United States Patent Application Publication US 2022/0090207 A1 - sequence listing, part 8

SEQ ID NO: 100753 - DNA, 15 bp, Homo sapiens
  chr22:19971896-19971911
  hypo
gacctggcaaccctg

SEQ ID NO: 100754 - DNA, 157 bp, Homo sapiens
  chr22:19972130-19972287
  hypo
atgcatgtacatacacgtgtgcaagtacccagcccggcacaggccgagcacatcaacccgtgtgctctaacagcaccccaagggcacggcgcccactgttcccagaggcacactcgtgagcacacatcctcccgtcctccaccgtgtatcggagacc

SEQ ID NO: 100755 - DNA, 76 bp, Homo sapiens
  chr22:19978173-19978249
  hypo
gccaggctgctgggcacgctccagctgtagggcaacatggcgccgctcctgctccagtgcccgtgtcagcctctcg

SEQ ID NO: 100756 - DNA, 31 bp, Homo sapiens
  chr22:20019038-20019069
  hypo
tcgactgctgcccacacggcctcctgttgtc

SEQ ID NO: 100757 - DNA, 273 bp, Homo sapiens; identical to SEQ ID NO: 34119
  chr22:20073378-20073651
  hypo

SEQ ID NO: 100758 - DNA, 31 bp, Homo sapiens; identical to SEQ ID NO: 34120
  chr22:20087955-20087986
  hypo

SEQ ID NO: 100759 - DNA, 30 bp, Homo sapiens
  chr22:20101815-20101845
  hypo
ggcctccctcctgccgagcccagagcagtg

SEQ ID NO: 100760 - DNA, 30 bp, Homo sapiens
  chr22:20109627-20109657
  hypo
tggtggtgttgtgacgggcagttcttggag

SEQ ID NO: 100761 - DNA, 175 bp, Homo sapiens
  chr22:20123201-20123376
  hypo
agcccccctgctgggacccaccgcatgtggcctggggtattcctggcccccgagcctcagtttccccatctgtccaggtgtctatagggattggacaggtaggtgcaggtacttcgaggcccaaaggcctggcctgacaagggcgcagcagcttctgccccgccggtcccgagcg

SEQ ID NO: 100762 - DNA, 338 bp, Homo sapiens
  chr22:20123632-20123970
  hypo
cccctggacctgccctccacccgtagcttggctggagccagccaggaggggctcagagggacatggcgggccagacactccacctccagcccaggcccagagcctgtctttgcctggccctccggcaggcgagcctggtgtgcaccatcaggtctgggtgggagtggagcctccccgagcctggacccagactactgcctgctaggccctgcctgtgggaatgcgtgtctttgagtgtccctgagcatccacacatggcctcccctgtccccatgtgtcctcatgcatccttgcatgtccttgtgtgtcctcccgtgttcttgcgcaccctgagagtg

SEQ ID NO: 100763 - DNA, 191 bp, Homo sapiens
  chr22:20126323-20126514
  hypo
ggcctggatgaggcatcgtggcgcattttccatctggggctcccacctccagcctgtgtaccgcccccgccccctaccccgccccagtcatggagcctaggtcgctggaatggggtgaccttaggtctgtgggcctctctgagacggctgccctgagaggttgccgggtcagggcacgggtagcccacatg

SEQ ID NO: 100764 - DNA, 30 bp, Homo sapiens
  chr22:20133563-20133593
  hypo
ctgtgctgccgcgccgtgtctgatgtgtca

SEQ ID NO: 100765 - DNA, 31 bp, Homo sapiens
  chr22:20200274-20200305
  hypo
tgctgactgccatggacgtgcacctggctga

SEQ ID NO: 100766 - DNA, 446 bp, Homo sapiens
  chr22:20228947-20229393
  hypo
agctctttattccacgtcgtccgatatttttacacaagtaaaataaaatgcatatctctatataccgcgatctgggtgggaggcggcgttctggaacaaacgctgccgccgaaccctgtaaacatgatggggtggagatgggggtggcgggcggcaggcgtccatcagggaggacctggcctggcctgccccacgggtcggccgcccggctggcttggcggcgtggagagagaccccgtatgtacacacacctggctgctgagcacgctcttgtgtccgctgggggtcagcagggcccaagcactgtccacagcaccagcgccaggcccaggggggtgaggctgcaggtgaggctgggtagggcacctgagccttctgagtcaccagtcccgccacccccgctgcctgcctggcccagacggcagtggctgcgggtgcggttcttg

SEQ ID NO: 100767 - DNA, 31 bp, Homo sapiens
  chr22:20243597-20243628
  hypo
gctgcctcttggaaaacgaggtcagtgtatt

SEQ ID NO: 100768 - DNA, 162 bp, Homo sapiens
  chr22:20248010-20248172
  hypo
gggccaggagcaccagcgcagcacatcctgcgtgaccttgggccagctcctcagccctccctcgacagccgtgctggtagctggccaggcccgggtgagtgagttccccaggtaggtggaaggggcttctggggtaggggccacgcccgggggcaggtggcc

SEQ ID NO: 100769 - DNA, 30 bp, Homo sapiens; identical to SEQ ID NO: 34126
  chr22:20254214-20254244
  hypo

SEQ ID NO: 100770 - DNA, 433 bp, Homo sapiens; identical to SEQ ID NO: 57823
  chr22:20255236-20255669
  hypo

SEQ ID NO: 100771 - DNA, 31 bp, Homo sapiens
  chr22:20258984-20259015
  hypo
tgggctgacagggacacggttcagcctcctt

SEQ ID NO: 100772 - DNA, 84 bp, Homo sapiens
  chr22:20308709-20308793
  hypo
agtgaataatgacaagcgctcaggccactgccgtggagggcggtccacaacccagagctggtcatgcgccgggcaccctggcct

SEQ ID NO: 100773 - DNA, 30 bp, Homo sapiens; identical to SEQ ID NO: 34128
  chr22:20745572-20745602
  hypo

SEQ ID NO: 100774 - DNA, 209 bp, Homo sapiens
  chr22:20760012-20760221
  hypo
aaagttcccccaggtgcgccggcagcgcggggcgggcgccggggagggcgagttcgtgtgcggcgagtgcgggaaggcgttccgccagagctcctccctcacgctgcaccggcgctggcacagccgggagaaggcttacaagtgcgatgaatgcggcaaggccttcacctggagcaccaaccttctggagcaccggcgcatccacaccg

SEQ ID NO: 100775 - DNA, 83 bp, Homo sapiens
  chr22:20765420-20765503
  hypo
agccaccgtgcccggccaaaaaggactcttaaaactcaacaataagaacatgaacggctgggcacagccgttcatgacacaga

SEQ ID NO: 100776 - DNA, 31 bp, Homo sapiens; identical to SEQ ID NO: 34130
  chr22:20788840-20788871
  hypo

SEQ ID NO: 100777 - DNA, 30 bp, Homo sapiens; identical to SEQ ID NO: 13340
  chr22:20791718-20791748
  hypo

SEQ ID NO: 100778 - DNA, 61 bp, Homo sapiens; identical to SEQ ID NO: 57827
  chr22:20792308-20792369
  hypo

SEQ ID NO: 100779 - DNA, 10 bp, Homo sapiens
  chr22:20792481-20792491
  hypo
cgcaagccca

SEQ ID NO: 100780 - DNA, 30 bp, Homo sapiens
  chr22:20847159-20847189
  hypo
tgagccaccgcgcccggcccaaacctgcct

SEQ ID NO: 100781 - DNA, 121 bp, Homo sapiens
  chr22:20857253-20857374
  hypo
ctagtcaaacaagttttatgttatcactactgaatggtaaagataataaaactatcaatccaacctaagagcaaaatgtgcaataaaaatgaattgcggctgggctcacccctgtagtccc

SEQ ID NO: 100782 - DNA, 102 bp, Homo sapiens; identical to SEQ ID NO: 34133
  chr22:20864297-20864399
  hypo

SEQ ID NO: 100783 - DNA, 132 bp, Homo sapiens; identical to SEQ ID NO: 34134
  chr22:20908749-20908881
  hypo

SEQ ID NO: 100784 - DNA, 30 bp, Homo sapiens
  chr22:20909370-20909400
  hypo
gcctcctgggacctcggggatggcccctca

SEQ ID NO: 100785 - DNA, 224 bp, Homo sapiens
  chr22:20929348-20929572
  hypo
ctgagtttctttgttgcgatcaccttgtctgttgtccctctgtcctcaaagatgatcacggaagccttggcccaaggtgggatgcacataagagcccggttcccgcctaccaccgctgtgtccgccatcccgtcaagctccatccctttgggcagacagcccatggcacaggtatttacggggcagcgcccagggcacggctgggagctcggggcgtcctctga

SEQ ID NO: 100786 - DNA, 30 bp, Homo sapiens
  chr22:20939335-20939365
  hypo
ggccagccctgggccgcgtgtgccaggtgt

SEQ ID NO: 100787 - DNA, 113 bp, Homo sapiens
  chr22:20958607-20958720
  hypo
atatctggcgcaggtacgccagggcctcctccaggcactcgtccatcttctggacgctgtcctgccccatctcgcccaggtcatggctgaataggagccgttggtgtctgtgg

SEQ ID NO: 100788 - DNA, 31 bp, Homo sapiens; identical to SEQ ID NO: 34136
  chr22:20976181-20976212
  hypo

SEQ ID NO: 100789 - DNA, 229 bp, Homo sapiens
  chr22:21011031-21011260
  hypo
cactgtgggctgccctcctaccgctctccccgctgcagtctccatggccaccaccaacctcagctaagcgaaacacgttgccacacgctcaagcctaccgcatccagcaggcgtcttacccttctccttctctaagctgggcaccgaacatcagggtatgcagacacaggagagcccggtaatggcctgattccttgccccctcagccggctttatatagggaggtttt

SEQ ID NO: 100790 - DNA, 51 bp, Homo sapiens; identical to SEQ ID NO: 34137
  chr22:21058304-21058355
  hypo

SEQ ID NO: 100791 - DNA, 279 bp, Homo sapiens
  chr22:21101700-21101979
  hypo
tctttgggccaaggtgcggcttgcaccactaccattgtcaacagacatccacagcaccctgcatgtactcatgtgcgtcatgaaaagcgacagccgagctctaagccttcccctgcactgtggctcctatggtctaaggggtcactgctcttcagaaggctcgcacataccccaagagttgtgttctgcttgttgtagccagcaaagtgaaggatgctctcagtggccatggccagccccgtgtgctgggacagtcccgatacccagttctgatgtttg

SEQ ID NO: 100792 - DNA, 175 bp, Homo sapiens
  chr22:21102481-21102656
  hypo
ctgaggacaaggccaattccccgagcggctgtcatgcagtcactgcggtgttgcaccgtcaatgggagagggccatttattctttcagcacatccttgctgagcatctgctgtggtagccaccaggcaaataagctacaaagccttggccttgcggtcaacaggcaggctgtgtg

SEQ ID NO: 100793 - DNA, 150 bp, Homo sapiens
  chr22:21105243-21105393
  hypo
gaaaatcatgcttgtgcgacgcagactcgagaggctataaactggctggtagctgaagacctctttggcagctaaaccgagaacacagctgagtcaacatggctgaggtgggggagctgggcttggaagacagagcgacctgggggcagc

SEQ ID NO: 100794 - DNA, 109 bp, Homo sapiens
  chr22:21153938-21154047
  hypo
agacaggaataggggcgtacttgtcgctctcctgagagatgtagagccggttggacaggctggccaagaacgcctccacaatcactgggtccaccgtcaatccagcctt

SEQ ID NO: 100795 - DNA, 34 bp, Homo sapiens
  chr22:21299563-21299597
  hypo
agccaccgcacccggcttggaattactttcttaa

SEQ ID NO: 100796 - DNA, 36 bp, Homo sapiens; identical to SEQ ID NO: 34138
  chr22:21304978-21305014
  hypo

SEQ ID NO: 100797 - DNA, 31 bp, Homo sapiens; identical to SEQ ID NO: 34139
  chr22:21331193-21331224
  hypo

SEQ ID NO: 100798 - DNA, 31 bp, Homo sapiens
  chr22:21348153-21348184
  hypo
tctctgttctctggggcgagggtcctgtgcc

SEQ ID NO: 100799 - DNA, 30 bp, Homo sapiens; identical to SEQ ID NO: 34140
  chr22:21354049-21354079
  hypo

SEQ ID NO: 100800 - DNA, 30 bp, Homo sapiens; identical to SEQ ID NO: 34141
  chr22:21354317-21354347
  hypo

SEQ ID NO: 100801 - DNA, 315 bp, Homo sapiens
  chr22:21380145-21380460
  hypo
aagctctatggaatccgcttcgacatcctcgtcaccgggcaggtaggcacaggtaggggtcaggccggggatgggatggggcaggcagacagggctggaggaggcatgaggctgacagtcgtgggctgagaggttcagctcagatctctctcaggcagggaagttcgggctcatccccacggccgtcacactgggcaccggggcagcttggctgggcgtggtgagtgcgagcactgtgggcacctgcaggctgcagtgagtgctgctgaccagggtgtgtccaatgcatgctggagcctccggtgcctgcacatt

SEQ ID NO: 100802 - DNA, 70 bp, Homo sapiens
  chr22:21385763-21385833
  hypo
agctcgcccatggatacgtaggtgaacaggtaggcagagcccgtgcgtggcacacgtgccccaaattctg

SEQ ID NO: 100803 - DNA, 376 bp, Homo sapiens; identical to SEQ ID NO: 57835
  chr22:21386500-21386876
  hypo

SEQ ID NO: 100804 - DNA, 110 bp, Homo sapiens; identical to SEQ ID NO: 57836
  chr22:21386893-21387003
  hypo

SEQ ID NO: 100805 - DNA, 31 bp, Homo sapiens; identical to SEQ ID NO: 34144
  chr22:21408212-21408243
  hypo

SEQ ID NO: 100806 - DNA, 30 bp, Homo sapiens; identical to SEQ ID NO: 34145
  chr22:21798779-21798809
  hypo

SEQ ID NO: 100807 - DNA, 30 bp, Homo sapiens
  chr22:21800817-21800847
  hypo
gcggcaccatgacgcgtcacatgcggagcc

SEQ ID NO: 100808 - DNA, 31 bp, Homo sapiens; identical to SEQ ID NO: 34146
  chr22:21802141-21802172
  hypo

SEQ ID NO: 100809 - DNA, 190 bp, Homo sapiens; identical to SEQ ID NO: 34147
  chr22:21803453-21803643
  hypo

SEQ ID NO: 100810 - DNA, 30 bp, Homo sapiens; identical to SEQ ID NO: 34148
  chr22:21804696-21804726
  hypo

SEQ ID NO: 100811 - DNA, 30 bp, Homo sapiens
  chr22:21970018-21970048
  hypo
tatcacagatgtgtgcgtgtgcagagcagc

SEQ ID NO: 100812 - DNA, 32 bp, Homo sapiens; identical to SEQ ID NO: 34149
  chr22:21970643-21970675
  hypo

SEQ ID NO: 100813 - DNA, 176 bp, Homo sapiens; identical to SEQ ID NO: 34150
  chr22:21977523-21977699
  hypo

SEQ ID NO: 100814 - DNA, 30 bp, Homo sapiens
  chr22:21977989-21978019
  hypo
cagaggcttggctttcgagccagtgggtgt

SEQ ID NO: 100815 - DNA, 343 bp, Homo sapiens; identical to SEQ ID NO: 34151
  chr22:21982765-21983108
  hypo

SEQ ID NO: 100816 - DNA, 30 bp, Homo sapiens
  chr22:21988638-21988668
  hypo
accggcaccgtgtacggccgaccctctgca

SEQ ID NO: 100817 - DNA, 34 bp, Homo sapiens
  chr22:21993227-21993261
  hypo
caaacagcacttcttcggcattcgattggtcaaa

SEQ ID NO: 100818 - DNA, 1131 bp, Homo sapiens; identical to SEQ ID NO: 13348
  chr22:22005793-22006924
  hypo

SEQ ID NO: 100819 - DNA, 148 bp, Homo sapiens; identical to SEQ ID NO: 34153
  chr22:22007500-22007648
  hypo

SEQ ID NO: 100820 - DNA, 82 bp, Homo sapiens
  chr22:22029109-22029191
  hypo
ctgctcggggtcacccgtgacggctcttctcagagcgtggtgggggtgccacataaacacaactgcccgacgccatcctgca

SEQ ID NO: 100821 - DNA, 30 bp, Homo sapiens
  chr22:22029538-22029568
  hypo
tcacagggctgggcacggtggctcacacct

SEQ ID NO: 100822 - DNA, 42 bp, Homo sapiens; identical to SEQ ID NO: 34154
  chr22:22044380-22044422
  hypo

SEQ ID NO: 100823 - DNA, 30 bp, Homo sapiens
  chr22:22057694-22057724
  hypo
gtagatgtcggcaaccgcatgcagcccggt

SEQ ID NO: 100824 - DNA, 395 bp, Homo sapiens
  chr22:22057964-22058359
  hypo
gggcaagatccttagcgcgtttcagaaactcccggcggggggatggtgggttctttcaggacccctaaagacccaggtgattctacacagggcactgtgtaggtgccatccaggccgtcccagggcccgtgccgctccccccgggctgaaccagggtactcacacggaattgaagaggtaggcgcgtccctggctcccctgaaaggactgaaagaagaaggtcccgtgagattggctgcgagtgctttctggaacgaagcggtgctgcccagaaccaggggagtccagccccgcggctgttagctgcgccgggacgcgtcaccgggagcagacaccggcgtcccccctccagaactccacttctaataacagccacttaacggagctgcaagctg

SEQ ID NO: 100825 - DNA, 25 bp, Homo sapiens
  chr22:22063243-22063268
  hypo
tgagccaccacgcccagctgataca

SEQ ID NO: 100826 - DNA, 293 bp, Homo sapiens
  chr22:22068419-22068712
  hypo
ccacctgcgcaggcacgcctgcattagagggtcaccttctcacatctgggactgaagatgtgtgtgggcagaacgcagcgtttgtaatcgtgtgaacggaagacacaaacggccggtggcggccacccaggatggtactgggacccggtcaccacggcgctgctgtgcccttccttggtgccccggcctgagatgctgcctaacttggacttggtgcttcttggtctttgcttgtcctgatggctgtgccccgtgtgtggccctgagccacactgctgcgtgttccgtgtttt

SEQ ID NO: 100827 - DNA, 43 bp, Homo sapiens
  chr22:22108626-22108669
  hypo
gattacaggtgtgagccaccgcgccctgccaatgatagcacct

SEQ ID NO: 100828 - DNA, 36 bp, Homo sapiens; identical to SEQ ID NO: 34156
  chr22:22201293-22201329
  hypo

SEQ ID NO: 100829 - DNA, 332 bp, Homo sapiens; identical to SEQ ID NO: 57845
  chr22:22220989-22221321
  hypo

SEQ ID NO: 100830 - DNA, 30 bp, Homo sapiens; identical to SEQ ID NO: 13351
  chr22:22292759-22292789
  hypo

SEQ ID NO: 100831 - DNA, 185 bp, Homo sapiens; identical to SEQ ID NO: 57848
  chr22:22307182-22307367
  hypo

SEQ ID NO: 100832 - DNA, 31 bp, Homo sapiens; identical to SEQ ID NO: 34158
  chr22:22314882-22314913
  hypo

SEQ ID NO: 100833 - DNA, 234 bp, Homo sapiens
  chr22:22324544-22324778
  hypo
gagggtgtgcccaggactctgcgggtgtggccagcacctggtgaatgcacagccgattcgcaggtccagctcctggcgagcatccactgagagcgcctcgttgtggtcaggctcgcctaggcaggccatggcattacagatgtctgtgtccgtgatggagctaaacctggcccggaacacggtcttctcgccaccatgggccttgttcatgacgggcagaacagcatcaagaac

SEQ ID NO: 100834 - DNA, 405 bp, Homo sapiens; identical to SEQ ID NO: 13352
  chr22:22862457-22862862
  hypo

SEQ ID NO: 100835 - DNA, 88 bp, Homo sapiens; identical to SEQ ID NO: 57851
  chr22:22863219-22863307
  hypo

SEQ ID NO: 100836 - DNA, 30 bp, Homo sapiens; identical to SEQ ID NO: 34162
  chr22:22899311-22899341
  hypo

SEQ ID NO: 100837 - DNA, 572 bp, Homo sapiens; identical to SEQ ID NO: 34163
  chr22:22899561-22900133
  hypo

SEQ ID NO: 100838 - DNA, 448 bp, Homo sapiens
  chr22:22901055-22901503
  hypo
gcagggtggaaaaagggggtgcggtgggcgaatggggaggcggggggctgactgggagtgtgggacggggtgttctgggatcacggagacgtccaagtctggactctgtcctgggtctgtgcttctggcgacctcccttttcttcagtgggatgcggggtgcaggggccggttccaggtcccctgagctcaagtctcgccccaccccgccccgcaagtctagaaaagatgcccctgcccttggctgggtaatctctggatttacctactgtctgtaaccccccgggctgaagagaccaccccccgggagtcaattaacttactctctggagcgcgcgttcctccctgctcccaggagtcggtttcccaaaactttctgaggcccgcgcatgctcccctcgactccccgtgtttccactctccacagaaatccacgcattcacgcccct

SEQ ID NO: 100839 - DNA, 166 bp, Homo sapiens
  chr22:23230278-23230444
  hypo
ctgggccctggtcccaggcagcgctggcccctgctgctgctgggtctggccatggtcgcccatggcctgctgcgcccaatggttgcaccgcaaagcggggacccagaccctggagcctcagttggaagcagccgatccagcctgcggagcctgtggggcaggtaag

SEQ ID NO: 100840 - DNA, 30 bp, Homo sapiens; identical to SEQ ID NO: 34165
  chr22:23415301-23415331
  hypo

SEQ ID NO: 100841 - DNA, 30 bp, Homo sapiens; identical to SEQ ID NO: 34166
  chr22:23415900-23415930
  hypo

SEQ ID NO: 100842 - DNA, 30 bp, Homo sapiens; identical to SEQ ID NO: 34167
  chr22:23435443-23435473
  hypo

SEQ ID NO: 100843 - DNA, 265 bp, Homo sapiens
  chr22:23437446-23437711
  hypo
tgcacagtgggagccggaggcggggggctgcagggagcacaccagcgaccggccctccaaccctccagccactcagcaacatcgccacagcaaccagcaaccagacggcagcagccgaggcaaacacaagcggacggcttcccaccgtcgccgaggacagggaatgactacggcaaatcaggccactttgccaactagggaggtggagtgtcactagtggggaggggcggccaccgcccgctgcacagagcgccatgccggctgg

SEQ ID NO: 100844 - DNA, 216 bp, Homo sapiens
  chr22:23437915-23438131
  hypo
gcagcccggcggtcccggagaattgaccgccacctgcgctcagagagccagcggcaacgccgcgaaatcaagctgctcctgctgggcaccagcaactcaggcaagagcaccatcgtcaaacagatgaagatcatccacagcggcggcttcaacctggaggcctgcaaggagtacaagcccctcatcatctacaatgccatcgactcgctgacccgc

SEQ ID NO: 100845 - DNA, 30 bp, Homo sapiens; identical to SEQ ID NO: 34170
  chr22:23438415-23438445
  hypo

SEQ ID NO: 100846 - DNA, 31 bp, Homo sapiens
  chr22:23446549-23446580
  hypo
acctcctgctctgcctcgtgatcaggctgga

SEQ ID NO: 100847 - DNA, 96 bp, Homo sapiens
  chr22:23453479-23453575
  hypo
tggctggctctgtaccgagcagggggtgcggccacaaatctccaagcccaggccaggggagagaggcaagcgcactggactcggttccgcctagtg

SEQ ID NO: 100848 - DNA, 30 bp, Homo sapiens; identical to SEQ ID NO: 13355
  chr22:23500537-23500567
  hypo

SEQ ID NO: 100849 - DNA, 442 bp, Homo sapiens; identical to SEQ ID NO: 57854
  chr22:23523109-23523551
  hypo

SEQ ID NO: 100850 - DNA, 31 bp, Homo sapiens; identical to SEQ ID NO: 13357
  chr22:23546141-23546172
  hypo

SEQ ID NO: 100851 - DNA, 43 bp, Homo sapiens
  chr22:23593617-23593660
  hypo
agggtgctgagtcctgtgggacgagaagtggagaacctgggag

SEQ ID NO: 100852 - DNA, 30 bp, Homo sapiens
  chr22:23602750-23602780
  hypo
gctgtgggctctgacgccccctcaggtcag

SEQ ID NO: 100853 - DNA, 30 bp, Homo sapiens
  chr22:23607591-23607621
  hypo
ctctgtcaggtttccgggttggacaagtct

SEQ ID NO: 100854 - DNA, 86 bp, Homo sapiens
  chr22:23624724-23624810
  hypo
aatggggagctctgttgcctccggccccagaatgggggaaaagttcagagagaccgaggctccccgagaagaacctcaggctgcag

SEQ ID NO: 100855 - DNA, 100 bp, Homo sapiens; identical to SEQ ID NO: 34174
  chr22:23737248-23737348
  hypo

SEQ ID NO: 100856 - DNA, 30 bp, Homo sapiens
  chr22:23779912-23779942
  hypo
gcgtctttcactgaacgtaaggttttcacg

SEQ ID NO: 100857 - DNA, 31 bp, Homo sapiens
  chr22:23793189-23793220
  hypo
tgacaggtggcctcagcggactctgctgtgg

SEQ ID NO: 100858 - DNA, 687 bp, Homo sapiens
  chr22:23800962-23801649
  hypo
ggagggttcccagagggctgccgggcgaagggagtcctttccaaaacggtttcctgagctctgatgcacacacatgcagctcacccccaagtctagcgttccattagtctaccgttccgttcttcccagcacattcggtgcgcagccgcgaccagtctaaccgtggcacctttccaccggccctgagccctggcgtgcccctccacgacatcccctgggcacggagttgtgtcgacaggtctctgtgactggctgggcatgttttcggggtttgcccgcggggcagcgtgtctcagagtttggctgtacgaagcggtgttgacgggtaaacccggttttgtctctccctccggcggttgagggctggttccgcgttccatctgttagtgatgggatcgtgttgccgtggacgtccgtgccgaggtctgtgtgtggacagcgctcagaccccctggctgcgcgcccgggcgtgtgctgggcccatggactctgcgttcagctctttgaggagccgccggctgtttgcagtggccgcatcacacacgctcccgccagcgacgcggagggtctgattcccctcgacccagcagctcatggtgtttgctctcagtggccgtcggcgcgaggcgggtccgtgtctcgctcagttgaggttcacgtttccccggtgcccggcgtcctggcatg

SEQ ID NO: 100859 - DNA, 93 bp, Homo sapiens
  chr22:23877155-23877248
  hypo
atgtgggaagcgagggcggcctctccttggttcctcggcagcctggaccctcaccccctgcaaggtcctggtggccaccgcttgcagggccgt

SEQ ID NO: 100860 - DNA, 142 bp, Homo sapiens
  chr22:24016560-24016702
  hypo
tcaccagactctggatctggtcgtccagcagcacactaaaaccaagctaagattccccgctgtgacccagctcctctcctccccgcctccccaggcagcatgggggcgggcagtgcggtgcgggggaggcattaaaggcaca

SEQ ID NO: 100861 - DNA, 154 bp, Homo sapiens; identical to SEQ ID NO: 34176
  chr22:24054815-24054969
  hypo

SEQ ID NO: 100862 - DNA, 36 bp, Homo sapiens
  chr22:24061195-24061231
  hypo
ccttagcttggggctccgaacacacattcttcttag

SEQ ID NO: 100863 - DNA, 30 bp, Homo sapiens
  chr22:24086717-24086747
  hypo
ccttcccacactcccggcactcgtagggct

SEQ ID NO: 100864 - DNA, 21 bp, Homo sapiens
  chr22:24091912-24091933
  hypo
gcccagccctaaagtattttc

SEQ ID NO: 100865 - DNA, 30 bp, Homo sapiens; identical to SEQ ID NO: 57859
  chr22:24110100-24110130
  hypo

SEQ ID NO: 100866 - DNA, 280 bp, Homo sapiens; identical to SEQ ID NO: 57860
  chr22:24110500-24110780
  hypo

SEQ ID NO: 100867 - DNA, 30 bp, Homo sapiens; identical to SEQ ID NO: 57861
  chr22:24110790-24110820
  hypo

SEQ ID NO: 100868 - DNA, 219 bp, Homo sapiens
  chr22:24159809-24160028
  hypo
cctgaaaatagtctttggggtcgaggagcctcgggagggatgcctcctgtgactgagggatgcctctgccccgtgcaccagatggagcctgggccgacttcttcccactgtggttctccgtggcactttactaagattttggaaaataacgtgggggaatcaccagcaacttcctctgtggtcccccaagtaacaaacaactaaatatcttatttagtt

SEQ ID NO: 100869 - DNA, 30 bp, Homo sapiens
  chr22:24176434-24176464
  hypo
ggcaaggacagaggcgaggggacagcccag

SEQ ID NO: 100870 - DNA, 461 bp, Homo sapiens
  chr22:24179768-24180229
  hypo
ggggccccagggcataagcagcgtgtcctgaggggagtggccagcctggggcggactagatgtaccgggaggctcacccagcaggtccacgaggatggagttgcccagcagcagcgagaagcccatgagcgcccaaggcaggaacggtgcctggaaagtgagcaggccgaagaagttgaccctcacccgagggctgcggcggctccacacgtacaccagcatggccatgagggcctggcccaggaagaacaggctgcccaggagtcccagcagctgggccagagtcaaggtgctccggtgcaggcctcagcccaagcccagggcccctctgacttcccaagaccctggaattcttcccctcatctcccctatgtgctattccctcatcaagatgagccagtccaataaaggcgacacactccacgggcttcaggtcccacgaaatctgccctgcacaccta

SEQ ID NO: 100871 - DNA, 201 bp, Homo sapiens
  chr22:24205104-24205305
  hypo
cggtctcatcaatgttatttataaagtagccagtggagattaagtttccgtgttcagcggtgaagccttgagctatcacggcctcagcttcatggaaaaaggaagaagaaattttaaaaagcaagcagggcaggcagacctgaccaaatgaacccctcggtttcactgtctcacaccttcgctcccccaaccctgatacca

SEQ ID NO: 100872 - DNA, 31 bp, Homo sapiens
  chr22:24212828-24212859
  hypo
tttatgtatattttcacgttctgggctaatt

SEQ ID NO: 100873 - DNA, 30 bp, Homo sapiens
  chr22:24224806-24224836
  hypo
gccatggagctctgcgggaatgactcggtg

SEQ ID NO: 100874 - DNA, 45 bp, Homo sapiens
  chr22:24409919-24409964
  hypo
ttataggcgtgagccaccatgcccggcctctttttaagcttttta

SEQ ID NO: 100875 - DNA, 109 bp, Homo sapiens; identical to SEQ ID NO: 34178
  chr22:24459507-24459616
  hypo

SEQ ID NO: 100876 - DNA, 27 bp, Homo sapiens
  chr22:24535563-24535590
  hypo
tttagcgactttgctttttccatgaca

SEQ ID NO: 100877 - DNA, 1327 bp, Homo sapiens; identical to SEQ ID NO: 57869
  chr22:24551714-24553041
  hypo

SEQ ID NO: 100878 - DNA, 122 bp, Homo sapiens
  chr22:24574385-24574507
  hypo
tgaaggtggattggtcgccatctgcacgccaggcggcatccttttctatgaagtgttgactttgtaaatctgcccacacccagctggccatatccacccctcgacgccgggatgagccggct

SEQ ID NO: 100879 - DNA, 30 bp, Homo sapiens
  chr22:24582959-24582989
  hypo
tgcacctcaggtgccgctgggagttccacc

SEQ ID NO: 100880 - DNA, 30 bp, Homo sapiens; identical to SEQ ID NO: 34180
  chr22:24584729-24584759
  hypo

SEQ ID NO: 100881 - DNA, 36 bp, Homo sapiens
  chr22:24697721-24697757
  hypo
aatatatatcagagccaggcacggtgctcacgcctg

SEQ ID NO: 100882 - DNA, 39 bp, Homo sapiens; identical to SEQ ID NO: 34181
  chr22:24763168-24763207
  hypo

SEQ ID NO: 100883 - DNA, 31 bp, Homo sapiens; identical to SEQ ID NO: 57872
  chr22:24820223-24820254
  hypo

SEQ ID NO: 100884 - DNA, 30 bp, Homo sapiens
  chr22:24829447-24829477
  hypo
ctggtgtgctgggccgtgtggctcaacagc

SEQ ID NO: 100885 - DNA, 19 bp, Homo sapiens
  chr22:24945496-24945515
  hypo
ttcaacagggtcttgctct

SEQ ID NO: 100886 - DNA, 41 bp, Homo sapiens
  chr22:24976013-24976054
  hypo
aaagaatttgtggccaggcaccgtggctcacgcctgtaatc

SEQ ID NO: 100887 - DNA, 31 bp, Homo sapiens; identical to SEQ ID NO: 34182
  chr22:24983097-24983128
  hypo

SEQ ID NO: 100888 - DNA, 92 bp, Homo sapiens; identical to SEQ ID NO: 13367
  chr22:24989195-24989287
  hypo

SEQ ID NO: 100889 - DNA, 30 bp, Homo sapiens
  chr22:24995692-24995722
  hypo
agcagggcgcagactcgtcagtgagagcat

SEQ ID NO: 100890 - DNA, 131 bp, Homo sapiens; identical to SEQ ID NO: 34184
  chr22:25016919-25017050
  hypo

SEQ ID NO: 100891 - DNA, 31 bp, Homo sapiens
  chr22:25097060-25097091
  hypo
atattcaatgccactgcgtgcacactttggt

SEQ ID NO: 100892 - DNA, 190 bp, Homo sapiens
  chr22:25102565-25102755
  hypo
ccagaacgtactcatcgcatcactgaaactttgtgccctttcaccgtcttccccatctttttcattctccgacaccacccttctactctgtttccatgacttggacattttaggctaatggctgggcaaaaatctgtggtatgtacacagagagatgacatcagctatgtgagcacgggggccgcctttt

SEQ ID NO: 100893 - DNA, 31 bp, Homo sapiens; identical to SEQ ID NO: 34185
  chr22:25251163-25251194
  hypo

SEQ ID NO: 100894 - DNA, 24 bp, Homo sapiens
  chr22:25285212-25285236
  hypo
caccgtgcccggccctcatagtca

SEQ ID NO: 100895 - DNA, 327 bp, Homo sapiens
  chr22:25294114-25294441
  hypo
cacagaagacagtgtcttggacgcccagcggaacacccccacggtgctgcgacctagggatggcagcgtggatgacaggcagagcagcgaggccaccacatctcaggatgaggctccccgggaggagctggccgtgcaggacagcctggagagtgacctcctggccaacgagagcatggacgagttcatgtccatcacgggcagcctggacatggccctgcctgaaaaggacgatgttgtgatggagggctggaggagcagcgagacagagaaacatggccaggcggacagtgaggacaacctctcggaggagcctgagatggaaag

SEQ ID NO: 100896 - DNA, 121 bp, Homo sapiens; identical to SEQ ID NO: 34187
  chr22:25336183-25336304
  hypo

SEQ ID NO: 100897 - DNA, 31 bp, Homo sapiens
  chr22:25347731-25347762
  hypo
tgggattacaagccaccgtgcgcagcctgtg

SEQ ID NO: 100898 - DNA, 1570 bp, Homo sapiens; identical to SEQ ID NO: 57875
  chr22:25348187-25349757
  hypo

SEQ ID NO: 100899 - DNA, 31 bp, Homo sapiens
  chr22:25388947-25388978
  hypo
tttgaatttgagtctgcgcactgtggactac

SEQ ID NO: 100900 - DNA, 332 bp, Homo sapiens; identical to SEQ ID NO: 34189
  chr22:25461274-25461606
  hypo

SEQ ID NO: 100901 - DNA, 188 bp, Homo sapiens
  chr22:25462989-25463177
  hypo
actccccgggctgcctcggcccacgggtcagggtggtggtcagggcggccagagcaggataaccaggactgggcactgggggcagcttctcctgggggtgtgccctggtgcgtctgaccacctctggttgggagatggggacttgggggtctccattgttggcacctgcccagcggtgctcccctccc

SEQ ID NO: 100902 - DNA, 31 bp, Homo sapiens; identical to SEQ ID NO: 34191
  chr22:25463395-25463426
  hypo

SEQ ID NO: 100903 - DNA, 30 bp, Homo sapiens
  chr22:25464956-25464986
  hypo
ccggcgctcacttgccggagtctctgggtt

SEQ ID NO: 100904 - DNA, 30 bp, Homo sapiens
  chr22:25465547-25465577
  hypo
gctaccaactcaccgcgtgaccttggccaa

SEQ ID NO: 100905 - DNA, 31 bp, Homo sapiens
  chr22:25483616-25483647
  hypo
gagcagtgtctcaggtcgggttcccagaagc

SEQ ID NO: 100906 - DNA, 102 bp, Homo sapiens; identical to SEQ ID NO: 34192
  chr22:25484762-25484864
  hypo

SEQ ID NO: 100907 - DNA, 42 bp, Homo sapiens; identical to SEQ ID NO: 34193
  chr22:25484923-25484965
  hypo

SEQ ID NO: 100908 - DNA, 31 bp, Homo sapiens; identical to SEQ ID NO: 34194
  chr22:25492972-25493003
  hypo

SEQ ID NO: 100909 - DNA, 86 bp, Homo sapiens; identical to SEQ ID NO: 34195
  chr22:25505389-25505475
  hypo

SEQ ID NO: 100910 - DNA, 45 bp, Homo sapiens
  chr22:25513767-25513812
  hypo
taacttcatctctcacagttccggagtccagaagtccaaaatcaa

SEQ ID NO: 100911 - DNA, 31 bp, Homo sapiens
  chr22:25536599-25536630
  hypo
cctgggaggggcacctcggggtctgtcagcc

SEQ ID NO: 100912 - DNA, 26 bp, Homo sapiens
  chr22:25547084-25547110
  hypo
gccactgcgcccggcccctttgctta

SEQ ID NO: 100913 - DNA, 31 bp, Homo sapiens
  chr22:25548090-25548121
  hypo
tacgcccactttatttcgtcaggccctgaat

SEQ ID NO: 100914 - DNA, 28 bp, Homo sapiens
  chr22:25559693-25559721
  hypo
cacgcccggccattccttggctgtattt

SEQ ID NO: 100915 - DNA, 328 bp, Homo sapiens
  chr22:25561923-25562251
  hypo
tgcaggtcccgcaggccgtaaccctttccctaaccccagcccttacccggagggacgtggggggctgtggaagggctttgagcagggacctattcagttttggaaagtagaatgagaagcacatacagggcgaaggatgccaggggaggtccctcggaagctgccgccgtgggtgaacagatagctggtcatagctggaaggaatgttgttcgagaaagagactttgaaggactgaggatcgatgcagtatggcagtgaaggagagagaggagggagcagcgctggcctcaggaccctcagtctggcattaggcggtggagggagaaa

SEQ ID NO: 100916 - DNA, 185 bp, Homo sapiens; identical to SEQ ID NO: 34198
  chr22:25573210-25573395
  hypo

SEQ ID NO: 100917 - DNA, 20 bp, Homo sapiens
  chr22:25578126-25578146
  hypo
cagagcgggactccatctca

SEQ ID NO: 100918 - DNA, 387 bp, Homo sapiens
  chr22:25602961-25603348
  hypo
gcagggtgactggaagcagaccgtccacatctcaaccttggtctcccggcaggtgggttggctatgagttccccggctaccgtgggcgccagtacgtgtttgagcggggcgagtaccgccactggaatgagtgggacgccagccagccgcagctgcagtctgtgcgccgcatccgtgaccagaagtggcacaagcggggccgcttccccagcagctgaaaggcacccagacttcaaggacccagacccaccctggggggctgcaagggcaagaagaggaggctccagggttggggcgagggccgacctgtccacccttccctggaatctgctcaataaagcctggggttggtcccccacccgccacgttcctcggcatcacttcctg

SEQ ID NO: 100919 - DNA, 671 bp, Homo sapiens; identical to SEQ ID NO: 57877
  chr22:25678197-25678868
  hypo

SEQ ID NO: 100920 - DNA, 207 bp, Homo sapiens; identical to SEQ ID NO: 57878
  chr22:25679042-25679249
  hypo

SEQ ID NO: 100921 - DNA, 110 bp, Homo sapiens; identical to SEQ ID NO: 57879
  chr22:25679267-25679377
  hypo

SEQ ID NO: 100922 - DNA, 30 bp, Homo sapiens; identical to SEQ ID NO: 34201
  chr22:25747673-25747703
  hypo

SEQ ID NO: 100923 - DNA, 156 bp, Homo sapiens; identical to SEQ ID NO: 34202
  chr22:25753157-25753313
  hypo

SEQ ID NO: 100924 - DNA, 30 bp, Homo sapiens; identical to SEQ ID NO: 34203
  chr22:25756141-25756171
  hypo

SEQ ID NO: 100925 - DNA, 43 bp, Homo sapiens
  chr22:25756561-25756604
  hypo
aggggctcacccttcccgcccagctcaacgccacctcatccct

SEQ ID NO: 100926 - DNA, 30 bp, Homo sapiens
  chr22:25796199-25796229
  hypo
agaagggatagggccagcatccggctctgc

SEQ ID NO: 100927 - DNA, 662 bp, Homo sapiens; identical to SEQ ID NO: 13372
  chr22:25816891-25817553
  hypo

SEQ ID NO: 100928 - DNA, 31 bp, Homo sapiens
  chr22:25826675-25826706
  hypo
ccagagggagcaaggccgagaataaaggccc

SEQ ID NO: 100929 - DNA, 30 bp, Homo sapiens
  chr22:25894166-25894196
  hypo
tgaagaatgttgctccgtcccttgttcctg

SEQ ID NO: 100930 - DNA, 30 bp, Homo sapiens
  chr22:26063650-26063680
  hypo
ttttttgatacattccgattcattcaccgt

SEQ ID NO: 100931 - DNA, 31 bp, Homo sapiens
  chr22:26118123-26118154
  hypo
ccactgggggtggacacgtagggtgtgcttc

SEQ ID NO: 100932 - DNA, 31 bp, Homo sapiens
  chr22:26176160-26176191
  hypo
tccaggtgaggcctctcgggggatgtgcaag

SEQ ID NO: 100933 - DNA, 318 bp, Homo sapiens
  chr22:26423316-26423634
  hypo
atcagccaaaggtgggcaagacggttcacagcgttcaagcatccactttgaaacggaagaggctaaccgttcctttctctcggggatcaagaccattttgaagaagagcccggagcccaaggaggatcccgctcacctgtctgactcgtcctcatcctccggctccatcgtgtccttcaaaagtgctgacagcatcaaaagtcgaccaggaatcccacgacttgcgggtgacggtggcgagcgaacgtcccccgagcggagagagccagggacggggaggaaagacgacgatgttgcgagcataatgaagaaatacct

SEQ ID NO: 100934 - DNA, 238 bp, Homo sapiens; identical to SEQ ID NO: 57885
  chr22:26565122-26565360
  hypo

SEQ ID NO: 100935 - DNA, 148 bp, Homo sapiens; identical to SEQ ID NO: 57886
  chr22:26565502-26565650
  hypo

SEQ ID NO: 100936 - DNA, 538 bp, Homo sapiens; identical to SEQ ID NO: 57887
  chr22:26565734-26566272
  hypo

SEQ ID NO: 100937 - DNA, 31 bp, Homo sapiens; identical to SEQ ID NO: 13379
  chr22:26825081-26825112
  hypo

SEQ ID NO: 100938 - DNA, 313 bp, Homo sapiens
  chr22:26829743-26830056
  hypo
gactgcgacaccaccgctgtcatcactgtggcctgcctcctggtcctcttcgtgtggtactgttatcacgtgggcagggagcagccccggccctacgtctccgtcaactccctcatgcaggctgccgatgccaacgggctgcagaatggctacgtgtactgccagtcccctgagtgcgtgcgctgcacccacaacgagggcctcaaccagaagctgtaccacaacctgcaggagtacgccaagcgctactcctggtccggcatgggccgcatccacaagggcatccgcgagcagggccggtacctcaacagcc

SEQ ID NO: 100939 - DNA, 30 bp, Homo sapiens; identical to SEQ ID NO: 34210
  chr22:26848273-26848303
  hypo

SEQ ID NO: 100940 - DNA, 30 bp, Homo sapiens; identical to SEQ ID NO: 34211
  chr22:26857150-26857180
  hypo

SEQ ID NO: 100941 - DNA, 30 bp, Homo sapiens
  chr22:26883625-26883655
  hypo
caactttaaaagtacgcatttcagagcata

SEQ ID NO: 100942 - DNA, 202 bp, Homo sapiens
  chr22:26888175-26888377
  hypo
agttcatgggcacagagctagcggccacgccaatgcccctctgagccatgttctcagcctcccgcctctcctgcatggcctcgtactggaagtccttcctccgctccgtgtgggtgagataggcaatgttctcccgtgctcctggctgcatgtaggcacctaagatacaggaggacagggcggtgaggagaggtgtttccag

SEQ ID NO: 100943 - DNA, 50 bp, Homo sapiens
  chr22:26930626-26930676
  hypo
cactactgcagtgtccccagccggccctcgcctctgcttctgagaagcac

SEQ ID NO: 100944 - DNA, 220 bp, Homo sapiens; identical to SEQ ID NO: 34212
  chr22:26961222-26961442
  hypo

SEQ ID NO: 100945 - DNA, 91 bp, Homo sapiens
  chr22:26965194-26965285
  hypo
ccagtaacagttccatggatacaaagtacaaaaacaggtgaaattctagggggagatgtcaggatggtggttaccccggtggggcaagggg

SEQ ID NO: 100946 - DNA, 389 bp, Homo sapiens; identical to SEQ ID NO: 34214
  chr22:27007745-27008134
  hypo

SEQ ID NO: 100947 - DNA, 31 bp, Homo sapiens
  chr22:27019111-27019142
  hypo
ctgccagatcctggggcgagcccccaacctc

SEQ ID NO: 100948 - DNA, 367 bp, Homo sapiens; identical to SEQ ID NO: 57897
  chr22:27068886-27069253
  hypo

SEQ ID NO: 100949 - DNA, 34 bp, Homo sapiens; identical to SEQ ID NO: 34215
  chr22:27099775-27099809
  hypo

SEQ ID NO: 100950 - DNA, 23 bp, Homo sapiens
  chr22:27742254-27742277
  hypo
aacactggtcccataagaatacg

SEQ ID NO: 100951 - DNA, 31 bp, Homo sapiens
  chr22:27887474-27887505
  hypo
gcaaataagttcaattcgcaggttcccgaga

SEQ ID NO: 100952 - DNA, 31 bp, Homo sapiens
  chr22:27976916-27976947
  hypo
cagatcttcccaaaaccgattccttctcatc

SEQ ID NO: 100953 - DNA, 175 bp, Homo sapiens
  chr22:28191121-28191296
  hypo
ctggagaatgctgatgctggccgcagcgtctgctgtgcatgctaaacacccggcttcaaatgagagagtgcgtcccgggcgtcctgggctgggcagtaaccgcggaacaaagagaaaaagcagagaggccgcattcatgaattagaaaacctaagcgggaaagctacccgggatg

SEQ ID NO: 100954 - DNA, 905 bp, Homo sapiens; identical to SEQ ID NO: 57902
  chr22:28197080-28197985
  hypo

SEQ ID NO: 100955 - DNA, 33 bp, Homo sapiens
  chr22:28361344-28361377
  hypo
agtatttcagacgtaaaggtacagagaataaca

SEQ ID NO: 100956 - DNA, 253 bp, Homo sapiens
  chr22:28371498-28371751
  hypo
gttgtaagtcacagtgctttgcggttgaagtcgcccacataccgctcctgacgctaattccaccgccttgcctcccgcacgacagtaccactcccgcgtgtgagagccctcattcccagcatttctagatacctccactgcatgtatgcacctggaccctgaaaggcgttattttgtattttcatatatagtggcataaaatcgtttgtagcgttttcttattctttgatctcagctgcgtctttagatagcc

SEQ ID NO: 100957 - DNA, 22 bp, Homo sapiens
  chr22:28991635-28991657
  hypo
aggcgcagtgactcacgcctgt

SEQ ID NO: 100958 - DNA, 22 bp, Homo sapiens
  chr22:28991896-28991918
  hypo
cgagactctgtctcaaaaaata

SEQ ID NO: 100959 - DNA, 832 bp, Homo sapiens; identical to SEQ ID NO: 57907
  chr22:29075350-29076182
  hypo

SEQ ID NO: 100960 - DNA, 92 bp, Homo sapiens
  chr22:29076603-29076695
  hypo
ccaccgcgcacggcctgtttctcctaaatataaggactcaatataataataagagaaagcctcagcaccgcgcctagcacttagtaggtagt

SEQ ID NO: 100961 - DNA, 30 bp, Homo sapiens; identical to SEQ ID NO: 13389
  chr22:29091825-29091855
  hypo

SEQ ID NO: 100962 - DNA, 23 bp, Homo sapiens
  chr22:29104627-29104650
  hypo
gaagaaacctttttgctgtttcg

SEQ ID NO: 100963 - DNA, 26 bp, Homo sapiens
  chr22:29129586-29129612
  hypo
agggaatctatggccaattcacgcaa

SEQ ID NO: 100964 - DNA, 19 bp, Homo sapiens
  chr22:29273574-29273593
  hypo
cccttttttcctgaatatt

SEQ ID NO: 100965 - DNA, 30 bp, Homo sapiens; identical to SEQ ID NO: 34219
  chr22:29278215-29278245
  hypo

SEQ ID NO: 100966 - DNA, 31 bp, Homo sapiens; identical to SEQ ID NO: 57912
  chr22:29279216-29279247
  hypo

SEQ ID NO: 100967 - DNA, 30 bp, Homo sapiens; identical to SEQ ID NO: 57915
  chr22:29300290-29300320
  hypo

SEQ ID NO: 100968 - DNA, 31 bp, Homo sapiens; identical to SEQ ID NO: 34220
  chr22:29353884-29353915
  hypo

SEQ ID NO: 100969 - DNA, 30 bp, Homo sapiens
  chr22:29441745-29441775
  hypo
tgagccaccacgcccgtcccaaaggaagtg

SEQ ID NO: 100970 - DNA, 30 bp, Homo sapiens
  chr22:29445355-29445385
  hypo
tgctgaccatggaccggcacggggagcaga

SEQ ID NO: 100971 - DNA, 480 bp, Homo sapiens
  chr22:29445630-29446110
  hypo
cctagcctcgcaccccggggcccggcccgtgcctttcctccgagcggcagtggcagcctgctcttccccaccgtggtgcacgtggccccgccctcccacctggagagcggcagcacgtccagcttcagctgctatcacggccaccgctcggtgtgcagtggctacctggccgactgcccaggcagcgacagcagcagcagcagcagctccggccagtgccactgttcctccagtgactctgtggtagactgcactgaggtcagcaaccagggcgtgtacgggagctgctccaccttccgcagctccctcagcagcgactatgaccccttcatctaccgcagccggagcccctgtcgtgccagtgaggcggggggctcgggcagctcgggccggggacctgccctgtgcttcgagggctccccgcctcccgaggagctcccggcggtgcacagtcatggtgctgggcggggcgagccttgg

SEQ ID NO: 100972 - DNA, 95 bp, Homo sapiens
  chr22:29446325-29446420
  hypo
cccagccgggcctagcgccggagcagctggcagcagcaccttgttcctggggccccacctctacgagggctctggcccggcgggtggggagcccc

SEQ ID NO: 100973 - DNA, 425 bp, Homo sapiens; identical to SEQ ID NO: 57917
  chr22:29468747-29469172
  hypo

SEQ ID NO: 100974 - DNA, 201 bp, Homo sapiens; identical to SEQ ID NO: 57918
  chr22:29469213-29469414
  hypo

SEQ ID NO: 100975 - DNA, 137 bp, Homo sapiens
  chr22:29482647-29482784
  hypo
tggtgcaagttcccaccgggcaccagtccgtatttgaaacccaacagggcgataggtgtgctatgtgaatatttgacggcactgtcatgttgccctctctctatatatatcttttttgagatagggtctcactccat

SEQ ID NO: 100976 - DNA, 21 bp, Homo sapiens
  chr22:29484600-29484621
  hypo
ggccaccgcacctggcctcag

SEQ ID NO: 100977 - DNA, 81 bp, Homo sapiens
  chr22:29525174-29525255
  hypo
tctaaaggtgcatctagaggccggcacaggggtgcacacctgtaattctaggctggaggctgaggcaggagaatcgcttca

SEQ ID NO: 100978 - DNA, 20 bp, Homo sapiens
  chr22:29525314-29525334
  hypo
acagagtgagactccatcta

SEQ ID NO: 100979 - DNA, 31 bp, Homo sapiens; identical to SEQ ID NO: 34223
  chr22:29533686-29533717
  hypo

SEQ ID NO: 100980 - DNA, 31 bp, Homo sapiens; identical to SEQ ID NO: 34224
  chr22:29534522-29534553
  hypo

SEQ ID NO: 100981 - DNA, 30 bp, Homo sapiens; identical to SEQ ID NO: 34225
  chr22:29542295-29542325
  hypo

SEQ ID NO: 100982 - DNA, 93 bp, Homo sapiens
  chr22:29580557-29580650
  hypo
acaccaagacaatctcgccttttgttggggctgtgggagccttacgtacgcctagagagaagccagtctaaaatcagtcgctttttgaaacca

SEQ ID NO: 100983 - DNA, 30 bp, Homo sapiens
  chr22:29581013-29581043
  hypo
cgatcaggcagccaccgtcattattagctc

SEQ ID NO: 100984 - DNA, 19 bp, Homo sapiens
  chr22:29587017-29587036
  hypo
tttcctattctgggtattt

SEQ ID NO: 100985 - DNA, 139 bp, Homo sapiens; identical to SEQ ID NO: 34227
  chr22:29587095-29587234
  hypo

SEQ ID NO: 100986 - DNA, 91 bp, Homo sapiens
  chr22:29594543-29594634
  hypo
gtgcacataacttttgactcccgaaaaactttaccactaacagcgtactgctgaccgggagcttactgatcacataaacagtccataaggc

SEQ ID NO: 100987 - DNA, 31 bp, Homo sapiens
  chr22:29607571-29607602
  hypo
tgtgtgtctgtgtgtacgtgctcactgccat

SEQ ID NO: 100988 - DNA, 13 bp, Homo sapiens
  chr22:29607988-29608001
  hypo
ttttgagacagag

SEQ ID NO: 100989 - DNA, 30 bp, Homo sapiens; identical to SEQ ID NO: 57921
  chr22:29621461-29621491
  hypo

SEQ ID NO: 100990 - DNA, 42 bp, Homo sapiens
  chr22:29627463-29627505
  hypo
gagagtgtgagggtcccgctgcttccccgaaatggtagatgc

SEQ ID NO: 100991 - DNA, 30 bp, Homo sapiens; identical to SEQ ID NO: 34229
  chr22:29678071-29678101
  hypo

SEQ ID NO: 100992 - DNA, 175 bp, Homo sapiens
  chr22:29686336-29686511
  hypo
atattttcattggctgttaaacgtggaaactttttaacatgctttgtcgcatttatatgctacaggttacaaagtgagagccttgtatacacttcaatacttaaaaagtacccgtactcagtactcagccggcagcataatgaaaagtgggactagacacggtgtccatatggag

SEQ ID NO: 100993 - DNA, 30 bp, Homo sapiens; identical to SEQ ID NO: 34231
  chr22:29686984-29687014
  hypo

SEQ ID NO: 100994 - DNA, 18 bp, Homo sapiens
  chr22:29701035-29701053
  hypo
ggccgggaatgttaagac

SEQ ID NO: 100995 - DNA, 969 bp, Homo sapiens; identical to SEQ ID NO: 57923
  chr22:29702351-29703320
  hypo

SEQ ID NO: 100996 - DNA, 30 bp, Homo sapiens
  chr22:29708231-29708261
  hypo
ctttccagctcctccgatgaaggcagcccc

SEQ ID NO: 100997 - DNA, 151 bp, Homo sapiens; identical to SEQ ID NO: 34235
  chr22:29714173-29714324
  hypo

SEQ ID NO: 100998 - DNA, 355 bp, Homo sapiens
  chr22:29744976-29745331
  hypo
agaacttttgcctgccttccacgcacaccaccacagactctcacgtgtccccgactcgactgtactgcagtgaggaggaaaaggggcggtgtccattacgcgcacatcactcatctgtctgtcagggctgtttacgaggtaataggaagggagggtttcatggcagtatgggccacagtggggctgagctgccagtcatgactcacaccctggccagctcgctggctcacctgtgtgctctcgtcatggaagccctcgaggaagctctccagcagctcatctgcgttgtcgatccgttccgcgtactcgcccacaatccagatcatggcagcccgggcctcaggctcatccaggg

SEQ ID NO: 100999 - DNA, 160 bp, Homo sapiens; identical to SEQ ID NO: 34236
  chr22:29758098-29758258
  hypo

SEQ ID NO: 101000 - DNA, 22 bp, Homo sapiens
  chr22:29768138-29768160
  hypo
tggtggctcacgcctgtaatcc

SEQ ID NO: 101001 - DNA, 22 bp, Homo sapiens
  chr22:29768399-29768421
  hypo
cgaaactgggtctcaaaaaaaa

SEQ ID NO: 101002 - DNA, 21 bp, Homo sapiens
  chr22:29773786-29773807
  hypo
gagactctgtctcaaaaaaaa

SEQ ID NO: 101003 - DNA, 31 bp, Homo sapiens
  chr22:29845783-29845814
  hypo
agctcacgcaggcctccggagagtttaccca

SEQ ID NO: 101004 - DNA, 160 bp, Homo sapiens; identical to SEQ ID NO: 34239
  chr22:29846253-29846413
  hypo

SEQ ID NO: 101005 - DNA, 30 bp, Homo sapiens; identical to SEQ ID NO: 13395
  chr22:29885579-29885609
  hypo

SEQ ID NO: 101006 - DNA, 121 bp, Homo sapiens; identical to SEQ ID NO: 34241
  chr22:29977661-29977782
  hypo

SEQ ID NO: 101007 - DNA, 46 bp, Homo sapiens; identical to SEQ ID NO: 34242
  chr22:29977961-29978007
  hypo

SEQ ID NO: 101008 - DNA, 32 bp, Homo sapiens
  chr22:29997159-29997191
  hypo
tgggttcccagtgtcacgcattttctttttcc

SEQ ID NO: 101009 - DNA, 121 bp, Homo sapiens
  chr22:30004163-30004284
  hypo
aaaaaaaaaaaaaaaaaaaaaaagtacaataacaaatttaaaaattaactagagggactcaggactcaataacagatttgaactgggtgaagaaagaattcgttaattttttttttctttt

SEQ ID NO: 101010 - DNA, 81 bp, Homo sapiens
  chr22:30032864-30032945
  hypo
ggttgggctagaactcgatgaaactggtggggctgacgtgagctttccagtttttccctgagcaggcgcctagctcatcac

SEQ ID NO: 101011 - DNA, 40 bp, Homo sapiens
  chr22:30051626-30051666
  hypo
aattactgcttggtacgcagagcaccgaggccgagccagg

SEQ ID NO: 101012 - DNA, 264 bp, Homo sapiens
  chr22:30084258-30084522
  hypo
gaggcagtaaaacaccctgttcggcccctcggcactgaagatgtgtttcagtgcagctctcctcggcaccggattcgttgctgcaacagtgggagggaagagccagatgcaaactcgttctgcgagcccgaggttctgttctcatgatccttgctgtgatttctcttttgatgttggcaattttaaaatgacatcagtctatctggacctttttcctaaggctcttgctcagaccactcagtagatagccgccacctgcccagt

SEQ ID NO: 101013 - DNA, 30 bp, Homo sapiens
  chr22:30087744-30087774
  hypo
gctgtttgcatgctccgcggggtggcttcc

SEQ ID NO: 101014 - DNA, 30 bp, Homo sapiens
  chr22:30088068-30088098
  hypo
ggtctgtctaaggggcgagcagcagtggcc

SEQ ID NO: 101015 - DNA, 590 bp, Homo sapiens
  chr22:30090267-30090857
  hypo
ccttgcctcaggccacgtcaccttaccccagccatgttgccagggcatgaggactaagatgcttgccctgccaagcccggaggggatgagcagcctcagctggtgccgccacagacagcacaccacagaggtggctcagggaccttggtagatgggaatgtgagaatctattaaaataggcagggatctccggtcctctgtcaagaggcaatgctgacggctttttcctgctggcgtgcctctgcccaccagccttccccttgcacatcctcatttgtcacctcctaatttgaattattgggcaaatctggccgcttatttgggactgacagccaacttcttgagcatctatttgaacagccttccctttcgctcccagccacctttgaggtgagtccaagtggcaggacaggaccctgtgtgacagagcggaggtcttgtgccctctcagcttcttctctgctttcttacagctcaccttgcagagcgccaagtcccgagtggccttctttgaagagctctagcaggtgacccagccaccccaggacctgccacttctcctgctaccgggaccgcgggatggaccagat

SEQ ID NO: 101016 - DNA, 690 bp, Homo sapiens
  chr22:30091059-30091749
  hypo
attcctgactcccttcgtccaaggcaccggtgtgtgtgtgtcttgcactccagagctgacctccaccgcccagcctgggaagtcattgtagggagtgagacactgaagccctgagaagccagtgccatcatccccaccccgcccagggttccggaacattcattcccccaccggtgaggacctggcatgcagcgaagcagcccagcccggcggatcccaggccagcacgcctgccggcttctcatcgtcagggagcccgcccagagctcgtgacgagcaagtgctgggtccccgccaggcaccccgaggcggcgctctggctggcagctggtggggaataggcagggcagctgtggctggggagagactttaggcagaagctgtgatgcaggctgactgccagccgaggggctgggtagtgccgtgcgggagctgatggtacagggcactcgctgtccccctccggccaccctagaccagggtccgagaggcaggcaggagccactcatgtcttccccattgcccgacgcccatagacgctccttcctgtgtggggctggggtactccctggtcgtactgcagtcagcacccgtaacccggctatgaccagggatctgtaagccctgtggctccacaggtgctgcttctcactggcccagactctgagctccaccggcccagtctgcacg

SEQ ID NO: 101017 - DNA, 170 bp, Homo sapiens; identical to SEQ ID NO: 57930
  chr22:30116799-30116969
  hypo

SEQ ID NO: 101018 - DNA, 30 bp, Homo sapiens
  chr22:30125627-30125657
  hypo
acctctcccttggccggctccctgggccgc

SEQ ID NO: 101019 - DNA, 40 bp, Homo sapiens
  chr22:30158324-30158364
  hypo
gggaccccaacccccaggccccggaacggtacgggtccat

SEQ ID NO: 101020 - DNA, 36 bp, Homo sapiens; identical to SEQ ID NO: 34246
  chr22:30165505-30165541
  hypo

SEQ ID NO: 101021 - DNA, 271 bp, Homo sapiens; identical to SEQ ID NO: 34247
  chr22:30190729-30191000
  hypo

SEQ ID NO: 101022 - DNA, 7 bp, Homo sapiens
  chr22:30232301-30232308
  hypo
aaggttg

SEQ ID NO: 101023 - DNA, 22 bp, Homo sapiens
  chr22:30233131-30233153
  hypo
aggcagggctgggcgcgatggc

SEQ ID NO: 101024 - DNA, 19 bp, Homo sapiens
  chr22:30250833-30250852
  hypo
ttctgaggtagactctcgc

SEQ ID NO: 101025 - DNA, 32 bp, Homo sapiens; identical to SEQ ID NO: 34249
  chr22:30309741-30309773
  hypo

SEQ ID NO: 101026 - DNA, 81 bp, Homo sapiens
  chr22:30352152-30352233
  hypo
aattgtcacaaaggaacaggtcggttagatgttttgtctctgtaaagttcagattgttgcctactggtgacaagaattctt

SEQ ID NO: 101027 - DNA, 31 bp, Homo sapiens; identical to SEQ ID NO: 34250
  chr22:30363112-30363143
  hypo

SEQ ID NO: 101028 - DNA, 27 bp, Homo sapiens
  chr22:30375185-30375212
  hypo
aggaacactggcttggccaggcgcggt

SEQ ID NO: 101029 - DNA, 175 bp, Homo sapiens; identical to SEQ ID NO: 34251
  chr22:30422073-30422248
  hypo

SEQ ID NO: 101030 - DNA, 35 bp, Homo sapiens
  chr22:30431159-30431194
  hypo
tggttgacggagcaagacaccgtctccagaaaaaa

SEQ ID NO: 101031 - DNA, 22 bp, Homo sapiens
  chr22:30455726-30455748
  hypo
acaaatgaaaataaaaaagatc

SEQ ID NO: 101032 - DNA, 186 bp, Homo sapiens; identical to SEQ ID NO: 34252
  chr22:30624612-30624798
  hypo

SEQ ID NO: 101033 - DNA, 86 bp, Homo sapiens
  chr22:30634302-30634388
  hypo
ctgagctcatgaaaagggtcacgggactgcatcggggagcgccaggcccaggatcctggccggccgcaggggcagggccttcccag

SEQ ID NO: 101034 - DNA, 246 bp, Homo sapiens
  chr22:30653607-30653853
  hypo
agccaaggggagaagcagggccggggtgtggggagggggcgtccttgtgcccgatgcccctgcccagtgctgcgtggcgaggccgctggggcctgagtcacagctgacggggccgcgccccgcctgcctgagtgacccaggccggcataaggcgatgactgggcagccctccgcatgaccgcaggggtcggccttaggtgttttgactcagacctgccacaggccgtgtgcagcacatccagcctc

SEQ ID NO: 101035 - DNA, 198 bp, Homo sapiens
  chr22:30656575-30656773
  hypo
ccttggggctgggaggcggggccccacctgccctgctcttccttgagcgcctactgtgcaccaggcaccatgcggatgcagagacagcatcaagcaaagcagactcggtctccgtcctccatgctaataagagatgcagttgggaatgtgaacaccacacagagtgcgtgctgccagaagggacggcacaaccaagtt

SEQ ID NO: 101036 - DNA, 73 bp, Homo sapiens
  chr22:30681972-30682045
  hypo
cccagccccccaacaccgggaacagccctcaccaaagcccaggggctgtccaccgatgcgcaccatcctccac

SEQ ID NO: 101037 - DNA, 29 bp, Homo sapiens
  chr22:30784249-30784278
  hypo
caagagtgaaactccgtctctaaataaat

SEQ ID NO: 101038 - DNA, 264 bp, Homo sapiens; identical to SEQ ID NO: 57934
  chr22:30792873-30793137
  hypo

SEQ ID NO: 101039 - DNA, 31 bp, Homo sapiens
  chr22:30934840-30934871
  hypo
catcaggattgggcagcgcagatagcacatc

SEQ ID NO: 101040 - DNA, 30 bp, Homo sapiens
  chr22:30940954-30940984
  hypo
cacccttctttgccccgggaaccccatccc

SEQ ID NO: 101041 - DNA, 1180 bp, Homo sapiens
  chr22:30950915-30952095
  hypo
ggcaagccgctgggcggtgggacgtcaccaccgcaggaaatcgcgaatgaacttccagagcttggtgacccacaggttggcgccgaggtccatcaggtactggatctcgggcgtgagcatgcgccggcagagctgcgcgtgccgctgcccgatgctcttcttgaggttgtagcccaggatggacttggtgcccagcggctgccagggctgcatggcctcgtcctggatggcggcggcgtccacggcgtggcccccgtcgatgcagatggtccgcatgcgctcgttggcatggcgcagggcggccacctcgcgggccatgcgctcccgcccgaaggcctccaccttgcgccagaagctggcgttgaagtggcggtagaggtgggagtccagcatgttccaggcggtggcgcgcccatacagctcccccgagagccgcggcacgggcgagtcgcggcgggcgttgagcttgaagtagagcacgtcctccagctcccagcacagcaggtccttcagcagcaccagcgactcgtcgaagtactcttgaaggagcaccaggtggaagcgacgctccacctccaggatgtgctcctgcacctgcgggctgctggggtccaggctgttgtcatagcccaggtcgaagaagagcaggtttcggaggtagtgggcattgaagccgttggggtcgtagtagcgatccgggtcttgcaggaactcggtcagcttgtcgccggccgagagcttccacgtgaggggcaccaccggcccgaagtagtggaaggaggactcgaacaagcgggcggggtcgcggagcaccgtgatgaagatggcgttggtcggcaccaggccgcgcacctcgtcgtagtggaagcgcatgtggttgcagatgatgttgaagcaggccccgggccgatagtcctgcaccaggctgcgggcgaagaaggtcgggtagtcgaagtcattgcggccgttagggaaggcgaacttgagccggtgcttctggccgaagcggaacaggatgttgagcagggtgctgctggccgtcttgtgcgtcttcaagaacacgatgttgcgccgcggctggcactcccccgccgagccgttggcccggatcactgcctctggctcgagtgcaggtggagagcaggacgctgcggcctccggggtcctgctggggacagag

SEQ ID NO: 101042 - DNA, 28 bp, Homo sapiens
  chr22:30958820-30958848
  hypo
aaagctcccatgggccaggcccggtgta

SEQ ID NO: 101043 - DNA, 181 bp, Homo sapiens; identical to SEQ ID NO: 34257
  chr22:30977856-30978037
  hypo

SEQ ID NO: 101044 - DNA, 28 bp, Homo sapiens
  chr22:30992656-30992684
  hypo
ctgtagtactgagagatgatgcgtgctg

SEQ ID NO: 101045 - DNA, 31 bp, Homo sapiens; identical to SEQ ID NO: 13399
  chr22:31002802-31002833
  hypo

SEQ ID NO: 101046 - DNA, 31 bp, Homo sapiens
  chr22:31049308-31049339
  hypo
tcctgctgccctatcccgactgccacaaccc

SEQ ID NO: 101047 - DNA, 51 bp, Homo sapiens
  chr22:31059625-31059676
  hypo
tacttcatgaggtaggcgaggcacagggcagctgagcggctcacaccagca

SEQ ID NO: 101048 - DNA, 30 bp, Homo sapiens; identical to SEQ ID NO: 34259
  chr22:31062271-31062301
  hypo

SEQ ID NO: 101049 - DNA, 31 bp, Homo sapiens; identical to SEQ ID NO: 34260
  chr22:31069874-31069905
  hypo

SEQ ID NO: 101050 - DNA, 166 bp, Homo sapiens
  chr22:31078360-31078526
  hypo
ctagcccaagacctgtcgtctcacgggtgaatgggaagggggttgtgtcggcaactgtaattgtgctgtacttggagttgacacatacaattcaagaggcagcctggtgctggggagtgggcctcggaataataatctagaggtgggagttcggcttctatgactc

SEQ ID NO: 101051 - DNA, 17 bp, Homo sapiens
  chr22:31088961-31088978
  hypo
accgtgcccagctctgg

SEQ ID NO: 101052 - DNA, 45 bp, Homo sapiens
  chr22:31126861-31126906
  hypo
gattaaagagctaatgctggccgggcgcggtgcctcacgcctgta

SEQ ID NO: 101053 - DNA, 86 bp, Homo sapiens; identical to SEQ ID NO: 34261
  chr22:31169317-31169403
  hypo

SEQ ID NO: 101054 - DNA, 20 bp, Homo sapiens
  chr22:31176967-31176987
  hypo
atttttttttttgagacgga

SEQ ID NO: 101055 - DNA, 711 bp, Homo sapiens; identical to SEQ ID NO: 57942
  chr22:31198440-31199151
  hypo

SEQ ID NO: 101056 - DNA, 31 bp, Homo sapiens
  chr22:31220229-31220260
  hypo
aagcctggggaggaggcggctcaggaagttg

SEQ ID NO: 101057 - DNA, 31 bp, Homo sapiens; identical to SEQ ID NO: 34264
  chr22:31225040-31225071
  hypo

SEQ ID NO: 101058 - DNA, 46 bp, Homo sapiens
  chr22:31250070-31250116
  hypo
tctagggtttacagtacgcatttttaacttacggcagtctccttcc

SEQ ID NO: 101059 - DNA, 31 bp, Homo sapiens; identical to SEQ ID NO: 34265
  chr22:31260513-31260544
  hypo

SEQ ID NO: 101060 - DNA, 129 bp, Homo sapiens; identical to SEQ ID NO: 34266
  chr22:31260801-31260930
  hypo

SEQ ID NO: 101061 - DNA, 30 bp, Homo sapiens
  chr22:31261978-31262008
  hypo
gagagcatccagggacgagtcccgggcagt

SEQ ID NO: 101062 - DNA, 238 bp, Homo sapiens; identical to SEQ ID NO: 34267
  chr22:31264324-31264562
  hypo

SEQ ID NO: 101063 - DNA, 710 bp, Homo sapiens
  chr22:31266248-31266958
  hypo
gatggggcaggcacctcaccccggccaggaacaggaacgggcaccatctcggggactgatgttttttgaatggcgctatccaccctgccctgctcggcctggctgtgcaggcctcttggtaccacgtctgttcgtaatgaccgtaacaactctattttcttccacagatgactctggggacgacgacgaggctaccaccccagccgacaagagcgagctgcaccacaccctgaagaatctttccctgaagttagatgacctcagcacgtgcaatgacctcatcgccaagcacggcgctgcactccagcgctccctgacagagctggacggcctcaagatcccatctgagagtggggagaagctgaaggtggtgaatgagcgggccaccctcttccgcatcacatccaatgctatgatcaacgtgagtacccacccccaccgccctggcacggggctccctggctccagccccggggtccctcggtgggtgaccagggtcagcttgaagggtcagcgttccatttcctgtggttccacggtgtttcccaaagccagcgccccccagctagcttccgagttcttaaatcatctccttcactcggccgtcgttgggcaaggacattcttcctaattgtctggaggaaacgagttggttgtggactctggtgcagtctgcagttatttacttcatgcctcgataaggaaggtcg

SEQ ID NO: 101064 - DNA, 30 bp, Homo sapiens
  chr22:31267164-31267194
  hypo
tgagcctgccgaggtcgtgccaacctgatg

SEQ ID NO: 101065 - DNA, 31 bp, Homo sapiens
  chr22:31271735-31271766
  hypo
agtaagtcagcagccccgtcatgaactcagg

SEQ ID NO: 101066 - DNA, 31 bp, Homo sapiens
  chr22:31276138-31276169
  hypo
agaccctgactctctgcgatctcaccgctca

SEQ ID NO: 101067 - DNA, 201 bp, Homo sapiens
  chr22:31279749-31279950
  hypo
gcacccagagggataccgtccccctgcctccgccaccgcccttacacccactggcacaaaaccagcaaagaggtgccatctggtctggctgctggggcacattgtctctgagtctgttttcagggtcctcactctaaggcctacagcagtgagagagggacagggttgtgggtgaagcaggacggccgctgtaggactcca

SEQ ID NO: 101068 - DNA, 222 bp, Homo sapiens
  chr22:31301688-31301910
  hypo
gagggagtcctggacgcggggagctggagggtgaggcgacccgggaggagacaccgccaggcaggggagggcggccgggtaggtgtggtccggctcacaccgcagccaccgccaccgccaccaccaccgccacagggagaacgcggagaacatgtactacttctcagagctggccctgaccctcaacgagcacgaggagggcgtagcgccaaccgacagccg

SEQ ID NO: 101069 - DNA, 31 bp, Homo sapiens; identical to SEQ ID NO: 34270
  chr22:31365680-31365711
  hypo

SEQ ID NO: 101070 - DNA, 22 bp, Homo sapiens
  chr22:31397072-31397094
  hypo
gccaccacgcatggccaagttt

SEQ ID NO: 101071 - DNA, 216 bp, Homo sapiens
  chr22:31475551-31475767
  hypo
ggaggtcccaagggacgcgtgaattttgaagtattcagaattggtcttagagggcgcctgaccctcgttctggataataacatggcatctcgcccaggtagagaaagcctaggaccttgaaatatgtcctccgaagtgagctctgtttgcctctcctgctgtgtagcattgacaagtcgctttcttctgtgccttgattttcttttttcttttttt

SEQ ID NO: 101072 - DNA, 189 bp, Homo sapiens
  chr22:31494686-31494875
  hypo
gccggcagcctggcggcgctcgagaaacggcaggccgagaagaagaaagagctgatgaaggcgcagagtctgcccaagacctcagcctcccaggcgcgcaaggccatgattgagaagctggagaaggagggcgcggccgggtgagctgcagaagtgggctgggcagtggggggcggggcgtgataggca

SEQ ID NO: 101073 - DNA, 111 bp, Homo sapiens
  chr22:31495078-31495189
  hypo
cgatccaccagcttcggggtccccaacgccaacagcatcaagcagatgctgctggactggtgtcgagccaagactcgcggctacgaggtgagccccgggaggccagggggc

SEQ ID NO: 101074 - DNA, 568 bp, Homo sapiens
  chr22:31522436-31523004
  hypo
tggtgacgacagcgacggcgcagacatgatcgccatagggtgaggtggcagggcatgtggaccccctcctgagcccctcgggccttccgggccctccacccatggcaggggcttccagggcacctctccaatcccatggccaccctgcccccacccctccaggttgcaggaagtgaactccatgctcaacaagcgactcaaggacgccctcttcacggaccagtggagtgagctgttcatggatgcgctagggcccttcaacttcgtgctggtaacgcacccctcaccccctggacagccagagaccctgctgaattcctggctccagctgtaccctggctcactgtggggcccgctgggcctctgtggctgggtccgtgacatgggtgggtggaggagcagacctgaaggtgggcgcgagggcgggggagttgtgttctgtcccccagccacgtggcctcccgctgcaggtgagttcggtgaggatgcagggtgtcatcctgctgctgttcgccaagtactaccacctgcccttcctgcgagacgtgcagaccgactgcacgcgcac

SEQ ID NO: 101075 - DNA, 30 bp, Homo sapiens
  chr22:31530035-31530065
  hypo
ccgcagccgcagcccgggactggccaggtt

SEQ ID NO: 101076 - DNA, 31 bp, Homo sapiens; identical to SEQ ID NO: 34273
  chr22:31532734-31532765
  hypo

SEQ ID NO: 101077 - DNA, 31 bp, Homo sapiens
  chr22:31532982-31533013
  hypo
ctggtccaggtggcggcggaagctgcggcag

SEQ ID NO: 101078 - DNA, 31 bp, Homo sapiens
  chr22:31609769-31609800
  hypo
acagagtccttcaactcgaatgatttccagt

SEQ ID NO: 101079 - DNA, 30 bp, Homo sapiens
  chr22:31615844-31615874
  hypo
accacgcccggctcttttctggactcttaa

SEQ ID NO: 101080 - DNA, 58 bp, Homo sapiens; identical to SEQ ID NO: 34274
  chr22:31644732-31644790
  hypo

SEQ ID NO: 101081 - DNA, 119 bp, Homo sapiens
  chr22:31655942-31656061
  hypo
agcagctgccctactctgtcacgctcatctccatgccggccaccactgaaggcaggcggggcttctccgtgtccgtggagagtgcctgctccaactacgccaccactgtgcaagtgaaa

SEQ ID NO: 101082 - DNA, 30 bp, Homo sapiens; identical to SEQ ID NO: 34275
  chr22:31674515-31674545
  hypo

SEQ ID NO: 101083 - DNA, 127 bp, Homo sapiens
  chr22:31685461-31685588
  hypo
gcaggggtgggggaccgtcatacccagagttcccaggtcctttttctccttggagttcatccgcacccgctggctgatcccaatcactggctgcacagctgccgcctcactccgagcgggcagggcg

SEQ ID NO: 101084 - DNA, 30 bp, Homo sapiens
  chr22:31688937-31688967
  hypo
cacctgccgggttctcgcaattctgcctca

SEQ ID NO: 101085 - DNA, 30 bp, Homo sapiens
  chr22:31689315-31689345
  hypo
acaggtgtgagccaccgcgttcggccgagt

SEQ ID NO: 101086 - DNA, 22 bp, Homo sapiens
  chr22:31701868-31701890
  hypo
gccactgcgcctggactctttt

SEQ ID NO: 101087 - DNA, 45 bp, Homo sapiens
  chr22:31744072-31744117
  hypo
agaaagagaaaggggccgggcgcggtggctcacgcctgttatccc

SEQ ID NO: 101088 - DNA, 19 bp, Homo sapiens
  chr22:31899872-31899891
  hypo
ccatgttttgtatttgatt

SEQ ID NO: 101089 - DNA, 18 bp, Homo sapiens
  chr22:31925244-31925262
  hypo
tttatcaggtcaggtacg

SEQ ID NO: 101090 - DNA, 144 bp, Homo sapiens; identical to SEQ ID NO: 34278
  chr22:31942753-31942897
  hypo

SEQ ID NO: 101091 - DNA, 35 bp, Homo sapiens
  chr22:31976810-31976845
  hypo
gagtcaccatgctcggcctttttagtttgcatttt

SEQ ID NO: 101092 - DNA, 30 bp, Homo sapiens; identical to SEQ ID NO: 34279
  chr22:31998238-31998268
  hypo

SEQ ID NO: 101093 - DNA, 155 bp, Homo sapiens
  chr22:31998582-31998737
  hypo
cctgcctcaggccatccttcacgcagagcgacagcttctgtataggtcttggttcatgtggcaccagcaggcagcagcacgtcaccaggagcaggagtggcaaacagtggcctgtgcccaccaccgccacgggcggctcaagaaagctttctgcc

SEQ ID NO: 101094 - DNA, 31 bp, Homo sapiens
  chr22:32001194-32001225
  hypo
tttcctccctgcttcacgcctacaaaattca

SEQ ID NO: 101095 - DNA, 87 bp, Homo sapiens
  chr22:32009373-32009460
  hypo
ggaggagaaagaaggcgcggctgcagtgggcgctccaggcctaccaggggcagctcctccaggagggtgccacgcggctcctgcgct

SEQ ID NO: 101096 - DNA, 358 bp, Homo sapiens
  chr22:32014102-32014460
  hypo
cctgtcggcggcaagcgagcagcctgcgcaggtggctggagctgaacagagaggagccggggcctgaggaccaggaagtagagcagcaggtgcagaaagagctggaacaggtgaggccccaggccatccccaggtgtccctggggacgccccgggctgtgctccctctcagccctgcctgtccctccatggccccaggtggaaatgcagatccagctgctggcagaggagctccaggctcagcgccagcccattggcgcctgcgttgcccgcatccaggccctgcggcaggccctgtgctagcgtgttcgcaccaggaacgcaggtgctgggctgtcggggaggcctcaggccacctc

SEQ ID NO: 101097 - DNA, 30 bp, Homo sapiens
  chr22:32015369-32015399
  hypo
gtaggcagaaggaacgggataggttgaggg

SEQ ID NO: 101098 - DNA, 43 bp, Homo sapiens; identical to SEQ ID NO: 34281
  chr22:32025195-32025238
  hypo

SEQ ID NO: 101099 - DNA, 30 bp, Homo sapiens; identical to SEQ ID NO: 34282
  chr22:32055432-32055462
  hypo

SEQ ID NO: 101100 - DNA, 29 bp, Homo sapiens
  chr22:32059271-32059300
  hypo
gagccaccgcacctggcctaaacattctt

SEQ ID NO: 101101 - DNA, 258 bp, Homo sapiens
  chr22:32078007-32078265
  hypo
actgcctaaaagttggtctttcgcagatcttaatgtacatggcattgattatgagacggaattccagcctggagacggagcgacggccgtgcattcattggctgcaccgcggccttggatctgctgctcccgtcctgtacgctccctgctgctcttggctcagtgggcaaggaaggagccacgggggaggtctcacgcccagatagtgggatctggaatggacctcaggttggctctggagcccgtgccaaagaccct

SEQ ID NO: 101102 - DNA, 14 bp, Homo sapiens
  chr22:32101965-32101979
  hypo
gacagagggagact

SEQ ID NO: 101103 - DNA, 30 bp, Homo sapiens; identical to SEQ ID NO: 34285
  chr22:32152143-32152173
  hypo

SEQ ID NO: 101104 - DNA, 20 bp, Homo sapiens
  chr22:32172014-32172034
  hypo
agactacatctcaaaaaaaa

SEQ ID NO: 101105 - DNA, 32 bp, Homo sapiens
  chr22:32276565-32276597
  hypo
aacggagatgttaatcgtcatcaaagtttcta

SEQ ID NO: 101106 - DNA, 42 bp, Homo sapiens; identical to SEQ ID NO: 34286
  chr22:32356771-32356813
  hypo

SEQ ID NO: 101107 - DNA, 456 bp, Homo sapiens; identical to SEQ ID NO: 57957
  chr22:32571843-32572299
  hypo

SEQ ID NO: 101108 - DNA, 431 bp, Homo sapiens
  chr22:32665357-32665788
  hypo
gtcctgtagaagctacctcatcgatgtgcaggccctggatgagaagctgctcatcatcatcgccctgcagttcctgcacggctactacaagcccatcctgttcgagcccaaccagacctggcccgggcacgtggctgtgtggcaggacacgtgctccatcgtggccatcttgctaacatcacgcagaaggtgcaccccgtcatctgatctctcaccagctaccctttgactgcacccaggctctggccgtacccaagcccataggtggggtggtggtctttgtcgtcagctcgctgttatacctgaaccagagcattcccccgtacggtgtggctctcagcagcctcaccacaggcaccgcagctttcccgctgtgcacccagctgggtgtgtgaatccccctggactgcgcccaggccaccttcatctcc

SEQ ID NO: 101109 - DNA, 189 bp, Homo sapiens
  chr22:32792011-32792200
  hypo
ttaacatcatcatgaatgactcggaacagaagagcaacttctactgtacctgacgggttaagaaggtcatggaagagcggttgacccaggcatagttcccagcagctgccattcccttcagatagtcttgaccctctggggaagcgattcgagcacaagccaactgccgatcattgactataatcttgt

SEQ ID NO: 101110 - DNA, 161 bp, Homo sapiens; identical to SEQ ID NO: 34288
  chr22:32804845-32805006
  hypo

SEQ ID NO: 101111 - DNA, 213 bp, Homo sapiens
  chr22:32914021-32914234
  hypo
gcacttacttgagatgcggatggggtggtgctggcttcttggactcttcaccctgctgggaggtactacggccctgcacagggggccggggctgtgaggcgagggtggcacctggcttggaggcctggtttggggagctgccactggatgcccgggatagctgcggagagcctggtgacctttgctgctgtggagatccggactgggggctca

SEQ ID NO: 101112 - DNA, 30 bp, Homo sapiens
  chr22:32983716-32983746
  hypo
tgtgcaagatgctggcgctgctggaaacat

SEQ ID NO: 101113 - DNA, 24 bp, Homo sapiens
  chr22:33038443-33038467
  hypo
tgagatggagtcttgctctgtcgc

SEQ ID NO: 101114 - DNA, 30 bp, Homo sapiens; identical to SEQ ID NO: 34290
  chr22:33195673-33195703
  hypo

SEQ ID NO: 101115 - DNA, 31 bp, Homo sapiens
  chr22:33215184-33215215
  hypo
gcttggccttgcaggccggtgctgggtttca

SEQ ID NO: 101116 - DNA, 30 bp, Homo sapiens
  chr22:33305902-33305932
  hypo
agacgcacatacaagcggtgtgctcggaga

SEQ ID NO: 101117 - DNA, 44 bp, Homo sapiens
  chr22:33361653-33361697
  hypo
agagattccatctggctttttcgttgttgttgttgttgttgttt

SEQ ID NO: 101118 - DNA, 43 bp, Homo sapiens
  chr22:33361996-33362039
  hypo
atcaccattgtaacctgagcacgcagcacataggcagtcaatg

SEQ ID NO: 101119 - DNA, 203 bp, Homo sapiens; identical to SEQ ID NO: 13412
  chr22:33453871-33454074
  hypo

SEQ ID NO: 101120 - DNA, 65 bp, Homo sapiens; identical to SEQ ID NO: 13413
  chr22:33454193-33454258
  hypo

SEQ ID NO: 101121 - DNA, 16 bp, Homo sapiens
  chr22:33454345-33454361
  hypo
gggtcccgggagctca

SEQ ID NO: 101122 - DNA, 31 bp, Homo sapiens
  chr22:34061439-34061470
  hypo
gttcagtgatgagaatcggatttcaaatgag

SEQ ID NO: 101123 - DNA, 30 bp, Homo sapiens
  chr22:34142214-34142244
  hypo
caagactccgtctcaaaacaaaataagaat

SEQ ID NO: 101124 - DNA, 17 bp, Homo sapiens
  chr22:34144136-34144153
  hypo
ttagacagagtctcagt

SEQ ID NO: 101125 - DNA, 152 bp, Homo sapiens
  chr22:34242011-34242163
  hypo
tttctacagagttttccgctgtctgaattttcatgacagcgtctctgtttgtcatttaacctgcatctctgccctctgtatacttcctgtgacttcatagctagatctagggtcttgaacagatccaagttctgttgcgggaagtcagggac

SEQ ID NO: 101126 - DNA, 51 bp, Homo sapiens
  chr22:34257536-34257587
  hypo
tcctcacccacagaatggccacgcagacacgcctggcctctccatgctgcc

SEQ ID NO: 101127 - DNA, 68 bp, Homo sapiens; identical to SEQ ID NO: 13415
  chr22:34316493-34316561
  hypo

SEQ ID NO: 101128 - DNA, 45 bp, Homo sapiens
  chr22:35526199-35526244
  hypo
cttatacttttttatgaaaagttcgccatgaatattgcatctctg

SEQ ID NO: 101129 - DNA, 19 bp, Homo sapiens
  chr22:35707943-35707962
  hypo
gcttagaagatgaggggag

SEQ ID NO: 101130 - DNA, 184 bp, Homo sapiens
  chr22:35730461-35730645
  hypo
ctggtcccctgcagttcgggtggctctcggggttctggaacccggttttatggtggcacaccatgaggaagggcacacggaccctgcttagtaagcacgcccttagtatcccctaagtcagtccagcatggcctgggagccctgtggtcagttgacagactgcgctccccacaggccatgctgg

SEQ ID NO: 101131 - DNA, 30 bp, Homo sapiens
  chr22:35741758-35741788
  hypo
gtggctgtccactgacgtggtatgttgggg

SEQ ID NO: 101132 - DNA, 318 bp, Homo sapiens
  chr22:35742068-35742386
  hypo
gaggaagcataacagcgccaggctcttacctgcagtagctcagaagactccagccacttgcagagggaacccatcaccaccctgtttacagatcagaagaccgataagcagctgtcctctaaggggaagcacccaggaggaggagggcgggtgccagtcatggggaccccaagccctgccaccctcccagggagcagaaggggcagggccagactcagcttctccgtccagggctcctaccgcagcatctgccaccccgtctctgggcaccaaggcccacatgggcacttcaggcccagaagccgccttctgcaggtg

SEQ ID NO: 101133 - DNA, 31 bp, Homo sapiens; identical to SEQ ID NO: 13417
  chr22:35746850-35746881
  hypo

SEQ ID NO: 101134 - DNA, 58 bp, Homo sapiens; identical to SEQ ID NO: 34298
  chr22:35758434-35758492
  hypo

SEQ ID NO: 101135 - DNA, 153 bp, Homo sapiens; identical to SEQ ID NO: 13418
  chr22:35768081-35768234
  hypo

SEQ ID NO: 101136 - DNA, 28 bp, Homo sapiens
  chr22:35768761-35768789
  hypo
aagagcaagactccgcctcaaaaaaaaa

SEQ ID NO: 101137 - DNA, 91 bp, Homo sapiens; identical to SEQ ID NO: 13419
  chr22:35777143-35777234
  hypo

SEQ ID NO: 101138 - DNA, 31 bp, Homo sapiens
  chr22:35804287-35804318
  hypo
gacccccataaattgccgctggcaacgtctc

SEQ ID NO: 101139 - DNA, 43 bp, Homo sapiens
  chr22:35806955-35806998
  hypo
tacttctggtaacaggcagctcgttacttcatgaggtagccca

SEQ ID NO: 101140 - DNA, 30 bp, Homo sapiens; identical to SEQ ID NO: 34301
  chr22:35817356-35817386
  hypo

SEQ ID NO: 101141 - DNA, 218 bp, Homo sapiens
  chr22:35820081-35820299
  hypo
tgtctgggctctgtcggagtcccctcgggcagcacgtgccgttagccagccatgtgctcccacagaaatacccggagcacgccatccacaaggtgctgcagctcatgctgcggcgcggcgagatccagcatcgcatgcagcgcaaggttctctaccgcctcaagtgagtcgcgccgcctcactggactcatggactcgcccacgcctcgcccctcctg

SEQ ID NO: 101142 - DNA, 144 bp, Homo sapiens
  chr22:35821625-35821769
  hypo
tggggtggcaaccttactgggcgcgctgtgggttttgcatccaaggctgcatctccggttcctgctagcctttcatcttgctcaggtggggactcgcgtgcatctcaggcccaaggtcctcccgtcctgcttgttcatggagtg

SEQ ID NO: 101143 - DNA, 30 bp, Homo sapiens
  chr22:35822529-35822559
  hypo
accagctacaggccgcgacccagcggacat

SEQ ID NO: 101144 - DNA, 30 bp, Homo sapiens
  chr22:35822852-35822882
  hypo
tgggtctctcaacttcgctcaccactatga

SEQ ID NO: 101145 - DNA, 289 bp, Homo sapiens
  chr22:35842432-35842721
  hypo
gactttgtctagtacccccatcgctgtacctccagcacacagagctgctgcgcaccctggaagtgaatgagcgagtggacgagcagatgactcagaggccagctcacagtctcgtgggcgaggcagacaagaaacaaccaagcagaatgcccccagtgagcactacggcatgtggaggggaacaaccggggcgcctgcaggagggagtggctgcccgtccgcagtgggaggaaggagtgaggaatggaagcctccctcaactctgcccgcagaattttccagattggct

SEQ ID NO: 101146 - DNA, 642 bp, Homo sapiens
  chr22:35848318-35848960
  hypo
gcagatgtcacaccctggaaccgtgtggtgtttctgttgtctgcctacagtaggacgtaggctccacgccacagggactctggcttcctggtcggccactttgtgtctggagcatggagccgggcaggtgcccggcagatgtgtgttgaataaacaggtgggtggccgcctcacgttcctccacggtaaagtgacgctaaggatcatagtcacctctgggctacatgaaataccatgcggaaacgtctggcagcgggcagggcagggcagggcacttcactttctgtactagctgtaaagtgagaaagaagcccttggcactggaagcctggcttttcgttgactctgcagctcctggttagccctgtgtgtgagtttgtgttaaataatcagtccgactcctccgctggggtggtggtgccagtgtggccagttcttgtgcaaatagaacattttcaagatagttctgccacttgtacagcactctacgtgctgtagagttcagccctgagagagagggacaggatcctgtgtgtcccgtccgccttgcatgtgggtctcaccagcggcttccttcatgtcactctggagcactctcacccaccccgagaggaaagtgccgctatccctgctttgcagatg

SEQ ID NO: 101147 - DNA, 39 bp, Homo sapiens
  chr22:35875347-35875386
  hypo
tatggggattacaggcgtgggccacggcgcctggcctag

SEQ ID NO: 101148 - DNA, 432 bp, Homo sapiens
  chr22:35947749-35948181
  hypo
ctgctggtgtcgggcgacgagaactgcgcctacttcgaggtgtcggccaagaagaacaccaacgtggacgagatgttctacgtgctcttcagcatggccaagctgccacacgagatgagccccgccctgcatcgcaagatctccgtgcagtacggtgacgccttccaccccaggcccttctgcatgcgccgcgtcaaggagatggacgcctatggcatggtctcgcccttcgcccgccgccccagcgtcaacagtgacctcaagtacatcaaggccaaggtccttcgggaaggccaggcccgtgagagggacaagtgcaccatccagtgagcgagggatgctggggcggggcttggccagtgccttcagggaggtggccccagatgcccactgtgcgcatctccccaccgaggccccggcagcagtcttgtt

SEQ ID NO: 101149 - DNA, 30 bp, Homo sapiens; identical to SEQ ID NO: 34304
  chr22:35949996-35950026
  hypo

SEQ ID NO: 101150 - DNA, 31 bp, Homo sapiens
  chr22:36003113-36003144
  hypo
agccaagggccactcccggttcccagggtga

SEQ ID NO: 101151 - DNA, 30 bp, Homo sapiens
  chr22:36135444-36135474
  hypo
agccctagcttacgcgtgtcagccccaggt

SEQ ID NO: 101152 - DNA, 43 bp, Homo sapiens
  chr22:36246093-36246136
  hypo
atatgttccaggctttaagtgcgtcagagaatactcccaatcc

SEQ ID NO: 101153 - DNA, 58 bp, Homo sapiens; identical to SEQ ID NO: 57979
  chr22:36424336-36424394
  hypo

SEQ ID NO: 101154 - DNA, 78 bp, Homo sapiens; identical to SEQ ID NO: 57980
  chr22:36424418-36424496
  hypo

SEQ ID NO: 101155 - DNA, 187 bp, Homo sapiens; identical to SEQ ID NO: 57981
  chr22:36425194-36425381
  hypo

SEQ ID NO: 101156 - DNA, 154 bp, Homo sapiens; identical to SEQ ID NO: 57982
  chr22:36462013-36462167
  hypo

SEQ ID NO: 101157 - DNA, 31 bp, Homo sapiens
  chr22:36491796-36491827
  hypo
ggtggttgcagtgagccgagatcaagccact

SEQ ID NO: 101158 - DNA, 164 bp, Homo sapiens
  chr22:36519453-36519617
  hypo
tggggccagaggaaggctgggcgcctttctcatctggacccagacccagacagaccccggggccattccgttctgcaggcaaacaagccagtcccgctagaatgtggcagtcacaggctttcaacatggaaggtggagctgcctggacgctgtgttttttttct

SEQ ID NO: 101159 - DNA, 30 bp, Homo sapiens; identical to SEQ ID NO: 34310
  chr22:36537258-36537288
  hypo

SEQ ID NO: 101160 - DNA, 31 bp, Homo sapiens
  chr22:36588478-36588509
  hypo
agttaaagtcatcttccgatgctctttagtg

SEQ ID NO: 101161 - DNA, 34 bp, Homo sapiens
  chr22:36646817-36646851
  hypo
tgtccaaaagatgttgaagaacggccaggcgcag

SEQ ID NO: 101162 - DNA, 175 bp, Homo sapiens
  chr22:36677170-36677345
  hypo
atcttagcttttctgcacaaccgcccacagctagctcagcctacgcctcagccaatctggttcccgacgatgcagagccggcattggctgcagaagccaggcctagtcctgtccagggccccctggccgcagacaaatgctacagacacggctcgtagcacatggttctctttat

SEQ ID NO: 101163 - DNA, 36 bp, Homo sapiens
  chr22:36684310-36684346
  hypo
agctgtttgatggcttcgtcccggttcttgttggcc

SEQ ID NO: 101164 - DNA, 279 bp, Homo sapiens
  chr22:36688046-36688325
  hypo
ctgcttcttctccaggttgcacgcgctctggcgctggtggtccaggtccaccagcaggtcgtccagctcctgctgcagccgcgtcttggtcttctccagcttgtcgtaggcggccaccttctcctcgtgccgctggctcaggccctccaggtccttctggagcttcctcttcacctcctcagcagtttccaggcaccccacactgtcctccatcttctttttcatgtcggccacctgggcaggagcaaggagtaagcagatgcccgagatggcacctgc

SEQ ID NO: 101165 - DNA, 30 bp, Homo sapiens; identical to SEQ ID NO: 34313
  chr22:36691001-36691031
  hypo

SEQ ID NO: 101166 - DNA, 172 bp, Homo sapiens
  chr22:36692852-36693024
  hypo
gccacctggcctcaggcgggcaggcggggtcctcacctggccagggcggcctggagctcctcctctttcttggccagctgcatcttgagctccgcgatctgggcctggagctcggcgatctggtcgctgaggtctgtggagtctccctccagcttccggcgggtcttctcca

SEQ ID NO: 101167 - DNA, 130 bp, Homo sapiens; identical to SEQ ID NO: 34315
  chr22:36695462-36695592
  hypo

SEQ ID NO: 101168 - DNA, 64 bp, Homo sapiens
  chr22:36697006-36697070
  hypo
tcttggcggtcaggcgggcccggagctcctcagcctcggcacacagctcggtttctgcctggag

SEQ ID NO: 101169 - DNA, 200 bp, Homo sapiens
  chr22:36707920-36708120
  hypo
tgtaaatgatgatgctgtcaccggccacattactgggtgagtcattgtgcaagaaccgtactcaggtcacacccctgcgtccccagcagctgcccggctcctggtcctagagagcctcgactccacctctcctgtgaagatctggccagcacctccccgtgagcgctcctcaccttgccggcatagtggataatgcagaa

SEQ ID NO: 101170 - DNA, 30 bp, Homo sapiens; identical to SEQ ID NO: 34317
  chr22:36713228-36713258
  hypo

SEQ ID NO: 101171 - DNA, 239 bp, Homo sapiens; identical to SEQ ID NO: 34318
  chr22:36713505-36713744
  hypo

SEQ ID NO: 101172 - DNA, 30 bp, Homo sapiens
  chr22:36718449-36718479
  hypo
ccggggcgccgccgcgctactcacgaagcg

SEQ ID NO: 101173 - DNA, 204 bp, Homo sapiens; identical to SEQ ID NO: 34319
  chr22:36732741-36732945
  hypo

SEQ ID NO: 101174 - DNA, 404 bp, Homo sapiens
  chr22:36740159-36740563
  hypo
tgatgatggagctaagccctgcggaaagagcactgaggctcaggtgggaggaaggagattcactggatgctcgtggaggcaagacatcgagcaagcggcttcgcgcccacgcggcgcggccacgacacggcgctgctccattcacaggccacagaggctctttgtgcccatccgcccccatcccagggcctcaccccctgaagaaaaagacagagcagctgtggctcagaattagccacgccacccacaatgctgggcaaacaggctgcacgaaggctcctgaggtcatgatttggaagcttgatggagagatagaccatgaatgaggcagcacctccccatccaggcagcacctccccatccaggcggccccgcccaggggcgctgacatgctaataactctg

SEQ ID NO: 101175 - DNA, 79 bp, Homo sapiens
  chr22:36741012-36741091
  hypo
ccaggcccccaggccttgccccgagccaggtgctggctgggtactttagaaagttcccatggatgccgggtgtggtggc

SEQ ID NO: 101176 - DNA, 30 bp, Homo sapiens; identical to SEQ ID NO: 34320
  chr22:36791015-36791045
  hypo

SEQ ID NO: 101177 - DNA, 30 bp, Homo sapiens
  chr22:36850084-36850114
  hypo
gtgcgccgccgaggcggagccaggctctgg

SEQ ID NO: 101178 - DNA, 198 bp, Homo sapiens
  chr22:36855432-36855630
  hypo
ggattacaggcgtgagccaccgtgcctggctggggcccggaactttctaaggcagaggcggcagagacaaagaggtggctggaggtggggcagtgccgagccaagtctcaggacatccctactgccgagcctcccctcccacaaagtaaaccggcaggtgggcagtgcaggcggggcccagctcgggtttcactcctt

SEQ ID NO: 101179 - DNA, 143 bp, Homo sapiens
  chr22:36860796-36860939
  hypo
cccaaagtcctgggattacaggcgtgagccaccgcgcccggctccatgttctgtatatttagaaggaacctgtgtgagtggccaccaaacgttcactctgaaccatgctggcgctgcctgcaggtgagcgtgcctgcccagag

SEQ ID NO: 101180 - DNA, 172 bp, Homo sapiens
  chr22:36885621-36885793
  hypo
agcttttgttttaaagcgcttgccacaaactcttaagatgcggatgggtttcccctgtgaagcactccacaggcgggatgcaggcccatctgaggaggggcttggaaggaagaggagcacttgagacggggcagaactgggctggcctggggctcagcgacagctccattgc

SEQ ID NO: 101181 - DNA, 876 bp, Homo sapiens; identical to SEQ ID NO: 13425
  chr22:36901806-36902682
  hypo

SEQ ID NO: 101182 - DNA, 27 bp, Homo sapiens
  chr22:36906150-36906177
  hypo
cttacatagtttacatagcctcggctg

SEQ ID NO: 101183 - DNA, 51 bp, Homo sapiens
  chr22:36906968-36907019
  hypo
ccactaagcatcaaaggccctcgtagtctcggtggaaggacaaactccagc

SEQ ID NO: 101184 - DNA, 31 bp, Homo sapiens; identical to SEQ ID NO: 34323
  chr22:37007645-37007676
  hypo

SEQ ID NO: 101185 - DNA, 31 bp, Homo sapiens
  chr22:37121761-37121792
  hypo
gctgggcttaggatgccgacccatggtttac

SEQ ID NO: 101186 - DNA, 156 bp, Homo sapiens
  chr22:37168654-37168810
  hypo
ttagaacgtatcacacgcatcttagttcttccttgagtgcaactgactcatgcttgcaggcccactgcaccttgcacggtgactctgacgtagtaggtgctcagcgagtatctgttcaatgcataaacacttgaactgaacgtcaggtccttcaat

SEQ ID NO: 101187 - DNA, 24 bp, Homo sapiens
  chr22:37285259-37285283
  hypo
atgtataagtactattcatgccgg

SEQ ID NO: 101188 - DNA, 24 bp, Homo sapiens
  chr22:37285582-37285606
  hypo
tccgcctcaaaaaaaaaaaaatta

SEQ ID NO: 101189 - DNA, 30 bp, Homo sapiens
  chr22:37329780-37329810
  hypo
aggagccagcgaagccgagggtccaggtgg

SEQ ID NO: 101190 - DNA, 17 bp, Homo sapiens
  chr22:37351404-37351421
  hypo
tctgagagggagtttcg

SEQ ID NO: 101191 - DNA, 625 bp, Homo sapiens
  chr22:37367460-37368085
  hypo
ctctatttcccgttgaactggttttggtaagatattttacaggctaactgtgtatttcatctagcagccagcaagcgtttgcacatcgttataaattatgtcttgttataaacttgttctaacaacaattcactctgagcaggcattccgcatgctcattacataatatttttgtctctgtgcagctgcacatctgcaccgtagtgtagctccctgtccccgggtgaccgattggaactaggtttctccatccccaataggcctcactgtgtctcatcacaccaaagtatttttaaaaaggcttaatgaagacagcatcctctgtatcatcccccgggaaggctgagcaggttgcgcaccataaatacacttcaacgttcctatctgcctaagccttgaatcccctcctctatgatatagcaaggtaaatgcctgcatcctgactgcatttaatggaccacgggccctgggttggggttgcagcacccagtgagctatgagagcagcccccagctgctccgtctgacagattgaagccaggctctccagccagcgcttccagcttcatcagttctgtttgttcaacgttatgttccttctgccctggtctcgcagcctgaaattc

SEQ ID NO: 101192 - DNA, 323 bp, Homo sapiens; identical to SEQ ID NO: 13430
  chr22:37414959-37415282
  hypo

SEQ ID NO: 101193 - DNA, 30 bp, Homo sapiens; identical to SEQ ID NO: 57995
  chr22:37415334-37415364
  hypo

SEQ ID NO: 101194 - DNA, 143 bp, Homo sapiens
  chr22:37509139-37509282
  hypo
gggacactcttgtcctcgcagcaaagagacacgttcacatagatggaacggaagccttgttgctctgggaatctgcattcctaacactgagcctcagcctccttggtccccaaggaaaaagaagcctccgggaggcctggtga

SEQ ID NO: 101195 - DNA, 195 bp, Homo sapiens
  chr22:37527572-37527767
  hypo
actttaaaaatgaatcggtgttttgtgactcaaagtgacgggaagacttgttagtatccacgctaagttatggagcctgctcaggaattttgagcagggacaggagaagcacagagcatgtctgcacagacagtggggtggagagagcttgtgctggcaggtcctgttcgttcagcacaccggcaacggtaatac

SEQ ID NO: 101196 - DNA, 158 bp, Homo sapiens
  chr22:37562375-37562533
  hypo
ttgaaggcactgcaccgctgcgtgtgttgtacacggagcctgcgcttcctgggccagaagtgaagctaagatgcactccacgcattcaaccgttgaaccctcattgcagccaccagagttctgtgccacccctgctccgttcccgcggtggagggagg

SEQ ID NO: 101197 - DNA, 30 bp, Homo sapiens
  chr22:37562800-37562830
  hypo
agtcgcggccaggagcgtgaccacgctgga

SEQ ID NO: 101198 - DNA, 30 bp, Homo sapiens
  chr22:37599445-37599475
  hypo
ggctgccagacacacgtgtgtggggggaca

SEQ ID NO: 101199 - DNA, 30 bp, Homo sapiens
  chr22:37602527-37602557
  hypo
cctaggcacacccacggcttctgcctcttc

SEQ ID NO: 101200 - DNA, 209 bp, Homo sapiens
  chr22:37622730-37622939
  hypo
gcgcttctgctgccgcgtgggctgagggcacagcacggcccggatggcctcgtcgaacacggttttcaggcctctctgggtgagagctgagcactccaggtatttcaccgagtctggttggggagatggacaggagagccaaggcctaagtggcggggggggttctgggccaacatgtctcctatgccatacaaccccttccacgccat

SEQ ID NO: 101201 - DNA, 53 bp, Homo sapiens
  chr22:37683792-37683845
  hypo
tcctgtgaatgagacctggggcgagtcacttcgccttcctaagcctcagtgtc

SEQ ID NO: 101202 - DNA, 31 bp, Homo sapiens; identical to SEQ ID NO: 34328
  chr22:37733865-37733896
  hypo

SEQ ID NO: 101203 - DNA, 169 bp, Homo sapiens
  chr22:37769149-37769318
  hypo
caaggatgtcatgcagatcctcgtccttggcgaactggaccttcttgcgcagggcgtgaccggcggccatgtacacctcctcccggtggtgcttcttgtagggccggaagcgctcccagatcttgtgcgtgctctcggatgagtactcggggctggaggagtaccctga

SEQ ID NO: 101204 - DNA, 30 bp, Homo sapiens
  chr22:37769664-37769694
  hypo
atggaaccactggacgacacgctgcaggtc

SEQ ID NO: 101205 - DNA, 87 bp, Homo sapiens
  chr22:37770929-37771016
  hypo
acactgcaggcggtcgtagttcttggtgacgttgttgaagaccaccagccaggccaggaagccgaagaggtcgcactcacagttgaa

SEQ ID NO: 101206 - DNA, 31 bp, Homo sapiens; identical to SEQ ID NO: 34329
  chr22:37790763-37790794
  hypo

SEQ ID NO: 101207 - DNA, 106 bp, Homo sapiens
  chr22:37875331-37875437
  hypo
ggcccttgggatcagcgggccaaggggcaaaggaggaggagagggacccaccgtgcggttgtggggctgtggctctgaggcatggatgggccggttcaggctgggc

SEQ ID NO: 101208 - DNA, 153 bp, Homo sapiens
  chr22:37893388-37893541
  hypo
tctcccctggacctgggcacacggtgcagtggagcctgcgtgccacagagcactccaactttgccttgccacggccctttcgtttcctccatcagaacgaacaccttcaggaccaaacttctatactgttccgctctgtagccctggcaccaa

SEQ ID NO: 101209 - DNA, 216 bp, Homo sapiens
  chr22:37902175-37902391
  hypo
ctccacaatcttgacccgctcaccttgaggcaggtgccaccctgggcccgctgcagctgaacctccagcagagccttggtgccctccaggctggtgagcgttgtcagcagctcatcccgctccgcctccaggccccgcacctgcttgcggtactggtccttctcgatgaggctctgtgagtactgcaactggatccggtcacggctctggatggcc

SEQ ID NO: 101210 - DNA, 397 bp, Homo sapiens; identical to SEQ ID NO: 58007
  chr22:37915036-37915433
  hypo

SEQ ID NO: 101211 - DNA, 767 bp, Homo sapiens; identical to SEQ ID NO: 58008
  chr22:37956435-37957202
  hypo

SEQ ID NO: 101212 - DNA, 194 bp, Homo sapiens
  chr22:37964557-37964751
  hypo
agcccagtgggagggggtccccgaggacctgctggccctgccctcggcaggcactggggagcaggctgggatggcggccaccactacccagagatggatgcgcggcaggagcgggtggaggtgctgccccaagcccgggcctcctgggagagcctggacgaagagtggagggcgccccaggcaggcagcaggac

SEQ ID NO: 101213 - DNA, 96 bp, Homo sapiens
  chr22:38002843-38002939
  hypo
aaaaataaaataaaataaaaaaatatatataattcatttcagtagtaaaagacataaacaaaaagctataagtatacactacgttacagcttttgt

SEQ ID NO: 101214 - DNA, 112 bp, Homo sapiens
  chr22:38014383-38014495
  hypo
caaggcgtgggagggaggccacggcctctgatgcacctgggcgtcccctcccatcccccctccctgcacaggtgctggaaacatgcatgaagagctgcggcaagcggttcca

SEQ ID NO: 101215 - DNA, 30 bp, Homo sapiens
  chr22:38019343-38019373
  hypo
ggatggagaagatctcgaagagggtgaatg

SEQ ID NO: 101216 - DNA, 31 bp, Homo sapiens
  chr22:38021053-38021084
  hypo
acggtgatgccacagccggctccatccctgg

SEQ ID NO: 101217 - DNA, 30 bp, Homo sapiens; identical to SEQ ID NO: 34333
  chr22:38062913-38062943
  hypo

SEQ ID NO: 101218 - DNA, 20 bp, Homo sapiens
  chr22:38085750-38085770
  hypo
agggccaggcatggtggctc

SEQ ID NO: 101219 - DNA, 138 bp, Homo sapiens
  chr22:38087229-38087367
  hypo
aagaggaaacatccccgacgggcccaggactccaaaaagcccccaagggcccctcgtaccagcaaggcccagcgccgccgtctcacaggcaaagcacggcacagcggggagtgagaccgagaacgaagcggtgcccca

SEQ ID NO: 101220 - DNA, 18 bp, Homo sapiens
  chr22:38141156-38141174
  hypo
caccgcgcccggcaaggg

SEQ ID NO: 101221 - DNA, 243 bp, Homo sapiens
  chr22:38146507-38146750
  hypo
tcttcattcttagcttgggatcgccctgggcagcctccgtctcaggtggaagacggggtgggcagaatacagagcagcgggacaaacgcagccccaggggttctcggccgtgagcagagcctgtgtctctcccttagacaggtatacagggaggggctgggatgccaacctactgggtcccccgactgtggctgtggaaggttctggatcttcagctgtcccaagccccggttggtccacttc

SEQ ID NO: 101222 - DNA, 45 bp, Homo sapiens
  chr22:38149209-38149254
  hypo
atccacacaagagaggatgggcgccgctcgcctcaccagaaggtc

SEQ ID NO: 101223 - DNA, 45 bp, Homo sapiens; identical to SEQ ID NO: 34335
  chr22:38149553-38149598
  hypo

SEQ ID NO: 101224 - DNA, 91 bp, Homo sapiens
  chr22:38150055-38150146
  hypo
tcctaaacttacagcttagggcgctctcacctgctgcggatgtgggtagccagcctacagttcaagaagcagaccgtgcatctgggcgcgg

SEQ ID NO: 101225 - DNA, 30 bp, Homo sapiens
  chr22:38155560-38155590
  hypo
tgtgtgtgagtccccgtgtgacactctgca

SEQ ID NO: 101226 - DNA, 78 bp, Homo sapiens
  chr22:38182163-38182241
  hypo
agtccctctccctctccctctcggcctccctctccctctcggcctccctctccctctcggtctccctctccctctcgg

SEQ ID NO: 101227 - DNA, 134 bp, Homo sapiens
  chr22:38199825-38199959
  hypo
atctcagcccagggccgctgccaagcggacccggcacgtgagtaggaggtcggccgcagacaaggggtcctagggtctctgaggtctctcctgctggcctctgggcccctaaagcccctcgagcttcagaactc

SEQ ID NO: 101228 - DNA, 87 bp, Homo sapiens
  chr22:38208854-38208941
  hypo
cccacaggcatcaacacgtgtctcactcattttcttcagagcatccacaagaatctagaagcaaaaatagcccgcttccaccagcgg

SEQ ID NO: 101229 - DNA, 389 bp, Homo sapiens
  chr22:38209274-38209663
  hypo
tcttactagagcagggcgctggtccagcccggcactgagacacgggggccccagagagaagcacagaacaccttgcctctctacccagaggagcgccctggctggcagtacagttttttgatttgctggagtcccggtcaagggagaagcccagggtggttaaatgatggctctacgctcactgcctccctccaggccctgctgaccccagaggacgcagtcctgtcggacgagctgaaccatgcctccatcatcgacggcatccggctgtgcaaggcccacaagtaccgctatcgccacctggacatggccgacctagaagccaagctgcaggaggcccaggtggggcgacgcctgggtccaccctcagcctccgcctggggaaggaa

SEQ ID NO: 101230 - DNA, 66 bp, Homo sapiens
  chr22:38211828-38211894
  hypo
ccaagacccagaggtgcgactcccagcagggcaggctcgggggcggagagacgtggtgagagccag

SEQ ID NO: 101231 - DNA, 31 bp, Homo sapiens
  chr22:38212284-38212315
  hypo
tgcccggctggcctctcgcatggcggatgac

SEQ ID NO: 101232 - DNA, 30 bp, Homo sapiens
  chr22:38244117-38244147
  hypo
gtagggactggaactcggatttccactagg

SEQ ID NO: 101233 - DNA, 23 bp, Homo sapiens
  chr22:38256657-38256680
  hypo
gcgtgagccactgtgcctggcct

SEQ ID NO: 101234 - DNA, 21 bp, Homo sapiens
  chr22:38257396-38257417
  hypo
aagtaaagattcctggccagg

SEQ ID NO: 101235 - DNA, 30 bp, Homo sapiens; identical to SEQ ID NO: 34337
  chr22:38261623-38261653
  hypo

SEQ ID NO: 101236 - DNA, 30 bp, Homo sapiens
  chr22:38280658-38280688
  hypo
aactgagccaggcttcgtagcgtgtacttg

SEQ ID NO: 101237 - DNA, 33 bp, Homo sapiens
  chr22:38285335-38285368
  hypo
gcgtgagccaccgtgcccagccctaaattgaat

SEQ ID NO: 101238 - DNA, 324 bp, Homo sapiens
  chr22:38328788-38329112
  hypo
ggtatctggcttccagagggccgtgaggatgacatgctggtggactggttcaagctcatccacgagaagcacctactggtgcggcgagagtccgagctcatctatgtgtgagtccccccgcctggggcatccctccctggaatccgtagagcttagaatggagaacccttaccctcttccctcatcagtaacagcgcagggcagggcagccggggctcgggcagaattgttaagagtcaccttattcccacccctagcttcaagcagcagaacctggagcagcgccaggctgatgtcgagtatgagctccggtgcctcctcaat

SEQ ID NO: 101239 - DNA, 30 bp, Homo sapiens; identical to SEQ ID NO: 34338
  chr22:38339957-38339987
  hypo

SEQ ID NO: 101240 - DNA, 267 bp, Homo sapiens; identical to SEQ ID NO: 34339
  chr22:38363620-38363887
  hypo

SEQ ID NO: 101241 - DNA, 30 bp, Homo sapiens; identical to SEQ ID NO: 34340
  chr22:38364188-38364218
  hypo

SEQ ID NO: 101242 - DNA, 68 bp, Homo sapiens; identical to SEQ ID NO: 34341
  chr22:38364988-38365056
  hypo

SEQ ID NO: 101243 - DNA, 338 bp, Homo sapiens
  chr22:38369806-38370144
  hypo
gcccctggggccccgcggtctctgtcttcacctgggctttggcatccacaccaggtggtgagaccgtgggcagagccacgcctggtggcttggagatccaggcggagtgtccactggccacggccagggcactgcccagcccatagccggctgctgagtagctgctcacatggcctgggtgcccattgggcggcaggtactggtccaactcagccacatcaaaggtctccatgttggacattacctcgtggctgatctcaccaatgtccacgttgccgaagtcgatgtgaggcttcccgccctcccccatggagcgcccgtcccgcttcgggtctgcc

SEQ ID NO: 101244 - DNA, 1228 bp, Homo sapiens
  chr22:38378820-38380048
  hypo
gataggatgaggtcccgcagcagcagatttgtcccgcagttcttcatccctcactcttccaaagactctcatctgaattccgttttctttaaacctcccctgagttctccatctgactgcctcagtttccctgaatctccagccaaccctttggttctttccaagcgtttccctcgtatcctcctgaccacagcagctggtggcatagtgtgcgtatctgtgggcaggagttagtgaaggcctccttccctccctccaaagccccaggccccacggtctgccacccgcaaaattccaaccacgagggggcgccttcctgcccgccgccccgtagggagacccggcctaggccgctggagttccgagttccagggtccttgtgatggaagggcgggcgcggcccccacacctggtcttccagccctatccaaggaggactgccagacagtcccgctctgaggtgcaggaggccgggccgcctcggctaccctgaatccacccgaagctagagggcccgagcccggggggcggtcgggtgctcacctccagagcttgcccagcgtcttgctgagctcagcgttgtgcaggtgcgggtactggtccgcgagcttcctgcgcgctgcctgagcccacaccatgaaggcgttcatgggccgcttgacgtgcggcttgcttttgctggcgccgttgacgcgcacgggcatgggcaccagcgtccagtcgtagccgctgagcacctggctgacggcctcgcggatgcacacggggaacttgtcatcgtccgcctcgccgtcctgctgctccttcttgaccttgcccagctcgcctggccccgggctggctcgcaggcccgatccgccgccgccgccgtcgggccctagcgagggcgcgctccccggggacaggcagcggggctcctccgagcccacggggctcagctccacctccgataggtcctgctcctccgccatgtcgcccccggccgccgccgccgccgcctcggccgcctcccccgggccagccgccggggtcctcgcaaagagtccaacgcccacctggatggaaggagggcgcgatggagcggccgcgcgcgcagccccgagggcggcccgagacaggacgtgggcacagccccgaggtggcggcccttcctgctccagctaaacccatctggcccctggggcccacgcacatgccagactctaggtgggtgcgtcccgcctctgtg

SEQ ID NO: 101245 - DNA, 311 bp, Homo sapiens
  chr22:38380261-38380572
  hypo
gcaagggcggggtgtcgcctctctccacctcacagcagggtcccaggcctgggcgggccagggaggagcaggctgcgcactcacctcctcggacctctcctccagtctggggctcgtccttaggaagtggaaaaccgtgtcccaaggtgtgcggtccagctcggggctgggaggtgacgctggtgggctgggagggaggggcggggggccctgagcctcaggccacggcctcgttaggacggagcctgaatccttaccaccaaccaccctggccggacagcccgagactgactgagcgactgagcctgagc

SEQ ID NO: 101246 - DNA, 30 bp, Homo sapiens
  chr22:38380914-38380944
  hypo
ggagagacgtgaaggcggtgagggtcctgg

SEQ ID NO: 101247 - DNA, 240 bp, Homo sapiens; identical to SEQ ID NO: 34344
  chr22:38381991-38382231
  hypo

SEQ ID NO: 101248 - DNA, 197 bp, Homo sapiens
  chr22:38424122-38424319
  hypo
gccccttttgacatcccgcagcttgttctgtgtgttccctgactaccttgtgtgcatgagagagagagactgcgctagagatggaggaggtcaccacatgagaacagtggggacctgggtgatttagacagagacacagagccaggattggaggctgcgtgggctgctttcctgctgcacggcgatgctttagggtg

SEQ ID NO: 101249 - DNA, 802 bp, Homo sapiens
  chr22:38434364-38435166
  hypo
gcttgggggaaaggaccaggccgggcccaggcaggtggaagccatggctctggccgggtcacagggcggctggggtttgacctggcggccatgatgggctctggacccaggagccacccgggcacaggatgggacgggttgagagattggtcgtccaggcgttgagtgtgccctcgctcctccccaccttccgccgtggccttgagccccttgcgcccgcgcccatggggttaaatctctccctgtctctctctgctccaagttgttttccaagtgaggcagagaatggttctcttgttaccaacatggcttctgggcattgggtaatgcgctccctcttctcccgcagcgccacaaagggaccttttgttcccctccctgcccctctcgctggctcttcccggccccccacccacccaaactccctcctccccccgccggcgcccgcaccccggggctgcgcgctgaccgtggcggccgcggcgccctccctctcccagcgcctgcactggcggccgccatcttgcgagcggccctcagggcggcctgggctttcccagggttctcggggccggggcagtcgtagggggcggctggggctccacaggacgttcgtgacccaccttgcgccccccagggagtggcaggaccctcccgtccccagcctccgcgccaggcctcgtccctgcatgggacaagaggcagccctccgccatttcccgcggcccttgcctcccgggagcggctcccctctgacgactgagtggactgcgcttgagggggccgccgctgggaaccagcc

SEQ ID NO: 101250 - DNA, 115 bp, Homo sapiens
  chr22:38470383-38470498
  hypo
aggaggcgcgcgcccgcttctcccagatgcgcaaggatgtgctggagaagatggagctgctggaccagaagcacggtgagcgccgccctcctccccgtccgctctccatttcaga

SEQ ID NO: 101251 - DNA, 30 bp, Homo sapiens
  chr22:38479317-38479347
  hypo
cctctttagccttccgccatgttcctaatg

SEQ ID NO: 101252 - DNA, 30 bp, Homo sapiens
  chr22:38484007-38484037
  hypo
accactcatccatccgtgggctggtgtggg

SEQ ID NO: 101253 - DNA, 35 bp, Homo sapiens
  chr22:38486387-38486422
  hypo
ggattacaggcgtgagccaccgagcctggcctaaa

SEQ ID NO: 101254 - DNA, 231 bp, Homo sapiens
  chr22:38506372-38506603
  hypo
tttccaggacatctgtagccccggctggccctccgtcctccagagcgggcctgatttctgtgccctgggaggaggggctcaggcctggcttggccacccatgtgctcaccttgtagatggccatggtggacctgtaaaactggtccatctcgggggccatggaggggctgtcccgggtctgagcaggaggctgggagctggtggcgatggcacagccgggagcagtggtag

SEQ ID NO: 101255 - DNA, 541 bp, Homo sapiens
  chr22:38506931-38507472
  hypo
accttactgggcgggcgctgcccgatgccctcccccaggactctctctgccagacccagcagcagcagcccctggaggggaacgccgctttacttctcactgtcctcaggcctgcggctcacagtggggccacgccctctgagcttggctcccacagccgctctggcccgcccagctcctccacttgccggagcaggagcagcacaaacgctggagttgcccagccctgggcagacctcggccctgcacacgcgctgcctgtccacgcggagtccccggcctctctgggtgacaaatggggctctccctggtcctccaagatgaagttgaagattgtggccctccttgggcctgccgggggtatgtgggcctggcagctgcctctgcataccctaagggccggtttaggggaggcctagaggaaagaggaggtgtccctgcccagggatcctggaaaacagagtgtccgggtacaaaggaaaagtccggtcaaggccaagggtcaaggccgaggggagccgggggtcaggggaacaggtgg

SEQ ID NO: 101256 - DNA, 30 bp, Homo sapiens; identical to SEQ ID NO: 34349
  chr22:38508132-38508162
  hypo

SEQ ID NO: 101257 - DNA, 322 bp, Homo sapiens
  chr22:38508431-38508753
  hypo
ctagggctgggaggggaaggtcggtgagtccgaccacgccagggcacggggccaagggctggggcggctgagccctcacctgaagtactggatgccgaccatctcgcaccaggcccgtgcccggtccacagcccgcccgtctggatccgtgcactggtgagaagcagccttggtgagtgccgggcccacaccccgcccggcccgcaccccgcccggccctgccctgcactctcggagccccagcctggggagccccaggctctttcgagtcaggctgagccacacagcagcagagcggctcgggcaaaaccccttcctggga

SEQ ID NO: 101258 - DNA, 122 bp, Homo sapiens
  chr22:38512226-38512348
  hypo
aaatgaggcaggaggacggctgagccacccgcccatccacctttccctttccccacaattcacaccccagggccttgggtagcagagtgcccactccaacctctgttcgggataggtgggct

SEQ ID NO: 101259 - DNA, 30 bp, Homo sapiens
  chr22:38517541-38517571
  hypo
cagggccaaggggccggctgcacctccagg

SEQ ID NO: 101260 - DNA, 56 bp, Homo sapiens; identical to SEQ ID NO: 34350
  chr22:38520280-38520336
  hypo

SEQ ID NO: 101261 - DNA, 256 bp, Homo sapiens
  chr22:38520659-38520915
  hypo
ttttactctctcctgcgctgacctggaagctccaccagggcagaagccgcctctgctctgggcagcgctgtgtgtcaaggggatgcaggaggtgcccaagagggctgataaatggaggaggcccgggtcccacctctaggggtcttttcctggaccaggtacccagccccacagcaagcctagaggtggcaggggagagactacactgttgctggaggccaaagcaaactcccgaagatgcggggctggcgacaga

SEQ ID NO: 101262 - DNA, 31 bp, Homo sapiens; identical to SEQ ID NO: 34352
  chr22:38525514-38525545
  hypo

SEQ ID NO: 101263 - DNA, 30 bp, Homo sapiens
  chr22:38526041-38526071
  hypo
gggggagtgtccccacgaagaacgtcacac

SEQ ID NO: 101264 - DNA, 257 bp, Homo sapiens
  chr22:38528841-38529098
  hypo
atggccaggtgcagcggggtgttgccgtgctctccgcgggcatccgcgttggccccgtgggtcagcagcactatggcacagtcgaagcggttgcgcatcaccgccacgtgcagggccgtgttccccgcggagctggtgctgttcacgttgcagccccgtttcagcagcatgcgggccatctgcgggagacggtcaggctgagttagcacaggcactcggggagctgccgcaccccgggacacgtgggcactgccact

SEQ ID NO: 101265 - DNA, 32 bp, Homo sapiens
  chr22:38531760-38531792
  hypo
tttaaaatttttctggctgggcgcggtgtctc

SEQ ID NO: 101266 - DNA, 130 bp, Homo sapiens; identical to SEQ ID NO: 13444
  chr22:38578022-38578152
  hypo

SEQ ID NO: 101267 - DNA, 38 bp, Homo sapiens; identical to SEQ ID NO: 34355
  chr22:38578431-38578469
  hypo

SEQ ID NO: 101268 - DNA, 37 bp, Homo sapiens; identical to SEQ ID NO: 34356
  chr22:38578708-38578745
  hypo

SEQ ID NO: 101269 - DNA, 30 bp, Homo sapiens; identical to SEQ ID NO: 34357
  chr22:38580938-38580968
  hypo

SEQ ID NO: 101270 - DNA, 143 bp, Homo sapiens
  chr22:38592933-38593076
  hypo
ggttcacgctcctaatgagactccaatgccagtgctgatcctacaggaggcggagctcaggcggtgacgctcactcagcccgctggttcctaacaggccacggacaaacagtactggtcctcagcctgcgatttggggacccc

SEQ ID NO: 101271 - DNA, 31 bp, Homo sapiens
  chr22:38595405-38595436
  hypo
agcctgtgggagggaacggaaagaagccata

SEQ ID NO: 101272 - DNA, 365 bp, Homo sapiens
  chr22:38618368-38618733
  hypo
cttgtgaactcttggaaacatcgtgaaatgccccgatatcccatgaacagcactgtgcccccagaagaaggcggggcatattccagaacgagaaacgaggacggaagcaggcaagctctacagagggtggcccttgacaggtgctctgggcgctcccacccagggggtgccggtggggaggagatgaggacacggagaagagctacagagagacgcatgccagtgacagtgaccagaactgacatgcaggacagacatgcagaccaagagcgggacctaccgtaagggccgtatgttggcactgcccgcggccaaaccccgggcaaaagcagggcaaggggggcggggagagaagccaaagaaat

SEQ ID NO: 101273 - DNA, 31 bp, Homo sapiens; identical to SEQ ID NO: 34358
  chr22:38633562-38633593
  hypo

SEQ ID NO: 101274 - DNA, 115 bp, Homo sapiens
  chr22:38634942-38635057
  hypo
agctaacagtgatgaaaaacacgtgggaaaactgtgaaatgccacgcaaacattcctaacaaacagcaactgcataaagcgacatacggacaccgcctcctgcctctgaacccca

SEQ ID NO: 101275 - DNA, 519 bp, Homo sapiens
  chr22:38694439-38694958
  hypo
tgcagaacaggagcagcaggacggtgtaggcagcaatcagggcagcagggggcgccgccagcaccacccatgccctgctgcgggcacccaggagggaccccaggtgaagccagatcctccttgttccgacgggagacagcgccctgcctggccctgctgcccatggtggcacaagctgtcagcacggatgaggctggagggctctgggaccccagtgaggtcaaccacactgtccagctcgtacctcccgtctgtcgggagcccctcccgccaccagctcactctggccctctgagtcagggccttccccatccagtcccccaagcccgccttggcctccaggtgactcacgaatttcagcatgttccagtcaaagacgtagtcataggagaagccctgccggtggaagaggttgcggaagagctgacgtaggtaagagtagtcgggcttgtcgtcaaaccgcagggagcggcagaagttgaggtatgttgagaattcggctggagggtgttgcagagg

SEQ ID NO: 101276 - DNA, 30 bp, Homo sapiens; identical to SEQ ID NO: 34360
  chr22:38695214-38695244
  hypo

SEQ ID NO: 101277 - DNA, 31 bp, Homo sapiens
  chr22:38723520-38723551
  hypo
cacccatcccttctcacggtggctgcctgtc

SEQ ID NO: 101278 - DNA, 31 bp, Homo sapiens
  chr22:38776947-38776978
  hypo
ttcgcaggtgcctcctcggttgctcctttaa

SEQ ID NO: 101279 - DNA, 30 bp, Homo sapiens; identical to SEQ ID NO: 34361
  chr22:38812938-38812968
  hypo

SEQ ID NO: 101280 - DNA, 159 bp, Homo sapiens
  chr22:38827316-38827475
  hypo
agattgggcatcccctcgccagcagtgcccactcctccccattatcgagtgcccagggtcaattctgagcttccacaatcctcagccccagcggcaacactcactccccaggcccaccagcccactggcctccacagtgcagcccgatggggacatggt

SEQ ID NO: 101281 - DNA, 160 bp, Homo sapiens; identical to SEQ ID NO: 34362
  chr22:38874141-38874301
  hypo

SEQ ID NO: 101282 - DNA, 35 bp, Homo sapiens
  chr22:38885380-38885415
  hypo
gagaagtccccacacacgctcgctctgtgaactgg

SEQ ID NO: 101283 - DNA, 31 bp, Homo sapiens; identical to SEQ ID NO: 34363
  chr22:38894491-38894522
  hypo

SEQ ID NO: 101284 - DNA, 97 bp, Homo sapiens
  chr22:38904793-38904890
  hypo
ttagccattcgaccacgccatacccttgtccagtgagtctgtgactgtccctttgtgtttctgggccaactgacatctcaacggcttttgttttttg

SEQ ID NO: 101285 - DNA, 85 bp, Homo sapiens
  chr22:38995554-38995639
  hypo
tctcatggccagttcacgaggctggctctagatttggaactaagatgagcacgattctgaccctgaggctcgcaccactggccac

SEQ ID NO: 101286 - DNA, 31 bp, Homo sapiens
  chr22:39026304-39026335
  hypo
ggagctctctgagccccgctctttgctttgt

SEQ ID NO: 101287 - DNA, 30 bp, Homo sapiens
  chr22:39041567-39041597
  hypo
caggctgttggccgacggctcggtacgcag

SEQ ID NO: 101288 - DNA, 20 bp, Homo sapiens
  chr22:39095041-39095061
  hypo
tacttggccaaaacctgaac

SEQ ID NO: 101289 - DNA, 31 bp, Homo sapiens; identical to SEQ ID NO: 34365
  chr22:39105317-39105348
  hypo

SEQ ID NO: 101290 - DNA, 155 bp, Homo sapiens
  chr22:39122030-39122185
  hypo
tctccaacgttacaggcgagaacctagatctgctgaagatgttcctcaacctcctctccccccgcaccagctacagggaggaggagcctgctgagtttcagattgatgacacctactccgtcccggtaagtggctctgggcgggtagctgggtgg

SEQ ID NO: 101291 - DNA, 230 bp, Homo sapiens; identical to SEQ ID NO: 34366
  chr22:39132168-39132398
  hypo

SEQ ID NO: 101292 - DNA, 30 bp, Homo sapiens
  chr22:39144770-39144800
  hypo
ttcagggacgagaagcgcctggaccacgcg

SEQ ID NO: 101293 - DNA, 30 bp, Homo sapiens
  chr22:39145447-39145477
  hypo
caggaggaaagccatcgtgtgtctgagagc

SEQ ID NO: 101294 - DNA, 43 bp, Homo sapiens
  chr22:39175178-39175221
  hypo
ctctaccctgtcacaccgccccaccccacgtctcccacacaga

SEQ ID NO: 101295 - DNA, 30 bp, Homo sapiens; identical to SEQ ID NO: 13450
  chr22:39239320-39239350
  hypo

SEQ ID NO: 101296 - DNA, 30 bp, Homo sapiens; identical to SEQ ID NO: 58044
  chr22:39332607-39332637
  hypo

SEQ ID NO: 101297 - DNA, 90 bp, Homo sapiens
  chr22:39424922-39425012
  hypo
agtgagaccgtgtgcaaaaataaataaattcgctgtgatcccgatataaaaataatcatcatcatcatcggacaggtgaaatgtgaggaa

SEQ ID NO: 101298 - DNA, 124 bp, Homo sapiens
  chr22:39529108-39529232
  hypo
aatcaccccacgttcgcctggccagggtttctaacccaggttcgcaaggcccatgtggacacgtctgcagccacacatgctttcacggggcacatgggaacgtacacgcgaagggtaatgcgtg

SEQ ID NO: 101299 - DNA, 101 bp, Homo sapiens; identical to SEQ ID NO: 34369
  chr22:39530912-39531013
  hypo

SEQ ID NO: 101300 - DNA, 30 bp, Homo sapiens; identical to SEQ ID NO: 34370
  chr22:39538288-39538318
  hypo

SEQ ID NO: 101301 - DNA, 30 bp, Homo sapiens
  chr22:39552209-39552239
  hypo
tgctgtagcaaatccgagtggcttctataa

SEQ ID NO: 101302 - DNA, 40 bp, Homo sapiens; identical to SEQ ID NO: 34371
  chr22:39571320-39571360
  hypo

SEQ ID NO: 101303 - DNA, 48 bp, Homo sapiens; identical to SEQ ID NO: 58046
  chr22:39638592-39638640
  hypo

SEQ ID NO: 101304 - DNA, 134 bp, Homo sapiens
  chr22:39686244-39686378
  hypo
gttgcagatgggaagagaggacgtccacactgtccacgagctcagcgcacagtaggtgctcaggacttcctcccagagactcgacaccccaagtcttcgcgttgtgccccctcgtgtcagagccactctcctct

SEQ ID NO: 101305 - DNA, 211 bp, Homo sapiens
  chr22:39690670-39690881
  hypo
acccatgaaggctccccggaggaagcaggcctggcgctgagtcacaggagcctggggcagggtaacccccacctgaagtcactgtctccccagcagtgacatcattagcaagccagaatgcgcagggcatacagctggaggaccaggcaagctgaggcgggggccaagtgggtagttcggggccaacccccatcagcggccaatggcctct

SEQ ID NO: 101306 - DNA, 155 bp, Homo sapiens; identical to SEQ ID NO: 34374
  chr22:39755184-39755339
  hypo

SEQ ID NO: 101307 - DNA, 238 bp, Homo sapiens
  chr22:39756396-39756634
  hypo
ccacacgcactccccacgggctctctcgcccctcctcgccatcttctcaggctcattcctgaccttcacattgccaatctcatggccaactgtcattgatggatctctcagcagcgtctggcagccgtgaggggtttatgcatcctcccttgaatccaaacggctgcagaatgtggacgccctcaccccgctcgccgcagaatgtggacaccctcaccccgctcgtcctctctttaat

SEQ ID NO: 101308 - DNA, 230 bp, Homo sapiens
  chr22:39770341-39770571
  hypo
ggctccatcgtgaacgagggctacctcaacagcgcctccgagggggaggagttctgcatctacaaccgcaaccccaacgcctgcagctatggcgtggccgtgggcgtgctcgccttcctcacctgcctgctgtacctggccctggacgtgtacttcccgcagatcagcagcgtcaaggaccgcaagaaagccgtcctgtccgacatcggtgtctcgggtgagccccaccc

SEQ ID NO: 101309 - DNA, 30 bp, Homo sapiens
  chr22:39772139-39772169
  hypo
aacgaagggacggacgcagcccgggccgcc

SEQ ID NO: 101310 - DNA, 137 bp, Homo sapiens
  chr22:39773594-39773731
  hypo
cctggcagagcctgaccgcagccctggccgtgcggagattcaaggacctaagcttccaggaggagtacagcacactgttccctgcctcggcacagccgtaggcctccccggcttgcagaggccggcagccctgtatc

SEQ ID NO: 101311 - DNA, 231 bp, Homo sapiens
  chr22:39777670-39777901
  hypo
gtccttgtcctcgccggcctttgtccccaggcgggccaggctgtgctggccttccagcggtaccagattggcgccgactcggccctcttctcccaggactacatggaccccagccaggactccagcatgccttacgcgccctacgtggagcccactgggccggatcccgccggtatgggcggcacctaccagcagccggccaacaccttcgacaccgagccccagggctac

SEQ ID NO: 101312 - DNA, 99 bp, Homo sapiens
  chr22:39778979-39779078
  hypo
gactggcccgaggtcacggtgagtgagtggcaaagctggccctgacgcctgggtttcttggccccagctgcccagcaggtgcctcgattccctgccctt

SEQ ID NO: 101313 - DNA, 30 bp, Homo sapiens; identical to SEQ ID NO: 34378
  chr22:39794803-39794833
  hypo

SEQ ID NO: 101314 - DNA, 713 bp, Homo sapiens; identical to SEQ ID NO: 58053
  chr22:39852943-39853656
  hypo

SEQ ID NO: 101315 - DNA, 375 bp, Homo sapiens; identical to SEQ ID NO: 58054
  chr22:39853690-39854065
  hypo

SEQ ID NO: 101316 - DNA, 31 bp, Homo sapiens; identical to SEQ ID NO: 34379
  chr22:39872974-39873005
  hypo

SEQ ID NO: 101317 - DNA, 211 bp, Homo sapiens
  chr22:39877225-39877436
  hypo
gaacattcttccctggcgccctctcctgcgtggagtctgctcacgtcgcctcctcggtgagcctgccctgcccactccattcatcactggacataatgacgcactcgctcctgcccgttacccgctttgtctttctccagagcacagcctctttgggcgcgcagttttctgagctgactagtgtgtttgtagtttacgcaggctccctacc

SEQ ID NO: 101318 - DNA, 30 bp, Homo sapiens; identical to SEQ ID NO: 34381
  chr22:39895718-39895748
  hypo

SEQ ID NO: 101319 - DNA, 364 bp, Homo sapiens
  chr22:39907958-39908322
  hypo
aacagggacatgaagacgggcctgagccggtccttgcagacccttcccacagactcctccaccttcgacacaggtgagaagggctgctgcccctcctgggacctctctggactttcagtaccactcctgcactcagcagatgtttcctgagcacatctgtgccaggcactgtgccagcacttgccctccatgccaggcccttctttctggggctgaggcagctgtggactgagcaggcatgggcagagctcacgtgcctctctctcttgccttggcagatacattctgcccgccccggcccaagccagtggccaggaagggccaggtagacttgaagaagtcacgactccgcatgtccctgcag

SEQ ID NO: 101320 - DNA, 30 bp, Homo sapiens
  chr22:39929926-39929956
  hypo
tggagttcgtcctccgggatagaccacacc

SEQ ID NO: 101321 - DNA, 30 bp, Homo sapiens
  chr22:39930312-39930342
  hypo
ttctaggcggagaccgctgtagcgaggacc

SEQ ID NO: 101322 - DNA, 30 bp, Homo sapiens
  chr22:39933196-39933226
  hypo
accagccaaagatgcggctctgccattaag

SEQ ID NO: 101323 - DNA, 31 bp, Homo sapiens
  chr22:39984783-39984814
  hypo
cttgggtactccccaacgttactgctcttct

SEQ ID NO: 101324 - DNA, 221 bp, Homo sapiens; identical to SEQ ID NO: 34383
  chr22:40026478-40026699
  hypo

SEQ ID NO: 101325 - DNA, 205 bp, Homo sapiens
  chr22:40033277-40033482
  hypo
gaccaatggggcttctcgcttcacagaggaccagtgggacttcttgcttctcagaggatgtgaacttgagctgaacctaaaagattcaagaaaaatgtctccaggcagatggggggacagggagtaggtggggagggtactcttgatcgaggcaaccccactgctgcggtgtggcgtgtgggttagaaatcggagccccagcctg

SEQ ID NO: 101326 - DNA, 238 bp, Homo sapiens
  chr22:40042591-40042829
  hypo
atcaacctgtgcctcgttgtcatagcgacccagttctcggagaccaagcaacgggagcaccggctgatgctggagcagcggcagcgctacctgtcctccagcacggtggccagctacgccgagcctggcgactgctacgaggagatcttccagtatgtctgccacatcctgcgcaaggccaagcgccgcgccctgggcctctaccaggccctgcagagccggcgccaggccctgggcc

SEQ ID NO: 101327 - DNA, 428 bp, Homo sapiens; identical to SEQ ID NO: 34385
  chr22:40045202-40045630
  hypo

SEQ ID NO: 101328 - DNA, 217 bp, Homo sapiens
  chr22:40045721-40045938
  hypo
ggagcagcgaggacggagcctcctcagaactggggaaggaggaggaggaggaggagcaggcggatggggcggtctggctgtgcggggatgtgtggcgggagacgcgagccaagctgcgcggcatcgtggacagcaagtacttcaaccggggcatcatgatggccatcctggtcaacaccgtcagcatgggcatcgagcaccacgagcaggccagtgc

SEQ ID NO: 101329 - DNA, 30 bp, Homo sapiens; identical to SEQ ID NO: 34387
  chr22:40048319-40048349
  hypo

SEQ ID NO: 101330 - DNA, 30 bp, Homo sapiens
  chr22:40073433-40073463
  hypo
tcccagagcaggcccgtggtgggggtgcag

SEQ ID NO: 101331 - DNA, 462 bp, Homo sapiens; identical to SEQ ID NO: 34388
  chr22:40075056-40075518
  hypo

SEQ ID NO: 101332 - DNA, 167 bp, Homo sapiens
  chr22:40083964-40084131
  hypo
ttgctaagaccccctccgagggcttcaggggggcctgccaagggggggccttgttcttgttcccaaactctgacttggaagaactcagcttgtggccgggctggtgagggtgtggggtgcgcccttcccttttgggctgagggagagggggccgggaggggttgtca

SEQ ID NO: 101333 - DNA, 314 bp, Homo sapiens; identical to SEQ ID NO: 34389
  chr22:40089235-40089549
  hypo

SEQ ID NO: 101334 - DNA, 40 bp, Homo sapiens; identical to SEQ ID NO: 34390
  chr22:40262907-40262947
  hypo

SEQ ID NO: 101335 - DNA, 31 bp, Homo sapiens; identical to SEQ ID NO: 13460
  chr22:40280490-40280521
  hypo

SEQ ID NO: 101336 - DNA, 30 bp, Homo sapiens; identical to SEQ ID NO: 34392
  chr22:40310793-40310823
  hypo

SEQ ID NO: 101337 - DNA, 31 bp, Homo sapiens
  chr22:40367763-40367794
  hypo
gtttcaatgtgaggagcgaagtactgggaaa

SEQ ID NO: 101338 - DNA, 26 bp, Homo sapiens
  chr22:40380447-40380473
  hypo
aagagaagaaactcagctgggcgtgg

SEQ ID NO: 101339 - DNA, 85 bp, Homo sapiens
  chr22:40380592-40380677
  hypo
tagctgggtgtggtggcgcacctgtattcccatctacttgggagctgggagagggagctcccgcgtagggagaatcacttgatca

SEQ ID NO: 101340 - DNA, 446 bp, Homo sapiens
  chr22:40417418-40417864
  hypo
ggcagctgagcctggcgggcagggttggcctccattactcctccactgtggctcgaaagcttatcaaccccaagtacgccttggtgtcaggctgccgccacccgcctggggagatgatgcgctgggctgcccggcaacagcgggaggcgggcggcaacccggaggggcaggaggagggcgccagcggtggcgagtcggcctggcgcctggagagcttcctgaaagacctggttacggtggagcaggtgctgccccccgtggagcccatccccttgggagagctgagccagaaggatggcaggatggtctctcacatgcacagagacctgaagcccaaatcccgagaggcacccagccgaaacggcatgggagaagcggcccggggggaggccgcccccgccaggcgcttcagcagcaggctcttcagtcgccgagccaagaggcct

SEQ ID NO: 101341 - DNA, 24 bp, Homo sapiens
  chr22:40444536-40444560
  hypo
tccgtctcaaaaaaaaaaaaaaaa

SEQ ID NO: 101342 - DNA, 18 bp, Homo sapiens
  chr22:40487229-40487247
  hypo
gcccgcctcagcctccca

SEQ ID NO: 101343 - DNA, 21 bp, Homo sapiens
  chr22:40515283-40515304
  hypo
acagaaattaaacacttgtgt

SEQ ID NO: 101344 - DNA, 31 bp, Homo sapiens; identical to SEQ ID NO: 34395
  chr22:40543468-40543499
  hypo

SEQ ID NO: 101345 - DNA, 80 bp, Homo sapiens
  chr22:40593307-40593387
  hypo
gagtctcacactgttgcccctcgctggagcgcagcacatggcttgatctcagctcactgcaacctccacctcccgggttc

SEQ ID NO: 101346 - DNA, 31 bp, Homo sapiens
  chr22:40607392-40607423
  hypo
tttcttttattctcatcgttcatgtgttagt

SEQ ID NO: 101347 - DNA, 30 bp, Homo sapiens
  chr22:40620834-40620864
  hypo
cttgagtgccttctccgggcgccgtgtgcc

SEQ ID NO: 101348 - DNA, 40 bp, Homo sapiens; identical to SEQ ID NO: 34397
  chr22:40621437-40621477
  hypo

SEQ ID NO: 101349 - DNA, 41 bp, Homo sapiens; identical to SEQ ID NO: 34398
  chr22:40624791-40624832
  hypo

SEQ ID NO: 101350 - DNA, 199 bp, Homo sapiens
  chr22:40642783-40642982
  hypo
cttttgttccacccacggtgctgttgtctagatgagtctaccttgggagaattacaagtagaaacccctctcggaaaggatctagtgagcccacgtagtgctttggaggatatggcattgtgtggctttgaggaattgcttagagaaaacaagagatgctaaaagaaaaaaggcaaagggccaacggctgtcacctgtc

SEQ ID NO: 101351 - DNA, 31 bp, Homo sapiens; identical to SEQ ID NO: 34399
  chr22:40655975-40656006
  hypo

SEQ ID NO: 101352 - DNA, 283 bp, Homo sapiens
  chr22:40693255-40693538
  hypo
gattcctaggctgatcgtttcatattgaaaggaagctttagcggcatatgactagattatcctcagctctatcaagttcagcattcccatccgtgacgggatgggggaacacaaactgggaataagtagaataataggatcaacaagaacttggtggggtgactgtgaagttaaatatgatagaggttcattcatttaatagatatttatggagcatcttctatatgccatgctcataaagatatacgtaaggtcttaagctcaaattaaaaaatcaataaaa

SEQ ID NO: 101353 - DNA, 31 bp, Homo sapiens; identical to SEQ ID NO: 34400
  chr22:40707968-40707999
  hypo

SEQ ID NO: 101354 - DNA, 30 bp, Homo sapiens; identical to SEQ ID NO: 34401
  chr22:40719898-40719928
  hypo

SEQ ID NO: 101355 - DNA, 30 bp, Homo sapiens; identical to SEQ ID NO: 34402
  chr22:40720350-40720380
  hypo

SEQ ID NO: 101356 - DNA, 30 bp, Homo sapiens
  chr22:40758240-40758270
  hypo
ttactctcgcctgctcgcattttgctggaa

SEQ ID NO: 101357 - DNA, 30 bp, Homo sapiens
  chr22:40805780-40805810
  hypo
caacctcgggcctgcgtctgaggtggccca

SEQ ID NO: 101358 - DNA, 155 bp, Homo sapiens; identical to SEQ ID NO: 34403
  chr22:40815003-40815158
  hypo

SEQ ID NO: 101359 - DNA, 30 bp, Homo sapiens; identical to SEQ ID NO: 58066
  chr22:40876218-40876248
  hypo

SEQ ID NO: 101360 - DNA, 36 bp, Homo sapiens
  chr22:40896202-40896238
  hypo
gattacaggcatgagccaccgcgcccggcccagtct

SEQ ID NO: 101361 - DNA, 35 bp, Homo sapiens; identical to SEQ ID NO: 34404
  chr22:40912132-40912167
  hypo

SEQ ID NO: 101362 - DNA, 30 bp, Homo sapiens
  chr22:40991408-40991438
  hypo
gccaccgcgcccggccgagaaatgcctttt

SEQ ID NO: 101363 - DNA, 174 bp, Homo sapiens
  chr22:41034365-41034539
  hypo
ataaaattatttattcgataaatattttttgagtaagaacactgagggggtaagctagatgagatacagtcactaccctgggggtgcttacaccaaactggaggatgctaaggcacgtactgcggtgactgcaatgccaggccggtatcccaggtgactaaaacaggatgcagg

SEQ ID NO: 101364 - DNA, 204 bp, Homo sapiens
  chr22:41044523-41044727
  hypo
tttcaaagcctggctctgccccgagccatgtgaccttaggaaatagactgtgtccctgagtttcaatctcgtcacctgtaaattaggagtaaccatacagatcgcaagtcaacacctgcccttgcaccgctgcggggctcagcggtcactgacatgcagtgaaaaagtggaagttctagctgggcgcggtggcttatgtctgta

SEQ ID NO: 101365 - DNA, 139 bp, Homo sapiens
  chr22:41087988-41088127
  hypo
acacacaaagcaatgaaagaacgaagcaacaaaagaagaaacaagcaacgaaagcgcagatttattgacgtgaaagtacagagcgtgagccggctcaagcaagtgggttaaaagtcccgattacaatgttctttagggt

SEQ ID NO: 101366 - DNA, 28 bp, Homo sapiens
  chr22:41123152-41123180
  hypo
ctgggactacaggcgtgagccaccgcgc

SEQ ID NO: 101367 - DNA, 97 bp, Homo sapiens; identical to SEQ ID NO: 34405
  chr22:41156759-41156856
  hypo

SEQ ID NO: 101368 - DNA, 36 bp, Homo sapiens
  chr22:41157095-41157131
  hypo
acaaagcgagactccgtctcaaaaaaataataataa

SEQ ID NO: 101369 - DNA, 30 bp, Homo sapiens; identical to SEQ ID NO: 34406
  chr22:41185268-41185298
  hypo

SEQ ID NO: 101370 - DNA, 26 bp, Homo sapiens
  chr22:41267748-41267774
  hypo
attactggggccaggcgcggtggctc

SEQ ID NO: 101371 - DNA, 17 bp, Homo sapiens
  chr22:41273931-41273948
  hypo
tgggtacagtggctcac

SEQ ID NO: 101372 - DNA, 30 bp, Homo sapiens; identical to SEQ ID NO: 34408
  chr22:41345963-41345993
  hypo

SEQ ID NO: 101373 - DNA, 30 bp, Homo sapiens
  chr22:41422983-41423013
  hypo
aagtggacaaagcgacgtattccgtggatg

SEQ ID NO: 101374 - DNA, 31 bp, Homo sapiens; identical to SEQ ID NO: 34409
  chr22:41464151-41464182
  hypo

SEQ ID NO: 101375 - DNA, 140 bp, Homo sapiens
  chr22:41486562-41486702
  hypo
agtagatactggtttcggggtttctttcggggtcacttacacccctgccacctcctccagtaccaatttacccatggccaaacacagggtgatgtgtaggaacctgaaagcacgtctccgacctcagctgcaaaactgtg

SEQ ID NO: 101376 - DNA, 205 bp, Homo sapiens; identical to SEQ ID NO: 34411
  chr22:41536177-41536382
  hypo

SEQ ID NO: 101377 - DNA, 30 bp, Homo sapiens; identical to SEQ ID NO: 34412
  chr22:41536742-41536772
  hypo

SEQ ID NO: 101378 - DNA, 160 bp, Homo sapiens
  chr22:41573031-41573191
  hypo
cggaaaaccaatggcgggtgccccatctgcaagcagctcattgccctctgctgctaccatgccaagcactgccaggagaacaaatgcccggtgccgttctgcctaaacatcaagcagaagctccggcagcaacagctgcagcaccgactacagcaggccc

SEQ ID NO: 101379 - DNA, 17 bp, Homo sapiens
  chr22:41578472-41578489
  hypo
ggaaaagctgccctttc

SEQ ID NO: 101380 - DNA, 572 bp, Homo sapiens
  chr22:41634410-41634982
  hypo
ggcagagcctggagctcgttgtggtgtaggctgagccgtctcagggcgggcaggccagccagggcctcgggggccagcacgctgagcgcgttgtgcgacagccgcagccagcggacgcgcagtagcccctggaaggccatggcgggcaggtaaaccagggcgttgtgggccaggtttagcgtggccagcgcacccagtgccccgaacgtccccggccgcagctcctccagtgcgttcccctccagctccagccgccgcaacgagcccagcccgtccagcgcctcctggggcagctcacgcaggtggttggaggccaggttgagcaggagcaggcggcccaggccacggaaggcgccctcggccaccagctccacctcgcagtggcgcaggtccaggtgtgtgaggtgaggcacgccctggaaggcggctgcggggatcaccttcagcaaattgccctgcaggtccagccgctgggtcagctggggacagcgaggagaaagtggggctgagccaggcagggaccccgcctttgcaagtgctgcttcttccccggaacactcttttctcctgtc

SEQ ID NO: 101381 - DNA, 50 bp, Homo sapiens; identical to SEQ ID NO: 34414
  chr22:41639281-41639331
  hypo

SEQ ID NO: 101382 - DNA, 145 bp, Homo sapiens; identical to SEQ ID NO: 34415
  chr22:41639557-41639702
  hypo

SEQ ID NO: 101383 - DNA, 136 bp, Homo sapiens; identical to SEQ ID NO: 34416
  chr22:41641906-41642042
  hypo

SEQ ID NO: 101384 - DNA, 31 bp, Homo sapiens; identical to SEQ ID NO: 34417
  chr22:41649014-41649045
  hypo

SEQ ID NO: 101385 - DNA, 803 bp, Homo sapiens
  chr22:41656915-41657718
  hypo
cttctgctggcactcacgatcggggactcagcaatgtcctgcggggatggggagaggagagtggaagaggagtggggataaggtcacctgagagcacgtcatttggcacctgagccctgcggctgcccctgcctatctccctgtcttggaggtctggtatgttccttctctgtgccccacaccagtggctgggccaggctactgtcagcactcgcaccatctcacttcaccacttctgagcctggcagatgacactccttggtcagagtggcctgcctggcctgaagccccataggggctggctcaccagtgggagccagtcacacacctttccggaaagtcacacacctttccagaaatgcacgacaggaattctggctcattttcggatgggttaacaggcttggagagggcacgtgacgccccaggtctcttggttgagtgccagccctgggattagcatccagaactgtcagcctactatgccgagtgcacctcaaggctgcaggggcaggatggacagaaaccactcaccctaaaagcttctgccaaggcagtggcgccatcattctccagacggtttctgccagccacaaagaccttcagggccagaggcttgccttgggcactggatttccggtgacattcggtcagagctgcagccaggatctgtggggaaaggcaaggggccctggtcatgggcaggagccccttctcccagcggggtggccactgctgctgaactgctcttcaacatcccacgccacccatcggtgcaggtcaggggacgcaggactgctaac

SEQ ID NO: 101386 - DNA, 111 bp, Homo sapiens
  chr22:41658258-41658369
  hypo
attaggaaaagcactgaaaaacggagactgaccgatgggaatcagagcccatggtaaatgcgacataaaagaatcacgagcgagtgcaccgagagaagtgatatttgcaga

SEQ ID NO: 101387 - DNA, 30 bp, Homo sapiens
  chr22:41658644-41658674
  hypo
ggtgatggtggatcacgcacacacgatcac

SEQ ID NO: 101388 - DNA, 88 bp, Homo sapiens
  chr22:41664702-41664790
  hypo
caaccctctaggtggacgtgtgacgtggttatggatgacagagaaacatgaacataaacaacacagaattctacgttgagggccagtg

SEQ ID NO: 101389 - DNA, 27 bp, Homo sapiens
  chr22:41664909-41664936
  hypo
ttagcatagtgacggggactttttaac

SEQ ID NO: 101390 - DNA, 455 bp, Homo sapiens
  chr22:41667720-41668175
  hypo
gctgacacctggactccacctcagcctactcctagttgtgtgactctgggctacacttctctcgcccgtcaagacctcactcctcacttgcacactgctgcagcagcagagagaacccctctggcatcagcactacgcccggaacactgggccatcaagggcagatcccaccctgcccctgccctgggctgcttcctgcacagaggagggcctaggaggtggtgtgcagtgattcactcgagccactgcatctgtagcaggcgggaaggtgcatgcagcactcctaccggccaggctctcccaggacaacctctgaggaagaaggaagggctctatctcctatttcatataagagcccagcctcagagctgcacgcagggcaaggccacgtacggcaaacaaggtggtgctgttagggcttgatcccatgtgccgaaagcaagctcagctcctgc

SEQ ID NO: 101391 - DNA, 39 bp, Homo sapiens; identical to SEQ ID NO: 34423
  chr22:41669064-41669103
  hypo

SEQ ID NO: 101392 - DNA, 122 bp, Homo sapiens; identical to SEQ ID NO: 34424
  chr22:41669394-41669516
  hypo

SEQ ID NO: 101393 - DNA, 65 bp, Homo sapiens
  chr22:41676090-41676155
  hypo
tccatctcaaaaaaaaaaagtgataaatgcacagggaggaagtctataaacgttagaccttatgg

SEQ ID NO: 101394 - DNA, 89 bp, Homo sapiens
  chr22:41768560-41768649
  hypo
ctcctgacaccaggctcgtgtctacccatagggtgggtacccatgtgggtaccatgtctcgggtcgtagctcttcgtcacccagccact

SEQ ID NO: 101395 - DNA, 30 bp, Homo sapiens; identical to SEQ ID NO: 34425
  chr22:41779336-41779366
  hypo

SEQ ID NO: 101396 - DNA, 30 bp, Homo sapiens
  chr22:41833264-41833294
  hypo
caaacaggtctgcccggcgccggggcagct

SEQ ID NO: 101397 - DNA, 105 bp, Homo sapiens
  chr22:41839258-41839363
  hypo
aaggtgtgtgtgtgtgtcacacgcgcgcgcatgtgtctgcctgctctaatgtcagaagcgaaggaagatttttttccccccctcgagacagtcttgctctgtagc

SEQ ID NO: 101398 - DNA, 44 bp, Homo sapiens; identical to SEQ ID NO: 34427
  chr22:41839902-41839946
  hypo

SEQ ID NO: 101399 - DNA, 30 bp, Homo sapiens
  chr22:41937237-41937267
  hypo
gaatgctgcctaaacgtgcactctccgaca

SEQ ID NO: 101400 - DNA, 568 bp, Homo sapiens
  chr22:41970754-41971322
  hypo
gccagtggagggcgacgaggtgacctacaagatgtgccctatccctcccaagaaccagaagttccaggccgtggaggtggtgctcactcagctggccccccacactccccacgagacgtggtctggccaggtcgtgggctcctaggctgagtggttcacaggccagctggccgggggttggggagccacacagggtgaacgggcagcagccggctccatgccccactgccctggctgatgagtccttcggtggcctcagtgtgcacgtctgtctgtccgtctgtgcttgtggctatgagcgtgtgcctccacccaccccacgacccgtgactactgtgcaagctggccaggaggtaggtggagggcaaggccaccagacctggcttcgcgctgtccactgcctctctcctcccctccctgccgcagacacgcaggacccgctcgccctcctgcttacccgtccccacggtgactgagctgcgagagcctgcgctgggctcactccctggcctccgcccctgagctgtcccgtgtcagtccctggcccggagccaggctctctgtgcta

SEQ ID NO: 101401 - DNA, 179 bp, Homo sapiens
  chr22:41973277-41973456
  hypo
ggccaaactcttcagaagtcacgacacacagatgtgggccccggtcacgcctcatgagctgtctctgggaagaaaatctcccggcatcgctgcaccgtgtcctgaggagacaccacgctgtggccaacagtccgggggtcggcaaagatctcaaagtcgttcccaccctgcacacagag

SEQ ID NO: 101402 - DNA, 30 bp, Homo sapiens
  chr22:41989312-41989342
  hypo
gtaatgaggatataaaccccacgtgataga

SEQ ID NO: 101403 - DNA, 41 bp, Homo sapiens; identical to SEQ ID NO: 34429
  chr22:41995508-41995549
  hypo

SEQ ID NO: 101404 - DNA, 30 bp, Homo sapiens
  chr22:41996936-41996966
  hypo
gcattgtctacatgcggcctgacggtctcc

SEQ ID NO: 101405 - DNA, 30 bp, Homo sapiens
  chr22:42032749-42032779
  hypo
aaagccggtgatctccgagatacaggtggg

SEQ ID NO: 101406 - DNA, 98 bp, Homo sapiens; identical to SEQ ID NO: 34430
  chr22:42033730-42033828
  hypo

SEQ ID NO: 101407 - DNA, 32 bp, Homo sapiens; identical to SEQ ID NO: 34431
  chr22:42034494-42034526
  hypo

SEQ ID NO: 101408 - DNA, 31 bp, Homo sapiens; identical to SEQ ID NO: 58086
  chr22:42084265-42084296
  hypo

SEQ ID NO: 101409 - DNA, 30 bp, Homo sapiens; identical to SEQ ID NO: 34432
  chr22:42093965-42093995
  hypo

SEQ ID NO: 101410 - DNA, 575 bp, Homo sapiens
  chr22:42095751-42096326
  hypo
ttggccatttccctcagcaaacgcggccaggcccttgccagacccgctccggtgaacccgacgcgaaaccgggcccccgcgctgtgttcactctcctccctgtcagcccgtcccggacccggccgcagcggcctctcgggcccctcagccccaggccggcctgcgggcctccgtggagcccggtccactggctctgcgcctgaaaggacggaaatccggatcccccgggacctcacccagtctcagggacacaccttcccgccttccgccttctggctccttccctttgctgcccctgcctccatttcccggggattcggccttagctcaggctcccgccatttcagcctcccgccatttcagcctccactcacctgcgggccaggggcgcatgcggcggccgctcctcattcccttcagctgtcggggtgtgaatcggaggaggggcagtctgggctccgaggggacaggagtgacaggttacagccgggcagaagtgggggtgaacgggaagactgttccttgggcagagctggccaaagcgggctgcctgggtcctcattgcctaccgcgtt

SEQ ID NO: 101411 - DNA, 204 bp, Homo sapiens; identical to SEQ ID NO: 58088
  chr22:42229857-42230061
  hypo

SEQ ID NO: 101412 - DNA, 37 bp, Homo sapiens
  chr22:42256092-42256129
  hypo
gccaccgcgccaggccgacatggtgattcttaattgc

SEQ ID NO: 101413 - DNA, 30 bp, Homo sapiens; identical to SEQ ID NO: 34434
  chr22:42296538-42296568
  hypo

SEQ ID NO: 101414 - DNA, 30 bp, Homo sapiens
  chr22:42296811-42296841
  hypo
gctccagcggtttgcgtgacttcccaggcc

SEQ ID NO: 101415 - DNA, 966 bp, Homo sapiens; identical to SEQ ID NO: 58090
  chr22:42310098-42311064
  hypo

SEQ ID NO: 101416 - DNA, 37 bp, Homo sapiens
  chr22:42329320-42329357
  hypo
agtggggtcctcttcccgtgtgcggacagcggcaggg

SEQ ID NO: 101417 - DNA, 24 bp, Homo sapiens
  chr22:42344626-42344650
  hypo
aagaaaataaagtaagctgaacgc

SEQ ID NO: 101418 - DNA, 30 bp, Homo sapiens
  chr22:42352622-42352652
  hypo
aacctgtcctttaccgagtgccctgcacag

SEQ ID NO: 101419 - DNA, 222 bp, Homo sapiens; identical to SEQ ID NO: 34436
  chr22:42395139-42395361
  hypo

SEQ ID NO: 101420 - DNA, 31 bp, Homo sapiens; identical to SEQ ID NO: 34437
  chr22:42473746-42473777
  hypo

SEQ ID NO: 101421 - DNA, 187 bp, Homo sapiens
  chr22:42667168-42667355
  hypo
aagacctagctggtcccgcctgggtccctggcagcccccgcccatgggttccaggtgtccgtggaggaacgacttgggtcctctcagagcctcagtttccaccgcggaaaacgcgaggagggaggcccacctacctcacctgtaaaacggacgctccagctgccttctgctgcggcattaagaagct

SEQ ID NO: 101422 - DNA, 401 bp, Homo sapiens; identical to SEQ ID NO: 13477
  chr22:42669779-42670180
  hypo

SEQ ID NO: 101423 - DNA, 30 bp, Homo sapiens; identical to SEQ ID NO: 34440
  chr22:42671394-42671424
  hypo

SEQ ID NO: 101424 - DNA, 59 bp, Homo sapiens
  chr22:42706986-42707045
  hypo
aatacccaagaaaatacggcctggagggaggaacacttaggaaccgtatggctggccca

SEQ ID NO: 101425 - DNA, 191 bp, Homo sapiens
  chr22:42733978-42734169
  hypo
ccagggaagcctttgacgggctcagatgggccacatgcccctttctccaccagtcactgtggccagagggagggggtactgggccccacctgggtccagtgggggcatgcgtcccaggaagaaaaccctctgggcccaggtcctactctgtacacaactcccgcctcggtctccacgcgtcccctgagatc

SEQ ID NO: 101426 - DNA, 193 bp, Homo sapiens
  chr22:42744708-42744901
  hypo
gcctggtgtaagggggcggtggctgccctggcaggcttccctcccgcagcctgccccataagccttgggctggacctccaggccgcagaggtggctgatctgtcacactggcggttgtgaagcaggtggcagcttctctgtagtcacctatgaaaggatctagcatttctgctttccccggttatcaaaacca

SEQ ID NO: 101427 - DNA, 29 bp, Homo sapiens
  chr22:42752216-42752245
  hypo
caagatgcaggttgagcgcagggcctcac

SEQ ID NO: 101428 - DNA, 328 bp, Homo sapiens; identical to SEQ ID NO: 58102
  chr22:42765053-42765381
  hypo

SEQ ID NO: 101429 - DNA, 30 bp, Homo sapiens
  chr22:42776253-42776283
  hypo
cggaagcccgcacggcgctccacattttac

SEQ ID NO: 101430 - DNA, 43 bp, Homo sapiens
  chr22:42796230-42796273
  hypo
tgtgtagcacttgacagtttacgaagtctgctgggacttgtcc

SEQ ID NO: 101431 - DNA, 201 bp, Homo sapiens
  chr22:42822799-42823000
  hypo
cacgacccatgactcacgaccgaagatgagcactgagtcccctccctcactgtgccctcgagccctgtccctagggccaaagcctcacagaccctccctgaggggtcccaggtgccacgccctgaggccatcatggtactggatgtaccttcctattgctgtctgggaggatgctgagcacccaggcgggggggctcgtgg

SEQ ID NO: 101432 - DNA, 30 bp, Homo sapiens
  chr22:42829719-42829749
  hypo
agaagtttcctaccgcgcagggggcaggcg

SEQ ID NO: 101433 - DNA, 30 bp, Homo sapiens
  chr22:42830026-42830056
  hypo
ttccagccctggtgccgcctccgctcctgc

SEQ ID NO: 101434 - DNA, 83 bp, Homo sapiens; identical to SEQ ID NO: 34441
  chr22:42916272-42916355
  hypo

SEQ ID NO: 101435 - DNA, 22 bp, Homo sapiens
  chr22:42916594-42916616
  hypo
cgagactctgtctcaaaaaaaa

SEQ ID NO: 101436 - DNA, 31 bp, Homo sapiens
  chr22:42918548-42918579
  hypo
gtcacttcactcacatcgcagcatctcagca

SEQ ID NO: 101437 - DNA, 165 bp, Homo sapiens
  chr22:42956594-42956759
  hypo
ggcaggctgtgaggacgtcccaggggctgagtgacttgggagaggcttttcacaatggagaggtggagctggtatgtcttggtttcagagcagcttctggcacaagcgatttgtgtactttgctttttacccaggaattttttttctttcgttcttttttcttat

SEQ ID NO: 101438 - DNA, 51 bp, Homo sapiens; identical to SEQ ID NO: 34443
  chr22:42972461-42972512
  hypo

SEQ ID NO: 101439 - DNA, 145 bp, Homo sapiens
  chr22:42995214-42995359
  hypo
gaaggcaccccagtgtctcagcgtttataaaactaagggaatggactagttccagctctgaaaatcttacggcccaaacaaagaaatatttctgcattgaaaggctctattcacgccgggcgcagtggcttacgcctgtaatccc

SEQ ID NO: 101440 - DNA, 144 bp, Homo sapiens
  chr22:42995598-42995742
  hypo
gcgagatgtcgtctcaaaacaaaaaaaacaacaggttctattcaacacgacctctcccacctgcctgatcagacacgcagtgtaagaaaacatgaaatgccataccatgtggtggagaaagccgcctgaggctgcaaacttcat

SEQ ID NO: 101441 - DNA, 296 bp, Homo sapiens; identical to SEQ ID NO: 34446
  chr22:42998947-42999243
  hypo

SEQ ID NO: 101442 - DNA, 193 bp, Homo sapiens
  chr22:43000040-43000233
  hypo
agaaggccctcctgagtatagcgctggagatcctccccaaggtctttgggcttcttctgtcgcctcccaccctcaggcctctctacaatagctaccctcaacggccactcatgcggcagacgctctgcctgcggactcctatgtcaaggggtgctctttgggaaaccctcccggatttctccaggccaactct

SEQ ID NO: 101443 - DNA, 18 bp, Homo sapiens
  chr22:43001430-43001448
  hypo
agtttctgttttttataa

SEQ ID NO: 101444 - DNA, 126 bp, Homo sapiens
  chr22:43005343-43005469
  hypo
ccagggcttcaccaggtattccgcgaggtcctggcaagagcgctgctggcaggtgagaaggcaaacgttccctggaccccaaattctctcctctataccccctacgggaacctggcataggtgtga

SEQ ID NO: 101445 - DNA, 31 bp, Homo sapiens; identical to SEQ ID NO: 34447
  chr22:43038393-43038424
  hypo

SEQ ID NO: 101446 - DNA, 31 bp, Homo sapiens
  chr22:43088995-43089026
  hypo
ctcttcttgttccacacgtggacagcatagg

SEQ ID NO: 101447 - DNA, 30 bp, Homo sapiens
  chr22:43089324-43089354
  hypo
ctgggtgcccagcacgttggtcaggttccg

SEQ ID NO: 101448 - DNA, 35 bp, Homo sapiens
  chr22:43089900-43089935
  hypo
ccgctgccttggggcgccccggagcagccgcagca

SEQ ID NO: 101449 - DNA, 31 bp, Homo sapiens; identical to SEQ ID NO: 34448
  chr22:43096260-43096291
  hypo

SEQ ID NO: 101450 - DNA, 31 bp, Homo sapiens; identical to SEQ ID NO: 34449
  chr22:43098230-43098261
  hypo

SEQ ID NO: 101451 - DNA, 35 bp, Homo sapiens; identical to SEQ ID NO: 34450
  chr22:43137118-43137153
  hypo

SEQ ID NO: 101452 - DNA, 35 bp, Homo sapiens
  chr22:43138067-43138102
  hypo
gtgagatcaagagtgagccacggcacccagcctaa

SEQ ID NO: 101453 - DNA, 257 bp, Homo sapiens
  chr22:43149955-43150212
  hypo
acctgcccagatgggctaagacgggacccttctgggtgttcgggtaaaagctggcctcagaagctggtgatgtttcctcaggaggctgcccatggtgtggtcctggcgacgcaccagcagcacgtcaccctcttgacccgggcgtgtgcctggctagctgagttttaagcctctctctggtgacatttggctttggagaaggttctttctctggcaaagcatttagatgtagctaaaaatacattattggccaggtg

SEQ ID NO: 101454 - DNA, 28 bp, Homo sapiens
  chr22:43159379-43159407
  hypo
aacacaaacgcaacgtacttcaggggtg

SEQ ID NO: 101455 - DNA, 737 bp, Homo sapiens
  chr22:43164506-43165243
  hypo
tggacatgccgctgccggctccgagacgggggcccacgggcaaggacagagacaggcctctacttgctaaggctgggccctggctgacagccagccagggaacagggacttcagtcctatagccacagaaaccagatcccaccaaccacctgcgcggactcagaaggcaactcacttgcagagcctccggaagggacacccacccagcaggcactgggccccctccagccaccctcaggcatgcggggctgcagccagagaggggcacagggtcgggcttgggcctgtcagaccctcccctccacagtctgagtgacctggccagtggcaggatggaggcctgagaggtggcgccgttcacggaactgggagggccatgggaccggctggggcgctggctgacggtgacgggcgtgtgtgtgagaacctgaatggatgagggtgggtgggtgggtggtggggtggaggcagctccctccccgtttactggggtgtgacttgagcacctcgcaagcacaggcagtgcctcagccgcttactctgtgaggggccgaccgtgcccacctgcaggcccactgtgtgccgggcaccctgagccccgcgtttccagtggctccaactctcccacaggtgacccggtggatgctgctctcctctgtgtgagggaggaagcgaggggactgtcatggcccacgagcctgttcgcctccacaagcggctcccaaccccaggctcct

SEQ ID NO: 101456 - DNA, 273 bp, Homo sapiens
  chr22:43166964-43167237
  hypo
gaggtgatttcctaatgctgcattttaagagagaatttgttcctgggaaaggctgtgtgtgtaagacgaacctctgtctcccactcctctctctttgctgacccgattcctcttggcgcagaggttcagaaacatcccctggccctcactggcttcatctcaagaacagaagtacaataagtaccttttccgcaccactgcctgagccctcagtccagccttcaccggtttccacctggtccttggattgtcgttatcacctttttctttttt

SEQ ID NO: 101457 - DNA, 30 bp, Homo sapiens; identical to SEQ ID NO: 34453
  chr22:43197156-43197186
  hypo

SEQ ID NO: 101458 - DNA, 30 bp, Homo sapiens; identical to SEQ ID NO: 34454
  chr22:43197564-43197594
  hypo

SEQ ID NO: 101459 - DNA, 23 bp, Homo sapiens
  chr22:43241247-43241270
  hypo
acattaaaaacaagctttagccg

SEQ ID NO: 101460 - DNA, 30 bp, Homo sapiens
  chr22:43246950-43246980
  hypo
tggggaagacagacgcgcaaattcaaacgc

SEQ ID NO: 101461 - DNA, 138 bp, Homo sapiens; identical to SEQ ID NO: 34455
  chr22:43253986-43254124
  hypo

SEQ ID NO: 101462 - DNA, 30 bp, Homo sapiens; identical to SEQ ID NO: 34456
  chr22:43266213-43266243
  hypo

SEQ ID NO: 101463 - DNA, 52 bp, Homo sapiens; identical to SEQ ID NO: 34457
  chr22:43273689-43273741
  hypo

SEQ ID NO: 101464 - DNA, 137 bp, Homo sapiens
  chr22:43298925-43299062
  hypo
tcagttctcaatcctgcgagtcacacgagctctctccatggtagctaaaaggaatcaactcttagcacgtcatcagccagtaacttcatggccggcagaagagcaactcccggcgcttctgccgcattcctgagaga

SEQ ID NO: 101465 - DNA, 176 bp, Homo sapiens
  chr22:43351233-43351409
  hypo
cacagtgcctgatgtgaactgcgtggacaagagaccaagaaggtaaactgaatgaatgaatgaatgaatgaacaaacaaacgaacgaacgaacgaaaaaacaaatcaactgatccagccagccagcatccaggtgaactgtccctccaggcagtgatctaacggatggctggaaat

SEQ ID NO: 101466 - DNA, 164 bp, Homo sapiens
  chr22:43390390-43390554
  hypo
gcacacacatgaatccagagccgtgtcctgcgccacaaagaccctcgggcgtgcttatggggacaccccagcctgcacacccaagctctgtccacacataccctgcccatggccaccattcagccacctttggctggaggcacgtgcacacagtgcacagccta

SEQ ID NO: 101467 - DNA, 93 bp, Homo sapiens
  chr22:43402809-43402902
  hypo
aaattccgtctcaaaaaagaaaaaagaaagagaagcagaacccacacagctactgcattctcaaccaaacacgtaaatgcaggttaagagaat

SEQ ID NO: 101468 - DNA, 22 bp, Homo sapiens
  chr22:43415870-43415892
  hypo
tttttttttttttttttgagac

SEQ ID NO: 101469 - DNA, 219 bp, Homo sapiens
  chr22:43434408-43434627
  hypo
cactcctgtaagtcaccgggctaccgggagactgcatgggaacaaccacgctcgcgcagcctgtcccgcagccatcgctcctcccacagctcctggctgcccacggcgcttccctgtagcaaacccagctgctgacgtcataaaaggcacacagccggacctgtctgtgctcatctagttccatttacaacagactcatccacaaaaccgaagtggtag

SEQ ID NO: 101470 - DNA, 35 bp, Homo sapiens
  chr22:43437049-43437084
  hypo
cattatcctcccaactcgggcggcagcaccaggac

SEQ ID NO: 101471 - DNA, 268 bp, Homo sapiens
  chr22:43465386-43465654
  hypo
gattctgtctcaaaaaaaaaaaaaaaaaaacgccatgccaggcaattcccaaggcactcacagaaactaggatgccacactcaggcccctccttctccctcattctggagacacctgaaatgaaacaggtgccaccacaactcgcatggacatgctcacgcatcaaagccaacagtcaccacctcagcgcctcgcgccccaaagaaaaaattcagctgtttactgaaaacatgagccggtggaagacgcacaaacccagatagaggta

SEQ ID NO: 101472 - DNA, 31 bp, Homo sapiens; identical to SEQ ID NO: 34460
  chr22:43517577-43517608
  hypo

SEQ ID NO: 101473 - DNA, 324 bp, Homo sapiens
  chr22:43524642-43524966
  hypo
gagatccctgaccctgacttgcgctgcggccagtgggggctgtcagagccgctccttggggcgccacagtccccaccactccgtatcatcatctgtgtcacctgtgtccacatctgcctgatcccatgggcttttgggtttgagatgcctggttctgagtgcacaaaccagtgcatggtcctgggtctccctctggtccgagagccttcacctggcaggcaggactcccgtctcctggccagggcaggggcctccctgagcagccttcctggtagcctggtcccatggtgtccactcggcaccgcccaccacaagggcagctga

SEQ ID NO: 101474 - DNA, 20 bp, Homo sapiens
  chr22:43526639-43526659
  hypo
tttttgtttttgagatggag

SEQ ID NO: 101475 - DNA, 245 bp, Homo sapiens; identical to SEQ ID NO: 34461
  chr22:43529306-43529551
  hypo

SEQ ID NO: 101476 - DNA, 31 bp, Homo sapiens; identical to SEQ ID NO: 34462
  chr22:43537480-43537511
  hypo

SEQ ID NO: 101477 - DNA, 227 bp, Homo sapiens
  chr22:43555230-43555457
  hypo
cagctgcagcagccatggccccgccctgggtgcccgccatgggcttcacgctggcgcccagcctggggtgcttcgtgggctcccgctttgtccacggcgagggtctccgctggtacgccggcctgcagaagccctcgtggcacccgccccactgggtgctgggccctgtctggggcacgctctactcagccatggggtaggtgggcgtgcactggcctggggataag

SEQ ID NO: 101478 - DNA, 144 bp, Homo sapiens
  chr22:43559029-43559173
  hypo
agcaggtgccatcacgcttgtgatgtggtggccgtcacgctttcatgaccactgggcctgctagtctgtcagggccttggcccaggggtcagcagagcttcagaggtggccccacctgagcccccacccgggagcagtgtcctg

SEQ ID NO: 101479 - DNA, 203 bp, Homo sapiens; identical to SEQ ID NO: 34463
  chr22:43566411-43566614
  hypo

SEQ ID NO: 101480 - DNA, 329 bp, Homo sapiens
  chr22:43567651-43567980
  hypo
cagcctggctcatgatggcagcgctaacaatcgccttccatagcaggaactcaggaggcggctcctgggactggcctgtgtgccagtcctcctaggaggcagtgtgggcggggtggggtcgggtgtgccctggcctctgtgtgaacctgctctgcacctccctcaggccctacctgcttcagcaccacatccgggtcatagttcatgaccgtgaagtgcttctcgtagtcatccaggtcgttgagtgcaaaggccctggaagacaagtgtgcagacacatatgggttcttgagcggccttgtccctgcgagggaggtgccacccactca

SEQ ID NO: 101481 - DNA, 386 bp, Homo sapiens
  chr22:43570047-43570433
  hypo
ctggagaggtcctgcggtccgtgaagacggccgtgacgttcggggcccacagctcggctcctgcaccacggtttccacagtgggtgctcatggaggagcaggcggacacagacgctgggccggggaaaagggccatggagcacaccgatgccgtgtctgggacttaccacctttcccgctgctggaagtagctgacaaactggggcagctcagtgcgcaggttgaaggttcggggcagccagggtgggccctcggggccacctgcccggcgcgcgatggaggccaggcagtccttgacagtcagcaggttctcgcaggggaactggttcagcagcacgcctggcctctcctggctgagtttcctgcagggcggaggcaggtgcgcc

SEQ ID NO: 101482 - DNA, 30 bp, Homo sapiens; identical to SEQ ID NO: 34466
  chr22:43581408-43581438
  hypo

SEQ ID NO: 101483 - DNA, 43 bp, Homo sapiens
  chr22:43581710-43581753
  hypo
gagaacaggtctcagacgggcgagtgaccgcccgagggagggc

SEQ ID NO: 101484 - DNA, 31 bp, Homo sapiens
  chr22:43596547-43596578
  hypo
tgcgctttgctgtccacggagctcaccttgg

SEQ ID NO: 101485 - DNA, 30 bp, Homo sapiens
  chr22:43605992-43606022
  hypo
gacgggggtgcacacgcagctgaggctgcc

SEQ ID NO: 101486 - DNA, 31 bp, Homo sapiens; identical to SEQ ID NO: 34467
  chr22:43655459-43655490
  hypo

SEQ ID NO: 101487 - DNA, 31 bp, Homo sapiens
  chr22:43665129-43665160
  hypo
gaggttgggacagcgtcggggaagacgtgcc

SEQ ID NO: 101488 - DNA, 50 bp, Homo sapiens
  chr22:43689395-43689445
  hypo
gcgggacccagccctgcggtctggctgcagaacacgcgcctttggcccca

SEQ ID NO: 101489 - DNA, 31 bp, Homo sapiens
  chr22:43874752-43874783
  hypo
gacgtgatctagggagcgtgcgacactaccc

SEQ ID NO: 101490 - DNA, 410 bp, Homo sapiens
  chr22:43926570-43926980
  hypo
tctgaagcagccaggtcacaccgggccttcggcagcaggtagagggctccccgtgggaagtttctggccgctggcatttggcagctgctccctgcagaggcactgggcgcagagctgtgctcaccgtcctgaaatctgcgacgcttagcagccctgttccagcctcatcatagcttttgaacgtgcgccgcattggcctccagcagtgcacaattttgggctgaatacgcagcagagcagagtaaaaagatggcgtctccgcgccggcttctttctagacacaagacaagaaggggtgaggagggagcttttgaacacgagggttggggtgggctcctcctcgcctcgcccccgcctcgcccagccctgctccggcttcacctcccaacctgctccgctggctctgaatc

SEQ ID NO: 101491 - DNA, 30 bp, Homo sapiens
  chr22:43935642-43935672
  hypo
caagggacggtggcccgcagttgaccacag

SEQ ID NO: 101492 - DNA, 30 bp, Homo sapiens
  chr22:43936313-43936343
  hypo
gggacaggccggcctcgcaggaggtgagca

SEQ ID NO: 101493 - DNA, 49 bp, Homo sapiens
  chr22:44026050-44026099
  hypo
ttaaaaaattgagacccgtgctttgtccactttgcgtatacctgcaagg

SEQ ID NO: 101494 - DNA, 31 bp, Homo sapiens; identical to SEQ ID NO: 34470
  chr22:44232852-44232883
  hypo

SEQ ID NO: 101495 - DNA, 585 bp, Homo sapiens; identical to SEQ ID NO: 58119
  chr22:44287469-44288054
  hypo

SEQ ID NO: 101496 - DNA, 30 bp, Homo sapiens
  chr22:44300929-44300959
  hypo
ctggctcatgccggccgcctcctaccagtg

SEQ ID NO: 101497 - DNA, 43 bp, Homo sapiens
  chr22:44317773-44317816
  hypo
ctcagctctcctgaccttccccgggacttaggacctgaccctg

SEQ ID NO: 101498 - DNA, 208 bp, Homo sapiens
  chr22:44322830-44323038
  hypo
cctctcagatcttgtgcggaaggccaggagtcggaacattggcatcttccatccatccttcaacttaagcaagttcctccgacagggtctctgcaaatgcctcccggccaatgtccaccagctcatctccggcaaaataggcatctctcttaccagagtgtctgatggggaaaacgttctggtgtctgactttcggtccaaagacgaa

SEQ ID NO: 101499 - DNA, 30 bp, Homo sapiens
  chr22:44390635-44390665
  hypo
gtctggtggaacttcgcagcgctgctttga

SEQ ID NO: 101500 - DNA, 31 bp, Homo sapiens
  chr22:44402182-44402213
  hypo
tagtgcaggaatctgacgatacattagaaat

SEQ ID NO: 101501 - DNA, 142 bp, Homo sapiens; identical to SEQ ID NO: 58123
  chr22:44420301-44420443
  hypo

SEQ ID NO: 101502 - DNA, 75 bp, Homo sapiens
  chr22:44487740-44487815
  hypo
aaaatgcaaatatattaccttcgggggagtgggtaactggcatcctggggccccgctgccattgtccttatgagg

SEQ ID NO: 101503 - DNA, 187 bp, Homo sapiens
  chr22:44500127-44500314
  hypo
ctgctctcagactgcaggttgcgtctcaaagcaggctggcagacattttccactcttgatcaatcattttccaaaataagcatagacacagcaacccggagagcagcttcggtttggctgtcggtggcgtgttagttactgtagtggtggcacagaggcgatatacgttaaatattagttctcactg

SEQ ID NO: 101504 - DNA, 196 bp, Homo sapiens; identical to SEQ ID NO: 34474
  chr22:44564308-44564504
  hypo

SEQ ID NO: 101505 - DNA, 31 bp, Homo sapiens; identical to SEQ ID NO: 34475
  chr22:44601832-44601863
  hypo

SEQ ID NO: 101506 - DNA, 31 bp, Homo sapiens
  chr22:44755575-44755606
  hypo
tgagtcccagttcagccgcttcctggtgggg

SEQ ID NO: 101507 - DNA, 19 bp, Homo sapiens
  chr22:44813100-44813119
  hypo
agagcgagattccctctca

SEQ ID NO: 101508 - DNA, 30 bp, Homo sapiens
  chr22:44892379-44892409
  hypo
aaggggtcagccctcgtggtccgtcagcgt

SEQ ID NO: 101509 - DNA, 447 bp, Homo sapiens
  chr22:44892864-44893311
  hypo
ttcctgatttgggcgcgccgcgcatgccggagcggagacttgtaggttctccgcaactctgccaggaacccctgatagttgttgcgcaaggggctgtcaggttgcatgtgggggatagcccacttctccgcctccccagtcagtcgagacacaaggaaggccacacgctcggcctcacccgggaagcgggaggcctggaagatcatgaatctgtccatctgcatcaggaaccccgccaaccggcctgggtccccggaaaagggctcgggcagagaggttggaggtgtggtcatgggtcgagtcccgtttgaagtaattgaggagatgggcggggtgatctgcagagcccccgggatccgcgccctggtgcgtaacaaggtcagctctgccatcacgctctccagcatgttggtgagattggccttctccgcccgcagggtggaagcc

SEQ ID NO: 101510 - DNA, 22 bp, Homo sapiens
  chr22:44945916-44945938
  hypo
tttttttttgagaaggagtatc

SEQ ID NO: 101511 - DNA, 244 bp, Homo sapiens; identical to SEQ ID NO: 58127
  chr22:45016264-45016508
  hypo

SEQ ID NO: 101512 - DNA, 40 bp, Homo sapiens; identical to SEQ ID NO: 58128
  chr22:45064196-45064236
  hypo

SEQ ID NO: 101513 - DNA, 30 bp, Homo sapiens; identical to SEQ ID NO: 58129
  chr22:45065037-45065067
  hypo

SEQ ID NO: 101514 - DNA, 31 bp, Homo sapiens
  chr22:45069631-45069662
  hypo
gggagaagatcctgagcgtggctttggcttt

SEQ ID NO: 101515 - DNA, 339 bp, Homo sapiens
  chr22:45074486-45074825
  hypo
gccctgcctgctagttctttaagccgctgctggaaggcatccttctctagaaagtcttcctggctgcctcctgttcaccgcaggccaggcggacccacggccccctcagtgccatctcaccctgggctctgctcatgcctttgggccagcgcttgtcatacagagcttctctgccctgttcccaggtctccccgacagcctggggctgctctgtgtgattcatctctgggtcccagggctcagctgggggctggcacagagtgggaccccagcagcattcgatgaattgagagcacgagtgagcgacagacatcagggcacctgcgttaggggacagga

SEQ ID NO: 101516 - DNA, 80 bp, Homo sapiens
  chr22:45075725-45075805
  hypo
gcccggaaaagatgccggcgcagcctgagggcttgtacaggtgccactgtgccgaagggtggctacgagggaggcaggtg

SEQ ID NO: 101517 - DNA, 177 bp, Homo sapiens
  chr22:45088596-45088773
  hypo
atacaggttgggagtgcagcccgggagtccgtcccgctctgccgcctgccctgaggagcctcagtctgcaggtctgcagagcggggatgttccccgggcctgcctggcagggcggctgcaaacacgaaggttcggaagtgcacgagctctcagcacggggccaggcacagctgggtg

SEQ ID NO: 101518 - DNA, 1107 bp, Homo sapiens; identical to SEQ ID NO: 58130
  chr22:45097904-45099011
  hypo

SEQ ID NO: 101519 - DNA, 33 bp, Homo sapiens
  chr22:45113076-45113109
  hypo
ttttttttttttgagacgtagtttcactgttgt

SEQ ID NO: 101520 - DNA, 33 bp, Homo sapiens; identical to SEQ ID NO: 34478
  chr22:45113348-45113381
  hypo

SEQ ID NO: 101521 - DNA, 31 bp, Homo sapiens; identical to SEQ ID NO: 34479
  chr22:45116348-45116379
  hypo

SEQ ID NO: 101522 - DNA, 154 bp, Homo sapiens
  chr22:45120620-45120774
  hypo
cctgtaataaaaggggaaccccggtgaatgcctgcggctgggttggtgaagactgaatgagcttctctggaataaagagtaaacacttgggaagaagctctgcaggcggagagaggaggagcccgtggcatccgggatttggacaggtggaagg

SEQ ID NO: 101523 - DNA, 38 bp, Homo sapiens
  chr22:45121860-45121898
  hypo
tattggtggcataacacggcctgcggacttttgtctgg

SEQ ID NO: 101524 - DNA, 164 bp, Homo sapiens
  chr22:45122234-45122398
  hypo
tgaccacctcctgtctcgtgacaacccggggttgggtcagttaccctcctggatgaactgatgctcaggccctgcagcaggtggactgtgggacctcagtgagtctcctccccctttaagccttggctgctcactggtggatggactctcgggggccctgctgg

SEQ ID NO: 101525 - DNA, 281 bp, Homo sapiens; identical to SEQ ID NO: 34481
  chr22:45123030-45123311
  hypo

SEQ ID NO: 101526 - DNA, 130 bp, Homo sapiens
  chr22:45123856-45123986
  hypo
cgcccctcgcttgatgcggcacattctggcggtgcctgtacctcccaccagatctggcctaggggagccggggctctcggagaagggagttttgtgtggcttgaaaggagctctgcgtgggacagccagg

SEQ ID NO: 101527 - DNA, 20 bp, Homo sapiens
  chr22:45128568-45128588
  hypo
cacatacttgtgcacacgca

SEQ ID NO: 101528 - DNA, 19 bp, Homo sapiens
  chr22:45128887-45128906
  hypo
cacacgtgcacatgcacat

SEQ ID NO: 101529 - DNA, 43 bp, Homo sapiens
  chr22:45175292-45175335
  hypo
tttgttcaacatattgcgagaccactcacgtcggtacgcgtgg

SEQ ID NO: 101530 - DNA, 31 bp, Homo sapiens; identical to SEQ ID NO: 34483
  chr22:45175810-45175841
  hypo

SEQ ID NO: 101531 - DNA, 200 bp, Homo sapiens
  chr22:45181175-45181375
  hypo
aagtgccacaacctggcggcttaagacaacaggtcactgtctcagttctggaggccaccagtccaaagtcaaggtgtctgcagagctgcactttcccgaaggctccaggggagggtcttttttgcatcttctggtggttcctggtgtcccttggcttgcggccgcatcacactagtctgtgactccgtcctcacacaccc

SEQ ID NO: 101532 - DNA, 30 bp, Homo sapiens
  chr22:45182002-45182032
  hypo
tggctgaggtaggtcgcatagtgggtgctc

SEQ ID NO: 101533 - DNA, 31 bp, Homo sapiens; identical to SEQ ID NO: 34484
  chr22:45210719-45210750
  hypo

SEQ ID NO: 101534 - DNA, 86 bp, Homo sapiens
  chr22:45220425-45220511
  hypo
tagtagggcttcaatacgtatttgcctgtgttaaggaaggactgttacctgagcacagagggtcttttcttttctttcttcttctt

SEQ ID NO: 101535 - DNA, 31 bp, Homo sapiens
  chr22:45221873-45221904
  hypo
gggtctctggggttcccgccccagcttccat

SEQ ID NO: 101536 - DNA, 184 bp, Homo sapiens
  chr22:45242865-45243049
  hypo
agcaggtgaaggggctcgtggctgtgggagtgcgggagcgtgcggggcttcgaggaagttgggaggagaaggggaggtcaggccttgcaagtcccaagaagacttgcacctccagatgcctgcgccacagtcctaggtcctggtgttccggggcacccccatcatgcaccgcaggccccccaag

SEQ ID NO: 101537 - DNA, 225 bp, Homo sapiens; identical to SEQ ID NO: 34486
  chr22:45277447-45277672
  hypo

SEQ ID NO: 101538 - DNA, 78 bp, Homo sapiens
  chr22:45392667-45392745
  hypo
acacacatgcatacatgcagacgcacataagcatacacagaggtgggcacacacgaacacatgcacacacacacatgc

SEQ ID NO: 101539 - DNA, 138 bp, Homo sapiens
  chr22:45392804-45392942
  hypo
cacacacgcgcacatgcacatcgcttccccgttctacttttcaccagagcacctgccaccttccgacccactccacgtcacgcattatgtttctcatcgattacctgtctcccccccgagtctctgagcaccacaagg

SEQ ID NO: 101540 - DNA, 31 bp, Homo sapiens
  chr22:45395493-45395524
  hypo
atctgaccgtgtgccccggagtaacagtcca

SEQ ID NO: 101541 - DNA, 2110 bp, Homo sapiens; identical to SEQ ID NO: 58133
  chr22:45402900-45405010
  hypo

SEQ ID NO: 101542 - DNA, 385 bp, Homo sapiens; identical to SEQ ID NO: 58134
  chr22:45405046-45405431
  hypo

SEQ ID NO: 101543 - DNA, 482 bp, Homo sapiens; identical to SEQ ID NO: 58135
  chr22:45405476-45405958
  hypo

SEQ ID NO: 101544 - DNA, 521 bp, Homo sapiens; identical to SEQ ID NO: 58136
  chr22:45406039-45406560
  hypo

SEQ ID NO: 101545 - DNA, 148 bp, Homo sapiens; identical to SEQ ID NO: 34490
  chr22:45591072-45591220
  hypo

SEQ ID NO: 101546 - DNA, 547 bp, Homo sapiens
  chr22:45593440-45593987
  hypo
gaggggacagcaggtgcgccagaaaggtgaacaaagggaggacttcagctctgggaaagctacggctccacccaaagtctgagacaaagaggccaagagccctgcaaagaaacccaaccaaccgacaggacagggcgggatgactccgggtggctcacaagtaccaaggccctggaggcagagctggctgtgagaaggtgcggctgcttccccacatccgccagcattacctgttaaaatccgatgcagcggcaacgtgacgtaggttaagtgtgcatagagaaggaagtttccatctgctctgttcagcttcagccaggacccgaccagggaccgtcctgtgcccgacagggaccgagaccgcaggttggttgcattgtgcagatcggctggaggaaagaaggccaggtcaaggcccccacagcatgggacgcggcgggagcagcaggaggccagctcccagtccaggctgaggccaaactctgctgaggccaggacgctccttaccaacacccccacaccagcacccacacgctccagagctgct

SEQ ID NO: 101547 - DNA, 356 bp, Homo sapiens; identical to SEQ ID NO: 34492
  chr22:45594220-45594576
  hypo

SEQ ID NO: 101548 - DNA, 86 bp, Homo sapiens; identical to SEQ ID NO: 34493
  chr22:45594815-45594901
  hypo

SEQ ID NO: 101549 - DNA, 160 bp, Homo sapiens
  chr22:45595257-45595417
  hypo
ggctgcacgaggtggcgactgtgtcaccaaagagcacgtggttctgggaggctgcacagagccaggagggccaggcctcaccctgagggcgagctggcccaaggcagcgcaagggagggaagccctcctctctcccgccacaccccgtgtgtgcggagcc

SEQ ID NO: 101550 - DNA, 30 bp, Homo sapiens
  chr22:45598871-45598901
  hypo
cgctcgtgcatgggcgaagctgggctggag

SEQ ID NO: 101551 - DNA, 515 bp, Homo sapiens
  chr22:45603948-45604463
  hypo
catcagaaaggtgtccgtgtgcgcaccaaagccaggcccaagaggacactgggagctgcccggtacccactgacaggagggtggccaggccgccatggtacactctgcaggcattacacagcagtgagaccagattacaaccacctgtgtcaacaggcatgactcacaaacatgacatgcggagaaagaagcctgaaacaacatatactgcccgattccaatgtatgagctgtgagaacaggcagaaccaccgactccacacacatgagctgtgagaacaggcagaaccaccgactccacatgcacgagctgtaagaacaggtagaacccgccaactccacacacacgagctgtgagaacaggcagaacccaactccacacgcaggagctgtgagaacaggcagaaccaccgactccacacgcacgagctgtaagaacaggcagaacccaccgactccacatgcaggagctgtgagaacaggcagaacccgcccgggaagtttgaggagacagag

SEQ ID NO: 101552 - DNA, 30 bp, Homo sapiens; identical to SEQ ID NO: 34495
  chr22:45607262-45607292
  hypo

SEQ ID NO: 101553 - DNA, 361 bp, Homo sapiens
  chr22:45607750-45608111
  hypo
taggaaagcccacatgtacaccgagagcagacaccacagggatgcttggggcacagacgcaggggcaggggccgggggtcactcaccttcctcccgtctgcaccgctttcgctgccggagtacgccagcttccggcgcacatagaaaagcatgtcgtcctgccggggagcccatttctccatgaagtaggtggagaacatccaagtccagaagacgatgcggtcatccttgaagcaccctgcagagggaggccagacaggagtgaggaaggacggccaccctggcccttgcagcatggccttggccaagctgcgcccatacccccacatttctggccagaaatttgcgagggctctgagat

SEQ ID NO: 101554 - DNA, 88 bp, Homo sapiens
  chr22:45613815-45613903
  hypo
agggactagcaggggagagggcgcgtgggaagtgagcactaagcctgggccgtccacaccccagtgcggtgtctgccacctctgaatt

SEQ ID NO: 101555 - DNA, 30 bp, Homo sapiens
  chr22:45639340-45639370
  hypo
tggtcaggctggtctcgaactcctgacctc

SEQ ID NO: 101556 - DNA, 121 bp, Homo sapiens
  chr22:45653544-45653665
  hypo
gtgtttgggtcatgggggcggacaactcatgaatggcatgtgtcctcatcatggtaataagtggcaatgagttcacacaagatctggttgtttaaaagcgtgtggcatgctgggcgtggtg

SEQ ID NO: 101557 - DNA, 31 bp, Homo sapiens
  chr22:45695618-45695649
  hypo
ggcaagctttctgatacgccaagcaatgaat

SEQ ID NO: 101558 - DNA, 31 bp, Homo sapiens; identical to SEQ ID NO: 34498
  chr22:45734833-45734864
  hypo

SEQ ID NO: 101559 - DNA, 30 bp, Homo sapiens
  chr22:45741345-45741375
  hypo
atagatgccgatcagcgcgtcggctctgga

SEQ ID NO: 101560 - DNA, 618 bp, Homo sapiens
  chr22:45808542-45809160
  hypo
acacccagctaattttggtattattagtagagacctccgcaggtcctctggcctctccagacctcagtttccccaactataaaatggggagagcagccatgcgccatggctaaccaaagacggtgtcgccaggaacttaggaaaagctcagtaaactgggtcatcatcactacattcctgggtcaaagctcccttggatccaaatggtggttctggctgcttggaacccattacctcctcgacagctccctctcacttcaacttcggatgagaagggaaaagggacgcgagtgaccagggccaagggccagagcagtccccgaagcaggagtgagggcagagaacagggcccatggcgggaccggggcggagaggaagcgtcaggacccccagggtggggggcgagggttgggagcccctgagatgaagggcgagggccggagctgaggtggggtggggtccctcagggtgtcggaggagggtcgggagccaggaggtggagggcgagagcggggcccgaggcggggccgagtggaagggtcaggacctccgaggtggggcggagggacaagggtcgggacccctgaggtggacggcgaggaccggggctgaggtggg

SEQ ID NO: 101561 - DNA, 30 bp, Homo sapiens
  chr22:45814462-45814492
  hypo
accgggtaacgaagacgacaacatccctgc

SEQ ID NO: 101562 - DNA, 438 bp, Homo sapiens
  chr22:45821510-45821948
  hypo
ggcccacgcggggtgtcggcctaatccaaggagggagttccctgccttggtaagttggtgcaagacccggagctcttatgcatacacccaacaggtggtgatcccccgagtccagcccacccgcccagcagtgcgcaggcagccaggggttcaaggacccacccacatccgtgcctgacaagtctcccctccacccgactcctgctgcccttagcatatcctcccctcgagggcccccagtgagatttgctggcctgggtgtcagaatgcccctggggtcactcggaccatcttctttaatgtcttcacctgcttaggccatcgagtcagtggaaaggaaaaagcaagagaaaaagcaagaacaagaggacaacttggccgagatcaccaacctcctgcgtggggacctgctctccgagaacccgcagcaggcagcca

SEQ ID NO: 101563 - DNA, 150 bp, Homo sapiens; identical to SEQ ID NO: 34501
  chr22:45822397-45822547
  hypo

SEQ ID NO: 101564 - DNA, 73 bp, Homo sapiens; identical to SEQ ID NO: 34502
  chr22:45826805-45826878
  hypo

SEQ ID NO: 101565 - DNA, 31 bp, Homo sapiens; identical to SEQ ID NO: 34503
  chr22:45882359-45882390
  hypo

SEQ ID NO: 101566 - DNA, 18 bp, Homo sapiens
  chr22:45901939-45901957
  hypo
tgccggctggcagccctg

SEQ ID NO: 101567 - DNA, 47 bp, Homo sapiens
  chr22:45914454-45914501
  hypo
gctgtcgtcaagacagaaggacgtgcgtgtcctggtggtgcatctgg

SEQ ID NO: 101568 - DNA, 182 bp, Homo sapiens; identical to SEQ ID NO: 34505
  chr22:45929577-45929759
  hypo

SEQ ID NO: 101569 - DNA, 136 bp, Homo sapiens
  chr22:45932766-45932902
  hypo
tgtgtggggtgcggccggggagctggccggcctgggttactggttctggaaagacaggaggtgagtcctgctttccccagccgttgtcaggttaactgcctggctaggccgctgcagtcagcgcttaagtcctgat

SEQ ID NO: 101570 - DNA, 89 bp, Homo sapiens
  chr22:45940275-45940364
  hypo
cttcgtgttggagttaggctttccccacccgcagagacagggagaagcaccctggccttccggatgacgacattccccaggcatgtccc

SEQ ID NO: 101571 - DNA, 31 bp, Homo sapiens; identical to SEQ ID NO: 34506
  chr22:45948181-45948212
  hypo

SEQ ID NO: 101572 - DNA, 43 bp, Homo sapiens
  chr22:45958410-45958453
  hypo
gagacacaaccaagagccctgcgtagccctggccactgtctgg

SEQ ID NO: 101573 - DNA, 30 bp, Homo sapiens
  chr22:45958777-45958807
  hypo
cacttttcttgcagccgctgtgagcgcttg

SEQ ID NO: 101574 - DNA, 428 bp, Homo sapiens
  chr22:45959025-45959453
  hypo
caccaagcctgtccccgagcccagggacttgctcctgaccgtcaagatggatctctctcgccacggcaccgtcagctcctttgtggccaagcttttcatctttgtgtctgcagagctctgagcactcgcttcgcgtcgcggggtctccctcctgttgctttcctaaccctgccctccggggcgttaataaagtcttagcaagcgtcccacacagtgagcctcgcgtgccttggttttatttggcatggttgggagtctgtgccgcttgttacccgggggtgagctgggcactggccaccgcctggtacccccgagggctgactgaggagcgctccccactagagggtgtgtgctcgggggtccctgttcacagagcccactgtctgtgccgacagggaggccaggccgggtacatcatttcacatgtg

SEQ ID NO: 101575 - DNA, 18 bp, Homo sapiens
  chr22:45969095-45969113
  hypo
ctccgtctcaaataaata

SEQ ID NO: 101576 - DNA, 31 bp, Homo sapiens
  chr22:45971082-45971113
  hypo
gcagagagccattaagcgctgattctgtgac

SEQ ID NO: 101577 - DNA, 126 bp, Homo sapiens; identical to SEQ ID NO: 34509
  chr22:45976303-45976429
  hypo

SEQ ID NO: 101578 - DNA, 360 bp, Homo sapiens
  chr22:45982907-45983267
  hypo
tgcttctcagacctgcgggtaccccacctcccagatgttgtcaatgggatgtgaggttcacgagcacgtcacggagcctctcccctcgtcatgtacgtgcgcatcatggcaaaatgtgcctggccactggttcctgacgctggaaggcacgaacccactccccacacccacagccggcgttgctgtgactgcagtgtctgtgttctaagccccacttttcacatccatccccgctgcccggccagagagacgtcctcagcccagagccccacttttcacatccatccccgctgcccggccagagacacgtcctcagcccagagccccacttttcacatccatccccgctgcccggccaga

SEQ ID NO: 101579 - DNA, 31 bp, Homo sapiens
  chr22:45994947-45994978
  hypo
cacccactcccttacccgctaacccggatcc

SEQ ID NO: 101580 - DNA, 393 bp, Homo sapiens
  chr22:46009355-46009748
  hypo
cctgcccattcggaccggttctgcacttccctccattcatggagaaaggagcctcgaagggacaatgatcaccgtctccttctgagaactgtgctggctggcatcctgcagacaccgaagggccagtttctaaggacatggcctgggtgttctgtccagctggatggcaggccgtgaccccaaaatcagcagtgatgataacgaagcgagtgaagcagtatggagatggccagtgatcacaatccaagataactaaaggcaaatctgtgacaagtaaactcagtgacatgtatatgcttgccgcagtgttcagtacgcagttagcacatagccaatgccagtcgcctggcttaacctctccttttcttttggaatatgaacaatccacttcat

SEQ ID NO: 101581 - DNA, 31 bp, Homo sapiens
  chr22:46023052-46023083
  hypo
atggaggcccaggcctcgctgcactaagaag

SEQ ID NO: 101582 - DNA, 30 bp, Homo sapiens
  chr22:46037471-46037501
  hypo
catgggctgactgccgctggccctgggaag

SEQ ID NO: 101583 - DNA, 88 bp, Homo sapiens
  chr22:46040671-46040759
  hypo
acctcagaactctcaagcaggacttctcaacctcagcactgttgacttttgggtgggacaattctttgttgtgcgtgtggcgggatgg

SEQ ID NO: 101584 - DNA, 51 bp, Homo sapiens
  chr22:46042934-46042985
  hypo
cacttaccagccactgtcctatgccctctcgttgaatgctcacaatgaccc

SEQ ID NO: 101585 - DNA, 160 bp, Homo sapiens
  chr22:46051558-46051718
  hypo
cctaggcgacacagtgagactctgtcttaaaaaaaaaaaaaagttccagttactctaatcctcggtgacactcataaactttattttttctaattggtgtgtattgatagcttattgatttcctatttgaattaactttgcatttcggtcaaacccatat

SEQ ID NO: 101586 - DNA, 120 bp, Homo sapiens
  chr22:46082800-46082920
  hypo
gaagattggcgaaatcgggggttttcaggaatccatggtttacaacctggggagagcatatgacagtgatcacagctccacattattttttctttatactgcaaacgcgaattattgtgt

SEQ ID NO: 101587 - DNA, 30 bp, Homo sapiens
  chr22:46083305-46083335
  hypo
catataagaggcagacggcaaaggatcagg

SEQ ID NO: 101588 - DNA, 495 bp, Homo sapiens
  chr22:46255143-46255638
  hypo
cagcaggacagcggccgtttgctcagcatcttctaagagcaaggcaccttatagaaagcactggatggaatccgcccctcaattcgggtttgctggagaagatgtagaccttggtgctcagagacgctgaatcgctgggctcacccaggcgggtgcggagccccagtctgccccttccactcggccaggctgcctcccgcctctgccctgcagtgccagctttgtgttgcccaattcatctgcagccactagaggtatcttccttgagaatctcctgttggaggctcccgctgccctcaggacatggcccagactccttagagaggcacatgaggtgcgtcccgagccctcctccagccctccctctctggcaggtgaccatgcagcagccgcaaagcacttggcggtctcttctggctcgaggctgacgcccacgcgagcccccacctagaacctccccaacctgtgtccaccgggtgtgcccccagaaatctt

SEQ ID NO: 101589 - DNA, 489 bp, Homo sapiens
  chr22:46261683-46262172
  hypo
tccatgactgtgaaatggagccgacacctctgcagcttcgaccacacagggcttgtggcttggcatggccgcagacgcactgccaggccggcagccttcgccaagaactggattcctcccggcctggcccggctcggctggcattctcgccagtttcattgggttgagttccagagcgatggcagcgattgataatgctgtaattggagtgacttgggtattttctgaggtgttgccacgatgactcatactagggcaagttgagggcccgcactgtccagccggagtcggttagagaccctcaggaggctcacaggctccagggcctggatgttaggatgtgaggcctggggttaccgagatcccacacccaggagatgctcgcgtggagccttcgctcacagcggcctgcgcgaatggggcttgctccgagaggttcagctggcaccgagagctggcaccgagagcgtttccagctgcaatctgttc

SEQ ID NO: 101590 - DNA, 162 bp, Homo sapiens
  chr22:46278022-46278184
  hypo
accgacatcgttgaggatgggaggttgaaccccagtggacagtcacttccaccctggctcttacggctgcacgagccaggctgagaattctgcaggtgccgttgtctgtggtctgactgtgacctgaacctggcggctggcaagctccgtgtgtctctgagg

SEQ ID NO: 101591 - DNA, 203 bp, Homo sapiens
  chr22:46278407-46278610
  hypo
cggtgatccccctgccgacaagcgcccatgtgtgtaaagtggggtaatggaggtggctcagggagcactgaccgtgaaacaggcgaagtggccactgcctgagcgttccacattgttccagcgccagcctgacgggcatttgtgggcattgggcggagcacctatgacatcgacagaaccccagcgcccgccccagaggacag

SEQ ID NO: 101592 - DNA, 30 bp, Homo sapiens; identical to SEQ ID NO: 34513
  chr22:46283127-46283157
  hypo

SEQ ID NO: 101593 - DNA, 30 bp, Homo sapiens
  chr22:46284445-46284475
  hypo
tagaatggctgcagcggccctcacaggccc

SEQ ID NO: 101594 - DNA, 182 bp, Homo sapiens
  chr22:46312228-46312410
  hypo
agatggggatggtgtgcgcaggtccagccggcaagtggccccagctgtggcttctttggccccagcagctcagatggggatggtgtgcgcaggtccagccggcaagtggccccagctgtggcttctttggccccagccgctctgacgagggcttccagggctgcagacgccacagggacctc

SEQ ID NO: 101595 - DNA, 144 bp, Homo sapiens
  chr22:46318750-46318894
  hypo
gacctcggtgcgctcgctgcaggtgttgcacttgacgaagcagcaccagtggaatttgcagttgcactgccacaccttggtgtactggtgggtgttgtagcctcggccgcagcacatggtgtcacagccgtccgcgccgggcga

SEQ ID NO: 101596 - DNA, 31 bp, Homo sapiens
  chr22:46396013-46396044
  hypo
tgcttcccttccatggcggactggggatggc

SEQ ID NO: 101597 - DNA, 31 bp, Homo sapiens
  chr22:46399902-46399933
  hypo
agcatggaagaggctgcgaagaacagctggt

SEQ ID NO: 101598 - DNA, 121 bp, Homo sapiens; identical to SEQ ID NO: 34515
  chr22:46437982-46438103
  hypo

SEQ ID NO: 101599 - DNA, 37 bp, Homo sapiens
  chr22:46455648-46455685
  hypo
aataatggaacattgtgtcaccgttaaaacggtggtg

SEQ ID NO: 101600 - DNA, 96 bp, Homo sapiens
  chr22:46455924-46456020
  hypo
aactccatctcaataaataaataaataataataaaatggtattgacaaaaagtttggaatggtatgggtgtgtacgggatacaacaccttcctaca

SEQ ID NO: 101601 - DNA, 31 bp, Homo sapiens; identical to SEQ ID NO: 13508
  chr22:46466169-46466200
  hypo

SEQ ID NO: 101602 - DNA, 75 bp, Homo sapiens
  chr22:46498575-46498650
  hypo
acagaaggacctcctagtgcccgtgcgccggcaggtaaacctctttgggtccccgttccctcatccctgaaacat

SEQ ID NO: 101603 - DNA, 30 bp, Homo sapiens
  chr22:46501311-46501341
  hypo
agcatggggtggtgccgggtggaccccacg

SEQ ID NO: 101604 - DNA, 30 bp, Homo sapiens
  chr22:46509600-46509630
  hypo
gtgatgttgcccctcggaagataactatac

SEQ ID NO: 101605 - DNA, 31 bp, Homo sapiens; identical to SEQ ID NO: 34518
  chr22:46521304-46521335
  hypo

SEQ ID NO: 101606 - DNA, 30 bp, Homo sapiens; identical to SEQ ID NO: 34519
  chr22:46521912-46521942
  hypo

SEQ ID NO: 101607 - DNA, 133 bp, Homo sapiens
  chr22:46555873-46556006
  hypo
gtagtgtagggacagagattccgatcacaagctgtgactggaagacgccgaccaccactgcagcagcctgaaaaccacagtcttgaaccgccagcgaagggctgggaagtgcggatccagggctggtgcactg

SEQ ID NO: 101608 - DNA, 160 bp, Homo sapiens
  chr22:46582356-46582516
  hypo
gcgtgggctgggggccgagggagcaaggattcccagtaacgagggaggaaggagcagcaccatgtgcccattactctatagacatctcgaaccacctggccatgtagctgtcattaacctaaatttacagttattgaaactgaggttcagccaggcgtag

SEQ ID NO: 101609 - DNA, 44 bp, Homo sapiens; identical to SEQ ID NO: 34520
  chr22:46585894-46585938
  hypo

SEQ ID NO: 101610 - DNA, 31 bp, Homo sapiens; identical to SEQ ID NO: 34521
  chr22:46598486-46598517
  hypo

SEQ ID NO: 101611 - DNA, 218 bp, Homo sapiens
  chr22:46599514-46599732
  hypo
tattgggcgaaaaggaaaaaagaaaaaaactctcagcaaagctagaggggatcctgccaatgagttcccagctcacagactgattagcaggccaccacacatgagctggaggccaggctcctcccgctgcgcaaggtgagaacttcccgtggctccaccccattctcccaatgcccaggtgggtccccgtcccttgcgggcctgtccagacaagggaa

SEQ ID NO: 101612 - DNA, 30 bp, Homo sapiens
  chr22:46610687-46610717
  hypo
ggagatgctcagatcgaagatgtgggaatg

SEQ ID NO: 101613 - DNA, 112 bp, Homo sapiens; identical to SEQ ID NO: 58168
  chr22:46658171-46658283
  hypo

SEQ ID NO: 101614 - DNA, 95 bp, Homo sapiens; identical to SEQ ID NO: 34522
  chr22:46678246-46678341
  hypo

SEQ ID NO: 101615 - DNA, 635 bp, Homo sapiens
  chr22:46704065-46704700
  hypo
tgaaaaatttgacttcgatctttcattgtcttcttcgaggtaaacaaatgagttttcttcccttgccttgggcataaccacattcagtaaagtctttcctttaaatgccagtgttatgagttattaatcattctttttttaaacaaatagtgcaaatgaagatgatgaagtcttcttcggaccctttggacataaagaaagatgtattgctgccagcttggaattaaataatccggttcccgaacagcctccgttgcccacatctgagagtccctttgcctggagccctctggccggggagaagttcgtggaggtgtacaaagaagctcacttactggctttacacattgagagcagcagccggaaccaggcagcccaagctgccaagcctgaagaccctcggagccagggcgtggaaagattcatacaggagtcaaaattaaaaataaacctctttgagaaagaaaaggaaatgaagaaaagccccacgtctcttaaaagggagacatactacctgtcagacagccccttgctggggccccctgtgggtgagcctcggctcttggcctcctccccggccctgcccagctctggtgcccaggcccgcctcacccgggcgccggggcctccgcact

SEQ ID NO: 101616 - DNA, 30 bp, Homo sapiens
  chr22:46724050-46724080
  hypo
ggcaagcccagcagcgcccgtgcagggtcc

SEQ ID NO: 101617 - DNA, 30 bp, Homo sapiens; identical to SEQ ID NO: 34523
  chr22:46727402-46727432
  hypo

SEQ ID NO: 101618 - DNA, 30 bp, Homo sapiens
  chr22:46727673-46727703
  hypo
cgtgggaatcacggcggctccacgtctccg

SEQ ID NO: 101619 - DNA, 204 bp, Homo sapiens
  chr22:46745136-46745340
  hypo
gccaagtaagggagggggactcgggaggctgggcagcctccagccccaccgcctccacctgcatcactttgggcgagtcatatgtgatgaactgggccggctccagtctcccctctgtaacgtggggagaattctccctctcacggctaacgtgggaatcggcagatggaaaacactagctacgcagagtgtgtactgtacacg

SEQ ID NO: 101620 - DNA, 250 bp, Homo sapiens
  chr22:46750299-46750549
  hypo
gcttgggtggaaaagcaaggacgcgggtgctgctgcatctgtgggtcaggccggggatgctgcttgccgtgttcagcacagcctcttccctgagtgacccggcctccaccttggcgcgtggagctgagaaggcccactctcagcaccctggctgccggctcatgttctggcacgaatgctggggcgccttctcttagacggaggcgggggccagcaggccccacccaccgattccaggacatctccttac

SEQ ID NO: 101621 - DNA, 43 bp, Homo sapiens
  chr22:46755415-46755458
  hypo
cccctgtcacctgggccgggggagtcgacgccctgtggcttgg

SEQ ID NO: 101622 - DNA, 445 bp, Homo sapiens
  chr22:46770691-46771136
  hypo
cccattgcggggatgcgcccggctgcggatgtgaagaaacccctccgcaggagcagcgaccctgccatatgggccccgcacacggagcccccgccagcccggggcctcggcctcgggaagcacctgggaggcggcggggaaggttggccctggctggtctgacacacgcctcggggctcgtccttcatgggccaggcctggtgctccacctaccactgctgggaagccatggaggcttctcaagggtgacctgcgaggtgggggtgcctgccttccctcttgaggtaagaggggtctggtcccaccgcttgccgtaaaaaaggaggagcagctcaggtctgcacgtggccctgagcagctcgccggaaggttccagcctggtctttttattccgtttcccttcccagggccggtccagccccacagacaccgtctccacccacga

SEQ ID NO: 101623 - DNA, 30 bp, Homo sapiens
  chr22:46777692-46777722
  hypo
aggagcctccagaacgggccctccccgtgt

SEQ ID NO: 101624 - DNA, 111 bp, Homo sapiens
  chr22:46785284-46785395
  hypo
cgtcattgccaaagagcgtgcccgtgtgctgtgtagcactgcgcagcgccctcaccagctgcagggccctggcgccgtccacctgcgtctcattgcggctcagcttctcat

SEQ ID NO: 101625 - DNA, 142 bp, Homo sapiens
  chr22:46786061-46786203
  hypo
cctctgggggagagaagtccacgtgggggtgcctggctcaggtgccaacaccccgaagtccacaggaacctgctggctccaggctgcgggcccgtggggctgtccctgcgccatcccagccgccccaacactccccagccca

SEQ ID NO: 101626 - DNA, 99 bp, Homo sapiens
  chr22:46790966-46791065
  hypo
gcattcactcacttggcgagcaagtattaaggactgtgtacaaatcagggtcataaagacaaccaggccagagatagagtctggcgtttatggatgtgt

SEQ ID NO: 101627 - DNA, 31 bp, Homo sapiens
  chr22:46794794-46794825
  hypo
gcaactgtcccgcctccgtcaagggcacaac

SEQ ID NO: 101628 - DNA, 20 bp, Homo sapiens
  chr22:46797737-46797757
  hypo
ctttgggagaccaaggcggg

SEQ ID NO: 101629 - DNA, 246 bp, Homo sapiens
  chr22:46804735-46804981
  hypo
gatattccccttccccctcttcggagaaccccaggggcgggcgccggaggaagggcgagtagcaggtgcccgagtgtgcaccaggaagcccagcgcctgggtccctccctcgggcacccacctagcaggtgccttggtggcacggggccccagtcacctggaggcgaaagctggtgggcccaccactggtggcctccatcagaacgctgtcctccttccgggtccggaacatgagccccaggtacc

SEQ ID NO: 101630 - DNA, 408 bp, Homo sapiens
  chr22:46805658-46806066
  hypo
acagttcttcccgccgaatcggagtggacactcacacagatacatattccacctgttgacacaggtgcctccattctgacaccgcctcccatcgcagaagttcctccgagcagcgcagcctggcaacacagagcgtgcggcagagcctgactcggaggaaccgcccggggtccccggcgccagacgtggcgtgggaaaccaggacggaatggacccggggctggacagaagtcagaccaggtctgaacgcccctggcaacggcaggaacatgggaactaagaaggtgctgaacgcactgaccacatttggagacgctgggacgccaggccatcacggcagccggcccggtcacctggtgacacatatgcaagaccctaggatcatgtgcgcctcgggttagctggctg

SEQ ID NO: 101631 - DNA, 31 bp, Homo sapiens
  chr22:46807447-46807478
  hypo
agcatgtttgggggtacggacccccagggcc

SEQ ID NO: 101632 - DNA, 605 bp, Homo sapiens
  chr22:46812242-46812847
  hypo
gtactgcgcagcagccggccaggcccagaggaccccccccaacccctgcaccaacaccccttgcaggaaaggcaattcccaggcctcgcttccaggacataaagctcagtagctggacctggtcactcaggccgagcaaggcaggcagcgcacacagtgactggagacagcaggggctgcccacggtacctctacacccctcggcgggcaaccctggccagcacaggctccctggggcaggcggaaacagagccagcaaggaaaagccacatgctcactcctgcagccacctgagaaaaaacctacagtgccgctgagcactgcaaggagtggcccagaagcgctaagctgtgcagatccggaatcctgctccaggagtcatccccggggtccagcctcttcttattttccttcgaggtattttcttccctgcgtgcaggccctcctccttggcttccactcagccgctctacgcagtgctgggagtttctgtgtgcgcacaaaagcatttggtccttacgaagtgctcacatttctccagccttttaacctgctgcagacgattctgcattgggaggccggtgggggtacggtttcaatgctgg

SEQ ID NO: 101633 - DNA, 191 bp, Homo sapiens
  chr22:46813167-46813358
  hypo
ggaaagtggtgggaagggtcacgaggagcaaattcacgcagatgcacgcagccttccagaattcaaactggcctcccaggagcctcggacaggactttgccagaatgcaaacctcagaccgagctgctacttcctggtggtcccaatacccctaggcaggtaacaggaccctgttccgccaggtagccacc

SEQ ID NO: 101634 - DNA, 333 bp, Homo sapiens
  chr22:46816084-46816417
  hypo
atgtgcacacctacccacactcgtacatacccacattcacacccacatatgctcacccacactcaaatgcactcgcccacacacgtgcactcatatatgcacactcagccactcatgtgcactcacgtatgcactcacccactcgtgcactcatgtgcacatttacccacatgtgcatgctcacccactcaaatgtgcactcacccacacatttacacgtgtgcttcttcacacacgtgcacacacccacacacatgcatactcacccaggtgcactcacccactcacgtatgcactcacacgtgtgcacacgtggacacacccactcacatc

SEQ ID NO: 101635 - DNA, 271 bp, Homo sapiens; identical to SEQ ID NO: 34529
  chr22:46816770-46817041
  hypo

SEQ ID NO: 101636 - DNA, 30 bp, Homo sapiens; identical to SEQ ID NO: 34530
  chr22:46817740-46817770
  hypo

SEQ ID NO: 101637 - DNA, 197 bp, Homo sapiens; identical to SEQ ID NO: 34531
  chr22:46828034-46828231
  hypo

SEQ ID NO: 101638 - DNA, 26 bp, Homo sapiens
  chr22:46829866-46829892
  hypo
accgcgcctggccttgttccttttct

SEQ ID NO: 101639 - DNA, 87 bp, Homo sapiens
  chr22:46835120-46835207
  hypo
gccccggaaggtgacgaaggactggggcgggaagctcctggtggtcacctcacagtagggcctctcatactcgccaggaggacacac

SEQ ID NO: 101640 - DNA, 192 bp, Homo sapiens
  chr22:46838111-46838303
  hypo
cccttcccctccaggacggggctctggggtgtgggttgctgatggctcacagctgagaccctgcactcagattccgcctcccggcccagttccactgccctcgctggggcagcccccatccagcaatgggtcagggtggacacagtgaccatcagactgcccaacgcaggccatccccgaggggccatccca

SEQ ID NO: 101641 - DNA, 148 bp, Homo sapiens; identical to SEQ ID NO: 34532
  chr22:46839046-46839194
  hypo

SEQ ID NO: 101642 - DNA, 284 bp, Homo sapiens
  chr22:46850524-46850808
  hypo
cattccacacctagttcagctcgcccacctccaagctgtccgggtgggacgcgggaaaccctctgctcctgcgcttagcgttcgcaaaggtaaacacatcgcagaaacctgcctcccaccctggagtggcccgtggtcctcgcagacacgcgacaggcaggccagtgagaagcgccaacagccctggttcccaaactccttagctcctcagcgaaggagcacccacggctgaattgtgtccccagaaagatacgctcagttacgaactcccagtacccttgaaa

SEQ ID NO: 101643 - DNA, 31 bp, Homo sapiens
  chr22:46857660-46857691
  hypo
cctttccagggacccgcggccacggcttctt

SEQ ID NO: 101644 - DNA, 30 bp, Homo sapiens
  chr22:46859601-46859631
  hypo
accagtgaagtcctcgaagcactcgcaggt

SEQ ID NO: 101645 - DNA, 236 bp, Homo sapiens
  chr22:46859884-46860120
  hypo
ggcagcacgcgctgcgtggagatggtggtcagcagcgtccgattcaggtagatctgctcctgcaggtcctccgacgggaagaactggccgcggacgccgccaggcagcagcgccgagaaggtcacgttcaggatgttggagctgacgtcggtgtcgttctggacgttgaagacgaagacgtcgtccttggtggtggacagcacggcggccaccccctccacgaagagggccagcag

SEQ ID NO: 101646 - DNA, 30 bp, Homo sapiens
  chr22:46869880-46869910
  hypo
gggttgggtgtgcggcgcatgtcaggatgt

SEQ ID NO: 101647 - DNA, 26 bp, Homo sapiens
  chr22:46887825-46887851
  hypo
gtcgcgcctctctattctttttaata

SEQ ID NO: 101648 - DNA, 30 bp, Homo sapiens
  chr22:46888073-46888103
  hypo
ctccaggaatgaagccggccaacatgccag

SEQ ID NO: 101649 - DNA, 45 bp, Homo sapiens; identical to SEQ ID NO: 34534
  chr22:46888631-46888676
  hypo

SEQ ID NO: 101650 - DNA, 69 bp, Homo sapiens
  chr22:46905650-46905719
  hypo
gggaggaggggtttcacgaggggatggctgtgggggtcaacagggtagcaggtgcggcagggcagtacc

SEQ ID NO: 101651 - DNA, 488 bp, Homo sapiens
  chr22:46929237-46929725
  hypo
ccactagcctgctgaggaaggcgctgatccccggtcttgaacttgggagaaccgcaggcctgctcccaggaaaatgctgacggaagcggcgcggtgcctctccccctcgctgggcctaggccgggcgcccacccccagcatccaaccggcggcaacaaatccttgcagagttgcccgggcccggcccaattgcgccccggcatgccaggcggagcccttggcgggttcctgaggctctccaggaggcccatcaggagctactcctcccaccccgacggccactcaccagacacagacacctccatgagcgcctccagcggccggttgttgtccaggtcgcggctgagctgcagttcgcccgtggcggggtccagcagcaacaggcgcagctcgttgccctgcacgaaggtgtagttgaggctgtctgacacgtcggggtcatgggccgggatgcagccgatcacgccggtggggaaactgttggactt

SEQ ID NO: 101652 - DNA, 30 bp, Homo sapiens
  chr22:46931123-46931153
  hypo
ctcgcggtccagctcggcacacactgtgat

SEQ ID NO: 101653 - DNA, 777 bp, Homo sapiens; identical to SEQ ID NO: 34536
  chr22:46931417-46932194
  hypo

SEQ ID NO: 101654 - DNA, 373 bp, Homo sapiens
  chr22:46979972-46980345
  hypo
cgttccagtgctggccgtcgggttccctggatgcaccccttcacggtgggtggtgtgagtccttcctcactttctggccctgtgagatgctccaggctcagcttgtccattccctgcccaggcctagagtcagccccttctgcagggagcccgggttccttttgttggagggcagaatcggaaaccaagatccaggtggcgggtacgctcatcactaccggggtgtcattgcttctgggccctcttagctgacagcaaggaaatgcacgtgtgagctgacgcgcacatatgtacgtgtctctgcctgtgtccgcgtgtagcctcctgtacctgtattgagcaaagtgtgagttcgcgccgctgatgaactctg

SEQ ID NO: 101655 - DNA, 88 bp, Homo sapiens
  chr22:47004838-47004926
  hypo
gcctgtagtaccagccgccccagaggctgagttgcgaggatcactgggcagtggcacgtgcctgcagtaccacctaccccagaggctg

SEQ ID NO: 101656 - DNA, 268 bp, Homo sapiens
  chr22:47004985-47005253
  hypo
taagaccttgtctctaaaaaaaaaaacaacaacaacccgaaaagcccaaaacatttttttttgttttttcttggctcttgggttttgccccagagacatacatcgcagaccgctgagtggcgctggttgctgtctgggccggcttggcctcaggcgatcctgttgccctccgcgcaggagcctgggtccaccttctcctggctgtgtgcttccttaaacacggaaggtgttccgcagcctgctgtgcggggtagccctgtgttgggct

SEQ ID NO: 101657 - DNA, 183 bp, Homo sapiens
  chr22:47005521-47005704
  hypo
gtgtgctgggccccagggacacggcacgctgatggtcagagaggcccacgcacacactggattccgcattgtggagtgcgagtgctttggggatgtggaacagcagagcagggtctgcagagcatcccaccggggagggccgtggggccccaggcaggaggcggtgcttagggctggctcctg

SEQ ID NO: 101658 - DNA, 874 bp, Homo sapiens; identical to SEQ ID NO: 34539
  chr22:47022396-47023270
  hypo

SEQ ID NO: 101659 - DNA, 491 bp, Homo sapiens
  chr22:47023707-47024198
  hypo
ttactgctgctgctgctctctcgacactgcccgatcaggcaggtggggccgcttggcttcctggggcatcactacagaccacagagtgcccggcctgccgggatcggccatccccaggcaaaggttgtggttggtcctgggggtggaccgggaccccggtagggtgtctgcccttgtgcaggttatgtggcagaacggcaggggcctgccttcgccggagagctgtgtctcatccgcctctggctggggctggcacagagggcatgggtcacgattctccgatggtggtctgtgtgctgagcatgtggtgggtgtctcgggaacaaaaatctccctcccgacacatacatggttcaacagggaggggtgacggggattccacgcaaaggccagagcggggctgtttccccagctccctctccgccatccgtctgtcctgctccaggtgttgtctcggtagggaccctcccgcctgagggaccctgtgagta

SEQ ID NO: 101660 - DNA, 30 bp, Homo sapiens
  chr22:47050326-47050356
  hypo
ttggcagagcccggcgtgtgatgattacct

SEQ ID NO: 101661 - DNA, 30 bp, Homo sapiens
  chr22:47052955-47052985
  hypo
cacctgaacttaaccgtgaccttggccctg

SEQ ID NO: 101662 - DNA, 274 bp, Homo sapiens
  chr22:47054010-47054284
  hypo
cctgccccagcatcccagagtcggggtcgcgtggacatgagcgatggtcacctggccgttctctcccccatagaggaggagctccggaagctgcgagaagaaaccaacgcggagatgctgcggcaggagctggaccgcgagcggcagcggcggatggagctggagcagaaggtgcaggaggtgctgaaggccaggtaccgcgccttcctcggggccctggcctgtgtgcggctgccccaaccccccaccccacccgccccgccgtcctctgctg

SEQ ID NO: 101663 - DNA, 262 bp, Homo sapiens
  chr22:47054686-47054948
  hypo
ccacgctgtggcccccgcccccctgcccccatcctagcagtatcatgtcctgggcgccagtgccgccctggctcctagagaggcatgtctgcacctgacatctttgctcttgtttgtgggtcccatgtgggaccctgagtgctcacagtctcctccctcaccctgccctgcgcctcacagtgccgccagcaggaagcaggtcattcaggaccccagcgcaagttacaaagccagtgccctcctgtctcgctaacaccacgag

SEQ ID NO: 101664 - DNA, 34 bp, Homo sapiens; identical to SEQ ID NO: 34541
  chr22:47056193-47056227
  hypo

SEQ ID NO: 101665 - DNA, 30 bp, Homo sapiens
  chr22:47059064-47059094
  hypo
cgcaggtaggggttcgccgagctggggctg

SEQ ID NO: 101666 - DNA, 30 bp, Homo sapiens
  chr22:47059571-47059601
  hypo
ctgtgctgagccgccgtgcatggccattct

SEQ ID NO: 101667 - DNA, 30 bp, Homo sapiens; identical to SEQ ID NO: 34542
  chr22:47062640-47062670
  hypo

SEQ ID NO: 101668 - DNA, 30 bp, Homo sapiens
  chr22:47066419-47066449
  hypo
gccctggacagctccggggcaggccgccct

SEQ ID NO: 101669 - DNA, 90 bp, Homo sapiens
  chr22:47069563-47069653
  hypo
cagctgcagacgacctcgtcacggagctacgtacccagcgcaccggccggcctgggtaaagaggaggacgccggtcgcttccacagcacc

SEQ ID NO: 101670 - DNA, 30 bp, Homo sapiens
  chr22:47074795-47074825
  hypo
gtggctctggactgcgcggacgttggcgtc

SEQ ID NO: 101671 - DNA, 219 bp, Homo sapiens
  chr22:47075160-47075379
  hypo
gggctttaccagcgtcgggtggtttagttcgagtcccttttgtggagaaagggagatgaaaactgaccacgtgccaggtgtggccgaagcccccagggagggccacattcggggagcggggggtcgggggagggccaccgactggctctgctgccagcacaggcccctccctggaagtcctcgggagcggagcgcggatcggcacgggctctgggctcc

SEQ ID NO: 101672 - DNA, 30 bp, Homo sapiens
  chr22:47097551-47097581
  hypo
cgaggtttctgcgtcgctggtgcccacggt

SEQ ID NO: 101673 - DNA, 217 bp, Homo sapiens
  chr22:47107131-47107348
  hypo
agttcctgtaacaccttcaggcggatttcctagataaaattccctcttcaattctacatcgctcttatgggacgggatcaagctgacctcagggaacgtgaacatgaacctctctcgggccacagtctgcgcgatgacatgcagcgttcctggtatttaattgccggcaaataataatttctttgaaagagattacgtctcttttataatttttcct

SEQ ID NO: 101674 - DNA, 43 bp, Homo sapiens
  chr22:47113511-47113554
  hypo
tgaacctagttgtttagaagtcgcagcagtggttcccctttgg

SEQ ID NO: 101675 - DNA, 30 bp, Homo sapiens
  chr22:47138819-47138849
  hypo
tttgcacaccctggtcgggtggagtgagat

SEQ ID NO: 101676 - DNA, 161 bp, Homo sapiens
  chr22:47163643-47163804
  hypo
aaccaggaggctggggaagagcggtcctggcagaggagtgagcaggtgcagaggactcccagagcgatgctggcgtgcttgaggagaggagctggggccagggtgggtctggccgagagaaggggagagtcgtggggtgcgtcatgaaaggtggtggggta

SEQ ID NO: 101677 - DNA, 285 bp, Homo sapiens; identical to SEQ ID NO: 34544
  chr22:47172071-47172356
  hypo

SEQ ID NO: 101678 - DNA, 204 bp, Homo sapiens
  chr22:47187930-47188134
  hypo
tacaggcgtgagctaccgtgccaagcctgttcaatcttttaaaaaattatatttatcttttgcaattctgcattcaatttcagacaaaatgatggcaggtgagaattcccaggtgggcgtttcttcgagtttttagtctgtgggcagaggcctcagttccttcattgcactcccagacaccctcatcaccgtgtagatgcccga

SEQ ID NO: 101679 - DNA, 30 bp, Homo sapiens
  chr22:47189671-47189701
  hypo
tcaccccccagcggcgacctccggctggtg

SEQ ID NO: 101680 - DNA, 30 bp, Homo sapiens
  chr22:47191925-47191955
  hypo
actctggagccagacgccccgggctggagc

SEQ ID NO: 101681 - DNA, 120 bp, Homo sapiens; identical to SEQ ID NO: 34545
  chr22:47192835-47192955
  hypo

SEQ ID NO: 101682 - DNA, 96 bp, Homo sapiens; identical to SEQ ID NO: 34546
  chr22:47193329-47193425
  hypo

SEQ ID NO: 101683 - DNA, 558 bp, Homo sapiens
  chr22:47197485-47198043
  hypo
tgtatctggtgaatggtagtgcgatttggtaacatgtagaacacgcagtttcctgaggaccgtctagggcctgcctcgcagcagtggggcctcggagggcaaactgtgtgtggagctcagctctggccctcaaggctttcgaacggtaggacagaaggcacgacgacccgtccgtcaaggagtggggccaggccacggctgtgttccacttcccctgaggggtgaccatccagtctaggctttatgagagcgtgctgatagatggaggtcagcgggagagggtgttttgggggttgggagggcatgaacagaagtttggagccgtacaccttggcagcactaatacgagtagatgcccccttggtgtccgtggctctagggcagccgtgaaggggcctgggcccttggtgacaggaggaagcaggtgcggccttggagtaggccctcagtgtgatggctggccgtgtccttactcatgaagtggctcaacctacctgtttcgtcagctgtagagggagcatgagacctgccctgcagggtcctcgtgaaggtcagtgg

SEQ ID NO: 101684 - DNA, 53 bp, Homo sapiens; identical to SEQ ID NO: 34549
  chr22:47299399-47299452
  hypo

SEQ ID NO: 101685 - DNA, 265 bp, Homo sapiens
  chr22:47327926-47328191
  hypo
cttattctgatgttacgcggtttctttcctggctcatgcatgcccccatttgtgcgtttatagaaagtgtaagtcctgtgctagtcagagcaagactctgtcagtgaagacgatggtgactagtggcgggttcaccgtgtcagacactgcgctaagcaggtcattacatgatcacctggaattcttaaatgccctctggcgacaccaccatacatgactgttgtgactcccccaggttgcccgtcaaggccgtgctgtgaccgtt

SEQ ID NO: 101686 - DNA, 111 bp, Homo sapiens
  chr22:47370211-47370322
  hypo
gtctccggcgtgcccgcagaggtgctgtgcaacatcgaggccgacacctactggtgcatgagcaagctgctggatggcattcaggtgagcgcccgcgcccacgggacacag

SEQ ID NO: 101687 - DNA, 30 bp, Homo sapiens; identical to SEQ ID NO: 34551
  chr22:47372685-47372715
  hypo

SEQ ID NO: 101688 - DNA, 188 bp, Homo sapiens
  chr22:47380644-47380832
  hypo
tgtcagagaaaaggccagaaacgcagtggcgtcatgactcctttagagaaaggtcaggaaacggccaggcccatgactcggggtggagtggactctgcctgtgagcaggtattgcccttcaggtggggctggcgtgagttgaccattgatgttaataccagggaggcgacagggtagttgggggaagc

SEQ ID NO: 101689 - DNA, 155 bp, Homo sapiens
  chr22:47381550-47381705
  hypo
cctgttggtggcagccgaggctgtttctggtcttgggctgttgtgaataacatttctgtgaacactcatgtccacatcttcttctagtggcctgttaagttctggctgttccacgtcagaatgcgatttctccaacactgcgttccccacagggt

SEQ ID NO: 101690 - DNA, 31 bp, Homo sapiens; identical to SEQ ID NO: 34552
  chr22:47393301-47393332
  hypo

SEQ ID NO: 101691 - DNA, 31 bp, Homo sapiens; identical to SEQ ID NO: 34553
  chr22:47418700-47418731
  hypo

SEQ ID NO: 101692 - DNA, 30 bp, Homo sapiens
  chr22:47424430-47424460
  hypo
agagtgagtggtcgcgttcctgtccctcgg

SEQ ID NO: 101693 - DNA, 30 bp, Homo sapiens; identical to SEQ ID NO: 34554
  chr22:47425581-47425611
  hypo

SEQ ID NO: 101694 - DNA, 273 bp, Homo sapiens
  chr22:47428636-47428909
  hypo
gctgacttcagcttatctccacggcagagcttcattcacgccagtgcaaggcggcacccacttgctgcagcccagacgtccacgcagagctgtgggctgggagtggccagtgaaaccaggtgccacctgccaggccaggcacctgccctggaacgttcctttcacactgccgtcccaggctgccctgtgtggcccctccttcctcaggcgctttgtttcaagcagtgattttcctctggggctgtcgctgtcgtcctggctgctcttccccaa

SEQ ID NO: 101695 - DNA, 361 bp, Homo sapiens
  chr22:47436578-47436939
  hypo
ggaggttaccccgtgcgggacgtgactcagcagcagaggagcagctggggtaggccgtggaatgaaaaagaacaacaggttctgacaggacattcaaagccaggttcttttctctaaatcccggtgacttcttcctcttggggaacattcagggctctgagtatggtgagtgagcagcagccaagccggcctcctgggcctgggaggttccatttccagtttggtgaaggccacctctcgtttgagatcctcggctgccttcagggctgcgggtacacctgaaacggttacttacgctgctttagaatggctcctcacacacatcctgtgcaggtggcgggggactcgctggtaaacgggc

SEQ ID NO: 101696 - DNA, 215 bp, Homo sapiens
  chr22:47441098-47441313
  hypo
tgtgaactgtggctgcgtggcacctggctgcacacgcggctgtgtgttcactgtccctcggactctgcgggaaaacgtgatgcagagccacggtcacggctgcgctcctccgcggtttggaagtcccattaatgcgacttctctctgagaagtcaacctgggcctcctcactctgcagacgtccagctccctcccggaagcggtcatgcagaggt

SEQ ID NO: 101697 - DNA, 30 bp, Homo sapiens
  chr22:47447898-47447928
  hypo
acagaaagcacagagcgggcgggatgcctc

SEQ ID NO: 101698 - DNA, 215 bp, Homo sapiens
  chr22:47455003-47455218
  hypo
tgagaacatcaaggctcggccagggtaggtgctcttgtccaaagccatccagctggtaagtagcaaagcgctgggggacaggccatgccgtgtgggcgcctccactgtctggcacctggattttctgccagggtcctactgggcatcttgaacacactggtgtgggtgcgcacgcgtctggtgtgggagccctttcttgacgctgtaagagagca

SEQ ID NO: 101699 - DNA, 56 bp, Homo sapiens; identical to SEQ ID NO: 34558
  chr22:47465543-47465599
  hypo

SEQ ID NO: 101700 - DNA, 121 bp, Homo sapiens; identical to SEQ ID NO: 34559
  chr22:47465778-47465899
  hypo

SEQ ID NO: 101701 - DNA, 121 bp, Homo sapiens; identical to SEQ ID NO: 34560
  chr22:47465958-47466079
  hypo

SEQ ID NO: 101702 - DNA, 58 bp, Homo sapiens; identical to SEQ ID NO: 34561
  chr22:47466258-47466316
  hypo

SEQ ID NO: 101703 - DNA, 60 bp, Homo sapiens
  chr22:47486205-47486265
  hypo
acccagtcccagcccagggagcgctcagacagacggggcgtcttggaggtgcatagacat

SEQ ID NO: 101704 - DNA, 138 bp, Homo sapiens
  chr22:47489046-47489184
  hypo
ttcatccataaaggagataggcgtgtgcaggcggtgcggtacttgtgacgggagcttgtgaagtgagccgcctccctgatgtgtcttggcggccagcaggccctgtgatcctgcgccgagtctcctgtggtctcctct

SEQ ID NO: 101705 - DNA, 31 bp, Homo sapiens
  chr22:47511003-47511034
  hypo
cctggcccctggatggcggcaccttctggag

SEQ ID NO: 101706 - DNA, 208 bp, Homo sapiens
  chr22:47525840-47526048
  hypo
cctccccaccagacaggttaccggagcgggcgtgtctggaggagcaggcagagcaggtgctgtacacctcgtgtcctctgggacccatcccttctaggcccctcctcaggacaccccctcctgccgggctccccccaagcgcagcccccttcccaaacccacgtttgcctcactgtcttccttgtccggtagagcacacccctcagca

SEQ ID NO: 101707 - DNA, 389 bp, Homo sapiens; identical to SEQ ID NO: 34562
  chr22:47534618-47535007
  hypo

SEQ ID NO: 101708 - DNA, 465 bp, Homo sapiens
  chr22:47540195-47540660
  hypo
gtatacaagcacatacgcgcatgcacttagggcacactcaggggctctccagagtcagtgcccaccacctggaggcgcgtcggtgttactgtctccagtcagcactggcgggacttcacgggtgcagcccgtgaaggtgcctgctggctgagatcctgggactgggtgcagcccgtgaaggtgcctgctggctgagatcctgggactgggtgcagcccgtgaaggtgcctgctggctgagatcctgggactgggtgcagcccgtgaaggtgcctgctggctgagatcctgggactgggtgcagcccgtgaaggtgcctgctggctgagatcctgggactgggtgcagcccgtgaaggtgcctgctggctgagatcctgggtcttggggtctggaggcggctgagccgtttggtgccgctggaccagagccatgtagatgttgactgtaatcggaactaccttggt

SEQ ID NO: 101709 - DNA, 547 bp, Homo sapiens
  chr22:47542708-47543255
  hypo
aggaaggcagccagccgcccagcctgagtccagaagggcgagggaggagcagcggctccagccaggtcaggcctcggcgggtggcgggcactgtccatcacggggccaacaaggagacaagggagggctccgccacctgcagagggctaaggagcaatactaaaccaactcggagtcggtctgcttttgctataatcagttgccaagcacaggcaatgccagagattaaatattcctccccgtaaaaggtgttttgttctcgtaaaaaccatttctgtgactcctgttaccttttaataacagatgtgtaaggctcaagtgggtgtgttttgctgacttgaccttgagtggatcctgctgccggcctggtatatagcatgtggtggtctgtcggagggctccccagggggctgcggtcctccaacacacacacgttctgcacccacctcctgggacatcgtgaggacccaggggtcacacatagtgccctcagagaggccttggggcataggtgcgccctgctgtttccatccgggctgcatttggc

SEQ ID NO: 101710 - DNA, 31 bp, Homo sapiens
  chr22:47584841-47584872
  hypo
aggctgggaccagtgacggccagccagagac

SEQ ID NO: 101711 - DNA, 414 bp, Homo sapiens; identical to SEQ ID NO: 34563
  chr22:48027434-48027848
  hypo

SEQ ID NO: 101712 - DNA, 30 bp, Homo sapiens; identical to SEQ ID NO: 13516
  chr22:48137393-48137423
  hypo

SEQ ID NO: 101713 - DNA, 31 bp, Homo sapiens; identical to SEQ ID NO: 34565
  chr22:48458712-48458743
  hypo

SEQ ID NO: 101714 - DNA, 30 bp, Homo sapiens
  chr22:48646477-48646507
  hypo
gcagcactgggcttccgatgtttgcaggac

SEQ ID NO: 101715 - DNA, 61 bp, Homo sapiens
  chr22:48727540-48727601
  hypo
gcctggtagatggagaagacacgccctctgctgctggtgcgtctgagggatgggaagagag

SEQ ID NO: 101716 - DNA, 360 bp, Homo sapiens
  chr22:48728450-48728810
  hypo
acacacatgacatacacacaccgctcactccaccatacacacacacaccacctacgcaccacttttattgaggttaaagagtccagcatttcccacggaggaagcaaatcctttctcctccacagtcacgcgttctgcacgcgtatcccacgctgccatgtggacgtctaagtggagagacagaggctcttcccggcagcgctgccgctcaagcgggagaggccgaccccgaccctgaaaccctcgcaggcgcctggtgctagcagaggctggggttgtcctcgttgtaccaagggtgccggagagggaaggtgggtgggccagtgctgcctcagagccggggacagggtctggtccttc

SEQ ID NO: 101717 - DNA, 219 bp, Homo sapiens
  chr22:48793076-48793295
  hypo
aacagcaagtaagacacccaccgcgagctggaagaacccgcctgaagtcacaccataggaaagggccctggtctcagacagagcttctgttcctgaggtcccctgcctgccgggcgacgcttgctgcagcccgggaagcgcgtcttccattgctctgtgctgagcacagccgcggtgcggggcctgggttgggcctgtctgccacgcctgctcataccc

SEQ ID NO: 101718 - DNA, 27 bp, Homo sapiens
  chr22:48863661-48863688
  hypo
gaatgtggccgggcgcgatggctcacg

SEQ ID NO: 101719 - DNA, 308 bp, Homo sapiens; identical to SEQ ID NO: 13517
  chr22:48885529-48885837
  hypo

SEQ ID NO: 101720 - DNA, 114 bp, Homo sapiens; identical to SEQ ID NO: 13518
  chr22:48885907-48886021
  hypo

SEQ ID NO: 101721 - DNA, 266 bp, Homo sapiens; identical to SEQ ID NO: 58179
  chr22:48886204-48886470
  hypo

SEQ ID NO: 101722 - DNA, 342 bp, Homo sapiens
  chr22:48918774-48919116
  hypo
aggaatagctggaaggggctgcggcagctggagccccccatggcggggctgtgtcggttccttcccagcaggagacccagagcccatgggtcacggtggaggatggccaggctggatgggggcggccagggagccactggtgcccgtgtcaaggcttccagctcacgggcctccatctcctcccctgccgctcgtgccacaaaaccctgctgcgccctgcacggagcctctgctggaggcgggctcggcttggtgggcacttcgtggcgcttggctcctgtgctccctggctttgccgtgggacagggctggtgggccggcgggcagcctccaccagggcca

SEQ ID NO: 101723 - DNA, 378 bp, Homo sapiens
  chr22:48923828-48924206
  hypo
caccagacaggcagatgaaagcggcatagacagagctggcttggccgcctgggccccccggggccccccggtgcctgtcctctcctcctccacaggccccgcgatggctctgatggcgtcgatgatgctgattctcagttaaggacgctgaagttcggaggtgccggaaacccgtgaatcaggagcctggtgtggtcctggtacctgacaagcttcgagcggagtgagatgggagtgggcctgggggctgctgcagagttgcggtgaggactccagtagggccttggggcatgagtcggtgccacctgggtgcatcgtgtctccaggaaagggttctgctctgggggtccattccccgatgcctgtgtatagccaagg

SEQ ID NO: 101724 - DNA, 30 bp, Homo sapiens; identical to SEQ ID NO: 58181
  chr22:48929553-48929583
  hypo

SEQ ID NO: 101725 - DNA, 160 bp, Homo sapiens
  chr22:48946284-48946444
  hypo
atgtgagggctttgacccccacggagccaggtgcccctgggaaatgccggcattgtgtgaaggagtgtcttgtatcaaagcagatatgccctgccccctaccctcatcccacggttcctagcaggttccatcgccttccgcacttgatgctgctggatcc

SEQ ID NO: 101726 - DNA, 294 bp, Homo sapiens
  chr22:48955832-48956126
  hypo
agggtcttctttctatgcacacgccggccatcctccatcaggcagctgccctggccaccgatgccttcgcagcataggatttggggacctccacgtgccgtcccatgggaaagccgagtccttgtaggggaggagcgtcactgctctcagcaggggaccgtttctctaacgggagcctgtcagtttctgggcgggggtgtgatgtggctgaggcgtctgtccctgtcgtgcgcccaggctggtgccgtcaggctcccggcattggtgcaccccggcattggtgtggccactgca

SEQ ID NO: 101727 - DNA, 89 bp, Homo sapiens
  chr22:48959485-48959574
  hypo
ccctctgagcagcaatggtcacggtgcctgttctgctaccagcgagctgagcagggtatcgggagctcgggctcctgggaggacaccag

SEQ ID NO: 101728 - DNA, 23 bp, Homo sapiens
  chr22:48970900-48970923
  hypo
gccgctggtcgggcccggctggg

SEQ ID NO: 101729 - DNA, 147 bp, Homo sapiens; identical to SEQ ID NO: 58183
  chr22:48971532-48971679
  hypo

SEQ ID NO: 101730 - DNA, 184 bp, Homo sapiens; identical to SEQ ID NO: 58184
  chr22:48971758-48971942
  hypo

SEQ ID NO: 101731 - DNA, 119 bp, Homo sapiens
  chr22:48977954-48978073
  hypo
agcccacctctcccagagacacgcactgcggtgccccccaacagagacacaccacacactacacgatgcacacacccacaccacacaaaaaacacaacgcataccatacaccccacata

SEQ ID NO: 101732 - DNA, 30 bp, Homo sapiens
  chr22:49008130-49008160
  hypo
gagcctgtgagatcacggcaggccacgcgt

SEQ ID NO: 101733 - DNA, 293 bp, Homo sapiens
  chr22:49013240-49013533
  hypo
gaggataaatgggtgctgtttcggggcctggtttgaggccattcgttactgcagccgtgtggagctcctggaagcatgcaggcactcccgtccctgcctcagtggccccggaagcgcctctcgcagaacctcggcactcactgtcctcactgtcgtcacctctcaggctgagtggcccatgaaagaaactggggatgcagcaggagagagaatggcagagtctgtctccgcgtctatctcctgggaacataaagctgccccatgcctgaggcgggggctggatgttctggagc

SEQ ID NO: 101734 - DNA, 30 bp, Homo sapiens
  chr22:49019301-49019331
  hypo
tttgtgacgggtgtcggtatcaccttttga

SEQ ID NO: 101735 - DNA, 773 bp, Homo sapiens
  chr22:49026209-49026982
  hypo
aggcttgctccactgctgcctcggccctggctttggggcgtgcgtggcctttattcattgcctttgttgagtcgtcagcggcgtgtgatgaccaggtgtgcgctgttgtgtccacaactttccagcctcgctcgggcccagggcaggtggccacgccttcttactacacaggttcacgggataattggtggggccaggtggacccagtgaggcgctaatgatggaagtctgtgcagtgagtgccgcttccagaacaatgacagcgtccacgtcttcaccgccctccatcaggggccgcctagaagccacacaggctgcagggctggctaccggggccctgaatcacgggggcgatgagccccaggctccaggcgctggggaaggaagctgggcactcggctgtggggcttttgtttctacctgaaaccagccagccaggccccccgaggaaaagcaaagtgagcccaaatctgccccctatacccagatacccagtgtcccaggggcacctgcatggggggagcccggcgtgcgtgctggctctgggatgcaaggcccagggtcaccgaggacaggggaactcggcgtgtcctgcagccaggggccggcgctctggaatgcagcgtggagtccctgcaggaacgttctggagggggtgtggctccccgccctgtcctttctaaggacggacctcctgggccaggcagaggcagagctccttcggctcacccactcgggacggtcaggggaccggggctgggatgacctgccat

SEQ ID NO: 101736 - DNA, 181 bp, Homo sapiens
  chr22:49038917-49039098
  hypo
tgctggggctgagctgggggtcgcgacagcccagaaagactgagaggcactgcaacccggctgccatgtggatctcagatgcacggcctccagcgccatgggataagaacgtgtaccgttcaggctgcccggtgcgtggctcgctgtggcgatctgttacgcaggaagctcctgcaaggcc

SEQ ID NO: 101737 - DNA, 344 bp, Homo sapiens
  chr22:49042350-49042694
  hypo
ctggctgtggggtgtctgtaacgtgtggccgctcagtcgcttctgctcctctctgcaggtcagctggccgccggcacctgtgagattgtgaccttggaccgggacagcagccagcctcggaggacgatcgcccggcagaccgcccgctgtgcgtgtagaaaggggcagatcgccggcaccacgagagcccggcccgcctgtgtggacggtaagcacccgtggccccaggacccctccgggtgctgagcgcggcgtcaccaaaggtgcctcttccctgacgcggccccttacctgaaggtccccctaggcctcagcgcatcctcgggtcaggcccctggctgttg

SEQ ID NO: 101738 - DNA, 159 bp, Homo sapiens
  chr22:49045920-49046079
  hypo
cataataagtttcctcgcatgtgaattgcatttgctgaagagaaaacttgtgctgtgttgggtcggtgttggaattgaatgtgagtagggttgaaatcggggaggcacttgctgcccctaccgcgttccgtgaccacaggcgctcggaatgccggagca

SEQ ID NO: 101739 - DNA, 241 bp, Homo sapiens
  chr22:49046593-49046834
  hypo
cacagtatcagccaccgagcctcccctcccccagggctgccctctgaggcaggcacccaggtgcgtgatgccctggcgggctggccaggccctgcttctgctcctttctagctgtttatgcagacgcgccaggttcccttttccatcagcacacacgtgctgggtcccgcagccaccacagcacggcactgaggactgagaccctgtgtccgagtccagcgctcacccagcccttgccagg

SEQ ID NO: 101740 - DNA, 80 bp, Homo sapiens
  chr22:49047928-49048008
  hypo
acctcgaggcgccaacggggcccccagggccagctgaaggcatgttgtggctgggactagggtgacgggaattttccacc

SEQ ID NO: 101741 - DNA, 338 bp, Homo sapiens
  chr22:49054730-49055068
  hypo
aaccatggcctcagactgcagcgtccaaagaggtcgtgtaagaggaggtgacgcctttgcccgtcattgtcaggagcaggtgcgattaccgggcaggacacccggggaccttgatggtctctgggcagcagagtccggggcaagtctccgagggccctgctgagggcgcagcgccttctggaccccgcggcggaggatccagcattcttcctggcctgttggctgcagaggcgggacacaggcagagaccctgcctcactctgggccctcgtccacccacaaagggacccagaatcatagccgcagccttgttgctcgctgggctttgagcaagtgga

SEQ ID NO: 101742 - DNA, 239 bp, Homo sapiens
  chr22:49063320-49063559
  hypo
cgtgagtgcccctcccgccttccgtgccacactcccctgttgatatttatttatctcgcgggcttcgctggaatcttgagggtccttgagactccgcactgcgttataactcctgcctggttaattcaatttctcttatattctgactcccctggcaaaaataatcggcttctggccaccagggccacagactttctgtcatgagcatgggtcttcaccgggagcgttaatcccccagc

SEQ ID NO: 101743 - DNA, 87 bp, Homo sapiens
  chr22:49070488-49070575
  hypo
accccccacagaaggagccctcgttcagggagacgccgtggggaggggggccaccttagcttgcccgttgggtctgcagtgtgatgg

SEQ ID NO: 101744 - DNA, 142 bp, Homo sapiens
  chr22:49104032-49104174
  hypo
tctgataactcccccagggcacggcgggggttctgtggagacagggccaggttcaggttccgtccaggtgtgctccttccgtccctgggcctggcctggtggctgctcacaccagagacccggagggcccttcagctcctct

SEQ ID NO: 101745 - DNA, 772 bp, Homo sapiens
  chr22:49138230-49139002
  hypo
cagagcaggtggggcaggagacgggtggagcgggtggtgctgtgtggcggagctggcggcgcagtggagcgggcgttgtggtggacccggtggcgtggcagaccaggcgacgtggtggacccggccgcatggtggaccaggcaacgtggtagactgggcagcgtgatggaccaggcgacatggtggaccgggccgcatggtggaccaggcaacgtggtagaccgggccgcatggtggaccaggcaacgtggtagaccgggcagtgtgatggaccaggcgacgtggtgggccgggtggtgtggtgaagccggcagcacagtggagcaggcattatggtggactgggcagcatggtgtattagaagaggagagatggcctggggtgctcagcggggctgagtccccagctgggagctcaggtgcgatgaagcccaagggactgacggtgtgaggagggccctctgctgcctccatgcagcccacacgcggggcccccacagtgcggacatgttggggcaatgctgcctggccccgccctcagcccagccctgggacgcaggctcagcagcccccggattccagtcaacatccccaggactcactcgggtcaggcacagtgtccaagctgtgtgagtctccgggagccgctggaacaaaatgccacacacccggtggcttcaaaccatgaaacccgttctcactgttctgggtccagacgtctgtggtcacagtgtctgctgggccgtgctcccgcaggaggcagcagcagaggg

SEQ ID NO: 101746 - DNA, 116 bp, Homo sapiens
  chr22:49140370-49140486
  hypo
aaatgggctttgcagggcactcggcaaagtcgctctgcagacacagcctcctcgttagagagcggtgctaaacctgtgtgctcttccggcgacacggtcctaacttgggtggtttc

SEQ ID NO: 101747 - DNA, 785 bp, Homo sapiens
  chr22:49145661-49146446
  hypo
aacacagcccctgaggggccccgggagtggccttggctccctggagagcccacgtctcagccacagttctccactcgcctcggacttcacccgttctctgccgcccgcccactccgtttccctgtggtccgtgaaggacggcctcaggccttggcatcctgagcttcggtctgtccagccgacccgaggaggccggactcagacacataggcggggggcggcacctggcatcagcaatacgcagtctgtgggagcccggccgcgcccagcccccgccgaccgtggcgttggccctgctgtcctcagaggaggaggaggaggaggcagctccggcagccacagaaggctgcagcccagcccgcctgagacacgacgcctgccccaggggactgtcaggcacagaagcggcctcctcccgtgccccagactgtccgaattgcttttattttcttatactttcagtatactccatagaccaaagagcaaaatctatctgaacctggacgcaccctcactgtcagggtccctggggtcgcttgtgcgggcgggagggcaatggtggcagagacatgctggtggccccggcggagcggagagggcggccgtggtggaggcctccaccccaggagcaccccgcgcaccctcggaggacgggcttcggctgcgcggaggccgtggcacacctgcgggaggcagcgacggcccccacgcagacgccgggaacgcaggccgctttattcctctgtacttagatcaacttgaccgtactaaaatccctttctgtt

SEQ ID NO: 101748 - DNA, 316 bp, Homo sapiens
  chr22:49146941-49147257
  hypo
ctgtattggtcaacacttgagcgtacaatatcttgaacatgcttcttccaatgggttttgtttcccatttcctgcccctttcgccactcacggaccttgaggccagttgacggcccttctccccacgcctgtgtccccgcgttctgagaagtcctctgtcttcgtgtcactaggtccagaaagtcgcgccgggcagaggcgcaggcggggccggcagggccgaggaataagcgacaattctggtttttctcccctggccgtcgttcgccagcctccttcattttcctgagttcccgctgaagtatatactacctat

SEQ ID NO: 101749 - DNA, 43 bp, Homo sapiens
  chr22:49175462-49175505
  hypo
ccccacattggcctgagtgaccgagtagctgcagggacccact

SEQ ID NO: 101750 - DNA, 202 bp, Homo sapiens
  chr22:49203054-49203256
  hypo
gccaggaaacaacggcgcttgtggaatcacaagtgggaaaataaagggctctgacgcaccgcattgtctggagagtgcctcagtggccgccaagaacagagcacacaggccttgaagccagacacacacccccccgcgccgtgctggcttatcctcacaggccgctttcacgtagcccggtgtggcccgggggtctgcctgg

SEQ ID NO: 101751 - DNA, 190 bp, Homo sapiens
  chr22:49233006-49233196
  hypo
acacacatgcacacacgtgtcctctcacacacacactcacatgtgtccttacacgcacctgcacgcacacacatgtcctctcacacatgcacacacgtgtcctctcacaaatgcactcacacgtccttacacacacgcacatgcatgcacacacgtgtcctcacacaagtacacacgtgtcctcacacat

SEQ ID NO: 101752 - DNA, 180 bp, Homo sapiens; identical to SEQ ID NO: 34573
  chr22:49277239-49277419
  hypo

SEQ ID NO: 101753 - DNA, 85 bp, Homo sapiens
  chr22:49294316-49294401
  hypo
agttagccttccacagtgcaccgtctcccctcgcgatgaagcctgttccttctgaggggctcccgttggaggacagcaaagggcc

SEQ ID NO: 101754 - DNA, 267 bp, Homo sapiens
  chr22:49295889-49296156
  hypo
gtcctccacagaagacctttacgccgataatgctctcctttcccgatgaactcgcctctgcttccccgaaaagtgctcctccatgctggcacgaagcaagcgtccagttaataaagtgcgtcgtagggagacgcgttcctccaccagttctctctgctggccccgccgagccctctctgtgctatcgagagaaccacccggctgctgcccacaccggggagggcactggccccagaccagaggggcgtcacctgccctggaggacag

SEQ ID NO: 101755 - DNA, 30 bp, Homo sapiens; identical to SEQ ID NO: 58185
  chr22:49338722-49338752
  hypo

SEQ ID NO: 101756 - DNA, 162 bp, Homo sapiens
  chr22:49380596-49380758
  hypo
cagtacccagcacactggccccgccttcccatcctgagtctccatccctcagaaatcagcgcagccctgcaggaggccggggcaggaggaccattgtggaggcacagttcgcagaggcaggaaacgtccccggcccagagcgtcccccagccatggggagag

SEQ ID NO: 101757 - DNA, 94 bp, Homo sapiens; identical to SEQ ID NO: 34574
  chr22:49387604-49387698
  hypo

SEQ ID NO: 101758 - DNA, 103 bp, Homo sapiens
  chr22:49389206-49389309
  hypo
tcccagagggaagcagacactcggatgtggacgcgtgtgctgcagccctgtgtgcatgtgggtggaacacgcacaggtggacggatataggaaccaagtgaca

SEQ ID NO: 101759 - DNA, 143 bp, Homo sapiens
  chr22:49404567-49404710
  hypo
ctataagaatctagtgccacggctgatctgataggaggcggagctcgggcagtaatatttcctgccactcacctcccgcagtacggctggtaccgaccgtggcccagggattgggaacccccggtttgtaggatgcaggagaa

SEQ ID NO: 101760 - DNA, 52 bp, Homo sapiens
  chr22:49512002-49512054
  hypo
gacaggaccaatgcctcaggccgctcctctcgggcctggttttattcataaa

SEQ ID NO: 101761 - DNA, 217 bp, Homo sapiens
  chr22:49538064-49538281
  hypo
gacaatcaccatggatgagaacgacacacaccaatggtggctatggccagattacgcacagcacgaaggcgcaaaggcagcgcgtggaaccacatgggacagccaggcggatggaaaccaaagacggcgaagcacaggagggtttgcggtggtctccgggcttgtctccgggtctgtgagtgcaggaatgtcatacgcttggatacctccaattcta

SEQ ID NO: 101762 - DNA, 227 bp, Homo sapiens
  chr22:49546642-49546869
  hypo
tagccgcagaagccaaggcagcgtcacgcgtggagaatgagctatggcttcgttaatcaggggagacagcgctgggaaccaggaggccggcgaggtcaccagaggaaggaggggctgcagccgccgtggggtgccagacacctgggccccacctcgccgccatctgccctcataaacccgggtctggtgggctcccagctctggccggcccattccaggccagacac

SEQ ID NO: 101763 - DNA, 72 bp, Homo sapiens
  chr22:49558734-49558806
  hypo
catcacaactctataaatatgcgacgtctgggaaaacggatggaaagaaacgcactggcatgtgccctgtgc

SEQ ID NO: 101764 - DNA, 213 bp, Homo sapiens
  chr22:49559993-49560206
  hypo
gcaggtgcatgtccagggccacgtgtgatcaccagacccctgtgtcccgtggtgcacacccctcttgcctcttggccacggggtccactctgtgaccagcgaggatacttgggaccttcttgctttgacgcaatgggccgagtgaccgggcggctgtgggaccccagtaagtaccacctgccatctcccctcgggcaggaaagatggcaccag

SEQ ID NO: 101765 - DNA, 30 bp, Homo sapiens
  chr22:49562439-49562469
  hypo
tccaaggacgaggcacgtcgacttcggcag

SEQ ID NO: 101766 - DNA, 30 bp, Homo sapiens
  chr22:49562880-49562910
  hypo
ccaaaactccccgtgcgtgccggaaagagg

SEQ ID NO: 101767 - DNA, 245 bp, Homo sapiens
  chr22:49580737-49580982
  hypo
atttataaatccccacagagccgctgtgcagaggtagagggccggtttcaggatgaggaagccctcttggaagcaccgtcctccgctaacagcctccaacctctgtccccagggagaggcgcgtccccagcgagtcgcatcagacacgtcccaccgtggacgtgtttgcccctagtcacctcatttctctgctcacagcgcacagtgctttcgttgcattcttcgttagaacacccaggggaatc

SEQ ID NO: 101768 - DNA, 180 bp, Homo sapiens
  chr22:49610930-49611110
  hypo
gctgacttggaaagagccacacgcgctgggactggaaggaacgcctcctttcctggatgcccgtgccgcggtgcccactccactcaccatccctccttgtcgtcttctggtcaccgtgtcttcggcagggcgtgagtacctcacctgcgggctgtggacgggtgctcttgtgtttctgcc

SEQ ID NO: 101769 - DNA, 78 bp, Homo sapiens
  chr22:49629161-49629239
  hypo
tgaaatgcaaaatcagcaccacgctggcgtcagtgtgctgcgcagacagtgtgtgccgcagtcatcccaccctagacc

SEQ ID NO: 101770 - DNA, 489 bp, Homo sapiens
  chr22:49637420-49637909
  hypo
tctcgcgactccagctccttccgaggaggtcactgagctttgcacgatgccggctccttctcaggaggtcaccagagcttctcgtgactccagccccttcccaggaggtcactgagcttcacacgacgctagctctgtccaagtcggggtccctgtgcccctaggtttccggtcaccgggagagctgtctgtcgcgccataagctggaggtgcgcaggaggatagaaatagaaactcctcatccagccgggccagggcactgacagccacagcgatgtccacggtgtaatggtcacggactccgtccccaaattagcccattttttacaaagacgataatggggggcggttctctgtgaaatggagccctccatttcggccgctcccgcgtcaggcccaaaataggtgcctgctggtcatcacttctgcgatcatgctttcatctccactcaattacgtcgcctccgcgtacttctgggctgctggttt

SEQ ID NO: 101771 - DNA, 86 bp, Homo sapiens
  chr22:49678541-49678627
  hypo
tttctgtcctcactgtaactccggttctcactggtctggtcctcaagcaagaggcaagcgtcttcgagtccctgactgacccatgg

SEQ ID NO: 101772 - DNA, 148 bp, Homo sapiens
  chr22:49699807-49699955
  hypo
cagcccatgtgtcctcctgcccgccaggcccaggctggccccaagaagggtcaacgctgccacggtgagtgtcctcccacggctttgtgccaggctgcggacggctgtctgtggagggcggggatgcggtgcaccctggggtacacag

SEQ ID NO: 101773 - DNA, 43 bp, Homo sapiens
  chr22:49721830-49721873
  hypo
tgaagacaggtgggaagcaggcggccctcctgggcagaaaggc

SEQ ID NO: 101774 - DNA, 279 bp, Homo sapiens
  chr22:49729096-49729375
  hypo
caagtcgccagcggccgctctgtagcaataattcatcgcttgggtccagcgttagaagcaggtctcggctctggtgctcagaagggacagcgtgtgcgggaagctttgctgccctggacgcggcgccaccacccaaccccggcccctgcggtcccagagtatcagccacgacttggtgcctcctgcctgggtttctctgtgcactttcaggcatgttgaagtcagaccattcacagttttgccgcaggtcgacacggagtgccccgtggcttagcaggt

SEQ ID NO: 101775 - DNA, 223 bp, Homo sapiens; identical to SEQ ID NO: 34575
  chr22:49729771-49729994
  hypo

SEQ ID NO: 101776 - DNA, 42 bp, Homo sapiens; identical to SEQ ID NO: 34576
  chr22:49730113-49730155
  hypo

SEQ ID NO: 101777 - DNA, 329 bp, Homo sapiens
  chr22:49785181-49785510
  hypo
atctctgcctcactgtcctcacgcagccccagctccggcattgcactcgaggccacccggagccccatctcactctctctgcactctgccaggcactgcgagaggcatggctttcagcggcacccccgagagaggcctccctagccagggtttgcccgcggacgccgcccagccctccctccacggtgccctgcacactctaccgggaagcagcaggggctcatgagggcgtcacgccttgctcggctgtgagtcttgtccatgggggtgatctcaggacctgcgcctgatgcactcaggaaacactcgccaagacacacatgggccct

SEQ ID NO: 101778 - DNA, 139 bp, Homo sapiens
  chr22:49831759-49831898
  hypo
agggcagaaagcatgtccacacgggtccaggacactgggctcccatgtgggtcctagcgccactgaggacctccgtccgcacagagcgggaggctttcagggaagcgcctcagcgcccggctcaaatcaccctggacag

SEQ ID NO: 101779 - DNA, 141 bp, Homo sapiens
  chr22:49852487-49852628
  hypo
acggaccaacccgggcgctgacatcactctgcatttgagggatgcaggtgcagcgtggggcacgggacgaccctggccagggcacctggtcagccctacactccctgaccccaggctgactgtccgcggtgggagagcact

SEQ ID NO: 101780 - DNA, 200 bp, Homo sapiens
  chr22:49855375-49855575
  hypo
gccccaaagcagacattgccccgatacggatttggttccctttaatgactctccggaataaaataaaggtgtagactacggctcttcagaagaacgaggctcgtgtctctggggtggtgcctccaggtgggcggtgcgcaggagcgtgtggcggcggccgagacccagaggtgtttgtcggtgacatggccagagctgtc

SEQ ID NO: 101781 - DNA, 139 bp, Homo sapiens
  chr22:49857252-49857391
  hypo
ggattacaggcgtgaaccaccgcgcccggctattattcaaaattcttatagatggaatgttggtggactctccactattcgtttacttatgaaatcatgtgttgacatcagtgtagacgcatgtgcaccctctttatgg

SEQ ID NO: 101782 - DNA, 43 bp, Homo sapiens
  chr22:49858315-49858358
  hypo
tggaaatgggatcccacaatacggagccttggggcctggcttt

SEQ ID NO: 101783 - DNA, 228 bp, Homo sapiens
  chr22:49901385-49901613
  hypo
gtcaacaaatgggtgcgggtggagggggctttgctggtcacagccagcaccgcagacggatccacggtgacccttttggcaaccggccacgtagggccagatgggcggcacagggaggtgtgttgtgccgtttaactctccattccttacacatggagtctcatgatgttcgcttttgttggattcaaaatggaaatgacctgactttctggccgatgagaactggct

SEQ ID NO: 101784 - DNA, 646 bp, Homo sapiens
  chr22:49911017-49911663
  hypo
ggagtaagggacaggaccagacgccatctgagggacaaagtccccgagccccgatgcctgggcgcagagctggagactcggcttcttcttcgacctccccggccacttcccaacaccacatcacctcaacgcaggtataaggcacgtcccgtcattgcccccgttttagagctgagaaacatgaggaccagagaatcaaggctgtctgagccagagggcgcctcgctggcccctaccccaaaacagcacccgccctgccctggtcattactgccccccaaccttaaccaccctccccactgccctacagaagacccttagaagggggctgactgatggaccatggtgaaggccagcctggcctccttcagccacagtgtgaagcgcagttcaccaaaactggaaactgccatgcatcccggtgtcatcaaacaccacagcaaaagagccaggtgaacgcacggaacatcaagccgcaaccctccacacctctctgtataaccttcgcggccactgcccccgtgcctgcagagcgggtttgcaggagacgtcatccgaatggataaatgtccgtcggagctggggatcatcctcccagagtttcagcagctcagagaaggccagcaactcaccgagccatgccacag

SEQ ID NO: 101785 - DNA, 30 bp, Homo sapiens
  chr22:49934647-49934677
  hypo
agaacagtccaccacgccgcccttcatccc

SEQ ID NO: 101786 - DNA, 30 bp, Homo sapiens; identical to SEQ ID NO: 34580
  chr22:49935075-49935105
  hypo

SEQ ID NO: 101787 - DNA, 30 bp, Homo sapiens
  chr22:49935364-49935394
  hypo
ccgctggctgtgtccgcctgagctgaggtc

SEQ ID NO: 101788 - DNA, 535 bp, Homo sapiens
  chr22:49948170-49948705
  hypo
gctgagacagcatcgcgagctgagggagaaactgacagacggcagttcaccaaaacccaaaaactggtcattctctggcctttaacaaaccaaagtatatttctccctctgaaataagaaacacaggacaattattaagttccaaaagtacgtttcattttggaggcatgttgttggtcccctttggaatcatgaacccctgtgagcgaaacacctcccaccattgattctgacagggtacggcgggcagttcccggcccaggtagaggcagacaggtgcagagccacagggccaccactgcagagtctggccttctctccagccccgggtgcacccacggttatcagggacccagcactgcctccctgcacgcacatggctctccaggccaccactgcagagtccggccttctctccagccccgggtgcacccacggtgatcagggacccggtgctgcctccctgcacccacccggctctccacagcagcaaacggggtacattagggtggacgggatgtggggccagggccct

SEQ ID NO: 101789 - DNA, 203 bp, Homo sapiens
  chr22:49958406-49958609
  hypo
cacttcctagcaagcccccctcgccctgtcactgcccctacatgcgggccacacaccgctctcctttcttgtttcactcggggacccgagattcttaacgccaggctccgtcttcaccatggaagtgcacacggcgaggaagtgagagaagatggtggcactcggaggggctgggcaggcgcgatcctcccaggccctgtccc

SEQ ID NO: 101790 - DNA, 30 bp, Homo sapiens
  chr22:49961570-49961600
  hypo
gccagtgtcactccacgcctgatccttgtc

SEQ ID NO: 101791 - DNA, 72 bp, Homo sapiens
  chr22:49980154-49980226
  hypo
gtgctcagcacagagtcactgcgaggcggcgtgagtctgtgtgacatcagcgtgtttagtgcatgacatcag

SEQ ID NO: 101792 - DNA, 30 bp, Homo sapiens; identical to SEQ ID NO: 34581
  chr22:49982589-49982619
  hypo

SEQ ID NO: 101793 - DNA, 155 bp, Homo sapiens; identical to SEQ ID NO: 34582
  chr22:49983003-49983158
  hypo

SEQ ID NO: 101794 - DNA, 266 bp, Homo sapiens
  chr22:49983614-49983880
  hypo
gcctcccagcagcctgaggcccgagcagggtctgtgatgagcagaggccgcagacggcagtgctggggccgggaattctccctgtgggctctgccctccggcgtgaccagtgcatgtgtctgtgctggaggtcggggcccttgagatgagacactgaatgctccctgctctgcccggctcccggcggcaggtggagcgtccagcgcacacagggtctgcacagccaggcgtttcttccccacctcgcatctctcctggggcagtgt

SEQ ID NO: 101795 - DNA, 30 bp, Homo sapiens; identical to SEQ ID NO: 34584
  chr22:50000868-50000898
  hypo

SEQ ID NO: 101796 - DNA, 202 bp, Homo sapiens
  chr22:50001628-50001830
  hypo
ctgctgtacaggagacatgatcgtgattattgttaccatgattaatgtcgtgcgcaggcctctcctgggtgccggggattcagctgcgatgaacaggacaaagtccagatctcatgggaccggcatgggggtgatctcagggaggacaacagagaaaatggaagccaagaaccgggaacagggattccgacagatctgggtt

SEQ ID NO: 101797 - DNA, 375 bp, Homo sapiens
  chr22:50002540-50002915
  hypo
aggcgcaagctcccccgatgacacgggaagctggagacattctcgtgttcacggtcacagctctgctcctttgagaaataagcggcacgatgtttttctagtgggtttgcctttttctcagtgatggtaaaagtgctgtgtatgttaaggtgagtgactcaggaccaaggtgagtcttgactcctcttggctttgcgctgagagcacctgggagagtcaagggagcacacaggacagtccctgcttcggctccccaggaacacgcggccaagtgcacgcagccggtgtcctcgggagccggtggtggggctccctgaaggtcctagaaatccggcggcacagggacgtgcaggcggatgagctggagggagattc

SEQ ID NO: 101798 - DNA, 103 bp, Homo sapiens
  chr22:50003143-50003246
  hypo
aagccaggcacaaagctggcacgtgggatgagtgaatcagacacagctgcatttgtgttctcggttcctccaaacacgagacgcttggaacagggtctctgag

SEQ ID NO: 101799 - DNA, 30 bp, Homo sapiens
  chr22:50006978-50007008
  hypo
cactcggtgaccaccgcatcagccatcagg

SEQ ID NO: 101800 - DNA, 795 bp, Homo sapiens; identical to SEQ ID NO: 34586
  chr22:50008937-50009732
  hypo

SEQ ID NO: 101801 - DNA, 370 bp, Homo sapiens
  chr22:50010153-50010523
  hypo
gacgggaaacagccccgggagcagaaggtcccagcagcggaattcccctccacttggaccaggcctgcgggagatccgggcactgacaggcggggacattttagaatcttttcaagaaaagataaagaaagaaacaagagtaacaggaggccagaagcaagggcatctactgcagacagcggtgccgcggggctggagctgaagctacccaaggagccccaggctcgggagcctccaggcacaggcgccgtcgggagcctccaggcacaggcagcgtcgggagccaccaggcagaggcagtgttgggagcctccaggcacaggcggcgtcgggagcctccaggcagagacagcgtcgggtggcagggagc

SEQ ID NO: 101802 - DNA, 250 bp, Homo sapiens
  chr22:50025071-50025321
  hypo
tgtgtttcaggacacgcggggtgcaagtgtttcggggcatacgcgtgtgtttcagggcacaccgggtgcaggtgtttcggggcacacgtgtttcaggacacacggaatgcaggtatttcggggcacatgtgtgtgcttcagggcacaccgggtgcaggtgttttggggcacacgtgtatttcaggacacacagtgtgcaggtgttttggggcacacgcgtgtttcagggcacgccgggtgcaggtgtttc

SEQ ID NO: 101803 - DNA, 34 bp, Homo sapiens
  chr22:50047561-50047595
  hypo
ttacaggtgtgagccaccacgcccggcccaacga

SEQ ID NO: 101804 - DNA, 491 bp, Homo sapiens
  chr22:50054351-50054842
  hypo
ttcaagttcattctgtgcctacgtttcagaaaaaaaatcttccagcaagaacgcaataaacaagactgagagcctcattaggagcctgtgagccccacatcaccagacgcgctgcagctccccgtgatgaccgctcctcctccgagccccgcacacggcgcgggttacatggaaaaggcaccgcagctccccgtgacgtcctctcctcctcggagccccgcacacggcgcgggttacatggaaaaggcactgcagctccccatgacgatcgctcctcctctgagcaccgcacacggcacgggttacatggaaaaggcactgagtgcggcccacaggagaggcggggatggaaccaggaccccaatgcataggctgggggacgcaccttggccacctcccgtggcgggatggttttcccaatcggagatcccagcagggcccatgctggcggctctgcctgtccctggcacggaccactcctcacctgtgga

SEQ ID NO: 101805 - DNA, 165 bp, Homo sapiens
  chr22:50056926-50057091
  hypo
ccccaggaccatcacccaacacggtcaccacagggcagacaatgtccgttttcactttcaagatcagccggtagacaacgcagaaaggccacctgccgtcggtgtccatgacagctggcttcaccgtgaaagtgccagccgggcgttcagaggggaggcactcag

SEQ ID NO: 101806 - DNA, 18 bp, Homo sapiens
  chr22:50075311-50075329
  hypo
tttttttttttaagacag

SEQ ID NO: 101807 - DNA, 354 bp, Homo sapiens
  chr22:50107837-50108191
  hypo
tcatcagagaaatacaaactacgaagtatctctagaccacaccttttcgaatgcccagaactccgacacgggccatatcaagggctggtgggaatcggggacaccgagaggcagataccctgcttgccgctcccgcatttgaaggctggtgggaatcggggataccgagaggcagataccctgcttgccgctctagcactttggagaggagtttggtggtttctgcggaagtgagggggatgcgcctacaggactgagccatcccgtggccagcgatctgccgagaggggtgaacgccatgtgtctgtgtgaaaacacgcacatgttcacagcggctccccttgcaatagccaa

SEQ ID NO: 101808 - DNA, 30 bp, Homo sapiens
  chr22:50119261-50119291
  hypo
gtcactgggatgccccgtctccagctgagc

SEQ ID NO: 101809 - DNA, 30 bp, Homo sapiens
  chr22:50119526-50119556
  hypo
ggctcggagctcagccgccgtgtcacctga

SEQ ID NO: 101810 - DNA, 43 bp, Homo sapiens
  chr22:50131652-50131695
  hypo
aaaattatgattagtaatgagcgcagaatttttcttgaagaaa

SEQ ID NO: 101811 - DNA, 30 bp, Homo sapiens
  chr22:50167351-50167381
  hypo
ggtgggcgggacgacgggagcggggacaca

SEQ ID NO: 101812 - DNA, 129 bp, Homo sapiens
  chr22:50169706-50169835
  hypo
gtaggaggggtagccgctgcacttggcccacaccaccttcagaggctccagcaccgaggcggcggcatcagtggagatccacatgctgctctggccgacttctgcggagaggggcgtcagcaggacaca

SEQ ID NO: 101813 - DNA, 31 bp, Homo sapiens; identical to SEQ ID NO: 13520
  chr22:50170509-50170540
  hypo

SEQ ID NO: 101814 - DNA, 394 bp, Homo sapiens; identical to SEQ ID NO: 13521
  chr22:50170577-50170971
  hypo

SEQ ID NO: 101815 - DNA, 142 bp, Homo sapiens
  chr22:50171290-50171432
  hypo
ctgcgtggtgggaagcgcagggccgcggtgcccacctcgagtcgcagagcgggctgttgctggaggagatgctggactcggaggcacagcgtcgtcggggtgtggccttcctccccaggccgccgcccggctcctgctcgct

SEQ ID NO: 101816 - DNA, 401 bp, Homo sapiens
  chr22:50171662-50172063
  hypo
ttaacaaactgcagtcggctccgatcgtagtagtttgctgagcaccatgaagatgctcctcttgacaagcccgggtctttagacaggctctgtgaaggcaaagaaaggatgccgtgagcctgccatgggggcagatgtgcaacctgtgagtgcaaacacgggggcggcctgtccacgtgggcaccggccgcgtttgaacggaaacttcaccaggccgaaggggccaccaaagacacaaaaacatgttcacaggagcagagctccagggaataggaaatcaggttttaaaaagaaaaaaccttggttcaaaagacaagtgttaacatgaagtcaaaaatgctgacgaaacactttaaaacacaaaatccggggccatcgccgtgtctgagtgtgtctggcct

SEQ ID NO: 101817 - DNA, 30 bp, Homo sapiens; identical to SEQ ID NO: 34593
  chr22:50173709-50173739
  hypo

SEQ ID NO: 101818 - DNA, 30 bp, Homo sapiens; identical to SEQ ID NO: 34594
  chr22:50175235-50175265
  hypo

SEQ ID NO: 101819 - DNA, 30 bp, Homo sapiens; identical to SEQ ID NO: 34595
  chr22:50175965-50175995
  hypo

SEQ ID NO: 101820 - DNA, 30 bp, Homo sapiens
  chr22:50176845-50176875
  hypo
ctgcacaagatcccacgcacagatgcccca

SEQ ID NO: 101821 - DNA, 173 bp, Homo sapiens
  chr22:50177126-50177299
  hypo
agacacagcacaacgcgcctgggcatggccgtcacacccaaaccaccagtcactatgggacggctccgcacatgctcaggacagcctcagaatgctgtccactgtgtcgtcagctgcagcaggctcccagtcggtgccgggctctcctctgcgtccttcgtgactgtccagag

SEQ ID NO: 101822 - DNA, 30 bp, Homo sapiens; identical to SEQ ID NO: 34596
  chr22:50177926-50177956
  hypo

SEQ ID NO: 101823 - DNA, 30 bp, Homo sapiens; identical to SEQ ID NO: 34597
  chr22:50181275-50181305
  hypo

SEQ ID NO: 101824 - DNA, 269 bp, Homo sapiens; identical to SEQ ID NO: 34598
  chr22:50191340-50191609
  hypo

SEQ ID NO: 101825 - DNA, 114 bp, Homo sapiens; identical to SEQ ID NO: 34599
  chr22:50192074-50192188
  hypo

SEQ ID NO: 101826 - DNA, 208 bp, Homo sapiens
  chr22:50209354-50209562
  hypo
ggaatgagtcagtgtctgaaacggcattcaggtctgttcctcatacaggagagcaggcgctcctgcaggctgcgtccacccaggtgccctcccgagctcccaggcactggctggacctgccctgcagctcctccttccaatgtgtcgtcctggcgcttccttcccgagtgcccgccactccagacccgatgcaggtcaagcacaggga

SEQ ID NO: 101827 - DNA, 91 bp, Homo sapiens
  chr22:50209832-50209923
  hypo
aaaacacaagccaaagggggccgcggccggtggctctaatccgtaaccctagcactttgggaggctgaggaccacttgggcccaggagttc

SEQ ID NO: 101828 - DNA, 24 bp, Homo sapiens
  chr22:50209982-50210006
  hypo
cccgcctcaattaaaagaacaaaa

SEQ ID NO: 101829 - DNA, 30 bp, Homo sapiens
  chr22:50217647-50217677
  hypo
gctggggagggcctcgtttttctttttgac

SEQ ID NO: 101830 - DNA, 30 bp, Homo sapiens
  chr22:50218908-50218938
  hypo
ctcaggctccacagcgaggggtgaccccca

SEQ ID NO: 101831 - DNA, 31 bp, Homo sapiens
  chr22:50228902-50228933
  hypo
ctgctgtctccttcctcggttatgggttgaa

SEQ ID NO: 101832 - DNA, 30 bp, Homo sapiens
  chr22:50244533-50244563
  hypo
gagcatccctgactcgcactgccctgtaca

SEQ ID NO: 101833 - DNA, 99 bp, Homo sapiens; identical to SEQ ID NO: 13524
  chr22:50246600-50246699
  hypo

SEQ ID NO: 101834 - DNA, 160 bp, Homo sapiens
  chr22:50250349-50250509
  hypo
cgttctaggtgaaggccgcgctggaatcccggccggcttcccacctctcgttctaggtgaaggccgcgctggaatcccggccggcttcccacccctcgttctaggtgaaggccgcgctggaatcccggccggcttcccacccctcgttctaggtgaaggc

SEQ ID NO: 101835 - DNA, 30 bp, Homo sapiens
  chr22:50251083-50251113
  hypo
tgaccttagcgtggtcgctggcttgctctg

SEQ ID NO: 101836 - DNA, 30 bp, Homo sapiens; identical to SEQ ID NO: 34603
  chr22:50252505-50252535
  hypo

SEQ ID NO: 101837 - DNA, 30 bp, Homo sapiens
  chr22:50280067-50280097
  hypo
gagctgatcagctgcgaccagtgggaggtc

SEQ ID NO: 101838 - DNA, 30 bp, Homo sapiens
  chr22:50282371-50282401
  hypo
ggtgtcctcttacccggtagctgtgcgctt

SEQ ID NO: 101839 - DNA, 238 bp, Homo sapiens; identical to SEQ ID NO: 34604
  chr22:50296994-50297232
  hypo

SEQ ID NO: 101840 - DNA, 79 bp, Homo sapiens
  chr22:50305617-50305696
  hypo
cgatcagcctcggctgcgggatcaccctcggccccgggatcagcctcggccacgggatcaccctcggccccgggatcag

SEQ ID NO: 101841 - DNA, 30 bp, Homo sapiens
  chr22:50307950-50307980
  hypo
ggcaagaaactgaacgtagtacagctgctg

SEQ ID NO: 101842 - DNA, 30 bp, Homo sapiens
  chr22:50313328-50313358
  hypo
cactgccttggaggcgctgacggtgggccg

SEQ ID NO: 101843 - DNA, 414 bp, Homo sapiens
  chr22:50316604-50317018
  hypo
tctcactctcacacaatgtgtcgccatcctcatggggcgcctgccccggttggcactgagtgtctaaggacagggcctggccatcgcctcatcccctcccctgccgcgtggggcctccgaggatggcatttgagatgattcctcctcaggggctgccctcctccctgcccttccccagccggccctggccacgggctgtgtcaggccatgatcggtccttccccgctccctggccgggctgtcctgggccgctcacagctgtgccgctctgttccagatgtggacgagtgtgcggccgagccgcctccctgcagcgctgcgcagttctgtaagaacgccaacggctcctacacgtgcgaaggtgggccaggcgggcgggtctgcactccggggcctgccgggtttcgttgctgc

SEQ ID NO: 101844 - DNA, 31 bp, Homo sapiens; identical to SEQ ID NO: 34605
  chr22:50324434-50324465
  hypo

SEQ ID NO: 101845 - DNA, 43 bp, Homo sapiens
  chr22:50340690-50340733
  hypo
ggccactgtccacccaagccccgcaggcaggaacccttggtat

SEQ ID NO: 101846 - DNA, 122 bp, Homo sapiens
  chr22:50341661-50341783
  hypo
ctgtcccatccctctggaacccgccctggtgaggggtgcaggggccctcagtggccaccttataggaccgggcaccgggcacttcatgaggctgtctgctcggccacagcagccctgctgat

SEQ ID NO: 101847 - DNA, 404 bp, Homo sapiens
  chr22:50343412-50343816
  hypo
cccaccaggacccaggttctccgagcagaggatcagatttccggcattgctgcccgggctccacgcatccgggcctcgctcacgggtctctctatacacgggtctccactatacagaaggccgatcagtggcccctgcccctggagcagagcccctcaaccggcagggacacaggcttcccactggaggggccctggggagaagtccttggctggagaggggggtgggccgtcagaaactccccaggcgggtccagcatgctggggggcagcacaggcccagggctgggaccctctgcagtgtgggtctcgcagtgtccccccgctggccagaggtgaggcctcaggtgtggcgggcacaggccatgagagccgcacctgcccgagggccctggctgttggact

SEQ ID NO: 101848 - DNA, 185 bp, Homo sapiens
  chr22:50344326-50344511
  hypo
taagcaagtaactagaaggaccgggcccagccgcctgctggagctgccgggggtccaggggcagccgccctgccaggcctactctacggcaacacggagcgtttgcagcagcttctcccaggccctgtgggccgagggctcaggagtccagggcagcgcaggacgggcacagctgggggcccctc

SEQ ID NO: 101849 - DNA, 87 bp, Homo sapiens
  chr22:50346584-50346671
  hypo
gatatggggacaggcaggtgacggcccggctctcaggctccccatctggacgatggatggacacgcgtaagcaagaccctgaggccc

SEQ ID NO: 101850 - DNA, 30 bp, Homo sapiens; identical to SEQ ID NO: 34607
  chr22:50352369-50352399
  hypo

SEQ ID NO: 101851 - DNA, 68 bp, Homo sapiens; identical to SEQ ID NO: 58194
  chr22:50422157-50422225
  hypo

SEQ ID NO: 101852 - DNA, 190 bp, Homo sapiens
  chr22:50433173-50433363
  hypo
cagcactcaggtgagacgatgtccaggctccagagggtggctcagcggggaagccggagagcctacgtgacccacacgagaagtcttcaagggccgaccccatggcccactgcacaggccactgctgggcacccctggctgggacctggatgtgccacttggaatgtctgagaaccgcacatcccagcag

SEQ ID NO: 101853 - DNA, 30 bp, Homo sapiens; identical to SEQ ID NO: 34609
  chr22:50435398-50435428
  hypo

SEQ ID NO: 101854 - DNA, 30 bp, Homo sapiens
  chr22:50439212-50439242
  hypo
cctggccacccacacgctctgacactgcgt

SEQ ID NO: 101855 - DNA, 30 bp, Homo sapiens; identical to SEQ ID NO: 58195
  chr22:50453422-50453452
  hypo

SEQ ID NO: 101856 - DNA, 30 bp, Homo sapiens; identical to SEQ ID NO: 34610
  chr22:50464993-50465023
  hypo

SEQ ID NO: 101857 - DNA, 90 bp, Homo sapiens
  chr22:50466961-50467051
  hypo
gtgggaatcagggaggcggcaacacctgcgtgccgtcataaagacccccaccatgccctcgtaaagacccccatcacaccgtcctgaaga

SEQ ID NO: 101858 - DNA, 30 bp, Homo sapiens; identical to SEQ ID NO: 34611
  chr22:50470007-50470037
  hypo

SEQ ID NO: 101859 - DNA, 50 bp, Homo sapiens
  chr22:50488451-50488501
  hypo
gcaccacactcaggccggcgccgactcctcctgcccgtgacagacgcaca

SEQ ID NO: 101860 - DNA, 211 bp, Homo sapiens; identical to SEQ ID NO: 58196
  chr22:50496971-50497182
  hypo

SEQ ID NO: 101861 - DNA, 8 bp, Homo sapiens
  chr22:50511908-50511916
  hypo
cagcactt

SEQ ID NO: 101862 - DNA, 50 bp, Homo sapiens
  chr22:50521513-50521563
  hypo
gagcctgcagcacagcgcaagtaatccatctcagccgggaacacgttccc

SEQ ID NO: 101863 - DNA, 67 bp, Homo sapiens
  chr22:50529038-50529105
  hypo
caagcccatctttctaaagcccgggatgcgcccggatgccctcaccgttcctttctcctgaggtgtt

SEQ ID NO: 101864 - DNA, 30 bp, Homo sapiens; identical to SEQ ID NO: 34612
  chr22:50529683-50529713
  hypo

SEQ ID NO: 101865 - DNA, 199 bp, Homo sapiens
  chr22:50601379-50601578
  hypo
tggcaggtgggagagacgcaagaagcaggtgtggggtccacacttgagggagtgctcttgggcagagacgtggggagccagtgttgaggctgggcaggtgtcctcagctgggggacacctcagcaatgatctggcgtgtgcccagggtggcaggagaccaggcggggtcattctataaaggactcggggcacctgtttg

SEQ ID NO: 101866 - DNA, 30 bp, Homo sapiens
  chr22:50610245-50610275
  hypo
gtactagtctgcagcggggaggggtgttgg

SEQ ID NO: 101867 - DNA, 102 bp, Homo sapiens; identical to SEQ ID NO: 58199
  chr22:50623612-50623714
  hypo

SEQ ID NO: 101868 - DNA, 281 bp, Homo sapiens; identical to SEQ ID NO: 58200
  chr22:50623741-50624022
  hypo

SEQ ID NO: 101869 - DNA, 132 bp, Homo sapiens
  chr22:50626941-50627073
  hypo
cctcctggcttgtagacgggcccccgcggcgtccttacccgggggagcaagagctgcgtggcgtctcttccaggagtactaaccccgtcatgggggctatgcactcatgacctcatccgaacctgatcacct

SEQ ID NO: 101870 - DNA, 31 bp, Homo sapiens
  chr22:50628014-50628045
  hypo
gagatgtctgtccccccggaggggcagccag

SEQ ID NO: 101871 - DNA, 30 bp, Homo sapiens
  chr22:50632804-50632834
  hypo
agctgaagcggcggcgtcagcggcccaacc

SEQ ID NO: 101872 - DNA, 30 bp, Homo sapiens
  chr22:50647100-50647130
  hypo
catgccagcgacagcgtgcagagaaatgct

SEQ ID NO: 101873 - DNA, 30 bp, Homo sapiens; identical to SEQ ID NO: 34613
  chr22:50654262-50654292
  hypo

SEQ ID NO: 101874 - DNA, 31 bp, Homo sapiens; identical to SEQ ID NO: 34614
  chr22:50656978-50657009
  hypo

SEQ ID NO: 101875 - DNA, 30 bp, Homo sapiens; identical to SEQ ID NO: 34615
  chr22:50657583-50657613
  hypo

SEQ ID NO: 101876 - DNA, 249 bp, Homo sapiens
  chr22:50686571-50686820
  hypo
catctagggacagttcggagtcatagccactgcacaggagcccgaggtgggatcctgcagcctagcacccggccacactgaccttgctgctggaggctcttccagtgcggggcctgggcagcacgggcactctggatggactctagggcactgtgagggagacacaacagtcgtgacacctggtctcacaccccggccctgcccgccctacctcccctcgcacctctgacatggcgccattggccctga

SEQ ID NO: 101877 - DNA, 30 bp, Homo sapiens
  chr22:50693839-50693869
  hypo
cacactccagcacccggtggcccccacact

SEQ ID NO: 101878 - DNA, 40 bp, Homo sapiens
  chr22:50695753-50695793
  hypo
acatccacactggcctcggtgtcctcgcagccccaccttg

SEQ ID NO: 101879 - DNA, 35 bp, Homo sapiens; identical to SEQ ID NO: 34617
  chr22:50706160-50706195
  hypo

SEQ ID NO: 101880 - DNA, 197 bp, Homo sapiens
  chr22:50714228-50714425
  hypo
attgatgatctgagggagggtcgcatcagagcacaccgggggaccgcccagcaccccacctgcccccgcccccgggggcctgaccctacctcgtcatagtacttctgcgtgtattggtagagctggtggagtgccacgagggtgttcaaggagtccgtgtgcgcctggggggtgacgggacagtcagggtggaaaag

SEQ ID NO: 101881 - DNA, 30 bp, Homo sapiens
  chr22:50716388-50716418
  hypo
cccaggcgccagcacgctctggaagaagtt

SEQ ID NO: 101882 - DNA, 1709 bp, Homo sapiens
  chr22:50718697-50720406
  hypo
gacactgtgaccagctgaaaccgctggacaggaagggctagagtccggctttgagtttgtggccggggacaccacccctagaccgccccccaccaccagcgctggctggcacctgccggctcctgggggcccaacaggccgctgtgccacccgccaccagccccagagcccctgcggccgccccgcccgtggccccgctcgtggccccgcccatgtgcacctgcgcagcatcagcttggggttcttggccaccacgtactgctccaggagctccaggaagagcgtgtgcatgatgtccgtgtagtactccagtttcccgtgcagcgccaccgtcagcagggacgcgaagtagaccttggcgcgggccgagaactcccgctggttctccagggtgtggatgaactgtaggggccggcggtcaaagcctgcccggcgccacctgtgtgccctcccgcccgcccgacgcctggctcacattgatgaggaaagacttgctgttcagcaggttggagaactggtagagggcctgctccaccaccggccgccgcggctcagggatgtccagcttgccggtgatcatcacgtccttgtcgccgtccttggagggcaggaagaagacgcggtcggtgtaggtcttgtagtccagcacggggatgccggcctcgtgcacgtcgttggtctggtcctccatctcgatcatcaggtctggggggaggctggcgtgagacgtccctggccacgtggggccctgacccccacgctacacacagcatccccgccccaggaggcgccccagcaccagcccccaagcggtccctacctgtgaattccttcttgcagcggtcccgcacgctctcctccaggccctccagctgggacttgatcttctcatactctcgttcggcctgctggctcttcctcctgcaaggcacagcgggcctcctaggttctgccggggctggccgctcagctgcccggatgaggaggtggatctacacgcctgcctgtgcagggcggcggatgaggccagaggggccgaggcgggagggccgagggctcagggtgttggcacagccggggggcgggctcaccagtagcagtagacagacaccgcgatgacgaccaccatgggcacgatgaccagcggcaagatgaggctgagcggcacgtcgctcacccgtgtgtcgtactccacgcggcccagcacccactcgcgagagccgaacttcacctgtgtggggggccgggttcagcgcggtcccgtgggggcaccccccgccagtccccgctcacgcacaatgaactcgggcaggttgtgtgtggtgtctcgtttctgccgccgcttgggcgggggctgcacctccgggggctcacagtacaggtcggtctccgtcagcgtcttcatggtgcagcgctcggcacccacgaaggcctcggcctcctgcagcgtcatcgccttgttcagattggtgccctggggaggcggcagtggtcggggtgaggaggagggaaccagggacaggtggaccagctctcagcccagacccgagcaggacccagacacccggggctgcaccgtcctcacccgggcgtggatgagcttgttgacctgcttcttgacgccacctgtgaagttctcaaaggtggggtcaggcacgtactcgaaggccccggcctctgttctgagcagggcacggtgcccgtccatc

SEQ ID NO: 101883 - DNA, 135 bp, Homo sapiens
  chr22:50720656-50720791
  hypo
actgcaggggctccgcgatgaccaccatggcaaacctctggatcaggctgaagccctgacccgtgacgttgatgctgcggccaccactgcggagggcagtgccttcgtgggctcggctggcaggggtggtccctg

SEQ ID NO: 101884 - DNA, 1137 bp, Homo sapiens
  chr22:50721351-50722488
  hypo
gggaccagccccagcccgaccaggctggccccgccatcccctcagggccactcaggtctcagtaagtgcccccctccatacccagggccagggccaaccagactcagcagctggcggtgacacccacactttacacgggacgccgttgagggtcacccgcacgtcctcctgggagcccgtgtccaggtgggtgccgtggatggtcagtgtggtgccgcccgcctgcggtccctgctgcggctccacactgagaggcttgggctgctgaaagagccgcaggggcactcgggtgaggacggggcacaggacgccctcggtcctgggctggatggtaactgtcgtggggaggcggcgggcagagcccctcctcccggtcctcccgggttcggcaggtccccgaggccgggtgcttacttggaaggtgaactggacattgggaggcgaacggcccagtttcccgaagacgtccacctcgacaccccccgtgaaaggcgtctccgcagcctcgatcacacacacgatcctggcgggcgacaggcagtgtggcccaggcactccccgacccaccccacaccctgacaccctcaccccctcagcctccccacccacccagtcacccggaaccccagcgtgggtactgacccagctgacagggcccagaccagggccgtccactcaccgggtggacacggagtaacgttccggctgaaaggagcagttccggccggccacagagatcctctggatgtcccctgcttggacgcccaaattggaccccaggatggtgatgcggatgcccccacccagggggcccgtctcaggctggatctgaaaccacagagccgggtgagcagggaggggctcatgccagggacgagggaaggtgtaggccaggcttcgaggggctcaccctggtgatgacgggcggcgggcactcggaggtggtgttgcacagggcctcatacacgcacctgctctggcccccgcaccacgcacacctgtagtcggggttagcggcccggcacaggctgcagtcgctgcggccaaaggagcagttgtagagggtcactgcggggagagctgccgtcagtggtcaccccgtgcctgcccgcccccgacctgctccccactgcgccc

SEQ ID NO: 101885 - DNA, 622 bp, Homo sapiens
  chr22:50724161-50724783
  hypo
accggccggcacccctccctccgcacctgagcctgcctgtcaccagccggcacccctccctccgcaccttcacggtgtccaggttcttgccctggaagttcacatctgtctcgtggttcatggggatcaccagggggctgggtcccaggaactggggacagctgtcctcctgggagagtaaggctggtcaggtgctgcctgggcacagcggagcagccatgccctgaacagtcccctgaggccccgaggcccctcaccatgtgggcacggacgatgccgtcctcagggttgggcgaagcctcccggcactcgtggtagcgcaggtcccactggcaggtccagcggttgctcacgcaggagatgcacctgcatccagaggggatcgtgagcagggctggggtggacgggcagggtggggtcgatgggcacaagacactcacggcaggttctcctccaggctcatggcctggcggcagtcgtagaaggggtactggtaggacgtgaggaagatgttgcctcgtctaaggaggagctggatggtcacggccacgtggtctgcagacagcagagggggaggtgtcaaggtggcggccgcagggccgagggccaggctgggcctccc

SEQ ID NO: 101886 - DNA, 30 bp, Homo sapiens
  chr22:50725802-50725832
  hypo
agaacccgactccacgtcttccaatacagg

SEQ ID NO: 101887 - DNA, 30 bp, Homo sapiens
  chr22:50728155-50728185
  hypo
cgcagccacggaggcggccaggcaggtgcc

SEQ ID NO: 101888 - DNA, 30 bp, Homo sapiens
  chr22:50728519-50728549
  hypo
tcaccaccaggacccgtggagctcaccagc

SEQ ID NO: 101889 - DNA, 85 bp, Homo sapiens; identical to SEQ ID NO: 13527
  chr22:50745644-50745729
  hypo

SEQ ID NO: 101890 - DNA, 22 bp, Homo sapiens
  chr22:50749079-50749101
  hypo
aagaaaagtcccggccgggcgc

SEQ ID NO: 101891 - DNA, 31 bp, Homo sapiens; identical to SEQ ID NO: 13528
  chr22:50765138-50765169
  hypo

SEQ ID NO: 101892 - DNA, 30 bp, Homo sapiens; identical to SEQ ID NO: 58206
  chr22:50766092-50766122
  hypo

SEQ ID NO: 101893 - DNA, 30 bp, Homo sapiens
  chr22:50845144-50845174
  hypo
gacttgtgatgtgccgcagatcagcgaccg

SEQ ID NO: 101894 - DNA, 77 bp, Homo sapiens; identical to SEQ ID NO: 34623
  chr22:50853284-50853361
  hypo

SEQ ID NO: 101895 - DNA, 31 bp, Homo sapiens; identical to SEQ ID NO: 34624
  chr22:50861881-50861912
  hypo

SEQ ID NO: 101896 - DNA, 30 bp, Homo sapiens
  chr22:50862941-50862971
  hypo
gtccgcgtgtggaacgtctgtcagcgtgta

SEQ ID NO: 101897 - DNA, 80 bp, Homo sapiens; identical to SEQ ID NO: 34625
  chr22:50864148-50864228
  hypo

SEQ ID NO: 101898 - DNA, 150 bp, Homo sapiens
  chr22:50873265-50873415
  hypo
acactgggcaggggccgggcacttgctctccgaagtgaacctggaggcctctgccacttggctctctgggtcgtgggtctggcaaggtcggggccaggaggccgccccgatggtgcctgttgctttcagggcagcgggtggcatgagacg

SEQ ID NO: 101899 - DNA, 30 bp, Homo sapiens; identical to SEQ ID NO: 13529
  chr22:50874139-50874169
  hypo

SEQ ID NO: 101900 - DNA, 73 bp, Homo sapiens; identical to SEQ ID NO: 34628
  chr22:50874674-50874747
  hypo

SEQ ID NO: 101901 - DNA, 466 bp, Homo sapiens
  chr22:50877968-50878434
  hypo
ctccttgaggggctgacgggcactgcctgggcctccctcctggagcagccccatcttcctgtcaacctctgaggggctcccggggcaggggcgctgcctcccctttgcctgcagcaccccaggcctgcccacgcctgaccactgtgtctctcccccagcaggcgccatgtggacggcagtgtttgatgagccagcgaactcaacgcccacagccccaggagtggtgagggacgtgggttccagtgtgtgggcagctggcacctcagctccagaggagaaaggctgggccaagttcactgacttccaacctttctgctggtaacaaatgcgctggcaggagggggctgtgccaggaagtgcctgtcagggccaggaggcacctgtcccccaggactgatcctgtcctcgtccttgtatgcagctccgagtcagggcccaggtgcagctctccggtggacacagaatg

SEQ ID NO: 101902 - DNA, 68 bp, Homo sapiens
  chr22:50882673-50882741
  hypo
tgatgctgctgccgcccggccacggcccaccctggtcaggctgcctccttaatcgagaaaactacctg

SEQ ID NO: 101903 - DNA, 198 bp, Homo sapiens
  chr22:50884058-50884256
  hypo
caggtgccaggaacttcggtcaggcgccatctgtccggcctgagggaagacctggctggtttcagtggctcaagtgagcccaccctcacatctcgcccaggtgtcccaacaccacctgtggggtgggggaggtggcgggaccatgctgggcctgacagggtccaaggccatccttggcttcaacgtcccaccagggga

SEQ ID NO: 101904 - DNA, 551 bp, Homo sapiens
  chr22:50885390-50885941
  hypo
aataagttagggccggccgggcggggcggggcggggacgggggctgtacacacaagtgctgggggctcggggcctcaatactgtcgagggccggggctgtaaacatggccggggcggccctgcccacccctagtggtcggtaacgaccggaagcagagcagccgggcagggctgggaggctcaggcgtccgacaggcagctctggatccggtccacccactgctgggccgagggcacgtcctgggcacagaagttgtaaacgcgacgcgttgtcttcacctggggaagggcgggttactgactccgcagcccccacaccgcagagcccctcccctctcccaagccccggccaaggctcacgtcaaagaaggccttctcgtccacagtcttaggggcacccatagtgggcgtgccaggtgccacagcctccacctccgccaagtcgatgacacccttgcactctgtgtccacacggtggtcgtagtagcgcagctggaggaggccacagagtcagcggagccccctcccccgtgagtcccccccaccacctg

SEQ ID NO: 101905 - DNA, 164 bp, Homo sapiens; identical to SEQ ID NO: 34631
  chr22:50894557-50894721
  hypo

SEQ ID NO: 101906 - DNA, 211 bp, Homo sapiens; identical to SEQ ID NO: 34632
  chr22:50895155-50895366
  hypo

SEQ ID NO: 101907 - DNA, 30 bp, Homo sapiens
  chr22:50897896-50897926
  hypo
acctggagaaggtgcgttctgggccttgaa

SEQ ID NO: 101908 - DNA, 660 bp, Homo sapiens
  chr22:50899049-50899709
  hypo
atgtccggcgggtaccgcagcttatgcagctgcttacggaagagctcggcgctgtcagaccccacctcctcgtcaaaggccattttcagcagctgtgtcagtaaaagcagcccttaggggtgtgggtggccccccagcccctcccccaactctgacactgccaggctccccttcccctcgcagccatgacagagagagaagcaggccccaggcaaaggcctgtatctgtgtcacacgaaggcaagcgcttgtgtaaactcgaaatctcagtggctgtgagctgaggcctgggtttgcaaggcacacccaagacacggacttgagggccggcgccccaaggaaaggacaaggacccaaagaccgcacatcaaacagtggacatcaactcaagagccacagtgagggccccagacatgcaagcgtaacaacagggccactgctggagactggcctaaaaatggttcatacaagaaagaccggtttgcaggagaaagaccagggcgggggatgagagccccacccgcgcaccgcgccccacctggaatgtgcaggagcgcagctggagcccgtcctgcaggagctggtccacaggggtctggacgctgatgcgcttctccttggtcagcgcagccaccgggaaggagcggaccaccacctgct

SEQ ID NO: 101909 - DNA, 236 bp, Homo sapiens
  chr22:50900057-50900293
  hypo
ctcctcacgcccatccggcagcaggtagacgcgcaggccgtccagcacacactcctcacccggcagcaggcgcggccgcagcagcttgggctgctcgaaaacaagagcaggagctcaggatgcagcccgggccttgggcccccgcagccccaacggcccccgcaaaccttctggatgggcggcagcctccggctctcccgctgcacggcctccagggtctcgatgtgcatctggac

SEQ ID NO: 101910 - DNA, 138 bp, Homo sapiens
  chr22:50918771-50918909
  hypo
tcaccagtgttgattcggctgatgtggctggctcagaggcaggtgtccccctccttccccactgttccctgtgcgtccctccgaagctgcacgctccatcgaagaggatggaggaccgggcttcgagtagctgcgctc

SEQ ID NO: 101911 - DNA, 81 bp, Homo sapiens; identical to SEQ ID NO: 58211
  chr22:50920027-50920108
  hypo

SEQ ID NO: 101912 - DNA, 230 bp, Homo sapiens
  chr22:50922549-50922779
  hypo
caagggggagggtcctggaagcgcccacccaggcgccgcccctgtgcttgctccccgagctcagggattgccgagtccacgtaactgacctgtactccacgaggccctgtgggaacggtccaggctggtcctgccctgtggaggcctccgtgcactgagagatgtactaggattgcagcaaaggtggtcagggtgatgggccgcacagcgaggcagtcaaggccagctcc

SEQ ID NO: 101913 - DNA, 96 bp, Homo sapiens
  chr22:50925262-50925358
  hypo
gagcctggctgaggacacactcgccagcctgtgctttgccacctgagcgccgctccctctcaggatgaaggtgacggtggtgagtacccagacccc

SEQ ID NO: 101914 - DNA, 31 bp, Homo sapiens
  chr22:50926292-50926323
  hypo
ctgccttctccttccccgccagcatgcccag

SEQ ID NO: 101915 - DNA, 112 bp, Homo sapiens
  chr22:50927879-50927991
  hypo
gtggggggaggggcaacgcagcccgtccaccaggcccggtcctgcagccccaagtgagccgctgggtggccttgcccgcaggctttctacatgatccggttccactccttct

SEQ ID NO: 101916 - DNA, 211 bp, Homo sapiens
  chr22:50938933-50939144
  hypo
ccacacaaaagcttgcatatccaatgttcacagcagcactattcacataggaaaggcggaagccacgcaagcgtctatcgatatacgaatgaataaggacagggaaaacgtggcccctccgtacactggactgactcagccctaaaggaacacagcgctcatacgtgctatgacgtgggtgtggccttgaaaacaccgtgctgagtgaaag

SEQ ID NO: 101917 - DNA, 30 bp, Homo sapiens; identical to SEQ ID NO: 34636
  chr22:50941784-50941814
  hypo

SEQ ID NO: 101918 - DNA, 1017 bp, Homo sapiens
  chr22:50942718-50943735
  hypo
ccttacccctgcaccccgggctccacaccccacccggtgcccagccttacccctgctccccaggctgggagaaccagtacttgtagcgctgggctcggacgtaggtgggcggctgcttgtggaagggatacctggccacttggctctggacaaggcggatcactgcagcgagaggcatcagcgtggcccccacagtacccgccctgcccctcccctccccaccccgctccaccccagcccactccacaccccccaagcccgctccgcacctggctccttgccctgcagcaggcgcaagaccaggcttgtgaaccacgggctgtgcgtgtgtgggcccagggctgcaaaccacatctgccagtccaggcgtggctggtggggcaccacaaccgggggcggccggctcaggttcccaggcttgtacatgaactcgatctcctgccaggcaggccgaggtcagctgggcccgctgacctgggccccaccaccctgcccgccctgggagggctcaccgtccagtggtggccgtcgtaactgccctccagcaccacctcaggccgtccaccaagcccagtcatgcggcggaagaggccgtaggagttggccagctgtaggtgctccacggcaccaaacaggcggtgggccccggtccagaggcgcccgtgggtcccgggctccacgtaggagtacggcacctggagacaggtgggaggttctcagggctgccctgcccccagcccatcccccagccctgcagcgctacccaccaggctaatcaggaacaaggccacggtcgcagtgcccacaagggacagttggactacagcactgagcttccgtagccagccccgcacctgggtccacctgtgggcaaggacccaaggtcgtcaggccggccctgcacacctgtgccccctccctgcttcctgggccatgtacctccacagggcactcagcagctcccagaccagggaggccacacccagccacacagtgggcagcgtcagtgtcttcagc

SEQ ID NO: 101919 - DNA, 699 bp, Homo sapiens
  chr22:50944141-50944840
  hypo
cagccaggtgctggtcgtccagcagcgcagtggtaagcaccagcgtcatcaggttgaagaagttgtagttgccggtgatgataatcaggacctgcagcagcacctgggggcggcccgctctcagtgctcccggagactgacgcctggccccgtggcaggcacccacctccaccctgcagggtgcatccctctgctacaaggccttcccaacagcggttgccagctgtccccgggagccacgctgtccccaacagggcacgctgagcagcgctgaaggccgagccctgtctgcctctctctgacagctgcggccctcacccacctgcgagtagaaagcagccaagcgcaggcgtcgaatgggggcgaagaacaggggcggcacagcgatctcaattaggaaggtggccaccacgctgagcttgtgcagccagaccggcaggtggtgtgcgaaccaggcggcgggcgtgggcaggcactgggtctcgtagtggtaggtgagggctgcaggcgagggcaggagtcagggctggccgagcccccagactaccccaggtccagaccgggcccctcaccagtgagcccccaccacgcagggcagcggctggtcagcttgaccacgcctgaggcgaacatgaggcggaacagcagccatcgcaccagccagaaggggaggtcttcgtggggcagggcccctgcctg

SEQ ID NO: 101920 - DNA, 30 bp, Homo sapiens
  chr22:50954367-50954397
  hypo
gggtggagcgcctggcgcactgacgtttaa

SEQ ID NO: 101921 - DNA, 160 bp, Homo sapiens
  chr22:50954886-50955046
  hypo
ctgcatttcttttgacgaaggcaagaccacaatgaacttcattgaggcagcgttgttgatccagggctctgcctgcgtctacagtaagaaggtgggccctgcttgacgctggtcttggcattttggtggccagtgggaccacagtcggctctccttctgg

SEQ ID NO: 101922 - DNA, 31 bp, Homo sapiens; identical to SEQ ID NO: 34639
  chr22:50958186-50958217
  hypo

SEQ ID NO: 101923 - DNA, 252 bp, Homo sapiens
  chr22:50961987-50962239
  hypo
acacacagattaaacgcagcccgtttaatgatggggcccagactgcagtggctcaagacaggacactgcggaaagccgccatgtgccgccgcacactgtctgagatctgctcagccgatctgctccggccgtagtaatccgtgaagaggccgtcagggttgagcaggtagatggcaatggagtggtccacgatgtagtcctggtcctcatccttggggcctgcattgtagtacacgcggtaactgtgactag

SEQ ID NO: 101924 - DNA, 640 bp, Homo sapiens; identical to SEQ ID NO: 13532
  chr22:50970391-50971031
  hypo

SEQ ID NO: 101925 - DNA, 30 bp, Homo sapiens
  chr22:50989617-50989647
  hypo
gtgacctcttcatacgggcagagggtggca

SEQ ID NO: 101926 - DNA, 96 bp, Homo sapiens
  chr22:51010438-51010534
  hypo
tttggaatgtcccactgcagccgtgtaggaggtgcgagcgcagggttcggtttgcccaggcagtgcccggtctccgtgtagcccaggtggaagctg

SEQ ID NO: 101927 - DNA, 79 bp, Homo sapiens; identical to SEQ ID NO: 34641
  chr22:51023315-51023394
  hypo

SEQ ID NO: 101928 - DNA, 30 bp, Homo sapiens; identical to SEQ ID NO: 34642
  chr22:51023881-51023911
  hypo

SEQ ID NO: 101929 - DNA, 30 bp, Homo sapiens
  chr22:51063665-51063695
  hypo
cacctggctggggccgaaggtcacagctgc

SEQ ID NO: 101930 - DNA, 83 bp, Homo sapiens; identical to SEQ ID NO: 13535
  chr22:51112150-51112233
  hypo

SEQ ID NO: 101931 - DNA, 30 bp, Homo sapiens; identical to SEQ ID NO: 58222
  chr22:51112521-51112551
  hypo

SEQ ID NO: 101932 - DNA, 31 bp, Homo sapiens
  chr22:51117959-51117990
  hypo
gattgcatgtgtgcaccgagtgtggatatac

SEQ ID NO: 101933 - DNA, 270 bp, Homo sapiens
  chr22:51149170-51149440
  hypo
ccaccttaattttcagcgacacctgaacttgttttctatggggttttgccttttttctgaacaaacgtttgactgagccaagcatgatggagttgtgcatatctgtgtgtgtgtgcgtgtctgtgcgttggtgagcggacacgcgctgtctgcacctgcgtgcatgcggcacacatgtctgtgcgtgggtgagtggacacgtgctgtgtgcacctgcatgcgtgtggcacacgtgtgtgcatgggtgagcggatacgcactgtgtgcgcc

SEQ ID NO: 101934 - DNA, 257 bp, Homo sapiens
  chr22:51160331-51160588
  hypo
ggaggaggctgacacacgcagctccagcgacccccacctggagaccacaagcaccatctccacggtgtccagcatgtccaccttgagctcggagagcggggaactcactgacacccacacctccttcgctgacggacacacttttctactcgagaagccaccagtgcctcccaagcccaagctcaagtccccgctggggaaggggccggtgaccttcagggacccgctgctgaagcagtcctcggacagcgagctca

SEQ ID NO: 101935 - DNA, 199 bp, Homo sapiens
  chr22:51171375-51171574
  hypo
acagactgccacatacacactcggtctcacactcacctgtgggttttggttccgttcaatttgggtttttaactttacagggtcagttccgcttcacctccttttgtatggagttccatccggggggtttcaccccctgctccagtcctgaggcctcctgaccctgacgttgtgatacgccccacagagatctatgttt

SEQ ID NO: 101936 - DNA, 30 bp, Homo sapiens; identical to SEQ ID NO: 13536
  chrX:2647654-2647684
  hypo

SEQ ID NO: 101937 - DNA, 30 bp, Homo sapiens
  chrX:2836220-2836250
  hypo
ggcagtgatccccgcgggatgcacaattca

SEQ ID NO: 101938 - DNA, 761 bp, Homo sapiens; identical to SEQ ID NO: 58226
  chrX:2846756-2847517
  hypo

SEQ ID NO: 101939 - DNA, 247 bp, Homo sapiens
  chrX:2931092-2931339
  hypo
gtgtctgcctacaacctgaaccgtgccttcacgtggcttggtgggtcaggtggtcttcccaccaatgaaacgacttttgccaagctgctgcagcaccgtggctaccgcacgggactcataggtatggcgccggaactctgcccgtggaaacgtgatcctgcagcctctctgtcatcgtgtctaaggtgtttccggggatgttggctttgtgcgcgccagtttgaccgacttctctttgagataagac

SEQ ID NO: 101940 - DNA, 29 bp, Homo sapiens
  chrX:3675259-3675288
  hypo
caggaaaatgggggtaatggccgggcgcg

SEQ ID NO: 101941 - DNA, 39 bp, Homo sapiens
  chrX:4606592-4606631
  hypo
aatagcatttttttttttagacggcttctcactctgttg

SEQ ID NO: 101942 - DNA, 38 bp, Homo sapiens
  chrX:4606870-4606908
  hypo
tgtgagccactgtgcccggctgtgagcagaatgatttt

SEQ ID NO: 101943 - DNA, 43 bp, Homo sapiens
  chrX:4637571-4637614
  hypo
ttattttggctgctcaacttccgcttcatatcttgcttcttgc

SEQ ID NO: 101944 - DNA, 28 bp, Homo sapiens
  chrX:4643044-4643072
  hypo
tggtcacaagtcttttttagccgattat

SEQ ID NO: 101945 - DNA, 121 bp, Homo sapiens
  chrX:4643431-4643552
  hypo
accatcgcggtgagtgttacagttcctaaaggtggcgcgtcctgagttcattcctcaagtccggagttgttcgttcctcaagtccggagttgttcatccctcccaggggggttcgtggtct

SEQ ID NO: 101946 - DNA, 140 bp, Homo sapiens
  chrX:6105439-6105579
  hypo
ggaggcggacgcatgcgcacgtacacgcacaggcacacgccagaaggcacgcacacgccaggaggcacgcacacatttccgcacccgatgccctacgcatcaccgacgtaatgtcccgcgtggagccccacagggaggaa

SEQ ID NO: 101947 - DNA, 37 bp, Homo sapiens
  chrX:6617023-6617060
  hypo
gtgagccaccgcgcccggcctgaaaatatttttacat

SEQ ID NO: 101948 - DNA, 31 bp, Homo sapiens
  chrX:7112969-7113000
  hypo
aaaacctggacagcaagtgaccgtactgaat

SEQ ID NO: 101949 - DNA, 30 bp, Homo sapiens
  chrX:8663331-8663361
  hypo
cacagagcgagattccgtctctaaattaat

SEQ ID NO: 101950 - DNA, 30 bp, Homo sapiens; identical to SEQ ID NO: 58236
  chrX:8698486-8698516
  hypo

SEQ ID NO: 101951 - DNA, 221 bp, Homo sapiens; identical to SEQ ID NO: 58237
  chrX:8698836-8699057
  hypo

SEQ ID NO: 101952 - DNA, 651 bp, Homo sapiens; identical to SEQ ID NO: 13546
  chrX:8699110-8699761
  hypo

SEQ ID NO: 101953 - DNA, 30 bp, Homo sapiens
  chrX:8769254-8769284
  hypo
ctgcctccctaccgcgagcgcttcacctgc

SEQ ID NO: 101954 - DNA, 31 bp, Homo sapiens; identical to SEQ ID NO: 34651
  chrX:9191714-9191745
  hypo

SEQ ID NO: 101955 - DNA, 31 bp, Homo sapiens; identical to SEQ ID NO: 13548
  chrX:9240652-9240683
  hypo

SEQ ID NO: 101956 - DNA, 34 bp, Homo sapiens
  chrX:9289522-9289556
  hypo
gaaggaaagtggggcctggcacggtggctcacgc

SEQ ID NO: 101957 - DNA, 30 bp, Homo sapiens; identical to SEQ ID NO: 58242
  chrX:9432825-9432855
  hypo

SEQ ID NO: 101958 - DNA, 30 bp, Homo sapiens; identical to SEQ ID NO: 58243
  chrX:9433100-9433130
  hypo

SEQ ID NO: 101959 - DNA, 1064 bp, Homo sapiens; identical to SEQ ID NO: 58244
  chrX:9433357-9434421
  hypo

SEQ ID NO: 101960 - DNA, 31 bp, Homo sapiens; identical to SEQ ID NO: 34654
  chrX:9571727-9571758
  hypo

SEQ ID NO: 101961 - DNA, 43 bp, Homo sapiens
  chrX:9656567-9656610
  hypo
atgtaacacatgattattgcccgtgataaacaaaagtgtttca

SEQ ID NO: 101962 - DNA, 30 bp, Homo sapiens; identical to SEQ ID NO: 58245
  chrX:9751458-9751488
  hypo

SEQ ID NO: 101963 - DNA, 459 bp, Homo sapiens
  chrX:9863401-9863860
  hypo
tgcaagcagcacagctctgggcgggatgctggccttctgacacagcccttggagccctcgagagtcttcccccacccacggtgggccagagcccacgccatcacctacctcagcctgagggtcctccggatgcccgcgagacaggacggtgttacccgctggacaaaggggccgagggctgctccgcgggagcccaggagcctcccagggccagccgtgcagaaaaagccagccagaggctggcagccagcatcacgtgggcagatggggagagcagcaggatctgcccgcaggagacgcccctgttgcactccctgacccaggaggggaagcgccggcctgagagcagtccagaggacagcgccaccagaccgccaccgttcgacgcccacgtgggcaagcccacccgaagaagcgaccgctttgccaccaccctgcggaatgagatccagatgcata

SEQ ID NO: 101964 - DNA, 43 bp, Homo sapiens
  chrX:9874883-9874926
  hypo
ttcagagattgacaaagtttgcggaagatgagatgataaatat

SEQ ID NO: 101965 - DNA, 45 bp, Homo sapiens; identical to SEQ ID NO: 13550
  chrX:10023768-10023813
  hypo

SEQ ID NO: 101966 - DNA, 30 bp, Homo sapiens
  chrX:10079956-10079986
  hypo
ccccggcagatgatacgtgcggcggcctcc

SEQ ID NO: 101967 - DNA, 716 bp, Homo sapiens
  chrX:10085162-10085878
  hypo
gcctgtgtgccagcaccctgacggtgtcctcggggagcagccgcgggtccctagcctccagccgtgggtctctggcctccagccggggctccctgagctcggtcagcttcacggacatctacggcctcccgcagtacgagaagcccgacgctgagggcagccagcttctacgcttcgacctcattcccttcgactctctggggcgagatgctcccttttcagagcccccaggcccctcgggcttccacaagcagaggcggtccctggacacgccccagtccctggcatcgctgtcctcccgctcctcgctgtcctcgctgtcgcccccaagctcgcccctggacacgcccttcctccctgcctcacgggactcgccgctggcgcagctggcggacagctgtgaggggccaggcctgggcgccctagacagactgcgggcacacgcctcggctatgggggacgaagacttaccaggcatggcggcccttcagccacacggggtccccggggatggggaagggccgcacgagcgaggacccccaccagccagcgctcccgtgggtggaagtaagtgcggatgtggcctcctgcggggcgagggttacctgcagggcggaaactgtggggtccagagtgaggatggctggctttccaggtccatggtgagctttacgtttaggaatattgatgtgatcgggaagagcacacacctgctc

SEQ ID NO: 101968 - DNA, 181 bp, Homo sapiens
  chrX:10092558-10092739
  hypo
tggagattcacagctgagagccgccacttcctggagctgggggctccggcaggcaaagtgtggctctcggggacagttgcgcccgtgtctgccaggagttggttctgctcactgcagcacaggtagcggactccctccctcaccgtcaaggaagtaatccgctggttggcaggacaacaat

SEQ ID NO: 101969 - DNA, 54 bp, Homo sapiens
  chrX:10102583-10102637
  hypo
ttgtccgttcccagacattctcgcctggagcacgaagccagtatgtttgcagag

SEQ ID NO: 101970 - DNA, 116 bp, Homo sapiens; identical to SEQ ID NO: 34657
  chrX:11783709-11783825
  hypo

SEQ ID NO: 101971 - DNA, 30 bp, Homo sapiens; identical to SEQ ID NO: 13551
  chrX:11948897-11948927
  hypo

SEQ ID NO: 101972 - DNA, 43 bp, Homo sapiens; identical to SEQ ID NO: 34659
  chrX:13062332-13062375
  hypo

SEQ ID NO: 101973 - DNA, 30 bp, Homo sapiens
  chrX:14891347-14891377
  hypo
gcgccggcgatctcgcggctggcgggggcg

SEQ ID NO: 101974 - DNA, 87 bp, Homo sapiens; identical to SEQ ID NO: 13556
  chrX:15808572-15808659
  hypo

SEQ ID NO: 101975 - DNA, 100 bp, Homo sapiens; identical to SEQ ID NO: 13557
  chrX:15809045-15809145
  hypo

SEQ ID NO: 101976 - DNA, 83 bp, Homo sapiens; identical to SEQ ID NO: 13558
  chrX:15817993-15818076
  hypo

SEQ ID NO: 101977 - DNA, 123 bp, Homo sapiens; identical to SEQ ID NO: 13559
  chrX:15821796-15821919
  hypo

SEQ ID NO: 101978 - DNA, 88 bp, Homo sapiens; identical to SEQ ID NO: 13560
  chrX:15822232-15822320
  hypo

SEQ ID NO: 101979 - DNA, 40 bp, Homo sapiens; identical to SEQ ID NO: 13561
  chrX:15826354-15826394
  hypo

SEQ ID NO: 101980 - DNA, 123 bp, Homo sapiens; identical to SEQ ID NO: 13562
  chrX:15827321-15827444
  hypo

SEQ ID NO: 101981 - DNA, 215 bp, Homo sapiens; identical to SEQ ID NO: 13563
  chrX:15833798-15834013
  hypo

SEQ ID NO: 101982 - DNA, 57 bp, Homo sapiens; identical to SEQ ID NO: 13564
  chrX:15836708-15836765
  hypo

SEQ ID NO: 101983 - DNA, 111 bp, Homo sapiens; identical to SEQ ID NO: 13565
  chrX:15838328-15838439
  hypo

SEQ ID NO: 101984 - DNA, 536 bp, Homo sapiens; identical to SEQ ID NO: 13566
  chrX:15840847-15841383
  hypo

SEQ ID NO: 101985 - DNA, 183 bp, Homo sapiens; identical to SEQ ID NO: 58266
  chrX:16729956-16730139
  hypo

SEQ ID NO: 101986 - DNA, 806 bp, Homo sapiens; identical to SEQ ID NO: 58267
  chrX:16730152-16730958
  hypo

SEQ ID NO: 101987 - DNA, 30 bp, Homo sapiens
  chrX:16731852-16731882
  hypo
tacaggaggtttttcgggtgaaggcaagaa

SEQ ID NO: 101988 - DNA, 37 bp, Homo sapiens; identical to SEQ ID NO: 34672
  chrX:16736863-16736900
  hypo

SEQ ID NO: 101989 - DNA, 19 bp, Homo sapiens
  chrX:17615241-17615260
  hypo
tttttttttttttttttga

SEQ ID NO: 101990 - DNA, 93 bp, Homo sapiens
  chrX:18239017-18239110
  hypo
aggagcctggaccacgtctccgcggctgcgcagtagcgcttggcatgcgtgcgtgactcctgggggtcaaagggcctcgccctctcccccact

SEQ ID NO: 101991 - DNA, 31 bp, Homo sapiens; identical to SEQ ID NO: 34674
  chrX:18247380-18247411
  hypo

SEQ ID NO: 101992 - DNA, 31 bp, Homo sapiens; identical to SEQ ID NO: 34675
  chrX:18969304-18969335
  hypo

SEQ ID NO: 101993 - DNA, 30 bp, Homo sapiens
  chrX:19416315-19416345
  hypo
gaaatgcggaaggcccgcctggacttgcct

SEQ ID NO: 101994 - DNA, 32 bp, Homo sapiens; identical to SEQ ID NO: 34676
  chrX:19530838-19530870
  hypo

SEQ ID NO: 101995 - DNA, 186 bp, Homo sapiens; identical to SEQ ID NO: 34677
  chrX:20135319-20135505
  hypo

SEQ ID NO: 101996 - DNA, 95 bp, Homo sapiens; identical to SEQ ID NO: 34678
  chrX:20160883-20160978
  hypo

SEQ ID NO: 101997 - DNA, 31 bp, Homo sapiens; identical to SEQ ID NO: 34679
  chrX:21958399-21958430
  hypo

SEQ ID NO: 101998 - DNA, 190 bp, Homo sapiens; identical to SEQ ID NO: 58271
  chrX:23801092-23801282
  hypo

SEQ ID NO: 101999 - DNA, 34 bp, Homo sapiens
  chrX:24069673-24069707
  hypo
accaagcccggccggatttttttatttagataaa

SEQ ID NO: 102000 - DNA, 34 bp, Homo sapiens
  chrX:24128930-24128964
  hypo
ggggtgagccaccgaacctggccccattcctttt

SEQ ID NO: 102001 - DNA, 71 bp, Homo sapiens; identical to SEQ ID NO: 13572
  chrX:27999797-27999868
  hypo

SEQ ID NO: 102002 - DNA, 30 bp, Homo sapiens
  chrX:31090089-31090119
  hypo
ggcgagcacacgggcgaagtcggtgcggta

SEQ ID NO: 102003 - DNA, 30 bp, Homo sapiens; identical to SEQ ID NO: 13573
  chrX:36854169-36854199
  hypo

SEQ ID NO: 102004 - DNA, 30 bp, Homo sapiens; identical to SEQ ID NO: 13577
  chrX:39729507-39729537
  hypo

SEQ ID NO: 102005 - DNA, 1156 bp, Homo sapiens; identical to SEQ ID NO: 13578
  chrX:39910497-39911653
  hypo

SEQ ID NO: 102006 - DNA, 158 bp, Homo sapiens; identical to SEQ ID NO: 13579
  chrX:39913137-39913295
  hypo

SEQ ID NO: 102007 - DNA, 79 bp, Homo sapiens; identical to SEQ ID NO: 13580
  chrX:39913507-39913586
  hypo

SEQ ID NO: 102008 - DNA, 147 bp, Homo sapiens; identical to SEQ ID NO: 13581
  chrX:39914619-39914766
  hypo

SEQ ID NO: 102009 - DNA, 168 bp, Homo sapiens; identical to SEQ ID NO: 13582
  chrX:39916406-39916574
  hypo

SEQ ID NO: 102010 - DNA, 274 bp, Homo sapiens; identical to SEQ ID NO: 13583
  chrX:39921381-39921655
  hypo

SEQ ID NO: 102011 - DNA, 327 bp, Homo sapiens; identical to SEQ ID NO: 13584
  chrX:39921997-39922324
  hypo

SEQ ID NO: 102012 - DNA, 346 bp, Homo sapiens; identical to SEQ ID NO: 13585
  chrX:39922859-39923205
  hypo

SEQ ID NO: 102013 - DNA, 265 bp, Homo sapiens; identical to SEQ ID NO: 13586
  chrX:39923587-39923852
  hypo

SEQ ID NO: 102014 - DNA, 188 bp, Homo sapiens; identical to SEQ ID NO: 13587
  chrX:39930224-39930412
  hypo

SEQ ID NO: 102015 - DNA, 55 bp, Homo sapiens; identical to SEQ ID NO: 13588
  chrX:39930888-39930943
  hypo

SEQ ID NO: 102016 - DNA, 2833 bp, Homo sapiens; identical to SEQ ID NO: 13589
  chrX:39931600-39934433
  hypo

SEQ ID NO: 102017 - DNA, 80 bp, Homo sapiens; identical to SEQ ID NO: 13590
  chrX:39935705-39935785
  hypo

SEQ ID NO: 102018 - DNA, 127 bp, Homo sapiens; identical to SEQ ID NO: 13591
  chrX:39937095-39937222
  hypo

SEQ ID NO: 102019 - DNA, 1950 bp, Homo sapiens; identical to SEQ ID NO: 58296
  chrX:39954905-39956855
  hypo

SEQ ID NO: 102020 - DNA, 1459 bp, Homo sapiens; identical to SEQ ID NO: 58305
  chrX:40013600-40015059
  hypo

SEQ ID NO: 102021 - DNA, 1127 bp, Homo sapiens; identical to SEQ ID NO: 13604
  chrX:40034218-40035345
  hypo

SEQ ID NO: 102022 - DNA, 324 bp, Homo sapiens; identical to SEQ ID NO: 13605
  chrX:40036258-40036582
  hypo

SEQ ID NO: 102023 - DNA, 59 bp, Homo sapiens
  chrX:40247664-40247723
  hypo
ggtggtcatgagacagtagatcgccgcacccaccctccggaaaatatcctgtatttagc

SEQ ID NO: 102024 - DNA, 45 bp, Homo sapiens
  chrX:40631232-40631277
  hypo
aactttaaaagcaccagggaccggccgggcgtggtggctcacgct

SEQ ID NO: 102025 - DNA, 44 bp, Homo sapiens; identical to SEQ ID NO: 34700
  chrX:40631516-40631560
  hypo

SEQ ID NO: 102026 - DNA, 30 bp, Homo sapiens
  chrX:41137558-41137588
  hypo
ttccatctgccgtgacgagagtccagcggc

SEQ ID NO: 102027 - DNA, 285 bp, Homo sapiens
  chrX:41331599-41331884
  hypo
agaagttggccacatccatgtcggtggctccaaagtgggtggccacacgcacaccctcgtgcaatgtgaagctcacctgatgactcaccatggccagcaggccgcggaggtaacgatcccgaagggcggctcgggcccgctgcttctgggattccaaggattcttgagctatggaacactcctggatttcaagaacctctgactacaggggggctctgcgtccatcaggggcaaagccacggctgagaccatcagggcctcggggcagccggagcacaggcacag

SEQ ID NO: 102028 - DNA, 30 bp, Homo sapiens; identical to SEQ ID NO: 34702
  chrX:41332942-41332972
  hypo

SEQ ID NO: 102029 - DNA, 30 bp, Homo sapiens
  chrX:41333420-41333450
  hypo
gacaacctgctggccgagctcccggccgac

SEQ ID NO: 102030 - DNA, 30 bp, Homo sapiens; identical to SEQ ID NO: 13608
  chrX:43379710-43379740
  hypo

SEQ ID NO: 102031 - DNA, 31 bp, Homo sapiens; identical to SEQ ID NO: 34704
  chrX:43773722-43773753
  hypo

SEQ ID NO: 102032 - DNA, 105 bp, Homo sapiens
  chrX:44224967-44225072
  hypo
agccatttaaagtgtataattcaatgggtttttaattttttctctttaatcaacaaataaaactgtatatatctatagtgtacaagatgacgttctgcaatatgt

SEQ ID NO: 102033 - DNA, 28 bp, Homo sapiens
  chrX:44420398-44420426
  hypo
cttaaaagtctatgccaaaaccgggcac

SEQ ID NO: 102034 - DNA, 31 bp, Homo sapiens
  chrX:44596042-44596073
  hypo
ggctctcaccaggaagcgaccacagaagtgt

SEQ ID NO: 102035 - DNA, 99 bp, Homo sapiens
  chrX:44729940-44730039
  hypo
tctgctattacatagtaatagcgggaagaaaagtgttgaggtgtggagagtgggtagccttttttttctgagacggagtctcgctctgtcacccaggct

SEQ ID NO: 102036 - DNA, 44 bp, Homo sapiens
  chrX:44751498-44751542
  hypo
cataaaagcttgctgggatttcgaggccgggtacggtggctcac

SEQ ID NO: 102037 - DNA, 39 bp, Homo sapiens
  chrX:44754636-44754675
  hypo
tacagaccatgagccaccgctctgggccaacttttattt

SEQ ID NO: 102038 - DNA, 37 bp, Homo sapiens; identical to SEQ ID NO: 34707
  chrX:44760626-44760663
  hypo

SEQ ID NO: 102039 - DNA, 43 bp, Homo sapiens
  chrX:44799976-44800019
  hypo
cttattaatacaacatgtactcggcaaggtacggtgactcacg

SEQ ID NO: 102040 - DNA, 172 bp, Homo sapiens
  chrX:44922873-44923045
  hypo
tgtagcacatcaagaacgctgggaagtacagacactattttgataggcaataatcatataacaggaagtggaagtaatggaaacgtgccttacctgcagcgaaacgcactcactctacctcataaccgcacaaacctgaccagcagcgcagaggagccgtggaaaaaccaac

SEQ ID NO: 102041 - DNA, 19 bp, Homo sapiens
  chrX:47317224-47317243
  hypo
gactccatctcaaaaacaa

SEQ ID NO: 102042 - DNA, 83 bp, Homo sapiens
  chrX:57705239-57705322
  hypo
gaggatgtctctgtccagggacgggcggatgttgaactcctgcaccccgagcctcgccaagtcctctccacggaacactgaca

SEQ ID NO: 102043 - DNA, 22 bp, Homo sapiens
  chrX:57705441-57705463
  hypo
cgggtccttccccttctaacct

SEQ ID NO: 102044 - DNA, 31 bp, Homo sapiens; identical to SEQ ID NO: 34709
  chrX:58293596-58293627
  hypo

SEQ ID NO: 102045 - DNA, 40 bp, Homo sapiens
  chrX:70532322-70532362
  hypo
aagtagaaaattaaagactctcggccgggcgcggtggctc

SEQ ID NO: 102046 - DNA, 23 bp, Homo sapiens
  chrX:70773233-70773256
  hypo
gcgcccagcagatgaagtgttct

SEQ ID NO: 102047 - DNA, 30 bp, Homo sapiens
  chrX:70795382-70795412
  hypo
tgatgtttgaaattcgctgaaatacttaat

SEQ ID NO: 102048 - DNA, 318 bp, Homo sapiens
  chrX:70797824-70798142
  hypo
ccgcgccttcgctccagttctcgtgcccccgcccctccccccgcgccctttcccagtggttgcaataacggacttagaggtctggacaattcaagtaaggaacaaggctcgcttatccaagttctcgcaggataaaagtttgttatgaacgatttcacatggtttctctttatcagaaagttgttagggacttttaatcgcagaattggcctcgggtgcccacgctctagtattgaaatggcggttttgggacaaataagcaacatccgtgggagtggaaagcgacagacctgatcccggaagcgttacagctaggcg

SEQ ID NO: 102049 - DNA, 77 bp, Homo sapiens; identical to SEQ ID NO: 34711
  chrX:71485134-71485211
  hypo

SEQ ID NO: 102050 - DNA, 31 bp, Homo sapiens; identical to SEQ ID NO: 34712
  chrX:71529505-71529536
  hypo

SEQ ID NO: 102051 - DNA, 563 bp, Homo sapiens; identical to SEQ ID NO: 58328
  chrX:73163982-73164545
  hypo

SEQ ID NO: 102052 - DNA, 31 bp, Homo sapiens; identical to SEQ ID NO: 34714
  chrX:73812147-73812178
  hypo

SEQ ID NO: 102053 - DNA, 20 bp, Homo sapiens
  chrX:77458034-77458054
  hypo
ggaaacttttaatcatacac

SEQ ID NO: 102054 - DNA, 30 bp, Homo sapiens; identical to SEQ ID NO: 13615
  chrX:80722921-80722951
  hypo

SEQ ID NO: 102055 - DNA, 197 bp, Homo sapiens; identical to SEQ ID NO: 34716
  chrX:82762196-82762393
  hypo

SEQ ID NO: 102056 - DNA, 31 bp, Homo sapiens; identical to SEQ ID NO: 34717
  chrX:87063732-87063763
  hypo

SEQ ID NO: 102057 - DNA, 30 bp, Homo sapiens; identical to SEQ ID NO: 13616
  chrX:87762080-87762110
  hypo

SEQ ID NO: 102058 - DNA, 30 bp, Homo sapiens; identical to SEQ ID NO: 13619
  chrX:93928298-93928328
  hypo

SEQ ID NO: 102059 - DNA, 19 bp, Homo sapiens
  chrX:94392602-94392621
  hypo
attataaaaatagaattag

SEQ ID NO: 102060 - DNA, 26 bp, Homo sapiens
  chrX:100228483-100228509
  hypo
tcgggcggcggcggctgccttctatg

SEQ ID NO: 102061 - DNA, 39 bp, Homo sapiens; identical to SEQ ID NO: 34720
  chrX:101014376-101014415
  hypo

SEQ ID NO: 102062 - DNA, 7 bp, Homo sapiens
  chrX:102232777-102232784
  hypo
tgacttt

SEQ ID NO: 102063 - DNA, 30 bp, Homo sapiens; identical to SEQ ID NO: 13623
  chrX:103731902-103731932
  hypo

SEQ ID NO: 102064 - DNA, 52 bp, Homo sapiens; identical to SEQ ID NO: 34722
  chrX:107070115-107070167
  hypo

SEQ ID NO: 102065 - DNA, 29 bp, Homo sapiens
  chrX:117634298-117634327
  hypo
ccgcgcccggccttcattgctttattaca

SEQ ID NO: 102066 - DNA, 19 bp, Homo sapiens
  chrX:118885581-118885600
  hypo
tgtagcatgtgtcagttat

SEQ ID NO: 102067 - DNA, 30 bp, Homo sapiens; identical to SEQ ID NO: 13627
  chrX:120184126-120184156
  hypo

SEQ ID NO: 102068 - DNA, 25 bp, Homo sapiens
  chrX:123094408-123094433
  hypo
agtcgccgaagagcgaacaccccaa

SEQ ID NO: 102069 - DNA, 224 bp, Homo sapiens; identical to SEQ ID NO: 13629
  chrX:123094492-123094716
  hypo

SEQ ID NO: 102070 - DNA, 125 bp, Homo sapiens; identical to SEQ ID NO: 13630
  chrX:123095160-123095285
  hypo

SEQ ID NO: 102071 - DNA, 152 bp, Homo sapiens; identical to SEQ ID NO: 13631
  chrX:123095554-123095706
  hypo

SEQ ID NO: 102072 - DNA, 66 bp, Homo sapiens; identical to SEQ ID NO: 13632
  chrX:123155215-123155281
  hypo

SEQ ID NO: 102073 - DNA, 142 bp, Homo sapiens; identical to SEQ ID NO: 13633
  chrX:123156379-123156521
  hypo

SEQ ID NO: 102074 - DNA, 80 bp, Homo sapiens; identical to SEQ ID NO: 13634
  chrX:123159688-123159768
  hypo

SEQ ID NO: 102075 - DNA, 166 bp, Homo sapiens; identical to SEQ ID NO: 13635
  chrX:123164809-123164975
  hypo

SEQ ID NO: 102076 - DNA, 98 bp, Homo sapiens; identical to SEQ ID NO: 13636
  chrX:123171375-123171473
  hypo

SEQ ID NO: 102077 - DNA, 78 bp, Homo sapiens; identical to SEQ ID NO: 13637
  chrX:123176417-123176495
  hypo

SEQ ID NO: 102078 - DNA, 206 bp, Homo sapiens; identical to SEQ ID NO: 13638
  chrX:123179012-123179218
  hypo

SEQ ID NO: 102079 - DNA, 153 bp, Homo sapiens; identical to SEQ ID NO: 13639
  chrX:123181202-123181355
  hypo

SEQ ID NO: 102080 - DNA, 75 bp, Homo sapiens; identical to SEQ ID NO: 13640
  chrX:123182853-123182928
  hypo

SEQ ID NO: 102081 - DNA, 136 bp, Homo sapiens; identical to SEQ ID NO: 13641
  chrX:123184023-123184159
  hypo

SEQ ID NO: 102082 - DNA, 279 bp, Homo sapiens; identical to SEQ ID NO: 13642
  chrX:123184965-123185244
  hypo

SEQ ID NO: 102083 - DNA, 109 bp, Homo sapiens; identical to SEQ ID NO: 13643
  chrX:123189976-123190085
  hypo

SEQ ID NO: 102084 - DNA, 113 bp, Homo sapiens; identical to SEQ ID NO: 13644
  chrX:123191714-123191827
  hypo

SEQ ID NO: 102085 - DNA, 132 bp, Homo sapiens; identical to SEQ ID NO: 13645
  chrX:123195072-123195204
  hypo

SEQ ID NO: 102086 - DNA, 105 bp, Homo sapiens; identical to SEQ ID NO: 13646
  chrX:123195619-123195724
  hypo

SEQ ID NO: 102087 - DNA, 307 bp, Homo sapiens; identical to SEQ ID NO: 13647
  chrX:123196748-123197055
  hypo

SEQ ID NO: 102088 - DNA, 214 bp, Homo sapiens; identical to SEQ ID NO: 13648
  chrX:123197687-123197901
  hypo

SEQ ID NO: 102089 - DNA, 72 bp, Homo sapiens; identical to SEQ ID NO: 13649
  chrX:123199724-123199796
  hypo

SEQ ID NO: 102090 - DNA, 263 bp, Homo sapiens; identical to SEQ ID NO: 13650
  chrX:123200023-123200286
  hypo

SEQ ID NO: 102091 - DNA, 94 bp, Homo sapiens; identical to SEQ ID NO: 13651
  chrX:123202412-123202506
  hypo

SEQ ID NO: 102092 - DNA, 176 bp, Homo sapiens; identical to SEQ ID NO: 13652
  chrX:123204997-123205173
  hypo

SEQ ID NO: 102093 - DNA, 141 bp, Homo sapiens; identical to SEQ ID NO: 13653
  chrX:123210180-123210321
  hypo

SEQ ID NO: 102094 - DNA, 103 bp, Homo sapiens; identical to SEQ ID NO: 13654
  chrX:123211805-123211908
  hypo

SEQ ID NO: 102095 - DNA, 151 bp, Homo sapiens; identical to SEQ ID NO: 13655
  chrX:123215227-123215378
  hypo

SEQ ID NO: 102096 - DNA, 134 bp, Homo sapiens; identical to SEQ ID NO: 13656
  chrX:123217269-123217403
  hypo

SEQ ID NO: 102097 - DNA, 225 bp, Homo sapiens; identical to SEQ ID NO: 13657
  chrX:123220395-123220620
  hypo

SEQ ID NO: 102098 - DNA, 391 bp, Homo sapiens; identical to SEQ ID NO: 13658
  chrX:123224423-123224814
  hypo

SEQ ID NO: 102099 - DNA, 128 bp, Homo sapiens; identical to SEQ ID NO: 13659
  chrX:123227866-123227994
  hypo

SEQ ID NO: 102100 - DNA, 79 bp, Homo sapiens; identical to SEQ ID NO: 13660
  chrX:123229220-123229299
  hypo

SEQ ID NO: 102101 - DNA, 2084 bp, Homo sapiens; identical to SEQ ID NO: 13661
  chrX:123234422-123236506
  hypo

SEQ ID NO: 102102 - DNA, 137 bp, Homo sapiens; identical to SEQ ID NO: 13664
  chrX:129139162-129139299
  hypo

SEQ ID NO: 102103 - DNA, 92 bp, Homo sapiens; identical to SEQ ID NO: 13665
  chrX:129146552-129146644
  hypo

SEQ ID NO: 102104 - DNA, 3265 bp, Homo sapiens; identical to SEQ ID NO: 13666
  chrX:129146924-129150189
  hypo

SEQ ID NO: 102105 - DNA, 178 bp, Homo sapiens; identical to SEQ ID NO: 13667
  chrX:129154947-129155125
  hypo

SEQ ID NO: 102106 - DNA, 82 bp, Homo sapiens; identical to SEQ ID NO: 13668
  chrX:129156870-129156952
  hypo

SEQ ID NO: 102107 - DNA, 393 bp, Homo sapiens; identical to SEQ ID NO: 13669
  chrX:129158961-129159354
  hypo

SEQ ID NO: 102108 - DNA, 228 bp, Homo sapiens; identical to SEQ ID NO: 13670
  chrX:129162608-129162836
  hypo

SEQ ID NO: 102109 - DNA, 223 bp, Homo sapiens; identical to SEQ ID NO: 13671
  chrX:129168428-129168651
  hypo

SEQ ID NO: 102110 - DNA, 168 bp, Homo sapiens; identical to SEQ ID NO: 13672
  chrX:129171340-129171508
  hypo

SEQ ID NO: 102111 - DNA, 149 bp, Homo sapiens; identical to SEQ ID NO: 13673
  chrX:129173110-129173259
  hypo

SEQ ID NO: 102112 - DNA, 79 bp, Homo sapiens; identical to SEQ ID NO: 13674
  chrX:129184690-129184769
  hypo

SEQ ID NO: 102113 - DNA, 158 bp, Homo sapiens; identical to SEQ ID NO: 13675
  chrX:129185833-129185991
  hypo

SEQ ID NO: 102114 - DNA, 2231 bp, Homo sapiens; identical to SEQ ID NO: 13676
  chrX:129189827-129192058
  hypo

SEQ ID NO: 102115 - DNA, 157 bp, Homo sapiens; identical to SEQ ID NO: 13678
  chrX:133507340-133507497
  hypo

SEQ ID NO: 102116 - DNA, 185 bp, Homo sapiens; identical to SEQ ID NO: 13679
  chrX:133511600-133511785
  hypo

SEQ ID NO: 102117 - DNA, 103 bp, Homo sapiens; identical to SEQ ID NO: 13680
  chrX:133512033-133512136
  hypo

SEQ ID NO: 102118 - DNA, 135 bp, Homo sapiens; identical to SEQ ID NO: 13681
  chrX:133527529-133527664
  hypo

SEQ ID NO: 102119 - DNA, 45 bp, Homo sapiens; identical to SEQ ID NO: 13682
  chrX:133527937-133527982
  hypo

SEQ ID NO: 102120 - DNA, 480 bp, Homo sapiens; identical to SEQ ID NO: 13683
  chrX:133547516-133547996
  hypo

SEQ ID NO: 102121 - DNA, 278 bp, Homo sapiens; identical to SEQ ID NO: 13684
  chrX:133549044-133549322
  hypo

SEQ ID NO: 102122 - DNA, 135 bp, Homo sapiens; identical to SEQ ID NO: 13685
  chrX:133551197-133551332
  hypo

SEQ ID NO: 102123 - DNA, 131 bp, Homo sapiens; identical to SEQ ID NO: 13686
  chrX:133559229-133559360
  hypo

SEQ ID NO: 102124 - DNA, 3133 bp, Homo sapiens; identical to SEQ ID NO: 13687
  chrX:133559689-133562822
  hypo

SEQ ID NO: 102125 - DNA, 30 bp, Homo sapiens; identical to SEQ ID NO: 34782
  chrX:135382443-135382473
  hypo

SEQ ID NO: 102126 - DNA, 30 bp, Homo sapiens
  chrX:135579018-135579048
  hypo
ggaggggcctttgggcgaaggaggcgcgtc

SEQ ID NO: 102127 - DNA, 30 bp, Homo sapiens
  chrX:135579376-135579406
  hypo
cgtgtcggcgcgacccgcgacgtcgccacg

SEQ ID NO: 102128 - DNA, 23 bp, Homo sapiens
  chrX:142200129-142200152
  hypo
gctggtctcgacaatgttgttca

SEQ ID NO: 102129 - DNA, 30 bp, Homo sapiens; identical to SEQ ID NO: 13689
  chrX:144475782-144475812
  hypo

SEQ ID NO: 102130 - DNA, 31 bp, Homo sapiens
  chrX:150560242-150560273
  hypo
cctgctgggtgcaaggcgctcagtctgcagc

SEQ ID NO: 102131 - DNA, 394 bp, Homo sapiens
  chrX:151306511-151306905
  hypo
ccctcatttcccagcagggcccgggccttccctctgctcccctgaagccgcattcttggtaccaatatccccttccctacgtcagcctcagatgccgacgtcagaatttgcgttcctggtcgccatgaccagggcttcccagggccgacatcaggggcagagccctccctgagcgtcccgacattgatgctggcagaacctaggcgcggctcccgccgaaccagccgggccctggtcacaccaagctctgactcccagagtcccctgcggcttaagcggcgggagagagtgggggcgggggtggggggggggtgacagcccagcctgagaagtctgccctcaggtggtccagagctggcagcagaggcagcgctgtattatttagggctttcta

SEQ ID NO: 102132 - DNA, 154 bp, Homo sapiens
  chrX:151306964-151307118
  hypo
ctgggcccgctctcttcagccgatctcaagcctgtccctcagaacgagaacctcgcttctctctgatccccgaggcgtaagttagtggcgtcacatccggtccccggggcttccctgggttgacagcaggggcggagtggattctgccggaact

SEQ ID NO: 102133 - DNA, 41 bp, Homo sapiens
  chrY:5077816-5077857
  hypo
gtttaatttgtcaggccgggtgtggtggctcacgcttgtaa

SEQ ID NO: 102134 - DNA, 40 bp, Homo sapiens; identical to SEQ ID NO: 34785
  chrY:5572739-5572779
  hypo

SEQ ID NO: 102135 - DNA, 62 bp, Homo sapiens
  chrY:6790936-6790998
  hypo
cagaacgcgcgcaggccgagaccgcgcgcagccccggctcccgcccacgcttttacctccac

SEQ ID NO: 102136 - DNA, 31 bp, Homo sapiens; identical to SEQ ID NO: 34786
  chrY:7149235-7149266
  hypo

SEQ ID NO: 102137 - DNA, 33 bp, Homo sapiens
  chrY:7413995-7414028
  hypo
gaaataaaatgttggccgggcgcggtggctcac

SEQ ID NO: 102138 - DNA, 80 bp, Homo sapiens
  chrY:7525417-7525497
  hypo
tggcagcagggggtgcgcgacgggctacagggggcggggaacaggggatccagtccaggggcacacggggtcagccagga

SEQ ID NO: 102139 - DNA, 169 bp, Homo sapiens
  chrY:8147741-8147910
  hypo
tgcttcatcctgaggacgctgaggatgctgtactcccagtggcattccaaaggacctcttgtcctatgccctgggcacaccagaggctagccaccgtggtagcccatccgatgacctgtgtgcactgcctttctggcgcagaggctctcgcactcgcagcaccggccgc

SEQ ID NO: 102140 - DNA, 30 bp, Homo sapiens; identical to SEQ ID NO: 34788
  chrY:9385571-9385601
  hypo

SEQ ID NO: 102141 - DNA, 31 bp, Homo sapiens
  chrY:10034277-10034308
  hypo
tggttggccctttgttcgtgtccccgggtgt

SEQ ID NO: 102142 - DNA, 30 bp, Homo sapiens; identical to SEQ ID NO: 34789
  chrY:10034536-10034566
  hypo

SEQ ID NO: 102143 - DNA, 31 bp, Homo sapiens; identical to SEQ ID NO: 34790
  chrY:14374844-14374875
  hypo

SEQ ID NO: 102144 - DNA, 31 bp, Homo sapiens
  chrY:14513074-14513105
  hypo
aggtctaaggggtacacgtgccggtttgtca

SEQ ID NO: 102145 - DNA, 118 bp, Homo sapiens
  chrY:14532157-14532275
  hypo
agacctgcgcccaggcgcagtgggtggaaataaatcctcgtcacgaacccgcagaacagaggcgccgtctttgggaagccgcgtggatttccaggcctgggggcgacagcgtggctgc

SEQ ID NO: 102146 - DNA, 30 bp, Homo sapiens
  chrY:14532509-14532539
  hypo
agcaacgacaccgcacgcggaacaccgccc

SEQ ID NO: 102147 - DNA, 31 bp, Homo sapiens
  chrY:14656910-14656941
  hypo
taaagcagctgaaacccggcatgatttccag

SEQ ID NO: 102148 - DNA, 271 bp, Homo sapiens
  chrY:14776532-14776803
  hypo
atgcttttaacttctcgcttcaaactttattcttacagtttgggaagaaagaaaacctaaagtatttgccgttggtgattcaagggtgagttgggagtattttttatttcactgacttgaaaataagattgtgggattttaattatttcttgttgccgttttctgttaacggtgattgcgtgaatgtttactcttgtcaatcttgtcttactgttacaatatttctttttgtcggttggctttagtaatatatatgactgtgggtccgggt

SEQ ID NO: 102149 - DNA, 149 bp, Homo sapiens
  chrY:14777102-14777251
  hypo
atatgtatatatgacttttcatctacacttggagaaaatttttataatgactacataatggcaaaaacattgtatttgagaatctacgtaataaagaagtgatttttaacagattttatttaacttattgagaccgtaaaccacccgtg

SEQ ID NO: 102150 - DNA, 136 bp, Homo sapiens; identical to SEQ ID NO: 34792
  chrY:15015980-15016116
  hypo

SEQ ID NO: 102151 - DNA, 80 bp, Homo sapiens; identical to SEQ ID NO: 34793
  chrY:15446138-15446218
  hypo

SEQ ID NO: 102152 - DNA, 29 bp, Homo sapiens
  chrY:15446277-15446306
  hypo
gagactacaaggaacgtaaactcatttac

SEQ ID NO: 102153 - DNA, 31 bp, Homo sapiens; identical to SEQ ID NO: 34795
  chrY:15562413-15562444
  hypo

SEQ ID NO: 102154 - DNA, 1362 bp, Homo sapiens; identical to SEQ ID NO: 58428
  chrY:16635795-16637157
  hypo

SEQ ID NO: 102155 - DNA, 31 bp, Homo sapiens
  chrY:18547039-18547070
  hypo
accactacacaatctacgcatgtaaccaaat

SEQ ID NO: 102156 - DNA, 31 bp, Homo sapiens; identical to SEQ ID NO: 34799
  chrY:21186957-21186988
  hypo

SEQ ID NO: 102157 - DNA, 339 bp, Homo sapiens
  chrY:21208476-21208815
  hypo
ggtccatgggactgggcgccttggagcagggggcggcgctcgttggggaggctcaggccgcgctggagcggggagtggggggaactcaggcatggcgggttgcaggtgtggagccctgccctggggtaggcaactaaggcctggcgataaatcaagcgcagcgcggatgggccagcgctgctggggtagccggcgcacactccgcagttgctggcctgggtgctaagctcctcactgcccggggctggcagggccagccgctcccagtgcgggccctccaagcccaagtccactcggaactctagctcgccggcaagcgccgcgcgcagcccgggttcc

SEQ ID NO: 102158 - DNA, 31 bp, Homo sapiens
  chrY:21210285-21210316
  hypo
acggcacaatttaagacgacagaagatgtga

SEQ ID NO: 102159 - DNA, 153 bp, Homo sapiens; identical to SEQ ID NO: 34800
  chrY:21226201-21226354
  hypo

SEQ ID NO: 102160 - DNA, 31 bp, Homo sapiens; identical to SEQ ID NO: 34801
  chrY:21238027-21238058
  hypo

SEQ ID NO: 102161 - DNA, 30 bp, Homo sapiens; identical to SEQ ID NO: 34802
  chrY:21877668-21877698
  hypo

SEQ ID NO: 102162 - DNA, 30 bp, Homo sapiens; identical to SEQ ID NO: 34803
  chrY:23566715-23566745
  hypo

SEQ ID NO: 102163 - DNA, 56 bp, Homo sapiens; identical to SEQ ID NO: 34804
  chrY:23568830-23568886
  hypo

SEQ ID NO: 102164 - DNA, 19 bp, Homo sapiens
  AC026273.7_55222-119630:48504-48523
  hypo
cccccggccccaggacaca

SEQ ID NO: 102165 - DNA, 31 bp, Homo sapiens
  AC133920.2_61082-76843:11716-11747
  hypo
agccagcgaagatggccggccagccaaggca

SEQ ID NO: 102166 - DNA, 104 bp, Homo sapiens
  AC133920.2_81912-122260:1985-2089
  hypo
gtgtgagccaaggcgcccggcctcatttcagagtttgctttcgtatgtgccatataaagatgttcatcatgtgctccgataccgtagcatggaaggcagcagta

SEQ ID NO: 102167 - DNA, 167 bp, Homo sapiens
  AC153808.1_1-20788:1300-1467
  hypo
gtaccagtccttggaccgcatctctccccagtcatgggccagggatggggggacaggatcagacctgcattctcactgcattgatctgcttcacaatgagcgtctgatccaagaagtgagcctgtccgctgtgaccgtgagatgggcactaacgcacttcctccagc

SEQ ID NO: 102168 - DNA, 31 bp, Homo sapiens
  AC153808.1_1-20788:9793-9824
  hypo
aagagaatagagagcccggaaataaatcctc

SEQ ID NO: 102169 - DNA, 259 bp, Homo sapiens
  AC153808.1_1-20788:20323-20582
  hypo
gtgcccctcacctgcacggcaggtgtcttccctgagaccactcacctctccgccgagcatggtaactgcctggccccaagtccttcctgctaggcagccacagcaacccaagggtggacaccaagctggtgttgttcttcactgagtccttaacgcctagggagggtgtcgccacgtgggcagctctgactacgcgtctactgaatgaacacgtgaaagaatgaagacaggccgggcgcggtggctcacacctataatc

SEQ ID NO: 102170 - DNA, 19 bp, Homo sapiens
  AC208171.3_11673-19430:7279-7298
  hypo
gcctcgagtaaataatttt

SEQ ID NO: 102171 - DNA, 121 bp, Homo sapiens
  AC240459.2_22426-31906:3388-3509
  hypo
agccaccgcacccagccgcggatttcttaattatatttttgaattgttccttgctagtgtataaaaacacaactggaccaggcacggtgactcatgtctatcatcagcactttgggaggcc

SEQ ID NO: 102172 - DNA, 31 bp, Homo sapiens; identical to SEQ ID NO: 34808
  AC242209.3_1-39555:31580-31611
  hypo

SEQ ID NO: 102173 - DNA, 181 bp, Homo sapiens
  AEKP01114215.1_1-7461:1443-1624
  hypo
cctagcctggcccatccccatcgcacctagggagcctcccggagtgcgcacagcccactgtcacggctaggctgccacacacctctcagccagtccggtgtcactgccggcgtgactgttttgtggaccccattggactgtgcggtcccaggactcccacgccatgggtgctgcctggtgc

SEQ ID NO: 102174 - DNA, 32 bp, Homo sapiens
  AEKP01114218.1_1-13684:9402-9434
  hypo
catgcgcgcgcgcacacacacacacacacaac

SEQ ID NO: 102175 - DNA, 34 bp, Homo sapiens
  AEKP01114218.1_1-13684:12131-12165
  hypo
tttttgagatggagtctctgtcgctgaggctgga

SEQ ID NO: 102176 - DNA, 247 bp, Homo sapiens; identical to SEQ ID NO: 34809
  AEKP01149809.1_1-6354:1324-1571
  hypo

SEQ ID NO: 102177 - DNA, 171 bp, Homo sapiens; identical to SEQ ID NO: 34810
  AEKP01153556.1_1-5252:371-542
  hypo

SEQ ID NO: 102178 - DNA, 31 bp, Homo sapiens
  AEKP01153556.1_1-5252:1025-1056
  hypo
ccataaccccgacagccgattccagggcacc

SEQ ID NO: 102179 - DNA, 75 bp, Homo sapiens
  AEKP01160137.1_1408-4031:1581-1656
  hypo
acacaccacacaggtacgcacacaccacacatacagcacacacgcacaccacacacaccacgcacacaaaacaca

SEQ ID NO: 102180 - DNA, 117 bp, Homo sapiens; identical to SEQ ID NO: 34811
  AEKP01166227.1_44013-111583:41309-41426
  hypo

SEQ ID NO: 102181 - DNA, 167 bp, Homo sapiens
  AEKP01166227.1_44013-111583:53193-53360
  hypo
ggaggcccaggtgcagcgagcccctctgcaccctagagatgggtgagtgtgttgtacacacatgtgtgcgtgcagatgtgtgtgcactctttttaaacagtgtgcccacagtgtggctgcggtcaaggagggagtttaaagtgtaaccccaacgtgccatcttgaac

SEQ ID NO: 102182 - DNA, 83 bp, Homo sapiens
  AEKP01172922.1_98-3151:2029-2112
  hypo
tctctgtgtgtgccccgcgtgtgttgtgtggatgtgtcatgtgtgttgtgtgtggtgtgtgtgtatcgtgagtggtgtgtgtg

SEQ ID NO: 102183 - DNA, 23 bp, Homo sapiens
  AEKP01172922.1_98-3151:2171-2194
  hypo
gtgtgtatcgtgagtggtgtgtg

SEQ ID NO: 102184 - DNA, 59 bp, Homo sapiens
  AEKP01188815.1_1-4777:3486-3545
  hypo
accaagggctgggaggggacccgtaaccggggctggccgggcaccctgcagctccccca

SEQ ID NO: 102185 - DNA, 36 bp, Homo sapiens
  AEKP01209288.1_3835-9918:5049-5085
  hypo
gtggcggttccagtcccgtcacgtttgcaggtgagt

SEQ ID NO: 102186 - DNA, 121 bp, Homo sapiens
  AEKP01212943.1_1-3701:1909-2030
  hypo
ctctagctcactttgccggctccctggctagacctgctctcattgcgcaccacggctgacttgcaaggagcccgcttgactctctctgccatagtccgtctgtgaaattccggctgaggct

SEQ ID NO: 102187 - DNA, 94 bp, Homo sapiens
  AEKP01213516.1_1-2586:270-364
  hypo
aggaccccagtgtacagatttcgtttcagaatgatgggtcacgtcagctgaggcagcaccggtgggaatccgaccctggcccgggaggcgcggc

SEQ ID NO: 102188 - DNA, 81 bp, Homo sapiens; identical to SEQ ID NO: 34813
  AEKP01221093.1_87-1602:654-735
  hypo

SEQ ID NO: 102189 - DNA, 121 bp, Homo sapiens; identical to SEQ ID NO: 34814
  AEKP01221093.1_87-1602:854-975
  hypo

SEQ ID NO: 102190 - DNA, 44 bp, Homo sapiens; identical to SEQ ID NO: 34815
  AEKP01225640.1_1-1497:730-774
  hypo

SEQ ID NO: 102191 - DNA, 105 bp, Homo sapiens
  AL162252.17_162460-176678:8536-8641
  hypo
caggcaggccctcaggcgggaagggatgcgtgcctgcgattccgggacataccgcgccagcccaggagaacccggaagcccgcagcgcctgtttctctgtgtgat

SEQ ID NO: 102192 - DNA, 79 bp, Homo sapiens
  FP565324.3_2001-29640:15360-15439
  hypo
gtgtggccgccgctcccgcctgcccagggccgctgtgtggctgccgctcccgcctgcccagggccgctgtgtggccgcc

SEQ ID NO: 102193 - DNA, 254 bp, Homo sapiens
  GL000194.1:58619-58873
  hypo
ctctcgtgcccctgcagctcccgctctgactggttgcagttggcgaaggcctggcggtagcgagcatagcagttctggaaccacacctccagccagcggtggccaggccggaggacgtgtaggcgcccgtgtttctggccacgtcatactctttgcagggcagctcgtagggtggcactgtctgtggggccagctctggtaggagcacatccgtctgcaccatggtgtctgccgcccaccagggccaggggagt

SEQ ID NO: 102194 - DNA, 33 bp, Homo sapiens; identical to SEQ ID NO: 34816
  GL000195.1:80191-80224
  hypo

SEQ ID NO: 102195 - DNA, 26 bp, Homo sapiens
  GL000204.1:44191-44217
  hypo
gcaatgcagagatgaccgtgcacatg

SEQ ID NO: 102196 - DNA, 25 bp, Homo sapiens
  GL000204.1:44336-44361
  hypo
acaccctcctcgttgttaaggacct

SEQ ID NO: 102197 - DNA, 28 bp, Homo sapiens
  GL000212.1:64461-64489
  hypo
ccaacgaggaagccgcccagggcatcgc

SEQ ID NO: 102198 - DNA, 31 bp, Homo sapiens
  GL000212.1:65199-65230
  hypo
tcgccaactgggactccgtccagggcctcgc

SEQ ID NO: 102199 - DNA, 121 bp, Homo sapiens
  GL000225.1:79484-79605
  hypo
tgagggaagcctcattccccacgtggcggtgagggcaacggcgacccacgagggagcagggtgacacccattgggggccgctttgttaaggaagcctgcctgcgcggacgccctgccagcc

SEQ ID NO: 102200 - DNA, 23 bp, Homo sapiens
  GL000225.1:80182-80205
  hypo
ccagccagcggctcttataaagg

SEQ ID NO: 102201 - DNA, 31 bp, Homo sapiens
  GL339450.1:72631-72662
  hypo
gagcaggggcccaacacgcagacacccaacg

SEQ ID NO: 102202 - DNA, 63 bp, Homo sapiens
  GL383535.1:198018-198081
  hypo
agcgaggtgagggtggcgcccagctcctccacggtcagcgtgcccgcccggtatctgctcagc

SEQ ID NO: 102203 - DNA, 7860 bp, Homo sapiens; identical to SEQ ID NO: 58444
  HPV16:0-7860
  hypo

SEQ ID NO: 102204 - DNA, 7800 bp, Homo sapiens; identical to SEQ ID NO: 58445
  HPV18:0-7800
  hypo

SEQ ID NO: 102205 - DNA, 25 bp, Homo sapiens
  JH636052.4:2022604-2022629
  hypo
ttttcaaacaataaaacaggccggg

SEQ ID NO: 102206 - DNA, 45 bp, Homo sapiens; identical to SEQ ID NO: 34818
  JH806600.1:5064465-5064510
  hypo

SEQ ID NO: 102207 - DNA, 31 bp, Homo sapiens
  KB021645.1:514668-514699
  hypo
caggctgggcatgccccgagtctgagtctgg

SEQ ID NO: 102208 - DNA, 315 bp, Homo sapiens; identical to SEQ ID NO: 34819
  NW_001838014.1_249000-295694:3952-4267
  hypo

SEQ ID NO: 102209 - DNA, 292 bp, Homo sapiens; identical to SEQ ID NO: 34820
  NW_001838014.1_249000-295694:7051-7343
  hypo

SEQ ID NO: 102210 - DNA, 31 bp, Homo sapiens
  NW_001838014.1_249000-295694:12764-12795
  hypo
aaaccggagactcatccggggcggccctggg

SEQ ID NO: 102211 - DNA, 241 bp, Homo sapiens; identical to SEQ ID NO: 34821
  NW_001838056.1_145425-224902:38580-38821
  hypo

SEQ ID NO: 102212 - DNA, 213 bp, Homo sapiens; identical to SEQ ID NO: 34822
  NW_001838286.2_1380778-1470498:80825-81038
  hypo

SEQ ID NO: 102213 - DNA, 1232 bp, Homo sapiens
  NW_001838286.2_1380778-1470498:81097-82329
  hypo
gtggcggggcaaaaagccacggcggcaagggcaaaaagttgtggcttcgggggcaaaaaaccatagcagcggggcaaaaagcagtggtggcggcggggccagaaaaaccacaaaatcccgcggcgatggggggaaaagctgcaggggcaaaaagccgcagcagcagggggaaaaaagccgtaaaaagcagcagcggcgggggggcaaaaaccgtggcggcaaaaagcctcagcggcaggagcaaaaagccatggcggcaggggcaaaaaccgcagtggaaagaagactcagtggcaggagcaaaaacgatggctgtggggggcaaaaagccatgactgcaaaaactgcggagtgtgagcccaaaaagccatggcggtggggataaaaagccacagctgcaaaaagcagcggtggtggggataaaaagccgtggcggcaaaaacccgcagcagcacaggcaaaaagccgtggcagcaggggcaaaaagccacggtggcaggggcaaaaagccgcggcggtgagggcagaaagctgtggcttcgggggcaaataaacacggcggccaaaagccgtagtggcagggcaaaaagctgcagcagtgggggcaaaaagcagcgggagcgggtgcaaaaacccacaaaaacccatggcaacgggaggaaaaagccatggtggcaaaaagccacagtggcggggggtaaaaagccatggcggtgagggggcaaaaagccacaaaaagcagcgtcggcggggacaaaaaccacggcggcaaaaagcctcagtggcaggagcaaaaagccatggcggcggaggcaaaaagccgtggcagcaaaaacccgtggtggcaaaaacccgtggtggcaggggcaaaaagccgtggctttggaggcaaagagccgtggctgtaaaaagccatagtggcgggagcaaaaagccacaaaaagccacggtggcgggggcaaaagccacggcgccgagggcaaaaagccgtggcttcgggggcaaagagccgcagtggcaaaaagctgcaaaaagccaaggtgacggggcaaaatgccacggcggcggggttaagaagccacggcggcggggcaaaaagccgtggcgggagaaacccgcagcagcgagggcaaaaatccatggcagcagtgacgaaaagccacagcagcggtggcagaaagccgtgaggcgggggaaaaatccgcagcagcggggtcaaaatggcactgcag

SEQ ID NO: 102214 - DNA, 113 bp, Homo sapiens; identical to SEQ ID NO: 58452
  NW_001838402.2_289580-297926:6068-6181
  hypo

SEQ ID NO: 102215 - DNA, 30 bp, Homo sapiens; identical to SEQ ID NO: 34825
  NW_001838715.2_220243-222386:1284-1314
  hypo

SEQ ID NO: 102216 - DNA, 98 bp, Homo sapiens; identical to SEQ ID NO: 34826
  NW_001838987.1_19978397-19979692:119-217
  hypo

SEQ ID NO: 102217 - DNA, 143 bp, Homo sapiens; identical to SEQ ID NO: 34827
  NW_001838993.2_42143-59442:15876-16019
  hypo

SEQ ID NO: 102218 - DNA, 114 bp, Homo sapiens
  NW_001838998.1_673882-674972:66-180
  hypo
gattctgttgctatgactttccgggccctgcggggaagggtgggacaggcaagtgaggaggaggcagtggtagcattccgggtagcaacagccttaaagaaacaggatggggcc

SEQ ID NO: 102219 - DNA, 199 bp, Homo sapiens
  NW_001839317.1_1572-22707:16429-16628
  hypo
atgacatcaatgtggtgcaagcgtttgagatgctggccagtagggctctgtcgagggtgagtggctgtggcggcaggacctgctgagaccgcccctggattggggagggtctcgggagcttccagagaagaacatcttgggtgtgggcagggatgtgggtgggacaggattgctcatcgtctcagttaattagttatgg

SEQ ID NO: 102220 - DNA, 89 bp, Homo sapiens
  NW_001839407.1_18933-24809:4219-4308
  hypo
cctcacccccaccccaccccccgccgcaggccttgacaccctgggacccttcagtggtggtgcgggctgtccgagggctcaccgccatt

SEQ ID NO: 102221 - DNA, 208 bp, Homo sapiens
  NW_001839407.1_18933-24809:5027-5235
  hypo
aaggggcttcccgcaccccacatgccctgcgctcctgaggctctcccactggggtcttttgtgagccacggagcgagggccatccctgtgttccagaacagcctacccgcactggcagaggggatctcccaacctgccatggcacgcggggttttgcctacgcctccccggctccttcggaaggggcggtctcccaccctcaggctcc

SEQ ID NO: 102222 - DNA, 257 bp, Homo sapiens
  NW_001839407.1_42766-49957:1425-1682
  hypo
aacacagggactggggacaggcgggagggagccggggacagagggaggaaggcacagaggaaaagcggtcttcggcctcggggaggaacgggacccccgccctccggtaaaatggtaagcttccggcgcgggctgagggctcggcccacagccgccacgtcggccggcggggcactcattctccccgattccttggcccagggaatgggcggtttcctcagagacaaaagaccgggactcgggttgccgtcgggttt

SEQ ID NO: 102223 - DNA, 181 bp, Homo sapiens
  NW_001839407.1_50257-55859:1426-1607
  hypo
gccaccccggctcctccagaaggggcgctctcccaccctcaggaatcttgttgacctccgcaactgggcaaaagccaggaggaccgggacccacagcgcgtcggtctgcagggcccttgtgcgggacagcatgggcccgctcaagcggagcaacagggtcaaagtgtgcttgtgccaccca

SEQ ID NO: 102224 - DNA, 121 bp, Homo sapiens
  NW_001839407.1_50257-55859:1666-1787
  hypo
tgcgaaccccaagccgggcagctgcacctcgccagcccacgccactggaggactccgcgcgacaggggcagatgcaaggcaacccggcgacctccgaggcgctcaaggagccggggcgctc

SEQ ID NO: 102225 - DNA, 121 bp, Homo sapiens
  NW_001839407.1_56047-63507:6751-6872
  hypo
ggaatcgaagggccaggcaccggggacaggctggcaaggtgcctgcgctggctggcggcctgtgcaacgtggcccccgttgggtgtcaccctgccccctcgtgggtcgccttcgcccacac

SEQ ID NO: 102226 - DNA, 121 bp, Homo sapiens
  NW_001839407.1_56047-63507:6991-7112
  hypo
ccgcgccggcagaggggatcttccaacctgcctgggcatgcggggattttgcctacgccgctacggctctttcggaaggggtggtctcccaccctcaggctcctcggtggcgtccacacct

SEQ ID NO: 102227 - DNA, 45 bp, Homo sapiens
  NW_001839407.1_56047-63507:7171-7216
  hypo
gggacagcctgggcccactcaagcggggacacagggccaagttgt

SEQ ID NO: 102228 - DNA, 31 bp, Homo sapiens
  NW_001839593.1_106153-129919:23228-23259
  hypo
tagcgcgtcagcctgccggacccttgcacgt

SEQ ID NO: 102229 - DNA, 121 bp, Homo sapiens
  NW_001839595.1_33916-36793:2250-2371
  hypo
ggtgtccttgcgccacctgcgtcccaggggagtccatcatggggttgtggccggtgtccgcaggtcgccggggcggcgtgggaaccccaagccagggcatccccacctcgccagcccatgc

SEQ ID NO: 102230 - DNA, 121 bp, Homo sapiens
  NW_001839595.1_74059-77718:790-911
  hypo
ctctcccacagtgggctttcgtgagccagggtgcgagggacaccccttgctccagtccagccaggctgcgccgggagaggggatctcccaacttgtcccggcatgtggggatttttcctaa

SEQ ID NO: 102231 - DNA, 301 bp, Homo sapiens
  NW_001839603.1_36678-41438:2679-2980
  hypo
gctagatgtctgtgttccgctgccaggcgctccacggtggcagttgggaggttgcaggtgcacgggtgggccgacgacggtggcgtagagttgcagagtaggcgagccgccggaggggtgtcaggcctggacgttgcacgggctcagtctttctcgggacgggtgtctccacctagcccaggcgaggacgcattttccgggggtggtgggtaggggtggggcgggggtggtatggcgccggtggggaggcggaaaggcatgagaagtctgcccgggctgctcctacagctgaggcggatgc

SEQ ID NO: 102232 - DNA, 39 bp, Homo sapiens
  NW_001839609.1_1-3470:1113-1152
  hypo
gaaagaaactcttttggacaccgagccaaagcgaggcac

SEQ ID NO: 102233 - DNA, 34 bp, Homo sapiens
  NW_001839613.1_2341-3640:86-120
  hypo
tcatgaaggggtggagcctgccggcctacgggcc

SEQ ID NO: 102234 - DNA, 145 bp, Homo sapiens; identical to SEQ ID NO: 34828
  NW_001839646.1_1-5206:1403-1548
  hypo

SEQ ID NO: 102235 - DNA, 301 bp, Homo sapiens; identical to SEQ ID NO: 34829
  NW_001839646.1_1-5206:2127-2428
  hypo

SEQ ID NO: 102236 - DNA, 121 bp, Homo sapiens
  NW_001839651.1_32960-37353:876-997
  hypo
tgcccgtgtccatccgtgaaattccggccgcggctccccgcgacggccttcccgacaccttcagagggcaccctgtgtgtggtagcccggggacggtgacggcgaaggagactcgtttgga

SEQ ID NO: 102237 - DNA, 438 bp, Homo sapiens
  NW_001839668.1_21493-58548:14915-15353
  hypo
gccaccacagctttttgcccccgccgctgcggccccttgccccctaagtggtttcctgcccccgccgcagcagctttttatcaccccagccgctttttgcccccgcccccacgggtttttgcccctgctgccgagggcttttgcgccttcatgtccccgccgtcgtgtctttatgccacccctgctttttaccccctccgccgtggctttttgcggcttttggcaccggacatcgcggctttttgaggctttttgcccccgccgccgcggctttttgctgccgtggcattttgctgccgtcgcaccgctttccccctccgtgcctttttgcccccgccgccgcatgtttttgccgctgtggcttcttaccccgccaccgtggctttttgcccctgccatcccgggtttctgcccccgatgttgtggctttttacggct

SEQ ID NO: 102238 - DNA, 57 bp, Homo sapiens
  NW_001839668.1_21493-58548:15412-15469
  hypo
cgcagctttttgtcgccgcagctgtttgcctcggccgccatggcttgttgcccccct

SEQ ID NO: 102239 - DNA, 145 bp, Homo sapiens; identical to SEQ ID NO: 34830
  NW_001839689.1_34352-41752:1477-1622
  hypo

SEQ ID NO: 102240 - DNA, 121 bp, Homo sapiens; identical to SEQ ID NO: 34831
  NW_001839689.1_34352-41752:1981-2102
  hypo

SEQ ID NO: 102241 - DNA, 121 bp, Homo sapiens
  NW_001839689.1_69962-76288:4518-4639
  hypo
gcgatccccgtccctgggattccactgggagggtgctgtacaaaggtgtcgggagagccatcgcggtaggcccggccagaatttcacggacagacacgggcagagagaggtcggcaggctc

SEQ ID NO: 102242 - DNA, 225 bp, Homo sapiens
  NW_001839792.1_1-3553:1227-1452
  hypo
ctggggcctgggttcccatgtcgccagcgtggagtgggaaccccaagccggggcacctccacctcgccagcccgcacccccagagacctacgcgcggcaggagcagatgcaaggcatgccggcgccctcccagtcgctacaggatccggggcgcttgtctgcagtcccctccggcctgctgttggatgagatgctggcaagccccgagtttctgcagcaggcgca

SEQ ID NO: 102243 - DNA, 25 bp, Homo sapiens
  NW_001839824.1_1-1535:1385-1410
  hypo
cagcggctcttatacaggcccccag

SEQ ID NO: 102244 - DNA, 121 bp, Homo sapiens
  NW_001839864.1_130-4387:2038-2159
  hypo
gccagggagcgacggccgtccccatactgcagcccagccagggcgcgctggcagaggggatctcagaacctgccccggcacacgggaattttgtgcgcgccaccacggctcctccagaggg

SEQ ID NO: 102245 - DNA, 79 bp, Homo sapiens
  NW_001840273.1_1-3087:647-726
  hypo
agagcaacacagggactgggacgggtgcgagggagccgaggacagagggaggaaggcacagaggaaaagcggtgttctg

SEQ ID NO: 102246 - DNA, 259 bp, Homo sapiens
  NW_001840273.1_1-3087:785-1044
  hypo
gagggctcgtgccacagccacagcgtcggtcggtggggaactcatttgccccgattccgtggcccagggaatgggcggtttcctcagagacaaaagaccgggactcgggttgccgtcgggttttcaccagcatggttcacagaccacaggtccccaggctgaatcccacaatggggcgcgaggatgacagccccgaccacggaggagccacactcgggacgagggaggcttgattttggtttccgcgtggctttgcact

SEQ ID NO: 102247 - DNA, 209 bp, Homo sapiens
  NW_001840306.1_6328-82586:33361-33570
  hypo
aagagaggccaaggcatgagtcgcaacgaaaccccagacaacatcctccgttttcacaagagcggtgcctcccctggtcaccactgcgacccctgcttccagctggcacgagccacacacactgctcatttttctcagcgcctgattgtctgtctcacacttctgccccggccacccccgcaccgcacgcagactgaataaaatatgcc

SEQ ID NO: 102248 - DNA, 36 bp, Homo sapiens
  NW_001840754.1_117-3691:2526-2562
  hypo
gggagggtgccatccgaaagtgtagggagggccatc

SEQ ID NO: 102249 - DNA, 121 bp, Homo sapiens; identical to SEQ ID NO: 34833
  NW_001840841.1_1-4205:1665-1786
  hypo

SEQ ID NO: 102250 - DNA, 104 bp, Homo sapiens; identical to SEQ ID NO: 34834
  NW_001840841.1_1-4205:2205-2309
  hypo

SEQ ID NO: 102251 - DNA, 106 bp, Homo sapiens
  NW_001840841.1_32027-40624:2465-2571
  hypo
tcatgccagctgtagcagcatcggcaggaatctcagccctggccctggagccatggcccgcaagaaggcaggagaaagcggactaccttcaccagatcccagaccg

SEQ ID NO: 102252 - DNA, 121 bp, Homo sapiens; identical to SEQ ID NO: 34835
  NW_001840859.1_1-2890:1477-1598
  hypo

SEQ ID NO: 102253 - DNA, 19 bp, Homo sapiens
  NW_001840859.1_78656-82292:1286-1305
  hypo
ggggtggagcctgcctgcc

SEQ ID NO: 102254 - DNA, 138 bp, Homo sapiens
  NW_001840859.1_78656-82292:1904-2042
  hypo
cgggacaggctggcagggcacccacgaaggcaggcagcctgtgcaatgcggccaccggcgagtgtcaccctgatccctcttgggtggccttcgcccacatcggcgcatggggaacgcgctgtgggggtgggaaggagt

SEQ ID NO: 102255 - DNA, 31 bp, Homo sapiens
  NW_001840866.1_38854-140524:82622-82653
  hypo
accattaagaggtaaacgggtggggtccgcg

SEQ ID NO: 102256 - DNA, 407 bp, Homo sapiens
  NW_001840867.1_34087-92528:38236-38643
  hypo
cagggccaccacagcctaagccggtgagccacgcggggagagaggatctgcgggtggggtgggcggcacagacaggcaaggccagggaccacgagcgcaagggcacccgggagcccacagaggggtggctcggggagaaacctcaggcatggctgggccaccaggaaaacacggccatgggatcccaccaccacagacactagggaggtcccgcggcgccccggctgggatgccggatggcccttggcacccaacaagacccgcctctcgagccctggttcccgccatcgggaccccgaagcgacctcagccacaaacccaacaccagggtcacgttgctcgtttcttgtccatcctccaacctggtcaagctccgggagaccggcgtaccccccacttgggatgct

SEQ ID NO: 102257 - DNA, 31 bp, Homo sapiens
  NW_001840954.1_1-14936:6734-6765
  hypo
ccagcccaggggaggacgcatttaccggaga

SEQ ID NO: 102258 - DNA, 25 bp, Homo sapiens
  NW_001841011.1_96346-168555:35644-35669
  hypo
gaccggtttctaagacaaccatggg

SEQ ID NO: 102259 - DNA, 121 bp, Homo sapiens; identical to SEQ ID NO: 34837
  NW_001841051.1_73730-82666:505-626
  hypo

SEQ ID NO: 102260 - DNA, 121 bp, Homo sapiens; identical to SEQ ID NO: 34838
  NW_001841051.1_73730-82666:745-866
  hypo

SEQ ID NO: 102261 - DNA, 121 bp, Homo sapiens
  NW_001841109.1_139-6923:1787-1908
  hypo
cctccaggggcacgggccggggacatgtagctgccccatcttgtggttcccacgccatcccggcgacctgcgtaccccggccccagccgccccacggactcccctgtgacgcgggtggcgc

SEQ ID NO: 102262 - DNA, 59 bp, Homo sapiens
  NW_001841138.1_67124-102688:28425-28484
  hypo
acacgacacaacaccccgtgacgggctcatcactcccgacccttcgagcccacctgcca

SEQ ID NO: 102263 - DNA, 121 bp, Homo sapiens; identical to SEQ ID NO: 34839
  NW_001841145.1_129149-174453:6132-6253
  hypo

SEQ ID NO: 102264 - DNA, 85 bp, Homo sapiens
  NW_001841145.1_177495-186900:957-1042
  hypo
agggaaaagctggccagagagacgggccaatcggtgtccaggattcagatttggtttcagaatcgaagggccaggcaccaggaac

SEQ ID NO: 102265 - DNA, 181 bp, Homo sapiens
  NW_001841145.1_177495-186900:6332-6513
  hypo
ctcgcccaccacccacagaaaatccgtcctcccctcggctgggtggagaccccctttccgcgaaacacggtccgcacagcgtacaggcctgacaaccctccagcggctcgcctgctctgtgcctccctgccaccgtcgcccacccgcccatacccctgcatcctcccagctgccaccatgg

SEQ ID NO: 102266 - DNA, 121 bp, Homo sapiens; identical to SEQ ID NO: 34840
  NW_001841145.1_63352-67863:4021-4142
  hypo

SEQ ID NO: 102267 - DNA, 121 bp, Homo sapiens; identical to SEQ ID NO: 34841
  NW_001841145.1_63352-67863:4201-4322
  hypo

SEQ ID NO: 102268 - DNA, 121 bp, Homo sapiens
  NW_001841145.1_82-8803:5705-5826
  hypo
gatgcccgggtacagattccgctcaaagcaggctcccagggcctcactttgtctcggagaccaaacgtgtctccttcaccatccccgtccccggacttccgcggagagtgtggcgtccgaa

SEQ ID NO: 102269 - DNA, 142 bp, Homo sapiens; identical to SEQ ID NO: 34842
  NW_001841145.1_90215-97412:6816-6958
  hypo

SEQ ID NO: 102270 - DNA, 492 bp, Homo sapiens
  NW_001841157.1_1611084-1612812:961-1453
  hypo
ttcctggaacagatgaagccccgaactgctcagaacagcgcgcagacctcttgcctctctactccccaaacctgccggtggttcctcagtaatcccctgagcacccgcagctcccgggttccctgctgcgcccgcctggagcccaaattccatgtaaggcagggtcgccctcgtgtcccgctgtggctccggtgtccttcccccgtcagattcctacttagaggccctggggggacggagtcatatcgggggacaaacggcggctcaaggtgccttctccggggagattgtctcaagggcaggaggaggcctccccgggcaggtgtggacgggggccccgggcagaagcgtctctcacggtggcccttgtgtccccgcagccgagtggcaggtggcggaggccacagcgctggtgcacacgctggactgctggtccgtggtgcagacaatggtcgtgtccaccaaaacgccggacaggaagctcatctttgg

SEQ ID NO: 102271 - DNA, 166 bp, Homo sapiens
  NW_001841533.1_1-11450:7729-7895
  hypo
aggctgctggggctctagtgctggcgcggggcaaagcagagccttcctgccccgttgtccacggcgggtccttgtcggaacaagtgacgattgtgtaggcattgtatgaaaaatggcccgcggggctgggccggctgttcaccccggtcagccctggtggctctgg

SEQ ID NO: 102272 - DNA, 121 bp, Homo sapiens; identical to SEQ ID NO: 34843
  NW_001842224.1_80-3146:1733-1854
  hypo

SEQ ID NO: 102273 - DNA, 17 bp, Homo sapiens
  NW_001842224.1_80-3146:2273-2290
  hypo
gcctccacacctgggaa

SEQ ID NO: 102274 - DNA, 179 bp, Homo sapiens
  NW_001842432.1_1-179261:39823-40002
  hypo
cacaacgcgcccagagcgtagggtcccactcacctgggagcgggggcacgtccctcccagtaggcgatggagttaagtttgtttccttatttattttacttaaaactggtagaatgttactattatatgaaatacccatgactctgtcagtaaatttgagcaaacgtttattagttttt

SEQ ID NO: 102275 - DNA, 322 bp, Homo sapiens
  NW_001842432.1_1-179261:102975-103297
  hypo
cccagttttggagaagcacctcgttcctgatggaggccgtgggcctctttgtcctcgcttaccaggcagcagctccagccattctcagccccaccggtgggtgccgccttccatcaggccaaagactttccgaaactgcccttcttggggccgggaggccgcatcctaggcctccctggggcctgcggcgctggcagcagctccatgttgaggtcacctacagccggcaccacggcacgctggaggtccctgagccgggggttgggaggccaatccatcggtgcagtgccgggtgcaggccgcagtctcaaaagtgcttgga

SEQ ID NO: 102276 - DNA, 30 bp, Homo sapiens; identical to SEQ ID NO: 1
  chr1:569477-569507
  hyper

SEQ ID NO: 102277 - DNA, 30 bp, Homo sapiens
  chr1:840603-840633
  hyper
ccgttcacgttcaccgagaaaacagacata

SEQ ID NO: 102278 - DNA, 65 bp, Homo sapiens; identical to SEQ ID NO: 34846
  chr1:859735-859800
  hyper

SEQ ID NO: 102279 - DNA, 30 bp, Homo sapiens; identical to SEQ ID NO: 3
  chr1:860007-860037
  hyper

SEQ ID NO: 102280 - DNA, 30 bp, Homo sapiens
  chr1:860598-860628
  hyper
ccgaaggaagtttacggggactcgagagag

SEQ ID NO: 102281 - DNA, 30 bp, Homo sapiens
  chr1:875865-875895
  hyper
ggcggtggagctggcggagcctgcatagtg

SEQ ID NO: 102282 - DNA, 188 bp, Homo sapiens
  chr1:877474-877662
  hyper
gggggcgggggggacgccgctcattgcgctgccgtccacagggagctgcctcagccgccccccttgctgtcgccgcagaatgcccctcacgtcgccctgggcccccatctcaggccccccttcctgggggtgccctcggctctgtgccagaccccaggtgaggaggcgggtgcgcatcccctgggagc

SEQ ID NO: 102283 - DNA, 30 bp, Homo sapiens; identical to SEQ ID NO: 5
  chr1:894192-894222
  hyper

SEQ ID NO: 102284 - DNA, 30 bp, Homo sapiens; identical to SEQ ID NO: 34850
  chr1:894586-894616
  hyper

SEQ ID NO: 102285 - DNA, 300 bp, Homo sapiens; identical to SEQ ID NO: 34851
  chr1:901740-902040
  hyper

SEQ ID NO: 102286 - DNA, 30 bp, Homo sapiens; identical to SEQ ID NO: 34852
  chr1:935124-935154
  hyper

SEQ ID NO: 102287 - DNA, 899 bp, Homo sapiens
  chr1:935361-936260
  hyper
ccgcgcctccccgtgccgggtggagcgcgccgccacggaccacgggcgggctggcgggcgagcggcgagcgcgcggcgatccgagcccctagggcggatcccggctccaggcccgcgcgcgcctcaggccgtttccctatttaaggcctcgccgccgcggggtgtgtgaacccggctccgcattctttcccacactcgccccagccaatcgacggccgcgctcctcccccgctcgctgtcagtcacgcctcggctccgggcgcggcctccgcgggcgacaatggcatgcggggcccccgcccgcgcccccctccgacaccgctggggacagggccgggtgatcccgcgctccccgatgcagccggggccgagcaacgcgccgggaggggccgctgggggcgaacggggcccgggacccccggggctgggcggagtctcggggctcactctcccgcccagggggccgggagccggggctggacggagctggggctgtggccgcgcgggaagtcgggaaggaaattcccccagtggcgcagggtccggcggcgccgaggggtgggcgagcctcggtctcgagcctcttggcttcctccgcccgtccccactccggtcccggtttgggccctgctcggtctccgagtttgatccgacaccggctcggcctccgggggtcccaccctcaggtgtgcggcctggagcacggagggctgcagaaagccttgggagcgacagagccgggggaaggtcggcggccgggtcggcaggcgggagggcggagtcagcggacggcgaaggggcgcacgggtggccccgcagagcagggccggtgatggcgcgggccgggccggaccacgaggagcagaacgtgcgcgtgacgcgagcgggctggtgacgtc

SEQ ID NO: 102288 - DNA, 30 bp, Homo sapiens; identical to SEQ ID NO: 8
  chr1:936595-936625
  hyper

SEQ ID NO: 102289 - DNA, 30 bp, Homo sapiens
  chr1:937394-937424
  hyper
gccgcagtcgccgccgcctcctgctggggg

SEQ ID NO: 102290 - DNA, 393 bp, Homo sapiens; identical to SEQ ID NO: 34857
  chr1:955507-955900
  hyper

SEQ ID NO: 102291 - DNA, 381 bp, Homo sapiens
  chr1:975561-975942
  hyper
cgcgggaaggggctcccccggctccatggggtgaatcggtgaggggctccggtgccgatgtggaaggagctcctgagcagaactggggcctggactgcttgtgcccgagttggtttcgaggcgtctctgcttttcgctggaggcccacgaggtgggtgggaagtgggtgctcgcccgtcgcagaaacagagtcgggtgccgcctgcggcagacgcccctctccgcgcctgcaggtgcggggtgggggagaaaggtcatccctggagaggcccggggctggcgggaatcctcggcgggcggggtctgcgaggggcagggccggtcctgtgagcgcacgcacgcgtgtccgtgtccgtggtggacccccgatgcggcgcgggg

SEQ ID NO: 102292 - DNA, 52 bp, Homo sapiens
  chr1:976152-976204
  hyper
cgcctgtgtgtgggtcggacgcctccacctacagcaacgaatgcgagctgca

SEQ ID NO: 102293 - DNA, 30 bp, Homo sapiens
  chr1:976431-976461
  hyper
gcctgcggggcccggcggggaggagcgggg

SEQ ID NO: 102294 - DNA, 62 bp, Homo sapiens
  chr1:994998-995060
  hyper
agaaggccggggggcgtggcctcggggcgtggcccggggcgtggcatcggggcgaggcttcg

SEQ ID NO: 102295 - DNA, 155 bp, Homo sapiens
  chr1:999584-999739
  hyper
ggtggtaccacgggcgcctgtctggcaaggaggctgagaagctgctgctgcagaaggggcatccgggcagcttcctggtgcacatgagtcagagcgatcctgggggcttcccgctgtcagcgctgacgcaagggtgggacgaggcgcagggctca

SEQ ID NO: 102296 - DNA, 31 bp, Homo sapiens; identical to SEQ ID NO: 11
  chr1:1003647-1003678
  hyper

SEQ ID NO: 102297 - DNA, 113 bp, Homo sapiens; identical to SEQ ID NO: 34861
  chr1:1004071-1004184
  hyper

SEQ ID NO: 102298 - DNA, 80 bp, Homo sapiens; identical to SEQ ID NO: 12
  chr1:1014972-1015052
  hyper

SEQ ID NO: 102299 - DNA, 30 bp, Homo sapiens; identical to SEQ ID NO: 34863
  chr1:1051642-1051672
  hyper

SEQ ID NO: 102300 - DNA, 131 bp, Homo sapiens
  chr1:1052181-1052312
  hyper
ggccccggggtctgggcggcgtcgctgccccacaggccgggcgcgtgggtttttccggggctctgcctctgagccaccctcggagaaaagacagctctgtgcgtcccgcggcgcccgcagctttcggcaaa

SEQ ID NO: 102301 - DNA, 157 bp, Homo sapiens; identical to SEQ ID NO: 13
  chr1:1072535-1072692
  hyper

SEQ ID NO: 102302 - DNA, 30 bp, Homo sapiens; identical to SEQ ID NO: 14
  chr1:1136386-1136416
  hyper

SEQ ID NO: 102303 - DNA, 30 bp, Homo sapiens
  chr1:1137084-1137114
  hyper
tgcaggcaggagtgcgcggggcagggcccg

SEQ ID NO: 102304 - DNA, 192 bp, Homo sapiens
  chr1:1181913-1182105
  hyper
cctcgcgggaggacgcgctggcggtggcgttggggggatctgcgcgctggccaggctgctgcgtcctctgtgcctcccgccgggccccgacgcccccgaggagcacgagctgcggcccgaggaggaccacgaccgcggcccaggcccagcgccgcatggctccgtcccgaggcggctcagcgcggcgagtct

SEQ ID NO: 102305 - DNA, 56 bp, Homo sapiens
  chr1:1182226-1182282
  hyper
gcgacggcgctcaggtccccccggggtcccgctccagcccccgctcccagcccccg

SEQ ID NO: 102306 - DNA, 30 bp, Homo sapiens
  chr1:1242982-1243012
  hyper
ggggcatggcggggcggggccgccgctttg

SEQ ID NO: 102307 - DNA, 30 bp, Homo sapiens
  chr1:1244629-1244659
  hyper
acacctgcggcacccggccatcaggtgagc

SEQ ID NO: 102308 - DNA, 30 bp, Homo sapiens
  chr1:1254458-1254488
  hyper
ctgcacgtgctctcccgggtcggcgcccag

SEQ ID NO: 102309 - DNA, 30 bp, Homo sapiens; identical to SEQ ID NO: 34867
  chr1:1259929-1259959
  hyper

SEQ ID NO: 102310 - DNA, 30 bp, Homo sapiens; identical to SEQ ID NO: 15
  chr1:1310108-1310138
  hyper

SEQ ID NO: 102311 - DNA, 30 bp, Homo sapiens
  chr1:1310963-1310993
  hyper
agagctatttcccccgtttttgctagagac

SEQ ID NO: 102312 - DNA, 30 bp, Homo sapiens
  chr1:1334021-1334051
  hyper
gaacaacacctgcccggtagccatggccac

SEQ ID NO: 102313 - DNA, 30 bp, Homo sapiens; identical to SEQ ID NO: 34869
  chr1:1334319-1334349
  hyper

SEQ ID NO: 102314 - DNA, 269 bp, Homo sapiens
  chr1:1334560-1334829
  hyper
gtacagcctgtccccgatcagcaccccctgcgaccctgagggtgcgcccccagatcccggggcgccggccgctgccgcgggagctgccgaccctgcagcaccagccgccgccgccgccgccgccattttgtgccgccgactccccttcggcttcttccctcagggcggctcctcgcgaagctccacggccgccaccgccccgccccgtcgcgtgccattggttcggcccgcgaccagcgcgacgccgcctagccgcaattggctacata

SEQ ID NO: 102315 - DNA, 30 bp, Homo sapiens; identical to SEQ ID NO: 16
  chr1:1342780-1342810
  hyper

SEQ ID NO: 102316 - DNA, 30 bp, Homo sapiens
  chr1:1343062-1343092
  hyper
ggtgtgaaagtgcccgttgcctctgaacct

SEQ ID NO: 102317 - DNA, 30 bp, Homo sapiens; identical to SEQ ID NO: 34871
  chr1:1371332-1371362
  hyper

SEQ ID NO: 102318 - DNA, 31 bp, Homo sapiens; identical to SEQ ID NO: 17
  chr1:1434134-1434165
  hyper

SEQ ID NO: 102319 - DNA, 30 bp, Homo sapiens; identical to SEQ ID NO: 34873
  chr1:1447359-1447389
  hyper

SEQ ID NO: 102320 - DNA, 345 bp, Homo sapiens
  chr1:1475298-1475643
  hyper
cgtaggccttggtagggggagcgcagcgggtatggggatcgcaggctggggaggggagcgcaggccggggtggggggagcgcaggcccgggaggggaccgcgggccggggagggggaagcgcaggccggggtggggggagcgtaggccggagagaggagcgtagggagtgtggggatcgcaggttggggaggggagcggaggccggggtgggggagcgcaggccggggaggggagcgcaggccggggaggggagcgcaggccggggaggggagcgcaggccgcacgggcggtaaacaaggcgcgggaggtgggccaggcggcgcgcgcgggcggggagcaggggg

SEQ ID NO: 102321 - DNA, 71 bp, Homo sapiens; identical to SEQ ID NO: 34875
  chr1:1510422-1510493
  hyper

SEQ ID NO: 102322 - DNA, 54 bp, Homo sapiens; identical to SEQ ID NO: 34876
  chr1:1510559-1510613
  hyper

SEQ ID NO: 102323 - DNA, 540 bp, Homo sapiens
  chr1:1534830-1535370
  hyper
ccgtcatggccaccacgatgtcctgcatgccggccggctcggcggtgaactccacgcactcggccggctcgggggtctctggcgcggcggcggcgggcccagcgcgcagcggcagcggctgcaggcacaggcggtagaggacgctgtcgtgcacgtcgggcagcaggtagtcgcggcaggaggccccgaggagcacgcgctcgcacgggaagcgcgtgtaggcgccgcgccacgagcagttgagcgcgaaggcgcgcacgcggcgcgcggcggccggggccaggcgccactgcaggaggacgctgcggttgcgcaggacgctggcgcgcagggagcggccggccggggcgtgcagcacgcagcccggagcctggcagcggaagccgcgcgcggggctgcggaagcacaggcgcccgccgcccgcctcggggccctcgggcagcaccttgtaggggcaccagggcgcgtcgggggtcggctcccagcccggcggcgtcggggcggccgcggcgcagggcggcggcgcgcaggcggccagca

SEQ ID NO: 102324 - DNA, 77 bp, Homo sapiens
  chr1:1535609-1535686
  hyper
tacgggtgcgggggatcgggggtgggggggaggagggggacgcagcgaggcggccggagtgccggtggggctggggt

SEQ ID NO: 102325 - DNA, 137 bp, Homo sapiens
  chr1:1550764-1550901
  hyper
gtaggcgacgcagacgctcccgcgtgacgcacttccggtgcttgccctgcccatccccgtggcgggggcgtggccatggcgggggcgctccggcgggggcgggccctgggctcccgcccttcgggtcccacagtttc

SEQ ID NO: 102326 - DNA, 57 bp, Homo sapiens
  chr1:1566482-1566539
  hyper
cgccagctgcttggcgctgaccccgttggccgggctgccgtcaccctgggcccgacg

SEQ ID NO: 102327 - DNA, 129 bp, Homo sapiens
  chr1:1566945-1567074
  hyper
cgcaacctggcaccctccgcggcccttgcctacccacgcaccccctccccgcctccccctccaccgccccatactcactgccacgtccccatccggccatcccctcccagctctcggggacactgtcag

SEQ ID NO: 102328 - DNA, 4 bp, Homo sapiens
  chr1:1590458-1590462
  hyper
cgtc

SEQ ID NO: 102329 - DNA, 30 bp, Homo sapiens; identical to SEQ ID NO: 22
  chr1:1709188-1709218
  hyper

SEQ ID NO: 102330 - DNA, 30 bp, Homo sapiens; identical to SEQ ID NO: 34882
  chr1:1709582-1709612
  hyper

SEQ ID NO: 102331 - DNA, 30 bp, Homo sapiens; identical to SEQ ID NO: 34883
  chr1:1710250-1710280
  hyper

SEQ ID NO: 102332 - DNA, 30 bp, Homo sapiens; identical to SEQ ID NO: 34884
  chr1:1710546-1710576
  hyper

SEQ ID NO: 102333 - DNA, 550 bp, Homo sapiens
  chr1:1713454-1714004
  hyper
gctgggattacaggcgtgagccacagcgcccggccacagcctggtacgtttattgtccacatttttcacgcgggggccagaggcacagagaggccaagtaacttgctcaaggtcacccagcgaggaaagggagctggggggtgggggtaggggacagggcgaggccagagagtagtgggaggggccgaggcggcctttcccgggagcgctcggttcccggccggcccttctattggccccagtcactcaggctcccaggtccggctcgggggggagcggggggccgcgccaggccgctgaagtgtccccgtttcgcgtgggcagagcgcgcctccccacgcatcctgctgagggccagcctctgctaggtgcgtgacacggaggggacagaacggaaaccttgtcctgctcaagtgtggacgtgcgtgccacgtgctagagtaaaattgaggtggggaacctccatccctgggacatggagcacaggggcgaccccgcgccgcttggtcaaaggaggtccgaggccctgcaggaacagcccacagccgga

SEQ ID NO: 102334 - DNA, 233 bp, Homo sapiens
  chr1:1714067-1714300
  hyper
cggagccaggtgacccggacacaggaagcgcgccaggggcccccacaccgcggagctgctggcgacaaagggcgctgctcctgcataggccaggctaatgcaatctacaaactagatttctgtgcctacagtttgaaaatgattgcagttcactcagccagtgtggaattatcctcctctttccacactgccttagtcagtgccgctgtccaagtgcacgttgttggcgcccg

SEQ ID NO: 102335 - DNA, 239 bp, Homo sapiens; identical to SEQ ID NO: 34886
  chr1:1737717-1737956
  hyper

SEQ ID NO: 102336 - DNA, 45 bp, Homo sapiens; identical to SEQ ID NO: 34887
  chr1:1747213-1747258
  hyper

SEQ ID NO: 102337 - DNA, 30 bp, Homo sapiens
  chr1:1840186-1840216
  hyper
gaggctgaagaggacgcggacggaggagcc

SEQ ID NO: 102338 - DNA, 30 bp, Homo sapiens
  chr1:1840421-1840451
  hyper
ggcggcgcggacggcgccgtgttcgcagtg

SEQ ID NO: 102339 - DNA, 30 bp, Homo sapiens; identical to SEQ ID NO: 34888
  chr1:1850260-1850290
  hyper

SEQ ID NO: 102340 - DNA, 143 bp, Homo sapiens
  chr1:1850718-1850861
  hyper
ggagcaaagcccggcggcgcggctttatggggccccgcccaccacaggacacacccaccacatgacacgcccacagaacgcccgctcagagtaaaccccgcccaccgggccccgctggccgcaggccccgcccacaggcgcac

SEQ ID NO: 102341 - DNA, 222 bp, Homo sapiens
  chr1:1850928-1851150
  hyper
cgtcgcaggcctcgcccacaggacgcctcacgcagcataaaccccgcccactgggccccgcccagtgcaagccttgttcgccgcaggccccgcccacaggagccctcgcccacgagacgcccccattcgctgggcctccactcaatgcaaaccccgcccactggccccatgcccaacgtaagcctcgcccaccataccccgctcagcgcaatcccctcccac

SEQ ID NO: 102342 - DNA, 183 bp, Homo sapiens
  chr1:1935023-1935206
  hyper
tctggcacagctttccgggaaaggcgtttcatatgggacggagttctgcctggggggcgggggtcaaacccttccagctcagccccagggtcaaacgcatccgcccccacacccacctctggctggcctgggtcccaggttctcgggctccggaggcacagacaccccgggctgctcaggcag

SEQ ID NO: 102343 - DNA, 241 bp, Homo sapiens; identical to SEQ ID NO: 34892
  chr1:1935231-1935472
  hyper

SEQ ID NO: 102344 - DNA, 30 bp, Homo sapiens
  chr1:1950400-1950430
  hyper
tccccacccaccgccggcgcagccagaagc

SEQ ID NO: 102345 - DNA, 83 bp, Homo sapiens; identical to SEQ ID NO: 34893
  chr1:1976104-1976187
  hyper

SEQ ID NO: 102346 - DNA, 1456 bp, Homo sapiens
  chr1:1981168-1982624
  hyper
gaggggcctggagggcgattgtccagatcaagcccctcgagtaaggcccgagaggctgtggcttcagaaatgaaggtcatgggcgactcgggccaatgccgcgtccttgacctgggcgaagtgagcggttgcactcacgagtgtggacggcccttccctacaggggaccttggattcgctgggggcggagtgggggctggggcccagagaacccgagtccggacgctcccgtccgtgaccctggccgggttctccgctcctcgcagcttcagtccgcaagtgtgagatgtcaggggacccctggacggcggggccctcgggctggcagcgcgcgccgcaggagtttcgattcggagggtctgggcgaaggccgagaactcgcgtttccagcgagttcccgggggcgccgctccgtcccagaggccggggcccctccggttgccgggcagagccgcgccgcgcgcggtcccattggcgcaggtgcgccgcgccccgcccaacaggtagccccgcccgacaggtagccccgcccgcgcctcgccattgggccgcggccgggtgtcccccgaggattggcccaggtggcggccccgcctcgccctcattggccgcaggtgccaccgcccgccccgggaccgcccgccccgcggattggccgctggctccacctcggtccgccatgttcggacaccgccccccgcccccgccggacggtcccgccccgcgcgccccccgctcccgccccgcgcgccgccggagttccgcggagttgaccgggtcggcgccgtcggtcctgagcgctgccttccgcgttccgccgcggccccacctggagcccccgccccgcgccatggccggagctcccggggcgcagcgctgacggcggcggggggagcgcgccatgcccagcaggaccggccccaagatggaagggagcggcggccgcgtccgcctcaaggcgcattacggggggtgagcggcggagagggcggggagcggcgcgggtgaggcagggagggcggggagggctcagccgtcggggctcctgcgcgagagggagagagggaaggggcggcgaggtcgctgcgggcccggggctgtcgcgggaggtcctcggtccccgcccgtgagcgtcacccgcggacacgtcgtggacagcgcgggctccttccccgggaccgggtttccctggggtcggccccgcgccgcgagctcctcggcccggtcattgtggtagacgttttcgctggaaagttgggcggggacgttccggccgcaaacctgtaaggactgaaagttttcatcaagttgtgaaaactcctggcgggtttcttaaaatcagcgtttcctaaacgttctccacgtttacccggtcgggggtctcgctttagccaaaatccggagacccggggcgcgggcgctgtggctccaatgcagcccccggcagggctcgggg

SEQ ID NO: 102347 - DNA, 157 bp, Homo sapiens; identical to SEQ ID NO: 34896
  chr1:2078422-2078579
  hyper

SEQ ID NO: 102348 - DNA, 30 bp, Homo sapiens; identical to SEQ ID NO: 34897
  chr1:2135699-2135729
  hyper

SEQ ID NO: 102349 - DNA, 410 bp, Homo sapiens; identical to SEQ ID NO: 34898
  chr1:2135929-2136339
  hyper

SEQ ID NO: 102350 - DNA, 287 bp, Homo sapiens
  chr1:2136830-2137117
  hyper
gtccccgtgagccccgcgaggggagcctgtcccagccacctcgccgcttcaatttcctccaggtccacaggcccagcccggcgcgcgccgctcgttctgcgacctccagggcgagcgcgcttccggggcggccgtgcaagaggcgtgggaagcgcgcggggggttctgagcgtgcagtcgccgcctgcggacggcgaaggggcgggtgaaacgagtttccagcgtcgagcctgcttcgtttcaaggtggacgccacatgcaagccacgagcgcgtcgccgcacggtg

SEQ ID NO: 102351 - DNA, 155 bp, Homo sapiens
  chr1:2158900-2159055
  hyper
tgggaccccagaggcgtccggggcctccccgctgtgtggtgtcccaccctgggagaaccccgggtgcgtggcgtggccccccggccgcccccagctggtttgcggtcgtggcgggggcctgtgggtttctgggccccgacggcggcgagacgggc

SEQ ID NO: 102352 - DNA, 385 bp, Homo sapiens; identical to SEQ ID NO: 34901
  chr1:2165785-2166170
  hyper

SEQ ID NO: 102353 - DNA, 30 bp, Homo sapiens; identical to SEQ ID NO: 34902
  chr1:2322538-2322568
  hyper

SEQ ID NO: 102354 - DNA, 30 bp, Homo sapiens
  chr1:2322812-2322842
  hyper
ttgggggtcgagggcgtagagcgatcgcac

SEQ ID NO: 102355 - DNA, 30 bp, Homo sapiens; identical to SEQ ID NO: 34903
  chr1:2323748-2323778
  hyper

SEQ ID NO: 102356 - DNA, 30 bp, Homo sapiens; identical to SEQ ID NO: 31
  chr1:2343721-2343751
  hyper

SEQ ID NO: 102357 - DNA, 224 bp, Homo sapiens
  chr1:2345879-2346103
  hyper
tgtaatggcacccgcgaccctcagttgcctcactcattggggcttcgaaggcctctggtgccccgagggtccttcctgagggcgacttgaatacggcggtcctatcctgggatggccggcaggtggcagcgtcagcccgtctgctctccaccgggctccccggtagagttataggggattaggcggtgagttttgccccaaagggaatcgaatctagatcagaa

SEQ ID NO: 102358 - DNA, 824 bp, Homo sapiens
  chr1:2374845-2375669
  hyper
cagcgcctgggcaaacgcccagcctggagatgggaagcgctctcggccccgcccccttcccggtcccgccggctggggccacggggagccggagggaggcggagggggaggtgtggggagcggaaggccgcaggagcatctttgcggagaaagtactttggctgcggcgggcgcagggcgggccggctagccccgcgccccacctgttctgtgcgtcgcgctcgcccggttgcgcccgatctgcctccagcccggtgcccgccgcggagcccgcgcccccggccccctcccggcgcggggcgggcagggggtgtggtgcgggcggcacgagtgacagcgcgctcctcgcgcggcgcctccacggggcgcagtgtcaccgcgcacagcccgccgcgggccgcccgagctggcggggcgatgccgcgggagccggagccccagcccgagcccgagcccggccgctgactgcgcctcccggcccgcagcccccgcccccgccgccctcgctgccctcgctgcagccgccacggagacaatggacgcgggagccgccccgcagaagcacagtaggtgccgctcctgccgctgcgccgctgccaaccgggatgcgcgggtggacgcgcgggggcgccgcagccctggtgcgggtcggggctgagccgcctgggcttcagactcgggagcggaggctcggatcgcggtggcacgggcaggggtgcgggcgcgggactgtgggcgggacgggcggagcggtcttgagctctccggatggcctcaggtgcggggtgagggatctgggggccgcccctcggcaaactttcctt

SEQ ID NO: 102359 - DNA, 374 bp, Homo sapiens; identical to SEQ ID NO: 34906
  chr1:2457939-2458313
  hyper

SEQ ID NO: 102360 - DNA, 931 bp, Homo sapiens; identical to SEQ ID NO: 34907
  chr1:2460597-2461528
  hyper

SEQ ID NO: 102361 - DNA, 495 bp, Homo sapiens
  chr1:2461950-2462445
  hyper
ggggcctgatgccgggagccccgcgcctcaatatgctgccttttcccaggccgccaaacgggaggggggcaggaaggagggccccctcccccgccctcccctccgctcccctcccctgcctctccccagcggcttcccactgctggctggcagaggccgtaggagcagataagggaaaaactgtagaatgaacaagtgccacggcttcctgggggatgggcaccttccctgactgggacctgctgcccctccaggggagggggacagagggggcgacgctcttaggatcagtcctacgtgcctatattacaagccccctgactgtcacctgggactcctgacttctccagacctagaaaatgggccttgtgccttcctggctgggctccgggcagctccaggaagctggggcccgtgctccacgtggagcccggcacccggcagctctccccgcggagccgggcacccggcagctctccccgcttcctgcaccct

SEQ ID NO: 102362 - DNA, 194 bp, Homo sapiens
  chr1:2472194-2472388
  hyper
cgccggtgtccccccaccccccgtgcgccccggggcagggccgggtcgccgtcccaagctggttaaaaaccccgcggtgtcagagagcagctcgttcccaacctctgaaaggcagacaagccctttattgctctattataacgcggagccagatggtcttttgggagttgcccccccgcgccccccgccgccgc

SEQ ID NO: 102363 - DNA, 72 bp, Homo sapiens
  chr1:2477790-2477862
  hyper
gcaccactgcctggcgcccataaagacgcctccaccacctgcgccgccgccgcctcccggccgccctccgcc

SEQ ID NO: 102364 - DNA, 30 bp, Homo sapiens; identical to SEQ ID NO: 34912
  chr1:2478074-2478104
  hyper

SEQ ID NO: 102365 - DNA, 30 bp, Homo sapiens; identical to SEQ ID NO: 34913
  chr1:2478347-2478377
  hyper

SEQ ID NO: 102366 - DNA, 30 bp, Homo sapiens; identical to SEQ ID NO: 40
  chr1:2478638-2478668
  hyper

SEQ ID NO: 102367 - DNA, 30 bp, Homo sapiens; identical to SEQ ID NO: 41
  chr1:2480416-2480446
  hyper

SEQ ID NO: 102368 - DNA, 31 bp, Homo sapiens
  chr1:2517090-2517121
  hyper
agcagcagcacccccccggggcctctcttta

SEQ ID NO: 102369 - DNA, 117 bp, Homo sapiens; identical to SEQ ID NO: 34916
  chr1:2517410-2517527
  hyper

SEQ ID NO: 102370 - DNA, 954 bp, Homo sapiens
  chr1:2559941-2560895
  hyper
cctacgcacctgccccgggggtgagcattgctccccgatgtgtgcgcgctgcccggtctcagagggaccagggctgtgcctgcggaggggctggcaggggcggctggaaggtgaccaggtctacgggtgcctgggagcccctgaaccaagaggggagatcaagggaggggccggcgtgggggcggggggagtgttcccgggacagccgggggcggggggagtgttcccgggacagcccgaggttccagcgagcagccctggccacgcctttgtctccgtgggaccccagactggccccttcccgccgtggtcccgtgacctgacccggccttgagcggggcgggggcggcaggaccctcaggtctctccgcaggatggcagcgggggagtgaggcagccaggtgagcccgggcggcgggagggacacggacgccggtggtccccagccggggctgcgcggccaggcagggagggggtgggcggaggggcgggcgacgggtctgcgccccccaccctccgggagtccggcggaggcggaggcggaggcggaggcgggcgggtgcggagctgcagaagcagcgcgcgggagtcggggccggggcagagctttctggaagggaccgcgggctccctgcaggtcagtgcccctcccgccgcctctgagtccgcagctcggccccgggagcccctgggtgcccagtgcagacccacctgccccatctgacgggcgggctcgggctgggggcaggcggaccctgcagcaggtgcagcggggcgagcgcggagagcgggcacggggacaggcgggggcggggcacccgcactcacctctgcggtcggcgtagaggacacccaaggccaccagggcagcggtcaccagcagcagcagcagcagcagccccccctccaggaaccccgggcgcttctgccctgcacggccggcgctctccacca

SEQ ID NO: 102371 - DNA, 779 bp, Homo sapiens
  chr1:2574027-2574806
  hyper
ccacgaccagaaatccgctcgcctcgctgggctcctcctccgctcaagaatctgcaggggttccccgctgcctgaggaacacgccaaggtgcaggccccgcctttctcgctggcgctgcctctcttccagcagcccggcggtcctcgacgctacctcccccggggggcgcagcgcacccaggaccccgccaggcttggccgcacggggcgaagccgaggcccacgcccggggtccgtgcagggagcgagggggtcccacggccccggctttgctgctgggctcccgcagggcacagtgtggcctcttctgccagctgtgagcggcgctgagcagggcaggggctcgaaaccccgtccctcgcctgcggtgcggcccgcgggaccgcccctctccgggcggaggcacctgaccccgacccgtagttcacggcccggggtggtagtgaagcctcggcccgcgcaggacccgcacatttgggccgggtccatggcagcaggagggcgaggccccgagcagctgtcggaccccgggagcccccaggccgccccagtggggaagggcgctcaatccgaccccagactcccctgagcccgcggctcgggccgcgcaggcgcagtgccacccggagggggccgcctgccgaggggcggggcgcaggaagcggggcgaaaccactgttggctcatttccgggtgggtccccgtctccaggcaaccatttcgcgtcctgcagattcttgcctgtgccgggagccgcctcctggcgccgcagcccagcc

SEQ ID NO: 102372 - DNA, 30 bp, Homo sapiens
  chr1:2575107-2575137
  hyper
ccccctctgcagcaccgaactgccccttac

SEQ ID NO: 102373 - DNA, 27 bp, Homo sapiens
  chr1:2706307-2706334
  hyper
cgcagcagtccccggccgcacagcgcg

SEQ ID NO: 102374 - DNA, 428 bp, Homo sapiens
  chr1:2780348-2780776
  hyper
agtgggacggcccctcgacagcttagttgggctctactcaggtgggcgaagcccctggggtctcttcctgaccccccacccccaactccctccgggcagggccggctctgggggcggctgactccagcctctgcttctccgaattaagacggatggcggcttctctaagaaaggaaatgtatatcaacaaacttccatcccggagatcaaaccgcttcctcccgccctccccaagcacctcccgtgctgccccccctcgccaccccaccccccagtcctgctggccttccctggccccatgtgccggctcaggggacctcaggaggggtggtgggggtgcgtgtgaggtgagctgggctggccagagcagggccaaggggccactctgcactttcaaatatcattagagtcagcgggctcccggcaag

SEQ ID NO: 102375 - DNA, 1716 bp, Homo sapiens
  chr1:2984306-2986022
  hyper
ggagggcaaggccaggagcctcgcggggcggcgcagagaccccgcatcgcgggcgcgacccctgcctcgggctcaggctgactctgcggcagctccaagtcccgttgccgggcaggacttcggtgctccggaagggtgcggggcagcaacctggccagggcagcgcctcggtttccttccaattcattctcgattcccagatactcagatgagaaatccgcactcaggccgtcaggctcctgggcccgggccaccctgcctgcgctcagcccggcccctccgccgcagcgcctcggagtttgggggctacaggggaagaggaagcgtctggtcggctcccgtccgagctgctccacctgcgccgctggcctttccgcccgctacgcacctgggccccgagaggccagaggggagtgtccccagtggcccgggtccccgaaggtggcccagctcgggcgctcgcgcagccgggtactcaccttgggggcgcggcggcaggagagcgcgggcggagaggtgcgggcgccctgggacgaccagccgaggacgcctggtgtttggacggctgcccccgcgctgtccccccgtgcgaggcgtgttggcctccgtggcctcgcgagggaccgagggcggcgggtccgagtgccgcccgccggcctgggcagtggcggagcgcggagctggcggcgcctccgctgttgtttttgagccgcgaagcccgaagcagcagccgttgggtgggggcgaaggggaggaggcgggggccgggaggcgcgaggggggcggtggggcccggagggggcttcggaggagccgggttctggcgcgcgagccccgacgccccctccagcgatcgcagggcggggacgggggccgaggggagaatgcaggagaaaagcgggccggggcgacggggaacgcaaagcttttaaattagtaatcaaacgcagtaaaacggagcaaaaccagcccggactcgcgtccgaactatcggcgcgtgtgccccgagatccaaggaagtcgtgtggaaaaccgcagccgccgccccatcttcggccccggctggggcgggagcagcagcgcgacgcgccgcgacgcaggggcagggtggggggatagtcacctcgcctccggggccacctgggtccttttaaagtgtccggggtgcgggccccgggcgggagcgccgaacacggaatgttttcttaaagggccagttccgagctgcgctgaaaagggggggggggagaggggggagagataagtgagacgaagaccgagaaggccgaggagagccccccaatcccgcgccgaggcggcggcggcggcggcggcggcgcgacgatgaggatgatgaatacattgcaaagtttttttggccccggcgaggggtgtcagattgagtgctctgtgcgcatgtgcgaaggtgtccaaactgacaatgctggggagatgaagatagtgtgtggctgcttctggactcaaggaggaggagagagattccgcgagccgacaccatgcgatccaaggcgagggcgaggaagctagccaaaagtaagtctcccgcgctcggccgcgccgcgccgccggggcccgggccgccgggccggggcgcccgggccaggggtgcgcgtcggggcgcggccggcgcgcctgcggctccgggcccccggctcggccgcgcggcccggggggctgctccgcctcccgcgctcc

SEQ ID NO: 102376 - DNA, 480 bp, Homo sapiens
  chr1:2986306-2986786
  hyper
ggtcaaatcatattccgggcttttgaaatagtgggcgctagagcaccgcctttggcgtccgccagccgggcgcagaggagggagaccccgagccggggaggggcggaggagggggcgcgggccggcgcccacccggctccgcgggcgcaggggcaggggtggcgacggcgggacagccgcagccacttggggagcaaaatggagacttttgcccgggctgggaactgtggtcgtgaagtttatccccggctgtgccccgcgtggtggagggcgctcctctgggacgccggcagcctgcgcgggccgccggggcgacagtgcctccgacaggagggacccacccggccacctcccgacccgccgctgccgccctcgggcccgcgtggacccctctgtacccgcttgcctggcacagccgggcccggcggggacagagctgccccggccaggctgcccggtcctcggtcttactttctcttt

SEQ ID NO: 102377 - DNA, 506 bp, Homo sapiens; identical to SEQ ID NO: 34923
  chr1:2987055-2987561
  hyper

SEQ ID NO: 102378 - DNA, 56 bp, Homo sapiens; identical to SEQ ID NO: 34924
  chr1:2987628-2987684
  hyper

SEQ ID NO: 102379 - DNA, 549 bp, Homo sapiens
  chr1:3087393-3087942
  hyper
catcccagcagccagggctgtcgggagcccatggccttctctgtctgcagcagccacggtggaggcaggccaccggggaaacgtgtgtttcagctcccagagctcgggctgatggcgccagcccaaacgaggctgtcctccccagcccgtcttggctagagagcccacacagcctcgctgcagtccctaagggaaggctgggataggggcacccctgtcccagcgggaccccgcacccctcagcgccccacggagacctgcaccttccagactgacagtgctcggggccctctctccctcttgcgatttttatttcggggccacgtttgtttacttgcggcgtgacttgctctggcctgtgcacggcagccacaggcccagttggtaggaactaaagagataaataagtctataaatagtttggtggcggtcggctgttacggcgcttgctcagcatttaaccccttgttcctcctcctcgctgtccgggcagagccagggaaagggaagcagagaacagaaatctccgagtgtgttttcttttctgaa

SEQ ID NO: 102380 - DNA, 191 bp, Homo sapiens; identical to SEQ ID NO: 46
  chr1:3310353-3310544
  hyper

SEQ ID NO: 102381 - DNA, 50 bp, Homo sapiens; identical to SEQ ID NO: 34927
  chr1:3310755-3310805
  hyper

SEQ ID NO: 102382 - DNA, 17 bp, Homo sapiens
  chr1:3310814-3310831
  hyper
tcctgggagtgtctgtg

SEQ ID NO: 102383 - DNA, 605 bp, Homo sapiens
  chr1:3325181-3325786
  hyper
gcatgagtgtgggtgcgtgagctggtgcctgtgttggcatgtgtgagagtgtgtgagtgtgagcacgtgagccggtgcatgtgttggcgtgcatgagagtgtgtgagtgtgggcgcgtgagccggtgcatgtgttggcacacgtgagagtgcatgagtgtgggcgcgtgagccggtgcgtgtgtgtgagcgcgtgtgggcgcgtgagctggtgcgtgtgttggaggatgtgagagcacgagggtgggcacgtgagctggtgcgtgtgtgtgtgagagcgcatgagggtgggcgtgtgagccagtgcttgtgttggcacgcatgagagtgaggggcgtgtgagccagtgcatgtgttggcacgtgtgagagcatgtgagggttggcgtgtgagccggggcatgtcagtgtgtgtgagtgtgggcgtgtgggccggtgcgtgtgtcggcgcacgtgacagcgtgagtgtgggcgcgtgtctgtgagtgcgagtgtgggcgtgtgagttgatgcatgtgagtgtgtgagtgtgggtgtgtgtgagtgagtgtgggcacgtgagttggtgcgtgtgtgtgtgagagtgtgggcgcgtgagttggtgcgt

SEQ ID NO: 102384 - DNA, 342 bp, Homo sapiens; identical to SEQ ID NO: 34930
  chr1:3370920-3371262
  hyper

SEQ ID NO: 102385 - DNA, 39 bp, Homo sapiens; identical to SEQ ID NO: 34931
  chr1:3371630-3371669
  hyper

SEQ ID NO: 102386 - DNA, 30 bp, Homo sapiens
  chr1:3407921-3407951
  hyper
gtgccggcagccggcggtgcagtaccacag

SEQ ID NO: 102387 - DNA, 524 bp, Homo sapiens; identical to SEQ ID NO: 34932
  chr1:3447460-3447984
  hyper

SEQ ID NO: 102388 - DNA, 36 bp, Homo sapiens; identical to SEQ ID NO: 51
  chr1:3448358-3448394
  hyper

SEQ ID NO: 102389 - DNA, 57 bp, Homo sapiens; identical to SEQ ID NO: 52
  chr1:3501583-3501640
  hyper

SEQ ID NO: 102390 - DNA, 125 bp, Homo sapiens; identical to SEQ ID NO: 34935
  chr1:3527612-3527737
  hyper

SEQ ID NO: 102391 - DNA, 38 bp, Homo sapiens; identical to SEQ ID NO: 34936
  chr1:3527759-3527797
  hyper

SEQ ID NO: 102392 - DNA, 139 bp, Homo sapiens
  chr1:3528466-3528605
  hyper
cgcaaaggcagctctctgggatcccggaccccagacctcgatctcaggagacagccctcagcctccctcacttctcaagtcccacggggaagccagcctcggcttgtcctgcccgtggacgctccgtccaccttcgccc

SEQ ID NO: 102393 - DNA, 49 bp, Homo sapiens; identical to SEQ ID NO: 53
  chr1:3540866-3540915
  hyper

SEQ ID NO: 102394 - DNA, 281 bp, Homo sapiens; identical to SEQ ID NO: 34939
  chr1:3541172-3541453
  hyper

SEQ ID NO: 102395 - DNA, 98 bp, Homo sapiens
  chr1:3566686-3566784
  hyper
cagcctatcagcgccgccggcttccgcgcggcattgtggggcttgtagttcttgtgccgcagggctttaaaggaaacgcccacgtttcttccgaccag

SEQ ID NO: 102396 - DNA, 128 bp, Homo sapiens
  chr1:3567216-3567344
  hyper
ctggcccttgcctcacgctccagtgccactgagatcaaggagagaacgaatttgccgctgactgggcagagcgagcgcgtggatcgcggccaccgcccgttcatcacccgcgcgcatctgggctggca

SEQ ID NO: 102397 - DNA, 113 bp, Homo sapiens; identical to SEQ ID NO: 34942
  chr1:3567737-3567850
  hyper

SEQ ID NO: 102398 - DNA, 551 bp, Homo sapiens
  chr1:3567882-3568433
  hyper
cggccagagaacccagtctgcgccagcccggctcgctcgcgaagccacgggcttcactgacgcgactttccaagacgtgggggtcaccatgggcagaggacatcggttcggagccagatcacgggccccataagcatcagaccataagcagcgccgccactgagagccgctcggaactcgcccagcatgtcgggtcccctagccagggcctggtgtacgtggtcgagggccctggaagccccgatggcctaggaggagcaggcgggcggggcggcgggtgtcgctggccggtagagagcttcggcctgacctagcgcaggtctggtgcgcgcagagaacaactccaagcgcaccgacgcccgcgagctccttccaaacaccgaacgggatccagagcccgagcccacaggcggcggccgggggagggagcagggtgctggccgccgcccgggagtgttcgcgtcctgggtgacccctggaaggacgtggggcccaaactccggctggggttgggagagcagcccccagaggctctccgcgggatcctctgc

SEQ ID NO: 102399 - DNA, 765 bp, Homo sapiens
  chr1:3663334-3664099
  hyper
gcctcgacccccgaccgagggacccgtgggatctgcgctcaccgccctgcgagcagaggcgttcgtgtcggagcccccacacctggggagcggggagctgcggtccctggttgtcccacaggagaagggggagggaacggggcaggcggggaggatgagcgcttccgcgtgcagcgggggctggagtgggtccgtccgagctggagtggtctccgaggggcggcggatgctcggagggggcggatcccttagggctgggggccaggacgatcccacccggagaagcctcgcgggcgagaagagggtcccttcctgcgggggcagatggaggcgcgggagccttccccgggaggtgaccgaggccagtcagcggccccggggacccaaggccggggactctcggcggccggtggacgggcagggccggcccgcctgggcaggcggcggggtgaaggtgtccagggcctgaggcggcaaagtgccgccgccgtcagccccgactgccacccaccaggcacccggcccatccccggctcccatctagggatccacacccgggcgccgcggcgccgcggtttaaagcctgtgagatcccgcaacaacccggatccggaagcgcggggtcgcggctgggcgagggcaggggtggggccttcggtgcagacccagggccaagtcgagggaggctccgggcgcggggcggggtcttgggcgtgggggcggagcctgcgcggggcgtagagatctgacgggtcccagatgcac

SEQ ID NO: 102400 - DNA, 30 bp, Homo sapiens; identical to SEQ ID NO: 34945
  chr1:3688906-3688936
  hyper

SEQ ID NO: 102401 - DNA, 174 bp, Homo sapiens
  chr1:3712495-3712669
  hyper
ctgagcaggggcagcgcgccggggcgaaagagctcggcgggaaaggagtctaggcaattgccggtgaggttgaggctctgcaggcgcggggcgcagcgcgccaggtcggctggcagctcgcgcagccggttgccgctgaggttgaggctctgcagctgcggaaggcccggcggc

SEQ ID NO: 102402 - DNA, 145 bp, Homo sapiens
  chr1:3713028-3713173
  hyper
tgccgccgccatggcgcctcagctgctggcaggcacccacccaccagggtgcttccggggcagcgcgcgccacttccgacctgtgccggaaaagcccatagagaagccacctggctgctagagtgccgccgcgcgtgccatagag

SEQ ID NO: 102403 - DNA, 180 bp, Homo sapiens
  chr1:3773151-3773331
  hyper
agaagaggaaaagccggatctgaaaacaatattccacgctaaatgggccgtcccggccggggcaggcggtcccagcacccgtgctgagctccccggcatacggcacgacggggccgcgccggctcttcggcgacagcaaggccggcatctaactccacaccgtccgcgcttgcaccgcgc

SEQ ID NO: 102404 - DNA, 160 bp, Homo sapiens
  chr1:3773813-3773973
  hyper
ccaggccgcgcctgcgcacaaggggagggctccgctactctggccctcagggttgtgtagtttccggggccacggcacctgggcacaccaggtggcgtcgcgcctttgctttcctgagccttctgagtaaggtaatgtggtgtccgtggggcgacgcctg

SEQ ID NO: 102405 - DNA, 192 bp, Homo sapiens
  chr1:3816432-3816624
  hyper
gaggccccattctgcgggggtgggtaacctgggagcccccttctcccggggacgtgacctgtgagctccacttcttccgagggcgtggcccggagcccccttttcacaggggcgtgacctggcagccctccttctcccgggagcgtggcctggagccccccaactactgccgggggcgaggcccaagcggag

SEQ ID NO: 102406 - DNA, 226 bp, Homo sapiens; identical to SEQ ID NO: 34950
  chr1:3816827-3817053
  hyper

SEQ ID NO: 102407 - DNA, 305 bp, Homo sapiens
  chr1:3817789-3818094
  hyper
aggaggccagggtccggcgtcgggctgggggccggttttcgtcccccgttacgtgcaaggcgggaaatgacccctccgccgtcccgttactctccggggccaacgtggactcgcaggggccacgccttttccaatggccacgcccctagcaggcctgggtggacccgcagcggccacgcctcctccaatggccgcgccctatcaggtctggatggacacacggcggccacgcctcctccagcaaacacgcccctagcaggcctgggctgctgtgatgcgtcctctttggccgccgctgagggagg

SEQ ID NO: 102408 - DNA, 44 bp, Homo sapiens; identical to SEQ ID NO: 60
  chr1:4004557-4004601
  hyper

SEQ ID NO: 102409 - DNA, 320 bp, Homo sapiens
  chr1:4712665-4712985
  hyper
tgcccaaggggttcctggagccgacacggtccggtccggagcccctccctgccctgctggctcctagtgtgcgaagccggccccttccaggcccactccggttgcaggaagggcctccctggtgcagcaccgcctcctcacaccgctaggtggcagcactgccggcgcctccttccccgccggccgccataggccccgctggttccaggacctccctgcctccttcgcctcttaatgggatccgctccctcacacccctcagggagaggctctaggggacgatgacccaggggcggcccggcagggaaactgctgagtca

SEQ ID NO: 102410 - DNA, 93 bp, Homo sapiens; identical to SEQ ID NO: 34954
  chr1:4713981-4714074
  hyper

SEQ ID NO: 102411 - DNA, 198 bp, Homo sapiens; identical to SEQ ID NO: 34955
  chr1:4714163-4714361
  hyper

SEQ ID NO: 102412 - DNA, 112 bp, Homo sapiens; identical to SEQ ID NO: 61
  chr1:4715427-4715539
  hyper

SEQ ID NO: 102413 - DNA, 1127 bp, Homo sapiens
  chr1:4715574-4716701
  hyper
cggcgctttcctctatgttgcaaatcaagggacccctcttcgcttcccgcaagcgggcaacggggtgcaccggtagccggaaaggggcgcccgcccggagcctggagcagcaccgcggccctggcggggagcggccgggtctccagggttccgcgcgtccggggtcggggcagcggcgcccgccccagcaacccgggaagtggggccggccaggcgcgcccgcagctctaggagccagcagcgcagtgtcctggccggctgccccggcgcgcctcctccccggggcccggggcgaggcgccggccgctgggcgcggcgggcgcgggggccggggctgccggggaaagctaaagctccgggctcccagcgagagcttcgcaggcggagttggaggaaaccacagccaaacagccactccgctcccccttctcctttctcggggccccggggctgagcaggggcctcccaggctcccagctgccgacccagctgtttgcgggtgacctccgggcccgacgggcgctcacagctggcgggcagctggggcgggagagctggggttcttggggagctccggcggccaccccgctgtaaacacacacgcacatacgcccgccggcgcgcccggggcttgtctgtgtctgggactccagggccagatggaagagggggttcgagcctagagcccgtggtgggggtgtccagaaagacccttctcggcaaactttgccagcccgccggggttctcgggcttctctggcttctgcctggggtggcccagggcccaccagagcacagctgtcgtttttgctgggcaggctgcctctgagccctcgccctcctgccggggcattcaccgagctcgtgcatttgggtcccgggttggaaccgcgagcggggaggacagaggtggaggcggagagcagcgtgcggttctcgagtttgtccactgggatgcactgcgctcccgcgttggggacgaaaaggccagtagttgttagcccgctgcttgagccgcccccactcagggatgaagctgcggggggagtgaggcgaagggagggaggatctagtgcgtgtcctgattttgagaaatcggaaggggactgggacgccaagtgttttct

SEQ ID NO: 102414 - DNA, 30 bp, Homo sapiens; identical to SEQ ID NO: 34958
  chr1:4718196-4718226
  hyper

SEQ ID NO: 102415 - DNA, 30 bp, Homo sapiens; identical to SEQ ID NO: 34959
  chr1:4718516-4718546
  hyper

SEQ ID NO: 102416 - DNA, 358 bp, Homo sapiens; identical to SEQ ID NO: 34960
  chr1:5772042-5772400
  hyper

SEQ ID NO: 102417 - DNA, 30 bp, Homo sapiens
  chr1:5772452-5772482
  hyper
cgccggggaaggcaccgtcacagcttccgc

SEQ ID NO: 102418 - DNA, 31 bp, Homo sapiens; identical to SEQ ID NO: 63
  chr1:5805925-5805956
  hyper

SEQ ID NO: 102419 - DNA, 138 bp, Homo sapiens; identical to SEQ ID NO: 34962
  chr1:5907430-5907568
  hyper

SEQ ID NO: 102420 - DNA, 30 bp, Homo sapiens
  chr1:6051625-6051655
  hyper
agcccgggggcgggcgggagcagcctgcac

SEQ ID NO: 102421 - DNA, 145 bp, Homo sapiens
  chr1:6052047-6052192
  hyper
gccaaacggcacccagcggccccgaccccaagtgtcccgacgaggggggacgcctgcgactaacgcggggacagcccccgccgcgcgccaccgccgcaccccaggcaccgggcccccacgcagggacggcgtggaccaccctacc

SEQ ID NO: 102422 - DNA, 925 bp, Homo sapiens
  chr1:6052411-6053336
  hyper
cacaagcctgaggaccgaggactggccgaggggcgcgccccgtccgctgccacccgcgggaggagcctcggaaggcggcgcaccgcgccgcacactcagtccaagaacccgcctcgcgtcactgtcgccgtcagggccgcggagccaatcagagcccaagtcgagggctgcgctttgcgagcgccagccaatcggtgcggcggcgggcccatcctgatttgcatgtccgacgacccctcaaccaatggtaatgtgactggcgtgaacaatagccaatcagaagctggaagaggcgtggccccgggcgtcccacgaggtgaagatgctgctggcggaacctgcaggagctagcgggattcgggggcgctaaagtcgcaggggcagggcgggaaggaagatccggcgcggggcacaggatccggagctggagcccccaggtgagtaccggggagaccccggcggggcgcgctttccaccaagctgctccgggacggcggcggcgggtatccgcgaggcccgcgctgcggcaggcgccgcggtcccgtctccatctcttcttccccggccctgcgtccctgcctccgccgctgtctcacctcctctccagcctcctcacctccttctccatcgtctcccttcccccatccctttctgtctttccttccctgtcctcccgcccgcccgacccttcagctcgcatccctgacccctgcccctgccgccgtccctcttcccggtgcacctcttccccatctctgcccgctccggtcctagcagcctcgccctcccctttcctccatcctcctctcatcccctctcccggcctctgcgcagccccaccggggcgctgctgttcccggtcctccccatctctcctcctgatcgcttctcaaggctcatccgtcgttctcgctgcctgtccctg

SEQ ID NO: 102423 - DNA, 142 bp, Homo sapiens
  chr1:6053624-6053766
  hyper
cggcattagcagcagccggggtacctgcccaccttcccaccccgccaaccagccgcatcctggtgtccctcctcctggcatttgtcctgggggctcttacagggactgtgctttgcccgcagcatcccggggtgctccaggt

SEQ ID NO: 102424 - DNA, 197 bp, Homo sapiens; identical to SEQ ID NO: 65
  chr1:6086203-6086400
  hyper

SEQ ID NO: 102425 - DNA, 84 bp, Homo sapiens; identical to SEQ ID NO: 34968
  chr1:6137222-6137306
  hyper

SEQ ID NO: 102426 - DNA, 366 bp, Homo sapiens; identical to SEQ ID NO: 34969
  chr1:6208750-6209116
  hyper

SEQ ID NO: 102427 - DNA, 30 bp, Homo sapiens
  chr1:6221868-6221898
  hyper
tgaacttcagcaccacggacagaggctggg

SEQ ID NO: 102428 - DNA, 2218 bp, Homo sapiens
  chr1:6239340-6241558
  hyper
gcgccagaaggacgccggcggcccgggtaaagtgcttgggagcggcggtcacagcgcacagaggccaggaaagaggagcaggggtccgagcccgtgcgtcccagagcggagtcctcctgggccgggagggaagccgccccatcctgggcgctcaacgcgtccccaagcaccgccggtcctcgcccctctctgggccccacccagcccgccccgcggccgacatgggccaggggccgggtcccgcctgcccgcagcgaggccagaggcgcacggcggcgggacgcgagcgcggggtgcgccgctccgggagctagcgcgattcccgcccccttcaagggcacgcgggctgaccctgacagcgccgcgccccccagcgcaggccccggcccgcggtcctctggcccgcctggcccgcgtcgccgcccggggggcccggatcgcaccccgcccttagccgccctcacgccggcccgggcgctcacccagccttcgcccttggccgcgcggcgccagcagggcgggagcgcagccccgcaacccgggtgcccctcctgcgaggcgccagcccggccgcgccgcccccgccgcccgcgctccgccctgggcccggcccgtctcggcgcccccgccgctctggccccaggcgcacccgcgccccgctcacctgacatctcgtcctcattctccatctcctcggcgaacagccgcggcagctcctcctcggtgcccactgggccccgcatgcccggcgcggggaggaggggaggtgggcgccccccctcccgccgggcgcggtgccagccttaacccgtgcgctgccggaccggcgcgcgcggcgggcgaggcggcctcggcgagaagatggcggccgcctgcccccccacccccccaaacctccacccccccgtctcgacccccctttctctcggccgccttagcctgctccccgcaaagcccgggcgctcctcccaccgcgccccgcagcccgagtcccgcagccggccgagggtggcggcggcagcgccagaggcacggcggcacggcgggggggcggcacacatgcccggattgtgacgtccagtctggttgctgtggcaaccccatcccatcgttccggcagcgcgactagttaacagcagagaacaagttgggggactagtcctgagccgccgggtgagggtggggaccggggggcgccccggcagggggagccgtcgaggcgtccgcgcgcccgcggacccgacggccgagcgggcagtcggggcttggcgagcccgggcgcagggggaggcgaggaaacaccgcccccgcgcaccccgggcagagccagccgccgccgctcgcctgcgaaggcgctgggccccgagcccccaagggcgcggaggcagggtcttcagggcagcgcgcggcccgctcccccactcggttcacaggcgccgggacccaccccgctcccggctccggcctcggcacgttcctaaccccctctccaaagaggattagaagaaaaatgtgttccacacttggggaaaagacgctctggagactgtgggtctgatttacagcagaaaaatccgcgcaggcgggctcccctcacctgcttccccgctcccaccgcccacgtgcccccttccaaaaagcccctccaggctgggtgcagctgaaacccatgcagacccctaggggtggtgcggatctgcgatgtctgtgcccaaaactcccgctcagaagcgacacctgtcgcagagcaggaaggagccgccgccaccagccctcggtcgttaaaggtgaagatggaggccaaagccctcgggagcaagactggaattttaaatgagcgcctccagtctccgcggcggcaagtcttaaagctaccttaagaacgcaaaagttccaggggctggccgaccgccagctctctaaccccagaaggcccgtgaagggagggccccctctcactgcctcgcaggggcactgggggaacccacctgagacacgcaggatcggcagcagtttcccttcttcccgttcaattttattgccagcaaaccccaaacaaaagaccctctgcattcatccctgggcaaggagaggtcggtccagccttctggaaccaaagactggggtgttgggaacccctccatctcccagatccgctttaactacgctgtagatagagaagccgggtcagcccagtgctggccgcctgcaaggggaa

SEQ ID NO: 102429 - DNA, 223 bp, Homo sapiens
  chr1:6259130-6259353
  hyper
atttcctctggggacgctaaaaagctcctcaaacccaggcctcctctccgaaagcacgccgaccaagccgcccttccgcggattcgtccccgagtcttggccgtggacttccgaatgcgcggctccccagggtagcaggtcccgttcttcttccccgccctccacccaggtaatcaggcccccggccggggtccgaggaccagtggccggcccagaccgcagt

SEQ ID NO: 102430 - DNA, 30 bp, Homo sapiens
  chr1:6259673-6259703
  hyper
agacgcaaagagcccgcagcgcgcaaggca

SEQ ID NO: 102431 - DNA, 217 bp, Homo sapiens
  chr1:6265332-6265549
  hyper
agagctcacaaccagcgaaaggcagggctgggattacagggcgtctcactccgcctcccaagcgctggaaagtcggtggaggggcgtccgctgctctctggcgcccccaattggccgccgaggaaatgaggcggcgatgacctgttcagacccaaatgggatggaagagtggggattagcgggggtagggggtggggtttggactcttttttttttt

SEQ ID NO: 102432 - DNA, 997 bp, Homo sapiens; identical to SEQ ID NO: 68
  chr1:6265788-6266785
  hyper

SEQ ID NO: 102433 - DNA, 29 bp, Homo sapiens
  chr1:6295522-6295551
  hyper
agcactcgcgggctcgctcactccacccc

SEQ ID NO: 102434 - DNA, 162 bp, Homo sapiens
  chr1:6296162-6296324
  hyper
cccgcccgcccctccccgcccctcggggacatccgggctctgagccagactctgtgccgggcgggggccgggaagtggtgggagaagtcgccgcccgcgtctgtccaaacttagtcccaaactcaggaggttcctgtcccaagaagcaatgtaaagtttgaa

SEQ ID NO: 102435 - DNA, 382 bp, Homo sapiens
  chr1:6301682-6302064
  hyper
caccttgatcctgcgcgaccctcggccagtgtaaggcgagtagcgggccaaggaggctgtttgtgatggaggagccacgggtgggggcgtcagaaagtagggggatcattccaggtggggagaccactgaccgaaaacgggccacaggacagggggcgcggcgggcagtgtcggggttggggtcggggggcaacggaggcggaagtccattcagtggaccagggcggagcgacgcctgagaattccgcccaggccttgaggcgggcctcgcctcccgcagccaaagcagaacattgcgaattagagcattttgcggtcaattttccactgcttaagaaacactaagctatccacgtgagcgtccccccgcccccggcccgat

SEQ ID NO: 102436 - DNA, 48 bp, Homo sapiens
  chr1:6304184-6304232
  hyper
cattgacatgtaaacgagggtccctataaaggcggcgctgcctcgcac

SEQ ID NO: 102437 - DNA, 832 bp, Homo sapiens
  chr1:6309258-6310090
  hyper
aaacgctgaggccaacgccccctcacccctgggaggggtggcgcatgtctgcgcgcggggcggaggcgggcgtctttggtgctgcggccccggagagcggcctggcctgcctggcgtccgtggggaggcgccggcggtcctaggacgcggagcccagcgagtccgagtgcagcgtggcgtagcccgaggactcggagggggaactcaggaagctgctggtgctgccgccgccgcccgccgcgcgcagccccccgggctcgccccacgacgcgctcaggccggggcgcagagagccggcgtgcgagtgcgcagaggggcgtggccctgggctccgctgggcgctgcttgggggcgtcggggcctctccgggatctgcgccgtcgggggcggcgggcgcagcggggaagggcccgggcgggcggcgcagggcctgtggctcgcactcgaaggcggtcagggcgaaggcgtcgggcagcagcgaggccgaggcggagcgggggccgggcccggggcggcggcgcgggctgccggggggcgagtcgcgggctccccgcgggccgctatccagggccgagggccgcagcgacagcaggctctcggccgagcggcggcgcgcgcgggacggtggtgcgtcctccgcgaaggccaggaggctggcgcggcgccgctcgggcccggcaggcagcaccaggtgcgccagggcggccaggtcctcgccggagccccagcgcggcaggaaggcgggcagcgggacggcggcccacacgtccgcatcgtcgtgggagaagcgccgcgtgggcgggacctgtcaggacgcggctggcttttaccc

SEQ ID NO: 102438 - DNA, 30 bp, Homo sapiens; identical to SEQ ID NO: 34980
  chr1:6320742-6320772
  hyper

SEQ ID NO: 102439 - DNA, 216 bp, Homo sapiens; identical to SEQ ID NO: 71
  chr1:6321177-6321393
  hyper

SEQ ID NO: 102440 - DNA, 30 bp, Homo sapiens; identical to SEQ ID NO: 34982
  chr1:6321661-6321691
  hyper

SEQ ID NO: 102441 - DNA, 237 bp, Homo sapiens
  chr1:6453980-6454217
  hyper
cgcatcgcggctctcgctaagatcggccctaagagagaatggaaggctgtttcctagaaaggagcattggtggcggctgctgggaagacacggggaatggaacgggcctttgcttccgcagcacaaagcgtcacgaggtggggaggaggaaaggccggcgactatctacaccgccgcctgcagcttttactgggagcgctgagcgccagcctggaggtgcacgtgttgcagtgagga

SEQ ID NO: 102442 - DNA, 256 bp, Homo sapiens
  chr1:6474513-6474769
  hyper
tcctggaccagctgccgagcccctgctccctgctgccccccaatggacctcgggtaacaagacaccacgtgtgtggggcgtgttctctagatccgttctcacgatcctgaaaccattattgagccttacagctgctttaagcgcccggggcttcatcagagcctttgaaaaccccaggtgaaactagttactcactgggaagcctcggtgtgtggctgccttctccctgatactgcatgcccgggcagctctctga

SEQ ID NO: 102443 - DNA, 770 bp, Homo sapiens
  chr1:6479022-6479792
  hyper
tggggcgggggcagacgggccactggaatccccagcgcgcccgccgtccagggtggcgctggccgctctccgccacaggtgctccagcaggcgcgcgctcacggcgggctccaggacacggcaggcgggcagcacgcgggccaggcgcgccacacaggcgctgtagccctcgcggtagctgtcgcaaggcactgcgggcggagagccgcgtgaggcgcggggtagggtgccgggtgcggggtgcagagcgcgcggcagggcagggagggctcactcacggggcgctgccgtgggccatgaggacgcaggcagctcctgcaggaagcgcacggtcatttccaggacgtctgccttctctagcttcgagcagttggagttctgcgcccggccacgaggaagagcgacagagaaccaccaagacagaactttggccggctaccgtgcgcaccctcgctctagtcgggagctgggtgtggggcgcgccgtggcctgctgggggtccgctccgacgcgcccaccccacccaggctccgcctcgggcgccgcgcggaaccccctggtgggttcctcccgcaggagcaccccgtccccctgcccccgctccgcgccccaggaccctctgccctccgcccgggcgcgctcacctcccggcccagcagcggcaggatgagccccttaagctggctcaggctctggttgatgcgcgcgcgccggcgcttctccagcagcggcttcaggctctgcggacgggcggcgcggtggttagacgg

SEQ ID NO: 102444 - DNA, 953 bp, Homo sapiens
  chr1:6479997-6480950
  hyper
cgagctttaagggagcggctcgcccgccccgccccgccccgcggagtccggccgcccgctggtcccacctcctgcctttgttcctgcgcagggtggagccgggaggggagaccgcgacgcccccggggatcccgctccccgcctttgcgtcctgtctaccgcggggtggcggcccccagttttccccgagcacctgcgggagagtggtaaaggcgccatcgggggccttcgctgcgtgaccccgagggcaggagggccaggtggggccaggccttgcctgactggagctacggtccctcctctccaatgctgcccttcattcattccccaggctcgggttcagcgtcttctctgagccccgccctgggccgcagcaggggacccagcggttacgggagctcccatgagggacagcagcgggagggacttgcacccccagctgctttatcgggtgaagggctgagctggacgggaaatccgagttccggagaaaggtcgtgacttgctccagtcctcgacgctgggaacaggccgagcctggacaagggccccagtcgctggacgcccggctctaaggagcccgtagaacccttcggcggcttgcctagttaagagtcttttggttaccccactccaggctttgggtggggaaacggaatcctagagaagcagaggcagccctggagccctcggagctcgttttcattcccaccggctaggggtccgggttctcgcccgcaagacagtcagggctcatgtgacgcgcgggcaggacagttttgggtgcgggccccagtggcccgcccaggaccgccttcgcgccgcgtggccgttgctgcggcaaactggctggcgtcccccgcccatctgctccgggctcccctcccccgaccggctggcggggcaacggccacgcccgcgaaccacactgcgaactgccgggcagagagatg

SEQ ID NO: 102445 - DNA, 111 bp, Homo sapiens; identical to SEQ ID NO: 34987
  chr1:6483911-6484022
  hyper

SEQ ID NO: 102446 - DNA, 675 bp, Homo sapiens
  chr1:6484601-6485276
  hyper
tgtctgtgcctggacggctctccaattcgaacccagttttgctgccctctggggtctcaactgttacgtgaggcaaattaggagagaagcccctgggcaccttgccccagtcgcacgagtgtccccgcgtcgcggcgggggcgggcggggaactcgggcggaggctgcggggcggggcggggcggggtgggggcgggcccgagtcttaagccggcgtccgcgggctccggccccagagcgcggcggagcggagcgccaggcagcgcggagcggaggccaggcccacagccgctccgcctcccggcccgcagatccccgacggccgcaccgcgggctcctctggcccgcaagaacacgtgcatggcgtcctggggaaggcgctgagtgcggagtcgcggcgccgcacgcggcaccatggccctggagcaggcgctgcaggcggcgcggcagggcgagctggacgtgctgaggtcgctgcacgccgcaggcctcctggggccctcgctgcgcgacccgctggacgcgctgcccgtgcaccacgcggcccgcgctgggaagctgcactgtctgcgcttcctggtggaggaagccgccctccccgccgcggcccgcgcccgcaacggcgccacaccggcccacgacgcctccgccaccggccacctcgcctgcctgcag

SEQ ID NO: 102447 - DNA, 243 bp, Homo sapiens
  chr1:6500744-6500987
  hyper
cttcgcggcgagccgcggccacaccaaggtgctcagctggctgctgctgcacggcggggagatctcggctgacctgtggggcgggaccccgctgcacgacgccgccgagaacggggagctagaggtcagcgcgggcccggggtgggggcgcgcgccctctgctggcaccgcgctttcagcacggccctgcccgggcgcgggggtcccagctcgcggccgcggccgggtcctcactgcgtgccc

SEQ ID NO: 102448 - DNA, 2 bp, Homo sapiens
  chr1:6501054-6501056
  hyper
cg

SEQ ID NO: 102449 - DNA, 203 bp, Homo sapiens; identical to SEQ ID NO: 75
  chr1:6507052-6507255
  hyper

SEQ ID NO: 102450 - DNA, 1589 bp, Homo sapiens; identical to SEQ ID NO: 34991
  chr1:6507490-6509079
  hyper

SEQ ID NO: 102451 - DNA, 18 bp, Homo sapiens
  chr1:6526035-6526053
  hyper
cttggagtggagacgcgc

SEQ ID NO: 102452 - DNA, 138 bp, Homo sapiens
  chr1:6526181-6526319
  hyper
cgcccaggggcttcccggctccgtgctctctgcccgtcgtggttccgccttcagccccgcgcccgcagggcccgccccgcgccgtcgagaagggcccgcctggcgggcggggggaggcggggccgcccgagcccaacc

SEQ ID NO: 102453 - DNA, 896 bp, Homo sapiens
  chr1:6545271-6546167
  hyper
cgcggggcccatagtcacgggcaccccctccctggcctcccgcacaggactgggcggctgcaggcgagaactgggcacccagccccgttcccgccccgtcccggccccgtacctggctatcaccgtcgcgggcacgacccccggcccaggagggctccgagtcccggaggggcagccccgggcccggcctggaggctgctaggcgtccggagacaccgggtcctgtccccatggcggccggaggaagccgcggtctgcgccgcccgccggacaaagcgcggagccccgcttcctgccattgtgcggccgcgcccgcccccgccgagcgcggggaccccggggagggccgggcccggaacagcccccagccccccaggaaggcggacacctccctcccgcccgggccctcgccacccagccccggggatccccgcctccccgcccgggaacccctacacccccgcctccgcctgcccgggcgaccccccgcctccccgcctctgcccagacccggggactccacacccctacctctgcccggccgggggacccccacagccccgcctccgcccagtccccgggacccccaccttcccacctctgcctggcccggggtacccccacctctgcgcctctgcgcggccccgggcccctctcttctctgactccctcctcaacaccaatgccgggctcagagggctcctcagaacttgctctttctcctggggagctccttgaatgctggaggcagggggcgctggtgacacccccccccaccttggagactgtggagcccctcccctgggtgactcgatccccgcccagccctgggggtgcccactctgctgtggtccccacctcaccctcagcgccaacacgcacggtccctcccagcc

SEQ ID NO: 102454 - DNA, 380 bp, Homo sapiens
  chr1:6546474-6546854
  hyper
cccagggacaccccctcacaccgactgctcactgcccaggtacggcagaggccgagagccaaaggccggtggcctctggaaagggccgtgggcagaaggcgggctgctctgagaggctatccttggcagcccccaggagctgggtgaggtggaggcatcaggaaaccctggcgacccacatggcacagcagcccaggtccctgcagttctaggccaggtccccaccgccagggggcactcagcaaagcctgagaggacgcaaacgcccagactctggtgctggagtcaccactacacggctgtcaaagcgcttttacactgattcccaggaaggcagggcaggcaccattagccccattcacggcgtgggggataaagtg

SEQ ID NO: 102455 - DNA, 30 bp, Homo sapiens
  chr1:6550843-6550873
  hyper
ggcgtcactgtccccgaggggccagccctt

SEQ ID NO: 102456 - DNA, 30 bp, Homo sapiens; identical to SEQ ID NO: 34994
  chr1:6614326-6614356
  hyper

SEQ ID NO: 102457 - DNA, 218 bp, Homo sapiens
  chr1:6614572-6614790
  hyper
cagggcctaccgcgcgagaatctcgcgagatcccgtcggtccgccccgctgccctcccagctgccgaaaagaggggcctccgagccgccggcgccctctgccggcaacctccggaagcacactaggaggttccagccgatctggtcgaggggctccacggaggactccatttacgttacgcaaattccctaccccagccggccggagagagaaagcca

SEQ ID NO: 102458 - DNA, 30 bp, Homo sapiens
  chr1:6639889-6639919
  hyper
accgcccagattgacgttgctaggcaactc

SEQ ID NO: 102459 - DNA, 195 bp, Homo sapiens
  chr1:6659236-6659431
  hyper
tgccagccagggagccgatggcatagagccggccacggcacgcagtggtggagcagttgtccatggggtaggtcatgggctgcagggcctcccaggagtcagtggtgtggtcatagcgctcggtgctgtcggcggccaccacgtacagcagtccgtccagcacagaggagctgtggtactcgcgggccttcagca

SEQ ID NO: 102460 - DNA, 30 bp, Homo sapiens; identical to SEQ ID NO: 81
  chr1:6663254-6663284
  hyper

SEQ ID NO: 102461 - DNA, 163 bp, Homo sapiens
  chr1:6663517-6663680
  hyper
cgtttttttcttggcgcatttataagcgacccggggccggattccaggagtcggccccactcctgtgttcctgaaggagcttctgactcaatcacacaggcgttaactttagtcggcttcacgcgcagttgtagtttccgagtctgcgtcgcagctgcaggct

SEQ ID NO: 102462 - DNA, 128 bp, Homo sapiens
  chr1:6663729-6663857
  hyper
cggactccacgagagggtaactgggtataaagagcgagggctcaaagtcagataggagaccgccttgaaactagatgacgccactaagcacagtcccgccgtcacttgtactgcggtggggaatggtg

SEQ ID NO: 102463 - DNA, 30 bp, Homo sapiens
  chr1:6673286-6673316
  hyper
atgcccggggcggccgcgacgtcagcgtcc

SEQ ID NO: 102464 - DNA, 471 bp, Homo sapiens
  chr1:6675267-6675738
  hyper
cggcccgaggccgtcgccgccctccacttggcattcgggtttttgacccacttctgctggttccccgccgaaagaaaagttcttcgcgggagttggaggcccgggtggcggcccgcggttcccgtggctgggcaggctcgccagtgcggggagcgcggtcaacgcgggccttcgcctccgctccgtgggcggccctggggtccaagggggtgggagaggagaaggtttgcttgaaccaggttgagaaaataattttctaagggcaccgactttctcgaaagaaaacccgcgggccgcacgcctgctcctcgcggcgggaggggcggcccgagacccctgccccccatttccccaccggctctcccccagcagagtggcggccgggtaacagcacctcgggaaggatgggggtgggtcggacaaggcactgaaaggaacctcagggaacgtgccgggcgaataaacagcaat

SEQ ID NO: 102465 - DNA, 30 bp, Homo sapiens
  chr1:6685609-6685639
  hyper
acagactagcgggccgcggccggggtttgc

SEQ ID NO: 102466 - DNA, 30 bp, Homo sapiens
  chr1:6761364-6761394
  hyper
ggtgagactcagttcgccatcctgctggcg

SEQ ID NO: 102467 - DNA, 30 bp, Homo sapiens
  chr1:6762101-6762131
  hyper
cgcgtggcacgcggcgtggctgcgtcctcg

SEQ ID NO: 102468 - DNA, 30 bp, Homo sapiens
  chr1:6844299-6844329
  hyper
ttccttactttctccggagagaggccggtc

SEQ ID NO: 102469 - DNA, 223 bp, Homo sapiens
  chr1:6845232-6845455
  hyper
ttggacagttctttcgggttctggccactaggaagctttgtttaggtccggaaggcgggctttcctgggagtgggtggggagggggcgttgattcttgaccaatcctttcagtccgttgggtggtgaccagccaatgggccggatggataggacgctcctcccggagagtagtgagacccctggtgcggggcgattggcggcgggagcgatgagtggcagccg

SEQ ID NO: 102470 - DNA, 30 bp, Homo sapiens; identical to SEQ ID NO: 34998
  chr1:6846145-6846175
  hyper

SEQ ID NO: 102471 - DNA, 179 bp, Homo sapiens
  chr1:7022451-7022630
  hyper
tctgggcccgccctccgatttggcctcttccccgggcccaccctttctatagccccaccctttccgttttggttcctctctccctgccagccccgccccctcagaacctatcccgtttcctttatggacctgccctcgtctggtcccatccacccatcttgccccgcccacatccagcc

SEQ ID NO: 102472 - DNA, 30 bp, Homo sapiens
  chr1:7741050-7741080
  hyper
ggggggcagggacccgacgtccccaaaatc

SEQ ID NO: 102473 - DNA, 258 bp, Homo sapiens
  chr1:7764521-7764779
  hyper
ggcccggctctcgcgcggggacgcccgggccgcgctccgcccgcaacctccggccgggcccccgccgtccagcgcggctcgggcgcagttccggcgcagtccccgcgccgagcggctccgcgccccgcaccagcctctgcccggctccgggtgacgtcgcatcctccgattggaccacgcggcctggggggcggggtctggtccggtgagctcaccgccgcgccccgccattggtccgggcggcgcactcgggcagtg

SEQ ID NO: 102474 - DNA, 213 bp, Homo sapiens
  chr1:7764989-7765202
  hyper
gcgtgcggtcgagggcggcggccggcgggggcgcgcgcggggcgggggcggggccggggcgtggggacacgcgtgctcgcgggccgggggcgtggtgcgcggccacgcgtgtttctggcgcgagtgtgcggggccaggccgggagggcgtgcgcggaccgggcgtgtttacgcgcggcagggaggggccacgagggtgcgcgcgtttctggcg

SEQ ID NO: 102475 - DNA, 134 bp, Homo sapiens; identical to SEQ ID NO: 35000
  chr1:7831037-7831171
  hyper

SEQ ID NO: 102476 - DNA, 124 bp, Homo sapiens; identical to SEQ ID NO: 84
  chr1:7843508-7843632
  hyper

SEQ ID NO: 102477 - DNA, 41 bp, Homo sapiens; identical to SEQ ID NO: 85
  chr1:7843652-7843693
  hyper

SEQ ID NO: 102478 - DNA, 189 bp, Homo sapiens; identical to SEQ ID NO: 35003
  chr1:7844212-7844401
  hyper

SEQ ID NO: 102479 - DNA, 391 bp, Homo sapiens; identical to SEQ ID NO: 35004
  chr1:8002367-8002758
  hyper

SEQ ID NO: 102480 - DNA, 267 bp, Homo sapiens
  chr1:8014150-8014417
  hyper
gagacccacacgcgacgctctaaaggaagtgacctttaggggctgttactctcagaccaggcccagcagcacccggcgcatttacgtcggatctgacccctgcaagcaccggcgcgaccgcgctagcggctgggaacacgcgacggtcccgcccactgcgacctgactcggccaatcccgggtggcgcatgctgcggccgccggaagtggacctacgtcatgcaggtcagtcggtaggtttccggcgcccagcgccccgtgggagtt

SEQ ID NO: 102481 - DNA, 391 bp, Homo sapiens
  chr1:8021445-8021836
  hyper
gcgtgcacggagcgcgaactaaggaacccctctgacaaccccagtccctcggcagttccagagaccggctcctcacggagggtggcggtagagactgttaagccccgcgggcgccggggcaggccggactgtgccattcgtggggggtaccatgtgggaccgagccgcctcacccagggctgtccagctagaaactccccggtgccacccccgcctcagtccgaggtagactcggccggacgtgacgcagcgtgaggccaaggcggcgtgagtctgcgcagtgtggggctgagggaggccggacggcgcgcgtgcgtgctggcgtgcgttcattttcagcctggtgtggggtgagtggtacccaacgggccggggcgccgcgtccgcagga

SEQ ID NO: 102482 - DNA, 1246 bp, Homo sapiens
  chr1:8085554-8086800
  hyper
cggcattaccatcgtcgctgtgagattaggcagagggagcggggctgaccgccagagaaccggtaccaaccaccgcaagcaatcgccgagcctcccaccccagctttcaagacaggatttacgggtacacggtgtgaacaagacaacgcaaccccctttttacaaataaaaaaaaaatcaaacaagcccccaggcccgaagacgctcatccccgccgggcaaccccgcgagcgcaggctgcgggacgaggaccttcatgctcgccgctcccgaacccccgtccgctcctgcggtcccggtgctgcggggacgtatcccgggcgctcgggtgcatggccccggccagccgaggggccgcgcgacgaccacagccggcgtggagaaggcggcgggcgccggcacttcgcggcgtccccaggcccgggctgcgccgccggggagggtcccgctctccacacctcaatggggagaagcccgcgagcgaccggccggcctctccctccatcccagagactccgcgtcgcggcgaccctccccgcgccctccacgcccccgccctcgcgtcggggagccgcctggatcccggcgcccggcgcggggccccctgagggaacggagcgctgcgtggccctccccaccccctcagcgcgccaggccccttaccccggaggagcggcggctgccccgcggcgccctcccgcgcatgtccgtcccggctggctcagcgccgcgggctcaggggcccggacatcgcgcaggcgcctcttgctggctcgcgctcccgctagcactctgcctcgcaccggaccgccgtcgccgcggctgccgccgccgcctctatatatagcataggccgccgggccgtgaggtcgccgcgtcccgccccgcctcctcccgcagccaatcagggcgcgcgccgcttaaaggggcgatgccgtggccgaggcgttgcgccgggcccaccgtggcgtatcgcggcgctgcagggagccggctttgtctcccggagaggcgtctccgggctgaccgcggccgcagctccgctcctctgcctgagccgtgcggcagccctgggagcctctcaacgccgagctttcctcagaagcccgcggcgacccgggcctcggccgctgttcctgcccgaactgagggcacatcgcgcttcgcgcgggatttcccataaattcaggctccgggcaagattgtgtgttttttcctctccgcgggccgccgctggccgtgtggg

SEQ ID NO: 102483 - DNA, 53 bp, Homo sapiens
  chr1:8277775-8277828
  hyper
cgcagggaaaaggaggatgctagtgacccatcctttctcgccgtgcgctttaa

SEQ ID NO: 102484 - DNA, 30 bp, Homo sapiens
  chr1:8378198-8378228
  hyper
aggcagcagcccagcggggacagggatgcc

SEQ ID NO: 102485 - DNA, 30 bp, Homo sapiens; identical to SEQ ID NO: 91
  chr1:8482674-8482704
  hyper

SEQ ID NO: 102486 - DNA, 30 bp, Homo sapiens; identical to SEQ ID NO: 35009
  chr1:8483375-8483405
  hyper

SEQ ID NO: 102487 - DNA, 30 bp, Homo sapiens; identical to SEQ ID NO: 35010
  chr1:8483989-8484019
  hyper

SEQ ID NO: 102488 - DNA, 137 bp, Homo sapiens
  chr1:8484295-8484432
  hyper
agcctgcacttccccggccgccgcttcacaactaaatcaccgcggaagcttcccagccaataaatcacctgcccaccgggcagagggtccctcccactccctgtgtttgagacccgccaggcggattcagtgaaggg

SEQ ID NO: 102489 - DNA, 30 bp, Homo sapiens
  chr1:8762933-8762963
  hyper
caaatactgactccccgttcctggaaagcc

SEQ ID NO: 102490 - DNA, 70 bp, Homo sapiens
  chr1:8762991-8763061
  hyper
catctttctagggtcggctggaacactccgtgcacccaccccgagccccccgcccgcacttgtccaactt

SEQ ID NO: 102491 - DNA, 30 bp, Homo sapiens
  chr1:8763823-8763853
  hyper
ccaaccacctctgacgtctaataaatgcag

SEQ ID NO: 102492 - DNA, 30 bp, Homo sapiens
  chr1:8876998-8877028
  hyper
ggggtcagaaggcacgcaggaacggtcacc

SEQ ID NO: 102493 - DNA, 82 bp, Homo sapiens; identical to SEQ ID NO: 35013
  chr1:8878158-8878240
  hyper

SEQ ID NO: 102494 - DNA, 30 bp, Homo sapiens
  chr1:8938084-8938114
  hyper
gttaaatgagtcaccgcttactaggcagaa

SEQ ID NO: 102495 - DNA, 30 bp, Homo sapiens
  chr1:8939059-8939089
  hyper
atggcccggggcggcgtggcgggcatgaga

SEQ ID NO: 102496 - DNA, 30 bp, Homo sapiens; identical to SEQ ID NO: 35014
  chr1:8939514-8939544
  hyper

SEQ ID NO: 102497 - DNA, 255 bp, Homo sapiens; identical to SEQ ID NO: 92
  chr1:9188650-9188905
  hyper

SEQ ID NO: 102498 - DNA, 279 bp, Homo sapiens; identical to SEQ ID NO: 35016
  chr1:9188943-9189222
  hyper

SEQ ID NO: 102499 - DNA, 126 bp, Homo sapiens
  chr1:9241458-9241584
  hyper
ctcagtctccttccccactggcggctcacaggctggacagggctccagccagcagggggcgcgcgcgttcacctcggggccaggttggctgaaagcccctctcccgttcccctcttctagagcaaa

SEQ ID NO: 102500 - DNA, 30 bp, Homo sapiens
  chr1:9256656-9256686
  hyper
ctcggtttccttcccgtgtcgtcgggagcc

SEQ ID NO: 102501 - DNA, 30 bp, Homo sapiens; identical to SEQ ID NO: 35017
  chr1:9295281-9295311
  hyper

SEQ ID NO: 102502 - DNA, 30 bp, Homo sapiens
  chr1:9340492-9340522
  hyper
cccactccccgccccgccgctggcagcggg

SEQ ID NO: 102503 - DNA, 31 bp, Homo sapiens; identical to SEQ ID NO: 94
  chr1:9352659-9352690
  hyper

SEQ ID NO: 102504 - DNA, 190 bp, Homo sapiens; identical to SEQ ID NO: 35019
  chr1:9352964-9353154
  hyper

SEQ ID NO: 102505 - DNA, 69 bp, Homo sapiens
  chr1:9353808-9353877
  hyper
gggcgtgtactgggctcggtggcgtccaggttccggtgaggacgggacggccccgagaggagggtgcgg

SEQ ID NO: 102506 - DNA, 166 bp, Homo sapiens; identical to SEQ ID NO: 97
  chr1:9489049-9489215
  hyper

SEQ ID NO: 102507 - DNA, 48 bp, Homo sapiens; identical to SEQ ID NO: 35022
  chr1:9599386-9599434
  hyper

SEQ ID NO: 102508 - DNA, 30 bp, Homo sapiens; identical to SEQ ID NO: 35023
  chr1:9600100-9600130
  hyper

SEQ ID NO: 102509 - DNA, 117 bp, Homo sapiens; identical to SEQ ID NO: 35024
  chr1:9600330-9600447
  hyper

SEQ ID NO: 102510 - DNA, 30 bp, Homo sapiens; identical to SEQ ID NO: 99
  chr1:9649501-9649531
  hyper

SEQ ID NO: 102511 - DNA, 30 bp, Homo sapiens
  chr1:9687241-9687271
  hyper
tcaccaccaggtggcgccgcgcgcttccct

SEQ ID NO: 102512 - DNA, 190 bp, Homo sapiens
  chr1:9689874-9690064
  hyper
taaggctgcggtgcacgggctggggagcacttctgcaccctcgctctccacttcctgtttttctccccaacgaattttgcgccattactctttcatggggtgaggggggagtgggggcggaggcggaggcctgcctgggaaggaagcccgggggtcagaggcgcccaggacaccacgaggttgggagagg

SEQ ID NO: 102513 - DNA, 1376 bp, Homo sapiens; identical to SEQ ID NO: 35026
  chr1:9711638-9713014
  hyper

SEQ ID NO: 102514 - DNA, 155 bp, Homo sapiens; identical to SEQ ID NO: 101
  chr1:9747556-9747711
  hyper

SEQ ID NO: 102515 - DNA, 152 bp, Homo sapiens; identical to SEQ ID NO: 102
  chr1:9749326-9749478
  hyper

SEQ ID NO: 102516 - DNA, 30 bp, Homo sapiens
  chr1:9884578-9884608
  hyper
ggagacgaggtcagcgaaacgcgcctggta

SEQ ID NO: 102517 - DNA, 30 bp, Homo sapiens
  chr1:9969891-9969921
  hyper
agcaacaaggtgggcggcgcggacacctgt

SEQ ID NO: 102518 - DNA, 56 bp, Homo sapiens
  chr1:9970618-9970674
  hyper
gggcgggtggaacacggcgccggtagtgagtggccgagtccgcgctgagagcaaag

SEQ ID NO: 102519 - DNA, 30 bp, Homo sapiens; identical to SEQ ID NO: 103
  chr1:9971100-9971130
  hyper

SEQ ID NO: 102520 - DNA, 256 bp, Homo sapiens
  chr1:10002704-10002960
  hyper
tgcacagtgccgaccggtctcaaattgcacaaacctccagttcttgacgttccgagtgtcataaacttgaggaaaatgaaattattcatcaggactacaaaaggctcaaagttcaaaccacctcggggtggagatgctggaaaaaaggaaaccattaacaagtaattttatttgctatatataaacttgccctaaggcagtccagataacttccacttgagcagcctgagacatcaagggcgggggcactttcccc

SEQ ID NO: 102521 - DNA, 142 bp, Homo sapiens
  chr1:10003445-10003587
  hyper
ttccgctggacgcacgcacttccggccccctggaaccaatgagagtgcgaccgagatgttccactcgctggcgtccgggccgctggtgatctccggtagcactcgggccggcggacagtgagggcgcggtaagctccccgca

SEQ ID NO: 102522 - DNA, 1006 bp, Homo sapiens
  chr1:10057108-10058114
  hyper
agggggaagctgccgcgcggtgggcagagccaggagcaccgggctgaggcggccgggagcgcagcggcttctaggggtgagtgggacccacgcggccccacctgctcctcccgcgcgcggccccacccccctgccccgccccgcctggtttataggtcccggcccgagcctccggccgcccgccgggtttgtcccgcgatccccgaccatgcccgccgacctcagcggtacttggaccctgctcagcagcgacaacttcgagggctacatgctggccctaggtaaggcggaggggaggcggcggcggcgcgaggctcgccgtgggtctcgggatcaggcgaaggcggccgggccgggcctgtaggtacgtcctctgtccgtgcctccgccctgctgcgcccaccgtcgcccagtcgcccccgagtccgctggtccttggcgcctccgtccatcgggcgcgggaccccagtccttcagtcccccagtccgtcctttcccgcgcccacccgcccccctgtccccacggccgtctctccacgccctctgttcccccggccgtcggtcccccacccgtccgtccctgagtgcccgcgtccagccccacgtccgtctctacccgcacgcggcacacctgcggagactgcagactcggggtccggccggggaggggggtccggccggggagggggcgcccgggaccgaagcctctgcccggccaccctccccgcagccgccttccgtgcaggccccggggccccgggcgcgctcccgcagcgaagtcccagcagcctcggcgcacccggagcgggtcggggatgcagaatcctggagccagcggacgacccttcaggtccgggcacccgcgggagtgcagagcctggttcggcccggggcgtgccccgaccgccgcctcccacgagggctgggtgcccgcggcgttcttgctcccgggggccccgcgctgtgcttcccgccctcatcgcggtgccaacggtgcgcggactct

SEQ ID NO: 102523 - DNA, 259 bp, Homo sapiens; identical to SEQ ID NO: 35033
  chr1:10092995-10093254
  hyper

SEQ ID NO: 102524 - DNA, 30 bp, Homo sapiens
  chr1:10093515-10093545
  hyper
agtagtctgtggggcgactggagtgaccga

SEQ ID NO: 102525 - DNA, 30 bp, Homo sapiens
  chr1:10270639-10270669
  hyper
gcggtcctgggaggcgcccgcgcgcgtcgg

SEQ ID NO: 102526 - DNA, 193 bp, Homo sapiens; identical to SEQ ID NO: 35034
  chr1:10271248-10271441
  hyper

SEQ ID NO: 102527 - DNA, 79 bp, Homo sapiens
  chr1:10458988-10459067
  hyper
gatggtctaacaggcgtcggggagagccaatggtgtggcttcatggctccacccccttccattcgattggccggcgccg

SEQ ID NO: 102528 - DNA, 30 bp, Homo sapiens
  chr1:10459558-10459588
  hyper
gcccgcgggaggcgcggaggaaagtgcaga

SEQ ID NO: 102529 - DNA, 30 bp, Homo sapiens
  chr1:10490329-10490359
  hyper
ggtggtcatgtccccgcgtcgcccggccac

SEQ ID NO: 102530 - DNA, 30 bp, Homo sapiens; identical to SEQ ID NO: 35035
  chr1:10490622-10490652
  hyper

SEQ ID NO: 102531 - DNA, 30 bp, Homo sapiens
  chr1:10490970-10491000
  hyper
ttccaggtgacgcccgtacgcggtgggcgg

SEQ ID NO: 102532 - DNA, 349 bp, Homo sapiens
  chr1:10532552-10532901
  hyper
gcgggaggccggagcggcggtccttctactcgacccccttccgcagcctgccgggagatgtagttcgttccgcagcaaatcacacgtgagaccagggcacgccgggaaatgtagttctagttgccgctaatcacgtgtggcgtcgaagcatgccggaaactgtagtctctgggtttaaagccgctttcgttctatcgcgcgattcagcctaggagttgtttttaacttttaggagctgcattcgcgcgttcaaatataaggccaatagagacttattttgcatgacgatgcacacgcatgtatactgtattgaatttttagagcattcctattcgcatatgagatgcat

SEQ ID NO: 102533 - DNA, 30 bp, Homo sapiens
  chr1:10535037-10535067
  hyper
gcaggcagagcagccgagccaggtaagggg

SEQ ID NO: 102534 - DNA, 228 bp, Homo sapiens
  chr1:10535372-10535600
  hyper
ccagccttgagctgcgagggcttgagaaggagaggatagatcgatcgttcccggctgtcccctccggggaggggcctgtttccattagggttcccactccctcacggcctcagcctcctggagcggctgccagcctcttcatctgtggtcacctttgcgcttctctcgtcaagttggatagtcagaaataatctagtcgagccctctcagtgcgttgataggaaaggg

SEQ ID NO: 102535 - DNA, 30 bp, Homo sapiens; identical to SEQ ID NO: 35038
  chr1:10566199-10566229
  hyper

SEQ ID NO: 102536 - DNA, 30 bp, Homo sapiens
  chr1:10754876-10754906
  hyper
gacccggcgcggggcggggaacgcggcccg

SEQ ID NO: 102537 - DNA, 503 bp, Homo sapiens; identical to SEQ ID NO: 35039
  chr1:10853672-10854175
  hyper

SEQ ID NO: 102538 - DNA, 1643 bp, Homo sapiens; identical to SEQ ID NO: 35040
  chr1:10854234-10855877
  hyper

SEQ ID NO: 102539 - DNA, 636 bp, Homo sapiens
  chr1:10856314-10856950
  hyper
ccctcccccggagccgcgcgccgggcattcccctggccacggcaggcaacgcgccgccccgcgcccgggtgccagccctccgtgccccctgcctccgcacggccggagttgggtggcagccgccgatcgcaggctggctggctggctcgctcgctcgctcgctcgcccgctccctgctgcaagcggcagccccgggggtggggggggtgcaccgggacagggggagagacggggaggcgccccgggaggcccgcggagctgggggacgtgggggggccgcggcggagggagcgccgagtctcttacctgcacttggggcggctttgggtgactttccaagtccgggggaaaaatgtgtgtgtgtttgggatggagcgccgcgggcgcgcatgcgctgcccaaagttgccggatcccggatttttcgctcccagtctccgctctcgcccgctgtgattatggaattctccgcggccgggcgggcgagtgggtggcatgcaaaacccgggccggatcgcggggccgggctccgctccaccctcacacccccagacctgcccctcccggatccttcccacccaccgcccgggctgagctcagcgtgtgcgcgcggcgagtcgcacggcctgcggaggag

SEQ ID NO: 102540 - DNA, 30 bp, Homo sapiens; identical to SEQ ID NO: 110
  chr1:10890877-10890907
  hyper

SEQ ID NO: 102541 - DNA, 203 bp, Homo sapiens
  chr1:10948509-10948712
  hyper
ccttgtccctaaaaccgtcacccgggtctcccaggcgagaggggcgggaggctccagacgcccagagcccacagcttcccgcccggggcggctgagcggtcccggggagagccctggagagagacagagaaggggaggcgtggagcggggcccccacagcagaagaggggcaggagggaggcgagagggggccggagtctggc

SEQ ID NO: 102542 - DNA, 334 bp, Homo sapiens
  chr1:10948746-10949080
  hyper
cgcggcccgggggtcccagacggggcgcccctccccacccggcccgccctgccccaccccccggcgcgggaggcccctgctccgcagtcggcggcgcccgggggagggggcgctgtgggggctcccggccgcccgccgcctgatgcgtatcgatcgcagcccggggtcgacgcgggggcaccagctgccggcgggcggggcgaccgcacattagcgcggccgggaccactccccggaacgcgggccgggcagcccattagacgcccccgggcggccgggcgaccactgcacgggcggggcgaggctggctccaagcaggcggcccctgggcggc

SEQ ID NO: 102543 - DNA, 30 bp, Homo sapiens; identical to SEQ ID NO: 35043
  chr1:11004281-11004311
  hyper

SEQ ID NO: 102544 - DNA, 317 bp, Homo sapiens
  chr1:11072440-11072757
  hyper
ggcggttggtcggccgaaaccatctgctacgttacgtggggggaggtcagctcctatacagccacacttttttcaatcttcagcttttcaggcctaggtcctggttttattttagctttcagagcttctctgtaggcttgaatttccaggaggcagcccgagtccctggggagagggtcatcgtggctctcgtcggtgccttccacctctggacaggcaaccggtgggagaggacgccggtgggcggggggaggaggcggccctagcgccattttgtgggagcgaagcggtggctgggctgcgcttgggtccgtcgc

SEQ ID NO: 102545 - DNA, 138 bp, Homo sapiens
  chr1:11119505-11119643
  hyper
ccagggatgaggagcgatggtgacacgtggcgaggaacggcaggcgggccgccgggtggaggccggggtgggacccggggtctcctcgggctctgacgtgtcctgagggctgacacgtggagcggggcgcagactccg

SEQ ID NO: 102546 - DNA, 30 bp, Homo sapiens
  chr1:11119846-11119876
  hyper
ggatgtcctggtagcgcgagcgccggtggt

SEQ ID NO: 102547 - DNA, 117 bp, Homo sapiens
  chr1:11120531-11120648
  hyper
tttacgttgttgcacggggcgagtagaacgtatccttctttgcgtccaaaatctggttccttgttggatttgaacagattatgtggctcgtcggggcgaaccgagggtttttattta

SEQ ID NO: 102548 - DNA, 30 bp, Homo sapiens
  chr1:11159244-11159274
  hyper
agatcttaagtgaacgccctgtataccttc

SEQ ID NO: 102549 - DNA, 354 bp, Homo sapiens
  chr1:11159754-11160108
  hyper
cccccgaggccccgcgaactcaccttcacaaagctgtcggcgtccgggaagcctggcagcaccatctctccgtcggatttggttgcgctggtcgccgacaggaccctgggctcccgggtactgggtggcgccattttttcagcctgcacggctcgtctcgcgagagcttgtcggccgaggagacgggacgcgtgcgcaccacgcatgcgccaggtcgaagcggcgggcggggcgtctgattatagtgtggggagcctgcgattggggtggggcgcctgcgattaggttgggaagcctgcgtttagggtggggcacctgcgattaggttgggaagcctgcgattaggttgggaag

SEQ ID NO: 102550 - DNA, 398 bp, Homo sapiens
  chr1:11322516-11322914
  hyper
aaggcctcagctgccgccgccagcaccggtaccgccgcttcaggccccctgccccaccgcccgccttccccgctgtcctctaagccgggagcgagggaaggagggttcccagccctgaggaccaatcgacaggtatagggagaagatggactgaaaaacaggccaatagtaatgaagaagagaagcttcaggacccggcttctccagggggcggggactgttcaaatagacaaaccacgcggccagtggcaggtgaaaacaggcttgggtccactcgggagaaccaatcggtcgtgagttcacctcagtcacttccactcacacatccggtacggcgctgctaggattcccttctgcatccgggctgtgaactcaaggagtccggtgtctgggtatct

SEQ ID NO: 102551 - DNA, 30 bp, Homo sapiens; identical to SEQ ID NO: 112
  chr1:11333397-11333427
  hyper

SEQ ID NO: 102552 - DNA, 30 bp, Homo sapiens; identical to SEQ ID NO: 35050
  chr1:11380408-11380438
  hyper

SEQ ID NO: 102553 - DNA, 1290 bp, Homo sapiens; identical to SEQ ID NO: 35051
  chr1:11538705-11539995
  hyper

SEQ ID NO: 102554 - DNA, 139 bp, Homo sapiens; identical to SEQ ID NO: 114
  chr1:11540039-11540178
  hyper

SEQ ID NO: 102555 - DNA, 59 bp, Homo sapiens
  chr1:11618431-11618490
  hyper
cctttggaggcaggcgcatagtcggaggaacttccccattgcctcgtcctctcccaccc

SEQ ID NO: 102556 - DNA, 36 bp, Homo sapiens; identical to SEQ ID NO: 115
  chr1:11624041-11624077
  hyper

SEQ ID NO: 102557 - DNA, 30 bp, Homo sapiens
  chr1:11696057-11696087
  hyper
cagaggctggcagggcgctgtccgcagtgc

SEQ ID NO: 102558 - DNA, 259 bp, Homo sapiens
  chr1:11710536-11710795
  hyper
ttacgcagaaggttgcggcgccgcttgctcaggaagtagaactgctgccagtggtcgcgctcctcctccacgccgccctcgggcaccagcccctcctgctggcacttgagcagccacagcggggcgccgtccaccagctccttccagcgcaggcacaccaggcggcaggcctgcaccagctcggcggccggcagtgcggccagcacgcgcagcagcagcggctcgggcagctcgtccaggtacgcggcggcggccgccg

SEQ ID NO: 102559 - DNA, 80 bp, Homo sapiens; identical to SEQ ID NO: 35055
  chr1:11715182-11715262
  hyper

SEQ ID NO: 102560 - DNA, 30 bp, Homo sapiens; identical to SEQ ID NO: 35056
  chr1:11724223-11724253
  hyper

SEQ ID NO: 102561 - DNA, 116 bp, Homo sapiens; identical to SEQ ID NO: 35057
  chr1:11740564-11740680
  hyper

SEQ ID NO: 102562 - DNA, 30 bp, Homo sapiens; identical to SEQ ID NO: 35058
  chr1:11741518-11741548
  hyper

SEQ ID NO: 102563 - DNA, 30 bp, Homo sapiens; identical to SEQ ID NO: 35059
  chr1:11750648-11750678
  hyper

SEQ ID NO: 102564 - DNA, 30 bp, Homo sapiens
  chr1:11751264-11751294
  hyper
tccttttgtggccccgggcccctgccctga

SEQ ID NO: 102565 - DNA, 37 bp, Homo sapiens; identical to SEQ ID NO: 35060
  chr1:11751777-11751814
  hyper

SEQ ID NO: 102566 - DNA, 30 bp, Homo sapiens; identical to SEQ ID NO: 35061
  chr1:11752479-11752509
  hyper

SEQ ID NO: 102567 - DNA, 30 bp, Homo sapiens; identical to SEQ ID NO: 35062
  chr1:11761922-11761952
  hyper

SEQ ID NO: 102568 - DNA, 30 bp, Homo sapiens; identical to SEQ ID NO: 119
  chr1:11779788-11779818
  hyper

SEQ ID NO: 102569 - DNA, 155 bp, Homo sapiens
  chr1:11796157-11796312
  hyper
gtggccgcaacgggcggggcggggcggggccgggcaagtttgttccccgagttcggagcctaggagccccccgcggctgcggcgcaggtgccctcggcctgagtcgggatggagctgcctgctgtgaacctgaaggtggcgacgggctgggggga

SEQ ID NO: 102570 - DNA, 30 bp, Homo sapiens
  chr1:11796964-11796994
  hyper
ccgcccagccccgccgcccacgtgtctggg

SEQ ID NO: 102571 - DNA, 30 bp, Homo sapiens; identical to SEQ ID NO: 35065
  chr1:11822281-11822311
  hyper

SEQ ID NO: 102572 - DNA, 30 bp, Homo sapiens; identical to SEQ ID NO: 35066
  chr1:11865337-11865367
  hyper

SEQ ID NO: 102573 - DNA, 326 bp, Homo sapiens
  chr1:11865774-11866100
  hyper
agttacactaatcccgcgaagggtgcgcaagggaggcggcagccccccccaagaagagaggcaggccggcctccagcgctccccgcccacaagcacgtccttgcccccgggaggttgtttgccggctccaggatctccctcccggcgaccccggcctcgccgtcactcaccctccagtcccgggtgactcagaacgctcggccgccggccgcaccactgtggccgctgcaggggcggggaacgcagtgaaggggcgcggcgcaggtgtcaggttgctggagaggcgggcctacagggcggaaaccaccggcgcgggtgaccggaag

SEQ ID NO: 102574 - DNA, 179 bp, Homo sapiens
  chr1:11866365-11866544
  hyper
gctgctgcggtgagcgtgagacccgcacccccgaggagctggtaagaagccggcggagtcggcctggggagggggcggttgctaagggactgagagaggcgttgccgggggtggggccgggccaatctgggcccgcaggtggcagcgggtggggcctggggaccgcagccagggctctc

SEQ ID NO: 102575 - DNA, 30 bp, Homo sapiens; identical to SEQ ID NO: 35069
  chr1:11919361-11919391
  hyper

SEQ ID NO: 102576 - DNA, 30 bp, Homo sapiens; identical to SEQ ID NO: 35070
  chr1:11919607-11919637
  hyper

SEQ ID NO: 102577 - DNA, 30 bp, Homo sapiens; identical to SEQ ID NO: 35071
  chr1:11959126-11959156
  hyper

SEQ ID NO: 102578 - DNA, 232 bp, Homo sapiens
  chr1:11994682-11994914
  hyper
ccactaggcaggcgcgggggagggcgtggaggggcggggtggtgccgcccccggggcgggcccagtgcgtggcagcgggacctgcggccccgtcgcgaagtttccagccctgcgagcgccgccgggtcggccgatcgtcccccatacctcggccatgcggcccctgctgctactggccctgctgggctggctgctgctggccgaagcgaagggcgacgccaagccggagggt

SEQ ID NO: 102579 - DNA, 235 bp, Homo sapiens
  chr1:12040193-12040428
  hyper
cgcccccccagctccggccgacgcccaccggaactacagcccccatgatgcagtgggagtccgagcctctgcgtcgtccgcttgggacgcgccggcggaggagtggcgcgcggaggagtggcgcgctgagacgccgctcgaagcgccgagtcgcggggcagcagaggcgtaaggagtaggcggggcgagccggctgggctcagggtccaccagctcacccgggtcgaggggcaat

SEQ ID NO: 102580 - DNA, 132 bp, Homo sapiens
  chr1:12079273-12079405
  hyper
cgccgagcctaggccgcccagcctgactgaaactgccgctgctgaactcagcgtatccagtcccgcagctgaccaatcggagctcgcccttccggggcccgccccattccaggaatcgacctccgcaccggc

SEQ ID NO: 102581 - DNA, 336 bp, Homo sapiens; identical to SEQ ID NO: 122
  chr1:12123217-12123553
  hyper

SEQ ID NO: 102582 - DNA, 229 bp, Homo sapiens
  chr1:12123787-12124016
  hyper
cgcaagggaggacactcctcaccccgttccctgcccagctggagtgagggggcgcgggtgacaagcaggaacaccggaatatgctagcacccacaggtgggaggctggctgaagggctagtggtggggggcgcctccttctcaccccgcgatggctgggactgattcattcattcagtgtgaattggactgagagcactgccatacgcgggaggcgctctttagcccgc

SEQ ID NO: 102583 - DNA, 1059 bp, Homo sapiens
  chr1:12226889-12227948
  hyper
tgacgctggaggtatcggcccagcgatgctggagtggtcgggtcggaggcccagcagcgtctggggaggggcgtgggggaggcgtgtccaaggccggctggccccgccccgccccgccgcctggcctctggcccgctggggcgcgggctttcgctttcagtcgagggctagcgagcgcagcggagcctggagagaaggcgctgggctgcgagggcgcgagggcgcgagggcagggggcaaccggaccccgcccgcacccatggcgcccgtcgccgtctgggccgcgctggccgtcggactggagctctgggctgcggcgcacgccttgcccgcccaggtgggtgactcgcgcggcccacgggggacagccgccccgcatgtccacccggctggtgcgcagccttcgggtgcccgggccgcgctctcccggggcgctgtcacgggctgggaggctgggagtcccagtcgccgccccccatccgcatcagacacgcgcgcctctggggacccgctggggactccgggcccggcacacgtgcgctcggggcacaactctggcccccgaagcccctcttacccgcgtcgtgacaggggcgcaccctggttcctccgcgagcgcaggccggggcatttggggctgagcagcgggtcctgggcagacccccgctagacccgggacccctcttccctcaccccggcgactgccgcgacagcccttccctcccacgcggtggagaaggggctgtgccggggcgctgccccactgcccacgccgggcaccctcttcaaaagacttccttttcctctgggcgacggttttccgatttcttagaaataccagggtcctgtgtctgaagagcaggaccaggtgtgtgtcaggtccactgagggcacagctggagggcgagctgcctgtctgcttcctccgatgcgtccgggggctactgcagagtctgttttctgcggcctctggggacagggcaagcgagggaggtctgggctggtaatcgagcaaggcaaatgaagtctccgggggccgcaggaaaatggagacagcag

SEQ ID NO: 102584 - DNA, 1779 bp, Homo sapiens
  chr1:12676997-12678776
  hyper
tttacaaggtgaaaccgactagctcagcactcgtgggtggcgcggagaagtggggtggccggcgactctcagctcccgggcgcgggatcccgcagcggcagcaggtgggcttacccccgcccctgcggccccccactccctggagtcgcagtgcctggtacctttctggcgccgcgctccgcgaactcgcgggcgagctgacgcccgatgcctctcccgccgccggtgatgaggacgttctcccgcgacaggtcccgcagcttggcgggcagcaccagtccgacggctgctttcaccaccagatagatcatctgtagagggaacatcaccagcgcgcccagccgtttccacaccatcctccgcgccgcggagccgggcagggggcgaaactccccgggccgagcaatacaggaattaaaaaacaccccgaacaataaatagtaaaccgaataaggaggagagaggcgtcccacctggccactcttgaaatcacctcttcccaaatgcaaagcaccgggtgagaaaaagaaaaaaaaaaaaaaaaaaaaagataaattctcctctgggggagaaaaagcgtctcctaaggttgggacggtaaaagaggtggagggggaagccggaggtggaaagttctaacaagaagtttcttgccccagcagccgtttcggctggggaattctcaggtaatgtttacagactgacagaggagtttagggaggggaagaaaaaaaaaaaaaggcaccaaccacacgcgcgcaccctgcctcggtcccgcggtttcaaagtgcaagattaaaaaaaaaaaaaaaaaaaaaaaaaagctgattccaaattgtagcgcccccacccccaccccgtctccagaaaaaaaaaaaaaaaaaaaagtggggggaaaaagtgcttggagctcccaatttcagcccgcgaaagtctcccgactcattgctattcttgggctcaggaaattgcttaaacgcgatctgattgccagcaacgtgcaggagaagtggggggtccgggtgtcagtttctttacgtgcagcgctcgccctcgcgcgcgctcgctcgctccggctccctccctccctctctgttccagcagaggctgggagttgccgctcgatccagctccccttctctccctttttagcatttattgccttctttttgtcctttccaacttggagagggtccgggtgtggagcgcgcgtggatcggacgccttggtctgcgcggccctattcattcgctccccgggcagccgcgtcgcggagagggcggcccctttttcccccattttttcaataccccattaagtctgattgacagttaaagttgttgggaggcttcactaccgttcctctgagtggctgctgcggcctcccctccccctgcgccgtcgcggggagcgcgcataaggcgcgcactcgggctcgccgggactcgcgctctcccgggactggctcccctctctgcaagccgggacttgccgccggtgtccctgagggctcgcagctgtaactcgaacacgctggaaccgactccggcgagccggctgccttctcgagacgttcctccttgcccgggccgcccgcgggccaggtgatcaccccgagtgtggagcaggcccgggggagcttgcgtatgccttgatccaaccaggtcacccagggttttatttcaggtcatttggtcatcctcggcctccaggtaggatcaggaagccactcctcacctttgctcggacctcttctgtgttcacgtagagtggactttt

SEQ ID NO: 102585 - DNA, 305 bp, Homo sapiens
  chr1:12679082-12679387
  hyper
acctcctgcccttcccgaccggaatgtctcccctgctggagggtgggaccgagctatttagagttgtctgttgcaggaagtctgggaggtgagtcactaaaaagcagccccagttcaaagtgctgatgggacttgcctcccgcccccctgcacgttcccggggccggaggagcgagagcgaagcagggagctgccctgtaatctggggcagccgtttccagcccgcgacttgttcagacggcgattcctgggcctcacccccagagattctgattcagcagggctgggtgcgctgggatcggtac

SEQ ID NO: 102586 - DNA, 30 bp, Homo sapiens; identical to SEQ ID NO: 130
  chr1:12679936-12679966
  hyper

SEQ ID NO: 102587 - DNA, 30 bp, Homo sapiens
  chr1:13825427-13825457
  hyper
ctgccttcatcttcacgtggccttctcctg

SEQ ID NO: 102588 - DNA, 226 bp, Homo sapiens; identical to SEQ ID NO: 35083
  chr1:13839542-13839768
  hyper

SEQ ID NO: 102589 - DNA, 432 bp, Homo sapiens
  chr1:13840257-13840689
  hyper
cggactggggagccgggacagcagggatggagaggggaggggcggggagggaggggcgagggactcaccaaagggtttacccggacaggaaattaacccgctagaaaaatctcttgggagaggcgggagcggcaggggtggccgagtggccgtcgccaaaacgcggccccaccctggcagctgatttccgagatctggcagtaagacgccgcgcgcaccgggcgggctgcactcgacgtctaagttcagctaccaagcccaggagcggtttccctaaggcgtgtcccgggcgtgcgccctgccccctcgcgcccgcctggtgccaaagcacgctccctgcacgccaccctatgtcgccaaagggagtgggacctgggtcactctgactctgctccgggggcaatccctgcaggttctcgggtgccgcgccag

SEQ ID NO: 102590 - DNA, 30 bp, Homo sapiens
  chr1:13909782-13909812
  hyper
cccccggagcccgcccgctccggtccccgg

SEQ ID NO: 102591 - DNA, 131 bp, Homo sapiens; identical to SEQ ID NO: 133
  chr1:13910116-13910247
  hyper

SEQ ID NO: 102592 - DNA, 446 bp, Homo sapiens; identical to SEQ ID NO: 134
  chr1:13910310-13910756
  hyper

SEQ ID NO: 102593 - DNA, 242 bp, Homo sapiens
  chr1:13910793-13911035
  hyper
cgcgggtgtgccgggaggagccccggaatccacaggctgcgaggtgggcagcacagggggcctccctccgagtcggcagcaccagagagatcgggtggaaggttcacagtaggcagccccgcttgctggcagcagtggctggggtttccttcccatagagcggtgtgttggaggaatacgcacgcctcgggagaagctggcctcgtagaatcaggagggacgttcaggagggcttgggccaa

SEQ ID NO: 102594 - DNA, 715 bp, Homo sapiens; identical to SEQ ID NO: 136
  chr1:14026481-14027196
  hyper

SEQ ID NO: 102595 - DNA, 162 bp, Homo sapiens; identical to SEQ ID NO: 35089
  chr1:14075413-14075575
  hyper

SEQ ID NO: 102596 - DNA, 30 bp, Homo sapiens
  chr1:14075943-14075973
  hyper
gcgcccggagcaagcggagctcccccaaga

SEQ ID NO: 102597 - DNA, 32 bp, Homo sapiens
  chr1:14076276-14076308
  hyper
ggcggcagaaagtgcgcggacggcgttccggg

SEQ ID NO: 102598 - DNA, 234 bp, Homo sapiens; identical to SEQ ID NO: 35091
  chr1:14219351-14219585
  hyper

SEQ ID NO: 102599 - DNA, 201 bp, Homo sapiens
  chr1:14219639-14219840
  hyper
cgccagcaaggccagctccccggggaccctggggcagcctcgcgccctgcctgcctccctggactgagacgccgcggggcctgggcagcgctctgccggcagctggtgctggaacacagccggggctgagctgctcccggggaccctgccccttccaggtgaccccaggagaagcagccccgggccggggggcaagttcca

SEQ ID NO: 102600 - DNA, 1868 bp, Homo sapiens; identical to SEQ ID NO: 35093
  chr1:14924520-14926388
  hyper

SEQ ID NO: 102601 - DNA, 1062 bp, Homo sapiens
  chr1:15250612-15251674
  hyper
ccgcgggactgagagccgttcccacgtgagaggctccgcggccgaattcctcgcgtgcagcaggcgcggaccgcccggcgtccggccggactgagagccctggtccggcgcgcgccgccggccgggcgggaggcgggggcgggctcggctgcgccccgatgcggcggcgacctccgggtctgtgagcccggcgcgcgccgtcggagcccctcgcgcagccgctggtagcgtccccccgggcacccggcatgcgggcggccgactcgggctcgtgggagcgcgtccgccagctcgcggcgcagggcgagccggcgccttcctgcggggcgggggccgggcccgcgcggcccccgggacccgcagcctgcgagcagtgcgtggacgcggcggggcccggcgatcggccccgcgccggggttccccgggtccgagcggatggcgactgcagccagcccggtaggtgcgcgcggggcggggcggggcgggcggcgcggacacaggcccaggagccgccggggccgggcgcgcgagggcgctcggagccgggatcgggaagccgctggtggcaaagttctcgcagcgcgcggagccccgagccccgggcgggtgcagcgggaggcgtgcgggacgcagagtgagttcctcggcgtggggaccggggctcgggggctgcaccggggggccaggaccgcgcttgccggagccaggcgatcccgcggcgcctggagacccagctccgggctggaccccgcgtctgctgggggaagcgtgggaaaggggccagccctgcgcgaagttggttcggccccctgggaccgcacctgtgagccatgtggcggcccccgcggagtgccgaggggagcccccttcaccgccgcccctccgaggcgaaattgatgcctcgcatttgctaggagcggagagattgctgcgtttctcatacacttgaactccgagtaatgcagaaagagaaattgcagaggtggagacacaaacgcagtgatctaattgcgtttggttggcgaatccgccccaagtggagaacagcgttttactgttaaa

SEQ ID NO: 102602 - DNA, 2383 bp, Homo sapiens
  chr1:15478881-15481264
  hyper
tctgcaggtgtacacacgtggacaccatatgtacccatgaattccgcctttggaagtgaacttgattgcagcctattttcgtctggaggcggtggattcccggtaggaggcgccttcagtcctcggctcgatcctgtgacgccagccagctgcctatcggcttctcagtgtttgaacttcaaagggctggacgctcacccaagaaggggaccccggcctgacctctctcggaattcaaaaaaatctaaggctcagagagggaatgggagctggctcttccctctgtgtttagcatccacgttttttggcggtctggctgaaaccagcccaccctagttcgggcgccagagcaacgcagttccgagggcagatctccaaggggcggaggcagagccgcgggtgagaggcttccgcgccgacttcgggtttgcactccccggagccagaactccgtggcggctccgggcctccgtggatccgagcagagactggctgcccgcctgccactcgcaggctgggaaaacgccagccggtgcctcgccgggaaagttctcggcaaagctggggatgagccctcagcagggcaggctcccggtgcagcgcgcccccatccattgcccgcgcgcaagaacccggaatgggccccacctgggccgggactcgggcgtgcgatcccgagggcgccctggggaccacgcatcgggtggggaccctggccgagggcgtgagctgactcagtttttaaaaactcgcttcctccttccctacttgtgccggtcactcacctcgctgggaaccagcccagggcagaagggggagagggaggcggtggcctccccaggaaggaggagaggtgagtatcccgccaggtaaaggcggggcggctggcggagctgtgcctcggcgtctgcgcctggtgtgggaggaaagcgggtctcccagctccacttaaacccctaaaacctgggacttctagcttgagacattccccgaccaccacccgtcacacacacgcgcgtgcgcgcacacacgcatgcacaccgattctctgggccctagggaggaggggggatcagggctctattttctcccgaccccctcttatccaactcggctggcaagggttggggagaacttaggcccagcccccggcacacgctcagcgcgctccagcggcatacgctggggagtgggtgcccgcctcgctcagctgcgatccctcgcctcgggcccgggggtggtgccgagggccgggagggagggtcggccggtgggcggtgcttctccgggctggaggccgctcctggccggcaccgccctccgcctcccgcggtccctccctcccgcacgccggcgctcccaggccgcgcttcctgcgtccccaacccggtccctgagagggcagtgcgccctctccaccactgcgttccctcggctaagaatcccccgaaccccagccccgcgatcgcggcgcccaccgaggaggccgcccgggtggggcgcgggggtcgcgaagcccgcagtcccggaccgcccagccgagacggagccggacccgccgcctcccgggtgagtctcagccgccgcgccttgcgcccgctgcttcccgcggcgcgctgtcggttccccacagggccgtgtaagggggccgaggcccgtttgggtctcctgtccgtccgtctgtccgccgagcgcttcccgcctggggtcgaccaccgggaggactccgcaccccgcaccctctgcggccgcgccccgccggcgcgggacgctcccgcctcccgggcaccgcgcctggccagctggcctcggctggggaaggcagctggccttgggggccccctgttggcgggaacaggtgctatccgcccggcgggcttcgaacccttggcttcgccagaagcgctttcagcgcgtggttaggagcagaacttcccagtaggtcccaggaaaccaccttggcgctttgctcgcgcatcccttactgtatggaagtcggggccttttagggatttagattcgtgtgtgtgtatgtgtgtgtgtcgctctacaagcaaacacgggggtaaagaatcgggcatgagcaaagtggattgaaactcgagtccttccctgagcgcgtcggtttcttcatctgtgaaactgacatgacaacgtcccagggtgcggcggggcattcatgcccagcacccagcaagcactcagcggtaagttacgttaccgggcctaggggagagcagagtacaaatcagatctcaaatcagcgcacaaacgggaggcgcttggcccggcgcgcctggtctgcattacaggataatggtctctttcccaaccagcggtgggggcgagagacctggcccctcccccacggtttccccaggga

SEQ ID NO: 102603 - DNA, 464 bp, Homo sapiens; identical to SEQ ID NO: 35098
  chr1:15573639-15574103
  hyper

SEQ ID NO: 102604 - DNA, 291 bp, Homo sapiens
  chr1:15735865-15736156
  hyper
atcggcgcccgccacggttcaccctaaacaggggtttctgctccccaggtccgcctcggaacccctgcaaccctcattgagaacgccagtgtttaacagcgagtcgtttccatagcaaccgacagggtgtcacagacacaggattatgacttcacggcgtggggattccggagaagggggtggggcggcgccccccctcgcttccccgccccccggcaagccccgctcctcacccaagccgcgggggaggagccctcttctttcccgcccggccccggcccccagcaggac

SEQ ID NO: 102605 - DNA, 71 bp, Homo sapiens
  chr1:15736984-15737055
  hyper
cccctggcacgcggcggagactcgtatttgtgctgcctccggtacaccatagacgcgtccacagagtgggg

SEQ ID NO: 102606 - DNA, 303 bp, Homo sapiens
  chr1:15852990-15853293
  hyper
gggaccagagagtgcgtccccatcctagcaactgttgctagacgagggccatctcccggtaggagcggaaacaccttcctggatcgaggaggtccttctggtatcccatcatgcatagcgacttcgcctcgctaggaggcacgttttggcctctttggtcacgatcagccttttggctgcaaccaaagagcgcgcctcgtttctatagcaaccaccccaggtccacgcctagacggcgagtggcaagggtcaaaatagattcgcccagtagacgccctcgacctgttcggtcctcgccttcag

SEQ ID NO: 102607 - DNA, 30 bp, Homo sapiens
  chr1:15853749-15853779
  hyper
ggtgtttgctgctccgaggtcggcgccgtc

SEQ ID NO: 102608 - DNA, 152 bp, Homo sapiens; identical to SEQ ID NO: 35101
  chr1:15905372-15905524
  hyper

SEQ ID NO: 102609 - DNA, 314 bp, Homo sapiens
  chr1:15928913-15929227
  hyper
aaacaaaaaaactctatgatattccaatgatagattcacctaagatgcatttctcatatctctgttaaacaatgcatgactataatttctccggtcatgtttccttatgtctgaaaacaaagggcactgaaacctgtttgttcactttagttcacaggctgattagaaaagtaagtaaaatccaatccaaatataaattaaatacacgtgaaataccaaaccctctagtaaacagcgagctacatacaagtcccagacactccacgaccgtttctagattgaaaatcctaggccaggcgcagtggctcacacct

SEQ ID NO: 102610 - DNA, 30 bp, Homo sapiens
  chr1:15930079-15930109
  hyper
cagaatcgggttggcgtcgcctagcaacca

SEQ ID NO: 102611 - DNA, 30 bp, Homo sapiens; identical to SEQ ID NO: 147
  chr1:15944302-15944332
  hyper

SEQ ID NO: 102612 - DNA, 164 bp, Homo sapiens
  chr1:16011275-16011439
  hyper
tcacgtgagcgccgcggcctcggagctatttttaaagaacaaagttgaggtcagcatcctcggagcttccccaaacctggcccggggccctgccctcccggagaggggtcagcgaccctccggtcccccactggggcagcggcgcccccgggagctcctgaagg

SEQ ID NO: 102613 - DNA, 30 bp, Homo sapiens; identical to SEQ ID NO: 35104
  chr1:16068052-16068082
  hyper

SEQ ID NO: 102614 - DNA, 30 bp, Homo sapiens
  chr1:16084923-16084953
  hyper
cgaggggatgggcagcggggagggaaggaa

SEQ ID NO: 102615 - DNA, 133 bp, Homo sapiens; identical to SEQ ID NO: 148
  chr1:16085154-16085287
  hyper

SEQ ID NO: 102616 - DNA, 30 bp, Homo sapiens
  chr1:16161083-16161113
  hyper
tgatcgctcaaagccgagcacgcgcacggg

SEQ ID NO: 102617 - DNA, 30 bp, Homo sapiens; identical to SEQ ID NO: 149
  chr1:16161658-16161688
  hyper

SEQ ID NO: 102618 - DNA, 30 bp, Homo sapiens; identical to SEQ ID NO: 150
  chr1:16162194-16162224
  hyper

SEQ ID NO: 102619 - DNA, 30 bp, Homo sapiens
  chr1:16162638-16162668
  hyper
gcgtctgaacagctcgcttgtgcccgacct

SEQ ID NO: 102620 - DNA, 30 bp, Homo sapiens
  chr1:16173706-16173736
  hyper
aacctttttctgatcgctttcccaagcagg

SEQ ID NO: 102621 - DNA, 46 bp, Homo sapiens
  chr1:16174335-16174381
  hyper
cgggtgtgtggtggcggcagagctgagctgcgaggcccgagagtca

SEQ ID NO: 102622 - DNA, 30 bp, Homo sapiens
  chr1:16175045-16175075
  hyper
acagccgggtccggcgccgccactccaagc

SEQ ID NO: 102623 - DNA, 217 bp, Homo sapiens
  chr1:16175857-16176074
  hyper
ggaaatggaagcagcggcggcggagctcctgtcttttaaatggaggatcattgattgtgttggtggttgctgttactggggcattaaaccctcgccgctggagcgcgcgtctgcgcgtgtccgcgtgtgaaaaggagccgggaatcgtggggccattcataacctgcttgagctgtcctcggcaggccggggggaggtgcgcgcttccagggactct

SEQ ID NO: 102624 - DNA, 30 bp, Homo sapiens; identical to SEQ ID NO: 151
  chr1:16176410-16176440
  hyper

SEQ ID NO: 102625 - DNA, 30 bp, Homo sapiens
  chr1:16302217-16302247
  hyper
cccgggaggtgacacgcgccccctcgcccg

SEQ ID NO: 102626 - DNA, 234 bp, Homo sapiens
  chr1:16302446-16302680
  hyper
tccccggccccgggcgattgttgacactcacctgccatgtcccggaccccaccgcagagggaggtgcatcacggccgcgagaaggccggggacggcactccagagcagacaaagggcgccgccatgttagagtcgggcggaaccgacctcgcaggcttcccggctgcaacttccggcgcatgcgcagcgtcctcgctaggagagcgcccatagacagacgcatgcgcctagcta

SEQ ID NO: 102627 - DNA, 213 bp, Homo sapiens
  chr1:16399669-16399882
  hyper
gcttcgtgtcacctgcggggctgcaaactggggcggggatgcggtgacctctgcacgtgcgctctctgcgctgcccccgccccctaccgtccctagctctgtccccctcaggacgccgcgtccccaggggtgcggcggggccgtgaagggcgggtcgccagccccatcccccaggtctccgagcggcgaggggactgcgcgggtccccggcac

SEQ ID NO: 102628 - DNA, 30 bp, Homo sapiens; identical to SEQ ID NO: 35111
  chr1:16400315-16400345
  hyper

SEQ ID NO: 102629 - DNA, 1538 bp, Homo sapiens
  chr1:16481257-16482795
  hyper
aaaaaaaaaaaaaaaaaagaaggaaacttctcaccggcccaagtttcctcccggcttcccccttgtggagcctgcggaaacctcgctctgcccaggcaggaggggaagccttgccctcactgttggaaattgaagctggcctgggctgggtggacaggaaggtcttcggccagggcaggagcccccatcctcgccctgaccctagcggagggacaacacccccaccacgcacccgctgcgccatgagcaaagtctgcggcccctcactcggcgcggctccgggaacactggggcgggggtgggtgattcagtcccccacccccgggtgtcctgactccctggtggccctgggctgacagctccacaccttgggaggccgcacccccacctgccgcatttcctcgttctgagtcacccttgctcagaacgcttgactttgggacttcctgtccgcactcgcggcccctaacctgccccgggagcccgggagtgcggcttgggaaggagggaaaggagtgtgtgagcagggattggcccgaacctatctccacgctctcccccgggactggaggtgaaggggggcgtggagaaaatctcagggaacaggggcttcgacagggggctcccgcccgcccgagccccctccccaaaatgcgaggcctgcacagtatgccttctccgcaaaacctcggcaagcgggttagtgaattcaggtcactaagaagctgagcccgcggaaagctgcccaaacacccccttctctaggggactccccacgccccccgccgggacgcgttcccgaagtcgccgcctggactgcaaccgcgtggcctgcgccgcgtcctcttctccgcagcctccgaggcccgtgcgaccaagctgaaaccgcttattctccggagcccctatgaccccgggtgggggccagggctcgcctcgatcgcagcccgtgcgccctccggactccagttcgccgggactgggcgacaccaggtaggttccaaagttgcgcgcgtcaaggagcgccgggctctagggggcactggggcccgggggccaggggtccagacgccgcgcgcactcaccttccttgccctgcgccgccgcggccgcggccagcgcacagccccacagcagggcgaagcaggcgcgggctgcctggagctccatgccgcgcttctcgctctcggtccgatccccccgagcccggctcccgcacacccgcacgcctgcacgccggcctcggtgtccgctcccgcccgccggcctgcgcgcaacttctgcccctcctgccccgagtccttaatggaagttgggtgagaaccgactcctgttcattcatgccctgcgtgacgtcaccaacgcccgccctcaggaatgtctttaaaggggccgggctggcacccggaggagagggaggggaagtccggaggggtttggaggaggaccttggggccctctggactcgcgggctccccgcaggccttccaaagtttgagcgtctcaaagcgccagcgcccctacggattagcccccag

SEQ ID NO: 102630 - DNA, 69 bp, Homo sapiens; identical to SEQ ID NO: 154
  chr1:16514365-16514434
  hyper

SEQ ID NO: 102631 - DNA, 92 bp, Homo sapiens; identical to SEQ ID NO: 35115
  chr1:16542924-16543016
  hyper

SEQ ID NO: 102632 - DNA, 30 bp, Homo sapiens
  chr1:16544073-16544103
  hyper
caaccaaggctcagcgccacgcccttccca

SEQ ID NO: 102633 - DNA, 193 bp, Homo sapiens
  chr1:16553469-16553662
  hyper
cgagccctcagagtcggggttgggccgggcctggggtcaagggcagggttacggccccctagggagactccgcccctggcggaccccgccccacccctccacatgagacggcgcgcgcaggctcagttcctcggcgtagcacagcggctcccaggcgcgctcagctcggcgaagggtgcggcgctatgccggg

SEQ ID NO: 102634 - DNA, 128 bp, Homo sapiens
  chr1:16558625-16558753
  hyper
tgagtatgtgggcaacgtcggccagcccagcccgcccgtccagtgtgcgcccatcagccagccgccgccccggcacactcttcacccgtagcaggggcagctcccaggcctgccggaaggctgtgagg

SEQ ID NO: 102635 - DNA, 30 bp, Homo sapiens
  chr1:16563174-16563204
  hyper
gccctcggcactctcgtgccagtttgggac

SEQ ID NO: 102636 - DNA, 305 bp, Homo sapiens
  chr1:16563565-16563870
  hyper
accgacctgggtgccgaaggcccctttaaacgcccacccgcactcccgccgccccagcccgccgggcccacttccgccccgcctgcgtccgccttctgcgcgtgctggcagctccggcgcaggtgcgcgcggcgcatgtgcggaggttgttgccatggagacgccggaggttgggttgggcgggttccgggaggcgttcgtccctcctacaacgtccgcagcctgcgccgcgcggtggctctggactaggccttttcctctgggttgtggatcctcttctctatgactccgtccgatccctagtc

SEQ ID NO: 102637 - DNA, 30 bp, Homo sapiens
  chr1:16678082-16678112
  hyper
caagatctcacaatcgttttctcttcgctt

SEQ ID NO: 102638 - DNA, 30 bp, Homo sapiens
  chr1:16678569-16678599
  hyper
ctcctcgcctcactcgaggacggcgatagc

SEQ ID NO: 102639 - DNA, 64 bp, Homo sapiens
  chr1:16679105-16679169
  hyper
gggtggaatgcgctcgggggagctaggcctccgcacccgccttcgccgcgtctctagcgtcgac

SEQ ID NO: 102640 - DNA, 146 bp, Homo sapiens
  chr1:16693548-16693694
  hyper
agatggcatctttccgccttctctgcccccttccaagatggctgccctaatgtacacttgggaccttgcctggcgcctcttccgggcttggcagcgggcggggtccattgagtaaagccttgcgtgcctgcgcccgcgacggaggc

SEQ ID NO: 102641 - DNA, 30 bp, Homo sapiens
  chr1:16694254-16694284
  hyper
gaggcagccgagggcggggggaaattgaat

SEQ ID NO: 102642 - DNA, 30 bp, Homo sapiens
  chr1:16694713-16694743
  hyper
tttttttgtctccccgtgttcgcgtctgtt

SEQ ID NO: 102643 - DNA, 44 bp, Homo sapiens
  chr1:16766995-16767039
  hyper
tggcgggcgcagggcgctttctttgcgtcggagggtgtctggag

SEQ ID NO: 102644 - DNA, 30 bp, Homo sapiens
  chr1:16767311-16767341
  hyper
accgcatccctccgcgggctaccaaccgtg

SEQ ID NO: 102645 - DNA, 30 bp, Homo sapiens
  chr1:16826125-16826155
  hyper
aactcctgacccatcgcccagccagaacga

SEQ ID NO: 102646 - DNA, 46 bp, Homo sapiens
  chr1:16861588-16861634
  hyper
cgcggatgacggacacggagacaaataggaacggtgtgtcgtgaga

SEQ ID NO: 102647 - DNA, 30 bp, Homo sapiens
  chr1:16939680-16939710
  hyper
gggaactcaggccccggcggtgcacgaccc

SEQ ID NO: 102648 - DNA, 30 bp, Homo sapiens; identical to SEQ ID NO: 35119
  chr1:17029816-17029846
  hyper

SEQ ID NO: 102649 - DNA, 30 bp, Homo sapiens
  chr1:17231778-17231808
  hyper
cttatttttccaaacgtggaaacctctgtt

SEQ ID NO: 102650 - DNA, 30 bp, Homo sapiens
  chr1:17248375-17248405
  hyper
gtcacatgggggcgccgccggatttaagct

SEQ ID NO: 102651 - DNA, 31 bp, Homo sapiens; identical to SEQ ID NO: 155
  chr1:17278332-17278363
  hyper

SEQ ID NO: 102652 - DNA, 30 bp, Homo sapiens; identical to SEQ ID NO: 156
  chr1:17306870-17306900
  hyper

SEQ ID NO: 102653 - DNA, 30 bp, Homo sapiens; identical to SEQ ID NO: 35122
  chr1:17307200-17307230
  hyper

SEQ ID NO: 102654 - DNA, 30 bp, Homo sapiens; identical to SEQ ID NO: 35123
  chr1:17337331-17337361
  hyper

SEQ ID NO: 102655 - DNA, 30 bp, Homo sapiens; identical to SEQ ID NO: 35124
  chr1:17338044-17338074
  hyper

SEQ ID NO: 102656 - DNA, 30 bp, Homo sapiens; identical to SEQ ID NO: 35125
  chr1:17380573-17380603
  hyper

SEQ ID NO: 102657 - DNA, 30 bp, Homo sapiens
  chr1:17380819-17380849
  hyper
ggagccatcctatccgggtccctgccccga

SEQ ID NO: 102658 - DNA, 795 bp, Homo sapiens
  chr1:17445313-17446108
  hyper
tcctgccccagtccccggcaagtctccgcggaagctccgctgaactgggagtgggaagcaggagaggggctgggttgaggtgggtccgaggggaagtgaggtgcggaggggaagtgaaaggggagaggacggcagggaagctgaaggggtgtgaggtcccccgggaggagaactggagagggccagacggagggttacgggtgaaagggagggtctgtgagggagctggggctgaggctgtgttagggggtctgggagagtctcagggtttctggaaggtggacacaaggttcgggggttgtcaggtttctggatgagattcttaggatttctgggctcgggggctcgggatgagggacaactcgggctggacaaaggctgtccacgtccccgagtctgagcgcgtctcaggatttctgggctcgagatctcggcccgggcatcacggtgggccggctcacctgtagacatcggtccagaggtaggtgcccagcacgtacaccgcctccacgcggctcccgtactgcagccgcacggtccgctcgcgcagcatcctccccgccgcagtgcccgcgctcgctggtccggggcggccgggagcacctgcagcaggtgcgccttctccagcagcctgcgccccacggccccgcgcgcagccttatccagcggccggtgggcggggcggcccgccccagtcctctcgcagtgggctgcgggcctgtccgtcaagcgtggtcccgcccctaactcgtcccgccccgctgaggtcgtggcgaagtcatcagggaccagttt

SEQ ID NO: 102659 - DNA, 209 bp, Homo sapiens; identical to SEQ ID NO: 158
  chr1:17591035-17591244
  hyper

SEQ ID NO: 102660 - DNA, 30 bp, Homo sapiens; identical to SEQ ID NO: 35128
  chr1:17764680-17764710
  hyper

SEQ ID NO: 102661 - DNA, 30 bp, Homo sapiens
  chr1:17765055-17765085
  hyper
ggttataaactgcgcggggggaggggagcg

SEQ ID NO: 102662 - DNA, 30 bp, Homo sapiens; identical to SEQ ID NO: 35129
  chr1:17765379-17765409
  hyper

SEQ ID NO: 102663 - DNA, 323 bp, Homo sapiens
  chr1:17766204-17766527
  hyper
cagaaacacatgtgcggccgcgcggcaagcgagcgcgcggcggggcgggaggcgcggggcgcggggcgcgcgcgccccctgccggccggcggacccgttgccggcgcccccgccccgcccggcctggccctgccctgcccacccgagcctgcgccgcgcgccgcgcgcctcgccgcccgcctcggctccgctgctcctgcgcctttcgcgggcccgcgagcgcgctttgggccttccacgcagtgcggcctgcgcgtcagggacttctttgcggcttaggaggatgttggattgtttttcctgggcacgtctagacaggtcac

SEQ ID NO: 102664 - DNA, 30 bp, Homo sapiens
  chr1:17842769-17842799
  hyper
gtttttctctgaactcgtggttccttccct

SEQ ID NO: 102665 - DNA, 788 bp, Homo sapiens; identical to SEQ ID NO: 35131
  chr1:17865913-17866701
  hyper

SEQ ID NO: 102666 - DNA, 31 bp, Homo sapiens; identical to SEQ ID NO: 160
  chr1:17908286-17908317
  hyper

SEQ ID NO: 102667 - DNA, 30 bp, Homo sapiens; identical to SEQ ID NO: 35133
  chr1:18427137-18427167
  hyper

SEQ ID NO: 102668 - DNA, 30 bp, Homo sapiens; identical to SEQ ID NO: 35134
  chr1:18433718-18433748
  hyper

SEQ ID NO: 102669 - DNA, 219 bp, Homo sapiens; identical to SEQ ID NO: 35135
  chr1:18434091-18434310
  hyper

SEQ ID NO: 102670 - DNA, 99 bp, Homo sapiens
  chr1:18434751-18434850
  hyper
gggggagggcgctggccggggtcgctccgagaggctcgggctacgagcaccggtcctgcccggggtctgtggagctggttggctcgatgagggagggag

SEQ ID NO: 102671 - DNA, 309 bp, Homo sapiens
  chr1:18435564-18435873
  hyper
gccgagcgggttctccggagccagtgagaggtggctccgcagccccagggtccgcggccggcctcccacccagtgccgccgcgtagtgggtcttaaatggagctgaaccctttcgcgcagtgagcagagagccaacgtgaggctaaaagccaggagggagggaggcgggaccagcgaagagccgcaggcaccgagactacaggctccgcgtccgggatcctcctcggagcctggtgccaacctcagcctggctggagtcagagcctggctccgcctcggaggggagcgggacgcgaggtgccaaaaagt

SEQ ID NO: 102672 - DNA, 548 bp, Homo sapiens
  chr1:18436450-18436998
  hyper
cttgttgggaaaccctggctccgtcaggaccccaccctgcgagctctccctggaacccgggagcagggttcttctggctgcccggctgcagagagctgacccggcatcctgacgcctcaaatccctttgcccgcctctgcgggctgcgggaggcgggggttggcgtgcctgagggtgagcgcatctgggccggtgcagccagcgcggcctcggagctccgctgctcaggatgaaggaagagcgcagacgcggatcgcgaatgggaaactttccgcgtctggggcgcagagggagatccgaggcagccgggagccctctcttctccgcagaggagagcacacgagggtggggtccctccttcctccttccaagtctgtgcccagaatggggggcggggtgcgagaagagtccgtgagagacgcaagaggcgggctgtgccggaggagggcgcccttcctggaggtggccgagagaggtgcacctggcagcggctttgcagggccacctgcctccgagggcgcagagaggagcaacccgcgccggccttc

SEQ ID NO: 102673 - DNA, 708 bp, Homo sapiens; identical to SEQ ID NO: 35139
  chr1:18437043-18437751
  hyper

SEQ ID NO: 102674 - DNA, 122 bp, Homo sapiens
  chr1:18956211-18956333
  hyper
gtattttgcctccagcgtggggccagagacgctctttcccccgggagacaaaaggcctgcagttgtggcgtcctgccccgctgggagggcgtttcgcccccaggactcggtgtcccgaggtt

SEQ ID NO: 102675 - DNA, 8 bp, Homo sapiens
  chr1:18956602-18956610
  hyper
tgaggagg

SEQ ID NO: 102676 - DNA, 1057 bp, Homo sapiens
  chr1:18956738-18957795
  hyper
cggcaggaaggtagagtaagaaccggacaccggggctctgacattacacagaaaaggtcagaattcctcccttcaagtcaccctaggccggttcccggggagcctcactggaggaatttcagagggtgtaagacgagggagaagatgagaaatagggcggactctggccctcggaggccagagaaaaggcgagactccagagaggcgccggacccgaggcagacattcccatacagccgggactccgagagcagccgtgggcgacctgggggccggggactcggcggatccggcccattcatcaaaggaaggcactgggacaaagttggccccctccccttctcccccagcccccaactcgccgggatcggctccctctcttttcacggcggttcaaattctcccccaaaacgaggtcgagccggggattagaaaagagggaaaaaaatattcgttggcgatttcttttcgttattggtcctccgctcccttgcgccctggcccccttccctcctcatgaataaaagaaaagtccgaacctatcagatcgcgctcactgcctcctcctcctcctcctcctcctcctcctcgtacttcggtgaacacttttgcacaacttacccagctgatcactcgcgccccctcgcttttccatttctctttccccaaccccgtcaccccctgtctcctccgtccagccctgaaacccgaggaggctccttcttccgtctgtccccgggtctcctaggggacggggctgtgaaagctggtgtggagggagaagcgagtgtggtccggagaaagaaggcgtggagaagagggagggagcgagagcgagagaataaatatataaataaatacgagaacgaaatccactccgcagtctccgggctcggaaactttggccccgagcgccagagcgccagagcgcgagagcgcggcgctcgccactctgaggctggcggcctcgattccggccgcgttcccccggcccccctccgccgcggggcctggtctccgggttctgccaggcgcatcagcccgcacaacttctggc

SEQ ID NO: 102677 - DNA, 195 bp, Homo sapiens
  chr1:18958033-18958228
  hyper
ggtgaagggagcggacgggaagcgatttttgccgactttggattcgtccccggcgtgcgcaagaatggcggcccttcccggcacggtaccgagaatgatgcggccggctccggggcagaactacccccgcacgggattccctttggaaggtaagaacgcccaggctggcctcgccgcgactccgccgcccggaac

SEQ ID NO: 102678 - DNA, 606 bp, Homo sapiens
  chr1:18958358-18958964
  hyper
cgcttctgcgtgggtttcactgcccggcggccttcgtttcgcaggtcgctagctgccggtctttacccgcagggctgaaattctggtagatttggactcctagtaaatatcaggtcctggtgaatttcagctctttccactatttccagacacttcttccctgacagtttctcggctctcctggctcgctggctgccagctttctactcttgttttgaattattttttccacccccgggattggtcttccagtcctttatttcgaaccacctaccatgggtgatactttatatgcctcaactaccacggctatccatttcttccgaagccacagtcaaacactcctgcttttccgcctggaaacaaactaattggaaataataattagtaatgattttccccctaaaactttttactcgggcttccgcactctggaaatctcccgggagagaacctctaaacggcgaggtttagagaacctctaaacggcgagaggggcacggcaatgtccaaacgagaagaaagagctgattttgtaaagcgtccttcctaaacatccagcgcccgcccggggagacccgataggacgggcggcggcgaaccggg

SEQ ID NO: 102679 - DNA, 136 bp, Homo sapiens; identical to SEQ ID NO: 35143
  chr1:18959253-18959389
  hyper

SEQ ID NO: 102680 - DNA, 451 bp, Homo sapiens
  chr1:18959455-18959906
  hyper
cgcagaatactgaggagagccgagtgccggtcgctaaagaggctcttgaatataaagttgggcgctcgagagctcttgagcgctaatggcatatcccgccacggagaccgagtgactccgactttgcgacgcacgatttctgattaaatccgagagtggcttcagacaccgacttttacaaagagaggtggggggaccgggagagcgagggagggggcggtaggaacggcccagcagcggagcctcttctcgcctcctccctttcaattacagtcagctccctccactcccgcggctgtgaaatcgttctaatcttccagatctccgcagccgctgagtccccaaattggggggatcgaggccggattagtgcgctgggtgtccccccaatcttctgtgaggaaattgtgtagactttgcattaaggcaaccaggcgttctcccctcccca

SEQ ID NO: 102681 - DNA, 30 bp, Homo sapiens; identical to SEQ ID NO: 35146
  chr1:18960370-18960400
  hyper

SEQ ID NO: 102682 - DNA, 152 bp, Homo sapiens
  chr1:18960803-18960955
  hyper
cccgcttggccaaggccgggtcaatcagctgggaggggtcttcatcaatgggcgacccctgcctaaccacatccgccacaagatagtggagatggcccaccatggcatccggccctgtgtcatctcccgacagctgcgtgtctcccacggct

SEQ ID NO: 102683 - DNA, 1710 bp, Homo sapiens; identical to SEQ ID NO: 35148
  chr1:18962781-18964491
  hyper

SEQ ID NO: 102684 - DNA, 30 bp, Homo sapiens
  chr1:18964760-18964790
  hyper
gatggaaagatcgtgcggtttggaggattc

SEQ ID NO: 102685 - DNA, 139 bp, Homo sapiens; identical to SEQ ID NO: 35149
  chr1:18965005-18965144
  hyper

SEQ ID NO: 102686 - DNA, 385 bp, Homo sapiens
  chr1:18966650-18967035
  hyper
caggtgtggagtgggaaatgacggggaaggatcggaaaggaggggagagcccggagtgtcggttttagacacttgtaaaaggaggtgggaaacaatttaatttggcagcagcgatagctgctaatgcggttttcggtcgtttgctacactggaggaagctgttttgattgtgtgtacaaggacctgccaaatttaattaggctccgggggagcgagtgaataggggaaggggggcacggctcccctcagcccacaccattttttcggcttcacacctggaagggacattgtttacgggatcttcgaaaaccaggaaggggcgggggcggagagggacaggagccttggaagcgggggcgagggaggggacgaggatagtccattt

SEQ ID NO: 102687 - DNA, 1193 bp, Homo sapiens
  chr1:18967249-18968442
  hyper
cccggctttaggcagcgctcggcggtggatatccagtgcgaccagagggagagagggagggggcgctggaggggcgcgccgggccgggggctgggggggatggggcgagcggagaggggcgtgcggagctgggaacgtcccggcggagggggctcccggcggagggggctcccggcgaggggccgagcccacactgggctgacaaggctccccttttcttccctccatccccccaaccgaagaagagagagggggaggcgggagcagagactaacgagaaacaacaatgaggagataactattacaaaggcaaacactggcgctcgcgcgctcgcagccccagaacccgcggtaaataaacaaagtctgcaaactgtttgctagataaactcgtgcctaaattgagtgtgacgagcaaggagagaagagacagaaggagataaggttggagggggatgaatgagcataatctaatagaagacatttagaaaacaaactttaaacaagggagaacaggcgagcggagggcaattatccgccccagagagcgggggaagccgtcggaggtctgggaaggggtggaagggaggggactgggagctgcggaagagctgagtgttggggggtgcctttgggactccgtggggagccaagaggggctccccagggcgcgcaagaaaagaggctcggttcccggattgagtgaggttcccgtgctcagccggtcttggaacgcaggcacgtctgaaccgggtggggtcccccgctgcgagggcgtgcgggttttgtgttcccctcggggcacgcaccgccacacttgggctgtttcaaggcgtttgtacctaaaagactagtgtgcacggcgcagcggttaaaggaattagatatttaccagtttgaaataagcctggctaagaagaagagagaagagagacattgaaaagacgaggctgggggaagacttcaaacgaattcatcatttggaatggtggaggggagatttaccagacagtattgggaagttatttagatattaataacacattttcctgaggcgcgaccacagcagccatctgcgctgctctcggagctatttggctgggtaaaatatgggcgtctcaaatgttgggaagagataacgcaatcaggctaaccctggtcctgagactgcatcgcagcgttaaacccggatt

SEQ ID NO: 102688 - DNA, 66 bp, Homo sapiens
  chr1:18969251-18969317
  hyper
tcgccttcccaaatcgaatcaaggcagaacggtgacctaagggggaaacttcgccattagtagata

SEQ ID NO: 102689 - DNA, 1204 bp, Homo sapiens
  chr1:18969555-18970759
  hyper
gggtcgctacagcctcgggaggggtgaagggaagttgtgtgcgccccaagtccagctcaaaagaggccccgagggcattctagggcgccttgggcacgcgtgccaggcccccggtttggcagccgagctgagcgagggtggattgcgaggggcactggggccgccgcggagctctgcgtgtcggctgccagtgaattggccgatttccccagtctgagggtcagcgaacggacctttccatggcttggtcgccctggtcctggaggtgcgctgggcccgagctccggtggagaccaagggaggggtggggagaggcagcggagacagagagccacagaggaggagagagctagaaaattcagagtgagaaagtctgagcgcagcagaagagaatcttgcgcacagtttgaggacgctggaaaatgcggaggcgccgagggaggcgccgagcagcaggaagaaagacaaagagatgcagaatcaccgagagactggccctgggacaggcggatcaggagagccagcgggacctagagacagcccgcgggagagcacgggccgagagggcgagtgctcaaagccgggcagcggctaggggaagataggaggcgggcgagccgcggccgcccttttgatccttcgtggcttcgccttatcagaagcgctttcggtgacatccgcacaaaggcagttcatcatattacagcacgtcccggcggctcgctgcgatcctgccgcttaattagaggcgagcgagctgggccggcagggcgggagggaggccgaccccgaggcgggaggccgggttctgcgctccaacccggggcgctgggcaggggccagcccgcgtgcctggcggtgttgggacgtggagagagggagaggccgggaactgcattcagagcgttgctaaattaacaggccggcccgggcttcactgcccggagagtgaagctcgccgccttccaatttagccgccgccccttctaagttcttgggaagggatggcgctccggccactttcccctcttccaggctgcgaacgctgcggactggagggcgagtaatggggaggcaacccagggcgagctgaaggcttagtgcaactccgggtccaggtcgcacccaccagccccccgcggctgtgttccatcccctcctccgaccgccttgctctccatccgaacccaggtgtgccaggctg

SEQ ID NO: 102690 - DNA, 492 bp, Homo sapiens; identical to SEQ ID NO: 35156
  chr1:18971625-18972117
  hyper

SEQ ID NO: 102691 - DNA, 32 bp, Homo sapiens
  chr1:18972421-18972453
  hyper
ctttcccccgcctcccgcggtcctcaccctgc

SEQ ID NO: 102692 - DNA, 497 bp, Homo sapiens
  chr1:18972900-18973397
  hyper
cggtcttttccgtctcggcggtacctgagcctcagtttccctatctgattagtgaggataagagccgctcctggcctccccaggcagcaggaaattagggccgggaaagcggtttggaaactggtcagcgggtgcaggcgggcagagggtgggaggcgtcaggagttcgtcctcctccccggggcgccccctccccgccgccctctcggcacagtccccgctcgcgcctcaatggccactttagaaatacaaacaactttagaaataaagtaaccaaacccccgaaagcggctttgaagaggcgaatgcctggtggcgctttactatggtgtgggccgaggccccggcctaatcccgctttcatttccaccgacggccgcgggggaagcgctcccggcctcccggcccctcaggaggctgattaggccacaaagagcccccattatcccgagaagaaaaccggggggcggcgcggggcggcgcggcgcggggggagc

SEQ ID NO: 102693 - DNA, 87 bp, Homo sapiens; identical to SEQ ID NO: 35160
  chr1:18978534-18978621
  hyper

SEQ ID NO: 102694 - DNA, 30 bp, Homo sapiens
  chr1:18988344-18988374
  hyper
gtgggcggagggcgccgggagggggaagtt

SEQ ID NO: 102695 - DNA, 628 bp, Homo sapiens
  chr1:19043114-19043742
  hyper
cgtctccctgatcgcgtcataaccctgagaatacctccagcctgggtcctctctccacccactccattctctcaaaccctcatttccctctttgcctgcctcctcccatagctggcctcgcctctacccattctcttccccctaatctctctcattctcctctcctctctcattccgcacccaacaaacacctcttccccctccatcttcagcccctgcgcgccccccttgcccttgccctctcccccacccccgtgtcccctttccgaattcctccgctgctggtgggctccgaggcagggaccgggcgcgggctcccgaggccgggcggacccaagtccagggcgggggttggggcggcggccggagcggggatcgggtctggggggatccgcgcggccgcccctccccgcgctccgccgccgccgccgtcgccgccgcgcctttgatccatggcccgaggccgcctgacagtggaaaatgcggggagacaaaaccactcagtcaaagtgattcccaacaactgtctccccgagataaggacgccctcgggctcggcggcctgcttaattcccgctgcccgggcctgggatcccgagcagccgcgcgcctggccgccccccggact

SEQ ID NO: 102696 - DNA, 92 bp, Homo sapiens; identical to SEQ ID NO: 35162
  chr1:19043756-19043848
  hyper

SEQ ID NO: 102697 - DNA, 224 bp, Homo sapiens
  chr1:19229113-19229337
  hyper
gaaacggatcaccccggctgtcctccgagctcgggatcagccaaagtcccactatatttagcttcggctaataaaaaatatttctagtgccataacgggggcattacacaacacaggacaagggaacccgaaagcgaagtcctgaaatgcatgcgttttcccctcctctctttatggtatgacccgggagagagggcgtgaactctgtcgaccagtcagagtga

SEQ ID NO: 102698 - DNA, 225 bp, Homo sapiens; identical to SEQ ID NO: 35164
  chr1:19229564-19229789
  hyper

SEQ ID NO: 102699 - DNA, 30 bp, Homo sapiens
  chr1:19239663-19239693
  hyper
ggtcccaagaaggccgtctggtaaaaagct

SEQ ID NO: 102700 - DNA, 308 bp, Homo sapiens
  chr1:19283561-19283869
  hyper
gctcctctcccacgtcgcctgccgagagggctccgtttctctgtcctctctgcccgcaatgcccctggccccaaattccttcggatgtgcgcgaccgcggctggaagggctgggggaccacagtatccgaaggtgcatcggcaccccacccccactctagcctggggaggcccagatcgacctttcggggataagagggcgcccgtgccccacgctgcggacccgggggtgggctcctcgaatgctagctgcgggccttgtcctctcgagatcggcccgggcacagctaagcccgctggttcccccgc

SEQ ID NO: 102701 - DNA, 30 bp, Homo sapiens
  chr1:19536207-19536237
  hyper
aggatgagtgcgggcgagaaatgcaaactc

SEQ ID NO: 102702 - DNA, 115 bp, Homo sapiens
  chr1:19536945-19537060
  hyper
agaaggtagcgcagcggggaaaggcgggagagcgttaacttctgagcctgcgcggtgggagttgctcaagcaggtggtagcgacttggcttccgggcagcgggtaaaggtgagtc

SEQ ID NO: 102703 - DNA, 126 bp, Homo sapiens
  chr1:19577870-19577996
  hyper
agccacttatctctcgaatatgttccacacgtacgcaccaatcaaacttgcccacttggtcttcgtagaccgcggccgcaggaatcagcagcgtagcccaaagccagaaacgagaagcccactcag

SEQ ID NO: 102704 - DNA, 223 bp, Homo sapiens
  chr1:19578597-19578820
  hyper
aaggccaactgggtcgggaggcagctcctgaacaccgcccccggctatgcctgctgccgtttcggcccacttttcccaacttcggccctttctcatcttcctgcgctcccgccaccctggctgcctttcccttctttcagcacaggtttgttcccgtgtctggcgttgtgtgtctgcggttgtttctgcctggcatgcttacatcttcgtatggtttgcgcct

SEQ ID NO: 102705 - DNA, 74 bp, Homo sapiens
  chr1:19600652-19600726
  hyper
ctttagggactggctcgggccgcgcccaccggtggtggagcggagggcgcggccaaaggtgcccaacgccgccc

SEQ ID NO: 102706 - DNA, 30 bp, Homo sapiens; identical to SEQ ID NO: 35168
  chr1:19638445-19638475
  hyper

SEQ ID NO: 102707 - DNA, 456 bp, Homo sapiens
  chr1:19639056-19639512
  hyper
caaaggcgaccagcgcggcctctcgagctggcctggccaggagttgccctgccccggccgaccggccccttggcatctgatggcttcgtttttcccgggccggccgggcgaggggccctcgcggcgctggccccagcagctgtcctatcattatccctccaaacaggcggcccgcgccgggctgagtcaccaggagggagctgtggccgaggacgccgaggcctggagtgggtggtagccccgagctgggacgctcctccctccacaatctccccaggtctgcagggaccgagggcctacactgcctcctcccacgccgtgcttagggtaggtttccaaacgtgtaaatggagagtctgagtctggaagtgtgaggggtcccgggcctgggtcacaggtcatgtctaatcaacgcttactgaaggcgcctgtgtgcccggacgctggaggggctac

SEQ ID NO: 102708 - DNA, 30 bp, Homo sapiens; identical to SEQ ID NO: 179
  chr1:19811689-19811719
  hyper

SEQ ID NO: 102709 - DNA, 242 bp, Homo sapiens
  chr1:19812416-19812658
  hyper
ggaccggccctccgcgccccaccccgtgcacgcgctcactcctgcggcgcacccggaactgccgccgagcgcggaccggcccggcccagcccaacccagcccaacccagcactgggggagcgcgccgggagcggggcaggagcccagcgctgccgctcgctacggcaggatctggagcgccgcgctgcacctgagcccgggcacgaattgaggagcctcgggctgacgccatttattcagca

SEQ ID NO: 102710 - DNA, 412 bp, Homo sapiens
  chr1:19923093-19923505
  hyper
gttagtggttcaggcgggaattccaatgcaagaaaccagtgaacgaatgagagagtgagtagggaaagtgaaggtgagtacgttaatgaatgaataaatcaagtctgtaccctctcttgcccgggggatttccagggccaatgtcgcactttggtgaggaggaaaggcctggtcacggcttggggtgacgcctaggaaactgtcagcctcgcaaacccataggcgcagccccaaggtcagggtcacctcgagcctccagacaactcgtcaccttgacgaccaactgaaaaaaccggaagggatggaagcagcggatcatctcgcgatatctggagcgtctgcgcctgccttcctgacctgggacttgtttccagctctcgcgagactttcaggggtcggagcgcgggggccg

SEQ ID NO: 102711 - DNA, 30 bp, Homo sapiens
  chr1:19924188-19924218
  hyper
gttaagtttttctgcgtagtcctttaacac

SEQ ID NO: 102712 - DNA, 33 bp, Homo sapiens; identical to SEQ ID NO: 35172
  chr1:19970319-19970352
  hyper

SEQ ID NO: 102713 - DNA, 285 bp, Homo sapiens
  chr1:19991371-19991656
  hyper
ccggcctctcctccgcgcgtgcgggcccctcgcggcgcctcccgggctcgggagacccggtcccgccgcccgcccggcccgcggccgcctcttcctctcgcagccccgcggcgcttgccgcagtcgcaggcggcggagcagccagagcgccccaggtaccagtgcgggcgggagacggaggcgaccctgctgccgggtggggagggggcgccgcgcggccgctgccctcctcttcccgcggggcctggcggccccggcgaacccccgcgccgcacaggccgtgtg

SEQ ID NO: 102714 - DNA, 168 bp, Homo sapiens
  chr1:20002970-20003138
  hyper
tgaggggtggggattacgatgtgcttcgtctccctgccccagcaacctccttgccatttcagaattagaattccagcttctatgaaaagaccgcgtgtagttggggtttcagcaccatggacaagacaccaactctggaggcctagaaagagccggggctggaggaga

SEQ ID NO: 102715 - DNA, 30 bp, Homo sapiens
  chr1:20126153-20126183
  hyper
cttagggcaggcagcgccagggagcgcgcg

SEQ ID NO: 102716 - DNA, 30 bp, Homo sapiens
  chr1:20126764-20126794
  hyper
gaaggactcggccccgagagtggcatgccc

SEQ ID NO: 102717 - DNA, 30 bp, Homo sapiens; identical to SEQ ID NO: 181
  chr1:20208748-20208778
  hyper

SEQ ID NO: 102718 - DNA, 635 bp, Homo sapiens; identical to SEQ ID NO: 182
  chr1:20512379-20513014
  hyper

SEQ ID NO: 102719 - DNA, 351 bp, Homo sapiens; identical to SEQ ID NO: 183
  chr1:20618134-20618485
  hyper

SEQ ID NO: 102720 - DNA, 83 bp, Homo sapiens
  chr1:20669764-20669847
  hyper
accggagcggggcggcgcgcaggatgccgacctatggagcgagaccttccaccacctggcggcccgcgccatcatccgcgact

SEQ ID NO: 102721 - DNA, 94 bp, Homo sapiens
  chr1:20669896-20669990
  hyper
cggaactgcgcccctcccgcggacggcctccggaggacagccccgctccacagccgctcccccttccccacccgcccccggtgatcctctcagc

SEQ ID NO: 102722 - DNA, 129 bp, Homo sapiens; identical to SEQ ID NO: 35178
  chr1:20692797-20692926
  hyper

SEQ ID NO: 102723 - DNA, 34 bp, Homo sapiens; identical to SEQ ID NO: 35179
  chr1:20692995-20693029
  hyper

SEQ ID NO: 102724 - DNA, 30 bp, Homo sapiens; identical to SEQ ID NO: 186
  chr1:20693318-20693348
  hyper

SEQ ID NO: 102725 - DNA, 30 bp, Homo sapiens; identical to SEQ ID NO: 187
  chr1:20802803-20802833
  hyper

SEQ ID NO: 102726 - DNA, 30 bp, Homo sapiens; identical to SEQ ID NO: 35182
  chr1:20803070-20803100
  hyper

SEQ ID NO: 102727 - DNA, 514 bp, Homo sapiens; identical to SEQ ID NO: 188
  chr1:20810323-20810837
  hyper

SEQ ID NO: 102728 - DNA, 324 bp, Homo sapiens; identical to SEQ ID NO: 189
  chr1:20810864-20811188
  hyper

SEQ ID NO: 102729 - DNA, 1093 bp, Homo sapiens
  chr1:20811219-20812312
  hyper
cggatcgcccaggcctggcaaaccccctcccaagccaagtaacaatgaaaagcccgtgcgacccgaacaccctagccttccccgcaggaatgggatcctccccacgcaggtccccacgccgtcccctgggggtccctgggaccccctccccacagggttatggagcgagtgcagctgtgactacactgcgcaaaaggcgggggtggggggcgcaaatcaaaaagcaaactttgccgcgcgggtggagacccccagctgctgctagaagccgccacgcccccagggtgacccagccggggatccggcttagggggacgcgttcctgcgacccgcttcagccggacccgcagtgcgggatcccccaattctgcaagaagggattccgtcaggtctgaacgggctccagcgggtgggagacctccgcaacccttgttcaggccgcggcgcgggaaaaagggggtgtcagacaagggggccgcgaactcaccccgcttgctccggccgatctggcccagcttgggcggccgcttgttctgcccggcgccgaagaagttgttggtgtcctgcaggcggcaggagaagatctggcccacgtcgccgccgtcgccgtaggggctcagcttctcgtcgccgtagggcagcacctccgacatggtcgcgtccgggggctccgccgcggcgcctcctccgcccgcgtccccgcccgcggcggacagggtcagcggcgctggggccgggggcggccggccggggacggcccgcgggctgctgcggcggtggcgccggcgagaggccgggggacgccgctagggcaagagcgcggcactcgcgcgagcggcccggagagcgcccgcggctgcgctgcgctgcgctccggctccgcgcgcgagtggctgctgctccgccagaggcgagcaggactcacatcctcggcgcgctggggctctgggcgggggccgggccgggcggggccgcgagccgggagggaggagacgtccctgcgagcccggagggcgcgggaccgaggagggcgcaccccgggagccgggcgggccggtcctgcggcgagtgcgggcggcggcgccggttcggg

SEQ ID NO: 102730 - DNA, 141 bp, Homo sapiens; identical to SEQ ID NO: 35187
  chr1:20812695-20812836
  hyper

SEQ ID NO: 102731 - DNA, 147 bp, Homo sapiens
  chr1:20813049-20813196
  hyper
tgcggggcaaagatcggagggctccagggcgacccgcggacatagcctcccccgccatctgcaaaccggggagcccttcctccccaccacacttgctccccaattcagaccctgagggcccagccactggggcctcacactctcctc

SEQ ID NO: 102732 - DNA, 173 bp, Homo sapiens; identical to SEQ ID NO: 35188
  chr1:20813270-20813443
  hyper

SEQ ID NO: 102733 - DNA, 30 bp, Homo sapiens; identical to SEQ ID NO: 35189
  chr1:20834486-20834516
  hyper

SEQ ID NO: 102734 - DNA, 502 bp, Homo sapiens
  chr1:20878726-20879228
  hyper
gcaggaatcgtggggcgcgggggttcccgaatgcgccaaggggagcttggagaccagtagcgaggccaaataaattagcatggacgaagccctcctgtatatttcaggggattcctagtacttaacagccctctctacccccacccctccactaataatgattaaacccgttccaccgcgcctgtgcagggtcccgggcagcgcgagcctgcgtggggggaggggagaagagggcaaggggaggggacaagagagctagcggtcccgcccggtgatgtaggcagcccggggaggtggagccgcgacgcctgaaggagtccccaccgcagccgcgctctcggtctgccccactaagcagccgccagcggctccggcgacccaaattgcggcggcagggaccgcggaaatcccaccgtttgggcttggtggacgtccagcccacctcacccccagccccggcccctcctcgcttcccagacggctggagacactcccgggaaaa

SEQ ID NO: 102735 - DNA, 181 bp, Homo sapiens; identical to SEQ ID NO: 196
  chr1:20879255-20879436
  hyper

SEQ ID NO: 102736 - DNA, 1252 bp, Homo sapiens; identical to SEQ ID NO: 197
  chr1:20879462-20880714
  hyper

SEQ ID NO: 102737 - DNA, 541 bp, Homo sapiens
  chr1:20915862-20916403
  hyper
aggcagtggcaagagcgcggctctgtcccttcttcccccagtctccgctggaatgttcctaccctgccgactgccccagaccgcgctcaaatgtggcttaaatccagggtctttcaatgcttagaggactgggatgaggaaggaagttggatgggaggcaggaaggggaggccataaatcaaaaacatcaacagtcctggggtgcaggcagggagagcgttcgtgctttcccagcctcggatatgtctggcaccttactgaggcttccacaacactaagtccacacctcctgcccactgacctaagtgttaatgctcgtctttagatgaaactacggaggtctcgagaggtgacatgacttgcccaaggtcacacggggcgctggtggtgaaaccctgggctggaggttccccaaagccctgctctcttccttccacccactgtgctcagtgctggccagggtggtgacgtgtttgtcgggggtggtcggtggagaatcttggaggagaaaagccagctgggctttcggagtccagcagtg

SEQ ID NO: 102738 - DNA, 93 bp, Homo sapiens
  chr1:20959848-20959941
  hyper
aagtcactgctagaggcgccagtaccagcatagcgcccccacgcgccgagtcggggaactgccgcgggggccggccccgcccaccagcgcctg

SEQ ID NO: 102739 - DNA, 409 bp, Homo sapiens; identical to SEQ ID NO: 35196
  chr1:20987843-20988252
  hyper

SEQ ID NO: 102740 - DNA, 206 bp, Homo sapiens; identical to SEQ ID NO: 35197
  chr1:21044016-21044222
  hyper

SEQ ID NO: 102741 - DNA, 180 bp, Homo sapiens
  chr1:21044549-21044729
  hyper
gttgctgggcaacgcccgtggcgtcacaagagcggccccgggaacgccccgcctggcccgcgagcttcgcccgagtgatccccgcagccacgcgcggccgcttgcgggaagcgccagccctggctgggctcctttcgcgtccgctgccttctcgaatccgcacagtcccagttcagagat

SEQ ID NO: 102742 - DNA, 30 bp, Homo sapiens; identical to SEQ ID NO: 35198
  chr1:21056767-21056797
  hyper

SEQ ID NO: 102743 - DNA, 1143 bp, Homo sapiens
  chr1:21058206-21059349
  hyper
cgaggcccctgaggggcgggcgcgggggtgcgaagcgctccagagtgggctgccggtcccgctgcgctacctcgctcggggcgctgcggggaacggccaggggccccggcagagtccccggacccaggagcgtgctgggctccgctgcaggggacggaggaggctacagtggcagggagggcagatgacgacggagcgggtgacgggcgcccctcactcccgagaccctcccgcgcccgtgtcagcgtaccaagccccccgcccctgcccggctcccggcgctcgctcaccgcctctcgagtccggtcccggccgctccggcccgcgacccccgcgtctcccgccgccgcagccccgcgcctgggtgcccgcttcccgccgcccccgaccccggtccccgcgcccccacacgtggccgcgggaaccgacccccggatcacctggcggcggcgacccgcctcactcaccaatcggcgcccgcggagccgctccgctcggccgcaccacccaatcagcggccgcgaggggccctggcactgcccacgcccggcgctccgcctggaagggcgggaggggctcgcccggagctcagaaggcacctcctcccgggctgggggcgctgaatcccccgcgcctcactcacgggtccctcctcctggagggcctctgcccctcccctctctggctggctcctccgcgtcatccgagccgcggctaccgcaccgcctcctccgggaagccttccacgaccaccactcacgcttcattctctgcagagcccttgtgactccgttgctcgcctgtcatccctctcctcttactcgaggacaagtgacactggaccggagtgtctccgttcccagtgtgaaggatcgagcctggctcggaggaggcgctcagggtggttcgggcccggcccttgtgagtggagggtcgttgcgcatcctcctcctcactttcttcctgccgggacgttctcagccgggaactgacagatcctgcttagcccggggcccagcactgagaaatctgggaaggaacgttgctcaccgcacatgggccgtggccccatccttcgggccctttaggtggggaatcgggctagcagctccagccacggcactgggacggggagcgctatcg

SEQ ID NO: 102744 - DNA, 30 bp, Homo sapiens; identical to SEQ ID NO: 35200
  chr1:21112706-21112736
  hyper

SEQ ID NO: 102745 - DNA, 30 bp, Homo sapiens
  chr1:21112941-21112971
  hyper
cacagcggcgaacgcgcacggcgggggaga

SEQ ID NO: 102746 - DNA, 266 bp, Homo sapiens
  chr1:21503349-21503615
  hyper
catggcgctgtggccgcctccagcagtccggcaggacggctgctcggaaaacttcggactttttcggaatggctcgggaaaccgagggtgggaagcctcttcggctctttccggagactgctaggggtcgggattcttcggagacgctcgggtgcgtcctcggccgccgttcgggagggctcaggggctaactcgcttcctcggcaaagatcggcgagggaggcttcgctggcttacagcggcgcgggtgcggggcggagggaaag

SEQ ID NO: 102747 - DNA, 371 bp, Homo sapiens
  chr1:21563146-21563517
  hyper
aacaaacaaaaaaaccggcctctccttcccccaccctcctctatctgtgctggacgccgcagcaccccctccaagtgcctggccagcctcaccttttccttggctgattttcgggtttcctcatccatccacttcagggtgctcaggctttcctcaaatgccttcttaatctccaggatgatctcggtggcctgaggagatacacatcacagcagtaaggtctgcgcactggtctcaggtaaatgcaacaggcaccccgtgcagaacaatgatggccagagattaaactcaattttccaagcgtcaggctgggtgagaaggggagccacagctgtgcttccaaaccacgctcctaacgtgaacaccctgca

SEQ ID NO: 102748 - DNA, 30 bp, Homo sapiens
  chr1:21617085-21617115
  hyper
ccttccccggaggtcgggagtgggggcccc

SEQ ID NO: 102749 - DNA, 95 bp, Homo sapiens
  chr1:21672238-21672333
  hyper
cttgccgagaccggcgttgggagctagcagaaccgggaagaggctcgattgtgtccggtggggccgccgggagcctcggcgacctttgtctcctg

SEQ ID NO: 102750 - DNA, 30 bp, Homo sapiens; identical to SEQ ID NO: 202
  chr1:21766353-21766383
  hyper

SEQ ID NO: 102751 - DNA, 30 bp, Homo sapiens
  chr1:21766834-21766864
  hyper
ttctcaggtgagggcgccgcgccaggctgg

SEQ ID NO: 102752 - DNA, 180 bp, Homo sapiens
  chr1:21835552-21835732
  hyper
gaaggaagatgccgacggtaaagacaaaacaggagacgcgcgcaaggagcaggtcagagcccaggctcgctgagagaggaagggctgggctggggcagcccggaggcagagagaccgagagtgcggggcgggcgagggacgccagggccgcgtcaccccagcccgttcctagctccgctc

SEQ ID NO: 102753 - DNA, 392 bp, Homo sapiens
  chr1:21835765-21836157
  hyper
cggcccgcggggcgcggggctcgggccgggggcggggccggggccgggctggggaggggttggggccgggggcgggggagggggcgggctgcccgggcctcactcgggccccgcggccgcctttataaggcggcgggggtggtggcccgggccgcgttgcgctcccgccactccgcgcccgctatcctggctccgtgctcccacgcgcttgtgcctggacggaccctcgccagtgctctgcgcaggtaaggattcgacgctgccccgcgccctggttccccagggccccagcggacgtggtccatccccttctgcatcctccgctggccccgtggttgaactttaatggcagggccggggtctccagcgccacgccgcccacagcagcccat

SEQ ID NO: 102754 - DNA, 141 bp, Homo sapiens
  chr1:21836216-21836357
  hyper
cgcgctctgggcgggacaggagattggacgtggcgcccgcggagccggcgaactcaggggaccgcgctcgggaccgccctgcagtcccagggtctcctacctcccgagccgctgcctgggaccctgcgctctgtctgggca

SEQ ID NO: 102755 - DNA, 30 bp, Homo sapiens
  chr1:21934573-21934603
  hyper
ccaccccctcagccacgccccttctgccag

SEQ ID NO: 102756 - DNA, 30 bp, Homo sapiens; identical to SEQ ID NO: 204
  chr1:21949206-21949236
  hyper

SEQ ID NO: 102757 - DNA, 30 bp, Homo sapiens; identical to SEQ ID NO: 205
  chr1:21985727-21985757
  hyper

SEQ ID NO: 102758 - DNA, 30 bp, Homo sapiens; identical to SEQ ID NO: 35209
  chr1:21985967-21985997
  hyper

SEQ ID NO: 102759 - DNA, 91 bp, Homo sapiens
  chr1:21996300-21996391
  hyper
cctggcagaggccacgcggttgaccctcgccagcccattcgcggctcttggactttgtctctggactgggcagctcgcccccgccccagcc

SEQ ID NO: 102760 - DNA, 30 bp, Homo sapiens
  chr1:22109542-22109572
  hyper
caaggaggacctggcgctccttcaggcagc

SEQ ID NO: 102761 - DNA, 30 bp, Homo sapiens
  chr1:22109833-22109863
  hyper
agcgtctcagcccccgttcagggcggcgca

SEQ ID NO: 102762 - DNA, 30 bp, Homo sapiens; identical to SEQ ID NO: 35211
  chr1:22110274-22110304
  hyper

SEQ ID NO: 102763 - DNA, 522 bp, Homo sapiens
  chr1:22140662-22141184
  hyper
ccgcatcttagggtttcgaataagggattgtagatttgaattaaattaaattaaatcatttaatccttacaatcattctgagattgattaatcatccccattttaccgatgaggaaaatgaggctcagagagggcgagtaactcgcttgggatcacacagcgggcaggggacagagtagagttcggggtcgcgccgcgcggctccagtttccgtgccttccgctgcagccgacctggcggaactgtgcgggcagacgtggcagggggacgggctgctgctgcgctcgcacgccgcatcgcgcaggttctacttcgtggctccggacaccgactgcgggctctgggtgcaggcggcagcccccggcgaccggatccgcttccagttccgcttcttcctggtctacagcctgacccccgcgcccccggcgctcaacacctcctccccggccccggccgacccgtgcgcccccggctcctacctgcagttctacgagggcccgccgggggcgccccggcccctgg

SEQ ID NO: 102764 - DNA, 51 bp, Homo sapiens; identical to SEQ ID NO: 35213
  chr1:22263554-22263605
  hyper

SEQ ID NO: 102765 - DNA, 102 bp, Homo sapiens
  chr1:22350997-22351099
  hyper
cttcagggttaagatcggggctgcagtggttagcatctctgcttcctctagccggctgtgtcattgaacctgtgtgatcagacgcaaaccagatcagtatga

SEQ ID NO: 102766 - DNA, 221 bp, Homo sapiens
  chr1:22351398-22351619
  hyper
taaagcttcagttcttaaccatcaggcgacagtgcgtagtctggtagcaactggaaaagtcctgctgagatttagcctcccatacacacagagtcccaccccggacaggctgtatcaaccccccacggccatatgcccactgctgtttgcgtacaatgaggcgggacctatagactgtatccactgactcatctggagtgattccgcggggcgccaataca

SEQ ID NO: 102767 - DNA, 30 bp, Homo sapiens
  chr1:22352081-22352111
  hyper
tcctgatctttcctcgtcccccgctccccc

SEQ ID NO: 102768 - DNA, 46 bp, Homo sapiens; identical to SEQ ID NO: 35215
  chr1:22469042-22469088
  hyper

SEQ ID NO: 102769 - DNA, 30 bp, Homo sapiens; identical to SEQ ID NO: 35216
  chr1:22587712-22587742
  hyper

SEQ ID NO: 102770 - DNA, 169 bp, Homo sapiens
  chr1:22746911-22747080
  hyper
tttagtaagccgatacgagcactgatagagagcgagagaaaaacacagatgggtcggaaaaggaaagctgaacaatggctgggaaatggggaaggaagctctggggggtccagtaaagggaccggcagtccaggcttctctgggcccctcctcacgtcccagcctttgc

SEQ ID NO: 102771 - DNA, 30 bp, Homo sapiens; identical to SEQ ID NO: 35217
  chr1:22778427-22778457
  hyper

SEQ ID NO: 102772 - DNA, 89 bp, Homo sapiens; identical to SEQ ID NO: 208
  chr1:22889706-22889795
  hyper

SEQ ID NO: 102773 - DNA, 30 bp, Homo sapiens; identical to SEQ ID NO: 35219
  chr1:22890033-22890063
  hyper

SEQ ID NO: 102774 - DNA, 30 bp, Homo sapiens
  chr1:22933800-22933830
  hyper
tctggaccccggtggcgggggctggttgcg

SEQ ID NO: 102775 - DNA, 30 bp, Homo sapiens; identical to SEQ ID NO: 35220
  chr1:22953268-22953298
  hyper

SEQ ID NO: 102776 - DNA, 30 bp, Homo sapiens; identical to SEQ ID NO: 35221
  chr1:22999431-22999461
  hyper

SEQ ID NO: 102777 - DNA, 31 bp, Homo sapiens; identical to SEQ ID NO: 209
  chr1:23000015-23000046
  hyper

SEQ ID NO: 102778 - DNA, 575 bp, Homo sapiens
  chr1:23036965-23037540
  hyper
tcagccgcgccagacgctctccggctttgcagcattcaataaaaattgagaaacatttgggctgaaatcgctgctttatctggaggagccacagcgccgggagagaccactgctgcgcggggggagcccggggtctcagtggcccgggcacgcggggtcgccgcgctccagcgcccgcgctgcccccgggtgaccctacgggcgcggtgtggggacccgggctcgcggcggcgcgcggccgccgggggccgggacgcgcgcggggggcggtggcctggcgaggctccccccgcgcccgcggctcaggtgggccgtgcccagcgctggcggagcccgggtccccgttctgcccgggctggatggctcattctgctggctgcgcggtggcggcggctgtgtgtgcgccgcgccttgccgccccccctggccccccgagcccggggcgcgcgctcccgcccgggccgtccgggccccgcggcgccgcggcccgaggccccgggaagcgcagccatggctctgcggaggctgggggccgcgctgctgctgctgccgctgctcgccgccgtggaaggtga

SEQ ID NO: 102779 - DNA, 763 bp, Homo sapiens
  chr1:23037595-23038358
  hyper
cgccggcgcccacctccgctccgcggcccgcaaagtttgcccgggggccggcgccgggcgcaggtggccgcggggaggtgtgtccggccgcgccgggaggagcgggccccgcgggcgcccggggagcggcgggcgctgattgactgtgccaggaggaggcgaagggaccatcttgccgaggctttgtagccagcccggcgagcgccgcccagggctgggggctgcccacgcgcgctcgccgcccccggctcgggcagccgcctcgcgccggcctggtcttgctccgcacagggtggaggggcgcgggcccggccgtggcggggggcggggggggcgccggcgctcggtcggggctggaaagtttggcagggagcagagggagggaggcaccgcggccggccggggtgggggctcccggcccgcgcccccgagatggggcccggcgccccggagagcagggactggcagagtggaagggagcgcgccagcccccgcgtcggtgcctgcccatcgcccgcggcgtacaatggggtcccctccccgagaggactgcgcgggggatgggtctgtgggcatctctccgccgcgcaaggtctccgggcacccccgccggccaccgccccgcggccgcggcgctcagcgtggcggctggagccccgggaactctccagctgccgccggggccggaccagatgctcttgccatgtgttggccttggccagggtcgcgggccctctccccgtggcctcgtgtattggtacca

SEQ ID NO: 102780 - DNA, 30 bp, Homo sapiens
  chr1:23279892-23279922
  hyper
ggggtgcgcggtgggcggcggagccgggcc

SEQ ID NO: 102781 - DNA, 48 bp, Homo sapiens
  chr1:23280131-23280179
  hyper
acggcgtgcccgtctcgttggcgaagtaggcgcccgggcaggccagca

SEQ ID NO: 102782 - DNA, 169 bp, Homo sapiens
  chr1:23280211-23280380
  hyper
cgcaggagccgccggggcccgccgcccaggagcgccacggccagcttggccaggtcggcggcggtagagtacatctggcccgacggccggtaccagcccaggtcatagagtggcgccggccgcccgctgccgtagaagcccgcggccaggcgcgcgcgcacgtcgggcg

SEQ ID NO: 102783 - DNA, 136 bp, Homo sapiens; identical to SEQ ID NO: 35225
  chr1:23345694-23345830
  hyper

SEQ ID NO: 102784 - DNA, 182 bp, Homo sapiens
  chr1:23346188-23346370
  hyper
gggtctgaggtggccgcgcagcccgcgggcctgtcgggcccagccgaggtcgggccgggggcggtgggggagcgcacaccccgcaagaaagagcctccgcgggcctcgccccccgggggcctggcggaaccgccggggtccgcagggcctcaggccggccctactgtcgtgcctgggtctgc

SEQ ID NO: 102785 - DNA, 30 bp, Homo sapiens; identical to SEQ ID NO: 35227
  chr1:23347437-23347467
  hyper

SEQ ID NO: 102786 - DNA, 30 bp, Homo sapiens
  chr1:23494457-23494487
  hyper
ccggccccgctcgccggcgtccccctgcag

SEQ ID NO: 102787 - DNA, 168 bp, Homo sapiens
  chr1:23495360-23495528
  hyper
gggccaaattgtgacgtcagcgttctggaaggcggggtctttgtgatgggcggggttgtctgtaggccccgccccctccgtcctttttttcccttcccaggacttagactccaccaagtttttattgcctccgtagctgggtcctgtgctaggcgccctgggaaatcg

SEQ ID NO: 102788 - DNA, 30 bp, Homo sapiens; identical to SEQ ID NO: 35229
  chr1:23504131-23504161
  hyper

SEQ ID NO: 102789 - DNA, 30 bp, Homo sapiens
  chr1:23504488-23504518
  hyper
cagccaggaaatcgcgtccttgttaattca

SEQ ID NO: 102790 - DNA, 149 bp, Homo sapiens; identical to SEQ ID NO: 35230
  chr1:23543644-23543793
  hyper

SEQ ID NO: 102791 - DNA, 52 bp, Homo sapiens; identical to SEQ ID NO: 35231
  chr1:23543840-23543892
  hyper

SEQ ID NO: 102792 - DNA, 30 bp, Homo sapiens
  chr1:23670231-23670261
  hyper
tgggatctgcaccccgccttccgcccccca

SEQ ID NO: 102793 - DNA, 146 bp, Homo sapiens
  chr1:23670872-23671018
  hyper
gggcaatcgcttggcgaggcggcctgacaggcagctcagacgaccagtagtatccaggcaaaacggaccacgccggacgactcgagagccaatcgatgaagctgccggctgaaccaatgagggtgctcagcgcccctggctggggc

SEQ ID NO: 102794 - DNA, 30 bp, Homo sapiens
  chr1:23671347-23671377
  hyper
ctctagtgagcacacgatttaaggatgatt

SEQ ID NO: 102795 - DNA, 258 bp, Homo sapiens
  chr1:23694765-23695023
  hyper
ggctgggtccctcccgcgccgggggttagaccgctgctgtctcagggaggaggtgctcagctcagcccagggaacgcctccgctctgccatctcgaggccgggtcctttccggcagctgcctcagccaatcagcgagcgaagttcgtgaaccactctgccaatcagaggcggaacactatgcccgcctcccacagcctggccaagagcctctagtgcgcctgtgcctgcccccatggcctgccgggagttggagttcc

SEQ ID NO: 102796 - DNA, 213 bp, Homo sapiens
  chr1:23695332-23695545
  hyper
ggagactcggaggccgcgctggaactttgagccccgcccacgcactacatctcccaacagcgcctgcggcggcgcggctctgtacgcaatacaactcccgagaggccccgcgccgccccgcgccggggcgactcgggagtgcggtcggcagtagagcctggcggtgtcttggcttcggcgctttaaccctgtaggggcgtgcgactgcgtcct

SEQ ID NO: 102797 - DNA, 234 bp, Homo sapiens
  chr1:23696194-23696428
  hyper
ggaacgggaggactcgcagctctccctttccccagccaggatgagggaattagacaatggaagtcgagcactggggaaagcaggcattctgcgtggggaagagctcccagctcgctgtagccttggagagggaagtgatggaaaaagaatatagcagcttattagggactcccaccctcttcaagttataaatatccccagaaccttggctacgtgcccggaagcctgttgtct

SEQ ID NO: 102798 - DNA, 258 bp, Homo sapiens
  chr1:23748953-23749211
  hyper
tgagacttcagcaaccggcagtaaaccccgggcctgagctgcaacgtggaggatccgtcttattacaggaagtatgtcctcctctgcctaaccactgctgggcgggtccactttcactcccagagcaggccccacctttctcggccagacgcccagagctccatgcccacccagacactgccgagagcccaggcgcagacgtggctgtaaactggctccatgctgcagggaccctgcggccagacttgcatcttttca

SEQ ID NO: 102799 - DNA, 30 bp, Homo sapiens
  chr1:23751180-23751210
  hyper
gggggcaggaggcgcgaaggcggagggcgc

SEQ ID NO: 102800 - DNA, 30 bp, Homo sapiens
  chr1:23810235-23810265
  hyper
gggcacttggggtacgtcccccgacctgtg

SEQ ID NO: 102801 - DNA, 63 bp, Homo sapiens
  chr1:23857273-23857336
  hyper
cccttgcagcatagcgagtaaggcgccccctacccaaaagggcttggcgcgcccgcggacacc

SEQ ID NO: 102802 - DNA, 198 bp, Homo sapiens
  chr1:23857852-23858050
  hyper
cccccccggaaagaacgcgtcctcgaggcggcgattgcaacactagcttcgctgcttaaaggggcagccacacctgctgttggtgccgccagccgccggccgcgctagttagcagccggcgagacggagacagagggtggttccgggattcacagtgcagaggcggccagagcagtgcacagcgccccgagaaatggg

SEQ ID NO: 102803 - DNA, 30 bp, Homo sapiens; identical to SEQ ID NO: 217
  chr1:23865146-23865176
  hyper

SEQ ID NO: 102804 - DNA, 719 bp, Homo sapiens
  chr1:23884854-23885573
  hyper
ggcaggagaggttcccggggtcccaggcagaacgggcgccagcacctgcgttctgggcgggggaggaaagaagaccaaggagcagtcagtttccgccgagcgtgccgaggcgggggccgtccgcagactggccggcgccagggaggaaacttggtctgtacctccagctgataactccgcgccccacgctgcccccacccagttggcgccaaagaccacaggcggagcttgcgctacccctcctacttggaattgacactagctgggagggggctgccgaagacagctccctatacaacatggaacagaaagacttgtatttagtcggacccatgtctactttgccagaccctcggccactgcgggagggcagggcccaggcgcatttaaggcttaaatgcacatcacatggaaactgactctgccattcatttgatgcaaccatgggcaagtcacttgtccctctctggcctcagtttccctaaaccgagtgagtggcaatttttcaaaacgtctgccaactccaggacttgccgtttaaacctccctctccaagagaggagatactcacctggaggtgtcaggacacggccgagtcagtggcaaaagctccttttgtcgttggagatgacaagttccggagtgagctcggctgtctgattagaggaaaagagggaagagttacgcgaggcaatcgggagctccgagggtcccgcagc

SEQ ID NO: 102805 - DNA, 71 bp, Homo sapiens
  chr1:23889003-23889074
  hyper
tcctcgggcagtcaccggccggcgactgcctcccccaccaatgagcgccggacacccgagaaaggggcggg

SEQ ID NO: 102806 - DNA, 30 bp, Homo sapiens; identical to SEQ ID NO: 35240
  chr1:23946279-23946309
  hyper

SEQ ID NO: 102807 - DNA, 83 bp, Homo sapiens
  chr1:24018072-24018155
  hyper
aggacgtgctgattcgggagctttcaaaaactatttttggaaaacccagatcccggtcttcagccagcgtcgcctgcagtggc

SEQ ID NO: 102808 - DNA, 204 bp, Homo sapiens
  chr1:24069634-24069838
  hyper
cggtggcctcattccgtcttgaagtagaccctggagaggtcttccaggcttgggctcagcacgcgagcacagggagcgggggtgccggcggcggaggcgcgtacggcccgagcagcccccagcccccagcgcgcacacttgggccaggggcgcgaggagtgcgcggccgccgggtgggcgctggggagcgggccctgggggcgg

SEQ ID NO: 102809 - DNA, 30 bp, Homo sapiens
  chr1:24104443-24104473
  hyper
tcaagctgtaaccccgctatcaagaaagtg

SEQ ID NO: 102810 - DNA, 30 bp, Homo sapiens
  chr1:24104783-24104813
  hyper
acctgggaggcgcgcgtcctacgtcagttc

SEQ ID NO: 102811 - DNA, 30 bp, Homo sapiens; identical to SEQ ID NO: 35242
  chr1:24105247-24105277
  hyper

SEQ ID NO: 102812 - DNA, 96 bp, Homo sapiens
  chr1:24117383-24117479
  hyper
gatgcctctccttccggtcggccctcctccaggaggcgcatgggtggtggtagcaagtgggagtcttgggtgccctgtctcgaatctacaaggtgg

SEQ ID NO: 102813 - DNA, 381 bp, Homo sapiens; identical to SEQ ID NO: 219
  chr1:24126328-24126709
  hyper

SEQ ID NO: 102814 - DNA, 4 bp, Homo sapiens
  chr1:24127245-24127249
  hyper
tcct

SEQ ID NO: 102815 - DNA, 16 bp, Homo sapiens
  chr1:24127261-24127277
  hyper
cgggccctttaagtgc

SEQ ID NO: 102816 - DNA, 30 bp, Homo sapiens
  chr1:24127797-24127827
  hyper
ctgccgggaagggtcggtctgcactctgcc

SEQ ID NO: 102817 - DNA, 30 bp, Homo sapiens
  chr1:24151760-24151790
  hyper
gagagcagtcaccacgggccaagcccccaa

SEQ ID NO: 102818 - DNA, 239 bp, Homo sapiens
  chr1:24194292-24194531
  hyper
gaccggcagctgcgcgccccagctggccgcccagccccacctcctgtttgccgcccgagccgggaaggggcgccgctccccgggaccacactcacttggcgcccgcggcctggaagaggtcggcccactcctccgggtggaagaagcgcgcagtgaactgcggtccgaagtcggcgtagctgaagccgggcgggtagttgtcgcgcatgaagcgctggtactgcggccgcccctcgccc

SEQ ID NO: 102819 - DNA, 268 bp, Homo sapiens
  chr1:24229166-24229434
  hyper
agtgcacgtcggccacgagctcgttgttgaacatgagcgcgttcctctcgcgcagcgtgggggaccgcgccatttggggctctccgggtggttgttgccaagtgtgggctgcgcgggcgcgggcgcgggggcgcggtgcaggctgcgctgcccggccttcctgcccacggcggcgccggcgttgctgtgggctaggaccgcggccgcggcgctggcggggacgtagagctccgccgccatcctcgagggcggggcgtcgggggcagcc

SEQ ID NO: 102820 - DNA, 30 bp, Homo sapiens; identical to SEQ ID NO: 220
  chr1:24377790-24377820
  hyper

SEQ ID NO: 102821 - DNA, 207 bp, Homo sapiens
  chr1:24477068-24477275
  hyper
aggttccctgagctcggttcgggtaagaccgcgcccagccgccctgacataccaccaccgtccaggaggtggcagcagacaggttcggagaagctcaagggcggcgacccagcagtaggaggaggaggagggcgggcgggtcacctggagaggacgtccttccctgtttcctggaaaggaccagatacccgaagctggccacaagcg

SEQ ID NO: 102822 - DNA, 26 bp, Homo sapiens
  chr1:24477646-24477672
  hyper
cgctgtcaggaataacgctcaaaatc

SEQ ID NO: 102823 - DNA, 229 bp, Homo sapiens; identical to SEQ ID NO: 35247
  chr1:24513458-24513687
  hyper

SEQ ID NO: 102824 - DNA, 828 bp, Homo sapiens
  chr1:24648323-24649151
  hyper
gcgccgggcctttcatgtggtcgcagcgctctgggtgcctggagcccgcagccctgggcagccccgggctaccgcagggcgcaagggatcctgggctgcggccgagggcgccggaagtcgccgccgaccgcctgggtctcgcaggaaaacagccggcgcccgcgagctgcccagcgtcgggttttcctgaaggtgcgtcggggcccccggggagctggagccgcaggcgacctccccggtgacctgttgttcccctctggagggccggccggcgctccaggcaggccccgttgacagcccaggaagggagagtttcgccgcaaaggggcttggcacacagtaggtctaaggcaccgaggcaggagcgtcccccgcggcctcgctccctgctctctgggccccaccgctgccgcctggagtctcccctcagcctcgcagagacgcgactcggttgggggaaggggactagaaccgtcgcagtcctgaccgcggccgccgccgccgttctatctgatctccaggagcgccggctccagactgcctggagcgctgaaagagttaatcaggaacgcctccccgctgtggttttgtggtcgaaaccatgattgccaggagcaaatttttgtcgtgcacgaggtgtgttattaaaagtcggagctacgctgctgctgaatgaaaagttaaaagccctctttgagttcgggctgtaaaactggcggactgggccgagaggcttgagccaaccctaacggcggcggcccgggcggcgcgggggtcctgcggctccgccagctgctgggagcgggcaggctgcgcagtcccagcagt

SEQ ID NO: 102825 - DNA, 59 bp, Homo sapiens
  chr1:24739843-24739902
  hyper
cctcccaacttttgcgcactcgcggagcctgagccagaagggtcggacgcccacgcccc

SEQ ID NO: 102826 - DNA, 30 bp, Homo sapiens
  chr1:24740224-24740254
  hyper
aggcctaacattcgcgagtccaccttccgc

SEQ ID NO: 102827 - DNA, 261 bp, Homo sapiens
  chr1:24742003-24742264
  hyper
gctctctgggacagcgggagagggggcaggggagtcgccgcaccattcttcctgtggccgctagggggtccccgctccaggtgagcgccaagctctagccccaggtcgctcccttatgcttcaagcaagctttgcagcgcagccaattgccaggggctgtcccgcctactccccgtcctcgcagccacttgcctgcgcgaaatgcctgccaacttctgactggcaggcagtctggcaaatcaaatcgcgacctttgaaagc

SEQ ID NO: 102828 - DNA, 30 bp, Homo sapiens; identical to SEQ ID NO: 35251
  chr1:24828796-24828826
  hyper

SEQ ID NO: 102829 - DNA, 30 bp, Homo sapiens; identical to SEQ ID NO: 223
  chr1:24829136-24829166
  hyper

SEQ ID NO: 102830 - DNA, 809 bp, Homo sapiens; identical to SEQ ID NO: 35253
  chr1:24882100-24882909
  hyper

SEQ ID NO: 102831 - DNA, 95 bp, Homo sapiens
  chr1:24969451-24969546
  hyper
cgaaggatgggtcacgtcacattgcgcgaacaaggatggtcacgcgccacaaaaggacttgcagggcggggcgactcgacggccttcccttttgc

SEQ ID NO: 102832 - DNA, 173 bp, Homo sapiens
  chr1:24969955-24970128
  hyper
cctcctagagccggcgcaccccccccccccccgtgcgctgcggcggagaccggtgcgcccctgcgcagtctcctcctccggaatggtcccccctacgcggcggcgacggtggccggaaaatggcggcgggaatgggccgggatggtacctcgctgcccgcctgcctggcgggg

SEQ ID NO: 102833 - DNA, 339 bp, Homo sapiens
  chr1:25071296-25071635
  hyper
aggtgttccccaggcgatgaaaactttccagtaagttgtcttggaaaaggcaactccgcgtaatagagggacttggggaggtagccgctgcgggaaagggcgatgagtcctggggtgctgcagcgggggagtgggtaggaggcgcctcctagcttccccagggcggccgaggcatgaggtcacctggcacagcaacagcagcagctgcggaggacgcgcaggcgctgcggcgggaggcagtgtcaggctcgggcccctggggaattcctcccctcctttcccccccgcaccagtcccctagagaggcgtacccgggtcccgcccgccagagcctgagct

SEQ ID NO: 102834 - DNA, 30 bp, Homo sapiens
  chr1:25071874-25071904
  hyper
agtggcgcggggggcgtggggcggtgctga

SEQ ID NO: 102835 - DNA, 30 bp, Homo sapiens
  chr1:25174489-25174519
  hyper
cccacctcctgctgcgagaggcatcagccg

SEQ ID NO: 102836 - DNA, 334 bp, Homo sapiens; identical to SEQ ID NO: 35258
  chr1:25255276-25255610
  hyper

SEQ ID NO: 102837 - DNA, 903 bp, Homo sapiens; identical to SEQ ID NO: 226
  chr1:25255920-25256823
  hyper

SEQ ID NO: 102838 - DNA, 118 bp, Homo sapiens
  chr1:25257156-25257274
  hyper
gggcctgtgacttctgcaaccccgggctgggggccgcggggtctcagggccggtgacgccgcactgggagccgccccaaagaggttactcacctccctcgtcccgcacattattctga

SEQ ID NO: 102839 - DNA, 239 bp, Homo sapiens; identical to SEQ ID NO: 35261
  chr1:25258917-25259156
  hyper

SEQ ID NO: 102840 - DNA, 30 bp, Homo sapiens
  chr1:25558560-25558590
  hyper
tgacggatctaagccggcctccaagactac

SEQ ID NO: 102841 - DNA, 268 bp, Homo sapiens
  chr1:25559009-25559277
  hyper
aaccttcagacaaacgggccgatacgtacgaatgggctaccataagccccgccccttccgggaggtctccggaagttgggacccttttagctatgaaatattttggattgcgtagggtcttgcgcagccgcgaaaagtagcgtgggccaggacagcgggaggtaagtcgccaagaaaagggttgggaagagctcagaatcggacggctaggaagaaatgaccaaaaggagcctgatagccccctattctgcacgctgttcctggaaac

SEQ ID NO: 102842 - DNA, 30 bp, Homo sapiens
  chr1:25573471-25573501
  hyper
gcctgcgctttctccggaaaggatcccgca

SEQ ID NO: 102843 - DNA, 30 bp, Homo sapiens
  chr1:25573940-25573970
  hyper
gcactgagggactacgttagcagacgcgtc

SEQ ID NO: 102844 - DNA, 30 bp, Homo sapiens; identical to SEQ ID NO: 35263
  chr1:25574221-25574251
  hyper

SEQ ID NO: 102845 - DNA, 30 bp, Homo sapiens; identical to SEQ ID NO: 35264
  chr1:25664865-25664895
  hyper

SEQ ID NO: 102846 - DNA, 30 bp, Homo sapiens; identical to SEQ ID NO: 35265
  chr1:25665317-25665347
  hyper

SEQ ID NO: 102847 - DNA, 30 bp, Homo sapiens; identical to SEQ ID NO: 35266
  chr1:25756827-25756857
  hyper

SEQ ID NO: 102848 - DNA, 248 bp, Homo sapiens; identical to SEQ ID NO: 35267
  chr1:25757171-25757419
  hyper

SEQ ID NO: 102849 - DNA, 30 bp, Homo sapiens; identical to SEQ ID NO: 35268
  chr1:25758589-25758619
  hyper

SEQ ID NO: 102850 - DNA, 384 bp, Homo sapiens
  chr1:25869922-25870306
  hyper
tcttctggcgccttcgggcggcctcggaaactcttggtgcctggacctggagcctggacagggaccgggcggggcgagaccggccgtcgggggcgcggcccgtctgggggcggggcctgtcctctctcgccccgccccgtcggacgccgcggcggagctggcgctgggaggggaggagcgcgcagcccgcgcgccgcagggccgggcggaaagtttttcctgacggagttttggctgcggcagcggcggcggcggccggagcgggccatggacgcgctcaagtcggcggggcgggcgctgatccggagccccagcttggccaagcagagctgggggggcggtggccggcaccgcagtgagtgtgcgcgcgtcagccgggccggg

SEQ ID NO: 102851 - DNA, 169 bp, Homo sapiens; identical to SEQ ID NO: 35271
  chr1:25870617-25870786
  hyper

SEQ ID NO: 102852 - DNA, 30 bp, Homo sapiens; identical to SEQ ID NO: 229
  chr1:25944087-25944117
  hyper

SEQ ID NO: 102853 - DNA, 30 bp, Homo sapiens; identical to SEQ ID NO: 35273
  chr1:26125946-26125976
  hyper

SEQ ID NO: 102854 - DNA, 30 bp, Homo sapiens
  chr1:26126435-26126465
  hyper
tgggaacggaagcacgggaaggggcgcgga

SEQ ID NO: 102855 - DNA, 30 bp, Homo sapiens; identical to SEQ ID NO: 35274
  chr1:26145990-26146020
  hyper

SEQ ID NO: 102856 - DNA, 52 bp, Homo sapiens
  chr1:26147237-26147289
  hyper
tgttccccttcattcgtttagttcagcgcgttgaagcgctcactgtgtccta

SEQ ID NO: 102857 - DNA, 289 bp, Homo sapiens
  chr1:26185982-26186271
  hyper
cgccagccccgccccggcaaggccctggcccccttcgctgtgccccgcccacgcactaactttcgcggccggtcccttgagtgcgtgcggcatatttccctgcgcggaggagtgcgtgttctttctgatccgctctttcaagagcggattcggaagctgctgtgtgaacggttctcgacagcctcagaaatgtacattttctttttgctgtattgaaaatttcttacagtatttcccgggcttaggaatttgttcgtgtcatcgctgaatcttcgcgatcacccccaga

SEQ ID NO: 102858 - DNA, 163 bp, Homo sapiens
  chr1:26202122-26202285
  hyper
caggcgacgccgagcgccccgcaccccgcccgccgcgcacaagcagctctgccccgccaggcccacgtgttgcacgcgcgggagaggggtcggccgcgcagaggtggcgtctcaggacttcctgtggcgtcacacagatgggaagaccgaggcccgggagtgg

SEQ ID NO: 102859 - DNA, 30 bp, Homo sapiens
  chr1:26231972-26232002
  hyper
gcgtggccctggtccgggcgaggaaaagag

SEQ ID NO: 102860 - DNA, 30 bp, Homo sapiens
  chr1:26232296-26232326
  hyper
tcccgcggtgagctcgccaccgcctcccgc

SEQ ID NO: 102861 - DNA, 195 bp, Homo sapiens
  chr1:26232691-26232886
  hyper
caaaggcgaggctccgcccgagccacacacaaagcggagcgacccccgcccaccaacccctccgaggcccgcagccccgcccgccgccctgcagcagggggtcgctgccacggcccagcccctcccgccgaccgcgtccctcttgctggcctcagccagccgccgcctcctccgagccccgcacccacctgctca

SEQ ID NO: 102862 - DNA, 933 bp, Homo sapiens
  chr1:26248902-26249835
  hyper
gggaaaggaaaggccacggtgtgagagggagttggcggggagggaatggctgaaattaaacatggtgattatcccaccatcagtggaagttatccagcagcagtggacatgactgcgaatcctccagaaaatggcttcgctgcgctccacggatctgctctcccaccccacctgcggcttgcacagcgacacacaagcgttgtgattggctcttccttggctgagacaagggtggggaccgaaatggcgtctctaacagctgatttttcagggcagcagctctgtgctaggagaagagaaggccgggctcactggcggtgcggagcccgccagggccaatccgcatccgggcggaggtgcaagcccgaccgcagtactgacacgtgccgcgacgtcccctcccggcagctcgcggggacctgggagcgggtggggtctctggctggcggggagccagggctgcgggaaaccgcacgaggtcgcgttcgcgagtggcggagaagcccagacccccgggcgcacgcggccgcgcccacccaggtcgctgggaggtgcccgcccgggaggcgccgcggccagtgcctgccgttagcttcaggaagaactaggattgagtaagaaacgactagggatggaagcacttggcactccgggtctcggagcaggctggggacgcccgcggcaggaacctggtcctccactccgggtgcggaccaaagtctgctagggcttccccgaagtggattcagtgactcgggagaggacccagcccctaggccccatccccggttaagggccagtcttggtctgggtgtttctctccgggagctggtcgcaggtttccgttttcctcttcaaggaaggaaagaccagcgagagaattcgagggaaagaacaaaagccgccggcaccgcccagcccaatttttggagc

SEQ ID NO: 102863 - DNA, 30 bp, Homo sapiens
  chr1:26324067-26324097
  hyper
gagtccagggtaatcgcggatcggaaagaa

SEQ ID NO: 102864 - DNA, 405 bp, Homo sapiens
  chr1:26324433-26324838
  hyper
ccgaggccccaaaccgggccagaatacaaaagtctgcaggaagctcaattgagatataggtgttttctccaatcaaacttacccagtcaagctgattcctcagaagcagccccagacgtttaactcgacggaaatgagaaacgacccatgaacccgtggccctttggtcgtcgtagtttccaaggctcaaaatggacgcttggaagcacttctcgttcctcaatctagaactacaattcccgatgtacagtgcgcgagattgcgcattacaactctaaaactacacctcccagagttctacgcgaccgtccagccccgcgtggtcgtgcgaaaccgcccaaggcctgggatgcggtgtgattcctccccctggtggcctgaagaggtgccgccgcgatttctgct

SEQ ID NO: 102865 - DNA, 30 bp, Homo sapiens; identical to SEQ ID NO: 35282
  chr1:26362446-26362476
  hyper

SEQ ID NO: 102866 - DNA, 1037 bp, Homo sapiens
  chr1:26372112-26373149
  hyper
cggccccaggccccccgcgggcaggggtcagaatctgggctgcgccccaagggagagacggtccttgggccacagcccattatcttcgttccctcacctcaccccacccctcctgcatggtcccagctcaagccgcagccaaaaccaaccactgctaggatggcaaatgcggaggtgcgtcggctgccgccaaaattcccgcccgtccccaggctctcgccttaccggattgccggcctggcgtccaacagatgctgcttctccttggcctccatgcagtcccgcgccgagtcccggcagccgcgcagccgccccgccgagtgcgccctgaaagttgcgcgcgggactccgggtggcgctcacccacctgccccgagggccccgcgaggtgcgctcactccggcccggctcctgcggcccctgagctcccccggctcccgctgcggctgcagctccggctctggctccgcgtgccaagcgctcccgtgtctcgggtcagccgctgcgccccgcggccgccggctttatccggccctcgccaacccgtgtgaagctgccgtcggcgcgtcgtgtgcaaaagcccgcggggaagggggggcggtcgccggctgcaaaaggcccggctgtggccccgcacacctgtgcctgcgcccatggggcccgcggagcccacctgccggccgcgagaagtttgccagccttcgcccggcgcggcgccgggtgttgctgagtgaggacggggtgacgcctgcgccccctctcccgcgcggggtgcgccgcctcgccgccgaaaagttctcgactttagtttgtagaaatccgctttggtggtcccgacggcaggaatgtggctccttgcctcggaagagggtctccagaggctactggggccgcgtctgccccctccgactggcggctgccctgggcttgatcatgttcccctctcaggccggagaccccccgaggtcggcttgcgttcctgtcctcctgctaggagggtcctggggtggggtgggctgcgccgccctcaggctggg

SEQ ID NO: 102867 - DNA, 30 bp, Homo sapiens
  chr1:26437399-26437429
  hyper
gagcggcaggagcgcggtggatcctggctc

SEQ ID NO: 102868 - DNA, 30 bp, Homo sapiens
  chr1:26438515-26438545
  hyper
tggggaaggccctgcgctcctcaggccacc

SEQ ID NO: 102869 - DNA, 30 bp, Homo sapiens; identical to SEQ ID NO: 35285
  chr1:26438873-26438903
  hyper

SEQ ID NO: 102870 - DNA, 30 bp, Homo sapiens; identical to SEQ ID NO: 233
  chr1:26496808-26496838
  hyper

SEQ ID NO: 102871 - DNA, 533 bp, Homo sapiens; identical to SEQ ID NO: 35287
  chr1:26551728-26552261
  hyper

SEQ ID NO: 102872 - DNA, 92 bp, Homo sapiens; identical to SEQ ID NO: 235
  chr1:26560288-26560380
  hyper

SEQ ID NO: 102873 - DNA, 30 bp, Homo sapiens; identical to SEQ ID NO: 35289
  chr1:26561012-26561042
  hyper

SEQ ID NO: 102874 - DNA, 30 bp, Homo sapiens; identical to SEQ ID NO: 236
  chr1:26606831-26606861
  hyper

SEQ ID NO: 102875 - DNA, 217 bp, Homo sapiens; identical to SEQ ID NO: 35291
  chr1:26633063-26633280
  hyper

SEQ ID NO: 102876 - DNA, 842 bp, Homo sapiens; identical to SEQ ID NO: 35292
  chr1:26662517-26663359
  hyper

SEQ ID NO: 102877 - DNA, 866 bp, Homo sapiens
  chr1:26735162-26736028
  hyper
tgggaatcaagacagcgtgactcaattcagcaccgtggacagagctgctggagccctcaggaccctggacagagaagcaggccgcgcattcccggggaaccgaattcgcatcacttgagaacccacctagagaagccagagcgttcaactcccctttccctcccttttcttcagccagacctcagccacttgctcctgagtcttaggaacagaggtacacggagcgaatatattttaagggcgccactaacagcgggagataagacttttgggagaggagaattatgtaaataaaaatggctttggctgatgtactaggagaactcttgataattctaaattagagtcctcagatgggagtggggcactgctaataatatttgttaacgatatgtattttttaggcggagcagcaaagggccactcttgtcctttttaccccacgaagtcccacctcccattccttacgctcaagttttcatttcttggagagcaccccgtacgagagaaagggaaataacttctgcagtctcttgctttcctccccatcttccccttccctacccccactcatccggtctctctgaaatacacatgtgcccacatccgcacgtgcacacacacacacacacaaacacacacacagagccacagcgtgagaattccaaaaggttctgcacactcggtggagaagattgaattcagagcaagcggatgcccccgaaagcaggctctgtccctttaaatgggttgtagtggtgggggaggggaactggccggagctggcattgtccagtttgaactgaacaccggaagtgaaggggcagggccagggccgtgcactgagccccgggccattgtccatc

SEQ ID NO: 102878 - DNA, 30 bp, Homo sapiens; identical to SEQ ID NO: 35296
  chr1:26736783-26736813
  hyper

SEQ ID NO: 102879 - DNA, 781 bp, Homo sapiens
  chr1:26737101-26737882
  hyper
gaggtgtcagagaccggagttgtgggggagggccggagctggagccggagggaaagggaggggaaaggagagggaggggaggggagggggctgcccgcggggggttgggtcattgtcttttagaatttgggagcctttgaaaagccgtgggccctcccaccgctattgtgcgggggaagatgtagcagcttcttctccgaaccaaccctttgccttcggacttctccggggccagcagccgcccgaccaggggcccggggccacgggctcagccgacgaccatgggctccgtgtccaaccagcagtttgcaggttcgagctcgggacttagcggggacactttaggattcaggggcggccaggagccacgtagaagggaggtggggaactgagtcctaggctgcccaaaggaccccaagacggtgcggccttctgcttcatagggccgtctctggggccaggaaccttggtgtcccagtggcgtgcgcgccagactacgtgggtggatggagaggagaggcttgtcccgccgtgagtctctgggaaacgcgttgtgggaagaggagcaaaactttcggggcactactgtcccggtgtacgctaggggaacgcgggaggcgaccgggataggtttcttctcttctgttgcttggtagctgccccctcctggctgtccacttgtggggctggatactcgggtctccctgcctggggcccgagacggccctccgattccgtgccccccagctaagtgcccggccctccctctctccaggtggct

SEQ ID NO: 102880 - DNA, 343 bp, Homo sapiens
  chr1:26737907-26738250
  hyper
cgaggaggcgccggaggacgcggcccgggcggcggacgagcctcagctgctgcacggtgcgggcatctgtaagtggttcaacgtgcgcatggggttcggcttcctgtccatgaccgcccgcgccggggtcgcgctcgaccccccagtggatgtctttgtgcaccaggtgagactgattccggtaactttgcccagggaagggcgtctaggcgcccatatccacgggtgggctccgggctcgcagttgaattgagggccatcgggagccctcattatgcatccctgtctttgcttcggcaccccaattctgagtccctgttaactatctcgtgggggagtagtg

SEQ ID NO: 102881 - DNA, 414 bp, Homo sapiens
  chr1:26758409-26758823
  hyper
gtgctctaatgaagcccggttctgcggcattccaaggtaaggacgctgccttacccagtctctcagcagtcctaagctgccttcgacggccgagaagcgcctcgattcttgcccctggctcatttccctggcgcgttttccagacgcctccgctcccaacgctgggctcaaccctgtcttccccagctggtctcccagcacgtggcctggagcccagcctcccgccccgctcggtcacgtgagcctggctctcacccgcgccggcttccacaccccgcgggactgagaaccgccctcccactagctcgcaggcgcaggcgcagggcagggtcccctcagtttgggtgacggaaggggcgtgtcgcagcgcccaaagatgacgtgttctgccagcgccacgtcatgaggaagtgc

SEQ ID NO: 102882 - DNA, 254 bp, Homo sapiens
  chr1:26798708-26798962
  hyper
ctcttggcgggagccggaacccggagcccgccgactcgcgcacccctcctcatttactgccttcgacgcgcgccaccccgactgcgcccccaccccctcggcgcgccgccgtctccgcgcactaccccccccacacacccccctcctcactccctccagaggaggtgagtttaaaccccgcccacgtgaccccagctgggccaatgaacggcggcgggaggtgaaatccggttctaaccggtccggggctccca

SEQ ID NO: 102883 - DNA, 30 bp, Homo sapiens
  chr1:26799826-26799856
  hyper
tcttatacgaacgtcgggctcactcattta

SEQ ID NO: 102884 - DNA, 30 bp, Homo sapiens; identical to SEQ ID NO: 243
  chr1:26827744-26827774
  hyper

SEQ ID NO: 102885 - DNA, 107 bp, Homo sapiens; identical to SEQ ID NO: 244
  chr1:26855979-26856086
  hyper

SEQ ID NO: 102886 - DNA, 30 bp, Homo sapiens
  chr1:26856393-26856423
  hyper
tgacctggcggcggcgagatgccgctcgcc

SEQ ID NO: 102887 - DNA, 153 bp, Homo sapiens
  chr1:26947305-26947458
  hyper
tagttaggtctgagcgcccacttccattcctggagaaggatgtgtgggggaggcggaacgagttccggcggagggctcgggcgcgcccggtggagtgaagcgccgcgcggtcgaagggctcacagagttgaagtgggcgggaaaacccggagc

SEQ ID NO: 102888 - DNA, 30 bp, Homo sapiens
  chr1:26947714-26947744
  hyper
ctagaggtgctgggcgcgcgcttcccgccc

SEQ ID NO: 102889 - DNA, 30 bp, Homo sapiens; identical to SEQ ID NO: 245
  chr1:27021694-27021724
  hyper

SEQ ID NO: 102890 - DNA, 30 bp, Homo sapiens
  chr1:27022217-27022247
  hyper
gctgagcctcgtgtcggagtgagggggact

SEQ ID NO: 102891 - DNA, 30 bp, Homo sapiens
  chr1:27023373-27023403
  hyper
cgtcgccgccgccgcggccgccgtcttcca

SEQ ID NO: 102892 - DNA, 30 bp, Homo sapiens; identical to SEQ ID NO: 35304
  chr1:27023721-27023751
  hyper

SEQ ID NO: 102893 - DNA, 706 bp, Homo sapiens
  chr1:27113545-27114251
  hyper
gccagaggctaacccggcccctggcttcgtttggagggcagataactgaaaccacataaggctttggaatcctgagaaacaagaaatccaccaacggagaaggatttatcatctgtttcctttaaggagggtgcaaagttgttctaacagtttccgttacaagggtacaaactggccgctccccccaatagacggttttgttgagttcgcctctttttttttcttctttttttggccccacttcctatgagagaaactgcttgggtgagggaggtgaaaggagccctggagggtgttctctgaggttttcttcaccatcctcattagccacctgaggtggggctgaggactaaagtaggacagaaggtctctggtagatagaggaggggaaaatcagggggatcccccactttcttcacacccaggacgcagggtgccgctgccggccacagaaaccccaagaatgtttttctttggctattcagaggacatctattgtgtgtcaggccctgtgctgagctgttgttgcctgacagcaggaagagcgcggctctggtttctgtgaagaggctgcgggtcagcctccgactacaagagcctcggcccacaccgggaactcagtgaacgtcagcgggagctggggcaagagcactgactctgagacagcagcctccgctcactatttgaaggcggggtggcggggggc

SEQ ID NO: 102894 - DNA, 100 bp, Homo sapiens; identical to SEQ ID NO: 35306
  chr1:27114660-27114760
  hyper

SEQ ID NO: 102895 - DNA, 30 bp, Homo sapiens; identical to SEQ ID NO: 247
  chr1:27152777-27152807
  hyper

SEQ ID NO: 102896 - DNA, 30 bp, Homo sapiens; identical to SEQ ID NO: 35308
  chr1:27191884-27191914
  hyper

SEQ ID NO: 102897 - DNA, 30 bp, Homo sapiens
  chr1:27216352-27216382
  hyper
cgttgggccccaggcgcagcgcgtccatca

SEQ ID NO: 102898 - DNA, 30 bp, Homo sapiens
  chr1:27216918-27216948
  hyper
gggaaaatcgctctcggaatttctctaacc

SEQ ID NO: 102899 - DNA, 58 bp, Homo sapiens
  chr1:27226965-27227023
  hyper
tctcgcgagaacaccgcgagcaacgttccagcccctgcgttgcgagattgtgaaaatt

SEQ ID NO: 102900 - DNA, 144 bp, Homo sapiens
  chr1:27247997-27248141
  hyper
tctagaagtctccacggcatcgggtgaccatagcaactcatgccaaactctcgggcccacggctccgcctaccgcttcgtggacgcgcttgttgattggctccgaatgtcgaccaatggtcggcgaagcgggttgcttgccgca

SEQ ID NO: 102901 - DNA, 30 bp, Homo sapiens
  chr1:27248410-27248440
  hyper
cgtgcaggaggtaacggcccgcgcggcgtc

SEQ ID NO: 102902 - DNA, 31 bp, Homo sapiens; identical to SEQ ID NO: 35311
  chr1:27286147-27286178
  hyper

SEQ ID NO: 102903 - DNA, 126 bp, Homo sapiens
  chr1:27286496-27286622
  hyper
ggccctaccccgcgggcggacccagcctccctcccgtcccgacgctgttcctcggggtgagcaccagcgtttgtcccatcccgacgctgccccccggtgagtgcggcccccgcacccagccagtgc

SEQ ID NO: 102904 - DNA, 30 bp, Homo sapiens; identical to SEQ ID NO: 35313
  chr1:27286929-27286959
  hyper

SEQ ID NO: 102905 - DNA, 30 bp, Homo sapiens
  chr1:27319869-27319899
  hyper
tggagaccggattccgtgaatttctaaaca

SEQ ID NO: 102906 - DNA, 34 bp, Homo sapiens
  chr1:27320113-27320147
  hyper
ctgattggctgtgccgcccgtcgctccgccccgt

SEQ ID NO: 102907 - DNA, 121 bp, Homo sapiens
  chr1:27321039-27321160
  hyper
ggaaggactacggatccgcaggaagaggcagttgggggccaggggcccagtagaggaggctgaggtgcggtcttagcggctggtgcgttcgagggtcggtcatggcgtgtggggggctggt

SEQ ID NO: 102908 - DNA, 30 bp, Homo sapiens; identical to SEQ ID NO: 35316
  chr1:27324456-27324486
  hyper

SEQ ID NO: 102909 - DNA, 508 bp, Homo sapiens
  chr1:27332478-27332986
  hyper
gttgcacgggggtcacgtagtaattgacagtggctggcacaaccccgtcagtgcctggagggcgccaggccagggcggcagtggcagctgggccctgctcagccagtgcctgcagcgccagtgcggcaatgaggtccagcgtctggcggcgctcgtggttcatgaggcacacggtgctctcgttgaccacccggtgcagtgtcaccaggcaggcgtaacggcgggctgcatctgccccaccgaagtgggcctccaggtagcgctctagggtgcgccgctgctccaccaggtctggaaagtcgatgaagaagcgggagcacatgtagcgctgcagggcgcgcacatcggtgctgggccggggccggaagccccgcaccaggaggtggcagtacttgaggaggccaccacctcggatctcctcgggactgcgcgtggcgatgacacggtgccgcaggtgctccagggcctcggtgaagtccccgtacaggctttcgcctgtgaccgttgg

SEQ ID NO: 102910 - DNA, 30 bp, Homo sapiens
  chr1:27481643-27481673
  hyper
cttataggcaccagcgagcagccggtgcgg

SEQ ID NO: 102911 - DNA, 165 bp, Homo sapiens
  chr1:27560695-27560860
  hyper
gttcagtgggcgagcgtgtgggcgggtgtcccagaagcggtgtgaggagcgttttacccggtggtggggtgggaggtgcgtccgggtaactaatggcaaccgggcggggtgagcccgctctgcaggaactcctcgacggcgaaaaactacgactcccagggtgcc

SEQ ID NO: 102912 - DNA, 30 bp, Homo sapiens
  chr1:27561255-27561285
  hyper
gcggaggcgctgtccggccccggccaggcg

SEQ ID NO: 102913 - DNA, 30 bp, Homo sapiens
  chr1:27589654-27589684
  hyper
ctgagctttgagcggcgctaccatgtcact

SEQ ID NO: 102914 - DNA, 30 bp, Homo sapiens; identical to SEQ ID NO: 35319
  chr1:27623352-27623382
  hyper

SEQ ID NO: 102915 - DNA, 30 bp, Homo sapiens; identical to SEQ ID NO: 250
  chr1:27648442-27648472
  hyper

SEQ ID NO: 102916 - DNA, 30 bp, Homo sapiens; identical to SEQ ID NO: 35321
  chr1:27649362-27649392
  hyper

SEQ ID NO: 102917 - DNA, 29 bp, Homo sapiens
  chr1:27684151-27684180
  hyper
gtgtcctgaccctttgcgaccaccagggg

SEQ ID NO: 102918 - DNA, 30 bp, Homo sapiens
  chr1:27692452-27692482
  hyper
ccccatccttgccccgctggctgggcaccg

SEQ ID NO: 102919 - DNA, 30 bp, Homo sapiens
  chr1:27693333-27693363
  hyper
gggcatccggtgatcggcagctcagagcca

SEQ ID NO: 102920 - DNA, 373 bp, Homo sapiens
  chr1:27718843-27719216
  hyper
ccactcttccaccacgttccctgcagcctctctgagacttcaaggctctcgcaccggcgcctctgaaacccccggcccgcagagggcgccgcgtcaaggacagcgcgggcagactcgggagggggcggggccgcagccacggtcgctttttatgaatgggggagcgggcggtgcgaggccttattactatgccgcgcaacgcgcgctgcgccccagcgcgccgcgcccattggctgatcggaccgctgacgtcaccgaaccggtggccgggggcggggcggggtgactcacgccgcttctcccgcggccgcgggggcttctcggggtccacgcacgccctgcgccgccaggacccgagcggagcctccccgcg

SEQ ID NO: 102921 - DNA, 30 bp, Homo sapiens; identical to SEQ ID NO: 35324
  chr1:27722036-27722066
  hyper

SEQ ID NO: 102922 - DNA, 81 bp, Homo sapiens; identical to SEQ ID NO: 35325
  chr1:27816285-27816366
  hyper

SEQ ID NO: 102923 - DNA, 128 bp, Homo sapiens
  chr1:27816423-27816551
  hyper
cggctcgggaagagcggcccggccggggcccgcgcctcccagcggggtctacccaaggggacttgttgctcacctggcctcccgcagtcgccgtcagcgacaggaagggtcggccggccgcccagtct

SEQ ID NO: 102924 - DNA, 261 bp, Homo sapiens
  chr1:27816581-27816842
  hyper
cgcgggctgccaaacggccggaccccctcagcgcgctacgcccccagccgcgctcgccctgcctgtgtccgccattacgcgattccccgccctgggcggcagccacaccccgccaatggccctgattggctcactgccccacccacccggggcttcggggcattccattggcctgagtaaaacgccagttaaataactacgcaaaagacgtactcacgggtaccctccccagagctccacccgggcgacttccgcaatcgg

SEQ ID NO: 102925 - DNA, 31 bp, Homo sapiens; identical to SEQ ID NO: 254
  chr1:27883559-27883590
  hyper

SEQ ID NO: 102926 - DNA, 30 bp, Homo sapiens; identical to SEQ ID NO: 255
  chr1:27894940-27894970
  hyper

SEQ ID NO: 102927 - DNA, 26 bp, Homo sapiens
  chr1:27895357-27895383
  hyper
agcctggggctggacgcgtacaaaag

SEQ ID NO: 102928 - DNA, 30 bp, Homo sapiens
  chr1:27901673-27901703
  hyper
tccgagttttcccgccgccgccgccgcctc

SEQ ID NO: 102929 - DNA, 706 bp, Homo sapiens; identical to SEQ ID NO: 35331
  chr1:27901985-27902691
  hyper

SEQ ID NO: 102930 - DNA, 30 bp, Homo sapiens; identical to SEQ ID NO: 257
  chr1:27928401-27928431
  hyper

SEQ ID NO: 102931 - DNA, 96 bp, Homo sapiens; identical to SEQ ID NO: 35333
  chr1:27928760-27928856
  hyper

SEQ ID NO: 102932 - DNA, 361 bp, Homo sapiens
  chr1:27929077-27929438
  hyper
gcgccctcaagcagcgagcagagattcagcaattcaccccagctccctgcctagggggctgacagctgtcactcagcaccccaccccctggggaagagggggccgattcaatcagagccccagaggaaacgcattgataggcgattatttatttatttatgcaaaagtgagccgactttgttcgccaggtaaccgggcacgcggcccaacccctccagccctagccgcccccaaatccctcctccgccccacaccccctccgggtcattaggtccccgcccctcaactccccgagagccagtggatcctagggatttgggggttggaggggaggggctcctccctccgcagtctccccttt

SEQ ID NO: 102933 - DNA, 30 bp, Homo sapiens
  chr1:27929972-27930002
  hyper
tccggcggtggcagcgacgcgggcgcccgg

SEQ ID NO: 102934 - DNA, 461 bp, Homo sapiens; identical to SEQ ID NO: 35336
  chr1:27960571-27961032
  hyper

SEQ ID NO: 102935 - DNA, 184 bp, Homo sapiens
  chr1:27961553-27961737
  hyper
cccacccgacgctgtcgcttacctggagcccaattctgcccggccccggggtgagccagccggggctccagcagccgcgagtgccggcgtgcggggagaactggggtgctgcccgcctctgaccgccgcccctgctgggcagggaggaggaagccgcctcggacttctcttattgcagtcacgg

SEQ ID NO: 102936 - DNA, 86 bp, Homo sapiens
  chr1:27961831-27961917
  hyper
cgcccccaccttcctcctccctggtttacgggaggtcggctctgtcaccctccagacctgagtccccagcccggccttcccaaaag

SEQ ID NO: 102937 - DNA, 184 bp, Homo sapiens; identical to SEQ ID NO: 35337
  chr1:27986360-27986544
  hyper

SEQ ID NO: 102938 - DNA, 30 bp, Homo sapiens
  chr1:27998868-27998898
  hyper
ccagctccgcccagcgggaacatttgtgtg

SEQ ID NO: 102939 - DNA, 30 bp, Homo sapiens
  chr1:28052131-28052161
  hyper
acatcacaaatccccgaaggtatcgcgaga

SEQ ID NO: 102940 - DNA, 30 bp, Homo sapiens
  chr1:28052362-28052392
  hyper
aaagctccgtgttccgccccttcccacttg

SEQ ID NO: 102941 - DNA, 30 bp, Homo sapiens; identical to SEQ ID NO: 262
  chr1:28053263-28053293
  hyper

SEQ ID NO: 102942 - DNA, 50 bp, Homo sapiens
  chr1:28099535-28099585
  hyper
tgacgtcatctccccgccctgcatccccaagcctcggggagtcctgtctc

SEQ ID NO: 102943 - DNA, 30 bp, Homo sapiens
  chr1:28099948-28099978
  hyper
accgagctggggggcgggagctgtcccggg

SEQ ID NO: 102944 - DNA, 30 bp, Homo sapiens
  chr1:28157046-28157076
  hyper
cgtttgcaggaggacgtagggaaagactga

SEQ ID NO: 102945 - DNA, 98 bp, Homo sapiens
  chr1:28157657-28157755
  hyper
gccagtcgccggagcgcttcgaggccttggcccgaacttacgcccaactcttgactgagtgcctggtgctctcgtggagcatcgcatctggccccttc

SEQ ID NO: 102946 - DNA, 592 bp, Homo sapiens; identical to SEQ ID NO: 35339
  chr1:28198911-28199503
  hyper

SEQ ID NO: 102947 - DNA, 327 bp, Homo sapiens
  chr1:28241264-28241591
  hyper
aggggctggcagagcggtatcgcaagaaatcaaccaatcagaacaatactaccgcgacgcagcgccgtgtgatcccaccctcgtcaagtgcgcgacttctgccgtcacttcctttgttcggcgtgctcaggttcgcgccaaactatcaccaatcagacgacgccttcatctaaagggctgtagcggagttttggcttcggtgtttcccacccacggtcgtgcgggaattgcgcacctcagggactcgcagcactagcctcacagcaccgcgtggagttgcttgttcttttacataggaggtcacattctcttcgtgtaatgccacca

SEQ ID NO: 102948 - DNA, 184 bp, Homo sapiens; identical to SEQ ID NO: 35341
  chr1:28261537-28261721
  hyper

SEQ ID NO: 102949 - DNA, 767 bp, Homo sapiens
  chr1:28286169-28286936
  hyper
acaggtgtgagggatcgcagccctggtccaggctctagtctccccgccctctcgctttcttgggcctccgggcgcctcaaaggtaaaactaggccatttgaagcctgcgaagcgaagggcagtcggtcttcaggcctagcgggcttggctgggctgggtcggtggacccctgggctggcggcgggagcagagcatcgagcggcttttagctggggttcgggcggaggacctgggacaaccgcgggcctcgctcctccccggacggggcgggacggggaagtcccgcccaccaggcccaggccccgggccgccccgagggctgcgcccacctccttcctgcctcggcaaccccgggccctgagggcaggccccaaccgcggaggagcaggagagggcggaggccggcgggccatgccctggtcgtcccgcggcgccctccttcgggacctggtcctgggcgtgctgggcaccgccgccttcctgctcgacctgggcaccgacctgtgggccgccgtccagtatgcgctcggcggccgctacctgtgggcggcgctggtgctggcgctgctgggcctggcctccgtggcgctgcagctcttcagctggctctggctgcgcgctgaccctgccggcctgcacgggtcgcagcccccgcgccgctgcctggcgctgctgcatctcctgcagctgggttacctgtacaggtgagtgcttcgccccgggaggggaggagtgtcggagcccagcacctccgtcagctgggtcac

SEQ ID NO: 102950 - DNA, 144 bp, Homo sapiens
  chr1:28414989-28415133
  hyper
tgctcgcccggctgcgctcagaccctgttggcagctgagactcacccaaaggctgtaaaagccccacaacaggacatggagatcagtccagacccacagtagaaccaatcgagcggaggaaaccgcggcgttagcgtgacccgg

SEQ ID NO: 102951 - DNA, 30 bp, Homo sapiens; identical to SEQ ID NO: 266
  chr1:28559015-28559045
  hyper

SEQ ID NO: 102952 - DNA, 30 bp, Homo sapiens
  chr1:28559446-28559476
  hyper
cataaatgcttcctcggtgctgcctccgcc

SEQ ID NO: 102953 - DNA, 16 bp, Homo sapiens
  chr1:28562219-28562235
  hyper
cggtatcctggacatc

SEQ ID NO: 102954 - DNA, 243 bp, Homo sapiens
  chr1:28562655-28562898
  hyper
tgctgcggcagagacgccagaggtgcagctccagcagcaatggcagtgacggcgttggcggcgcggacgtggcttggcgtgtggggcgtgaggaccatgcaagcccgaggcttcggctcggatcaggtacgctgcggcagtgtccgctgctccagccccgcgggcggatcccatctttgcttccgtacctttaccagtgtccctgtctctctgcagtccgagaatgtcgaccggggcgcgggc

SEQ ID NO: 102955 - DNA, 30 bp, Homo sapiens
  chr1:28585822-28585852
  hyper
gcattcacccgaggcggactacaactccca

SEQ ID NO: 102956 - DNA, 216 bp, Homo sapiens
  chr1:28586718-28586934
  hyper
ttcctcggctccctcggactcctggccaatgagggagaagccttctggaggctctccgagctttgggctcctgagcgtcttcaagtccaggcaaatcccggccggagcggccagaccactcctcctccccgcccccttccgcggagtcccttcctcttcgcgggggccggcgggcagaggacccttcctggggtgcctcccggctcctgtccccca

SEQ ID NO: 102957 - DNA, 280 bp, Homo sapiens
  chr1:28586972-28587252
  hyper
cgacctcatcctatgtccaccgcactcctgctttggagggagagcgcaggggctctgggggcttggcgggccgcccggtacgcggcggcggcagccaaagctggggggagaggggacaaccctggtcgcggcttccgaagccaagcgcgggttaggctgcgccctgctaagtaagtggtctgaaggcccagaagtttgttttccagaaattcctcccccaccctcccttcgcgccgctcccctccacccccccgcattcgcatcccggcatagcccgcag

SEQ ID NO: 102958 - DNA, 30 bp, Homo sapiens; identical to SEQ ID NO: 35348
  chr1:28655624-28655654
  hyper

SEQ ID NO: 102959 - DNA, 30 bp, Homo sapiens
  chr1:28696027-28696057
  hyper
ttacacacaaggtgcgcagagcggccagcg

SEQ ID NO: 102960 - DNA, 30 bp, Homo sapiens
  chr1:28696642-28696672
  hyper
gtgcatggagtctccgccacgggggagcct

SEQ ID NO: 102961 - DNA, 30 bp, Homo sapiens; identical to SEQ ID NO: 35349
  chr1:28832366-28832396
  hyper

SEQ ID NO: 102962 - DNA, 274 bp, Homo sapiens; identical to SEQ ID NO: 35350
  chr1:28833049-28833323
  hyper

SEQ ID NO: 102963 - DNA, 131 bp, Homo sapiens
  chr1:28844464-28844595
  hyper
gtatcttttttctccgtacagaccctaccgcacaagattttcctaaacagaccgaactcaaggagtctttctggttgttagtccacgtgtcccgatttggggtttccaaaatacacgcccactggaaccgg

SEQ ID NO: 102964 - DNA, 30 bp, Homo sapiens
  chr1:28844854-28844884
  hyper
cagagggcggtaagcggagcggccacagcc

SEQ ID NO: 102965 - DNA, 165 bp, Homo sapiens; identical to SEQ ID NO: 35351
  chr1:28879231-28879396
  hyper

SEQ ID NO: 102966 - DNA, 341 bp, Homo sapiens
  chr1:28879650-28879991
  hyper
tgagtgagggcagccgtccggggtctgaagacaaggaagcatctcggtttcgcgagagaggaaggatctgagtgggaggggacttgggatcccagaaaggggagacgtgtgacgggggttctttttggtgacacagaagcgggttccagcatctaagtgaagaggctgagtccgtgaggctaggggtcctggggccccacctgggttcgtgggagggaaaggtggtgctttggggacatagaatgggagcaatccaaggactgaggcgcgctgttctgggaccggaggagtggggtttctaggtccaaggggaggctccctaaagcggggcaagcttgaac

SEQ ID NO: 102967 - DNA, 30 bp, Homo sapiens
  chr1:28907888-28907918
  hyper
acctccagaggtctcgcgcgtagtcaccag

SEQ ID NO: 102968 - DNA, 30 bp, Homo sapiens
  chr1:28908356-28908386
  hyper
cgacaccgggaatgcggcggggagaaaggg

SEQ ID NO: 102969 - DNA, 398 bp, Homo sapiens
  chr1:28908622-28909020
  hyper
cccacgcaggaagccgacccgccttggcctctggagttgtctctgggatgtctttcagtctggaaatgaaccctgtgtgctgggaaagggctcgggctccgctccgagctcagtgggcgtgcgagcgagcagcgcctgagtgggtttcggggagggggtcatactccccgaaaggcgatttattcaaggcttgtctcttccactaatatgtaattttactgagcgcgtgctattttaactgtgtctgattatctgatctagttttcataaaaaccctgtgtacgctctgtggacaaataaggaaacttaggaatggatcacacagctatcgcaagcgaggagaggactggaatttggagcccaccccaggcaccacacatagcgcaatgttttgccca

SEQ ID NO: 102970 - DNA, 315 bp, Homo sapiens
  chr1:28919086-28919401
  hyper
aagacgtcgctgctgcggagctacgtggcaggcgcgcctggcgccccggagccggagcccgagcccgagcccacggtgggcgccgagtgctaccgccgcgcgctgcagctgcgggccgggccgcgggtcaagctgcaactctgggacaccgcgggccacgagcgcttcaggtgcgggtagccggggcgcgggagggacttctggtggggggctcggtgagcgtgctttaggccacggcaactcccgagaggccaactcagaggtcaggcggagggcgaggtccctgccctgggtcccgcccggtccactggggcc

SEQ ID NO: 102971 - DNA, 357 bp, Homo sapiens
  chr1:28969539-28969896
  hyper
ctgccccagtgaagcgttcgtctcagcagccggtccgactgcgcggccctccccgactacttccggcaccgctccccgcctccaacccggaaacgcgcggctcttccggccggcgggcgcgcgcctcgcttgcgcaggcgcagactgccctccgacacgtggtggcgatattgagctgtgtgtaggtacaccctgcagcttgcgcttttaactgcttgtggttgagtggcagcatgagcgagctctgcgtattccaacccggcgttaagaatccttcactagcttttcttcccgacgctgcttatttatctatcggtagcatgacgggtaattgacgccctcggatggctttgaggt

SEQ ID NO: 102972 - DNA, 301 bp, Homo sapiens
  chr1:28974715-28975016
  hyper
cagccgctgagagccggtattccaacgccatgagacgccttctgtcgtgagcagttgacaagaaagacccagcacttactgcaaccggaaggagcggttcctccctcgctcgcgcagccgctcttccccgccactccctcggtgcccgccagcacattcccagcaagccctgagtatatttgcatatcaactcactacatttttttcttctaactaaaaaatcgaaaggacaaattccagattctccttgtgaagtcttcctttcagttcagaagaaatggaattcgctcttcaacttcag

SEQ ID NO: 102973 - DNA, 238 bp, Homo sapiens
  chr1:28994972-28995210
  hyper
tcctccagaggagtcgagaaagctagcttggccctcaattgtggttgaggtgattctttcatttagggcctattttcctcatctatgagtgcgggaaggagagttactggggtctctagcgacctttccaacactgattttcaagggcgaaagaattctgcttaggtaaggcccaaatcccttggctaaggttaatcctcggtgggaccggcaatagggacgcgtcccctttaaggcg

SEQ ID NO: 102974 - DNA, 30 bp, Homo sapiens; identical to SEQ ID NO: 35359
  chr1:28996116-28996146
  hyper

SEQ ID NO: 102975 - DNA, 313 bp, Homo sapiens
  chr1:29062770-29063083
  hyper
ggccagcgatttccccgaaaataaattgtagattctccttcctgcaatgctaaggggtgaatctcttttgcgggagactggattctttcggtgtgtgttttgctctctgggtactctttctgtagtcggctaacagaggatgaccaagcccctcgcgggggcgggggcgggtcactcccggacagggcccccatgaagtttccctggggactgtgtgactccctaggggtcgggttacctcccagatgggggtggggtatcacttgcagctggaaggcaggttcattttaaggtctcgcgggcttcggaggcc

SEQ ID NO: 102976 - DNA, 48 bp, Homo sapiens
  chr1:29063452-29063500
  hyper
gagcgtcgccgagtcggagccggagcctgagccgcgcgctgtgtctcc

SEQ ID NO: 102977 - DNA, 603 bp, Homo sapiens
  chr1:29138557-29139160
  hyper
tgcccagctccgagccggtggtgcagcgtccgcccccggtcgcgggcgcagactggcggccgcctccgggccacgtggtgcgcgcggcgggcgcgtccgaggagcctgcggctgctcctggctcacagcgctccgggcgaggagagcgggcggacgccgggggctgggccggtgcgggcggcgaggcaggcggacgaggcgcagagacagcggggcggccggggcgcggcagccggcggcgtcggggccgcggcctctgccttgccgctcccctcgcgtcggatccccgcgcccagggcgcacggtggagagggacgcggcggagccggccggcagccatggaaccggccccctccgccggcgccgagctgcagcccccgctcttcgccaacgcctcggacgcctaccctagcgcctgccccagcgctggcgccaatgcgtcggggccgccaggcgcgcggagcgcctcgtccctcgccctggcaatcgccatcaccgcgctctactcggccgtgtgcgccgtggggctgctgggcaacgtgcttgtcatgttcggcatcgtccggtgagtccgctgcgggccggcgccgcagggctggagcc

SEQ ID NO: 102978 - DNA, 174 bp, Homo sapiens
  chr1:29213651-29213825
  hyper
aacctcttaaagggcgagagcggcgcggagccagaacgcggtcggcccggtccccgccgcacccagcccaggtgagcctggaccacctggggggcgaccctcggtccccgggagggacggggttagggacagaagaacctacccccaagggctcggaccgtcccgggagaggcg

SEQ ID NO: 102979 - DNA, 30 bp, Homo sapiens
  chr1:29240971-29241001
  hyper
ccttccctccggcgcggcccaatagaaatt

SEQ ID NO: 102980 - DNA, 329 bp, Homo sapiens
  chr1:29241581-29241910
  hyper
gcgtcaatcacggtgcggtgtgcaggagcctcgggaggaaaccaaatgcggagaatcgcaggtttcagacggtgaaggtgttgcgtgcagccgcggagcgatttcttcctggcgagggagctgggctgtctgcagaagtcaggcggaatctgaggactgcagggagccctggcaagacttcgcaggccttcccgccaccgacgcctgcatcattgaaaaacatgttcccccttagtcttctgggttcccagcgagcagagggttaaatctattctctcagcgtcgtgacctcctttttcagttcgcgcatctgtcggcttggaaatctt

SEQ ID NO: 102981 - DNA, 1107 bp, Homo sapiens; identical to SEQ ID NO: 35362
  chr1:29448270-29449377
  hyper

SEQ ID NO: 102982 - DNA, 30 bp, Homo sapiens; identical to SEQ ID NO: 35363
  chr1:29450087-29450117
  hyper

SEQ ID NO: 102983 - DNA, 30 bp, Homo sapiens; identical to SEQ ID NO: 35364
  chr1:29450554-29450584
  hyper

SEQ ID NO: 102984 - DNA, 30 bp, Homo sapiens
  chr1:29508244-29508274
  hyper
ccgatgtacacccgcggcatcccggcaacg

SEQ ID NO: 102985 - DNA, 30 bp, Homo sapiens
  chr1:29508579-29508609
  hyper
tcctcgcgcgagctcgccaaaggggttcct

SEQ ID NO: 102986 - DNA, 426 bp, Homo sapiens
  chr1:29557215-29557641
  hyper
ttccccggcttcggcgccgtctcttactcgacgaccttggctggatccccgtggtgcccatagacaagcgcccggacccgggcaggctcggcggatgcggagtaggaggaggcggcaggtccgtgacagccagaagctgggagcagcccccgccactgccgggcgggggttcgcacccgccacagggtactgcagacccacatgctcgctccaaccaacacagagcctgacgccccggctacgtcatcttccagcgaccgcgcgcctgcgccccgcccctgccccgccgggtgaccactcccccttggtccctttgaagggcgtttccttccttcgctgcccaagtggtggcgcctggctagactgcgtgtgggccccggagggatccgggggtgcggagcttgcgaggccgccaaagctgttgtc

SEQ ID NO: 102987 - DNA, 30 bp, Homo sapiens; identical to SEQ ID NO: 35366
  chr1:29562823-29562853
  hyper

SEQ ID NO: 102988 - DNA, 33 bp, Homo sapiens
  chr1:29563129-29563162
  hyper
cccgggacgggcggcgacgctccaaccatggcc

SEQ ID NO: 102989 - DNA, 30 bp, Homo sapiens; identical to SEQ ID NO: 270
  chr1:29563362-29563392
  hyper

SEQ ID NO: 102990 - DNA, 30 bp, Homo sapiens; identical to SEQ ID NO: 35368
  chr1:29564105-29564135
  hyper

SEQ ID NO: 102991 - DNA, 515 bp, Homo sapiens
  chr1:29564622-29565137
  hyper
tctgctgtgtggtcgcgttctccgggtgtgtttcggagtctggtgtctttggtgtgcgtgcgcgtgtgtgtgtgcgcgcagctgaatgtatgtatacggagcctgtgtttgtgtgtccgtgtgctcgtcggagtgtggacggtgtgtcggatgtgtgtgcgtgcgcgtgttccacatcccaccctgaggcctgggatcctagaccgcggccccttcccgcggagtttcggggccctgctccgggtgacctcccccgccctcgccaccggcggggctgctccgcgggctccgggtagccgggagacgcccggggcgggatccgagccgagacacgtgctggagcggagccgcttcctcacggtcgccagccgcagacaactgacctccccggcatcgcgttcgcggccctgctgctggctccggtgtctcgggccggaactcctgtggctccagcgttcgcgccggccactggccagcgcttgggcctcgccctgcagctccggggccatagggca

SEQ ID NO: 102992 - DNA, 862 bp, Homo sapiens; identical to SEQ ID NO: 35370
  chr1:29585831-29586693
  hyper

SEQ ID NO: 102993 - DNA, 561 bp, Homo sapiens; identical to SEQ ID NO: 35371
  chr1:29804770-29805331
  hyper

SEQ ID NO: 102994 - DNA, 613 bp, Homo sapiens
  chr1:30558993-30559606
  hyper
ggtgccggtgcggggcgccccaccaggaggaggtggcggaggtcccgggggccgccccgcctcgcagcctgggctctgcctgctctgcgtccacgccagcataagccccagccggctccgtctcccctaacgactctaattaccagccaagctcggctccccaaggcccaggcgccagaactgatgactttaataacagaatcccttccctttcacggcctgctccgggggccgctggcctgaggatgcagcgatctctgctgtcctgggagggcggggtcccacgggggttctacaccctcttacacatggggagggggggctcagccagggcagtgaggggagaatcgcttagggtggcctaagagagcctggcgccgcgcgcttgttcatctatggcaaaaaccgcaataacttttgcaccaacttaatatttgatcgatgatcactcagggacatcaccctgaacttaacgggtcctgggaccagacacccagagatgaaaagacagtggggtacagttctagcgctgggtgattgaagctacgacactggcctgtgacaattcctgcggggcccagagaaggtgctggcaccccgggggggctatcag

SEQ ID NO: 102995 - DNA, 14 bp, Homo sapiens
  chr1:30815402-30815416
  hyper
tttggttatttaaa

SEQ ID NO: 102996 - DNA, 322 bp, Homo sapiens
  chr1:30815454-30815776
  hyper
cggcaggtccttgcagaggaggggctcttcccaggagggcgctccagccgaggcccctctgccttcacctgcgccatgaccacttccctcggccctctcccctcctccacgcctcctggggccgctctccagggtcctgggacgagaccagccccgggcagggcagcgcggggagccaggggtcccacacccaggagggcccctcaccgcaagggacgggcttaggcggataaatgtccggctcccctcgaggggcagagtcagcaccccccacacggtccctgagatggccctgggaccgagccgccgcccccgacttgtg

SEQ ID NO: 102997 - DNA, 549 bp, Homo sapiens
  chr1:31157912-31158461
  hyper
acggtgggcgcctcccgggcccagcagcctcttggctgggaaagagacagacgggggcccccttccccgggaactgactttccagtgggaacaaggacgaccgtcgaggaacccgacaaatgaattaaaccagcaccagcgtgatgagcaaagcggagaaggaaagagggcgctgtgaggagagcgaggctcctccgggaaagctccttctgctccaggtgacagcggagagagatgccaccgcgcggcgaccggcagggccgcgtcccctctgcgtcctagcacagcgacgccccgcccgccacccgccctacgtcacccacagcccccgacaccgccccctcccccggccctgggcttccagtccctgacagtccctgggacgccgccccacaacgcccgccctctctggaccctaggacggccccgggcacctgcatatgatgtgtggccacgcccccgccacagctaattggaccggggtggacacctgaacccagtcggaccaatcaactcctgggttgccccgagacccggaccgggccctgt

SEQ ID NO: 102998 - DNA, 30 bp, Homo sapiens
  chr1:31190988-31191018
  hyper
tgtaactcagttcccgccgttttataggct

SEQ ID NO: 102999 - DNA, 621 bp, Homo sapiens
  chr1:31191731-31192352
  hyper
cgctggcccgggcccgcgcagacacgtcctgcacgctgtcctggggcctcccgtctgtcaccacgatgaccacctgcgacacgcggggcggtgtgacaccgggctcccggaagcccacgggactgtccaggagaggaggctgaggcccggagaggcgggaggactgccgggtcgcacagccaggcggcacccgggggaagaggacccggctggccgaagaggagacccgtttcctctgactgagagacgtggctggggggctttccatctgcttcgcctccctcgggcaggcagctctgagatgcccggagggatgtgatgccccatcgccaaattggggtctctaaggtcagggccatgccttcccctcagactgaggcggctgagggcagggtcctcaggctgatggctgtgggagtcgtgccacgcccctcgtgcccccgggaggcccggccggggctgggtggggggatccggtggttccacatggtgcagttctgcgctttggccaccagatggcagccgaagctaagggatggggctgccgtctcccgtcttgctgtccttgtcccggtaagaccggggaccctggaccagggaaccgacggagggccactccca

SEQ ID NO: 103000 - DNA, 153 bp, Homo sapiens; identical to SEQ ID NO: 35376
  chr1:31380838-31380991
  hyper

SEQ ID NO: 103001 - DNA, 30 bp, Homo sapiens
  chr1:31538081-31538111
  hyper
ccacacagaagactcggggcttcgcaaacc

SEQ ID NO: 103002 - DNA, 43 bp, Homo sapiens
  chr1:31538417-31538460
  hyper
ggggtccggagcagcgtttggggccggtggggtgcggatactc

SEQ ID NO: 103003 - DNA, 165 bp, Homo sapiens
  chr1:31538499-31538664
  hyper
cgatcttctctctctggcgctctcgctcccccttacctttcactccgacaacatggcggcccactggggactgggttggcgcggtgcatcctgggataggctccggccccggccccggcggtggcagcggcatgtgcggagaaggctggcggctctggaacaggt

SEQ ID NO: 103004 - DNA, 36 bp, Homo sapiens
  chr1:31538916-31538952
  hyper
cagctagcagggttcgcggacggccacccgcactgc

SEQ ID NO: 103005 - DNA, 30 bp, Homo sapiens; identical to SEQ ID NO: 35378
  chr1:31769232-31769262
  hyper

SEQ ID NO: 103006 - DNA, 156 bp, Homo sapiens; identical to SEQ ID NO: 35379
  chr1:31769776-31769932
  hyper

SEQ ID NO: 103007 - DNA, 30 bp, Homo sapiens
  chr1:31846319-31846349
  hyper
ggctggtgcccacgccggggaaagctctgg

SEQ ID NO: 103008 - DNA, 230 bp, Homo sapiens
  chr1:32083722-32083952
  hyper
gtggggtatgaaggcgtcccctccccttccccaggggtctccagggatccgcaaccctccggcacctggccggggtcgtcctagcccagccgggggaaggaggggctgagtgcgggaggaggggaggggcggggagctgggctggctggatttatgaatggagagcgacccgcgcgccggaacagcggctcctggcggccgtcggggagcgtcgcggccctggggaccca

SEQ ID NO: 103009 - DNA, 30 bp, Homo sapiens
  chr1:32110462-32110492
  hyper
catggtgattctgacgtcacactcaggcaa

SEQ ID NO: 103010 - DNA, 129 bp, Homo sapiens
  chr1:32110846-32110975
  hyper
agctcctgagtttccgcagatgagccgcgggaaaggagacgaggggcggtggccaggcggttgccctgacaacggggaaccgaccgactcttcccggtagggagaggcgatggcggaattactcctcta

SEQ ID NO: 103011 - DNA, 30 bp, Homo sapiens; identical to SEQ ID NO: 278
  chr1:32135815-32135845
  hyper

SEQ ID NO: 103012 - DNA, 728 bp, Homo sapiens; identical to SEQ ID NO: 279
  chr1:32180092-32180820
  hyper

SEQ ID NO: 103013 - DNA, 626 bp, Homo sapiens
  chr1:32180905-32181531
  hyper
cgccctaggccctgcctcctatctggctccgcccagccctggccaaccttagaacctgtcccaaggtccagagaggcctagatgaggggtagcctgcctctgagaggcatggagccctcctcccgcgtggggtcagggaatagaagggcgtcgagggtggcgggtgagggaacgttcctggcgccgcgaacgggaagcctccaggctgcaggacgtagctgcggggacccggcagtctgcgaggctggagtggccgaggccgccccgagcatagaaacagccctgtatacgtgggcacagaaaggcccagggaggcgcctgggcagaagtgtctaggacgatgcctctgccacggagccctggagtgggggcagctgatggctcaagacacatgagctctggtggcgagtacagggacgcggggtttggggaggcccaagtcaaggtccatccttctgggatgaggggcggaggatgggaggcggagcccggtctccagggcaccagccctccacctagcgggaagcttgggaatcgcggagtgcagaggtggggtgcggaaagggttccaccgcgcctgggctcctttttctccttggaggtcccactggcgcctacccaccacc

SEQ ID NO: 103014 - DNA, 170 bp, Homo sapiens; identical to SEQ ID NO: 35385
  chr1:32226157-32226327
  hyper

SEQ ID NO: 103015 - DNA, 166 bp, Homo sapiens; identical to SEQ ID NO: 35386
  chr1:32226372-32226538
  hyper

SEQ ID NO: 103016 - DNA, 30 bp, Homo sapiens; identical to SEQ ID NO: 281
  chr1:32226920-32226950
  hyper

SEQ ID NO: 103017 - DNA, 30 bp, Homo sapiens; identical to SEQ ID NO: 35388
  chr1:32228806-32228836
  hyper

SEQ ID NO: 103018 - DNA, 30 bp, Homo sapiens
  chr1:32229244-32229274
  hyper
gggagggggggggccgagattagagattca

SEQ ID NO: 103019 - DNA, 30 bp, Homo sapiens
  chr1:32230236-32230266
  hyper
ccgccagggtgtcccgggccctgcaggctg

SEQ ID NO: 103020 - DNA, 1025 bp, Homo sapiens
  chr1:32237638-32238663
  hyper
cggcggcggcggcgcgggtgtggggccgcgcggccgggagcgggcggaagagagcgcgaatttgaatttcaaaggcatctggaacccaagtgcttctgcgttgcccgattgtgtgtgtggcgcttttgtgtgtccgcgaatgcgcgcgtgcgtgtgtggcgtgtgtctgggtgttttatgactgtcctccgtgaggccgtgtgtgagcccttgcgtgggccgtgagtgcggcagggagcgcggtgtccgggggccgcctgtcggtgtgtctgtgcgtgcttgtgcgctagcctttgcctctgcgagtgcgtatttttaggaccgagtctgtctatatgagcctgtgtctgtgtgtgtgcgctcccggccctgcgtgtgtctgtgagcgtctgccggggcgcgtgtgtgctcggaaccccgcggtggtgtgcgggtgtgtccgtgtgtctgtgcacgtgcaggcgagcgttcccatctgtgtgtgtgcatctgagtctgggctatgtgtgactcagggaccagtctatgagcctgcctgtgcctttgagccgatacctgtgtgtgactcagggacgagtctatgagccgatacctgtgtgtgcttgggtgtctgtgtcgtggtgtgtccctgcaagcgtttgtgcctgcaggtgctggagtgtgtagctgtgggaatgagtgcgtgtgagtgtgcggaaggggcaccgcgcgagggagcgccggtgcggaaggctaagcgagcccgcgccctccacggacggtgccgccaccccctccctccgccccgcgctatgtgcccctgtgtgcccgcgccgccggggccgtctctgggctccgggagggggctgagcgagcggccctttcctcccagggaccccgggcccgccgccagccctgggcacacccgccccttcctccagcggccccgctcgctgacccacgggcactcgatgggcactcgggaggcaatggccggagaggatgggcagttagcgggagggactgagtggcgccggcttcacgct

SEQ ID NO: 103021 - DNA, 30 bp, Homo sapiens
  chr1:32254250-32254280
  hyper
caagccccgcccagcgttgcatagcaacgt

SEQ ID NO: 103022 - DNA, 30 bp, Homo sapiens
  chr1:32404311-32404341
  hyper
gaagggttctttctcgctacttggccctaa

SEQ ID NO: 103023 - DNA, 30 bp, Homo sapiens
  chr1:32404365-32404395
  hyper
acggggtggccgccacgtcctgggcttggg

SEQ ID NO: 103024 - DNA, 259 bp, Homo sapiens
  chr1:32410104-32410363
  hyper
gcggagggggcagggcgctggctccagctgtttgcatgaatcccccgcccctggcctctctgcctgtgcaggaagccctggtgtcgtaccccgagccgctgcagttcgcactctgcggcctcctcaggcactagagcttcccctgcgtccgcctttgggggaggggagggagtgaagctgtgaattccgggagaagtcaagggtcgctcggggcgtgggtccgcgcgcggaggggctcgctgtcccggtgccagcggga

SEQ ID NO: 103025 - DNA, 30 bp, Homo sapiens
  chr1:32479126-32479156
  hyper
agtaacaggtctcccgccccacactccgcg

SEQ ID NO: 103026 - DNA, 74 bp, Homo sapiens
  chr1:32480180-32480254
  hyper
cgaaggcgactttgcgatcccctagcgctaatgtcttgatggatagtgctgagctccccgcccctttcccgact

SEQ ID NO: 103027 - DNA, 67 bp, Homo sapiens
  chr1:32573588-32573655
  hyper
ccaataaagcgtttcgtcctggagttaactggtttgtccctttcgggctgccgtcctacagatccgc

SEQ ID NO: 103028 - DNA, 175 bp, Homo sapiens
  chr1:32574074-32574249
  hyper
gcaggcctgggcggcgctaaggtagctttctcctgggttgtgtttggccaacgcgtgtcttgactagattcagtggctcccctgaactcagggaagtcctacctacgtagcgaggtggagtcctctagtgaggggacgtcaggcgagccagcactaggccggtaagcatgggcag

SEQ ID NO: 103029 - DNA, 30 bp, Homo sapiens; identical to SEQ ID NO: 35393
  chr1:32645012-32645042
  hyper

SEQ ID NO: 103030 - DNA, 30 bp, Homo sapiens; identical to SEQ ID NO: 35394
  chr1:32645317-32645347
  hyper

SEQ ID NO: 103031 - DNA, 144 bp, Homo sapiens
  chr1:32666249-32666393
  hyper
gagagggcggagggcggagggaacttgcaccgaagcatcactcgagaccccaaacctccaggtcagtagccccctgagggagtgagggcgggggcggaatgacgcgggtctgacgctctgtcttcgagcgcggctgcggagctg

SEQ ID NO: 103032 - DNA, 30 bp, Homo sapiens
  chr1:32666720-32666750
  hyper
ggaggcttggggggcgctgctggaccgggg

SEQ ID NO: 103033 - DNA, 72 bp, Homo sapiens
  chr1:32671078-32671150
  hyper
tggagtgccccttgcggctgtgggaggggcagtcgggggctggggggacgcaggtacgcctgtcgccaggac

SEQ ID NO: 103034 - DNA, 30 bp, Homo sapiens
  chr1:32671398-32671428
  hyper
gcgagatgctaccacgttcagtcccctaac

SEQ ID NO: 103035 - DNA, 414 bp, Homo sapiens
  chr1:32687708-32688122
  hyper
ccccacttccctccttcgctctcttcgcctcggctgcgactggcggctaaggcaggcccagggaagctagggagatgaatccaggagtccggcctctggggttgtagcaggggtcggggttagagggtggatgtggagcaggaaatgaattcgaggcgagggtcgggaaatccatggaagggcggggccggctacctacccagagacgccgccatggcaacgccgctgtcttctacttccgggaacgaaggggcggagacccataatccggaagtgacctcgaaaccttttccggtcttactcacgttgcggccttcctcgcgtcacagccgggatggtgagtttcagagttaggggtattgcagtgggggtcctgggctgaggctggggcccaattccgagcactgacgttac

SEQ ID NO: 103036 - DNA, 300 bp, Homo sapiens
  chr1:32757387-32757687
  hyper
agaaagttggcctccgatctccaagcacgcttttcacgacgaagtgggactgttaagtttacagagctgctttcctcccccgggactgatggtacggtccccgggcggctccccacccatctgtcgcagaccttggtacaggcccagggggccctcggcggcctctccgggctgcccttgccccctgccgagttccgggcccgtgtctgcgcaagctgattggctggagcggtgcccgggctgcgcggctataggtgagcccaggaggggacgggcggggcgggccggaggcccgccccc

SEQ ID NO: 103037 - DNA, 165 bp, Homo sapiens
  chr1:32758018-32758183
  hyper
tcgcgtgggggaagcgtgaggtaatcttgatgggaagattctgaggaagtctgatgtggagagtttgagtgggactcctagaggggagggtgcgtcggagcggggaggctgaatctgatggagacggctgcaaggatacattttcttgccgagaacccaaagctc

SEQ ID NO: 103038 - DNA, 30 bp, Homo sapiens; identical to SEQ ID NO: 35400
  chr1:32801031-32801061
  hyper

SEQ ID NO: 103039 - DNA, 184 bp, Homo sapiens; identical to SEQ ID NO: 35401
  chr1:32827549-32827733
  hyper

SEQ ID NO: 103040 - DNA, 102 bp, Homo sapiens; identical to SEQ ID NO: 288
  chr1:32852879-32852981
  hyper

SEQ ID NO: 103041 - DNA, 30 bp, Homo sapiens
  chr1:32859498-32859528
  hyper
atcacactggtttgcgtcgaggtctgtctt

SEQ ID NO: 103042 - DNA, 1042 bp, Homo sapiens
  chr1:32930152-32931194
  hyper
cagtgaaagaaaccgcgggtatgcaataaaaacctgttgaatcgattaaaccatttcccttatttccagatttttgcggaaagcgccagtaggtgaaatatgtgcggactgatgagtcaaagctcttattccctggactgcattaatacccacgacgtgcttttcgctctccagacaaagagaccggtacttggcaggtccctcaagtgggactcaaaagaccgaaccgagctgcagcctttcgctagcactggtcctcgccccttttggcatcttggtacttgtagttttgtccactctatctttacccgaaaagccagcgctgagaccacaactcccatcaccctgcgagcaccagcgccttcagagcgcatcctccgaggggcaccagcgccattgaccaccctgctggccgaagggcccgccttcccgaggccaggcgctcccgcgattggccagccgccccgcctctcatcggagggcgccaggtgaatgaaaggggggcgtgtcggtgcgcggtgctccgtggctgcgctgctggaacccgctggaaggtgagcgcgaagaagcgggttggcgctgccgctttcgttggtttggggaggattcctagcacccgggaggctggctggagattggggttagcgggcagggttgcccccactcagtcatcctccttcggaccgcttggccctggcaactcctgggacctccgccccgcgagcccttctagcgtggggaggggcaggcgcggccgtggggccccagcttccctgtcattgggtgtcctccgcgtcgtccagccgggggtcgcggcgccgactacttccacggtgaatggtgcccaggcgtggggggctcggccacactggagaagtgccagcggcagcgatggccactttgtccgcgggaggccatgggaggggctaggccttggggtcccaccctcgggggccgtgccctgtagctggttctggtggcctctctgcaggtcgtctgatgctggacgggggagggtctgtcttgcgagcagtttagatgc

SEQ ID NO: 103043 - DNA, 30 bp, Homo sapiens
  chr1:32966547-32966577
  hyper
ccgggggcggggcgcgagccagcgaatttg

SEQ ID NO: 103044 - DNA, 30 bp, Homo sapiens
  chr1:33004986-33005016
  hyper
gtgtccccagccctcgggcgtttctgtcca

SEQ ID NO: 103045 - DNA, 37 bp, Homo sapiens; identical to SEQ ID NO: 291
  chr1:33005605-33005642
  hyper

SEQ ID NO: 103046 - DNA, 30 bp, Homo sapiens; identical to SEQ ID NO: 35405
  chr1:33116059-33116089
  hyper

SEQ ID NO: 103047 - DNA, 203 bp, Homo sapiens
  chr1:33116488-33116691
  hyper
tactctgaaagggtcgtaagcttaatagccttcaagaaaatggctgccctcttgccgcgggagtgtgcggaccaaacctctctcacgtgaccctgaccgggcgcagtcccgtcaacgccggcgcgcgcaatcgctggaagtcggctcggggaggcgtggggggaggggcggagcgcgcgcctcggtccccgcggaaagctact

SEQ ID NO: 103048 - DNA, 16 bp, Homo sapiens
  chr1:33116715-33116731
  hyper
cgcggcttccccgccc

SEQ ID NO: 103049 - DNA, 224 bp, Homo sapiens
  chr1:33168523-33168747
  hyper
cctcccagccccctcgtcttcccgaaccttctctccacccttcctttcgtgaggtcccgttgcagggggagtcagaaggggggtctgaagccccagggagcaccttccctgtccagcctgggagggtggaggcagggttgggcgggctgctcaaagggagccagcacccctctcccgcgagtgtttgggggtgtccgctgccgctcagcgccctctggtcccca

SEQ ID NO: 103050 - DNA, 30 bp, Homo sapiens; identical to SEQ ID NO: 35408
  chr1:33178039-33178069
  hyper

SEQ ID NO: 103051 - DNA, 30 bp, Homo sapiens; identical to SEQ ID NO: 293
  chr1:33182357-33182387
  hyper

SEQ ID NO: 103052 - DNA, 30 bp, Homo sapiens; identical to SEQ ID NO: 35410
  chr1:33207152-33207182
  hyper

SEQ ID NO: 103053 - DNA, 327 bp, Homo sapiens; identical to SEQ ID NO: 35411
  chr1:33207543-33207870
  hyper

SEQ ID NO: 103054 - DNA, 532 bp, Homo sapiens
  chr1:33219373-33219905
  hyper
gagagagtgggcaacccgcctgccccacctggactggccaggccttcccctgtgcgccctaggctgggcggctcagccggtctcccaggtcccgggaggggcggagccgacgggatgcgcgccaggccccgcccctcctccgggcccgcccccggcctggccattggccgcagagctcgggggcgtggtcgagctggggctgggggcgcccgcggtgcccgcccgcgagtctcgctgcctccctcccggggctgcgggcccggcggccgggctggctgggccgcgcttgggttcccgcgccggctcccgcacccgcaatggggaactcacaccacaagaggaaggcccccagcggtccccgggtccgcagcttctggcggttcgggcggtcggcgaagcggccggcaggtaggggccggggtgggggcggggcaggcagggaggagggtccctactgcggtcgtcgccaccgctgctgccccctcccggggcttggagggtgtgagtgtgggggggtcgggaatccccgcgc

SEQ ID NO: 103055 - DNA, 255 bp, Homo sapiens
  chr1:33282728-33282983
  hyper
aaatcactgaacctcgggctcctaatccccaacggcgcatttccaacccccaggcctgacctgcaggttccgggtgataaggtgcagtttctcttcagggctgggagcgtcccccatggctccgctacccctgcttcccccgctcagcccggcaccagagccccttcctgggtcaccgtcgccgccgcgtgccgggaactgtcacgcgagtccagccaggttgcatcagctgggctcggcgctccgcttactcgg

SEQ ID NO: 103056 - DNA, 30 bp, Homo sapiens; identical to SEQ ID NO: 35414
  chr1:33283480-33283510
  hyper

SEQ ID NO: 103057 - DNA, 127 bp, Homo sapiens; identical to SEQ ID NO: 35415
  chr1:33283880-33284007
  hyper

SEQ ID NO: 103058 - DNA, 622 bp, Homo sapiens; identical to SEQ ID NO: 35416
  chr1:33358605-33359227
  hyper

SEQ ID NO: 103059 - DNA, 30 bp, Homo sapiens; identical to SEQ ID NO: 298
  chr1:33429475-33429505
  hyper

SEQ ID NO: 103060 - DNA, 423 bp, Homo sapiens
  chr1:33430299-33430722
  hyper
cgaggagccaggggcgcccagcgccgccacagctcccgcctcagcgcccctcagccagcgcccggccgccgccgacgccgccaccaccgcctcaaccgccctcccggcgatagaagccgagcggcaacgacgaagtgattataaagcctccgccccgcgcgccgctgccctgcgcaggcgcttcgctcaaacacctcacaacccttgcgccccggtctaggagtgcgctgggcagggccgagcggggtggggccgagcgagctggggcggagctccgcctcctgccggtcaggtggttccagggccgccatgttgcggagactctcagagatcctagcccgctgctctccctggtctccgcctccaattccatcaccatgacacccaaggtggactttttggtttgccgttcctcacaggttg

SEQ ID NO: 103061 - DNA, 170 bp, Homo sapiens
  chr1:33438468-33438638
  hyper
gtgcgtttcacactgcggaacgagcacggctcgcgtcttcccttgcccggggcagggccagcgctttccttgggcactcgaacgaggggagggggccgcttagtgcctggaaatccgagcagccttggcttgcttggctgcgcaacccgccaatccggctgcgcccggtg

SEQ ID NO: 103062 - DNA, 154 bp, Homo sapiens; identical to SEQ ID NO: 35419
  chr1:33438839-33438993
  hyper

SEQ ID NO: 103063 - DNA, 273 bp, Homo sapiens
  chr1:33502497-33502770
  hyper
acgcacgccacgcacgtcccactcgccgctcacactggcccatagccgcgtccgtcagcccgttccgcccgcccctgagcacgacggactcttcaccttaccaactgcacggcgatactgaggaactttgcttttgattggacagaattggtgcgggataaggaaggggcgggccagcatgtactaagggtggcgggtgtgcggagtgggcgggaaaacgcgaaggaggacaggaggtcaggccggaaggtatacttcggcatttgacagttg

SEQ ID NO: 103064 - DNA, 30 bp, Homo sapiens
  chr1:33546518-33546548
  hyper
cacctgcgtggcggcggccctgtagttctg

SEQ ID NO: 103065 - DNA, 650 bp, Homo sapiens
  chr1:33592694-33593344
  hyper
gagtcgtatgggaagcgcgcttgtctgaggagtttttcgctgtgtaaatatgagaagctccttcctccaaaagcctccgttttctcatctgagcatatgagactctcagaagtggaaacgattgcctggcggaaccatgactgctcagcttccagccaccggaacccccagctcacggcccccatcccttgaagccacggtcttccggtagcgtaaagtcacttccgtattcgagagccttctaggcttcgagccacgcgatgtcgcgccctctggcggctgggaggagggaccgactttaccaaacggtgagaaggaacagggaagtccattggttgaaagacggagaggcgcagctcagtcttccaacctcaaccaatgttaaaccgaaccttcgccgagggcggggctctcacgggaaaggggtcaacccgggactgaggcggcgtgggaagcgggcgaccttatctctgctcagctggaaaaaggcccagggtaacaccggaagtgggcttatttgcgcatcagctactttcgcttctacttaaaaacggaggatctgggtaaaagaaccgaaaggctgtacgaacctaagacttgtctccgatgtccttctcaaccatcaatttcatatgcgagggaaaacacct

SEQ ID NO: 103066 - DNA, 30 bp, Homo sapiens; identical to SEQ ID NO: 35421
  chr1:33646887-33646917
  hyper

SEQ ID NO: 103067 - DNA, 30 bp, Homo sapiens; identical to SEQ ID NO: 35422
  chr1:33647839-33647869
  hyper

SEQ ID NO: 103068 - DNA, 499 bp, Homo sapiens
  chr1:33721207-33721706
  hyper
tctgaggtctggagccgggggacagccggtgccacctctgatagactctgcgagaggagccactgccagcttcgggccgccccatccgtcggggatccggcctagggctagggaggggtggctgggcctgtgcaaacttctactccccacccctatgtcctcgtcttaaaaaaaaaatcggcctggattttgagcaggtcgttatcaggggtgagggtccatcctgggggtcccctccaggcggccgtcttcgagggagacccccaggggcagcctggcaccgcgcgggctcggcctggtcagggccgtggcccgccaggcccaagtccccagcctgccatcacccaggagtggggtggcgaggcggccgccgggcctgggcaggacaatggccacggccgccggggccccgggagcccccgcgctggggaaggggctgtcctagggccgggcgccggtgccctccccgcgcggctcaggcgggcggaggggggcgagg

SEQ ID NO: 103069 - DNA, 30 bp, Homo sapiens; identical to SEQ ID NO: 302
  chr1:33722120-33722150
  hyper

SEQ ID NO: 103070 - DNA, 397 bp, Homo sapiens
  chr1:33772445-33772842
  hyper
gggctccagcagaactcgggcgacagcaccttggcgggcttgtgcagccagaagaacttgttgaggtggctctcgtcgtgccagcgcgcctccaggccgcgcgcgcggtcccagtccaggccccccgcacagtgcgccgtcagcccgcgcagcgccgccacgctgcccccgaacaccgccgcgtggttatagaagtcgccctggccccacgccatcgcggcggccgaatgcgcgtcgcgttcgaagggcagcagccacgacggccagtggtagtgccaggagtgcagctgcgccaccgactcggccagcgcctcgggcccaaaagtgccgctgaagtgctggtccacgtccatgcagaacatgaagtgcgcctcgcggcccggcagcccgcccagcg

SEQ ID NO: 103071 - DNA, 100 bp, Homo sapiens
  chr1:33772856-33772956
  hyper
cgcatgcgcgccatcgacacgtcttgccagcgccgctcgcgcgccacgcgctccacgggcagccggcgtcccgggcccagcgccacgcggggcaccgctc

SEQ ID NO: 103072 - DNA, 92 bp, Homo sapiens
  chr1:33772986-33773078
  hyper
cgctctggcccgccatgaagtgctgctccgccgtctccaggaagcgctccaggtacttctccaggtatctaagggcgcggcgccaccgtcag

SEQ ID NO: 103073 - DNA, 30 bp, Homo sapiens; identical to SEQ ID NO: 303
  chr1:33788139-33788169
  hyper

SEQ ID NO: 103074 - DNA, 785 bp, Homo sapiens
  chr1:33896038-33896823
  hyper
tgcgctgtcacgccgcggctggggagcgggcgccccggtcaggcccgacgcccgggtctcaccgcactctgcgggacaagcggagcaggcgcaggccgcgcaagaccacgggctgccgcggcgcgggcctctccgcaggaggggggtcggtccccggagaaagcgagtcactgacgggaccttggcccgttcccgttccggttcccgttcccggcaagcctcggccccaggctctccgcagccctcctcgctgcgcgttcccggcccgggggcgccgcgctctgccggtcgccggccgggactgcgggctcccagcgcgggccccacgccgcggaccaggggtcaggccgcctgccgcccgcctgtccgtgcccatggcaatgccccgccccgcgcggcccgtcccggccgagcgctccggcccgaccgtgacagctgggtgcccaaagggttaagccggcagcgcggcggccggtgtcccccgcgcgctgcccgtcagccgcgagctggccccagcgcgcacgcgcccgcccgttacctgcggtcgcctccgcgctcctcctccacctggccgctctctcccgggggccgcccctcagcccgccccctcggctcggcgccgcgcaccctgctggctgctcggacgctgcccgcggaggaggggcgagggcgctattaccatatattagcataccagcgcgcgtcacgtggccgctccagccaatggtcaccctagaagggcggggattgggcggaacacgccttagtgctgctcccagcctgaa

SEQ ID NO: 103075 - DNA, 423 bp, Homo sapiens; identical to SEQ ID NO: 305
  chr1:33937918-33938341
  hyper

SEQ ID NO: 103076 - DNA, 30 bp, Homo sapiens
  chr1:34100648-34100678
  hyper
agcccgtttgagaaacgtcagcactcggcc

SEQ ID NO: 103077 - DNA, 2421 bp, Homo sapiens
  chr1:34628643-34631064
  hyper
gctgagcggtgcaagcgccggtgagtcggcctttttctctcccctaggggcaggatatgcccaaggggcagggacaaatctagccagaaaaacaattcagtccgatgccgagacattctccaatcagctaagccagagaccggcctcgcctcaacgtacgtccgggaggcctggcgggaggtagcagcgattcccccaccgcccatgtggcaagtctgggtgaccagcagcgtcggtatgcacagcctcccagtgggtgtgggtgtgcgagaggccagagctcccaggcgcgcgcaccgcgggcgcccctctctgggtgtcggtggctatgactcttagcagaacctaagaaagtcccgtcagctaggaatgagagagccagagctggctcggggcgccctccctgaccaagaaccccaacatgccgcggttaagcggtgggcgacacggtctgcgaggacagactcacaagacgctgaaggccagagtgggccagagagctcgccactcactgacctgccagaggagaggcgcactttcccaagaaggggaactggggtggtccaggccaagccttcagaggttcaatcggtggtttcaaaacaaaacaaaacaaaacaaaaacaaaaacaaaaaagaaaacacggctccaggtcgaaggtgccctaggtctaggcctggccagcaggtgtttcggtttctcccccagtgggtgtcagcctcgcgggctaaatgaaaatgcggttccaggcatcccggtttggacccgtctccacccgggcacacggaactttctagcttgtagctagaactgagcttcggaggggtgctgtgggtaaagcgggagggcaccagtcgcggccagtagcctccacaggggaccgggttccctcgaaggttcgcgtacctcccccgcgcgctgcaagctgcagccagacacccgcgaagttccgggactctccgcacccgctagatctgccccttcccggactcggtcgtcgggagctggtcccgccgcccgcgccgccgctgccgctgccgcagccgaggcgctcggctgcagcagggcgcgggaaagggcactttggcgcggagtgagcaccgaggggaatgtggcagcgcgaagcctggcggcggcactccctcccccgcctcgggctacaacccccaccccctccttcccatccctcaacaccctccagcccccacctgcaccctcctgcaaggaatgcgcgggacccccaccgtgggcacgcgtccacctgaaccccctcctagctccgagcgccgagggaggggtagcatttgaggagggggatggcggccgcagtctgcagtcggttccagagggggcaccggtttcaattggagaaaatgggcgggggcagggaagggcagaccttgcagacgcagaaatggggagggggcgcacggttcctctccagcccccaggaccagcgtgcctggcagaatcaggagccgggggagtagggctcccggaaagtttatcgggaaaaagcctagcaccgtgggggctgggaggctggagaaactgaagccacagaccaggtgccccgcaaccccgggcggggatgtctgtctcccaggcccccacaccggccgcatccgtccaagttgcggctggggttggggcagcagtgagggtgagggtggaggtgaggacgtggctgagggtggggtgggagacggaggcagggatgagaatgagagtaggcaactgggagggtgggagattcaggcagggatagaggcggggggagggactgggaccgggtcgaggatgggtgggctcggggctcgggtggggcgcgcggcggccgctggctcctcggcgcggctggactcacccgcggcggccgagacgctgagcaacccacagcccagcaacagcagcagaggcggcggcgttggcggcggcgggcggccccagcggctcccggcgcccggcacaagcgccgaaatcccggtttcgccgcgagccctccccgcggggcagccgcagcgccccagctcccgtccccgcgagcgcggcatggcgcggccggcagcgccgagggagaggctccgctcgccgccgaggagaaaggaggtcaggagagctctggagcttttttctgctcggaaaaaatcccggtacgcgggagccctgagcttctgcggctggaatgaaccaagtgtccgcccggccggggagaggcgcgctgcgctctcggaaatgactcgctccaatcccgcttcgcggggttcgcgccggggggcgggagggggtgaattatccccggattaatcactccggagccgcttctccgccgctccaaatgctgggggtggaggcgcagctaaggataaaatattggggggcgggggttcctcttcagcgccacctccacctccagataa

SEQ ID NO: 103078 - DNA, 30 bp, Homo sapiens; identical to SEQ ID NO: 35432
  chr1:34631309-34631339
  hyper

SEQ ID NO: 103079 - DNA, 30 bp, Homo sapiens; identical to SEQ ID NO: 35433
  chr1:34632103-34632133
  hyper

SEQ ID NO: 103080 - DNA, 71 bp, Homo sapiens
  chr1:34642418-34642489
  hyper
tctgatcccccgaagcgctctggggtcctttgggccccacccccacccaccccaccggcgggtcttgggct

SEQ ID NO: 103081 - DNA, 52 bp, Homo sapiens; identical to SEQ ID NO: 35435
  chr1:34642862-34642914
  hyper

SEQ ID NO: 103082 - DNA, 31 bp, Homo sapiens; identical to SEQ ID NO: 310
  chr1:35208445-35208476
  hyper

SEQ ID NO: 103083 - DNA, 593 bp, Homo sapiens
  chr1:35246932-35247525
  hyper
ggggtgccccacgcacggtcaaggtcccgcgccaagcggggaccgggctgggccggaagcgggcacggtactcgcggcaaactagcgtgggcgagtcctgattgcagtcggacctgccgccgcggcacttaacagtttgcagagtgcttcccgcccctgatctcattggagccttcggacagcccagcccatggccaccgatgcccccatttcacgcctgaggaagcggaggctcagacgggccaccagcccctccggaggctggcccgggagcgcctggcagcgtcgggtctaggagccggctccctcctgctccctcctccgcgccgcccggggtgtgcccgccgtctgtgtgcaccactgctgagcccagctccggcgccctcgcctctgctgtgggccccggggacgcggggtcaggccaccgcgttggccaggccgctgcaggtaagtgctggacggggcggggcgaggctgggcgggaccctcaggggcgccaagcgctcctggcgaccccctgcggcagggctggggcttgagcctgccagtgcgctgggatggggcgcgaagcgggggtgcggggagcccgccac

SEQ ID NO: 103084 - DNA, 90 bp, Homo sapiens
  chr1:35258519-35258609
  hyper
cgccgccctccccgtcgcgtttcctgcccccaccccgcccctctgcgctatttaaggcgcccccgccgctcgtgcggtccagcagggctc

SEQ ID NO: 103085 - DNA, 30 bp, Homo sapiens
  chr1:35259851-35259881
  hyper
aggtccaggagcactcgaccgtggtgggta

SEQ ID NO: 103086 - DNA, 85 bp, Homo sapiens
  chr1:35260185-35260270
  hyper
gcgggcgctggcggccgtagagcgtcagatggccaagatctcggtggcagaagatggtcgcctgcgcatccgcggagcactgatg

SEQ ID NO: 103087 - DNA, 30 bp, Homo sapiens; identical to SEQ ID NO: 35439
  chr1:35331634-35331664
  hyper

SEQ ID NO: 103088 - DNA, 30 bp, Homo sapiens
  chr1:35332188-35332218
  hyper
aaggagggagttcccgacccaggctccgca

SEQ ID NO: 103089 - DNA, 858 bp, Homo sapiens; identical to SEQ ID NO: 311
  chr1:35351016-35351874
  hyper

SEQ ID NO: 103090 - DNA, 121 bp, Homo sapiens
  chr1:35390546-35390667
  hyper
accatcgggaccgaacgaagcctcattcagcactcgggacagctccgaaggagcaaatccccgccgaatcccactcagcacccgggacagttcccagcgacattgccggccccggtagcca

SEQ ID NO: 103091 - DNA, 1462 bp, Homo sapiens; identical to SEQ ID NO: 35442
  chr1:35394586-35396048
  hyper

SEQ ID NO: 103092 - DNA, 148 bp, Homo sapiens
  chr1:35396107-35396255
  hyper
cgcccagagcgatgctgtaatgggggggagggggccacggtggggaagccgcagggggaggggctgaagacgtgggggaaggggtggctccggattccggctttccagggtaggtgtgaggaaacactgcctccggcgctgaaagttg

SEQ ID NO: 103093 - DNA, 30 bp, Homo sapiens
  chr1:35450772-35450802
  hyper
ccctgccgcccgcccgcgccgctcaccatc

SEQ ID NO: 103094 - DNA, 182 bp, Homo sapiens
  chr1:35497270-35497452
  hyper
agtgaatgtcaacgcgtccctaaggcgatatccgcagccgccccagccgcgtagcccacctggcaccgcccccgccgcaacgcctcgtcacgtggtgtggcctccgccccgccgtcccgcccactaccactgcggccgcacccaccttctgtcgcctccctgctaccggaggagcactggaa

SEQ ID NO: 103095 - DNA, 237 bp, Homo sapiens
  chr1:35544792-35545029
  hyper
tggctgccagccagcgacgacttcaagggtaagatcctatgcgggccgtaaggactcttcccctccccctctcccacttcttctatcccaaagtcgctcttcccaattcagggagctgggaccaccctgagccagcggccctgcgcatgctcaaccgcagagcacgacgggagaggggcggggtcggcggggccgtttcgcttcgaagattgtttcagaagcgttgggcggggcgtc

SEQ ID NO: 103096 - DNA, 30 bp, Homo sapiens; identical to SEQ ID NO: 316
  chr1:35658266-35658296
  hyper

SEQ ID NO: 103097 - DNA, 30 bp, Homo sapiens; identical to SEQ ID NO: 35447
  chr1:35658503-35658533
  hyper

SEQ ID NO: 103098 - DNA, 30 bp, Homo sapiens
  chr1:35658774-35658804
  hyper
taggccagctggcacggccccgcctactcc

SEQ ID NO: 103099 - DNA, 30 bp, Homo sapiens
  chr1:35734389-35734419
  hyper
ggccattaaccccccgagtcccggccccca

SEQ ID NO: 103100 - DNA, 30 bp, Homo sapiens
  chr1:35734821-35734851
  hyper
ttgggtccggagcgcgctggcgagcggtcc

SEQ ID NO: 103101 - DNA, 30 bp, Homo sapiens
  chr1:35735060-35735090
  hyper
tggcgggaataagtcgtggaggggtctcag

SEQ ID NO: 103102 - DNA, 84 bp, Homo sapiens
  chr1:36023210-36023294
  hyper
ttgcctccttcgctcgagccccagcccccagactcgggcaatacccacaagcaagatggcggcaacggcggcaccccctactgc

SEQ ID NO: 103103 - DNA, 2 bp, Homo sapiens
  chr1:36023575-36023577
  hyper
ta

SEQ ID NO: 103104 - DNA, 14 bp, Homo sapiens
  chr1:36023591-36023605
  hyper
cgccatatcgcgac

SEQ ID NO: 103105 - DNA, 1211 bp, Homo sapiens; identical to SEQ ID NO: 317
  chr1:36042458-36043669
  hyper

SEQ ID NO: 103106 - DNA, 30 bp, Homo sapiens
  chr1:36106973-36107003
  hyper
cacccggtcggaggcgacaagaacatagtc

SEQ ID NO: 103107 - DNA, 30 bp, Homo sapiens; identical to SEQ ID NO: 318
  chr1:36107280-36107310
  hyper

SEQ ID NO: 103108 - DNA, 652 bp, Homo sapiens
  chr1:36173084-36173736
  hyper
agcccctgctggagacggaggttggggagccccgagagtgggtgagaactgaggcctcggggtggaggatatcccaggagtgtggaaggaagcggtcccacgacagcccagggagacatcaaggtctagggagcggccctcaccctgagagctgtcactgaatgttgggggccggtgctaattcgcaccactcaagaacacacccacaaacccagtcccaccaccaggttcccaccccaacaccctacccgcagcagccctctcctccgtgctcccaccccgccctgcagacccgggttaatcctcccctccctgctttgtgcgccctcgcgcctgaggccaaagccctgggcggcgcgggcgctcccggcagctgaggtggcggggcgggggccgcgggggaggagacacaaaagggggaggggcccaggctgcagctgccccgtacccgcggggacaaagggcctgctggcgggccggccccagccgttttcatgcttgttgggattaggggcagtaaagggcgctcgggactgtgcggatcaacagtctgtgcggggcggcgcgtgggggcgggcttggccccgcccgcccctgctttgtgcgcagcccccggcccgcgccactcgaggcgccgcggggctccggggag

SEQ ID NO: 103109 - DNA, 30 bp, Homo sapiens
  chr1:36184758-36184788
  hyper
taaggcggtagccgcggggctctgtgcgtc

SEQ ID NO: 103110 - DNA, 86 bp, Homo sapiens
  chr1:36235728-36235814
  hyper
gcagctgctggtagcggagcctgggggagctggaggtgcacgggggcggggcagtcggtaccaggcgagccgtggtctttgacctt

SEQ ID NO: 103111 - DNA, 30 bp, Homo sapiens
  chr1:36274197-36274227
  hyper
tggggggcggtgaccgcgccccagccggcc

SEQ ID NO: 103112 - DNA, 30 bp, Homo sapiens
  chr1:36396250-36396280
  hyper
ggtggtcacttgaccgcctgtgaggaggcg

SEQ ID NO: 103113 - DNA, 30 bp, Homo sapiens; identical to SEQ ID NO: 321
  chr1:36549704-36549734
  hyper

SEQ ID NO: 103114 - DNA, 30 bp, Homo sapiens; identical to SEQ ID NO: 35454
  chr1:36554311-36554341
  hyper

SEQ ID NO: 103115 - DNA, 30 bp, Homo sapiens
  chr1:36554886-36554916
  hyper
tccggccttatagacgtctcgccccgaaca

SEQ ID NO: 103116 - DNA, 174 bp, Homo sapiens
  chr1:36615011-36615185
  hyper
acgggttagctcggcgacccctgcagacgccggagcctaagccgctgcccctcagcccacaagaccgaccggcactgactcactgcgcctgcgcggcctcccgcggggcaccacgggactagtggtccggccgacgtgggcaactcccgcccaacaaacgtcagactacaacac

SEQ ID NO: 103117 - DNA, 30 bp, Homo sapiens
  chr1:36621191-36621221
  hyper
tgccggagcaagggcggcagcaaggctccc

SEQ ID NO: 103118 - DNA, 30 bp, Homo sapiens
  chr1:36622132-36622162
  hyper
gccggccggctgggcggggacccctccgct

SEQ ID NO: 103119 - DNA, 30 bp, Homo sapiens
  chr1:36689745-36689775
  hyper
ggtgggggcagtggcgtcagcaacgccccc

SEQ ID NO: 103120 - DNA, 78 bp, Homo sapiens
  chr1:36690053-36690131
  hyper
cgggctggttgttccgttgcgagctgcagctgcgatctctgtggtaggcccaggtgagtgagcgcctctgatggaagt

SEQ ID NO: 103121 - DNA, 30 bp, Homo sapiens
  chr1:36772402-36772432
  hyper
ccgggagctgagagcgccttccccgtgccc

SEQ ID NO: 103122 - DNA, 30 bp, Homo sapiens; identical to SEQ ID NO: 35456
  chr1:36772822-36772852
  hyper

SEQ ID NO: 103123 - DNA, 21 bp, Homo sapiens
  chr1:36788083-36788104
  hyper
gctctgcggacagctcggggc

SEQ ID NO: 103124 - DNA, 31 bp, Homo sapiens; identical to SEQ ID NO: 323
  chr1:36789069-36789100
  hyper

SEQ ID NO: 103125 - DNA, 41 bp, Homo sapiens
  chr1:36789375-36789416
  hyper
cgccggggaggccgcggcagggacccgcccccaggccacta

SEQ ID NO: 103126 - DNA, 30 bp, Homo sapiens
  chr1:36850725-36850755
  hyper
tgggcgggcctgaccggctcggcaggtgaa

SEQ ID NO: 103127 - DNA, 30 bp, Homo sapiens
  chr1:36851759-36851789
  hyper
atctatatctgcggcgaggctgggacggag

SEQ ID NO: 103128 - DNA, 30 bp, Homo sapiens; identical to SEQ ID NO: 324
  chr1:36862992-36863022
  hyper

SEQ ID NO: 103129 - DNA, 174 bp, Homo sapiens
  chr1:36863406-36863580
  hyper
ccgaagctagcgggcgcctggactggctgcctcccgccggctgcagcaggacggagaaaccatgccggcgaccgggccgctctgtcctccgggcgcagagtgcgtcagtgctctgcaagtcaccgcgtcacggagaaactacaatccccagaatgcttcgcggcgcggggctcg

SEQ ID NO: 103130 - DNA, 31 bp, Homo sapiens; identical to SEQ ID NO: 326
  chr1:36883607-36883638
  hyper

SEQ ID NO: 103131 - DNA, 230 bp, Homo sapiens; identical to SEQ ID NO: 35461
  chr1:36916114-36916344
  hyper

SEQ ID NO: 103132 - DNA, 30 bp, Homo sapiens
  chr1:36930105-36930135
  hyper
tggttgtgtgcccacgtttagcagcgtgct

SEQ ID NO: 103133 - DNA, 867 bp, Homo sapiens; identical to SEQ ID NO: 327
  chr1:36931642-36932509
  hyper

SEQ ID NO: 103134 - DNA, 219 bp, Homo sapiens; identical to SEQ ID NO: 328
  chr1:36933229-36933448
  hyper

SEQ ID NO: 103135 - DNA, 322 bp, Homo sapiens; identical to SEQ ID NO: 35464
  chr1:36936919-36937241
  hyper

SEQ ID NO: 103136 - DNA, 78 bp, Homo sapiens; identical to SEQ ID NO: 330
  chr1:36937668-36937746
  hyper

SEQ ID NO: 103137 - DNA, 30 bp, Homo sapiens; identical to SEQ ID NO: 331
  chr1:36938251-36938281
  hyper

SEQ ID NO: 103138 - DNA, 30 bp, Homo sapiens; identical to SEQ ID NO: 332
  chr1:36939051-36939081
  hyper

SEQ ID NO: 103139 - DNA, 30 bp, Homo sapiens; identical to SEQ ID NO: 333
  chr1:36939438-36939468
  hyper

SEQ ID NO: 103140 - DNA, 30 bp, Homo sapiens; identical to SEQ ID NO: 334
  chr1:36945020-36945050
  hyper

SEQ ID NO: 103141 - DNA, 30 bp, Homo sapiens
  chr1:37486454-37486484
  hyper
gccctggctgctctccgtggtgctgaacac

SEQ ID NO: 103142 - DNA, 170 bp, Homo sapiens
  chr1:37498397-37498567
  hyper
aggaggagacccacccgctgggtttctgaccgcctcctaggaaaatctcaagtacggaaaccaagcccgacaccggttccggcacctctttcacgccgctggcagcccaaggtccgccctgaagaagagctgtagaggaggaaggtggccctggctcggcggagtccggc

SEQ ID NO: 103143 - DNA, 247 bp, Homo sapiens; identical to SEQ ID NO: 336
  chr1:37498597-37498844
  hyper

SEQ ID NO: 103144 - DNA, 794 bp, Homo sapiens; identical to SEQ ID NO: 337
  chr1:37498888-37499682
  hyper

SEQ ID NO: 103145 - DNA, 561 bp, Homo sapiens; identical to SEQ ID NO: 35473
  chr1:37500013-37500574
  hyper

SEQ ID NO: 103146 - DNA, 577 bp, Homo sapiens
  chr1:37500602-37501179
  hyper
cgggagactgacccgggaaccggcttccctccccaaccccattcctcctggcagcagagttggggctgggggttcggagaggcagaattcaaagcgaattgtctacgctgggccaggggagctgagggagttggtagaggtgggagagcccaagtcagaccccctgctgtgggaagctggacttgaccgcgcacaggtcctggggctgcggaggaggaagaccgctcacgccttagatgtaggggggcgtgggcgccgggcccgctccctctcagccctctcccgtaactgtgcaggaagggctggtgccccctccctcattctcctgagaaagaataaagagaaactgtaatttgtcgtgggatggagtaggatccgtgggggagcaagctaaaggggttaaaaagaaaaacaacgttgtttattagcaataataattttttttcaagtggcgctgggtgtgagggaagggaaaggctgtggagcgaggctggagcaggaggctgcgaattactcagttaggcgagtttaatgacctttttgacagagacaaagcggtgccgatacagtagataaa

SEQ ID NO: 103147 - DNA, 296 bp, Homo sapiens
  chr1:37501687-37501983
  hyper
ctggaaaatgttgcccgagggatcggagggaaggacacgcagaccaaagctagggaagcagcagctgccacctcttgataaaaagtaagggctccagtgggcgccagtaaggaggaagtgcaggagagggcagcagagggcgcggcctcccggatatagctgggggagccccttccttggggacgcacacccctccccatcgcctgcctatcagcttccgcaacaggtttggttgccccaaggaaccaaaaggcctagctgttctctaaggaagaaaatttcggtgcgctgataga

SEQ ID NO: 103148 - DNA, 165 bp, Homo sapiens; identical to SEQ ID NO: 35476
  chr1:37721107-37721272
  hyper

SEQ ID NO: 103149 - DNA, 30 bp, Homo sapiens
  chr1:37789657-37789687
  hyper
aaggggacccggcgccgtggttcacgcctg

SEQ ID NO: 103150 - DNA, 30 bp, Homo sapiens; identical to SEQ ID NO: 341
  chr1:37939709-37939739
  hyper

SEQ ID NO: 103151 - DNA, 396 bp, Homo sapiens; identical to SEQ ID NO: 35478
  chr1:37940473-37940869
  hyper

SEQ ID NO: 103152 - DNA, 157 bp, Homo sapiens
  chr1:37980345-37980502
  hyper
atgttgggctgaggcgggcggcggcggcgcgaggttgggggcggtccctgcgccgccagggggcgcccccccgctctgcgcctgcgcgcgcggcttccggagacgcgtgcagcgccgtgccgagcttcgctaaggccggggctctcgaaggtccttc

SEQ ID NO: 103153 - DNA, 30 bp, Homo sapiens; identical to SEQ ID NO: 343
  chr1:38019537-38019567
  hyper

SEQ ID NO: 103154 - DNA, 106 bp, Homo sapiens
  chr1:38019906-38020012
  hyper
tggacttccgcttccggggtgcccaggctcccagaaatcctcgcggcaaaggttaaacacgtgactactccctagtgggtgtggccgcagcgacaggcttgggtgg

SEQ ID NO: 103155 - DNA, 136 bp, Homo sapiens
  chr1:38061486-38061622
  hyper
ttcccaagcccggccgaagacacccgcctgaaccacgccggaccacgtgtgcacgacgtacgtcacttccgctcgcgtccctctcggcctcagagcgacttcctgtgaacgcgcggcgcgcgccgtcaccctcctg

SEQ ID NO: 103156 - DNA, 30 bp, Homo sapiens
  chr1:38099774-38099804
  hyper
caccgggggccgcagcgcatgccgcctgcc

SEQ ID NO: 103157 - DNA, 418 bp, Homo sapiens
  chr1:38100074-38100492
  hyper
ccctgtcctgatcgccgaccggagagcgatcagactccccttcctttctgtctccccccacgcacccagctagaaccagccccgacgggagggcccgccgcgccccagctcccggggaagggggcgctggggagaaggatggggcagctacgaggggactcaccttcgtgctgccagtcgcgacgggggcaggcccgggaggggcgagggcgcggcccgctcacccgcccgctgcgggactgtcctgggcgcccggctcgcctgcgctccgcccgcccgttcccaagttgctcaatctgcggacggctcacgccctcggggccagcgccccacccggcgcatcggtcctccggggcggctcggagctgccctcgttctccgcagcacccgagcggatgccctactctggccggtcgct

SEQ ID NO: 103158 - DNA, 58 bp, Homo sapiens; identical to SEQ ID NO: 347
  chr1:38100533-38100591
  hyper

SEQ ID NO: 103159 - DNA, 30 bp, Homo sapiens; identical to SEQ ID NO: 35485
  chr1:38155510-38155540
  hyper

SEQ ID NO: 103160 - DNA, 257 bp, Homo sapiens; identical to SEQ ID NO: 35486
  chr1:38157953-38158210
  hyper

SEQ ID NO: 103161 - DNA, 30 bp, Homo sapiens
  chr1:38218518-38218548
  hyper
ctcggggtggggggcgcggacggccttacc

SEQ ID NO: 103162 - DNA, 444 bp, Homo sapiens
  chr1:38219543-38219987
  hyper
cgatggtgcgaaggtcgggagcccccctttcggctggagggtaggcagggtgaggagagggcagcggaggggcgctctcctcagtgatctgccaggcatcctaaccccatcctccgtctggactctcgcagttgtcctggttcttctcatcaaaggccccggcccccagggcgcgtccaggctccgctcccccgtacgccgccttccggggcgctggcccccatatccgcccacgtgcgccccagtgcggagaccctgccctcaccaccacctggatcaggccttccttcttggccactcccaccccccaccctccgcagtgcagcctggaggggggactcacgggtgcaggaagccgagggcgggtcggtgggtgagcgcgcatagctgtcctggcacacgcagaaggtggaggcgttttccagggcccggctgtgctctggg

SEQ ID NO: 103163 - DNA, 314 bp, Homo sapiens; identical to SEQ ID NO: 35488
  chr1:38229928-38230242
  hyper

SEQ ID NO: 103164 - DNA, 645 bp, Homo sapiens
  chr1:38230282-38230927
  hyper
cgcatctccctgtctccactcttcatctccccgcccccgcacctcccacctccaatcactcagcttgtccgtctcaccggccgctggaccgccgcctctggctcccgcggttcctggcctctttctttcccaacctcccgggtctccagcccccaagctcctcagcgcccctctcttcgctactgcttgatcacatttttctctgtctctccagttctttgctgcctgcttgcttcaagccccaatacagactctagtctctccaatgactccttcccccagaacccccatcgccagccccctatcttttggtatgccacgctccgagcagagctcaccagtcttctcaccttcctcggcggtcccaggccgccagggtcccaaaagcagcgcgagacagagctgcatccggcagaggaagaggcgcagcgggtgtggaccggcgcaggtctccatggtccgcagaccgagctgtcagtccggcggcggctcaagccgcgccagcctagcaccgctgagcaatgcccccagaccccagagccagcggggggcggagtctcaccgctcaccatcatccatgggaaccaatcactaggcaccgccgcgggatgccaaccaatccccgccagcagagggtgggaaggt

SEQ ID NO: 103165 - DNA, 30 bp, Homo sapiens; identical to SEQ ID NO: 35491
  chr1:38260395-38260425
  hyper

SEQ ID NO: 103166 - DNA, 72 bp, Homo sapiens
  chr1:38273327-38273399
  hyper
catatttccagttccggattccttggtgagcctggacaagcccctcccgctctctgcgcctcagtctcccaa

SEQ ID NO: 103167 - DNA, 30 bp, Homo sapiens
  chr1:38274360-38274390
  hyper
tacggcagctgggccgccggcgcccggagc

SEQ ID NO: 103168 - DNA, 30 bp, Homo sapiens
  chr1:38325380-38325410
  hyper
cagcctccaattggcgagcggggcaccgag

SEQ ID NO: 103169 - DNA, 137 bp, Homo sapiens; identical to SEQ ID NO: 351
  chr1:38412696-38412833
  hyper

SEQ ID NO: 103170 - DNA, 30 bp, Homo sapiens
  chr1:38455852-38455882
  hyper
tggtggagcgatgccgagaggttcgcagat

SEQ ID NO: 103171 - DNA, 38 bp, Homo sapiens; identical to SEQ ID NO: 352
  chr1:38461632-38461670
  hyper

SEQ ID NO: 103172 - DNA, 30 bp, Homo sapiens
  chr1:38478315-38478345
  hyper
tacttcctgaaagccggctccggataggtt

SEQ ID NO: 103173 - DNA, 30 bp, Homo sapiens; identical to SEQ ID NO: 353
  chr1:38478687-38478717
  hyper

SEQ ID NO: 103174 - DNA, 681 bp, Homo sapiens; identical to SEQ ID NO: 35495
  chr1:38510052-38510733
  hyper

SEQ ID NO: 103175 - DNA, 1026 bp, Homo sapiens; identical to SEQ ID NO: 355
  chr1:38510773-38511799
  hyper

SEQ ID NO: 103176 - DNA, 292 bp, Homo sapiens; identical to SEQ ID NO: 35497
  chr1:38511821-38512113
  hyper

SEQ ID NO: 103177 - DNA, 313 bp, Homo sapiens; identical to SEQ ID NO: 35498
  chr1:38512126-38512439
  hyper

SEQ ID NO: 103178 - DNA, 702 bp, Homo sapiens
  chr1:38512643-38513345
  hyper
tcgctcccggggtcccgcgcgccggccgtgctgattggccgctggggcttcattcacggcccccctaccgtccgcgtacacactcacgccccgggggcgcggccgccacgtggggagtggcgcgggggtggccctgggaccgcaccccctctcgtcctggctgtgtgggccccgctttcccccagcgctggagactccgagcccggccggtcccacattccacgcgagctgaattcccgcccgcatcccgcccgggcagcagggattgccggctccgggaggcgctcgggctccgagaagcggctcagccccgcgcccctccctcctcagtaccgctgccggcggaccaggattcccgcgggtcctggcggctgcgagcgcgaggcggcgcggattcgcggctcggttccggcgcgactgctcaccgcgcccgcctcgcctcccgcggctgccagcgtgcactgggcgctcctcggcgcgtctgcccggcccgtctcggctttccttctccttcctctagtcccagcgtcacaactccgccgacctcctctgccctgagagcgcgtccggtgcgggcggagtcggacggactctggcttcacgcctcgcgcgggcacaccttctcccgggcactgaggcccaggtgagtaccgcgcgggcagctggggctgggacggcgggcggcagcggttctacagtcct

SEQ ID NO: 103179 - DNA, 99 bp, Homo sapiens; identical to SEQ ID NO: 35499
  chr1:38580184-38580283
  hyper

SEQ ID NO: 103180 - DNA, 75 bp, Homo sapiens
  chr1:39043983-39044058
  hyper
ggagatggaaggagccgaagggaccagagagagcgtggacgggaggaagacagacacgaagaacttaagagggga

SEQ ID NO: 103181 - DNA, 446 bp, Homo sapiens
  chr1:39044095-39044541
  hyper
cggcggcggcgagagcgggcgggggacacggggaccgggagacgcgatccggagagcggtgggaagtattcgcctccgttcctcaaacacaggatgcgagcgccctttggagaagtcgcgctcggcggaaacgctaactccccggccaagtgcaaatgtaaagaggccctgagagcactttgtgcaaatatcaggccgggaagtgctgcgcccgcggagctgccgggcacctcggcgcccccgcgccctcggctgcgcgctaattcactttgccgtcacctctcgggcggggtcgggcgggcgcgggcagccggagcgcgcagagggcgcagagcgcctcgcagggccaggggccgcggccctgcctaatggagcaaaagacagatcagcagaagcaaggcaggtggggcgggagcgggagcgtggacatccggcacgaagtcaga

SEQ ID NO: 103182 - DNA, 449 bp, Homo sapiens
  chr1:39269714-39270163
  hyper
gtcaggggcaggcctcggcggcgtccgggctgggggcgaggcgcccacgccccaccctcccgctgtggccgctggcgccggcccgagcgcgcgcagcccggtgcgcttcggcgcccgctgagcccgcgaacctctccgccgcgccatcagcgcagccatcagccgcgccgcgtgctgtcccgcgccccgctgctcgcggccgcgggccaccggcggtaataatgaggcacagcgccatgaccgcggccctcggctgcgccgccggcagcagcgcgggcgccgcattagcatctccgaagccttcctgtgtgttcttttgtgctcattttccagcccgaatgctcggcacatcccggaccgcggacggagccgcaggagccaccgcggccgaacgtagctgccctggttttagaaagagctgcgggctgcgggcccggctgtccccgaga

SEQ ID NO: 103183 - DNA, 518 bp, Homo sapiens
  chr1:39284065-39284583
  hyper
gggtccgcggctgcgcggcggggttcccagacccgggacttaggcgcaagcttcagagcgagctgtgtgaccctgggcacgcccagccctctttgatcaaccgtcctttctcggtaaaaccgagaggatacaactcctctgctcggggtcgtcgggaaacgcaggaccgagggacggcgccccctccttcccgagaccacccgccccatccactccgcaccgcactcccgtccagggaagtcttaaggaacccagtccccctagacgagaggtggaaggaggcgctggggaaatcctgcaaagcaggaatccgcactgaacagcaggatccttttccaggaattgtaaacccagaattgtaaataaaatgctaatgatttattcgtgctcaaacgccgggggctgcgtcgccgcttttgaagacagctccaagcgtggctttccaggaaggcaggcctccccgcggcgccttccagggctccccggggcctcctccctggccgcgggtccgggctggg

SEQ ID NO: 103184 - DNA, 30 bp, Homo sapiens
  chr1:39324903-39324933
  hyper
gtggacacagaggtcggggtccccgcgcgg

SEQ ID NO: 103185 - DNA, 206 bp, Homo sapiens
  chr1:39338989-39339195
  hyper
agcggcgtagctggcgccggagaccgcgactggcgggttgggagcagcactgctcatgcgcggaagggggcgcgcgcctgcgcacttgcaaaccaccggccgggatcgccgaggtgtggcctgttttcatggcgaccaggacgctctgcatccccagtagcaggctgagccgagggaggctgcgtatgcccgcccctctggctgtc

SEQ ID NO: 103186 - DNA, 30 bp, Homo sapiens
  chr1:39457242-39457272
  hyper
ccggcagcgagcggcgccttccaactccgg

SEQ ID NO: 103187 - DNA, 30 bp, Homo sapiens; identical to SEQ ID NO: 35504
  chr1:39457656-39457686
  hyper

SEQ ID NO: 103188 - DNA, 30 bp, Homo sapiens; identical to SEQ ID NO: 358
  chr1:39483421-39483451
  hyper

SEQ ID NO: 103189 - DNA, 128 bp, Homo sapiens
  chr1:39492080-39492208
  hyper
gctgcttatgtccgcgcggcagcttagcttaaggaccttccttccgaggtctctttaacagatttcctcttggcttgctgtgtgtccccttctcccagacctgaactcagggcgtgttccctgccctc

SEQ ID NO: 103190 - DNA, 30 bp, Homo sapiens
  chr1:39492555-39492585
  hyper
ctccgggcagagttcgtgcttcctccttcg

SEQ ID NO: 103191 - DNA, 30 bp, Homo sapiens; identical to SEQ ID NO: 35506
  chr1:39568220-39568250
  hyper

SEQ ID NO: 103192 - DNA, 96 bp, Homo sapiens
  chr1:39864296-39864392
  hyper
ttaaatagttccactcgctgggggtgcttctgtggttttcctctccttttaagaaaattagttaagaaatagtgttgcttccgggagtgacttaca

SEQ ID NO: 103193 - DNA, 43 bp, Homo sapiens; identical to SEQ ID NO: 359
  chr1:39874198-39874241
  hyper

SEQ ID NO: 103194 - DNA, 492 bp, Homo sapiens
  chr1:39874756-39875248
  hyper
cgagctagcgagctagcgggtcgcgctgcgcgggggaggaggactcgccccccgcccgaccctagcggagccttttgttcccagccagaagtttgcatgccgggaccgtgacagctgcgggcggggaggacggcggggccgcggggccagcggcgtggtggagaatagaggcggctgcttgtcatgcagcccacggcgtggcggctgcgggccggggactggcggcggcgggcgaggcggcgcccacagcactcgggactcagctgccggagggacaaactaacttcctgagcgcgggacctgaggctggcgcggccgggagccacctgcagcctgcggtgaggcgaccctggccctcggggcgcgcggcatggcgcggggaagcgggccgtgctgagcgagcccctccgacagacccgcggccgctgctgctgcccgcccgcccgcctgcctttccgaaggcctggcgcggggctccgctcgccttgtttt

SEQ ID NO: 103195 - DNA, 716 bp, Homo sapiens
  chr1:39956619-39957335
  hyper
ggcccagctggaggcaggaggcggagcctcctccgcaaagctggatcagtaccggggacgcagggcgcacagctagggctggcgggggcggcccgactggggcgctgcctgggctcacgcgggagccaggtgggggacgcagggagaagcagccgagcaggtgccgagaaggaggcgcccgcagaagcgcatgcaggggccacggggaaggcgccaggaggcggtgaggggccgcggtggccggaacccgggccggctgctgcgggcagaggaacaggccccacccgcggggcttggctggcaccgcccggctctccagacggggctacggccgcgtgtcgggcccggtggcgaccacggcacaccacggcgaggcagccgggtggcaccactggcgggaccgggacggcgccgcggccttaggatctctgcgccgaggcccgcggcgggagccacgacggccctgaccacgctgacgcccaggctgcgggctcctcgcccggaccaaccgccagccacgccgaggtcgcacctcggggtcgccccacccgcaacacctgccgccgcccggggctcctagcgggcgcggcctccgcgcccaggccccgcccccgcgcccccattggtcagtcccgggggtgggcgggcggcacagacggctgagccggggcaaggactcgcgggaatcgcgccgcccgggtcgctgccggagctcg

SEQ ID NO: 103196 - DNA, 46 bp, Homo sapiens
  chr1:40042401-40042447
  hyper
ttttcctcaggctgcgaagcccgaaagcggcggaggcggcagcgac

SEQ ID NO: 103197 - DNA, 626 bp, Homo sapiens
  chr1:40105060-40105686
  hyper
cgcacacgccccctacgccgacacctgtggcccccgcgctcacctgcctctgcccaggcggtgctggagggctggcccgcctgctcggcgagcccgtcgggccgacccccaccccgctcgccctccgcctgctcggtccccgcatcccggcccttacctcagctggccctcttggcccacgtcgatgggtccgtcggactccccgtcggagccgctcggctccttgggtcgcttcatggcgaacgcaggctgcctggtctcagccccgcggctaaggctcccagtcgggaagtcaggccccgccccggccccgccccggccccgcctcgggggcgccgccaccgccctttcccagggccctttcctgcgccgcagctccgggcgcccaggcgccccctcgcccccgcggtgacgcgccgccgagccgtgggaaggccctaggcggtcgccgccttcatcgacggctgggaggtccggctctgctccgctgtctcggctgccgcgcgctgggtggccttgggcaggtgccctgggaggccccgcggggaagccaggagtccccgtctgtccctgggtcgcctgggcgctgctggcctgtagaggcgccgcttcgatgcccgggattc

SEQ ID NO: 103198 - DNA, 30 bp, Homo sapiens; identical to SEQ ID NO: 35513
  chr1:40137955-40137985
  hyper

SEQ ID NO: 103199 - DNA, 182 bp, Homo sapiens
  chr1:40149562-40149744
  hyper
gcgaagcgctggcctcgggaacagcagcgcccgcgcggccccgcacctcgatgatctccagcatctccaggcgcgtgatgcgcccgtcgccgtccaggtcgtacatctcaaaggcccagttgagcttctgctcgaagctgccgcgggaggtgaccgacagggcgcagatgaactcccggaag

SEQ ID NO: 103200 - DNA, 8 bp, Homo sapiens
  chr1:40149784-40149792
  hyper
cgtgctgc

SEQ ID NO: 103201 - DNA, 184 bp, Homo sapiens
  chr1:40157110-40157294
  hyper
gtgcctcccgaaggcgacactatttgcataagccccgccccatcccgggcaggttgcacggctattggctcctctggagcggagtggcaggcggggtttcaggtggggaccgggtggccggcgaggcccggccgcaggagcgcgccccgcctgcccgcgctgaccttcccggagtcgccgggaa

SEQ ID NO: 103202 - DNA, 662 bp, Homo sapiens
  chr1:40157667-40158329
  hyper
agggtgctggttgcgcgcggagagcgcggtatgggtggcgaagtcccagcctctacctagccccgcgctagtcgtgggttccctccagccacccctctggcccttcattccggtccctccccagacgggccctcctcctttctcatggacccccaagaggcctctcgcgttctcccccgaaggacccctatgcctagccatggatcctccattccccaccctcccgttttcccgtcccgcagacggagccggtccccagccgccgccagtctccggcctcggatgttgacacaaacccgaggcggtttacactgagcgggtctggaagctttcagggccccggcaacacctcctccccgcacttgggggtctccccacagcccgggccggccgcctgggctgcactggcgtctgagagctcctgacacaaggctgtgggaaggaacccttttaagccaaactgggggcaaaaggggagccagacatccccgggctgggccacgtgcggggcagggacttctaaggatctgtcgaaagtcggggcggacggctggggattggcctaatcggagcgcggacgctgaagagcagcggtgagaggcggggcttctgtccgcgcggcgaaggtagaggtgggctgggcggggcgatggaggatgggg

SEQ ID NO: 103203 - DNA, 30 bp, Homo sapiens
  chr1:40204464-40204494
  hyper
aacgcgagggtgggcggggtctaagagcta

SEQ ID NO: 103204 - DNA, 30 bp, Homo sapiens
  chr1:40237131-40237161
  hyper
gtcctccgtgtccagcgcacaggcccgggc

SEQ ID NO: 103205 - DNA, 344 bp, Homo sapiens
  chr1:40254462-40254806
  hyper
ccgcggtccgagcagcgcaggggcgatgggcgagctcctgcagccacccgcttggtgcggttcccgcgagtccctgccctgccctgcccagcggtccgcgtcgcccgcccccaccccgggactgaccaatgggggggcgggggcggggcctgggagcgggggccacgcctgcgagggggcccggggctgcggccggtgtcgcgggtggggagaccccgaggtgctacctgggcgtggcgggtgggcaggcggcccgggcgaggggctcgcagcctgggcgtcagcgtggtcatggccgtcgtggcttccgccgcgggcctcggcgcagagatcctagggccgcg

SEQ ID NO: 103206 - DNA, 120 bp, Homo sapiens
  chr1:40254922-40255042
  hyper
cgcccccacctggctcccgcgtgagcctgggcagcgccccaggcaggccgcccccgccagccctcgctgcgcggcgtgcgccccctgcgcccccagtactgatccagcttcgcgggggag

SEQ ID NO: 103207 - DNA, 117 bp, Homo sapiens
  chr1:40255068-40255185
  hyper
cgggccaggagctctggggcccttctggagcacccgggagccacctgtgcacttctcagtcgccacggccccggtgcaggcctggcaggagaaggatccccgcggaaatgcctctac

SEQ ID NO: 103208 - DNA, 30 bp, Homo sapiens
  chr1:40268712-40268742
  hyper
cagcaccgaggccaacgcgggaggatcact

SEQ ID NO: 103209 - DNA, 30 bp, Homo sapiens
  chr1:40348888-40348918
  hyper
gcccctacaagcctcggggttcacccttta

SEQ ID NO: 103210 - DNA, 281 bp, Homo sapiens
  chr1:40367950-40368231
  hyper
ctccttgcccactccgagctggggaattagggctactccccgccccaccctgcgcgcctactttccccggcgcaccccgctgggttcaggtgcgcccgagccgccgcgaggggtagggggagggaaacgcgccacctggcggccctcagccctgaacttgggctggtcccggcgtccgtctggtcacccgtcggcccgtttcttgagctcagtggcccaagcctggatggcatcgaagcgaagattccgggatttagagcccgaaacgtaaccttcctgag

SEQ ID NO: 103211 - DNA, 32 bp, Homo sapiens
  chr1:40420567-40420599
  hyper
gggcctcggtttcctcgcgcgtgtctgggagg

SEQ ID NO: 103212 - DNA, 123 bp, Homo sapiens
  chr1:40420931-40421054
  hyper
ctaccaggtcccaagcggcgtggcccgcgggtcatggccaaaggagaaggcgccgagagcggctccgcggcggggctgctacccaccagcatcctccaaagcactgaacgcccggcccaggtg

SEQ ID NO: 103213 - DNA, 30 bp, Homo sapiens; identical to SEQ ID NO: 35518
  chr1:40421515-40421545
  hyper

SEQ ID NO: 103214 - DNA, 30 bp, Homo sapiens
  chr1:40505582-40505612
  hyper
gctcatcttattctcggggaccacaccctg

SEQ ID NO: 103215 - DNA, 30 bp, Homo sapiens; identical to SEQ ID NO: 35519
  chr1:40505984-40506014
  hyper

SEQ ID NO: 103216 - DNA, 30 bp, Homo sapiens
  chr1:40506843-40506873
  hyper
tctgagatatatagcgagtgaggaaaagaa

SEQ ID NO: 103217 - DNA, 30 bp, Homo sapiens
  chr1:40562827-40562857
  hyper
tccagatgctgcagcgcccgagaagcgcag

SEQ ID NO: 103218 - DNA, 30 bp, Homo sapiens; identical to SEQ ID NO: 35520
  chr1:40627048-40627078
  hyper

SEQ ID NO: 103219 - DNA, 30 bp, Homo sapiens
  chr1:40723372-40723402
  hyper
ctagcctcctcaggcgggagccgcggccca

SEQ ID NO: 103220 - DNA, 54 bp, Homo sapiens
  chr1:40723945-40723999
  hyper
ggggatgtgggcatcgctggacgctttgtgggagatgccggccgagaagcgtat

SEQ ID NO: 103221 - DNA, 881 bp, Homo sapiens; identical to SEQ ID NO: 35522
  chr1:40781095-40781976
  hyper

SEQ ID NO: 103222 - DNA, 647 bp, Homo sapiens; identical to SEQ ID NO: 35523
  chr1:40782310-40782957
  hyper

SEQ ID NO: 103223 - DNA, 30 bp, Homo sapiens
  chr1:40915482-40915512
  hyper
aaggctcaccctaacgttcacgtgcatttt

SEQ ID NO: 103224 - DNA, 30 bp, Homo sapiens; identical to SEQ ID NO: 35524
  chr1:40915881-40915911
  hyper

SEQ ID NO: 103225 - DNA, 30 bp, Homo sapiens
  chr1:40974095-40974125
  hyper
tggccaagcggagacgcggcacttcaccgg

SEQ ID NO: 103226 - DNA, 30 bp, Homo sapiens
  chr1:40974638-40974668
  hyper
ccctgcgatcgccgcgtctccctcccttgg

SEQ ID NO: 103227 - DNA, 30 bp, Homo sapiens
  chr1:40997341-40997371
  hyper
cttcaaatcagcgccgcgggaagtgcgggc

SEQ ID NO: 103228 - DNA, 47 bp, Homo sapiens
  chr1:41131455-41131502
  hyper
ggcctaggggaatccggggagtttggcttgccgggttgtggttgggg

SEQ ID NO: 103229 - DNA, 30 bp, Homo sapiens
  chr1:41158424-41158454
  hyper
aagtgtgctctgtccgagcctaggaagcac

SEQ ID NO: 103230 - DNA, 389 bp, Homo sapiens
  chr1:41267898-41268287
  hyper
tggtgctgtgaggtggaagggcgaggccgaggcggcggtggcgtcgcgtcccccctctccgcccctggcctcggggacgcggcggcaccttcacactttccgcttggcccgctgctcgcctttcaggccgccgcgttttcaattgttaatttggaaacggaaaaagtagccggccgggcgggggaggccgcggggaggtaatcggagccgcagcaccgccccggcccctcccgctctcggggcctggcattggcaaagccccgcccctcccagggacgcaagagccccgcccaccattccccgcccccggcatgccccgcccatttccgtaagccccgccctcgccgaggcgggctgggggcacctgggagtgccgagcagtggcgccc

SEQ ID NO: 103231 - DNA, 702 bp, Homo sapiens; identical to SEQ ID NO: 35527
  chr1:41284000-41284702
  hyper

SEQ ID NO: 103232 - DNA, 560 bp, Homo sapiens
  chr1:41326953-41327513
  hyper
gagggggagaggacacgatccaagaaccagagtccgaaagctgaagctggtccggtctctttcactttacggccgaggctggggtcagagaagtgaagccaaactgtcctcccgcaggaggcaaggcctggagggacgccagggtcccagtccggtgccgggccctgcgcacacagccgccgcctccaccctcgcggagggcgcgcgcggggcccagtcgctgggtgcagggtccggcgggcagtcgggccctttctcctctccggcacgccgggcgggcgccggccgccctcagcagctcacggagccggcgggcggcgcggaccccaagtccgagaagcagtcgaactcgctctggcccaggaagagctcgggcagctcgcgcacgcggtgcagcccgagctccagctccagcgacgtcagcgcctcctcgtcgatgagttcggcgtccatgccgcccagggcgtgcgcgggcggcggcggggctgcggcgcttggcgccggctgcgggcccggggggcctcccggagcgttggggggcgcggccgcgcggccggggt

SEQ ID NO: 103233 - DNA, 450 bp, Homo sapiens; identical to SEQ ID NO: 35529
  chr1:41327843-41328293
  hyper

SEQ ID NO: 103234 - DNA, 161 bp, Homo sapiens
  chr1:41444959-41445120
  hyper
cgaccctccgcacttccgtcttggaggccagggtggcgctgccgccgtccctcgcccggaggcagagatgcgctggcgcatcaccgccaggagcccacagtgaaagaccatcggatggaaggcgacgcccagaactccaggagaccgctgtgggaggacgc

SEQ ID NO: 103235 - DNA, 30 bp, Homo sapiens
  chr1:41445665-41445695
  hyper
taacgggagtggggcgggcgccccggccgg

SEQ ID NO: 103236 - DNA, 36 bp, Homo sapiens; identical to SEQ ID NO: 369
  chr1:41446123-41446159
  hyper

SEQ ID NO: 103237 - DNA, 476 bp, Homo sapiens; identical to SEQ ID NO: 35531
  chr1:41832017-41832493
  hyper

SEQ ID NO: 103238 - DNA, 1592 bp, Homo sapiens; identical to SEQ ID NO: 372
  chr1:41847296-41848888
  hyper

SEQ ID NO: 103239 - DNA, 340 bp, Homo sapiens; identical to SEQ ID NO: 373
  chr1:41848942-41849282
  hyper

SEQ ID NO: 103240 - DNA, 525 bp, Homo sapiens; identical to SEQ ID NO: 374
  chr1:41981636-41982161
  hyper

SEQ ID NO: 103241 - DNA, 30 bp, Homo sapiens
  chr1:42039850-42039880
  hyper
ggaagagggccagtcgctgtgagcaggcgc

SEQ ID NO: 103242 - DNA, 164 bp, Homo sapiens
  chr1:42127232-42127396
  hyper
gaggaggggctcctcggaggatccagagcaatgctagtttaactcactcccaatgagccccgaggagccccaggctggtgggctctgacagactgaaactgcatggccttgggggaagctagggctgccaaacccattcagcagctcccgccgggtgtgccgtg

SEQ ID NO: 103243 - DNA, 131 bp, Homo sapiens
  chr1:42128196-42128327
  hyper
tcactgctggccaccccgggatgccttcgcggccggggtcgcagatgggcccgggcgcggctggcggctgccaggggagggtctcctcgcccggggaatccctggctgccggcggccgcggggagggtctg

SEQ ID NO: 103244 - DNA, 30 bp, Homo sapiens; identical to SEQ ID NO: 35536
  chr1:42500952-42500982
  hyper

SEQ ID NO: 103245 - DNA, 30 bp, Homo sapiens
  chr1:42501742-42501772
  hyper
gcctcaaaggtgcccgccccgcctactccc

SEQ ID NO: 103246 - DNA, 49 bp, Homo sapiens
  chr1:42800265-42800314
  hyper
cgtgaggtacagcccgccctgccggcagaaaagcgcccccaagcttaaa

SEQ ID NO: 103247 - DNA, 30 bp, Homo sapiens
  chr1:42801131-42801161
  hyper
gtgcctcggagtggcgtctgggagcaaagg

SEQ ID NO: 103248 - DNA, 30 bp, Homo sapiens; identical to SEQ ID NO: 35537
  chr1:42845975-42846005
  hyper

SEQ ID NO: 103249 - DNA, 30 bp, Homo sapiens; identical to SEQ ID NO: 375
  chr1:42846455-42846485
  hyper

SEQ ID NO: 103250 - DNA, 30 bp, Homo sapiens; identical to SEQ ID NO: 35539
  chr1:42846885-42846915
  hyper

SEQ ID NO: 103251 - DNA, 30 bp, Homo sapiens; identical to SEQ ID NO: 376
  chr1:42922679-42922709
  hyper

SEQ ID NO: 103252 - DNA, 457 bp, Homo sapiens; identical to SEQ ID NO: 35541
  chr1:42928781-42929238
  hyper

SEQ ID NO: 103253 - DNA, 30 bp, Homo sapiens
  chr1:43123905-43123935
  hyper
ctcctcctcactcccgcgtccccagtgcca

SEQ ID NO: 103254 - DNA, 30 bp, Homo sapiens
  chr1:43124295-43124325
  hyper
gcacccgaacctaccgacctgccgggcggg

SEQ ID NO: 103255 - DNA, 112 bp, Homo sapiens
  chr1:43147842-43147954
  hyper
tactctatggttttcgtggccgactactctaattctagttccggtctctatggcggccggcggaggcaggaacggttgtaggtcgactgaattagccgccaaaggtccaatg

SEQ ID NO: 103256 - DNA, 30 bp, Homo sapiens; identical to SEQ ID NO: 35543
  chr1:43231616-43231646
  hyper

SEQ ID NO: 103257 - DNA, 13 bp, Homo sapiens
  chr1:43232838-43232851
  hyper
cggagccccgcct

SEQ ID NO: 103258 - DNA, 472 bp, Homo sapiens
  chr1:43232901-43233373
  hyper
cggaagctccgcccacgcgcctttatgcgcaggctcttcctactcgcacagcccagggagtggggaggataaggcgctgtcatggaggacgccgccgcgccggggcggaccgagggggtccttgaaaggcaaggagcgccgccagctgcaggccagggaggtatgcggggcgggagtcagcagggggaagtcagctcccgcgaggcagccggtctcggggctccgcgggaggccgacggcgggagctcacggcttgtgttcctgggtgtgtgtcgcaggagccctggtggagctcaccccgacccccggcggcctggccctggtgagcccctaccacacccaccgggccggggaccccttagacctcgtggcgctcgcagagcaggtgcagaaggtgaggaggcgcggccggggcagcgaataaccatcttcgttcacgttgtactctgcgtctttcggctcagacctcact

SEQ ID NO: 103259 - DNA, 80 bp, Homo sapiens
  chr1:43282585-43282665
  hyper
acccagcgcggaaccgtcctaatgggacgctgagacccagagggcgcccagggttttcccactgcggccggcctaactcc

SEQ ID NO: 103260 - DNA, 30 bp, Homo sapiens
  chr1:43282928-43282958
  hyper
tcctcgccttcccccgaccactggacccag

SEQ ID NO: 103261 - DNA, 30 bp, Homo sapiens
  chr1:43283170-43283200
  hyper
ccaaagctttttcccgttatattttctgca

SEQ ID NO: 103262 - DNA, 30 bp, Homo sapiens
  chr1:43311963-43311993
  hyper
tacaacttcccagacgagtggccctgagac

SEQ ID NO: 103263 - DNA, 30 bp, Homo sapiens
  chr1:43312497-43312527
  hyper
tggcccccggcccacgcagccaggtggctg

SEQ ID NO: 103264 - DNA, 911 bp, Homo sapiens; identical to SEQ ID NO: 379
  chr1:43389628-43390539
  hyper

SEQ ID NO: 103265 - DNA, 63 bp, Homo sapiens; identical to SEQ ID NO: 35547
  chr1:43424612-43424675
  hyper

SEQ ID NO: 103266 - DNA, 30 bp, Homo sapiens; identical to SEQ ID NO: 35548
  chr1:43424909-43424939
  hyper

SEQ ID NO: 103267 - DNA, 41 bp, Homo sapiens; identical to SEQ ID NO: 380
  chr1:43516647-43516688
  hyper

SEQ ID NO: 103268 - DNA, 30 bp, Homo sapiens
  chr1:43534182-43534212
  hyper
cagctgattcctctcgggctgcaaatccct

SEQ ID NO: 103269 - DNA, 507 bp, Homo sapiens
  chr1:43613348-43613855
  hyper
cttctagtaaccagccgggcctgaggagctggggcaagtgagtacagtgccagaatagggcggggcgcgaaataagatcccgaccggcgggcgcggggcggggcgatgcaggcagggtaaggggctggcagagtgagacccgccccgaccgggcagcactacccgagcgctgttgcctggagaccacgggacgccgttgcctggagacagcggggacgcgttgcctggagactgtggaaggcccaggcaagagggcgcgtggcagcccaaggccatggcgggacacccaaaagagaaggtgattccagatgaggtccatcagaaccagatcttgcgggaactgtacctcaaggagctacgaacccagaaactctacacgcagtatcacgtgaatcccctccgcaagagtgagaggcacggcggggtgggggaagggcgagagcgggagggcgccggggaaggaggagccctccgggttgcggggtgggaacgcggtcccagcaaaaa

SEQ ID NO: 103270 - DNA, 532 bp, Homo sapiens
  chr1:43637577-43638109
  hyper
cggcccctctagcacgacattgaggcctggcttcagaagccctcgggaaaacgcatcctgcaactgcaggacacaatcacggtcactcccaggggtgtaaggccccctctcccacgcccagccccacgagctcggctgacacctacctctctgtctgtgacaagggattcatcggattccgactccgaatccgagagcgggggagtgtccatctcgccgcacgcacgtcccacacctacaggaagaaacggggtatcccgagacccaagcggctagcagagggcggccctggccgctgctgcctgccttcagccccctactcccacgccgtggctccacgtgccaccgaatcgctccagcgccagcaactcacagctactgctcaacttttgattgggacttccgcttccggcggcaaaccatacttccggtttgtcgttgctataggaaccgctacggcgtttgaaagtgtccgggttgcttaggatccctacaggtagcgcctctggatacatgcgtggtctgctgaccc

SEQ ID NO: 103271 - DNA, 30 bp, Homo sapiens; identical to SEQ ID NO: 35553
  chr1:43638350-43638380
  hyper

SEQ ID NO: 103272 - DNA, 44 bp, Homo sapiens; identical to SEQ ID NO: 382
  chr1:43803508-43803552
  hyper

SEQ ID NO: 103273 - DNA, 30 bp, Homo sapiens; identical to SEQ ID NO: 383
  chr1:43803852-43803882
  hyper

SEQ ID NO: 103274 - DNA, 30 bp, Homo sapiens; identical to SEQ ID NO: 384
  chr1:43804341-43804371
  hyper

SEQ ID NO: 103275 - DNA, 209 bp, Homo sapiens; identical to SEQ ID NO: 385
  chr1:43805019-43805228
  hyper

SEQ ID NO: 103276 - DNA, 104 bp, Homo sapiens; identical to SEQ ID NO: 386
  chr1:43814926-43815030
  hyper

SEQ ID NO: 103277 - DNA, 30 bp, Homo sapiens; identical to SEQ ID NO: 387
  chr1:43817944-43817974
  hyper

SEQ ID NO: 103278 - DNA, 269 bp, Homo sapiens; identical to SEQ ID NO: 388
  chr1:43818176-43818445
  hyper

SEQ ID NO: 103279 - DNA, 155 bp, Homo sapiens; identical to SEQ ID NO: 35561
  chr1:43832811-43832966
  hyper

SEQ ID NO: 103280 - DNA, 30 bp, Homo sapiens
  chr1:43833532-43833562
  hyper
ggccaggcagggggcgccggcacgtggaga

SEQ ID NO: 103281 - DNA, 46 bp, Homo sapiens
  chr1:43834165-43834211
  hyper
gttaggatctgctgcgagggctgcctggaacggaggtgagaggata

SEQ ID NO: 103282 - DNA, 212 bp, Homo sapiens
  chr1:43855423-43855635
  hyper
tctcacctgcattgcggcggccgaggcggctgccacgatttcacttccggttttccagtcagcaaacgcctacgagaaggcttcgtccaccaatcagaaaactggaactcggccctcccaccaacttccggttcctgctgggtgccgaggtagcgaggtcaggggtcaagagtggaacaccctcactggcccgggccggcgcgggagggctg

SEQ ID NO: 103283 - DNA, 287 bp, Homo sapiens; identical to SEQ ID NO: 35562
  chr1:43919240-43919527
  hyper

SEQ ID NO: 103284 - DNA, 119 bp, Homo sapiens; identical to SEQ ID NO: 391
  chr1:43919541-43919660
  hyper

SEQ ID NO: 103285 - DNA, 35 bp, Homo sapiens; identical to SEQ ID NO: 35564
  chr1:43996429-43996464
  hyper

SEQ ID NO: 103286 - DNA, 218 bp, Homo sapiens; identical to SEQ ID NO: 35565
  chr1:43997370-43997588
  hyper

SEQ ID NO: 103287 - DNA, 346 bp, Homo sapiens
  chr1:44015774-44016120
  hyper
gcctgtctggtcccccgggctgccttgggccagcttggcctagtctgttgggtgggcgggcagggtgcaggctcctctccagcctccaagggaggggagttgttctgcctcctcgatagccccaggccttgggcacagcccagcctcccacggctcttgggccctcctccttccaggccgccggtgacccacacctggctctcctccccggcgtctcctctccgcttctttgtttggagcggaggccccgccccaccccgcccccaggcgcactcgcccggccattccggttcagccggttccagcccccagtttctgccgctgcaggtcccggcaggagctggag

SEQ ID NO: 103288 - DNA, 356 bp, Homo sapiens
  chr1:44115472-44115828
  hyper
ttggcctatcctttcgttagcgacatcctatagtaacctcaccgcccttacccatctaccggaccggcccacttccaggtactagcttctttcaaccctgattagttatgggtgaccaggagcccgcctatgattggccagcttcgcgatccagctagaggctcactggccgcggtccctagtggtacagcgtttcctcccggcaacagcccgagccggcgctcataggctgagcacactgaggtcgggactgggaggtggctgcggcgcgtgctcattggctggtgtatggcttgcagccacccttgaattggttgactctgtacggctgcgcagatgccgactttagaggaggc

SEQ ID NO: 103289 - DNA, 30 bp, Homo sapiens
  chr1:44172590-44172620
  hyper
caccagggctcagccgcaggaatgaaaaag

SEQ ID NO: 103290 - DNA, 30 bp, Homo sapiens
  chr1:44173747-44173777
  hyper
cagcgtttgggtagcggttgtcattgctta

SEQ ID NO: 103291 - DNA, 30 bp, Homo sapiens; identical to SEQ ID NO: 35566
  chr1:44399477-44399507
  hyper

SEQ ID NO: 103292 - DNA, 405 bp, Homo sapiens
  chr1:44401967-44402372
  hyper
ttccagggggacgcacggcccgctggtgcagtggaagagcccggcggccgccgccgcagccttctcggcccgcgcccccgccgcctgcacccccatctgctcttccccgcgggggccgcgcggcgcgggctgggggcccgggcagccgcgctcgggcagcgggggcgcggggctgccgcctgcgctcgcagctggtgccggtgcgcgcgctcggcctgggccaccgctccgacgagctggtgcgtttccgcttctgcagcggctcctgccgccgcgcgcgctctccacacgacctcagcctggccagcctactgggcgccggggccctgcgaccgcccccgggctcccggcccgtcagccagccctgctgccgacccacgcgctacgaagcggtctccttcatgg

SEQ ID NO: 103293 - DNA, 59 bp, Homo sapiens
  chr1:44411959-44412018
  hyper
ttattgggtggtcccgagagccttccttttttccttcctgaggcgtgccaagtcccctc

SEQ ID NO: 103294 - DNA, 271 bp, Homo sapiens
  chr1:44412316-44412587
  hyper
gccttccggctaggcgcaacacggactacatttcccagggtgaacagcggcggggcctagactcggccgcggcctggggcggcgagccgctccaccgcctgctcaggggagtgcgagctggcgcgaggacagggctaaggacccggaatgagtttccgcgcagttccgctgggccgtgccggcctgtaccgggccgtgccgagccagaactggcaggagtgggggcctgagttggaggtgccggggacaggcgctcggggcagcccgcgcc

SEQ ID NO: 103295 - DNA, 30 bp, Homo sapiens
  chr1:44412884-44412914
  hyper
tgggtacaggccatcgaccctgtgacccct

SEQ ID NO: 103296 - DNA, 99 bp, Homo sapiens
  chr1:44435543-44435642
  hyper
attggttctctgtgcggggcggtggcggggattggagggcgggagctgtgctgacttaggattggcaaaatcgctatcagccacgcctctaaaacccgg

SEQ ID NO: 103297 - DNA, 30 bp, Homo sapiens
  chr1:44435941-44435971
  hyper
tgtacgagctggagcgagtcgctggatttg

SEQ ID NO: 103298 - DNA, 198 bp, Homo sapiens
  chr1:44441184-44441382
  hyper
ggatctggctggagcgcttgctccctcggtcccgcctcggattcgggcttgcgggtggcgaccctgcctgcgcaggtgcttggtctgggaggtggttttagcgagggaatggcagaaaatggaggcctaagcagaggaatctgtctacacagctgtactgtcacctgggggcagcctgaggacgccccttcagggagg

SEQ ID NO: 103299 - DNA, 121 bp, Homo sapiens; identical to SEQ ID NO: 35569
  chr1:44444588-44444709
  hyper

SEQ ID NO: 103300 - DNA, 45 bp, Homo sapiens
  chr1:44445509-44445554
  hyper
ccacccggtctgtgcggcctgcccgtccgcgggtgccacgtgttc

SEQ ID NO: 103301 - DNA, 225 bp, Homo sapiens
  chr1:44457109-44457334
  hyper
aaggtgcccagggccgagcccaaagtgcttgggtcagggctcggtggagcgccgaggtgagtctgaactcccagccggcacgcgccgcccgccggaccaaacacgggagggggcggggccctagagtcgcggcgtggtttcccgggtgatggccacgcggaagaggtggggctagggccctggttcccactgcctggtttctgggcccccggcatccgagtcggc

SEQ ID NO: 103302 - DNA, 30 bp, Homo sapiens
  chr1:44495743-44495773
  hyper
gcggagagcaggcccgaaagggggtgcggc

SEQ ID NO: 103303 - DNA, 30 bp, Homo sapiens
  chr1:44678989-44679019
  hyper
aatgaaaacaggctcgcgggagaaccaaag

SEQ ID NO: 103304 - DNA, 30 bp, Homo sapiens
  chr1:44679621-44679651
  hyper
tacagtgagttgggcgataaaaggggtgac

SEQ ID NO: 103305 - DNA, 30 bp, Homo sapiens
  chr1:44820711-44820741
  hyper
cctcggggccagcgcggcaggctccctcca

SEQ ID NO: 103306 - DNA, 697 bp, Homo sapiens; identical to SEQ ID NO: 35572
  chr1:44870924-44871621
  hyper

SEQ ID NO: 103307 - DNA, 690 bp, Homo sapiens
  chr1:44872032-44872722
  hyper
tagagtagcccgacacgtgggatctcccgggattttcggggtcgggaccccctctcccagcggttctactgagcaaggcgggaggacgatcgtggagacgagggctacttgactactctacttgtagttttatttttatcttagacctgccttaaactgagtaacaatttctcttctgacttaagaacaaaacttttcagtgagcacgccggtcgctgcggtcctgcggccactgccgccgcgcttgtcagcccgggccgagcgaccttctctgcccggaacccagccccgccaccgcactccggagcctccggcctcccccaccccacccccgccccccaacccggggcttttcagggctcggcctgggcgtttcgcctttgtgctttgtaagagaaagccttttcttccagggcacaacaaacttgggcggagagcttccgtgtggccccccgggcgaggccgcccacggtggtgaggccatccgaggggatgcccggttcatcccccagtccaggagcctctccgagagctcgcggcccaggtcgaccccagctggcgagggcgcgcaggagtcccgaagtagcggggactagggcagccaggaggcagggggaaagctctcgcttcccgttaagcacaccctgcattctcgggtcgtggatgcagctccagcggagagcccgtgtt

SEQ ID NO: 103308 - DNA, 249 bp, Homo sapiens; identical to SEQ ID NO: 396
  chr1:44872923-44873172
  hyper

SEQ ID NO: 103309 - DNA, 140 bp, Homo sapiens
  chr1:44873509-44873649
  hyper
gggtgacccccggggcggggctgctcgggggctggaggtccttggactttggtcgaaggctggcagctctgagcccctgccccgcgggccccgcgcggctgcggaccaggggcccttgcacgtgtcggttcttcctggac

SEQ ID NO: 103310 - DNA, 178 bp, Homo sapiens
  chr1:44874565-44874743
  hyper
cgatcccgggcgcaggtcaggaagcccagaccttggactgggatgggagattacctactctctgagactttctcttgggctttcggtttttctgtgcgaaagtggctagttcgctccgcagagcgcggagcgctgcgcatcagcccagcctcagacattttcacgttccaaacgcgga

SEQ ID NO: 103311 - DNA, 99 bp, Homo sapiens; identical to SEQ ID NO: 35576
  chr1:44883115-44883214
  hyper

SEQ ID NO: 103312 - DNA, 371 bp, Homo sapiens; identical to SEQ ID NO: 35577
  chr1:44883751-44884122
  hyper

SEQ ID NO: 103313 - DNA, 50 bp, Homo sapiens; identical to SEQ ID NO: 35578
  chr1:44884203-44884253
  hyper

SEQ ID NO: 103314 - DNA, 43 bp, Homo sapiens; identical to SEQ ID NO: 400
  chr1:45097399-45097442
  hyper

SEQ ID NO: 103315 - DNA, 87 bp, Homo sapiens; identical to SEQ ID NO: 401
  chr1:45097717-45097804
  hyper

SEQ ID NO: 103316 - DNA, 40 bp, Homo sapiens; identical to SEQ ID NO: 402
  chr1:45098108-45098148
  hyper

SEQ ID NO: 103317 - DNA, 114 bp, Homo sapiens; identical to SEQ ID NO: 403
  chr1:45098213-45098327
  hyper

SEQ ID NO: 103318 - DNA, 30 bp, Homo sapiens; identical to SEQ ID NO: 35583
  chr1:45139509-45139539
  hyper

SEQ ID NO: 103319 - DNA, 81 bp, Homo sapiens
  chr1:45139910-45139991
  hyper
ggccgcatgaggggcggggctacagctgcgctcgcaacccacaggttcatgaggtcacctccccgcgcctggacccaaccc

SEQ ID NO: 103320 - DNA, 119 bp, Homo sapiens
  chr1:45140251-45140370
  hyper
tcaccccactagctcggccctagcaaccatgccccgcccctattactgacccgcagccattggctaattcgcttgatctggatcaggtattggtcagccggggcgccggtcaggaagag

SEQ ID NO: 103321 - DNA, 30 bp, Homo sapiens
  chr1:45205257-45205287
  hyper
gttttcgggaaccccgcagtacaaggtgac

SEQ ID NO: 103322 - DNA, 30 bp, Homo sapiens; identical to SEQ ID NO: 35585
  chr1:45205503-45205533
  hyper

SEQ ID NO: 103323 - DNA, 30 bp, Homo sapiens
  chr1:45241346-45241376
  hyper
ctgaggagtccagacgccccgacccccggc

SEQ ID NO: 103324 - DNA, 30 bp, Homo sapiens
  chr1:45241809-45241839
  hyper
aaggtgggtgcgagcgtgggcctgtccgcc

SEQ ID NO: 103325 - DNA, 232 bp, Homo sapiens
  chr1:45252004-45252236
  hyper
gactcgcggttccgcgttcctgtcgcagtccagacccttccctggaggcccctgctcccaggactctcccaggcgccacctgcatccggctgtgggccggacccccagaggctcccggcgggcggcgcacctgcgtccaccacgtgctccatggtggggaagcgcttaagcacgcgggtgctgaccgagcgcagcaccagcacggacgccaggttcgcgtagcggatgaggg

SEQ ID NO: 103326 - DNA, 30 bp, Homo sapiens
  chr1:45265688-45265718
  hyper
gcccgggccccactcggacttcagcacaca

SEQ ID NO: 103327 - DNA, 30 bp, Homo sapiens
  chr1:45266271-45266301
  hyper
cgtcagaccccgggcgcctcatcacggacc

SEQ ID NO: 103328 - DNA, 332 bp, Homo sapiens
  chr1:45284954-45285286
  hyper
agagccacaccaaaccgctaacagctactgtctctgggaatagaacaaggagtttggttggcgcgatataccgcccctgaacctctagccacaataaggcttaattaatgaccggacgacttgaaagcgccttccactgtttatctcttaaatctgcaacgaaatgcaacaaaaacgcaagaaataaacaatagaagccagtcttactgcacactgcagaagccaataaaccccaaatgtagctcaaaacaaggtgtcacgcaaacttctgatttttttttgttttacactgaatctctgtcactctgactagagggcagtggcgcgatctc

SEQ ID NO: 103329 - DNA, 812 bp, Homo sapiens; identical to SEQ ID NO: 35588
  chr1:45285405-45286217
  hyper

SEQ ID NO: 103330 - DNA, 30 bp, Homo sapiens; identical to SEQ ID NO: 35589
  chr1:45308578-45308608
  hyper

SEQ ID NO: 103331 - DNA, 30 bp, Homo sapiens
  chr1:45476686-45476716
  hyper
ggctgggcctgcggcgcccacacgcagccc

SEQ ID NO: 103332 - DNA, 30 bp, Homo sapiens
  chr1:45476975-45477005
  hyper
acagctggcgcgaccgcggacagagcttcc

SEQ ID NO: 103333 - DNA, 228 bp, Homo sapiens
  chr1:45477621-45477849
  hyper
ttgcgccaagcctccggatacccagactgtcagatgagaacaaattcctcatgtcaccgtaagatacatttacagcggagttttcttttgggcctttgttgttgcgtcgctacagcaaactttacggtgaaaaaaggtaggggtcctacgggcagcagccagggcagccctggagctgtcgctggagtccgatcatgtgatcttcaacatggcgacgctcttggttcc

SEQ ID NO: 103334 - DNA, 36 bp, Homo sapiens
  chr1:45671644-45671680
  hyper
agcagcgccggcgccggggccgccccggtactggaa

SEQ ID NO: 103335 - DNA, 30 bp, Homo sapiens; identical to SEQ ID NO: 35591
  chr1:45671972-45672002
  hyper

SEQ ID NO: 103336 - DNA, 30 bp, Homo sapiens; identical to SEQ ID NO: 407
  chr1:45672720-45672750
  hyper

SEQ ID NO: 103337 - DNA, 295 bp, Homo sapiens; identical to SEQ ID NO: 35593
  chr1:45792558-45792853
  hyper

SEQ ID NO: 103338 - DNA, 167 bp, Homo sapiens
  chr1:45805830-45805997
  hyper
ccccgccccatccccgactgcctgaaccgcgccaggagacggaccgcaagtccagcgtacccacagacgactcaggcgggagacgagcggtgtcatggccgccgacagtgacgatggcgcagtttcagctcccgcagcttccgacggtgagcggcttcccagaggta

SEQ ID NO: 103339 - DNA, 427 bp, Homo sapiens
  chr1:45956917-45957344
  hyper
agtagccagtcaaccgtcaactcctgataaacgaggtagtggaattgcccaattagcgctaggaatgccacgtggtatgagggtgggcacaatgggcgtccagaaaagccaatcaacagccgtaggtgccaactccggaggacgaagggaaccaataggaaggaagtcgaggtaaaaacagaagaagcagtgtgtgggaaaggcggaaccgaggaggagggaatacacctgggggaaacccaagtccaggagcctcttagagggcggggcagtaaacacaagatggaccaataaaaatgttaaacacagaaatgattggtaattgataaagccaatagaaaatggactagactggcgcggctttcgggttggtcaaggtatagctgagtaaggaaaagcggtaagaatgctgcgtcctgcaggattt

SEQ ID NO: 103340 - DNA, 30 bp, Homo sapiens; identical to SEQ ID NO: 35594
  chr1:45965328-45965358
  hyper

SEQ ID NO: 103341 - DNA, 148 bp, Homo sapiens
  chr1:45965664-45965812
  hyper
tttggactggctgccgcagcgccacctgggaaactgaggtcgcctcttgcgaacacaaccggcgatggaggcggtggaactacctttctctagaagagacacgtacatgcacacccccaccgtgtagcttgccgggaaactgagtctt

SEQ ID NO: 103342 - DNA, 978 bp, Homo sapiens; identical to SEQ ID NO: 35595
  chr1:45986969-45987947
  hyper

SEQ ID NO: 103343 - DNA, 30 bp, Homo sapiens; identical to SEQ ID NO: 35596
  chr1:46016470-46016500
  hyper

SEQ ID NO: 103344 - DNA, 30 bp, Homo sapiens; identical to SEQ ID NO: 35597
  chr1:46050037-46050067
  hyper

SEQ ID NO: 103345 - DNA, 30 bp, Homo sapiens
  chr1:46151181-46151211
  hyper
cacacaccaccgcaccgcacccattcttat

SEQ ID NO: 103346 - DNA, 30 bp, Homo sapiens; identical to SEQ ID NO: 35598
  chr1:46152102-46152132
  hyper

SEQ ID NO: 103347 - DNA, 96 bp, Homo sapiens
  chr1:46152353-46152449
  hyper
acgccagttccctacgctgccaacgttcggcctccagaacggcggttatgccctgccccgcccccggctcccttcttcgccgcttgaggcggcgca

SEQ ID NO: 103348 - DNA, 30 bp, Homo sapiens
  chr1:46152957-46152987
  hyper
actggaaggggcggcgctgccatgacagag

SEQ ID NO: 103349 - DNA, 186 bp, Homo sapiens
  chr1:46153750-46153936
  hyper
cccaaacagaaagccgggcctaggaaccaattagcgcaggtcaagtccctacccggactcattttttttcagccctcaggaagtaggggcctctctgaatccacttgccggaagtgcctttccagtggacctgggctgttgttgcggttgttttccttctctccgtgcaacgctggcaagtctcaa

SEQ ID NO: 103350 - DNA, 217 bp, Homo sapiens
  chr1:46216407-46216624
  hyper
gaggcgaagccgggcggtgggaagggacttcggacgcttcgcgggccctgggttttcactgcgcgtgcgcgaggttcttccgctcgcgggagactgggccgctggcgcctctcagtgcccactgatggggcccagggcttgggcttgcttccccaaggatcaacagcttagctgcaagcctctgcttctgcctgctggggccggctggctcgccctt

SEQ ID NO: 103351 - DNA, 33 bp, Homo sapiens; identical to SEQ ID NO: 35601
  chr1:46269379-46269412
  hyper

SEQ ID NO: 103352 - DNA, 106 bp, Homo sapiens
  chr1:46598365-46598471
  hyper
cccacccgctgaggcgccacccaaccgcgccgggaggggggacagcaggcatcaccaccgccccttccacgccgtcccgcctcgatgtaccgggattctgtcaagt

SEQ ID NO: 103353 - DNA, 30 bp, Homo sapiens
  chr1:46598712-46598742
  hyper
gagcctggagcctgcgtcttttgtctgcct

SEQ ID NO: 103354 - DNA, 30 bp, Homo sapiens
  chr1:46598987-46599017
  hyper
gctgaggcttggtccgcccggacgagtaag

SEQ ID NO: 103355 - DNA, 269 bp, Homo sapiens
  chr1:46632676-46632945
  hyper
cttttcctgactccgcgcccggcgcggttaattatagccccaccccgcgactacctgcttcgctcccacccgcgcgcccaggaccctagctgcgggactctagcggggaaggcacccccaattctgggccctggcgaccttgggtcagggccaggaaaggcacttccagccaagcgctggcgccgggtgcgcctcgctttacggaaagaacgccccgcgaataaatccggagcggatttgcatcacagcagccgcgagaaggctagctg

SEQ ID NO: 103356 - DNA, 30 bp, Homo sapiens
  chr1:46664325-46664355
  hyper
ccgctccccagcaccgccgatggcaagccc

SEQ ID NO: 103357 - DNA, 130 bp, Homo sapiens
  chr1:46712817-46712947
  hyper
tcccagaaatgtgccgcctttcataatccccagctgtccactacaggtggtaactcccctgctgctcaatgtggcgtaaatcttcccttccatagctgcgggaccacagctcaccgacctgggacaaaca

SEQ ID NO: 103358 - DNA, 30 bp, Homo sapiens
  chr1:46713427-46713457
  hyper
ggcggctgttaacgcgcgctttgggaacag

SEQ ID NO: 103359 - DNA, 1886 bp, Homo sapiens
  chr1:46767963-46769849
  hyper
cccttcccgcctgtccgtcattcgagcctccctcgcttgtttaagccgctccgggcccccctccactcgctctccggtccctcctcgccgctcgagccgatccgagtggcctccggcgctccctgtcctgcgggtcgcacggtcgctcggtcgcttagtcagtttggcacccgagaccccggttgtcggttcgctcccgtcagccctgggccgtcagacaggccgcggcgccccgaccctttcgttcggcctctccccctgccccattccctcgctctccaatctgctgtcctcccctccgcccatcggcttggcctccggaatctcgacccccgtggcgtgtcaggcagatgctggagccccggggccatcagtcaggttcggtggccccgggcctggcctggccttgccttaggccgggcctcctaacctcggcccctgccctagggcagccgggccatcgctgcccaccggttcgacatccgagactctcctgcccggcccagccgagtgtcagttcgcgcggcccacagccgcaatccagcctcagtcgcccgggcccagcctgcttcgctccagaccgggcctcctggcctcgccccccgcgcccccgagccaggccgcggtgcgggtcagcctgcccatttaggtctccgtctttactctgtccagccctgtcagtcacaaaattcattctccgatcctacgagctggctttcagcgccccaggctgggccttgccccgggcctcccggcctcgccccccgcgccccccggccgctgggccgccccttgctcttagccagaggtagcccctcaccccgcgacttaccccacaccccgctctccagaacccccatatgggcgctcaccgcccgcccgcacagctcgaacagggcggggggagcgttggggcccgaggccgagctcttcgctggcgccgcctcccgggacgtggcctccatggtcgttgccgccgctacctcacagaaccagcaactccgggcgcgccaggcctcgggcgccgccatcttggggaggtgcgcgagcccgagagtgtcgcccgcggaccgccatcttgaaaaggtcagcagttaggacggctccataagcgatatggggaagaatgtgaattattctaaagaaatttcgaagaaattagcacactttccaagtctcttaggagctactattttagataaactcctagatcaattatacttgggtgtggtatgactaaggggatgtttcttagcaaagcctcctcgggtgcaaacatcagctacccctaacctctgcctgcggctggtagtacatgccaatctgagcatgtgttcgcgaccacgatgagtgtgccgcacttccggccagatcgccggatttccgctgagtgacccttacaagtccttcttgatcctgaactgggttaggtgccgctgttgctgctcgtgttgaatctagaaccgtagccagacatgggactggaggacgagcaaaagatgcttaccgaatccggagatcctgaggaggtaaggcaaggcgatccactcggccctcttctctgccctgaagcccaggacctagcccgccaaaacacgcacggggccctcttagcccccagtttaccctctagggtttgcatagtcgggagctctagttccctcgacctttccccagaattcgtccggtgactttggacagatagatgactagtttttctctgggcctcggcttctgcattctgtgaatgtagtgaaggtttgagagcgaaaatgttttgtggactaaagtcttgtaaaaatatgacctatgtttgcagtcagtcagatgttctgaagcccgcgtttcacagatttggggagcaaacagaccgccttgccccagct

SEQ ID NO: 103360 - DNA, 32 bp, Homo sapiens
  chr1:46806340-46806372
  hyper
ggagtctgtagaggcgcgcggagtcctgggag

SEQ ID NO: 103361 - DNA, 121 bp, Homo sapiens
  chr1:46859839-46859960
  hyper
gggggcgatgccaggcgggccgcctctgatagcctctaggctctggcgcgcttccccgcccctcccgcgcaggcgggcgtgggatcccggctgatccagtccgggttttgcggcggagcgg

SEQ ID NO: 103362 - DNA, 356 bp, Homo sapiens; identical to SEQ ID NO: 35606
  chr1:46859974-46860330
  hyper

SEQ ID NO: 103363 - DNA, 364 bp, Homo sapiens
  chr1:46908435-46908799
  hyper
acaaattggctagtccgagcccagagcgctgaagttcccagaaggaccgggagggggcgcccacccacattcttccccacctgagtctgcgctgacgatttcctgggcttatctggatcttcctgcagaaagtcagtcttatgtgaccctgtacaacctcctggactttcccgcgggcgtggtgcctgtcactatcgtgacactacaggacgaggaggaactggccttctacaaggggtgctacggagatagttctgacaaaaatttctcagaggtcagtttccttctccgagcctctcccggagcggggacaaaccagggctggttctctccgggttggggcccctgacggtagtggtggaga

SEQ ID NO: 103364 - DNA, 111 bp, Homo sapiens; identical to SEQ ID NO: 35607
  chr1:46913765-46913876
  hyper

SEQ ID NO: 103365 - DNA, 359 bp, Homo sapiens; identical to SEQ ID NO: 408
  chr1:46913886-46914245
  hyper

SEQ ID NO: 103366 - DNA, 78 bp, Homo sapiens; identical to SEQ ID NO: 409
  chr1:46914285-46914363
  hyper

SEQ ID NO: 103367 - DNA, 556 bp, Homo sapiens
  chr1:46932179-46932735
  hyper
cccgccccgccccgccctcctcgggccccgctccttcccaggcgcccccgcgccgccggcgctttgaagtcccaatccggcaaatagagtcaatcaattatgaagggaacaatctggcggcccctcggggagcggcggccgagcgatcccgggggattaggccgcaaatcgcgctgagcctccctaagtgacagcgagagaatcgcgcgcggcggcgacggcggcggcgggagcgggagggagcgcggccgctaacccgattatgcagatccgcggggggcgcggattaggcctcgggggcggcttcgccctaagcggctctcggatttgggaaaagtttactcgggcggagggggcggagactcccccgggcgggcggccgggacttctcccagccgggtgaatggaggacccgcctgcaggagcagccgcgaaagagtggagcgggcgcgcctgctgagccacagccacagcaacactttgcaggcgtgcacactcacacgcacacccaggccacaacagccgtgtctgcaccagcccacgggcgcacgcgcgc

SEQ ID NO: 103368 - DNA, 128 bp, Homo sapiens
  chr1:46951189-46951317
  hyper
aaggggagtagccgtcggagggcggggacagagcggtagctgccttgcgctgggattgggggtgggggtgggagtggggagggctctttaagcggcggccgcgctaataacctgtccaggagatggct

SEQ ID NO: 103369 - DNA, 28 bp, Homo sapiens
  chr1:46951644-46951672
  hyper
cgcccggaaggggcggggaggggccccg

SEQ ID NO: 103370 - DNA, 640 bp, Homo sapiens
  chr1:46954655-46955295
  hyper
gacacacaccttttgggaagccgagcctctgcctgattgagagccggccccagaacgtcctcttcctatgagccggttcccgcctggagggagcagagcgctggtaagagcaggaccatctcaggcccaggattttcccgaagtggaccggtcgccgagtgtgtttgttcccccagtcccggcgacaggtgcctgtgctgtgtgtgaagccgcgagttccagcccgcggcctcccggcccagaggccaacatccaggtgctagacaggtgagcggctgctaggagcgcaaaccagcgcacccgcggggtgtgtgggcggcgagttcagagtactggctgtggcgctgcatggtggcgcgggggtggcagtgttgttgcaggtggtgtggaactgatgggaagaggtatgtgtgcgcgcgtgtgtgtgcgcacaaccttgaagggacagtggggacgggagtccgtcggggctcccccaggtcacctctacggactccagctgccaagcgtcggggtgggaccggcgagggggaggtttctcaagacctttcaacaccccagggatcggcctgcggcttccgcggacccaagagaggcagagatccctggaccgggagccagagctcgaggagcagagatt

SEQ ID NO: 103371 - DNA, 640 bp, Homo sapiens; identical to SEQ ID NO: 35614
  chr1:46955975-46956615
  hyper

SEQ ID NO: 103372 - DNA, 756 bp, Homo sapiens
  chr1:46956684-46957440
  hyper
cgacaggccaggggccctgatggactgtgcagggtcccgggcaccaccggctgaactttctggcggtcacaaattcccggaacctgcgcaggggcttcgttggcactggtggttcacttaaggagcttgagggaaacctcctcttccccaaattcgcaccaaatctggggccccgacttttcctggattccagccacactcggtttgggaggcagtgggctcctcaggcttgtgatttgcggcaggaaggagtcccggaatggaagaacggggaggacgagatccgaggccttttcaccctctttgcaagcatgcagttcaccaaagccgagaacccaccgggcctggagcgcagcctcagcgctggttccgacccgggccccagaaggtctttttcgtttgagaaaagtcctcggaggccggggcagggtgcgccgatattggtttactaagggcgcctccagtttgagggcgttggggaaagaggagggctttattgacttgatggaccttggaggaaaggggctgtctgtaccgcaagggttgtgtgctccacagccgaggaaattgtgcaagttcctacctggctgtggcgatggcagggcgaccagagtcctttcccctctctagtgctagggattctgtgcgctgcaggcgggtcagctctgtccaacccctttctagaaagttctatggtctgttagttttaggtgggtgtagtgggggttgttttcaatttttcggggatttgtgttt

SEQ ID NO: 103373 - DNA, 73 bp, Homo sapiens
  chr1:46957803-46957876
  hyper
agaggagtggaaacccgccccaggcgaaggccatggcgaaggacaagcactcgggcctcgggatgggctctgc

SEQ ID NO: 103374 - DNA, 30 bp, Homo sapiens
  chr1:46958275-46958305
  hyper
tcccctatgtctgaacgaattctgtgtgcg

SEQ ID NO: 103375 - DNA, 126 bp, Homo sapiens
  chr1:46958669-46958795
  hyper
actctctccaggcctcgaagttactcctcctcctccggccagtcccagttcctcaaggagccagtcttcacctcccccacccctgccttcccatttcgccccccaccccacccctttctcacagtc

SEQ ID NO: 103376 - DNA, 61 bp, Homo sapiens
  chr1:46958809-46958870
  hyper
cgcagtgcccatgtaaatgacagcaataaatatctaatcaaggccccgggcgacgccactg

SEQ ID NO: 103377 - DNA, 95 bp, Homo sapiens
  chr1:46998611-46998706
  hyper
ctgaaggaaggggaatgaacccggacagcggagtcacggcggggccctggtccgctagggggcggcgcgcgcccggggtgggttgagctggactc

SEQ ID NO: 103378 - DNA, 335 bp, Homo sapiens; identical to SEQ ID NO: 415
  chr1:46998934-46999269
  hyper

SEQ ID NO: 103379 - DNA, 325 bp, Homo sapiens
  chr1:47009560-47009885
  hyper
aggaaggaaagaccccgagagcgcaggaccaccaagagaggccgggccacctcctccgccgtccgctgacttctaggggctgggccggcgcacagcaagggggttggaggtggggtcgccctctcccacgcggctgggtttccaggcggtgtcctgggccgagccgcttggagatcctagatcagcatgtgggtgggaaagggcgccccgtcctgggcccccccgcccctgcgcgcagagcagagacgcgcagacccgctcccactccgcttggctcccttggagcagccccggcggcggcagcgatgggctgggaggggccggc

SEQ ID NO: 103380 - DNA, 125 bp, Homo sapiens
  chr1:47009910-47010035
  hyper
cgcctcccgccacccggaacccctctccttcaagcgttgaccgccgacccacagctccccttcaacccggggcgagcggggttcttaccatacacctcccctctccgctcggttccatccttctc

SEQ ID NO: 103381 - DNA, 10 bp, Homo sapiens
  chr1:47010104-47010114
  hyper
cgtccgcact

SEQ ID NO: 103382 - DNA, 169 bp, Homo sapiens
  chr1:47069638-47069807
  hyper
tcggacaccggccacgccccgaccccaggcacagaggtcgcagacagctcgggacagtcctgaaaagcgtccccttaggctgtccctccgcagctgaatcgcgtcgtgacctcgggcagccgtgaaggccctgactgcccccttccgggcacacgagctcactcacaga

SEQ ID NO: 103383 - DNA, 32 bp, Homo sapiens; identical to SEQ ID NO: 417
  chr1:47070161-47070193
  hyper

SEQ ID NO: 103384 - DNA, 290 bp, Homo sapiens; identical to SEQ ID NO: 35621
  chr1:47078537-47078827
  hyper

SEQ ID NO: 103385 - DNA, 30 bp, Homo sapiens
  chr1:47082357-47082387
  hyper
ccgcaggggcacggcgcacactcacgggtc

SEQ ID NO: 103386 - DNA, 30 bp, Homo sapiens
  chr1:47082752-47082782
  hyper
aatgggaaaacgctcggcttcttctggagc

SEQ ID NO: 103387 - DNA, 30 bp, Homo sapiens
  chr1:47133938-47133968
  hyper
acctgcaggaccgccggtcccgcgccaccc

SEQ ID NO: 103388 - DNA, 24 bp, Homo sapiens
  chr1:47134173-47134197
  hyper
tggccccggcactgcgcgctctcg

SEQ ID NO: 103389 - DNA, 30 bp, Homo sapiens; identical to SEQ ID NO: 419
  chr1:47644962-47644992
  hyper

SEQ ID NO: 103390 - DNA, 149 bp, Homo sapiens
  chr1:47691968-47692117
  hyper
gaacaaattccggatcgtgctctttggttttagcggggaatctgtcaggcaggggttcgttgctttaggaacctcccttggcctctcagcaatattcccagcccacctacaggcacacacccagaaacccggtgcggatggaagtaggg

SEQ ID NO: 103391 - DNA, 511 bp, Homo sapiens
  chr1:47694979-47695490
  hyper
cgctgagaggcctgcagttacgctgcggtgtggtcctgggcgatctgccgcgcccaaagcgagtttccaggaaagataggggtggagagaaagaggcagggcaagagggagggagagagagaaatgggggtcaatggctgggaattacctcctgtccccgaccaaccagtccagggaatcgcaaacagctttccgcccccaacctgcaggtgtttggagcctttcctctaccccctcctccccccacccgccttaaaaaaccctatacatgaccaatcaggaatagctatttagtccaacagcaacaacaacccctcccgacaggctgtctggaacattttcgaaccctccaactgggatcggtctggttcagtgtttgttttctaagcagggaggtgtctacgcggttgcctcctcagccaggtctccggctgccgctacaccgcgaagggatagtcccgggcctggatgggcggaggtccgtgttgggaaaggcgaatagtcttcagac

SEQ ID NO: 103392 - DNA, 518 bp, Homo sapiens
  chr1:47696002-47696520
  hyper
cttatgatcacacatcgaagtcttggattaactgcgaaggcctccttctatttgccgcggctttggtggacatataggaataattcttccctggattgcaatacaatgcggaagattttctttctcctcttctaatccaaaagaggggaggggaggaaagaagaggggaatccatccattcccggcgtgttcgcggggggttaatgttgcgtgttcgctgggggttaatgtttgccttatgaccaagtctctgtgtccgtgcctctctccattttctcttcctacctcaaacccagcaacttagaaaacggctgtagcggaaaaaaacccgctgctttgttctcccgccaaaggagccaaaagggacaaactgctgcgctctgggatgattattttaattaaaatagatgttaatgatgacgattgtgatggtgatggcattagcaattacaataattgacaaaacaaaattctttcaacccgagctagggccccactaacccggtccctcccagagc

SEQ ID NO: 103393 - DNA, 344 bp, Homo sapiens; identical to SEQ ID NO: 35626
  chr1:47696620-47696964
  hyper

SEQ ID NO: 103394 - DNA, 268 bp, Homo sapiens; identical to SEQ ID NO: 35627
  chr1:47696986-47697254
  hyper

SEQ ID NO: 103395 - DNA, 667 bp, Homo sapiens; identical to SEQ ID NO: 35628
  chr1:47697279-47697946
  hyper

SEQ ID NO: 103396 - DNA, 188 bp, Homo sapiens
  chr1:47698006-47698194
  hyper
cgaggcgcgccggggccgtgtgcgccgcagagataaggcactgccgcgggtccgcccgcccccgataagcgcctcggccattatgggccaaatgattcattttaatttggcaatttcaccggagggagtggggactggttgagcggcgctaggaccggctccggaacgcgctgcggggagcgttggac

SEQ ID NO: 103397 - DNA, 30 bp, Homo sapiens; identical to SEQ ID NO: 425
  chr1:47779652-47779682
  hyper

SEQ ID NO: 103398 - DNA, 30 bp, Homo sapiens
  chr1:47780002-47780032
  hyper
tggagaactgcgggcgccaccggcgctcca

SEQ ID NO: 103399 - DNA, 30 bp, Homo sapiens; identical to SEQ ID NO: 35631
  chr1:47799819-47799849
  hyper

SEQ ID NO: 103400 - DNA, 30 bp, Homo sapiens
  chr1:47800152-47800182
  hyper
gaaggcagcaggagcgcggatttgggttag

SEQ ID NO: 103401 - DNA, 30 bp, Homo sapiens; identical to SEQ ID NO: 426
  chr1:47800394-47800424
  hyper

SEQ ID NO: 103402 - DNA, 30 bp, Homo sapiens
  chr1:47882001-47882031
  hyper
cgacatggatccgcccgccgcgttctctgg

SEQ ID NO: 103403 - DNA, 87 bp, Homo sapiens; identical to SEQ ID NO: 35633
  chr1:47882250-47882337
  hyper

SEQ ID NO: 103404 - DNA, 30 bp, Homo sapiens
  chr1:47902356-47902386
  hyper
cccatctccccttccgtgccccagaggctg

SEQ ID NO: 103405 - DNA, 30 bp, Homo sapiens
  chr1:47902818-47902848
  hyper
agaacaggcaaactcggagcagtagaccgg

SEQ ID NO: 103406 - DNA, 30 bp, Homo sapiens; identical to SEQ ID NO: 427
  chr1:47903435-47903465
  hyper

SEQ ID NO: 103407 - DNA, 450 bp, Homo sapiens; identical to SEQ ID NO: 35635
  chr1:47903679-47904129
  hyper

SEQ ID NO: 103408 - DNA, 581 bp, Homo sapiens
  chr1:47909579-47910160
  hyper
tcttgccacagcgggcgcgtcttcgtggttacaaagcgctttttccctgatgacttttttccccttttcaaaaacacttctttctccccccttcaactagcaaccctccccaggcccacccctcctccctctccgctccggtttatttaaacttcgcctcctccagcgccgccgcagcgcgcacttaatgaagttgaaggctcggtgagcccgggtgaagagggtttggaatctgttgaaaggggcgttttgtgacactgattggggcgggggcgggggcagtcgcggaccagacaatgaccgaccaggcgggttttcctgcgcacagggtcaggcgaataaaggcgccgacgctgtttaaacgaaggaccttgtaagagaaagggagaaaagattttgtgtgtggagcgtgcctcgtaaggtttcgtgcttaggagaagttgggaggaggcagctcgcctagagtctttacggaccgaattcggagtttatttcgaacactatgcatcaagccaaagaaaagcggggccagtttgggtttgcgcctaacttaattccgatacgcgcgtcaaaatgttgtg

SEQ ID NO: 103409 - DNA, 158 bp, Homo sapiens
  chr1:47910466-47910624
  hyper
gcgggctagtgggcgcggcgcggcgcagggcggagcgggcaccgcctccttccgtagcggagcgagagctgccgctcgaggctgaggccgctccggaggcctggaggcttcggactgctggactagtggggaaggaaggcggtttcctccgcagcgcc

SEQ ID NO: 103410 - DNA, 262 bp, Homo sapiens
  chr1:47910748-47911010
  hyper
cgctcgctgtccgcgactttgcatttctcctgcagcaggggtctctacccggtgccttcctcccggcacgctagcctcctcgccgaaatttcgtcgtcccggagtcggtaaccgagtcccaggctttactgccactccactccctgctgggttatttaagagatacgcggcttccgaggggttttcatcagaccccgcaagtgcgctcggctgggaaggatgcgctccgatgccgctacaggggttccgcgcgtttcaccgc

SEQ ID NO: 103411 - DNA, 102 bp, Homo sapiens
  chr1:47911423-47911525
  hyper
cgttcagatgcaaatgtgctgggttcgggttgagtgtgaggaatccacctccccacccccaccccggcccacgccttccttccccgacgccccttctgggcc

SEQ ID NO: 103412 - DNA, 598 bp, Homo sapiens
  chr1:47973695-47974293
  hyper
gagctcagtggaagcgccgcgggcgtccttcgcctggccggttccggcgctcttatctggcgggaaagccagctcctctaccgtgtcccctgtgcgcccgcggtcctctgaggacgcccgccccgtaccaacccgtcctggcttccactcggccccggagacagggcgggcgggtggcaccttcgggccccgcggggcgcccgccgcggcgtggggcgtggagagggtggcgacagagcgcgggcggggacagcgcgtgggccgcggggggcggggcgcggtggcgaaatggcttttccagattaggggcccagcccgcactgttgacacagtcataagttttaatgagaaattttgagtatttgtgtgggagacgcagcctctgtgcacagatgctgcgggcgggcggcgcggggggccgtccctccctggggccgccgcggccgcaggcccggcacggattcctttcaggcagaggggaaacatttaaactcgctcacctttgaactgccagggacgctgtttaccttggctgcccgagtggcagttttacagatattaaataccgacccgaggctgagccggggctccttcgctc

SEQ ID NO: 103413 - DNA, 30 bp, Homo sapiens
  chr1:48058092-48058122
  hyper
acagctcacctgcagcgcctgcaatgccgt

SEQ ID NO: 103414 - DNA, 367 bp, Homo sapiens
  chr1:48058946-48059313
  hyper
cgccgccgccagcccggggctgacctctcagagcagggcggaggattttcacagcacagcttcccgagagagcgggattaagggggaactgctcgggtgggccagagccaggggctagggggaggccgggcggaaacccaaaacctccgcagctgtttccagtttgccgccctggctggaccgcggtggctgcgtgcagagcgagcaaggctgcgcgggcctggagcgcccacggggcgcgggacctctctctgtctccccccgccccgcggggctctctctcgtcctctctgtcttggtggggctcagtctgtctctcgttttctctccctgtttctaagatctcgtggaatcaaagacattttgg

SEQ ID NO: 103415 - DNA, 861 bp, Homo sapiens
  chr1:48173820-48174681
  hyper
ggctgtcatttggaacgtatttgcagacacatggcttgtttttaagttaatgctttttaattcactgtttcccagttgtcgttttttattgcaaaggcggattctgcccgtgtgtgttcctttgcgggggcgggggatgggggtagcttcgcgggcaaagatccgatgagagagaggcagagaaaatgagaggcagagacagaggcaaaggcacagcgagacaccggggaaacggggaagcaggtcagagaggaagagagagacaggccggaagagactgtgcccaggagcctggacaagggatgccgtgcccagcagcctggacaagggatgccgtgcccaggagcctggacaagggatgccgtgcccaggagcctggacaagggatgccgtgcccaggagcctggacaagggatgccgtgcccaggagcctggacaagggatgccgtgcccaggagcctggacaagggatgccgtgcccagggaggggaaggccaggggccgctctagcggcgaggggcggagggtgtgctgagaaacccggctccggggacctaggctgacgcccccatctccgcctaaggcccctggggctgagcttgcttccccctggctctctggttcctttccgagtggaggagggtgaactggcccttgggagagggctggagggacgcggcgggaacgggctgagtacgcagcacccgggtcggcaagggctggggttctgagatcagagagaaaagaggacctgggagtcggaggcgatctccctggccccagccgaccctctgagctctagcgagcctgaatccggctctgggggtggcgccccccgcctgctgcggctcccggggccag

SEQ ID NO: 103416 - DNA, 579 bp, Homo sapiens
  chr1:48175231-48175810
  hyper
aagccgggagctggcgagctgaaagcccgggataattagcgctaattacatgtgtgcaaacagccgcggcagagggcgcgggctaggccgcggggccgcccctcccccggcctgaccctggcagtcccaccgcagtggaggggctctgctggcgcagctcgagccgaccgctaggggagagcgcgcaggagcacccacgagacccgggaatcggggtgcgccgtcagtgcccagagccaccgagccccgaccacacacgcgggcgcgcgttgcggcccggcaatctcgggatggcgggttacagtcgggccagaggctgagcccagaactgggggccgaacacccgctgcccttcgctgcccttcagcggggaccgggcggggtggggctgagcattctggcccctaggcttctccgactgttttggcctccggagcaacccggtgtctgcggaagattggaagcgactctccagcaccccgccgccgaggcccgctctcccaggccatgccggctggcgccgaggccgcgggacctggaagggtcggagtctggtgctggtgccggaaggccagccag

SEQ ID NO: 103417 - DNA, 318 bp, Homo sapiens
  chr1:48176215-48176533
  hyper
gcccctggaaccccacgcacctccaggccctgagcgaagcctggaagctgcggggcgaagcggagcgcgagagaggttgcgctctgcgggtcgggcagccggggctcgctgcaggcccatggcgccctcttgcgttcgtggccggaggcgcaggcggctgctgggctgacccgtgtcccgcggtcctgctggacttggacgcggcatctgactcctctctctcaatgattgcgcaggcgaggatcgattagctgcggagagggtgacctgagaccacacgaggatgcattttgtataccgtacgctttgtatgctgta

SEQ ID NO: 103418 - DNA, 30 bp, Homo sapiens; identical to SEQ ID NO: 35646
  chr1:48190103-48190133
  hyper

SEQ ID NO: 103419 - DNA, 196 bp, Homo sapiens; identical to SEQ ID NO: 35647
  chr1:48190694-48190890
  hyper

SEQ ID NO: 103420 - DNA, 316 bp, Homo sapiens
  chr1:48190924-48191240
  hyper
cgtctaaatgcggagccgctgcctccgccccccgggtcagggcgcccccgccctcgccccccgctccgtgcaaaatggtgtttaccaaagtcaatattggccgcggcgcccgcccggggcacccgggagcccctctggcctcccccagcccaaggctggatctgggccaccagagcctcatcttggtgtcccaactagccccggccctgacaaggagtcttttgagggctagacacaggcgggtctcgcccagggtctcccaggacccgacctggagtctcaggcctccttcctgtctcggcgctgtactccctgg

SEQ ID NO: 103421 - DNA, 30 bp, Homo sapiens
  chr1:48191799-48191829
  hyper
aacgtgctgatgcgtcgtctctgcctttcc

SEQ ID NO: 103422 - DNA, 952 bp, Homo sapiens
  chr1:48462220-48463172
  hyper
gggcgcccgaggctgcgcccggggggtggaggtggagcgggcgggctaaggtgggtgcggaagcaggacccaaaccatggtcccacgggactagaatacccaggcaggcgggagagtggccgggcaggcgctcgctcaccgatccgggcggccggcactgtcctccgtccgggggctgcgggcgggcgcgagcggtggcgaggagggcggcgagcagcggccccgccagggcggcgtgcatcctgccagggcccgcggggcgcgggggaccctcctgggcggcgcccctcagcggggcggggagcccccagttgggcacggagtttcctctggagcacggggctccagccgcaggatgctgggcgccctctggggcgtggctgactgtccctgtcggacctgggggtttctctggggccgggctccgtctgttggaagagggagaccctctagggctgggcccctcccccgggcgctcaacctcgctggccgagcccccgggtgctgagggcgtgttggggtccgggggcgcgcggggtcccggagctgcgtcgcggtccaggggcgcgcggggttcctggggcagaaccgagaacccggggtgcgcaagggtcccggggttatgctgggcacccggggcacgcaagggtcccaggggtgcgcggcgctccaggaggcgcgcagtgggacaagtgcggcggaaggcgcggcaggggtggggggcggctctggggcgaccggctgcccccgagcccggctcagaggggcggcgggcggccgcgcggccgctgcccgggctccgccatgctgctccgcggccgggagggagggagagaggagggcgggagagcggcgcggagccgggccgggctgggggctggggccgctggggcgggggaggggaggacctggcgcggggggcgggggggcgaggggccggggccgcgccggg

SEQ ID NO: 103423 - DNA, 60 bp, Homo sapiens; identical to SEQ ID NO: 435
  chr1:48463405-48463465
  hyper

SEQ ID NO: 103424 - DNA, 142 bp, Homo sapiens
  chr1:48559545-48559687
  hyper
gtgctgcatcggaaacgcaggtgcggcagctgcacaactggttctacgggtggatctgagcaccgggctcacctgggagatttctaataatacaaatccccaggctccgcccctgagattttgacgccgtgggtttggtgtg

SEQ ID NO: 103425 - DNA, 863 bp, Homo sapiens; identical to SEQ ID NO: 35653
  chr1:48937289-48938152
  hyper

SEQ ID NO: 103426 - DNA, 30 bp, Homo sapiens
  chr1:49143171-49143201
  hyper
ccaggcgccagggggcgcattacttatata

SEQ ID NO: 103427 - DNA, 946 bp, Homo sapiens
  chr1:49242175-49243121
  hyper
aagcagtggctccccccggtcccctccgcccgggcccccggcccctcccggggtcccagcccccgcccgggtcccaccgtccctccccgcccgcttgctcacctgccagcgccaggatctgggccttgtggagcaacagcgcgccccagtcgcggggggcgcgcggggggctctcgggcccggcgcccaattcctccgggccccggtacacggcgtacaccttctggttgtcaaaatccagccgcgagcgggggctgaagtcgcgcacgcacgacacgggcagcgcgtagcagacgttgtcctccaggaaccgcacaaaggcgtacatggtgggcgccgggggcgggccccggtcgggcagctcagcccgcggggcgggcgcggaggtggggatccggcggggggcgcgagtctcgctacggtgctggggggggcgggggcggctccccaggacccaggctccccccactgttattgttcctgaaagcaccgttctgccaatcggctgctttcgcctgggcgcggaaaagggagggagggggggaaagggggacgaggggcggatgaggggggtttggaagcgcactgccacttgcaaagtcagacccgagcaatcacagccggagcgcgattcgaatggggagggaaaagggttcagagattcagttgcaataaaaataataacaagagcattgcaggaaaaaaatgcattgattaaaaggtgcgctgcgtgcaggattatattgcttcaacaatcgcgctgccaaattgcattgcaacaaaactgcattgccaagtagagaagtgtatgagtgagtgaatgcgggataggggtgggggcaatcttgattgaatctcaaagtgtaaacttggaagccagcagaagtttggagtgttttaaatgtagccaccctacccgcgcccccagccccgcaccctccccgcg

SEQ ID NO: 103428 - DNA, 276 bp, Homo sapiens
  chr1:50489507-50489783
  hyper
cggggcagtagggagcgggtggtgggatcagtgggctgacaggagctacctcaggaagacgcggcacgacggttgcctgggcaacgggcggcaggcgcgcgggtggccggcgcgcggctgagggcgggagggacgcctgggaggagcgtgcgtccaaggccccgcccccgcggcgcgagcccgggcctgagctgggacttgggccccggggcgctgctcctccgcaaccgatccaccgcatcctggcaactgagcaggctccgccacccctagagc

SEQ ID NO: 103429 - DNA, 560 bp, Homo sapiens
  chr1:50513655-50514215
  hyper
tcctccgtctctacgcgaagcgccccctcgaggtgggcagggggtggcggcggcgacggtggcggagccgcagagcgagctagagagcgagagcggtgagactctgcggacgtcttcccgcccgccgcgctccgccccacccagcctccgcagcctcgggccggatcgcccggcggggaagatgcgcctcaagaaccaggtagaagcgcctcggcgcaggccccgcacccccgactctgcccgccctctgttacggacacccgctgggccacgtggtcgcgactggcttctcccagcggccagcctggccaccccgactcccagggagggggagagggcccttgcaagaggatcctgcccccgcgctgcccagacctgagggctcctggcgaccccacccgcagcccatctggcggctctggccccgcaggtcagggtcacacccctgccggcctcctgagacttcccggccccaggggagagagctgaaacttgggttgacgcgcgccccctccccagcgacaggcgaccccgcagcagccccgcgccactcctctctg

SEQ ID NO: 103430 - DNA, 100 bp, Homo sapiens; identical to SEQ ID NO: 35658
  chr1:50717511-50717611
  hyper

SEQ ID NO: 103431 - DNA, 30 bp, Homo sapiens
  chr1:50774664-50774694
  hyper
gcctgtgtcctttatcgaggccgtgaggca

SEQ ID NO: 103432 - DNA, 670 bp, Homo sapiens; identical to SEQ ID NO: 442
  chr1:50798646-50799316
  hyper

SEQ ID NO: 103433 - DNA, 205 bp, Homo sapiens
  chr1:50799393-50799598
  hyper
cggcggcagccgcggctgccccctactggcggaaggaagagtcgccgctccggggcccttggcggccgccgctcttcgcgcctccttggcctggctgccacccttccaccctcgggggagaccccgcgctctgtgctcactcggggaagagaggctcaatcacggcctggaccagcactagggacctaaacgctcttctcagtgt

SEQ ID NO: 103434 - DNA, 30 bp, Homo sapiens; identical to SEQ ID NO: 35661
  chr1:50834215-50834245
  hyper

SEQ ID NO: 103435 - DNA, 385 bp, Homo sapiens
  chr1:50880931-50881316
  hyper
cggcccgggttcgcatcctcccactgctcagaccgagtcggctccagcttgctttgggaagcattcaggaataaacgtggacagtagcggtcaggaaggagattcccgtttccccttctcccaggaggaaaagaggtaacgctgccgccactgccctctctttccagggtgggaacgccgcccgagaccggggtaccccacactcctccctagcgctgatcccagcggagctcaggccgcagtcccctcctgccggctgcggaagctcccagaagcggagactcaatcgcccccctgcccctgctaccaggccagagtctggagtacagatactggctccctggggcctgggtgtgcgaccccaggccggtcattgcaggtctct

SEQ ID NO: 103436 - DNA, 530 bp, Homo sapiens; identical to SEQ ID NO: 35663
  chr1:50881426-50881956
  hyper

SEQ ID NO: 103437 - DNA, 502 bp, Homo sapiens
  chr1:50882143-50882645
  hyper
cgctttctcccgcctgcctcttttctttctaactcttccctctcctgtctcctctcgccctcttttttctccttttttatccccttttcgtccatcgctcttgccggcatctttcttctctgggtccttctcccccactttcatctcatcgcgctcgcacttcatcaccagacagccaaaccccctttccaattaaagtggaattaggcaactcaatcaaattagttccccattaaagcccttctttattaaaccgttttcttgtcctgctattaagtttcactgcctggcggaactcgagccggccccagaagtttaccttgggatgtcgccggacccagccgaggggaggagtcattcttttcctggagcgggggagtcaccctgcggggagcgggagggactggaggttgaaggagagggtcggcccaggagcggctaatttgctcagctcggcgtgaggagggaaggtgaaaagggtgagagacgaggtctggctcga

SEQ ID NO: 103438 - DNA, 707 bp, Homo sapiens
  chr1:50882895-50883602
  hyper
gtgaagactggggccgacgatccaaaaactaagagccggggcaaggtgacccctccgcaagggtgcccaagctggggtacacactgtgttccctctgctcagcggtcgcgggtccttcgggagttgtgagccccgcgccactctggtgggataggtcttccgagtaccacaggaagtctcctctcccagtagccccgagggtcggagatcccacgggacctcggacaagcgtctccttagcgccgcggcctgagtgggaaatcacgaccttccccagcgccccacccccaccccctatttctcgaggagcgggacgggattcggcattgttttcttagaaaataacatttatttctagctcatatctatgcaaaggaaagcacaaagtgctgctctgcagcagcgttttccgctgcgggcccttcagtcagggcgtttggcgagtcccgggaggcgaggatgggcccgcgagcgggcggttctggctcagtcacacgtcgctctgttcctgcttcagtgcgcaccttgacggctccttagggacagaccagccgcaggcaagaggggcaggtgggcaggattcatcccgagtttccaatatatttaatctctaaacctgataagtacaatgcgcgcatagtctaatttttttccattttgtccctttttttgcttgttttgaatgtttttcacgttaataccgaggt

SEQ ID NO: 103439 - DNA, 332 bp, Homo sapiens
  chr1:50884020-50884352
  hyper
cgcagcctctgaattctcatgaattcccagccttttggaaagggggccgggtgaggctggaagagggatccggaggtaggagatgaggacccaggccgcgcaccccctccgagaacacctgcacctgtctgtagctgctccccctttgctcagccttccccacccaccctcctaaacaaaacccaaaaaccaccttagagtgagaagacgcccagccagggcgcagagagagcgctgggcgaagaggggtcgatggcccgcgggaacagggctggggttcctgtttggggaccggccggctgccaggcccctcgccctactgcttctccgga

SEQ ID NO: 103440 - DNA, 197 bp, Homo sapiens; identical to SEQ ID NO: 449
  chr1:50884690-50884887
  hyper

SEQ ID NO: 103441 - DNA, 203 bp, Homo sapiens; identical to SEQ ID NO: 35669
  chr1:50885248-50885451
  hyper

SEQ ID NO: 103442 - DNA, 1074 bp, Homo sapiens; identical to SEQ ID NO: 35670
  chr1:50886010-50887084
  hyper

SEQ ID NO: 103443 - DNA, 122 bp, Homo sapiens
  chr1:50887175-50887297
  hyper
gggcacgctgggcagctccgagcgcagctccatgacaggacctgacgggaaagaaggtgggagaggggagagacctggtgaggagcacaccgcgcgctaggccaaagcgccgccttgaggaa

SEQ ID NO: 103444 - DNA, 557 bp, Homo sapiens
  chr1:50888238-50888795
  hyper
agtcggggcggaagacgtatcctgcgaaaagttaggcatttcgggagggggatctttctcgaagaccacctcacactgccctcccctcccctccgggtttagggacagagtcgtcagacacgccctccccgtcttggggtcccaggggacccctctcgagcgcaggctcctgcgttctgatctcagagttggggtcctaggacacggatggcccagcaggccgcaccaagccaggggagtcgccttcgcaactggccataaacggacaccagagtccctcccacgccgcagccccataaggcccaagcaggcccagctccccgcttctgccgcggtctcctctgcttcccgcgttccccgtccctgccagagcccgcgacagagtccttgtgtctccgtccgagagtcccagacctcctctctatgagcgttgcctcctctcccagacccttcgggcgtccctaaggcccacggggcccaggcctcctcaacaggggccgcagaccaggtctccacccactgctctccctgcggccctcaactacctgccttgggct

SEQ ID NO: 103445 - DNA, 1234 bp, Homo sapiens; identical to SEQ ID NO: 35673
  chr1:50889123-50890357
  hyper

SEQ ID NO: 103446 - DNA, 32 bp, Homo sapiens
  chr1:50890616-50890648
  hyper
gcgggaatctgggcgcgcagactcggcccggg

SEQ ID NO: 103447 - DNA, 689 bp, Homo sapiens
  chr1:50890795-50891484
  hyper
cgccccggaagagccctggaagatgcccaccgggaggctgaggctggagggaggagtgggtgggggtgattcgctggaggaccgggcggagagcttccagaaagttcaccaggccccggcgcgagggcgctccgacacggacaaggtctatgatagcgataaaaagctggttactcgctcccagaaaatgccacttgctggagtctgtgaatgggtttaggagagagaagggtgtcagcccccgcgagggtctcccgcgtgaagtgaggataagggagtgcttcagggataatatgtcctctaggagcgcaggacccagaccccaccttccaacacctggaggttccgaggccaagtatgtctagccccggctgcacctgggtaggtgagccatggggtcgggggaagagcgccgacaaccgccggattccgcgcaggggccgccaggcgcctgctcccagagctcctttggacaaagttttcgggaaattctattaaaccgaaaacgaaataaactatacaaatctgcctagcttttgagggggcggtggcccaggtatccttctcgcttgaggccaggtcaccgtgagatttccccactccggaccggggatcccgcagaagccaagggtgtagccacgaggactcgggaacccgaggcggcccagcagatgcgtgaggaacttcat

SEQ ID NO: 103448 - DNA, 30 bp, Homo sapiens; identical to SEQ ID NO: 35675
  chr1:50891735-50891765
  hyper

SEQ ID NO: 103449 - DNA, 38 bp, Homo sapiens; identical to SEQ ID NO: 35676
  chr1:50892245-50892283
  hyper

SEQ ID NO: 103450 - DNA, 1086 bp, Homo sapiens; identical to SEQ ID NO: 35677
  chr1:50892336-50893422
  hyper

SEQ ID NO: 103451 - DNA, 494 bp, Homo sapiens; identical to SEQ ID NO: 456
  chr1:50893518-50894012
  hyper

SEQ ID NO: 103452 - DNA, 301 bp, Homo sapiens
  chr1:50896093-50896394
  hyper
ggtgtgcaccggctacgtggtcttctttgggccatccttctcctggtttccatctcccaagaggaccccttgaaatagcgattccgagaatcggctccggggctgatgagccatccagatacggagcttccgccgcactgtgtgaccgtgagcgagtcgccagccctctctgggctcgcctcccggctaccccggagtcagactgcctggaggataggcagccaggccactacttgtggagaaaggagactgtagagaggaggggcattcgggctggttcctgggccgggtcagcctgggt

SEQ ID NO: 103453 - DNA, 82 bp, Homo sapiens
  chr1:50896801-50896883
  hyper
gggtggaggagctggcgcacaagtagacagcctgctgcgatgggaggtagggactccaggcttgctgcggcactgacgcaca

SEQ ID NO: 103454 - DNA, 30 bp, Homo sapiens
  chr1:51425345-51425375
  hyper
ctgcagcgttcaaacgctgggaagaagact

SEQ ID NO: 103455 - DNA, 63 bp, Homo sapiens
  chr1:51425637-51425700
  hyper
ggcagcgcgggaagcgctaggcgctcatgcactcggtaaccttcaggcgccccggccgcccgc

SEQ ID NO: 103456 - DNA, 71 bp, Homo sapiens
  chr1:51426054-51426125
  hyper
gatctctgcgctggcggcagagactgcaacctgcagctgcggaagcttcaagtctcgcaacaggttattcc

SEQ ID NO: 103457 - DNA, 31 bp, Homo sapiens
  chr1:51426398-51426429
  hyper
tgcatcctcagactccgtaacacagaagtaa

SEQ ID NO: 103458 - DNA, 145 bp, Homo sapiens
  chr1:51434358-51434503
  hyper
cgctgcaactctgccgagcctccttaaaactctgccgttaaaatgggggcgggtttttcaactcaaaaagcgctcaatttttttcttttcaaaaaaagctgatgaggtcggaaaaaagggagaagaaaccggcaccctctctgag

SEQ ID NO: 103459 - DNA, 30 bp, Homo sapiens; identical to SEQ ID NO: 35685
  chr1:51435600-51435630
  hyper

SEQ ID NO: 103460 - DNA, 30 bp, Homo sapiens; identical to SEQ ID NO: 35686
  chr1:51435844-51435874
  hyper

SEQ ID NO: 103461 - DNA, 384 bp, Homo sapiens
  chr1:51442593-51442977
  hyper
ttaagtattctgtcccgagaaagcaatatgatgtatttcccttatcgtattgatcaaaagaacgttgtggatggagtccgtggcccaggactggtttcgaaatctcagttcccaaaaaggtgctttcggcttttgccgggggtagaagtaaatagtccataggcgccgggcagtcacagtgctggagcaagaaaaggtcgtgctcacagccttcctggctgccctaagcaaccttcatcaaaaggctacgggggaaagtccctgtctcggtctctggagactgttctgcttttatatggcagtcccatgaaaacagctccacgcaggaacctagtgagaggcaggaaacaaatttcccacctgagaccccgggtaaagctctgc

SEQ ID NO: 103462 - DNA, 30 bp, Homo sapiens
  chr1:51443937-51443967
  hyper
ggagcaagggccagcgggccggtgagtgcc

SEQ ID NO: 103463 - DNA, 30 bp, Homo sapiens; identical to SEQ ID NO: 35688
  chr1:51983744-51983774
  hyper

SEQ ID NO: 103464 - DNA, 139 bp, Homo sapiens
  chr1:51985091-51985230
  hyper
gccggccgcggcgccgcccaaaccctggcgccggagtctcggccaccggaccagagcctgcccccggggccgccttggaaaacccggcgcggacataaaattaaagcggacgggctgcggaggcgactgcagattgacc

SEQ ID NO: 103465 - DNA, 204 bp, Homo sapiens; identical to SEQ ID NO: 35690
  chr1:52081940-52082144
  hyper

SEQ ID NO: 103466 - DNA, 262 bp, Homo sapiens
  chr1:52082577-52082839
  hyper
ttgcattctcgcatccgtggcatggagtcctacacacaataggcgccctaagaaagcgtgtttgacttgatcgctggagcatctgccggcaccgcccaggacccgcccaggacccgccccgccccctgcggccccgccccccgcatgctgaatgccatataggcgagtgacgtcaggccgtttgttgtcattggcggctcccaagatggcgtccatcatggaagggccgctgagcaaatggactaacgtgatgaagggctgg

SEQ ID NO: 103467 - DNA, 30 bp, Homo sapiens; identical to SEQ ID NO: 35693
  chr1:52083279-52083309
  hyper

SEQ ID NO: 103468 - DNA, 34 bp, Homo sapiens; identical to SEQ ID NO: 459
  chr1:52194843-52194877
  hyper

SEQ ID NO: 103469 - DNA, 349 bp, Homo sapiens; identical to SEQ ID NO: 460
  chr1:52194940-52195289
  hyper

SEQ ID NO: 103470 - DNA, 792 bp, Homo sapiens; identical to SEQ ID NO: 35696
  chr1:52195348-52196140
  hyper

SEQ ID NO: 103471 - DNA, 30 bp, Homo sapiens
  chr1:52343948-52343978
  hyper
gtattgcttggggtcgctgggagacttgac

SEQ ID NO: 103472 - DNA, 248 bp, Homo sapiens
  chr1:52344232-52344480
  hyper
cacacaacttcctccgggtggcacagactgcagcaacagtgactctcctcagcattcaccaccaagctggagcgatggacatcccgcttcccaggacccacctcctccgcgttctagaggcggtggcggccggccctggtgctgccgcagccgcggggaacaggcctgaacccctcccccaacccagtctccctctcgccgacttccctcgtccctccgccctcccggccgccgatgacgctactgat

SEQ ID NO: 103473 - DNA, 30 bp, Homo sapiens; identical to SEQ ID NO: 35697
  chr1:52344711-52344741
  hyper

SEQ ID NO: 103474 - DNA, 30 bp, Homo sapiens
  chr1:52520646-52520676
  hyper
agagaagataagaacgcggtctgacccttt

SEQ ID NO: 103475 - DNA, 193 bp, Homo sapiens
  chr1:52521175-52521368
  hyper
gcaaattattgattcgtgaggtcagtcgctcccaacagtgggcggattgcccactggcctcggattctccttacccctccacaaatcaagactggacaactggatttcattgttaggttcctgcgagggtctctgaggagacctggcaagcctgttctgcggtgcgtgggctcgtgccgtgcagacatgcact

SEQ ID NO: 103476 - DNA, 30 bp, Homo sapiens
  chr1:52607456-52607486
  hyper
ccgagtgacaagaacgttcacgtatcttcg

SEQ ID NO: 103477 - DNA, 30 bp, Homo sapiens; identical to SEQ ID NO: 35699
  chr1:52607933-52607963
  hyper

SEQ ID NO: 103478 - DNA, 257 bp, Homo sapiens
  chr1:52608419-52608676
  hyper
gagggaggcagatgacgcctgtttgcaaacaagctttggcttccacgcgtcccataccgagtccctcagaatcccggttgtggcggggaaagggggaggagaggaaggccagggtgagaattgggggtgcagagagtgcgggaccaagagagcccctgctactcctggagtgtcattcatggatctggcttgctcgagaacaaccttttgcgtcttatttgaggtgaaatttcatcacctgccggttgctcattcct

SEQ ID NO: 103479 - DNA, 162 bp, Homo sapiens
  chr1:52832013-52832175
  hyper
gggcgtccaccggccggctccaatgaggtcgctgcgcccagccctcgcccacttgcagcctctccaccgaacctcctccctcactcagcccgaggcgctgggcgctcgctcgctcgctggacctaccccgcctccagccctcgccccgccccaccgagcaag

SEQ ID NO: 103480 - DNA, 30 bp, Homo sapiens
  chr1:52870022-52870052
  hyper
tccttctacaactacgggccgaaagccagg

SEQ ID NO: 103481 - DNA, 30 bp, Homo sapiens
  chr1:52870265-52870295
  hyper
agccctttacactacggtgtttccggcttc

SEQ ID NO: 103482 - DNA, 969 bp, Homo sapiens; identical to SEQ ID NO: 35700
  chr1:53017721-53018690
  hyper

SEQ ID NO: 103483 - DNA, 198 bp, Homo sapiens
  chr1:53019301-53019499
  hyper
gtgggggtggcgggcgccccagtgctgccccagtctggttcctagtctctgccgaggcccccgagctggaagccgagcccgagggccgcctcggcgcctcgctcccaaggctgctccccctggggaggaaggccggcctggaatgggtaccctctggcctggcactcggactgggcgtggcccgagcctcggcggacc

SEQ ID NO: 103484 - DNA, 728 bp, Homo sapiens
  chr1:53067877-53068605
  hyper
gtccggggcaggggtgcgctgcctcaggacagacggtgaaactgaggtccagagccggacatccaccgcctgcggagggaacgagaacgcggcgcgtcctgccttgcgggccgagcggcgccagagccgcctcctcccgccccccgcgctagatccccccgccccgtctttgccctcgcgacgccgccacctccggaacaagccatggtggcggcgacggtggcagcggcgtggctgctcctgtgggctgcggcctgcgcgcagcaggagcaggacttctacgacttcaaggcggtcaacatccggggcaaactggtgtcgctggagaagtaccgcggatcggtgagtgcgcggggtctggcggcgccgctgggcccggcctcgccctggcggggcctgctggggacgccccgcagcccggtcccccgcgcggtgtggctccgaggacgctccagccgcgcggccgccaaaccccggcccccgccccgctcggccgtgacctctggcgcggcgcccccatcccgcgcccggcccggcccggcccgcggctacgtggcacggccttggcgcggaggaacccgaagcgctcgcagtcggcgcccacttcgctaccggcacctttgggcagcggggtccagaccttcgccgggaggccgggcaccactgcccagcctttgccattcacgggtgaaaaaagtaaccgtagcatcgtgcggcctttccctctc

SEQ ID NO: 103485 - DNA, 614 bp, Homo sapiens
  chr1:53098659-53099273
  hyper
tgtctgccccagccccgaatgccccgagactcccggcgccggctcggtgcaggtaaggcgcccgcgccctggcctcgaattcccgccccgccactctggccgcgtcgtgctgtcgttgcgcacccagcgccctcgtgcaggcagggggagcgcagtggggagggggcaggaagcgcaggcagagccaggcgagcacgcggctcccggcccagctccccgcgtccgctccggctcctgccgcgttccagcagccgtcactcccgccgccggcccccgccgcccgccccgcctgcccctacccctccgcgcgggccgggcacctggccgccgctcggtcctcggggccccgcgctgctgtctctgtctcggcttctctcggcccctgggtctcttcgtctctgccgttctcaggctcagctccgtctcgctcggtccctcgcttccccgccgggctctagccggccgtctggtggcccgaggtggcggcgggctgggcgcggggcgcgatgagcggcgcctgcacgagctacgtgagcgcagagcaggaggtggtgcgcggcttcagctgcccgcggccggggggcgaggcggccgctgtcttctgctgcggcttc

SEQ ID NO: 103486 - DNA, 30 bp, Homo sapiens
  chr1:53163893-53163923
  hyper
gtccgggtccttctcgtggtagcagtggta

SEQ ID NO: 103487 - DNA, 30 bp, Homo sapiens
  chr1:53164137-53164167
  hyper
cgcgccgttaagggcgctggcagccacgct

SEQ ID NO: 103488 - DNA, 519 bp, Homo sapiens; identical to SEQ ID NO: 35704
  chr1:53168676-53169195
  hyper

SEQ ID NO: 103489 - DNA, 30 bp, Homo sapiens
  chr1:53192057-53192087
  hyper
ctgcgcattgagagcggaggcgggtccagg

SEQ ID NO: 103490 - DNA, 242 bp, Homo sapiens
  chr1:53308365-53308607
  hyper
gcgggccggcccccgcgtgcgcgtcgcctcgccgggcatttcaaaagctcgccggcagggcgcggcgctagctccgtgtgcctcgcaggcgtggtgggcgcgtcctggcagccgcccgcttggttctcgcgggatccgggctccggctcgacgccggctctctttttgacgccccgccgccggggttgccatggttcatttcttgcacccgggccacacgccccggaacatcgtccctcctg

SEQ ID NO: 103491 - DNA, 375 bp, Homo sapiens; identical to SEQ ID NO: 466
  chr1:53308907-53309282
  hyper

SEQ ID NO: 103492 - DNA, 307 bp, Homo sapiens
  chr1:53387230-53387537
  hyper
ccggacccgccagggcgcgcacttggatctctgagcccccggccgccccgtcggaagcgcagccgcgggcccgaaggggcctccaggggcgcaggaggcacagaacgcgcagcatcggggcgcaggctgggagtgaaggtgcttctccggccctgcaccgtctcggctcccgctgagagctcgcagttccggcgtcgggcgaagccttcgccaattgctccacctatgggccaagcgtctgttgcctccttccgcacctcccggggacagggagacttgagcggaggaggtcgggggaagcccagct

SEQ ID NO: 103493 - DNA, 30 bp, Homo sapiens; identical to SEQ ID NO: 35708
  chr1:53392866-53392896
  hyper

SEQ ID NO: 103494 - DNA, 30 bp, Homo sapiens; identical to SEQ ID NO: 35709
  chr1:53393282-53393312
  hyper

SEQ ID NO: 103495 - DNA, 31 bp, Homo sapiens; identical to SEQ ID NO: 468
  chr1:53401231-53401262
  hyper

SEQ ID NO: 103496 - DNA, 572 bp, Homo sapiens
  chr1:53527561-53528133
  hyper
gaactaggaagcgtcgcggaccagacagcccgccttcccggtctcccgggtgggggttcggggggcgtggtgcggcggccggggctgagaggggtcggtgcggcggctctgcctccccgggaagtgggaaccggccaagtcccgagcggggaggggcaggctttctcctgcccgcgcctggggggaccctacgcctgtgtccgaaggaggccggcgtccagcagatgctcccggggcgggtggggagtgggggaagggggcgggagagaggcggggaggagaaaacccacaacaaaacttgcgtcgcggagagcgcccagcttgacttgaatggaaggagcccgagcccgcggagcgcagctgagactgggggagcgcgttcggcctgtggggcgccgctcggcgccggggcgcagcaggtacagggcgctggcagccggggtgggccgaggggccgggggctgagcccgggcagcgcactcagacgtccccgcctctccggatggctccagcagctgcctggggcgggcccgccgcatctcaccccctctgtaggaccctgcacccagggc

SEQ ID NO: 103497 - DNA, 522 bp, Homo sapiens
  chr1:53528170-53528692
  hyper
cgcagtcaggacccaggcaggggccttctcctctctgagcagaggctggtccccgtccccaggcccctcccgctgcgcacatctggaaagaatctgagggcggttgggggcgggggctggagtgggaggacgccggcgggcgacagggaatgtggggggcaggtggaactgcgtaggggcggggacccctgtcatgagagcctgggcccgaagtatccccgcgtctttccacgtcaactcatcaggccccctagcgactccaacctccacctctttatagatagagaaactgaggcccagagaggggcagaggtctggccccagggcgcgtcggacgccgggtgggtcccctccggggctcggcttccccggccactgtgccgccccagcttagtgccaaccactagttgagctaaaggtctcagctggcggtctggagtccgtctatctgtctacgcggctgcttcccagccgggacagctggagggaggaaggggtgggggtccgcgaagcgcgaggagc

SEQ ID NO: 103498 - DNA, 210 bp, Homo sapiens
  chr1:53662228-53662438
  hyper
tcagattccaatcacgtttcttagcttttcttttttttttccaactccagtttctgtcttgctccaaaaaaggggaaggagcggctgcggcgctcggtttcccgcctcctagggaagggaagggagacgagcagcgcggaggctggggcccccttccgggcggggcctactagtgggcggggcctgtcagtgagcggcccctgcccggaa

SEQ ID NO: 103499 - DNA, 54 bp, Homo sapiens
  chr1:53662693-53662747
  hyper
gccggctccgggcccggccagtacctgcagcgcagcatcgtgcccaccatgcac

SEQ ID NO: 103500 - DNA, 30 bp, Homo sapiens
  chr1:53685993-53686023
  hyper
gctttgagttgcagcgcgattttctgaggg

SEQ ID NO: 103501 - DNA, 56 bp, Homo sapiens
  chr1:53686482-53686538
  hyper
ctgactccaggattcggtggtgccacagacagttactgaacgccaattttgtgcct

SEQ ID NO: 103502 - DNA, 30 bp, Homo sapiens
  chr1:53704291-53704321
  hyper
gcaacatcccctcacgcctagtctgtaaag

SEQ ID NO: 103503 - DNA, 30 bp, Homo sapiens; identical to SEQ ID NO: 35716
  chr1:53791673-53791703
  hyper

SEQ ID NO: 103504 - DNA, 30 bp, Homo sapiens
  chr1:53792545-53792575
  hyper
gcagtcgtcctcgtcgctgtggtctaagca

SEQ ID NO: 103505 - DNA, 30 bp, Homo sapiens; identical to SEQ ID NO: 472
  chr1:53792906-53792936
  hyper

SEQ ID NO: 103506 - DNA, 30 bp, Homo sapiens; identical to SEQ ID NO: 35718
  chr1:54147856-54147886
  hyper

SEQ ID NO: 103507 - DNA, 1496 bp, Homo sapiens
  chr1:54203828-54205324
  hyper
gtattgtcccggggccgagtttgagcaggtcactgccccttcggtggattgcgcgtctttaacataggttagcaccacgacacctagcccaatcagaggtcaaacccacctgattccacgcaaaagccccctcgctcaggagcggttcgcccttccctggtgtggggaggaccccaggcccccgcgccgcggcgcattaccgcgaagtcccacccaaatcctcctccaccgaaaccagcctcctttgcacgaatggtgaaactgaggcctggagcgggtaaggcgcctgttccgcgtcccccagtggaacacggagccggcggcaacgaggattcccagagcagggctcgggcgaagccccggagacggctccgggtaggtcacgggctgcgcgcttcgtcgactctccggggccgagctgcgcgcagaagctggggacccgaacccaaaggcccgagggaaacccccagagactcacccgcgaccacccgaacctggaaaacaggagtcccaagctgggcgctgaatcctgcgacgcgaacccatcacgcgcagccgggacacccacattcctatgcgcagcggaggaatcgagcccgtcgcgcgcgcaaaccggcacagtgggcaatgcccacgcggccgccgccacacacccgcacacccgccgaggcacgcccggggacggacacgccacccacactgccgctggtcagacgctcagcagcgcacaaccacacagtcccacgctctcgccacacgcgcgtgcgatgggggccgcgacagagcctccctcagcccttccatcaggggcccccaaactctccgttcccctccgcgctccctgcgccatccccaagctgccggggttcgagcgtcgccgggacgccagcctcggatctcgggccccgcacacgcccctccctcggccgcgggccgcgccccctctcacctcgcagcggcagctgcagatcgctgggcgcccggctcggcgcgcctccactggcgcagcagcccccgcagccgccgcagccgccgccgccgccgccgcgtcctgcggggcggttccccgggggacgggggcgggcccgcgtctgcccaacagccgctccagccactggctggccgcggccgcccggctcaggccaatcgcggcgcgagggcggggcatccccccctgggggtctgggcggggcccgacgcggggctgagcagagggtttgacaggcggcggccggctggatccccgcgctgcccgctgttctcagacggccgagccgggcaggacggcggggcggcgccgcggcgagagaggctgggctcgggggtcggcggagtgcgctgggcgtgaggagtgccgggctgaacccggctccctgcccgcctctccactagccccgggcaggatcctcccttctcccggtcggttttcccctccgtcagatgggaacgacgctgtctgctaacgcgaagcggacagatgcgaaagtgcttgaaaa

SEQ ID NO: 103508 - DNA, 439 bp, Homo sapiens
  chr1:54303837-54304276
  hyper
cgaccctggcagtgcgtgccacagtgcacgccgcactcacgcgccacagtatgtcccgcgacctgccggcgcagggccggctcacggccgtggccatggagatggcggcccctagtctagggcgtacaggagaccgtgcgcccgcccgccaccgcagttcaaaggcaggaaggccccaggaggaccctgctgggtctgcctcaaacgctgcctgagcgaagcccggcccaggctccaacccatccctgcgaggcttcgtctggacaagctcaacaggccaggactgccgcgcagacacgtcccgcaaacgcggctgtaactccaggaaccgccctctggcgaccaaacggtcccttcgaagcagggtccagcggggcgccagaagcaggtggcggcgctgcatgctgggaactgtagtctcgacggccccctgagagga

SEQ ID NO: 103509 - DNA, 175 bp, Homo sapiens
  chr1:54355495-54355670
  hyper
ctctccgcctcctccgggaagagccccgcctccttaaagagacagcagctcccagagaaacctgcgtgctgcggcgcgcagagcccgctcccgcccgcccttctcccgaggctgagcctcgagttcttaaagagacaggcgagggcggagtggtggggtcgctgagtgtgactac

SEQ ID NO: 103510 - DNA, 30 bp, Homo sapiens
  chr1:54411002-54411032
  hyper
gcctcaaagagtttcgtgggctggtagtgg

SEQ ID NO: 103511 - DNA, 30 bp, Homo sapiens
  chr1:54518138-54518168
  hyper
attcctgagcgtctcgctactccctgagct

SEQ ID NO: 103512 - DNA, 30 bp, Homo sapiens; identical to SEQ ID NO: 35723
  chr1:54518477-54518507
  hyper

SEQ ID NO: 103513 - DNA, 30 bp, Homo sapiens
  chr1:54518841-54518871
  hyper
ctccccttcggcgccgccatcttgttcccc

SEQ ID NO: 103514 - DNA, 30 bp, Homo sapiens
  chr1:54519229-54519259
  hyper
cgcccgcatttcttcgcagtgcattctggg

SEQ ID NO: 103515 - DNA, 30 bp, Homo sapiens
  chr1:54587413-54587443
  hyper
ggcgctgtgtccaacgctagccccggcctc

SEQ ID NO: 103516 - DNA, 13 bp, Homo sapiens
  chr1:54665606-54665619
  hyper
ctgaagtcctgga

SEQ ID NO: 103517 - DNA, 293 bp, Homo sapiens
  chr1:54665659-54665952
  hyper
cgcttcacctcacgtgaggattttccaggttcctcccagtctctgggtaggcggggagcgcttagcaggtatcacctataagaaaatgagaatgggttgggggccggtgcaagacaagaatatcctgactgtgattggttgaattggctgccattcccaaaacgagctttggcgcccggtctcattcgttcccagcaggccctgcgcgcggcaacatggcggggtccaggtggaggtcttgaggctatcagatcggtatggcattggcgtccgggcccgcaaggcgggcgcta

SEQ ID NO: 103518 - DNA, 30 bp, Homo sapiens
  chr1:54740885-54740915
  hyper
ccgggtctcacatgacggggactcagctcc

SEQ ID NO: 103519 - DNA, 30 bp, Homo sapiens; identical to SEQ ID NO: 35725
  chr1:54870910-54870940
  hyper

SEQ ID NO: 103520 - DNA, 31 bp, Homo sapiens; identical to SEQ ID NO: 35726
  chr1:54871324-54871355
  hyper

SEQ ID NO: 103521 - DNA, 30 bp, Homo sapiens
  chr1:54872706-54872736
  hyper
tgggcggctcgagccggcgccgaggcgcgc

SEQ ID NO: 103522 - DNA, 30 bp, Homo sapiens
  chr1:54873344-54873374
  hyper
aaaagctgtgtaagcgctgattggctgcct

SEQ ID NO: 103523 - DNA, 30 bp, Homo sapiens; identical to SEQ ID NO: 475
  chr1:54940518-54940548
  hyper

SEQ ID NO: 103524 - DNA, 30 bp, Homo sapiens; identical to SEQ ID NO: 476
  chr1:54954333-54954363
  hyper

SEQ ID NO: 103525 - DNA, 30 bp, Homo sapiens; identical to SEQ ID NO: 35729
  chr1:54955134-54955164
  hyper

SEQ ID NO: 103526 - DNA, 149 bp, Homo sapiens; identical to SEQ ID NO: 35730
  chr1:54965081-54965230
  hyper

SEQ ID NO: 103527 - DNA, 30 bp, Homo sapiens; identical to SEQ ID NO: 35731
  chr1:55007864-55007894
  hyper

SEQ ID NO: 103528 - DNA, 30 bp, Homo sapiens
  chr1:55181339-55181369
  hyper
gggattcgggttcacgcaccaccccaaaag

SEQ ID NO: 103529 - DNA, 30 bp, Homo sapiens
  chr1:55181837-55181867
  hyper
tcgaggttttgagtcgcttcttaagctgag

SEQ ID NO: 103530 - DNA, 54 bp, Homo sapiens; identical to SEQ ID NO: 35732
  chr1:55230329-55230383
  hyper

SEQ ID NO: 103531 - DNA, 30 bp, Homo sapiens; identical to SEQ ID NO: 35733
  chr1:55230610-55230640
  hyper

SEQ ID NO: 103532 - DNA, 459 bp, Homo sapiens
  chr1:55266562-55267021
  hyper
cctcgaggaagcactcgcgggcctcgtccagctcctccaggtagaatgcgaaagcgcccaggaggtgacgcacagcggggcgctgcggggcggccgccagctggagctcctgccgcagaccctcccgctgcagcttcaggtcccgggcgcgctgtggggccggcgagcgcggctcgaagttcaactgcatctccaggtgaaagtggcccgggaggtagtccaggtcgtcgatgagggcgtctagatcgtcggccacagcctccagctccgccatgactgctccctctgctcccctggcctcacccttgtccctgaggctgtggagggcagtggatgggggcgttccccgagcgagctccgtgcgggaggcgaggggcagccggcagaggccccgggcgctgcggcctctcggtctcagggcgcctcccgcaggtgggtgggcccgaggagtgccctgta

SEQ ID NO: 103533 - DNA, 237 bp, Homo sapiens; identical to SEQ ID NO: 479
  chr1:55352447-55352684
  hyper

SEQ ID NO: 103534 - DNA, 194 bp, Homo sapiens
  chr1:55353148-55353342
  hyper
cggggctgcggggccgcctcttccaaacgcgccttaagcggttttgcagtggctttccgccggagggctgggaggcgccccggccctgagtcagtcaccctttggccggacaggcggttcccgggcgcggaggatggaaacctggcggtaacctctgcaggtcgtgccactcggtgtgcgcaaggtctccagag

SEQ ID NO: 103535 - DNA, 495 bp, Homo sapiens
  chr1:55446119-55446614
  hyper
ccgccctggagcgctcgcgggggcgtgacggcccccaggacccaaggttccgatccgcgccaaggcgttccggtcagcagcagccccgcggctcctcgggccccgccgcgctggcaagccccagtccccgccagcccaatcgtgctggcgctttaaggacgggcggggcgggctgggcgacagcgctggacacctggagctgcccgaggacgcggaggagaggtggggcgggcgtcaccaccggagtggagggcgaggcccgggtcccgcgctcccctgggcgccccacggcagcctcagagccccgcggggagcgcgcagccctcggggcgggcgccggggtgaggcctggctcggtccctgcgcaccgggtgcgggcggcggagagggcgcggctggtgagccctgggagggcccaggagccagacctcggttttgcgggctggggagcagggctcgggggcagcggccaggcccctccgcccctaacacccg

SEQ ID NO: 103536 - DNA, 774 bp, Homo sapiens; identical to SEQ ID NO: 35739
  chr1:55462134-55462908
  hyper

SEQ ID NO: 103537 - DNA, 477 bp, Homo sapiens
  chr1:55505132-55505609
  hyper
ttaatcagataggatcgtccgatggggctctggtggcgtgatctgcgcgccccaggcgtcaagcacccacaccctagaaggtttccgcagcgacgtcgaggcgctcatggttgcaggcgggcgccgccgttcagttcagggtctgagcctggaggagtgagccaggcagtgagactggctcgggcgggccgggacgcgtcgttgcagcagcggctcccagctcccagccaggattccgcgcgccccttcacgcgccctgctcctgaacttcagctcctgcacagtcctccccaccgcaaggctcaaggcgccgccggcgtggaccgcgcacggcctctaggtctcctcgccaggacagcaacctctcccctggccctcatgggcaccgtcagctccaggcggtcctggtggccgctgccactgctgctgctgctgctgctgctcctgggtcccgcgggcgcccgtgcgcaggaggac

SEQ ID NO: 103538 - DNA, 30 bp, Homo sapiens
  chr1:56783488-56783518
  hyper
cgttttccagggcttcgcacacatccctca

SEQ ID NO: 103539 - DNA, 485 bp, Homo sapiens
  chr1:56943216-56943701
  hyper
ccccagacaaacgcacggctcccagacaaacgcacagctacaaaagcagcccgcatttgcattctaaaccgtcccggcctgggatgaaaagcagaaaatgaagtcaaagcggccggcagaacaatgagcccctcccggcagccgccgccccggccgcccccacctcacaggctgaatcccaggcccgagacgtggggcgtccggagcagcccccgccgcggaggaacggccgaggcgcgcccacctccggggccgtccgagcctcgtcgggctcggtggactggccccgcccgagcgcgcaagcttcccatctctgctttctctcctccagggtgaaaggacggacggccccgacccgcagacccggcagagccccgcggggagggcaccaggccaaaactaggaggaaaccgaccaagtgggctgcggcggccgggaaagaaaccacgtgcgctgatgtcctcagaaacgcagggagatgttcc

SEQ ID NO: 103540 - DNA, 30 bp, Homo sapiens; identical to SEQ ID NO: 35742
  chr1:57043923-57043953
  hyper

SEQ ID NO: 103541 - DNA, 955 bp, Homo sapiens
  chr1:57044087-57045042
  hyper
atgtttacatacagccgccgggaaggcagctcggctccaggcaggagcccgactctcggggcgatccatttcactcggatggagggcgaccagctagctatacgctggctctagagcgcggctcaaccaacttcccctacgctaaaaggacgaacccacaccttccgcgggattccgcccgggcttccaacgtggagacgacttttactgagctggtttaacagttgcccacgaacgcttaagcacgcccagacccactcaagtacaggccaagaagtcggtgggatcggggagggcgggggcttcgggcctgggcggcgcaaaggctccccaggaaggctgcgggggccccccggagctgacggcgcggcgcggcgcggcgctgcgcggccccggactgggctgggacgcgcgccgagggacgaggggccgaggggccgagggacagcggggctgggctcacccatgaagaggcagaagaggtcgaggcagatgagcagcacccgcttgctgccgctcctcctcgggttgttgttgagcgccgggctgccgccgttcttgctctccgggacgatcgctttgtcgtacttgtagttttgcatggcgctggctgcggcgcgagcctcccgccccgcgaagacgtcccgcaacagcagccacacacccaggcgcccgggtcgcctcctggccgaggctgctgcggatagtggcgggtcggccccggctccgggcgcggcggctagagtgcagccggggctgcctgcctccaactgcagaaggtggtgttttctgctcctcctgcgcgcctctgctttcctctgtcaaccctaaatcgttctaaagtccaaggggaagagagccagatcccgagcagaaacttttgcagagctgcgcagcttggggcgcgctgttgtggcgcgcgtctgagtgcgcgagcgagcgagtgggcagcgcg

SEQ ID NO: 103542 - DNA, 149 bp, Homo sapiens
  chr1:57110513-57110662
  hyper
ccttttacagcccctcgctcccgacatgcgaggcccgtctcttcttccagtttgacttccaagtctttccattccctaggatcgggccccagtctcaccccctattttcacccccttcggttttcctcagaaagggcctcctgcctccc

SEQ ID NO: 103543 - DNA, 806 bp, Homo sapiens
  chr1:57110714-57111520
  hyper
cggaccccgcgcatctggcgcagcccctcccgcactcccgcccagcgccccgcgtccccggcccccgctgtcgctgcttcgggttccgccgcaggagcctctcactcccgggagcgggcgcctcgcgctccctccctcggccccgccccgcccgccgctcgcccgttgcttcccacctgggcccgaagcgcccagcgccctctcccgggaccccgcgcccgccccgcgcccctcgcggctcggggtccgccccctcgcccgcagggcccgctgcactgtgggtaggcggcggcggcggcggctacgcggagcggcaggcggtggagcgaggccgcgcgcgccgaagatggctgagaagcagaagcacgacgggcgggtgaagatcggacactacgtgctgggcgacacgctgggcgtcggcaccttcggcaaagtgaagagttgagtacgcgctccggaccgctgtgcggggctgcctgacttgcgggaggccgaggggagaggcgggagccccgggcctccggcgggcgcggggctcggcggcaggtggagcggtcccgggtcgcgcggagctggggccccgggagggtggcgcgcaccgcctcgcctggcaccggcgcccgggccccacagggtccagggaagagggcgggggtgtgagctgaggatgggcgtcctgggttccaggttccgcgcccatctgcctttctggaggtcggagcaaggcacttctgtgttctctggacctcagtgtcctcctctgcaaaatcgggagaactggactcgttctgcgaggcgccttccag

SEQ ID NO: 103544 - DNA, 2750 bp, Homo sapiens; identical to SEQ ID NO: 35747
  chr1:57887907-57890657
  hyper

SEQ ID NO: 103545 - DNA, 193 bp, Homo sapiens
  chr1:58714601-58714794
  hyper
aacctcggtctgcaacgacgcgattcctcagacaccaaactaaaatgcattcattggaactcagcctcccaaagcggaagcaaagccactgcaaggcgatttacaggcaagagcccctctgaaagagaggaaaggagggggcttggaaagcaaggggacacaccttttctgagctgttcgaaacaggctgcct

SEQ ID NO: 103546 - DNA, 75 bp, Homo sapiens; identical to SEQ ID NO: 35748
  chr1:58715251-58715326
  hyper

SEQ ID NO: 103547 - DNA, 495 bp, Homo sapiens; identical to SEQ ID NO: 489
  chr1:58715359-58715854
  hyper

SEQ ID NO: 103548 - DNA, 166 bp, Homo sapiens; identical to SEQ ID NO: 35750
  chr1:58715978-58716144
  hyper

SEQ ID NO: 103549 - DNA, 30 bp, Homo sapiens
  chr1:59012085-59012115
  hyper
cacggggtcaccggcgtgccccgggcaagg

SEQ ID NO: 103550 - DNA, 458 bp, Homo sapiens
  chr1:59012377-59012835
  hyper
agcagaagcgaaagcggtgacaccgcagacccgacctatgcgcaggcgcgcacccgcacttcctgcccgccataccggccggggcgcccttcgctccgcccacacccggcagtcaatacagccgcccagagtcgttctcccagctgccccgggccccgcggagactgtggcgctctagcgcctccgtgtggcttaaggcgggacatggccctgggctgggctgcttgcctaggaacaactttctcccgtctttggtgagttgggtcctctaaagaatgatccacgcaaggctgtgtccgttgtagtctctacggcagtaccggccaaaagggaagagactcgaagactgccaaaagacgaaggcttcctggttctgaatctgcattcatagaaatagtctttggagtatgggaacagtgctttcatatgatttttggagggacgcattttaagaaaga

SEQ ID NO: 103551 - DNA, 927 bp, Homo sapiens; identical to SEQ ID NO: 491
  chr1:59042065-59042992
  hyper

SEQ ID NO: 103552 - DNA, 197 bp, Homo sapiens
  chr1:59247410-59247607
  hyper
atactgaatgagatcgaatgttaggtccatgcagttcttggtcaatgttaacgaaaagtccaacgttccgttcgcgcggggacagcccgtccgcaaagcggggcagcccgcaggcggccgctccctggctccacgccaagggagggcgcgccaagtccttcccactcgtgcacactgggggcgccgtcaggacgcaa

SEQ ID NO: 103553 - DNA, 30 bp, Homo sapiens
  chr1:59248397-59248427
  hyper
cacgaagccctcggcgaagccctcctgctc

SEQ ID NO: 103554 - DNA, 102 bp, Homo sapiens
  chr1:59249796-59249898
  hyper
ttcccattggctcgcgtcgctctcaggggggcgggcccgcccgtcaccatggagactccaccctagaagattcttctctgggcccgcggaggctcacgggat

SEQ ID NO: 103555 - DNA, 30 bp, Homo sapiens
  chr1:59250188-59250218
  hyper
ttgggccaggggtgcgggcgaggggtggtt

SEQ ID NO: 103556 - DNA, 454 bp, Homo sapiens; identical to SEQ ID NO: 35755
  chr1:59281466-59281920
  hyper

SEQ ID NO: 103557 - DNA, 30 bp, Homo sapiens
  chr1:59282219-59282249
  hyper
cgctaacccaccggcggccccagagcccca

SEQ ID NO: 103558 - DNA, 30 bp, Homo sapiens; identical to SEQ ID NO: 494
  chr1:59369141-59369171
  hyper

SEQ ID NO: 103559 - DNA, 122 bp, Homo sapiens
  chr1:59369442-59369564
  hyper
ccgctcgccacgtcagcgcacgcccgccccggcgctccgcccggccctcctgggcctccccatagaaggttaacccgggccggatcccacgaggactggtgggggccgggcggcccgtgatt

SEQ ID NO: 103560 - DNA, 191 bp, Homo sapiens
  chr1:59369777-59369968
  hyper
cagcaggctttatgcggctgtcgggctcggggcgaggagccggctccaccctcccagtctgggcccatcctccggcctcggccagccccttccctccctctctttggcgttcgcgttccctcggcctagcagacctcttagaatgtttgttttccttctgagaaagagcggagggacgtggccaagaccaa

SEQ ID NO: 103561 - DNA, 518 bp, Homo sapiens
  chr1:59612305-59612823
  hyper
cggagaaacttcagagcggcaggtgccttcgtttcccgttacctgctgagtctagtcccttccagggcacacagtgggcgcttagtaactgtagaaagaagtcgaacgaaatcggaagggggagaggcagaggccacaatcaagacacggaaacgacagtcagtcgaggcagcagagagggtttcacgcgggccagcggaggcgcagggcagttgagaagggaacttgccacggggcggaggggccgcgctccccaccagcgcggcgcgggggcgctaggccagggaccgccgggccagggaccgccggctgcgagcagcgggaacggacctgccccgggtcgcagcggtttttcccgggcggggctgaggctgcagggaggcgggcgttccggcggagggtcacggcctcgccgccgggactttcctggggtggaggtgtgagcacgtaggagccctggcctttccaacttcccaggtcagactggggctgggaccaccctgcgcggccttggatgc

SEQ ID NO: 103562 - DNA, 191 bp, Homo sapiens
  chr1:59762029-59762220
  hyper
ttatttcttacagtcgcctacaacagtcctggtgtttagtaaacggtctgacacacacacccatcaggggctgcggagagtccgcctgggtaagctccgcaaggtgagtccccagagccgggaactcgcagcctgagcagacgcagcgtagccgatcttgggtccgcgctcctcccgccttgcccagccct

SEQ ID NO: 103563 - DNA, 32 bp, Homo sapiens
  chr1:59762508-59762540
  hyper
gccgtggggttcggcgcggctacgtgcagaat

SEQ ID NO: 103564 - DNA, 30 bp, Homo sapiens
  chr1:59762778-59762808
  hyper
cgttgttcccgagacgttgttgagtcccct

SEQ ID NO: 103565 - DNA, 30 bp, Homo sapiens; identical to SEQ ID NO: 497
  chr1:59799495-59799525
  hyper

SEQ ID NO: 103566 - DNA, 219 bp, Homo sapiens
  chr1:60280121-60280340
  hyper
acgcctgagcccagccggtgccctgctgcccctctgcctcttcggccactggggctgagcttcagccttaccaatccccgccgcgcacgcgcgctcgcttcccgcgcgcaacctcccacccccgccctcactgcacctgccaggtcataaacctcttcccacccactctcactctctacccaaggctcaggcttgtctcacgttgattggccagagccc

SEQ ID NO: 103567 - DNA, 279 bp, Homo sapiens; identical to SEQ ID NO: 35762
  chr1:60280812-60281091
  hyper

SEQ ID NO: 103568 - DNA, 230 bp, Homo sapiens
  chr1:60539399-60539629
  hyper
cgcggtccgtgcttctccccaggaagctgacactctcagacccggggacgggacggggcgtggggaccgagcccaggaatccggccaatcacagggcccgcatcgcgggcggcgcctgttccgccctggtcgctaaggacgctgaaggctgtttctgggcggggaccaggtttttctccactgcctaggcaatggacccaggctctggctgccaacgggtgaagagccta

SEQ ID NO: 103569 - DNA, 83 bp, Homo sapiens
  chr1:60747089-60747172
  hyper
ggagtggtttcctgtcgagaggcacgcagacagcgagtgtgttcttacacatacacacaatgcatctacggccgcagcatttg

SEQ ID NO: 103570 - DNA, 616 bp, Homo sapiens
  chr1:61508553-61509169
  hyper
gggccactcctcctcctcacccggacggctgcaaggaaccctcattctgtgcaaagccagggcgcaatcctgtgcagtaaacctcccctcgcgaagagggaagcggggttcgctgttgcaccccaggccgagcgccctaggggagagggcgccgcagcgagtcccgagatccgagcccggcctcgacgccggagcgctcccggagctggtccttgcccgaagcgcattaaaacggcgccctctggtgtcagctcgcggcggccgggtaaaagcagtggcgctgggggtagagttctactcgccaccctgttcgcaaactgaaagatccccgagtttagaaagtgtcttgccgctctgcggacgctgtgtccgcggccccgctgtcgcgcagagctgggctgcgatcagaaagtccggctcccctggccccagacagtggctcccgggggaaccagcgtggagggtgaggagggacctggccttcgaaggcaggaaggacagaacccccaagccacgacggcagcggggcgcggggacggccgggctccagccacagaggcccgaactcggcccgcactgcccggcggcaggccgcgaaggagccccgggtagtggg

SEQ ID NO: 103571 - DNA, 41 bp, Homo sapiens; identical to SEQ ID NO: 501
  chr1:61516033-61516074
  hyper

SEQ ID NO: 103572 - DNA, 30 bp, Homo sapiens; identical to SEQ ID NO: 502
  chr1:61516540-61516570
  hyper

SEQ ID NO: 103573 - DNA, 73 bp, Homo sapiens; identical to SEQ ID NO: 503
  chr1:61519331-61519404
  hyper

SEQ ID NO: 103574 - DNA, 512 bp, Homo sapiens; identical to SEQ ID NO: 504
  chr1:61519472-61519984
  hyper

SEQ ID NO: 103575 - DNA, 31 bp, Homo sapiens; identical to SEQ ID NO: 35769
  chr1:61522826-61522857
  hyper

SEQ ID NO: 103576 - DNA, 30 bp, Homo sapiens; identical to SEQ ID NO: 35770
  chr1:61542314-61542344
  hyper

SEQ ID NO: 103577 - DNA, 30 bp, Homo sapiens
  chr1:61542930-61542960
  hyper
cttctgcaaagtctcgtacaatccaaagca

SEQ ID NO: 103578 - DNA, 30 bp, Homo sapiens
  chr1:61547482-61547512
  hyper
attacctctgccgacgaatctattcccaca

SEQ ID NO: 103579 - DNA, 360 bp, Homo sapiens
  chr1:61547844-61548204
  hyper
gttacccagtaatgcgctgatcgggggagggggcgggggggccggggagcgagcgggagagcgagcaagcgagcgagcaaggagcgagccacggagagagccggggagcgagcgagccagcctgcgagcgcgagcggccgcggaggctcgggacccggctggccgcgcggcgccgcagccgccccctcccccacaccccctcccccccgcggcggcggcgcgagcgggcggcggctgtgcggtgcggtgcagagcggaggcggaggcgggcgcgcgggcagctcgcgggcacccggccgggccggcgcgggagcgggaaagggtgcgctatgcctttaacacccgcgtacagtaggcatg

SEQ ID NO: 103580 - DNA, 1141 bp, Homo sapiens
  chr1:61548436-61549577
  hyper
acacgcataccccagcgcccggcagttatgtattctccgctctgtctcacccaggtaagccgcggcgtggatgcggagggcttgggggccggggcgccgggggcagggctggggctgggtggggggcaccggggccgtcgctccggccgggcccagggcgtgcgtctcggtgtgtgtctgtgtctgcgcgtgtttctgtgtgtgtgcgcgcgtgtgcccgcgggtggggggggggatcccgcttaaagaaagtaactttgtttccatgcgggtgcattcctcttgcacggccatttgtgtgggcacatggctaatggcgccctcttattaatgcgttaattaatatcggggcgacggactgcggaacagcagtgttttcggacaccccgcacgtgtttcggcggggttgcagtccatgacacgcagaaatctggctcagcgtttctgctgccgggagcagggattccgtagtgccgcagcgcccggggagggggccgccgacggagcccaccgctcaccccgcacgctcgggccggctgcagtcctcgggtgcggggagacctcgggtgcctgcgcccaacggcccgctccccgcagcctgcgctgccgcagccccccgccgtcttcccgaactcttacttttgtttattgtttgtcagccttcggggtccggccgcggaaaggacgcgggctcccgtcccggccccggcccggacagcgcccctcggacgcgggcaggctgcggctagccctcggctgagcggggctacgtggacgcgcgttcccccgcgccggccgggtggagcctgcgtcctcgccgcgcgccggtggcccgttggctctcccggagtgaaagtttcggggccgagacgagcccacgttgtgcagggcgccgaacgccggaggccgcgggccgcgggccgggtagcgccgggcagagttgggctcctagccgggagccggagcggcggcccgggccggacacggctccccccgccgccgccgccgccaccaccaccaccgccaccgcgcgactccggccgctccgcgcgcaggacgggggcaacttttcccctccgactcaactcagagcatggggctcttgcgccccaccgcctctcctttccgtgcccccctgtcc

SEQ ID NO: 103581 - DNA, 30 bp, Homo sapiens
  chr1:62190579-62190609
  hyper
ccccaactctacctcgcctccatggggggg

SEQ ID NO: 103582 - DNA, 224 bp, Homo sapiens
  chr1:62190977-62191201
  hyper
tgtacccagtccctcgaggcgaattttcccccacgaacccttggaaggagctaaggttaatctttgagtgctggaggaaggaaacgagtggtttaggcaatcaggtgcttcacccgcttctcattcccgcgcccttagctgaggcttctcggtcctctgaaagtgccagcggcgtcagaggttggaatcaatgctttcctgacatcatcgcagttagccctgat

SEQ ID NO: 103583 - DNA, 602 bp, Homo sapiens; identical to SEQ ID NO: 509
  chr1:62207659-62208261
  hyper

SEQ ID NO: 103584 - DNA, 519 bp, Homo sapiens; identical to SEQ ID NO: 510
  chr1:62208291-62208810
  hyper

SEQ ID NO: 103585 - DNA, 1060 bp, Homo sapiens
  chr1:62784144-62785204
  hyper
gcaaagcgccctcggcggcgtctagagcactcggagctgccccattgcctccgcccaaggtcgcggcccaaagggagccctggaaagttcagccaggggccgaggagtgccagggttggcactacggggagacttttgcgacaggagagagactaagagctcgattccaggtagcagtgggagcccgcggcaaagaacgcccagtcccgcaggctgcatcccagaccgcagcgcctagctcggaaaagctgggcgggggctgcaccacctgagtcgcaaggacagcacggcctccccctcctcaccagtgttctccacccccagaattggggcgcggagagccaatctgggctggaaagggagcggcgcccacctttgggcagcccgagcagccccgctccttttctgtcgcagaccccaggctgggaggcgggggcgccaggtcggcccaagctgccgcagccactgctttaaagggagccggggacgcggcgctggggactgggcgaggcgggtggcagaggcaagaggagagtggtcgagcgccggggccaacactcgggtcgcgcagggcgggtgttgaacaccccagcagacgcactgcgggggactggggtcgcagagtcccttaccttggcgagctgcggaagtcctgcgcgaggcggcccgcggtgcacggggccggggcagctaggcgcacaccccggcttcggagcgcacgcaacctccgggtgcactgtccgcgtcccaggcgcgcaccccggggctggcgcaccctggtcgtccgcggcgcgcacaccctccaggcgccctctggccgacggtctcggccctggccccggcgcacccctgcgggcacacccaccgcggcggatgcgggactggccaggcgccgccagccgcggcttcgccccgcgtcgccagctgccaacagcgcccgagtccccgccttcgctaggggagaaaaaaaagactcctgacgcggcgcggactttggtgtgtaggaaggggcagaattgcgaaaccgaggggagggtcttagcctcgataaactcaaaag

SEQ ID NO: 103586 - DNA, 30 bp, Homo sapiens; identical to SEQ ID NO: 35777
  chr1:62902647-62902677
  hyper

SEQ ID NO: 103587 - DNA, 31 bp, Homo sapiens; identical to SEQ ID NO: 512
  chr1:63153559-63153590
  hyper

SEQ ID NO: 103588 - DNA, 30 bp, Homo sapiens
  chr1:63154450-63154480
  hyper
tgtttctgcagcaccggtctccgagctttt

SEQ ID NO: 103589 - DNA, 30 bp, Homo sapiens; identical to SEQ ID NO: 35779
  chr1:63250121-63250151
  hyper

SEQ ID NO: 103590 - DNA, 30 bp, Homo sapiens; identical to SEQ ID NO: 513
  chr1:63348082-63348112
  hyper

SEQ ID NO: 103591 - DNA, 558 bp, Homo sapiens; identical to SEQ ID NO: 514
  chr1:63539430-63539988
  hyper

SEQ ID NO: 103592 - DNA, 30 bp, Homo sapiens; identical to SEQ ID NO: 35782
  chr1:63782973-63783003
  hyper

SEQ ID NO: 103593 - DNA, 30 bp, Homo sapiens; identical to SEQ ID NO: 35783
  chr1:63783451-63783481
  hyper

SEQ ID NO: 103594 - DNA, 30 bp, Homo sapiens; identical to SEQ ID NO: 35784
  chr1:63784828-63784858
  hyper

SEQ ID NO: 103595 - DNA, 129 bp, Homo sapiens
  chr1:63785163-63785292
  hyper
tctctgtatctgtctcgcttcttccgtctctgtcctacagcttggcggtaactgacgacctgtgagcttttagctgcaaactgcaactacgcggcaaacaatttatttagcccgacatctagccggtct

SEQ ID NO: 103596 - DNA, 148 bp, Homo sapiens; identical to SEQ ID NO: 515
  chr1:63785618-63785766
  hyper

SEQ ID NO: 103597 - DNA, 317 bp, Homo sapiens
  chr1:63786078-63786395
  hyper
gccccgggcccctgcctttagggctgggcaacccaagcagagcaaaggaggttcctgaatgtgtaaatttccgctttttagctttttttttttttttttttggaccttccgacacttcggttgctgaggcagttgcagacgcgacctctgcagtcctgggcgatggccagccagctcagctcgggtcggtttcgcggaaagctgtctagacggcattgtaaacggttcggagcctgcgggccacaaagctgtggagctacggaaatcaactctgagatgcgttttagggccgtgtgcaacctcgggatcatttagat

SEQ ID NO: 103598 - DNA, 478 bp, Homo sapiens
  chr1:63786770-63787248
  hyper
gctcccctcccaggccgcagcggacagacagggattgggttccgtgtgcctgccacaccaggcaggctcttgcggctcccaactaggcggcctaaatgagggaggaaagaggaggcgcatcgctgattcaccgcgtcaagagcactgactttccttggaggtgtgaggtccacgcaccccagccacgcacttgggggtcggtttgcggtgcctccccctccagtcccagtgaaatccccacagtttttcctactatcactgacttgccttgcactccgcgtgcattggccacacatcctcgcctcctccacccgctccgccgccggttttcttggaagttaaatcttggaggatttgtccacaccttaagagaagaaaatccacgttagctggcagcaacggagatcccagcatgctggcatgcccaagtctgcccaggttcccccaaggccatgcccgccgcccgggaagtcactgc

SEQ ID NO: 103599 - DNA, 403 bp, Homo sapiens; identical to SEQ ID NO: 35789
  chr1:63787282-63787685
  hyper

SEQ ID NO: 103600 - DNA, 864 bp, Homo sapiens
  chr1:63787902-63788766
  hyper
cagggcagcgacagtcgcacagtcccgcggacgctcccaggcccacgccctgactcgctcacacccacccacactcacacccacccgctccctgggccccagggcccggatccagcctgggtgggggggtctccgggcgggccgcagcgccctccgtgccccggggatgctggcgcacagtgcggagcggagttgcgcgtctctcgtccctttgttgacaattccctgaaccaacttgagtttggccggctcggccgcggccctgacgtcacgcacggtcacgtggccccgcctcccgctggatctttaagtagaaagtaatctatcaggccagtccttaaaacgggactttcgactaccggggcttcggcgtccctgacacccagccccctgcccccccgctactgtccctgcccgcgccctcccgagctgctcggcgcccggcgtcccgcgcccgcctggaccgctcctgcgccccacgccagggccagaggccgaggaaggcgggctaagtgagggggcgcggcgtggagaaccgccggggccgggagcggtagcgagcgcctagtaccgagcgccagggacggcaggagttcgcggagcgcggccgctgggggcggacggcagagcccgcgccacgcgatgcggggccgccgagtgtgagctgagcccagcgggccccaagccacctgcggccccctcccctctccctgccccccatctttcgggggcactcaaaccctcttcccctgagctccgtggcagcccccgaacaccctcatcgcccgctgccccctccccgccgccgctaccaaccccgaggagggatgaccctctccggcggcggcagcgccagcgacatgt

SEQ ID NO: 103601 - DNA, 577 bp, Homo sapiens; identical to SEQ ID NO: 518
  chr1:63788919-63789496
  hyper

SEQ ID NO: 103602 - DNA, 63 bp, Homo sapiens; identical to SEQ ID NO: 519
  chr1:63789728-63789791
  hyper

SEQ ID NO: 103603 - DNA, 63 bp, Homo sapiens; identical to SEQ ID NO: 520
  chr1:63789849-63789912
  hyper

SEQ ID NO: 103604 - DNA, 232 bp, Homo sapiens
  chr1:63790252-63790484
  hyper
ggtcccggtcccgctgcccaatcctggactctgcctctccccaatttcctttcccctgagcccccaacgcctaccttccgcggcctccatcccctcgcgcacacctaagctggtcgagcaaactcaccgcgcgcccgccggggatagctttccatacaggtaaaaccgaaaaccgaattttccaaaaatgcaccccgacggcgcctgctcttagtaccgtggggatgggagg

SEQ ID NO: 103605 - DNA, 301 bp, Homo sapiens
  chr1:63791877-63792178
  hyper
gctcggccctgcgcgcgtccttttggttaatcccggccagtccccggtgttgtcgtccactttgcctccctggtggtggagatgcctccccgtctcggatcccacctcatttctccgctgtcgacgtgggctgggggtcgctttgaaagacacttccttgcaaatacccaatctgttttcctggtaaacggtaaacattattgtgtcttgagtaaacattccttcgggatcagggtcctaaaataaaacaagctgccgggggtgagatagtttaacttgataaacaagaacctgataacca

SEQ ID NO: 103606 - DNA, 71 bp, Homo sapiens; identical to SEQ ID NO: 523
  chr1:63792231-63792302
  hyper

SEQ ID NO: 103607 - DNA, 105 bp, Homo sapiens; identical to SEQ ID NO: 524
  chr1:63792543-63792648
  hyper

SEQ ID NO: 103608 - DNA, 855 bp, Homo sapiens; identical to SEQ ID NO: 35798
  chr1:63792797-63793652
  hyper

SEQ ID NO: 103609 - DNA, 935 bp, Homo sapiens
  chr1:63795342-63796277
  hyper
gaagggaaagacagacacagacgcgccgggccggtggaactcagctccgggaaggctgtggacctggaccctggggctccccgctgcctgggcgcctctagcccggcgatgagtggttctgcggggaccgacggccccatttccttcttgcctcgtgatgtgggagggaagaaagaaggcggcaactgcaggcccgaagctcccctcgcccagcggcccaaccacagtgctgtcgtgtcggggatcggtccccaagggagcccccaaccccctgcccacgccgagatcacccccgtgccaacctcgagggctcggcctgcgggactccagctgcccctgcctggagggagggaagggagaagagaatacgaattaattacgaaggaaacccaggtgtgaaaggcacccgccgcggagctgggcgtgcagcggggcgcgcggtgggacctctgctcccgtccccgtcccgcggctactcagttgcccgctcatgggaggctcgcgacggaaaataaatcccctcagagtgaacctgggaggccgagaggacccagcctgggatctctgggggaaataggggcaagtttaccacggtttaattaagccacagccctagcacgaggaccccggcgacccatccgggctgggggatggactggagtgccccccaccccaggccgcgaaccggcagcgagaagcacactctccgccatccccggccccgccgcttccgcctctgcggactccgcgtttgccatgctccttcccggggtccagggaccggagctgcggtgcacgtcttattgaaggggagagctttggttcttttcctccctgcatccctcccactttcctctcaacagatagtaagcaagactcaattttctccaaaaaagcccgttacccctttctgcaaggggcgcatgcctaggttc

SEQ ID NO: 103610 - DNA, 30 bp, Homo sapiens; identical to SEQ ID NO: 35800
  chr1:63832995-63833025
  hyper

SEQ ID NO: 103611 - DNA, 30 bp, Homo sapiens
  chr1:63833410-63833440
  hyper
gccgggggctcggacgcgccacgagccggc

SEQ ID NO: 103612 - DNA, 30 bp, Homo sapiens
  chr1:63988404-63988434
  hyper
catgagttctcccacgggtttacacgaacg

SEQ ID NO: 103613 - DNA, 30 bp, Homo sapiens; identical to SEQ ID NO: 35801
  chr1:63988799-63988829
  hyper

SEQ ID NO: 103614 - DNA, 201 bp, Homo sapiens
  chr1:63989065-63989266
  hyper
ggccataccacccccgcgatagaggagcaacacagctgtctctgtgcgctccggatcagcgcttcctagatttctagccggatcgtttggagaagggctctgcatcttatttccggtggcggtgaggtgcagttgccatggtgattagagaaaggccgagatctgtccagctgcggtgagaggaacgctgaatcgccgaag

SEQ ID NO: 103615 - DNA, 30 bp, Homo sapiens; identical to SEQ ID NO: 35802
  chr1:64059037-64059067
  hyper

SEQ ID NO: 103616 - DNA, 1000 bp, Homo sapiens
  chr1:64239451-64240451
  hyper
ctgtcaagtagcctcgaaggtccccggcgctcggttcggtggcgagtttgaggagtgtgggggaggggaggggagggagcgtgcccgagacgcgggagccgcgaccgctttctgcgaagtcggggagggtgcgggcgttgagaggctgcagcagagggcgctgggtcgccagcctgggccgcgtctcccattggtcggggctggggcgctgggctggagagttggtggaaagtgacaagttgagcgagagagggagcgtggagagctggagcagccgccaccgccgccgccgagggagccccgggacggcagcccctgggcgcagggtgcgctgttctcggagtccgacccagggcgactcacgcccactggtgcgacccggacagcctgggactgacccgccggcccaggcgaggctgcagccagagggctgggaagggatcgcgctcgcggcatccagaggcggccaggcggaggcgagggagcaggttagagggacaaagagctttgcagacgtccccggcgtcctgcgagcgccagcggccgggacgaggcggccgggagcccgggaagagcccgtggatgttctgcgcgcggcctgggagccgccgccgccgccgcctcagcgagaggaggaatgcaccggccgcgccgccgcgggacgcgcccgccgctcctggcgctgctggccgcgctgctgctggccgcacgcggggctgctgcccaaggtaagaggcgcccgccggcccccgcccgcccagaccccctgacccgtggccacccttccgccgtccagccgggcgcgggacacgcaggaagcgccgcgctggctccggggcgcgtccggccacccgccacggggctcgccggcgccgccaggccagggtttgccccggagccccgccaggccagggtttgccccggagccccgcggcgggccggggcgcgcccagggactcgttcctcggtgcgcagcagcgattgtcagcgctgacaggaa

SEQ ID NO: 103617 - DNA, 495 bp, Homo sapiens
  chr1:64240532-64241027
  hyper
cgcgccccagccggtgttcaggcaagtctatcctgcccccaagttgcgagccggcccggaaggcgcggtccaggagggagtttggattttcagtggtgctcgccagagcccaggcggctcgcggatcgacgcaaacaaaagccctgtcctcctggggctccggcggcctcgcatcgccaccgcccccggccctccggccctcccgagagtcatcatagaggccaaaacttgtgcgccgctgcagccgctgccactttgtgcaaaatgtgctgtcagaggcggcctgcggctccaaagtgctttgggtgtgcacgcgcgcgcgcgcgcgtgtgtgtgtgcgtgttacaaacaagagggggaaaagccatctaatgcatatttgattttggtaatctctaaagacaatcgcaacagttagagaaagacttcaccgcaagccggagcgtcttagttcgctgcgggaagctggggtccttgctgcgtctgagccggtac

SEQ ID NO: 103618 - DNA, 30 bp, Homo sapiens
  chr1:64711236-64711266
  hyper
aggtatagagggaaccggaactaacatggc

SEQ ID NO: 103619 - DNA, 30 bp, Homo sapiens
  chr1:64935556-64935586
  hyper
ggtgggctccctggcgcggacggaggcggg

SEQ ID NO: 103620 - DNA, 1003 bp, Homo sapiens
  chr1:64936232-64937235
  hyper
atggtggccgcccgcgctcccgcgctgtagccgggcgccccctaagtttgggagccttcgccaccgcggcgcggagcagagcctgcaacagaggaagaaacttttgcggggtgcgccgcgcttttgcggggggcacctcccgcggcccgcttccccgcgcccggagcccgtcggcggggagtggggggaggcagcatggcccgccagccggaggaagaggagacggccgtggcccgggcgcggcggccgcccctctggctgctctgcctggtcgcgtgctggctcctgggcgccggggccgaagccgacttctccatcctggacgaggcgcaagtgctggcgagccagatgcggaggctggcggccgaggagctgggggtcgtcaccatgcaggtaagtggcccccgagctggccagacatcccgcctttctcctttgctcaaactcccatcccactcccggtacaagtcccctggactgtgtgcatcggctccttgcatacatagagcccggcttcccgtcggacccctctgtcctctgcacagaccccctgacaatacaccaactcttcttccatgcattcgtctacccctgcccttctctggagaatcccctgccctctgcacggaacccacttgaccctgcacagcccccctcttctgagtaccagcgccttcatctcgtcaaggattctccagtttcctcgcacgtcttctctaatttgcacacatttcccatgtaggcttgttttcaccctgccacgcctgcaaactccccctttgtgtccccatcccagagcagccagccccgtctggctcggacgattttccgaagtccccaccccacccccttgaccgcgtcctcgcgtcctcgcgtcctccctaccgaggcgcaccaatgggcgccgggagggaaggcgccgcagagtacgcagctgccccggggacacctaggtcccggcggagagcggccctccgagtgggctccgcgctcctttcccctc

SEQ ID NO: 103621 - DNA, 30 bp, Homo sapiens; identical to SEQ ID NO: 35806
  chr1:64971203-64971233
  hyper

SEQ ID NO: 103622 - DNA, 30 bp, Homo sapiens; identical to SEQ ID NO: 35807
  chr1:65210405-65210435
  hyper

SEQ ID NO: 103623 - DNA, 14 bp, Homo sapiens
  chr1:65210893-65210907
  hyper
cgcgggcctgggca

SEQ ID NO: 103624 - DNA, 419 bp, Homo sapiens; identical to SEQ ID NO: 35809
  chr1:65210939-65211358
  hyper

SEQ ID NO: 103625 - DNA, 322 bp, Homo sapiens
  chr1:65431032-65431354
  hyper
gagtggcaggaaggacggggtccccttccccaggaacacacaggaaatcatggagtgcaaaccctccaaaaaacgtgtgcacaaacacctggcaaacatcgcatcttttatctagaagttccgtggtaaacacacatccaaggagcccacatcccagggaccctggggagtgactttggaggagtgtctattagtcctccgatgctcccggtcgccgacgatgcgcggatggagttggagtgagggagccagagaccagccccagtttcggttaatcagtccctttccagtgggattcgcaattccccgggtagttctctcc

SEQ ID NO: 103626 - DNA, 30 bp, Homo sapiens
  chr1:65431687-65431717
  hyper
aggatgtcagacagcgcgctccgggcttgt

SEQ ID NO: 103627 - DNA, 30 bp, Homo sapiens; identical to SEQ ID NO: 35810
  chr1:65432477-65432507
  hyper

SEQ ID NO: 103628 - DNA, 755 bp, Homo sapiens
  chr1:65468241-65468996
  hyper
accaagcctgcacccagggagcgctcagtaacgcagcgctgaggagtaggccaccccggagggctccaggtttcagcgcaggcttccgcggagccagctggatgcgtcaccatccgaaagtgcgagcctggccggcggcggcggaggcgggggcaccgcgcagttggaagcccgggcgctcttaccgaaagcgcgagcccggacttccccgccacgatcgatgtggccagtctgcgcctgccgcagttcccgctcgcaccccggcccctcgcagagtcccaggaaagcgctgtggcgggcgggcagtctctgcccccgggaggggacgcacgcacgcgctgctccttccaggtcccggcggggaagcgatgctttcttggcccgggcttggggccagcgggaaccgggctgtccggccgcgccgtcgcgcctcgcacggcgtgagacaacctagctttttttttttttttttttttaagaaaagcattggcaccgcagcagcctcccccgcttcttccctactaggacgcccgcctgactcgccccattgcacaattcttaccgtggaacagccgcgtgactcggcgggagcccaaaagtttcccaggtttcctcagcctagaaaagcgtgggtgggtgtcccggcctggctccaggcgccctttaagttgtatttcttcgggtaactgggttgccctttaaaatgtggagattgtcctttagaaagaaagaaaatctcacgagctcgctggccc

SEQ ID NO: 103629 - DNA, 43 bp, Homo sapiens
  chr1:65532727-65532770
  hyper
gccccgctacccctcgggaaaaacacacgcacgcgctaacaac

SEQ ID NO: 103630 - DNA, 30 bp, Homo sapiens
  chr1:65533343-65533373
  hyper
ggattatctaatgacgcagcaaggctcgcc

SEQ ID NO: 103631 - DNA, 51 bp, Homo sapiens
  chr1:65533815-65533866
  hyper
ctttccctcccgggcggctgtaccgttgtgggctacgttcagagaagtccc

SEQ ID NO: 103632 - DNA, 154 bp, Homo sapiens; identical to SEQ ID NO: 35813
  chr1:65534603-65534757
  hyper

SEQ ID NO: 103633 - DNA, 30 bp, Homo sapiens
  chr1:65613027-65613057
  hyper
cccttgcagtagaccgcggtccccaggcga

SEQ ID NO: 103634 - DNA, 30 bp, Homo sapiens
  chr1:65613377-65613407
  hyper
cgaggcgcggggctcgggctcgtcgcgcgc

SEQ ID NO: 103635 - DNA, 30 bp, Homo sapiens; identical to SEQ ID NO: 35814
  chr1:65613670-65613700
  hyper

SEQ ID NO: 103636 - DNA, 31 bp, Homo sapiens; identical to SEQ ID NO: 534
  chr1:65614106-65614137
  hyper

SEQ ID NO: 103637 - DNA, 39 bp, Homo sapiens
  chr1:65614490-65614529
  hyper
cccgagccacccggccgagggaacgagaactaggcaggg

SEQ ID NO: 103638 - DNA, 296 bp, Homo sapiens; identical to SEQ ID NO: 536
  chr1:65614751-65615047
  hyper

SEQ ID NO: 103639 - DNA, 20 bp, Homo sapiens
  chr1:65622589-65622609
  hyper
cagggcgagactgtgtctca

SEQ ID NO: 103640 - DNA, 40 bp, Homo sapiens; identical to SEQ ID NO: 538
  chr1:65720328-65720368
  hyper

SEQ ID NO: 103641 - DNA, 174 bp, Homo sapiens; identical to SEQ ID NO: 35820
  chr1:65731331-65731505
  hyper

SEQ ID NO: 103642 - DNA, 156 bp, Homo sapiens; identical to SEQ ID NO: 35821
  chr1:65731781-65731937
  hyper

SEQ ID NO: 103643 - DNA, 887 bp, Homo sapiens; identical to SEQ ID NO: 35822
  chr1:65774900-65775787
  hyper

SEQ ID NO: 103644 - DNA, 30 bp, Homo sapiens; identical to SEQ ID NO: 35823
  chr1:65886620-65886650
  hyper

SEQ ID NO: 103645 - DNA, 31 bp, Homo sapiens; identical to SEQ ID NO: 540
  chr1:65886883-65886914
  hyper

SEQ ID NO: 103646 - DNA, 441 bp, Homo sapiens; identical to SEQ ID NO: 35825
  chr1:65991119-65991560
  hyper

SEQ ID NO: 103647 - DNA, 152 bp, Homo sapiens; identical to SEQ ID NO: 35826
  chr1:65991605-65991757
  hyper

SEQ ID NO: 103648 - DNA, 41 bp, Homo sapiens; identical to SEQ ID NO: 35827
  chr1:65991783-65991824
  hyper

SEQ ID NO: 103649 - DNA, 586 bp, Homo sapiens
  chr1:66258064-66258650
  hyper
cgggcggccgggggagggtgtgtagtggcagacggccgctgggattatgaatgggggctggggggccggcgagtgtggggttcaaaccaggattttcggtctctggctttggataggcacgcagggctgtgcgtaatccttcagctctggtggtaagggagatgcagtgagctcccggctgggagagagggttattttgcaaaactcccctggtaccgtgcccgcggaatattgcaggaggtctgtgaggtaggtgggggaaaaaataacctgggagggcaatcagggagaggccagacgactggggacggcgtgctttgcaccctagaattgacaggtggtggcctcagcagttacaacctactacacagcatctcgtccgtgcgatacggtcacattgttattccccgcacccggctgaggagcgcagcgcggcagaccaagtggcaccggcgagctgtctctcttccggggggcgggggtggacagtagggagagggggtttaaagggccagaggacgagagaagagctgaggggcgcgtcgccagcgcctgtgtctccctggcgcgggttccccaggctagc

SEQ ID NO: 103650 - DNA, 476 bp, Homo sapiens
  chr1:66258671-66259147
  hyper
cgcccccggcccgcgcgccccttcccggggctcctggcctcgcctcagcggctgcaggctcttcgtcgcgggccgggctgcacgcgagcgccctccgggcagactttcgtcccccacccccgggagcgcggaaggctcactcgcagcgcatggtctacccgcgccgggcggagccccggcgtccagagcgctgcggccgcggcggtgcagcagaggcgcctcgggcaggaggagggcggcttctgcgagggcagcctgaggtaagggctgcctaggaggctgcgggtttatttttcctcattctcttacttcatcacacactgaagcctcaatggagagtgtagggtgctgtggggctgatgtggggcaaagagggaatggggccgccgggcctggatggtcgtcttgacggcgtcattgtcgccccttgtaggaaatccgccaaccggcccctagcctttcgccctcatcttctc

SEQ ID NO: 103651 - DNA, 704 bp, Homo sapiens
  chr1:66797584-66798288
  hyper
gcctcttacttgtgcgggtcagtgttcgctgaattagaagttattccaacatgaacacaatcctcaggatgaatgactgcctagactttgaacgtaatggtcaaccagttttcacccgaattttgactgtttcatttagaagaaaagcaaaatgagaaaaagctttcctcatttctccttgagatggcaaagcactcagaaatgacatcacataccctaaagaaccctgggatgactaaggcagagagagtctgagaaaactctttggtgcttctgcctttagttttaggacacatttatgcagatgagcttataagagaccgttccctccgccttcttcctcagaggaagtttcttggtagatcaccgacacctcatccaggcggggggttggggggaaacttggcaccagccatcccaggcagagcaccactgtgatttgttctcctggtggagagagctggaaggaaggagccagcgtgcaaataatgaaggagcacgggggcaccttcagtagcaccggaatcagcggtggtagcggtgactctgctatggacagcctgcagccgctccagcctaactacatgcctgtgtgtttgtttgcagaagaatcttatcaaaaattagcaatggaaacgctggaggaattagactggtgtttagaccagctagagaccatacagacctaccggtctgtcagtgag

SEQ ID NO: 103652 - DNA, 907 bp, Homo sapiens; identical to SEQ ID NO: 543
  chr1:66998816-66999723
  hyper

SEQ ID NO: 103653 - DNA, 279 bp, Homo sapiens
  chr1:67218064-67218343
  hyper
cagagggccactcagcggccaagtccggccggggagggccgagggctctgtttgaggtcaccctggagaccggcctcagagtccagggagagtgcgcgggcggccgccggctgaatgaagcctgggacgcgggagccgcgccgcgcgcagtgtctgcagtgccggaggtctgggaggctccgggcgaagcctccctgctgcaggtagggtcgcctctctctgcagcgcgtctggaccccaaaggaaggatagggggcaagggatcggccctttgttgag

SEQ ID NO: 103654 - DNA, 380 bp, Homo sapiens
  chr1:67390717-67391097
  hyper
ggggcttcttcaggcggtggcggcagcagcgaaggtggcggcggcagcagcggcagcggctgtaagtgcagcctccacaagccatctctccccttctattccagtttgggatgaggggctcctgaggtgtcctcagtcccctttctctccttcccctcccccacggcagtgtaccgcccggaagacccttaacttccggggaggggctgccgcagaacgcgcctggcttgctctccgccggctgccaaaggcgcatgcgcagcttcctccctctggccatcgactgcctcccagcgccgcctttttgccttcgcggtggtggcgccgcgctgggaatccgctgcggagtgagttcgcctcgccccgttcgcttcggtccc

SEQ ID NO: 103655 - DNA, 167 bp, Homo sapiens; identical to SEQ ID NO: 35834
  chr1:67395532-67395699
  hyper

SEQ ID NO: 103656 - DNA, 30 bp, Homo sapiens
  chr1:67395902-67395932
  hyper
tggggtgtggtgggcgcgctcgggcggctc

SEQ ID NO: 103657 - DNA, 30 bp, Homo sapiens
  chr1:67396562-67396592
  hyper
gtaattttcatgatcgtggtaaaatgagag

SEQ ID NO: 103658 - DNA, 747 bp, Homo sapiens
  chr1:67773094-67773841
  hyper
gtcaacaaagtgccacgtctctatggctgtgaacgctgagcacacgattttatcgcgcctatcatatcttggtgcataaacgcacctcacctcggtcaacccttgctccgtcttatgagacaggctttattatccgcattttatatgaggggaaactgacggtggagagagaattatcttgctcaaggcgacacagcagagcccacaggtggcagaatcccacccgagcccgcttcgacccgcggggtggaaaccacgggcgcccgcccggctgcgcttccagagctgaactgagaagcgagtcctctccgccctgcggccaccgcccagccccgacccccgccccggcccgatcctcactcgccgccagctccccgcgcccaccccggagttggtggcgcagaggcgggaggcggaggcgggagggcgggcgctggcaccgggaacgcccgagcgccggcagagagcgcggagagcgcgacacgtgcggcccagagcaccggggccacccggtccccgcaggcccgggaccgcgcccgctggcaggcgacacgtggtgagtgaccagtgactcggggtcggggacagagagagccccaggatcccggaccagcggggtgtctgcgtgcccgggattccgtgtctcgcgtctcccgagggggcttcggcgacggcttctctctttatatatatatatgtatatatatatttttaaagtcttccaatacgatccgaaatggcttctct

SEQ ID NO: 103659 - DNA, 30 bp, Homo sapiens; identical to SEQ ID NO: 35836
  chr1:67895322-67895352
  hyper

SEQ ID NO: 103660 - DNA, 30 bp, Homo sapiens; identical to SEQ ID NO: 35837
  chr1:67896169-67896199
  hyper

SEQ ID NO: 103661 - DNA, 139 bp, Homo sapiens; identical to SEQ ID NO: 546
  chr1:68001180-68001319
  hyper

SEQ ID NO: 103662 - DNA, 30 bp, Homo sapiens; identical to SEQ ID NO: 35839
  chr1:68150311-68150341
  hyper

SEQ ID NO: 103663 - DNA, 136 bp, Homo sapiens
  chr1:68150808-68150944
  hyper
gcatgcaaatgaggcggaaggtggttggctgagggttggcaggataaccccggagagcggggccctttgtcctccagtggctggtaggcagtggctgggaggcagcggcccaattagtgtcgtgcggcccgtggcg

SEQ ID NO: 103664 - DNA, 30 bp, Homo sapiens; identical to SEQ ID NO: 547
  chr1:68152066-68152096
  hyper

SEQ ID NO: 103665 - DNA, 811 bp, Homo sapiens; identical to SEQ ID NO: 35842
  chr1:68297571-68298382
  hyper

SEQ ID NO: 103666 - DNA, 910 bp, Homo sapiens; identical to SEQ ID NO: 550
  chr1:68298403-68299313
  hyper

SEQ ID NO: 103667 - DNA, 1012 bp, Homo sapiens
  chr1:68696599-68697611
  hyper
ctctggcagcgacgccgccggcgcccccgggcgttttccccgcaccccacatcgcgtgggcgcccgtaaaggcacgcgcggagaaagcccctccgtggactccccactccgcaaagtttaacaaagccgtgaagtaaggaaaccgaacctcccgtccgcgcccgctgcaaagttggcattgaagtttgtgccgggatgtcccaaatcttgagggggcggggggcgcgagtgtgcagagaggcgggaggatggatgcagatggggagacagtgaggggaagggagtttttccgagtggacggtccgtgaggcggttttcttcacccggaagcctgtttgactcagagaggtccgggaggtgcacgccaggggaggtctcccggggcgggcgctgtcgccgaggaggccggcgagctgtcacctgcggggggctgtggtgggagctgagggcgctctcctaagcgccaaaagaggacggggacattcacagtcaccggctctcggggctctaagtagtgggggaagggatattcacgagtgggcaggaggccaaaagcaacacctttcggatacgcttttcccctccgacctctccaacttcccgcggcgctggtcaaggactccctcccaccccaccccatcccacccaacctcccggccgacaattcggacctgtccacggcagagcgtggggtggagtgcggcgggaaagcagagggcgcgaaggtcgggaccccaaattgcaaaccctcagcccctagcaaagacgaccaaatgcatttacaaccgtgcaagtatctcagccttgtaacagagctccgggtttgcgccgggcacagttccccgactcttctgttgttcctaataaagtcgattacgttgccctcccggagctgattggaagggaaccgagaggaaaagggggggaacgcgggaaaaagcgggggggggggggggcgagcaatcaactttgtaacccagcgcttcctcgcgcgatccgtcgccatgcttaa

SEQ ID NO: 103668 - DNA, 495 bp, Homo sapiens
  chr1:68698071-68698566
  hyper
cgcctcctttctgggcgctgcaaaacttcagaggtgctggagcgcggcgaggatgggaccgggacggaaggcgcccgcacggattcccccggcgcagccggctcgggttcccccaatgcccggagctgtgattgtggccgctccgccgcctgtggacgcttaaaggagcagggaagcggatcacatgacgccgcctccctccctttcttcctccctccctctcgcgcttcctccctccctccctccctctcttcctctaccccttgcccaccagttcggggctcagagctctggcgggtgctggcgcctggctcccgagtctggcctgcaacctgtctctccaaggtctgatgccatttaggggttgctgttgatgttaagcgggttccccctgcccagcttctcacaggtttccttttctggtttccgaagtgcgagatttaaatcaccggtggaccgccttgcagacctttaacttacgcgttgactttagga

SEQ ID NO: 103669 - DNA, 1923 bp, Homo sapiens
  chr1:70032825-70034748
  hyper
cccagggcagcagccgcaaccccagaatgaggagaggacttaagagcaggcacaaggttcgctgccatgactgatgtgaagcgacctgacgcacaagcggagacttttctccttggcagccaacaacctgcagcaggcaaggcgggcgggggaggaaaccccgaggaggcgctcccggccgcctctttgctgagatagcaggagcagcagcctgaggagccacgagctcagcgtcactgagctagtgcgggtgcaggggcgctcaggcaggcgcacaggccgggagccgcttctgccgctcaggcggccgcgctgcagaaagccgcgccgcgctgcccgagcgcccggggctggcccgcgagcgggaggagccggcagccgcgctccgccccgcgctgagattcgtgccacctgcctcgaacaccacggaggcgagaggaacccagagagctcggcctctcgtcccgttctcgaaaagcagcctatcgtgacggagccgggagaaggctagcgtttcaatcctgtgcaggactgggatttttcttctcataatttgggggagccggagtagaggtcagagggacaggcgaggatctcaaaaagagaccgagggttgtgaacatggttaccccctcctatcattggaaaatctccttgacatttttcacactttgaagcagctgcagctggtgtcgtcggaaaagggggtgggaaaaaagagagggggcggggagagcggtgagacacagccaagagccatgagcggcgcctcctcgcctgccaatcctggcacctgtgcgccgagccactgcaccgaggaggaccctactccgggtgaacaccgggcttgaagccacggacacccagccccagtgcagcgggttctcgccggcgggacctgcagccgcccactcgggccaccgccaccgcctcctgcagttgcggagcgctcagcccctccgagacgcccgctgcgccctggcccctggggatcctcgccctgcacaggcgcggcaacgggcaggggttgttacggagttgggtgcaggattcgcctttcctgcttgtctcttctccgcccaggatttattgtctgtggagccttctgggggcggggagggagctgcgcctccgccaccgccgccgccgccgccgctgctgctgcggtcgctagcgcggcgcgctgggcaggctgaggctggggagtggacgcgctcctgcctcccccgccggcgcttcgggcttcccctcagccgcttcccgcgggaacctctccagccgtccacctgaagggcactggcatcatggtctaacgtggcaccttcctggattcccctctatctcctgttcttcctaccttctactccttccctcctcttctcctccgaagaccctggcgcccactccactgcggacccctgaacacttaaggaataacccttggcagctgcacgactacgctctccgaaacctcatgggcagtttctcccgccggcgatgtgagtaaggcacgctcgctccgtggcggagggtgctgcgggggcccggccgcggcgaccgtaggcgcgcgaggtgtgggaccccagaggccggccgggggcgggggtggcagggcgggaggcttcggcgctcgcggggagctgcttgtgcggtggccgagggaggcggcgaagatgtggtaggttgcagagcatttggaaatggggtgctaactgggcgggtgcatgggagcaccgagtagcttgagctggcaagagaccttaaagggttacatactgcgaaaaggaaaggtaaatgttgggcgctggtgctgggaccattggttccgctgaaattaggtttagctcctcgttattatcttgggtatctccagtcagcttttttcccagaggtgtctgagggatgaagcgcgtgtttgatcgt

SEQ ID NO: 103670 - DNA, 614 bp, Homo sapiens; identical to SEQ ID NO: 35849
  chr1:70035029-70035643
  hyper

SEQ ID NO: 103671 - DNA, 673 bp, Homo sapiens
  chr1:70671104-70671777
  hyper
tggccgctcttcctcgctgccttcaacagcccttggggtaccgaggtaccgcagtctcttccacctgctttgaaaccagcgcggagatcctgccccgctatccgcttcaggcgcgacatgttcaaagtcctaggtccagaagctgcagccccacccgtgacgcttaaaggtggcgccgttgggatgccccgctcctttcgtgagcgcgcgctctgggcgctgggctcgcggcctcgcgctgggccttcactctctgcggcgcagtccagatgtcgtcagcaccagcgcctgggctggaggacagagaagccttttccgttgccggtgccggcctagcgtcctggaattacttcaatcaagtaagtgcgtttaacgggcttaagaggggctttcgggtttattgtttgcactgttactgcgactccaaccttctcctctgtgcttccaccgtggcgagggtgtggggaaagagaaccctctcttctcccctctcctagtctgaacgtgggccttgactaaaacttgagatctgggcgcggtcggcagcgtttctggaccccagcctgtgtttgtcgcttgtggtggtggcgccagacctctggcgtacggagtaaaagaaattttctgttcttaaggcttgtactctgacaccattctcgttgtattgagggta

SEQ ID NO: 103672 - DNA, 30 bp, Homo sapiens; identical to SEQ ID NO: 35851
  chr1:70687286-70687316
  hyper

SEQ ID NO: 103673 - DNA, 30 bp, Homo sapiens; identical to SEQ ID NO: 35852
  chr1:70820057-70820087
  hyper

SEQ ID NO: 103674 - DNA, 326 bp, Homo sapiens
  chr1:70820329-70820655
  hyper
gatctcagtctcgccgtcgcagccgccgtcgctgccttacaccgaaaaacagggcacggccatcttcctcttgctcctctcgcgagagctcccccaggagtgaagagagagaaaacaccgcgataagtgagccacccgctccctccctcgcaccttctattcccagaatcactaggcgccggcgcctccgaggcagtgtgtttccgcccagagctggagtctcccagctgccagccgaccccgaacccgcactcccgccaaccgcgctttttgtgggcggtcggaaaccacagcctccgttggatatgttcggtgcatgttataaa

SEQ ID NO: 103675 - DNA, 30 bp, Homo sapiens; identical to SEQ ID NO: 35854
  chr1:70876477-70876507
  hyper

SEQ ID NO: 103676 - DNA, 30 bp, Homo sapiens
  chr1:70876864-70876894
  hyper
cgctcaatgggccgcgctggtcccgcccca

SEQ ID NO: 103677 - DNA, 1134 bp, Homo sapiens
  chr1:71512730-71513864
  hyper
acagcgcgggtggcacgcgtcttcatgtggctcgcataccagtgcggcgccctgatggccagcgcccgctcgacggccatggcgctggcgatgaacaacgaggagagcccgaaaacagtcatggtcagcccgaaaaaggtgcagagccgccccgacgggtcgatgtgctcccaacgctgcttggacaggtacacgacgatgacgaccggggtggtgagaagctgcccgaccaggtcggtgagcgccagccagccgatgcacagcaggaaggacttcttgcgcttgctctcccggcgccggtagctgcgcgacacgagcagcatggccagtgcgttgcccacgaaaccagtgagcagcatggtgatcgggaaggccacggacaccgatccgcaatcctcgccagaccctggagggcgcgtgaggttgccccgcgcctcggcggaacgctcgggcgcccacatgcctgtgtaggagtggttgaggcgggtgcagaagggggcatcccctccgtagccccgggtctccttcatgttggcttcgaggtgaggaggggatggcgtccagagagccgcagcgggagggggcagacgcggcgcgggcggcggcggaggtcggcgtttaccgcggctggggctgggctgccccccatggtgcggggcgcagccgccgccctactccgctgctgggaccgcggccgcggcggcgccagggctcactggcccgggagggagccacgccttcctctctgggaaacctctggtggcgaggcgcgcggaggtgccgagtcccctttataaggccgagggggcggggcgcccgtgggtgtggacagaaccgaggtgggaggagggtgcaaagcaactgagcgcctctcttggctgttgcctatcctgatcgcctgggttgggaagccccagacggtctcctctgaaacgccctgctcctggccggaccgggagcccactggggtctcctccagttctccgctaaagtgtcggtggacggcaagcagctaataagtagcactggacttgcggaccccaggcaaactgccgaggcgcacctgagcgctcgtcctcctgcttcttcaaccacaaacgctcctacagggacgggatccttctcctgaagtcc

SEQ ID NO: 103678 - DNA, 1913 bp, Homo sapiens
  chr1:72747786-72749699
  hyper
agtgctttagcatcacgagtccagcttgctacctgccccagcataaacgggccggggctccgggaagaatctgcacctggaattcttgggatgtggtctttccatgatgagcaccaccagcattattgcttgtgttataaagaaggcaaagagggttcaaagagagacagaaagatagaccgaaacaagtacgaaaagcacgccgttcttcctacctaagcaccgccgtgtccccttttctgaccatcatgttgtccacggccgcccaggggaagtccacactctgtccagccgggaggcaggagggtagcaggcagcacaggctgaggagcaccgccgccagccactggttcgagcaacaagcaccctgcaccaacagcatcatgtccatccctgctagggctgctcactctccagcagctttcagctcgcactcccccaccccctggtgctggcgagtcttcccgggaaccaggcggcgcgccacaggatttttttttttttttttttttttttttttttttggtgggtgggtgggtttcttttctttctttcttccccccaccccagttgttgggtgttgtttctctctttttgtttttcggtgtttttgcctcccctcctcctcttcgctttccctccctccctcccctccctccccctggcaccacactacacctcctctcggttgcttttggccgcgtccggagtgtgtctaattctcgggcggctcgcacaccatctagcgaggaggcgagcgcgccggcgagtgagggaggaggcgcggcggcgggggaggaggcagggcgagcggcggcggcggcggctgcaatcccagcagcagcagcagcaacagcaacagcagcagcagaagcagcgcggagcgctgcgccggccgccggctcccgggctcgcgcgcgttgccaagcggccgtttccttagcaaccccgccaggggactggggatggagaagggagggggattaaaaaaataataaaaaaagaaagaaaaaagatagcaagaaaaaaaaaagaaaagcaagacaacgaaaaaaaaaataggaggaactgtatcacaattatgcaaactaagggggaaagagaggcaccttagaatgaaggctctccttactgtcgtaagcgctagagggattctttgctagaaaagtctccgtgtcagggctggggtgaagagagctgaggggcgctttgccttccctcaccggtgcgttttacctctcgaggcaccgtaagtttgaagtcctccaagttgtggtcggcgccatcatgacgccggcgactgtgagttgtttttttgtttattttcttctaatcttgcctgggtggctacgctgcagttagcgagcagccaactagttctctctgcgttttctcgggaataggtagggacggtggcggggcgctgcttttttgcggggacacgaggaggtgcaaggccttgcggcagagcagcttgcgtgtttgtggcggtcggcccgtatggattgcaggacgcccctcttttatctgtgggtgttgacactaagttgtgtgtgtgagtaggggattgtttatggtcaacatggagtgtgtgtgtgatagagagcgtgtcgtgcgcgcgggggcctgtgcacgcgcggcacgcaggcgcgctgggagggacggggcgggtcatgctgggatgtagagtcgggaaaagactgcaatcaagtgttttaattgtgtagagcccaggcggtccagttatgtaagaggcagtttaacccatttgagcctatcaggccgaataatcggcgcatccgagtcaaggcagggcagagttaaggggtttaacgagtcgcagggttgtatttcttaacagcctccacaccgcgttaacaggcttgctcctccgcggtgcagagcggtaacct

SEQ ID NO: 103679 - DNA, 955 bp, Homo sapiens; identical to SEQ ID NO: 35857
  chr1:72749731-72750686
  hyper

SEQ ID NO: 103680 - DNA, 58 bp, Homo sapiens
  chr1:74663884-74663942
  hyper
gggtcagaaacaaccgggcggaggcgcaccccagggcgcatgcgtgctgtgcggcgcg

SEQ ID NO: 103681 - DNA, 30 bp, Homo sapiens
  chr1:74664145-74664175
  hyper
ctgtaggcctatgacgctccccaggagtag

SEQ ID NO: 103682 - DNA, 43 bp, Homo sapiens; identical to SEQ ID NO: 35859
  chr1:75594038-75594081
  hyper

SEQ ID NO: 103683 - DNA, 56 bp, Homo sapiens
  chr1:75595515-75595571
  hyper
caggctatatctgcccggtttgcctaggacttgtagggaaacgcggtaaagggagg

SEQ ID NO: 103684 - DNA, 172 bp, Homo sapiens
  chr1:75595818-75595990
  hyper
cgcgccatagcttttagccgggaagctttccaggctgccctgcttaatttcggcgtggttcctaattttctctctcccatcctctctcttagactggaaacgcttcccctatttcttccgtagcggaccgggagagcttactggcgctctgcgaaccggctggaaagaaaca

SEQ ID NO: 103685 - DNA, 216 bp, Homo sapiens; identical to SEQ ID NO: 35861
  chr1:75596135-75596351
  hyper

SEQ ID NO: 103686 - DNA, 231 bp, Homo sapiens
  chr1:75596627-75596858
  hyper
gcaccttcttatgatcgcgaaagtctccccatcctccaccgcctcctacagtcctatggcccactgtacccttggcgctggagccctggaggtgggcggtgagggccgcgggccagggaaagctcgggtccgcaagagcagggctctgtttctgcgcctgcaggccgcccgggagtcctggatgcgcctcctttgaccacgttttctctcaggctccagctgtgcctcgcc

SEQ ID NO: 103687 - DNA, 23 bp, Homo sapiens
  chr1:75596929-75596952
  hyper
cgggaatccgagtttccggagat

SEQ ID NO: 103688 - DNA, 254 bp, Homo sapiens; identical to SEQ ID NO: 35864
  chr1:75597153-75597407
  hyper

SEQ ID NO: 103689 - DNA, 1187 bp, Homo sapiens
  chr1:75597686-75598873
  hyper
attggaatcaattggcgtttgggctaaaaaccctcattactaagaccaaacaaacaaacaaaaactcttttgatttttagcgcacccctgtaaagtaggaagataacttttccgttgccccagccgaggatgagcgtgggtaagaggcgtgacgcgagctccagggaaccgggccaccaggaagaagctataccttcgtacgcccacccctgacaaaaggtcagaaggtcgttggaccccagaccgacaggacgatcagccctgggattcatagcaaacacattcccctcttcttgcacactcgacccccagccaaaggcttataccgcccaggacatagaaattgactcaccgcccagaggcttacagctcaaggaggggtgcgcgcagctgcaccccgggacaggtcagcatcccacaaggcgcctggagtaaagcgaggccagaccaatctttcacgtcttctgctcctgtctgacgaccattcttcttccccaagcccagaaacctctaaaaatgaatcattttctccacttatgcagagatagacgctcttagatcaaggttagtattttgaaaacctgactgagagccgcctgattaggcgagggtgggtggaaagaccgcataaatgcccgcacccccgccctgcttccctaacacagctccagctctctctggatctccaaatgacccgcgcgataaattctcctcgatagtagccagacagtaccccagattcactttaaaccctaacacacacacacacacacacacacacacacactgtaattaaatatccaaaccggacctttatgtttaattccactttcaacgaaatcctgctctatacacgacctgatggcgccaatgttctgcacgactctgactttccattcggaagagcggtctccacaacgatgctatttcatggaaaatgcattatgtgaatttctccaccacccccaataccgatttctgcatttgatgaaaaacacaagtctttctggttcccacgcacaagttagctttttgaaaagtcagtccaccccaatctttcaattttctaagagggcacagattaattatatcgtcctcctcccttcgctcagtaaatttaaacgagatctcccagagaggaccggcagggggatggctaatattaacttgtgcgcagctgcgcgaaa

SEQ ID NO: 103690 - DNA, 1009 bp, Homo sapiens; identical to SEQ ID NO: 35866
  chr1:75600109-75601118
  hyper

SEQ ID NO: 103691 - DNA, 248 bp, Homo sapiens; identical to SEQ ID NO: 35867
  chr1:75601187-75601435
  hyper

SEQ ID NO: 103692 - DNA, 1310 bp, Homo sapiens
  chr1:75601917-75603227
  hyper
cggtgttccccgctccgctatgattgacgtctggaaagaaagagctttgtgaggggatgattgttattaacttgttatccccggcgggggggcggggaaccgacgtgcccgggtgagcgccggagacccggagcccggggagcgcgggacgagctaccagcgctcgggtggcggccgccagcggccagcgaaggaggctgcgcgccagcccgcccgcggcgcccgggctcaggcgccgtgacggctgcacgcgctgccccgcactctgagggccttcattagctcgctccccgcgccgaggctggggcgggcagcacgctcggaacttctgatctgtttctccatactttctccccctcctactccgcagtgtcaggggctcatgtcagaggagtgcgggcggactacagccctggcggccgggaggactcgcaaaggcgccggggaagagggactggtgagtgcggaggggctcgcgtgctggcaagactggccgtggggaggcggcgcaggacgaagggccgctgtccccgcgctccttccagggcccagctggcccctcctgcagcagacagaggacggggcggagagggtctgggtggggtgggaagcttagctggcccgcgaggagggcagggccgcaagacttctggggtccgaataggtcaggggtcggcagccccagcgggtgcgtagccagagcttggactcggggaagagggcgagaatcgtgacctcaagaagctgggggtggggtggggtggccagggggaagggaggggaggcggtgggggcgcccttgtgggtaggtgggatgcgaaggggaggaggggtctagaaccgcctgcgcctcgcggtttcctgcaggtgagccccgagggagcgggggacgaggactcgtgctcctcctcggccccgctgtccccgtcgtcctcgccccggtccatggcctcgggctccggctgccctcctggcaagtgtgtgtgcaacagttgcggcctggagatcgtggacaaataccttctcaaggtaggatagggcctcgggtgcgaggcccaaggggagcgggcttagcgtgggagctctgggaaaagagtaatgttcctcccaccaacctttccgttcaagttctgggtgaaggttgtaggcttttgcagaaaatcagcccagtttagggcaactcatgcggtgggataaagtgagaagaaatcccagactcttctatgtcgttgcaaaacagctaatgtgtgacacatcctggtctggacgcgccggatgtgtgtggatgcgctggagtcagccactggctt

SEQ ID NO: 103693 - DNA, 834 bp, Homo sapiens
  chr1:76080131-76080965
  hyper
attaaggatcatgattttaaacgctttccagtaagtgctttgagtactccggagcaattaaaaagcaagctgacgcgccaagataaagttgtgtccccctagtgacctctagagcggagctaagctcccacaagccagacttgggaggaaaagcaaaaagcacgccaaagcctgagcgctgctgtagtccaagccaatgtattcagtaatacccttcacccctcagttctcatctgagttcctgtccttttttatataaccccaaaggctcagtaagtcgctgcctcccaggtcattgggcccattgtgttgaaatccaacttcgaacgacgccccttccttgccaccatcctcaggtccagttcccccgcgcacagccttcctcaccgcgcatggtgtcgagcccacttccacctctctgcagtgctgcagacaacctctagggctctgcgagtcccccagcgagagctagggagccgacaagctgcgacctctgcgagtccgcgctgcgggagcgggtggcttgcacctgctccccgcgcgccggctctgcgacccctaggcaagacgcagcccaggaggctccctcccgagtcgcgccccggaccacgccgcaatgcctcgtcaccccagcaacaagctcttccttgtcctccccgccatcgcttctctccgcgaactttccaactttggaagcccgggttccaaaggagcaacagggagactgcttagccggagccactgcccgtctcgacaggttggggagcaggaagtagcctgcagggactcggccggtagcaagtccccttgaccgcagggaaaaggagaggcagc

SEQ ID NO: 103694 - DNA, 1185 bp, Homo sapiens; identical to SEQ ID NO: 35871
  chr1:76081200-76082385
  hyper

SEQ ID NO: 103695 - DNA, 259 bp, Homo sapiens
  chr1:76082672-76082931
  hyper
gagctgtcctcccctcgcgtgctgataagggatgaaaagaagttctgctggcgtcccagaactgcaagggcaggcgaaagtttaagaatataaaggagtatcggaccttaaaaagaaacgcttaaagggtagggtagggagaggttaccagggtgtgccactgtgggaagaggctacaatatcgaattttttttatatgctgcagctgagattgccgccgaaacgcacttcctaattcgcagtgaccttcttaacactt

SEQ ID NO: 103696 - DNA, 30 bp, Homo sapiens
  chr1:76190157-76190187
  hyper
gccagaggtggaaacgcagaaaaccaaacc

SEQ ID NO: 103697 - DNA, 240 bp, Homo sapiens; identical to SEQ ID NO: 35872
  chr1:76251751-76251991
  hyper

SEQ ID NO: 103698 - DNA, 850 bp, Homo sapiens; identical to SEQ ID NO: 35873
  chr1:76540051-76540901
  hyper

SEQ ID NO: 103699 - DNA, 457 bp, Homo sapiens; identical to SEQ ID NO: 571
  chr1:77332976-77333433
  hyper

SEQ ID NO: 103700 - DNA, 344 bp, Homo sapiens; identical to SEQ ID NO: 572
  chr1:77333579-77333923
  hyper

SEQ ID NO: 103701 - DNA, 217 bp, Homo sapiens; identical to SEQ ID NO: 573
  chr1:77334168-77334385
  hyper

SEQ ID NO: 103702 - DNA, 348 bp, Homo sapiens; identical to SEQ ID NO: 574
  chr1:77334408-77334756
  hyper

SEQ ID NO: 103703 - DNA, 63 bp, Homo sapiens
  chr1:77334795-77334858
  hyper
cgcgggtaccagcctgagcgttcctctgacccggaaccggagggtgagcgcagccagcccgcg

SEQ ID NO: 103704 - DNA, 80 bp, Homo sapiens
  chr1:77684950-77685030
  hyper
cacagccggcctcccggctgtggtcaaatgagcctgactcctacctcgatatgactagcggccacgctgccgaaggacaa

SEQ ID NO: 103705 - DNA, 1526 bp, Homo sapiens
  chr1:77747293-77748819
  hyper
aggtttttcctgggagttcctcggagacccggaggtaaccgtgtatgtgcgtgcgagtgtgtctgtgtgcgtacaaggtccggagaagcgaaacggtcgcaggttcctacagaccccgaccctgttcccttggccacctggtccccggtagctgcatccctgggcggcgcacgcagtgaagcgtcgcgctctggcgccggtgccgcaccgaggggtatgactacgaccccttgcgcgtgcccgcccccacctccgcacctcgcgccagcccgcgcagcgtgaccggcagccgccgcagacccggctcggggaggcgcggagcgcggcgcgctgaaccggagaggcgggccggctgctgccttgcgttcgccacgctgtcctccctcctccgctccctgcgccccacccctggcggccgcgctgcctggcagcccgggaagccgcggcacagctgctcggcgcctgcagctccggctcgggggctggaaccgaagcgggggcggcgggagcgcggagaccacagcccccggggagaggcggagggggtccctggcctgggcggagaggctgagctgagtgcgcgtgagaaagagggctgcaccgctgctcggcgcggactctgccagccccagcttcagccccggctcaggtcgccgcagcccgggagcctccccgcttgcgccccaaggcacgcgcggcacagccatgaacaccaacgatgccaaggagtatctggcccggagggaaatccctcagctttttgaggtagggctagagctggccgacgggcggtagcatccggggactgcatctcaggggttcgggttgaggcagccgcgccccgtcccaccttccccacacggggcatgtaatgaaggggcttgtagaagcgcactcgcccgctcccccgagggtagtcgcctttcccgcgggttgccagggtccttgtcagaaggctgggcttagaagcctgcatctcacagatcaagtttcagtcttccagcagggttctgaaagcagcctgctcccatcgcgcccctcggatgtggacacccagggtgggctgcagaccgcggccgggccgcactctctgggggcgagggccaggtcaggtggctgcactgtcgcccagcagcgagtaaagactcgaaactgagggagccagagccctagtcactctgctggtcgagggtcggaacccctgggggaaagaggaaatgtggacgaaggcagcccttcctggagacagcttggaagagagggatgaagatgcaaaaagcaaaacccaacctatcaagtgccacctccccggtgacaggcccccagccttgctctgcgctttcgctgaatgaactcctgagcacgtttttcccgttgcctaggaagggttgggccgcaggtttcgccagtgctcgacaacccacctggagatagcgggtcggggagggagctgcgaggggggcggactcctgttgctcagtcttcagaccgcagcacagcatcatctgcaccgggacccgggaatg

SEQ ID NO: 103706 - DNA, 110 bp, Homo sapiens
  chr1:78148509-78148619
  hyper
ctttccgctttatacgtctcctcctttccccttgtacagaaaagcagaaatcttaaaaacctccgattaccacgattatactacataaacagagcgcagtgcgctgcccc

SEQ ID NO: 103707 - DNA, 214 bp, Homo sapiens
  chr1:78224922-78225136
  hyper
aacccaggagccggcgcgctgcagggctttcagtcacccactgagagggactggcaagcctgagtggggagaccgaggaagggagcagagcccccgcttctcgggctcacctgcacctcccgcttccagggaagaacccctgaggacccttcctcaaatcaacgaccggttcccatcctccaccgaccgttgacagggcgaccactagattatc

SEQ ID NO: 103708 - DNA, 230 bp, Homo sapiens
  chr1:78225421-78225651
  hyper
gaggggcagtgtcgcgtcaggagggccggaaaacggccccgcagcgctgccctcggggggtccgcctcctgaactggccacttcccgcagcagccgcggctccttccggtgtctccggggccgccgcaggcgtctccggcgataggggaggtgggggcggagcctcgatgggagcccgccccaggggcggggccacgggagccaggcccaggtgcggggacccaggccgg

SEQ ID NO: 103709 - DNA, 220 bp, Homo sapiens
  chr1:78245316-78245536
  hyper
ccccggaaggactccgccttctccatgtcagactgctgctcagcgccaggcatcagctgggaagctggcgtgggcaggccagctgtacctggcctggagctccaggtacagggccaggggcggggtggggtggagaggcgggcgggaggaagcggagagttgagcggccacgcagttggggcagaggcctcggggcaggggtggcgcggactccatcgct

SEQ ID NO: 103710 - DNA, 69 bp, Homo sapiens; identical to SEQ ID NO: 578
  chr1:78354048-78354117
  hyper

SEQ ID NO: 103711 - DNA, 779 bp, Homo sapiens; identical to SEQ ID NO: 35884
  chr1:78354190-78354969
  hyper

SEQ ID NO: 103712 - DNA, 30 bp, Homo sapiens; identical to SEQ ID NO: 35885
  chr1:78444538-78444568
  hyper

SEQ ID NO: 103713 - DNA, 85 bp, Homo sapiens; identical to SEQ ID NO: 579
  chr1:78444894-78444979
  hyper

SEQ ID NO: 103714 - DNA, 30 bp, Homo sapiens; identical to SEQ ID NO: 35887
  chr1:78470625-78470655
  hyper

SEQ ID NO: 103715 - DNA, 818 bp, Homo sapiens; identical to SEQ ID NO: 35888
  chr1:78511527-78512345
  hyper

SEQ ID NO: 103716 - DNA, 236 bp, Homo sapiens; identical to SEQ ID NO: 35889
  chr1:78956555-78956791
  hyper

SEQ ID NO: 103717 - DNA, 686 bp, Homo sapiens; identical to SEQ ID NO: 35890
  chr1:78956874-78957560
  hyper

SEQ ID NO: 103718 - DNA, 87 bp, Homo sapiens; identical to SEQ ID NO: 35891
  chr1:81880256-81880343
  hyper

SEQ ID NO: 103719 - DNA, 488 bp, Homo sapiens
  chr1:82265930-82266418
  hyper
tttagctggctctacgtaactacaaagaaaaaaatcatcgcaatttaaaaaaatgtaactttcattaacgagcgcgccggaaatctcaggtatcaaagacgcattaaccctggagcgtcccccgcgcgccgcagccggacggaggcagccgcggcgaacagacgttctttctcctccatgcagttacacaaaaggagggctacggaaactaaaagtttcggggcctctggctcggtgcgtggagaaaagagaaaacctggagacggggtgggtgaaagacgcatcccgggcgcctctccgaagtccaggccgggagcaagctcctgggcctagaggggagggggccccgagccgctggtcatccccctgcgctcagcctcggagcgccgcgcttcgcggcgctctcccaaatactcttcacccactccagaaataaaataaatgtttttaaagtgcatgtgtgtggacaggatggagagcgcgcgccg

SEQ ID NO: 103720 - DNA, 1237 bp, Homo sapiens
  chr1:82266440-82267677
  hyper
cgcgcagtgagtggagtttgggggtgggctaggggttagcggttgaatgggtgtgttaatggggggagctggaggcagagctcggggacctgggggtagggggagcgcgaaccgactgggaggggagagaaggggaggggcgcgagctggcgcaggccgcctccggggcgcgttccacggccgtgcgcgcgcgtccctcgccgccaccgccgcccggacagccctgcggccgccccgccggcggagccggggccggcctggtcctcgggcggctgcttggccaccgccaccgccgtccgaagggctcgagcccgtaagtatcccctttcgctcctcctccccgccgcttgggcgcacagccgcagcagctgctcaaatggagtggaaaacggccattgggcgacaatgagttatagattatctgctccacgttttgtacttagctgcctgtaatcttcttttgagtttgcccgagccccttgctggaaaactcaggagggagagatttgtcctttgacgctgtacacgctagtatgtttatatgattagcccaactggcggggagggcggatttgggggaaggaggaggaggaggctggaggtgactccagttcagacctcgcggagagtctgtgtcaggacttcgcattcccccgtctctctctctctccctctcgctccctctcactctctctccgctcacacacacgcagaggtgctggggcgaaatcgggagcttaccagagaattccttgggattgttggggggcatctcccctccgctgctgtgtgtggcgtggctcttcccggctactccttgcttccccgagcccgagtctgcgccgccagccttccttggggcagcggccaccgctcagccccggccgggagatccgaaatgtgaggaggggtcgccgccgcctcccgccccaggccgcagggtcggcgcgagggatgctattccggccgggcgctcggggggctgaggggcttcgcctgacaaactgagttggcctcgcgcccccggcgccctcccgcccgtcgcttcgaagggactcccaagtctgcgcacctctgtcaggcttttgcttccaccacccctttcgctctgattcccgatttttttttcctaagggagcgtgcggtctgggggtgtgtgcgtgtgtgtgaaagacctctctcgaagagcggcgtgtgggaaactgcgggaaaatgttgacttaaccccaggagccgc

SEQ ID NO: 103721 - DNA, 1295 bp, Homo sapiens
  chr1:82267739-82269034
  hyper
cgccgtgtccggccggggagctgcggcgctgcctcccgcgcggactcggcggccgaggacccgctcgcggccggcctcggccctctccggccggggtagccgctgccctccgcgcctgtccccgcgcggcccccacgccagacggccctccctcggggcgcgctcgcagacggaggtaagagccgcaggagcgaacaatgtgcctctgtgcccagcttcggagacctgtttgctttgcgcctccagtccgggggtggatgctggaggcgcagggagccgcgggttaatggggctcggctgttgctgttcggctggcccagggggagacccgcgctcgctcgggctgctcgctccctccccccaatctcctcttggaaatcgatccgcagaactctcagtccggtccagccggcttctccttttctcgtggagccattgtaacgctctccaggcatcagtctagttgccgggggcgctggcaagggggttaggatgaggctcccgtagccatgcattttttaatttcataaaagcttggggtcgcaaggttccgcccgtcctttcactgggggcctggggaggaggagtgtgaagcgcgtcctcggcggagcttatttgctccgggcgctggggcccggggccaccccagcgtcccgcccgctttgccctccggtcccgcactgtaagtggagcggggaggctgagcggctggagcgagttcgggggaagtggacggtgggggagggcttggacgagtttttgagggttgctgttccttctcgtcagtggttaggtggtgtggggaggcgaggatgacagtaaagcgcagccagatgtggtcgggccgccgccgggactggctacgattgggagcggcggggctgctgctgccagggcggcctcgtgggtcgggagggtgcaggggccggggacccggcgggccacggggagggcagagagcctcccggagccgcagtgagagggcagcagcgggccgcgttgggcctgcgggagaagttacggagtgtatgctgctggagtggctgtggggcagggagcctcgggagcttggtttgtgggatgggggtgccactggggagtggcgacgagagaaaggcgtgggaggagcgcgagggaaggggagacccccgcgctgcccgagcgtgggctccttgattggctggggcgaccctcaggcagagggggcgagggcgagccaaaccatggaagcgccccagcagtgtggaggtgcgcctgcgagacttctgcgcttgggacccgtaaagtttgttcct

SEQ ID NO: 103722 - DNA, 30 bp, Homo sapiens; identical to SEQ ID NO: 586
  chr1:82269243-82269273
  hyper

SEQ ID NO: 103723 - DNA, 34 bp, Homo sapiens; identical to SEQ ID NO: 35897
  chr1:82269507-82269541
  hyper

SEQ ID NO: 103724 - DNA, 180 bp, Homo sapiens
  chr1:84158380-84158560
  hyper
ggggtgagcagtgcccgtggtaagtgagctcctgcaagttcctgtcacagacctgtcccttccacctcctacccttaaggcagttcctgcagctctcacagctgtgcccacactttcactcctgcaaagaacgtctcattggcttcaattgctttagcggctcagcgtggtccctgtcgg

SEQ ID NO: 103725 - DNA, 69 bp, Homo sapiens; identical to SEQ ID NO: 35898
  chr1:84326246-84326315
  hyper

SEQ ID NO: 103726 - DNA, 388 bp, Homo sapiens
  chr1:84326357-84326745
  hyper
cgtcccagatcccgccagggcccactcgggctccagccgctgcctgggacagccaaaggccggcccgggcggttcttccccaggtggtccggggcgtcccgggccgcactggcctggcccatgggccccgaagaaggcgctcacccaaggaccactgtccgagcggcttcccccggcccggcctggtgccgcgtccccaccagcccggggtggcaggttctactcgggaagcctgttttatgtcttctttcacgcccatatcacaccgacaagggtgaagctgtggaacttatacctcggctgggccccgccgccaactcctagggcacgggaactgcgcacaggccggggttccgcgaggggcggagcttcccgctctgccctcggg

SEQ ID NO: 103727 - DNA, 1148 bp, Homo sapiens
  chr1:84464233-84465381
  hyper
cggaggcttataccacgatgtgggaaaacgacggaattacagaataaaccagcagggagcctcctcgttcacccaacccgaccccgcccgcccgagtctcccatctggagcctaaaaactgagctgagatcacagcaactgaccccgtcccctccgccctctccctcccccattctgcccaaacctctcagggcacgaatggtgctgaatcatttgcacgaacgcagcagctccccgttccgcggctcccagcggggacggtgtccccagagcagtgacagtccggggatgggggcccggaaagagggccagggcggagcctttggggacgtggggacatggaagggggtcgggggaggatggcggcagcaggtactcacccgggtgaggaaagcccagcccgggtcctcgcgtccccgctgcaagcggtcccccaggtgctcccgcgcctcgcagcttccccgtgggcggccgccccgactcggcagcctgcactggtggtccggtgctctcctccgcccgcccaccgcccgtggcagccacggctcgggactccggtgctcgacgcggagtgcctggaacagctgtcgctgcccaagcgggtggcggctaccgacgggccagaccattcgcctgctgcggccgggggtgcacgacgtgccgagaggcgcgggcgccgggggcggcgacggttgggaggaacaaaggactcggggaatcctctgccccctcggagtcaggaggtcctggggacaggagggatcaacggaggggccgctgcctcttctgggggtttactgaagacactgctcgagctttcccgggccacacacaccccccccccgtttgccttggtcccgctcggggctcctttagaacgcggcaaacagaggacttagcaacgcgagcgcctgggcggcgcccctcctcagagatgcgagaggcgctggcctgagcgcctccggccacctccttctacctccgggccctaggcgcccgatccacctgcctatctgaccacagacatcttcccacaaaacagtggagctttttgaatctttgaagagagtcttcagatcttttatctaagcatctttgtgaagcaaagaataaacgggtatctgaggccagctcgaaagttaggaaat

SEQ ID NO: 103728 - DNA, 1350 bp, Homo sapiens
  chr1:84543140-84544490
  hyper
taaccccgaggacaacgtggtgggctgagcgaatacctcaatgtgcgagagaacgaaaagctcgaaccacgaccgtgcctagggaccaggcttttcctgtggccgatgcggggcagatgcagacccagaggccacccttgcgcgcgatctccaacccgacggtgcggctcctctcggacctggagctgtggggagaaggcagccttttagtgaggagccgccgcgtggcgggacgcaaggaaaaccacccgagccgctgaacagtattccgcgactgcactccagggcaccgggaccgccagggtgaggagggactctgcgttctgcaaagctagcggttcccactccacctcccactatctcagcgatgggcacgcgagcgccagcccgggcgaccgcgggggaagaagcggtccacgccacctcaggcccccgccccaggctctgccagctgggggtccaccgcccgcccccggggtcccgggcctgcgcgtcacttccggcgcgcgcgcccgcctgcgaagatacagtcgggccagggcctggcctgggcgcgcggctgcccgggggcgcgcagagagggcggaccgcgcgaagggggagtgtctgcccgccgccgccactgctgctgccaccgccgtcgccgccgccgccgccgccgccgctgctgctgccggtgctaaggagttcgctggagccctttcctcagacccggcccggtcttcgcgcccggactcctggcgccagcgctaggcgcactcaccgctctgacgggtgcagacgcgggagttgtcccagactgtggagtggcgggcacggccccagccccccttcccttccctgaccccttcttgccatcgccccagacatggggaacgcggcgaccgccaagaaaggcagcgaggtggagagcggtgagttgaaggccgggtctgggtatccgctgggcgggccggcgcggggcaccgagcgccctccgggtcgcagcttctgaggccgcgggcacgggccaggcctagcagcggccgccgggagtcgttctggggggccgggagaccagctgcctttctcctccattccgaccccccagctccgcgttgagagctgaacgcgaagggccggatgtggggatcctgggaagagcgttccctgggattccctttctcactctagcgaggaggacttgcacacgttctggaacacttccccaaatatggtccgaggaaagaagtccctagtgccatcccacccctgctttcccccctcgccgactctttgggagctacaggtagtgctgtgggtaaggttggctcttctccctccatcacttgggtccgacccaaccttatc

SEQ ID NO: 103729 - DNA, 30 bp, Homo sapiens
  chr1:84764360-84764390
  hyper
aaacacatcttggccgtgtgtccggtgctc

SEQ ID NO: 103730 - DNA, 30 bp, Homo sapiens; identical to SEQ ID NO: 35902
  chr1:84944961-84944991
  hyper

SEQ ID NO: 103731 - DNA, 30 bp, Homo sapiens
  chr1:84971895-84971925
  hyper
ggttctgtgctcagcggctccaccctcggt

SEQ ID NO: 103732 - DNA, 195 bp, Homo sapiens
  chr1:84972302-84972497
  hyper
cggcgtgagtcacccgcacacccccgccccgtacaggcgtgtctctctgtgacccgagtttggccaacaggcattttcagttccacccccaacccccagccccgctgacccgaggcggagagcaggcgcggaggtcgctgtcgcgtacccagcggagccgggcgggcggggagcaggggcgctgattcgctggag

SEQ ID NO: 103733 - DNA, 30 bp, Homo sapiens; identical to SEQ ID NO: 35904
  chr1:85039791-85039821
  hyper

SEQ ID NO: 103734 - DNA, 57 bp, Homo sapiens; identical to SEQ ID NO: 589
  chr1:85040190-85040247
  hyper

SEQ ID NO: 103735 - DNA, 30 bp, Homo sapiens
  chr1:85086531-85086561
  hyper
ccctctgcagggaagcgggtggcgcacgca

SEQ ID NO: 103736 - DNA, 30 bp, Homo sapiens
  chr1:85156355-85156385
  hyper
cctccaaaaaaacccggagaaaaagaagac

SEQ ID NO: 103737 - DNA, 30 bp, Homo sapiens; identical to SEQ ID NO: 35906
  chr1:85156619-85156649
  hyper

SEQ ID NO: 103738 - DNA, 316 bp, Homo sapiens; identical to SEQ ID NO: 35907
  chr1:85358276-85358592
  hyper

SEQ ID NO: 103739 - DNA, 526 bp, Homo sapiens
  chr1:85358751-85359277
  hyper
cgcatgccctcggggtcgagcgcgacggggcgaccgggcgccgggctccagccgggcgcggagaagcagcggaggacgcggcgggcgggcggagcgcctcctctccagcgacccctgcgacgcgtccagagccaaaggaaagtttggcggtgcgagggagggacctagggacagcggcccctccctgccccgccccgccccgccgggtgcgttcgacgttcccactggagagcgtccccaacctgcaaggccgcgagctgcgctcaaaggggcccgtgcgagccgcgggagggcagcgctcttgcagacgcgttcctgcctgggatcgtccccaggtgggtggtcggccggccccgagagggaaaagcgcccactaaaggaccgctagtacccacaagcctcacggagccatacctcggagctccgtattagaacgcagtccctctgcccctctgtcctcagagatttgtttgaagtggctgcgggaagtgcagcccacacccaccacccccgtgggaggcaggct

SEQ ID NO: 103740 - DNA, 911 bp, Homo sapiens
  chr1:85462468-85463379
  hyper
gactcctcacctgacggttaacctgaaaacacctgatcctctctccggaatccttgcctggggaaaacgataaggctgccgggccatgcctcctccttcaaaactttccagggctctcgggattcggaacaggaaacaccgttcacggccgactcatttcgccctcgccgtaacgcgtccgccgaagttggagccctgcaaagcggggttcccttctcttaccctttctgccggccgcgtggtgcgcgcagaccccggcccgagagcaggcgccgcagtcgtggagtgcggcgggcagttctcgggcggctgaaaggcggctctgtgtgcaccctgcaggatgcggcgcgtggccaggcgctcccgccccgcccccaaggggctgccccgccccgccccgccccgccgcctcctaccggggaccggagcttccccagttggggtcctaggggacttattccacgcttcagcggaccagcctccccgcgctcccggagaagggggtcggcgacgcggaggcggggtgggggccgtaggggatggaaccgaggcgcgcgcgagaagagccgaggaagtaagcagtcccaaaagggggcggcggtggggcccccagggaggcgtggggcacgccaagggcgccgtggggcactgacctgtggtgcggcccccaggacaggcccgaggcgcggttgcacaccggcaggtccagcacctccatgcctcgaggcatggcgcggccagggagcggcaggaggacacctagcgtgggacggctacacctgtctgggcgcaggcccgccgcccttgcactctccacccaagtgcccaacgctgcggtacggcccgctttggctcggggtgtctgccggagaagcgccttacagagggacccgggcggtgggccctgcggc

SEQ ID NO: 103741 - DNA, 249 bp, Homo sapiens
  chr1:85463876-85464125
  hyper
agaaagtgcgaccggcgcgcaaggaataggaaaagcgagttgccctgcgcccgcgtcgggatgaaaggcagggagccgggagggagcgtcagcgtggcccggcgggcgcggagggagggcgcacggccccagggctggactcgtaaccccagcgccctgctgcagccgccgttgcttttccctcttggtgcacgaaaggaagacgcctgtgggaaatcgaacagacaatcggtcgccgttcgtgaatct

SEQ ID NO: 103742 - DNA, 30 bp, Homo sapiens; identical to SEQ ID NO: 35912
  chr1:85513581-85513611
  hyper

SEQ ID NO: 103743 - DNA, 284 bp, Homo sapiens
  chr1:85527760-85528044
  hyper
tgtgaggcatggaccgagcctgttagacctggggtcaggccgggccactgtcattaatatacttaagacacaaaactctttccttggtagtggaaagctgctggcctcacccggttcgcgttgagtgacgtcacatagtggcaaccaatcacaagtctgctttgaaagatactgttagggagcggacactgtattggtagagatgctctgtcagtctcgcagaggactcgcctcttttctcttagcgacagatgcgtcctggcaacagtcggcagagttgctgc

SEQ ID NO: 103744 - DNA, 162 bp, Homo sapiens; identical to SEQ ID NO: 35914
  chr1:85666111-85666273
  hyper

SEQ ID NO: 103745 - DNA, 437 bp, Homo sapiens
  chr1:85666726-85667163
  hyper
tgcctgtctccaggcggccgccctccgcccccagggaggagcccgccgctgggggaggcgggggacgccgttccgcctccgccccctcaggctcgggcgcagactgcgagccgccgggcaggttttcgtagtagtcggcgtcgtagtcgtcttcgtccttgtcgtcttcctcctcctctccgctgtcctcggagccctccggggagtgcggaggggcgtgagcgagcccatggctctggggggcggcctcctgcccgccgcgcggccgaggcccgagcgcccccaactgctccgggtgccctccggggacccgcgccccgggaccccacgcctcaggtgacggcgagggctgctgtaggctccgcccgtgtcccccggcgtgctcacgtgggagggtgtctgcggcaccccaggcgtctcccgcggctgccgaagag

SEQ ID NO: 103746 - DNA, 30 bp, Homo sapiens; identical to SEQ ID NO: 35916
  chr1:85667776-85667806
  hyper

SEQ ID NO: 103747 - DNA, 30 bp, Homo sapiens; identical to SEQ ID NO: 35917
  chr1:85724687-85724717
  hyper

SEQ ID NO: 103748 - DNA, 30 bp, Homo sapiens
  chr1:85741634-85741664
  hyper
ggatgaatctgagccgccagtccctaacga

SEQ ID NO: 103749 - DNA, 175 bp, Homo sapiens
  chr1:85741884-85742059
  hyper
atcctccttgtcctcggactccaggcttccgctttcgtctcccgctgggctgcagcccgcccccgcccgccctgggcacagctgcgttactcacgtccttcttcacttcagtgaggtcctcctcggtgagggacggtgcggtgggctccatggtggaggcgggagatggcgcttc

SEQ ID NO: 103750 - DNA, 30 bp, Homo sapiens
  chr1:85742519-85742549
  hyper
ccgtgggtggggtccgtcagtgcccaggca

SEQ ID NO: 103751 - DNA, 388 bp, Homo sapiens
  chr1:85773928-85774316
  hyper
gcagatcctgggaagacgccctttactcagtaaggagggcccaggcgtccaaagcccaccagggggcagcggcggcattcttagccccacttctccgcgctcaaaggccggctgagaaaacgcgagtgactacccgagggcgctgttactccacaatttttctgcaaaagctaaggtcggcaaacatggatattcggatttccattgtttttgaggctaaatcaaaagatgcctctggggaaaaggggcaacatgcactgtcggatcggcattcatatggaaaaacagaggtaggaaacattttatacattttgaagatactttgatgtgcagtaattttgaaactttcgtagggcacctgtttttcaatgggcggtgtagagtaatg

SEQ ID NO: 103752 - DNA, 1197 bp, Homo sapiens
  chr1:85929934-85931131
  hyper
gggcaccgacaccccgttaattcatccagcttgtcctgctccgagcgccaggcaggacttgggggcttcggtgtcacgactggcgctgccccctggagggacgcccagcctccacccgccctaccggagcggcacccctcgcggccctcgctccctgggaaacactcagagttgcactgtcgtcgctgccgtttaattttcacaaataaaaatgcccgtgagacggaatcccccgcccacccacctgcccgagaccgtacaaccacattgaatcggatcctccagaaggctgccggcagccgggaggtgtgaacaatgaacttctctctgactctctgacacacacacacacacacacactcgccccccgacgggaagttgtgaactactagcccgagggccaatggcgcgactccccaggcaacacggcggccggcggcgggggagggcctggcgcgcgccccggccgcgcccctcgagtcggcagttacctccttcctccggctcggcgccccgggtcgggtgatgagggccgtctcctcgcacaccacggccacgtcctccacgaagacgcagtccggaaggctctcgtcggccggcagctccaccacctgcagccccagcttgctgcccagcacgcccacgtagagctggtgctgccgttccgcgcgggcgacgtccacctcctcgcccttggcgcttctcagcgcgtgctggccgagcgactcgggtagcgcccgcaccacggcgtgggtggcccggccgaaggcggcggggtggccgagcccggccatggcttcgggaggcttaggggcggcggcggcggcggaggcggccgggtcctgccgcgggcagcgcgcgctgagcctgcgagcgcccgtcggctcctcttggcagccgctgaatgtggtgcagaaggagcccagctcgcgcccggagccctgcccgcgcgactgagcatgcccagagctccgggcgccggcccgcgcgcatcccgcgcgcccactccggcgctcgcgggtctcgcgccagcccaggcgggagttgtagcggcgagcgccgggcgaggagtggggccaggagaggcggccggggaagcagcgagggcaagaagtatgcggaggcgggggacctcggcgaaaagccaccgctacccggacctggcggtacctgtgttctgtcgcaggtgcacacctc

SEQ ID NO: 103753 - DNA, 153 bp, Homo sapiens
  chr1:86042080-86042233
  hyper
agggctccccacacgcggaacttctcgaggaggaagaggggaaggggtcgtgggaggccaggagaaaccgagagccagctttaccatgtgtcccttctggggataatggaatccaggcccttcggggcttttccccagagctggctacacgtc

SEQ ID NO: 103754 - DNA, 36 bp, Homo sapiens
  chr1:86042646-86042682
  hyper
gccgccaccgccaccgccaccgccccccgaagctag

SEQ ID NO: 103755 - DNA, 385 bp, Homo sapiens
  chr1:86045826-86046211
  hyper
acactcctcttccccgttctactctttcaacagataacttgcctctcaccttcgctgtaaaaaagcaaacagctcactgccttcccgggtgagggcttcagtggctgcccggtcaactcgcatcaccaaacaaaacgacttttgttcctccctctcaggtcctcccacccacccagtccaggcaaagttctgaactggcccccctcgcccctcacgaccctccaactaccatcaccaccatcacgccccaaagaacccttcccaacataagtcgtaatttaaggtggaaaaaacgaactgttttcttgacgggtctgggacacacacacacacacacacacacacacacacaccccccgaactgttttcttgacgggtctgggag

SEQ ID NO: 103756 - DNA, 753 bp, Homo sapiens
  chr1:86046270-86047023
  hyper
cacacacacacaaaggtgcaatggagccaggggaggcgcttggcagcagcccgcgccaaccagcattcctgagatgtttgagaattctggaacgcgcagacagagccgacgtcactgcaacacgcggcgcctccgccggcccgtataaaaggcgggctccggggcgcctgggcagaccgcgagcgagagcgcccccgagcagcgcccgcgccctccgcgccttctccgccgggacctcgagcgaaagacgcccgcccgccgcccagccctcgcctccctgcccaccgggcccaccgcgccgccaccccgaccccgctgcgcacggcctgtccgctgcacaccagcttgttggcgtcttcgtcgccgcgctcgccccgggctactcctgcgcgccacaatgagctcccgcatcgccagggcgctcgccttagtcgtcacccttctccacttgaccaggctggtgagttggactctccttttgccacctattccccgtccgctctccagccccttcccctggtcccagattgcccacggcaggaaaagttaaaaagttcgcgatcgtttgcgggtagccgtttctttaagcactctccccctccccccgaagacgtgtcgggacctcttggtgggagcagccttccgaggtggccgggctggacgagatcagaggctccccgtcgatagggtcggagacccccgtccctcactgcggcagccgcggcgcccctcctgcgcaccgcgccgagtctc

SEQ ID NO: 103757 - DNA, 190 bp, Homo sapiens; identical to SEQ ID NO: 600
  chr1:86047064-86047254
  hyper

SEQ ID NO: 103758 - DNA, 30 bp, Homo sapiens
  chr1:86174045-86174075
  hyper
cggaatacctacggcggcccacgtgtggag

SEQ ID NO: 103759 - DNA, 30 bp, Homo sapiens
  chr1:86377410-86377440
  hyper
ttataaaacccctgacgttttcatacctgt

SEQ ID NO: 103760 - DNA, 1373 bp, Homo sapiens; identical to SEQ ID NO: 35925
  chr1:86621178-86622551
  hyper

SEQ ID NO: 103761 - DNA, 30 bp, Homo sapiens; identical to SEQ ID NO: 35926
  chr1:86861424-86861454
  hyper

SEQ ID NO: 103762 - DNA, 30 bp, Homo sapiens
  chr1:86861943-86861973
  hyper
cgcagaagagtgcccgctcaagtggaacaa

SEQ ID NO: 103763 - DNA, 30 bp, Homo sapiens
  chr1:87170094-87170124
  hyper
caagcatacagaggcgccgagaccccgcgg

SEQ ID NO: 103764 - DNA, 30 bp, Homo sapiens; identical to SEQ ID NO: 35927
  chr1:87170609-87170639
  hyper

SEQ ID NO: 103765 - DNA, 85 bp, Homo sapiens
  chr1:87379856-87379941
  hyper
gatccaaaacagaacgctaacggccgttgcccttacatctctcatttggaagtgacaggtattaaataacggcatatgaaagctt

SEQ ID NO: 103766 - DNA, 53 bp, Homo sapiens
  chr1:87380148-87380201
  hyper
cagaggaaaccaaccgtaaaccgaaccaagagcgaagcgcaggggctcttccg

SEQ ID NO: 103767 - DNA, 30 bp, Homo sapiens
  chr1:87380658-87380688
  hyper
cgcctccggggtcccgctccccgccccccg

SEQ ID NO: 103768 - DNA, 30 bp, Homo sapiens
  chr1:87380940-87380970
  hyper
tcgggggctgaaagcggtttcaaagagaac

SEQ ID NO: 103769 - DNA, 30 bp, Homo sapiens
  chr1:87597695-87597725
  hyper
aggcgtcctgctggcgccctctcgccaccc

SEQ ID NO: 103770 - DNA, 348 bp, Homo sapiens; identical to SEQ ID NO: 35929
  chr1:87617582-87617930
  hyper

SEQ ID NO: 103771 - DNA, 128 bp, Homo sapiens; identical to SEQ ID NO: 35930
  chr1:87793798-87793926
  hyper

SEQ ID NO: 103772 - DNA, 30 bp, Homo sapiens
  chr1:87796993-87797023
  hyper
tgctgcttaaaatacgaaaaaccagtttcg

SEQ ID NO: 103773 - DNA, 30 bp, Homo sapiens
  chr1:87797036-87797066
  hyper
tgcacccacccctcccgtcaccttgccttc

SEQ ID NO: 103774 - DNA, 243 bp, Homo sapiens; identical to SEQ ID NO: 35931
  chr1:87800821-87801064
  hyper

SEQ ID NO: 103775 - DNA, 30 bp, Homo sapiens; identical to SEQ ID NO: 603
  chr1:87907740-87907770
  hyper

SEQ ID NO: 103776 - DNA, 311 bp, Homo sapiens; identical to SEQ ID NO: 35933
  chr1:88928296-88928607
  hyper

SEQ ID NO: 103777 - DNA, 95 bp, Homo sapiens
  chr1:89149363-89149458
  hyper
gcaccttaactggtcgagaaggcgcgctgggggctgggtttgagggtgagcaaaaggcaagattattagtttgggttgacgtgggggtcaagggg

SEQ ID NO: 103778 - DNA, 30 bp, Homo sapiens; identical to SEQ ID NO: 35934
  chr1:89149699-89149729
  hyper

SEQ ID NO: 103779 - DNA, 85 bp, Homo sapiens
  chr1:89150029-89150114
  hyper
tccggtgagggcggcgagaggaagcccgctacgagtgccctagctccccgccgctctcgatgaaccggacggaataagccgcgcc

SEQ ID NO: 103780 - DNA, 30 bp, Homo sapiens
  chr1:89150323-89150353
  hyper
gccctggtgagaggcgctggcggaggagac

SEQ ID NO: 103781 - DNA, 30 bp, Homo sapiens
  chr1:89151084-89151114
  hyper
aatgagaaagcagtcgactaagggaaaaca

SEQ ID NO: 103782 - DNA, 30 bp, Homo sapiens; identical to SEQ ID NO: 605
  chr1:89356949-89356979
  hyper

SEQ ID NO: 103783 - DNA, 30 bp, Homo sapiens; identical to SEQ ID NO: 35936
  chr1:89357182-89357212
  hyper

SEQ ID NO: 103784 - DNA, 30 bp, Homo sapiens; identical to SEQ ID NO: 606
  chr1:89664392-89664422
  hyper

SEQ ID NO: 103785 - DNA, 35 bp, Homo sapiens
  chr1:89990215-89990250
  hyper
gcaggagcagctaccgaagcgactgcagcctcttc

SEQ ID NO: 103786 - DNA, 1192 bp, Homo sapiens
  chr1:90098145-90099337
  hyper
cctgaccctggccttcggaggagttcccagaagggctatttttagtggtggctgctcccctctaacttacccaggggaggagctgcggtggctgagccgacgctgcgcgcacagccgcctgtggttttccgcgcattgtgagggatgaggggtggaggtggtattagacgcagccgaatcctccctcagagtccgccaggtgggcgtctcaggggtgggagtggccgcgtcgtgaagcggagagaggatttctctcctggtcctggagaaggcccccggcggccggcggcatccctcgctggcgagtcccgggagcgaggtggtctctgcaggggaggaagttcccgggcggcgcggcctgcgtcacagcggggctggcaccgcggagtcgactcggcgggcggtggcgaccccggggccgggcgctgggcggcgctggctgccgctagccgggctgcgtgcggggcggcgctggaggcggctccgtccgcggccggggaggcggaggggaggagggcttgcggggctggggcgttagctgcgtcccggctggaagcccgcgaagagaagtaggaggaaggcgccgccgtggccgcggccgcagtgctcgggcgcgacaagccatgagcagcgaccccgcgggcgacgccgccgtccctggcagccgctgagcccgacccccaggcagctcgccgctccctagcaccttctccagtcgacactctcgcgcccggaggtaagggcgggggatccgcggagggatggagaggggcagcccgcagagggccacccgctcggtccgctgtgcgcgccggaccgggactcgccccgcctcactcgcgtccttgcttccccccggctctcagacaggcagaatgtggttgcccgcccggcgtgtggtgctgggaaccttccgctactgcggctcaggagcccgccaacccctaccccacccaatccgcgctagcccgagcggccgcgcgaggatctcagcctggcgcccaacgccgcgccgcagcggcaggtcctgcagactgggcgcgggggtgggggggcggtccgcgaggggaaatgcgtccgtggccggggcgatcgttgttctttcctacctcgaaaatctctgagaccccggggccagtcctttccggtctatcacccccctgccacctccgaacccttgaagttagcactt

SEQ ID NO: 103787 - DNA, 30 bp, Homo sapiens
  chr1:90223378-90223408
  hyper
acacaggaagtatcacgatttctcttcctt

SEQ ID NO: 103788 - DNA, 144 bp, Homo sapiens
  chr1:90228346-90228490
  hyper
gacgttgggaatttccggaagcacaatccccctggccagcactggtgttaattaagggcgctgctggtgttttgcaggcagctgtttcctcctccggccctcctgttccccgggccgcctgggcaccggcgcctgcactctggc

SEQ ID NO: 103789 - DNA, 146 bp, Homo sapiens
  chr1:90228980-90229126
  hyper
cggacgctcgttgtcagtcctctgtgatctctaattaaggctctgctgagtctcctctttatctatagggagaatcctcaagcggggagacacacccttcctgcagaggcgtatcgccagccacgacaaggcgagccgcgtttctc

SEQ ID NO: 103790 - DNA, 173 bp, Homo sapiens; identical to SEQ ID NO: 35941
  chr1:90286175-90286348
  hyper

SEQ ID NO: 103791 - DNA, 30 bp, Homo sapiens
  chr1:90287263-90287293
  hyper
ccttgctggcccggcgtccaaaggtgagcc

SEQ ID NO: 103792 - DNA, 46 bp, Homo sapiens; identical to SEQ ID NO: 35942
  chr1:90287492-90287538
  hyper

SEQ ID NO: 103793 - DNA, 30 bp, Homo sapiens; identical to SEQ ID NO: 610
  chr1:90308584-90308614
  hyper

SEQ ID NO: 103794 - DNA, 768 bp, Homo sapiens; identical to SEQ ID NO: 611
  chr1:90308852-90309620
  hyper

SEQ ID NO: 103795 - DNA, 30 bp, Homo sapiens
  chr1:90460781-90460811
  hyper
agcgccgccaaggccgacggccctcagcct

SEQ ID NO: 103796 - DNA, 30 bp, Homo sapiens; identical to SEQ ID NO: 612
  chr1:90461125-90461155
  hyper

SEQ ID NO: 103797 - DNA, 213 bp, Homo sapiens; identical to SEQ ID NO: 35946
  chr1:91170440-91170653
  hyper

SEQ ID NO: 103798 - DNA, 1128 bp, Homo sapiens
  chr1:91172119-91173247
  hyper
cgcaggaactcgtggcggccgggcggtcctgaaggtggaggagcgcggggcccagctggggtacgcgccgagcaagaacccgcacggagccggcgcgccgcggctgggcttcaaggccgccgcgccaaatccctggctgcgacgtgtatgcgaatcgttaggaggaggcgggaggacagccacactgagggcctcttcactaaagaatgaagtctgacggcgggaatgggggtgggtgggggcgggaatccatcagctccacaaagtgacagggcccttttatcgtaaatcaagttcaatctcgctctcgcgaaggtcctcttttttcggcggagctcccgcaggggcgactcgctgtcccagaccagatagtagcaagagctgggagagacccaaatctgcagggagagggcgcgggctgagagccgcggtggggagcagggcctgggcccagcgcgacctgcagggctgctgcctcgggagcgcttctgctctgcctgcggtggccgaggcggcggctcgccgagcgcgctccgagctgtgcgaacagaggaagtatgtgccagttagaagggttccgccggccacctcgtcgcagccgcggcgcaaggtcttggagccgcagacctgaggcccggctcctccctcctcggcttccactaagaacttattaaatagggacgattcacagttgatctgtcactgagcactacttaccccgagatctttgggtttttgaattactttattgatctgaagattttgttctttggaatgtgaccctgtttggacttagagctaatcaggaaacgctgccggggaggttgctttgtaatcactttgcttacctccccccgggcgccgccgacccttcctagacgcctccgctgcggccgcctaggcttttacccggaacccgccagcccaggttacctagctccacccggcgccctgggagctgtctgtggtgctagcacacagaaaccgggagcgggagacccagtggacaaggagaggagagaggagacaaactgagaatgtaaggttaaccgagacggtccacccagcaacactcaaactgacaaagaccttcaaaattcagccggaaggaccgggggaaatagtccc

SEQ ID NO: 103799 - DNA, 152 bp, Homo sapiens
  chr1:91176444-91176596
  hyper
gggctgggggctggacgcccgccgccagggactgagaaggcaacgatcaaagccgccacaagggtttgttagctggccctctccaagtcccccgggggcgtcctaattgctcgtcccacagcctcccgctcacaggctgtccgacctcgccg

SEQ ID NO: 103800 - DNA, 134 bp, Homo sapiens
  chr1:91176691-91176825
  hyper
cggaccctcgctgccccaggaagacccctagaagaaggaggaggggaggacagagggatcaccacaccggtgaagctggggcctctatgcaggtcaggacggcagcaaagttggccgccgacttagccagcacc

SEQ ID NO: 103801 - DNA, 230 bp, Homo sapiens; identical to SEQ ID NO: 35950
  chr1:91177941-91178171
  hyper

SEQ ID NO: 103802 - DNA, 235 bp, Homo sapiens
  chr1:91178991-91179226
  hyper
taccttatgaaggaacgcagggctggtgggccatccatacccggcagctccagccaaattaataaacatgtcgcccattttaaattggctacaaatgacactaatgttttccgacagaattagggtggctgaaaccgtatgtaatgagacagaaaattatggtaaagatgacaagtggatgggcatttccaaccgcacttatggacgattagaacacaaacgggagaaaaggagg

SEQ ID NO: 103803 - DNA, 59 bp, Homo sapiens
  chr1:91179580-91179639
  hyper
cctgcttctcccagccgcctcacaggccaaagcaaggacatttacgccgaggctggtgg

SEQ ID NO: 103804 - DNA, 229 bp, Homo sapiens
  chr1:91180119-91180348
  hyper
gtcagtgaggttgagcgctgcagccaggtccatgcgatcctgcacgctcaggtacttctgccgctcaaagctacgctccagttgattgagctggtggtcggaaaaagctgtccttgcttttcgaggcttcttggctctcacagggggactctcacggctactcgtaatctcccggtctccttcctcctttgtccctaccatagaaacccagccacggtggtaagttagc

SEQ ID NO: 103805 - DNA, 1305 bp, Homo sapiens
  chr1:91181890-91183195
  hyper
caaaggaaggagctggatggccgtgaaggttgtggggtagaacaataaacagaacttcgaggagtccccacatcgcacgcccaggcctcccttcagctgcagtcttttgaccgtcgcccagtcgcccgagaagctcctggaatcgctccccagcagagatctgctgaaggctgaaggggagattgggaaccaggaggacaagctagacggccgagagcgccgggtggcgggactcaccgtggcatttgatgtcgctctgggaatcctcccgcttgtcgagtttggtcttgctgtcctcctgctcgagctttggcctgaagctctcgtgcactgcgttgctctcctgcttcggggtgtggtggggagaggatacgctggtgctgtagggtgcacatgccgccagaggtttgctgtcgcccaagatgtccttaattaaaaaagaagacgtggaagtcctgggggccgaggcggccgagcccagctgctgggggggcggcggcggcggctgctgtggcggcagcggctgctgctgttggggcaaaggctgcaaactttgcgtcggggccgcggccggcggcggcggctgctggctgtggtggaggtggtgatgatgctgggtcgcgtctgctaccagatgcggctccgggggctccatggtgactgagataggagaagaaggcgccgtccctacggtatcaatctccgaacagggagatggggtggcctgactcctaaaatccgcggtcctggcctcaccgagcgggcggaaatctccattcatcatgcctgggctgcctgaactggcactggacaaaatcgtgtctattccaaaactcgacccgctggccccttccattgtcattgctacatgaggtccacgccactccgccgttcagcagccgccccgaaccagcgaagaaagctatcgatcgtaaaacaaaataaacaccaaacaatgttgccgccgcttaaaaaaaaaaaagtggggcggggagagaaggaagggtaattgggaagtggcaatctgtggatactttcgacacaactttttttcttttatgcaaaaagtaggggtggaaagaaaaaagatgcggggggcggggggagttaaaaaaatttctgagaaaactcggaacttgcgctccaggaacgactgcgcacgtggcgcggcggtggcggcgcggaggacccaggcgaaggcgaaggcgaaggcgaaggcgcaggcgaaggcgaaggcgcaggcggcgggaagctacgccaaagccgccgccgccgccgctgccggggtctgcccacagcctggca

SEQ ID NO: 103806 - DNA, 360 bp, Homo sapiens; identical to SEQ ID NO: 617
  chr1:91183250-91183610
  hyper

SEQ ID NO: 103807 - DNA, 757 bp, Homo sapiens
  chr1:91183775-91184532
  hyper
cgagtccagtggtcccggtgtccacaatcacgagtgcgaggcaaagggagagggaggaagagatcagagggagaccagagaaagggaaccaaaggggagaaagaaaaaaaaaagtagcaaggattcgcccgttttcttaagtcagaagagagagagaagaggacgggaagggacttacctttaggctccagcgcggcggccctcgcagcctccccaaacgcgcgcgggaatagtccgaagacattaagagcggaggaaggagatccctgaaggaatccacagaaaagtgtgtcacttcaggcgccggagccttgcataagcgggcgggtcggctctgggctctgatttctcgcccgacgaacccaggcgctcgggctcagcccggcgggaggcggatccctgagagggacacagccgggtccgcgtccaccaggcgctctcggggaggacgaggcctgaggctccaagctggggaaccagcctggtctccagctggaaaaaatgcctggccagacgctttctcccgaacgggggagctaatgcccgaggcgttctctggtggcgagggcagccacggttcactgcggtgtcgggcgggcgcggggctcaggacccatagcggctggtctgcagcccgcgcccctgccgcgccccgcggcagtccgtccacctctgtcccccggcccctttcggcgagcgctcatttggaaaggaaacagtcactgcggatccacttgggacccggagcatgactgta

SEQ ID NO: 103808 - DNA, 559 bp, Homo sapiens
  chr1:91184749-91185308
  hyper
aaccctatgaatctgcgaggcgggcatcgcttccgtggctaggtctggaatgatgttcgagtggcctttaatgtctccaaaggctgggccgaaatctggagtttagttgcagttctggaggtcactttctgggccacagcttttatctgttgaggacgaagggaggggtgtcagggaggcaaatgacctcctgggacaagctcttgcctttcggtcggaactgcttctgtgtgagccctgggtccggaagcgggtagctgggcgactcatcctgcctgcgttttcctagggaaatcggtgtgtttgacccagaaaaaaaaaaaaaaaaaaaaaaaaaaacagcactacttggagggtgggttgagctgtttctcatcgtctcagtggcatttttcctagggctgttccgagagaacagcggggattgaagggacggaggcaaggagatgcacaatccgggcagctctcgctcttctcggaaggcgaagggagtttggcggagaagacggggttggtgagccgaggcggggactccggacgtgctccatcccggcagggg

SEQ ID NO: 103809 - DNA, 280 bp, Homo sapiens
  chr1:91185347-91185627
  hyper
cgggtgactgggccccgccgggtggggtcgggccactgtaggctggagcggggttggatcaaatgcctttggcgcgggaactgagtgctggcccgggagaccctccggagagctcgcgggctcggcctcggcctcggcctcggccttcggccgcggttaccgaaacacagacggtagacttgtggaggtggcttatccgaggccgcagggcccgacgctgcacagcttcgcagcctaaatatcctgcgcctctgtcacagttgaccgctgtggggaggac

SEQ ID NO: 103810 - DNA, 30 bp, Homo sapiens
  chr1:91187253-91187283
  hyper
ggctggctccctgacgattgtctgacctct

SEQ ID NO: 103811 - DNA, 766 bp, Homo sapiens
  chr1:91189042-91189808
  hyper
atgttaattaacaagcggctaattaaaacggcactttgagtgctaatcaatcgccttattaagttacagccatcactggaacaaattgaaacctccccgccccgttttctgcctttggtgcaggcggggccgcgttcccagataccgtgagaggccttggggcgcggaggttgggggcagcctcggtcagctttctcagtctctcccaggtctacagaatacgccactggacaagtgcctaagcagcgacttctggtccagacacaccgcccggggagtaagtagttgcgtcgaagaacaactcattcagcagcagttaacaccgacgtttcctcctagaaagagctcccgcaaagcggggggatgtgacctgtgggcccccagcaggggtaggaggcagttcagcccgagagggggcgctctagggcctggatcctgcatccctatttcctggaacacacccaacgcctcattctgaaaaccctgcttaggccctggccctggtgccgctcagcaaccaggaaagagctggacctgccttcaggcagcaagaacaggactgccagcctcctgtggctctgtctcccgaggctccatgagaaggggatgggggtgcaagaagggaagagtgaggtggtgtgctgggcgtcggggacgaggacgcacgccagccaagacgtgcctcccacccagcccacgcgcgcttccccacccccctggccctccaaaatcggtaagagaattaagatttcgaatccctattttg

SEQ ID NO: 103812 - DNA, 860 bp, Homo sapiens
  chr1:91190088-91190948
  hyper
ccattggaagaagctcttttgcgtggtgggcgatgtgtgggtgggggacttgtggcatggcccacggtgttgtttctgtgcctgcgatgacacacgtatgtcttgagctgtgggctcgccttcctggaggtgcgcccgaccgcatctgctggtgggtctgagcgtgcttggggtgtcccaggagaactgagagaacggctcccacgtgcaaagttccaaagcattaatattttcatcatattatcattattcaatataataatatttgttcggttagcggcactaattaggccacattaaaaccgtagtgtgtccctaatggtgcgtaatgtgctcacactcacatttttctctctgaggatgggcggctgcaggctggtaggggaggagagacaggcaagcggcgggctggattagggcgtgacgccccccaccacgcacacaaacatacacagcccactggatgtctgccgggtgggagccgcaatctccgcgcggtcgatggggccctccgctgcgcactcggccctgcgccgagcaccctgcagcctcctcccgcgacacggcgctttgaactcggcggattgattttgcttcccttcccccttttgtgtgtgtttgcgttcaattggttaggtttttaagatttgggagggctggtgtgaaagaattaaaatactcttaactggagcccctccgccgagaactggaggtcccgcctcctagttcggcgctttcaggaccctcttcccagagggaatttctttcagaaattccagggtgggcttgtaaaagacgcttccgcagagcaggtcccgtcagggtctttttcctgttcctggtgccagcggtcggcccgg

SEQ ID NO: 103813 - DNA, 250 bp, Homo sapiens; identical to SEQ ID NO: 625
  chr1:91190984-91191234
  hyper

SEQ ID NO: 103814 - DNA, 813 bp, Homo sapiens
  chr1:91191289-91192102
  hyper
cgcggccggacagagcccatcagctacaacgcggaaggcctctgcacccccttgggggcgggaggaaagtactgccagtcctgcctgggggccgagggtaacaagcaccgagcctctcgctccacgcagggccagctgcccagctcagcgaagctcttgtgatctggtgcgtgtctctcgctcttccctccccatcaaagaagtaaactttctacctactccccctaatccgatcgtttagagctgctgttttccttttgtcagattcctcctccccgatcagtctgagtacacgatcagaactgctcagagagcaggaagcacattgatttcagcttgttctgtccacagacaggccctgacaaggttgttagaacagccggagaggtctatacaatcacttaattaccaaaactgtcagtcaggcgggacgcggatccgcgtcccgggctgcgctaggcattccagcactgggccgcgcgcgtgattgatcggtgctgatagcaccgcaaaataattacggcgaattttctgatgtgtgattttatcccaagttcatgcttcagagaggtaatcggagaatgagaagggtcagtgccatttcggattacctggaatctgcgagaaagggtaaaatgggggaaggagctccgaggaaaacgggagagatgggggtgcagagagagagggaagaagaaagcgagttatggattgctggagggactgcaagcaattcgtcaaactgtgcaagtgatttccttcagagccagcatatggcagattgattttgtccaacgtcggttttagccacat

SEQ ID NO: 103815 - DNA, 208 bp, Homo sapiens
  chr1:91192368-91192576
  hyper
catggtgctgactcccgccaccttggagccccgagctgagcctcgggcagaagatgacaggccagccgtggggcaaggaggccgcggaaacgcggaacggcttcggggagacggaagcgcccaatgagattcaccctgcagcccgggtccagcccaccttcctcggagattgccgcggccctcgaacccgggcctaggtcttcatgtc

SEQ ID NO: 103816 - DNA, 40 bp, Homo sapiens
  chr1:91192681-91192721
  hyper
cgactctgggccaggccccaaggaccgccccggcctctcc

SEQ ID NO: 103817 - DNA, 136 bp, Homo sapiens; identical to SEQ ID NO: 35969
  chr1:91194580-91194716
  hyper

SEQ ID NO: 103818 - DNA, 288 bp, Homo sapiens
  chr1:91195117-91195405
  hyper
caggagctgcaggctcgggtccccagccaggcgggggactgcgggccgcccgcgctgcagggccgcgggtcaccgcagggggcgccggggcgctacgggtcctcgggcctggtcttttccggtccctgcccgagcccgcgcctttcccgcctttcgggggagaaacctgcctggacactggaactgggagaaagcagcagcctaattgctcttccgatcgtcgcttgggaaaggggggcttcacatttagaaacttctcgcacctttctctctcggtctctgcctttt

SEQ ID NO: 103819 - DNA, 208 bp, Homo sapiens; identical to SEQ ID NO: 35971
  chr1:91195986-91196194
  hyper

SEQ ID NO: 103820 - DNA, 201 bp, Homo sapiens; identical to SEQ ID NO: 630
  chr1:91196225-91196426
  hyper

SEQ ID NO: 103821 - DNA, 1202 bp, Homo sapiens
  chr1:91316201-91317403
  hyper
tggactaacagcatgtattagcgtgacagagactaaaaagctaagaaccgccgtgcgatggccggctttgggcaccgggggtgggggctacgctacgcgtgaagggcctcagtcctcgggctttagttcaggaagaaaatgaaagctggaggtctcgtgggcgggactggaggcggccagataggcaagaacccgcaacaggagtagggacattttttcttcaaattccaatcccatccagcgatagacaggcgcgtgggtctccctcctccacgaccaccacacaatggcacacacttttgctggaaactgaaatcgaagtctctgaggcaggctggggcccaggccggcagcggggaggggcagggtccagccacctcggcgtggccttggcgagcgctccggggtcagaggccgtcgttctcgccgcgctccacagcgcgtcacccgctgccctagcgacccccgggcgaccccggcatcgcctggctgcgccgtcccggcgggccggccctctccacgccctctcctggggtttgcggtgggcacagctccctccagactgggtctctccactagcctcctccccaactgcaacgtgggaaccagagctatccgagtcacgagccccaagtgcacacaaagcccccaacggggccacggcgcctccacgcctcgctacctccagctccaggagcgcagaacgcagcgccctgggtcaccgcgtctgccctgcggagcagccccactgaggggaagcctcgggcaggaggtgagaccccgcgcacgcaagcacccccgccccaagcagggccctctgcccgagggagactctcacctcaaataaacgggcgctgccgcctccagggggaggacagcgggcggagaatactcacgctgggcccagccgcgcggggacttcgctgggaaccacgcgcgggctcccgccggggagcggagccccagcctgcagtcctgcgcccgccccagcaccgcctcctcggaagggaggcctctaccgtccggcggcggacctgcagccgccgcgggagacgctgccccgccccccggccccgcccttcggcccatccccgccccgctggcctccttttcccctgccccctccctccgctcctcaacgcccgccgggtgcaatctgctctctccgggagacgaacgcgaagcgacgtggaaacccttcc

SEQ ID NO: 103822 - DNA, 115 bp, Homo sapiens
  chr1:91486936-91487051
  hyper
aatgccagagccagcgtttctggccacaaccgagcagcctcaacgagaggggttggtgactgctctcggcccgccccgttactcagtgcattgcaatggcgaccgccaggctccc

SEQ ID NO: 103823 - DNA, 30 bp, Homo sapiens
  chr1:91487501-91487531
  hyper
cactcgggtcccagcgaatctgaccaaata

SEQ ID NO: 103824 - DNA, 135 bp, Homo sapiens
  chr1:91487791-91487926
  hyper
acaaacgagggcagcggaaacagtgcaccactgttctcgggtgccagaaaccaaacaaggtcacctcccccagcgctgacctaatcactcccaaggaggttcccgccccaaagtaggcacgctccaaatatggtg

SEQ ID NO: 103825 - DNA, 699 bp, Homo sapiens
  chr1:91869766-91870465
  hyper
ctggctggaagggtccggctggggaccgaatcagcacctaaagcaaaataacagctctgtggatttcctaaggagaatatcctaaatccaaggcagaggccttagggccccgagagtggcacaagaacggggcgctggggcgcgtcactccaccccccgggtcccgtttcctcccaccgctgtgaaacccgcggctcagacagatgggtacgtcccccccagcgctcgctcagggggcgccacacaccggaacacaagacacaggaaccgaacaccaatcagccgactttaggggcgggccggacgcccagccggtcccacctcgcggggagctgggcccgccctgcgcccgagcgcgccgcaggcctcaccgctttctgactggaaatgcggctgaggcgctggcgcgggccggcggcctggagacgcctggtgaccaacaactcgccgcgcccgtccgctgcctgcccggcagacggctctagagatcgaccgctgcccggacggctcggctgggtccccacttccccgcgggcgtcgggcccccgtccccaccttccccgcgggcgtccgggcccctctcctcacctccctgcggacagctcctaggccagtcgagcgccgatttatcagcccctctgaggaccgccaagcctggctaagccgagctccaagcaatggatcgcccaagcccccaac

SEQ ID NO: 103826 - DNA, 30 bp, Homo sapiens; identical to SEQ ID NO: 633
  chr1:91904864-91904894
  hyper

SEQ ID NO: 103827 - DNA, 30 bp, Homo sapiens
  chr1:91966059-91966089
  hyper
agtagggcactcaacgaaaaggaaataaaa

SEQ ID NO: 103828 - DNA, 141 bp, Homo sapiens; identical to SEQ ID NO: 35978
  chr1:91966292-91966433
  hyper

SEQ ID NO: 103829 - DNA, 106 bp, Homo sapiens
  chr1:91966640-91966746
  hyper
aagtcgcgcgcctgcgcactaagcatctggttcggtctctggcccgagggaagccggtccttcccggctgagctcgcggccagcgctggccggcggattcccattc

SEQ ID NO: 103830 - DNA, 30 bp, Homo sapiens
  chr1:92213427-92213457
  hyper
ctgaaggcctccctgcggactttgattgcc

SEQ ID NO: 103831 - DNA, 171 bp, Homo sapiens
  chr1:92350553-92350724
  hyper
cgctaacctccgtgcggtgcttactcggtgccaagcactgttgtagcacctcacacacattaaatcattagatgctcacagcaactttacggggcaagtactactatcctcacttcacagctagggaaatggaacggttttcttcttccagcttttcgtgaggacaccaaa

SEQ ID NO: 103832 - DNA, 31 bp, Homo sapiens; identical to SEQ ID NO: 35981
  chr1:92351055-92351086
  hyper

SEQ ID NO: 103833 - DNA, 332 bp, Homo sapiens
  chr1:92351378-92351710
  hyper
tgcagagcccacagcccgggcgggctgcagcgccgcggggctgggccggcacgtacctcggaggcggtgtgtccagcggagatccacccgcagcaagttggaggaaagcggcggcaagtttccccgcccagcgctcggcggcggcgagctccggcagctgctgcgccgcggcaaaactacgccatccggacccgctggggactctcacctcctgcagggagctccgggaatcgcgcagggaaagtggccggggcgcgagagccgccgactgccctccttcactcgctgggaagaggaaagtgccgctcggcgtccccgaaaccctcgattac

SEQ ID NO: 103834 - DNA, 30 bp, Homo sapiens
  chr1:92351941-92351971
  hyper
gcttcccttcgggacgaggaggccgagaga

SEQ ID NO: 103835 - DNA, 503 bp, Homo sapiens; identical to SEQ ID NO: 637
  chr1:92495399-92495902
  hyper

SEQ ID NO: 103836 - DNA, 617 bp, Homo sapiens
  chr1:92545647-92546264
  hyper
ctcgcccagtctttcgttggaaaaaagtgtagacctgtcaggaagacacagcatagaaaggctgcatgtgctgatttgaactcgagcctcagtaaaacattgaaatgaatgaacaccaaccggaagggaaagaagaggggaggggataaggagcctgaggattggtttgccccgcgggatggtccgcgcctgagccatgggaggcggggtgcccgccggcagaagtaaacagagcgagtacgcctgcgcacgctcttcctgggtcaagagccggctcggttctgggattctgaggctccccaccgcggtccggcttctctgggagactgtctacaaaccgacgagaggcgtcaaccttttaccctagggggcggatttgggtaggagccgagcgttcggtcggaaacgcccccttcttcctcctgggcggggcaagtgaggccaagtactgggcctccagggcgtcgtacctctgtgagacatggctcgctgtggggaaggcagtgcggcccccatggtacttctggggtccgctggagtttgcagtaaggggttgcaaaggaaggggccgtgtgagcggcgccggctgaaggcgacggtgtcggagcagctcagcc

SEQ ID NO: 103837 - DNA, 30 bp, Homo sapiens
  chr1:92764159-92764189
  hyper
atcactgtatcacacggagacaagacaacg

SEQ ID NO: 103838 - DNA, 185 bp, Homo sapiens
  chr1:92764404-92764589
  hyper
cgcagcaccaagtccgccgcggctcacggccaaccgcgagccctggccaccctgaacctctccacaactccacttaccggccagaaccctcgcctctcccagccgccgccacctcctccggcgtcttagcccgctcttctggccccgccccgcgctacgcgtagggaggcggggcctcggggcga

SEQ ID NO: 103839 - DNA, 30 bp, Homo sapiens; identical to SEQ ID NO: 35987
  chr1:92764818-92764848
  hyper

SEQ ID NO: 103840 - DNA, 36 bp, Homo sapiens; identical to SEQ ID NO: 35988
  chr1:92946277-92946313
  hyper

SEQ ID NO: 103841 - DNA, 60 bp, Homo sapiens; identical to SEQ ID NO: 35989
  chr1:92946604-92946664
  hyper

SEQ ID NO: 103842 - DNA, 924 bp, Homo sapiens; identical to SEQ ID NO: 35990
  chr1:92946768-92947692
  hyper

SEQ ID NO: 103843 - DNA, 4459 bp, Homo sapiens
  chr1:92948157-92952616
  hyper
cactggccagctccgcgcaaacgaatctaagcgacaagcagctagggtcctgccgcctgggatggaggcagcagccccagcgggcaagctgtccaagtcccagagaagccggatgcctccttcccctacgaatcagctcccttctcccggaaagactctccaactccccgttagcatttctacgcccaaggtcgcgccaattcccccccagcactgccgggtccctgcagctcccgcccaagaggttcccagtgggttcctacctggagacgcggagggtgacgggggcctccagaagtcctcaaactccgagctccgttcgcagacgctgccttcgcagctgtctggggatgcggaggctctgtctggggcttcggtcagctgcgattcgggggacaaacggtcccggggctccgccttcgccccgcctgcatttgaagtgctgtctgcaaagaggaggcaggtgaggggctcaggctgggaccggttgagtctgagggtgctgaaggctcccccaatcccccgaccagggcagccgagcgtcttcccctctccacccagaccccggccgggaaccctctcggatccgagggcaggcgcagagaggccatggcacctaggagacaaacccggaggaaccaggacagtaggaaacaaaaacagcagcaaaagggacgttggggcagcccctcccagctccggactaatggtgtgccgaggtgcagtaggcatccgggggagcagccccgcctggcccgcgcgcgcctcgcacctgctcggctaggcgccggtacattctctaaacggagggaatagtctggtcctggggagcgcggctggtggtagctgtgagccttcttgcttttgacgagaaatgagcgcggcatggtggtccggcactttccccactgcgccccaagagtccctggagccgctgtcacccacggtcactccgagggcttgctcagccccagcccggaggagacctgagagggaaagaaaaccaggtggagacgtgggtcagtactctccggtgcggcggactgggcacccaggcggagggagagcgcgggccagggaggcgcgcagagggcccacgggaggaggggcttgaccctgctgcgccgcgcttaccaggtggcacttggacaggtggcgcgaacccgccgtcgttgccgccgccgccactgacacagctcagcggtaaaacctgtcccggggccctgtctcaggcccctttcctcctccctgcccacgccccccagctcctcccctttcctagcgaagctcgctccggcaatcaaactccctggagagctgtagttcccatcgggtgggttaccccaactcagctactcatcgcctgcctggctgtgctttacggctggcgagggagggcggggacacgcggatcggtttaggggccggggatgcccagtggtcgaggacccggaaggggcaaggagccaagacctccaagagccagctaccaactggagtgaaaggaccggggggaggggggaacagaacacaagataaaactgtggggcggcgggaggacagcagcagagggattggggacagcagaggccagagaaaggaggtgggagagcaaagggacaggaaagtgaggggaacaacagacgaccaacccccgccccaggagaaactcgcatctgggtgatcccactcgcccctcactagtgccccacgtaggagaaactttgcccttggactcccggctgcggcgggcaccggtcgaggctgcggcgagccatcccagaccatggagacctaacctcgggaatcaggtcccgggaaaaaagcactttccgttctgctcaccaaaaaatcttgtcctagggaggtggagcccgatccacgaacgttgactgggaaatgctaggtgtcccgagtcggtagtgcaccgacaatttagcagacaaaaaagacaggacgccagagcgcgcaggctgcattagcagagagcgggggtcgggcccgggcccgggagggaactagctgcccggggcgtcgctctcattaacccccaatcagttcacctaataccaggtcgaaatctgagcgcagcgggagggcgtggctgcgcctgccgctaggctccagccggctccgggggcggtaccccacagtcgaggtggtctggagtaaacgaatctgccttcctcccggggtgaaggcgatggtgaccgggttcacacgtgagctgcagtacagcagttctccgtggcctcggctggttcagaaacgagggtgctgggaactctgggccggggcaggacctgcagtcctccggcttcgcgctgtttccactgccggactaggagcccctcggcttcctaggcaagatgcaggccacacagtctacgtctgtccgttggcgctctcagctcaaacgagtcctacaggccttggtccctgtagggtgcaggccccctgctccagatccccagccccattgtgtccccttctccggaggaatgggaatagacctgggagaaaagacgcctgggacgtgtcgcggggctcccgcgaagtttcccgctacccaagcgccagaatgcccctaggggtgagagtgccatccgcctccctccggggtggctcctagggctagagctttgtcgcttcctgcacttctcgtccgtacaattagacgccacaaaccccaaacccaattctttaaacagccacgaaactcggaagaaaagaaaaacggagtggcgttgtcccgagggtcccgctgcagcttggacccacgttggctgggagcgggacagatgggggcggggtaactgtcagcgccggagctgggtctgggctggcgccaccagagaccaggcggacgcggaggccgcctccccacccgggctgtaagcccacgcctctctcgcaccccggcccgctttgctggttcctgtggggagcgacagagtttggaggagataggggccccggggcctgggccgagcgcgtgggaaggcaaccccgcgctgcagctggcgcgggaggtggggcggcccctccgcgcgctcaggcctctcctcaccgtccgggcccaggaaggagggagccgagggcgctaagggggcgtcctcccgagcgcagctgccgccgcctccccaccagatgtttccttccctggtggatttggctcccctgccgaaccaccagaccgcctgctgcgcgcccccagctccagatttccagtcacactgcgcgggtcgcgccctaacccagctgccggagctctctgggctcccgcacggcggtccgcagcaggtgggaaaccgcccgcgccctctgatcgcccccgcagtgccagtgctctgcgagtccccgcggccgcccccaccagggcaggaggcgcagaacaggctcggcggacctacctgcggagtcacggcgcgggcaccgcgctaggagagttttcaaacggaatcttgctttcgggagagaccgctctatctctctgacttaaaaaaaaaaaaaattctccttccgagctcagcccccaaaaccacaagcttcacttcctgagcgttactgagtcgctcgcatagccctcccagacctgctcccaacccccgtcgggcggccgggcgcgctcctttgcgcaagtggccaggcggtggggggcctggcctttccagcccgtcccgcgcgccccttagtagtcctcccagttctctccctgtgggtcggcaggggatgggggaaattggaggtccggacacttaggcactagaaatgacttgaaagaaaatgaactattcttggctccagggagacttccgcagcgagagaagccacagattgaggacacagattgactggcgagagaggggtggggggcgccccgctccgaggaccctccccgcccctcaggcctcggtcacccgccccccccacccccgaccccgccgcctcctagggctgcaccacccccgggtcgggaccgtgaatcaccggcccgcggtgccgccggcctggagcccggcgagtggccacggcgtccgcagagcgaaacctgccccgcaggccccgaaatagcttgttgtggaaacacttggggataaatacgcccaacgaggctgaaaataccttgacacccaatccgagaggtttgctcatttcccttcggatttaggtaatggttaaatttggaagaggtgggcgagcgccgagcccccggcggagagggccctggcggcgcgtcccgcgggcgcccggcgggaccggtgggcgcaccctccctgcgcggagctcgccggctctcgaccgggtccgctcagccttcgactaatttccggtggtcggagctgcaaaattaaaggccgcgcgggggcagcgccggcggctgctaggctgactccgccctgccggggcaagccagggagagcgggacctcgcacgcgggctctgccaccgcctgagg

SEQ ID NO: 103844 - DNA, 30 bp, Homo sapiens
  chr1:93249982-93250012
  hyper
gcaagtcaggggggcgagtgctctcgcccc

SEQ ID NO: 103845 - DNA, 619 bp, Homo sapiens
  chr1:93250439-93251058
  hyper
agccggcagccgcgccgccgcgtctcagcgcctcggccccgctcctggctccacgggtcgcccgtcccgagttcccaaaagcaccacgctcactcagaagctcagggccgcctcgcgaccctcacctacccctcccggcaccgccgctgtcggaactgcagccagccccttgccagctggccagctggttcctccggggtccggcccggccgcgtcaggagagcccaaggcgcaggcgcgggagggccttaaagagacccggcagcctctaccgcagaatgggttggagcaggttaggggccgggcgggccggccgagaaaaggagaaggcgaagggattggacggagtgcagaggaggcggggaaatcgctctcgccctccgcctctctttcaaagcaccagccttcagtcctgcaagtcgccgacttccccggccactggaaccgccccttccatgttaaaacggtagaagacacaccccctcgggggcccgaagcgaccccgagcttaggactgcaggcctcgcgctgccgcaccgacgcggagcctgactttcagggccctggcacgcggtgctgacgcgcatgcttcggaaggcagccccgagctcccccagag

SEQ ID NO: 103846 - DNA, 30 bp, Homo sapiens
  chr1:93297807-93297837
  hyper
ggtgcagttcccagcgtggccttaaatggc

SEQ ID NO: 103847 - DNA, 30 bp, Homo sapiens
  chr1:93298078-93298108
  hyper
agtaccgagtacttcgtgggttttccagga

SEQ ID NO: 103848 - DNA, 89 bp, Homo sapiens
  chr1:93426907-93426996
  hyper
ggtggctgggcggccgccggcctacctggaggtaatagggtttccttagccaggcccccggacagagactcctcgccatggtaatcaca

SEQ ID NO: 103849 - DNA, 168 bp, Homo sapiens
  chr1:93427436-93427604
  hyper
ggctccccgcgctgcgcccagctgcgcgtcccgccacccgccccggcagcaccgacgctccccatggactcttctcctggagtcaggacgtgtctggacgggttgtttggaaattcaagggaagcttggggctccttccctggggactggctcgtcctccctcgccct

SEQ ID NO: 103850 - DNA, 226 bp, Homo sapiens
  chr1:93544519-93544745
  hyper
cagggaaaagaaatcggcccagcaagatgcacagagcaccgttacgaccacgcacaccgaaggtcgcacacgacccttttcctgtataacagtgccagcctgccgacgatcaggagcgcagctttcactattgtgttagccccggcggcggaaggactgagcctcactgcaacgttaaagagtccttctttgttcagccccagtcggggacgcagggcgcggtgtt

SEQ ID NO: 103851 - DNA, 762 bp, Homo sapiens
  chr1:93645816-93646578
  hyper
cgggctgaaagaggcgtcaggtactgttgtctccgctccgcgtttcctctctggactcctcgtggttgacagggaaatctggagtctgaagaaactccaggtggcggccgcggcggcggcgaacactccctccgaaagagaagcgcagttctccaaagggtagggactctgggcggggctagcagtcctattccgcaaccgcctcagtctcggccccctcaggccaggcgtgagcgccgcccgcctctccccctgacggcctccggttcccatggcttcccccaccaatgggcatcatggcggtaattgtgggaaatgtagtcccgggcgggctccgctagtgggctcgggcgcgctcgccgaccacgatccccggcaagccccgcgccttcggcggcgcctcacgcagtctgcgccggggcggggcagtgaccgggtaggcgcgtcccaacggctcccgcggcggttcgaattctgtgctgccggggttcgctggttctccgagttgtgtccgaggcttccacgcgcaggggcccgggaaagggtcagaggcttcctaacgcagactcgagtgcgaagcgcgcagtcgccgggtgggtctctccccagcgacgatttgggtggtgagcgactgcgccttggcgtggggaaaccggcttacctgggggagttctgttcctttccctcccggcaccttggatgcgctgggactggtcctcgtggttgctgagcatgctgctctgaacggttgtattttatttg

SEQ ID NO: 103852 - DNA, 101 bp, Homo sapiens
  chr1:93646697-93646798
  hyper
ccactgtctctataaaattaaaaaaaaaaaaaaaaagaggaaactgtcacttccgtcccccacccccgcccccgcttctttcagacggatgtaagattagc

SEQ ID NO: 103853 - DNA, 535 bp, Homo sapiens
  chr1:93810811-93811346
  hyper
acttagccattaggcgacttagttgcctctaggcaagtaacttctctgaaatgtttcatttttcatgaagtttaaaaaaaaaaaggtgaaggactttagagagctttgaaccgaataaggtctatcagacatcttgaaaagctttttctccagacgacgcagaaacaggcacacggggttctgctttccccacctcccacccccaagcccaggtcccattcttctcactttcaatcctcatttgggctcctaaaggaatagcaaagagagttattttatcaataccagcgctcctctgtccccaaatccagctagggaaggtttcggaggcctcagctacttgagagagggtagagacgatccttcctcgcctatctacccagccacccaccccttcccagatgtagcgtccgggccccagaccaagcgcgtgcttggagctctccggtacagtgaggcgcgcgcttgcctggctagggtccctgtgaaggaatgggatcccgaggtgcttgccaggaccgtagcaggcggaagc

SEQ ID NO: 103854 - DNA, 30 bp, Homo sapiens; identical to SEQ ID NO: 35998
  chr1:93811862-93811892
  hyper

SEQ ID NO: 103855 - DNA, 30 bp, Homo sapiens
  chr1:93812104-93812134
  hyper
tcactctccgagggcgactttttgagaaat

SEQ ID NO: 103856 - DNA, 1056 bp, Homo sapiens
  chr1:93913409-93914465
  hyper
ggtccgactggcagcggagtgggggcagtccaagctccggggtacctgcaggaggagactcgaccagcgagaggggccagcgagggtgaccaggtgcccgcttggggaccccgccggcggtggccaggctagcccaggtcctccccgatcccaggatgcactgcgccccgccccctccccgcgccgcgttccgcctcccctcggccccggccccctcccgcccagcgcggggaggcggggacgcgtcggcggcggaggcttctccagtcgcgtctttctcactcactggggagcccggcggtggcggcacctttcgaggtagacccgctgagctgctagcccgccggccagcgagtgagaggtcggacagactgtggagccgacagactgaaggacagcggcaccgccagacggccagaaagttccgccatgagctggggcacggagctgtgggtgagtcggggagaggggcgccccgcacggaccccggcccctgagaagcgcgggttgggcgggcgccgcggaccctcggcggtgaaagcgcgctccgccgtcctcggtccggcgctggcggagggtgagggtcccgctcgtctttgtgtgcagactcctcttcccttctcggccgggggtctagggggccgctagtccgtgctcccgcctttgccgccgtggtgcagctcgggcggcgcccgggacggccgggggagcagcccgcgggctcctgcgtgcgccgtgatcccctcttgttccttctccctcctccaccttcacttttcccgacgcctggcttcgcgcccggcggctcctctcttcctttgtatctctcctcccggaggcgggggagggggcccattgtccccaaggggcgctgttcgagggcggggaggggaccggccgcgattcctcgcccgggccaggtccgcggggctagggcgtcgcccgtctggggcggcgccgcccagagccctcgccccaggtatggggacccaggcggctttgttcggagcccggcctcgggccagccaggcccagcccacacgcacatttctctct

SEQ ID NO: 103857 - DNA, 144 bp, Homo sapiens; identical to SEQ ID NO: 36000
  chr1:93914735-93914879
  hyper

SEQ ID NO: 103858 - DNA, 459 bp, Homo sapiens
  chr1:94146397-94146856
  hyper
tacacctgattacaccgttttaaagcggcggcgccctcagcggcctaagtgggtaaggacagttgggctgtacgatctatcggaacctccttcccaccgtccctcccttcctttgccttccctcgcctctccccaccgcgacgcagagggagcaacacaaccaactattcattctttctcaacaaagggagagagggagggagatgttgtcaacagttacagggcaggctccttcgctttctttgcaaacttcccaagagattaccggagaaactcgcctcctcggagccttgggcttccaccagagcgctctgggccctcgcatctgcccgaccccggccggcttctgcgaagaggggacgggcgggacagggcggggtggccggcagagcagctccgacgggcagggggtcgggcgaggccagcgcccgggaagatgccgctcgagtgccaccgagc

SEQ ID NO: 103859 - DNA, 30 bp, Homo sapiens
  chr1:94311787-94311817
  hyper
catttgaggcctggcgatgctgggcagggg

SEQ ID NO: 103860 - DNA, 202 bp, Homo sapiens; identical to SEQ ID NO: 648
  chr1:94312191-94312393
  hyper

SEQ ID NO: 103861 - DNA, 30 bp, Homo sapiens
  chr1:94313612-94313642
  hyper
ctacgccctgcgtgcgctgtgctgactacc

SEQ ID NO: 103862 - DNA, 664 bp, Homo sapiens
  chr1:94344322-94344986
  hyper
accctccttggtaccgtgttaacagtaaggtttaaaagttcgaactgtgcttctgcattaaggagttgaacgacccaaataaagttatctaacctctcttccatactaaaaattgccttaagagacagtggtgaaggctaaacagtttccgtgacaggcttagcacggggcctgggagacccaagcgcgcggcaagctcgggtcctctctgtcggcaggtcctcacccttaaccggacccttgcgccgccccgcctgcctgagcgcggctctgcgaagcggcgagaagtagggaagactggatttcctaccttttgcccggaactttcagccgacgcggcttggatgctggccttagcccgtgcagatctggtaaccaccatctttccggctccctcgcgaccaccacgacttccctcttccctggcgctccggaaatgcgtcagagaactgcctcgagcgcgttttccgcgcagatccgagaattcgcgagaatctccgcccagccagttcaggccagggcggtcagagacaaagggcctgggtttaagtgtgcatttcagagctgtagaaggcaagccagatttttgctgggaaagaccttcatcggggcggcgaagcccgcagtgacagagggtcttagcgtacccgttcacatgaattgt

SEQ ID NO: 103863 - DNA, 132 bp, Homo sapiens
  chr1:94374253-94374385
  hyper
ggagagagacggagcgacgtcctggccctctgtgacctccgtgccaggaagagggacccaggatgtttgagagttttgctaccagccttaagcaccgagagaggtgtcactcagtgcgcagctgcaccggct

SEQ ID NO: 103864 - DNA, 30 bp, Homo sapiens
  chr1:94375144-94375174
  hyper
ggcgacgggtggtgcgcggcgggcgcgcgg

SEQ ID NO: 103865 - DNA, 657 bp, Homo sapiens; identical to SEQ ID NO: 36005
  chr1:94702420-94703077
  hyper

SEQ ID NO: 103866 - DNA, 425 bp, Homo sapiens; identical to SEQ ID NO: 651
  chr1:94703103-94703528
  hyper

SEQ ID NO: 103867 - DNA, 287 bp, Homo sapiens; identical to SEQ ID NO: 652
  chr1:94713017-94713304
  hyper

SEQ ID NO: 103868 - DNA, 121 bp, Homo sapiens; identical to SEQ ID NO: 36008
  chr1:94884614-94884735
  hyper

SEQ ID NO: 103869 - DNA, 1310 bp, Homo sapiens
  chr1:95006822-95008132
  hyper
aacagtccaattactcggacaccccgagcaaaactctccagcggaaggggcagcggggtctggggcgccaactccctccctgcaactcccgccggcgcccgacggactcggttcattcaagccgggctgggtgagcgcagccgagtcccgtaggcgcgggggacaacatgggcgccccggggaaccagggcgagcccgctgccagccaggactgtcgcctccctcctgcgtgtggcgcgccccgggcttccaggggctggtgccactcacctgaagcgccggccacctgggcgaagacccagccgagcaggagcgtccgagcgacggcggtctcggggcgcgggacccggggccaggcaggggtctccatgtctaccagttggcggcgagatcgagcgggttccgtggcgcccgtggggctggggaggttgggctgaaggcgccctgggccggccagagggagtgcgagggggtgcggggagctcgcagtcttggggagccggtgccccgcgcgctataaagggccggcggcgcgctctcccgcgcctctgcccgcccccggcgcccgcccccgccgctcctcccgactccccgcccccggcccgggtcacttgccgtcgcggtgggcggcccccggcgagtccacacccctgccccgcctcctcccggtaggaaactccgggaccctgcaagggatgactcaccccagtgattcaaccgcgccaccgagcgcggagctgccctggaggacgcaggcgggtctagttgcccgggtcccccaaggcccccggattcacccaggcccgcgactccgacgtgcagcttaggtgggttgcaggtctatggcaggaaagggagggcgccttggaagaattcttcccttccatttggtgataaagtgggagaggcggcatttacaacatttaatagaaagcacgggctctgggctcccctcgggcagcggagggcatttcccggatgctttgcccacctggggcagaagctcgggacctgcagcgaagtaaacgtgtggctgtgagcagggccctctcccagccacggtggcttcttctaccccacgaaggtcaagaatacctggcctgcccacctcgcggggcccttagcgggtcgcacaggagaaaggcggtgggaatgccggtgtcagccacggtgtgaccggctcggctcacaggtctgagggtcagttggctcaggcatcgcccggtacgaccagagatagtgactgaggaagagcagcctcacatctggcagtttgcctctgggagaattccagcgtgacatctgcagct

SEQ ID NO: 103870 - DNA, 673 bp, Homo sapiens
  chr1:95285586-95286259
  hyper
tgctcagggcagaggccgaccacccgcccaaggtcgtggcggcgccggctcagctttagtcgtcaaagtgcacatcctgggagccgctgcctcgaggtggttgaggcgagagggcagggaagcgtctgagcctcttcctcccaccagagcaggaccccagctgacagcgggtgagctgggcagaaacccatgccgggaagaggcggacccagtggaccgcagcgcccgcagtcgccgggccaggcgcagaggcgaacgggaggcggcgctgcaccgtgcccgcccctccccggcccggccccggctccagccccagccccagccccagccccggccccggccccggctcgcgggcgctgcgtctccgcgtacaggaggcggcggcggctcccagtcaccggcccccgccggcgagcgcacgatgcactgcctgggcgccgagtacctggtaagcgctcgcagcctcggccctcgggggaggagccccggggaagggtcgagtcccccgccttcacgcaccttccctgccggacgcttccgcctttcccgcgcctcggggatcccgcccccgcttagtaccttggggccacctggcggggaggaacctggaccctgctccagtgctggggcggaggcgggggagacgcgggccgcggggcgcaaacttggggtc

SEQ ID NO: 103871 - DNA, 1448 bp, Homo sapiens
  chr1:95391394-95392842
  hyper
gttctgtgcacagttccgcgccgattggctggtctctccccccagaaacccctgatgtcatgggcttggaatgcagggagggaggaaggaaggagaggatttggggagggggacgcctctcatctctttcccaggccaaaagtcctaaagataaacctaacgcattcttgggctcagtggcaaagctgagcgtcaccaaatcccaatcgctccaaactataagccgcctcagcaaacaagccccaaacaaaagcaacccacaaaaataatcctttatgtcgtgaaagtctaatgtacttcaaacttctcagtgtttcataaaaagtctcaagcctaagcagatatcactcgcacagtggcgcgctcaggctttgtctccatttcccgcaaaagcaacagcagaagcagcagcagcaatctgcctccaaatgcctcccaggcaccgagatcggagactgtgatgggtcccggaccggcttccgttcctcggggcccctggggtcggcgggacattaggcggtctctctccccgtggggaggcgcggagtccgccagcacccggggcccgggcagatggcgggggctgcggcagcggctcgccgggtccctggccgcgcagacgggctccgcctaagggcgagtggccacgcaggagcgcccccttcccggagggcgcgttctgcagtcaccaaacggcccccgagacccccgcagccggaaaggctggcgccgcgggactccaggcgcccgggaacccaccgccagccactagtcctgtcccacggcgcgggaacaaagccaggcgggtgcccgggagccggccccgcaagcccggggactggacgcgaccgggacaggcagagacgctcgcgccgcctcgacggcccctctccaggaaaacggtgagccacagcgcgaagagcaaacgaagcacggcccagcgccaggccagcccaagggtgccccgggggcccccgcgcccgcccgagccaggcgtaccttgttcttgacttcggccgagagcccataggaagggcccttgttgaagtgggtcatggtggttcgggcggcgggaagagacagcgctggggtccggggtctctcgcacttcgcttccccgctcctggccccgaggagtggccgccgcgggggatgctcgaactccctcctctgggaggcgcaggagacggccgcggggcgcgggcggtgcctgggcgactgggtccaactgggtgctacagagcctcgagctccgctgcgaagcacccggctgcctcgctcgccgcccgcacctcggttccccacaggccgcccccgcctccgcctgggccttcgaggattggccgccgggcccgaccaatggagggccgcctcctcccgcctctgcgccgaggggcggtgcggccaattgaagggccgcgggggccgctttccctcccgctccctcc

SEQ ID NO: 103872 - DNA, 212 bp, Homo sapiens
  chr1:95392887-95393099
  hyper
cggcggctaggcggccccgcccccgggctaggcagggcgcctgggggcttcccagccacaggccattcacgtcaacctccaggcatcctccgcggcgggccggaccgggccggcggaggggagcggaagcccaccggggctggcccgccgctgacccgccgcctccgtctgcctcctcccgggctctgggcccagcgcgcccagatgccggg

SEQ ID NO: 103873 - DNA, 205 bp, Homo sapiens; identical to SEQ ID NO: 661
  chr1:95428538-95428743
  hyper

SEQ ID NO: 103874 - DNA, 492 bp, Homo sapiens
  chr1:95538360-95538852
  hyper
taacgtccatggaacgaagcactacccatattcgcaggattaggaaaaccgccacagctcctgcggccgcagctagaacgagaacgcacaccatgcagagaaacggcgcatgcgtccaacttccggggaccagccgctgtcaaagttcacaactacgggtgccgaagcgactcaaacgcggaggacgcacgtcttggtgggctggtctttcctgagctgggaggagtggaggcgacggagaagctgaggtcccagtcacaatccattttacctcatttatcatgtagtattcgtgtttcctaaactaaatacgcaatacctagattaataatgcacaacagccatacagggaaactgcatattagcgttaaaaggtttctacgttctgtacgttcacgtttgtcagcggaacccctgcttctgcgcggattgtgcgcagctgcagccaagcgtaagctgaaaattgtaaagttaagcgctggggaagcttga

SEQ ID NO: 103875 - DNA, 30 bp, Homo sapiens; identical to SEQ ID NO: 36017
  chr1:95582314-95582344
  hyper

SEQ ID NO: 103876 - DNA, 936 bp, Homo sapiens
  chr1:95582632-95583568
  hyper
gaccgctgcgggggcgggctcacacagttcccccgctggcaagttttgtgacttgctttggaaaacccgggaattgcaccctctgcccttggcaaggtgtgagcttccaggatctctccgctgcgacttcgggtgttagggtttttgggctctttccgggacccaagttccagggcaagaaggtctgctcggcggcccgcctcggggccccgcccactttggccagggtcggagccgcccggagcgggagccggagcccgagcggccgcggcccctttaaggagcagctctgcggtaacccgagcccgcagtccgggcgggcgcgacggccgccgcggtagctggagcctccgcgactgcacctccaagcggcccggaacccgcggcttccctggctcccgtgagcatctcaccgggcggcactggccagcgccagccctcgggccggcccggatgagcagactcctgtagacacccgccgccctctcccggctcggcgcagccgccgcccgcgcgcgactcgccccgggacccggcacaggtgacgccgtttggagggggggttggggaggaaggcgggcttgcctcgccccgcggctcccccgcgccagccgccaagcgcagcccgcggagaggggtgccgcggcttcccgcccctggcctagcgcggccgagagctcctgcgcctggaggctgggtgggcgtccggcgcgcgggaggcggcccggggctcccgggcgggctccggcaggtgtgtgcggaaggctcagcatcgtccccgcccggcgggccacggcgtcgctccgggagcaaatggtgtcccggggcccgcggcccccgcgccgcccgggcgccccgcattcctctcgcgtttctcgggctgcacgattccggctgccctgtctgcctggcggtgcctctcgggtctgagcttaa

SEQ ID NO: 103877 - DNA, 30 bp, Homo sapiens; identical to SEQ ID NO: 663
  chr1:95699559-95699589
  hyper

SEQ ID NO: 103878 - DNA, 247 bp, Homo sapiens; identical to SEQ ID NO: 36020
  chr1:95699850-95700097
  hyper

SEQ ID NO: 103879 - DNA, 30 bp, Homo sapiens
  chr1:97186882-97186912
  hyper
ttagaggctggagccggtctgcaaataaaa

SEQ ID NO: 103880 - DNA, 44 bp, Homo sapiens
  chr1:97187290-97187334
  hyper
cgcggtggcccgtgcgcctcggcaccttcggcaatttccgtcgg

SEQ ID NO: 103881 - DNA, 372 bp, Homo sapiens
  chr1:98386194-98386566
  hyper
taaacaggtcccgacgcaaagggcaacccctccagtagcggaaagtcctcccctgagctccccgcctgcccacgcgggcctgtggctccgcgctcctccgctcccccgcagagctcccacgggggaaactttcccgcgtctctcactctccggggtgcgggggccgcgggggcctccccggcacctacccgcagagcactccccaccaccccgccaccaccgacgagccggcgcgaagtccgtacctcgatgtccgccgagtccttactgagcacaggggccatggcagtgcctacagtctcgagtctgccagtgacaaaccctccttgcgtcctcaagctccagccagagagccaagtgacagcagccgga

SEQ ID NO: 103882 - DNA, 310 bp, Homo sapiens; identical to SEQ ID NO: 36023
  chr1:98386618-98386928
  hyper

SEQ ID NO: 103883 - DNA, 1074 bp, Homo sapiens
  chr1:98510849-98511923
  hyper
cccaaagagattggacgtctgaacagtcactgcctgccccaacctctttcaggaaggttccaggtctgtgccacactgcaaccaatccggttcccatcctgtttctccaccccttctcggagaatccgaaaagaaaatatgcgttcctgagagacccgccacacttccgatctggaagttccgcggggacccagcccccgggcccccgccccctccccatctcggccgccaagtctggttgcggagcagcgcggccggccgggggtggggctccggcaccgccccgggctcgggattcgcgaagtcacgcgcttccgcaggcttgcgggggcaccttcgcccacggacacgccctttctgcggaggcagcccccagcgaccctctgcccagcttcggcgcctcactcgcgacgctcccaaactgctcaaggcctttcagtcgttcccaactttagaaaatcgccccgtccgcgtctctccctccagccgcaccccaccgtggagaggagaggagcggactgggaacgccgaaccgccccgcaggctcggggaaacggacccccttccgctccccgcccatccccttcacctcgccccccgccccctgcgcgaacccattttccagtcctggtcaccagaggcgcagcgcacagcctttccggtggaaccagtgcgaaaacacccgaggaaatgaaaagaacaagaaagtgctaccttggcaaccacgggcgtttagtggccagctggtgggctggggagggcggccgctgcccccctgccgctggtactctcctcgactacgcgtattcttaagcaataacaacgtaatccgtattatccacccaagaatacccgtcaccgaagagagtcagaggaccaagctgccgctgccgctgctaccgctgccgctgctaccgctgccgctgctactgccgccgccgccgccaccagaactcttgctgctcgctgagcccgcccctgcctggggatgggctgagcttgaccgggaccataaatccataactcgatttccctaaagaaggatccaaagctgtgctcggctgcttcctgccc

SEQ ID NO: 103884 - DNA, 505 bp, Homo sapiens
  chr1:98513940-98514445
  hyper
gcttcagcacctggacgaatggacagctcaacccgggccgactgccggcagcactcgcagcagaactgacgctctgagctctaaccaaagctctctcgtgcttgagcggggcagcctgacttacgagaacaccatttcctacgagaccactgccgctgggtgcatattcaattcaagcctccttaagctgtcggatttcccccacccatccaccctcccccccttctccaccctccacacaaaaacaaaaaagggaaaaagcccaataccatcagggcgtttgttgatcaacttacacttcgcttttgaatatttagatactgctagcggaacaatatcagcggaggcttaggtccgcattaagtacctttgttcatcgactcctgcaagccatgtttattagaatctacatttctctcgcgccccaataactagaggtgtgttttgcgggcagggggctttcagcaccttttgatctctcaaggccaccgcgactgattgacgg

SEQ ID NO: 103885 - DNA, 277 bp, Homo sapiens
  chr1:98515025-98515302
  hyper
gctgcttcttctctccgagtgccgggttacagtgttaacaagccttgggaagggacctcggcgcctcgcgctggctgtgccccagtgccttcgcgtggtggcggcttgctcatgcttccgaggagtcccaggcgatagccttcagctgatgcgagcttccagaaaggagtggggaagggaaaaaatcatctaatgcaatcaaatcgatctgatctacaccatctgtcgcctgccactatacacaaacgttaaaataggaaaacggaaaacactgaca

SEQ ID NO: 103886 - DNA, 961 bp, Homo sapiens
  chr1:98519026-98519987
  hyper
ggtcccgaaaaccgccggaggccaggtgtcgcggacgggccccgggctaaactctcgtctggcgaagtgaagagcgcaaagtctccaggcccagcgcgccttcgcggggcaggccggacaccctagccccgggccgggctcgctcttctctgaagccctggagcgggcaaggggcaccattctggccacaggaactctagtttcagcagccgcagcccgccagcgctggctcggaccggggcctcctctgggagagtaggagagcgaaaaaatcaaccaccaccttggatttcagatcgaggaaaggaagccaaagcaaaggtgtggttacacaggacatccatagacaaatcgttgcctctctaagtgggcctgagctttgcggctccagaagcgcgaggcgcggttggtgcggacgcgggggcgtgggagtcatcgctctccccgcagccctggccgagctctctgctgtcctcccgagtttgggccagagaccacggctcactccctaacgccctcgcaaggacggctgcccgtcgggccaagggcgccccgggctggaggccggagcaagacggccccgcgggactcgggagccttggtaaggcggaggctcagaccccgttcacgaaaacgcctggctcctccaggatttgtcaggtcttaagcagctccgagaaggctccgctggctcttggggaaccccgctgtgcggctcacccccgtttgtctctctcaagctctcgccctcctcccctggtcctcccttctccagatcccctgccctgcccgaggtccgggccgcgcgggctgagcccaatacgcccggagaagagcgccggagccccctgctggccggacgcggcaggcgcggcggcccgctcggtcccctccgccccgcgggctctgcccagcccggacccgcctccaccctccagtgccctggcgctgggggcgtgct

SEQ ID NO: 103887 - DNA, 1136 bp, Homo sapiens
  chr1:99126874-99128010
  hyper
ggtgccttccagcctcgctgtggatcccgcgaagtggacggttcgcttcgtggcttcttcccagaccccgccactgcggaaaccgtcactcggtggcccccgactgggtcaatgcgaggacgcccacctcctacctttgagtctctcctcttctccagggtacagccaaccctttctccaacgtagccggagtccgagagtcccagttccgcccctccagcccgccccaggccaggtggggatgcgcccggcccgggccagcgctggtcccggcagttccgcgtctgcgcagcgggcgaggggctggagcggggccggccggggaggtgcaggagacgtgggagccaatgggcacgctcgggggagccgggctggcggcggcggtggcggccggctgggcgcgcactctcgggatggagggcgagcgccgggcatcgcaggcgccctcctcgggcctcccggccgggggcgccaacggggagagcccggggggcggcgccccctttccgggcagcagtggctcttccgccctgctgcaggcggaggtgctggatctggacgaggacgaggacgacctggaggtgttcagcaaggtgagggcggcggcggcgagtcccgggaaacttccaaggcaactccgggcgttgccagcattgcgccgacggctgcctctggcgcgcttgccctcccggggcggtggctctgagctggggacgagtgaggtcccccgggctgctggaccccgcctgccagctctggccgcacccggggccgcgtcgcctcggggcctcaaaccgcagccgctccctcctccgcactttgaccttccgttcggcggggctgtggcttagtggagtctgcaaagttgtgatttgttttccctttctgcttctctgacacagacatcttcctcgcggcagctcccgaacctgggaggctggtggctcaaaaccgctcccgccagctgcttttcgggcgaggccagccctgaactctgggagagcagccaagtttagagaaattattcttaatttagtgttgttgcttgtggatttgagacttgggtgagtctcgggtcttgtgggaataggttctaggaaatctccctgaacaggagaaaacggttgtttctaaca

SEQ ID NO: 103888 - DNA, 302 bp, Homo sapiens
  chr1:99469759-99470061
  hyper
cgctgaagccaccgcggggtgtgggggggtgacgtgtgggaagagctgggggcttccttcgcacccaccctcacgcgccctagaatgtcctctggggaaggggctgcccataacttggaggaacttagaaggcaaaacctactgcgccccaacccttagaggggcctcaaccccgaaggcgaggggcgagatcagggactcggcgacgagggcgagcgcccccgggcttaccacgagcacggggaccccggcggccagcgagtagaggagcacggggggcacggcgctgctgtcctccgggc

SEQ ID NO: 103889 - DNA, 318 bp, Homo sapiens; identical to SEQ ID NO: 36030
  chr1:99470211-99470529
  hyper

SEQ ID NO: 103890 - DNA, 399 bp, Homo sapiens
  chr1:99470582-99470981
  hyper
cgctgggtcaatcccccaggctagcccggaggaggcgctgcgtgggcggacggggcggcagccggcgggacagcggcacctgtacccctcacagggcggacgctgtggggctggagaagctcctggcgggggtaaaatcaaaagggggggaggggaggcagtagagatggagcttccagaaactcttccgaggcaccagctgagaggtttaagaaacccgcacaacgcctgggaaaatggtgcgtggacgcgtcttccgagcgcaaagcccaccaaggcgcaaagtgccgatgcggcgcccagagtttcaaccggtgcgttcagcctgcatccctcgaattccttgacccagcccggggctggagcctggcggtggtttctaggcgctgttagaaaaat

SEQ ID NO: 103891 - DNA, 33 bp, Homo sapiens; identical to SEQ ID NO: 36032
  chr1:99730206-99730239
  hyper

SEQ ID NO: 103892 - DNA, 30 bp, Homo sapiens
  chr1:100315651-100315681
  hyper
ccagaggtacggtccgctcccacctggggc

SEQ ID NO: 103893 - DNA, 41 bp, Homo sapiens; identical to SEQ ID NO: 673
  chr1:100316317-100316358
  hyper

SEQ ID NO: 103894 - DNA, 329 bp, Homo sapiens
  chr1:100435243-100435572
  hyper
tttgcccttccttacgcagtggacaccttggcaccctctgcaaacagacagtcccgcagaggccctcgacgagtgtcactccatctgtttcgcgctcctaggagaggtgtagcagaaagcagtgccccaggcctccacgcgacggtgaagcaggaaccaggggctgccagcagagcagcccaggtgcgtcgccttagggacagagctgccaagtgccgagctggggctgccagagccgagccgggaacggcatttgccagagccgaggcggaagccggagcatttgggggacgggaccgcgggaacccggaaacgcctgggctgcaccg

SEQ ID NO: 103895 - DNA, 139 bp, Homo sapiens; identical to SEQ ID NO: 36036
  chr1:100437130-100437269
  hyper

SEQ ID NO: 103896 - DNA, 552 bp, Homo sapiens
  chr1:100503349-100503901
  hyper
ttaatagcttaggacgtctgtttccgtgagcaggtaacaactttttgaaacaaattccctcatctgctgaagaagggggacaaaaacggcccctatcgcccagaaccgttgcgaggatttagctagctggtgacgccggagcacgaagttgtacaggtagccagcagcacccacgcgagcccgcggttaccctggccgcgcggctactgtagagtgggctggcggcgagcgggcggggcggtatcacgcgggaggggcggggcccgctcgtcggctgatcgcacgattgtgacgcgccgccggaggcaggccgggccctcaagatggcggcgggcgcccagagcggctcggcccggcagtagtggtgggacggcactagctgctggggcctgccgccccgggagtggctgcagcagcgccaggaatcgaggatggtaaaatgacccaggggaagaagaagaaacgggccgcgaaccgcagtatcatgctggccaagaagatcatcattaaggacggaggcacggtgagctgagttccgcgccggcgagcgtc

SEQ ID NO: 103897 - DNA, 30 bp, Homo sapiens; identical to SEQ ID NO: 36039
  chr1:100504484-100504514
  hyper

SEQ ID NO: 103898 - DNA, 249 bp, Homo sapiens
  chr1:100598144-100598393
  hyper
agagaggtaaccaccgggccctctgggttccctatccgcttcctaggggggccgactcgacacctaggtgcaaggtggatcccacgggccagaaccgccatctttccccattggcctgaccccaaccgccacccgcgggcactggatgacgcggaccttacctctcctcacagtctttgcatttcacctgcaacgggactagttggtggaacagcacttggctcatgttggctcgctgcctcggctggt

SEQ ID NO: 103899 - DNA, 56 bp, Homo sapiens
  chr1:100715426-100715482
  hyper
cgcggcctatcaggagatgggaaacgcgcctccccctgggcgaccaatagggaggg

SEQ ID NO: 103900 - DNA, 306 bp, Homo sapiens
  chr1:100731301-100731607
  hyper
aagataacacactccgcatacacaaacacgcacaccgcaaggaaccaaaggccaagagtatcaatgtaccagggcgcacacacttcgagagacaggttcggtgcatcgcaggatcccaatctttcttgcatcttcagctctaaaagtcggcacctcggggtatgccaggatcctcgagaaaacagatataaacacatatttacccacaaaacagagataaagcacaagcctgcgggataactggaggagttatcttacagttgagactttctgcaacctgcagattttgccgtgcccagggcacaa

SEQ ID NO: 103901 - DNA, 30 bp, Homo sapiens; identical to SEQ ID NO: 36042
  chr1:100731841-100731871
  hyper

SEQ ID NO: 103902 - DNA, 101 bp, Homo sapiens
  chr1:100816955-100817056
  hyper
tgtagcgccattttcgtatggaagggactgcactctgattaggtacagccttaggacgcccagcgttcaagttgttcaaacagtacgtagagcctcgcaga

SEQ ID NO: 103903 - DNA, 66 bp, Homo sapiens; identical to SEQ ID NO: 36044
  chr1:100817824-100817890
  hyper

SEQ ID NO: 103904 - DNA, 30 bp, Homo sapiens; identical to SEQ ID NO: 36045
  chr1:100818192-100818222
  hyper

SEQ ID NO: 103905 - DNA, 30 bp, Homo sapiens; identical to SEQ ID NO: 36046
  chr1:100925335-100925365
  hyper

SEQ ID NO: 103906 - DNA, 277 bp, Homo sapiens; identical to SEQ ID NO: 677
  chr1:101004539-101004816
  hyper

SEQ ID NO: 103907 - DNA, 992 bp, Homo sapiens; identical to SEQ ID NO: 36048
  chr1:101004842-101005834
  hyper

SEQ ID NO: 103908 - DNA, 64 bp, Homo sapiens; identical to SEQ ID NO: 36049
  chr1:101491303-101491367
  hyper

SEQ ID NO: 103909 - DNA, 80 bp, Homo sapiens
  chr1:101491587-101491667
  hyper
atggcttaaacacccgcttcctaagcctgggtaagtgcagtagctcttcgctcgagaggagccacgtggaagagagtcgg

SEQ ID NO: 103910 - DNA, 1549 bp, Homo sapiens
  chr1:101701718-101703267
  hyper
gcccaacaccaaaaccggcgctggttcatttctctgtgcactctgggaaagccactgcccctcagaccgcagttgcgagtagcacgaggatctggggtggcggggggagtacaggaacctcccggttcattctccctcccgggctgcttgtctcctccgtacctctcgcagccccttcccagcctctcctccccagagcgccgccgacactcgccgggccgcggctcaggttttctgctgctcgcgcgaaagtggctcggggagctcctggccacaagctcagcacaccgatcctcctagggctgcggggggtgtgggaccagggcggtgcgctacgagactccgggccgtcctctgcctcctcagacttttcgagagaaaagttttcaaagtctctccaccttttttttttttcaggggctcgggagaatcctctccacagccagggatcagcgtctatctgggcgagggcagtgatttatacagtagaatccaggggttaccgggctccgccccttctctctctctctttttttctttcatttgttgtttggggaggaggggttcttttttttttttttttttttttttttgcttctgccccagatctttcctggacagtgcgtctcagcagttcagatccgggggcccccagctgacagagggcgtggggggttaaggcattaacccctcccagcctcttcctgaagaaaccacccagccttggcgcggcgctgggtgacttcgcgtagcaggcagggaactggccgcggcgagcgggactggccattggagtgctccgctgcggagggaggggaccccgactcgagtaagtttgcgagagcactacgcagtcagtcgggggcagcagcaagatgcgaagcgagccgtacagatcccgggctctccgaacgcaacttcgccctgcttgagcgaggtagggggcggcgaatggcgggggtcgcgggcgcggggagcccggttgtggtagggcttaggtgtcagaaacgaatttttaagtcgaacgaggcaaacaaaaacttagaaaacatgcatctccgggcgctgaaaatttgcatctctgggctactaaggagcccatctcgatcagattgttcttgggcacttgtgatttatggagttcagaaaaaaggttaattcccaactgtggaacctacgggtgtaggggcagtgaaaattgcagttggtcggaggaataggagggaaggcgttaaattttggaaatcctatagacaaagaatatggtgggtggtgtggagcgtgggtaatggcttaaattagtactgcccaggagcagggtataaaattagttgggggaaaatgcggagcttcttggcttgagcagcctctgctgttcgcggagttgctgggattgttctcatctctattacctcattttattgcattgctgcattaccttgaaatatttaagcaacttagaagtagacttctgctgaccagtgccgtcttagaaagtttctttgtaactttctagtcctaggagaggagtcaacgtgttgggggactg

SEQ ID NO: 103911 - DNA, 89 bp, Homo sapiens; identical to SEQ ID NO: 36053
  chr1:101703554-101703643
  hyper

SEQ ID NO: 103912 - DNA, 623 bp, Homo sapiens; identical to SEQ ID NO: 36054
  chr1:101774904-101775527
  hyper

SEQ ID NO: 103913 - DNA, 30 bp, Homo sapiens
  chr1:102462085-102462115
  hyper
cctagtccctccccccgcgcagtaggactc

SEQ ID NO: 103914 - DNA, 216 bp, Homo sapiens
  chr1:102462481-102462697
  hyper
tggaagcagaggcggcggcagcagcagtagcaataacagcagcagcggcagcggcggcagccgccctggggggcgatcattccgcaggcattctcagagctaggagtccgggagctctagagagtgggttgggctgcagtgggcgctggccgcggtgctgaagcgcctccaacccgcgcgccccagtttaccctctcccccgctgctatatagcta

SEQ ID NO: 103915 - DNA, 30 bp, Homo sapiens
  chr1:103572362-103572392
  hyper
tcagagatcggcctccgggagggctgactc

SEQ ID NO: 103916 - DNA, 139 bp, Homo sapiens
  chr1:103572599-103572738
  hyper
ctttcgcctgccagtcgattctaaggcacctaacggaccgctccagccagatgccttttcgggaaagggcgggggaaagagggagggagaaggcggaggggaggagtgaagtcgctctccctccgtgggtactgacagg

SEQ ID NO: 103917 - DNA, 845 bp, Homo sapiens
  chr1:103573572-103574417
  hyper
cagaagcagtaggaccgacggcaatctcccacctccccaaatccattttttcttacctcctctgacctctctagcttggaagaggaaggtcaatgcgagggttgttacggtgaaatcccagagccaccgtttcgttttccacctagaggaccacggctccatctccgagccccgcactcacaactgtgaactcaacccacgaaattgcgactgcagaccaacttcgtcctttccaaggtatcgccagggatgtttgctacacagccattggggagggagagggggaaaaagtcaaagggctttttcttctaaatttgatggtttgcgttcttcgtgtctctagccctttcctctccctctgagttggccccaccggccgggaccctccggccgcgaccctctgatccttcctctgccgggccctgccttcagaatgaaggcagatgaggggcttccaccaacaagctgagagtactgtgtgcccctaaaggcttcatgccgtcagtgggctggacgagtggctccgggcagccccctcctccgcccactcccctccctgctcccagctccccctcccagggcgaaactgacaagcaggctgagggtcagacccaatcacacgactctggggcggccccaagcccgcccccgcctccctcagcccaagaatgaggactccgagcaggcccagcccaccaaccaccccccatctccccactcctctcctccctcctcgcctaccaaatccccgagaaaaaatgggagggagttacgggggacgcgtgcttggctccagcactttgggaatgaaaggaattgcaggagagccccggagcacacggagt

SEQ ID NO: 103918 - DNA, 422 bp, Homo sapiens
  chr1:104068297-104068719
  hyper
tgacggtcccagcccgcacatgcgcagtcgtgagtcctcttgtccttgagcgtcaaccttctttccctgaagtggctggggttcctgtttccttctttgattgacaacttgtgttaaccctcgcacatctctgggccaatttttgcttgtaagtctttccggagacccctggaatttaaatcattagcaccgcgcccttccccgaagagtcttcgaagggttgccgcttttcggtggcgcagttctcgcgagaaggtgactttctttctcggtatttcctggtttccagaatccttagcgcgaggcggaaaaaatatttctcccagcttgtgttgatgccgcgattttgactgagacttcttcccacgatttctgtttttgcttctccaaggaaaatggcagctcccgagcagccgcttgcg

SEQ ID NO: 103919 - DNA, 1210 bp, Homo sapiens
  chr1:107599192-107600402
  hyper
acaggagaccttccgcgccgccggccgggcgaccccgcaggaagtaggaaggacgagcgcgcactacaagtcccagaagcccccgtttcctggagcccgcgccgtgccgcgctacgcccgccgggagccgggcagagcggccaagatgtcgcagcccaagaaaagaaagcttgagtcggggggcggcggcgaaggaggggagggaactgaagaggaagatggcgcggagcgggaggcggccctggagcgaccccggaggactaagcgggaacgggaccagctgtactacgagtgctactcggacgtttcggtccacgaggagatgatcgcggaccgcgtccgcaccgatgcctaccgcctgggtatccttcggaactgggcagcactgcgaggcaagacggtactggacgtgggcgcgggcaccggcattctgagcatcttctgtgcccaggccggggcccggcgcgtgtacgcggtagaggccagcgccatctggcaacaggcccgggaggtggtgcggttcaacgggctggaggaccgggtgcacgtcctgccgggaccagtggagactgtagagttgccggaacaggtggatgccatcgtgagcgagtggatgggctacggactcctgcacgagtccatgctgagctccgtcctccacgcgcgaaccaagtggctgaaggagggcggtcttctcctgccggcctccgccgagctcttcatagcccccatcagcgaccagatgctggaatggcgcctgggcttctggagccaggtgaagcagcactatggtgtggacatgagctgcctggagggcttcgccacgcgctgtctcatgggccactcggagatcgttgtgcagggattgtccggcgaggacgtgctggcccggccgcagcgctttgctcagctagagctctcccgcgccggcttggagcaggagctggaggccggagtgggcgggcgcttccgctgcagctgctatggctcggcgcccatgcatggctttgccatctggttccaggtgaccttccctggaggggagtcggagaaacccctggtgctgtccacctcgccttttcacccggccactcactggaaacaggcgctcctctacctgaacgagccggtgcaagtggagcaagacacggacgtttcaggagagatcacgctgctgccctcccgggacaacccccgtcgcctgcgcgtg

SEQ ID NO: 103920 - DNA, 1917 bp, Homo sapiens
  chr1:107682641-107684558
  hyper
agttactggaaacggcgcttctgtggaggagccgggggggatggggagtagagggagggggccctgttgcctcagcgccccgaggtcgtggagcggcagcagctgcagccggagcagcaccagcaacagcaacagcgagcgggacggagttaggaccgctcggagcgcacaggtctcgaggtagtataaggtttgctatccttccacttgctggcagttgcagaagaagatctgctttttaagtgaaacgtacatgccacccctccgagggctgcggcttccccgggcttgcttctttgccgctcctctttccggctctcgcgctcactctttaattggcactggcccctaagtttgccaggagctcgctgcccgctcggagcagggtcccggccgggagccgctggtgggggcggggagtccgggagccgcaatccagaagcgtcgtgggccatgtatatttcatcaaacggactttgggtgcgtcgcgtctcactgccatcagtgctatgtgcagtgacatttctgacttgagtggaggaatgcgcgaaggaaacccgggcgaaattggtattagaggatcttcttggcgccaatgctaattgtcctgatttatgccccttctgactaagctcaacgtcttcatctgaaataaaatgaaagcggtgccaagcggcatagaaccgcctggccgctggttctgatccccgggaaccagaaaatcgtcctgcggcttgaaaaaaaaaaaaagaggaaaaaaaaaagaaatagaaatagaaaaaagaaaaaatatccctcagtaaaagtttaaggcgagaagtgtcagaggcagcggagcgaggaggcgcggaggagagccggcgagcaggggactgggctggcacgacctccgaaggctgagatctcattattaatatcactatatttttggagggagaggcacctttctcatcctctcttcctctccgcccacccttactccctccccctcatctacctgtcaaagtcactgatcttttgcatttcggaagaggacgtcaacgggaaggaattccccctctgggtgcgggctccgagagggggcgacttgcaggaggctccccccgggggcggaggcgaaggtaattaagcggcggggagtggcgggccggcgctgggttctcggtcctcggggtcctctcccgccggcggccgggcgcgatcggaatccccgggctgcggcggtggcggcggctcgggtcctcacgcccacccctcccgctccgcccgctcccgcctggggaggaggctccgcgggagctgccgccctccgcccgtacgccgcccgcgggctccgctgctgcggccgccgcccgaggcggaccaggctggctgcgcagggccgccgccccgcgccgtcggctcggctcccgcccggcgcaagggcaaacgagccacacggtaagtgcctgcggctcgcctctcctactgcgacccgagcctctcgcccgtgcccctctcccccgggtttccccaccccccgccgccccccgccccacccgctgcgatgcacaggcgggagggaaggctccgggtgggcgaggaactttgtaaagcgccccgaggaggcagcgcgcggagccctacgcgcacacacagcggcacacgctcacacccacacacaagtcttcccgggggtgcgccccgggccggtgatgcgtcctcttgttgtgtccggagcccaggcgtggggtctgagcctccatccgccgactgacaggggccccgcgctctccctctctcacgcacacctggccacacacatcgctcaggcggcttgtcgttattttttctttctttcgccaattatatttgtttggggaaaagcaaacaaaaaaaacaaaaaaacacttgccctattgccggccttggggatct

SEQ ID NO: 103921 - DNA, 31 bp, Homo sapiens; identical to SEQ ID NO: 36060
  chr1:107842875-107842906
  hyper

SEQ ID NO: 103922 - DNA, 800 bp, Homo sapiens
  chr1:108506276-108507076
  hyper
tagctgaggctctgcgtcatagaggattagtgctgaaatgtgtcagggagagggctctgtcctctcccttttaagttgaaagcagtttggttttttgttttgttttaacattctgaaagagaaagaggctctgaaccgagtttaacatccttctgtacaaaaattttccgacaggacaaataaactactcttccactgaactgtgacttttgagctgactctagggtgcacccaaccttccagaggtgtctggcttaaccctcaaagaggcagctccagccccaggagccgaccggcaccacagcacctgagcagggcactgcaggaaggaaagcggaatctctagtgaaacttctcatttcctgtcgctgctgagagaggctggactcgctccttctcacatggcttaggaagagctgtaaacgggagcttgccggctggccaccagctcaggggccctgggggcggcctccgggttctgctccctgttcttccctttgaccaatgtcactcctggacagataacgggaccaaacgcccttcacttcctcgagtcctcatgtatgtcatggttcctcttttaggaaaacatgagtacaagacgcaaagcaaaagaagagactaaaggcaaattaccccatcacctcgtttcgtccctccccttcgttattatagaagagcttgatcaaattccctttgtcgcgccacacacacgcagagtaggtgaagggcaccctaagacaacttatttctttcccgcctcacagaaagcctttacgaaatcctcacaccatctccgg

SEQ ID NO: 103923 - DNA, 227 bp, Homo sapiens; identical to SEQ ID NO: 690
  chr1:108507148-108507375
  hyper

SEQ ID NO: 103924 - DNA, 112 bp, Homo sapiens; identical to SEQ ID NO: 691
  chr1:108507494-108507606
  hyper

SEQ ID NO: 103925 - DNA, 872 bp, Homo sapiens; identical to SEQ ID NO: 692
  chr1:108507657-108508529
  hyper

SEQ ID NO: 103926 - DNA, 38 bp, Homo sapiens; identical to SEQ ID NO: 693
  chr1:108508549-108508587
  hyper

SEQ ID NO: 103927 - DNA, 885 bp, Homo sapiens; identical to SEQ ID NO: 36067
  chr1:108742392-108743277
  hyper

SEQ ID NO: 103928 - DNA, 767 bp, Homo sapiens
  chr1:109203572-109204339
  hyper
aaccctgctcactgaaaccaacgcttctgtctttgtacgggccgtcgcttccatcatcctgcggtaagcagcatgcccaaccgaaaaaacaaagctcgtcgcggagccgccagcgtcctcaactcagcgccgccctgacgcccgcgcacgcacggcctcgctgcgtgacgctaccgccgcggctacgccggcgcccgcacccgcgcctcggcctccccgcggggctcgccaacctcgtgcgctctcacggtcggccttgggccccgggagcctcatggtgcgccgagctccgtccctctaggctctcagttccaaggcgtcggttttgcgtctcgtaacggccgctgtggcgcatgcccagaagccattttcaaggtcctcttccgaaccttggcgaggacccctgcgcctgccgcgccgttgaccccgctagcgtgcggctgcgacgcggcacggtacggcagctgttggcgaaggcccccaactccgagcgcgtccgcagaccgcgagccggaaggcggcttgggcggctgttgagttcgtggcgctcccgaggcgtggcaaaggcctaaaaacggtcctggccagcggaaggcggcaagaggagcagcaaggctccacgcgaggcggccggcggctggagtcccagtcagcctccgctttcatcccagagcagtccacgggggccttaaaggaatgtaggctgggtgaagttggcccagtgacacctgcgttcagaaaaacgttctttccgctcccaacgcccc

SEQ ID NO: 103929 - DNA, 209 bp, Homo sapiens
  chr1:109234632-109234841
  hyper
attagcaagcacaccgcagccatgcgaacccttcctggctcagctcccgacaaaagaaatcaagcccccagtcaaaatacaacaacaacggattaggcctacaaccctctcccccggcccccaaattctcaggagaaatcccctaagagtcaggtacggaggtcactgcagcgacttcagcgtgcagagaacgcggggacctaggaaga

SEQ ID NO: 103930 - DNA, 183 bp, Homo sapiens
  chr1:109235040-109235223
  hyper
ggtcattttgtcggcgtcgggtgccctctcttgcccagctggggcacagcgaggcggccccttctcccgacgacgttcgatggagtagggtcccagaccgttgtcccgaagagcgagatcgagcttggccccctcccccccctccttccctccctccttccttccgccgcaacatggctaaca

SEQ ID NO: 103931 - DNA, 30 bp, Homo sapiens; identical to SEQ ID NO: 696
  chr1:109257153-109257183
  hyper

SEQ ID NO: 103932 - DNA, 30 bp, Homo sapiens
  chr1:109289098-109289128
  hyper
cgtcgaacctcgggcgacagcagcctcccg

SEQ ID NO: 103933 - DNA, 30 bp, Homo sapiens
  chr1:109289861-109289891
  hyper
ttattctgcttattcgtgttagtatcaacc

SEQ ID NO: 103934 - DNA, 30 bp, Homo sapiens
  chr1:109420019-109420049
  hyper
ctgcggggacgcggcgtcgatgctcaagaa

SEQ ID NO: 103935 - DNA, 31 bp, Homo sapiens; identical to SEQ ID NO: 697
  chr1:109420435-109420466
  hyper

SEQ ID NO: 103936 - DNA, 30 bp, Homo sapiens
  chr1:109505959-109505989
  hyper
cacacccaactgcacggactcacgtccggg

SEQ ID NO: 103937 - DNA, 30 bp, Homo sapiens
  chr1:109584167-109584197
  hyper
agggcgaggggcgtcgctctgcccccagaa

SEQ ID NO: 103938 - DNA, 38 bp, Homo sapiens
  chr1:109584671-109584709
  hyper
acgtccgcccctcccggcccagcgactcctcagctcag

SEQ ID NO: 103939 - DNA, 30 bp, Homo sapiens; identical to SEQ ID NO: 36073
  chr1:109585007-109585037
  hyper

SEQ ID NO: 103940 - DNA, 172 bp, Homo sapiens; identical to SEQ ID NO: 36074
  chr1:109618423-109618595
  hyper

SEQ ID NO: 103941 - DNA, 30 bp, Homo sapiens
  chr1:109618805-109618835
  hyper
atcacgggctaggtcgcgagtatctcgttg

SEQ ID NO: 103942 - DNA, 453 bp, Homo sapiens
  chr1:109632944-109633397
  hyper
ctcatttcatttgcaacgttcagacgcagtctgactagatttccatccggagtaaggaagagcagctcaagggcagtcacggaggccgcaggtgcggcttcttcacccgcggtgctggagttctctcaagtggaagcccaggacgatgaaaacctcataggtaggctgctgcttacacacagcagccgccacggcgcaaaataaactacaaaactacaagcctttaccttttcaaacacactgacgcgggccagccccagccctacgcccgcaggggcacgcagaaaagacttagttaccacggccaagtacgaagccttcgagatagcgttcttcttaccctacgtaaacacgcagtttcccgagctcgacaatcggctagccactcctgatagcgttcggcgctcgcctctcggcccttgctcctgcgtactacggcttcttccagtcacc

SEQ ID NO: 103943 - DNA, 19 bp, Homo sapiens
  chr1:109633440-109633459
  hyper
cgccgctattaccactgaa

SEQ ID NO: 103944 - DNA, 37 bp, Homo sapiens
  chr1:109642649-109642686
  hyper
cctatgttcccctccgagccacgcgagggcagcaacg

SEQ ID NO: 103945 - DNA, 211 bp, Homo sapiens
  chr1:109643169-109643380
  hyper
attgatcagatagacgaggccgggcttgtccccggccactgattatcgaggcgattctgatctgggcacggccaccgggctgcgggctgccggtggcgtaggggcgagcacgtgaacggcggcggcgggcggggatgctgagcgcggtggccaagggtaaatgagccgctgcccctccccctggagctggaaggtcgcggaggcctttttg

SEQ ID NO: 103946 - DNA, 30 bp, Homo sapiens
  chr1:109655391-109655421
  hyper
tggagcgctggtttcggttgccaggcaact

SEQ ID NO: 103947 - DNA, 1107 bp, Homo sapiens; identical to SEQ ID NO: 36079
  chr1:109656100-109657207
  hyper

SEQ ID NO: 103948 - DNA, 30 bp, Homo sapiens; identical to SEQ ID NO: 36080
  chr1:109756399-109756429
  hyper

SEQ ID NO: 103949 - DNA, 30 bp, Homo sapiens
  chr1:109756732-109756762
  hyper
acagcgagtggcgacgatgtaagtaccggg

SEQ ID NO: 103950 - DNA, 30 bp, Homo sapiens; identical to SEQ ID NO: 36081
  chr1:109791931-109791961
  hyper

SEQ ID NO: 103951 - DNA, 30 bp, Homo sapiens; identical to SEQ ID NO: 36082
  chr1:109792502-109792532
  hyper

SEQ ID NO: 103952 - DNA, 30 bp, Homo sapiens
  chr1:109826288-109826318
  hyper
agtacatcctccatcgcctcttcaagaacc

SEQ ID NO: 103953 - DNA, 618 bp, Homo sapiens; identical to SEQ ID NO: 36083
  chr1:109940218-109940836
  hyper

SEQ ID NO: 103954 - DNA, 31 bp, Homo sapiens; identical to SEQ ID NO: 701
  chr1:109941101-109941132
  hyper

SEQ ID NO: 103955 - DNA, 30 bp, Homo sapiens
  chr1:109968634-109968664
  hyper
caaggtaggagttccggctcctcacgcctt

SEQ ID NO: 103956 - DNA, 211 bp, Homo sapiens
  chr1:109968965-109969176
  hyper
ggaggcagcggctacgcggggattctgaggaccaacacgactccaccggcacccaactcaccggcagccaactcacccacacggccgcagtactaaggaccaactgcgcgtgcgaccgcgacctctttagcccgccctcctgtgcctgcttcctattggctggtagtagttcccgcctaggtgattgggccaacgcgcttcctcacgaggg

SEQ ID NO: 103957 - DNA, 50 bp, Homo sapiens
  chr1:109969512-109969562
  hyper
gggcggtaatgagtcggctacagtgggtctgagccggcgccgcggacgag

SEQ ID NO: 103958 - DNA, 1231 bp, Homo sapiens
  chr1:110008893-110010124
  hyper
gaggagaaaaaccggcgctgggcagtttgcaatccaggaaaatagggaaggataaacctgaagcctgtgcgtccaggtgcgcctggctagggtttccgacggccgcggtgtctcggtggggaccggtcccggaggcttcggcgaggaggacccggagtcccccccgccccgcggcggaactaaccacggaggcctctggtccctttaaggtgcccggcgagcggagaaagggagcagagggggcgggaggagggttcgggagcgcacgccacgtgacccggcggccaagttcgctgcgagtttgacagaagtttgaatccgagtcgggggctttctgctgccggcggggcaccgcggcggccgcagcctctgagagcacgaacagcagcgcccccgcgtcccagccagccagccagccagactggactccggcccaccgacggccgctcgcgctccggccccgctcgcctgctctgccccggacctgcagctccccgctcccccgccgtgtccgccgcctcccggccagagagccaagccaccacgccgcgcccagcgctcgccgcgccagcatgtcctcgaccgagagcgccggccgcacggcggacaagtcgccgcgccagcaggtagtccctgcgcgcccaggactctcacccgcccctctccacctagatgtcgggctgcacacttatcccacccctggaccgcgtgtgagtggggcaaggggaccagcgccttcccagggttccccaccgccctgaccccccggccggctgtgtctccgcaggtggaccgcctactcgtggggctgcgctggcggcggctggaggagccgctgggcttcatcaaagttctccagtgggtgagtcgctgccccggccccgggctatttcgggagcctgggctgtgacgctgacctgaagcaatggagccagggtgggggctggggaggtgctgcggccgggccacggcggaagggtggggggcggcgacaggtgggcgggggaggggcgggctggggctgcttctccggacttagtggcaggagggtgaagagcgaggcatgcggagtcccggattcggtccttctatgtgcaaggagcctttgcccagggcgctcacatttcacccgggcgagaggacccgggtgtaacctttccagaactctgatcctgcacataccactccttggtgacgggaggggggagaaggacgacggggacgaggtccg

SEQ ID NO: 103959 - DNA, 99 bp, Homo sapiens
  chr1:110025978-110026077
  hyper
agaggaggcacgacacgggagccgaggccctcccccacaccacccctgtgtccttcagcacctcctacagactccctccccttgcccttctgattcaca

SEQ ID NO: 103960 - DNA, 30 bp, Homo sapiens
  chr1:110036556-110036586
  hyper
tgcctccgggctctcgcgggagcgggcctc

SEQ ID NO: 103961 - DNA, 30 bp, Homo sapiens
  chr1:110037111-110037141
  hyper
acgattgaacagaccgaactacttcctcag

SEQ ID NO: 103962 - DNA, 207 bp, Homo sapiens
  chr1:110052078-110052285
  hyper
tgggagctccgtcgcggcctctcccggcggcgcctcaccggccggcctgtcactgcgcccaccttacgcaggggcccgcgcccggcaccgtcgcctcccggggacttgcggggccccgctccgctcaccctgccaccgcctcgaccgctgagcccgccggagcccaccgaccgcggtcgctgcctccaggtccgcaggcctggcgcg

SEQ ID NO: 103963 - DNA, 104 bp, Homo sapiens
  chr1:110090997-110091101
  hyper
ccaaatcaggtagccgaaaggtaaatgaggcttcaagttgggcggcgggcagcgaacttgacagaacctcgaaactctgcagatccgccgcccaacccagccgc

SEQ ID NO: 103964 - DNA, 173 bp, Homo sapiens
  chr1:110162330-110162503
  hyper
ccaagacccagggtcggctcaggccagccctaccgcggtgtggtggctgcccacgtggcgcccaggaagagaaaaaaatggcgaggcggggtcggcaggcggaggcggggccaggcgggggcggggccaagggccgcagagcctggcgcggagccggcgagattttggtgggg

SEQ ID NO: 103965 - DNA, 237 bp, Homo sapiens
  chr1:110185989-110186226
  hyper
tactgtggtcagagccgtgccccttgcaggtgggtagcgctgagagcagagcagcgcccgcgggactggcctgaggatcccgcaggcaggagggaccccgcgggcctttccctacctgggaggtgcacggttggccaccagggcgcgctgctggactctccccagaaatcgggcggaggtttaggcctcagagtcacttaaacttgtaaccctaccggtagccgtggagtctagtaa

SEQ ID NO: 103966 - DNA, 30 bp, Homo sapiens
  chr1:110198894-110198924
  hyper
cggggccgagggggcgggtctggcgctagg

SEQ ID NO: 103967 - DNA, 209 bp, Homo sapiens
  chr1:110230510-110230719
  hyper
gggtactgggacatccgcggggtgagcgagggtccgctggacggtgggacgagggcgcaggggagggaagtgcgaagcagctgcgggacggactctagggaccgttcctcttcagggctgcccgcctcagaagggcctgtgcatgccgctgtgtgtgtgttgggggtgtgggcgggtagaggaggcaacgggtacgtgcagtgtaaact

SEQ ID NO: 103968 - DNA, 685 bp, Homo sapiens
  chr1:110282509-110283194
  hyper
caggcggatggcgtgcgccagctggggaagacagcggttcagcgactgcgcagctcccacccattcccaacccccgcccgctaacgttccccggcccggggctgccgagtccctgcgtcctgccggggcggtggttaagcggcccctaggcccggctccggcgtggtctcctccgcccctccccacagggcccgcgatcccagaggctgggcaggggtcgacatccgtggctcggcagctcgaaaaggctcccgcgtagagctgctcctgctggagatcgcggacccagagacccgccctctccgcgtcagtctctttgaccgagcggctctaccgttgagacggcactcaccccacgaatatcccagtacccgagaaccatagacgactcgcacgacatggtgacgggcttccgagccttcgaggactagggaaactgtgagcgggaggggctttatacccgacataagggggcggggcccacgcgcgggcgccctgactccgcctccgccccgttctccgtcccttgcctccgcggctccacagggccgtgcgcaggcgcgactaatgccggcgttggggttcagggcctggcgaccccgaggcgggacccgggcaggagtgctgcaggagagcaaaggacccgaggttgaggctcctcccttccccgcgggtgggagccaga

SEQ ID NO: 103969 - DNA, 148 bp, Homo sapiens; identical to SEQ ID NO: 36095
  chr1:110453159-110453307
  hyper

SEQ ID NO: 103970 - DNA, 422 bp, Homo sapiens; identical to SEQ ID NO: 36096
  chr1:110453530-110453952
  hyper

SEQ ID NO: 103971 - DNA, 283 bp, Homo sapiens
  chr1:110526884-110527167
  hyper
aggaagtcacaaagcgttgtgcagaaaccagactactctgagtcagttctgccccctatgaagtcaaaaagacaggcacggccccttgggaaggagctttaatccaaagggcctggggctgggccagtgagtgagtgggctgtctcgagccccggacatttcctaggaatcgctgtaggatgtgtcgtgtggggctctggtctttgctcccaaacacccctttcatgcgcctctgaggccttgccaggaaccccgcagcccaaagaccctccgttccgcagca

SEQ ID NO: 103972 - DNA, 30 bp, Homo sapiens; identical to SEQ ID NO: 36098
  chr1:110528062-110528092
  hyper

SEQ ID NO: 103973 - DNA, 85 bp, Homo sapiens
  chr1:110577101-110577186
  hyper
cagacagaatatcgcgaggtattggtcagccaagatggcttctaacactggccgccacacttaatatggcggccagggaaatttc

SEQ ID NO: 103974 - DNA, 30 bp, Homo sapiens
  chr1:110577926-110577956
  hyper
acttagagccggaccgagctaattatcatt

SEQ ID NO: 103975 - DNA, 252 bp, Homo sapiens; identical to SEQ ID NO: 36100
  chr1:110610425-110610677
  hyper

SEQ ID NO: 103976 - DNA, 182 bp, Homo sapiens; identical to SEQ ID NO: 36101
  chr1:110610715-110610897
  hyper

SEQ ID NO: 103977 - DNA, 231 bp, Homo sapiens; identical to SEQ ID NO: 707
  chr1:110611045-110611276
  hyper

SEQ ID NO: 103978 - DNA, 79 bp, Homo sapiens; identical to SEQ ID NO: 708
  chr1:110611434-110611513
  hyper

SEQ ID NO: 103979 - DNA, 140 bp, Homo sapiens; identical to SEQ ID NO: 709
  chr1:110611653-110611793
  hyper

SEQ ID NO: 103980 - DNA, 233 bp, Homo sapiens
  chr1:110612458-110612691
  hyper
gccgcagtccccagccgaccccgatttgaccactctaggttgaggcccagcctcagggccctcaaagggcgccagacacaaaagccgcgcttcttcgtcaggtctcagtgtggctccacagccctcggccgggtctgggcttcagggtaggtggcagttccagtccaacttcggcagagcatgctctctccttcccaggtccaactgctttcgggccccgactggactccggg

SEQ ID NO: 103981 - DNA, 876 bp, Homo sapiens
  chr1:110626790-110627666
  hyper
ccctcgcgtggccgggcgcagatccccgtgcacgggtcctccgcacacccttgccagcccgcagggattgttcgccgcgttggtgactccttcccaaaatgggaataaaagatcgaaatagctagtaagcatgcaaagtttattgtcaacctcaagtctctataaaaccagatcaaagggaacaggcgtttggtttcttcccagatcgctggggggcctcggggctcaggaagccccaggagtccagcccgctgccgctcactgcgctcttctctccagccgggtccaagggctcgagcatcgcaacctgcggcctgagttggccccgggcgcacgcgagggaaatggatgcagtgcccgtgaacttggggcctgaataattgataacaacccgctgggtgcccgtcgcgcggccaggcctgcggggagcggagccggaggcagcaagcaaaggaaacgcacgagccgggagcgcgggcgcgcggggccacgaaagaccgaccgactgtccgacgggcggtgggacaagaggacggatgctgtgggggggccccggaacccgccgccacaactcgcggcccacgcgggtcgcagccgccagccgtagggagctgccgagcagcgacgttccgcattccatcgggttcccgcgccctactgggcttgtgcggcgcagtgcctgcgtgtgctttcgttttctcaaggccattctgataaaacatacgtgctggttccctttcttttctcagaatgattcttcaaggcgaatgactcgaaatggagatttcttctaacaccgcgtgatcaccgacaacttttgcaggacgggatgaaactcctctgggtttccagtcagatgtgcgagtgggctctctt

SEQ ID NO: 103982 - DNA, 559 bp, Homo sapiens
  chr1:110672762-110673321
  hyper
ccttcccggctcccacgcctcttgctggggagggtggctcatttttcacgggtgccgcgtgactttccagactgtattttcagcctcggtttgacgtcaggctctcacggtcccaaaggatgggctttgtacatttccaggccgcagaccggagcctcccatccctttgggcctcttgggcggtccctacggccacctcccgcagctccctgggggcgggggaccgctggatgagggaggaggggaggtactggggggaaagggcggttggcgggaaggaagtccaggtgagacaggcccgcgttgggactatcgtgcgcggtatgtcggccggcaggtggggctggtccgggcgcaggaggcggtagagcaggagcagcagggggagccaggctggccgagctggggggtgagcacgtttgtctcaggcagctcatcgcctgacacccccgggaacgggctctgccccaaggcctaaaatgagggaagatgaggaaatgggggtggggacgatggagaggatggaaggggcggcgggggggtgcggtggtctgcgcgg

SEQ ID NO: 103983 - DNA, 30 bp, Homo sapiens
  chr1:110679715-110679745
  hyper
cggatccccgcagacgaggtaggcatcaaa

SEQ ID NO: 103984 - DNA, 529 bp, Homo sapiens; identical to SEQ ID NO: 712
  chr1:110692967-110693496
  hyper

SEQ ID NO: 103985 - DNA, 433 bp, Homo sapiens
  chr1:110693736-110694169
  hyper
cgtacgcacgggttggacaccgggcttcagcttctggtgctcagaagggcccaagaactccggaggaaattgggcttagctgcggaggcaagcgcccgcggagaaccggagggggcctgtccggcccatccgcggcttgaaactgcgcgcccagggcgcagttccactgggagcctcttacgcagctggagaccccagccccagccgctcggcctcaggcctgtgaccttgacagtaacattggcaagcgaagcagaactgtcacgcccgagatgaatatttaattctcagtcctggggctggtcctcgctggattcggagctagcagagagcccttcctccctcgtgggaagcgcatctggggaacggaatggctgagacaggggacgtgcgtgtggtgcccatctggagggggcgccgtcctggcgggtcg

SEQ ID NO: 103986 - DNA, 140 bp, Homo sapiens
  chr1:110752408-110752548
  hyper
gttgggcctccgaggcgcaggatgcggggcggggtggtcagaaggccccaacacggtccctgggaaaggagagggcagcctgatcctcgcgacagcgtctctaccctctttcttccttggccttccgtcagccgcagtga

SEQ ID NO: 103987 - DNA, 13 bp, Homo sapiens
  chr1:110753206-110753219
  hyper
tcggccgccgccc

SEQ ID NO: 103988 - DNA, 384 bp, Homo sapiens; identical to SEQ ID NO: 714
  chr1:110753509-110753893
  hyper

SEQ ID NO: 103989 - DNA, 399 bp, Homo sapiens; identical to SEQ ID NO: 715
  chr1:110753957-110754356
  hyper

SEQ ID NO: 103990 - DNA, 219 bp, Homo sapiens
  chr1:110880351-110880570
  hyper
atagggttgaggaccggatcaatacaagaatcctcataacctccgccccggcgcgaacctgggagggctgcagacagtctaaaggctgtggtgacctcagcgctgcgtccctccagcaaccggcgagtgctggggcacaggccatacccccctaagctcggcatcgcctgcacctctcacaggtgctctgtccgccacagtaacgcactatggaaagga

SEQ ID NO: 103991 - DNA, 30 bp, Homo sapiens; identical to SEQ ID NO: 36113
  chr1:110881005-110881035
  hyper

SEQ ID NO: 103992 - DNA, 358 bp, Homo sapiens
  chr1:110881805-110882163
  hyper
aacactttgggtcacgtgaccgcagagtgcgaggggcggagctacagtctggcgcgaggaaccgttaagatagacaacaaatgtaaccaatgaggtactccgactagggggttgggaacccaataacagtggttgggcgggcgccttcctggagcgcggggagatgtaaagatagacaaataattttcccaatgagactgtagaagagagagcaattggccaatgaggactgcggggcgggaccctgtgccgcggcggagtccaagatggcggcgtgcggttccgctgtgtgaaacgagcgcggggcggcgggttactcagctccgcggagacgacctccgacgacccgcaacaatga

SEQ ID NO: 103993 - DNA, 30 bp, Homo sapiens
  chr1:110950524-110950554
  hyper
gagaggtctgcagccgggcctcagtgcttc

SEQ ID NO: 103994 - DNA, 30 bp, Homo sapiens
  chr1:110950756-110950786
  hyper
cagagactaaaggacgagatggagcaaggt

SEQ ID NO: 103995 - DNA, 271 bp, Homo sapiens
  chr1:111097873-111098144
  hyper
gcggtcggaactcagcgctgcggaagccggtgtatctgagtctctccacgtggctctacttttctgcagccctgtagaaataaacctgggtcctcgctccctggcctggggaaggaggtctgcaggggtctgtgggggccctggaggcgccttcccagctgcacaggctcagtcggaccagcagaggtcactgcgtgggaaagagtggggcgccaacccgcgcagagcccagccggcgaccgcccccgcgtccccgcggagctccctgcct

SEQ ID NO: 103996 - DNA, 1205 bp, Homo sapiens
  chr1:111148987-111150192
  hyper
ccgcctgcctagctgcgaggcggcttggcagcagcgagagggggagcctggaggaagccggcttccggactggccccctgccgacccaatcccgccggccccagggcggggaggggtctgggccctctccccatcgccccgggctccggccgggattccgttcggcgcactcagcgctcgcctccgcgcagaggaccagaccctcccgctggccgcggccgctagcgccaccttaaccccctcctgcccgcgcggtcggctcctgctgcgggcccaagcgcagttcagctcttaagcccccggcgtccagccgagggaccgccgaggctcagtgtccaacccaaaatcccggaacctgatctctgggggtggggagtagcctgcgccaggctgccgccccagatctcagcttccttttaagcgcgggggctcggcggcagcccacggccccagcgaaggggaaagccctctctgcagcaaagccgtttgttattctgtgccgaagaggcgaatgcagcccggccgtcccaagtggttcaggtcctaccaacccgcgctatttaccagacatggttatgctgccagctgcacttcccaccacccaccagctcctctccgtgccctccgccccgcgccacgcaaaccccagagggtcccgagcccattctgtgcactcttcttgagcagggtgcaagttccccttgatctccccggtctgggacctgccgagcagacggcagtggtcggcaagggcttgccgccgcggactcagcccaagcctgctgcgctgcaggctgcgccgccgggtgccccgcagcccctctgggcgccgcagccgggcagggaaggcagcacgcgccgcgcaacgccccgacacggatttacccttccggatgggcaccggggcctccatgttcctaggttacggccagcgccggcagaaccccggcagcgggcggcggcggggtgcgggcggccagccgggagccggctctgcagtcccgcgggcggcgcgtacggagctcccggccgccgcccgcagccgcaccgcgccacgcagcgccgcacctggctcgacggcgaactcgaattaaaggggccggcgggggccggggccggggccggggcgacaagctgccctccgccgccaccgagctcgtcacctcgttgggcccccgggcctcagcccccgccccgcgaggaaa

SEQ ID NO: 103997 - DNA, 258 bp, Homo sapiens; identical to SEQ ID NO: 36116
  chr1:111216714-111216972
  hyper

SEQ ID NO: 103998 - DNA, 697 bp, Homo sapiens; identical to SEQ ID NO: 718
  chr1:111217194-111217891
  hyper

SEQ ID NO: 103999 - DNA, 59 bp, Homo sapiens; identical to SEQ ID NO: 36118
  chr1:111217923-111217982
  hyper

SEQ ID NO: 104000 - DNA, 41 bp, Homo sapiens
  chr1:111289413-111289454
  hyper
tgcaatcttaaattccgtccccaagccgtggtcaacttcta

SEQ ID NO: 104001 - DNA, 30 bp, Homo sapiens
  chr1:111323693-111323723
  hyper
ggtagaaatgaccacgtcttcttggcctgg

SEQ ID NO: 104002 - DNA, 1081 bp, Homo sapiens
  chr1:111505934-111507015
  hyper
gtcacataagagcgtcggccatcttggttttcatctcccgtggagatctactcggtccgcctattaaacttgagacgctggggtcccgcggagccgctgtgtcaggctctaaagaggttttacatttcccagaggaaagcgctctatgggctttaagcgccgcggagacaagcgcttcccgcctgggtggcgcactctgcgggctccaactcctctcaactacacagcgtccggaaacgacggccgactccacatccctaagacggacagaggggcagccgtggggaggattcgaaaccggtacttaccaacgcgaggcgttgcctgaattttcctctgcgggtttcaggaagaccctccgtaggttatttgacattttagtggggagaaaggggacacctcatccagaaaagtgggaagcgtggggccgagtttcccaatggggcgagaaccagagcgagggaatgttgggctggagttgcccacagcaactgtgaggggttcgaccttaacggagggcgacagcgggctctcgagagggtgtatccccaggcttcgggacgaggtcgcgcaccgcgcagaaaccggaaggctcctggcggtggactgcgccctcacagccctacgctgagagagaatcggcgtgagtctccgccctcagagcctacgacaactctccagactccgccggagcaggcgcagggggcgtggccttggtggcaccacccccaacagagcctggtcagtgctgaagactgcgtcagtctggctctgccgccccgcccactgaagccgatagctggagcaaagctcggtcgggcgtcttccggggtcgtcacgtccggttgccaaggtgactggctcgctaaagcccaacccttatgatgcaatccaatggcaagtgatatttgctatcttttcttccggatcaaggaacaaatcgcaaaagaaagctctcccgacacctacgcaaaataaaatgtttccggggtcaatcataaattttctgcttctgtgctcgccgctagcgtacgtttttctctcccgtcagtgcattaaaagacatcggcgcgcttttttg

SEQ ID NO: 104003 - DNA, 89 bp, Homo sapiens
  chr1:111682578-111682667
  hyper
atcccaccctctgacgcacccttctagagggagcgggctgcaagcgctggggcctgtcccttctcccctacttcgacttaccttaccag

SEQ ID NO: 104004 - DNA, 30 bp, Homo sapiens; identical to SEQ ID NO: 36121
  chr1:111682929-111682959
  hyper

SEQ ID NO: 104005 - DNA, 261 bp, Homo sapiens
  chr1:111683180-111683441
  hyper
tggcggagcgccggcgcgggagccggggggctgttgtgtgggagcccaaggtaggggtgggaagaaccgtggagggccagcgctgagcgggccgagggctgggagcgctacccgtgccgaacggaccttgcttgtcaggtccacaccctcctgcccgaatgctggcaagtccacacaccgtgtggcatcctctgccgggtttgtctccccttaggaatgcggtgctgatgtttgtggctgggacgcgcttctggtcagcaa

SEQ ID NO: 104006 - DNA, 749 bp, Homo sapiens; identical to SEQ ID NO: 36123
  chr1:111746590-111747339
  hyper

SEQ ID NO: 104007 - DNA, 245 bp, Homo sapiens
  chr1:111813493-111813738
  hyper
cccaccggtgagtcccgggtggcctagggtaaggcggaccgggagccacctcacacccacacagcctgcgggaaggatccgacaaggtgagggtagccccgcgcggggccgcaacagcctattcctcccgtgtgtgacgaccccagccagagagaacccaacctgagtgccagcgagagcctgtccttggtcgctccgacccctcgccaggggatgtccggtaggaatagcactgagctgatgtg

SEQ ID NO: 104008 - DNA, 15 bp, Homo sapiens
  chr1:111813750-111813765
  hyper
cgccaaaatctccac

SEQ ID NO: 104009 - DNA, 30 bp, Homo sapiens; identical to SEQ ID NO: 36124
  chr1:111888704-111888734
  hyper

SEQ ID NO: 104010 - DNA, 156 bp, Homo sapiens
  chr1:111889100-111889256
  hyper
tgggctccaaggtgcgggttcctgccccagtagtggctcggtggacgccccaacttgccgcgcaggcgcgctcgggccctctccccctccccgcgctccgcagctgggaatcacgggactagccttcgtttccttggcaacgcagtacacaagtgc

SEQ ID NO: 104011 - DNA, 30 bp, Homo sapiens; identical to SEQ ID NO: 36125
  chr1:111991158-111991188
  hyper

SEQ ID NO: 104012 - DNA, 280 bp, Homo sapiens
  chr1:111991908-111992188
  hyper
aactctacttctcgcgagaattgcttctatggctccatcctgctttccggctgtcgccctcatgcgataggctctcagcgttacttgactcttctcgcgataattttttttaaaaatctcccaaggaaagttgaaggaagagtacaaaattttcatctcgcgagacttgtgagcggccatcttggtcctgccctgacagattctcctatcggggtcacagggacgctaagattgctacctggactttcgttgaccatgctgtcccgggtggtactttccg

SEQ ID NO: 104013 - DNA, 30 bp, Homo sapiens
  chr1:112281614-112281644
  hyper
gctcaaagtttcttcgtggtcccctttcct

SEQ ID NO: 104014 - DNA, 30 bp, Homo sapiens
  chr1:112281862-112281892
  hyper
atgcgcccatttgtcgggttcggttcaaac

SEQ ID NO: 104015 - DNA, 30 bp, Homo sapiens
  chr1:112282106-112282136
  hyper
gccaatgggcagggcggccgggaggccggg

SEQ ID NO: 104016 - DNA, 30 bp, Homo sapiens; identical to SEQ ID NO: 36127
  chr1:112298274-112298304
  hyper

SEQ ID NO: 104017 - DNA, 30 bp, Homo sapiens; identical to SEQ ID NO: 36128
  chr1:112299248-112299278
  hyper

SEQ ID NO: 104018 - DNA, 265 bp, Homo sapiens
  chr1:112531584-112531849
  hyper
tccccggggccgcgacggcccttggcgtcacgtagagacctttcccagagctcgcggggtggaagtggcgtcgggcaggaccagatggactggcccccagcctctggtagacacaccgccggctcgccgagctggagaactttgcgaagcgccccaaaccgctccgggtttccactttcagccatttctctccttgtcccctcaccaagagcggggacggagcaagccttcgccacctgtctctggcacccgccgagggaagaca

SEQ ID NO: 104019 - DNA, 146 bp, Homo sapiens
  chr1:112532137-112532283
  hyper
ccagcccgggccccgcgcccggcgccccgcgcgcgcgaggaagctgcggccgggagccggggccgcggaggcgccgagcgcccagcagcgcggggaagcgcccagcagccgccgctcgcgcggctcctcctcgccagcgcagtctc

SEQ ID NO: 104020 - DNA, 828 bp, Homo sapiens; identical to SEQ ID NO: 36130
  chr1:112532951-112533779
  hyper

SEQ ID NO: 104021 - DNA, 36 bp, Homo sapiens; identical to SEQ ID NO: 725
  chr1:112938561-112938597
  hyper

SEQ ID NO: 104022 - DNA, 166 bp, Homo sapiens
  chr1:112939041-112939207
  hyper
ctcccggtattccccgaggaggcggctcctcatcctccgagggtcctcacagctactttttgtccctcgtcgattcccagctcctcagaaggggcttccctctgacacccctcattcaaaggcacctcccaccccgcacctcagccttggcggagaggactcacag

SEQ ID NO: 104023 - DNA, 196 bp, Homo sapiens
  chr1:113008784-113008980
  hyper
tgtgggtgaaggggcggtgatagaagttgcttgtctagattggaagccatgtggttctgacgccaaggcccggctgcaacgtgcccgacgggctactccgggctggcagccccgcccttcttcggaaagctgacttacttgcgccccctggtgtttcacatgctgtgaatctctcacgaccgaggtctggccgcgc

SEQ ID NO: 104024 - DNA, 30 bp, Homo sapiens
  chr1:113044845-113044875
  hyper
tctcctctcaggagcgcgtccccgtgccct

SEQ ID NO: 104025 - DNA, 30 bp, Homo sapiens
  chr1:113050799-113050829
  hyper
catactctcagccccgcccgagagggtgga

SEQ ID NO: 104026 - DNA, 528 bp, Homo sapiens; identical to SEQ ID NO: 36132
  chr1:113051156-113051684
  hyper

SEQ ID NO: 104027 - DNA, 109 bp, Homo sapiens
  chr1:113052056-113052165
  hyper
cgtcctggtggtaagtgtggctctcaggctgggcgggtgaggcgcttggtaggagaggccggaggcgcctggagggactggctgctcacgggaccaggctgttgcttcg

SEQ ID NO: 104028 - DNA, 30 bp, Homo sapiens
  chr1:113161319-113161349
  hyper
ccttaagagttctacggaggagccggtaac

SEQ ID NO: 104029 - DNA, 30 bp, Homo sapiens
  chr1:113161702-113161732
  hyper
tgcggcttcacccacgccgccacggtccgc

SEQ ID NO: 104030 - DNA, 120 bp, Homo sapiens
  chr1:113162276-113162396
  hyper
cctacttcctggggcgcgggcgcgggcgctggcgttaggagacgtcactcccgcgcataactgacatggggccctcttggtcggcgtttccgggcgggtccttccgacggccgccgcggt

SEQ ID NO: 104031 - DNA, 437 bp, Homo sapiens
  chr1:113216759-113217196
  hyper
ggaatgcaacgaagcgcccaaatatgtggctcaggggtaagggtcggtcaccagcctttccacataagccgatgtggcagagaaaagcaattactgtgtatcctggcagagccccttgtccctccctcccacacgtacacacctttatctcagagacactgggttcttttccccaaacttctttgacccttatgccaactacgtgcgtctgaaagcccgagaagggaaaatgggggagggggcgtgtcgccccgagtttacgtccctggaaggctgggggaggcgctggatgagcttccccattccggccgcagccgacctagatcccagccctgccctttgctctcctgcttttcactgagtcccgaggctctggagggtgggcgtgagggtagccctggctgaggctcggaggtcctcccgggctgttcagaggg

SEQ ID NO: 104032 - DNA, 191 bp, Homo sapiens; identical to SEQ ID NO: 36136
  chr1:113249225-113249416
  hyper

SEQ ID NO: 104033 - DNA, 161 bp, Homo sapiens; identical to SEQ ID NO: 36137
  chr1:113249974-113250135
  hyper

SEQ ID NO: 104034 - DNA, 658 bp, Homo sapiens
  chr1:113256959-113257617
  hyper
gccagccggccgctccgggcagggggtccgcttctttgccaggccagcacgagttggcaggctgaagggcatctaaatgggaccctcctctaccccgggcgtccccctccccgctcctggggaagctggcggcctcctggtgtcgcgggctatttctgggtgtggagggggaggggaactacggtaagagggacagggaactggggcgctggagccgggaagcgggtgagcgagtcttcccaaccgctatgtcccctattaaaaagaaccccgctccttcgtgaaaccccttttcccttagcctttaagctgccgggccgcgacggggaactggccaactcatccttcgccgggctctccgccctccgggctctggggcagaacagggtcctgaggcggcgtgggcgagggcagtcaatgagcgggaaggacgtgaagaaggtgacacaggctgccccccactggaaaatgggttgggagggggtgcggcccgaagaccagaggatagcaaaggtccacggaaaagggagctcctggcccggacgcggcgtggggaacgcgtcctagcgccggggatgcggagctggggagaggggtgggagccccatcctggtttgggtgccccagggggcgctcactcggcgtagcctgtgctcca

SEQ ID NO: 104035 - DNA, 141 bp, Homo sapiens
  chr1:113258351-113258492
  hyper
aggcgcttgggagccgctgggtatgaggcgccaggtgtgacaccacctctggatggggctgctggagcgagagcgggcaagctggtaccgggtggggttgcgggattaatgacgcaggctgcagccgaccaccccggaatc

SEQ ID NO: 104036 - DNA, 30 bp, Homo sapiens
  chr1:113261473-113261503
  hyper
gccaggggccgctgcgtctcggctgtgccc

SEQ ID NO: 104037 - DNA, 13 bp, Homo sapiens
  chr1:113287134-113287147
  hyper
cgcctcctccgcc

SEQ ID NO: 104038 - DNA, 644 bp, Homo sapiens
  chr1:113392151-113392795
  hyper
actagcgccgcgctccgaggtcacgcagctgcctgcgaagccctcagtgaggccgcctcccaccccctggagacgtggtctcccctcccgcgagggtccctccgaccccacccgggcaactagggcaccgcgggctgttacccaactaaccattaagcgcggagccgagcgcgtgcgtggcacggagaggcggggcgggtctggtctgcgctctcggcaccatgcggcccccaagacgtagagcttccctgcctcggtttgaagggaccgctgggctgcctgattacgcgcccccggccgagcctgcgcactggggacgcagtcggccctcgcgtcctctgctgcccgaaacaagcgcgtggaaagcttggtcggggcttctcacagccgcgcgcacagactggttctccccccgcgtctcccgggagcgtcgccgccacctgcacgcgtccggcacacaaacgtcggtctcaccccttagtttctggaagagaaaaaggaaaagccaccgagaggcctgaccctgaggggtcggggggagatgcgggcgcgtagtagagggaagcgactgaggagcggggactgggcagcatttgaatggatgcgggtgccgctggcacccgggaagacgcctgggagccggc

SEQ ID NO: 104039 - DNA, 1692 bp, Homo sapiens
  chr1:113497848-113499540
  hyper
caaagtaataaaatgttaaaacgcatgctggaaaaaaaaaaagacgtacttggaacaaaaaacttgcatcggaccaagtgtaacgctatcctccagatttctctcaacagggccgccttaagtccatgagtagaagggcgctgcggcggacgctggcagccacaggttgaatgacaaagagcccccgtcagcaccactcccaggagtctgcgggctgccccgtcccctccgcaaagtctactcgaaccctgcagtcacgccttggctgtggggaatgcggctctccgcaccactctcgcaagtcaccaggtggggcaaggatcggcgggccaagaaggttggggcggacaatgtcacgaatcataaataacttctgccccgagtcccttcccttggggcagaagcggccaggagagtctggaggtaccacatgcagcagcctcatgttatcccttttccagatcaaagcatctctcgaggagcctattgaagacttaggggggaagggacttccccaccgtcaccgggcaccacgacccaactcctcggccaggcctgggaccggcatcttagcacggggcccgcggctcggctaagagaggcgctgaccccagcgcctcaaggtctccttcaccagcactgcagtccgaggccacgcggctgcctgtgaccacgatgccctctgctgggccgcctccctccgccggagacaaagtctcccaaccccggaggtcccctccgaccccaccagggcagcgagggcaccgtggggtccgcgccgcgtgccgccggctgttacccaactaaccgttatatgcgcggatcgcagcgccgagcgtgtgcgtgacgtggtggcgcaggctggagttccacggggcccagggtccggctcccgtccttcgctcgctgcctcgtttgcttgttccagtacccacgcagctagccagtcacgtcgcagctcaccactttgtctggccgggccagcgaggctgccttataacccgccggggccggagcatgcgcgcagggggcggagtcgtctctcccggccgccgccccctccccgccacacagacatccgaactgcagcccgcgcctccacacgctttcagccgcgcgcgccctctagctcgcccgcgcgcgccggcgccccctccccgccacgtgaccggcgtcccagtccgacccgcgcgctgcgcccctgctgagcggcgcggagctaccacgccctgccagactcgcccttgggtccctgtctgacgagctctaggcaatctgccctcgttcgggacacaaccatcggtctcacccctcagtttctgccagagaaaaaggaaaagtcaccgagaggcctgaccctgacgggtgggggagatgcgcgtgcggagtagcgggaagcgactgaggagcggggaatgggcagcatttgaatggatgcgggtgccgctggcacccgggaagacgctgggggccggcgctgtagagccgggcatgggctgggatgtgtttggattccaatccgggcctgacaccagttcagtgacctcgggaagttccccaaccctccgggcctgtttcctccctctgaagtggcgacagtagtagaaccgacctcgtaggctcatcgggaggtcctgatgggagaacccatgcaacttgccaccatagagccaggcccgcggcggttggcgc

SEQ ID NO: 104040 - DNA, 30 bp, Homo sapiens
  chr1:113615863-113615893
  hyper
ccgctgtcgcgctgcgtctgctccttgcat

SEQ ID NO: 104041 - DNA, 30 bp, Homo sapiens
  chr1:113616351-113616381
  hyper
tcggagggtgtggtcgagagcctaagctct

SEQ ID NO: 104042 - DNA, 706 bp, Homo sapiens; identical to SEQ ID NO: 732
  chr1:113932572-113933278
  hyper

SEQ ID NO: 104043 - DNA, 778 bp, Homo sapiens; identical to SEQ ID NO: 36142
  chr1:113933305-113934083
  hyper

SEQ ID NO: 104044 - DNA, 31 bp, Homo sapiens
  chr1:114300640-114300671
  hyper
gggcatggtggctcacgcctgtagtttgaga

SEQ ID NO: 104045 - DNA, 30 bp, Homo sapiens
  chr1:114301538-114301568
  hyper
tgcaatatatcgggcgagcgtgttcgtggg

SEQ ID NO: 104046 - DNA, 245 bp, Homo sapiens; identical to SEQ ID NO: 36144
  chr1:114302509-114302754
  hyper

SEQ ID NO: 104047 - DNA, 255 bp, Homo sapiens
  chr1:114354448-114354703
  hyper
gatggtgcttgtgccgctccttgtggcccttatgcttgggcccggccgcgctcaccgtcagaggcgagaaggtgaagagggccgaggtgcttggggccgggagaggggcagcgacagcgggcccggcgggtgccagcgaaggtggcggcggaggcggcaggagaagaggctcaacagggcctgggacagttggggctgcattcgttggcggcagcggcccaggatgttggcggctgcgacgccgccggtgagggg

SEQ ID NO: 104048 - DNA, 85 bp, Homo sapiens; identical to SEQ ID NO: 36146
  chr1:114355229-114355314
  hyper

SEQ ID NO: 104049 - DNA, 30 bp, Homo sapiens; identical to SEQ ID NO: 36147
  chr1:114448373-114448403
  hyper

SEQ ID NO: 104050 - DNA, 156 bp, Homo sapiens; identical to SEQ ID NO: 36148
  chr1:114471833-114471989
  hyper

SEQ ID NO: 104051 - DNA, 590 bp, Homo sapiens; identical to SEQ ID NO: 36149
  chr1:114695146-114695736
  hyper

SEQ ID NO: 104052 - DNA, 383 bp, Homo sapiens; identical to SEQ ID NO: 36150
  chr1:114695799-114696182
  hyper

SEQ ID NO: 104053 - DNA, 114 bp, Homo sapiens; identical to SEQ ID NO: 738
  chr1:114696349-114696463
  hyper

SEQ ID NO: 104054 - DNA, 638 bp, Homo sapiens
  chr1:114696540-114697178
  hyper
cgcccctcacgtggcatcccgcggcagctggcgagtctggcgcctcgcggccgccccctctacactcagggactggcctgagtccggggggtgggggtttcgaggcgggaagccgggctgtcccgaatctcggagggtgcaaggccaggaaagagtccgggttcccactccgcattcactgcctggtgtgaccttgggcgtctctgagcctcaattttcctctccgtaaaggaggtgtaatgattttaagtacttcacggactccctggggatagaaagatcgtgtttgtgaaaacactgggtaaactgccacatgccacacgaatgacagagaaatagataaccccgtaacagaaagagcgacggtcaggcagggtctgggaggaccttggccgaggttcctgacgggagcagttagactggcccccgagtcccagcttcggaggtagaagaccccaagacaggcgggcgatgcgaactgcaagactttccgagctccgcaatcctgcggtccgcggtacccgcatgttgctatggcgacgggaggcagcggccgtctctctccatggcaacgggagggaaaagtttctggcaaacaggaatggggggtcatttcaagagggcgcagggcgctcagt

SEQ ID NO: 104055 - DNA, 583 bp, Homo sapiens
  chr1:114697442-114698025
  hyper
ttgatctacacctgtcggcggtggggccccttctgtgtggggctcgcctgaagccccagactcaggtccatttgctctcccggagctgggaaggaagctttagctgcagcccctggaggctgctgggttggtgtatgcccgagtggctggcgagggagaaaggtcttgcctcttaattaacacgcttattggaagtgactcgggcagtgactcacgttccggagggaggagattcggagccttagctcctggcggtctccactgcgcgccatctgtgccaaccggcccttggacttgcgatcccctagcagctggtgcctggggcaccaagggctaaggcaaggcctgtgaggaccctggcccagccaggcggcttttccaccgtgaggcgccccctggctctgtccacggtgctgaagacccagttggtgctaccatcgcgtgggcataagtttaggggacgagggagaggcaattgttgaaggttcgcagcttccaccctgacccctgtgcctgtgatagcagaaggctaggaactcaggcagggaccaagcagacacgacgcaggcgatactgtgcaatc

SEQ ID NO: 104056 - DNA, 100 bp, Homo sapiens
  chr1:115053406-115053506
  hyper
cggcgtcgatactgcgcccccggcaactccagtgcccactgaggccgcaggagatgaagcagcctgggccgagcccgaggaggccgcggccacccccccg

SEQ ID NO: 104057 - DNA, 30 bp, Homo sapiens
  chr1:115053820-115053850
  hyper
aaccaacgagagcgcgcgcgcacgcggcgc

SEQ ID NO: 104058 - DNA, 276 bp, Homo sapiens
  chr1:115124230-115124506
  hyper
gcctgcgttttctgcgtctgcgtaaactcagttatatttaattacgccggcgcctgacactgatgtaatcacgttccctccgtattgacgttagtgcatgctcagttgctaattttgaaggcgggtccgcccggtatctagaaattgccgggctggtttgttttgggcggacgtgacgtaacgtcttggcttgtctgcgtcagcgaaaggcctcaatttcctgtcctctgcttactgcccctttttttgcctgcgaatggcggcgatttgaagttg

SEQ ID NO: 104059 - DNA, 630 bp, Homo sapiens
  chr1:115212644-115213274
  hyper
tcccgggtatcactcgggtccgctccgtcccgcccccgcaggccctgccgaaggccccgtcccggctgcagccccaccccctagccccgccctccctggcaaggctcagttcttattggctcctattcccacccctcacgctatgcccgcctccgacaccgccccggccggcggtgaggggaaccaccacgcctcaagtccgctgtatggccagaaccttgccaggacctcggtcactgcagttccagcaggcgggcgaccagtgtcaccgtcgtccggccaagccctcgagccagagctccatcgccttcgcctgccgtcgcatcggccccacggagacggccctatgcttcatgtgaaggtttactcttcacaactactcaacaagataaagcctggcttaatcagggaatccaagcactgtttcctaggctgacctcagtgagcaaacaattgcactacggtgccaacttgaaacgtcaagagaagcaaataactctcgcggcacctcaggcttggaatctcagaacgggggtgccttgatactcccagtgcgtgaggtcagcccccacgccctgttgagacacacatgcctaagcgctccgcctgcaacacgctcttgcttaggta

SEQ ID NO: 104060 - DNA, 30 bp, Homo sapiens; identical to SEQ ID NO: 744
  chr1:115252199-115252229
  hyper

SEQ ID NO: 104061 - DNA, 72 bp, Homo sapiens; identical to SEQ ID NO: 745
  chr1:115256505-115256577
  hyper

SEQ ID NO: 104062 - DNA, 95 bp, Homo sapiens; identical to SEQ ID NO: 746
  chr1:115258667-115258762
  hyper

SEQ ID NO: 104063 - DNA, 30 bp, Homo sapiens; identical to SEQ ID NO: 36160
  chr1:115300425-115300455
  hyper

SEQ ID NO: 104064 - DNA, 30 bp, Homo sapiens
  chr1:115300848-115300878
  hyper
gcgtctctagtcttcgagcgtttgaatacg

SEQ ID NO: 104065 - DNA, 196 bp, Homo sapiens; identical to SEQ ID NO: 36161
  chr1:115323252-115323448
  hyper

SEQ ID NO: 104066 - DNA, 202 bp, Homo sapiens
  chr1:115631835-115632037
  hyper
tgtttgccttctcctcgcctccgcgtttgagcacccagccctccccacgagcgcgactcggacgccgcagtcagcagctcggggaccccggccccgcgcccgccacccggccccctgccctgaccggccctcccggctcctggtctcacccagaagagcaggttgaagccaagcagcaggtacttgatgcaccgcaggcccc

SEQ ID NO: 104067 - DNA, 535 bp, Homo sapiens; identical to SEQ ID NO: 36163
  chr1:115632104-115632639
  hyper

SEQ ID NO: 104068 - DNA, 49 bp, Homo sapiens
  chr1:115632692-115632741
  hyper
cgccctgagtcctgtgggctgccctcaacccagccggccagtggaggga

SEQ ID NO: 104069 - DNA, 30 bp, Homo sapiens
  chr1:115655759-115655789
  hyper
actgccccagccccacgctgctgctggctg

SEQ ID NO: 104070 - DNA, 648 bp, Homo sapiens; identical to SEQ ID NO: 750
  chr1:115880146-115880794
  hyper

SEQ ID NO: 104071 - DNA, 78 bp, Homo sapiens; identical to SEQ ID NO: 36166
  chr1:115880872-115880950
  hyper

SEQ ID NO: 104072 - DNA, 1148 bp, Homo sapiens
  chr1:116184426-116185574
  hyper
gacgaggtgagggggacgccggccgagccccgccctccgctgcaggtgggccggccccgcggcggggccggcagcgctagctgttcttggctcgcggccgcgccgggctcgcagggctgggctcgggctgcggggcggcgccgggacaggaagcggaaagcagcagtgcagcggcggcggcggcggggctctgcctctccaggagcccagcgcaggccgcagagccggggccgctgtgagccgagaccgcgggccgcggagctcgggcggccggcgcggaggtgagtcccgcgagaggccgagcgctgcgcggcggcggtccccggggcagaccgttggctgggagacgcccccacctcggaccccgcgtgcccctgcgccctcctcccgcattcgccccgccggacttcgaccccgggtggccggctcccgcctcgggccgggggctccctcccctcctccggagcgctccgggtagtgcttcctctgactccactcttctccccatgcgttgcgcccctcctggccctgccgtgcgatctccgccgcaccccactccttggggtcccggggttccctgctcacacctcggacgtccctttctccccgggctggcctttggagtgcgccccttcggtgcgcgtgccggggcggcgggcaggccggcagggagtggccgagcgttggaggcaccgggcggctgcagcagccgtgcagggcgggagccgggcgcgcaccggggttcccacccctggcggggctcgacccgggcgccgcctggcccttcgccaggaaccgggacagagctggtctgtgtgcacacctcgctcacaaaaaattgagccggccctggaggcctggggggcgagtccggttgcgcctcggagagcgcaacaggcaggtaggagtttactttcaaaaacgccggggtggagcagaggcgcctggcgggtctctgcccaaggtgtccctgctggaggaaatctcaccgcgccggggcagccttcgccaccggcaggacctcatttccttctgcagtctttgaactgccccaagcatcgcgcctagagaagtgtgaagctttataaaaatttaaacgcgtccgtggtggcggcagcagtggggcggagccgcggcctggctgctgt

SEQ ID NO: 104073 - DNA, 552 bp, Homo sapiens
  chr1:116370914-116371466
  hyper
ccaaggtcccgtggccgcgatcccacctgcggcgtccgcgtccgcccgctctccctgaggtctgcaccctgagaggaggggcgagcgagccaacttggggcagggatcaccgtgtccacaggcgcccactggtgtggcgtcctgagagtgcgtgcgtgagcgagcgagcggcttatcctagactgaagacccagggaaacagatctgtgtggaggatgtttctgttttcagcagaacagacgcagcccccgagtcagtgccgtcagaagacacgtcagtcaattcagtggaaaacacttccagtgtgaggcgttcgccggcgccccttagacgcggccgggtctgaggcgcctgccgagcgaggtggcgcggcccgggagctgtggtcgaagcccctgggcctggcgtgtaggctgcgcgggcggcggcgggctgggggcggggctctccgccctccgcgcgggtccgcctggcccctcccccgcccaccccgcgcccgtcccgcctcccccaccttctcccagaggaggtgacagacgggcctgtaatttg

SEQ ID NO: 104074 - DNA, 2211 bp, Homo sapiens; identical to SEQ ID NO: 36169
  chr1:116380294-116382505
  hyper

SEQ ID NO: 104075 - DNA, 30 bp, Homo sapiens; identical to SEQ ID NO: 756
  chr1:116518723-116518753
  hyper

SEQ ID NO: 104076 - DNA, 36 bp, Homo sapiens
  chr1:116519004-116519040
  hyper
cgccccgcgtagcccggctgcgctccccgctccccg

SEQ ID NO: 104077 - DNA, 30 bp, Homo sapiens
  chr1:116694652-116694682
  hyper
ctgtgaccaggacgcgggctcttgaaggag

SEQ ID NO: 104078 - DNA, 686 bp, Homo sapiens; identical to SEQ ID NO: 36172
  chr1:116710668-116711354
  hyper

SEQ ID NO: 104079 - DNA, 30 bp, Homo sapiens; identical to SEQ ID NO: 758
  chr1:116915294-116915324
  hyper

SEQ ID NO: 104080 - DNA, 30 bp, Homo sapiens
  chr1:116915809-116915839
  hyper
gggcggggccagcacgcaggttgcatattt

SEQ ID NO: 104081 - DNA, 60 bp, Homo sapiens
  chr1:116961168-116961228
  hyper
aggccctgaggatgcgccgctcaggtgggagcttccggggagctcgcgcgacagcctggg

SEQ ID NO: 104082 - DNA, 30 bp, Homo sapiens
  chr1:116961449-116961479
  hyper
tcccacccgcgcgtcggccagtgaagggct

SEQ ID NO: 104083 - DNA, 30 bp, Homo sapiens; identical to SEQ ID NO: 36175
  chr1:117113603-117113633
  hyper

SEQ ID NO: 104084 - DNA, 30 bp, Homo sapiens
  chr1:117209521-117209551
  hyper
cacgaagcaagttggcgttcggcagccctg

SEQ ID NO: 104085 - DNA, 339 bp, Homo sapiens; identical to SEQ ID NO: 36176
  chr1:117209808-117210147
  hyper

SEQ ID NO: 104086 - DNA, 41 bp, Homo sapiens; identical to SEQ ID NO: 36177
  chr1:117215386-117215427
  hyper

SEQ ID NO: 104087 - DNA, 1088 bp, Homo sapiens; identical to SEQ ID NO: 761
  chr1:117452333-117453421
  hyper

SEQ ID NO: 104088 - DNA, 30 bp, Homo sapiens
  chr1:117603338-117603368
  hyper
gcgtgttcggaagacgcccagctaattctg

SEQ ID NO: 104089 - DNA, 23 bp, Homo sapiens
  chr1:117630869-117630892
  hyper
gaaaagtcggctgggcgcggtgg

SEQ ID NO: 104090 - DNA, 21 bp, Homo sapiens
  chr1:117631130-117631151
  hyper
cctgggcgacggagcgagact

SEQ ID NO: 104091 - DNA, 676 bp, Homo sapiens
  chr1:117664692-117665368
  hyper
ctcttaaaaagccacgctgatttggcgccgggacggccttctttctgccctcggactcgtcccacgaacgcagactgggttctcccattggtggatggcactgtcagttggctctgcgctgggagtgggagacgtttttcgggctcccgaggtctcggccgctcgggggcgccagacgtttctcctccacgcgggtttgaggctgcgaggctcccctctgtcctcaggcgcttactgtagctcacaggtccctcaggcctagcgtgctgggtacaagcactcccgcggctccccgactttgggtatttttcgggggtgagggcatctcaggctcgcgttacggggaccggttcgggagaccgtggagccgaggtgtcgaatggagggcttacttcggccgggccagggagcgccaccctccttgtcgggctcgggaaggctttgttttccggtccggggggagtgcagatgacctaaggagttgaatgtcacccgggattccacagtcctgtgtaacagaaacgagctgagcgagttggacccgctgtttttatcagtcaatcacggagggctcctgcctggtcacagtgagacaatggacggtggcaatgagggacaagccctttgtgggcttaaaactaattgggaagatgaacacgtccgacccctttaactt

SEQ ID NO: 104092 - DNA, 31 bp, Homo sapiens; identical to SEQ ID NO: 762
  chr1:117695844-117695875
  hyper

SEQ ID NO: 104093 - DNA, 30 bp, Homo sapiens; identical to SEQ ID NO: 763
  chr1:117909184-117909214
  hyper

SEQ ID NO: 104094 - DNA, 30 bp, Homo sapiens; identical to SEQ ID NO: 36183
  chr1:117910210-117910240
  hyper

SEQ ID NO: 104095 - DNA, 413 bp, Homo sapiens
  chr1:118148621-118149034
  hyper
cgggggcgtggtcccgccgtataagaacggagggggcggcggcgggacggctcactcggtgccgctgcctaggggctgtagaggtcgcgccgctcctgctggggcctgcccacgccaaggacctgcctctgtcgcctcctcttctattgcccaggtgagtccgcgacccccctcctctaaaggtgcggcgatgcggcagcagccccagggagccgcgagctcacttagtgggggtccgcccccactaagtggtgctcaggtctttgcccagcctggtagggggcaggcggacccgaggggagctgcggacaggtgccgagacccggtgctcctttcccctcctgctccctcgaggacccccgcccctgacacacccgtcccaaagggccagaagagacgctccgaaagggagc

SEQ ID NO: 104096 - DNA, 318 bp, Homo sapiens
  chr1:118149461-118149779
  hyper
gatccaagccagtgacttgtgcgctgcgcgtctctcagaaacttcttgggaatgcggtgtctgtgaaacctgcttcctctccttttgaaaatgaaacttgctttactgcgtaggtgaaaagccacggcaagtgggtcgactcggacggataccggtgcggctgccccgggaggtgtcgcagttcggggactcccttcgcactggtcgcgaggcaggagggagcagggtgggaggcgagtcagaggagggtgacttacctgaagaatacaggttggtagcctgcacacctgaactcaacgctggcgggcgagaaaacca

SEQ ID NO: 104097 - DNA, 30 bp, Homo sapiens; identical to SEQ ID NO: 36187
  chr1:118150244-118150274
  hyper

SEQ ID NO: 104098 - DNA, 236 bp, Homo sapiens
  chr1:118471567-118471803
  hyper
acttccccctcaagcggccagagagcggaaacacaaagccaggccagtgtcactccagggattgcgggaacctagacaacgcaccatcctgggctcagcgtctacccacccctcacccgaggtgctctcggttccgtagaatgtccagtccacaggaacggcaacacggacttgtctttgggactacaaccagcaagagctcccgcctgccccatttcacctgcaccctagggcgc

SEQ ID NO: 104099 - DNA, 78 bp, Homo sapiens
  chr1:118471866-118471944
  hyper
cgtagagacggcgtccccgacaacgcctcgggaaagaacctaaccaacatgcgaggaagtggcgccaggctcgttctt

SEQ ID NO: 104100 - DNA, 120 bp, Homo sapiens
  chr1:118472378-118472498
  hyper
tcggctgggagcctcgtggaggctgaggtgagtcctggaggtgcgtggttggggcggagagcattatctgcggctccgattttgcagattctggctgaggcgttcgtgatgtcagcagca

SEQ ID NO: 104101 - DNA, 30 bp, Homo sapiens
  chr1:118473049-118473079
  hyper
agaatacaaggtcgcgggacgaggaaggaa

SEQ ID NO: 104102 - DNA, 152 bp, Homo sapiens
  chr1:118727839-118727991
  hyper
cgctaccacagtaaccgaagccacgcccagttcctgaaccacgtcggctcccctcccccaacaccgttcggaatccttgggtcaaccgcctccgtctccacagcaacggagtttcagagcgcgcggcagcttgggggcggggttcccagtcc

SEQ ID NO: 104103 - DNA, 30 bp, Homo sapiens; identical to SEQ ID NO: 765
  chr1:119168297-119168327
  hyper

SEQ ID NO: 104104 - DNA, 3 bp, Homo sapiens
  chr1:119521923-119521926
  hyper
tgc

SEQ ID NO: 104105 - DNA, 82 bp, Homo sapiens
  chr1:119522352-119522434
  hyper
agagctaagaacagccgccatccctcagggttccgggtcccgggtttccagggtcccgggtttccaaggccccgcgataacc

SEQ ID NO: 104106 - DNA, 231 bp, Homo sapiens
  chr1:119522565-119522796
  hyper
cgttccggccccgcggcgcctccaaggccgggccgaggggccgaggggccgagggcgggcagacgcggccacggcctaattctgacttctgaaggtcaccgaaactgcgctgtttttccagagatgggttgaagagaagagatgcaatcccagttccttctgcggcgaaacgggatctgaaattcttggagagggggaagaattggacgttttcatcgtgcgtggaggaaa

SEQ ID NO: 104107 - DNA, 99 bp, Homo sapiens
  chr1:119526832-119526931
  hyper
gtgtcgatctgcctgcgtgtccttggatgtgcctgtctaggtgcccacccgcgcgcgccaccacatccccaggcctctggaacgcagctgctgtgtggc

SEQ ID NO: 104108 - DNA, 551 bp, Homo sapiens
  chr1:119527236-119527787
  hyper
cgagagccaggctcctccgaggctggtcttgaggcacttctctagtagcttctccaaaagactgagagtgccggcgtaggtatgacagtgagggtacctcacagacccttctccaaagtctggcgggccttggggtttttcggggccaccaggctcggtggaatttttgaaacgctttcgaaatacatagtttcctctgtggagtgagtgcctacaacgcgcaggccggactgatcccccgttgctgcaggttggtgccccaagctgcgggtgctcgggcgccaactaaagccagctctgtccagacgcggaaagaaaaatgggctgtgaaaaagcaaaaggcctcgtctttgaatgaaagttaaacattaaaatctgaccctagagttgtctaaagatcgcggaattttgaagctccggcagagcggactaaaaaacggtgctatgagagatggtgagaatactctaggcatgaacgtgtgcgtgtgtgtttgtgtgtgtgtgtgtgtttcattcttcccgcaaaacaattttttgtttttttcctattc

SEQ ID NO: 104109 - DNA, 289 bp, Homo sapiens
  chr1:119527820-119528109
  hyper
cgcagcggcttctgggccctaaggacaaaagagttaaaacaatgaggctcacccgggaagagacgctgccctgggcacaatagggtcgcctgcattactcctccatacacacatctttaaatgtgtccctgtgtgtgttcgttagggtgctgtattacagaaaaagaaaggcctaaaaacacccccagccctggtcgcgcctttcgctaccgcctgagtctggagccgacagctccacctcttctgctccctggaccgccgcgtctccacgccacggcgccctttttac

SEQ ID NO: 104110 - DNA, 436 bp, Homo sapiens
  chr1:119528622-119529058
  hyper
tagacgggctccgtgcgatctggggcctcccaagagaaaacttccccgggacaggacgtctgccacgcgcagctaaacaacttctgttttttccgccgtggggaaaataaaagaaccttacaaattctaaggcgtcataacccctgcaagaacttctaactgtatgaaggcccacgcgagattttgacaatagataaatgagctgaggaaatagggtctggccagcgaagggaaacacacagtagccctgggtgcctttctggaatgcccacgcaggggtccgcgtggacaagcacttgcattcaaatacaggaaaaggcttggacggtcgaaataaatctccttttaattttcttttcatcgactaataaaaataattccccagcactaaactcaaataccgtaacgggccacaaaaacacggagaattcataaa

SEQ ID NO: 104111 - DNA, 15 bp, Homo sapiens
  chr1:119529378-119529393
  hyper
cgttgtatgtgcgcg

SEQ ID NO: 104112 - DNA, 55 bp, Homo sapiens
  chr1:119529856-119529911
  hyper
ctagatctcggctcccgccgttgccttcggcccgcgcccctcccaatcccaggga

SEQ ID NO: 104113 - DNA, 143 bp, Homo sapiens; identical to SEQ ID NO: 766
  chr1:119530005-119530148
  hyper

SEQ ID NO: 104114 - DNA, 306 bp, Homo sapiens; identical to SEQ ID NO: 767
  chr1:119530201-119530507
  hyper

SEQ ID NO: 104115 - DNA, 584 bp, Homo sapiens
  chr1:119530553-119531137
  hyper
cgggtctctccaccctccccctgcgtcctcctccgccctcctctgccggatccgacctgcgcccctacgctggcccagctgctaggaactagcgccccgagcgccgcccgctcgctgcatgagcgcccgagtcctgcttcccacccaccggggcaggcgctcacagactgtgtccactgaacttcatcttgtttttgttattattattattctctctcctctctctctctctctctctctcccctccctctctttttctctcctccccctctctctctcttcctctctgccttcccgtcctccctgtgatccaaacttctgggaaacttttttttccgctaaattcctcccttcccgaggaacagggggcaggcggtgcgctcctgtccgaggggtgagggagagggagggggaggaagaaaaagactgagggggaaaaaagccagcccccaaccaatagcgaggagggaacaagagaaactccgagagcgcgaaccaatgagaggaagggagagactgaggcccgggccaaagcgcagcgccagtcgtcccctggatgctcctgggccgactttaacccctgg

SEQ ID NO: 104116 - DNA, 66 bp, Homo sapiens
  chr1:119531623-119531689
  hyper
gcgcggggtttagggcgagctcctcaggcgtattccagctgggccccctcacgccgcaaatactct

SEQ ID NO: 104117 - DNA, 10 bp, Homo sapiens
  chr1:119531986-119531996
  hyper
agttacgcca

SEQ ID NO: 104118 - DNA, 459 bp, Homo sapiens
  chr1:119535261-119535720
  hyper
gtgggtccactcttgcgggccgcacctccagtcgctcctttaagtcgcagagagctgcgggacccgcataagtcgttaactattcaagcaccccctcacactttttaaaaataaaagtccatgggggtgaaaggtctttaatgatgtttttttgttttcacgaaataaaatcttttatttttattttaaaccagcagcgtgcccatcccttggtccttccagatgtttgcaataaaatcgcaggttttgcctttgggactggaaataaaatttaacggccttcaccctgtaattattctcttagcttgcccttcataaatttatctgcgttctatcggcattggggcaagaggagagcgaaaaggggggggaagccccgattttatatttgtgactataaaaaagcgccacccggtttcctcgccttcggccgccgcggtgtggccggcagagccgggg

SEQ ID NO: 104119 - DNA, 35 bp, Homo sapiens
  chr1:119535907-119535942
  hyper
cgactgcagggtgcgcccgccgttccaggcgccag

SEQ ID NO: 104120 - DNA, 31 bp, Homo sapiens
  chr1:119536346-119536377
  hyper
aagcatgcatacacttcgtacacccacacgc

SEQ ID NO: 104121 - DNA, 14 bp, Homo sapiens
  chr1:119542979-119542993
  hyper
tgtttatttgtgac

SEQ ID NO: 104122 - DNA, 34 bp, Homo sapiens
  chr1:119543069-119543103
  hyper
cgaagagcgggtagatgccggccaagcaaagtgc

SEQ ID NO: 104123 - DNA, 87 bp, Homo sapiens
  chr1:119543127-119543214
  hyper
cgccggaagcctggagaggcaagttgcgagttcgcagggcttgggagttttttgcggcggaagaagctgaatctaggggctgagtcc

SEQ ID NO: 104124 - DNA, 1220 bp, Homo sapiens
  chr1:119543273-119544493
  hyper
cgagattgagagctctttctgcggaacctgcctccggagtcagatgagcaaggggaccgccacgtcctcaccgagctcccagcggcctttggggcgggtccggggacaagccggaggactaggcttctcccagagcgcggctgtctttcccggaaagacccaagtgcgcgatgtcagcccgcctgcacttcatctgagttgtccttatgtggccatttctgtttcaaatttcagatttttctactaaaaaaggatgggttaaaacagctgagagcgcgcctgctctttcccgccctgggttctacatctctctagccgcccaccagactgcatctccaatctgggagctatcctcaccttgggagggtggggcaacaatgttattctcgtttcccgataaggaaaccaacgtccctacaacttgacgttaaatggtcccaggttcctgagcctcaaatctaggactattacctaggtcacctaaaaatttttgttctttccactcccccgagggtgattctgttagcctcgcaggcccttctcccacccgtcatttgaagtcatcgaccccggggcagccccaacagttctgtgcgggcctgcgcgcaccgccctcaccttgcgcgccaggcatctcacctcagccgggcaggtgcagaggtgacaggcgcggcagccgcggttcgtccggccgaggggcaggaggaggctggccgccgccttctgctgcccgcaggctgagggggcaggggagggggaacagggctgggaaactgccgtcagcgggtcccggccccgcctcccgaacgcaacgtccaggaaacctcagaactttctattgtctgagaagcttcactgaacaaattgtccctaaaactttagagctgcgaagagcggatcagggcaggttctagtgtggccctgtgccccggagcctgcctgccataaagtgtgaccggaagcccccccccccccgcccactgtcagaaccactgaggagagaagagcgcggcgccttagtgccgccctgcgtcgtggtcgggaagccgagcaagcggtgtggacgccccaggagcagggggatccaggcctaaactcatgggttccgaatgggcaagggagcagaatcaagcatcggtgggcgcttatagaaagcgcgtctgtcttggaacacccttaccagggtacccaaccccagcgccaggtttcctggccttgca

SEQ ID NO: 104125 - DNA, 81 bp, Homo sapiens; identical to SEQ ID NO: 772
  chr1:119544706-119544787
  hyper

SEQ ID NO: 104126 - DNA, 30 bp, Homo sapiens; identical to SEQ ID NO: 773
  chr1:119545260-119545290
  hyper

SEQ ID NO: 104127 - DNA, 30 bp, Homo sapiens
  chr1:119548527-119548557
  hyper
ggagctagtggaagacgctcagcagcctta

SEQ ID NO: 104128 - DNA, 925 bp, Homo sapiens
  chr1:119548809-119549734
  hyper
atccagatgccgctgcgttcaagctctcccagcacccgcggccgaagtaaataacaattctcttaatgctaaggcagcaaggagagggcactgcgaactgcagacttttcttctaaggatgaagaggacattataaaactgcacactacctccctaatggcccattcgtcctagctctgtctagtgaagtagagagcagaaaaaaacatctagctctatcaagttgaaaacattttcacattcaccttaaactggtgaagcaaacgggttttccctttactaacatcgctcttgtttttccatttagtctttgggaacgtagcctcaatcttaaccgcgtatgatcgtttccactgcacctgtgcgggagagacaggcgcatatccccgtggcgtcggatctctaaattatctaatctggcggctgcgtacgactcagggaaagccctggccgcgagctttttcaccaggcttgagctcagcagccgggcccgcagtgttgccgccagtggggaggcagggaggctgtcggcgcgccggagccaggcgggaaagggactacagccgcccgccgttgtagcgcaggaagcgggcggtgccaacacacacctcgcagctctgcacgttcttcgtgtcttggaggagagtagagcctccgtgtgaagctccgtccgcacctgacgaagaggagggcgtcttgcgccactccagcgactctgcgatgttaagacgcagacccgctgctgcgcctgcctttgtcggggcgggcgggcagccgccgctcggagcaaggtggggctgcggggagggagagccgcggggcagatccctggccaaggtcctctagaaagcccgctctgcgcccaaacgcgccgctcggtccgtgggccacttcggacctgacgctgccggtgaattcacgcgct

SEQ ID NO: 104129 - DNA, 364 bp, Homo sapiens; identical to SEQ ID NO: 36203
  chr1:119549914-119550278
  hyper

SEQ ID NO: 104130 - DNA, 215 bp, Homo sapiens; identical to SEQ ID NO: 36204
  chr1:119550505-119550720
  hyper

SEQ ID NO: 104131 - DNA, 321 bp, Homo sapiens; identical to SEQ ID NO: 777
  chr1:119551013-119551334
  hyper

SEQ ID NO: 104132 - DNA, 30 bp, Homo sapiens; identical to SEQ ID NO: 778
  chr1:119551790-119551820
  hyper

SEQ ID NO: 104133 - DNA, 75 bp, Homo sapiens
  chr1:119683270-119683345
  hyper
gagaagggcggagccgtcttgtttggaatgacgtctgttcagagagccaatcccagtctcgcgactcctgcttgc

SEQ ID NO: 104134 - DNA, 844 bp, Homo sapiens
  chr1:119869836-119870680
  hyper
cacagaacttcaaagcgaaaggaagcacaagcagtagggggaggaggtgtaaatttcccccgcggtcccttggaactgtgaacatttgcagattccccaagccctcccgctagctccctgccaggtgtccgaggcccgaccgcgccccgcccccaccgcgcccccctccccgcaccccgcccctcctgctcccggctttcatgtggatcaaggctggaggatgacaagctcctgactgatagatacatggagacttcgctggtgatttattggctttctgcacctgacgagaaccactaggcctatctgaggagggaaatatatgggctttcctgactccaagtggcagccccggggcgagcatgtgatgtcaagctgggcagaggaaagcggagctgtgcaccggcctgtgtactgtaagccggcccgggtcgtaaaagtgtcagcacgcgatatatttcttgcaggggatcctctctggctcttgccagcgcctctcccccgtggctggcagccgccctagccgggcctgcaaacagcggatgccccaggtcgctatccctccgccctgccccggagcgccgggccctcacgttctcgctccagcctggggtctctcacgtggcatctggccctggggacggtgcagcggaggagttaattgctgtcactcctgacttcagcgaaagaggtcgatcgtggggtgagatattgaagctggggattgacctgtggaccaagagtttgatggggcaactcaatagcaaactcaatgttcccagagatgaaccaagtaatcagttatttattcagaaaattaagtgccattcgtgtgccaggcact

SEQ ID NO: 104135 - DNA, 86 bp, Homo sapiens; identical to SEQ ID NO: 36209
  chr1:120190363-120190449
  hyper

SEQ ID NO: 104136 - DNA, 293 bp, Homo sapiens; identical to SEQ ID NO: 780
  chr1:120190519-120190812
  hyper

SEQ ID NO: 104137 - DNA, 509 bp, Homo sapiens; identical to SEQ ID NO: 781
  chr1:120190871-120191380
  hyper

SEQ ID NO: 104138 - DNA, 256 bp, Homo sapiens
  chr1:120254604-120254860
  hyper
acttctactcacagcggccgattccgaggccaactccagcaatggcttttgcaaatctgcggaaagtgctcatcagtgacagcctggacccttgctgccggaagatcttgcaagatggagggctgcaggtggtggaaaagcagaaccttagcaaagaggagctgatagcggagctgcaggtaaggcgagagagagaaaattgaggtctctagggcaacctccatggaaaaaggctggctgcgcccaggccagcgcg

SEQ ID NO: 104139 - DNA, 30 bp, Homo sapiens
  chr1:120255372-120255402
  hyper
gggaaggcagccctcgtaaggcagcaaaca

SEQ ID NO: 104140 - DNA, 30 bp, Homo sapiens; identical to SEQ ID NO: 782
  chr1:120336067-120336097
  hyper

SEQ ID NO: 104141 - DNA, 30 bp, Homo sapiens; identical to SEQ ID NO: 36213
  chr1:121280597-121280627
  hyper

SEQ ID NO: 104142 - DNA, 30 bp, Homo sapiens; identical to SEQ ID NO: 36214
  chr1:145644968-145644998
  hyper

SEQ ID NO: 104143 - DNA, 2 bp, Homo sapiens
  chr1:147775410-147775412
  hyper
tg

SEQ ID NO: 104144 - DNA, 128 bp, Homo sapiens
  chr1:147775495-147775623
  hyper
cggcaagatgtgcctctcaggttttccgaggctttggagcctgcacaattgttctacaaaaggcagtagctccgccgaacgttggatcgtcccttggtctggtgataccagaacgagagttgactgtg

SEQ ID NO: 104145 - DNA, 218 bp, Homo sapiens
  chr1:150459683-150459901
  hyper
gtctgggggaatagcgagggtgtgttacattttcggtcttccggtcagccggaaccactcacaccgctgctggtgctgtgtagggtgtacctcttcggagttcctggaggtggtgccagactagagtggcagctgtagtaaccaatagacacggactttgttggaccagaagccaatgaagaattacgtggaggagaagcggcgataatctgtttgag

SEQ ID NO: 104146 - DNA, 30 bp, Homo sapiens; identical to SEQ ID NO: 36217
  chr1:150488790-150488820
  hyper

SEQ ID NO: 104147 - DNA, 30 bp, Homo sapiens; identical to SEQ ID NO: 783
  chr1:150521186-150521216
  hyper

SEQ ID NO: 104148 - DNA, 30 bp, Homo sapiens
  chr1:150534006-150534036
  hyper
gaacttgctagaggcggcctgagaggggca

SEQ ID NO: 104149 - DNA, 30 bp, Homo sapiens; identical to SEQ ID NO: 36219
  chr1:150534237-150534267
  hyper

SEQ ID NO: 104150 - DNA, 30 bp, Homo sapiens; identical to SEQ ID NO: 784
  chr1:150534764-150534794
  hyper

SEQ ID NO: 104151 - DNA, 30 bp, Homo sapiens
  chr1:150551365-150551395
  hyper
cgtaaggtctccagcgccttcctgctggtg

SEQ ID NO: 104152 - DNA, 39 bp, Homo sapiens
  chr1:150551999-150552038
  hyper
caaacattgccagtcgccgccgccgcctggctgagaaaa

SEQ ID NO: 104153 - DNA, 113 bp, Homo sapiens; identical to SEQ ID NO: 36222
  chr1:150586170-150586283
  hyper

SEQ ID NO: 104154 - DNA, 62 bp, Homo sapiens; identical to SEQ ID NO: 36223
  chr1:150601696-150601758
  hyper

SEQ ID NO: 104155 - DNA, 30 bp, Homo sapiens; identical to SEQ ID NO: 786
  chr1:150602085-150602115
  hyper

SEQ ID NO: 104156 - DNA, 30 bp, Homo sapiens
  chr1:150602411-150602441
  hyper
aggattaagctttgcggtgttagcagaaaa

SEQ ID NO: 104157 - DNA, 30 bp, Homo sapiens; identical to SEQ ID NO: 787
  chr1:150669240-150669270
  hyper

SEQ ID NO: 104158 - DNA, 459 bp, Homo sapiens; identical to SEQ ID NO: 788
  chr1:150669480-150669939
  hyper

SEQ ID NO: 104159 - DNA, 70 bp, Homo sapiens
  chr1:150849134-150849204
  hyper
ctccccagaagcggcgcctgaccgccgcctccgctaccgcggaatccaagatggcggcttcagcagcccc

SEQ ID NO: 104160 - DNA, 88 bp, Homo sapiens
  chr1:150898620-150898708
  hyper
gagggtggtaggagcggcggagactcggtaatatactggccacgcctactctgccctgccagtctcttctcacgtgtgcccctggaag

SEQ ID NO: 104161 - DNA, 30 bp, Homo sapiens
  chr1:150899236-150899266
  hyper
aaaagcagttcacacgaatgtgtgaagtat

SEQ ID NO: 104162 - DNA, 30 bp, Homo sapiens
  chr1:150946659-150946689
  hyper
gcaaccccgcgggccgctgccagggtggag

SEQ ID NO: 104163 - DNA, 107 bp, Homo sapiens; identical to SEQ ID NO: 36228
  chr1:150947648-150947755
  hyper

SEQ ID NO: 104164 - DNA, 33 bp, Homo sapiens
  chr1:150980782-150980815
  hyper
acattgcggagttgcgggactacgtttcccacg

SEQ ID NO: 104165 - DNA, 201 bp, Homo sapiens
  chr1:150980853-150981054
  hyper
cgtcccaggagcctctgggcgtagagccccgcctccgccgctgggggcggggcgacgccggactccggagcgcccgcttacgcagttcctcccggggtcggaggccgattcgccgtgtggcgggttcgagtcccgcctcctgactctggcctctagtccctgagtcccgggcgggctgcattcgtcggggaaacctctcct

SEQ ID NO: 104166 - DNA, 30 bp, Homo sapiens; identical to SEQ ID NO: 36230
  chr1:150981637-150981667
  hyper

SEQ ID NO: 104167 - DNA, 815 bp, Homo sapiens
  chr1:151020068-151020883
  hyper
ctccaaagaagtgaacgactctttcaccaccccttgcatcccaaaccttcggttctggcagagttcttgccgcagaggttccttaggagcaccccgcgcggcccgcgcgagcgcgcctgcgcgtcgaaccccacccccttccccgcgggcctcggttcaaacgacccggtgggtctacagcggaagggagggagcgaaggtaggaggcagggcttgcctcactggccaccctcccaaccccaagagcccagccccatggtccccgccgccggcgcgctgctgtgggtcctgctgctgaatctgggtccccgggcggcgggggcccaaggcctgacccagactccgaccgaaatgcagcgggtcagtttacgctttgggggccccatgacccgcagctaccggagcaccgcccggactggtcttccccggaagacaaggataatcctagaggacgagaatgatgccatggccgacgccgaccgcctggctggaccagcggctgccgagctcttggccgccacggtgtccaccggctttagccggtcgtccgccattaacgaggaggatgggtcttcagaagagggggttgtgattaatgccggaaaggatagcaccagcagagagcttcccagtgcgactcccaatacagcggggagttccagcacgaggtttatagccaatagtcaggagcctgaaatcaggctgacttcaagcctgccgcgctcccccgggaggtctactgaggacctgccaggctcgcaggccaccctgagccagtggtccacacctgggtctaccccgagccggtggccgtc

SEQ ID NO: 104168 - DNA, 56 bp, Homo sapiens
  chr1:151031280-151031336
  hyper
tctcccggtcccaccgcctctggccctaaggcctccaacccgcggcctgacaagcc

SEQ ID NO: 104169 - DNA, 171 bp, Homo sapiens
  chr1:151032104-151032275
  hyper
ggaagcggcggcgacgcgattacgaaacccgtccggctcggagcccggcgcactgctcccctctggactgcggaggcactgcactgcgcgggacgtgggagggtgcctctgcagcccctcaaggccgccgcccctgcggggagaactggagaatgcggacacctagatgag

SEQ ID NO: 104170 - DNA, 107 bp, Homo sapiens
  chr1:151042861-151042968
  hyper
aaacctggccgccccggaccccgaagaagcagccaagagttaagacgcaatctgcatgactgacgcacgctccgagtctccctcagcagttcgccaggttcttggcg

SEQ ID NO: 104171 - DNA, 239 bp, Homo sapiens; identical to SEQ ID NO: 36236
  chr1:151043248-151043487
  hyper

SEQ ID NO: 104172 - DNA, 30 bp, Homo sapiens
  chr1:151118706-151118736
  hyper
caccagtacagttacggggctcggccactg

SEQ ID NO: 104173 - DNA, 190 bp, Homo sapiens
  chr1:151119042-151119232
  hyper
ttccagggcgctgtcgggagagccctgggtccaagtccagccgcggatccgcggaggaaaacaatgcgaccgcccggggctctgggctcggccccagtggccccgcccgcctcccagccgggcccacctcctgcccgcctttgggtcgccgcgactaatcccgccctcggagggcggctagacaccgcct

SEQ ID NO: 104174 - DNA, 30 bp, Homo sapiens; identical to SEQ ID NO: 36238
  chr1:151119510-151119540
  hyper

SEQ ID NO: 104175 - DNA, 79 bp, Homo sapiens
  chr1:151138452-151138531
  hyper
agagagtggatttccggatcgcgcaatgcatgcgtggaagtgcgtccccggaagtacggaggccgacaggaagagaagg

SEQ ID NO: 104176 - DNA, 30 bp, Homo sapiens
  chr1:151162692-151162722
  hyper
cggcggaagtcgggcgtttacaggcagaag

SEQ ID NO: 104177 - DNA, 133 bp, Homo sapiens
  chr1:151170899-151171032
  hyper
tggactcgtcagggcgtgaggacccacctcacgtgaccattagcagcctcccgattggttttgctccttttttctccccaatgagtgggctgatgccccgagaaggtcgggcgcatgcgcagtgctcggattt

SEQ ID NO: 104178 - DNA, 30 bp, Homo sapiens
  chr1:151227521-151227551
  hyper
tttctctgttctagcgccgtcttctctaga

SEQ ID NO: 104179 - DNA, 179 bp, Homo sapiens
  chr1:151254485-151254664
  hyper
tggcggaggccaatcgtttacgagactcgtagatggggcagacggaccccggcgcagccaatggggagaggtatcttcagagggcctcggccccttgcccaatgagcataagaggactgtgcggggctagttccgagcggcagtatttagggccaacccagtgcggggctggaaggggc

SEQ ID NO: 104180 - DNA, 30 bp, Homo sapiens
  chr1:151255056-151255086
  hyper
ttgtaagcacagtccgtagccgggtaaacc

SEQ ID NO: 104181 - DNA, 30 bp, Homo sapiens
  chr1:151255727-151255757
  hyper
ggcctcaacctaatcgccgccagcccctcg

SEQ ID NO: 104182 - DNA, 30 bp, Homo sapiens
  chr1:151299767-151299797
  hyper
ggggtgcgggcagtcgcggttggactgccg

SEQ ID NO: 104183 - DNA, 30 bp, Homo sapiens
  chr1:151319523-151319553
  hyper
ggggtcccagattccgggcacgtgcacatg

SEQ ID NO: 104184 - DNA, 49 bp, Homo sapiens
  chr1:151319767-151319816
  hyper
atggttgtaacagccgcgatctgcctagatacacgggcggcctgctctg

SEQ ID NO: 104185 - DNA, 30 bp, Homo sapiens
  chr1:151371929-151371959
  hyper
tgcatgttcagctacgacctcatcaacatg

SEQ ID NO: 104186 - DNA, 30 bp, Homo sapiens
  chr1:151372213-151372243
  hyper
ggcgctttcgtttgcgtagcgggagggacc

SEQ ID NO: 104187 - DNA, 30 bp, Homo sapiens
  chr1:151372637-151372667
  hyper
ttgaagcaagttctcggccagatggtgtaa

SEQ ID NO: 104188 - DNA, 233 bp, Homo sapiens
  chr1:151483993-151484226
  hyper
gagtggacccggtgcgggccagggcacccgagaggaaagcgagccttcaggggtacctttgaggggcaggcatcgaggcggtgtgagatgcccctctccagggcaccggtgccgagtgggagacgggaggaggggagattggggcggggtggggtactgattaagagccgacccctaccctgaggtgccagatgcaggtggctaggaaggtgccaggcgaggggcacctgggg

SEQ ID NO: 104189 - DNA, 894 bp, Homo sapiens; identical to SEQ ID NO: 36240
  chr1:151512577-151513471
  hyper

SEQ ID NO: 104190 - DNA, 30 bp, Homo sapiens; identical to SEQ ID NO: 795
  chr1:151566301-151566331
  hyper

SEQ ID NO: 104191 - DNA, 212 bp, Homo sapiens; identical to SEQ ID NO: 796
  chr1:151566652-151566864
  hyper

SEQ ID NO: 104192 - DNA, 290 bp, Homo sapiens
  chr1:151584376-151584666
  hyper
gcaggccttgcttccgaactgcgtcttataacctcggctcaggcccaggcccagaccgctccccgcccccgccacccataaactacatctcccaggaggccccacggtgcccgattgtccgcttttcgcccgccccctgcctcctcttcaccccgcgccagcagctcggtggccgagtcggtcccgcggccggcggatcgggcgcgcgcgtcgggggtcgtccggctgccaggcagggcgagcacgcgccgggaggccttggaggcgtagggggcgggggtacggctcgc

SEQ ID NO: 104193 - DNA, 35 bp, Homo sapiens; identical to SEQ ID NO: 797
  chr1:151584887-151584922
  hyper

SEQ ID NO: 104194 - DNA, 414 bp, Homo sapiens; identical to SEQ ID NO: 36244
  chr1:151689188-151689602
  hyper

SEQ ID NO: 104195 - DNA, 664 bp, Homo sapiens
  chr1:151693821-151694485
  hyper
aatcagtcccccaatccgggaaaggcgatcctttagagacccaccccccaagcccccgccccggagctcacccctcagttccctcagcccctagcccctgcttcgctgaaggggccgggcttgggggcagggcggggccgggggcggggcctcgccggctcgcggccggtcgccttgacgaccgcagcaagatggagacgctgccaggcttgctgcagcggcccgaccccggggcgcttagcgcagcgcagctggagcagctgcgaaaattcaaggtgggtgcgcccgcgcccccatccagcgtccaccaaagtgtagctgccccaggactggggccccagactgggaagagagccgccgagagaaggggagcgggagcctgttccctgataaagtggggagggcgcaggggagacccccggcggacctctaggcgtctgatcccagcacagagcgcgacgggcatctgagagtgcaggaagaactaactcagggactcggccagagaaatgggccgaaattactgccagacacatccgaccttagtaaaggcccctcatcctgaacaagcggcagaatgatattttatctgtaagaagatgggtggcttaaactttcaagcatcctggggaaagacttgggttaaatgcgcacgccgtttccc

SEQ ID NO: 104196 - DNA, 30 bp, Homo sapiens
  chr1:151735829-151735859
  hyper
ggccaggtcaggggcgttcccttcatgtcg

SEQ ID NO: 104197 - DNA, 30 bp, Homo sapiens
  chr1:151736077-151736107
  hyper
aacagatggcaccgcggcttgcctattttt

SEQ ID NO: 104198 - DNA, 111 bp, Homo sapiens; identical to SEQ ID NO: 36246
  chr1:151762600-151762711
  hyper

SEQ ID NO: 104199 - DNA, 30 bp, Homo sapiens
  chr1:151763365-151763395
  hyper
atgagtggcaccgttcgcaaaaattggtgt

SEQ ID NO: 104200 - DNA, 304 bp, Homo sapiens
  chr1:151763858-151764162
  hyper
aagggagcgggtctccgcaggcggaagtttgctttggaagattttattccagacgctgtcctggtccctggacggttaggaacggttgggtcctgctactgcctccgtggggcagggagcctcgcgagaccagcactgcgccctactcggtccaccctgtccccgctccgcgctaggggctcaccctgggaacaggggtcgggcgatcctggtcattgggggatcttccgcactagcttccatcacaatacctggcaggtgatgagcaataaatatttgctgaaagaacgcaaggttgtatctt

SEQ ID NO: 104201 - DNA, 215 bp, Homo sapiens
  chr1:151801435-151801650
  hyper
cagtgtgagactctgtctcaaaaaaaaaaaaaaaaagcctggtgcaggctccctgtctcccttggcagcagcgctgagttcctgagttcctgaggccaccccgcctccgcacacccccctacctctatctccttccttccccggcctggcagtcggccccaccccctcccatctccctgcctctgtccagcatttctcctcgccttttttcacaa

SEQ ID NO: 104202 - DNA, 30 bp, Homo sapiens
  chr1:151802005-151802035
  hyper
ctaggatcccactgccgcactccttccctc

SEQ ID NO: 104203 - DNA, 85 bp, Homo sapiens
  chr1:151811028-151811113
  hyper
ggcgacgaggccgtgtcgctgtcgggggcccggcagaggcgcaggtccggggcggagacgtgcagccgggactgcgccgcgggga

SEQ ID NO: 104204 - DNA, 25 bp, Homo sapiens
  chr1:151811614-151811639
  hyper
caccgcgccccggtctccggaccca

SEQ ID NO: 104205 - DNA, 46 bp, Homo sapiens; identical to SEQ ID NO: 36248
  chr1:151966777-151966823
  hyper

SEQ ID NO: 104206 - DNA, 145 bp, Homo sapiens
  chr1:152008863-152009008
  hyper
taaagtttcagtcccgttgggtcttggccgtctgccgggtgcttactgaaactttgattttccctggggctagacgaccaagttctaaaatgtcccttttctggtgtacagaaataactagtgacccctcgcagctttccagccc

SEQ ID NO: 104207 - DNA, 69 bp, Homo sapiens
  chr1:152009442-152009511
  hyper
ctctgtgcgcgcggcgtgcgggtctggagcctctcctcaacccacgcccttcccggcccagccttgccc

SEQ ID NO: 104208 - DNA, 578 bp, Homo sapiens
  chr1:152080383-152080961
  hyper
tcgcgctcctggcggcgcagctgctgttcttccctttccggacggagctgctcttcctctaggatttttctgtagcgttcttggcggcgcagctgctcttgctccgtttcttggcgcagctgttcctcctcacggaattttctctccagttcctggcggcgcagctgctgttcctcctggaggaattttctctctcgttcctgacggcggagctgctgttcctcttcgcggaattttctgtcacgctcttggcggcgcagctgctgttcctccccttcctggagcagctgttcctcttcacggaattttctgtcgcggtcgtgacgcagctgttgttcgcgctcctggcggcgcagctgcggttcctcctcgaggaattttctgtcacgctcttggcggtgcagctgctgttcttccctttcctggagcagctgttcgtcttcgcggaattttctgtcgcgctcctggcgcagctgttgttggccctcctggcggcgcagctgctgttcgtcctccatgaattttctctcttgttcctggcggcgcactttctgttcctctaaacggaattttctgtc

SEQ ID NO: 104209 - DNA, 84 bp, Homo sapiens; identical to SEQ ID NO: 36249
  chr1:152082877-152082961
  hyper

SEQ ID NO: 104210 - DNA, 46 bp, Homo sapiens; identical to SEQ ID NO: 36250
  chr1:152083261-152083307
  hyper

SEQ ID NO: 104211 - DNA, 391 bp, Homo sapiens
  chr1:152083935-152084326
  hyper
cgcctctcctcctcgcgcttcagcagctgatcgcgcctctcctcctgctcgcgcttcagccgctgctctcgcctctcctgctcgagcctcttctcctcctcgcgcttcagcagctgctcgcgcctctcctcctgctcgcgtcttagttgttgctcgctcctcaaccgctgctggagcctctcttcctcctcctggcgcttcagccgctgctcgcgcctctcctcttgctcccgccttagttgctgctcgcgcctctcctgctgctcgcgcctctcctcctcctcgagcttcagccaacgttcgcgcctctcctcctcctggtcgcgcttcagctgctgcttgcgcctctcctgctcgtgcctctccgtctcctcctcgcgcttcagccaat

SEQ ID NO: 104212 - DNA, 144 bp, Homo sapiens
  chr1:152084598-152084742
  hyper
ctcagctgctgctcgcgcctctcctcctcctgctcgcgcctcagctgctgctcgcgcctctcctcctgctcgcgcctcagctgctgctcgcgcctctcctcctgctgctcgcgcctctcctgctgctcgcgcctctcctcctgc

SEQ ID NO: 104213 - DNA, 127 bp, Homo sapiens; identical to SEQ ID NO: 36251
  chr1:152487829-152487956
  hyper

SEQ ID NO: 104214 - DNA, 252 bp, Homo sapiens
  chr1:152487999-152488251
  hyper
cggcgactcaggctgctgcggctccagctccaccagttgctgctgcttcccaaggagacgccgccgacagcggagtagtggttgctgctgctgcgggggcggcagccagaggtcccagcgctccaacaaccggagctcaggatgctgctccggctgctgagaggcccgcaacccccagcgctgcgctagagaaacccgcccagcccagagcgggcccgccccgctgcggctcccacgcggggctgggcctcg

SEQ ID NO: 104215 - DNA, 47 bp, Homo sapiens
  chr1:153377335-153377382
  hyper
cgaaggacccagccacgtggtactgcctccggcgacaaccagggcga

SEQ ID NO: 104216 - DNA, 38 bp, Homo sapiens; identical to SEQ ID NO: 36254
  chr1:153395126-153395164
  hyper

SEQ ID NO: 104217 - DNA, 30 bp, Homo sapiens; identical to SEQ ID NO: 804
  chr1:153425048-153425078
  hyper

SEQ ID NO: 104218 - DNA, 95 bp, Homo sapiens; identical to SEQ ID NO: 36256
  chr1:153438388-153438483
  hyper

SEQ ID NO: 104219 - DNA, 177 bp, Homo sapiens; identical to SEQ ID NO: 36257
  chr1:153508698-153508875
  hyper

SEQ ID NO: 104220 - DNA, 76 bp, Homo sapiens
  chr1:153606601-153606677
  hyper
aggaaagggcaggccgggtgagcagacggatcggccgactagacagccaaccagcaacaacgaactgagctcgcat

SEQ ID NO: 104221 - DNA, 30 bp, Homo sapiens; identical to SEQ ID NO: 36258
  chr1:153606928-153606958
  hyper

SEQ ID NO: 104222 - DNA, 181 bp, Homo sapiens
  chr1:153631119-153631300
  hyper
cagcatttcccgggcgccccctcacggggcggggcagtgcggcgcggctccggttcccggcggccctcgcggcaggtttcgggcttcaggacaattcgtgatggcgggggctggttccgccgctgtatcgggggcagggaccccggtggcggggcccacaggccgcgaccttttcgccgaa

SEQ ID NO: 104223 - DNA, 30 bp, Homo sapiens; identical to SEQ ID NO: 36259
  chr1:153643029-153643059
  hyper

SEQ ID NO: 104224 - DNA, 30 bp, Homo sapiens; identical to SEQ ID NO: 806
  chr1:153643807-153643837
  hyper

SEQ ID NO: 104225 - DNA, 1495 bp, Homo sapiens
  chr1:153650944-153652439
  hyper
aggtaggcgtggggcggccgagaccggggaagatggtccacggggaagcgcgcgggctgggcggcggggaggaaggagttaaagatcctggattggctcttctgtcactgagtctgggaggggaagcggctgggagggagggttcggagcttggctcgggtcctccacggttccctccggatagccggagacttgggccggccggacgccccttctggcacactccctggggcaggcgctcacgcacgctacaaacacacactcctctttcctccctcgcgcgccctctctcatccttcttcacgaagcgctcactcgcaccctttctctctctctctctctctctctaacacgcacgcacactcccagttgttcacactcgggtcctctccagcccgacgttctcctggcacccacctgctccgcggcgccctgcgcgcccccctcggtcgcgccccttgcgctctcggcccagaccgtcgcagctacagggggcctcgagccccggggtgagcgtccccgtcccgctcctgctccttcccatagggacgcgcctgatgcctgggaccggccgctgagcccaaggggaccgaggaggccatggtaggagcgctcgcctgctgcggtgcccgctgaggccatgccggggccccggcgccccgctggctcccgcctgcgcctgctcctgctcctgctgctgccgccgctgctgctgctgctccggggcagccacgcgggcaacctgacggtagccgtggtactgccgctggccaatacctcgtacccctggtcgtgggcgcgcgtgggacccgccgtggagctggccctggcccaggtgaaggcgcgccccgacttgctgccgggctggacggtccgcacggtgctgggcagcagcgaaaacgcgctgggcgtctgctccgacaccgcagcgcccctggccgcggtggacctcaagtgggagcacaaccccgctgtgttcctgggccccggctgcgtgtacgccgccgccccagtggggcgcttcaccgcgcactggcgggtcccgctgctgaccgccggcgccccggcgctgggcttcggtgtcaaggacgagtatgcgctgaccacccgcgcggggcccagctacgccaagctgggggacttcgtggcggcgctgcaccgacggctgggctgggagcgccaagcgctcatgctctacgcctaccggccgggtgacgaagagcactgcttcttcctcgtggaggggctgttcatgcgggtccgcgaccgcctcaatattacggtggaccacctggagttcgccgaggacgacctcagccactacaccaggctgctgcggaccatgccgcgcaaaggccgaggtgagacgctggcacaccccgtcccgccgcttagccgcagggcctcccctctgacctgccggaggcatcgggactttctctctcatctgggggcactcttctttctcctcgccgttcttcattctactttcagc

SEQ ID NO: 104226 - DNA, 30 bp, Homo sapiens
  chr1:153894448-153894478
  hyper
agggtaagttccaccgaccctcaggaactg

SEQ ID NO: 104227 - DNA, 190 bp, Homo sapiens
  chr1:153895706-153895896
  hyper
cacatccgggtcttcgacagcccattaagtgtcgggggtcaaaaaatcgcttcaggctgcaactttaccttagagacgttttggtccccaggcagccgccgtaccccagtctctccaaaccgggattcccctttggccatctctcattctttcaattctaaagatggagactggcgaacggcgatggggt

SEQ ID NO: 104228 - DNA, 30 bp, Homo sapiens; identical to SEQ ID NO: 36263
  chr1:153918694-153918724
  hyper

SEQ ID NO: 104229 - DNA, 209 bp, Homo sapiens
  chr1:153919194-153919403
  hyper
gcccaaagcccagccgcctgcagcccgacccctggcggctgggagggccccctgcacccaggtagcttcccaccatccagcccgtgcctcaggacactgaccccaggcgacccagagggccgcggcgcgctcccttcccgcctgggtcctgcagtcagatgtggcaagcatgatgtgggcgcaggtgaagtcccgaaggtctagtctac

SEQ ID NO: 104230 - DNA, 30 bp, Homo sapiens
  chr1:153930864-153930894
  hyper
tctcctcggcctgacgctgcttctgcagcg

SEQ ID NO: 104231 - DNA, 109 bp, Homo sapiens
  chr1:153931159-153931268
  hyper
cacatccccagtcacgcagcactaggaggaaacggactccacttcccagcagccctgctgactccggaaactggggacttggctccaccctctcggctactccctgaga

SEQ ID NO: 104232 - DNA, 173 bp, Homo sapiens
  chr1:153936112-153936285
  hyper
cagaccgggagtgacgtcagttaggagcaatcagagatcgggagcgggagcgggcggagcaggcgacctgaggagagtgagcgagagcaagagcggatattaggaaaaggacctcggggctggggccctggggcgcatctgtggaggactgaggggccggagcgggccagtca

SEQ ID NO: 104233 - DNA, 177 bp, Homo sapiens; identical to SEQ ID NO: 808
  chr1:153936614-153936791
  hyper

SEQ ID NO: 104234 - DNA, 157 bp, Homo sapiens; identical to SEQ ID NO: 809
  chr1:153940531-153940688
  hyper

SEQ ID NO: 104235 - DNA, 30 bp, Homo sapiens; identical to SEQ ID NO: 36268
  chr1:153949877-153949907
  hyper

SEQ ID NO: 104236 - DNA, 331 bp, Homo sapiens; identical to SEQ ID NO: 810
  chr1:153958646-153958977
  hyper

SEQ ID NO: 104237 - DNA, 30 bp, Homo sapiens
  chr1:153959233-153959263
  hyper
agatgagttatcatcggtttctggggctga

SEQ ID NO: 104238 - DNA, 27 bp, Homo sapiens
  chr1:153963224-153963251
  hyper
ttccgctttcgctcctttccggcggtg

SEQ ID NO: 104239 - DNA, 308 bp, Homo sapiens
  chr1:153963300-153963608
  hyper
cggcggagatctcgctgttctgtccgaactctcccctcacgctgatttcggatcgtagagggtcctcatttaccctctgcacttcttaggacattaactccagggaccgcagcggcccacgggccacccgcatagacgggagcggagaggagataagatggcggcccagctgcgcagacaccaggggcggcgaggggcgagctctccccggtgtgtgacagtgggggctattttcgaccatcccattttcgctgttggtttctaaatctctgcatttctgtccctcttagctcgcaaaggatctcctt

SEQ ID NO: 104240 - DNA, 30 bp, Homo sapiens
  chr1:154154883-154154913
  hyper
gagggagggcaccgcgcttcctctcagcca

SEQ ID NO: 104241 - DNA, 30 bp, Homo sapiens
  chr1:154155280-154155310
  hyper
gtttccccctcgtccgcttggtgtcctact

SEQ ID NO: 104242 - DNA, 30 bp, Homo sapiens
  chr1:154155888-154155918
  hyper
tggtaactgggcggcgcttcgtgccctagc

SEQ ID NO: 104243 - DNA, 30 bp, Homo sapiens
  chr1:154192355-154192385
  hyper
atttcattgcaaagcgcatgatttgcctct

SEQ ID NO: 104244 - DNA, 30 bp, Homo sapiens; identical to SEQ ID NO: 36272
  chr1:154192829-154192859
  hyper

SEQ ID NO: 104245 - DNA, 30 bp, Homo sapiens; identical to SEQ ID NO: 812
  chr1:154193254-154193284
  hyper

SEQ ID NO: 104246 - DNA, 30 bp, Homo sapiens
  chr1:154193715-154193745
  hyper
gcggcctagtgggccgcgccagagccgggg

SEQ ID NO: 104247 - DNA, 30 bp, Homo sapiens; identical to SEQ ID NO: 36274
  chr1:154194034-154194064
  hyper

SEQ ID NO: 104248 - DNA, 136 bp, Homo sapiens
  chr1:154244744-154244880
  hyper
aggctggccagccccgcgggtggggtggttgagggacgccctcaagccggtccatttgtgcggctgggctgccctctggcggctttatccgggtgccatccagagtcaaaccctcgaaatcgcttttcgtactgag

SEQ ID NO: 104249 - DNA, 30 bp, Homo sapiens; identical to SEQ ID NO: 36276
  chr1:154297256-154297286
  hyper

SEQ ID NO: 104250 - DNA, 449 bp, Homo sapiens
  chr1:154297540-154297989
  hyper
tctcggtgctgtgtcgttcattcaaggagagttgagatacagtgaaatgagccagggcgaggagggagggtgaaggaacggagggcgggcggctccgaggagcgagagtcgggctgagggcaacctggcgccagggaaaattctggttattcaccacttctacagctctcctgccgctccctgcagaggatgctcgttttgcagagaaggcagtgttcctctattcccttcttccgaattaaaaataccccctcagagcgatctagcctcccgaattgttttttcttttaagatgcggatggacgtacgtgtgggggcatcccagcccagccacgccgaggctcggaagggctaagaccctcccactgccccgcacaaagatggctgctccctcctccccgctccttctcccctccccaaaaccccctcccgccccccggcccccgccg

SEQ ID NO: 104251 - DNA, 114 bp, Homo sapiens; identical to SEQ ID NO: 36278
  chr1:154298038-154298152
  hyper

SEQ ID NO: 104252 - DNA, 240 bp, Homo sapiens
  chr1:154298253-154298493
  hyper
cgcggggctggaggggccggggagcgggtgtagactggggagcaccgggggccaagatttgggagctgcggccagacggggcggggatggcggccgactggagacgaggggctgtcgggttcccggggacggggcagagcgggggtctgcgtacaggatgggaggatggggtgccgaaggggcgcgtggagagcaggagagcggcgcgagtgccaaggagaagctcgtgcagccttggcc

SEQ ID NO: 104253 - DNA, 30 bp, Homo sapiens
  chr1:154298904-154298934
  hyper
atcccaaatgtggccgagagggggctgggg

SEQ ID NO: 104254 - DNA, 30 bp, Homo sapiens
  chr1:154301022-154301052
  hyper
tgtgtgtgtgaaagcggttgcccccgacaa

SEQ ID NO: 104255 - DNA, 216 bp, Homo sapiens
  chr1:154377606-154377822
  hyper
actggtggctgatacgcccttttctcatcaacagaaccgggaggaagggctctggtggggctggcggtcccctgttctccccgctcaggtgcggcgctgtggcaggaagccaccccctcggtcggccggtgcgcggggctgttgcgccatccgctccggctttcgtaaccgcaccctgggacggcccagagacgctccagcgcgagttcctcaaat

SEQ ID NO: 104256 - DNA, 30 bp, Homo sapiens
  chr1:154378315-154378345
  hyper
ctgccttgaggccccgcgggtacctagctg

SEQ ID NO: 104257 - DNA, 284 bp, Homo sapiens; identical to SEQ ID NO: 36281
  chr1:154474300-154474584
  hyper

SEQ ID NO: 104258 - DNA, 34 bp, Homo sapiens; identical to SEQ ID NO: 815
  chr1:154474743-154474777
  hyper

SEQ ID NO: 104259 - DNA, 80 bp, Homo sapiens; identical to SEQ ID NO: 816
  chr1:154474987-154475067
  hyper

SEQ ID NO: 104260 - DNA, 67 bp, Homo sapiens; identical to SEQ ID NO: 817
  chr1:154475371-154475438
  hyper

SEQ ID NO: 104261 - DNA, 69 bp, Homo sapiens
  chr1:154531378-154531447
  hyper
cttgcctctgtgggcgcctcagtgcgagtttgcgtatgtcgtgcgtgcttgcgcgcgacgccccttcgc

SEQ ID NO: 104262 - DNA, 227 bp, Homo sapiens; identical to SEQ ID NO: 36286
  chr1:154540059-154540286
  hyper

SEQ ID NO: 104263 - DNA, 30 bp, Homo sapiens
  chr1:154580332-154580362
  hyper
gctgcttggcaagacgacacacacacacac

SEQ ID NO: 104264 - DNA, 30 bp, Homo sapiens
  chr1:154580724-154580754
  hyper
ttgagcaaatcttgcgccacgcttggtttc

SEQ ID NO: 104265 - DNA, 30 bp, Homo sapiens
  chr1:154599637-154599667
  hyper
ctctgataccaacacgaaacacctggggcc

SEQ ID NO: 104266 - DNA, 30 bp, Homo sapiens
  chr1:154600116-154600146
  hyper
tacaccggcccgggcgtccgcctcctggaa

SEQ ID NO: 104267 - DNA, 54 bp, Homo sapiens
  chr1:154600441-154600495
  hyper
atcaatggtctggtcgcagattggtgacatcattggcgcgccgggcgtgggagg

SEQ ID NO: 104268 - DNA, 31 bp, Homo sapiens; identical to SEQ ID NO: 818
  chr1:154816590-154816621
  hyper

SEQ ID NO: 104269 - DNA, 80 bp, Homo sapiens; identical to SEQ ID NO: 36289
  chr1:154842702-154842782
  hyper

SEQ ID NO: 104270 - DNA, 644 bp, Homo sapiens
  chr1:154909301-154909945
  hyper
gggctgaccgcccgcgaccgtgccctcagctcatgtccaaacagatatggggagaaaagggtgagacacgcggagagaaaggcggttccttcacagagcagcctcccctcgtgaagctcccccacccgaactcacttagaacagtccagccccgcccagaaccttcgctcacagcctggcctgcttaactgacacccggggaggaaccggacgcgactaccttcctccgaggggggtgacgtctgaaatttcctgaggtgaaccccatgttcccttccgcgcagccctaaaactttaggaaaaaaaatctctggagtgagatcacgttggagacgttttggaaactgcccttttgcctgtgcgttatagtacatgtgccacagcaaatctgcgcgcgccccagagtgggaatgggtcttcctgggggcgtaaggcagccctgacgcgagcggcgtgtctggccacgtcatgtcgggggaggagcagaatcgcgcacacgatatttcattgtcaagcagattttataacccgagacgtcactaagatgtggccctttaagcccggcgagaaacctttgattgcttttctagccgcagcctccggcccaaaggttttcggaagcaaacggcgtgggtgacatcaat

SEQ ID NO: 104271 - DNA, 30 bp, Homo sapiens
  chr1:154928713-154928743
  hyper
gaagggaggtctagcgacacggccctaaac

SEQ ID NO: 104272 - DNA, 30 bp, Homo sapiens
  chr1:154947298-154947328
  hyper
gcaatagcgagggtcgtgagctttggccgc

SEQ ID NO: 104273 - DNA, 30 bp, Homo sapiens; identical to SEQ ID NO: 36291
  chr1:154948290-154948320
  hyper

SEQ ID NO: 104274 - DNA, 196 bp, Homo sapiens
  chr1:154955612-154955808
  hyper
taaggtccggcccccgtatttccgggcgagaagtgaccacgtggttgtcgcctataacaatccggccctgctcccatccactggctaaagcctgagagcgacagttgaatacaccaatgggaccctggaagagtctaagcgacagccaaaatcaccattcaatgtcagctaggtgcaaggcgggactttaagtacg

SEQ ID NO: 104275 - DNA, 30 bp, Homo sapiens
  chr1:154956207-154956237
  hyper
aggaacaaaggagtcgcttgtcaaggatct

SEQ ID NO: 104276 - DNA, 8 bp, Homo sapiens
  chr1:154971611-154971619
  hyper
gccttgga

SEQ ID NO: 104277 - DNA, 677 bp, Homo sapiens; identical to SEQ ID NO: 36293
  chr1:154971706-154972383
  hyper

SEQ ID NO: 104278 - DNA, 30 bp, Homo sapiens
  chr1:154973687-154973717
  hyper
cagggcccccctggcgccgcccattgtggt

SEQ ID NO: 104279 - DNA, 30 bp, Homo sapiens; identical to SEQ ID NO: 36294
  chr1:154973930-154973960
  hyper

SEQ ID NO: 104280 - DNA, 30 bp, Homo sapiens
  chr1:154976632-154976662
  hyper
ctagtttgggacaccggaagtgggtgctgg

SEQ ID NO: 104281 - DNA, 813 bp, Homo sapiens; identical to SEQ ID NO: 36295
  chr1:155036004-155036817
  hyper

SEQ ID NO: 104282 - DNA, 546 bp, Homo sapiens; identical to SEQ ID NO: 36296
  chr1:155043325-155043871
  hyper

SEQ ID NO: 104283 - DNA, 239 bp, Homo sapiens
  chr1:155051345-155051584
  hyper
agggagctgggaagcggagaagccgggagcgcggggctcagtcggggggcggcggcggcggcggctccggggatggcggcggctccgctgctgctgctgctgctgctcgtgcccgtgccgctgctgccgctgctggcccaagggcccggaggggcgctgggaaaccggcatgcggtgtactggaacagctccaaccagcagtgagtcggggaccctgggagtccgcgcgtcccgtctca

SEQ ID NO: 104284 - DNA, 30 bp, Homo sapiens; identical to SEQ ID NO: 36297
  chr1:155052931-155052961
  hyper

SEQ ID NO: 104285 - DNA, 30 bp, Homo sapiens; identical to SEQ ID NO: 36298
  chr1:155053836-155053866
  hyper

SEQ ID NO: 104286 - DNA, 94 bp, Homo sapiens; identical to SEQ ID NO: 36299
  chr1:155055087-155055181
  hyper

SEQ ID NO: 104287 - DNA, 30 bp, Homo sapiens
  chr1:155058681-155058711
  hyper
gtgagtctgcgcagcgccctctggtggcca

SEQ ID NO: 104288 - DNA, 30 bp, Homo sapiens
  chr1:155064086-155064116
  hyper
tatccaccaggtggcgcagcacctgggctg

SEQ ID NO: 104289 - DNA, 538 bp, Homo sapiens
  chr1:155099555-155100093
  hyper
tattcaagagcctgttcgcacggtgtacgcgtgtgttgttacatatactcaggttattagcgctctttgacttatctaaaataagaacggccccctctcgagcccagggtcccgcgtgtcgctcctgcgggcaggcactgatgtgatggacagaggcgtccttagccccggccgcacacgttacacactcgatcacacaaagcgttgcactttattcccggcatctaggcgatgacacaatctccagaacaaagacaacattgacaaacccaacaaaaacaaacagccgcgtgtgtgtggggaggggcagtcaagcgcagagtccgggaaggggatgggggaggaggagagtgtgggaacgcgggcgcccgagcctgggcatgcgaggctcagaaaggtgcggggcatgtcaacaacctcgcaccctgcaaggtccgcgcgcggagcagcaaagccgtgtcccgcacccccgcgttcgcagactcgcacttgcgagttcttcccttctcccgcacgcgactgcgcccagggacgcaag

SEQ ID NO: 104290 - DNA, 226 bp, Homo sapiens; identical to SEQ ID NO: 36301
  chr1:155100351-155100577
  hyper

SEQ ID NO: 104291 - DNA, 30 bp, Homo sapiens
  chr1:155107787-155107817
  hyper
cagtggattggccacgtcatgtaaagttga

SEQ ID NO: 104292 - DNA, 30 bp, Homo sapiens
  chr1:155112687-155112717
  hyper
ccccaaagccactgcgctaatttcgtcatg

SEQ ID NO: 104293 - DNA, 30 bp, Homo sapiens
  chr1:155145205-155145235
  hyper
gaggatacagtgagcgagaacacgaagaga

SEQ ID NO: 104294 - DNA, 5 bp, Homo sapiens
  chr1:155145936-155145941
  hyper
cgtct

SEQ ID NO: 104295 - DNA, 30 bp, Homo sapiens; identical to SEQ ID NO: 36303
  chr1:155146925-155146955
  hyper

SEQ ID NO: 104296 - DNA, 92 bp, Homo sapiens
  chr1:155147169-155147261
  hyper
agggggaggggacttccggtggggagggggcgagtaggcggggctcttgattcccccgctagttcggagaagggggtgccgctgaccgggtt

SEQ ID NO: 104297 - DNA, 114 bp, Homo sapiens; identical to SEQ ID NO: 36305
  chr1:155147320-155147434
  hyper

SEQ ID NO: 104298 - DNA, 444 bp, Homo sapiens; identical to SEQ ID NO: 36306
  chr1:155152068-155152512
  hyper

SEQ ID NO: 104299 - DNA, 933 bp, Homo sapiens
  chr1:155164119-155165052
  hyper
gtaggtggggtgacagaatgggatttacggacacagaactatcctttggggagcagagtggtattggggacaggtaggcacgtagcggggggcaaaagcacacgtgaggtgcgtaatgcgcgacagccaagaggtgtgtgcggcagcagtgcacgaggggaggaagctatcccaggccgcggcagcacgtggaacttgggtcccgcagtcgcaggctgcgctctaggccgacggaagcagttccgcctgtattcagaaaacagttctcagccccaaagacacaggttggaaagaacactttaaaaacacttcggcgaggcacgggattggagcgcatcagatcagcaggcgagagaccaccgctctcgcccgcgcgccgcgcggcgcccgaggcgcagctttgtgtgcggcgagaccctggggcaggcgctgggcggggtggggacatctgacgtcagcgcgcccgggagcgcgggccggggaggcggggagccccccaactcgcaggccggagaaaacacgagtagctaggtgggcggccccaaacctcaactcccggcattgccaagcaacagccattcagttcggttgctgggacacgcgtcaccatggcgacggctccgcgccgcgcagtctgagtacttaaagagcaagcgcgcgcaacgcccgggcgtcggaaagcggccttctgggactccgcaaactcccgttctccctcccccctcccccttgccattccctttgccttccgggcgccaagtctctctggcctccaaggtgaacccaactccccagcgcgccccgggttcccgggtcgggccggcttcaggcggtggggagcgggatcccgggccccgggcgggcgggagggacgggacgcggtgcagtgttgttttttcccccgccaatattgcactcgtcccggcctccggc

SEQ ID NO: 104300 - DNA, 30 bp, Homo sapiens
  chr1:155176936-155176966
  hyper
tcccatcctaggggcgcagcacactcgctc

SEQ ID NO: 104301 - DNA, 183 bp, Homo sapiens
  chr1:155178387-155178570
  hyper
tgggtactagcggacgggccgtgacccggatgaagcagaggggcgcctgagttcccgtcacctaagcgacagcctgcgagcctctcttcccctcccccacccaagccccagcccggcctccgctccggccgccgccaccgcccctgttttgtttccatggcgacaggcggcgcagggcccgct

SEQ ID NO: 104302 - DNA, 118 bp, Homo sapiens
  chr1:155179120-155179238
  hyper
ctggtgaggggtggcgccggcgccctctgctgtgccctgatgactggggagggggccgaactagccaagcatccaaaccttgccagggctactcagcacgggcgcagtgggggaaact

SEQ ID NO: 104303 - DNA, 116 bp, Homo sapiens
  chr1:155278329-155278445
  hyper
ctgcgttttactaacgtgccaatcagctgcccaggaagataatgaaaacttgagtaagacaggcagccaaagccacagcggggacgttcccagcctggctcgcttccggcactgac

SEQ ID NO: 104304 - DNA, 35 bp, Homo sapiens
  chr1:155278671-155278706
  hyper
cacagagccgatcgcggagcggattctgcttttag

SEQ ID NO: 104305 - DNA, 30 bp, Homo sapiens
  chr1:155279038-155279068
  hyper
tgtggggcttgggacgcgcggttcaagcac

SEQ ID NO: 104306 - DNA, 458 bp, Homo sapiens
  chr1:155294651-155295109
  hyper
cttcgccggtgtccccggagcccagcggctgtggatggcagaagcccagagtgggactggtcagctgcaggagcagaagaaaggtagggcaccctgactcccgaccccgcgcttccgaataaactgcccttcgcccccggccctgctctcaggctgtccgaaggcagtctctccacgcccctcgggcaagcctgggtaggggcgcggcctcctagcgtcttccctttcccactcctcccaggtcttctgatagccgtcagcgtctccgttgataaaatcatctcgcatttcggggccgcccggaacttggtgcagaaggtgaaggtggctggggggaggctgttgggatgaggagagtaatggagctccgcggggggtgcgggaatggttggcgggaggtggctgggaggtgtctggagggatctctggagccatcggcatcgcgccacctccaggcc

SEQ ID NO: 104307 - DNA, 30 bp, Homo sapiens
  chr1:155533390-155533420
  hyper
tacttcttcagcctcgttagacagcctggt

SEQ ID NO: 104308 - DNA, 30 bp, Homo sapiens
  chr1:155579642-155579672
  hyper
gttttctttttgcccggggagctatcagcc

SEQ ID NO: 104309 - DNA, 30 bp, Homo sapiens
  chr1:155658127-155658157
  hyper
cagcagagtggccgcggcagctcctccaga

SEQ ID NO: 104310 - DNA, 30 bp, Homo sapiens
  chr1:155658883-155658913
  hyper
agtctcaggacgggcgctttggagccggcc

SEQ ID NO: 104311 - DNA, 30 bp, Homo sapiens
  chr1:155715242-155715272
  hyper
gagctatcagccagcggagagatctgtaag

SEQ ID NO: 104312 - DNA, 30 bp, Homo sapiens; identical to SEQ ID NO: 831
  chr1:155827029-155827059
  hyper

SEQ ID NO: 104313 - DNA, 30 bp, Homo sapiens; identical to SEQ ID NO: 832
  chr1:155829534-155829564
  hyper

SEQ ID NO: 104314 - DNA, 451 bp, Homo sapiens; identical to SEQ ID NO: 36311
  chr1:155830058-155830509
  hyper

SEQ ID NO: 104315 - DNA, 30 bp, Homo sapiens; identical to SEQ ID NO: 834
  chr1:155880492-155880522
  hyper

SEQ ID NO: 104316 - DNA, 218 bp, Homo sapiens
  chr1:155881087-155881305
  hyper
agccggtcgggtcacgcacttcgtcttccttcactcgcggaggctccggcactgacctgtgacccctcccgcaaccgagtaagatggcgccaccggcgcccgagtcgcggaaggaggggcggggccactcagtgacgcccacagcctgccccgccctcttcccgcccctcccaggtccctaaaacccagttccgggacccaccgctgaaggtcctctg

SEQ ID NO: 104317 - DNA, 26 bp, Homo sapiens
  chr1:155892962-155892988
  hyper
tccagcctgggcgacagaaaaaaaaa

SEQ ID NO: 104318 - DNA, 180 bp, Homo sapiens
  chr1:155904141-155904321
  hyper
tgtgtcgcgctccccgcggacatggcgaccgcttctactcaaccacccgccaactatccgactaccacctctcgtcacttccgcccccaacgttcttacgcacagcctcttccggtcgtggggccgagcggttccggtgaaaatgtcgattccgattggactctcgatgatttaaaggca

SEQ ID NO: 104319 - DNA, 30 bp, Homo sapiens; identical to SEQ ID NO: 835
  chr1:155946130-155946160
  hyper

SEQ ID NO: 104320 - DNA, 222 bp, Homo sapiens; identical to SEQ ID NO: 36316
  chr1:155946471-155946693
  hyper

SEQ ID NO: 104321 - DNA, 30 bp, Homo sapiens
  chr1:155948303-155948333
  hyper
gcacgcgttggtctcggggacaggaagtct

SEQ ID NO: 104322 - DNA, 30 bp, Homo sapiens
  chr1:155990679-155990709
  hyper
gttggcatcccaaacgcctttccggagcca

SEQ ID NO: 104323 - DNA, 30 bp, Homo sapiens; identical to SEQ ID NO: 36317
  chr1:156022821-156022851
  hyper

SEQ ID NO: 104324 - DNA, 66 bp, Homo sapiens
  chr1:156023927-156023993
  hyper
ggctaactcggctccgggacaaaggactttctgtgtcgccgctttatctccgttccctgtgataac

SEQ ID NO: 104325 - DNA, 30 bp, Homo sapiens; identical to SEQ ID NO: 36318
  chr1:156024328-156024358
  hyper

SEQ ID NO: 104326 - DNA, 127 bp, Homo sapiens
  chr1:156024562-156024689
  hyper
tacaactcccagggcgtcccggagcaggccaacgggactacgggaagcagcgggcagcggcccgcgggaggcacctcggagatctgggtgcaaaagcccagggttaggaaccgtaggcatgctgcgc

SEQ ID NO: 104327 - DNA, 30 bp, Homo sapiens; identical to SEQ ID NO: 36319
  chr1:156024987-156025017
  hyper

SEQ ID NO: 104328 - DNA, 66 bp, Homo sapiens; identical to SEQ ID NO: 36320
  chr1:156036260-156036326
  hyper

SEQ ID NO: 104329 - DNA, 30 bp, Homo sapiens
  chr1:156052227-156052257
  hyper
ccagccccttccagcgctcaaactcttttg

SEQ ID NO: 104330 - DNA, 158 bp, Homo sapiens
  chr1:156084255-156084413
  hyper
gggcaagcttggagccgacagtgctgagcaggcaggagccaagagaggggaagcttgagcctcacgcagttaggggtgcgctggagagggtggggcccgactccgccacaccccaacggtccttccccctcctcaccactcccgcccccacccccaat

SEQ ID NO: 104331 - DNA, 424 bp, Homo sapiens
  chr1:156084628-156085052
  hyper
agcagtctctgtccttcgacccgagccccgcgccctttccgggacccctgccccgcgggcagcgctgccaacctgccggccatggagaccccgtcccagcggcgcgccacccgcagcggggcgcaggccagctccactccgctgtcgcccacccgcatcacccggctgcaggagaaggaggacctgcaggagctcaatgatcgcttggcggtctacatcgaccgtgtgcgctcgctggaaacggagaacgcagggctgcgccttcgcatcaccgagtctgaagaggtggtcagccgcgaggtgtccggcatcaaggccgcctacgaggccgagctcggggatgcccgcaagacccttgactcagtagccaaggagcgcgcccgcctgcagctggagctgagcaaagtgcgtgaggagtttaagg

SEQ ID NO: 104332 - DNA, 30 bp, Homo sapiens; identical to SEQ ID NO: 36323
  chr1:156163750-156163780
  hyper

SEQ ID NO: 104333 - DNA, 30 bp, Homo sapiens; identical to SEQ ID NO: 36324
  chr1:156163996-156164026
  hyper

SEQ ID NO: 104334 - DNA, 30 bp, Homo sapiens
  chr1:156182602-156182632
  hyper
tatttttccggtcgcggacatcccaccgcg

SEQ ID NO: 104335 - DNA, 170 bp, Homo sapiens
  chr1:156182941-156183111
  hyper
cttcagaagctggtcgccgccggcaggtaaagtggacgcagccgcggtgggagtgtttgttggcaccgaagctcaaatcccgcgaggtcaggacggccgcaggctggcgcgcggtgacgtgggtccgcgttgggggcggggcagtcggacgaggcgacccagtcaaatcc

SEQ ID NO: 104336 - DNA, 707 bp, Homo sapiens; identical to SEQ ID NO: 839
  chr1:156215212-156215919
  hyper

SEQ ID NO: 104337 - DNA, 30 bp, Homo sapiens
  chr1:156252423-156252453
  hyper
ttttgcttcgggctcgctgctctcccctgt

SEQ ID NO: 104338 - DNA, 30 bp, Homo sapiens
  chr1:156252861-156252891
  hyper
cttacagctaggagcgtgactgctttgtcc

SEQ ID NO: 104339 - DNA, 361 bp, Homo sapiens
  chr1:156307947-156308308
  hyper
gcacgagcactggacgatggcccatcatggcgacgcgatgcagagccgggtacccagagctgggggaaccggcagaaccttctggagagagagaaccagacagaagcccagaaaacgctgcctcctcagggcttacacctcaacccgctactctcaaggtagtcgccaatcaccgcacccatctcattgatcggcacaaaaacagaccaattgacagccttagtcccgccccctacgcaagaacggccagacaagttagacagagagcgcacgacgaaggcactgggagggcacaggcgcttgcgcagtagggtggccgctcccggccgcgtgcagcgcgaacgtcggcgcaggcgccaag

SEQ ID NO: 104340 - DNA, 254 bp, Homo sapiens
  chr1:156326778-156327032
  hyper
gtgggctgatgcggccgctggtccctgctctcaatacctgaatgaactatttggctgaaagcctagggtgaggtgttcgggggacggagagcagggcgtggacttcgctccgccgctaggtggcgggctggctcaggacaggtgagcccggcagagagtgccggagggggaggagcccagcagggaagggcagaggggcaccctggcggtgggaggggatctgcgtaggacctcagcaacgttgggggacattt

SEQ ID NO: 104341 - DNA, 702 bp, Homo sapiens
  chr1:156357855-156358557
  hyper
tgagggaaggttctccggaagcagccgctgttctggcttggcgcaagtgcgtgtggacgacagcaggatttcctgcccagggacatctggataagaggcccaaggtccccaggagcccccaggtgcttctgccctgtgtggccagagccccctcggccaggagttagaagctgctcctctgacctctggaggacccggcactccgaaccccgcgcagcctgggaaaggcctgagattccccgctattgggattcacatcacgacgcggcggccccaactcggggaggaattagacacggcgtgagtgtcccaagtgcggggcggtggccgtcccggggcagacgagcgcggctgccgcgtccccccacctcaccccgatattccgctcccaccgtcgggaactcccccaccgccgcctccggccctgcgcgccccttctcctttgtctggcccgcccactcccagccggtccgccgcgccgccccgcgcgccccggcccgtgcgcccgccgccgccgcccaggaacaatgcgggccaatgtctccgggcgggcgagccggctatgcaaatgcccaacggcctgtgagaatccccttcgccgccgcctgggcttccacggcctgaaaagggctggcggccgggcctgggtgggggaggcggccactgcatagggatgagctgttgtcccggagcgcccgggac

SEQ ID NO: 104342 - DNA, 1176 bp, Homo sapiens
  chr1:156390039-156391215
  hyper
gtgctggtcagtcctcgcggctctagcccctcgctcaagcctctccctcccgcccgtgaggccggctttccccgggcccctctgcgcagtgtatggggttatttttactttcggttatctagctttatgaagactccacaccactcatacagctagataaccaaagataacaaccaaccccgcctcctggctgctgtcgccgcctcttccacgcagcctcccggccgccgccgccgccagcacctccgcagcttcccggtcgcccgtcagcgggagtaggagggaagggacacgagtggagttgagggggagggtgaagagagaaatgaagtccgagacaaaacaacaacaaaaacctcagacacggagatacagacacgacagagaccgaaaaaggcgtggaaaggacgcgatgacccgtggcgtcgaagtcggggagttgaccccgatccagacccaaaaagtttctggtgccccatttcccgctctcccattcgggccaggagcaggagttccgctggtcccaggtggaagggacgcgcgggcttttcgtgccacccgggaagaccgcagcgacccaggcagaggcctccccagcctcgccgggtctccactgcccttctctggaagatcgagggcgcatccgacagccagagccctgccttcggcggagcccgagcctggcgcgggatggaaatggggagccgcggtgccggcccggccacgtcgccaactcagaaaggcgttggaagcgaagcggagcccttgtgggggaaagagccggattcaagaggccgactaaaaggggaaatgggcagccaaaccccggaggtaaaaaccccagagatgtcctaataggaagcagggaaatcccggcgacccaaagagagaggaaaggctgtggggggcgggtgggggcgacccagagactcccaagcgagtctctcaaggagagaaggaaacagcagagaccccacccgggaagagatccgggagagtacccatgagaggggcggaggggaggaaagcagagggcgacagggcaggtgaccagagtcccaggccctgcagagccccggataaacggctttgttcaaagaggaccagagatcacccagggttgtgaaaatggccgggggttcgaggcgagcggtgctctaggggtgggaaaggggt

SEQ ID NO: 104343 - DNA, 359 bp, Homo sapiens; identical to SEQ ID NO: 843
  chr1:156391242-156391601
  hyper

SEQ ID NO: 104344 - DNA, 97 bp, Homo sapiens
  chr1:156405317-156405414
  hyper
gtctgggtcctctgtgtgccccggggccaggccaaaaccaggctggaacccgccggcagggcccccgaggcgcctctgcctgctctctccgttcttg

SEQ ID NO: 104345 - DNA, 436 bp, Homo sapiens; identical to SEQ ID NO: 36330
  chr1:156405634-156406070
  hyper

SEQ ID NO: 104346 - DNA, 604 bp, Homo sapiens; identical to SEQ ID NO: 36331
  chr1:156406104-156406708
  hyper

SEQ ID NO: 104347 - DNA, 81 bp, Homo sapiens
  chr1:156427346-156427427
  hyper
acaaactgcccgagcgaagcccttggagctctaaatacttggcagcaagtacaaagcaaaggtggcggggtggagggggtg

SEQ ID NO: 104348 - DNA, 196 bp, Homo sapiens
  chr1:156468707-156468903
  hyper
ttcccaggcagggccgtgggagctgggacagccagactaagtcctggggcgggtgtgaccccgtggccacaagcgggtggacatctgtgaacactgacatgtgccttttcaatgctctcctcagctactgagaccttcctgttggggttgggagaggagtgggaggtggacagctcccaaacgccaaaacacccaa

SEQ ID NO: 104349 - DNA, 206 bp, Homo sapiens
  chr1:156469262-156469468
  hyper
ttcaggaggagtcctcggaaggctgctgagaggacagcgtgattcactagggggagggggcccctttccccatccccctaagacccgaacctggtaggagagaagctggcattggagtgggggactaaaagcattttggtctccttggcccatcctcccaaaagcccccccaaactccctaaacccccgctcgcagcccagctccg

SEQ ID NO: 104350 - DNA, 30 bp, Homo sapiens
  chr1:156470900-156470930
  hyper
tcggtccgctcccacggtgcccctcggagc

SEQ ID NO: 104351 - DNA, 30 bp, Homo sapiens
  chr1:156471273-156471303
  hyper
ccagcaatttaaagcgacagctcatagttc

SEQ ID NO: 104352 - DNA, 30 bp, Homo sapiens; identical to SEQ ID NO: 846
  chr1:156474709-156474739
  hyper

SEQ ID NO: 104353 - DNA, 574 bp, Homo sapiens
  chr1:156541930-156542504
  hyper
cttgtccggtggcatcgctgggcaagtttggtagccagcagtaactgctgaatttcaaggagccattaggatcacctacattctcccgactccggaaccccagaacttggaaataggaagaaagttctttgtaagctttaaagcgcagcacattagtcaggggacaatgcgccgctcacagttccactcgggcccacggcgcccgggctgaggattcccgtcccactgagcagtcccaccgccctcgcccctcaggcttcacgcccgacacacgccccaatctctcccgggacagccaagcccccgaccagcggcaccactgcgagacccttctctgaccctctccgcactcacaggctgcccagcctgggcccgctgctctcctctccatgttcctccttcttccaggtttgaatctcccgccgttgggccaccgcccctcaccgtcggcaccgccagacaggacacttcccgtccacaccgctgagaatcctgggatttgtagttcccggccgcggagccgggccgcccaggtgctgggagaagaggcgccccaggccggggcagtaccgct

SEQ ID NO: 104354 - DNA, 30 bp, Homo sapiens
  chr1:156561932-156561962
  hyper
gaataccagttcagcgtggaccaacttatg

SEQ ID NO: 104355 - DNA, 140 bp, Homo sapiens
  chr1:156571299-156571439
  hyper
accatagagacgtccgcgggaaccaaaatcacggtttttccaggagaaaccattgcggagcccaatttgccggtatggttgccatagaaactgggacctggagcgtgcccattttcggaggttccgaggctgttccactt

SEQ ID NO: 104356 - DNA, 30 bp, Homo sapiens; identical to SEQ ID NO: 847
  chr1:156589288-156589318
  hyper

SEQ ID NO: 104357 - DNA, 1435 bp, Homo sapiens; identical to SEQ ID NO: 848
  chr1:156593617-156595052
  hyper

SEQ ID NO: 104358 - DNA, 103 bp, Homo sapiens; identical to SEQ ID NO: 849
  chr1:156595080-156595183
  hyper

SEQ ID NO: 104359 - DNA, 82 bp, Homo sapiens; identical to SEQ ID NO: 36339
  chr1:156595221-156595303
  hyper

SEQ ID NO: 104360 - DNA, 13 bp, Homo sapiens
  chr1:156611559-156611572
  hyper
tcttctttgaaca

SEQ ID NO: 104361 - DNA, 300 bp, Homo sapiens; identical to SEQ ID NO: 36341
  chr1:156611643-156611943
  hyper

SEQ ID NO: 104362 - DNA, 264 bp, Homo sapiens; identical to SEQ ID NO: 36342
  chr1:156611993-156612257
  hyper

SEQ ID NO: 104363 - DNA, 544 bp, Homo sapiens; identical to SEQ ID NO: 36343
  chr1:156626474-156627018
  hyper

SEQ ID NO: 104364 - DNA, 65 bp, Homo sapiens; identical to SEQ ID NO: 36344
  chr1:156627083-156627148
  hyper

SEQ ID NO: 104365 - DNA, 210 bp, Homo sapiens
  chr1:156627377-156627587
  hyper
tccaaggcagtcaccgcagaccgcccgggagcggggaacggccgccatctgctggcggctgcgctcactgcacgccttcgtctccctagaccggtaccgggagtaccagtggatcggactcaacgacaggaccatcgaaggcgacttcttgtggtcggatggcgtccccctggtgagaggccccagtcgaaccccgccgtctagctcact

SEQ ID NO: 104366 - DNA, 30 bp, Homo sapiens
  chr1:156629967-156629997
  hyper
cgggcagaggggtgcgaggagccccaggat

SEQ ID NO: 104367 - DNA, 150 bp, Homo sapiens; identical to SEQ ID NO: 36346
  chr1:156646446-156646596
  hyper

SEQ ID NO: 104368 - DNA, 646 bp, Homo sapiens; identical to SEQ ID NO: 36347
  chr1:156646634-156647280
  hyper

SEQ ID NO: 104369 - DNA, 63 bp, Homo sapiens
  chr1:156647956-156648019
  hyper
agggccccttctcccgcaccccctgccagggaatgttgggtagtggacgccctctggcggctt

SEQ ID NO: 104370 - DNA, 30 bp, Homo sapiens
  chr1:156661576-156661606
  hyper
ctggcctgacacacccgctcacctcaagca

SEQ ID NO: 104371 - DNA, 30 bp, Homo sapiens
  chr1:156662004-156662034
  hyper
caaccctgtctcacccgacgcccttcagtg

SEQ ID NO: 104372 - DNA, 188 bp, Homo sapiens
  chr1:156662233-156662421
  hyper
gagtggaaatggggacgggcaaggcactctagagggccaagtgtcacggaaagagaaggaagttagacaggagaggagggggagggggctcctaggtcccatccttccataaagagccgtgggtctgaccccgatgcaggggaaaccaagtgtaggcagcaaggatgtgtcctcggggctgcaggaaa

SEQ ID NO: 104373 - DNA, 127 bp, Homo sapiens; identical to SEQ ID NO: 36350
  chr1:156675373-156675500
  hyper

SEQ ID NO: 104374 - DNA, 844 bp, Homo sapiens; identical to SEQ ID NO: 36351
  chr1:156675830-156676674
  hyper

SEQ ID NO: 104375 - DNA, 30 bp, Homo sapiens
  chr1:156695827-156695857
  hyper
ctcactctcctttccgttcatgccttgcgc

SEQ ID NO: 104376 - DNA, 30 bp, Homo sapiens
  chr1:156698487-156698517
  hyper
aggccgcgataaaccggaactgcagcccgc

SEQ ID NO: 104377 - DNA, 223 bp, Homo sapiens
  chr1:156710900-156711123
  hyper
cccgccacgcccgtcgactttctgggagttgtagtccaagtgtaaaacggaagctcaaccacgaatcttacctctcagcatgctgggagttgtagtccgccgctagaaagctggaaacaggaagtttggcgggggtaggaaatcaaggaaaccggaacacaccatgaagcatgtcgggaatcgaaaggcaagctggttcggctggcccgcctggcacattccc

SEQ ID NO: 104378 - DNA, 166 bp, Homo sapiens; identical to SEQ ID NO: 857
  chr1:156716424-156716590
  hyper

SEQ ID NO: 104379 - DNA, 30 bp, Homo sapiens
  chr1:156717190-156717220
  hyper
ggggcgaaagggggcgtccttctcaggaag

SEQ ID NO: 104380 - DNA, 48 bp, Homo sapiens; identical to SEQ ID NO: 36353
  chr1:156721108-156721156
  hyper

SEQ ID NO: 104381 - DNA, 210 bp, Homo sapiens
  chr1:156722049-156722259
  hyper
ggatttgagccctacgtccgcctttgctaaggaggaaacgcttgagtttggtagccaggagatggccaaggagttgaggcacaaattggccaccttccgggtgcattcgatctcgtttctctaagctactgtcttgccaaggagacttggactcaacggctagctaaccccgcaaagatgagctcagttctagtcggttacggtagaatg

SEQ ID NO: 104382 - DNA, 139 bp, Homo sapiens
  chr1:156737021-156737160
  hyper
ggaacttcaagtaccgaaatgctctcctgtccgtctcagtgactgccgtggtgaccggtggggcttgtagtcacctcggaattgttaggcgacgaaaaaaactactcaccccaggtgtccctgcgtcagaggcgggttt

SEQ ID NO: 104383 - DNA, 30 bp, Homo sapiens
  chr1:156737997-156738027
  hyper
gaagatcgcggcgccggagttgcataaggg

SEQ ID NO: 104384 - DNA, 30 bp, Homo sapiens; identical to SEQ ID NO: 36354
  chr1:156783618-156783648
  hyper

SEQ ID NO: 104385 - DNA, 30 bp, Homo sapiens
  chr1:156783857-156783887
  hyper
tcaccagcgagaggcgtgatccccaccttc

SEQ ID NO: 104386 - DNA, 67 bp, Homo sapiens; identical to SEQ ID NO: 858
  chr1:156814885-156814952
  hyper

SEQ ID NO: 104387 - DNA, 34 bp, Homo sapiens
  chr1:156815030-156815064
  hyper
cgagctgttgccccccagccggaggggcccagct

SEQ ID NO: 104388 - DNA, 30 bp, Homo sapiens
  chr1:156815330-156815360
  hyper
aaaccccacccctcccgcaagacccgcccc

SEQ ID NO: 104389 - DNA, 485 bp, Homo sapiens; identical to SEQ ID NO: 36356
  chr1:156818570-156819055
  hyper

SEQ ID NO: 104390 - DNA, 30 bp, Homo sapiens
  chr1:156829362-156829392
  hyper
tggagaccccttagcgccaggctccgtcac

SEQ ID NO: 104391 - DNA, 30 bp, Homo sapiens
  chr1:156829676-156829706
  hyper
gccacggaggcttgcgcggtgggaggggtt

SEQ ID NO: 104392 - DNA, 30 bp, Homo sapiens
  chr1:156830451-156830481
  hyper
cccctcagcgtctgccggagctgaggcgga

SEQ ID NO: 104393 - DNA, 267 bp, Homo sapiens
  chr1:156830839-156831106
  hyper
tgcctgctgcccccacggctcctcgggactgcgatgcacccgggatggggccctggatagcctccaccacctgcccggcgcagagaacctgactgagctgtgagtgtccggcgggcggtgggggggcgcggggacaggcaggcattgcagtgccccgagggcgcggactcgctgcttgtttgctggtcaggcaggacgagcacggcggaaggctggcaccacgcagccttcggcgctgcccgggcgttcctccgcagccgccgctgc

SEQ ID NO: 104394 - DNA, 76 bp, Homo sapiens
  chr1:156863061-156863137
  hyper
cggtgcccgggaggggtcttaataagatcacggttgctgggcagcactggacagtgcccgacgtaggcgatctcat

SEQ ID NO: 104395 - DNA, 141 bp, Homo sapiens
  chr1:156863344-156863485
  hyper
gttttccctcccgggcgcctggatctcccctcccccggctcctgtttccttgtcaaaacttcctgccttggcgagggcccgagttcccacccccttcctgccccccgcccctcggcgcccctcccggccctgcgatcagca

SEQ ID NO: 104396 - DNA, 46 bp, Homo sapiens
  chr1:156863640-156863686
  hyper
cgcgccccctggcaggggaggcccggtggtgcggccccggagacca

SEQ ID NO: 104397 - DNA, 222 bp, Homo sapiens; identical to SEQ ID NO: 36359
  chr1:156890274-156890496
  hyper

SEQ ID NO: 104398 - DNA, 30 bp, Homo sapiens; identical to SEQ ID NO: 861
  chr1:156893334-156893364
  hyper

SEQ ID NO: 104399 - DNA, 16 bp, Homo sapiens
  chr1:156893791-156893807
  hyper
cgcggtggggctacac

SEQ ID NO: 104400 - DNA, 30 bp, Homo sapiens; identical to SEQ ID NO: 36362
  chr1:156894216-156894246
  hyper

SEQ ID NO: 104401 - DNA, 430 bp, Homo sapiens
  chr1:156897223-156897653
  hyper
ccatattccggcggacgccctgtaccttttccagcgacccacattctccctccggctgccccaggattgcgcacttgtctctgcggaacaataacatcgacgaccgcggggcgcaactcctgggccaggcgctgtccacgctgcacagctgcaaccggaccctcgtctcgctcaacctgggtttcaaccacatcggtgacgagggcgcaggctacatcgcggacgtgagtgcacggcggggagggacctgctgggagcaggggcggcttgggcggctcacgcgtccctgcccgcctcttagggcctccggctgaaccgttccctgctctggctgtccctggcccacaaccgcatccaggacaagggcgccctgaagctggctgaggtgggtgtgccgatcaggtggggcaggggcgtgggcgggccgagg

SEQ ID NO: 104402 - DNA, 30 bp, Homo sapiens
  chr1:157015858-157015888
  hyper
caaccctttgccgtcgctcctcggccggtc

SEQ ID NO: 104403 - DNA, 30 bp, Homo sapiens; identical to SEQ ID NO: 36364
  chr1:157016120-157016150
  hyper

SEQ ID NO: 104404 - DNA, 127 bp, Homo sapiens
  chr1:157108691-157108818
  hyper
agaaatgggccctgcgacctcccagagtggggatccctcacaatgggaagacgggacccgcagacttcagacgcaatttccctaccctttaagaaagggccctttcatatacgtatgaaagaaaccg

SEQ ID NO: 104405 - DNA, 30 bp, Homo sapiens
  chr1:157961899-157961929
  hyper
agaggagctgtggccgctacacatcaacag

SEQ ID NO: 104406 - DNA, 417 bp, Homo sapiens
  chr1:157963008-157963425
  hyper
ggggtatgtgtgtgcgcgcgttgtgggggggcagggggagggctcgtggagggaggcgccgtcggagggagagtagacgtcaggcggagggagggaggcaggcaggcagggaggcagggagggagagagggaaggaagagaaggggagagaaagggggagcaaagaccgaaagagacccagagagatacagcttgagaggagaaataattaaagggggagggcgaccaggaggagaaaaaggtctgggaggaaagagagataaagagaatcggagggcagggaaatgagtttgtgcgcgtgagtgtgcgcgcgcgcgtgtgtgtgtgcaggggcgggcgcgggcgggcggggggcgggctcccgggctcccgggctcccctcctccccagcccgctcctctggctcgctcgccaact

SEQ ID NO: 104407 - DNA, 448 bp, Homo sapiens
  chr1:157963443-157963891
  hyper
cgggcgcacggcgggcggacagcatgctgagcctcctcgtctggatcctcactctctccgatactttctcccaaggtaagggcccccagcccacccccggacgctcggcttccccccggggccggggcactgcttccccggtgggagagtgctggagtgccccgcggcccgcggccagtccccgggtccggacgccacgaggcgggggctcggtccgggcgcagagccctgggggagggggcgcggagtaacgaggggctggggagaatgagtttgccgttgatttgcccaagttgtttcctctggctgcgcgggagaaccgagcaatggggccgcgagggctggaggtccgagtaaaacggggaaccgaacgctttctcttgagcttctggcagccctaccgaccctcgccctctgaggccggggttccggacgcctgagtccagcc

SEQ ID NO: 104408 - DNA, 593 bp, Homo sapiens; identical to SEQ ID NO: 36369
  chr1:158083064-158083657
  hyper

SEQ ID NO: 104409 - DNA, 179 bp, Homo sapiens
  chr1:158088030-158088209
  hyper
cccagccccaacacacgcagtctggaggttgccatactaggagaagggtaaggcagggcacaatttgtcttcgtgtaattatctgtcaggtacagcttgtgaaacctcagccacctccctgcaaccatgcaggaaaataaattacacacgagcacgcagagacacggcggcaccatctt

SEQ ID NO: 104410 - DNA, 506 bp, Homo sapiens; identical to SEQ ID NO: 867
  chr1:158150550-158151056
  hyper

SEQ ID NO: 104411 - DNA, 22 bp, Homo sapiens
  chr1:158151116-158151138
  hyper
cggcacagagttcgctggcatc

SEQ ID NO: 104412 - DNA, 28 bp, Homo sapiens
  chr1:159141371-159141399
  hyper
gccctatttaatccccgcgactgcagca

SEQ ID NO: 104413 - DNA, 111 bp, Homo sapiens
  chr1:159141432-159141543
  hyper
cgggctccgaagcggctcgggggcgccctttcggtcaacatcgtagtccaccccctccccatccccagcccccggggattcaggctcgccagcgcccagccagggagccgg

SEQ ID NO: 104414 - DNA, 591 bp, Homo sapiens
  chr1:159141599-159142190
  hyper
cgcctgctgctgggcgcccggcggggccaacctctcccaggacggtgagtgagggagggggcggcgcctggggaggtggggagtgacccgaggcgggggctgggatcgggagtctcgcggaaggagcctgttggctttgtttggaaccggggttaaagtcaccagccgctgctaatacccttgtgtctgtctctgagcatccgtgtctctgtggactgtgggtgtgccggtgtgtgcacccttctgtgtacaccactgagcgtgtgtctgcgtgtgcaccggggtttggctctcggggctgatgtccgttaggagcagcccggggtctggatgtgttgctgtccgtgtgcgcgcgcgtctgtgttggtgtctggctctgcgtttctgtgtcagtatctgtgtgtatgtctgtgtcagtgtgtgttgggggcggagtgagatttgtcgctgtttcagtcagggcgtgtgtcgggtgtttgtgtatgtatgtctgtaggggttgggtagccagtgcaatcccccaaactgctgtatgcaaacatttctgctcccccgcccgtcccccaccacccgcggcgcagctccgagtgg

SEQ ID NO: 104415 - DNA, 184 bp, Homo sapiens
  chr1:159158184-159158368
  hyper
tcctcagggaccctaagcccacgtcccacttttctttgtaatctcgacctcccggcccccgcgcgccctctctcggtcctagcgcccctttctcccctctcctcccccacctgcctctccccagctggctctgagtcgcgctgggacgactggcgaagttcacccgggactccaaagcccggac

SEQ ID NO: 104416 - DNA, 47 bp, Homo sapiens; identical to SEQ ID NO: 36374
  chr1:159158471-159158518
  hyper

SEQ ID NO: 104417 - DNA, 299 bp, Homo sapiens
  chr1:159750346-159750645
  hyper
tcctgggagaaagccgatttgtcatctcttaaaccccagggcatccagcgtgaaggaggtagaactaggccggcccgcgaggaggcaggggcaggcgccagtgacgcaatgactgcaacatgccgccagggtgcagcagagcccgaccccgggttgttccatccgcagcaaacaattcctaactcgctccaggtcttccttcttagctgagtgggttgaaccccgtggaagtaaccccccgcccattatgatgatccagccaatcaccgcgtgatctgctcggacggggcgggatcgcg

SEQ ID NO: 104418 - DNA, 638 bp, Homo sapiens
  chr1:159750677-159751315
  hyper
cgcgttccagccccgccccaggttctgggccaatccccgcggctgggcagagcgacccgagggcggcgccctgcagaccacgtggcccgggaggcgccgaggccaggtaggtggtgagttacttggctcggagcgggcgaggggacgcgtgggcggagcggggctggccagcctcggcccccatgacccgctgtcctgtgccctttcccagcgatgggcgtgcagccccccaacttctcctgggtgcttccgggccggctggcgggactggcgctgccgcggctccccgcccactaccagttcctgttggacctgggcgtgcggcacctggtgtccctgacggagcgcgggccccctcacagcgacagctgccccggcctcaccctgcaccgcctgcgcatccccgacttctgcccgccggcccccgaccagatcgaccgcttcgtgcagatcgtggacgaggccaacgcacggggagaggtcagcgggcggggtcagcgcagggagggaggggcctggaaggtcagcgggggacacgggcggagctggggagaccgggcctgggataacttaactgggctcggggaggcagacagtagggccgggagactgggaagccagtgcgggggagggaagcg

SEQ ID NO: 104419 - DNA, 30 bp, Homo sapiens
  chr1:159824006-159824036
  hyper
cgtggtcgaggcgagcgacagaagcaaccc

SEQ ID NO: 104420 - DNA, 676 bp, Homo sapiens
  chr1:159824348-159825024
  hyper
cgcccgccccttcccacttttggggaggaggctctgcctccctacgcatttccttagggaaatgccttcacccccagccgcctggcagcctggggcgagcgaggtcgtccccagccccgacgtgtccccagctgcagacagagagccccgcgccctcctcctggctggggcgcagcccggcccggcgcgcgcgctcacaccaagaggccgttcttgcactgcaccggcccctcggcgcagtcagccggctccgcgctcttgaccttgacgtagaccggggaggggcccgcttcgcaggcggcggcggcggtgcagggcgccagggccacgtcctcggggccgccgcaggggggaggcgcgtacttgcggcgcagggagcggctgacgttctgcgtcgggtaccccaggaggtgggtgacgcggctgccgcgcccgctggccttgcacccgggcgccacggcgtcctctctgtggaaaacaacaggcgggcgggtgagcgggctgctccgcagcggggcgtgggcacggcctgggcagagccgggggctcttggcaacctcttgtctcccgcgcctccctccacctgccctcgtctctctccctcggcctcgacctactgtcctttgtgacccttcctgggtcggcgaccctgcagcggtcccggagccagcatccc

SEQ ID NO: 104421 - DNA, 30 bp, Homo sapiens; identical to SEQ ID NO: 870
  chr1:159894046-159894076
  hyper

SEQ ID NO: 104422 - DNA, 930 bp, Homo sapiens
  chr1:159894399-159895329
  hyper
cgaccacaccctgggccgttacaacagatgagtcacccaccgccctcccgccgctggggtgacgcagtggtctgggcagcccgcccgtccgcccgcggccaccaccggctttcccagcagcagggggcacccggtgggggcagcggcgctcgggcagggtaaaagcagccaccaccacccccacaacctcacacagggcaccccggggcgcagtcagggctgcagcacccagacccccgaggtcaggggaccgtcatagagatgactggagcttcacagaaggtcaccgtgcgacccatgcagagccccctagccccagcccgtgacctcaagtccccagaatagcaagctagcaggaacaggaatgaaaagggcggcctcggggactcagagggcacgcagtgctcacacgtgctcctggaaccaggaagtgaagggtcgcgcgggaaagcccaggagcacgagctggcccagggccggcgccacgacccggggtcactcggggccagccagctaaagtccgacgcccttttttcccctcgccccagtgaggactcagcgatggagcccgcgggtggggctcagtccctgagtccctgctccagacggacgccctgtctatgcatgggctaacctcgcctgacctcatcgtccaacaatgtcgggtcagggcttggggacaggacctgacagcacggggcggggtaaagtagtcaccggacccttgcctggtaccagcccttgatccccgagctcgctggagcaagttcaaagcgctggcttcttgctttctacacagcacgcacatgtccccgacccccgtacccccgacctgctcaccgttcaagcgggctggagagcggcgcactgactcaaggcaagggctgcagctgcaagtggtgcgccctgcccagccggggattttcagga

SEQ ID NO: 104423 - DNA, 30 bp, Homo sapiens
  chr1:159895649-159895679
  hyper
ggaaggccttcccccgaccccaactgacta

SEQ ID NO: 104424 - DNA, 490 bp, Homo sapiens; identical to SEQ ID NO: 36380
  chr1:159915359-159915849
  hyper

SEQ ID NO: 104425 - DNA, 224 bp, Homo sapiens
  chr1:160001424-160001648
  hyper
atagaaaaccagggcgactctggctagaaaggccacaccaaagacgccggctggagccaccttcaagttcaggagccattcgccccagtgcttggtggagcccatgatctgaccgtgcgacagctgcttagccccagctccaaactgccttcgtacttctaaccttcccttcggttctttgcagcaggtggccgccgcatctcccacccgccaggctgccaacc

SEQ ID NO: 104426 - DNA, 30 bp, Homo sapiens; identical to SEQ ID NO: 36382
  chr1:160001964-160001994
  hyper

SEQ ID NO: 104427 - DNA, 145 bp, Homo sapiens; identical to SEQ ID NO: 874
  chr1:160039832-160039977
  hyper

SEQ ID NO: 104428 - DNA, 508 bp, Homo sapiens; identical to SEQ ID NO: 36384
  chr1:160040180-160040688
  hyper

SEQ ID NO: 104429 - DNA, 402 bp, Homo sapiens
  chr1:160053732-160054134
  hyper
aggcgcccagcgacgcgcggcaggtggcagcagctcgggcccccgccgcactccaggcgcccgcagcgctcgccctgacgcggccgccatggcgcaggagaacgcggccttctcgcccgggcaggaggagccgccgcggcgccgcggccgccagcgctacgtggagaaggatggccggtgcaacgtgcagcagggcaacgtgcgcgagacataccgctacctgacggacctgttcaccacgctggtggacctgcagtggcgcctcagcctgttgttcttcgtcctggcctacgcgctcacctggctcttcttcggcgccatctggtggctgatcgcctacggccgcggcgacctggagcacctggaggacaccgcgtggacgccgtgcgtcaacaacctcaa

SEQ ID NO: 104430 - DNA, 93 bp, Homo sapiens; identical to SEQ ID NO: 36385
  chr1:160055538-160055631
  hyper

SEQ ID NO: 104431 - DNA, 30 bp, Homo sapiens
  chr1:160068163-160068193
  hyper
gcagggccgggaaccggaacgggggcctgg

SEQ ID NO: 104432 - DNA, 30 bp, Homo sapiens; identical to SEQ ID NO: 36386
  chr1:160071022-160071052
  hyper

SEQ ID NO: 104433 - DNA, 30 bp, Homo sapiens; identical to SEQ ID NO: 877
  chr1:160093911-160093941
  hyper

SEQ ID NO: 104434 - DNA, 30 bp, Homo sapiens
  chr1:160175381-160175411
  hyper
acgatctgggacaccgggggccagacgggg

SEQ ID NO: 104435 - DNA, 31 bp, Homo sapiens; identical to SEQ ID NO: 878
  chr1:160175619-160175650
  hyper

SEQ ID NO: 104436 - DNA, 44 bp, Homo sapiens
  chr1:160232421-160232465
  hyper
aacagagcgagaggcgcctgcgcattaccgaagaggcaaagttg

SEQ ID NO: 104437 - DNA, 734 bp, Homo sapiens
  chr1:160370124-160370858
  hyper
gagtgtcagccccaccgcggattcccaggatcggggagggccgctgggcatctgaaggcgcagggctgggggagcggcgactccgggaagagcggggccgcagacaatggacgcggcggtaggaggggcggcggctgtgggaacagccgggaggcggcacccgggagctcgcgctcccccgccccctgcaccccccaccctcatcccctccccctccgccccctcccccctgcgccgccggctcccgatctgattcctgatccttgattccttgatccttggtcccgccatgggagcctgagcgccccctattcccccctggcccccagcccccggggccttgagggggaagaggcagcggtctgggacggagcagggggtgaccagactcaagaacccccccctcaacatcccccatcgcgcgcgctgcctgtccaggagcgccgagttcggagcgacccggagcgctgcggatacaaaggcgacgggccgagcggggcgcccgcggagcccacccggcagttcgcagcggcgggtgagtgccgggccgcgggggcgcgggcaaagtttgaaaaaaaaagaagaaagaaagagagagaaaaaaagaaatggaaaaggaggaaaatcatgcaaggggccagggggtgcccgaccccagagcgagcggggtggcttatgggggaaggggggctggactccgggcaacccccttccggtccgcttccccactgcac

SEQ ID NO: 104438 - DNA, 189 bp, Homo sapiens; identical to SEQ ID NO: 881
  chr1:160526914-160527103
  hyper

SEQ ID NO: 104439 - DNA, 30 bp, Homo sapiens; identical to SEQ ID NO: 882
  chr1:160948028-160948058
  hyper

SEQ ID NO: 104440 - DNA, 425 bp, Homo sapiens; identical to SEQ ID NO: 883
  chr1:160983484-160983909
  hyper

SEQ ID NO: 104441 - DNA, 948 bp, Homo sapiens
  chr1:160990369-160991317
  hyper
aggagccaaggctcccggctgcgcagcggggttcgtggatgctgggtggccgttggaggggcaggctggcccttcccaggtgcgtgtggagcgcgcgctgggtagatgagtgtggaagggtccttggcccgacggccctctccagtgaggacgaggagtgtacctctggtgtgtgcagatgggtcagctccctcctggtggccgtgaggggtgcggtcacaactcaccagtgtgggggaggggagccagccactcacccagctgtgagagtggtgaaagagggaccagccaggggtggaaaagataattcgcagaacgatataggaaggtttctgagctcctcccctcccgcgggctaggggcgtggggagagccttcctccaacctctgacccgaccaaccgattcctcccgaaactctgggaacttacacaacaggatcgccaatatgaagaggcacaacagtttcctctcgacttgcgcctttgtccccatcgcgatcaggctcccgacacaacagccgccgaaggactcctgggaacagacacagctccgcgactacagcgaggggactgagagccagccgccaggtggaaccccgcccggccccgccctccgcgcctgattggccagctccccacccctgcacgttccgattggtgtaaggaaccgctgctcttcagaacgagtcacctcggccaggtgttaccccgccgccactccccgcctcggcgcactggcgcctttccccacaggagctgcctcagattggcccaggagactgtcgcgtcaggagacgaattccgcaccttcagcaggtgacggccccctgattggttggtgttcccgaagtagcgacttcctgactggctgggttctcagttggagctagagggctgagaagtacctctaaggaggaagtaggaaaggcagtcgtggtgtgggattt

SEQ ID NO: 104442 - DNA, 149 bp, Homo sapiens
  chr1:161015807-161015956
  hyper
aactgccccacttccgctcactccatcttgatgagagttggtgtttgtgggttatttgtgaagccggaaagaagccgtgtcctggagaatgtagctgaaggcctggccactttcgacaagaacgggaaagagacgactaacttgtacta

SEQ ID NO: 104443 - DNA, 855 bp, Homo sapiens
  chr1:161067871-161068726
  hyper
caaatgatccctcccggccctagtggagcagcacctgcacctcaaatgtcaaaatcgcaaatcagttcacagcggagatcacaggggtttattctaaggacccgactgtcctccgactttctgaggttaacaatcttgcaggatttttattgacctgatacagctcccgtagccttggtggcaccaccatacggttcccgatagccacccaggtgtcctgtctccacggtaactgctgctttgcgaccttcggtttgcagcggtcgcgctgcagccgctgcagtggttgctgggcgaccacggagagaaagccgggacttgaggtgggaaccccggctggcgtccggtagggggaggttcccggggaagcccgcggaaggcgaggtgcctggcctgccatgtaggggctcgttccaagccgcagaccccaccgccctccctctccccggggcccatggcggtggccgtgcccccgggtcgggccgcaggctcaggctgggcctggaggccagtggcgcgggacgcgcttttggctagagctttccattcatgcaccgaactgcggggacggttctatctcgtaggtggtctcctagcaggaggagcgagagagcccagcagcgatacggtggttttcgacccagctaggggccaggccgtacgattgggagcccggggcagccccccgcgcagtcaccacgacgcggcacccgtggacgggcgttggctctgcgtggtgggcggctgggacgggtctcgccgcttggccacagtgaccgcactggacacagagcgcggtgtgtgggaggcgtggacagggacccctggtgactgcccccccgccggcctcagtag

SEQ ID NO: 104444 - DNA, 30 bp, Homo sapiens; identical to SEQ ID NO: 885
  chr1:161087307-161087337
  hyper

SEQ ID NO: 104445 - DNA, 30 bp, Homo sapiens
  chr1:161087620-161087650
  hyper
ctctctaggtgccacgcacatgtggtgctg

SEQ ID NO: 104446 - DNA, 42 bp, Homo sapiens; identical to SEQ ID NO: 36398
  chr1:161087908-161087950
  hyper

SEQ ID NO: 104447 - DNA, 107 bp, Homo sapiens
  chr1:161102588-161102695
  hyper
gcagcggcattaatcggggagtggatagcttcacttcgggaggagagatagagattggcagccatcttgctttggggcaagctggcaacgccggtttgtcttgacgg

SEQ ID NO: 104448 - DNA, 30 bp, Homo sapiens
  chr1:161102957-161102987
  hyper
cccagatcccgtctcggaattcatttgttc

SEQ ID NO: 104449 - DNA, 121 bp, Homo sapiens
  chr1:161123622-161123743
  hyper
gatgcactcacaagcgggtaactaggtgacaagaaaacaaagatcttattcaaaagaggtcttacagcaacccaacgtctcatcttcccatagtaaagatgacggcgccttgaggtaagct

SEQ ID NO: 104450 - DNA, 30 bp, Homo sapiens; identical to SEQ ID NO: 36399
  chr1:161124141-161124171
  hyper

SEQ ID NO: 104451 - DNA, 61 bp, Homo sapiens
  chr1:161129124-161129185
  hyper
acctctctgggcagcgttgagaaccagcgaccctaaacttggctgcgtttccatggtgtcg

SEQ ID NO: 104452 - DNA, 30 bp, Homo sapiens; identical to SEQ ID NO: 886
  chr1:161129600-161129630
  hyper

SEQ ID NO: 104453 - DNA, 132 bp, Homo sapiens
  chr1:161136045-161136177
  hyper
gctcactcccagctcggcgctaacacggttaacctccagctcttacagctgccgtcgctccgcctctgccagttcaatgttttattggtgaacgtgatccggggccttccaagtcccgccaatccagatgta

SEQ ID NO: 104454 - DNA, 100 bp, Homo sapiens; identical to SEQ ID NO: 887
  chr1:161171824-161171924
  hyper

SEQ ID NO: 104455 - DNA, 30 bp, Homo sapiens; identical to SEQ ID NO: 36402
  chr1:161172240-161172270
  hyper

SEQ ID NO: 104456 - DNA, 386 bp, Homo sapiens; identical to SEQ ID NO: 36403
  chr1:161195512-161195898
  hyper

SEQ ID NO: 104457 - DNA, 204 bp, Homo sapiens
  chr1:161196135-161196339
  hyper
ctgttccaggtgtagcgtcggaccatgtggaagtttctgaggctggggagccggataatggggggtggggcccgttggggggtaaaggggcaatagcgtcctttcacaggctaacctcggctcttcccagtcctctggactaaaatggggaacacattgggcctggcaccaatggggactttgccccgccggagcccccgccga

SEQ ID NO: 104458 - DNA, 453 bp, Homo sapiens
  chr1:161228439-161228892
  hyper
gaggctgtcattctacggtaggaggagcttctattggtcgggctggaggcgggtaccgagctgagtataaaaggtggggccggaggcggcgagctgagcggctctgacaggacgggtcgcagggggtcgcctggccggagctgggctccgagaatcccgggtgccagcaccagagcagcggctctccgcactaactctcctctcctggtcagctgtaacccctgccgcagagcccggcaactttcagctgtcgcccgcggagccccgagggccactcgcctcacctgtgcgtgcagcgcctcgcgcgccctgtccggctgcggagatgagcgaggtgagcggtgcggcccccggcgctgtcggcagggctgcggcggggagggtgctgcggctcgggatcccagggaggcgagggagagcgaggcagaccggagccgcgaagaaccctccagg

SEQ ID NO: 104459 - DNA, 129 bp, Homo sapiens; identical to SEQ ID NO: 36406
  chr1:161275449-161275578
  hyper

SEQ ID NO: 104460 - DNA, 579 bp, Homo sapiens
  chr1:161275639-161276218
  hyper
cgatcccccgcccggcccgctaaccgctatttcttatccttgcgagactcccccagccccttggccttcttctcactgacagctttggtgcttctgctgtggtccagcattgcatacagcactggcgtctgggggaggggcgcacacatcagtcaccgagcgactggggcttgactgttcccatcccacccctcactgctgcccggcggctcccagggttctccttcccatcttgtctaggccccaagtcccgctaacctgccgcccgcgcttcgacgcgtcctttcctggcttgtgcaatttccccttctccatagcactgcaagaagagagactgctgtacgtttggcctcgccggaaccccttgcaccgcggacacagcttcctcttccccttggccctcccacccactggagtagtctccgcccagatgggggatagtggggagagggggaggggagctaggctccgccccttacctgagcctcctctgcagggccgcctgcctgcgtagccagcagtaccgaaccacgtagaaaagcagcagcagcaacagcaccaccccgaggacacccccga

SEQ ID NO: 104461 - DNA, 191 bp, Homo sapiens
  chr1:161283830-161284021
  hyper
aacgcaacagactgcgaagtccttaaggaagaatctaaacaagtccgccgtttgctgtttgggagtgcgatacaaaatgaatatgtacgcaggtggaacgtagactgcagattttgagccagcggcgtttctgccgaaatcctggcaaattccggtagaagtcggctgcaggaggcggaggaggagactaa

SEQ ID NO: 104462 - DNA, 30 bp, Homo sapiens
  chr1:161359769-161359799
  hyper
tgactcattgctgacgggaaagctccggac

SEQ ID NO: 104463 - DNA, 30 bp, Homo sapiens
  chr1:161360251-161360281
  hyper
ccgacgttcaggatcggtgcccaggagatg

SEQ ID NO: 104464 - DNA, 578 bp, Homo sapiens; identical to SEQ ID NO: 890
  chr1:161368923-161369501
  hyper

SEQ ID NO: 104465 - DNA, 698 bp, Homo sapiens; identical to SEQ ID NO: 891
  chr1:161369560-161370258
  hyper

SEQ ID NO: 104466 - DNA, 837 bp, Homo sapiens
  chr1:161409867-161410704
  hyper
gcaagcctccttccccggcgcacaggcacgcagccacaggccaagctgcgacgcgagctccgcgcgcgggatctccgcaaaaggtccgcccgatgcgttgggcgggaatcgagcccgggtcaactgcttggaaggcaactatgctcaccactataccaccaacgccgcacggcgcgggcagccccgccgcgccggcccggggctcccaccagcgcgccgccgacgcccggggcaggccggccccgacgcccggtccgtccgcccgcccgcagctccgcgctgccgcggcctctccaaaggccgccccgcgccccaccggtgcaaggccagcgcggctgacccgttacgcccgcctgcctctgggggcgctctcgctcactcgccgcctcgggcccccagagcccttccccaacaggtgcccgggggggaaacggccggcgccggcagggtccccactcctacgcttcccaccgggcgcagggccccgtgtgtcgcagaaagcctcttccgacaaccactttgagccggcagctcgttgggcgccgtgcagggccagaggaggcctcccggctgccgctaccaagccgcggacgagaagaaaagacaggaggccaaggaggcccagaaggccaaagggccaggcaggccaggcccgagatggcaccctgcgactagctggagggcggaggaaggagaaggagggcccacaggctgggtccgaggcggcggcccaaaaagcacggctgcctccccgtcggggaatcgaaccccggtctcccgcgtgacaggcggggatactcaccactatactaacgaggacgacggcgacggtcgccg

SEQ ID NO: 104467 - DNA, 127 bp, Homo sapiens; identical to SEQ ID NO: 893
  chr1:161494852-161494979
  hyper

SEQ ID NO: 104468 - DNA, 30 bp, Homo sapiens
  chr1:161501012-161501042
  hyper
gtcagaacctataacgcgctgtgtatccgt

SEQ ID NO: 104469 - DNA, 157 bp, Homo sapiens
  chr1:161509888-161510045
  hyper
ctcagggctatgagccgcgccctgaagcacggaaagctaattgtgtcactggtttcaaatcaacctcaatttttttggagacgtgagtgctgagcattttttcttcagtgaagtgacttggcagccaaaatcgccaacgcccgtctctgtggcgcaa

SEQ ID NO: 104470 - DNA, 157 bp, Homo sapiens
  chr1:161510104-161510261
  hyper
gaagtcgcattttgtgaaccctgggtttttgaaactttgactgaaaaaactgcgtgcgatgctatccgctgggagcgctggggccttggcgctcaaaaccagccgcggtgctaaccgcagggagctctggtagcagacctccgcgttgtgtggttcc

SEQ ID NO: 104471 - DNA, 30 bp, Homo sapiens
  chr1:161581762-161581792
  hyper
ctccagcggagggtgcgatttgaacgcagc

SEQ ID NO: 104472 - DNA, 474 bp, Homo sapiens
  chr1:161582199-161582673
  hyper
gggacatgaggagtgcgggggggaagagaagacggcggaggaaaatcccccggcggtgctcaactgcggctttctctctcggctgtgagccggctccgccctccggcttccagagcaagtggcttctgcgttcaccgccccccgccgtttgtggggcggggccgattcataagaatcggttctcaccaatggagggcttagcatgtttaacctcaggatcataaacaaaagacactgctagaacggtcgggaaagtcatacgctttgcttatcttatatatagatttctaaaattccaaaccggggacgcgttggtggtgtagtggtgagcacagctgcctttcaagcagttaacgcgggttcgattcccgggtaacgaaacgtttttgtctttccttctacgaaaaacttttctgagccggagcctccagcgcgctgtgtattcgttttacgcctcaacgaaactgcagcaat

SEQ ID NO: 104473 - DNA, 453 bp, Homo sapiens; identical to SEQ ID NO: 36416
  chr1:161591322-161591775
  hyper

SEQ ID NO: 104474 - DNA, 30 bp, Homo sapiens; identical to SEQ ID NO: 895
  chr1:161601157-161601187
  hyper

SEQ ID NO: 104475 - DNA, 577 bp, Homo sapiens
  chr1:161695644-161696221
  hyper
gttcgagggtgagccgctagtcctgcgctgccgcggctggtacgacaaggtggtctacaagcttcactactaccacgacggccaggccgtgcgctacttccactccagcgccaactacactgtgttacaggcgcgtgccagcgacagcgggcgctaccagtgctcgggcaccatgcgcatcccggtggagagcgcgcccatgttctccgctaaggtggctgtgacagtgcaaggtgggagagaccaggggccccgggagggaggcaaatgagcattgagaaattctgggacaggagctcggcgagaaaagaaggggcggaagttcaaatagctgccacttggagggtttctcttagactatggacgctgtctcctctcctttgccgtgaagcagcgcttgatccgccgcctgcttggaggctggtccctttccccgacgcacatcctggcttctcactctggctggggactcccacagagagggcagctctggcaggggcaggggccactgtgggactgggacgaaggagcgactccctagcgtcctgcaaggcaggcgcagcgtctcctattctag

SEQ ID NO: 104476 - DNA, 286 bp, Homo sapiens
  chr1:161696447-161696733
  hyper
gagcggtggacaagccggcgccgttgctccccgccctctccgtagagctgttccgggcgccggtgctgagggtgatgggtccgcgggaggcccgcggcgcggcgctgggtggggtggtgctgcgctgcgacacgcgcctgcacccgcagaagcgcgacacgccgctgcagttcgcgttttacaagtacagccgcgcggtgcgccgcttcgactggggcgccgagtacacagtcccggagcccgaggtcgaggagctcgaatcgtactggtgcgaggcggctaccgc

SEQ ID NO: 104477 - DNA, 70 bp, Homo sapiens; identical to SEQ ID NO: 36419
  chr1:161697226-161697296
  hyper

SEQ ID NO: 104478 - DNA, 30 bp, Homo sapiens
  chr1:161720159-161720189
  hyper
gcagcagcagagggcgggggaggtgtcatc

SEQ ID NO: 104479 - DNA, 36 bp, Homo sapiens
  chr1:161736083-161736119
  hyper
ttttgtccgcctgccgccgccgtcccagatattaat

SEQ ID NO: 104480 - DNA, 30 bp, Homo sapiens; identical to SEQ ID NO: 897
  chr1:161993349-161993379
  hyper

SEQ ID NO: 104481 - DNA, 30 bp, Homo sapiens; identical to SEQ ID NO: 36422
  chr1:161993901-161993931
  hyper

SEQ ID NO: 104482 - DNA, 30 bp, Homo sapiens; identical to SEQ ID NO: 36423
  chr1:161994348-161994378
  hyper

SEQ ID NO: 104483 - DNA, 931 bp, Homo sapiens
  chr1:162039134-162040065
  hyper
ttcctggtaaaacacgaaaacaaaacaataaacacggcccctcccccctctccaaaaacaaaaacaaaaacttcaaggccatgccgccgcggccatcagtagctccggctcagaatttgaccgttaaaaaaaggaaactaggctgagctagggcacctcagatcccggcagtctggggccggggcgaagttgccggcgtcgcgcggccgggggcgcgggcagggccgggcgcgactctcccggggactttcacctgctcggctggcagcgcgggcagcgcgggggcggacccggcggcgggcggggcctctgagcccggcgggaggagccggcctgggcccgccccacaggaggagccgctcgctggcggctgatccagcgtctccgtgacaggcaccctgctccgccgccaccgccaccgccaccgccaccgtcgccttttcttcttcgtcccgggcggtgcgttccactgctctggggccggcgccgcgcccagtcccgcttcgggccgcaagccccaccgctcccctccccgggcaggggcgccgcgcagcccgctcccgccgccacctcctcccctgccgccctcctagccggcaggaattgcgcgaccacagcgccgctcgcgtcgcccgcatcagctcagcccgctgccgctcggccctcggcaccgctccgggtccggccgccgcgcggccagggctccccctgcccagcgctcccaggccccgccacgcgtcgccgcgcccagctccagtctcccctccccggggtctcgccagccccttcctgcagccgccgcctccgaaggagcgggtccgccgcgggtaaccatgcctagcaaaaccaagtacaaccttgtggacgatgggcacgacctgcggatccccttgcacaacgaggacgccttccagcacggcatctgctttga

SEQ ID NO: 104484 - DNA, 30 bp, Homo sapiens; identical to SEQ ID NO: 36425
  chr1:162058274-162058304
  hyper

SEQ ID NO: 104485 - DNA, 30 bp, Homo sapiens; identical to SEQ ID NO: 36426
  chr1:162393905-162393935
  hyper

SEQ ID NO: 104486 - DNA, 30 bp, Homo sapiens; identical to SEQ ID NO: 899
  chr1:162467740-162467770
  hyper

SEQ ID NO: 104487 - DNA, 344 bp, Homo sapiens
  chr1:162530844-162531188
  hyper
aaggtcagagagcgcgccaggcccgccctgaaagtttctccgcaggaaaatccaccgccctttcccaaccacccgcgtgggtggctcggaaatccgccaccctggggacacagctccctgcccatctctgtggcccgcttgtgccccgtgccgctgggccgactaagagcctcgggctcgcacctcccagtacaacctagggacgtcaggggtcctgggacccacgagccgctctctgccggccggctcctggcccctcctagcagacccaaccgacatccttcaccctcagttagtgcgcaggagggaccgggacgccagccgactgcgctccagaactattc

SEQ ID NO: 104488 - DNA, 126 bp, Homo sapiens
  chr1:162531408-162531534
  hyper
gtggccggggctggcgctccacttggcccccgctcccggcccgccccgccgccgcggccccccggatgagggtatatattcggagcgagcgcgggacgccgatgagtggccgcgcggaaggagctg

SEQ ID NO: 104489 - DNA, 30 bp, Homo sapiens; identical to SEQ ID NO: 36430
  chr1:162660818-162660848
  hyper

SEQ ID NO: 104490 - DNA, 472 bp, Homo sapiens
  chr1:162792155-162792627
  hyper
cagcctgtggtggaagatgtgcgaaagggatgggggaacgctgtggaccggtgtggagtctaggacgacaggtggtgggctctgtccccacgcgcctcgcggccagcagaggccccctcactgcggccgccgggcgggactggcgcgggcggcgctgggctgggcccgggaggctggcatccctgggtgctccggtgcggtactagggggcgacggctgagccgtgggtggagccgctgggtcagtctcggatagaaataaactgggaaactgctgtggtctctgttgcttgcgtgctcggttttcgtgcttatcacgctgatgatgaggaaggtggttttggttacggagtgagcaggtgaacgcctccccgtggaccccaccggactgggtggggaactcacaactctgacgccccgtgactgcatcccctagctgggcagagacgcatttggctcgccaccagccacct

SEQ ID NO: 104491 - DNA, 71 bp, Homo sapiens
  chr1:163291478-163291549
  hyper
tcggaccccgaaaacgctctaaacgctggcggaagtcacgcagagatgggctagacgctcaaccccggtct

SEQ ID NO: 104492 - DNA, 30 bp, Homo sapiens
  chr1:163292005-163292035
  hyper
aggggcgggcccgtcgttactttttatttg

SEQ ID NO: 104493 - DNA, 31 bp, Homo sapiens; identical to SEQ ID NO: 902
  chr1:163378140-163378171
  hyper

SEQ ID NO: 104494 - DNA, 90 bp, Homo sapiens; identical to SEQ ID NO: 903
  chr1:163378350-163378440
  hyper

SEQ ID NO: 104495 - DNA, 177 bp, Homo sapiens; identical to SEQ ID NO: 36435
  chr1:164290494-164290671
  hyper

SEQ ID NO: 104496 - DNA, 131 bp, Homo sapiens; identical to SEQ ID NO: 36436
  chr1:164290723-164290854
  hyper

SEQ ID NO: 104497 - DNA, 30 bp, Homo sapiens; identical to SEQ ID NO: 904
  chr1:164528670-164528700
  hyper

SEQ ID NO: 104498 - DNA, 313 bp, Homo sapiens
  chr1:164529155-164529468
  hyper
accgagggggagggcgggaggaagcaggacattggagacattttacagcaaattatgaccatcacagaccagagtttggatgaggcgcaggccaggtgagatggaggcttttcttttcctttcttggggttttttgtttttcttcctcttgcagggggaaacaatgggaaccgaatcaccacagcgctttttttgaaaaatgttatttcttttctcattttgacaagcaactacatggcggaggagtaaaatttgaaggagcgttgttatcgaaagtgtaatcgcccatgccgagatgtggctgtgtacatat

SEQ ID NO: 104499 - DNA, 360 bp, Homo sapiens; identical to SEQ ID NO: 36439
  chr1:165086748-165087108
  hyper

SEQ ID NO: 104500 - DNA, 200 bp, Homo sapiens
  chr1:165204496-165204696
  hyper
ggtagcgacggtgtccgtgcgtttcttcactagtgcatgtgcgaggagggctggaggcatgagcgaaagagggaaggcaatctcggtctccaaaaaatccaggggactctccctttcagcacaagcgctcacacgtgcgctcgcgcggacacacacacacacactcacactcacacacaaataaatccccagcacctgcc

SEQ ID NO: 104501 - DNA, 736 bp, Homo sapiens; identical to SEQ ID NO: 36441
  chr1:165204732-165205468
  hyper

SEQ ID NO: 104502 - DNA, 584 bp, Homo sapiens
  chr1:165321202-165321786
  hyper
atgcagaattctgcgcgtgcacgcgcgcgtccacacagtcaacctacaccagtcctaatgcacaaaaacagagacctctggatcagccacttttcttcaatcatctccaaagccctgcaaagccaatacacttattaattaaacatttcgcaaggaaaaaaccgttccctctccttacacctcctaagctcctcccggcacgcccggagagaataaggaagttcttctacctcccactttctggcttcatccaggctttagtgttataaaaatccagtttcgaaatatccactttcttaaattcctgcctcccagttctcctctgaacgtaccagaacgttcatgtggacaggagggaactgaacttgctccgtggcagaagagcgtacccacacctgaactaggatggcggcacaggttgaaggagagggcttcagttcaggccccaactactgtcctaaaagcccctgcatccgagggttctgcagaaaaccaggaaggcgacagtgaaagggcgaacgggctgtgcgcttagctccgaatggcagcagagccatttccgagcccaaactgtccggactcca

SEQ ID NO: 104503 - DNA, 454 bp, Homo sapiens
  chr1:165321942-165322396
  hyper
cgcagggcaccccggtaaaagagggagaccaagctcgagggattccaaggctaacaaagagtggcctctggaaacggccgagtcagagaaaggggcctggaaggaccagaaagcaggcgagcagaccgtggaggacagccattgcgcgcacttctgcgggactcgggccactgctgcgcgcacccgcgcggatctctgccctaccaccttcccgtgaggggcaatgtacacgactgcgctgaagggaagttctgctcgctgggcgtgtctcttgggccttccagaaaaggactagggtaaaggaggacaaagtcctcgacgcacactgatgccagtgcgcggggagcgctgcgggggtgcggccacttacttctcgtagtcatacttgcagtacagcttcttgtcccggtagaagcaggtggtctccaggggctctttgcaggaggcgcactgc

SEQ ID NO: 104504 - DNA, 106 bp, Homo sapiens
  chr1:165322515-165322621
  hyper
cgttggcgggtgagcagcccgggcaggtagaccatgccaaacctggccgggacccgctcctgatcccttcacatccacggattcccccagcgccccccaccccagg

SEQ ID NO: 104505 - DNA, 139 bp, Homo sapiens
  chr1:165323108-165323247
  hyper
ttgataactaagaagcgtcaaaacagagggagggaaaaaaatagcggaagaagcaagccgctgagtgtcccggccgggattcccgatgccaggcgcgttcggcagcagtgcttgagggcgaaacgggcctcaaagtgac

SEQ ID NO: 104506 - DNA, 38 bp, Homo sapiens
  chr1:165323480-165323518
  hyper
cccttccgagaggcccggccaccggctcgggagctggg

SEQ ID NO: 104507 - DNA, 127 bp, Homo sapiens; identical to SEQ ID NO: 910
  chr1:165323697-165323824
  hyper

SEQ ID NO: 104508 - DNA, 1160 bp, Homo sapiens
  chr1:165324196-165325356
  hyper
agcctagggcccagccgcgcggtctaatccccgcgctgcgttgcctactggcccagaaaagtctctctcggccttgcccatggctgaaattggggctggagttggtgggggagagaagcctcctcgaacttgggcgctccaggcctcgggtctcggatgctattgcctctaggccgcgagaagagggcggcatttatgagacgtcgatcagctccgagattaaaaatccagccctgggtatttttaatcacttgccactcagacgcctacgaacaagctcgcccgcccctcgcggctttggggaattcggtgcccagtgcgtgaggcctggggcggcttgttggatttatttgggtagggacgacccacaagcactgacggacagatagtgatggggctcaatttagtgtatgaagaggggcgctagcttccctatcgcggaccaggtcccagagagcggggctccagagctcagcgccaagcggaaagagagtgcgcccaggacgcacggcctgaacactcacccagcagcgaggagaaggaggccgaggtgtcgatcgcgctttggaagttctcctccatctttaggccgtccagcatgttcgggccgggccgggaggacctgtagaggagaagaaacgatgcgtctgacgtccgtgcccgctgggactcggcgccagcagccaccgcactcctgggaaagaactgagggagtgtccagggcgaccagaatcagccaggaggatagggtccagccaagagaatgtagggtgggaggagagatcagtcacagcgaactgctctggctgatctgatttcacttgaagtcaacacgttatgtacttaggcctccgccccccaactgcgtttctccttctcctgcccccctcacccccacctacatcccttgccccaggttttccatcccgaatccgactccgccccaacctatacgaaggtgggccctcgggacgtctctgcaggaacgcagctactggggtatattgggtatataaagagtgggtaccctccctcgagcgaccgggtccaggcacgcgggacgatggggtttgcaatcccgcgtcccagccgccccgttgcggccctcacctgccccaggtcgagaaggggcactgtaagggacccggagggcgtcccgc

SEQ ID NO: 104509 - DNA, 810 bp, Homo sapiens
  chr1:165325394-165326204
  hyper
cgcgcaggagccggtgtgcggggcgcgcggggaggtcctcccgccagtcggccagtgccgggaatgtctgcagaagcaaaagagtcgcctcggggaggagccccggctggcccggctcactcttggatgcatttcaagtcaactttcagaaacacgcccgcccgagccacagcctaggcacgggcagccttacttacctggtaggcgagctctctcccagtgactggagcagagagaagttgcggagcgctgctggaagcttctgcccgggaaggcgtcgcccccgagactgcagccggaggagccgccctcggcttcggagcgccggggagggagccggagcgaacgccggccgctggctctgctcctcggcgcgcccaggctgggccgggacgtggtcgcgagctgccggccttcccgggacgtcctaccagcccgcgtcgctcctcagcgggaggagagggccagttgcttctccaaggctaggagggaaggcagaggcccagggtcctgggtgcgagtcggccctgcttcgccggggcggatcctgcagcttctgacaggggccgcggcgctgcgtgcgcggcggcggagagggggtggggtgcgctgggcggggggctggcagcgcgtcccgtggcggggccgtggtgctccctttcccagcctggctgcgcggccaccacacggccgctgccctctgagcccctccgcctctgggagctctcggacacgctaagtttcctcccctccacgtgtaactgttacctcggggcgctctggcccggtcgccccccagtgcccctcacc

SEQ ID NO: 104510 - DNA, 38 bp, Homo sapiens
  chr1:165326296-165326334
  hyper
cgctgcaatccttacccgggccccgggaagcgctgaga

SEQ ID NO: 104511 - DNA, 389 bp, Homo sapiens
  chr1:165345283-165345672
  hyper
ctgctctgcccgaaccgcaggctgcctgggccggggacgcgcggaggggccccccgcagagggcgggctcagccgggcagagctctcgggggcgccccgcgcccagccccgccggctcctgctctccccgagcacgcggcgttagctaatcttctcagggactgccgaggccctttctccgccaaaccgcagggagggaacagcccgagaagggagggggctgggaagggtttgttgttgctttttctgaattaaaagaaaacagggactagagcaaggaagagagcgaagttcaagggagaatctggcaagtcaccttgggcagcccctggaccgccgccagagctctcttggagagggtgaggacgccgagcgtgtgatgagcgcct

SEQ ID NO: 104512 - DNA, 30 bp, Homo sapiens
  chr1:165345988-165346018
  hyper
agggattagtgcaagcgtccgttggccgga

SEQ ID NO: 104513 - DNA, 544 bp, Homo sapiens
  chr1:165414038-165414582
  hyper
tctcatacaggtccacgcagtgaagcccaagggagatacttacctccatagcctgcgggaaacttcatgaagtgagaataatttccatacatgtttactcgtcagttcatgttcctctcctgtgcagcttctaaatattaccgcctctctcggctcccaggcacagcccggctttcttcaacttgggctaacaagagtggtcatcgcttcctagcagcccggggagcacaggctgggccagccctctgggattagtcaggaatctgcctctagatcggagagtccacatagtgcgtttgagacggctgtggcggcagcagctggtgcctgtcagtaatcacgcataatgctgccgccgccgccgccgccgccgtcaccgctactcttgccaccgccgtcgctgctgcttgagatcctgttgctagtttgattaactcagggttgggctgctgcgtgcgactcttccagctcccggcgcgtccccagaggtccctaccgggtggcacgatctattatctaggaagccaatcgatgtatgaccgcc

SEQ ID NO: 104514 - DNA, 30 bp, Homo sapiens; identical to SEQ ID NO: 36452
  chr1:165567477-165567507
  hyper

SEQ ID NO: 104515 - DNA, 56 bp, Homo sapiens
  chr1:165599886-165599942
  hyper
ggtacggcccaccacgagggcagggctcggcgccagctctcggcaaaactaacaat

SEQ ID NO: 104516 - DNA, 30 bp, Homo sapiens
  chr1:165600282-165600312
  hyper
agtaaatcgctggacgaccatgagcaggaa

SEQ ID NO: 104517 - DNA, 30 bp, Homo sapiens; identical to SEQ ID NO: 36454
  chr1:165600992-165601022
  hyper

SEQ ID NO: 104518 - DNA, 125 bp, Homo sapiens
  chr1:165667435-165667560
  hyper
cccggaggcactcgcgttgccccagaatcgctagttgcctacacacacaaccttagactctccactgtcactgtcttgtgctcaagtcaacgctgcagaacacaggaaacgggggctggccggga

SEQ ID NO: 104519 - DNA, 190 bp, Homo sapiens
  chr1:165667891-165668081
  hyper
taggggcagtcactcgattcctctgcggtccaggccaggccctcccctcgccaggagggtggagcaagacaccacattctccccaccaccccgccataccccacacagtctccaggcgggaagaggacttccttcttcgtgatcaatatttgcgtagcactttgcaagtgttttcgggttcatcattgca

SEQ ID NO: 104520 - DNA, 827 bp, Homo sapiens; identical to SEQ ID NO: 36455
  chr1:165737817-165738644
  hyper

SEQ ID NO: 104521 - DNA, 30 bp, Homo sapiens; identical to SEQ ID NO: 917
  chr1:165796842-165796872
  hyper

SEQ ID NO: 104522 - DNA, 30 bp, Homo sapiens
  chr1:165797372-165797402
  hyper
gttccgggggtacgcggccacgatcgcagg

SEQ ID NO: 104523 - DNA, 30 bp, Homo sapiens
  chr1:165798366-165798396
  hyper
agacacggcggctggcgctgctggacttct

SEQ ID NO: 104524 - DNA, 730 bp, Homo sapiens; identical to SEQ ID NO: 918
  chr1:166134160-166134890
  hyper

SEQ ID NO: 104525 - DNA, 1296 bp, Homo sapiens
  chr1:166134933-166136229
  hyper
cgcctctcgaaccctccttgtcgcgttcttcccgccccgcacctttctcctcgcgtttctgggaagtcagaagcaaaccacgagaaaatgccttcgcaaggagcctccctacacccgccctgtcactgaaacaaaagcgtagggaggagggaggtgggagaggaggcgggaggaaggtttagaaagacgatggggacagcagtaggaaggagctggggaggggggtcaaggtggcaagcagagctgggggcccagagtccgctcccgtgccgcgcggcgagtcgcttacatgcccaggtcgctgtaggtgttgaagaactccatctgattgcacgcctgaatccagcccaccacccaggtctcgtggcgggggatggggggcatgaccacgcgggcggaggctttgaagtagggggtcttgtagcgcaggacgatgggcgaggtctcctcgatgcgcgtggggcactggtcgatggtggcgcacacatcgtacaccacgatgttctcgcgccggatccgcgccttgcaggtgatgctttggatacagcccatcctgcagcccggtgccggcacggcgcggcgtggggcagcgcgggggcccgcgcgggcagccgggggcgcccgtcacgccggcatggcgacgcgccgctcgctcccggtcagactcagctcgcacctaggagcggggagccgccgggcatccttggggaagccccctcctcttgcagccgcgcggggtccccgctgccccgacgtccgcccacgcccgccccctcgctccggcagggcgcgcggagggtgcactcctaggaggcggcgggtgccctcgccggctccagcgcccgggcggagggcagggaggggagcggcgctgcgaggaatggtgcccaccccgggccggagccccccgcccctcgccggagaggaggaggcggcagcggcggcggcatggagccgggggagggcggcggtggcagcgcccggtctgtctgcctccgcggcggcagcagcagcagccgccgccgccgccgccgctgcatgaacctctgcaccacggctgccccccgcgtgcagcgcacccagcggcgggcgagcgggcggcccaagaggcaggcggaggcagcagcggcggcggcggcgaccggagctcccgccggccccgccccgtagccggaccacaccgacactcctcggcccggctgcctcggcccggggggcgccaggaggctgtggcccggggtggagagccccaacggctggagcagcacaggacgtgctccgcggaggaaactggct

SEQ ID NO: 104526 - DNA, 34 bp, Homo sapiens
  chr1:166136428-166136462
  hyper
aggccgagcagggcgcggcgctgtccagagtcca

SEQ ID NO: 104527 - DNA, 96 bp, Homo sapiens
  chr1:166808336-166808432
  hyper
aagcacggcgagaacgcctggagagctcgtccaagcaagtgcaacccgctggtgactgcaaatgagcacatggaactgtgcgcccacgctacgctc

SEQ ID NO: 104528 - DNA, 30 bp, Homo sapiens; identical to SEQ ID NO: 36462
  chr1:166809392-166809422
  hyper

SEQ ID NO: 104529 - DNA, 30 bp, Homo sapiens; identical to SEQ ID NO: 36463
  chr1:166845740-166845770
  hyper

SEQ ID NO: 104530 - DNA, 30 bp, Homo sapiens; identical to SEQ ID NO: 920
  chr1:166846167-166846197
  hyper

SEQ ID NO: 104531 - DNA, 268 bp, Homo sapiens
  chr1:166853523-166853791
  hyper
gtcgggatgggcgggcggcacggtgctgctcttagcactaaagcggctgttgtccgagaaacgaagcgagaatgcagagctggccccggcgcgagcgaaatgtctctgcagcagcaccgcttgccttcgctagaggaagaagagacggccctgagcgcagcatcacctcggccggttggagtctgcccggctgccgccagggggtgatgcgccctcacctttcctccaggatgcccgggatcccaaggagggtcgtgggtctccgcgt

SEQ ID NO: 104532 - DNA, 174 bp, Homo sapiens; identical to SEQ ID NO: 36465
  chr1:166916746-166916920
  hyper

SEQ ID NO: 104533 - DNA, 13 bp, Homo sapiens
  chr1:166916936-166916949
  hyper
cgactacaatgca

SEQ ID NO: 104534 - DNA, 14 bp, Homo sapiens
  chr1:166917124-166917138
  hyper
ggggtggctggggg

SEQ ID NO: 104535 - DNA, 30 bp, Homo sapiens; identical to SEQ ID NO: 36468
  chr1:166944378-166944408
  hyper

SEQ ID NO: 104536 - DNA, 209 bp, Homo sapiens; identical to SEQ ID NO: 36469
  chr1:166944963-166945172
  hyper

SEQ ID NO: 104537 - DNA, 42 bp, Homo sapiens; identical to SEQ ID NO: 924
  chr1:167028535-167028577
  hyper

SEQ ID NO: 104538 - DNA, 239 bp, Homo sapiens; identical to SEQ ID NO: 36471
  chr1:167090626-167090865
  hyper

SEQ ID NO: 104539 - DNA, 253 bp, Homo sapiens
  chr1:167189608-167189861
  hyper
tccacgcgcccccacgtttctggccgctgcgctccttgccgtgcttttacaatgccacaggccactgggggagaccggagcgaagccaggagggaagcaaggcgggaggaaaagggagaagtgtaagaagacacaggcgcccgggatactatataatctggttctgagctagagggagcgcatgcgccggcgacacttctggcggcaggagaaaggcgcgcatgcgcagagccgagacgaaaaatgaagccac

SEQ ID NO: 104540 - DNA, 238 bp, Homo sapiens; identical to SEQ ID NO: 925
  chr1:167190163-167190401
  hyper

SEQ ID NO: 104541 - DNA, 30 bp, Homo sapiens; identical to SEQ ID NO: 36474
  chr1:167191345-167191375
  hyper

SEQ ID NO: 104542 - DNA, 166 bp, Homo sapiens
  chr1:167423948-167424114
  hyper
ccgagtgagatgaaagcgcttttccgatccaccgaatcagtcccactgcaactgtaagctggagaccctctgggccttgggagctcaggctgcctgggcaacgcaagggaggacaggggcggagggggagccaggagggccgcacctgcctcgctcgctggtcgcc

SEQ ID NO: 104543 - DNA, 132 bp, Homo sapiens
  chr1:167424547-167424679
  hyper
ggtcaaagctacgccgggtgcactgcgggctgggcagctctcccactacgcccaaagcccaggcggccgggaccgccgtcccaaagtcacaaaccacacccgtgaaggacgccctccgcaagacagagagga

SEQ ID NO: 104544 - DNA, 30 bp, Homo sapiens; identical to SEQ ID NO: 927
  chr1:167503207-167503237
  hyper

SEQ ID NO: 104545 - DNA, 78 bp, Homo sapiens; identical to SEQ ID NO: 36478
  chr1:167522407-167522485
  hyper

SEQ ID NO: 104546 - DNA, 35 bp, Homo sapiens
  chr1:167523049-167523084
  hyper
ccccgccccctccgcgaggcgccaatcagagctaa

SEQ ID NO: 104547 - DNA, 777 bp, Homo sapiens; identical to SEQ ID NO: 36480
  chr1:167599107-167599884
  hyper

SEQ ID NO: 104548 - DNA, 200 bp, Homo sapiens
  chr1:167691105-167691305
  hyper
gccttcccggcggacggatgatggacagcctgactctccaatcgcgtccttaaaagggtgcgggcaggccaatgagcggacagcgagggccggagtggggctgaggcttcggtgcagagctggagagccgcggctgggaccggagtggggagcgcggcgtggaggtgccacccggcgcgggtggcggagagatcagaagc

SEQ ID NO: 104549 - DNA, 30 bp, Homo sapiens
  chr1:167691695-167691725
  hyper
tggatcctggagtgcggaggaggaggggag

SEQ ID NO: 104550 - DNA, 30 bp, Homo sapiens
  chr1:167772630-167772660
  hyper
gtaggtaacgaggggcgccgcagtggtgct

SEQ ID NO: 104551 - DNA, 30 bp, Homo sapiens; identical to SEQ ID NO: 36482
  chr1:167772887-167772917
  hyper

SEQ ID NO: 104552 - DNA, 30 bp, Homo sapiens; identical to SEQ ID NO: 36483
  chr1:167904975-167905005
  hyper

SEQ ID NO: 104553 - DNA, 391 bp, Homo sapiens
  chr1:167906375-167906766
  hyper
ggggccttggttgccgaattccgtgccggtgcctcccccagtcaagccccctgtgcatgctgccagccgccgcccttgctgggtttttctcggagggccgggccgtgggcagaaggtactggcttgtaaaggtgttggggtcgctgatgggttgggactcgggagacttgcggaacctccaggagctgccgcgtttagagcaaaagttagctcttttgctcttttccagcgcgctttccccgctcagccgaagaacctaagttgttgcccaccctctccttcaatctccagagggtttaggtgtcggctgcgacgcgttgaccaccctcagggacttcacgctccagacagaatccgtgtaaactgtttttgcggcgctgagccaaaacct

SEQ ID NO: 104554 - DNA, 30 bp, Homo sapiens; identical to SEQ ID NO: 36485
  chr1:168105302-168105332
  hyper

SEQ ID NO: 104555 - DNA, 178 bp, Homo sapiens
  chr1:168105712-168105890
  hyper
cagaagccccaggccgcaggggaggggcgcgcccccaacatcttcccacaaagagctccagctctccaaagcaaggcgcagtgcgggcggaggacagccctgacctccgagaggggcgcggggagaaagggagcgccgtgggggcggggacccttcccggcccgcgccctgagccctc

SEQ ID NO: 104556 - DNA, 30 bp, Homo sapiens; identical to SEQ ID NO: 36486
  chr1:168148081-168148111
  hyper

SEQ ID NO: 104557 - DNA, 30 bp, Homo sapiens; identical to SEQ ID NO: 930
  chr1:168148606-168148636
  hyper

SEQ ID NO: 104558 - DNA, 244 bp, Homo sapiens
  chr1:168194874-168195118
  hyper
ttcctgtgtaggcacgatcgcaatatggatgaaccacagcctttgttcccgtctgcacaaggcttctcccccgtctttgtgtctccggagccttgcacgtggtaggtgctcggcattcgttgactggatcaagtagggcgagggagcgcggcccgttccggtttgaaactgctctggacgccgaattagtgtttggcagcgcctggtggtcttcaatcccagcccctccggcccgccgcgcccc

SEQ ID NO: 104559 - DNA, 190 bp, Homo sapiens
  chr1:168195383-168195573
  hyper
agtgagcccggggccgtcggccccctctcgccgcgctcccgccctgcgtcccctgcccgggcctgggaagcctgcggggactccctggagtttctggacggtagctctgccccttctcctcctcttcttctgcagggctccgcgaagaggtctggcactacacggggcagtggccgcggcgtccttttct

SEQ ID NO: 104560 - DNA, 283 bp, Homo sapiens; identical to SEQ ID NO: 932
  chr1:168311896-168312179
  hyper

SEQ ID NO: 104561 - DNA, 335 bp, Homo sapiens; identical to SEQ ID NO: 36491
  chr1:169074761-169075096
  hyper

SEQ ID NO: 104562 - DNA, 30 bp, Homo sapiens; identical to SEQ ID NO: 36492
  chr1:169075385-169075415
  hyper

SEQ ID NO: 104563 - DNA, 30 bp, Homo sapiens
  chr1:169075656-169075686
  hyper
gaggtcaggggaggcgggggcccagcacac

SEQ ID NO: 104564 - DNA, 333 bp, Homo sapiens
  chr1:169076041-169076374
  hyper
gcggcagctgctgacccgccatcgccatggcccgcgggaaagccaaggaggagggcagctggaagaaattcatctggaactcagagaagaaggagtttctgggcaggaccggtggcagttggtgtaagtacggggtccgcagctcccggccgccgcgtctgatctttcccgggcggcgcatcccctgcgcagggtccgcggccggttccgcacccaccgcgctggccggggtggcgggggcgagggtggtggacgctgctgggtcgcgccggcctgggcttgcagtcctgtgcggaatgcggtgtccccagagtggggcgcagggtcggggct

SEQ ID NO: 104565 - DNA, 192 bp, Homo sapiens
  chr1:169337028-169337220
  hyper
aggcaacaaagccccgcccactgtcgcacgaggcgtgggacgccaccgccccacctcttcgtccttagtggctgggagtaatctcagctgcgttcatccaatcgacagacccgcccctccacgctgtcgcctggggctacgagacgccattattctgtttccggcagttttacttccgtttgtttaacagct

SEQ ID NO: 104566 - DNA, 30 bp, Homo sapiens
  chr1:169337507-169337537
  hyper
taacctggtgataccgatccgaagagccta

SEQ ID NO: 104567 - DNA, 257 bp, Homo sapiens; identical to SEQ ID NO: 935
  chr1:169396431-169396688
  hyper

SEQ ID NO: 104568 - DNA, 200 bp, Homo sapiens; identical to SEQ ID NO: 936
  chr1:169396730-169396930
  hyper

SEQ ID NO: 104569 - DNA, 151 bp, Homo sapiens; identical to SEQ ID NO: 36497
  chr1:169454464-169454615
  hyper

SEQ ID NO: 104570 - DNA, 30 bp, Homo sapiens; identical to SEQ ID NO: 36498
  chr1:169455040-169455070
  hyper

SEQ ID NO: 104571 - DNA, 203 bp, Homo sapiens
  chr1:169455341-169455544
  hyper
cacgccaggcctctgacgtcccagggctcaagcgcggaggacatgtggaactccactccaaaagcggcggcttgcggcggagctctctctagtgaggcggccagctggcgttcgtggcacacttgctgtcggctccgctcatctgttgggaatgcgtcctgtgggcctagtcctccgctggaagaaacgcgctgttctcccca

SEQ ID NO: 104572 - DNA, 30 bp, Homo sapiens
  chr1:169555659-169555689
  hyper
caggacctgggcagcgcttgccgagctgct

SEQ ID NO: 104573 - DNA, 30 bp, Homo sapiens
  chr1:169681318-169681348
  hyper
ggttccttcacctccgtctttccttgctca

SEQ ID NO: 104574 - DNA, 359 bp, Homo sapiens
  chr1:169763975-169764334
  hyper
acgtgtcctgggatcgcgcttctgaaaaagctcacctcacaacgcctcctccggacctaaatcgcgcaccagtgagtcgagtcctccaggggctagagaagcccgactttctttccggccttgagggacccgggctcaccaagaaaccagccgccctcctctctatggttttggagccggcggagagcgcgcaagggttggcgggactgcgagtttccggtctgggctttggcgggtctggtttgaagctctcctgtttgacgaaagtatgtctcaggaaggtgcggtcccagctagcgcggttcccctggaagaattaagtagctggccagaggagctatgccgccgggaactgccgt

SEQ ID NO: 104575 - DNA, 30 bp, Homo sapiens; identical to SEQ ID NO: 938
  chr1:169862706-169862736
  hyper

SEQ ID NO: 104576 - DNA, 38 bp, Homo sapiens
  chr1:170043653-170043691
  hyper
caggcgcggttatttccggggacggtggccaaagtacc

SEQ ID NO: 104577 - DNA, 93 bp, Homo sapiens
  chr1:170043981-170044074
  hyper
ggctccgtagtcaccgcccccttgaggatgggaatagaaagggctgtcaggtcagcttgaaaggagagaggggaatccgataaccttttagtt

SEQ ID NO: 104578 - DNA, 30 bp, Homo sapiens
  chr1:170501630-170501660
  hyper
tcttttagaaaaaacggtccaggaatccac

SEQ ID NO: 104579 - DNA, 310 bp, Homo sapiens
  chr1:170629361-170629671
  hyper
cagcccaccctgcctcgaaactccctgcggtgatgtcggggctagaggaatccagggcttggtccctgcagctgaggcctacgggatatcccaggaaagagcagcctctccgtagtggtgaagagtctctcaagccttagcgctctggtgacctccgcgggattctgagaaaagcactgcggaacggcgggagcgggccctgctgcttgcttcgcgccccccacccgcccggggaccgcgactaagtccccgacgcagctcttcccttttcctgaataccctgggactctgctcccgagttccagctccg

SEQ ID NO: 104580 - DNA, 449 bp, Homo sapiens
  chr1:170630320-170630769
  hyper
tatgtgtaggggaaaaacagcaacgttaaaacgcaactgtgtaaatgaggatagagagtgcgaaaggagggagaggcgaggagctgctctatttctagggaggttttggggagactgatcagctccaaggacagaccgctgggaagggaaaaacggcccacatcgaactggatgccggatggaaacctctctgcgctattagactgcgtccagtacagcagatggcacgagcacgtgcggcgctcagcttaggctctcggaggcagctgagttggaaatcccgacggaaagcacccacaagctcccactctgcgctggcccacccgcgtgcacgcccaccccccacgcgcgtccctggctcagaagcgcacagatgtttactgcttagagccggtaccgctggggagatcgagcgacttgcgcggcgcacagtgcggcgctggcagggc

SEQ ID NO: 104581 - DNA, 442 bp, Homo sapiens
  chr1:170631084-170631526
  hyper
ctcttgactataggacgaaaaaaaaaaaaagtctagcaatcaagggagtgcgggagtacggatgcgtgtgtgtgtgtgtgagtgcgcgtttaaagaacataaaacgccacaaataagcacttaatattttactgagtcgtcatacagtaactcatttctaatgagactgttaaagctgttaccaaattccaacaggtcatgaaaaaactgctcagcacctctctgtcttctgtcaggttagggctccgcagacggacgacagaggattatccgtagacttagatgggggttcctccgcccctctctgtcctcctgccaccacagccaggctggacgcagaaccgcacggaagcctccccaactcctgcctctgggagtgctcctgcctgcttcaaggaatctgggcagcgggaccctctgggtttagcgtcctcgcctgggg

SEQ ID NO: 104582 - DNA, 1116 bp, Homo sapiens
  chr1:170633352-170634468
  hyper
ggagaccatgacctccagctacgggcacgttctggagcggcaaccggcgctgggcggccgcttggacagcccgggcaacctcgacaccctgcaggcgaaaaagaacttctccgtcagtcacctgctagacctggaggaagccggggacatggtggcggcacaggcggatgagaacgtgggcgaggctggccggagcctgctggagtcgccgggactcaccagcggcagcgacaccccgcagcaggacagtgagtgaggggcgcatgcccacgggggtgtgtgcccgggacagagggcggggacccgtgtagggcagctagagcccgtccgcggccagaaagacaaggtcctgggaccaggagaggtgatggcagacttcaaaggaagggccagtcacaggggaaaccagatgagaaaagcgggtctcggccgagggcatagccaaggaggacgctggagagaggctccaaggtccggggacactccgaggccctgcggtctcaggcagggactctgtccgcggcggactctctttacttcggctaggcaccggctcggttcatcccgcacgcggggcggcggggctgggctgggaaaaggtcttagcggggtgcaaactcagagagccagcgctgtttgggaaagcagcaggttaaagatgctgagtcgggttggaagggcttctctcgggcagcgtatgacggcttgagggagggcaccaggcacagggagcaggacttggcgctgctcaggctgcactctccacgcgggcaccgtaaggccgggcgcgaccgggaggccccgagagaacgcccggccccagacgctggagctgctctctgccccctgctgttgcctctaccgcaaatgggtttgagactggcagagtcaaaagcccggctggcttgggaaaactcgggccaagcaaagggaatgtcctttaagggtgaaacctgaaatccagccccgcatgatcccgcacaggcgagctgcatccgggaggcgcgagcttcagtgcggaggccagtgtcaccttagaggagctctccctattggctcttaaacgcccagaaaagtccagtttcccttccccatcctcaccgaccaacctcgcga

SEQ ID NO: 104583 - DNA, 32 bp, Homo sapiens
  chr1:170634834-170634866
  hyper
gcacagtggtggccccgcgggccacgctacag

SEQ ID NO: 104584 - DNA, 366 bp, Homo sapiens
  chr1:170637492-170637858
  hyper
caacctctaaattagcgaaaccagattgtcctaataagaccttttgttggaaacacatgtagtcataaaaaggtagacggaaagtcaattagacacgcgcgcacacacgcacacattcacaagccggtgctaagtgtgcacccggcgcagctggctcccgggccgcggcgggatgcaaatacaaaacagcgacgcgggaaatcgatttgtcacaaagggagaggtgtaaacgcagcgcaaaggaattgcttgcccaatctaccagccacactctctcgggaccttgccccgccaacttctcttcgccagagaaacgcccaggagagcgggaacattttctagggcgctcccaagttggaattctca

SEQ ID NO: 104585 - DNA, 30 bp, Homo sapiens
  chr1:170638495-170638525
  hyper
ttagattttacaacacgagcgaataaatca

SEQ ID NO: 104586 - DNA, 308 bp, Homo sapiens; identical to SEQ ID NO: 944
  chr1:170640316-170640624
  hyper

SEQ ID NO: 104587 - DNA, 50 bp, Homo sapiens; identical to SEQ ID NO: 945
  chr1:170640664-170640714
  hyper

SEQ ID NO: 104588 - DNA, 399 bp, Homo sapiens; identical to SEQ ID NO: 946
  chr1:171220521-171220920
  hyper

SEQ ID NO: 104589 - DNA, 98 bp, Homo sapiens; identical to SEQ ID NO: 947
  chr1:171220979-171221077
  hyper

SEQ ID NO: 104590 - DNA, 30 bp, Homo sapiens; identical to SEQ ID NO: 36513
  chr1:171454814-171454844
  hyper

SEQ ID NO: 104591 - DNA, 154 bp, Homo sapiens
  chr1:171455048-171455202
  hyper
gtgtctggggaagtcggcctccagcttggggagcgggaaaccggagtcagacccgccccatgtggtctgcagcgggagttctggaccggtctgtcttgctcccacctagaccccagtcctggccctgcgaggggattacgcatgttgccgggta

SEQ ID NO: 104592 - DNA, 272 bp, Homo sapiens
  chr1:171711246-171711518
  hyper
gcgggtccagggcacggagataatcgaggaagtcgatccgccgagccctattcacctaaaagagcccgaacccacacgcagtttagatgcatctctccaaatttatgctgtgctttaggggaggaacaaccactggttgtccacgttccggtcgtgatccggcgtgcgtggagggcgattaggggaggagtgggaaacttccgagaaccgctcgggactgggcgccgcgccggagtgcgtggctggggtgatgaggcgttagaaagaaggtg

SEQ ID NO: 104593 - DNA, 627 bp, Homo sapiens
  chr1:171750678-171751305
  hyper
tgcgacggagcctccggagaaaggcaagcacgtcgcagccaatgaggtgatagaaacgcaaagcagcgaccaatgactagctgagttgggctgggccggccgacgaatcacgaggcttcgcacccggatatggttatgggctcggaaatctagttcgggaaaagtgtgaggggctcttcacgtggggaaggaacagcaggcgcggaggagggggcaagcgtgtgtgagattcagtggtccatgcgtgcgtttgtcgtgtaagggtcattcctggggtttggagtgggggaacaaatcaatgtggctgtttttccgtggaaagaattcccactgcagtgtcccggagcctgcgtgtggtgggcaagctcctcaaatggtatctcacagggaataggggagtcttgaaaacgcagcttcggcagtaggaacatgaacctcttacctaaaagttccagggagtttggctccgttgactattgggagaagttcttccagcagcgaggaaagaaagctttcgagtggtatggaacctacctggaactgtgcggggtgctacataaatatatcaagcccagggaaaaggtgaggagcgcgggttggtagcccttcgtacgtgctccggaaggt

SEQ ID NO: 104594 - DNA, 202 bp, Homo sapiens; identical to SEQ ID NO: 950
  chr1:171810194-171810396
  hyper

SEQ ID NO: 104595 - DNA, 773 bp, Homo sapiens; identical to SEQ ID NO: 951
  chr1:171810513-171811286
  hyper

SEQ ID NO: 104596 - DNA, 459 bp, Homo sapiens
  chr1:171811320-171811779
  hyper
cgccgaaagcttcccagtgcccctctcctgttttcccagctcaacacccccctccttttcctgtcgccctccgtgaggctccctgtgaggctgtggggctttatcccccgagccccctcccttaggtggagatgctttccttctcgccagggttctcgttcctctcagctgtctactgttgcctgcctctagctggggaggcggggtgcgaggagaaagacgtcgtttgttgtggtgaagctttatccagagacgcttccccaccattctcctcccggagagtcgaagaataaaaggtggtgtgtttgcgtgtgcacctattcacagcttcaggcaattgtgagagagcccgaggcacagacttggcagggggtggacgtggacttatgttgtccaggtgccatgtcattcctgcatcatctcggaactgaccagcatctttctcgcactctctctgcg

SEQ ID NO: 104597 - DNA, 117 bp, Homo sapiens
  chr1:172412822-172412939
  hyper
ggcaagccagacaccgttaccccctctgcagcagggatcccagcccgggaatcttaaggccgccgccggggttggagggtctgcgacgcccaaaagggcagcgcccgcccgcagagt

SEQ ID NO: 104598 - DNA, 111 bp, Homo sapiens
  chr1:172501925-172502036
  hyper
cgagggacgaagggcggtccactgtaaggggaaatgctgaggatcactgggctcctcccggctttctgaacgcaagccagcaagtgggcgggacctggggcgggcggagcg

SEQ ID NO: 104599 - DNA, 350 bp, Homo sapiens
  chr1:172502085-172502435
  hyper
cgcctgcgacgtcgaagggggcgtggcctgcgcagaggctggtgggggtgcgggcgccgcgggacttgggtgacgcgtccctttccagctcagcggtgtgtgaggtgtcgcggccccgccggcgattggctgttgagaggcgagtacgcggcggccgttggtcgctggcctcacggagcaaggcccccggcgggcggggaggatatggggcggcagtggcggctgcaggaggcgggcgtggacgagccggtggctgcagcggcggcggtccccggagtcctgtgaagcgcccctgtccgcgcctctgtggggccctcagagagggctgccaggacgcgagccactgagga

SEQ ID NO: 104600 - DNA, 30 bp, Homo sapiens
  chr1:173445964-173445994
  hyper
tgtagggagctggccgcgagtgggtgcgca

SEQ ID NO: 104601 - DNA, 30 bp, Homo sapiens
  chr1:173446445-173446475
  hyper
tttattcctccgcgcgctgggacaggctgc

SEQ ID NO: 104602 - DNA, 284 bp, Homo sapiens
  chr1:173638743-173639027
  hyper
cctagggaccttctgcgatcccttgcggctgccggcggggtaggagaccggtgcgcaaagctctggacagaagcagtgtgaggacgctgagattgaagcccactcccctccagccctgcccgagcagcctggagggaagatgtccgtctaccccatcgcactcctccccaagtgcccaccccggcccacagcgccaggacccctagactcaccacacccgggccccggcctcctcggttaccatagcaacggcgcaacacgcgaggcagcgcctcctcctgcgc

SEQ ID NO: 104603 - DNA, 137 bp, Homo sapiens
  chr1:173683923-173684060
  hyper
acaaggaacccccacgaggataaacaacctctgaggttacctgaatgccccagcaaagggcacgactacttccggagccgcaccggaaccccttggcggattatgtgggttcctgcgggaacgatttaagaatagga

SEQ ID NO: 104604 - DNA, 30 bp, Homo sapiens
  chr1:173684660-173684690
  hyper
gctccctggactgtcggaagcggagttgtt

SEQ ID NO: 104605 - DNA, 30 bp, Homo sapiens; identical to SEQ ID NO: 954
  chr1:173793302-173793332
  hyper

SEQ ID NO: 104606 - DNA, 54 bp, Homo sapiens
  chr1:173793621-173793675
  hyper
actgagggcaaggccgagccacttaaccactatcgtcaacctttccaatcgtgc

SEQ ID NO: 104607 - DNA, 345 bp, Homo sapiens
  chr1:173793729-173794074
  hyper
cgtagtaggcatggcggcggcacctcaccactgattcgttgaattccttcccggtaatcttgggcactagcgggcggagttgaagggcgcttggaccccagcggcgatctgtgtttgggttcgcgctctgggagaattttggctttgctcgccttcctctttcagaagactcgaaatcggccagcaggtctgcgagatttgaaacgcgactgttactccttgttttccggttctggccgcgggagcctctcgagaagcgtggaaagaggagaagggcgtataccttgtgaccgcctctggttgtcttgggctcgcgcctggcgccgctacgtggagtcgctctct

SEQ ID NO: 104608 - DNA, 96 bp, Homo sapiens
  chr1:173836712-173836808
  hyper
acgtggactaccaccgacagcctttcatgagagcggacggctgatggaggctcgggtcacggcccttaacaatagcttactcgggtgactcggcat

SEQ ID NO: 104609 - DNA, 38 bp, Homo sapiens; identical to SEQ ID NO: 36528
  chr1:173837158-173837196
  hyper

SEQ ID NO: 104610 - DNA, 30 bp, Homo sapiens
  chr1:173991119-173991149
  hyper
gagcagagggcgggcgaggacaaacccttc

SEQ ID NO: 104611 - DNA, 31 bp, Homo sapiens; identical to SEQ ID NO: 957
  chr1:173991621-173991652
  hyper

SEQ ID NO: 104612 - DNA, 30 bp, Homo sapiens; identical to SEQ ID NO: 958
  chr1:174128282-174128312
  hyper

SEQ ID NO: 104613 - DNA, 30 bp, Homo sapiens
  chr1:174129260-174129290
  hyper
tcctcttcctccgccgagcactttgctcgg

SEQ ID NO: 104614 - DNA, 153 bp, Homo sapiens
  chr1:174968319-174968472
  hyper
aggctcacttataccgaatccaaacccaggcgagaactacggactcttgaaatggtcggtgaaaggggcgaaagcaccaggaaatcgtgcttcaacagtccatgactgaaaggagggcctgaaactgtggccataggcgggcccttttgttag

SEQ ID NO: 104615 - DNA, 135 bp, Homo sapiens
  chr1:174968761-174968896
  hyper
tgtcctagagcggacgaaagcaggtgactctctagtcaacttccgacttggactccgaagatcggtacgttatttccggggctgggttaacgcagcggttccgagctgcgactgcgcagcgtggcccagcgcggt

SEQ ID NO: 104616 - DNA, 27 bp, Homo sapiens
  chr1:174969427-174969454
  hyper
cggccacccggtcccgcgccagtcagt

SEQ ID NO: 104617 - DNA, 30 bp, Homo sapiens
  chr1:174992353-174992383
  hyper
accaagcccaagcgcggaagagggcggaag

SEQ ID NO: 104618 - DNA, 375 bp, Homo sapiens; identical to SEQ ID NO: 36532
  chr1:175048455-175048830
  hyper

SEQ ID NO: 104619 - DNA, 30 bp, Homo sapiens; identical to SEQ ID NO: 959
  chr1:175091630-175091660
  hyper

SEQ ID NO: 104620 - DNA, 256 bp, Homo sapiens
  chr1:175161546-175161802
  hyper
ggactcagcccaggcgcagagaggaagactcctgagagtcctcgcgaaggagggaaacacaccagaactaaagttgtgaaggcgcaagaggctacttaggaataattccttgtatctctggggcaggtctcatccttctaaagacaggagtgactgggcgtcttcttccaaacagagggcgcttaaaaatgtatttttaaaaaacataacagaaagtcctgaaactcacctttcggtccgcggaagggcttcctgc

SEQ ID NO: 104621 - DNA, 38 bp, Homo sapiens
  chr1:175162029-175162067
  hyper
tccctgccttcctacgggccgacgcctggcatagttga

SEQ ID NO: 104622 - DNA, 30 bp, Homo sapiens; identical to SEQ ID NO: 36535
  chr1:175712856-175712886
  hyper

SEQ ID NO: 104623 - DNA, 90 bp, Homo sapiens
  chr1:176176504-176176594
  hyper
tcggggctccctggcgaagggagtctgtctgtcccaagccgctttcgttccagaaaacgtgccagagggcaggccgtcttaatacagtga

SEQ ID NO: 104624 - DNA, 30 bp, Homo sapiens
  chr1:176176902-176176932
  hyper
gaacctagaagctccgagcggttgcagaca

SEQ ID NO: 104625 - DNA, 16 bp, Homo sapiens
  chr1:176867110-176867126
  hyper
cgctgcgaccacaaac

SEQ ID NO: 104626 - DNA, 278 bp, Homo sapiens; identical to SEQ ID NO: 36538
  chr1:177133308-177133586
  hyper

SEQ ID NO: 104627 - DNA, 665 bp, Homo sapiens
  chr1:177133689-177134354
  hyper
cgtgatgcttttgagcttgcactccagctccttggatggatccacgtcgccggcggccgtggccagcaccgccgccggcccccagcagcaggcgagcagggcgcagagcccggctaaagccatcttgagccccggccgccttcctcctagcgctgcgatggtgggggaggaagcgagcggggagggagcgagggagcgagcgcgggaggcgggggaggttagggaggggatggagagccgggagagccctggaccccggaatgagatgccgcttgcagagtcctgggtttaagctctgatgtctggagagccccggattctttgtttcccggagctgcttatctggagaagggaaagcgggggaggggggagaggagaaaaagggaaggaaggacgtcgaaaggaaagaggaagggagctgaggattctagggaatcaggtcagcccccagctggctgccggtgctcctgcctctctcctccgttgcatcctccaacacgagcaaggctcttggctatgaactacctgcacggcatttttaatacattgatctttgcaatgtaaaatcttccctctcgcatcatcatccagaaggcttgagagaggcacacacagacatacaccttaaagggcgcttctgcaaagctgcgcggtgaggggagatg

SEQ ID NO: 104628 - DNA, 30 bp, Homo sapiens; identical to SEQ ID NO: 36541
  chr1:177139861-177139891
  hyper

SEQ ID NO: 104629 - DNA, 74 bp, Homo sapiens; identical to SEQ ID NO: 962
  chr1:177140099-177140173
  hyper

SEQ ID NO: 104630 - DNA, 523 bp, Homo sapiens; identical to SEQ ID NO: 963
  chr1:177140304-177140827
  hyper

SEQ ID NO: 104631 - DNA, 458 bp, Homo sapiens
  chr1:177150727-177151185
  hyper
agaaataactaagcacgcagtgaggactgtgggggcagctaatgtctgccaccccctcactcggtgttcagccatttatcatcaatacgtcgttaggcaggagcaggggcaggtggctgacgggtgtgccggcggctggcggggtcttgggaggcgccctgcacacgcctcttctttctgaaatctccgacctttcggatttgagccgcgagggaccgcggagcaagggcagcctcctccggaagcctcgggtcactagagacccctagaggcgaaaagctgtgttacaagcccccggccgcagaggcgcaggcgggattcttgccccggaggttgccgaggagtggccggtacctttcctaaaacccttatctgtaagtacactccggcaagctcgaaagggacagcaggggagccatgtgtgcgtgcgcgtgtgcggagaaggaatggggagggac

SEQ ID NO: 104632 - DNA, 1428 bp, Homo sapiens
  chr1:178062415-178063843
  hyper
tcagcgcggacagggcgcagggcgcagaccctgtgcatatcccagaatcccggacccactgccactccactctgggaaggaagaaggcgctcccccttgggtgactgtaagataaagcagcttcttcgatctctttgtccaataagaaagaaacgttggcccataaagaaagaaagaaacaaataaataggaaaggtgtgagaaggaagggaagctcctttcttttctgtttaaatttcccgcacccttttacctccccgccttctcaaacggtctttactttgagcagcagagacccggaccgctcaatacccggctatccctgggagggtacttggaaagtaggcgggacaggccggatgaataattcggtgtccgacttttcctgcctgcggcgcagtccctccccggcttcgttactcgagtgcacacgcggccgggctctcggccctcgattgcttcagcctatcaccctgggatgccgcctgccgctgccgccgccgccgccgccgccaccgccaccgccaccgccaccgccaccgccgtggctgccgggtttgtgggatccgccgcggagcaggagccagagctgtggccggagctgtggcctgagagtcagggggcgggcaggctcattccagaagtgggggccgaggacaggcgggctagaacccggggccaccgccccctacccctcctcaggctgagggaacgggcactcggagcttctgaggcggcggcggcgggagccggtcagagggggcggcccctggcggcgacgcccccaagcccagccctgcccggccccgctccatccccagccagagcctggtctgaccgcgagagacgccggcggggctgaagaaggcggctccgaggaggtgggagggcgagcctcccctcccgggttcttctgcgtcctctcccgggagggacccacacacacctgagcccggacccacccttggtcggggccacgctggatcctcctcccggcctgggtcccgcccgccgactgcaggtgggctgcatcgcccgagcctcgggcagtgggcgacggggaaggaggtgagaggtgtccgcgccggctgccgctcgggtccctgccctcgctgcgcgctctcctcctccccttaccgcaggcagggcgcggagccgcgcgccagcccgccccgaagccgccgcctcgtccccctcccgcctcggggcaccatggagctctctccgtcgtccggaggagccgcggaggcgctgtcctggccggagatgttcccggcgctggagtccgactcgccgctgcccccggaggacctggacgcggttgtcccagtcagtggagccgtcgccggtggcatgttggatcggatccttctggagtccgtgtgccagcaacagagctgggtccgggtgtacggtaaggaccacagg

SEQ ID NO: 104633 - DNA, 30 bp, Homo sapiens; identical to SEQ ID NO: 36546
  chr1:178501573-178501603
  hyper

SEQ ID NO: 104634 - DNA, 30 bp, Homo sapiens; identical to SEQ ID NO: 36547
  chr1:178511770-178511800
  hyper

SEQ ID NO: 104635 - DNA, 213 bp, Homo sapiens
  chr1:178693953-178694166
  hyper
taaaggtgaagagcccggcgctgaaggccacagacatcacggcggatttcacagagggccgcgttccgggagcgggtggccaggcggtggcggacgccccacctgtccatcctcctaccccttcccccccccgttgtttggccggtgggagcccctcctttcagcaggcgccgggcggtggggttgcggatggctgcgcgcgctgcgggcacc

SEQ ID NO: 104636 - DNA, 30 bp, Homo sapiens
  chr1:178694466-178694496
  hyper
gctactctaggcggcggcggccgtggcggt

SEQ ID NO: 104637 - DNA, 31 bp, Homo sapiens; identical to SEQ ID NO: 966
  chr1:178694819-178694850
  hyper

SEQ ID NO: 104638 - DNA, 30 bp, Homo sapiens
  chr1:178695276-178695306
  hyper
aacacttgcaaagccgggagatctgtctgc

SEQ ID NO: 104639 - DNA, 31 bp, Homo sapiens; identical to SEQ ID NO: 967
  chr1:178995254-178995285
  hyper

SEQ ID NO: 104640 - DNA, 30 bp, Homo sapiens
  chr1:178995846-178995876
  hyper
ccctcagtgggctgcgcttgagatttcatt

SEQ ID NO: 104641 - DNA, 88 bp, Homo sapiens
  chr1:179050618-179050706
  hyper
cttcctcttgcttttcgtggactcccactgtggaaacctgctggtgttttgctgcggtttcatttccctctgcggaggagccagggca

SEQ ID NO: 104642 - DNA, 30 bp, Homo sapiens
  chr1:179198399-179198429
  hyper
cggtctctgtggtgcgccccgccgggtccc

SEQ ID NO: 104643 - DNA, 40 bp, Homo sapiens
  chr1:179262757-179262797
  hyper
ccagggccagcctgcgagcactggcgccggggacccgcgc

SEQ ID NO: 104644 - DNA, 30 bp, Homo sapiens
  chr1:179335201-179335231
  hyper
aggcctgcccaactcgcgagtttgtggaac

SEQ ID NO: 104645 - DNA, 696 bp, Homo sapiens
  chr1:179544699-179545395
  hyper
agcagatagtggtgctgaatccgtaccttcctcgggccgctcgctctccaacagcgccaccacctcggtgccctcctcgccggagcctcggacctcatccacgtccaccaccgtggcggcgggcgctcggggctcccccggggtccccgcccgtccggagcccgacggctcgggcccagcctcctggcgcccgcggcctccgccgctcctctcggcctttgccctcttgttctccttgtgcggagtcctgccgcctcgcccgcgggactccctggaggagctccgcgccctcctctccatcctcagagctgccgggcggctggagcagcagcgcgggagcgctaggggcacgggagcgcagtccctgtggagtcgctgcgggtccgcgtggcgtgcccgggggaccctaaagaccgtcgggtgggggctgagggcgaggggcgggacaccggggccgcgggcggggcgcacccggaaccccgacagctgtgtcttggtggagctgtggactgcgcccgccgactcccacggccggggcggcgctgaagcagagagaggcctgggtgggagagccggccccgggcagggtgcgggcgttgaaaagtgcgtgtctgcaggtgccaacccgggctgtgaagactcatctcctggagggttcctaatgtcatgctagagggctgacggagatacagaagc

SEQ ID NO: 104646 - DNA, 449 bp, Homo sapiens; identical to SEQ ID NO: 969
  chr1:179711889-179712338
  hyper

SEQ ID NO: 104647 - DNA, 143 bp, Homo sapiens; identical to SEQ ID NO: 970
  chr1:179712410-179712553
  hyper

SEQ ID NO: 104648 - DNA, 166 bp, Homo sapiens; identical to SEQ ID NO: 971
  chr1:179712567-179712733
  hyper

SEQ ID NO: 104649 - DNA, 344 bp, Homo sapiens
  chr1:179712830-179713174
  hyper
cgactcgggggcatctccggcctcgtggccagaccgcgggtggcggtgctcgcgcctcggggccggacttgccgggtccctgcccccgggccgtgccgaaggcgctctactcagcgtgtctgcagcgacccgcttctctgcgctttcagccgggccggacctcacgcggacgccgctgctgctgctgcgcctcgcgcccgccgccacccggggagcatgaggccggggcaggggacccgggtagggtgggggccgaccggcggggtctgctgggccaatgcgccgccgtcggtcagtgagtccggattcgtgccggcaactgtgggcagccttgagaccggggc

SEQ ID NO: 104650 - DNA, 30 bp, Homo sapiens; identical to SEQ ID NO: 36558
  chr1:179846914-179846944
  hyper

SEQ ID NO: 104651 - DNA, 30 bp, Homo sapiens
  chr1:179847144-179847174
  hyper
gcatctctgtaagacgtcgaccaccctgac

SEQ ID NO: 104652 - DNA, 402 bp, Homo sapiens
  chr1:179851079-179851481
  hyper
aaggacatggtcaacgtagcagtcgatcaaaaagattccagggaaactgcgcaacagcctggggccgagaagcgaaacttgggtcttctccaccctcgtcgcactccttttccccgagacttggtactgggagataggacgggagtctcctacacgcagtcaacacttgccacgagcggctagacttaggacaggcaagttgccctgccatccttctatcgcccccacccctcctttacttaagggcgatggcagagacgtcctcctcccccttctcctcctctttggtgcctccagccaggaggcgggagcgatccacagcagctgacccagctcaggcactgcctctctcacagccctcaagacacaccatgggcccagaggcaggtttgctacacagca

SEQ ID NO: 104653 - DNA, 96 bp, Homo sapiens
  chr1:179851494-179851590
  hyper
cggcggccccagcgactcgcaactgcctccctgaccacagcggccaccgcccaacacccccgagaagccatcgccaccaccggcaggagaacctag

SEQ ID NO: 104654 - DNA, 361 bp, Homo sapiens
  chr1:179923499-179923860
  hyper
tctgacaggggtgacgacttatttggacgacagttggtgaaacattgtaaactctcagaagctgccgtttccagactttgagttcattcttgtcgaatccccagcttgttttctcagcccggggtgaaatgcgcagccaaaaggcccaatgagcgtcaaagcgaaagggcaggggtggtctcttctgcggatataccttggctcctcccaagtcctacgagtttaaacttcgacgcaccaaacatggcttcttcgcggttctgctccttgttttatttcgctcccacctttcggccacactcaacatggccctaaccgaaggttggcatgcctgtggcactgtctcgggacagttctcgcg

SEQ ID NO: 104655 - DNA, 30 bp, Homo sapiens
  chr1:179924301-179924331
  hyper
ggaccgcggagtctcgctcagcctcaactg

SEQ ID NO: 104656 - DNA, 214 bp, Homo sapiens; identical to SEQ ID NO: 36560
  chr1:180123472-180123686
  hyper

SEQ ID NO: 104657 - DNA, 890 bp, Homo sapiens; identical to SEQ ID NO: 975
  chr1:180123700-180124590
  hyper

SEQ ID NO: 104658 - DNA, 30 bp, Homo sapiens
  chr1:180197620-180197650
  hyper
tgttgttttgtcttgcgtgtttttcactgc

SEQ ID NO: 104659 - DNA, 600 bp, Homo sapiens; identical to SEQ ID NO: 36562
  chr1:180197992-180198592
  hyper

SEQ ID NO: 104660 - DNA, 30 bp, Homo sapiens; identical to SEQ ID NO: 36563
  chr1:180198986-180199016
  hyper

SEQ ID NO: 104661 - DNA, 1611 bp, Homo sapiens
  chr1:180199359-180200970
  hyper
ggggaaggagcgggcgggggagggaagaggaaaaaagccagagctgcagcaacagcgtctcaacctgggatgtgcaccaaccccggagagcgagatcaaagggactggaaacagactggggactggcggggggagggggccggccagcctgtggagtcctccctgagaagcggagggcccggcttccaccgtgactccagcggcctgcttggggttttaattattattttgaaatttctgaatcgagctagagcgagagagcgagagatctccgtagactgcgactcgctggctttcgctccgagatgatgcagagtgcgactgtccccgcggaaggggctgtcaaggggctcccggagatgctaggtgtgccgatgcaacgtaagacacccccctttctcgctgatttaattctaacaagacagctagcagcctcagccgctgcggggcgggccggacgccgctcaggggccgggaggggctggcggccggggcgcagaggcggtcacagggcaggggcaccagccagagtgcgtttgagggggccaggctcttggctgtttggggccgaatgtgaacgcctcctggatcatgcttgaggcgagccgagtaccgaaccccgcatctccagcccaaggcttttcttggaacgctggggagagtgctgtttggggacacccaggggtacgagctgtaggccaggcctgagggcgagggtggtccccacaaatcttctttcgccggcgtgacggtcagcgcttgcaggaccgctagtgcaacttcaccccagctggcgggaagttggagagcgcgtctctcgcccctggggctggcggcggagaagccccggccacactcttagtccctgcggcccgcgccccgggcgtgcgtgccgggtgagtccccagccgctactgcccgcggcgcccgccgcgtgcgccgcgggaaactgactgctccttgtgagggaatctgctcgcgcattccagctagcctaggaatgcaggggagggagaagcgaccgcaagttgtgaattccgggttcagcctttgcgcacgcgagggcaggtgctcagggtggctcgggtttggaggggtagagacgggggtgtgtgggagctttgctagcctgcccgcccgctttcttcccgcgcccgaaattagcgagacagccggagctcgcggcgtgtttatccccaagtctctctctgtgtgtatgggtgtgcgcgcgcagagattttcccgaagggaatccgtctctgtgcttcactcctgagcgagagtccccgagagggaatctgtgcagaggccagaacaggtgcccagtcgtcgcgcgcgcgcgcgcgcgcgcgcgacaagcgccgggagagtcctgcccctgtggcttgcacgctcagcagggcgccccgggcaccctggagagaccaaggagttcctcgctccgcttgccaaggggttgtacttccgcctgcgacttctttagtggtgcggtagctacatcttcggggtttactttaagtaagggccggctcatccagggatggtgactacctacaaactagggcgcacgagcgcgccctcctgcgcctcgggtttccatggcagggtttc

SEQ ID NO: 104662 - DNA, 14 bp, Homo sapiens
  chr1:180202380-180202394
  hyper
ctcgccactctgtc

SEQ ID NO: 104663 - DNA, 501 bp, Homo sapiens
  chr1:180202648-180203149
  hyper
cgagccgcctccaaaactctccccgcggacctcagcagtccctccacgcgtcggggccctgctggccggccatgccctctgaggagacgcggaaaagagcgaggcatataggaaggtggggcgttttatccgcctcggttttgacccatctgccatgtagtctccccaggcaccgagggaaaggacgacggaagcccgccgcccggatcgctggcgggagagagggcagcccgcacgggagaaggaggagccccgcggggtctccgctgggggtggtaattggaatgcaggcctgggggtctctgtccccctccttgtctcctaaaatgcttccggcaagctctggcgaaccccgaagctgtaggaaaaaggtattttattttgtgtttggtagggtcggggtaaaggttttccctgggacttcctctcctggggctcctccggggtgcgtggggtaatgtcccagcgcaggtcgagttgcagatccgagtccccggggtt

SEQ ID NO: 104664 - DNA, 77 bp, Homo sapiens; identical to SEQ ID NO: 36567
  chr1:180203530-180203607
  hyper

SEQ ID NO: 104665 - DNA, 986 bp, Homo sapiens; identical to SEQ ID NO: 36568
  chr1:180203633-180204619
  hyper

SEQ ID NO: 104666 - DNA, 397 bp, Homo sapiens
  chr1:180204897-180205294
  hyper
cgccggggaaggcgaggtggcgcgggccaccgggtgcactcaccgcacgagaggccgcggctggactgggaccgagcgcatccctgtgtctcagggggtttgctttgtgcaggatgggaccttattatttttagacagtggggcaaacgtgtcttttaaagagatccgaagggtgaaactaatgaaaaaggaaatgaattactagaaaagccgtgaagggataaaaccgggagcagcaggaagttgaaggaaggacgaccgaagctaggtgtatctgcacctgcctcttgacacgccaaaaacaaaggggggttaaggcaagaatgtagactaaatgctgtgaggattagggtaacgcgagccctcaagacgtctcggagaccgcctacagggctgc

SEQ ID NO: 104667 - DNA, 30 bp, Homo sapiens
  chr1:180206358-180206388
  hyper
ggggaggagggcggtcgtgtgtccagcagg

SEQ ID NO: 104668 - DNA, 30 bp, Homo sapiens
  chr1:180471234-180471264
  hyper
aggccttgcaggtgcgcggcagccttctca

SEQ ID NO: 104669 - DNA, 30 bp, Homo sapiens
  chr1:180471479-180471509
  hyper
ccaccagtctgggtcgcgagcctgagctcc

SEQ ID NO: 104670 - DNA, 92 bp, Homo sapiens; identical to SEQ ID NO: 36570
  chr1:180472130-180472222
  hyper

SEQ ID NO: 104671 - DNA, 30 bp, Homo sapiens
  chr1:180601115-180601145
  hyper
taccatggcgatgacgtccagagggcgggg

SEQ ID NO: 104672 - DNA, 20 bp, Homo sapiens
  chr1:180601720-180601740
  hyper
tgcgagggcagccccgggtc

SEQ ID NO: 104673 - DNA, 31 bp, Homo sapiens; identical to SEQ ID NO: 979
  chr1:180606644-180606675
  hyper

SEQ ID NO: 104674 - DNA, 539 bp, Homo sapiens
  chr1:180881295-180881834
  hyper
gtggaaggagaaagcaagctccgtcggtttgggccgcggctgcagggaatgcccctggttgcgacccccgtcccgcgctggggaaagtgatctgctcgagagcccccaggaccctgagaaccggtccccacccaaggcggcggcgggcaattccggcaccgcggcagacgggatgcgcggagcgcgttccctccgggtttccctcacgcctctggagagcgggaaccaacgaccttgacctcggaggaaacggctctacggagcgatggacggccccacagagagggcggccggctcctctggaaaacttgtccacacaaaaggcattcctcagcttccaccccgaaaggcgagccctgggtgtagggttaccagcggcgcgcggagcccgccgagaacgtggtgcgcccccagctcctgcccgcgctccccggcctccgtgcgccccgcgcgcctccgctcttgcgcccgctttcccgcggggaaggggccaccgccctgcgaggctggcggccgccccgtcgtccccaagctcgggg

SEQ ID NO: 104675 - DNA, 678 bp, Homo sapiens
  chr1:180881864-180882542
  hyper
cggccggggacactcgctccctgggccgcggctcaggagaggcggccccgcggggctccgggcggggtgggaggccgaggcccggctcctccagcccctcccgcggccccacctctccgcgctcggctccctctgcccagcgcgggccgggaaggcgcgggcttggccgctcttcccctccacggcaaagccgtgaacggacagctgatgccacttccttccctgccagcgccctccctgcccgaccccgcttcccgtcctctcgccgggagggagtgcggcccgtggggcgctgcgccggccagacccacccggggcccgggggctgccagcagagccgggagctggcccggcctcggcgccgtcccggacccccagtcggccgcgccccgaggggcgaggcctgcgggccgcactccctccggccccggattcggggctggaagtccctccccgaacccagcagctggcctgggagggagaaggggctggagagggcctggcctctccgagggatggaggggacagaggcggcggcggccaaacccgcgggcggcagcccccagtgagtatagaggaggcagcgccgggccggccgggcgggggtggcggaccggcggggcggaggagcggggagcccaggtcgccccggccactgggaagcgggcctcccacggg

SEQ ID NO: 104676 - DNA, 30 bp, Homo sapiens
  chr1:181058048-181058078
  hyper
agctggaggctcatcgcatcgtcagcatct

SEQ ID NO: 104677 - DNA, 670 bp, Homo sapiens
  chr1:181058993-181059663
  hyper
cctggagcacagccatcgtggccttctgagcccttggcccccctgcggggaggaggtggagcagcgggcgtccccgaagtgagggccaggcccttcccggctgcgaggacgcccagagaccgcgggcgctgagcgcgttgggcagactggttgcctctgggcatcgcaaactgcccccgggcgcatctggcttatctggagacctgggagcttgaggctcattggaagaggacgatcgttaacttttgtgtttgtgtatgtctgtgtatgtaagtttgtcttgtggcattaagactattttgctcttctggaatgcaccactccttccccagggtttaagagattgggggcagacagggactttcctctgccggctgcgtggagaaggaagcggctaaaaggtttgggccggggagttccccattcgttctccggggagggagggactttacacctacccctcaccggaaagctagacccgcttcagggccaggagtggcgtttccgcacaggatttcctaagacgagagggatttagccaagagcacagacttggattccttctgtccctccccacctttctctcccaatgaagaaacgtttatatcctgtgattactctaggaaaggggcgtattaacggtcctttgcttccccgcaggggagaaaaa

SEQ ID NO: 104678 - DNA, 30 bp, Homo sapiens
  chr1:181059926-181059956
  hyper
aaaatgtaacttctacgtgtctaacacgta

SEQ ID NO: 104679 - DNA, 30 bp, Homo sapiens; identical to SEQ ID NO: 36576
  chr1:181073994-181074024
  hyper

SEQ ID NO: 104680 - DNA, 30 bp, Homo sapiens
  chr1:181074775-181074805
  hyper
gggacataacaatgcgccccttctgcagcg

SEQ ID NO: 104681 - DNA, 37 bp, Homo sapiens
  chr1:181286825-181286862
  hyper
tcccttgccgcctcgcgcgtgccgcccgtgtctggac

SEQ ID NO: 104682 - DNA, 20 bp, Homo sapiens
  chr1:181287179-181287199
  hyper
taaaataattcagtgatgtc

SEQ ID NO: 104683 - DNA, 1056 bp, Homo sapiens; identical to SEQ ID NO: 36579
  chr1:181287267-181288323
  hyper

SEQ ID NO: 104684 - DNA, 914 bp, Homo sapiens
  chr1:181451413-181452327
  hyper
caccgctcccggcaccgaacagggcacagcactggggacacctctctgcagggacccaagacgcgcgtgcgtgtgcgccccacgccaggccctcgctctcttgcggagactccgccgcatcgctggctgcacctgcctctctcttctcggcattacttgggggaaaggggactcttcactggacctttgcagaggtggctgctaccctttggccacataaatcaagaaggcaagccagcctcaccttccaggaacctccagccttccggctgcgtccccgcccctcccgcctggccagctcctcccccgcttctcccagcgctcttgcgcgcctcgctgcgcctctgcgcgccgctcgctgtcctctgcctcgcctccccattctccttccgcatcttctccagtgctccgccgagggcgctgcctgcggggaagagggagactgagccgttagtgaggaagttcggtctgtggacaagtgtggtgccaggccgccgcgaggctcggctgcaacctgttcctcgcccgccggtgctcgccgcccgcccgctcgcactcccgccctctcggcggcgcagccgcggatcgctgttgcatgctgatccggggaggcggcggtggcgagcgctccgggcggatgctggcactcaggcttcgctgctctctggatgctgctcaacttctagcccaagcgcaggagctttgaagtcatttgtcccttttcgcttggatcgacttcttattttgagattttgggcattgcggtttacgcaggaacctcaatatcgctctccccacctccctccctctttctccaacctttggatgcgtctctgctggcagatataaagacccaagtcttcgcggtggaatttcttagatggacttgcaggggctggcgttataaagcatgt

SEQ ID NO: 104685 - DNA, 291 bp, Homo sapiens
  chr1:181452694-181452985
  hyper
aacagttcacagcggcgggctgctgctgctgcctctccgaagagctcgcggagctccccagaggcggtggtccccgtgcttgtctggatgcggctctgagtctccgtgtgtctttctgcttgttgctgtgtgcgggtgttcggccgcgatcacctttgtgtgtcttctgtctgtttaaacctcaggatggctcgcttcggggaggcggtggtcgccaggccagggtccggcgatggagactcggaccagagcaggaaccggcaaggaacccccgtgccggcctcggggcag

SEQ ID NO: 104686 - DNA, 553 bp, Homo sapiens
  chr1:181454728-181455281
  hyper
ctagggtggaggtttcgggcgggggaggggtcgggtccctgcagtcacgcctgccggtgcgctgcacaaagcggacagatctcattgtgttgtgtgctgcggctgcaaatattcctctaggcagtctacggatttcccagctgggccctcctttctcactcggcttctacggttctctaaatcttcccatccaccaggtgctgccttgctgtgcccctctcttaggggcgtgtttattcagacaggcgccctcccgtttctttgcggtagacaaagccgcccaaccgccccgcgggtggcaaagtgtgccagcagccatcgttggcacctcggacagcgccgctgaaactcccggcggcccggggctccccagttacccgggttcagcacctcgggtacttctggccgggcccagccttggagctgagaaaccaggcacgtttcctacaccacgtggtcaccttttttcacgttttctcttccgctgcaaagacaccgcctttccaccaggcgttgcgagcgcgcaaggtgcggctgtgagtcttactcctcc

SEQ ID NO: 104687 - DNA, 204 bp, Homo sapiens
  chr1:182026224-182026428
  hyper
gtagggccgctcgcccgtgtgcaggcgcctgtgctgctggagtgtgccgcggtgggagtaggccttcccgcatagctcgcacgcgtagcgcttggcggcgccgccgcgcgtctccgcggggctcagcggcttgctgggcttctgaaaggcccgcccgccccgcaggcacctgtagggacgcgcctcagcctctccgccctcgcg

SEQ ID NO: 104688 - DNA, 116 bp, Homo sapiens
  chr1:182358841-182358957
  hyper
tctccctcctccctccgtggaccagggtggctagaaagggaacacattgttctcctccaacgactagggcaacgttctgaagtacagtggcaaagtttctacgggcaaccgtccat

SEQ ID NO: 104689 - DNA, 235 bp, Homo sapiens
  chr1:182359461-182359696
  hyper
tctcttgctcttttccgtgagccgagttgcatgccagcagcctagtgccactctatcaactgctgctgctgcggtgccaagtttacgtgggggaaatggattctgaagttttcagcagtttctgcagctcccaccaactccggggtcgtcctccctgccccctcactcaccccagccacagaaagtcaagcgtatcgttagggttgccctctttaacccttctctttttggagtg

SEQ ID NO: 104690 - DNA, 151 bp, Homo sapiens
  chr1:182359742-182359893
  hyper
cggagctttctgggagagggcgatggagaaggggacagacagcggccggcccggggggtgtccgaacaggcaggttggtgggttaaggtcttaatcttgactcgagatctctccccggagttcacagagtaggcgacgaagccgaagcagc

SEQ ID NO: 104691 - DNA, 58 bp, Homo sapiens; identical to SEQ ID NO: 986
  chr1:182360259-182360317
  hyper

SEQ ID NO: 104692 - DNA, 72 bp, Homo sapiens; identical to SEQ ID NO: 36583
  chr1:182360887-182360959
  hyper

SEQ ID NO: 104693 - DNA, 207 bp, Homo sapiens
  chr1:182361364-182361571
  hyper
cggaaccagggaaaccgaatttagccttttgttgcgagggagcctccgagccccgcttcctgcgggcaggggttagcttgagagggagcgcggggcgcgggacccgagggaactttgggcgggcctgggctagggcgggtgccgcgcgggcctggggacaggccggggttcccaaggcctggaagagccgcccgctccggctctctt

SEQ ID NO: 104694 - DNA, 436 bp, Homo sapiens; identical to SEQ ID NO: 36584
  chr1:182557966-182558402
  hyper

SEQ ID NO: 104695 - DNA, 30 bp, Homo sapiens; identical to SEQ ID NO: 36585
  chr1:182573438-182573468
  hyper

SEQ ID NO: 104696 - DNA, 557 bp, Homo sapiens; identical to SEQ ID NO: 988
  chr1:182583782-182584339
  hyper

SEQ ID NO: 104697 - DNA, 271 bp, Homo sapiens
  chr1:182584403-182584674
  hyper
cggcctgcggctccggaaggcgaagctcttccaggaagcagcggcggccccactggccctctcaggctgcggagaaagggcgggaggccgcggggctctccaggactcagtggtttcggagaaactcgacttcccaggctcggagggccagtttgggattgttatagaacaaaacgtgggcggcataaagtgctccgaagtggagatcaccttgaagactgggcccttggctctgtgacccagcagacccgaaattccaatctggcaaact

SEQ ID NO: 104698 - DNA, 127 bp, Homo sapiens
  chr1:182758309-182758436
  hyper
gccaggaaagctcccgtatgagtagataattcactttaaaattcgctcatctctctttaacacgagagtctgcagggctggtgcagcggcgtcaacccgaagagacctgaacgccgatgggcagttg

SEQ ID NO: 104699 - DNA, 30 bp, Homo sapiens
  chr1:182808502-182808532
  hyper
tgcgagttgctgtgcgtttctctgttgtct

SEQ ID NO: 104700 - DNA, 30 bp, Homo sapiens
  chr1:182808976-182809006
  hyper
ccacgaataactggcgccgtcgtgcaggcc

SEQ ID NO: 104701 - DNA, 135 bp, Homo sapiens; identical to SEQ ID NO: 36588
  chr1:182911448-182911583
  hyper

SEQ ID NO: 104702 - DNA, 226 bp, Homo sapiens
  chr1:182991636-182991862
  hyper
tgactcagcaggcccgaaaaggaggatgtcagaatccacataatttcgagtcttttaaaggcaagccgaggaacacaaacaacacagtggaagaatttcgcagtgggtcgtgcgtacccaagggaaaaattcattccattcccagccttttcacttccttccttgccccggtaaaacgactggttacactttaaatcagcggcaggaaatcgcttcacgaaactca

SEQ ID NO: 104703 - DNA, 438 bp, Homo sapiens; identical to SEQ ID NO: 36589
  chr1:182992749-182993187
  hyper

SEQ ID NO: 104704 - DNA, 30 bp, Homo sapiens
  chr1:183044526-183044556
  hyper
aggaatgagccaccgcgcccagcgtatctg

SEQ ID NO: 104705 - DNA, 292 bp, Homo sapiens
  chr1:183155178-183155470
  hyper
cccgggccaggtgtgcgccctcctcgctgcgagggggagcgggcggctgcggggagcgattttccagcccggtttgtgctctgtgtgtttgtctgcctctggagggctgggtcctccttattcacaggtgagtcacaccctgaaacacaggctctcttcctgtcaggactgagtcaggtagaagagtcgataaaaccacctgatcaaggaaaaggaaggcacagcggagcgcagagtgagaaccaccaaccgaggcgccgggcagcgacccctgcagcggagacagagactg

SEQ ID NO: 104706 - DNA, 393 bp, Homo sapiens; identical to SEQ ID NO: 36590
  chr1:183385925-183386318
  hyper

SEQ ID NO: 104707 - DNA, 228 bp, Homo sapiens; identical to SEQ ID NO: 992
  chr1:183386598-183386826
  hyper

SEQ ID NO: 104708 - DNA, 676 bp, Homo sapiens
  chr1:183386946-183387622
  hyper
cggcgccccaacctctgcccccatcccggtcttcgccagcctggtagccgaaccaccgcaccgccacactccagttctggtatctcgaacccctgcccagccccaaatgatactcatctctagtcccctcccatcccccacctttggccccctgcgagccgggtctggccccggcaagtgacgcctcggaaacgcagtctgcgtaccctcccctgagtccaaaatgaaggggccgacctccaccagctggatgagccggcccacccctccgaaggggcacacgccttcccgttcgatcgccctggaaaacacaggtgcctgggaaaggagaggagcggaagcggcttccagaggtgggcgggaggactcaccaaacatctgaatgtgccctttggtgatgggattgaagctgccgcaggcgagcaagataacgtgggtcttggtggtctcggtcatggtgcagatgggtccttcgcggtggtctaggggttgcctctctttttgtgtctcgttgtgtctgcagagggagaaaggaaggcgaggctccggcggtggatgctgtggactccaaggagccgctccagacgcaaaccgcgtcactctccgcctccccttaacgcttgcagctccggctagatccgaggctgcttttgtattgctctgctctcttctctcc

SEQ ID NO: 104709 - DNA, 30 bp, Homo sapiens; identical to SEQ ID NO: 36593
  chr1:183439350-183439380
  hyper

SEQ ID NO: 104710 - DNA, 30 bp, Homo sapiens
  chr1:183440243-183440273
  hyper
tatcagagtgatggcgctagtcagccttcc

SEQ ID NO: 104711 - DNA, 30 bp, Homo sapiens; identical to SEQ ID NO: 994
  chr1:183440894-183440924
  hyper

SEQ ID NO: 104712 - DNA, 202 bp, Homo sapiens
  chr1:183441277-183441479
  hyper
ggattgcccccttgcgcgggaggagaagggtggattggcaggaagccgccaagcgccaccagccggtctctcagaagccgcacaggcgccacacagctcgttgatcccaaaagggagcgctacagagaggcggaaatcactgagggacaggcgctgctgaaatctcgcgagagggaccccctccctcgcccggtcgccgact

SEQ ID NO: 104713 - DNA, 30 bp, Homo sapiens; identical to SEQ ID NO: 36595
  chr1:183441850-183441880
  hyper

SEQ ID NO: 104714 - DNA, 30 bp, Homo sapiens
  chr1:183603880-183603910
  hyper
aaggattctccacacgcattccccgttgtt

SEQ ID NO: 104715 - DNA, 194 bp, Homo sapiens
  chr1:183604495-183604689
  hyper
cctctcagagcgggcgatcccaaagagacaggttaagccgcaggttgagagggcagctccgcgccggtgccccgcggatcctgcaggctcccgggtcccaggagaagggcgggctgggctgggctggggtggggagggcggtgaatgcaaggatattgccgcaggcaggagtccacctcgccctcgtcgggccc

SEQ ID NO: 104716 - DNA, 145 bp, Homo sapiens
  chr1:183605166-183605311
  hyper
gtccgattgcgtcacgtgattctcggtgggggggttcccatagaaacgcttttctgcggtccagtctagggggtctcagattggcggggatgggcagcagcggcaggtggccttggcttttgctgcagccgtcaacgacctatca

SEQ ID NO: 104717 - DNA, 554 bp, Homo sapiens; identical to SEQ ID NO: 995
  chr1:183774207-183774761
  hyper

SEQ ID NO: 104718 - DNA, 1312 bp, Homo sapiens
  chr1:184005519-184006831
  hyper
tcccagggcatcttcgtctctccccgggacgtggaaccccgatgcaccggcagggacagcccggagcgctcgcaggagaccaggcccacggtggtgccatggttgggcacactccgcgggctccgcccaatctccacccctaggtccaggtccccctaggagagctaggagcacatttccagcctggagcaggagcccggcaccggaaagtcagagcagcgcactgcggcgccccagccactgcggagcccctggccaaccgcagttacgttccatctgtcgtatctacatgggaatacggcgacaggcaccctatcccctcacgtcagggctagcagtatgaggtggggaaagaggaaacctcgagagttaaaagcgagggaactgaaagtccccttgaggggtgtcccccatgccccttgtgggacaaagccccaattcgcaggctaccctccagagctccagcggtccggttctccccatcagcaccctctgcgcacactgacccgcgcgtccctccgcagcctgaccgcccgatccgccagccaccggcgcgggcagcgagggggtgtgtgcgccagattttccgcgtgcccccccgcccctccagcggctccctcgccctgcagctgctgctccgggcgctgtccgcgctgggcaggccgcccccgcgtcccgccgcggcggcccggggcccgtgcgcgctcaccagatggccatcctgctcttggggtagtccagccgctccaggcagccgaggaagtgcggcagcgtgtgcgccgcgttgcgggcgaggaccgccacgagcaccgtggggctctgcaggggcgactccgggaaaaccaccggctcctctccgtcgtcctccgagtcccgctcggcgacgaagcgcgctcggcagccttcgcggagcagggctgaggagaggagcagtagcgaccaggcgagggtggcagcagggcgcgcagccatgttccgggccgaggcgggcggcggggaagtcctggcgcgagcgcccggctgggctgcctgagggcggcggcggctgccggggagcaaggggctgcgaggggcggccgggggatgcggcttgccgcggccggccggctcacacactggcctcggcggctgcggttcccaggaccctcccgccgccgctgcaccgcccaggccccagtgcgggtgcgcagcgtacctgcagccgctggcgctcccctgcgcctcgggctcgcagacagtagtggccgaggggctgtgtgccctgagtcctgaggaaagttcctctagtccaggttccgctcgtacagctgag

SEQ ID NO: 104719 - DNA, 30 bp, Homo sapiens
  chr1:184020696-184020726
  hyper
aactagagagcgttcgcgcaggttctagct

SEQ ID NO: 104720 - DNA, 30 bp, Homo sapiens; identical to SEQ ID NO: 36600
  chr1:184021019-184021049
  hyper

SEQ ID NO: 104721 - DNA, 508 bp, Homo sapiens; identical to SEQ ID NO: 997
  chr1:184355380-184355888
  hyper

SEQ ID NO: 104722 - DNA, 279 bp, Homo sapiens; identical to SEQ ID NO: 998
  chr1:184355935-184356214
  hyper

SEQ ID NO: 104723 - DNA, 147 bp, Homo sapiens
  chr1:184356540-184356687
  hyper
ctggcggtgcagcccgccccggctcggctacccgggcatccccgggtgggcagggagggaggcctgcggggtgtctgccgcacggaagggatgggagccgcggtcgtggcgctgcctgcgcggggcccgggccggggctgctgctgg

SEQ ID NO: 104724 - DNA, 30 bp, Homo sapiens; identical to SEQ ID NO: 1000
  chr1:184464148-184464178
  hyper

SEQ ID NO: 104725 - DNA, 274 bp, Homo sapiens
  chr1:184633155-184633429
  hyper
cctggctgcaaagtccggctcctctacactctgcagagctgttttcccccttcagagctcctctcctccgggagggcttgcctcgccccggtccaggatctctgccttcggttgaagcgcagcgcccccagccgtccgcaggagggatcgacgcctctgtctccccgaagtgagggcgctcgctgcggagctgggggtggtctcctcttccccccatcgcggcccagcaacctgggggtccgcgtgacttctccctggccgggggatggaggat

SEQ ID NO: 104726 - DNA, 245 bp, Homo sapiens; identical to SEQ ID NO: 1001
  chr1:184722804-184723049
  hyper

SEQ ID NO: 104727 - DNA, 368 bp, Homo sapiens
  chr1:184724482-184724850
  hyper
ctggctgaatgaggcgcactgtccccatgtcagtgctgctgcgttagggaatagtgttggagtagtcgtctaccctcagggaaattccaaaacacagtaacagcaaaatgaattgagcctttgaaggcattgcgctaaggtttttactcgcaatcatctcatgcactcttctcaactctgatagagtaagtaccaccatcccccttttgcagacgagaaaacagaggcttagaaaagttggttaacaagagctcgtcacactgctgtattagaatccatccagcctctgattcggaagcccttgcatttaaccaccgcgcagtactacaaggatgaaggagcacgtgggtcctcgtacatgattaata

SEQ ID NO: 104728 - DNA, 30 bp, Homo sapiens; identical to SEQ ID NO: 36607
  chr1:184943053-184943083
  hyper

SEQ ID NO: 104729 - DNA, 398 bp, Homo sapiens; identical to SEQ ID NO: 36608
  chr1:184943399-184943797
  hyper

SEQ ID NO: 104730 - DNA, 136 bp, Homo sapiens
  chr1:185014249-185014385
  hyper
caggtttaagaggacgaactcatgagaaagaagtctgagcccaaaccccagaagccggccaggaaggtgtaaagggtgggccgaagccagggcagaagaacccaagcagaaggttgagcacgaggtggctgcgccg

SEQ ID NO: 104731 - DNA, 255 bp, Homo sapiens; identical to SEQ ID NO: 36610
  chr1:185125951-185126206
  hyper

SEQ ID NO: 104732 - DNA, 30 bp, Homo sapiens
  chr1:185126689-185126719
  hyper
ccgcgggcccgcggcggtttactagcagct

SEQ ID NO: 104733 - DNA, 30 bp, Homo sapiens
  chr1:185285349-185285379
  hyper
cactccgcaggctgcgaggcgaggccccca

SEQ ID NO: 104734 - DNA, 30 bp, Homo sapiens
  chr1:185285580-185285610
  hyper
gctgcccgcccacacgagccgagtctcgag

SEQ ID NO: 104735 - DNA, 375 bp, Homo sapiens
  chr1:185286447-185286822
  hyper
tcccagcccgcttccgtctcgaatccatctgcaaatcacaggcgagctccataaagatcccactctaagccccgccccacccgcggccccgcccacatcccgccccgccttcctccctggtctactggggttccttccttctcggtgtaactaggtcagcgcaaggtgatcctgaggagataggcggcgctcggggggcgccctcgttcctcttatcgcgcctttgtccctccctccgttccttgccccgcaccctcactttcgccgccctgtgcgttgcctgtcccggaactggttccctcaagccgccctcacctgttctgacttcccctcgaggcacaatagcctgagagatcagacgtgggagattagatt

SEQ ID NO: 104736 - DNA, 31 bp, Homo sapiens; identical to SEQ ID NO: 1004
  chr1:185287293-185287324
  hyper

SEQ ID NO: 104737 - DNA, 30 bp, Homo sapiens; identical to SEQ ID NO: 1005
  chr1:185510393-185510423
  hyper

SEQ ID NO: 104738 - DNA, 177 bp, Homo sapiens
  chr1:185643477-185643654
  hyper
tgactgactctagtgcgacatgtttagtaggaagtgggagaggaagtaaaaatagaccaaagcaaacatttgctcaagatagacgaagagcaatacatcctctctgtgcccctccacccctatgaaaacatggctctaagcttctgacaactttttttctcccgtttctattgttat

SEQ ID NO: 104739 - DNA, 520 bp, Homo sapiens
  chr1:185703183-185703703
  hyper
agaggtgtctaaagccgcgttgtacacaatagaaaaacaaaattccctttgtgctagtgtggtgtccctcggtttgggtctttgccacacattcttgaaagccattgtttacactagcgttttgcaggttaggaacggtgccggtgggaaccgagctgacaccgtaagcgcttccctgggactgaattgaccctacaatcagtggagggaaaagtcaccctccgggggggcctccagagcaaaggagggaggacggcaactggccaatcaggaggcgaggccgagccaggcttcccctcgtcgctcgtgagctgcaaacagtggaaagttgggaacctcagtcgctggcccaggcggagagcagcggcggcggcgagggcagcgggattcgggccgcggcgccgcaggctcagagctgcccccggggcatggacccgacgcgccgcccgcactccgccacaggctgtccagggcccgcgggcagatagcagtccaggaggaagccgcatccagacaaaag

SEQ ID NO: 104740 - DNA, 30 bp, Homo sapiens; identical to SEQ ID NO: 36615
  chr1:186343740-186343770
  hyper

SEQ ID NO: 104741 - DNA, 30 bp, Homo sapiens
  chr1:186344702-186344732
  hyper
gggatgccatggatcgtcctcgttggcggc

SEQ ID NO: 104742 - DNA, 66 bp, Homo sapiens
  chr1:186344947-186345013
  hyper
tgtgggaagtaggtcgctttctgatgaattcagtggcagtgaattgagaccggagggaatctggcc

SEQ ID NO: 104743 - DNA, 908 bp, Homo sapiens
  chr1:186649186-186650094
  hyper
gtgggaaagctggaatatccacggagttctttcgaactctagcggtccaagctctttcccaagtcacgtagcttctctattcggagagaagtcggagtactgggatagacccaggaggtcagagcggaaactctgcccgggtgcgtggaaccggagtccccggtgcgcggcgccaggtactcacctgtatggctgagcgccaggaccgcgcacagcagcagggcgcgggcgagcatcgcagcggcgggcagggcgcggcgcgggggtaggctttgctgtctgagggcgtctggctgtggagctgaaggaggcgctgctgaggagttcctggacgtgctcctgacgctcactgcaagtcgtatgacaattggtcgctaaccgagagaaccttcctttttataagactgaaaaccaagcccatgtgacgaaatgactgtttctttccgccttttcgtaccccccacaaatttttccctcctctccccttaaaaaaattgcgtaagcccggtgggggcagggttttttacccacggaaatgagaaaatcggaaacccaggaagctgccccaatttgggagcagagggggtagtccccactctcctgtctgatccctccctctcctccccgagttccaccgccccaggcgcacaggtttccgccagatgtcttttcttcttcgcagtctttgcccgagcgcttccgagagccagttctggactgatcgccttggatgggataccgggggagggcagaaggacacttggcttcctctccaggaatctgagcggccctgaggtccgggggcgcagggaatcccctctcccgccgccgccgccgtgtctggtctgtacgtctttagagggtcgaggaagtcacgtcgggacagactggggcgagtaaggttaaga

SEQ ID NO: 104744 - DNA, 494 bp, Homo sapiens; identical to SEQ ID NO: 36618
  chr1:186798091-186798585
  hyper

SEQ ID NO: 104745 - DNA, 30 bp, Homo sapiens; identical to SEQ ID NO: 1009
  chr1:189649417-189649447
  hyper

SEQ ID NO: 104746 - DNA, 39 bp, Homo sapiens
  chr1:190444372-190444411
  hyper
ttctgaggaatcgtcgtttactaacgttaaatatagctc

SEQ ID NO: 104747 - DNA, 235 bp, Homo sapiens
  chr1:190444650-190444885
  hyper
gacacctttcctacacgcatgggttattcccacatcaacaccaagcctggggccagctggtcaaccaggcaccttgctctcctccgttccctgagctcaggtggcataggcgttgccgtgagctgcggagaaatctccacgcagagtcgcctgttgataaccctccagttaaaacgttcttggcagcgggagcccctcagatgtaaatttccctttcacacgcttgagcttcagg

SEQ ID NO: 104748 - DNA, 258 bp, Homo sapiens
  chr1:190445092-190445350
  hyper
gcttgtcaggcaggacgaccggactgggaaagagaccaggtagaaactagtgacctagtgacgggtgaggggcgccaagtggtgcggaccacagtctcaacccccgttccctctcggtgggagtcaagggggaaaagcccttgaatcccgagacggggggatggggcgacgctgcagctggagtacttttatgtctgggagctaaaagggcttttgaatttaaaaaaacattgcttgggttgtcgcgtcagccatcaa

SEQ ID NO: 104749 - DNA, 35 bp, Homo sapiens; identical to SEQ ID NO: 36623
  chr1:190447264-190447299
  hyper

SEQ ID NO: 104750 - DNA, 393 bp, Homo sapiens; identical to SEQ ID NO: 36624
  chr1:190447388-190447781
  hyper

SEQ ID NO: 104751 - DNA, 74 bp, Homo sapiens
  chr1:190448066-190448140
  hyper
gatctgtataaagagcgctgtgggagtcttttgccctccgctctagctctatcttcctccggaccccgaagctt

SEQ ID NO: 104752 - DNA, 30 bp, Homo sapiens
  chr1:192139463-192139493
  hyper
cttcgcagtaataagcgagttatcattctt

SEQ ID NO: 104753 - DNA, 30 bp, Homo sapiens
  chr1:192777855-192777885
  hyper
ccgcccggccgccacgcttcagcaaaaggt

SEQ ID NO: 104754 - DNA, 30 bp, Homo sapiens
  chr1:193028123-193028153
  hyper
aattactgtggaaacgcgactgtctcgagc

SEQ ID NO: 104755 - DNA, 30 bp, Homo sapiens
  chr1:193028546-193028576
  hyper
agcgcgactgagcgcgggaggacgctctag

SEQ ID NO: 104756 - DNA, 140 bp, Homo sapiens; identical to SEQ ID NO: 36626
  chr1:193028794-193028934
  hyper

SEQ ID NO: 104757 - DNA, 30 bp, Homo sapiens
  chr1:193073679-193073709
  hyper
cgagacagactctccggccaagtgcgcagt

SEQ ID NO: 104758 - DNA, 30 bp, Homo sapiens
  chr1:193074162-193074192
  hyper
aagtattttcaacgcgagagtcacaggctc

SEQ ID NO: 104759 - DNA, 108 bp, Homo sapiens
  chr1:193074684-193074792
  hyper
gcgctggattccagcgagtgccacccacgtgtaaacatcctttagaggggagaagcggctcacttgcttatctcgagggttcatccgagccccgcctctggattcttt

SEQ ID NO: 104760 - DNA, 30 bp, Homo sapiens
  chr1:193091026-193091056
  hyper
ggcacttttccaggcggtcgcggctccccc

SEQ ID NO: 104761 - DNA, 94 bp, Homo sapiens
  chr1:193091320-193091414
  hyper
gggggggaagatggcggacgtgcttagcgtcctgcgacagtacaacatccagaagaaggagattgtggtgaagggagacgaagtgatcttcggg

SEQ ID NO: 104762 - DNA, 1270 bp, Homo sapiens; identical to SEQ ID NO: 36628
  chr1:196577278-196578548
  hyper

SEQ ID NO: 104763 - DNA, 30 bp, Homo sapiens
  chr1:197169942-197169972
  hyper
ccaggcctgattcacgaacagggtgaaaat

SEQ ID NO: 104764 - DNA, 13 bp, Homo sapiens
  chr1:197170338-197170351
  hyper
cacagatccatta

SEQ ID NO: 104765 - DNA, 30 bp, Homo sapiens
  chr1:197743827-197743857
  hyper
gctcagagagcactcggaataataacctct

SEQ ID NO: 104766 - DNA, 30 bp, Homo sapiens; identical to SEQ ID NO: 36629
  chr1:197744237-197744267
  hyper

SEQ ID NO: 104767 - DNA, 60 bp, Homo sapiens; identical to SEQ ID NO: 1014
  chr1:197744742-197744802
  hyper

SEQ ID NO: 104768 - DNA, 22 bp, Homo sapiens
  chr1:197879529-197879551
  hyper
tctaaagtgtgagctttggtgc

SEQ ID NO: 104769 - DNA, 50 bp, Homo sapiens; identical to SEQ ID NO: 36632
  chr1:197879610-197879660
  hyper

SEQ ID NO: 104770 - DNA, 1355 bp, Homo sapiens
  chr1:197879716-197881071
  hyper
cgccgtccatccattcgatggcctcgctgatgagcatagaagatgaacccgggaggactgtcccttcctggctgcgaaacctgaccgatataggggagattctagaagaaagagctaaggaggccagggcggaaagaggaaagtcaggtgtaggggagattaaaaggtaaactggtgggactgaccgggctggtgggactagttagcgaagccaagtgtttgggtagaaacagagatcttgtaggaggtgctccgagctacatttcgggatttgggatgaaaagagaaagccagggggttcgccgctcctggtttgttccttaccgaccctaaactgtatggcggagcttgtgggtcaggcgtggaggcggcatccactcccacgtgccccacatgcagcagcaatcccacgcggttttcgcaagcggctgggaggcaagcgggcgtccccccacaccccccccccactgcgccctggacccacgccacgcaccgccaaggagtagctatggtggcacgtggaggaggggcgggtaggcagggcggcaccatcaccgggaccagcatcttggaacggtcaatctcactgctcatactctcctccctaccggcgcgggagccttgctgtaatcccctgccaccccatctccgactgtgaggggcgcaccgggtgggggaatgggtaaataactggcccaaggcccagcttccaggtcctccctccactttcccgcggcctgactgcgccccgggcaacacagccccttgggaacctgcgaccaggtaatgtggcctccgccccgtcccgggtctggctgcatcccctctaacccctgcctgcccgggtccaagtgagggttttctcccggaaggttaatcaccacccccatcccctagccgggtcccgggaggaagagatgccccggctctctcgttgacccggcctcgaacgccgacctcgagcgcagaatactcccgagtgctgggttcctgatacccagcccgggagcgaggggagtgaaggagggaccgggacaggaaggcggggacgcggtgggtgaacaatcaatggcttagcctagtttccccgcaggagctaccgcccattcaccgtctatgcaagcaccagctggcggcagcatcttttaggtacaagctgcagggaggcaaaagctggctggggggccgggagcccagggcacgccgcgggactccagtccccctgctgcgccccagcctcaagacgctctgggctttatgaggttcagttaccgccgagtcctccattaacacctcctctgattattgagaggctggaagggctgaacgcaacctcagagcgtttctctgggcac

SEQ ID NO: 104771 - DNA, 477 bp, Homo sapiens
  chr1:197881311-197881788
  hyper
gccgccgcctcccgccgagaaccgagttctagttggggaaacgtctgacatctggacatcaaggtaagaccctgatggagatattttagtcggagcagttttctgccctcggagtgcgcccggacgcccgggagtttcagggacttcttgggagcctaccggaggaaggcccggctttgctccaagccgcgtccctacctgaggtctccacgggaggagcggtttggacgcgccccaccggatgggaggaggtgcttggggaagccgggccgtaccgccggtctgactcccggcttttctctgccagtgcaaccaccattacggcgtgatccactccttttcctctaagaatgctgaacggtaccactctagaggcaggtgagttatgtgccaggttccttctgatgttctctgccccttgggccagtgcgtataccatgtgagtgtgtgtgcgtgtgtgtgcgccttcgttgggtg

SEQ ID NO: 104772 - DNA, 883 bp, Homo sapiens
  chr1:197881989-197882872
  hyper
gtggctccagggacgcgctcctgaccctccggggagctgctgggggtgtctctttcttggaagggatggaaggggggccgagaagacactgtttctcacacgtgtaggggttaactggaaactggcttcacccacatttttttgttgttgttcagtcctaacccagcgcagccgtttctgcgcctgatctcagcggacgcagtgcgggacttctccctttatttctgcagagctgagggcaggcggcgcaacaaatctcaggtaaaagagcatcagatttcagaagagctgtattctagacttggcgcaggcccctttggggagaagagcccaggggctatagagaacagaggtttgaaggaagcaaaagctggcgagaggttttttttttgtcgcgaagggtgagggtaggcagagaacgcgcgaaagggcagggccttggccgggaagtaccgcccagcgaaaggctggcaagggtgcgcagctggagcgtggcctcgggtacccctttccaggcagccgaactccccgtatcccagctctgcttggctgactcccatttgtcttgagggaggatcccctagtaggactgaatcagaagtgcgcccgtgcagcagccccagtatggatctgccaacctcagtgtagggggaaattttccacatggagtatctcagtctccactgtctggagaaaggccccagcgtgtcccggcaatccgctcaccttccatccagcgcagcccgggcatccagggccaggtggcgcggcactgaacgcatggttcccagcctcaggctgacgctgacgtttcactgggccttgggtgctcaggacagtgccagacgctggatactgttttaagagccgcgcctttcaaacc

SEQ ID NO: 104773 - DNA, 30 bp, Homo sapiens
  chr1:197885090-197885120
  hyper
ggtctgcggccgggcggctcttgtgaggta

SEQ ID NO: 104774 - DNA, 30 bp, Homo sapiens
  chr1:197885584-197885614
  hyper
aggcgccaagctcccgggagtccgcaagtc

SEQ ID NO: 104775 - DNA, 165 bp, Homo sapiens; identical to SEQ ID NO: 1017
  chr1:197886901-197887066
  hyper

SEQ ID NO: 104776 - DNA, 310 bp, Homo sapiens; identical to SEQ ID NO: 36638
  chr1:197887146-197887456
  hyper

SEQ ID NO: 104777 - DNA, 415 bp, Homo sapiens; identical to SEQ ID NO: 36639
  chr1:197887706-197888121
  hyper

SEQ ID NO: 104778 - DNA, 304 bp, Homo sapiens; identical to SEQ ID NO: 36640
  chr1:197888180-197888484
  hyper

SEQ ID NO: 104779 - DNA, 1009 bp, Homo sapiens; identical to SEQ ID NO: 1020
  chr1:197888734-197889743
  hyper

SEQ ID NO: 104780 - DNA, 168 bp, Homo sapiens
  chr1:197890553-197890721
  hyper
gactctgaccacgggcgaccatttcggcatgaaggacagcctggtgtactgccgcgcccacttcgagaccctcttgcaaggagagtatccaccgcagctgagctacacggagctggcggccaagagcggcggcctggccctgccttacttcaacggtacgggcaccgt

SEQ ID NO: 104781 - DNA, 569 bp, Homo sapiens
  chr1:199998193-199998762
  hyper
gagagcagcacacaaccatttcgcatctttttcgtcgggcagaaccgccgcggtgcgcaggcaaggagtccttcccggcagctccgcgcagctccggttccgcgtccggggccgcagctagagcgcgctcgggccggagacgcggactgcgcgcgcacgggggacgcgcgctcgggggctcgcgcccgcgcgggcggtcttgggctcctgctgcgcgcagccccagctggccgctgccaaaatagagttgagctgggtcgggagaccacgcacgccgatccctcacagtctcccccacaccccatgggtgaattaaagagggtaaggtaggggaaagagacgctgttgcacttttctctgcaaccctggaagaactgtgtttccagctaccgcacgcgcaactcacatcgcaagggaccgaggcggtacactctgagcgtaaacagagaacacctgcagctctggaatcggtcccaccgcagagggctgggaaccggaggactgtcggtccagcccataaggggctgctggggactaaacctcaagaaaagtaccgaagaaggctctcc

SEQ ID NO: 104782 - DNA, 30 bp, Homo sapiens; identical to SEQ ID NO: 36643
  chr1:200007416-200007446
  hyper

SEQ ID NO: 104783 - DNA, 790 bp, Homo sapiens; identical to SEQ ID NO: 36644
  chr1:200008277-200009067
  hyper

SEQ ID NO: 104784 - DNA, 174 bp, Homo sapiens
  chr1:200009358-200009532
  hyper
aaagaggtgacctccgaaaggattgtcttagcgctattagaatacatgtgaccacaccaaaagcccaggcggacacccgcagccagctcggatttggacaattcaacattgctggcagaactgaagggaacaagttaccccaaccccatcccctgtacgcgtagtgctgagtga

SEQ ID NO: 104785 - DNA, 408 bp, Homo sapiens; identical to SEQ ID NO: 1023
  chr1:200009744-200010152
  hyper

SEQ ID NO: 104786 - DNA, 940 bp, Homo sapiens
  chr1:200011379-200012319
  hyper
ccatcctagggctctgtggcccgggaagagacgcgtcaactccgcgggtctgcgcgcagtccttagccgcaaagtgctgcaagtgacccccctgacggccctttccgaccgaagagctcgggaaccaaagagaaaaaaaataactttattttcaaaagaacaagtcatcactgcggcgatactgtggcggaggactttggcgatggggtgggggctatttctctttcctttttggtaaacaaatcagaggaaacttctgcccggccgtggctttccatcccccacctgccccaccccctgcaaacgccactgattaacttaaaacaaactcggctgcgtgtttgtgcgccgttgggtagcaggaggtagagcctaggcgagagcctggtgcgcccacgggtttcgccgaagagtgcccgggggagtgcgggcagggtcccggctgcgcagacctgcgggtgcccgcccacccgcgccccgcgctcccatacttgacctgtgtggatgtggagtctccgggaaataccggatcaggcacttcctggggtctcctggtcactgcccttcctgtgcatagtttgtcatctttttagctgcgaagacgccttcgtgggtctgcgtccggagcaaggcggttacccgatcccggcagtgagccgcgccgcgcgtcgtggcggcctgatttctgtttaactttaatagggcgatctcgaggtgtttatattttgctatgatgatcggaaacatgtgaggttcattacagggcttcaatactttgaaaccaaaacccttctgtgtgtcttttactcttctggtatttttccccgtacgggcgtcctctattttctttttccttctttttattttcacagattttcaaacgtaaggagatgaaagtatccagaatagaaaagtactgtcaatacggaactgaatgttt

SEQ ID NO: 104787 - DNA, 149 bp, Homo sapiens
  chr1:200271191-200271340
  hyper
ttaaaaaaaaaaacgcgtaccaaacaacgaagctcctgcccttgggagtttatacacaggctatgttaatatttgcaaagggccccgagtgtctaagcggctaatgaacgtcttgggtcggtttcctcaaaatccagcccattgtttcc

SEQ ID NO: 104788 - DNA, 540 bp, Homo sapiens
  chr1:200271373-200271913
  hyper
cgcactgtagcccgaatctttctgccaacaaccgctgaaactaccagaggttaaagcaattaacatgagatgcaacctcaccgtggcgcagctccgcgcgcccccggctgctgcgacccgggaggggggagccccggagcggctgcgcccggccccgcacccccggcagagcaggttagctccccctgggtggcaagcctttgcaaaacaaaaccgaaaatgagcgttcgctctcctgacagtcttgcctaaaagaacctcgtctatactgcaaaatcccattaggtacacaagtccggtcggcattgtcacttttagcgtgacttcaatttacacattcaaagaatacctgtccggagcatgggacctggtagaaaggttaggctctctccgaaggaagttcaactcaggatttccctcccccggtgctgcacacaccatcaacggcaaaacctcccctcccagttgcagatctagacttgctgagaaaggtgctggagatgtttccaaggtcatccccagcaccgcgagtccagcctt

SEQ ID NO: 104789 - DNA, 30 bp, Homo sapiens; identical to SEQ ID NO: 1025
  chr1:200379220-200379250
  hyper

SEQ ID NO: 104790 - DNA, 30 bp, Homo sapiens; identical to SEQ ID NO: 1026
  chr1:200379460-200379490
  hyper

SEQ ID NO: 104791 - DNA, 284 bp, Homo sapiens; identical to SEQ ID NO: 1027
  chr1:200379702-200379986
  hyper

SEQ ID NO: 104792 - DNA, 119 bp, Homo sapiens
  chr1:200589895-200590014
  hyper
gattggctgctgggcgtcgcgtcgggtgccgcgcctttgcttccacccgccccccggaagtgccggtggttgggctccggtagccgtctctgaatgctggactcgccccaccctcatct

SEQ ID NO: 104793 - DNA, 30 bp, Homo sapiens
  chr1:200638557-200638587
  hyper
gtgctcctgctgggcgggacggcggacggc

SEQ ID NO: 104794 - DNA, 30 bp, Homo sapiens
  chr1:200639487-200639517
  hyper
actcaaaatttaaacggagtcagcttgatg

SEQ ID NO: 104795 - DNA, 236 bp, Homo sapiens; identical to SEQ ID NO: 36654
  chr1:200708631-200708867
  hyper

SEQ ID NO: 104796 - DNA, 7 bp, Homo sapiens
  chr1:200992796-200992803
  hyper
cgcacac

SEQ ID NO: 104797 - DNA, 31 bp, Homo sapiens; identical to SEQ ID NO: 1029
  chr1:201050380-201050411
  hyper

SEQ ID NO: 104798 - DNA, 817 bp, Homo sapiens
  chr1:201083265-201084082
  hyper
ccaggaagccagagaacgccaccggggcacacaggtcgcctctgctgagtctgtaggttcggtctgggctgagcgccagcagcaatctggcctcccatcccttcctctgggttcctttctcgaggagtaagcgtgctcccaaagaagtcgctagtatctgaggccatctggtggagagcagtggcatggtaaccgagggctcaaagtcgggctcgcatcccggggactcgcagagactggactgcgcctgcggcaaggaaggacggagcagagccacctgaggccgagcgggagccagacccagggatgaccgtcctggggagcccctctgcaccccggaggggacgcaggacgcccggagcagtcccaggccctgcccctcgcttcacccacggagctcctaggtctctatcgtgcccatcgtacccgctgccctgcacttccgccccaagctggtggaggagggagggtgtcgcagacacgggagcgccgcggacctcctacagtcaccgtcctgcggcgcatcgcgggtgacccaacagcctcccgctgctcccgaaagtgggacggggccggcggatcatcctccaagccgggggcggccacaggcccgatcaatgccaggattcctccgactccaagaaaggcgacggggagaagcaggaggactcggatgactccggcaccagggaggagggcgcccgggcctcgccgtcgccagggcggtcgggacggggggtggcgggcggcgcggggcagggcccggtgcccgggaggccgcgggaagcggggggcgtcgagccgtcgggggccgagc

SEQ ID NO: 104799 - DNA, 31 bp, Homo sapiens; identical to SEQ ID NO: 1031
  chr1:201122936-201122967
  hyper

SEQ ID NO: 104800 - DNA, 324 bp, Homo sapiens
  chr1:201228891-201229215
  hyper
ccccaggcctggcctcgcccagagagccgccctcttccgggaacctcctgctccggagccaggaagggctgccctttccccaccaggaggccaggcacgagctccaccagggtgtggacccccagggaaagtgcgccaggtgcctgggatgctcaatgggggacttgttccaggactgggaggctggcggggtgggggctgctgcttccctggagcagcacctgtcccccacccccacctcccgcgtcagtggagctgttggcgcttgcacccggcttcccaagcgatgagacacggctcccagccagccgccccaagccgctg

SEQ ID NO: 104801 - DNA, 511 bp, Homo sapiens
  chr1:201252437-201252948
  hyper
agagaaaaaaaagagcgagcaggaaggcgcccagcgtcccacacaggggactcgcagccctgcccccaagagcgctggctccgcagcagcagtgccctgcagctccgcgtctgagcagcagcagcgcgcggcccggtggagtgggtggtgcagggcaggggtggtatatcctgtctgacggagggcgggcctcgccagtgccagagagggacgaaccagggtggaagcgccaggagcagctgcagggagccctcacgcggaccacgcactctatggccgtagggagccgctgagagcgagaagagcacgctcctgcccgcccgctgcaccgcacctcgcctcgcctctctgctctcctaggccccggccgcgcgccacccgcctcccgccaccatgaaccactcgccgctcaagaccgccttggcgtacgaatgcttccaggaccaggacaactccacgttggctttgccgtcggaccaaaagatgaaaacaggcacgtctggcaggcagc

SEQ ID NO: 104802 - DNA, 484 bp, Homo sapiens
  chr1:201368374-201368858
  hyper
cccggctccctccggcgctcacctggacagcgcggaccagtccttcctgctgacagccatgctgcaggagccccgcgtggccgcccgcgccccgccggccgccgcctcacctggcgcccctccccttccagcccaggtgggatcacatggccgcttatctcacccccgcgcgccccggccgcgctccgatttgccgacccgggaatggcctctgggatgtgggcgtcccagacaaagccgcattgattgcagcccaggccggcccggccgcgaggccgcaagcactgggtggaccgtcggacggatcgcgggaccgaacgacggacgcccggggccggcgtggggctggtcggctgcccggggcgagggcgggagacttcctgctcagaaccagtccgaccagcttggcgctgggacgcctccccgcgctgtgccgcggcccggggtgccgaggagctgggctgggggcggggacccctgccgg

SEQ ID NO: 104803 - DNA, 234 bp, Homo sapiens; identical to SEQ ID NO: 1033
  chr1:201437932-201438166
  hyper

SEQ ID NO: 104804 - DNA, 30 bp, Homo sapiens; identical to SEQ ID NO: 36661
  chr1:201438632-201438662
  hyper

SEQ ID NO: 104805 - DNA, 30 bp, Homo sapiens; identical to SEQ ID NO: 1034
  chr1:201449031-201449061
  hyper

SEQ ID NO: 104806 - DNA, 592 bp, Homo sapiens
  chr1:201449630-201450222
  hyper
tctaatcattagaaccgttcagaggcagccccagctgcggggcggggcggggcggggcggggcggggcggggcgcggagctgttggcagctaagtggttgaggttgagcggccgggtggaggccggcacctactaggaggctgggctggtccgcaggttctcaagcccggctgagcccgggcaagcgtcagagaatcaccagagcagcttgtcgaatacagattcccaggccccacccaggccaaccgaatcagaatctctaggggtggggctgggaatccatttttaaaggcttccccaatgattctcagaataaaggttgggcttggaggcggggccggggctgggcgtggcacggaggcgaggcgcggggagggccggaccttccagttgttaatccctgtgttcctcactccgccacactcacctccactgatctaagtcgggggatcgttcctcgctgggtgcccccctcacttgatcttagccaaaaggtcgagaagcgattgggagcccctctcgaataatttctgtggcccttgattcagggatcactcccacacttaatagcagctctaacgccccccaaccc

SEQ ID NO: 104807 - DNA, 15 bp, Homo sapiens
  chr1:201450300-201450315
  hyper
cggacaatttgctaa

SEQ ID NO: 104808 - DNA, 30 bp, Homo sapiens; identical to SEQ ID NO: 36663
  chr1:201475790-201475820
  hyper

SEQ ID NO: 104809 - DNA, 276 bp, Homo sapiens
  chr1:201476296-201476572
  hyper
cgtgtcccgggccacgccaaccagtgggctttgcacactgcaccactccagggctgatgtcatggcgcgaagcccggcggtgctgccctcctaggccccgggaaggccggccggcaggggcgggggcaggagtcgccgactctgggggtgctccgagctcgtgctgcggtcccactgtgcgccctgtcgccgccaccgcggaaaacgtcttgcacgtgcgaggggcatttcaggagtttcctgtctgtcaggtgagaaggcggagatatgacctta

SEQ ID NO: 104810 - DNA, 30 bp, Homo sapiens; identical to SEQ ID NO: 36665
  chr1:201507559-201507589
  hyper

SEQ ID NO: 104811 - DNA, 31 bp, Homo sapiens; identical to SEQ ID NO: 1036
  chr1:201507612-201507643
  hyper

SEQ ID NO: 104812 - DNA, 30 bp, Homo sapiens
  chr1:201508950-201508980
  hyper
ggggcaggtgacctcgcgggccgttccaga

SEQ ID NO: 104813 - DNA, 30 bp, Homo sapiens; identical to SEQ ID NO: 36667
  chr1:201673445-201673475
  hyper

SEQ ID NO: 104814 - DNA, 30 bp, Homo sapiens
  chr1:201798199-201798229
  hyper
ttagattcattccccgccctccgcccgctc

SEQ ID NO: 104815 - DNA, 454 bp, Homo sapiens; identical to SEQ ID NO: 36668
  chr1:201857900-201858354
  hyper

SEQ ID NO: 104816 - DNA, 429 bp, Homo sapiens
  chr1:201915620-201916049
  hyper
ggtgctgaagtgttcactggacgcagcagcctccctgaagcccagggctagtggaccccggctggtctaatcagcggccaataagacccgacaactgccaggcccggagaggagaagccaatccccaagctgggggcgggcctacctcgctgtcagagctgtttgaaacttgaggacattccagggaatcttggagcgctgcgtgaccaaatttagtacagagcagtttagccttttaaagacaaggggccacgcaatgagaaaaagatacaaaaatgcgtaggctggcagaagcagatcacagccacggagagccagacaagcagggacgaggccatgagggccggtgaactcgccagcccggggcacgttcaagagcgtattttactactccatcaccgggtggacgtatcactgtggtcaatgtgt

SEQ ID NO: 104817 - DNA, 169 bp, Homo sapiens
  chr1:201924322-201924491
  hyper
gggaaagaaagaagcgtatttaggcagtatcgcgttgatttcagtccacggaacctctggtgaccgggtagtgtgactccgtcattggtagccccccgcccacacagccgggactcgcggcctttgaggacgtgggcagggccagtctcgccacgccgcggccaatgcc

SEQ ID NO: 104818 - DNA, 16 bp, Homo sapiens
  chr1:201924571-201924587
  hyper
cgccctcctctcggga

SEQ ID NO: 104819 - DNA, 30 bp, Homo sapiens
  chr1:201925055-201925085
  hyper
ttgctcagttcctgcgttgaggaactgaag

SEQ ID NO: 104820 - DNA, 5 bp, Homo sapiens
  chr1:201951859-201951864
  hyper
tgtgg

SEQ ID NO: 104821 - DNA, 106 bp, Homo sapiens; identical to SEQ ID NO: 36671
  chr1:201977861-201977967
  hyper

SEQ ID NO: 104822 - DNA, 189 bp, Homo sapiens; identical to SEQ ID NO: 1040
  chr1:202112265-202112454
  hyper

SEQ ID NO: 104823 - DNA, 550 bp, Homo sapiens
  chr1:202162903-202163453
  hyper
tgtgaaactgaataacgaagatcactcaacaatgcctgcccctctctgactgcaccgtcccggcgctcccaccgccgccgccgccgcccaatagagcccctggggcggtccccaccgacggtgcagcccgccgggaccgggaggaagcagctgcggccatcgcgccgtgcgtccgcgcccggccgccaggtgccccagtagcccgaccgccgagatgcccagcccgccggggctccgggcgctatggctttgcgccgcgctgtgcgcttcccggagggccggcggcgccccccagcccggcccggggcccaccgcctgcccggccccctgccactgccaggaggacggcatcatgctgtctgccgactgctctgagctcgggctgtccgccgttccgggggacctggaccccctgacggcttacctgtgagtactgcccgcctgtccccgcctggtcctgcgggctgctggctagcgcccagtcccggcctcagcagggcacctgcttgcttggtgccctggggcatgggcatcccggagagggtttgcc

SEQ ID NO: 104824 - DNA, 430 bp, Homo sapiens
  chr1:202183288-202183718
  hyper
ttggagggagagggccgctcagcgagggcgggacagaacctctcccgggctgggagtgcacggcgcggtgcgcccaggtaggcttgggggaagggtgccgagctccggaaagttccacaggtcctccgcagccctggggagcaggacccagaaaccgacgcgacgggtggggcgctacccgggccggccctaatccccttccattgttctgggagccgaggccgcctccccacttccggaccctttcagccatggagcgggcggcgcgggcaggggcgggcaggggcacggccaggcgggctggggtgggcaggggcgcgcgcgcgaggctggtccccgcccccggggccgccgcttagctcccgggtacgtgcgtgcagctaggggctccactgaaccacctggcgtgggttcgcgctgccaattctta

SEQ ID NO: 104825 - DNA, 30 bp, Homo sapiens; identical to SEQ ID NO: 36674
  chr1:202187160-202187190
  hyper

SEQ ID NO: 104826 - DNA, 206 bp, Homo sapiens
  chr1:202317589-202317795
  hyper
gaggaagaggctgacgccagtccaggagacagttccagctttagggcaaaggtgaccccactgggtcccgtggcgaaagagagagccgccggtcctcgccttttttctgatgcatccagggatttgtagttcccttacggccaccaagtgcacttagggcaggcctcttactacgagtcccgtgatgacccgaggccgggcagcgc

SEQ ID NO: 104827 - DNA, 30 bp, Homo sapiens
  chr1:202611437-202611467
  hyper
ccaggtgcagaggctcgggcaggcgtgccc

SEQ ID NO: 104828 - DNA, 1345 bp, Homo sapiens
  chr1:202611677-202613022
  hyper
gcttcctccaatgcacagagccgtggcgcgtgtcaaagtgtgggaaagttcccgggagaggaaggggtggaaaatgcagccgctcatctcaaccctggacggctgcggcaaggcgggggcgctcagaaaggcagccagtcctgcaaaccgcccgtgcctccggcacacccccctctgcgccaggggctccccagtgtcgcgcgagcatggtcttccagctcctcctcagcgaggcaggcgctgcagggtcccatgcgccccgcacccacttctctccgcacgcccacttcatgcacctccccgcgcccttcccacggcttctctgcggcgagtcgccttcgcttcaccgcaggtccctggtcccagcgctaaggcaccgcggcttctctcgccttctctccgctttggacccgggctctccgcggggagagataggttgggggctaggggttcccgaaataattcaggacacctcccccgggtctagccaggtaattccgacgcccatggatttccggattacagttcccaccgcgggctcagtcctacctactcttagtttaccccgcagtgagcaccaagtcccaaaagtcggagtgtcaccgtttggcgaccccgcgtccgcccacgcctcaggccctagaggtggccactgtcggtcgaggcacggcttcgctcgggactactggctgccctcgtggggtgccccgcctggggttccctcttaccctgggacgttccgggcgcgttcagcctgagctggtggagagggcgggggcgggggcgggggcggggacagctggggtcccgaagtccaggtccctcttcccacttccccgccggccctgccgctgcggccctcgctcccgcgctcgctcgctctcgagtctctccctctctctattctcttcctctctctctctctgcagtagtaacaacctgatcccgcttcccccgcccgcctattgatatgctcctcacattcgcctgcacacagcgcgtgcggcccctccgagggcgatccccgcaaaccacgacgcagggcccccgccccaggcaatccccgctgctggggaggctgcctccgcgcgcccacgcctcccttctccagtccggactgccagcggaggggaaaatgggcgacaggagaaggggaggtgtgtgcgggagggactaggctgggggagaggggtttaaactggcgcggtcctacagaagtttgaggagggcggggccggctccgagcccccggagccctacgggactcccccgattctgccgaggagtccccgccagctccgtgcactcctgcaacactccccaccccacccgccagctccgagtt

SEQ ID NO: 104829 - DNA, 153 bp, Homo sapiens
  chr1:202613486-202613639
  hyper
cgaggctgacacccacggtgagcaccaggaggggcagggaggaccgagagcctgggcagcactcctgtgcctcagtgtcacccttgggcctcaccctcaacccccaacctcacccgataagacctcggggccacagctcgccaggtggaattt

SEQ ID NO: 104830 - DNA, 30 bp, Homo sapiens
  chr1:202613984-202614014
  hyper
catagacctcactcccgaagaagccgggga

SEQ ID NO: 104831 - DNA, 164 bp, Homo sapiens
  chr1:202678716-202678880
  hyper
gaagcagggacggggcgtcctaggtcgtgctgagtcatgagatttggagagaggggaggggcgcctccagccccttcttgggcccctgccccagctcctcgtgcccgttgcttccagatggcccctgcagtctgtctccccaacctctccctgacccagggtct

SEQ ID NO: 104832 - DNA, 847 bp, Homo sapiens
  chr1:202678923-202679770
  hyper
cgacggcggtgccaggggtccccgaagcttgagactggggcaaaagaaccttccttggagaccgctagggctggcgggggctgggctagacgcgagtgggttcgtcccagggaaaggagagagggacgggggcgcagagccggccggtgcaggggacgcgtggcccgcccctctctgcagcaacccgcgggaggaaatctgcccccagcccagccccagtccctcagaggagccggctcctcgcccctcgggtccgactccccgagacgaaccttccatccggacgcttccaaactcccccaaaggacggggcagactcccggcccccttggcctcaaacttccccaaccctactcacctctcgggacccagaccaccccgtggcccctcgactcagtagcaggaaaggagaaactttggagagggaggtccgtgcccccaccggcgggggtatggacttaccggagagcgacccgaaggaggcgggagagatccggggtctccaatgtgagggggcgtcggacggcaaggacgcgtggctggcgacggtttcgcaggggcgcccgttcccctgggggcgcgaagtccccgctccaccgctgccccaactcggctccgaagtgcctttgccgcaagacttgctgagcttagcagtctgcgccgaggcggcagagggagggggcctgatcgatgggcgcgcgcggcgagcgctgcagtgaggggaggagaccaagcggcgtgggagggcggggaccgaggcggaggaggcccggaggaggcggagggcgggcctgccccccgggacgggttctttctgcgcagccccccaggcgctcggcgcccccgc

SEQ ID NO: 104833 - DNA, 30 bp, Homo sapiens
  chr1:202776665-202776695
  hyper
gcccaggtgagggccgctccgggccgacgc

SEQ ID NO: 104834 - DNA, 30 bp, Homo sapiens; identical to SEQ ID NO: 1042
  chr1:202777280-202777310
  hyper

SEQ ID NO: 104835 - DNA, 30 bp, Homo sapiens
  chr1:202777596-202777626
  hyper
tcgccgcaagcccacgccgtgcgcctccgc

SEQ ID NO: 104836 - DNA, 30 bp, Homo sapiens; identical to SEQ ID NO: 1043
  chr1:202780665-202780695
  hyper

SEQ ID NO: 104837 - DNA, 52 bp, Homo sapiens; identical to SEQ ID NO: 1044
  chr1:202830112-202830164
  hyper

SEQ ID NO: 104838 - DNA, 734 bp, Homo sapiens
  chr1:202830480-202831214
  hyper
tccgttttgcgctgcgggcccttcccaccgaccccccgtgcgcccccggcatcctccccatcgtgcgacaccctcccccgcacagcatccttcaccatggttgatccagtagttgaagttggagggtcgctgactgcagacaccatacgggtctccagcaacaccacgaatcccaacgcgcggttgctggcgggaccttataaatccccggagagccgccggttgtgtctcctggcggggactcccattgggtcgcagctggacagagatcggatcgtcccccgcgcgactctcactgggccaggcccccaccgaggcccgcccctctctccgctattggccagccgcttacgaaacagccccgccgcagcggtcattgggcagttggtaaagccaaagggaggcagagtcgggcgtccgcgtcctcccggccagctcgaccgtcttctctattggggtgagtgctgggtctacgaggtggaatctttgggggaaacaccctcattctgttttagttttaggactttgcaccagtgacaccgctgacctgattcgaaaagtgtgtcggccttggagaagggtgcatacttaagttcagcaaccactgcagaaggaaagatgctgtgatgagaaccgactgctgggagtttccagagcgggacaaaatgcggctggggtgggtaggataggcaaacaggcatgggaaaggacattgcaggcgccggtagttgacg

SEQ ID NO: 104839 - DNA, 65 bp, Homo sapiens
  chr1:202858343-202858408
  hyper
tgtctctgcgcaggcgcccgcttccccgctctggactctactgcgcaagcgccttcattcattgc

SEQ ID NO: 104840 - DNA, 30 bp, Homo sapiens; identical to SEQ ID NO: 36684
  chr1:202896478-202896508
  hyper

SEQ ID NO: 104841 - DNA, 30 bp, Homo sapiens
  chr1:202927460-202927490
  hyper
gcgtcacctcctcgcgggctctgcctgggc

SEQ ID NO: 104842 - DNA, 31 bp, Homo sapiens; identical to SEQ ID NO: 1046
  chr1:202935961-202935992
  hyper

SEQ ID NO: 104843 - DNA, 281 bp, Homo sapiens
  chr1:202936075-202936356
  hyper
gcttgggtggtgaccgtcccaggggtggcgatcccgagctccagcgcggaggcatgccaagggcagaggggtaacctggcggagtcccgagcccggatgtgcgggatcgggaccccagcatccacggtgggcccagagccctgcggggcggggtcggcagcgacagcccctggtccggagctgagtggccagaaccagatggggaggggtcccccagtggaggatactgaatgagggtcttaccgtctggatccccatgacggagcgccttttcctccacc

SEQ ID NO: 104844 - DNA, 30 bp, Homo sapiens
  chr1:202936569-202936599
  hyper
gctgggcccctctgcgcgccaccctttccc

SEQ ID NO: 104845 - DNA, 30 bp, Homo sapiens; identical to SEQ ID NO: 1047
  chr1:202937099-202937129
  hyper

SEQ ID NO: 104846 - DNA, 149 bp, Homo sapiens
  chr1:202976329-202976478
  hyper
gaggtacggcgatacgcgacaccacccagtacaacagctctctctccacctggaacccggacccagcttgattcgcgggtgccggatgatgacgtatccttgcacctggcgatgattggttcgcgtggagaggcgtcgtccgacaacgc

SEQ ID NO: 104847 - DNA, 30 bp, Homo sapiens
  chr1:202976911-202976941
  hyper
ggattacgccaactcggatccggcggtcgt

SEQ ID NO: 104848 - DNA, 30 bp, Homo sapiens; identical to SEQ ID NO: 36689
  chr1:202996160-202996190
  hyper

SEQ ID NO: 104849 - DNA, 223 bp, Homo sapiens; identical to SEQ ID NO: 1048
  chr1:203086993-203087216
  hyper

SEQ ID NO: 104850 - DNA, 30 bp, Homo sapiens; identical to SEQ ID NO: 36691
  chr1:203096555-203096585
  hyper

SEQ ID NO: 104851 - DNA, 30 bp, Homo sapiens; identical to SEQ ID NO: 36692
  chr1:203097219-203097249
  hyper

SEQ ID NO: 104852 - DNA, 31 bp, Homo sapiens; identical to SEQ ID NO: 36693
  chr1:203143408-203143439
  hyper

SEQ ID NO: 104853 - DNA, 88 bp, Homo sapiens; identical to SEQ ID NO: 1049
  chr1:203242475-203242563
  hyper

SEQ ID NO: 104854 - DNA, 30 bp, Homo sapiens; identical to SEQ ID NO: 36695
  chr1:203274645-203274675
  hyper

SEQ ID NO: 104855 - DNA, 211 bp, Homo sapiens
  chr1:203296274-203296485
  hyper
acccgggaccgttgcggccaaggcgatcccacacgggctgcctggagtcagacctgtccagcaaggaagcttcggggaggagggagacagcgccggctgggcgtgcaaaggcaggcaggtgaccctccctccgtcccggatatgggccctcggccgctcaccccccagccacccacccacgtccctcaatccccacgagcagctgactggg

SEQ ID NO: 104856 - DNA, 31 bp, Homo sapiens; identical to SEQ ID NO: 1050
  chr1:203561334-203561365
  hyper

SEQ ID NO: 104857 - DNA, 413 bp, Homo sapiens
  chr1:203595792-203596205
  hyper
ccattcccccttaagacgaaccaggaagtaaccgcaagaatcgggccaccttaacagtagagtaatggtttggcctcgcgccaagtcccacctctgttccagctcctgctcctcccctctctcttcccgcactgcttggggagagctggtgagcaagagtctggcccgagttagctagagctgttgccatgacaagcattttcttaagaaagctctgctgttgagatcgtccaaagctgggggctgggagggggggcacgaacttcgtggggcaccatccctccgaagagagcaagatcagagacacccgcccagctctcctgcaccctttttctttcaggaacctgagaggtccttcccattggaggggcagggggaggagacccagcccactccccggccttagccagaaa

SEQ ID NO: 104858 - DNA, 175 bp, Homo sapiens; identical to SEQ ID NO: 1053
  chr1:203596925-203597100
  hyper

SEQ ID NO: 104859 - DNA, 42 bp, Homo sapiens
  chr1:203598468-203598510
  hyper
cctcgaaaatcacgccgctttcgccgcggcctcccatcgtgg

SEQ ID NO: 104860 - DNA, 13 bp, Homo sapiens
  chr1:203764620-203764633
  hyper
cccagcgcctccc

SEQ ID NO: 104861 - DNA, 30 bp, Homo sapiens
  chr1:203764934-203764964
  hyper
gtttttttgattcccgggtggcttggggcc

SEQ ID NO: 104862 - DNA, 220 bp, Homo sapiens
  chr1:203830670-203830890
  hyper
catttcccaggagccgcccatgccgccgcgtgaccttcacacttccgcttccggttctttattccggaagttgctctcagaggcagcgtgcgggtgtgctctttgtgaaattccaccatggcgtaccgtggccagggtcagaaagtgcagaaggttatggtgcagcccatcgtatcctacgcaggatgtcaggactaggaggttcgggtcagaatacggg

SEQ ID NO: 104863 - DNA, 824 bp, Homo sapiens; identical to SEQ ID NO: 1054
  chr1:204042250-204043074
  hyper

SEQ ID NO: 104864 - DNA, 1004 bp, Homo sapiens; identical to SEQ ID NO: 1055
  chr1:204043133-204044137
  hyper

SEQ ID NO: 104865 - DNA, 32 bp, Homo sapiens
  chr1:204044373-204044405
  hyper
tgtctccctgcctaccgcggttgtgctttcgg

SEQ ID NO: 104866 - DNA, 30 bp, Homo sapiens; identical to SEQ ID NO: 36704
  chr1:204120810-204120840
  hyper

SEQ ID NO: 104867 - DNA, 30 bp, Homo sapiens; identical to SEQ ID NO: 36705
  chr1:204121424-204121454
  hyper

SEQ ID NO: 104868 - DNA, 30 bp, Homo sapiens; identical to SEQ ID NO: 36706
  chr1:204159817-204159847
  hyper

SEQ ID NO: 104869 - DNA, 189 bp, Homo sapiens; identical to SEQ ID NO: 36707
  chr1:204332590-204332779
  hyper

SEQ ID NO: 104870 - DNA, 503 bp, Homo sapiens
  chr1:204347105-204347608
  hyper
tgacgggcaattagcgcggtgagtaattacgatgcctctcctgccgggactgttaacgggcagcgctgggtctccgttcctcctggctctgctgccctccagcctggcggagcccggagagcagaagctggagcggggaggatccctccccgaagggagcaggttgcagtgcgagcaggggtgttgcctctccgctcccagctccgatcttgcacttgaaccaccggcggggccgggggcggagccgcgccgccgcctcggaaggtaattcacagccccgagaactcgccggcagcgccaagtcccccagtccaggcgcaccgcgcagagaaccagtttgactaaaagagctttgaatcaggaacctggtggacatgtccagccactgaacggaaaaggggaagtgattaaacctggttctacttggtgggaggttaggagaggaacaaaggtcaaaggcacggaagcgtggcggggctgtgagcagcgaggggcccggggag

SEQ ID NO: 104871 - DNA, 206 bp, Homo sapiens; identical to SEQ ID NO: 36709
  chr1:204379619-204379825
  hyper

SEQ ID NO: 104872 - DNA, 30 bp, Homo sapiens
  chr1:204380120-204380150
  hyper
aggggactggtgaccgaggggtctgaggag

SEQ ID NO: 104873 - DNA, 179 bp, Homo sapiens
  chr1:204380934-204381113
  hyper
aagcccaaaatggccgcagggcccgcgcgccggcaggacacccccctagacgccggaagagacgcaggactgttgggcgtctacgtccctagcgccgcgccgcccaacgtcactcgcaaaatccccggggggcgggcctttccgcccacttccgtgtggccgccgattggttttgccag

SEQ ID NO: 104874 - DNA, 30 bp, Homo sapiens
  chr1:204462840-204462870
  hyper
aacatcaaagtcaccgctgtcgggagctga

SEQ ID NO: 104875 - DNA, 30 bp, Homo sapiens; identical to SEQ ID NO: 36711
  chr1:204464064-204464094
  hyper

SEQ ID NO: 104876 - DNA, 452 bp, Homo sapiens
  chr1:204485345-204485797
  hyper
ctcttcaaatctgacgactttcaaccgttcgggccccacgactctctccccggactaggatctactctatggtagtgagctcagcctttctagctctctagtcctcccattgctccatctatggtttccggaggcctcaccggaagccctcgtgtgaggccgtgtgggaggccggaagttgcggcttcattactcgccatttcaaaatgctgccgaggccctaggatctgtgactgccacccctccccccacccgggctcggcgggggagcgactcatggagctgccgtaaggtgtggctcttggccttcgtcggcggggtgccgggagcgggagctggagagtgaggagcaggcggccgtaccgccagttgtgcgggtagcgggcgggaggagcttgagaggtgggtcgggcggcgtggggaaggccgcgccaggcggaagaagggctcgg

SEQ ID NO: 104877 - DNA, 106 bp, Homo sapiens; identical to SEQ ID NO: 36713
  chr1:204487762-204487868
  hyper

SEQ ID NO: 104878 - DNA, 201 bp, Homo sapiens; identical to SEQ ID NO: 36714
  chr1:204518655-204518856
  hyper

SEQ ID NO: 104879 - DNA, 902 bp, Homo sapiens
  chr1:204653941-204654843
  hyper
ccaccttgtccctccgcacagactcgcgagctccaaggaggagaaagtccccaggctctggagcgcttccagcctgccagtccgcccgtgtcacgccctccctaacctcactgccacctctcggctcctccacatctccagggccccactctacccagcaacagtttgggggaggttctggcctctccaggcgaaggcccaggcgccctctccctggccgcttctgggcattctccagccctccgtccctctgcccctcggccgcctccctctcccaagtctccggctcccccgcaggcgtctcggcggaaggcagcggccggccctcctctggcccccacccgggtcaggcggagctgcggtgccggggcaggagccaggagccctgaggcggctgctccggccgctcccgccgcgtacgcctcggccacgccagcgacctcggtgtccacgattccccggcggcggcggcgctgcccaggtcagccccgaagctgcacactcaccccgtgggcgccgggcaccgtctgccgtctgctgcccgcgcggccgcgctccgctcgccttccgcccggggccgggctggggacgctggtccgcgccctcccgccgcgcgcgccgtctgcacaggccggggaggctcggcgggcgccctccccaacgtggagttatcctgggagcggctccagggcccagccggtgagggcgatggcagaatcccaatccgtccccaccccctctccgcgccctgggcgcgtcgcggccggaggctggcgggcgagagccaggcgctccttgagagcgccgcgcgttcgcaggtgcccggagcaggccctcgcggcgcccggcaccccctccacgcgcgcccctcttcccggcttcgcgctcgccctcctcactcg

SEQ ID NO: 104880 - DNA, 30 bp, Homo sapiens
  chr1:204797551-204797581
  hyper
tctccaggcaagcccgcaaagaggcctcag

SEQ ID NO: 104881 - DNA, 227 bp, Homo sapiens
  chr1:204797785-204798012
  hyper
gggctggtctctgccctaatgcggcggctggcggcgagaggcgctgcaggggacgcgggggaagtggcggcgccggcagcggacagctcggacagcgcccagggccggagcccgagcccttggaggtaggcgagcgcgaacaccggagagatgggggtagagagtcatggaaacccacctagcgacacccccttgttcccgccctcgtctgtctccatcccctgacc

SEQ ID NO: 104882 - DNA, 30 bp, Homo sapiens; identical to SEQ ID NO: 36718
  chr1:204806843-204806873
  hyper

SEQ ID NO: 104883 - DNA, 118 bp, Homo sapiens
  chr1:205091309-205091427
  hyper
aagattatttgctccgggaacatgtaggtgaggtagaaattccaggcatacagttaacctactagttcttgccctgttgtgtgttcagcggcgttgtccgggcgggctacctcagact

SEQ ID NO: 104884 - DNA, 30 bp, Homo sapiens
  chr1:205180524-205180554
  hyper
cgcgcaggttctgtcgcagccgtcccaggt

SEQ ID NO: 104885 - DNA, 244 bp, Homo sapiens
  chr1:205196741-205196985
  hyper
cttgtgctccttctcgccaaataaagcgaatgggtggaggaaatcctgggcgagccctcctcggcagggtccctcaagctggagccgaaactgcgactcccacgcccgccgcccccgcccctgaactgcagcccgctctctgcaatgcaaaaacgcagcagcatcgtcctccagccctctcctgggggatcgcacggtgcaaccaaccccaaaaacgaagctgcgcgacgccccctcagccccg

SEQ ID NO: 104886 - DNA, 30 bp, Homo sapiens; identical to SEQ ID NO: 36721
  chr1:205197445-205197475
  hyper

SEQ ID NO: 104887 - DNA, 30 bp, Homo sapiens
  chr1:205197861-205197891
  hyper
ccaacccaggtccccgaagcaagcctcctg

SEQ ID NO: 104888 - DNA, 66 bp, Homo sapiens
  chr1:205290854-205290920
  hyper
cagcagtaccagagcgcgcagtaaagcacagcattccaagttgttataaacgccctgagcccgagg

SEQ ID NO: 104889 - DNA, 321 bp, Homo sapiens
  chr1:205312590-205312911
  hyper
agtccatggggacgccgttgtcgtcacatcccccgatggcatagacctggcccccggtctccagcagggagcagtagacccggcggctgggcagtggcgccaggcgcttccactggaagtccttgacgttaggcacctccatggcagccttggggagcgcccgggcgccgggagaggtgcgagcgcgggggtccaccggctacttggcgccggctcccacggcccctatcgccacctccatctggctcccgagcgccggacccagccagaccccggccagtgcttcaccgtgccccgagtctcagcggtccggcggcgtcc

SEQ ID NO: 104890 - DNA, 532 bp, Homo sapiens
  chr1:205312961-205313493
  hyper
cgcgccctccggcgggcagcggatgggctccgcagcccctggtcaacttcactgggaagacgcggcggcggagggcgccccccgggggcagcaccacaccctgcactgcttggtccccgccccctccccacccgctgctcggacactgccgaagcaagccgcaggccggggctttcaggggttcggggtgccgggcagtccccgggcggaggaaggagttagcgtctctcggcgtcgacgcctctctttccccgcgccccctccccgcagtctcggcgcccccgcccccgcatcacttacgctgccaggcccggggagcgcggcggcgaggcgcagacgacgcatcactggggagcccggagcccccgccccgctgcacgggagccggggagagggcgctctgtccttccccagtccgcgcgccgctgtcacacatgcagatgaggagatgaagtgaacagcaggaaggagaagcggagccgccgccggggaggaggccggcgagcctgctccgctccgtccccatccgcag

SEQ ID NO: 104891 - DNA, 533 bp, Homo sapiens
  chr1:205399678-205400211
  hyper
tgagacaggagaaagccgcccatcaccgtggagaaccaggaatggcagaccacgcggacgccaacagtttacgcagctccccagctaggtgcaaagtggccaaaggaagagccggtcttccacacgcacacctccgcgcccacactgccccaggagcttcccactcagccgggggacccccaagcagccggcgaggcgcactgcgcacgcgcactcaggccgcggctccagccgccctccctccgcagtggggcgccccgcccccgcgccgctcagttttaaactcgcagcagacggaactcgacttaaaaataactattttgacagttcagatgtaaatatgtgagtgacgcgtggggctgtttttccttcacacttcccctcacccctcgctccctaccccagctcaattcggctgaggctgagatgatgggagagcgccgtctgcaggatgctccctaaaatgcagcaggaggaagagacttgtcctagagagcccagcgagcttgggggtggggcggaggacccccagc

SEQ ID NO: 104892 - DNA, 1750 bp, Homo sapiens
  chr1:205424701-205426451
  hyper
cggggacaggaggatcggctacctccggagccaaggctccctctcacactccccccaatcccaccagcggcaaaatcctttaaaaggaacaaaggcaatgggggcggggagggggcttcctctttggtcgacctagggcggcggctgacgcagcccgccgccggtcagctttcaggtgagtgcctgaacccgcatcccgcccatgccttagggacccctcttcgcccagccaagcccggggcggggaggaaagtccccctcagccgcactcgggcccccaacccggccaaggggtcgccaactcgcggcactttctgcctgtttgttttcgctcagtactcacagtttagatgctaagccggctcctcttgcactcacttcctttgtgtctctctctctctttctctctctctccccctcaccaatctctttcttccctccttgtccgattctctgctgtagcttccagtggagaaaaataattattcttcaatgggttagcacggggcgcacgcacacacgcgcgcgcacacacaccccgccgaggtacccaatcaatgcacaaatcttcggggtccctttaacctctgcggatgactccgggagttaattatgaagcctatttcggcgcggcataaatatgcattaaggtaggaaataatcgatacgctgaacttctgggaactggcatttagacggactccgtctcgccgccccccactccctccatggccccacgagccacctccacagcctcgcgccttcccggggtcgcaacgcctatcacaagcttctacccgggtttcagggggcccctgtagtggcgtgggcgccgcgccggtgccgggagaccccctcgtgcgccctctgcggtcggggcagaccctcagccggagcttcttcctcccccacccctgcaggccgggcccaagctgcgacacccccagcacgggctcagcctgtgaacaaactccgagctcagtactcggaggaactggcgagagcgggacggctacctgcccgcacgcccgatttccgggcacagctagaaagaccgggacgcgattcaactcccaatccggtgaatccgcctagcgccttcgggtcctgccgcccccggccagtcccgacccgcacacatatgcaggcatttgcacacacgcgcgcacacacatgcacgcacatgcacacacacatatgcacaccctcgcgcacacagacactcccgcgcgcgctcacgcccgcacacactcagggttataacaaaggaagaggggccagcgctgccttacttttgtctctcttctctcttttgcagccccccagccccggggccggcgtgcccggcccaccccgccctccgcgccccccgacggccgcggtcagccggcattccggagcagcgcgtcggagctgcaacttcgcgcctaagcgcccgcacctcgcagcccggcgggcgggagacaaaagctgcggcgccgccgccggaggccgcgcggccaaggtgtgttcgctaattgtcaggaaatgtgtgtgtgtgcggccgggagcccgcaggggcgggggaggggacggaggaagaggagacccacccctcctacccccgccactcgccagcgccgggtacccgaaccgggattagagaataaattatctgctctcttctcattgggctgtggctgaggacgccgtcggcggcgccgggctgggagctctcccggctctttgcattcaccgcacagctccggct

SEQ ID NO: 104893 - DNA, 30 bp, Homo sapiens
  chr1:205473798-205473828
  hyper
ttctacctcctcctcggccagctcaggttg

SEQ ID NO: 104894 - DNA, 30 bp, Homo sapiens
  chr1:205512506-205512536
  hyper
tttcagcatcgggccgtgagcagtggccgc

SEQ ID NO: 104895 - DNA, 289 bp, Homo sapiens; identical to SEQ ID NO: 36727
  chr1:205538139-205538428
  hyper

SEQ ID NO: 104896 - DNA, 35 bp, Homo sapiens; identical to SEQ ID NO: 36728
  chr1:205560982-205561017
  hyper

SEQ ID NO: 104897 - DNA, 116 bp, Homo sapiens; identical to SEQ ID NO: 1064
  chr1:205561300-205561416
  hyper

SEQ ID NO: 104898 - DNA, 30 bp, Homo sapiens
  chr1:205600231-205600261
  hyper
agctgtgcacaaggcggaaagtaaagaggg

SEQ ID NO: 104899 - DNA, 30 bp, Homo sapiens
  chr1:205601045-205601075
  hyper
ggcgttccttgcagcggcggggcctgccag

SEQ ID NO: 104900 - DNA, 30 bp, Homo sapiens
  chr1:205638913-205638943
  hyper
ggggctggtgaggcacgaggaataatgact

SEQ ID NO: 104901 - DNA, 30 bp, Homo sapiens
  chr1:205649196-205649226
  hyper
gaggggccgctccccgcccacaccgccgcc

SEQ ID NO: 104902 - DNA, 30 bp, Homo sapiens; identical to SEQ ID NO: 36730
  chr1:205718885-205718915
  hyper

SEQ ID NO: 104903 - DNA, 86 bp, Homo sapiens
  chr1:205719205-205719291
  hyper
ctgctgccgaaccccgagctgctggcttctcaaactccgctgctctttggttcagggctcctggaacagacgagccccccgctccc

SEQ ID NO: 104904 - DNA, 140 bp, Homo sapiens; identical to SEQ ID NO: 1065
  chr1:205721777-205721917
  hyper

SEQ ID NO: 104905 - DNA, 31 bp, Homo sapiens
  chr1:205743848-205743879
  hyper
agaaggacccaacaaccgacagcaaatcccc

SEQ ID NO: 104906 - DNA, 34 bp, Homo sapiens
  chr1:205744398-205744432
  hyper
accgggacttcccccgagcggctccaagtcagtg

SEQ ID NO: 104907 - DNA, 30 bp, Homo sapiens
  chr1:205782224-205782254
  hyper
ggggaccggggagccgagctcacgcgcccc

SEQ ID NO: 104908 - DNA, 30 bp, Homo sapiens; identical to SEQ ID NO: 36734
  chr1:205827849-205827879
  hyper

SEQ ID NO: 104909 - DNA, 30 bp, Homo sapiens; identical to SEQ ID NO: 1066
  chr1:206955685-206955715
  hyper

SEQ ID NO: 104910 - DNA, 30 bp, Homo sapiens; identical to SEQ ID NO: 1067
  chr1:207038445-207038475
  hyper

SEQ ID NO: 104911 - DNA, 89 bp, Homo sapiens; identical to SEQ ID NO: 36737
  chr1:207223722-207223811
  hyper

SEQ ID NO: 104912 - DNA, 30 bp, Homo sapiens
  chr1:207226354-207226384
  hyper
ctttttattaacaccgcccccagccctatt

SEQ ID NO: 104913 - DNA, 30 bp, Homo sapiens; identical to SEQ ID NO: 36738
  chr1:207226809-207226839
  hyper

SEQ ID NO: 104914 - DNA, 30 bp, Homo sapiens
  chr1:207495032-207495062
  hyper
caactcgctccggccgctgggcgtagctgc

SEQ ID NO: 104915 - DNA, 774 bp, Homo sapiens; identical to SEQ ID NO: 1068
  chr1:207627526-207628300
  hyper

SEQ ID NO: 104916 - DNA, 466 bp, Homo sapiens; identical to SEQ ID NO: 36740
  chr1:207669321-207669787
  hyper

SEQ ID NO: 104917 - DNA, 295 bp, Homo sapiens; identical to SEQ ID NO: 36741
  chr1:207669828-207670123
  hyper

SEQ ID NO: 104918 - DNA, 148 bp, Homo sapiens
  chr1:207925328-207925476
  hyper
gaggctccgccccgcggcccgccgattggccccagccgccctggtgactcgacgcacttccgccccgggcgcggctcgggccacgcccacctgtcctgcagcactggatgctttgtgagttggggattgttgcgtcccatatctggac

SEQ ID NO: 104919 - DNA, 30 bp, Homo sapiens
  chr1:207925779-207925809
  hyper
cagtgctcagatcccgggggtatgtggcgg

SEQ ID NO: 104920 - DNA, 209 bp, Homo sapiens
  chr1:207995188-207995397
  hyper
aagaagggcggtgctcgtcctaggccagagacccagggcgcactgcgcttccagatgcgcagtcacgggtgggggccactgcgcatggcgcagggcttggtaaaccccctccccacaaacgtgagacctgcgacaaagacaggttagagagccgggaccctgatttttcgaggcctccctcccccaaccaaaggcggacagcctgctgc

SEQ ID NO: 104921 - DNA, 30 bp, Homo sapiens
  chr1:208042106-208042136
  hyper
ctcactcacccctgcgcgcagctggccctg

SEQ ID NO: 104922 - DNA, 30 bp, Homo sapiens; identical to SEQ ID NO: 36744
  chr1:208042665-208042695
  hyper

SEQ ID NO: 104923 - DNA, 633 bp, Homo sapiens
  chr1:208084077-208084710
  hyper
tctcagtccattggaaccagtcgtgctgaccgattcacacctcggctaacgcacactcgcgggggtgatggccttcccttcccctcccacccccgtcagctcccaggtgaggcgctggccccggggggaagcagctgtgggcggcagtgcgtgggttgggcaggggtcccttccctccgtgagactctgctctgctgttcagcctcccagaaagcctccaccctccccgcggcgaagccaagcggccgcggcgcgcgggcggtactcacgcagcaaactcagcaagcaaagcgcggtccagccccgcggcatcctgggccctgcgcgcgcgcccctgcggaccagcatccttcccgcgcggctcctagagagacgcaccgagtggaagacactactcggcttggccaggacgcgctcttcccgccccctccgcccgggagaggggtgggggattcttgcttttttcctctcttctcccctccctttttagtcttggcaaggcagcgcctctccttggctgctactaacttgagctcccctggttggtcccaaaggcggagggcgttaggagggaggctgggttgccgccgtcgaggccaaaaaaggtggaggtttgttcgggctccagatgcc

SEQ ID NO: 104924 - DNA, 531 bp, Homo sapiens; identical to SEQ ID NO: 36746
  chr1:208416771-208417302
  hyper

SEQ ID NO: 104925 - DNA, 54 bp, Homo sapiens
  chr1:208417907-208417961
  hyper
cggctgcctgtcctgcgcccagctcagcccggacccatcggccaccttaagtag

SEQ ID NO: 104926 - DNA, 151 bp, Homo sapiens
  chr1:208418635-208418786
  hyper
cacggctttccggaagcggcctgcaagctggaccccagcgagttcgcaggatctgcgtagtccctgctcgcgattagagcgcacacgagtttactcctgtccaagtattctgataagcttcctctactgccctctcgtggccacagtcctc

SEQ ID NO: 104927 - DNA, 31 bp, Homo sapiens; identical to SEQ ID NO: 1076
  chr1:208418805-208418836
  hyper

SEQ ID NO: 104928 - DNA, 219 bp, Homo sapiens; identical to SEQ ID NO: 36749
  chr1:209364147-209364366
  hyper

SEQ ID NO: 104929 - DNA, 434 bp, Homo sapiens
  chr1:209381128-209381562
  hyper
gtgggctcgggaggccgcccgccgtcggcctgactcacagcgagctcggcgctccctcttgtggcttctgtgttccccgtcagcctcgggaagctgccggccaccacatacaaatggactccgcgtagttaagctgtcaggtctaatgtatttatttgactctctcctgttaaaatgatttctctacagcactgcggttatttacgactattgtcagtacaaggcgatgagaaggcagcagcagaggaaaacaacaacagctgaaggaaaagttctgtctgggagggctgggtggctgggtggctgggtcccgggctttcccgcggctgcagcggctgtgtgtttactttatctgcagcgggggcttcggagctcatccatccataatgcagagcccattgccctcagcccgcagttcacggccagccccagtg

SEQ ID NO: 104930 - DNA, 104 bp, Homo sapiens
  chr1:209742999-209743103
  hyper
tgtaagctacaggtccgccctcaaaggtatctctcggggaatgtttccctcatcaagaagaatctgtttaatccgaaacacaggacgctcgatggttcttgtta

SEQ ID NO: 104931 - DNA, 30 bp, Homo sapiens
  chr1:209833739-209833769
  hyper
taaaattactactctcgtccaaatttgctt

SEQ ID NO: 104932 - DNA, 143 bp, Homo sapiens
  chr1:209849316-209849459
  hyper
gtccaaccggcagcacgcctcctaggaactgtgggagaccagcggagtgggagggagacgcagtagacagagacagaccgagagaggaatggagagacagagggggcgcgcgcacaggagcctgactccgctgggagagtgca

SEQ ID NO: 104933 - DNA, 604 bp, Homo sapiens
  chr1:209957602-209958206
  hyper
ccttccctttctgtccgacatcaaggaccctcggaagatgagatttctccgatccacacaccccacaccagagcatgttatagtgatttgctaaatgaggcataagtctgtctcacatacgttctttttccacgtccgctacaggttcgggggctcagaaactttttgcggcttcctgcctgctgccagaaaggcagctagtcccccacgcccagccgcaagtaacactggaaaacccgcctgcgctgggaagaccctcgcagcccgctctgctccagtcccgcaggcaccttcttgcgcatgcgcacccactcgagtgccgccctctttccccccattccgtgacgtcatccagccgctcgcgcgcctcgcgttagaatcactagctaggcagccttactgcgcgccggaagtttgggccaccgtgcggcccgccctttccggccagactgaacgcggccccatctgtcggcttaggaactgggaagggcggaagtaaacgagaaaaggcggaacctggtgaaactggtttcccgctgctgccctcattttgcttcgccgaacgtcctccctgtgttatgacgtctggtgtcccacttgactg

SEQ ID NO: 104934 - DNA, 234 bp, Homo sapiens
  chr1:209979377-209979611
  hyper
gtcttagccaaggggcgcctggctctacccaagtagggactgcaggttcctctccccgtcccgcaccagcccttacctgcccagcccaggtgcgccgagctcacgtcagcgcctcgccccaggacgccgcagccttcgcatccgcccggccacgcctcccaggtgtggccacgccccccggcgttcgggattggcgagttgcaagaaatatgacactccgcgtttctgggctgc

SEQ ID NO: 104935 - DNA, 1 bp, Homo sapiens
  chr1:209979634-209979635
  hyper
c

SEQ ID NO: 104936 - DNA, 230 bp, Homo sapiens
  chr1:210001203-210001433
  hyper
ctttcaaagagctgcggtagggggcagaaccgggaaccggatgttctaagcctgtcgtacgagcgcgacgtaaagcggatctgctttatggcaccttgctttcgccgtaaagcgcagtcagcgagcccacgtgcttgtgttgactggacaacttcctggtggaaaaccgcgactcttgcaagtgggcaaacttgacgttttcgctatgggcaaacgcgggagccggagcc

SEQ ID NO: 104937 - DNA, 227 bp, Homo sapiens; identical to SEQ ID NO: 1079
  chr1:210110983-210111210
  hyper

SEQ ID NO: 104938 - DNA, 138 bp, Homo sapiens; identical to SEQ ID NO: 1080
  chr1:210111283-210111421
  hyper

SEQ ID NO: 104939 - DNA, 126 bp, Homo sapiens; identical to SEQ ID NO: 1081
  chr1:210111796-210111922
  hyper

SEQ ID NO: 104940 - DNA, 38 bp, Homo sapiens; identical to SEQ ID NO: 1082
  chr1:210112036-210112074
  hyper

SEQ ID NO: 104941 - DNA, 43 bp, Homo sapiens
  chr1:210405540-210405583
  hyper
caggagggaaacgggcgggggcgggcggcgagggagaataact

SEQ ID NO: 104942 - DNA, 1297 bp, Homo sapiens
  chr1:210405792-210407089
  hyper
gctagggcgggagcccgagagcgcgtggggtctgggctgcgggctggagctgggcccgcgtgtccccgggcaccgggaggggaggggaggaaaaggaggagggagggcgggaagcagggaaggaggcagggggcgggctggggtgggggtgcgggaaaggcgccccgtgtgcagcctgaggagcggcggcggcggcctgagcagagggagggagggagagcgggcgcgcttgtcatgttccctctctcaccctgggggcatcctgcagaacctctcctcggaaatccacggggaaatggcaaacaggattgacgggtttcacacgctcctcgctagacagagccgctcattaccataaccgtctgcagcgacggcggcgcagcgccccagtcgcggcggcgggacctgccgggacccttgcccgccgcgcacccgcagtcaccgccgagcgggcggccgggccgggacccgcgagtgtgcaccggcggccgggctggcgccgagcccagagcggaccagcagcagctcaagcgctgcggccgccgcctccccgctgaccccgcggtaagagccgggctgggcgcgggccgcgggggcgggagggccgggcagggtggagggcgagggccccccggggctcctgccctcgcagacgggcacccacgcggcctcccgcgcgccctcttggcaccagggctgtgccgaggtcaccgagtggactcgcagcggccggagcggagtcggggcggcgtgggggccaaggcacagctgggcgcggaggcggcgcgggcttttccctgggctagcgtgcgccgcggcgccttcaccagggcgggaaccgccgcctcctctagggctgctcgggctgccacccgcgcgcaccgagacaactccaggggcgggtggggtcagaagctctggtgagacctcatggtcctccgtggccgcttagtccctcatcgtaggggaaggggttaagtaggaggggtgcccccaggtccggatgccgcggcgcttggcaggtggggagagagggattgtggatgtcaggagcgcgcgtttgcaagaaaaaggaattgatgcagtagctgacaccttctgtcccccgccacctccgcccccgcaccctcctcccaggcagcagagctgcgctgcgggcggcggcggctcctctgtcctcagctcacctcctcggcgggctgaggctgctgcccgcctggtccacgcctccgcctctcgcttcccttcctcccctcccgcctcttcggccctagcaactttccgagtgcccagctgt

SEQ ID NO: 104943 - DNA, 145 bp, Homo sapiens; identical to SEQ ID NO: 36761
  chr1:210407458-210407603
  hyper

SEQ ID NO: 104944 - DNA, 30 bp, Homo sapiens
  chr1:210424599-210424629
  hyper
tcacggctctcgagccgcggaggagccttt

SEQ ID NO: 104945 - DNA, 498 bp, Homo sapiens
  chr1:210424843-210425341
  hyper
gaggtggcccccccccgccccgcccccactccctggctggcgagggctggcaagggctccgggcgctcattgtgcaggcagctggcaccagctgggaaggggaattagcataacaaagagccggagcgagcgcggcgcggcccggcgggggctctgccgagcgccccgggctcggaggagccgcgctgtcagcggctgtggcgcgctcgggcctcctggcctgagaccctcggagcagcggggcccggcccccagcgggcgcgctctgtctgggttccggccgcaggactcgcccggagaatgcagtgggtgtgggtgtgtccgggacagcgtgaatgggcgtgggtgtgtgtgttcgggtgagtgtgggtgcccgtgtgtccaagcgtgcgtgtaaccgtgtccctgggcgtgggaatgcgggtgtgaaggggtcacctgcacacgggtggggacccgccagccctcttcccttccgccccaggaaggcctctttgt

SEQ ID NO: 104946 - DNA, 457 bp, Homo sapiens
  chr1:210465688-210466145
  hyper
agagacaaagaggcctgttcccgaggtgtccgacctcctgcccccttggcgggccccgcccgggttcctccagcaggaatcgccccaggcgctgggagccagagctggccgggtctgacacccgccccagactttccacgatcaggtttcagctcgactaacgagggggaaagaaagaacgcgcgacttccgcgggccggagccgcgcgggggcccgggggaaacgccggcctggtctgggtgggaggggacgcgaagaggctccgggctcggccagtgtctgccccgggactgggccctgggactaggcggggcacaggtgtcccaggagggggcgccctgacttgacgcgaacgggccacctgtccctcccacgcctgcgctgccacccgccctgctccgccatcgcctcctccaaagctccccggatcctccgaggcgtcgtcgtccgagttgt

SEQ ID NO: 104947 - DNA, 31 bp, Homo sapiens; identical to SEQ ID NO: 1085
  chr1:210502487-210502518
  hyper

SEQ ID NO: 104948 - DNA, 934 bp, Homo sapiens
  chr1:211306755-211307689
  hyper
ggacctggagttgcccgtctctactgctggctctccctggggagaggcggcgcctctgggagcagcccgggagccccagagccttcgcggaagggtgggcagtgccgatggggcgcgcgctgccgctccggctgcagccagctttccatcacttttcccagtactttgctcagcagctgtcacgcatccttggagataagaccgagagggcgctagaaaggcccaaaaggcgtccccagaagagctctcctgttaggatggggacccatcagaccccgccccgccctgcccacctttctctgcctcggggaggctgccctgggtgcccgcgccgcggctccttagcagagctcgcgggttctgctgcatctgctggctccgagcggcgagaggttctgcaataaaggcacggataaaacgcccgggtaatcgaaatccgaatgcacctcttaccattggaccgccgaacaatattctccagaaacgtgttttgaggggccactagtcccctcctgcccccagccatggtcatcctcccagcagctcggggtccggcgggcgtcctggcgcggcttcttacgacagcaggaaactggcctcggggcccgcacgcagtcccggctcgaagcgccccatgcgcccggcggggatccgcaggcagggctggcggctccctctggctgctaccctcgcgccctcttcgcgcctccctccctgcggcccgcctcgcagtgcactcgcgccggcctcggctagcggcagccgcctccgggtgggcggagggagcagcggcgcctgggccggcggcgccccctaccgggctcgtgccccaccgccggcctgcgggagaccaagctggggggctcccgcagaggcagggaagtggcgggcggccgtggaccaaggctgggacggcagcgccaccctctgggtt

SEQ ID NO: 104949 - DNA, 199 bp, Homo sapiens
  chr1:211431627-211431826
  hyper
ccaggcagcctggcacgcagcagatgccctcaaatctggtgaaggaataaacgcagtttcctactcctttcgccgaatgcaattcagaaaagcattacagagcacaactccttccaggctggaaacgctgccagaaagcagctctcgcttcacctctgccgggggactccgccctctcccccagcgctccaagcggaga

SEQ ID NO: 104950 - DNA, 30 bp, Homo sapiens
  chr1:211432739-211432769
  hyper
cggggcggttatggcggctccatattaaca

SEQ ID NO: 104951 - DNA, 118 bp, Homo sapiens
  chr1:211434030-211434148
  hyper
ggtgtagctttggtcgcggcagctctgcggagtgcaggagccgcggagagaaaggggtgggggaagggggtggggagacgccagcggcaggcacacctcgctcgccagccagctctgg

SEQ ID NO: 104952 - DNA, 136 bp, Homo sapiens; identical to SEQ ID NO: 36766
  chr1:211496968-211497104
  hyper

SEQ ID NO: 104953 - DNA, 119 bp, Homo sapiens
  chr1:211499930-211500049
  hyper
acggaagagcaagacggccacaattcagacgcacgtgagggaaatcagatgactggacttgtagatactaacggttctgaagcgggtaggttagctttccaaccgcctggatgacggtc

SEQ ID NO: 104954 - DNA, 30 bp, Homo sapiens
  chr1:211500556-211500586
  hyper
gggcggctgtggaccggaggggccaggttc

SEQ ID NO: 104955 - DNA, 30 bp, Homo sapiens
  chr1:211555983-211556013
  hyper
gtggcttgagtccccgcgcccctcccctcc

SEQ ID NO: 104956 - DNA, 30 bp, Homo sapiens
  chr1:211556271-211556301
  hyper
gtgaccgttccagccggggctgtggctaga

SEQ ID NO: 104957 - DNA, 30 bp, Homo sapiens; identical to SEQ ID NO: 36768
  chr1:211688763-211688793
  hyper

SEQ ID NO: 104958 - DNA, 150 bp, Homo sapiens
  chr1:211689001-211689151
  hyper
gggcggtgtcagggcggcaaggcggcgcctccccaaagccgtaaaccttcccgcccggctgactacgccggcccagccacgcacgcgcaccccgcatgccccgtggcctgtgaggttattcaagaagccaaggtcgggagtggggaaggt

SEQ ID NO: 104959 - DNA, 190 bp, Homo sapiens
  chr1:211750952-211751142
  hyper
ggaagcatttctgacgctgttataaccataaccagacaagtctccagcaaagttgctgcagcctgtaaagacagccaagtgcgggtgtggactgcagcgggatgatgatcacctcctgaccctttttcttagggtctgacccacagcccccacctacaaatatgccagacgcgtcgccggctccttgcac

SEQ ID NO: 104960 - DNA, 30 bp, Homo sapiens
  chr1:211751892-211751922
  hyper
aacatgaaggtcagcgccagcatgcacagc

SEQ ID NO: 104961 - DNA, 30 bp, Homo sapiens
  chr1:211753137-211753167
  hyper
ggagttagtcctcccgaaggtctgctaggg

SEQ ID NO: 104962 - DNA, 13 bp, Homo sapiens
  chr1:211848589-211848602
  hyper
agacccaggaaag

SEQ ID NO: 104963 - DNA, 296 bp, Homo sapiens
  chr1:211848657-211848953
  hyper
cgcagggcgctcgccccgaggcgacgaaacctaagcaggggcaggcgcagggtaggtcccacgctcaccttgccatcactcttcctccggatcttctggcagcggccgtaggagcctgtgccaatggtgtacaacacttcatagtcctcagcccgggaaggcatggccggccagtcgccagagtcgcgctgcctcacgcaggttgcgccgccaagtgcggagctccagggaccaggaactccagggacctggatggagaagcccccgagcagcactgacccgccacccctgccttg

SEQ ID NO: 104964 - DNA, 30 bp, Homo sapiens
  chr1:211849237-211849267
  hyper
gcttctttgcacaccgcttccaccagatgc

SEQ ID NO: 104965 - DNA, 150 bp, Homo sapiens; identical to SEQ ID NO: 36771
  chr1:211872027-211872177
  hyper

SEQ ID NO: 104966 - DNA, 768 bp, Homo sapiens; identical to SEQ ID NO: 36772
  chr1:212003415-212004183
  hyper

SEQ ID NO: 104967 - DNA, 30 bp, Homo sapiens
  chr1:212208168-212208198
  hyper
tcctggaacttgtccgcagagaatgagcag

SEQ ID NO: 104968 - DNA, 30 bp, Homo sapiens
  chr1:212208716-212208746
  hyper
atccagttcctgttcgccatagccggcatc

SEQ ID NO: 104969 - DNA, 156 bp, Homo sapiens
  chr1:212209084-212209240
  hyper
ggcgcggagtttggcggccggggcttacagtggcgggagttggaggcgataacgatttgtgttgtgagaggcgcaagctgcgatttctgctgaacttggaggcatttctacgacttttctctcagctgaggcttttcctccgaccctgatgctctt

SEQ ID NO: 104970 - DNA, 30 bp, Homo sapiens; identical to SEQ ID NO: 1088
  chr1:212395928-212395958
  hyper

SEQ ID NO: 104971 - DNA, 30 bp, Homo sapiens
  chr1:212459678-212459708
  hyper
aacgcttgcctctgcgccagcagagccatt

SEQ ID NO: 104972 - DNA, 75 bp, Homo sapiens
  chr1:212588335-212588410
  hyper
tctcacccctgtggcggaggcctgcatgtgaccctgggccagctaagctggtccttagacgcgtgcctctgcgtc

SEQ ID NO: 104973 - DNA, 30 bp, Homo sapiens; identical to SEQ ID NO: 36776
  chr1:212606091-212606121
  hyper

SEQ ID NO: 104974 - DNA, 30 bp, Homo sapiens
  chr1:212606741-212606771
  hyper
tcgttgatgatctgcgtacagacctcagaa

SEQ ID NO: 104975 - DNA, 30 bp, Homo sapiens; identical to SEQ ID NO: 36777
  chr1:212732441-212732471
  hyper

SEQ ID NO: 104976 - DNA, 120 bp, Homo sapiens
  chr1:212781880-212782000
  hyper
ggctggctcctccccgaacttgcatcaccagtgccccctctctccacccgccttcggccccgccttggcccctcctccaccccccttcctccgctccgttcggccggttctcccgggaag

SEQ ID NO: 104977 - DNA, 30 bp, Homo sapiens
  chr1:212783070-212783100
  hyper
ccgtggcggggaagcgagggtgtggagcca

SEQ ID NO: 104978 - DNA, 203 bp, Homo sapiens
  chr1:212838652-212838855
  hyper
ggactcactgcgggccggcgggcacctgtcactgatgggaagagctcctgtttccttgccttgtgccaagagggcccaaggcagacctgccagcagccacgagatggcgctgcgatccaggcgactccgggccctgcagccaccctccccgaggctgccccgcggaggacccaagcggtcgtggaggacgctctcccactccc

SEQ ID NO: 104979 - DNA, 268 bp, Homo sapiens; identical to SEQ ID NO: 36779
  chr1:212873455-212873723
  hyper

SEQ ID NO: 104980 - DNA, 793 bp, Homo sapiens; identical to SEQ ID NO: 36780
  chr1:212873750-212874543
  hyper

SEQ ID NO: 104981 - DNA, 30 bp, Homo sapiens; identical to SEQ ID NO: 36781
  chr1:212964870-212964900
  hyper

SEQ ID NO: 104982 - DNA, 30 bp, Homo sapiens
  chr1:212965566-212965596
  hyper
tgagttcctggaatcgttccctcactcccc

SEQ ID NO: 104983 - DNA, 30 bp, Homo sapiens
  chr1:213031360-213031390
  hyper
gcggggccgcctcccgcccaccctcaggtg

SEQ ID NO: 104984 - DNA, 30 bp, Homo sapiens
  chr1:213032093-213032123
  hyper
tacggcgctctccccgcggcgcttcgtggt

SEQ ID NO: 104985 - DNA, 1033 bp, Homo sapiens; identical to SEQ ID NO: 1091
  chr1:213123589-213124622
  hyper

SEQ ID NO: 104986 - DNA, 297 bp, Homo sapiens; identical to SEQ ID NO: 1092
  chr1:213124668-213124965
  hyper

SEQ ID NO: 104987 - DNA, 30 bp, Homo sapiens
  chr1:213188772-213188802
  hyper
gggtttacctatcccgcttggtctctggag

SEQ ID NO: 104988 - DNA, 44 bp, Homo sapiens
  chr1:213189227-213189271
  hyper
gctcaaggagcatgcgcagagcgtgggacgcgcgtgcaaccatt

SEQ ID NO: 104989 - DNA, 31 bp, Homo sapiens; identical to SEQ ID NO: 36785
  chr1:213266553-213266584
  hyper

SEQ ID NO: 104990 - DNA, 30 bp, Homo sapiens; identical to SEQ ID NO: 1094
  chr1:213529200-213529230
  hyper

SEQ ID NO: 104991 - DNA, 30 bp, Homo sapiens
  chr1:214155741-214155771
  hyper
cttctcttttcgctgcgtcaggcaggcacc

SEQ ID NO: 104992 - DNA, 103 bp, Homo sapiens; identical to SEQ ID NO: 36787
  chr1:214155979-214156082
  hyper

SEQ ID NO: 104993 - DNA, 144 bp, Homo sapiens; identical to SEQ ID NO: 1096
  chr1:214156134-214156278
  hyper

SEQ ID NO: 104994 - DNA, 671 bp, Homo sapiens
  chr1:214156394-214157065
  hyper
cgctcgctctctctggccggagaggccgcgacacctagcgcggggccgaggctaggaagggcgggccggggagggaggagggcactgggaggaagccgcgggcgaggaagccccgctcctgccgagtgcctggagaggagattcccagccttcctgcccaacccgaaacttttccaacacacgcaggcgtattcctcgcaggattcggcggtcccgagtcgcagtcagggaggaggctcgggaagcacacgtgccctggcacactggaggaggtacacaggcacaccaggagggacagggcctcttgggaggcggctgagggcgtgaaggcagcaggcggccacacatccgaaagggactccctgcgagcgggatcgagcgcttaaaaccctgccacagcttggaagtgtagcggtgcccagaggctttgcgtaactttgcccactgcgcccccgcgtgcaaaggtgtccccttcacactcacaccctcaccccatctcactccccttgagttgcggcccgagactgcctttgtacttaagcgacagcaaaagatatgtggatttgaaccaaagatggtgggcaagagtgttgtaaattgtgtaaattccactcgcgggaacccccagatacgtagggagagcacccctttctcgccgaaggcatcccctc

SEQ ID NO: 104995 - DNA, 286 bp, Homo sapiens
  chr1:214158624-214158910
  hyper
ccgagatagggggctcgggcctcaagtcttgtccagggcagcccgagacccaggagaatgccgcagctctagcaagagaggttgccaggagcctggcctgtacgcctccccgacagtagaggacaggacacgggacagggctgcgccgaggcagctcacggagctgggctgcgaaccgatctcgctcgcctagcgtggcgcgcgctcctatttcaagtcgccgctcctgcgccctaatgcgggctgcgaaccgccgcggcagagcgtcgcgagccgggagcctctg

SEQ ID NO: 104996 - DNA, 182 bp, Homo sapiens; identical to SEQ ID NO: 1099
  chr1:214159036-214159218
  hyper

SEQ ID NO: 104997 - DNA, 852 bp, Homo sapiens
  chr1:214159482-214160334
  hyper
ccagcctcaactgtcacatcccggttagaacacctgatacaacagtcaatagttggaggtgtgagtggtgcgtgtgcgctcctctgtgttgcttccgtgatagacgcgtggggggagtgtgtgggggcggcaaaaggggaaagaagaaggctggggatgctcccgcaatctcttttcttatcgccgacacctaacctgaccgacctaattttttttctccttttcactgtttgaaattcgtgccaaaagtttcctgccgggatagactcggacatactaacatcgctattcttattcaaagggagggcttaatatcctctttacggtttggtgaatttgaggctgaaattgtaaattccctaggaaggagtgtgtgtgtgtgtgtgtcgcagaagacattggtagtgtttggccagtgtacttgtaacacacctcataaataccctgttgtcacgacacagcatgattcaacctttgatctgattaaatttgagggacacacgaagactacttgtcctcctcctacttacaaaaatgagtgtctaatagactatgtatgaatgtttctgcttcgcagctcttgcaagtcccagcttttataggatctttaggtcataaacgcggctgctttattaaaagccgtttactgtgcccggtgaaagggacgttctagctgcggctgaggctcgcttgcatttgtaacttgcaaagcccaaggagatctttaagagccacattatctaaagaaattttgctggttatttttcaagcaagaaatgtcaaaccaaagtaaattttctagggctttattttagagcctgcgatttatgcgtttgaaatttcttgcctaat

SEQ ID NO: 104998 - DNA, 42 bp, Homo sapiens; identical to SEQ ID NO: 36794
  chr1:214160833-214160875
  hyper

SEQ ID NO: 104999 - DNA, 150 bp, Homo sapiens; identical to SEQ ID NO: 36795
  chr1:214161236-214161386
  hyper

SEQ ID NO: 105000 - DNA, 30 bp, Homo sapiens; identical to SEQ ID NO: 1103
  chr1:214161705-214161735
  hyper

SEQ ID NO: 105001 - DNA, 30 bp, Homo sapiens; identical to SEQ ID NO: 1104
  chr1:214162024-214162054
  hyper

SEQ ID NO: 105002 - DNA, 582 bp, Homo sapiens; identical to SEQ ID NO: 36798
  chr1:214162293-214162875
  hyper

SEQ ID NO: 105003 - DNA, 446 bp, Homo sapiens
  chr1:214360412-214360858
  hyper
cctatttggattatttttcagcgtgtctatttggaaacattacctcgtaacatttgctgctgtaattctgcgatcccctgacgctggtatttgagaaacacactctggaaacgctgtggttgtttttcacaggaacccagggagctatcaaagtcggagaacgtgcctctgtttgcaggagaggtgggcaggcagcgagatccccgcgcaccgctcgctcgggctgcgggcaggcagcaatcagctaattgcctaatcggagtggggagctggtgcccgctcgccgcggtcgcctcgcgggtcacagacaagagagcggcttgttttctctctgtcacatcgtcgtcttgaaccgtgtggtctgttgcaggggaaggggccgagctggaggagcgagcgggcgggcggcgcttggcacatcccgaagaacgctgcctcggttgcct

SEQ ID NO: 105004 - DNA, 36 bp, Homo sapiens
  chr1:214360926-214360962
  hyper
cgcgctctgctcagctctacccggctccgctctcag

SEQ ID NO: 105005 - DNA, 240 bp, Homo sapiens
  chr1:214387628-214387868
  hyper
ttctccttcctcaaagcgagctccagagtagaaactgcaattgtgtatttgaaattctccagtcaccaaatccaagaaaggtgaagaggaactgccccagtggcgtctgcgaggcgtttcctctataaagctgtcgtccctagctctggtcagtgctgaccaagtcaccctggcctcctccccggcccctttttctactgcaggaaaggctggagcttcggaagagataacatcagggaa

SEQ ID NO: 105006 - DNA, 30 bp, Homo sapiens; identical to SEQ ID NO: 1108
  chr1:214435167-214435197
  hyper

SEQ ID NO: 105007 - DNA, 296 bp, Homo sapiens
  chr1:214453829-214454125
  hyper
tggcttcctctgcaacgttcgcagcatgcctcagagactcggtgagctgggccggccaatgcatttcctcttccgtccatgtaattccactagaggagcagagggcaaactacgttcccattaaagccacaaggtttaaaaacctctaaccttggaaaagcacacttcaaccctctgcacaccaaacttctctactgtggtttcccctctgccgctttctccttggcgttccccgatcactgcctctagggtctttacaagggacagcgaacgtaaggtttcggagctggcttcgc

SEQ ID NO: 105008 - DNA, 1604 bp, Homo sapiens
  chr1:214724211-214725815
  hyper
ctctcgttcccaaaacgcagaagggaatggagagaggggaccagggtgtgggtttaaccacaaactccccagactgcgctcaccttccagctcgctcccgggaccagctttgcgcctcaccgcgggcagctcccaccgcgagataacacccctgcggcccggccaccccgcgccccaggctgccctgccaggcgtcccggggcgccaatcgcaagttggcgttgccagcgtctgcccaagtcatctgcagggcgcccggagcgccaaggcggcctccaacctcgggcccaactcccggcttggacggggcttacctgcttacatggcccccgtggcgccccggagtcccgcgcggaaaggctgtccttcgcggcggcggagccgattccccacggaattgattccagtgactggcggaggaggggcgaagggaaggagccgcaggaggcgaaaggggagggaggtttccgccgcgatcccggcgcgagagtccgagcagaggcgcaccgggggagaaaaggagaaaaacctaagcacggggctgtcccgcccgaggaggccggggaggatggctcagctgggaggggaaggagcgccagtggccacttgatgtctgtctagggctccccgaggacctgagccaggagagcaggcggctgagcccggagaagcacagcaacctgcccccgagtctgcgcccgctgcgctcactccgccgagaaaaagttggaaagaactttgaggggccgggagagccagagcggcaggaaatgcgagcggccgggagaggagggaggaaggggccgtgcgagtgggaggggacggagcaggcgccggcggccacggctcccccaccccagagccgggctccgcggccctgggggccgggaggcggagggagcgctgggcgcgcggccgggggcggggaggaatgcggcccgggagggcgcgcgccgggggcgccgcgggcgcgcgctgaaacgtggagccccagctcccgagctcccgagctggaggcgcgccgtccttggggacgtcacagcgctggaatccgaggaatgccgggctgcaggagctccttctgcaggcccggagaagtcgcacacttttaatggggtagttttggaaaatgttttaaaaggtgggggccgaggacggaggaccggatgaaactccctggagtaagagacgtggaagtggagagagcaaggcgaccgcagccaccccaaccctgggctgctcccgccgttggggagaaagaggcaaggcaaggaagagcccacctagacttccgaggaccgcagagacggggcggcggcaggaacttgctcaccccgacctacattcagaatagtccaccttatattggggaaccctccaagcaggacgtttcatgcagccaccccacaggggaaaacagaccaggagaaagtaaggtggcctcaccaagtaggcaatctcagagatctctccctagaatctctgggtactggacccggtgtcttagccttctctccctgccccctcccgccccgtaggaatgataaaaagcagcctgtgtgctgagagttggaaaatgtcgttttcccggtttgttccatgcc

SEQ ID NO: 105009 - DNA, 30 bp, Homo sapiens; identical to SEQ ID NO: 36804
  chr1:214776289-214776319
  hyper

SEQ ID NO: 105010 - DNA, 1072 bp, Homo sapiens; identical to SEQ ID NO: 36805
  chr1:215255054-215256126
  hyper

SEQ ID NO: 105011 - DNA, 677 bp, Homo sapiens; identical to SEQ ID NO: 1112
  chr1:215256195-215256872
  hyper

SEQ ID NO: 105012 - DNA, 40 bp, Homo sapiens; identical to SEQ ID NO: 1113
  chr1:215256953-215256993
  hyper

SEQ ID NO: 105013 - DNA, 352 bp, Homo sapiens
  chr1:215740686-215741038
  hyper
tattttgtcccgaacggtgacccctcctcccaggcaggctgcggcggcgtcggtggcagcggagcacggagaagaggcccgggcggcccggcggcctggaggccgcgaaaggtggaggccgggccgcccttgtgcaccgcaggattgacccgggaaggggcagaagctagcgagccccgcccggccgccgggaaggtgggggaagccccgtgcaccccccgccctccggccgccgccgccccgctggccctgcagccgtcgccgctgcctcgggctacagccccgggctcggcggtcccggctggggaaggagggcggcgagcgcgtccggagccgccggagatggcgggag

SEQ ID NO: 105014 - DNA, 30 bp, Homo sapiens
  chr1:215741828-215741858
  hyper
cccccccccccccccgccccttctgtgcct

SEQ ID NO: 105015 - DNA, 32 bp, Homo sapiens; identical to SEQ ID NO: 36809
  chr1:215744969-215745001
  hyper

SEQ ID NO: 105016 - DNA, 620 bp, Homo sapiens; identical to SEQ ID NO: 36810
  chr1:216774193-216774813
  hyper

SEQ ID NO: 105017 - DNA, 513 bp, Homo sapiens
  chr1:216896524-216897037
  hyper
gtccgcccccacccccgcacccccacgacgagtttaaaaaggaaagaaaaaaggtacctactcttcctcgtagtgcagggaaaaagattcaggaaggcaaagttctaccgaatccatgtgcgaccggcaaccattatttgtgcaccccagctataaatcaaagtttccttgacagagcacagtgcaattaacacaaatgttctcctagtgacaagcctataggcacagccagttgggaccaaagctctcacactctcctaatcaaggacttaaagccccgattggagcttattaatatgaagtagggctttacatatgcagtcccaccggcccagccgcgcagccgattggggggcctctgcccaatcaggagggaggcgacgggaggctgcacggagcgagaggagccaggcaggtaggcagggtgcagagagccgaagggggctggaaactgagagtgggcagagaaaaagggagcggagaagggagcgattgaaacgctcccaatacaca

SEQ ID NO: 105018 - DNA, 33 bp, Homo sapiens
  chr1:216897275-216897308
  hyper
tattacaccgggggccgcggcttatttggtgct

SEQ ID NO: 105019 - DNA, 645 bp, Homo sapiens
  chr1:217262877-217263522
  hyper
atcaggtgagtcgtcggggattttaaagaagccgaagccggtttctttggctatgaaagtctacaaaacccccatgcaggaacattgcacatcttacacacgcctcctttaactgggctcccgcgacctcggcaggcgagggggtgctggccggccctccggtggcaagggcacggccccccgctctgcccccgcgggcgcggggccggcctggcacccggggtccgcgtcccgagcggctgtgcactcaccgagccgggctgcgaggggcagaggggcgcccacggctagccggagcgccaaggcgcctcccttttctcttggtagcgtcggtccgcactccctgtgacccaggacgtcatgatgcctgtctgttttctcaatgataacttggcagaagaagagagaggctgccaggttctcctcgggtggttacgtggtatgtgcacgattctgtttgcatgcgtttctctttttaaaaataaatatctatatttttctaaaaaaaattcccggcactgtcatgatttgattgcattattgcgtttgcataattgacgcctctgggtgtgtatatatgtgtgcatatgcgtgtgatttttttcccctttaaatcctgctgctcctgccgccgccgcagccgct

SEQ ID NO: 105020 - DNA, 1886 bp, Homo sapiens
  chr1:217307427-217309313
  hyper
cagatgcgggcgccccgggtcctgtctgaaccagactgctgctgcaatgtgagctcgggagggaactggggatgcgagctgggaacagaccgcgctccagcccccatggtttgtgacggggaacttcgggcgcacacaccctggggagtaggtctcctccaaatggcaccgacacagactggcgctggatcttctctccctgctaatctatccgcaaagaccgcctgggcacttttgggggaatgtggccaaaaggggactctaactgcgacatctacagaggaaggagaaactggtggtgcctaagaagttgatctcgatgcgcgcagtgagggcacagggccctgcgcgccagagaagcgaagccagcggtctccacttacttgttcttaattcctccctacccccgctctggcctctcattttcggcctcatggatccaagacccgaggttattttcagtcacaactttctccacaccccgtacccccaaaagtgtacctcagctcaggcgggaaagggcactttgacccgccgtgcgcgagtttccagccagccgctgcgcgcctgagagaaagagcgcctggctgcggctccgagcgcacagctcttccccgcgtgtttggcgcggctacgtttctcttgctccgggctgaggctcgaggaacctcgccagcctgctgtggtcccgtccccttgacgtttgatttctaaaaccgcatagtctgcggctctggcatttagaaaaagaggacaaggtcaaggcctgtggaccgaccgccgcgatccgcttgcacctttgctctcacagcaagcgagtcctggccgcagccgctggaaaaaggtgccgcagcgcccagtttacctggaattcagggacctgaccctgactctatttccggctagtcccagcctctccttcctctcctttccccgctttccgcccagggcggttctgagattttgattaagagagatctgtccccgcaccgcagagggatggtgccaaatggccaggcttcctgggcactgcgtcctcattcccaggtcagagctactgcgaaaggaaaggtctccatctggacgcacctcgtcccctcccccagcgcgcggggcagccctctagggccagctcgggcacgcgcttttccccctcctcaccccctgctccgcccagccccgtacagttttattctttatgaaacacacacgcccaccccgcctcccacgtaaaggccagtcttgactcattttgcgcccagatgcaaactcagctggaagttgagggtagggccaaagaggtgaggggagggtaagagatacagcgaaatagagaatgagaagggagaaatcaaagggggaggagggacaagagaaagcgtgtggagctggaggttgaaggggcagaggcggaggccaaggactgagcaaggggcgcgcgcgcggcggcggcggcggcggtgttggcggcggcggcggcagggcggctgcacctcctcccagccttttcgcccgcgcgcgcgaagcggggtcaggcgcggacccacattcaccgactgcagaactgttttctttgccactaccagagggtgtttcggggctccccacggtcttctccctggctgcttgccgcgtgagagcagaaataaaacaaaacaaatcacgggacacgacggagtcgggccgctgggcgcctccgggatcgctctcactttgcactcggaagcgggcgcggggattcgggctgccgcgtgtagcctataaatagcaaactttttgaccgaagcaactaacaaataagaggagcaggcgtgcattttgctcaagatccccccttttctggggacgaccttactcccacccccgccccctttgcagtagttgtg

SEQ ID NO: 105021 - DNA, 978 bp, Homo sapiens
  chr1:217310808-217311786
  hyper
cccccgcgaagaccgcgcctggggctcgagagctgacggactgccctttccaggctgccccaagggcctgggaggctgcggtaccgcctgtcggtcccggtcccgagcgcgcttgcttaagagttctcaaagacggggttggaagcagtacagacgtccccggttatcgctgccgggcttgtgcgccccacgccacctacctgtccggccttcccgctccaattgctgacccgtttagggagcccggcctggagcccgccgcctccagaggagcccgccctcgccctcccccgcgcgcctccgctctctgggacgcctggccaaatgcggggcggtctctcgcgggccattggcttgggccaccgttccgagtcagctcctaggatttccccaggctttgcggcccctttgtgggtctaggccagcgcctcaccttgcaccctattccacctccagtccccttaggtgcccccgcatccctcctccagagtccaggctttgaaactgcagcaactccgcaaagaaagcctttgggaaaacctcctagagggccgaatgtggaggtcgggtgggtgggtgggtgggtactcgcggcatttctcaaggttctgggtgttcgtaactaggggaacaggccctatgggggcagaaatgacagacgcacgaacagcgtctctgtggctgtctgcagcgcgaggttcacgtctattgttttatgcctccgggagagctaccccgcgtgatagatcttttcagatccatcactggaagaaaaaccctggtgataacgattatctcccgctcgcgctatctcgccatcgccccaattcatctccctctggctctagccccttggggagacgaggagggcgaggcgctggcaggaggaccggccaagccgctgtcctcggatggagaggagagggagaggcacgaggccacctcattcgtccctttccgcttcgggctggggagaca

SEQ ID NO: 105022 - DNA, 17 bp, Homo sapiens
  chr1:217313025-217313042
  hyper
cccctctgcaattgccg

SEQ ID NO: 105023 - DNA, 592 bp, Homo sapiens
  chr1:217313068-217313660
  hyper
gcagaggccggggacttcgggcgcttgctaggtcaccgcgccgggcgaccgccgctcgccggctatttaatatacatggggtgggaacggagcgaagcggatctccgagcctgcctgtcctgcagaaaaaaaaaatcaatttgctatttatttttgaaatatatagatttagggaatgttttttccagctcgacccccttcaagaatggcggcccacatttaattacgtcttttaatgacttttcccttatttgccatcgctattccacgttaagggcgggggcggggtggagtttctttggggggttttcaattctggtatcttcaaaaagatttgccttatgtgttaattgcatgctgttaagcacatctgggactgtgtgctgaccaactcagaccaacttttaattaacacattgacccggagaagaagcagccgcccagcctccccctctaaatatgtatattagccacgcggaggcggctcggcccgcgccgccagatgcaagcaaggaattgcctgcgtcgaggggcgggagggggtgcaaattgcaacggttctctctctttctgtgagcgttttttctcgcct

SEQ ID NO: 105024 - DNA, 30 bp, Homo sapiens; identical to SEQ ID NO: 36820
  chr1:217804414-217804444
  hyper

SEQ ID NO: 105025 - DNA, 1640 bp, Homo sapiens
  chr1:218337470-218339110
  hyper
tgtcctaggacaatcggatttcaccgggtaacgtatatgcaaacagacacgtcccgtttatttcattgtttgcactgcggagactctccgccgctctccacgcctttgttgacctaccgccagcaaagttgtgtggttataaatagatagaggcagctgattaagaagcggggggagtgactttctctgggctcttacggatcaatcaccgctaaggggatgcaggttgaggggaaggaagaaagtaaatcgcggggcagtttgactaagtgaaacccaattccttcgccccaaagctgtggtggccagacgtgcgcgaccctctagacccaaaacagttttagtcagcaacgggtcatcagcaggaccgagaagactgggtgggaggtctggccggtccgaaatagggaagaggtgcgggctcatcaccgaggcggtagggctcggcttatggtctagagccttgaggcgctcccgcgtgagccccgctgcttccagtccgccctcgcctggcccggcgcgggtcgctccctcctccccgtcctgttccgcactttacccagcaggggtcccaggtcgagcagggccaaccctgctcgcgcagcgccggacccctccccgctgcccggggtgcggcggcttccctccgcccaaacggggggtgtctcctccatcacccctgccgcggcttcccagtcggagtcgcgctgcggggcgagggaggctcgctcctccgcggccggggcctgggggtgccagtgcgcccccgagtgagcgggtagggaagccgaagagccgccgacccgctgcgcgccctccagtcccgggcggcgccgggacccagagcggccccagcccgcgccccagcggggacgcgaacggcgtctcgggacggcacctcgccggggccttgccctgtcccgccgcgtcgcggcctctccgcaccccacgtcccgggagccgaccgggagactctcacggcggagttccacagacctcgttaggttaaaggaacctcgccttgccccccactaatcggctagagagggaggccggcgaaacaaaagccgtagaggaaaattaagcgacttccccctcggcggggaacttggaggtgggggagcggggagcggcgcggggcgcaaggagaaggaagtgctgagctgggttgccgacgaaccccgggcagggggaggtggggggctgcggcagaagaaagacaaacatctggggatcggaccatatgccggagctttgtcttgtccttcaaagttcggctgcccttgaagtgatttgtcaggcggcccacgggtgacagggaggatgtgcagcggggagcgggggcgggacatgccggggggagcggagagggctagaagagaggggaggaaggggggacgccaacaagagggggagcaaagtgaccccgccgcccgaggaacggtagaaaccgggatcgcggaggtgcgagcccgagcccgggagcggagcgcttcccggggagacgccaagacggcgagaaaggaggagcgggaacgcagaggttaagcggagggaaggccgaggagaaacagccagaggacgggaaggaggaaatagacggggagaagaaactgaagattagtcgttgaggtgtatta

SEQ ID NO: 105026 - DNA, 30 bp, Homo sapiens; identical to SEQ ID NO: 36823
  chr1:218458481-218458511
  hyper

SEQ ID NO: 105027 - DNA, 30 bp, Homo sapiens; identical to SEQ ID NO: 36824
  chr1:218458854-218458884
  hyper

SEQ ID NO: 105028 - DNA, 490 bp, Homo sapiens
  chr1:218519309-218519799
  hyper
cctgcggcacccgaccgagtaccgagcgccctgcgaagcgcaccctcctccccgcggtgcgctgggctcgcccccagcgcgcgcacacgcacacacacacacacacacacacacgcacgcacacacgtgtgcgcttctctgctccggagctgctgctgctcctgctctcagcgccgcagtggaaggcaggaccgaaccgctccttctttaaatatataaatttcagcccaggtcagcctcggcggcccccctcaccgcgctcccggcgcccctcccgtcagttcgccagctgccagccccgggaccttttcatctcttcccttttggccggaggagccgagttcagatccgccactccgcacccgagactgacacactgaactccacttcctcctcttaaatttatttctacttaatagccactcgtctctttttttccccatctcattgctccaagaatttttttcttcttactcgccaaagtcagggt

SEQ ID NO: 105029 - DNA, 20 bp, Homo sapiens
  chr1:218520042-218520062
  hyper
aatgcactactgtgtgctga

SEQ ID NO: 105030 - DNA, 196 bp, Homo sapiens
  chr1:218520095-218520291
  hyper
cgctcagcctgtctacctgcagcacactcgatatggaccagttcatgcgcaagaggatcgaggcgatccgcgggcagatcctgagcaagctgaagctcaccagtcccccagaagactatcctgagcccgaggaagtccccccggaggtgatttccatctacaacagcaccagggacttgctccaggagaaggcgag

SEQ ID NO: 105031 - DNA, 217 bp, Homo sapiens
  chr1:218520309-218520526
  hyper
cgagcgcgagaggagcgacgaagagtactacgccaaggaggtttacaaaatagacatgccgcccttcttcccctccgaaagtaagtacttattttgacttccatcccctgaggtttagctctgcccggagctctcaaaaccgcagcagctcccgggatcgcccttccctctcgcggttcccgttcgctcttttcccgttctcctgtccttcacccca

SEQ ID NO: 105032 - DNA, 109 bp, Homo sapiens
  chr1:218520764-218520873
  hyper
ctttgctccgattggcgtggagcgcgccgaactggtgcacgaagggttaaaaaaagtgtctcaaaactagcctctccggaaggcgccccctttccgtgctgacctatca

SEQ ID NO: 105033 - DNA, 600 bp, Homo sapiens; identical to SEQ ID NO: 1126
  chr1:219346992-219347592
  hyper

SEQ ID NO: 105034 - DNA, 167 bp, Homo sapiens; identical to SEQ ID NO: 1127
  chr1:220101043-220101210
  hyper

SEQ ID NO: 105035 - DNA, 242 bp, Homo sapiens; identical to SEQ ID NO: 1128
  chr1:220101370-220101612
  hyper

SEQ ID NO: 105036 - DNA, 129 bp, Homo sapiens; identical to SEQ ID NO: 1129
  chr1:220101674-220101803
  hyper

SEQ ID NO: 105037 - DNA, 303 bp, Homo sapiens; identical to SEQ ID NO: 36832
  chr1:220101864-220102167
  hyper

SEQ ID NO: 105038 - DNA, 30 bp, Homo sapiens
  chr1:220219707-220219737
  hyper
acggtcagagagagcgtcgccatctccacc

SEQ ID NO: 105039 - DNA, 30 bp, Homo sapiens
  chr1:220220021-220220051
  hyper
tggacgggactttacgacacttcgtcaagt

SEQ ID NO: 105040 - DNA, 30 bp, Homo sapiens
  chr1:220263162-220263192
  hyper
agctactgagcatgcgggaaactgcgcgca

SEQ ID NO: 105041 - DNA, 335 bp, Homo sapiens
  chr1:220267775-220268110
  hyper
tgaagctgctgggccgccagcagccggacacggagctggagatccagcaggtacgggccccgcctcggcgcggggcctccagagaggcccgatccggccgcgggcaccgggcgctcgcaggcgccacacctctaggctccacgccggtgcgggtgggcgggggtgtgaccagattggtggaattcgtctgcttcgcacagattttgtgggctgaaaacctaagtgaagaaatctctagatgagcccctcctttgtaccaggttctggagcgggacattaaggggtcactagcgatgcccagttaccagcatgtatcgcacgtatgtcccatgtct

SEQ ID NO: 105042 - DNA, 30 bp, Homo sapiens
  chr1:220445964-220445994
  hyper
ttgtgtgtctacgccgaggcatgaaccctt

SEQ ID NO: 105043 - DNA, 354 bp, Homo sapiens; identical to SEQ ID NO: 36834
  chr1:220700604-220700958
  hyper

SEQ ID NO: 105044 - DNA, 966 bp, Homo sapiens
  chr1:220701526-220702492
  hyper
tgctccgcgcgcagccggctcgggccgctcctcctgactgaggcgcggcggcggcggtggctgtgaccgcgcggaccgagccgagacattcgcgccgggggatcgggcgccgccgccgctgggccccgggcgcgtggatgcggctgggtcgggcggcgccgtacacctgaggcggagaacggggcgcggcgcgggtgacgctgtcagggccgcggttcctgacgcccaggcgctcgccaggacgagccaggcagtgatttgaggcaccggcttcaccttcacccatggtccggagagcctagcggggctcgccaccgcctcccggctccccttccacgcctcatcctgccagcctcgccgccccgccagcgccgggcaaccgcctcgcccgaagccctccctcgttactgtccgcataccccggcggcgccgccgcgggaagcggctccccctcctcttcctccgcgtcctcttccctctttcccccgccggggccgcttgttgcaccgccccgcggcctgcgggagccgctcgccccggccttgtgctcgcgtccgcacccctttcctgtcgccccccggggcccgcaccacagcccggccggcgagaccccggccagaccccgctgcccgcacaaaatgtcggcccggacgccattgccgacggtgaacgagcgggacacggaaaatgtgagtaaccggagcctccctcgggagcagtgggggcgagaccctcctctgatccccacttcacccgcgcttgggccgtcccccgtgcctcggcgcggccacccgcggcagggtctccacctggagcccggcgtgaccctcacccactgctcagccctattcttcattccaaccccatttcgcttgtttcccctcaagggtgagggtagggaaccgtaagtggcgccctctcgctcggaggtggtcctccaggggcggatggggtgatggagggcag

SEQ ID NO: 105045 - DNA, 737 bp, Homo sapiens
  chr1:220863498-220864235
  hyper
tgtgcagtgcgcgccgtagtctgcacagtttggccggcaggtgggatgaagggcggggctggcggagcgcgcccgccgcctggtaggccagttcggagcggagccaacgctatcccgggccccacggccagggggcgctgcggcccccccaatcccccgccccgtccgggctggggcggaggagcgggcggggaccaaaggttggtgtctttgcgctcggaccttcgccagaggggccgggacatcatgacggtgggagccaggctccgaagcaaggcggagagcagcctcctgcgccgcgggccccgagggcgagggcgaaccgagggggacgaggaggcggccgccatcctggagcacctggagtacgcggacgaggcggaggcggcggccgagagcgggacgagcgcggcggacgagcggggcccggggacccggggcgcgcggagggtgcacttcgccctcctgcccgagcgctacgagccactggaggagccggcgccgagcgagcagcccaggaagaggtaccggaggaagctgaagaagtacggcaaggtaggggccctgcgccaccactgcccggggggcgcgggtgtggtgtcccgcgggggagcgggagccgggtccttaccatcgactcacccagtttctccgggctgcacctgcgacccctccgcccccgctcccattccctcgccggagggaagccgcgagttgcgagtcgtgatagaaactta

SEQ ID NO: 105046 - DNA, 897 bp, Homo sapiens
  chr1:220921290-220922187
  hyper
cacgctagagttcctcgtctttgagtgcagaggtttagactgtgtctttgtgtgcagaaagtcctgcagttctcacagcgacctgccagaaaaagtcgttcccaaatgtttgtaaatcctccgttgggcaacccgccttcacgttctgcggtgatcttgtcgagcgactaagcgtgcagtattagcagagaagggggtggcagagtgctggcgctgaaggtcatgttgcatgggtaactgtcgtgttgtaggggcggggaagagggaggagacactgaccaccccagaggccgccccattagctcgcttgctttgggcggcgtcgctcccacggcgcccagggtacccccgccgctgtctgcctgtcttcctccattaccgcgcaggcttggtcaccgcattaaggcattcccgctctccgcggaactgctctgccgtctcggcggtgaaagtgtgagagggtccgtagttgggtcaactttgactcctctcgcctgcccggatccttaagggcctcctcgtcctcccggtctccggtcgctgccgggtctgtgcgccggtccgcgcccgccctcgctctgccatgggcgcttccagctcctccgcgctggcccgcctcggcctcccagcccggccctggcccaggtggctcggggtcgccgcgctaggactggccgccgtggccctggggactgtcgcctggcgccgcgcatggcccaggcggcgccggcggctgcagcaggtgggcaccgtggcgaagctctggatctacccggtgaaatcctgcaaaggggtgccggtgagcgaggctgagtgcacggccatggggctgcgcagcggcaacctgcgggacaggtacagcacagcgcgggcgcggggcagcgcggagcctgcctg

SEQ ID NO: 105047 - DNA, 84 bp, Homo sapiens
  chr1:220950172-220950256
  hyper
gccagggtccattcagcacagcgcggctgggtcggcttccattcctgggtccgcagcgccctcgtgtggtaggtgcccagcctt

SEQ ID NO: 105048 - DNA, 568 bp, Homo sapiens
  chr1:220959915-220960483
  hyper
ctaatttcaaaatcacgctttgtcctgcaaatgttgtatattgtttattttaggtcaaataaccccataaatacgtaagtaaataaattggtcacttgcagcgatcgtggggtgggggagggcacagcgccctgcagcgcaggcgacggaaggttgcagaggcagtggggcgccgaccaagtggaagctgagccaccacctcccactccccgcgccgccccccagaaggacgcactgctctgattggcccggaagggttcaggagctgcccagcctttgggctcggggccaaaggccgcaccttcccccagcggccccgggcgaccagcgcgctccggccttgccgccgccacctcgcggagaagccagccatgggcgccgccggctcctccgcgctggcgcgctttgtcctcctcgcgcaatcccggcccgggtggctcggggttgccgcgctgggcctgaccgcggtggcgctgggggctgtcgcctggcgccgcgcatggcccacgcggcgccggcggctgctgcagcaggtgggcacagtggcgcagctctggatctaccctgt

SEQ ID NO: 105049 - DNA, 1325 bp, Homo sapiens
  chr1:221051884-221053209
  hyper
aaacaacgaaccccacgtgatccggagatgtggtggaggggtgaggctaacatttcctacaacctcctgcaaaggatggaagcgcgtgccgctctcccgggtttcgggaggcagcctgttttgtagcctctgaggctccggggaaaggtttggctgcgtctaagagagacgtttggagccatccgtcttattttgtttgaaaagtcactcgttcaatttgtcactgtgtgacagctcagaataaaaccaatttgcggccgcccctcctcctcgcttcccggaggatctcctgggaggcacgaggcggacgcggtgctgagttgggccgggactcagggcggcaacatttgggcaagggcccaggaaagatgaggggctttgccgaggacacggactcctggaataaaagcagaatgaggtcaagagaagggaagcaaaggggccaaagcgcgctccgctctccaccgggaggcgggctttgcagagccctaaagagtgagattaccgtcccttccccacgcccccaactcgccccgggtgacaagcgcttcaggaaagctcctgtgatcaaccctccttgccccgtggcggttcggagctgcagaagttagaagagagtcagagccctccggagcggctgcctggcccctacgcagagtagcaagaagcactgcgatgtgcgctactaagcccacgcggccgcagcaaaaactttggcgtggccggggcgtggctagggtccggccaggcccccttgttcctaattcccctccactccccgctcccattggtcacgaggatgaccaatgagcgctcggatcgaggtcctaccccgggcctgactcgaaagctcctgccaaaactttgggagtttttagagacgagtttttttttttttctattacttttccccccccctaactaacggactattattgttgttgttttaaatttagctcttagggcttagctatttgggttttcttgcggtgtccggctcccgtctccctggctcccccgcccgccctgcggccccagcgcccctcgctctcatccagcccgcgaggagtgcgggcgccgcgccgcctttaaagcgaggccagggagcgaggcggtgaccggccgagatccggccctcgcctcctccctcggtggcgctagggctcccggcctctcttcctcagtgcgggcggagaagcgaaagcggatcgtcctcggctgccgccgccttctccgggactcgcgcgcccctccccgcgcgcccacccacccagtccggctggactgcggcagccgcgcggctcaccccggcaggatgttcgcag

SEQ ID NO: 105050 - DNA, 503 bp, Homo sapiens
  chr1:221053255-221053758
  hyper
cgcttactgctcctcggccggcccaggcggctgctccttccccttggaccccgccgccgtcaaaaagccctccttctgcatcgcagacattctgcacgccggcgtgggggatctgggggcggccccggagggcctggcaggggcctcggccgccgccctcaccgcgcacttgggctcggttcacccgcacgcctctttccaagcggcggccagatccccgcttcgacccaccccagtggtggcgccctccgaagtcccggctggcttcccgcagcggctgtctccgctctcagccgcctaccaccaccatcacccgcaacaacaacagcagcagcaacagccgcagcagcaacagcctccgcctccgccccgggctggcgccctgcagcccccggcctcggggacgcgagtggttccgaacccccaccacagtggctctgccccggccccctccagcaaagacctcaaatttggaattgaccgcattttatctgcagaatttg

SEQ ID NO: 105051 - DNA, 31 bp, Homo sapiens; identical to SEQ ID NO: 1138
  chr1:221064929-221064960
  hyper

SEQ ID NO: 105052 - DNA, 30 bp, Homo sapiens; identical to SEQ ID NO: 1139
  chr1:221118798-221118828
  hyper

SEQ ID NO: 105053 - DNA, 230 bp, Homo sapiens
  chr1:221914260-221914490
  hyper
atgcacatagcaaagacgccaaaccccacgccaagagacgctcacctaaacgaactttaagagctatcaggaaaaatgccatctatcatccgtctacacacgaccgtcaccattctcatccgtctacacacgaccgtcaccattctctgacacagaaccaaagtgtcacaggcggaatccacactcacgcgcgcacacggggcacgcacccatcacgtcggcagatctcc

SEQ ID NO: 105054 - DNA, 30 bp, Homo sapiens; identical to SEQ ID NO: 1140
  chr1:221915460-221915490
  hyper

SEQ ID NO: 105055 - DNA, 30 bp, Homo sapiens
  chr1:221915779-221915809
  hyper
gtcagcgggctggacgcgctgctccgctaa

SEQ ID NO: 105056 - DNA, 30 bp, Homo sapiens
  chr1:221916647-221916677
  hyper
gaccggcagcccggcgcttctggaacagcc

SEQ ID NO: 105057 - DNA, 30 bp, Homo sapiens; identical to SEQ ID NO: 36845
  chr1:222045430-222045460
  hyper

SEQ ID NO: 105058 - DNA, 30 bp, Homo sapiens; identical to SEQ ID NO: 36846
  chr1:222164932-222164962
  hyper

SEQ ID NO: 105059 - DNA, 30 bp, Homo sapiens; identical to SEQ ID NO: 36847
  chr1:222639009-222639039
  hyper

SEQ ID NO: 105060 - DNA, 209 bp, Homo sapiens
  chr1:222792067-222792276
  hyper
aagggctcggtgggcgttttcccagtggcaggttgatggtggggtttgtttggaaaggctccctggcgctgctcctttgcccttctgctttattgggatttgggcttgtaccgccttttgaacaggaattgggagtttaggtttgggacgagtctggagtccaagcactcattgtattccgaggtctctgccccgactttgatcaatcc

SEQ ID NO: 105061 - DNA, 30 bp, Homo sapiens; identical to SEQ ID NO: 36848
  chr1:222817453-222817483
  hyper

SEQ ID NO: 105062 - DNA, 30 bp, Homo sapiens
  chr1:222884902-222884932
  hyper
cccagaaaccgaaacgaaatcgaggtggaa

SEQ ID NO: 105063 - DNA, 30 bp, Homo sapiens
  chr1:222885911-222885941
  hyper
ccgagggccgccatcgctattgcggcattc

SEQ ID NO: 105064 - DNA, 30 bp, Homo sapiens; identical to SEQ ID NO: 1141
  chr1:222886475-222886505
  hyper

SEQ ID NO: 105065 - DNA, 30 bp, Homo sapiens
  chr1:222887004-222887034
  hyper
ctgaagtaaagattcgcaaaacttcagaca

SEQ ID NO: 105066 - DNA, 223 bp, Homo sapiens
  chr1:223254691-223254914
  hyper
caggctcacagacccgtgtcacctctgacgtcaagtggcagggacacgctaaaagcctttgagtctattgattgagaaggctccagaaggttttggagcgctggaagaaggccaggcctggaatttacgcgtcggcctcttggtgtctcctcccgctgaagggagtaaatccaggcaggtctggggctgccgggcgggcacctggggcggaggagcctcgagg

SEQ ID NO: 105067 - DNA, 75 bp, Homo sapiens
  chr1:223297158-223297233
  hyper
agagttcaagaacggcgtccacgctgttgaggttgccgctgcaaaggcgcccgaccccagcggaggagtgcgcca

SEQ ID NO: 105068 - DNA, 328 bp, Homo sapiens
  chr1:223302694-223303022
  hyper
cccaccggttcaccacgttgctcttgcccctagcccaccaggccctggccctcagcagcggacctgccgcggtttctggactaggaaggccctgctcccgaccgacccggagcgcgctgctgccctctaccggtcatccgtgcggccggacaccgtgtcaggcccgcgaggagggctctgccgcagtcccggggaacagcacccagcagcgccactgggagaggaaactggggtcagggaggtgtgactgggccccaggcagtcacactcaggccaacaaggtcagggagggagggcagctcactcgtgcaaacgtgagtgcaaaatg

SEQ ID NO: 105069 - DNA, 30 bp, Homo sapiens
  chr1:223306712-223306742
  hyper
gctcggaacctgaaacggcccgcctgagac

SEQ ID NO: 105070 - DNA, 199 bp, Homo sapiens
  chr1:223307127-223307326
  hyper
gggacagcttgggtgcgacttctgatttcaggagatgcgctttccctagagaccagcagagggcgcaaaaggggcagggaccgagggggaggagcccgcggagccgcggccggagagtcgagcggggcgcggggagctgcaagcgtccctgagctgagctccgctgggaagttcctatcgcttgcgcagtagagtgcat

SEQ ID NO: 105071 - DNA, 30 bp, Homo sapiens
  chr1:223316653-223316683
  hyper
cacctgccaggccacgcccccgtctcggcc

SEQ ID NO: 105072 - DNA, 1380 bp, Homo sapiens; identical to SEQ ID NO: 36853
  chr1:223537347-223538727
  hyper

SEQ ID NO: 105073 - DNA, 38 bp, Homo sapiens; identical to SEQ ID NO: 1145
  chr1:223674887-223674925
  hyper

SEQ ID NO: 105074 - DNA, 776 bp, Homo sapiens; identical to SEQ ID NO: 36855
  chr1:223899910-223900686
  hyper

SEQ ID NO: 105075 - DNA, 224 bp, Homo sapiens
  chr1:223936528-223936752
  hyper
tttctctggtattctcggcgttcaagcatttgaacggggtaggaaaggttctccaagtgcaagaaagcgcagccctgagcctcccaccccaggcctcggccgctgcgctagtgcgtccggcggtcccgcccggcagtaggacagagggagcgagggagtccgggaggaagggagagcgggtgcggccagtctgacggttgctgtgtttgcagatcaccagcgcc

SEQ ID NO: 105076 - DNA, 203 bp, Homo sapiens
  chr1:223936995-223937198
  hyper
cgggcgccgggtgcgccgcgctgccacctggtggccgcagtggccggcgccaggggccctggttttacttgttttagatgttaccctgttttacagttacaaccttactattttgataagctaaaaataataaaacaatgcatcttcatagtgttttatactctataaggtgctttctcttttgatctcgtaaaagtattcgt

SEQ ID NO: 105077 - DNA, 30 bp, Homo sapiens
  chr1:224033937-224033967
  hyper
gtagtgaatggcaccgagccgccccagggc

SEQ ID NO: 105078 - DNA, 30 bp, Homo sapiens
  chr1:224301686-224301716
  hyper
tgtgagtctctctccgcctgttatcccaca

SEQ ID NO: 105079 - DNA, 54 bp, Homo sapiens
  chr1:224301980-224302034
  hyper
ccccgcgctggctccggaccagctgcctcaaaacaacacgcttgtggcgctgcc

SEQ ID NO: 105080 - DNA, 151 bp, Homo sapiens
  chr1:224302335-224302486
  hyper
ggctccttgccccccgcccggaagcgggccctctacgggaggggtagcggagttggtcttcccaccttccgcctggcccgagagtagacccggagaggtcatgtcgcctgccttttgtatgccgcttccagcccccggcctgggtttgggg

SEQ ID NO: 105081 - DNA, 30 bp, Homo sapiens
  chr1:224371014-224371044
  hyper
agtctgcaagccaccgctgtcgccatgggg

SEQ ID NO: 105082 - DNA, 30 bp, Homo sapiens
  chr1:224371475-224371505
  hyper
tgccctcaggtgggcgccctttcctctcac

SEQ ID NO: 105083 - DNA, 106 bp, Homo sapiens
  chr1:224481040-224481146
  hyper
gattacaggcgtgagccaccgtgcctggcccagaacatttcttaactagatttccactctaccacctcaacagtgcttcctgagatagtctcgcttatgaagttat

SEQ ID NO: 105084 - DNA, 30 bp, Homo sapiens; identical to SEQ ID NO: 36860
  chr1:224518264-224518294
  hyper

SEQ ID NO: 105085 - DNA, 169 bp, Homo sapiens
  chr1:224528767-224528936
  hyper
cgtctctgtggagcgcggcaccgccttggatccagctccacctcctccccgtgccctccccacgaggcctgggagcgggtcctgcccggctgcgcaagggtgggggtcgcgcagttagctgcctttgggatgcagagcacaggggacccaccgccgccactgctgctcc

SEQ ID NO: 105086 - DNA, 30 bp, Homo sapiens
  chr1:224544749-224544779
  hyper
gccagttgggcacccgggcaggtgtgtggg

SEQ ID NO: 105087 - DNA, 30 bp, Homo sapiens
  chr1:224621846-224621876
  hyper
ggggacagcagcggcggcgggaggggcagc

SEQ ID NO: 105088 - DNA, 205 bp, Homo sapiens; identical to SEQ ID NO: 36861
  chr1:224622415-224622620
  hyper

SEQ ID NO: 105089 - DNA, 35 bp, Homo sapiens; identical to SEQ ID NO: 1151
  chr1:224622765-224622800
  hyper

SEQ ID NO: 105090 - DNA, 30 bp, Homo sapiens; identical to SEQ ID NO: 36863
  chr1:224622840-224622870
  hyper

SEQ ID NO: 105091 - DNA, 251 bp, Homo sapiens; identical to SEQ ID NO: 1152
  chr1:224691179-224691430
  hyper

SEQ ID NO: 105092 - DNA, 842 bp, Homo sapiens
  chr1:224803453-224804295
  hyper
gatgcaacggaaggacgttaatggagaattttgcagggtctgggagcagagcagtaaacgcagccctaagcactgagtatgctacagtttggtaaaatccatccaagcagctttgggatccaaggcttgcactgtatccccaaccaacactaggcaacgccccaagtccccacacttcccactccgataggcgaaactgcaagaaccgggaggggcggctgcggcgtttaggcgcgaggcacacaccatacccttccgcagcttcccacctcctccagacgcacgtgtttaaagagtccctgctccaaccggtcccgccccacctccgctcggcctccagccctgcttgtactgctggcttcaagtttcctccgagaggcgggcgtgcacagctgcagtggcggcggcagcggccaccaagcgcccggcggcgcttcgccacccacctttcctcagcccccggcgctgcagtctccgcccgccggggagggcgcgctcagcggaacaggagtcgagggtggggcgccgagaggagggaatcccgggtcgcaccgctacagttctcgcagtggcaaaggcggcggcggcggcggcggcagcggcagcagcaggtggagcgagctacagcgtttggcctgaaacccactgctgcagccacccgggctggagttggcccgttgggtggagccagtgctcgccccggtccgacccccggtttccgggacacttgggttgcggaggccggctggccggagtcacggttggggacgggcgcgcctcggagcgcacggctgcgctggaagccgcgtctggggcgcaggaccaacgggacctacctcctc

SEQ ID NO: 105093 - DNA, 291 bp, Homo sapiens; identical to SEQ ID NO: 1154
  chr1:224804395-224804686
  hyper

SEQ ID NO: 105094 - DNA, 269 bp, Homo sapiens; identical to SEQ ID NO: 1155
  chr1:224804846-224805115
  hyper

SEQ ID NO: 105095 - DNA, 554 bp, Homo sapiens
  chr1:224805197-224805751
  hyper
cgtcccgggtcccgggcgccggggagtggcggctacaaccacaactaaccccttcctctcccgccccgtcctctcctgccggcgggaggcgaaggagaagcgccgccgtcggtcccggcaattagtcaagtagctataataactaaacatttaaaatgtcagcatctgtggtgggttgcatttagatataattggagacaaagtggaaacacgacgggagcgccttgtaagaggtagggagaagccgagcccacggagaggaaggagaccaggcgatgggggtcgaagtggaaggcggtgggggaaaggcgagaaggagaagagcaaggaggcgagggagactgggaagggcaggcatcattaaggccatggaggaaagtcacgaagagagaccgtggagagcgacgacggtgtcctccatctgccctcttggcgtctgaagtccgactcctgaagaccccctgcaggtggcgaacctccgctaggcccccagcgtccccagcccacacaagcttcctgtcacccttcccggggctacgccaggtggagggcag

SEQ ID NO: 105096 - DNA, 639 bp, Homo sapiens; identical to SEQ ID NO: 36870
  chr1:225117199-225117838
  hyper

SEQ ID NO: 105097 - DNA, 21 bp, Homo sapiens
  chr1:225118300-225118321
  hyper
accatacttttttttttgaga

SEQ ID NO: 105098 - DNA, 957 bp, Homo sapiens
  chr1:225614335-225615292
  hyper
acttctccaaattcatctaaacgtggcatagagcaagacgctcgaatgacgttggacagcttccttttcacacctgagccccggtagccccactaggcaaaatgcaaacaggaaccccgggccttgctccgcgccctttgcttcatgaagcaacagaaaggccaccttcctggctgtaaaggcagaagcgccttcttccccataaacatccttgggcagctcatcattcccctcctgctcgttcttctccctcttcccaggcagcctgagaaacaaaacttaaactggacttgttgcctaatctaaattaggatccctctgctcttctccgtagctccatcttctcccacacaccagttactacaatgcgtaactacagatctacacgtgtttacgtgcaaggtccccgggggcctgttcaccctggcactgcccaggcgccgcgcctcgcgctgcaggtgtccacgcgcggaccacggtatctaccgcgccctcgtgtgaacacccgaccgggccccgtaatcactctgggaaagcgccttcaacaaagccctccgaaagcaagtgctttactaagtgccccttgaggctactggcagtgcgaggctggctgtcattagaacatttttctgaaccctcaaaaaggtgaaaaagcaggaccgtgctttagcaggaacacgcacacccgcctaaatacccgatttttgagactgtccgggcgaaggaattcaacgcataggagcgagcagccatgcagtgtgcctggagaatcaccaaaccgcgacgaccacgaccctcaaagccagtgacaagcagcgcgaatctaagcccacctcggccgcagacccttccccgtcccgccaggccgccgcgccctgtcagcctcctactgcaggaccgcggggccgcctgctcatctgtcagacgggcgctcggaggggccgggagccaggctgc

SEQ ID NO: 105099 - DNA, 31 bp, Homo sapiens; identical to SEQ ID NO: 1161
  chr1:225841440-225841471
  hyper

SEQ ID NO: 105100 - DNA, 30 bp, Homo sapiens
  chr1:225965321-225965351
  hyper
tgagggccacgggacggacgccactcattc

SEQ ID NO: 105101 - DNA, 32 bp, Homo sapiens
  chr1:225965661-225965693
  hyper
gggaggagttcagccgcgctgccgagaagctt

SEQ ID NO: 105102 - DNA, 3 bp, Homo sapiens
  chr1:225997661-225997664
  hyper
cgc

SEQ ID NO: 105103 - DNA, 51 bp, Homo sapiens; identical to SEQ ID NO: 36876
  chr1:225998106-225998157
  hyper

SEQ ID NO: 105104 - DNA, 925 bp, Homo sapiens
  chr1:226069174-226070099
  hyper
ctgttagagcccaacgaacagctaggagagacctttgcccccacactaaacaaaggagaggggcgtgtgaagggaaaaggagcctcggcttccgttcatatcccccttgaaggcacagcagacttgaggatgacctgagaggtgtcaagggagggtcagtgggtccgccacgctgtccacccctgcccttgaagaggacaccacctgcctggggctgaatgaccaaggcccctccagggcctcaggtagctagtcttatcaggtgctggaacctttgcggatttggtttcttagcagagctcgcctcaccctttccgcccccgcccttccccccagtccccgagtccccagcctccctcctcaggactccgccaaggctgcaggaagtggtcacccaggaacagcccgaggggtggcctctgccttcctggcgtcaggagagtcggacgcttggccctttcccagcccggcctcgtatagggtccgaggagcccatagctgcactcctagttaggtgggaggtcggactccgccgacaaatcccaaagagaggggtggggaagaaggagataccagccctgaaagcgaaaagccggagaggaaagtcctgaaaagccgccaggaattcccaaggagcgcagggctggaatggaggcgctgcccggaccctctcctcccacccaatcccgcgtcgtcaccccctgcttggggtcgggggctctggggtctgcgtaggctgggagccgttccggaaccggacacctggcgcgcacgtcccgggaaaggcggagggtgcattgcccctcctcacgccccctgtcccctgtacctgcggcggcggcgtgtctggcgggacccagcagcgcggggcgtgttccgaccacttaaaagttacaaagtgaaactccggcgcctcctgcacatg

SEQ ID NO: 105105 - DNA, 290 bp, Homo sapiens
  chr1:226070381-226070671
  hyper
acagggtggtcgcggcgcagggagagcatctgcaaacgttggtccctgtagtgctttgaatttccccgaagagctcttagacccgccccgggagagtggggttgcgggggtggtagcatggggagctcagcaggattcagcccgcacctcggctccgggtagtcgggaaccgcgcggagcgccctgcaagaggccacggctcccccgccgctgtagaaggccggaccgtgaaagcccggagggtctccgttcgggcaaaaatgtgggggcgggtcgcagcatttccaacg

SEQ ID NO: 105106 - DNA, 31 bp, Homo sapiens; identical to SEQ ID NO: 1164
  chr1:226127349-226127380
  hyper

SEQ ID NO: 105107 - DNA, 30 bp, Homo sapiens
  chr1:226186789-226186819
  hyper
ccccagagaataaacgtacccccgccccgg

SEQ ID NO: 105108 - DNA, 30 bp, Homo sapiens; identical to SEQ ID NO: 36880
  chr1:226187463-226187493
  hyper

SEQ ID NO: 105109 - DNA, 35 bp, Homo sapiens
  chr1:226249796-226249831
  hyper
tccgacagcgggcgcgggacgctggattcctattt

SEQ ID NO: 105110 - DNA, 36 bp, Homo sapiens; identical to SEQ ID NO: 36881
  chr1:226250416-226250452
  hyper

SEQ ID NO: 105111 - DNA, 30 bp, Homo sapiens
  chr1:226251209-226251239
  hyper
tcggatacgttttgcgattgtttccatttt

SEQ ID NO: 105112 - DNA, 30 bp, Homo sapiens; identical to SEQ ID NO: 36882
  chr1:226252126-226252156
  hyper

SEQ ID NO: 105113 - DNA, 30 bp, Homo sapiens
  chr1:226271289-226271319
  hyper
cgcccccacgcggccgcctgcacagggggt

SEQ ID NO: 105114 - DNA, 172 bp, Homo sapiens; identical to SEQ ID NO: 36883
  chr1:226297379-226297551
  hyper

SEQ ID NO: 105115 - DNA, 30 bp, Homo sapiens; identical to SEQ ID NO: 36884
  chr1:226309521-226309551
  hyper

SEQ ID NO: 105116 - DNA, 30 bp, Homo sapiens
  chr1:226313152-226313182
  hyper
tattcttcctgcaccgccagctgcctcgct

SEQ ID NO: 105117 - DNA, 30 bp, Homo sapiens
  chr1:226373829-226373859
  hyper
caggtaaaatgtcccggtaacctctgggag

SEQ ID NO: 105118 - DNA, 52 bp, Homo sapiens
  chr1:226374594-226374646
  hyper
gaactcccctcccccgcaccccatcctttcggatcccagttgctccaggtgg

SEQ ID NO: 105119 - DNA, 85 bp, Homo sapiens
  chr1:226374683-226374768
  hyper
cggctgtcagtgcccagcaggggcggggtcagtggagccccgcgcgggggtcggagtagggaggattgacgaggtcggccagcac

SEQ ID NO: 105120 - DNA, 120 bp, Homo sapiens; identical to SEQ ID NO: 1166
  chr1:226411103-226411223
  hyper

SEQ ID NO: 105121 - DNA, 765 bp, Homo sapiens; identical to SEQ ID NO: 36887
  chr1:226411246-226412011
  hyper

SEQ ID NO: 105122 - DNA, 149 bp, Homo sapiens
  chr1:226497225-226497374
  hyper
ttccgagtggagaacgggagggaggccccggcggggggaaagaagccctcggttctgggtcgcattgcccgagggggctctacgcaaagtgaaatactcacagttcccgaaacccacgttgcttgggcgcctccgtcccctcacttttc

SEQ ID NO: 105123 - DNA, 257 bp, Homo sapiens
  chr1:226497393-226497650
  hyper
cagccccctgcgcgtcgcgacgtccgggactcggtcccagcggcccctcgcgatccgggcacgcctttcccgaatgttggaagctgagctgcgtgcagccggggagcgagaccttgagaggtcatgaagttggtcatttaggccgacagctaaagaactgttctgctcagctgtttcatccattcgacactagatcgtgcagtgggctggaagagaattagaaaacgagtaacaggaggcttcgagaggatacagaa

SEQ ID NO: 105124 - DNA, 30 bp, Homo sapiens; identical to SEQ ID NO: 36889
  chr1:226595561-226595591
  hyper

SEQ ID NO: 105125 - DNA, 1040 bp, Homo sapiens
  chr1:226736490-226737530
  hyper
gcggccgcctgagctcggcgcggagcccggagcccgcagccgacagtctcctgctcccgtacgctgggcgccagctccggccgtgctgcccggctgcctgagagcgcgcccggccatggagccctcgcacaaagacgccgagacggcggcggcggcggcggcggtggcggcggcggacccccggggggcgtcctcgtccagcggggtggtggtgcaggtccgcgagaagaagggccccctgcgcgccgccatcccctacatgcccttccccgtggccgtcatctgcctcttcctcaacactttcgtgccgggactgggtaagacacggctgccgcgacccttgcgacccccaccccgccgcgggagggcgtggggggagagaagggcgcggccggagacctcctggcggggccgcgcgctccaagtgctgcgaccacgcgccaccgcccgctcctggcgtccccgggcaggtggcagaagcgcgtggagtgtgcaccccagaggggagaggctgcgctggggtctccgacccgcaggcggggccccaaagagccggaaactttgcggccaatgttggagcccgcagcggcggccggaatggctctgccggcttcggagtagggctcccgtcccggcgccccgatttctgctccttctctccgtcgtgtgcatccgtccgcgagcccacttccccgagaggaatggggtcggatcagaatgagctctagggcctcggcggcgaggatcaaactcccgggcgtcgaagtcagctgagccggggaaagaggacgagccgggctagatatacctgcagccccctttggttcgcggagtgcggaccgcgtggggacgagaactctagccagagtctcctccgcctcattcaggggtacctgcacttccgccagcaccccgcagggcgccagggggatgggggatgattttattagtttggatgcatgtggccagagatgaacccatagctccctcggatcccttctgttcctgagaagtagagagtgcgccgatgtaattctgtg

SEQ ID NO: 105126 - DNA, 29 bp, Homo sapiens
  chr1:226737804-226737833
  hyper
cgtgcccctgtcggcgagcctgttgccaa

SEQ ID NO: 105127 - DNA, 153 bp, Homo sapiens; identical to SEQ ID NO: 36892
  chr1:226814280-226814433
  hyper

SEQ ID NO: 105128 - DNA, 30 bp, Homo sapiens; identical to SEQ ID NO: 36893
  chr1:226890913-226890943
  hyper

SEQ ID NO: 105129 - DNA, 106 bp, Homo sapiens
  chr1:226924723-226924829
  hyper
tctggttcacctgcacgttctgcaactcgcgctgcaagatccgcagcttcctcttggcctcctccggccctggcggggagagggtaccggctgccaccacctgctg

SEQ ID NO: 105130 - DNA, 2121 bp, Homo sapiens; identical to SEQ ID NO: 36895
  chr1:226924900-226927021
  hyper

SEQ ID NO: 105131 - DNA, 30 bp, Homo sapiens; identical to SEQ ID NO: 1171
  chr1:227016009-227016039
  hyper

SEQ ID NO: 105132 - DNA, 34 bp, Homo sapiens; identical to SEQ ID NO: 1172
  chr1:227058122-227058156
  hyper

SEQ ID NO: 105133 - DNA, 108 bp, Homo sapiens
  chr1:227058779-227058887
  hyper
cttcttctctctcgccggagacctccgttgcgccgagtccattcggcctctagcaccgggtcctgggcatgctttccccgggaaggaggcgcgcgggggctctgcccg

SEQ ID NO: 105134 - DNA, 30 bp, Homo sapiens; identical to SEQ ID NO: 36898
  chr1:227058890-227058920
  hyper

SEQ ID NO: 105135 - DNA, 30 bp, Homo sapiens
  chr1:227128045-227128075
  hyper
ggcgggcgcggaggcggctagaaggtgacc

SEQ ID NO: 105136 - DNA, 30 bp, Homo sapiens
  chr1:227128522-227128552
  hyper
tggggctctaggctcgttgccgctggctgc

SEQ ID NO: 105137 - DNA, 770 bp, Homo sapiens
  chr1:227505241-227506011
  hyper
attcaaaattcaactcgtgcaacgtaatcctgaaacgaatccggttgcatcattaatgaataaagtccgatttgcatcagcaattcacttcccgggaagaagaaaaacagaaaagggaggaaaaaaacagaatgcatagaagggggagggaaaaccaaaaatgttgctgcaaatcctcccaaccaccacttggataatgcatcagcggcaatttctccagcgggaaagggagggggcgaggtccctgaagcagcccctcggctcggagcacgccaagtcttgcccggaggcggcttttcgtttctcctcccgaggtccttctttctttaaggctttgcagtcagtcctattttcaacggattccggtgaaaactcttcattttcctcccggcttcaccctagggcctgaccggcggcgcggccgggggtggaaggcgggctgcgggcggcactggcaccgggctccggagaagcggctacttggccgcccgagcccactccatgtcggtggtcgctcgtgggccgagccgcgccgcgccgcgccgggcagagagcccggtctccccgacacccgcaccgggccgccgcgccggaggctcccgacgccccaggcgggggggtgcttctctgaattcaaaggacacaagcagcagcagctgcggcggcggcgcgggcggctctggcagctacttctcccccttcttcacacccctgggctaagggcatctttccacagcgaggagggaggcggcccggcgcaggaggagggg

SEQ ID NO: 105138 - DNA, 716 bp, Homo sapiens; identical to SEQ ID NO: 36900
  chr1:227506042-227506758
  hyper

SEQ ID NO: 105139 - DNA, 206 bp, Homo sapiens; identical to SEQ ID NO: 1175
  chr1:227652538-227652744
  hyper

SEQ ID NO: 105140 - DNA, 667 bp, Homo sapiens
  chr1:227729829-227730496
  hyper
cggggccgggccggcgagagaagggtccggggcacccagtgggctcggatctcgagcggtccccgtgacggccccgcgactgcgcgacttcccgctctagagagtttatggaccctgtcccaggagggctccgcagccgccagggaggtaccggagggaccgcggcgctgggagagggtggcgccaggcggccctggagccctgggcgacgcggccgggccggccagagggcggagaagtccaaagcagcagcccggacagccgcttccgcccctgcgccgccctcccggcccaggtgaccggtcgccctacccggggagcagcgccctcctcctcctgggccggagccgggcgtgggggtcgcaggctggtgccacagcctgaggacaccgcggcctctgccccggggagcacgccaaatgccggacggagcggctgttgcagacggtgaggccgcagccccgcttgagggtagggtcgggcggggtgtcggggtcctggcagaggccgcggcgagggcaggagccggtgcgctggccgctgcacatgcgccgcccggcaccgggaccctgcgggcgcgccccctggtggcagccagcgggaggtggcgtccctgtccccagccaggcggcagcgcgaagctgcctccccgcggggggagcggaag

SEQ ID NO: 105141 - DNA, 30 bp, Homo sapiens
  chr1:227751597-227751627
  hyper
ccggcctctctgggcggctatgaagccgca

SEQ ID NO: 105142 - DNA, 30 bp, Homo sapiens; identical to SEQ ID NO: 36903
  chr1:227916358-227916388
  hyper

SEQ ID NO: 105143 - DNA, 30 bp, Homo sapiens
  chr1:227922823-227922853
  hyper
gcagcaagaagccccgcacaaagtcggcgt

SEQ ID NO: 105144 - DNA, 478 bp, Homo sapiens; identical to SEQ ID NO: 36904
  chr1:227975251-227975729
  hyper

SEQ ID NO: 105145 - DNA, 436 bp, Homo sapiens
  chr1:227976219-227976655
  hyper
gagcagggcgtccagcggagaaggcagaggaggggagatgcgggctcctccaggtagcgcaggagcccctccggctgccggagccccgcgagggcgcgagtggagggcaggagcccgggcggcggaggagcggaagggatgctgcgttgccttggagtgtcagggtgggggaggaaagaccaagggacccacgtccttcgcccccgccgcggagtcccgggccggcgagacttccgcagcctgcccagcgccggggacctagggctttgcaggagtccgcccgggagctctatcagagcgggcgtcctccccgccgctccaaaggtggcttggggcaggtggggcgtcccggagggaatggagggaccctgcctagggaaggtgagtcgtgtgtggtcgggtgtgtgtgcactgcgtggtgtgtgtacactcaggt

SEQ ID NO: 105146 - DNA, 111 bp, Homo sapiens; identical to SEQ ID NO: 36906
  chr1:228074791-228074902
  hyper

SEQ ID NO: 105147 - DNA, 895 bp, Homo sapiens
  chr1:228134408-228135303
  hyper
cctgcagggctcctcggcccaggcggcctctccctgcccgggcgggtgccagattcctggaccaacggggccctctgccggccagcccgccgcgcgctggcgctcaggccagagggccgggaacaggtgaccggcggagggcggcggcccggctgagggagcggcccagggcgtccaggtcgggggctgggatccgaaggccagccagggctcccagcggcggcgctcggggtaggaggctggagggtggcggggaggcccggggcgctgcctcgcacggcgccaccctgcacctcagcgcgcccaaagcgcagcgagggtccctgtaaaggtcgcaggactgggcatcccagacctcagagagggggagggaagaaggaagggaaagaaaggaagagagagacgcgccgacagcccggcaaagcgctgctgcagagacacgtgagcacgggcaatgacaccgcgggacgccccggccgggccctgcgctcccggccaggttccatggacgcgctcccgcgggccggggcccgggccacagagtcagaagcaaagcgcaagaaaaataaattcctccagcttggaggatttctctctttctctctctctctccgtttggggctcagcgcgaggaacatctggattttgtacgtatttttgttattgttaaattaacttctcgagaagagaaagggggggaagctgctaggtgggcgatggccaggggctgaggactcaggctccagccttttggcaaggacacggcggcccaaggaagtcgggacctgatcccagtccctaagcgcgaggcagtcctgctcacggcggcgactacgacgacgacgactctgcggtcacggaggaccgcggcccggcgcaagccggacgggtccac

SEQ ID NO: 105148 - DNA, 388 bp, Homo sapiens; identical to SEQ ID NO: 1177
  chr1:228135362-228135750
  hyper

SEQ ID NO: 105149 - DNA, 372 bp, Homo sapiens; identical to SEQ ID NO: 36909
  chr1:228135899-228136271
  hyper

SEQ ID NO: 105150 - DNA, 32 bp, Homo sapiens; identical to SEQ ID NO: 36910
  chr1:228193570-228193602
  hyper

SEQ ID NO: 105151 - DNA, 434 bp, Homo sapiens
  chr1:228193976-228194410
  hyper
aggggtcaatccctgcgccacagagagagtcccactcgtccccagctgtgacccacagacgcgtggctgcaccttggaggtccacctggccgctgtccccattgcaggctgcacccatcccggaccctttctatccgccgaaggcgcaggcagctctggtctcagcggaaggagtccggccgcaggcagacggggccaaaggacgtgcacccgacaaccgtccgctccctccccaaacccccgccccgagaaggttgatggatgaaggggagccctagcccagccacctcgggggcaagagacggagctcgccacagaccaggagcgagagggggactgcgggtcccaccgtgagcgcagggcgcgcggggctggaaacccaggacgcggcccgggagctccaggagggcgcctgcggatcgcgcggccccggg

SEQ ID NO: 105152 - DNA, 2006 bp, Homo sapiens
  chr1:228194570-228196576
  hyper
cgcccgggccccggccccggcgggcgccccccgcggcgctgccccgcccccgccgccccgcgccgccccgggcctcggcccgcagcccggccgccggcccacctggcgcagcgccgccctcggagcccgcgcacacccgcgcacccgcggccgcaggagggcccagcgacgccgccgcgccagctcccagggcccggccccccccggcgctcacgctctcggggcggactcccggccctccgcgccctctcgcgcggcgatggccccactcggatacttcttactcctctgcagcctgaagcaggctctgggcagctacccgatctggtggtgagtgagcctcctcgcgttcgcccctgcccctgtgcgccgcgcccgcagcagacggtcccctcgggcagggaccccgcggtggcccgagcccgcgcccttctgctccagccccgcgtgcgggccgcgggcggttggttttccttgacggccactttggacctgttcaggccgctgggacgcgtgggtggcggagtttccggagacattgattcccgagcgggggagtaggggaggttgcggaggtcctagctgcccctggcgtcggacagggcgagcagtgggctggggagaggctgaaagaaggtcggcacgcacggtcaccgaggggacaggcagctcgaggccaggggacaggcgagggaagagggccagcgagagagaattcgccggagactttcctcaaaaaccgtatcttacacacaaacacacacacacgttttaaaacaaagtcgatgagacaagactgaacagctcggagcagcgtggttacgtaaagaaagctgggacccggcggggagtggcgcagagccggcggcggggcgcactgggggccggccctgggccccgcgcgcctccccgccgcagtccgggcacgggggtttccaggggccctctctgcgagccctccgcatgggtccacctggcaatgaggggctgctgtagagagagttaagggtgagttaagcacggggtgtgaggggctccaggaccctcaatcagaaagcgctgtgctgcgccctccacaccagaaaaggcgcgttccgtgagaccctccccagcctggcgatggaagtgcagataaaccaaaggaagggtcccgaaaggtctctctcaggcctcccacctccactgcacatatcctgtgggagggggaacggtggccacactttcgccagggcttgtgatccctcagagccctcaccaagcaaggatcaccccagttccgaattaagggcgctctgagatgcccaagattgaggaacacaagtgggaggaatgtgggcgcgcagggccgggcgcagcgctggtaggacccacagttggagagaagcctccccacaagcatgcacactcccccccatccttctccgacggcagcctggaattataataattacgccgaggggaaggggggagacccagcgagccgaggtacatctaatccgataataatttttctcttcgagatggttcaggagcgggggctcccgcggtaggggcgccgggccaggagcagcggggaggggaaggggcagccctaggcagctgaagggcctggaagaggccacgaggccgcggggacgcgcttcggggacccccgcgcgcccctatttccgcgtgccccatttcccgtgcggcacctgctgcgcccagtggcccacctgagggtcaggctcggggctcgccttggggtgcggggatactgacgcgcgtccagacggccgcagggagccaggggcagcgcgtccgtccgagagagccccgagggctgccggcttacgcaccaggcttctaattagaacccgccgccgcgttcctgagcgcaaaaggaagctccttcgccccgcgcccttcccataaatgtcgccagcctcctggcaaccccgcgccctaggatctttgtcttgtcggccctgagggttcctagcctcggtccccatccacctcatatg

SEQ ID NO: 105153 - DNA, 581 bp, Homo sapiens; identical to SEQ ID NO: 1181
  chr1:228225421-228226002
  hyper

SEQ ID NO: 105154 - DNA, 36 bp, Homo sapiens
  chr1:228238538-228238574
  hyper
tctcgggagttcgccgacgcccgggagaaccggcca

SEQ ID NO: 105155 - DNA, 184 bp, Homo sapiens
  chr1:228247856-228248040
  hyper
ctcttccctgggaaccgccctcctgattaaggcgtggcttctgcaggaatcccggctccagagcaggaaattcagcccaccagccacctcatccccaaccccctgtaaggttccatccacccctgcgtcgagctgggaaggttccatgaagcgagtcgggtccccaacccgtgcccctgggatc

SEQ ID NO: 105156 - DNA, 500 bp, Homo sapiens
  chr1:228248268-228248768
  hyper
cccgggctcccacaccgtcaggtactcctgccagggaactggcctgctgcgccccaggccccgcccgtctctgctctgctcagctgcgcccccttctttgcagctgcccagcccctcctccctgccctcgggtctccccacctgcactccatccagctacaggagagatagaagcctctcgtcccgtccctccctttcctccgcctgtccacagccccttaagggaaaggtaggaagagaggtccagccccccaggctgcccagagctgctggtctcatttgggggcgttcgggaggtttggggggcatcaaccccccgactgtgctgctcgcgaaggtcccacagccctgagatgggccggcccccttcctggcccctcatggcgggactggagaaatggtccgctttcctggagccaatggcccggcccctcctgactcatccgcctggcccgggaatgaatggggaggccgctgaacccacccggcccatatccctg

SEQ ID NO: 105157 - DNA, 118 bp, Homo sapiens
  chr1:228270661-228270779
  hyper
gcggacgggcgggtcggtgagctcctcgcacccctcacaggttcccgaagtcgctcgcggccgcttgtcctcctctgcctgtccctgcccccgcccgtcgcccggaagtccgcttgga

SEQ ID NO: 105158 - DNA, 30 bp, Homo sapiens
  chr1:228271353-228271383
  hyper
acctgcctgcggaacgacctgctcgcagac

SEQ ID NO: 105159 - DNA, 30 bp, Homo sapiens; identical to SEQ ID NO: 36915
  chr1:228290318-228290348
  hyper

SEQ ID NO: 105160 - DNA, 30 bp, Homo sapiens
  chr1:228353702-228353732
  hyper
tggccccgacgcggcgcccttcctgctagg

SEQ ID NO: 105161 - DNA, 310 bp, Homo sapiens
  chr1:228444460-228444770
  hyper
gatgtggtacaaggacgggaagaagctgagcttcagctcgaaagtgcgcatggaggctgtgggctgcacacggaggctggtggtgcagcaggcgggccaggcggtcgccggggagtacagctgcgaggcggggagccagcggctctccttccacctgcacgtggcaggtcagtgctttgggggttggagagtgactttgtgtggaggtgatgatgagactggctgatggactccacggcctccagtgccctttccatgagactccacctctccacttctccatgccctcacttcccggtttcataccctt

SEQ ID NO: 105162 - DNA, 584 bp, Homo sapiens; identical to SEQ ID NO: 1183
  chr1:228463164-228463748
  hyper

SEQ ID NO: 105163 - DNA, 266 bp, Homo sapiens; identical to SEQ ID NO: 36918
  chr1:228566259-228566525
  hyper

SEQ ID NO: 105164 - DNA, 509 bp, Homo sapiens
  chr1:228566547-228567056
  hyper
cgccaataaaaacgcacagccgggcgagaagtcttccgtctcgttgcattattttcttttggggaggagagggagtgagggctctgtccccgcctttctggctggggcgccgatcaggctgccccgctgtgtttgggcctgtgagccccttagaaggcgtccttaggggtcgctccctcactccgatgctccgcgcgttcagcccctcggggcgtctccgtcctcacacccatgcgcgtttattccacccgccgtgcgccttcctctcttccatcacgctgacctgcagccccgcagcccgctttctccgccgtcgggccagccgcttgtttccacaacttctctgccccgggaagagttcttgggcaaagcgtgcaagcgagggcgagaagccgcgggccacgatccgctggaggagaggaggcttcagagtcgctggcgcgtggcctcggtgaaaagcaacccagtgtttgagattccatgggcaatgactacgctggccgagcccc

SEQ ID NO: 105165 - DNA, 30 bp, Homo sapiens; identical to SEQ ID NO: 36920
  chr1:228593607-228593637
  hyper

SEQ ID NO: 105166 - DNA, 251 bp, Homo sapiens
  chr1:228594014-228594265
  hyper
gggtgcaggcgccgcgccatctcggccatcttagcaagcgggcggttgggccgcaggttcctctgcggggacagctcgcggcactcggggcacgcgtacgggccctcgggctggccccagcagcgccggatgcactcgcggcagaagttgtggccgcagtcggtcatcaccggatccgtgaagtagtcgaggcagatggcgcaggtggcctcctcctggaggttggtggacaggtcgggggcggccatggc

SEQ ID NO: 105167 - DNA, 30 bp, Homo sapiens
  chr1:228594869-228594899
  hyper
cagggcggggcacacggaagcaactgcaag

SEQ ID NO: 105168 - DNA, 199 bp, Homo sapiens
  chr1:228603724-228603923
  hyper
agatctacagactttcgcctacgccacggggttgctatggggaccgagttgcagaaggagttgaaaatcgcgtctacactgcaagcacgattctccccttccgttctgccatcccctaaagcgagggcgtctaggggtctcagacttccccggctctgtcccacgtccagtttctcggagctttctgcacgccaaccac

SEQ ID NO: 105169 - DNA, 437 bp, Homo sapiens
  chr1:228604123-228604560
  hyper
ggccggcggaggcgggaaggccgggcgttggagggcgaggaggaccgggttaggcttaggtcgtggcccaggcgccacaggagggtagcctaggcggcggggtgggggctactcaccgcggggaaggggggcccgcacagcgcctagtgcacctggccgagcgctcgctgccgggaaaggctgggtctgcccccacgaagcccaggaggctgcggcccggcccggggcgtggggacctggggtcgggaggcctagggactttgtggcgtcagcgggggctggggggcggcgggggaggggaatgctgggcgagggagtgttcggcggccgggactggggcggcgcctcttaggagaggttgggggtggcttggggaaggaaggcggcagggggtggaaggctctggacgagccggggacaggcgcagcgggtgctga

SEQ ID NO: 105170 - DNA, 374 bp, Homo sapiens; identical to SEQ ID NO: 1184
  chr1:228633575-228633949
  hyper

SEQ ID NO: 105171 - DNA, 164 bp, Homo sapiens; identical to SEQ ID NO: 1185
  chr1:228633983-228634147
  hyper

SEQ ID NO: 105172 - DNA, 387 bp, Homo sapiens; identical to SEQ ID NO: 1186
  chr1:228644856-228645243
  hyper

SEQ ID NO: 105173 - DNA, 601 bp, Homo sapiens; identical to SEQ ID NO: 1187
  chr1:228645305-228645906
  hyper

SEQ ID NO: 105174 - DNA, 121 bp, Homo sapiens; identical to SEQ ID NO: 1188
  chr1:228646025-228646146
  hyper

SEQ ID NO: 105175 - DNA, 361 bp, Homo sapiens; identical to SEQ ID NO: 1189
  chr1:228646205-228646566
  hyper

SEQ ID NO: 105176 - DNA, 569 bp, Homo sapiens
  chr1:228646865-228647434
  hyper
atgtcttttataagcaagtggtgcattcctggatgttgagcgcttgcgcccggttcaggaccgggtccaaatgaggttggcgtgcgccgtgcaggtgaggagtgcgggtcacctccccccaaaagaccctgtgccaacctccccaaccctacccgccccccatgggcgaggccagacgtggcgcaagaccacgggctctgaggccatgggtgttgtcactttcccctggcggtggtgcctggctctgcatttgcttaagacttttccatccctgcctggaccagacagacatgtttagatttaagcaatgaacattccgggaggatattttcctggcaggataccgcgatggcaggatgtttgataccgaatcgaagcacggcgtcaaagcagcgtcctgcgcgggggagccggatgtaataagcgaccccagctgccggtaactttaacccttatgggagtgggggtgggggaaggggttaatttaggaggaaaagaattccctttttctgagcaaatgtagctgcctccctctttagccacattattttctgcgaggcgttagcaac

SEQ ID NO: 105177 - DNA, 563 bp, Homo sapiens; identical to SEQ ID NO: 36928
  chr1:228651338-228651901
  hyper

SEQ ID NO: 105178 - DNA, 241 bp, Homo sapiens; identical to SEQ ID NO: 1192
  chr1:228652211-228652452
  hyper

SEQ ID NO: 105179 - DNA, 277 bp, Homo sapiens
  chr1:228652508-228652785
  hyper
cgcgccggagctgaggttgcgcatctttgttcaaagcctttgttttaaacctggagatttttgtgtctgcagcggatctggaggtagctaaagagaaactgaaaaacggttgcaaccccaaattgaggtcttctctggctgtgaggcacatacatgggggcattttttttttctgaggcccacagctagggaggggtagttagtgcttatttagaaggggaggtggcggtgggaatggcagtttgcaacgaccttaacccttcgtttcttgcccttc

SEQ ID NO: 105180 - DNA, 179 bp, Homo sapiens
  chr1:228674802-228674981
  hyper
gcggtgacgtgcgccgctgccaggaccttgcaggtggagagcatagttgccaaaatcaaggcggaggagcgcaccgccgctaggatccaggcggagaagcccaccgcggccaggacctaaggatgcagtacactgctgccaggatcttgtctgtggagcgcagcgcggccaggacctcc

SEQ ID NO: 105181 - DNA, 95 bp, Homo sapiens
  chr1:228783177-228783272
  hyper
ggggcaataggaatccgggtgcacagggactgttttcctggtggttggcgaagcaatgtccttcctcccgggtaaagcagtccatgcgttctgga

SEQ ID NO: 105182 - DNA, 708 bp, Homo sapiens
  chr1:228783331-228784039
  hyper
ttataaggttgcgactgcgccggatgagtgaattgaattgcctggtggatccgggagcgggaaggcaccgcgaacggcagggaatcctggcctgcaccttagtgatctgaggcgtggtgtttctgctggatccggtttcatcgtgttgcgccgcccatcctgaatagttgtgatgttgttgcctggctgtgctgcaggttagcccacactaagcggtcccgggctgttgtgtgggcttgggcgtgtgaaaagagggagcagatttacggtgcggttgagaagtacggcgaccaaacggtaaagagggaggaacttgaagtctaaacaagcctgcgtctcctggttttctcaagtggcgtttcatctaagtagcggtctggcccagaccctgcttatcttcacgagatcagaggagaccggacgccttcggggtggtatggccttagacgccggtagtgcagcctgtctgccccaaaggcgcggctcagccacgcccgtccgactccatgcgccacctctaatccagtgccatggggatcttatcgggacccgggagccgctcgccggaggtctggctgggttgctctccgtgtctacgcccaagcaccgttgcccgccgccttgcgccttctgttggcctcttagagccttccgtgattgcttgcgcctaggccactcgctggacctccgcggcgccaccctgtttcc

SEQ ID NO: 105183 - DNA, 40 bp, Homo sapiens
  chr1:228784106-228784146
  hyper
cgactctccaggccttccccggctccggagctccagagct

SEQ ID NO: 105184 - DNA, 1566 bp, Homo sapiens
  chr1:228870692-228872258
  hyper
atgagaaaaaatcacacgatcagctgcagttagacttaaggaaaaaagctgtctgttaattcaatctcattcgcaggacaggcctccaggacacttcatttttccccctgggtggagccgtggccagccgggggctccacggagtgaataggaggcggctcaggcttcctggctcgcgtgggcgccagaaagcggaacctcccgggccagtcgcgcggtggtcaccctcttgggagctggggaggaggctgcggaggctggcccggctccttcgggcgtcgcttcccggaccgggtgcgcggggtcccccggaacgtgtgttccaggtcctcccgcgccagtgttcgcagtccccgcctggtcgcggcggcgcctcgggcgcgggtgcaggcgcgcggcgcgcaggcggggggcgctgtggtcttggcgcggggaccgagccgctcggccagacccgcctcttttccctccccgccagcccgcccgcctgcccgccccccacgcgtcgtgtcgccgggaagccgggcggagacagagcgcttgggatccacggcgctcggaccgctgtcctccaacagcgcagggcagagcggctggcgccgccggagcgcggagccacgaccctccctggccgcctttgtctactggccgtgcggcccggaaccgccactctccagggccggggacgcgcccgcagctgtcggtgacagctcctccctaccgcaaccctccggggcggaggggcggtcgggccgggccctgctagcccgcgaccgcaagcccgcgctcgcggatcgatgcccccgcagcagggggaccccgcgttccccgaccgctgcgaggcgcctccggtgccgccgcgtcgggagcgcggtggacgcgggggacgcgggcctggggagccggggggccgggggcgtgcggggggtgccgaggggcgcggcgtcaagtgcgtgctggtcggcgacggcgcggtgggcaagacgagcctggtggtgagctacaccaccaacggctaccccaccgagtacatccctactgccttcgacaacttctccggtgagctggccggggggccggggccgggggcgcgtggccgcggtccacccaggggaaggaaggtggcgcgagggtcgcgaggttcccaagggggctgcagggccccgggcgcggctccagctgggaagccggacaaatgaggagtgcaggacgtttcctgagtctcagggaccgggcaagcgcggagctaacacgaaaggaccacggcggagtgggcttggagagaggagggcggagcggcagtcagagccttgccaaaaaaaaaaaaaaaaaaaatctcacaatttaagcaacagataagtaggagtgaaacaggttgagttcagggtgcccggtcagtttgttgcatagagcaaagtttcctgagggcgacgtcgctggcgccgctgcagagtttcaatcagaaggtgacgcgcaggtgcctttacctgagcgtcgctcctttgcttttaggcggctcagctcacaaggggcgtctccgctttaaagagccgcggagacgccggg

SEQ ID NO: 105185 - DNA, 30 bp, Homo sapiens; identical to SEQ ID NO: 36934
  chr1:229406919-229406949
  hyper

SEQ ID NO: 105186 - DNA, 30 bp, Homo sapiens; identical to SEQ ID NO: 36935
  chr1:229478602-229478632
  hyper

SEQ ID NO: 105187 - DNA, 30 bp, Homo sapiens
  chr1:229479000-229479030
  hyper
cgctgtcccaggcacgcgtcactctgcagg

SEQ ID NO: 105188 - DNA, 100 bp, Homo sapiens; identical to SEQ ID NO: 1195
  chr1:229542852-229542952
  hyper

SEQ ID NO: 105189 - DNA, 490 bp, Homo sapiens
  chr1:229543220-229543710
  hyper
cgagagggagctctggtccccgaggggctgtcccgggagggagcgaggtggggagggggagcaggccctgccccgagcaccccgcggactgagcgtctggcgtgcacggcggaggggttaccgcggggaggtgacaccccagggtggtgagggcacgcagatgaggctggcctgaggggtgcctgctttggggaaagcagtctgtggagggagggaaggagggcgatcgcggccccacgcgggttgtgctgctgaggctccgcgccgcaggaaaggcaccctagccggattcgccctcggacgccccagctgggcacactcacgcggctctcccgcggcttctcgggaattcgcctccagggcaatcagctcttcgcacaaacgttcaaaccaaggtaagagctatcagatccagccagatctgcttcctaagcctggccagggccctaagcacccccacccacacgctcagaggcgggcgacgccgagg

SEQ ID NO: 105190 - DNA, 619 bp, Homo sapiens
  chr1:229566657-229567276
  hyper
cagcaccatggtcagcgcccgctgcctgaggggacccagggccaccagcggaggccgccccggcagtgctggcaacactcgggagcgctgcgcagaggaagaaagctgcctcgccacaccccagagggtcaagtcaggccaccactagctgccagtgatctggaatggatctgatccactgcagaaaccggcaggggagcatgggaagatgtaagttttgtcttccaaggagcccattcatttggggtatcgtgaaaagtgacttaagaggatgtgggggatgggaatccctcttcctgctccactcccgccccaagcaaataaacacgaccactttacgcagcttaacagaatgactttaatgcttcttcaagttttccattttcttccacagggctttgtttcgaaaaataacaaaatgaggtaataagttaatgtatgtacacgttataaacactgtgtcagtttacgatggcagcaacggaagttgttacaaagaaagtgactgcggggtggctggagctcagccgcccccccattgagaagattcgtcgtcctgagaagtcgcgtgctggaggtggagtgtgtctagaagcatttgcggtggacgatggaaggg

SEQ ID NO: 105191 - DNA, 623 bp, Homo sapiens
  chr1:229567369-229567992
  hyper
cgctccggcggggcgatgatctgcaagacagcgcgtgaggtggggagacctcaccctggagcccaccccgccgacagcccgcgcaggccaccacccaccttgatcttcatggtgctgggtgccagcgcggtgatctctttctgcatgcggtcagcgatcccagggtacatcgtggtgccccccgacatgacgttgttggcatacaggtccttcctgatgtcgatgtcacacttcatgatgctgttgtaggtggtctcgtgaatgcccgccgactccatacctggggaccgcggcggggagcgtgagcagaagctcggggcgccgggggccggcggggcctgggggccggggcgagggcgagcggggctcaccgatgaaggagggctggaagagcgtctccgggcagcggaagcgctcgttgccgatggtgatgacctgcccgtctggcagctcgtagctcttttccagggaggaggaggaggcggccgtcgccatctcgttctcgaagtccagggccacgtagcacagcttctccttgatgtcgcgcacgatctcgcgctcagctgcggagggcagaagcaggagaggagccctcactcaggggccgccgccggccctcccgc

SEQ ID NO: 105192 - DNA, 193 bp, Homo sapiens
  chr1:229568157-229568350
  hyper
cgccggagtccagcacgatgcctgtgcgcgcgcgggagagagtgagtggctgggggcgaggccgaggctaggctctcagcgctagcggcgggggcgggggcgggggcgggggcgggagaggggactgggggcagcgggcactcaccggtggtcctgccggaggcgtagagggacagcacggcctggatggcca

SEQ ID NO: 105193 - DNA, 612 bp, Homo sapiens
  chr1:229569691-229570303
  hyper
ccttcaggttcccctcggtagtgccctgtccccctgtcccctcccaactcctgccctacctgggcgggtagctacaactgctactctcggctcgggccctggtcgccgcggaggggaagcgaggcttcacttggcgctgtccgctgcggtggccgcttgtccctctgctcaggttttatatagcccgcgggcattccctccgcgccaccccgcaggaatgtcgctgcccttctcgagccatatttgggtgttgggcactagagccccctccctcggccggttcgcggcctgggcccccgcccgggtcccctgcgttgaccaaagaaggagcgggttggcccggtcccaggtaacgcgggccgggccgtatatggagtgtctccctagcgggtttgcccctcctgacccgacccagttgcccgccggaggggatggggtggggcgagggtcaccgcgttcgccggtgggtgcatgtgtgcgcctgcgctccgggaaccgcacctgtcccaaaggcctccccaaccatgtccactctgagcgccctgggcgctcgggaaggtgcctgactgctgacttccaatatttcaactcctcttcgggttctttgctcag

SEQ ID NO: 105194 - DNA, 478 bp, Homo sapiens
  chr1:229643802-229644280
  hyper
gagatcacttaccgcgagcttagcgagctacgccggccgaccggcgagaagagcactggggagctgactgcagaccccaggggcagacccttcctgctagccgtccggggcgtggagccgggcccgagtccggccagcgggccccttcgggacccggtacccggggtccgcggagaaggggcggctgggaacatgactccaaggagcagcgactaggacagcgagggatctggccgtcaggttgcagcctggcctgcgcgcggaacttaaacacctaagggaagagatggcgcgcgatgatgacgtcaaacgcaatggctcccgcgggttgtggtcggagcgctggcgggggcgggatcgtgacgttaagggcggtgcccagtcagcgaggtaggtcgggaaggcagccggcggccccagatctagaaccgctgcagtgccgagcttccagggacgtgaagccggaaagccaggcgcc

SEQ ID NO: 105195 - DNA, 30 bp, Homo sapiens
  chr1:229693698-229693728
  hyper
cgaaatcttgacaacgctactctgaggtga

SEQ ID NO: 105196 - DNA, 157 bp, Homo sapiens
  chr1:229694642-229694799
  hyper
gccacccttccgagcgcccccaacccgctcgggtgccctccctgcagcgcccccaactgcccgctggcggaggagcgccgggcgcgccagctgggacgaggcccgggaagcccaggagcacggctgcgcctgcgtactgggcgcagggaactttttc

SEQ ID NO: 105197 - DNA, 30 bp, Homo sapiens; identical to SEQ ID NO: 36944
  chr1:229762133-229762163
  hyper

SEQ ID NO: 105198 - DNA, 95 bp, Homo sapiens
  chr1:230202415-230202510
  hyper
aataagagcaagcccgttaagggtctgaggtggccccaaagaccaaggctgaagaggtgacagtctgggcaggaagcaccgaggccactaccgcc

SEQ ID NO: 105199 - DNA, 30 bp, Homo sapiens
  chr1:230203979-230204009
  hyper
cggttccgcgtcctcgtgccgccgctccgg

SEQ ID NO: 105200 - DNA, 220 bp, Homo sapiens; identical to SEQ ID NO: 1200
  chr1:230223229-230223449
  hyper

SEQ ID NO: 105201 - DNA, 30 bp, Homo sapiens; identical to SEQ ID NO: 36946
  chr1:230240616-230240646
  hyper

SEQ ID NO: 105202 - DNA, 31 bp, Homo sapiens; identical to SEQ ID NO: 1201
  chr1:230468967-230468998
  hyper

SEQ ID NO: 105203 - DNA, 1398 bp, Homo sapiens; identical to SEQ ID NO: 36948
  chr1:230561208-230562606
  hyper

SEQ ID NO: 105204 - DNA, 30 bp, Homo sapiens
  chr1:231003617-231003647
  hyper
actttggtcagcctcgcttacgacagctcc

SEQ ID NO: 105205 - DNA, 30 bp, Homo sapiens; identical to SEQ ID NO: 36949
  chr1:231004164-231004194
  hyper

SEQ ID NO: 105206 - DNA, 30 bp, Homo sapiens; identical to SEQ ID NO: 36950
  chr1:231004626-231004656
  hyper

SEQ ID NO: 105207 - DNA, 194 bp, Homo sapiens
  chr1:231053144-231053338
  hyper
tacttgctaataaaccgcctctagggggcgctgacatacacgttaacttggtttttcatcaacagtaccattgtgcctttcagtggaagttgacctggtacattccactaagcactttaaacactcaaatatcttgttgtatattctgctgtgtgtgccttgcaaagtaccaatatatccgtaatcctgggtaa

SEQ ID NO: 105208 - DNA, 30 bp, Homo sapiens
  chr1:231113857-231113887
  hyper
taagatgtgccaggcgtctccctccggggg

SEQ ID NO: 105209 - DNA, 33 bp, Homo sapiens
  chr1:231114516-231114549
  hyper
cgcggcggccacagcgccgccccagaagcagca

SEQ ID NO: 105210 - DNA, 30 bp, Homo sapiens; identical to SEQ ID NO: 36952
  chr1:231114788-231114818
  hyper

SEQ ID NO: 105211 - DNA, 30 bp, Homo sapiens
  chr1:231115072-231115102
  hyper
ggatttggggaccgcgaggagcagggtcct

SEQ ID NO: 105212 - DNA, 584 bp, Homo sapiens; identical to SEQ ID NO: 36953
  chr1:231175064-231175648
  hyper

SEQ ID NO: 105213 - DNA, 707 bp, Homo sapiens; identical to SEQ ID NO: 36954
  chr1:231175692-231176399
  hyper

SEQ ID NO: 105214 - DNA, 1890 bp, Homo sapiens
  chr1:231296817-231298707
  hyper
cgctacgactccggtctttagtctttgtttggagcacgggagaacctgggacggagggaggcatgacttcaatattcatatcgttgttaaataaacgatttcctaatttgtatctgtttcatgccagcgtgaaacttctgtaggcagagccggctgcgctgccagcactttcttctgctcgtccccacccacctctgcctcccccacccagccttccctcggcagcagcggggaagaacagccgagcagaccaaacagccggggccgcgggtgggaggctgttcccgcagctcgtggctggcgttggagaatgtggagattttcccattcataaaaggaacgtctccgcttgccgccttcccgtccgccgcacaccgccacatccgcagcggggtagggctgggtctgggggcgctgggttcccaggggtctacccgggcgcgctctcgcctttctcaggaaaccccattttgtgagcggcaccgcgtgtcctctctcagtccgtgcacacagttgacctggagcgcggatgagcacccttggttgaaaggaagagacaaaatggcttgtggttcaattcataaataaaacctcacccttggacttcaggctgcccgacattttgggacttggatttttttgctttatcgtagttttaggaagcgactgtcaggccatgttgcctatccatttctaaacgactggctttttaggatcccgttttcacccttctatggcggtgggttgggggtggggtgtggaactggagtggcccagggagacgatggcaggggcggggcggggcaggtcgttgtactgattcaagatacaatctccatccaaataatggattgttattaacaatgatcctccctgcaaaacccttaaaattgccccttgattccctagcagcaagaggcgagcccttattcgctgagctgaagcctcctcccccctcctccccattactctctgctctggaaattacaactcctcggcgcgccgcgcggggaggcagcggcagcggcgggagggaggcggggaggggattcccgagccagccggacgctcgccctccgcccgccggctgcagcgtcgcgcggcccaaggtcagaggcgccgcaggagcagcagctgggaaccagggaagcgggtcaatcccggccgcagggagaaagccccagggcgcagtcagccggcgtccacagccgcccaggagtagggtgagcggctgtctccgggccggtcgggtcccgccgaggtggccgcggccccagcgacccggcgggtggcggcccaggggtcggcgagcaggcagctggagccccaccttcggctcccgggcgctgtccgccgcctcgtggtgctgatcccagccccacggctgagcggccttcgcacctgcctgtctcacctcgctatcaccccgataaggagttgggccggggcagaaggggggcctcggggtagccgcccaccggagccaggggctgaagcagcgagcgcacagcagcccggccgctggtcctggggtggagaggaggcgcgcgctgcagccggcggcggcgctggtgctgattcatcacctaaagctcctcgcaggccaccgcgagggcagccgaccggctccggaatctggccgcaggttgaagccgctggtgcgggaccctcgggcaggaggtgaggaccccctcccttctctcgcccctcaatcatcttagggcggtggctacaggacagagagaggggcgtgcccctcggctgtgaagtgggcatgcccgtgtgatgcccccgcccgtcgtctcaccggggcgcaccgcgctggtcctcctccgccagtctcccgagctccggccattcatccccagcgcagagcagcgctggcagccg

SEQ ID NO: 105215 - DNA, 251 bp, Homo sapiens
  chr1:231298924-231299175
  hyper
cgctgcggctggcccggcctgcggcggtgcaggcgggagtgcagctggcggcctcggcggcggtgcgggaggtggcggagaccacgcggacaagctcagcttgtacagcgagacagacagcggctacgggtcctacaccccgagcctcaagtcccccaacggggttcgcgtgctgcccatggtgcccgcaccacccggctcctcggctgcggcggctcggggtgccgcctgctcctcgctgtcctcgtctt

SEQ ID NO: 105216 - DNA, 30 bp, Homo sapiens
  chr1:231299557-231299587
  hyper
caagagcccgggaggcgcgggggcgggggc

SEQ ID NO: 105217 - DNA, 412 bp, Homo sapiens
  chr1:231376706-231377118
  hyper
acacaggagacccacgttcctcaaatctgttctccacgtgggctcctgggaccccgcactcaccaaagtcgtaaaggttctggagcagagcgtcaagaagtgtcggagaactgggaggcgtggaggaccccggcccttgctcctgcgacattgtggggtcagccgaggaatcaaccctcattctgccgcgctgcacccccgcttccgggttccgcgactgcgcgcatgcgctgcagggccctgcgcggcttccgtcctggctgagatggcggcgcccgggatcctgtgtagcggctgcagagggtgccgccgccctaggcgaagtagggccgtcctgagcgaaagaaccgcccccagcaggagcaccaccacggcttagcaaagaatcccagaccccgcccgggaaggcagc

SEQ ID NO: 105218 - DNA, 30 bp, Homo sapiens
  chr1:231473309-231473339
  hyper
cgcttcaggttctgcgccgtctcctccgcc

SEQ ID NO: 105219 - DNA, 35 bp, Homo sapiens
  chr1:231473771-231473806
  hyper
gcgcatgaaccgagcgtgacgttgaggtttgaaat

SEQ ID NO: 105220 - DNA, 30 bp, Homo sapiens
  chr1:231556667-231556697
  hyper
taggcagtttcagtcgcaggcaggggctgc

SEQ ID NO: 105221 - DNA, 30 bp, Homo sapiens; identical to SEQ ID NO: 1208
  chr1:231557900-231557930
  hyper

SEQ ID NO: 105222 - DNA, 30 bp, Homo sapiens; identical to SEQ ID NO: 36961
  chr1:231663871-231663901
  hyper

SEQ ID NO: 105223 - DNA, 92 bp, Homo sapiens
  chr1:231664199-231664291
  hyper
caggtccaggaggacgcatcgtctttttagtaacagtgcatgctgtgaggcttgtagagtcgcctctctcttcaggcgcagcagagggcggc

SEQ ID NO: 105224 - DNA, 30 bp, Homo sapiens; identical to SEQ ID NO: 36963
  chr1:231664576-231664606
  hyper

SEQ ID NO: 105225 - DNA, 30 bp, Homo sapiens
  chr1:231762223-231762253
  hyper
atgcgtctggaaggcgccctcctgtacccc

SEQ ID NO: 105226 - DNA, 103 bp, Homo sapiens
  chr1:231762649-231762752
  hyper
gccggcggcggcggcgtgagccaccgcgcaggtaggggagctgccacagagtcctagcacgtcctgggggggtcctggcaaggagggcgcgctctggccccca

SEQ ID NO: 105227 - DNA, 109 bp, Homo sapiens; identical to SEQ ID NO: 36964
  chr1:231763011-231763120
  hyper

SEQ ID NO: 105228 - DNA, 511 bp, Homo sapiens; identical to SEQ ID NO: 36965
  chr1:232765025-232765536
  hyper

SEQ ID NO: 105229 - DNA, 889 bp, Homo sapiens
  chr1:232765595-232766484
  hyper
cggattccccgacacgaaccttcgcaacgccgtccgccggaacctgctacagcctgtgcgcgccgggcggcgcgtacccgggctgccgcctcgccgcccgccgctgcccggggctgcccatcggcccggactctccccgcgccgggctccggcggaggcggcccggacccgctggctgcggctggagctctcggcctgcgctcgggcggccggcgggggcgcggtgctcctcctccgtcctcctcctcctctcgctccgccagctcctcccgggctcccagtctgccgcgccggctcccgatgccaccgcccgcccgcccagcggcaccgccccccgcccgctctgcgggctcccattggtcgctgcctgcaggccccctcggccccgccccacgattgggcgcggacgccgtcagtctcaccgtccgcccggctccgggcgcagccggtgcgctgttcccaggccccgcggcgcgcgggagctgcgcgtccaggaggggcccggacgcccttcttggggagggggctgcggggcgcatcatgagcggcgctgggcgagctcgagggccgggcagcctacctggaccccggcttctagagagccgtcgccgtccttgtcgagactcgctttcgcccctctgaggaataagttaaaaaccgcgagtctggttctgagccgccccctggcgcaggcgcgaccccacccggccctcccgtctcccaacttgggacagacgcggcggccgggcggtcggatccgtgagcctcggccgctggggctacatacacagcccaggacgccacagaatcgccgaggccccgcgaacgcccaaacggccgcaagtcgaagtgatcccatctgaagaagacagcgcgaggaagcgagacc

SEQ ID NO: 105230 - DNA, 565 bp, Homo sapiens; identical to SEQ ID NO: 36968
  chr1:232941033-232941598
  hyper

SEQ ID NO: 105231 - DNA, 278 bp, Homo sapiens
  chr1:233086109-233086387
  hyper
agtttaataactgacgttctcacgcacttatctctgcaaataccccacaaaagccctgaacccagaatgaaacttaagagaccgtacaacccgctccgcctataggaactgccgcggcacaggcgccaatgccgagggctgaatgcgcaggcgcggaccggggactcgggagaaggcgcatgcgtggtcttgagggcggtgcttccggtcaaagcaccgcttgggggcggggcctgcgacacgcggtgggcgggtcctgagtcgcgaccctggtccgg

SEQ ID NO: 105232 - DNA, 30 bp, Homo sapiens; identical to SEQ ID NO: 1213
  chr1:233143151-233143181
  hyper

SEQ ID NO: 105233 - DNA, 30 bp, Homo sapiens
  chr1:233431505-233431535
  hyper
tcagaggttgcttccgaggctcctcccaac

SEQ ID NO: 105234 - DNA, 30 bp, Homo sapiens; identical to SEQ ID NO: 1214
  chr1:233463477-233463507
  hyper

SEQ ID NO: 105235 - DNA, 30 bp, Homo sapiens; identical to SEQ ID NO: 36972
  chr1:233464495-233464525
  hyper

SEQ ID NO: 105236 - DNA, 30 bp, Homo sapiens
  chr1:233724110-233724140
  hyper
gaggtcctggcacgtcgccgataacaatct

SEQ ID NO: 105237 - DNA, 330 bp, Homo sapiens
  chr1:233749400-233749730
  hyper
cacactacacgcgcgcgaacacacacacacacacacgcacacgccgcgcgcggtcagctagagtttggctactggacccaggaagggagggagcgggaggagctggtggctgtcgggtcggggtctgggcgccaccgagcgcccgccccacctctggagtgcgcagaaggcggtgcgtcccgggccccggcagcccagcccaggcgctctggccaagtttgcgcgcggtctccgctgactctcgggttacctgagccggcaaccacgtcagcgccacatcatctgggctttttatattgcaaggaaacaggaaaagaaggaagaaaaaca

SEQ ID NO: 105238 - DNA, 923 bp, Homo sapiens
  chr1:233749768-233750691
  hyper
cggaggagcggggcgggcgggcgcgcgggggagcgggcggcgggcgggagccaggcccgggcgggggcgggggcggcggggccagaagaggcggcgggccgcgctccggccggtctgcggcgttggccttggcggcggcggtggagaagatgctgcagtccctggccggcagctcgtgcgtgcgcctggtggagcggcaccgctcggcctggtgcttcggcttcctggtgctgggctacttgctctacctggtcttcggcgcagtggtcttctcctcggtggagctgccctatgaggacctgctgcgccaggagctgcgcaagctgaagcgacgcttcttggaggagcacgagtgcctgtctgagcagcagctggagcagttcctgggccgggtgctggaggccagcaactacggcgtgtcggtgctcagcaacgcctcgggcaactggaactgggacttcacctccgcgctcttcttcgccagcaccgtgctctccaccacaggtagggtatcctgcgcgccccctggccgccccggccacctcgcccacaacccacacaccccggccccggcgccccgggcccctctaaccctcccaccccaccccccacctttcgccatcccggctcctccagcccgcctcccctcactgtcctcccgaccctccgaccttccccttactggcgtccccggcctctgcctgggtgactcgggagggcaagccctgcggagccggaagccagagaggtgactccagacgtgacttggttgttgccgtccgtaactctggggaagtggtccctaacttcggcctgggtggctgcaggtgcttcctccccttgagttcttttttcgcaacccactaagccaaactgtcgggtttgaatgtgtagcagcacctggccgccgtgcggcaaggcag

SEQ ID NO: 105239 - DNA, 223 bp, Homo sapiens; identical to SEQ ID NO: 36975
  chr1:234040257-234040480
  hyper

SEQ ID NO: 105240 - DNA, 212 bp, Homo sapiens; identical to SEQ ID NO: 1219
  chr1:234041148-234041360
  hyper

SEQ ID NO: 105241 - DNA, 118 bp, Homo sapiens
  chr1:234041415-234041533
  hyper
cgggccggtggggctcacgtccatcgaggagcggatcctgcgcatcactggctactatggctaccagccctgggcagcgagctgcaaaagtaagaccccctcacgtcatgtttcccgt

SEQ ID NO: 105242 - DNA, 30 bp, Homo sapiens; identical to SEQ ID NO: 36978
  chr1:234261159-234261189
  hyper

SEQ ID NO: 105243 - DNA, 593 bp, Homo sapiens; identical to SEQ ID NO: 36979
  chr1:234349863-234350456
  hyper

SEQ ID NO: 105244 - DNA, 22 bp, Homo sapiens
  chr1:234350469-234350491
  hyper
cgtggggggatctggcagcttc

SEQ ID NO: 105245 - DNA, 517 bp, Homo sapiens
  chr1:234508998-234509515
  hyper
gctctgtaacactccgtccagctctcgcactctcagatgcaaacttccacacaaactcctcggctcgccttgtcccgcgggactagcatatcaagccttccgggacacaccgtgcgatgatatatacgtatatacccctcttgcccttgaaggccggaagtcggtcttacagataaaagcgaaacaggaagtcccgcccctctatggaaagtaaatggtagctcggaagggtcaaaagagtccgcggtttcgccgcgtgagttgctttttgcggctggggaggtctacgcttctagagcttgagccagcggggcgaccctgcagtggcaggactcggcaccgcgccctccaccgccggttggtggcctgcgtgacagtttcctcccgtcgacatcgaaaggaagccggacgtgggcgggcagagaggtcggcttgctgatgggtccgggtggggcgcgcgtggactatgggcccgggaggtcccttactgtccccgagccgcgggttcctcttgtgc

SEQ ID NO: 105246 - DNA, 30 bp, Homo sapiens; identical to SEQ ID NO: 36983
  chr1:234613475-234613505
  hyper

SEQ ID NO: 105247 - DNA, 30 bp, Homo sapiens; identical to SEQ ID NO: 36984
  chr1:234614952-234614982
  hyper

SEQ ID NO: 105248 - DNA, 200 bp, Homo sapiens
  chr1:234736238-234736438
  hyper
gccattctgaacaacgatacaaagtgaaaaaataaattttttaaaaaagaaagggaaaaactacaatttgaccattctgaccagcctccttgttccaactggcctcttgatttgtataaagataatggggtccggcggcccccttgatgcatgaattgcacgctgggcataatgaacttattgtgcgaaagcactttgga

SEQ ID NO: 105249 - DNA, 139 bp, Homo sapiens; identical to SEQ ID NO: 36986
  chr1:234743047-234743186
  hyper

SEQ ID NO: 105250 - DNA, 30 bp, Homo sapiens
  chr1:234743760-234743790
  hyper
ttaaaaccttcaggcgtacgggattctgag

SEQ ID NO: 105251 - DNA, 212 bp, Homo sapiens
  chr1:234744131-234744343
  hyper
cttcctctgctctccgtccccttttctcccctagaccccctcacttcacagccgcccctacctgctttagacccgttggccccgttggcctcgaaacccaacaacctgcctgcagtcagggccggctccttcttaaacttgctctcgaagggccccgagtggccgtgctggtgcagcgccagcagcgtgtcgcgcacggtcttgggcctgtt

SEQ ID NO: 105252 - DNA, 30 bp, Homo sapiens; identical to SEQ ID NO: 1222
  chr1:234745188-234745218
  hyper

SEQ ID NO: 105253 - DNA, 30 bp, Homo sapiens
  chr1:234746167-234746197
  hyper
ccacccggctgtcccgaccaccctcaggat

SEQ ID NO: 105254 - DNA, 30 bp, Homo sapiens
  chr1:234746553-234746583
  hyper
ggactagcctctcccgaacaccaagtgccg

SEQ ID NO: 105255 - DNA, 30 bp, Homo sapiens
  chr1:234748603-234748633
  hyper
gtatgttttagtcacgtagactctgccctc

SEQ ID NO: 105256 - DNA, 191 bp, Homo sapiens; identical to SEQ ID NO: 36989
  chr1:234812046-234812237
  hyper

SEQ ID NO: 105257 - DNA, 142 bp, Homo sapiens; identical to SEQ ID NO: 1223
  chr1:234828213-234828355
  hyper

SEQ ID NO: 105258 - DNA, 196 bp, Homo sapiens
  chr1:235257186-235257382
  hyper
taaatgtttgttgagcgaacagaagagcgaatgatgcacacgaatatggaggtctactaatatgtgcttaaggaattaaaccggtgatgatagagatgaaagaggcgggtaggtcatcgcagtgcctgcggtaggcactagatggcgcccaagcacaccaagaaggcgctgagaggcgggccgagcagcatgagtt

SEQ ID NO: 105259 - DNA, 30 bp, Homo sapiens
  chr1:235267674-235267704
  hyper
ccagagggcgccagcgcgctccttcgcgtc

SEQ ID NO: 105260 - DNA, 30 bp, Homo sapiens
  chr1:235291846-235291876
  hyper
cctcctgtgaagggcggcggccgaaggcag

SEQ ID NO: 105261 - DNA, 285 bp, Homo sapiens
  chr1:235292116-235292401
  hyper
tcacacccgacggccgcgggccaggaacacagaaaggccgagcacacgccacttccggtcccagtcaactaagggcctcgaggtcgtccgcggcagagcctgagcagaggcccagagcgcggctcctgcgcctgcgcagtgggcgaagccggcgtttcccctgcgccgctgggtgtacgcactggagtcgggaatttgcacgtgaccacggactttttttcatatccgccgaccatgctgtaacgaggcgtacgcgttactggcgtgcacgtactcagaagacta

SEQ ID NO: 105262 - DNA, 30 bp, Homo sapiens
  chr1:235324789-235324819
  hyper
agccaggctaggagcggggtgtccacccaa

SEQ ID NO: 105263 - DNA, 30 bp, Homo sapiens
  chr1:235490693-235490723
  hyper
gagggcctgtgggccgcgggcaggaccggc

SEQ ID NO: 105264 - DNA, 30 bp, Homo sapiens; identical to SEQ ID NO: 36991
  chr1:235491348-235491378
  hyper

SEQ ID NO: 105265 - DNA, 111 bp, Homo sapiens
  chr1:235491612-235491723
  hyper
agttctttagaacccgcctatacactgttcctattggtccctggatacaaacaacgacgccattttcccaccagttctatggaaacagaaagttacgcctcaaggctttct

SEQ ID NO: 105266 - DNA, 345 bp, Homo sapiens
  chr1:235530665-235531010
  hyper
gtcgctgacattctcgtctatgctccagcagccgtacctcactccggtggaggcgggacttcctacagcacttccggccagagcctcaagcttcgctgctgggcagttggctggaggggctgctgctgggaacacctggagtctccgcgggcaggtgagcttcagaggttcggggagctttcggaacgagcattcctggccggtgcgtcaccctgcagtgctcttggccttttcttcctttcctggaatcttcccagattgccagagccgggcgttgcctgctccgtgcgctgggaggcggtccagccggctgggttggggccaccctgcgcctcctggaaggcc

SEQ ID NO: 105267 - DNA, 30 bp, Homo sapiens
  chr1:235533175-235533205
  hyper
gagtggattattcatcgaaggtcctatgtg

SEQ ID NO: 105268 - DNA, 30 bp, Homo sapiens
  chr1:235666875-235666905
  hyper
ctagatttgtttaaccgacttacatcataa

SEQ ID NO: 105269 - DNA, 189 bp, Homo sapiens
  chr1:235667333-235667522
  hyper
tttggcccttcccccgcctccaacaattcccggcgaagccccgcggcaccaagccgggcctcccacccccccggcggccgccaacccgcccggccccaggacctcacctgcagggccggccccggaggcgcaggcgggcggcggggagcgcagccgcagccagaggtgcagcgcggccccgagcacaca

SEQ ID NO: 105270 - DNA, 65 bp, Homo sapiens
  chr1:235667931-235667996
  hyper
tgagcctaagcacgcgcttccgtcactcggcggccgcgggggcgaagcgcgaggccccacacaga

SEQ ID NO: 105271 - DNA, 30 bp, Homo sapiens
  chr1:235668399-235668429
  hyper
agggtagaactgcacgtgctccgggttcat

SEQ ID NO: 105272 - DNA, 1426 bp, Homo sapiens
  chr1:235811919-235813345
  hyper
gtccactgtgggaagcggcacacctcactcatgagcagacgacaggactggcacgttttaatggagcacacgggcgcagcctaggcggccttttgctccggctgagaggcacgggcccggtgccagcatttgacagtcctgggaggcgacgggtagaggagagacgcggcagccgcggggccggggagacggtgggaggcccggcgtccatcatccactttattacttgatcaaactttaacattttcgggtttcctaacaccttagccccaaatactcgaaatgaagcaaatcttaaattaaggagtctttccccaccacgctctgtcctcctccccacttcaccctcccgccgtttcgcgttatttccaaggcaatttaaaaaatcaagccaaacaaagctccccggttgctgccgggcgcgcgcggcgaacgaagcacatttcagttcagcaccagcctcggggacagacgccatcaaggaggtgaggaaaaccaccctcagctgcggtggctccagcgtcaccccgagtgctcccgaggcggcgtctgggctgctggggagccaggagggcttcctcaggcactcgccagaaacatttccccaaagaaaacgcccaaccagccacgccatctcctgccactgaggtccttttccacgggggacgtccccgctgggaaaacagcaaacgctctgtgacctacaaatggaagaggggacccccgagcccccgcctgcctcatgccggagggaccgggcgcccccagccccggaagcccctggacgcgctccgagggggctgtccacacccgcgcgcgggcttccccggggcccggcgggaggtcccgggagaggaggccgagggaaccacaggtctttgtgtcgcgtgcagcagcagctggcggcgtgaggaccacaccggcgccagagccgtctccctaggtccggagactttcaccccgagtttcccttccgcgtctggctgcaccgggctgggctctccccgcggacacccggggctccggccgggcgcccacttacccggagcgggatcacgcgcgggcttcgtctgcagcgcggtgctcgcggggggcggccaggccgagcggcatcgctccgcatcggggcgcgggccgggctcgggtgcaaacgcgcgcctcgtgcccctcccgccgcccgcggggtctccgcgtcccgtcaccggccccgccccgcgccgcgcctcccgccctgcagggcccgaccacgcgggcctgggggcgcaggcggaccctcccccggccctggacgctgggggcttctgctcggccccctgtgccgtgggggcccagactggggaagggagagccggcgactctgcgaccctcgcccccgttccacgctggccgcgcccactccgccgcggggtctcgcccgggaaatccc

SEQ ID NO: 105273 - DNA, 129 bp, Homo sapiens
  chr1:235813667-235813796
  hyper
ggaggggtctggggacggggccgcggtcagcgcgggctccccgaagcctcaggtaccgccctcgctcggggtgagctccagcgcctgggccgttggggcgcgggccgcttcccaccctgcaccaaggga

SEQ ID NO: 105274 - DNA, 58 bp, Homo sapiens
  chr1:235814009-235814067
  hyper
ggttctaggagcgactgctctccaggcctcgtccctgtggcaccgcaggcttttgcgc

SEQ ID NO: 105275 - DNA, 30 bp, Homo sapiens
  chr1:236030541-236030571
  hyper
gaccctggggagtgcgagcaccgtttgaga

SEQ ID NO: 105276 - DNA, 238 bp, Homo sapiens
  chr1:236227505-236227743
  hyper
tctggtcccgctcctcgtttggggcctccgtggtgacaatgcctggccacaggaaatgggatcactgggagccctgtgtttcccgctctggactctggactctgaaacgagcccaactggaaagcagcatcactgccaagacacatccggagtccacacacaaatacaggaggctgccggcgaaactctcccgcagccacaagagtcccggggcccgcgcgcagactgcgatccagct

SEQ ID NO: 105277 - DNA, 151 bp, Homo sapiens; identical to SEQ ID NO: 1228
  chr1:236227769-236227920
  hyper

SEQ ID NO: 105278 - DNA, 602 bp, Homo sapiens; identical to SEQ ID NO: 1229
  chr1:236228021-236228623
  hyper

SEQ ID NO: 105279 - DNA, 50 bp, Homo sapiens
  chr1:236228705-236228755
  hyper
cgtggtcctctgattagggttgggtcgtggagagccggcgacgtggaaac

SEQ ID NO: 105280 - DNA, 30 bp, Homo sapiens
  chr1:236304880-236304910
  hyper
cggacaaggggggccgtgtgccgtcagctg

SEQ ID NO: 105281 - DNA, 46 bp, Homo sapiens; identical to SEQ ID NO: 1230
  chr1:236305442-236305488
  hyper

SEQ ID NO: 105282 - DNA, 86 bp, Homo sapiens
  chr1:236305804-236305890
  hyper
gaatcatgtggtgccgggggaggaagtgcggcttgttttctttcctccagtctcggggctgcaggctgagcgcgatgcgcggagac

SEQ ID NO: 105283 - DNA, 710 bp, Homo sapiens; identical to SEQ ID NO: 37003
  chr1:236444197-236444907
  hyper

SEQ ID NO: 105284 - DNA, 451 bp, Homo sapiens; identical to SEQ ID NO: 1233
  chr1:236445120-236445571
  hyper

SEQ ID NO: 105285 - DNA, 30 bp, Homo sapiens; identical to SEQ ID NO: 1234
  chr1:236445955-236445985
  hyper

SEQ ID NO: 105286 - DNA, 8 bp, Homo sapiens
  chr1:236558368-236558376
  hyper
atatcaga

SEQ ID NO: 105287 - DNA, 553 bp, Homo sapiens; identical to SEQ ID NO: 1235
  chr1:236558653-236559206
  hyper

SEQ ID NO: 105288 - DNA, 119 bp, Homo sapiens; identical to SEQ ID NO: 1236
  chr1:236559256-236559375
  hyper

SEQ ID NO: 105289 - DNA, 30 bp, Homo sapiens
  chr1:236687560-236687590
  hyper
ctctgcaggcgaggcgctccggggcataag

SEQ ID NO: 105290 - DNA, 30 bp, Homo sapiens; identical to SEQ ID NO: 37008
  chr1:236687968-236687998
  hyper

SEQ ID NO: 105291 - DNA, 121 bp, Homo sapiens
  chr1:236850197-236850318
  hyper
cgctttgtggaggtgctgtgctgtcctgtgccctcgcagccccgggggccccttaggaaagaggacacgtccggggacaggcaggacactgggcgtcgtgtgtgtgcgcgcgcgctagcag

SEQ ID NO: 105292 - DNA, 30 bp, Homo sapiens
  chr1:236958338-236958368
  hyper
cagcacgaacttggcgctgtgacttttcct

SEQ ID NO: 105293 - DNA, 30 bp, Homo sapiens; identical to SEQ ID NO: 1237
  chr1:237093369-237093399
  hyper

SEQ ID NO: 105294 - DNA, 82 bp, Homo sapiens; identical to SEQ ID NO: 37010
  chr1:237205141-237205223
  hyper

SEQ ID NO: 105295 - DNA, 164 bp, Homo sapiens; identical to SEQ ID NO: 1239
  chr1:237206101-237206265
  hyper

SEQ ID NO: 105296 - DNA, 153 bp, Homo sapiens; identical to SEQ ID NO: 1240
  chr1:237206511-237206664
  hyper

SEQ ID NO: 105297 - DNA, 204 bp, Homo sapiens
  chr1:238027724-238027928
  hyper
tgcctccaagcgccacgtgggggcgctgcctcaccactgcctgacctgcgcacgtgtccgggagagcgctgacctccgggccaaggccactgtgtactggccatttgccaaagcggagctggcctccgcgcggttcccaattaaccaaagccacgtggatttgtcatcagagcgttcaagtgacacggccgggccctgcgcgtg

SEQ ID NO: 105298 - DNA, 2054 bp, Homo sapiens
  chr1:239549363-239551417
  hyper
agggaaaagtcaagtcgtcctctattacactgctctgcagaaacagactcactaaatgtcaaaaagtagatgcatcagactgttccttagagaaaggtttgccatggagtcgtatattgtaactgagctgaagttcactcatcgataagttgtgcccaaggaatcgaattccttccagtccttctaagcagtccagggaaaccaatttaaaagcgaacacaacaaaactaacagaccggcaaaatctatctttgaagcgccgcgggaggcacaatttgggaacaggtgaggccatgctgggtgggtgaggcccccctctctcctgcttggtgttccgctttcagccaacccaccccaggagtaccctgggatctcctcgccccctgccaggcggagaacgcggagcccagcgggcacgcgggaatggagctaggcgccggcagggcaactgggcatgctcagaagccgggcaggttttggtctcaagcacgcagcctgtgcattacaccagctctctcagtccggggaggaggaggagcaggaggaacgcgaggaggaaggagaggaggagcggccagcagtagccacgaccgccaccaccaggcagaggaagagttcgtggggaggaaaagacctctcctcccccttggagcgccttctctctgcttttggagaaagggaatacacgataaagaaggagacggaaagaagagaaaaagtgaggcgggagacagagggaaaagggcgtgaacagaaagggccggagcgtgcaggggagcacagggcgcgggggcggcactgccgagccgggagcgctgccgcttgggcaggtgccgcggccgctgcccggaggcggcatgtgacgcgcggccgcagctgcccgcgggcggagcgctctcagaccccggagcgcacaccgcggggccatcggtgccatcgcggatctccaggctcctcatcagtccgccggggccgcagcagcgcttctgggaagacgggcgatgaactgaagggcggctccgggcaggggggcacgatcttaaggacagtcgctccctgaacgcggagccggaggagacgaagggaaggtggagcggacgccacccgcgcaccgggcaggcgcggagaccggcgtgggacagccacctggagcgcagctgccaggtagggacggcgcccgccacccaggcgctgggcagagcgggtggcggtagcggctgacctggtttcttgccttatctcgttgcgaaaggaggaaaaagttttcggcgcgggtaggagaggtcttgtgtttggagtccaaagaaggggctgggtagggacgagagaggctgttgatttggggaagatgggggcacttgaattccgacagcgcgatctggtgcggagttggagttctgggactgagggtggggaacgcccgctggcactcaagtgccccgaaagggacgggaatcatgcgagcggtggccgggagagagtcggggacgtcccaccccgctctccctcgcttcgattctctcttcgccactgccggatctgaggctccaaagtgcccgagcatgaggagctactgggctccgggtgtgtttgtgagcgcactcgtgtgttgagcgtttgtctcccatctccccatttggtttcctgtcatttctaagaaggctaaagctggcacccgccaacctcgcagtggggccgcaagttcggattgcatttcagggggcgagaaggcaaatttggcacttcgagtaacacttgggcgaaggtacctagcctagtgcgcatctttactgacccggggagagtctgcactcgcgaggcagcggccgctggactgcaccggttctcctctttggaacacttcctcagcatagcctcctaatagcgaggttaatttttgcgtgtttttaaacggcgggggcgggcggacagttgactccagcagcagaattcacttgtctacttcgcggtgtgcgtgctggaattgagatcctgttctgcatgcttgtgcgtgtgtccgactctccttgcacgcatttggaagtggtagaggc

SEQ ID NO: 105299 - DNA, 40 bp, Homo sapiens
  chr1:240161045-240161085
  hyper
tccccgcgacacccgcgatcgccccccaggactggcggcc

SEQ ID NO: 105300 - DNA, 258 bp, Homo sapiens
  chr1:240161122-240161380
  hyper
cgtcctgctcaggcaattcctcccgcgcgccccgtcggggaccgggcggggacgggagaaggaaaagggcccctggctccgggaccagggctccggagggtgccgggcggggagcggaacagggaacgggctggtggcggccccaagcgggagggacggaccgacacgcggccccctggcggccttgcgactcgccgacctgcggaacctcgtcgccgccctcacagccccgcggccaccgccgacccgggccggtcc

SEQ ID NO: 105301 - DNA, 1220 bp, Homo sapiens; identical to SEQ ID NO: 1242
  chr1:240254938-240256158
  hyper

SEQ ID NO: 105302 - DNA, 280 bp, Homo sapiens
  chr1:240256624-240256904
  hyper
cgctgtttcaagccctacccgctcatcaccccctgctacatcaagaccaccacccggcagctcagctcgcccaatcactccccgtctcagtcccctaatcagagccccaggatcaagaggcggccggaaccctccctgagccgagggtccagaactgccctggcctccgtagccgccccggccaagaagcaccgggccgacggcggccttgcggccggcctgagccgctcggctgactggacggaggagctaggcgcccgcacgccccgggtgggaggct

SEQ ID NO: 105303 - DNA, 278 bp, Homo sapiens
  chr1:240775034-240775312
  hyper
tacccggggtgaaaccggcgagacgtccactcagggctttcggtcctgaccagccacggaacaaacaacgtcaattcattctaagtgcctggtgaaggtagaaatcagaaaccgtgtctgtgtcacgttagtcgtgacaagctgcgtacctgcaatgacgtgatggaagcctcctcctcgggtcccttctctctctctctctccctctccctctgccttctctgagttctctagtccacagcggggtctaagtttggtctcccgccgccgctttcagt

SEQ ID NO: 105304 - DNA, 111 bp, Homo sapiens; identical to SEQ ID NO: 1245
  chr1:240775378-240775489
  hyper

SEQ ID NO: 105305 - DNA, 1249 bp, Homo sapiens; identical to SEQ ID NO: 37018
  chr1:241519637-241520886
  hyper

SEQ ID NO: 105306 - DNA, 777 bp, Homo sapiens; identical to SEQ ID NO: 37019
  chr1:241587077-241587854
  hyper

SEQ ID NO: 105307 - DNA, 34 bp, Homo sapiens
  chr1:241588236-241588270
  hyper
agtcacctgccacctcggccgcctccggaccttg

SEQ ID NO: 105308 - DNA, 30 bp, Homo sapiens
  chr1:241682228-241682258
  hyper
cagaacactatgcccgcggtattcggaatt

SEQ ID NO: 105309 - DNA, 30 bp, Homo sapiens
  chr1:241682459-241682489
  hyper
gctatggggcaggacggtgcgggagctgcc

SEQ ID NO: 105310 - DNA, 307 bp, Homo sapiens
  chr1:241682869-241683176
  hyper
gggatggcggcctgcgctcaccattcgagccgcgttcggaggccaaaacgagggcacggccgcgccacccaagccgggagccgaagctaaggctgcggctggagcccgcacgaggggacgcgagcgcgcgaggagccgaagtgctcggtacatggtgctgagggagcttgggtagaatttctgggcggctgtggccacgcctccacgccggttgtcagaaaccgttccgcccaccggcctccgctcttatccaatcaacagcctcacaccgacaggtggggcaggaccaatcgtgaatgaccagtaa

SEQ ID NO: 105311 - DNA, 30 bp, Homo sapiens; identical to SEQ ID NO: 37021
  chr1:241695149-241695179
  hyper

SEQ ID NO: 105312 - DNA, 30 bp, Homo sapiens; identical to SEQ ID NO: 37022
  chr1:241803352-241803382
  hyper

SEQ ID NO: 105313 - DNA, 186 bp, Homo sapiens
  chr1:242011572-242011758
  hyper
cagtgagttaggggcgtcggagcgggtttctccaaccgcaatcggctccgctcaaggggaggaggagagtcccttctcggaaggtgagaggagcgggctgtgcggaggctaatgggtgggttcccttgggggtcgacctgcgcgtcacctccgaccctcctctcgggattcgggtcttccaggaag

SEQ ID NO: 105314 - DNA, 30 bp, Homo sapiens; identical to SEQ ID NO: 37023
  chr1:242034247-242034277
  hyper

SEQ ID NO: 105315 - DNA, 133 bp, Homo sapiens
  chr1:242161790-242161923
  hyper
ccggggcacgctctgcgccacctaccggatgatgctgaggaactgggtcatggtcagctcctgcgggaccaggaacttggttttgtccagcgggggcaggaacgtctccctggggtagcgctccactaccacc

SEQ ID NO: 105316 - DNA, 905 bp, Homo sapiens; identical to SEQ ID NO: 37024
  chr1:242686694-242687599
  hyper

SEQ ID NO: 105317 - DNA, 423 bp, Homo sapiens; identical to SEQ ID NO: 1250
  chr1:242687610-242688033
  hyper

SEQ ID NO: 105318 - DNA, 163 bp, Homo sapiens; identical to SEQ ID NO: 1251
  chr1:242688080-242688243
  hyper

SEQ ID NO: 105319 - DNA, 447 bp, Homo sapiens; identical to SEQ ID NO: 37027
  chr1:242688277-242688724
  hyper

SEQ ID NO: 105320 - DNA, 31 bp, Homo sapiens; identical to SEQ ID NO: 1253
  chr1:243418478-243418509
  hyper

SEQ ID NO: 105321 - DNA, 30 bp, Homo sapiens
  chr1:243419515-243419545
  hyper
tggggcagtatcaacggagtctccggggtg

SEQ ID NO: 105322 - DNA, 544 bp, Homo sapiens
  chr1:243646219-243646763
  hyper
agggcgtgtgtggttcgcaggctgtggggggcttcttgcagcgggggctgctgcctaaacagactccgcgggccccatgatggcaaaccccctcgccccgttcatgacttaatgcctcctagaagaaaaggctaaaaacaagacacacagaacaagaaattgcactctctcaaaacgacagtcgccctgaaacggacgctggaagaggtttccaggcccgtggcgacggtgaggggggtgaaggtcgcaggtggagggcacggggcggcggctgcggagcccggggaggaggcggcgggcgcccgggtcttcctcggagcgcgccccctgggctgggcggcgtgtccctgcctcccgccggcgccctcgtccccgcagcagcgtccccgccgccaccccgctgcctcgtcgcctttctcgcaaacagcggtgccctctacgtgggggatcctggaggctgctgagcacgagcgccctccgcgacccgcccctgctcccgcctccactcttgcctcggggggagggtctcagtcttctgcctaag

SEQ ID NO: 105323 - DNA, 1 bp, Homo sapiens
  chr1:243646877-243646878
  hyper
c

SEQ ID NO: 105324 - DNA, 857 bp, Homo sapiens; identical to SEQ ID NO: 37031
  chr1:244012278-244013135
  hyper

SEQ ID NO: 105325 - DNA, 1000 bp, Homo sapiens
  chr1:244013706-244014706
  hyper
catcaccagaaaacaccgctcgggcgggggccgggtcacgccggcggggcggcggctctgggccccggggcgcgcccggcgcggggaggggttctgcggcctcctcccgggctgcgcctcgctgaggggaccccccgccgcctccccgccccctccttcctcccgctcggggccgccgccgatcggttctcgccgtcgccgcggggcttgttgttgactttgaggaaaactcctgacgtcaggggctggctctcggcgactggcgggagcggcttccccgcgtccccggccctgcccgccgcctctgctcccctccctgcccggccctcgtcctcaggcttccccgcgcccccaaaccagcggtgccccgcgccccctctcctctcgcgagaacatccccctagccagccagagccgggagcgggggcagtcgctcccgggcgggaagttctgggtttccccctcgcccgcgtggcccttggcgggcacccgaggcccgggagcggaggctcctcgcccagccgcttcctcggcgcatccgcccacccgccctggccgcggacgcgcgcgccgccaggccccgggcgtctcctccagtccgccgcggccccttggggagatgggcccggcgcgagggctcgcacctggaagcccacgaagtgggcggtgcccaatgaggtagggaccggagagcgcggagcagtccagaagccgaccccaccccctgcacctcggggaagagggaacccgggtcagcccgtagcaagaatcattcctgactatcccaggagaccacggcagaccaaaaacacctctctgaacagccttccgcaccgctcgctgcaagcattcgtccacacacggtacacagattgcgggcggatcgtaattcactcttgaaatcacaccctttttagggatattcgttttcaatgactttgggaaagccacgaggtactacatttactacgaagagaccgtttctttattttgaagtcag

SEQ ID NO: 105326 - DNA, 542 bp, Homo sapiens; identical to SEQ ID NO: 37034
  chr1:244080519-244081061
  hyper

SEQ ID NO: 105327 - DNA, 88 bp, Homo sapiens
  chr1:244081077-244081165
  hyper
cgccccaacgctgccggcccctgttttgtttcttctttctgcattcatccactttgtcctcccattatggcgacgagttcagaagatt

SEQ ID NO: 105328 - DNA, 97 bp, Homo sapiens
  chr1:244211308-244211405
  hyper
atacctgcgtaactcgcagcagccaagccccactacgttcaaaagtgtgtttgtggttgtcacagtgcacaccgaaaagctcgctccgcacccgcag

SEQ ID NO: 105329 - DNA, 30 bp, Homo sapiens
  chr1:244214234-244214264
  hyper
tttcctgaatagcaccgtggcttgagtgtg

SEQ ID NO: 105330 - DNA, 30 bp, Homo sapiens
  chr1:244614438-244614468
  hyper
gtctgatttcaggacgtttcgaaacaatcc

SEQ ID NO: 105331 - DNA, 66 bp, Homo sapiens
  chr1:244615534-244615600
  hyper
gaggcgcggaagcgcgtgtggagcgtcggactacaaatcccagcatgcaacgctctgggctgcggc

SEQ ID NO: 105332 - DNA, 30 bp, Homo sapiens
  chr1:244816198-244816228
  hyper
ccgttcctccaggacgcggaggcgccggag

SEQ ID NO: 105333 - DNA, 30 bp, Homo sapiens; identical to SEQ ID NO: 1255
  chr1:244816650-244816680
  hyper

SEQ ID NO: 105334 - DNA, 1007 bp, Homo sapiens; identical to SEQ ID NO: 37037
  chr1:244893208-244894215
  hyper

SEQ ID NO: 105335 - DNA, 151 bp, Homo sapiens
  chr1:244998149-244998300
  hyper
aggcatttttccttcggggacgccggaagacttcgccacacgcgcgccctctccgcggacaccaacgtgctgacgcatgttcattagcgagctgctccctccattttgtccccagtctcctttaggcgaactgcgcggttctatgttaaag

SEQ ID NO: 105336 - DNA, 30 bp, Homo sapiens
  chr1:244998879-244998909
  hyper
aaaatggcggccggcgcgtcggaacagggc

SEQ ID NO: 105337 - DNA, 30 bp, Homo sapiens
  chr1:244999126-244999156
  hyper
ctaggcccggagcacgtgtcactggcttct

SEQ ID NO: 105338 - DNA, 30 bp, Homo sapiens
  chr1:244999785-244999815
  hyper
ggcatcttgtacgtcgttacatttatcata

SEQ ID NO: 105339 - DNA, 30 bp, Homo sapiens; identical to SEQ ID NO: 37039
  chr1:245027100-245027130
  hyper

SEQ ID NO: 105340 - DNA, 30 bp, Homo sapiens
  chr1:245027754-245027784
  hyper
cgcctggtgtcgaacggcgccaattccttt

SEQ ID NO: 105341 - DNA, 96 bp, Homo sapiens
  chr1:245028044-245028140
  hyper
gaggaaaaggaaaccgcctttcagttcaaccgactcactgcatgatatattggcctttctgggtctttggtggctatactcgtttggcttttctcc

SEQ ID NO: 105342 - DNA, 30 bp, Homo sapiens; identical to SEQ ID NO: 1257
  chr1:245133201-245133231
  hyper

SEQ ID NO: 105343 - DNA, 198 bp, Homo sapiens
  chr1:245134409-245134607
  hyper
ctggaggtcacagccgctgcctccgagcttcccggtcctccgaaatgcctgccccgccgccggctagcgccgcgcaattggcctagtgtcttgtcttaaaaaaaaaaaaagacacacacccaaacagcaattttaataacgacgaaaaaccaaaacctggttgagatcttggaaccgctgtgcgccggccgggcctct

SEQ ID NO: 105344 - DNA, 30 bp, Homo sapiens
  chr1:245317774-245317804
  hyper
tcccttttgcacggcgtttcacagacagac

SEQ ID NO: 105345 - DNA, 30 bp, Homo sapiens
  chr1:245318230-245318260
  hyper
ccgaggctcctccccgagtctggatcttta

SEQ ID NO: 105346 - DNA, 123 bp, Homo sapiens; identical to SEQ ID NO: 37043
  chr1:245474019-245474142
  hyper

SEQ ID NO: 105347 - DNA, 30 bp, Homo sapiens
  chr1:246670711-246670741
  hyper
tggtcgtaaggctccgcgtgcggctcgtgc

SEQ ID NO: 105348 - DNA, 30 bp, Homo sapiens; identical to SEQ ID NO: 1258
  chr1:246729203-246729233
  hyper

SEQ ID NO: 105349 - DNA, 30 bp, Homo sapiens
  chr1:246729557-246729587
  hyper
aacactagagcctgcgcatgcgaacagcgg

SEQ ID NO: 105350 - DNA, 61 bp, Homo sapiens
  chr1:246730173-246730234
  hyper
ctattgctgcgcgtcgcgccaatttctccctccctaggggactagcgccagaagtcgttcc

SEQ ID NO: 105351 - DNA, 911 bp, Homo sapiens
  chr1:246887310-246888221
  hyper
ttgctccacccccacgtgcaacaaggacaaccggctgccgcctccagcttccagcagggctagaagatgcgctgcccggggcggccagagccctgcagaacaaaccgccgcacggaattaggggccgccgtccgcgcctgccaggcttggaagcggactcgcccccagggccaccgccctaggaaacctcccgtcggaagcctcccaagcaagccgctcacccgcggctcccgcgcgaggcggcgtgggcgtgggcgcggccctggcgcggcggcgcgcgcggggtgaagggagcccggcgcgctggctgcggcgacggcggccgttgctgcgccgggtactggggtcgctgcctgaggcgcaggcgccgtggactccacccgccccggggcctgggctcgctgtggactcgtcatggcgaccgagcagaggcctttccacctggtggtgttcggcgcgtctggcttcaccggccagttcgtgaccgaggaggtggcccgggagcaggtggacccggagcggagctcccgcctgccctgggccgtggcgggccgctcccgggagaagctgcagcgggtgctggagaaggcggccctgaagctgggtacagcggcggggcgggacggggctgcgcgggcggctgggccggggaccccgcatcgccccaaacgagcgtttctcccgcagggatgcgccctacgtgtccccgagccctgcgtgaggacaagaagaggagagggagagatgtttcaaatactgccatagctttgtcccacctccttaactatatgtgtgtgtgcgcgtgcgtgtataatatacacacacatttttttttctttccttctcctctttcccgctttttgcatttctgcctcagtttggggagctcccctggcgaaatggtcaagaac

SEQ ID NO: 105352 - DNA, 30 bp, Homo sapiens
  chr1:247094371-247094401
  hyper
gagctggaacctcacggctgagccccgagt

SEQ ID NO: 105353 - DNA, 30 bp, Homo sapiens
  chr1:247095645-247095675
  hyper
ggactctcttgtcacgtaatcgtgtggccc

SEQ ID NO: 105354 - DNA, 375 bp, Homo sapiens; identical to SEQ ID NO: 37047
  chr1:247170805-247171180
  hyper

SEQ ID NO: 105355 - DNA, 253 bp, Homo sapiens; identical to SEQ ID NO: 37048
  chr1:247171251-247171504
  hyper

SEQ ID NO: 105356 - DNA, 330 bp, Homo sapiens
  chr1:247241958-247242288
  hyper
agcaacagaagctgccgcgggaccacttggacctcccagggataaggggaaggagcagcggagacgcaccgagctcgccacattcgcgctgcccaacacaaaagccgcgccaggtcccggaagctgctccctcctttcgcggcgcgcttgagagtacagtccccttcccagcgcccgattggacagggccttaggccccgccccttcagtcctgagtgacgggagatgcaatcagacacggcgctgagtgaggccaggttctttccctgcagtccttttctaaggcatggattctgccctgtgctgagacctggcgccccccgggggact

SEQ ID NO: 105357 - DNA, 838 bp, Homo sapiens
  chr1:247267049-247267887
  hyper
acctggtttatgaatcgccgtttgctcaaacacacggtttaacgttttaacaaagcctcggcttaattttaggggaagaaaggtgggactggaagccccatgaaccacagctcctcccatgctggaaccccgcacaccgagacaccgagtcggggctctcccgcatcaccctcccgtggtcaccacactacctggataggggaggcgaggggttcccgacagggctccggccggcggaagtggcgcccgcaggtacagacaggatgcaggggttccgctgcccgccccgcccggcccggccctgaacagaagaggactgagccccggctacgccacggcgactcggtccgcaggttccggagccgatggcgtggaggcccgagtcgcgccacagcaggtttcaaccagccctcttctccacttcgggaagccaggcgcagtccactcaccattcctcggcttcccgggtgtcctggcgtcagctagggatgtcccaatactcgcaggtcacagggtggcagaggctgctgcagagccacctgggcctcccagagccaagaactagcagcggagactaacaggaagagccggctccggcgaaggagagacaaagcaaccgccaggcagatcccggaagccgccctctcctttccggcggcgcgcctgattgaacggtccccaccccagcgcccctgattggatggggcttcaggccccgcccctcaggccctgagtgacaggagattgcgatctcacgtgaggctggatgaggtcagaatgaccgcttttggcctagcggtttgtaggcggtgcgtccttcctgcgctgggatccgacc

SEQ ID NO: 105358 - DNA, 83 bp, Homo sapiens; identical to SEQ ID NO: 37050
  chr1:247274376-247274459
  hyper

SEQ ID NO: 105359 - DNA, 1162 bp, Homo sapiens
  chr1:247274518-247275680
  hyper
tcagtctccccagtggttgggattacaggcgtgagcccccgcgcccggccaaagggccccctaggaccggctgtctcccccgactacgcaccctcggcccccagcctcgcgccagacacggcgccgcagccccagcgcgcgggggtggagagagccgcggggcaggggcgccctgtgggtcccgcggtcacgccggatcgctcggccgcagtagtggggcccgggcgggcgcagggccgggctacggggaccggcaggcgcgcgaagggcccggggcgccgggaggactcgggttcacagtcgctcccgctccggaaagtttgcggcggctgccccgggagggacttcggcggggaggaggcggcggcgccaggtggccgaagtcggaggggtccgtccgctcccgcagcctaggagcgcgccctccccgccggtgccggggcccgtggtgggggtcgcacccaccgccgcttggccgggaccgtcttggctggcgccgccttggagctcgtaggcaccgcgcgcggtgcggggagcggccggggcggagggacccagcgagcccggggagggccggggtcctgcaggcggaggcgccggggagggtgtggggtcagggcccgcgcggcgctgcttctgctcccgaagactgcggtcggagctggcgcagcggagggtgcggctcccggagcgcgaggccgcagcggggagtgaccggaagtggcctctgcagccgcgtccctgggcccatgtcagggacggctctggctgaagcaggaggacggcgtttggagggtggggtgggcgcgtcctctcggcggcccgcgtggactgacagccaccactgcccccacgctgccctcgtgcccgcggttctaagaagtcgaatgccaggcggaggcgacggggcaaatggcccaggcttgggaggccgctggcggtccaggtcccgcaggatgtggaggattttcgaggagggcccaggggctggagggtgcacaggcccatcttgcacaggagccacggccccggccttagctgggcggagcaattccggtgccgccgccccttccccgcccggccatgctcgggctccaggcgggctgctgcagggggcctgatccggtggacgatcggctcctcaccccggcaagggccccca

SEQ ID NO: 105360 - DNA, 31 bp, Homo sapiens; identical to SEQ ID NO: 1263
  chr1:247278690-247278721
  hyper

SEQ ID NO: 105361 - DNA, 38 bp, Homo sapiens; identical to SEQ ID NO: 37053
  chr1:247494235-247494273
  hyper

SEQ ID NO: 105362 - DNA, 30 bp, Homo sapiens; identical to SEQ ID NO: 37054
  chr1:247494968-247494998
  hyper

SEQ ID NO: 105363 - DNA, 642 bp, Homo sapiens
  chr1:247495197-247495839
  hyper
gacacttcctgctccgctctaggactggggaggtctccgcatctcagtggttcgctcccccgccccccggccgaggtgtgcgctgggggtgacatccgacacccccggcccgccccgctccgcgcgcgcctgggcctggccgccgggccgggggctttgtgggtcagccacgtcgccgcgcccgggcttccccgcgggcccgccggtccggaaggtcggcccggggctcttttctccgctgttctccttctctggcgcccccaggacacgcggccagtggacgcccggaacggccgaccgggagtcgcggctggggatggaagctggaattgggggtgcgggatggagcggagagaggaggccccgcgcgccgtcggccgcctcatttcagactcccctgcgaccccccccccgccgccagccgaagcccgggccgcccagcccctcctgccgctgcgggacgccgaaggtagcgctcacatccgcgccttccgggcctggcgcccacgtgcggagtccccgggttaggaaaggccgcgcatccggaggccacgcagagcctcggggcttgcgcagaggggctgcggtgagtcctgaccctgagtgggggtcacggggctcgttgctcgctgaagtgaacac

SEQ ID NO: 105364 - DNA, 138 bp, Homo sapiens
  chr1:247536196-247536334
  hyper
accaccagagggcgccgaggacagtacggacgccgtcagcgtctcggtcacatccttccgtgtccagctagaaaatgaatgggaaacccgggcactgaggctcacgcctgtaatccagcactgcagggggcgaggcgg

SEQ ID NO: 105365 - DNA, 139 bp, Homo sapiens; identical to SEQ ID NO: 1264
  chr1:248020309-248020448
  hyper

SEQ ID NO: 105366 - DNA, 115 bp, Homo sapiens; identical to SEQ ID NO: 1265
  chr1:248020515-248020630
  hyper

SEQ ID NO: 105367 - DNA, 400 bp, Homo sapiens; identical to SEQ ID NO: 37059
  chr1:248020956-248021356
  hyper

SEQ ID NO: 105368 - DNA, 206 bp, Homo sapiens
  chr1:248406537-248406743
  hyper
aaacaatattttggacgtattagttttaacttaatttttggtgttgaagtttgggctgtaatccagtagatggcgcctaagagtaatgcccgtagagaggctcttgatcggccacttggctctttcgtgtttcctggcattcgcaggcacgctgtccggtgggggttgagagagatgcctccttaccaggacgactcctgagcctt

SEQ ID NO: 105369 - DNA, 30 bp, Homo sapiens; identical to SEQ ID NO: 37060
  chr1:249120091-249120121
  hyper

SEQ ID NO: 105370 - DNA, 376 bp, Homo sapiens
  chr1:249120444-249120820
  hyper
gctttacggagctgcggcggcggctgccggaaagccacttccggcctgctccacggaggcgggcgcgacgccgaaagtgagctggtaaacttccggcagtggctccgggggcaactcgagtccggacgctggcgggcttcgcgggcgaaggcaaagtcgatttccaaaagtgactttcctcactcccgtgaagtcggcggaaccctccactaacggcgtctgagcggacggctccgatgtgtaaatcccactcctcgaggcctctggaccttgcaccttgaacgacgttttggtggggtcaccaattgctccgtgaatactaaccaggaacttagtcaacattaactcagttaattcactcgtgcacccagggtca

SEQ ID NO: 105371 - DNA, 30 bp, Homo sapiens
  chr1:249132315-249132345
  hyper
gccaacagacaaagcgggaggcaggaattg

SEQ ID NO: 105372 - DNA, 30 bp, Homo sapiens
  chr1:249152806-249152836
  hyper
gcgagagactttcacgggaaatttcaactg

SEQ ID NO: 105373 - DNA, 235 bp, Homo sapiens; identical to SEQ ID NO: 1267
  chr1:249167653-249167888
  hyper

SEQ ID NO: 105374 - DNA, 30 bp, Homo sapiens
  chr1:249200627-249200657
  hyper
gcatccgaggagttcgtcctcaccactgcg

SEQ ID NO: 105375 - DNA, 18 bp, Homo sapiens
  chr2:11722-11740
  hyper
gcccgcctcctggcagct

SEQ ID NO: 105376 - DNA, 542 bp, Homo sapiens
  chr2:45389-45931
  hyper
tcacagccccgcacacggccagccccgcccccagccttctgggcacacacctcgggtccggctctgctcctggctgggggtctccttggccttcttacaggtgtacagccacttgatgatgcgggcgttcctctcgatgaccgaagtggtgctgggcacctgctctatcagctcctcctcctgcagcccctcgtcgtcgccgccgctgtgccgggagaagccgctgccggaggtggcgacgctcacgctgcgcaccttgagggtcacacagtccgaccccgcggtgaagttctccctccccagggcctccaccacctcggggtccaggccgcagtactggaagaaggtgtcagactcggccaaggcagcggaatagcgggagctgaggtccgactgtgagcgctgcagcccccgacgcctcaccacccgcggctctggcccagggggcgcggccgggacactggagggcgccgcggaccgcgcggctggggctggggtctcggggattgcggggtccgccgcggggccaggagtggtcggga

SEQ ID NO: 105377 - DNA, 1240 bp, Homo sapiens
  chr2:45969-47209
  hyper
cggggcaccggcgccttgtccttacccggcccctggaagagcttcttcaccaggcttgccctggggccgtcggcgcccgatcctcgcacgaattcgcatttctgccggtagatgatcagcgagtccggtctcaacggcttccgcgcaatagccctgcgcgccaccggggccggggcgcgggccgggggcccagggtcgttccccgggcacttgatcgcccccgggccgctgccctcggaagcgacgccccggccagtccccggccgaccccgcacatacttggcgcgatccgccgccagcctctccactgcgctcctgcgcgccggccgcgcggcgtcggggtcccgggtagccgcggggtcccggggaaggagccgctcgttcgggggcgcgctcagggccgccagggcgcgcatcttcgcggggaatggaccgaccggggttccgggtccagcggagacgcgctcgagtggtagagccagtcagtcccagggccggttccgaagtccgcgccgggtggggaacggcgccccagtgcccagctgcccaggcccggggttggggagaaccggagtctgcaccgattggcgaaactccccagttcccgcccctcccgacctcatcgcccacaccgactggcaccgcccccgcccccgcccggtgccccggccctggccgcgtccccgcatccccgctcgtccccgcccgtccccgcctcctcactcccgcccgggcccgcctccctggccgctctccgggtgccagcgcccgccctcacctcgcgtccggggtcccggccctcacctcctgcccggtgccgtccccgccccccctcaccttccggcggcgctgccaaccgcctggaggacgctggggcgagcaggctctgaacccccactcgctcagccccagatccccgaggtcactgctggacgcaggcatttccggggagggggagcagaggggacgtccccccacctcccccgggcaggtgcctcacatcctttgaattcttaaagtgacctcatcgtgtttggaaacttgactgtttaattttgtctacctgagctcatattcttattaacagaaaggaataggacataagaggaaagaacacgcagcgcacgccaggatcagcctacgtgttgggtggcaagaacgcagggcctcggattgggtccgactcggtcgctggccggcagcgggcgtggccgggcccgaggaccgagctaggactctc

SEQ ID NO: 105378 - DNA, 581 bp, Homo sapiens; identical to SEQ ID NO: 37065
  chr2:263890-264471
  hyper

SEQ ID NO: 105379 - DNA, 345 bp, Homo sapiens
  chr2:264739-265084
  hyper
ccctgcaggtgacccgcggaccctccccgcccgtcctactaccgtcataggaccgcctccgcaggcgcactggagccgattgcgcaggcgtggctctcacacgcgctgccctgttggcgttggtgcgggactgcgcaggcgcgcggggcaagagggtggcagtgcgcctgcgccgcgtcggcgtgcggaacgccgcggtgtctcggcgcctctgcgcgcgggaagatggcggaacaggctaccaagtccgtgctgtttgtgtgtctgggtaagagggcgccgacttactcatgttctgacgtcctctggagagttggatcgggcttgtgcgctgtaggttgtgcc

SEQ ID NO: 105380 - DNA, 1519 bp, Homo sapiens
  chr2:287343-288862
  hyper
tggaaaccaccgacccgcgccgcagctcacgcgcgccagaaggagaccaggcgcttctccgccaggcctcatgcgcggacctattgctgctattttctttttcttaaaaaaaaaaaaaaaaaaaaaaggaatcctgctgttcagtggtcaaaattgatgtctctttttgaaacgtgtttctcaaagacaattctatttcccagcagccccggccctcgggcgcgctcggccccactcacccactcgctgctccggcgaaggccccagccccgccgcctccgcgcggcccagggcgcagtcccgcccgaggagctgcaggcccttgtgctccgccgagtggtgcttccgcagctcctggacgagttccaccaccagccgcagcagcgcctgtccgtccgccggctcccggggctccgcgcccccccggccgcgccccgccgcccccagcaccagcagcagccccaggaggagggggtgcccgggtccgcgcatcgtgcgctcggggccgcggggctgggagactccgacacgcgccgagagctgggctcgctgcgagagaaggggcgcggggggccggagagaaagtcagcgggggagggggacggagcgcggggcgggggaggggaggggaggcgggaggagccgctggcgctggacccggcccctcacctccgcggaccccgaggaacaagccggcaggtgagggagccgcggtctcctcgacgatcacgcccgaggtcccgcccacggggagcgaccgccgctggtgcggaaaggagcccccggaacccgcccgcccgccagcccggcccctcctaactttcgcccgaaaggccgcgtccgccgagcgcgctgcgcctggcgcgggcgcaactttctttcccctttggaagccgcgggtgccaggcagctccccggccgcgggcggacctcggaggggccgcgctcccgcgcctaccgctctccaagaaggcggcgccgcgcgccgggcccggcggccgcgctcaagtttccagcgtcgcctttgcgcggtggtcgccggcgagcgccgagtccccgaagcccacggaggaggccgggtgcggaccctcgcgctggccccggccgcgccacgtgctggaagcccctccacctcccggccatggcgccctcccgcacctgcccggcgccacccgggagccacctgcgcgtcgtggccgggccggttacctggagccgccggagtcgtcgccgtctgtgcgcacgtctgtccccgcgccccgagctgcgccactactccatgcccggcgggcggagcgcacgggacgcggggactcggccgctccgagcgctggacccacggccgacctggggtgcgccggctccgagtcccgcctcagacctcggggagcttcttatccccgcgcccgccgacgtcaggcgggtccccaagggctccgagcggggctttaattagaagccgctgaagtgttagtacccccatgcggatcttcgtcagtccccccgcctcacctcgctc

SEQ ID NO: 105381 - DNA, 1254 bp, Homo sapiens
  chr2:289131-290385
  hyper
cctttaccaggaactcggttctgtttttgtctaaatgtagatcttgggctattaaaaagggagctgcctgattgcttcgacatttaataagtcaattagagtccatccgttttggagggatccgctctccggacctcgaggggtctgccccgcccgagcccagtccccaggttcgggtccccaagccctggtccccgaggcggggcggccaggaggcaggagatgggcgggtgaggactctccacggcccccgaggtgcgcacagctgaccacccgaggaggggcaggacctgcaccccctccccagaccccctgcgagaggacgagcgaaggtccctccccggcaaggaccgcgccatctgcgcgctcctctgcgctggaccctcggcccgcgggtccctcgcgccccggcagggaacgcccgcaggagggcacttgcctcccggactcgtctttaagaaagtttggctctttggccgaagcccggcacatctgtgaaagttcagcaatttgcctcttttattttattcttgtaaaatgtattatcaatcagttgcgcactttcccattcgattggtgctttctgggcaagagctggacgtcttccaagtccgcgatctgtttgggaaaggtgttctgagtgcaatcagagaggcggagtgggcgagaattaaaggcctgcaccatgatcggggcagtcgcaggaccgcggcgggaaggtgctggcccaggcgcacgtgagcgcgggcggtgcgggcggaaggctccgcgccccgatcccccagctcccggagaggccccgtctgcgcccgtccccgcgtcctttctctcttcctgcacggggtctgtctcctcaggaggagaaagtgtccggcagagctgggcggggaggcagcgtggagagagaagatatgaaatgtgccggttccggaccccgccccacacccttgggatctgcgttctctccgctcccttgaaaaacagatggtttgatttcacagcgaggcttttctttttctttttgcaagctacatgactgaaatgtgaacatttctgctaaaatacactcaggaaaaagtaaaattttatgtcaaacagaccttaggcacataaaaggaggcatttttcgtttctctctttccccttcccatgtccaagaagacacttgagttccacgggcaagagcgacgcctggcgatggaaccggccctccccggccctgctcccggtcctgcttgccgggcccacctcgca

SEQ ID NO: 105382 - DNA, 118 bp, Homo sapiens; identical to SEQ ID NO: 1275
  chr2:468115-468233
  hyper

SEQ ID NO: 105383 - DNA, 287 bp, Homo sapiens; identical to SEQ ID NO: 1276
  chr2:468423-468710
  hyper

SEQ ID NO: 105384 - DNA, 31 bp, Homo sapiens; identical to SEQ ID NO: 1277
  chr2:637196-637227
  hyper

SEQ ID NO: 105385 - DNA, 240 bp, Homo sapiens; identical to SEQ ID NO: 1278
  chr2:677554-677794
  hyper

SEQ ID NO: 105386 - DNA, 767 bp, Homo sapiens; identical to SEQ ID NO: 37074
  chr2:945450-946217
  hyper

SEQ ID NO: 105387 - DNA, 114 bp, Homo sapiens; identical to SEQ ID NO: 37075
  chr2:946289-946403
  hyper

SEQ ID NO: 105388 - DNA, 134 bp, Homo sapiens; identical to SEQ ID NO: 37076
  chr2:946432-946566
  hyper

SEQ ID NO: 105389 - DNA, 30 bp, Homo sapiens; identical to SEQ ID NO: 37077
  chr2:946984-947014
  hyper

SEQ ID NO: 105390 - DNA, 56 bp, Homo sapiens; identical to SEQ ID NO: 37078
  chr2:1610485-1610541
  hyper

SEQ ID NO: 105391 - DNA, 471 bp, Homo sapiens; identical to SEQ ID NO: 37079
  chr2:1746561-1747032
  hyper

SEQ ID NO: 105392 - DNA, 6 bp, Homo sapiens
  chr2:1747305-1747311
  hyper
gggaac

SEQ ID NO: 105393 - DNA, 380 bp, Homo sapiens; identical to SEQ ID NO: 1283
  chr2:1747627-1748007
  hyper

SEQ ID NO: 105394 - DNA, 454 bp, Homo sapiens
  chr2:1748396-1748850
  hyper
ggggcgagaacccggggccccagcgtccggcctgagcgccctcatcccggtggggcggcccgcatggccaaggcgagcgctcgggggcgcggaggagagcattggcacccctgattctgcgctcgagactcggggctcgggaccctggggcctacgcgaagcttctccacttctcttacccgtggtttctgcctgcgctcactacgggttttttagttggcgccttaatgtttgtaacacttttagagcgcttgctctgatccgggcacgattccaggcgcgcaggcgcgctcctctctttctccttctccctacccgcaaccacgtaggaaattatttaacgttccaaaaaagcccctcattccttttgaggaaactgaggcccaagccccaaagcgcacagcaagggagtctgcgggaagattagacccaggcggtccggctccccggggcc

SEQ ID NO: 105395 - DNA, 122 bp, Homo sapiens; identical to SEQ ID NO: 37083
  chr2:1754707-1754829
  hyper

SEQ ID NO: 105396 - DNA, 96 bp, Homo sapiens; identical to SEQ ID NO: 37084
  chr2:1858659-1858755
  hyper

SEQ ID NO: 105397 - DNA, 144 bp, Homo sapiens
  chr2:3307439-3307583
  hyper
gagcagccacaaacccgccagacgccggcaacctgacttctgagtgtttcccggcaccgtgaacacaatagacgacacgtgatacggtgcggcctctgcgcccgggaagcttcgccctctgctggcagacggcgggatccatcg

SEQ ID NO: 105398 - DNA, 237 bp, Homo sapiens
  chr2:3381719-3381956
  hyper
atccgggctctcagcgcggggactcctggaggtgagaacccggcccagaggaaataagttggtgggcggagcgggccgcggaggccggctgtgggtggaggccggctccgagcgcaggccgtcgggagcaagcggcgattagccttagctagccatcgcatctaagaatcgctcacgccgtagttgggcgccgccatgtattgtcatttgtatgtacttggcgttcctgagcgctgg

SEQ ID NO: 105399 - DNA, 119 bp, Homo sapiens
  chr2:3383398-3383517
  hyper
agggctccaggccccgcccacagcagacgaaccggaaacgaaccccatttccggcctgggggcagggcctcgggttcctgcatcgggcctgagcagaactaggcgcgccgcggcccggc

SEQ ID NO: 105400 - DNA, 30 bp, Homo sapiens
  chr2:3384189-3384219
  hyper
gaagaccgaaaaagcgtttattcaacagaa

SEQ ID NO: 105401 - DNA, 176 bp, Homo sapiens; identical to SEQ ID NO: 1285
  chr2:3465088-3465264
  hyper

SEQ ID NO: 105402 - DNA, 30 bp, Homo sapiens
  chr2:3522228-3522258
  hyper
ataaacaaggtgagcggatctggactggtg

SEQ ID NO: 105403 - DNA, 30 bp, Homo sapiens; identical to SEQ ID NO: 37088
  chr2:3522491-3522521
  hyper

SEQ ID NO: 105404 - DNA, 30 bp, Homo sapiens
  chr2:3523119-3523149
  hyper
gaggcttgggctcgcgtaccttccagtaga

SEQ ID NO: 105405 - DNA, 30 bp, Homo sapiens
  chr2:3606034-3606064
  hyper
gacgagcccgaactcgtcaacttcctgtcg

SEQ ID NO: 105406 - DNA, 30 bp, Homo sapiens
  chr2:3623100-3623130
  hyper
ctggccggggggtgcgggcgggagggcgag

SEQ ID NO: 105407 - DNA, 30 bp, Homo sapiens
  chr2:3750537-3750567
  hyper
gcgttctgaatggcacgcgcctgacaccgc

SEQ ID NO: 105408 - DNA, 30 bp, Homo sapiens; identical to SEQ ID NO: 37089
  chr2:3775705-3775735
  hyper

SEQ ID NO: 105409 - DNA, 30 bp, Homo sapiens; identical to SEQ ID NO: 37090
  chr2:3828551-3828581
  hyper

SEQ ID NO: 105410 - DNA, 88 bp, Homo sapiens; identical to SEQ ID NO: 37091
  chr2:5506155-5506243
  hyper

SEQ ID NO: 105411 - DNA, 608 bp, Homo sapiens
  chr2:5813467-5814075
  hyper
cacagcttgatcagccgcccctgtaaccgggtggggcatccccgccctccgctgccctggaaggagccctcggctgggtcagggccgcgggagccctggccaggagccacctccgccaggcgcggccgctcccgggggctcctcctgcgtccccagcgcccacgccccgccccacctggctccgctgcacccgcagccacagcgcccgcccgggacacctgcccctccacggccgcgcgggcggaggatggcactgcaggtggcgaggctgctgcactgggcttccgaggaggtctgggggaggaggcagctggcagaaggaaagccagacggcggcggcagcagcttaataaggggggtctccagagaactgtggtccaggcaggtggctgggagcccggtgagccctttcagagaagggggagcgctgctgtctcaaagagcagctgagccaaaaacagaggggccgggggtgggggacagaggggtcatcactgcctggacagagctgcgtcctgcgcaggaccggcagcccgaggcggagacgaagggggcccgcagggactcctggccttgcgtcttgggagagcgcacgctggcctgcgcta

SEQ ID NO: 105412 - DNA, 72 bp, Homo sapiens
  chr2:5831132-5831204
  hyper
gcccccagaatatccgtagaggtagtagggactcaataaagaaacacaaaggagacgaacacggcacgatcg

SEQ ID NO: 105413 - DNA, 163 bp, Homo sapiens
  chr2:5831237-5831400
  hyper
cgccccaggtcgcggctccccggccgccagcgcacctttccatctccagggaaaatatttagacgggaaactcgagtgcaccttattttctctttggtttatgagtgacccagaaggcttctagctcacaatcgcacgatttcaggacgaggctgccggagaa

SEQ ID NO: 105414 - DNA, 580 bp, Homo sapiens
  chr2:5831467-5832047
  hyper
cggaggggcggggagaggacggggcggggagaggaggggcggggagcagagggagaagggaaggagggcgccgggcccctcgcagggacgccgggcggggcgcgggcttgctggagcctgcgggacccagagcccgctccggagccagccctgggagtggccagcttgaacccgagggccccgcagaccgttactccggcccccgcccggggcggggcgcgcgggggcgcggcgcagcccaacccgcacagccgcgtccccaaacaccaccgaggagggaaaacagacggagaaaaaggacaaaacagaaaaatgcaaaacgggggagggagctcaccgcctctcgagctttaaattgatttctttgccttacaaaaagggagaaagggaaaaggagagcagagcccacgtgccgggaaggttgctgtcttcaagcgccaccttccgtcggccagggccgccgcggggctaccgggcgggctcggggcggcgacccgggggagcggccgagccccgcgaggggctcgccggggagcagctgcgcccaccccggggcaggccgggcgcggctgaccgcgag

SEQ ID NO: 105415 - DNA, 145 bp, Homo sapiens; identical to SEQ ID NO: 1288
  chr2:5832283-5832428
  hyper

SEQ ID NO: 105416 - DNA, 191 bp, Homo sapiens; identical to SEQ ID NO: 37097
  chr2:5832655-5832846
  hyper

SEQ ID NO: 105417 - DNA, 150 bp, Homo sapiens; identical to SEQ ID NO: 37098
  chr2:5833282-5833432
  hyper

SEQ ID NO: 105418 - DNA, 140 bp, Homo sapiens; identical to SEQ ID NO: 37099
  chr2:5833499-5833639
  hyper

SEQ ID NO: 105419 - DNA, 494 bp, Homo sapiens; identical to SEQ ID NO: 37100
  chr2:5833734-5834228
  hyper

SEQ ID NO: 105420 - DNA, 30 bp, Homo sapiens
  chr2:5834593-5834623
  hyper
aggggaggtaggacccgctccggaaggcgc

SEQ ID NO: 105421 - DNA, 527 bp, Homo sapiens; identical to SEQ ID NO: 1292
  chr2:5836047-5836574
  hyper

SEQ ID NO: 105422 - DNA, 123 bp, Homo sapiens; identical to SEQ ID NO: 1293
  chr2:5836621-5836744
  hyper

SEQ ID NO: 105423 - DNA, 10 bp, Homo sapiens
  chr2:5836827-5836837
  hyper
cgctggcttc

SEQ ID NO: 105424 - DNA, 139 bp, Homo sapiens; identical to SEQ ID NO: 1295
  chr2:5836852-5836991
  hyper

SEQ ID NO: 105425 - DNA, 115 bp, Homo sapiens; identical to SEQ ID NO: 1296
  chr2:5837352-5837467
  hyper

SEQ ID NO: 105426 - DNA, 65 bp, Homo sapiens
  chr2:5837518-5837583
  hyper
cggcgcccttcccgcctcccctcccgcttgcttttgccttactcgatcttaccaccacccctccc

SEQ ID NO: 105427 - DNA, 469 bp, Homo sapiens
  chr2:5866015-5866484
  hyper
gtaaaacaacaatttaggaggcgaaagggagtatcaagttagcgaaactgcaagggaaactgggggcagcagagcgacgtgccagcgtccgtgttgggcgggtgtcggggggacccggacaccccgccctccttcctgcagagctctgcgggccctgtggcatccatggagaccctggctccggtttcacaggaagggaaggtgtgtgtcacagtccctaatggatcagctaccaatcattagccaagtccttctcttacttttctcctcggagagaaccaagcttagacaatagcatggctttcgaggtgggaaggacctcatgaaggagacggaaaagagtgactgcagatcttacatgtaggatctggcggagctcagcttaaagccgttgccacccagccatgggcattttctccacattttgcaggcatcctacaactgaaaactgggtcgcaggcatttgaat

SEQ ID NO: 105428 - DNA, 443 bp, Homo sapiens; identical to SEQ ID NO: 37107
  chr2:6121679-6122122
  hyper

SEQ ID NO: 105429 - DNA, 30 bp, Homo sapiens; identical to SEQ ID NO: 1299
  chr2:6913289-6913319
  hyper

SEQ ID NO: 105430 - DNA, 1045 bp, Homo sapiens
  chr2:7005153-7006198
  hyper
tcctccaaaacggcccgggcggcttcccggtccgggaagaccacggaactgggcaagtctggcaccaccgggtgcagcgggggctccgggacgggcacgacctgtgcgcagcccacctgcagccgcctgccgtcttgcacctcccagaggcgctgccacagctggccgcgcgggtcggcctcgaactcgcccaagtgcgggcgtggtgcctcctgacaggcgcccagcagctcgagcagcgcttgccgggtgtcagggtcatccagggggtcgcgcagcaggaagccttgctgtgcgccgccggcctggccgcccgggcagtagcagagcagcctgagcagctggcaccgctggaaggggccgcggcgcagctggtgcagcaggcgctggtgcagccgcgccgcccggacccgggccccgcagccggcgtccggggtcacgggcacgcacagcgagtagctgcgctccgggggccccagcagcgccgccaggcgggggtcgggggcgtctgcgtcgccgggggcgtcggcgcctagggcgaagtgagccagggtgcagtcgggaagctccaggacgaagcggcgcggcggagccatggccccagcgcagaccccgcgccgcccgagcagcggccccgacagtggcccgcgcaggagccggcgggcgaaggccatgggcgcctcagcgacgccgccctcggccccgcctcggaaacgaaacctggcgggagccaggcgccggcgggaaacgaaacccggagggagccaggcgccagcgggaaacgaaagcgaagcgttgcggggaaacgaaagccggaggcccaggcggggcaggagccctggggctggggcgcccttccggcctctcctcctcgccgcgagatgtgcgcgataaacggccggcgctcgggagcagacgcttggccccggggccccaggtgcgcggctccgcgggcctgcgcggtccccaggcgccggctcccggggctgacaccgaatgaggccccgcgccgtcggccccaaggtagctccgtgtgcgttctgcg

SEQ ID NO: 105431 - DNA, 30 bp, Homo sapiens; identical to SEQ ID NO: 37110
  chr2:7006612-7006642
  hyper

SEQ ID NO: 105432 - DNA, 692 bp, Homo sapiens
  chr2:7057747-7058439
  hyper
gcccaggtagagtgacgcgcgtcccctttgtgtccgcatcgcccgggccggccgcggagcggggagggcgggacgcggcgctgcgcggccggccttggggctcggggcttgcggccgcgcctgccccgctgggtcctgccccggcgcccggtggcagcgggcggggggcagcgtcccgggcggggactcgcgggctccgttcagaggacgcccgccctgccctgcccgtgtccctgacctcgtccctgctctgctcctgccctgccctgcctctcgcaggcggcgcccgcgccccagggcagtgggcgcttagggacctggcgtccccctgcctgccctgcgcggtcgcgggtctgcgctgcggcgcgggacagggcgccccgggccagggtcccgcgggcgagctggcggcgggggctttcaaggttcgcggccccgcccgcagaccctggggctggagcctcggccccaagaggaggtctgggaaaggacgacgcgtccggggcatcgccaccggcggggaaggtcggaactggccaagaggatgccccgcacatcccctgcgcgcggggtccgcggctgctactgcccctggtccccaccgcgagccctttcccggggaatgagccgccgcccgagccccggagttccctgcgggtcttacccaccccagcctccggccgccgacccca

SEQ ID NO: 105433 - DNA, 32 bp, Homo sapiens
  chr2:7571090-7571122
  hyper
tgggctgcaggcctgcgagtggcaggcgcagc

SEQ ID NO: 105434 - DNA, 319 bp, Homo sapiens; identical to SEQ ID NO: 37112
  chr2:7571157-7571476
  hyper

SEQ ID NO: 105435 - DNA, 86 bp, Homo sapiens; identical to SEQ ID NO: 1302
  chr2:7571576-7571662
  hyper

SEQ ID NO: 105436 - DNA, 303 bp, Homo sapiens
  chr2:8818277-8818580
  hyper
gggattggtctggcccgcgctttgtagtagtaatgagggcgcgaatcgcgctaggctctgcgcgcgcgaggctccgccgagcaggaggactggggctgcacatcctcccggctcccccagggcggagaggggggccgttctggaagaaaaaattgtttatgcgcaacctccgagggttccgaggagttaggcagtaagacggtgtggaggttgggggggcggggcgagtctttcaatctttcaaaggtatttttaggaatccaggatcaaagccattcggcgagaaaccgaaataatccaaag

SEQ ID NO: 105437 - DNA, 666 bp, Homo sapiens
  chr2:8818828-8819494
  hyper
ccttttcttttcttctcggtcctctttccttccccaaatcactcgaaacttaagacgtgcagcgtctgcaggtgcgcgcgggccggcggccgggcctgggcgagcctgggactgccgggcctcgcaggcattgatcagctgggcgcgcgcgctgagtgacggcgcggttgccatggcagccgcctgagcggcgccgcgaggacaaggctgcagggcggcgtgaatgggcggcgtcacgcgcctggcgccagagagtctgctccggggctccggctccggccccgccgcggcctggcccgcgcgccgccgccgccgccaccgccgccgccaattcatcacctgtcagggatcactcgcggggtcacgggcggaatggacacagctgtgagaacaaaacccgggaaagaaaggcgaacgctccccattgcgccagatgtgcagggaggaccttgagacgcgccccccgcccccgcaggctcctcccgccccccggcgcatcacgcgggggtggcaaaggcggcctggccagcgcggagctcccggcccggagctgcttctgattaccgcgaggggcccggacgcgagagccgccgcggggcctgccctagaggcggagtgagtgagtcctggagccaggctgggggaccttacgggccggtctgtcgc

SEQ ID NO: 105438 - DNA, 170 bp, Homo sapiens; identical to SEQ ID NO: 37116
  chr2:8821591-8821761
  hyper

SEQ ID NO: 105439 - DNA, 710 bp, Homo sapiens
  chr2:8821975-8822685
  hyper
caccccagctgggctcgcgccccgcccaccccgcggggattggctgcgaacgcggaagaaccaagcccacgccccgcgcccgcgcccaccaatggaagcgcccgctcgtcttgatagacgtgccaccttccgccaatggggacgaagggaagctccagcgtgtggccccggcgagtgcggataaaagccgccccgccgggctcgggcttcattctgagccgagcccggtgccaagcgcagctagctcagcaggcggcagcggcggcctgagcttcagggcagccagctccctcccggtctcgccttccctcgcggtcagcatgaaagccttcagtcccgtgaggtccgttaggaaaaacagcctgtcggaccacagcctgggcatctcccggagcaaaacccctgtggacgacccgatgagcctgctatacaacatgaacgactgctactccaagctcaaggagctggtgcccagcatcccccagaacaagaaggtgagcaagatggaaatcctgcagcacgtcatcgactacatcttggacctgcagatcgccctggactcgcatcccactattgtcagcctgcatcaccagagacccgggcagaaccaggcgtccaggacgccgctgaccaccctcaacacggatatcagcatcctgtccttgcaggtaagacctgctccggggtccccgccccgccgccgcacactc

SEQ ID NO: 105440 - DNA, 137 bp, Homo sapiens
  chr2:8823633-8823770
  hyper
ttaatgtttaatttgcgctgtcgaggcgagtgtgtgtgttgcatctggacgccagggtttgcccaatctttgagtgtttggttaaatgttcaaactgtggcttcctcccggcgccagtcgcccgcctctgcccttag

SEQ ID NO: 105441 - DNA, 209 bp, Homo sapiens; identical to SEQ ID NO: 37119
  chr2:8825634-8825843
  hyper

SEQ ID NO: 105442 - DNA, 90 bp, Homo sapiens
  chr2:8826160-8826250
  hyper
gtcccgggagaaaacgccagggagtgcggcctttccaaatgagtgctgctccagcatgtgtacagccgtttccacgtgtggatctcatgt

SEQ ID NO: 105443 - DNA, 30 bp, Homo sapiens
  chr2:8977837-8977867
  hyper
ggctggaggggccgcggggcggggacaccc

SEQ ID NO: 105444 - DNA, 30 bp, Homo sapiens
  chr2:9142856-9142886
  hyper
ttatttctcagtaatcgttaggccctttaa

SEQ ID NO: 105445 - DNA, 121 bp, Homo sapiens
  chr2:9143112-9143233
  hyper
cccaaagtgcagtagcgcttaagcctctccgggcccctagcacccatcgacgccgtctctaaggcacccagcacacccagacccatgcatcagcctctccgggggtcgctcagaggcgcgc

SEQ ID NO: 105446 - DNA, 211 bp, Homo sapiens; identical to SEQ ID NO: 37122
  chr2:9143657-9143868
  hyper

SEQ ID NO: 105447 - DNA, 460 bp, Homo sapiens; identical to SEQ ID NO: 37123
  chr2:9144089-9144549
  hyper

SEQ ID NO: 105448 - DNA, 30 bp, Homo sapiens; identical to SEQ ID NO: 1311
  chr2:9283125-9283155
  hyper

SEQ ID NO: 105449 - DNA, 1779 bp, Homo sapiens
  chr2:9346367-9348146
  hyper
ctgtctcctaggcctgcgacgatgcaatgactgcacgcaaagcgcacattcacggtcaggtcacttctggcgtccggctgtggtccccgcagggtgcccgccggcggagcgcatcctccggcagggggcgagctccgcaccccgctttcctcatgggccggcgcggcccgccgttcaagtggggagcccagaggtgctccgcgccgtgggcggggggcggttggcgcgcacaaggccggactccggcggggcgcacctccacacgcaccctcgcgggcagcgggtcggagtcggggcctcgggccggctgggggcggggcatgggcgcggcgcgcggggcccggaacgccgagacaatgcggcgcgcggcggccaggaacggctcggcgggccggggcgcgcgccgccttccttcctgcgggatccgcttcccggcggcgcggcagcggcgagcgcgccgattggcggcccggtcctcccgccgccccgccccacgcccggccggccgccgcccccggcccggacccgcccctctccgcgggaggcgtcggggcccgcggctgggtggcgggtagttcccgccggctgtgcgcgcccgcctcggggctcgctctgagaggacgcggcggcagcggactcggagccctcggcgcgcaggcgggcggaccggccgagctgcgcggggctgcgcgccgcccctgctccgccgccaggccccgcgcggctcccgcgcccggcgctcccctttgtccgcgggccggagcggcggcggcagcggcggtgtccgagcggcggtcggagcctgctgcggcagttgaggcggcggcgcccctgcggctgtgcgccagcgccctcgcgccgaggcgatgccggaccagatctccgtgtcggaattcgtggccgagacccatgaggactacaaggcgcccacggcctccagcttcaccacccgcacggcgcagtgccggaacactgtggcggccatcgaggaggtgaggcggcctgcgcggcggctccggccgcaggtatcccgcgccccagccccgcccgccgctcccgcatccgcatcccgagaaaactttctttgctccgaagccggacgcggccgggccaaccctgcccgagacagaagccctttgttcccgcctaggtggctcggaggagatgggtgatggccaccttgggcctctttaagacctcccctctctcggcctcgtggccctcgcggggttccgcggcctggtcttttccccgcagcgcggccaactttgtccagagtcggggtccgcggcgagcgggggatcccgctgcccgccgccgcccgccgccgcccggggtctttggtacccggtgcggaccttatcaacttgttcttgaagtggaccggcgggggcagctccgcgctccgagctccccgccgcagcccccgagcgccgcagggcccccaccctcgggtccgcgggtccggggcatcccgggctgcccgggaaggcgtgcccgcctcagccagggcggcctggctgcgctccacccgtgcccggagaaggaactgcgggcaaggtgtgtgagagtcggcgcttctgggtccaagaagcctccaggagccgctccccggttacctgggtctcacctgcttgaacccggaatgccgcccttccccctcaacctggaaaaggcctggttttagtaaagtgctctcaaggtgcaaagtcatcacgcctagctgctaagcagtacgctctccaggtcctggggagaggaacacgtaggaacgaagaa

SEQ ID NO: 105450 - DNA, 30 bp, Homo sapiens
  chr2:9563650-9563680
  hyper
agactatgcgcaggcgcagtcctgacgtcc

SEQ ID NO: 105451 - DNA, 197 bp, Homo sapiens
  chr2:9695938-9696135
  hyper
agccagcttccggccgccgctgtcccccgcaccacccacagccggaagccggctgccgcgcggcatcccgggaggctccgcttgccccgccccacgccggtgcgccgcgggcctctggtccgctgccgtgttcggccccgcccgtcacgtctagctggggctcgcccggcgccttcctggacgcagacgtatgagtc

SEQ ID NO: 105452 - DNA, 30 bp, Homo sapiens; identical to SEQ ID NO: 1314
  chr2:9770569-9770599
  hyper

SEQ ID NO: 105453 - DNA, 30 bp, Homo sapiens
  chr2:9983412-9983442
  hyper
cactcagcagtaggcgtcgcccactttctt

SEQ ID NO: 105454 - DNA, 319 bp, Homo sapiens; identical to SEQ ID NO: 37128
  chr2:10092150-10092469
  hyper

SEQ ID NO: 105455 - DNA, 186 bp, Homo sapiens; identical to SEQ ID NO: 1316
  chr2:10151689-10151875
  hyper

SEQ ID NO: 105456 - DNA, 121 bp, Homo sapiens; identical to SEQ ID NO: 1317
  chr2:10151929-10152050
  hyper

SEQ ID NO: 105457 - DNA, 186 bp, Homo sapiens; identical to SEQ ID NO: 1318
  chr2:10152409-10152595
  hyper

SEQ ID NO: 105458 - DNA, 249 bp, Homo sapiens
  chr2:10182874-10183123
  hyper
tcccggagggggcggcgttttctcggggcctgggaagaatgggcgggtttcagcgggcgccttctgggtgactgcccgtttcggcttcccctgaccccgtaacagagcggaagaggcccagagacgccagaggaggggcgtcagcgggacactcaggccaataagctctgactcccgctgtctgcaaaaatgaccggatgcaggaatgtcacctagaaccggccagctttccgacctctccggtcaagg

SEQ ID NO: 105459 - DNA, 73 bp, Homo sapiens; identical to SEQ ID NO: 37132
  chr2:10183213-10183286
  hyper

SEQ ID NO: 105460 - DNA, 199 bp, Homo sapiens; identical to SEQ ID NO: 1320
  chr2:10183603-10183802
  hyper

SEQ ID NO: 105461 - DNA, 453 bp, Homo sapiens; identical to SEQ ID NO: 37134
  chr2:10183814-10184267
  hyper

SEQ ID NO: 105462 - DNA, 30 bp, Homo sapiens; identical to SEQ ID NO: 37135
  chr2:10219643-10219673
  hyper

SEQ ID NO: 105463 - DNA, 145 bp, Homo sapiens
  chr2:10220228-10220373
  hyper
gccaccggcacccgccggcgggtcccgccctccagggctgccgctccgggccccgcggggaggctctcggggctgcgccgccgcctcagagtccggctgctccggctgctgccgctgcccatggcgcgcccgccgcctcccggac

SEQ ID NO: 105464 - DNA, 254 bp, Homo sapiens
  chr2:10220686-10220940
  hyper
ccccactcccgcccacgggtcccctcgctccccgccgtcgggtcagccctgtcccggccttctggaattgctgaaccctgcggggggcccggctgagtttgttcatttatggaaacgctccccagacgacgctcgccgggcccgtgggaggccgcgggagcttggggggacttcccaaagcctgagccccctagcgatgcgcggggtgggcgggggaaagaccctgagggctgcgcgcgctgcgttcgcgaggt

SEQ ID NO: 105465 - DNA, 44 bp, Homo sapiens
  chr2:10220958-10221002
  hyper
cgacctttcagtgtccgccaggcctgagacgccccgggagggaa

SEQ ID NO: 105466 - DNA, 203 bp, Homo sapiens; identical to SEQ ID NO: 37138
  chr2:10260351-10260554
  hyper

SEQ ID NO: 105467 - DNA, 30 bp, Homo sapiens
  chr2:10262812-10262842
  hyper
ccgggagcgcgcggcgcgggagatttaaag

SEQ ID NO: 105468 - DNA, 30 bp, Homo sapiens; identical to SEQ ID NO: 37139
  chr2:10442802-10442832
  hyper

SEQ ID NO: 105469 - DNA, 30 bp, Homo sapiens
  chr2:10443123-10443153
  hyper
tgggcggcgatgagcgcagggccggcgcag

SEQ ID NO: 105470 - DNA, 512 bp, Homo sapiens
  chr2:10443617-10444129
  hyper
tgtgagcagctgtgcgcagagcggggtggcggggtgggtgtgggtggtccagccccacgcccagagccccctgtccctgctggtcggcgcagtgcgtagcttaggagcctcgaggacagctgggacccgacgggcaagggcgggcctcgcgggcaggctgggcagccctcagggaacaggtccgtgcggcccacgtgggtcgcctgtgagcttctgccaagggtgggggcccacgcggaggcgatccgctcgttcctcccagggccatggggcgacgaggagagccctggcctccccgcgacccgcactgcgacctgggccagacgcgccaccttccccggtcgcggtttgcttctctttaaaatgaggacagctcctcccttgggggctgtggtgacaggtgaaatgagaacgcactgaagacagctcttggtccaaagccccgcacacagtaggtactgtgttaattggattagcgtctcctgtttaaaatcctttttttttccccttta

SEQ ID NO: 105471 - DNA, 398 bp, Homo sapiens
  chr2:10444193-10444591
  hyper
cgcgaagcactgagattcgagaaagtttagctgccagctgcgctgcctcctgcagcacctcccgggcggcgccgcctccgcgagtgcccgagagcgccgcgctgggcgccggccctgccccagcccccaggctcccgcgcaagcgtgggggtccctctcctggccgggaggcagcgactgcggagttgagaaccctttggttcaacaagttcctagtccgggaggatgcagctcagctcgtggagtccgagagtcacggcgtaaaattggcgcttcccgcacatgcagatctcgggctcccggggtgtcccggccgccaaaggccacccctttcctcctggctgaccccaattccaccagaggaggatgtttgccagggacgccgagtccagctgctg

SEQ ID NO: 105472 - DNA, 227 bp, Homo sapiens
  chr2:10587832-10588059
  hyper
aggccggggcccgctcgtctgtaccaaggcgagcccgggctctgcgcccctgcacctgctgcgcggccgccagggcctccccaacggctccccggccagcgcgcggccgccgaagggttgggaaagaggccggcgcggggccgcagggtctccgggtgggtctcccctaggcccctccagccccgagctgtgaagacgggggcagaacgaggcgcccggatcaccct

SEQ ID NO: 105473 - DNA, 661 bp, Homo sapiens; identical to SEQ ID NO: 1324
  chr2:10588855-10589516
  hyper

SEQ ID NO: 105474 - DNA, 30 bp, Homo sapiens
  chr2:10688882-10688912
  hyper
gccccatcggaaggccggctttccccacct

SEQ ID NO: 105475 - DNA, 30 bp, Homo sapiens
  chr2:10829710-10829740
  hyper
ggtccagtttctggcgcggtgacggcagtg

SEQ ID NO: 105476 - DNA, 30 bp, Homo sapiens
  chr2:10852775-10852805
  hyper
aggggagggtgacctcggagcccgtggctt

SEQ ID NO: 105477 - DNA, 30 bp, Homo sapiens; identical to SEQ ID NO: 37142
  chr2:10861577-10861607
  hyper

SEQ ID NO: 105478 - DNA, 456 bp, Homo sapiens; identical to SEQ ID NO: 37143
  chr2:10862069-10862525
  hyper

SEQ ID NO: 105479 - DNA, 208 bp, Homo sapiens
  chr2:10953100-10953308
  hyper
gggcctgctgggggcggggctggcagtctcggctcgcaccgcctcagctcctccgggccctctcggggtgctgctcggaggggagtccagtactgggcgtttttaccttagttccttattctgcacccccccaccccgcctcctccttgcctgtgtgcgcccccaccctctttatcccgggggagcgtgactcggcctcagggcaccc

SEQ ID NO: 105480 - DNA, 134 bp, Homo sapiens
  chr2:10953333-10953467
  hyper
tcctcttgtgcccgacgaatattccgtggacacacatttgctccgcacgcgctgtctgcaatgtaattcgacaagtttctattttgttgaattacttttgaaagttcttccgtccagggcgcatggctctgcag

SEQ ID NO: 105481 - DNA, 30 bp, Homo sapiens; identical to SEQ ID NO: 37145
  chr2:10975528-10975558
  hyper

SEQ ID NO: 105482 - DNA, 905 bp, Homo sapiens; identical to SEQ ID NO: 37146
  chr2:11051787-11052692
  hyper

SEQ ID NO: 105483 - DNA, 329 bp, Homo sapiens; identical to SEQ ID NO: 37147
  chr2:11269991-11270320
  hyper

SEQ ID NO: 105484 - DNA, 30 bp, Homo sapiens
  chr2:11273060-11273090
  hyper
gctgctgaactgggcgtggcatctagtcag

SEQ ID NO: 105485 - DNA, 30 bp, Homo sapiens
  chr2:11295702-11295732
  hyper
tggagcacgctgggcgtgtgcgccgcgctg

SEQ ID NO: 105486 - DNA, 203 bp, Homo sapiens; identical to SEQ ID NO: 1326
  chr2:11621382-11621585
  hyper

SEQ ID NO: 105487 - DNA, 685 bp, Homo sapiens
  chr2:11622659-11623344
  hyper
ctggggttccaggcccggggcgcgaacccgggtgggagggcgcagggggctcccctctgtccctgtcacctccacccatcgccggccgccgctaggggttccggccccgcgccctcccccgacccttccccggcggaggtcctggggcagccaagcccaccgcccggccctcctccgcggccgtcccgaagacccggagaagtggaccacagggggcggccagtgtcaggggtcgagtcctccgcgctggccgcggttccggagatccgggctttgccgagcgccccgcgccgtggccggggccggggccaggtccgggtgcggggcctggcgctgcggccgcgagctcagcctgtaggctgggctagcctccgtcggcggcgggcgctcaggagcggggccgcggcggccggaggacaaagggcccgaggtaggagcggtccctccgggcggcagcgggcggagcgggggcgcggggctgtgcggggctgctcggggcgggcactcggcgcccggcggggaaggtgcgccccgccggacgcgggcacttcctggccctggtcccgggaaggaggtggaaggtgtccgggatcggccctggcagcgtgtagggacctgggtgctgccgctgccgtgcgcttgtgcgtgcgtgtgcgcgcgggtataggtgtgggcgcgcgtgtgt

SEQ ID NO: 105488 - DNA, 144 bp, Homo sapiens
  chr2:11623403-11623547
  hyper
gagtgcgcgtgtgcgtgcgtgcatgtgtacgcgtgtatcggtgtgcgcgcgcgtgtgtgtgtgtgagagagagagagcacccgaggctcctggcgcttggcacatggtgagccctcggtaggtgggagccgtgaacagtgacgg

SEQ ID NO: 105489 - DNA, 180 bp, Homo sapiens
  chr2:11809815-11809995
  hyper
agcaggctgcgggcacgcaggggctggcacacggctaggcagcgctcggcgctcaggcctgccacgctcagcaccgtggcgtaggcgcacagctcgtgcacgaagtagtagccgcggcagcccaggtcgccgaagacccaggggtagtggaaccacacgaagctgtagagctccaccggc

SEQ ID NO: 105490 - DNA, 74 bp, Homo sapiens
  chr2:11810041-11810115
  hyper
cgtggtggcgcaggcgccccgcgcgcccggcccgcgccttcagcaccacgtgcgcggacagcgcattgcccgcc

SEQ ID NO: 105491 - DNA, 239 bp, Homo sapiens
  chr2:11810146-11810385
  hyper
cggtgaacagcaccttggcccagaggcgagtgtccacgcccagccgggcgtccaggctcagccccgggttggagctgggccgcgggggccgcgggctgctggtttccatcccgctcccgcggccggcgctccctccctctcactgcccggagtctgggcgagctgcctggttagtgagcacctcctcttctctgggaacctctagaactgggaggacacgcccccgaaagggtgtccct

SEQ ID NO: 105492 - DNA, 221 bp, Homo sapiens; identical to SEQ ID NO: 37151
  chr2:11828583-11828804
  hyper

SEQ ID NO: 105493 - DNA, 30 bp, Homo sapiens
  chr2:11886598-11886628
  hyper
tgagcgggcagggccggccagcaggccctg

SEQ ID NO: 105494 - DNA, 1006 bp, Homo sapiens
  chr2:12856407-12857413
  hyper
ggatcgggggcaagcggtgacaccaactaaaaggaagcaatggatttccttttaaatggagaggaggatgtcggagagataccatgaaacgaattctcgaaactccaggcagcaataccgatgaaagcgcattcttccaaaacagagctcctcattcagggccacatctgagcctgggggcccaatgctcagagcgtgcctggctttctggggaaaagcgccaggaacatgaacgagctacgaagagctggagcgggcgctgcgggagcagcgtgtggggaacggctcgggagtcgctgctggtaaccccggcccagccgcccgcagctgggctcgcagccggctcgcagccgacacccagggtgctgcgcccggggccccgggccgcggaaggatatttcactttgtttacctccccggccgggcgagggagctgcgaggccggtgctggcgcccccggcacggagctgcaatggcagcggcgcggggagccgcccgaggactggcagcggcggggctgattgatgggcgcccggcgcaatgaggggggcccgggcgggggcggggcggggccggctctgggctgagccagtcgcgggggcggcggggggggggcggaggctccgtggaaatgtgtcggtgacattgaatggggagaccgagcgcgagcgaggcgcgcgcgcgcacacgcgcactcacggccccgctcgctccgagatccccggccacgtaagtaactattaataccgcctcgccgggggatgcgggcgtgctgagcgcggggattggcctcgggcaccgtcggccgtcccctttaatttttaaatacacggtcccctcttttctctggggggggcaagcaagaaatcaaagaaggaggagacaagccgtcaattttctccaaaacaaaccccaccgggcaatttggtctcggggtagggggagacggggtgattgcaaattattccaggacgagatccagttctccagcgggaaaggggcaaag

SEQ ID NO: 105495 - DNA, 31 bp, Homo sapiens
  chr2:12857636-12857667
  hyper
cctgcgcccagcccgcgccgcaactctgtgc

SEQ ID NO: 105496 - DNA, 641 bp, Homo sapiens
  chr2:12857961-12858602
  hyper
gcgttgggactgagtcgccgccgtgagctccccgaagactgcacaaactaccgcgggctcctccgccccgtctgcgattcggaagccggcctgggggtcgcgtcgggagccctggcgctgcagctccgcaccttagcagcccgggtactcatccagatccacgccggggacacacacacagagtaactaaaagtgcggcgattctgcacatcgccgactgctttggggtaacaaaaagacccgagttgcctgccgaccgaggacccccgggagccgggctcggagcagacgaggtatccggcggcgcccatttgggggcttctaactctttctccacgcagcccctcttctgtcccctcccctctcgctcccttttaaaatcagtggcaccgaggcgcctgcagccgcactcgccagcgactcatctctccagcgggtttttttttgtttgtcgtgtgcgatcctcacactcatgaacatacacaggtctacccccatcacaatagcgagatatgggagatcgcggaacaaaacccaggatttcgaagagttgtcgtctataaggtccgcggagcccagccagagtttcagcccgaacctcggctccccgagcccgcccgagactccgaacttgtcgcatt

SEQ ID NO: 105497 - DNA, 30 bp, Homo sapiens
  chr2:12858980-12859010
  hyper
tccaggagctctctgcgcgaggccgggtcc

SEQ ID NO: 105498 - DNA, 30 bp, Homo sapiens; identical to SEQ ID NO: 1331
  chr2:12897042-12897072
  hyper

SEQ ID NO: 105499 - DNA, 712 bp, Homo sapiens
  chr2:14772283-14772995
  hyper
aagacgtctggggaacgaaaagggtcttcgatccaaggaccagcctaggggccatcgggaaccaaggctctgggggatcccagcagggcccagacgcccgcctcgggcaatgtcgctgcctgccccgggccgctcgcagtgcctgggccatactggggtgccctggggtttcttctccatacccagactcagcttccccgctggagtctgtcttcctggaacacggaacgcgggcgggctgtgttctcagtcacaatcagctcggatgagctggggggcgcgggcgcaagcgggcatcggcacctggcagaaagcgccgcgccccccgcgggtgcgcacacctccgctccccggggcggcgcgcggtcgggtgtgcggggtacggggcggggcggagcggagcagagcaaagcgcacaggaggcccgcctctgctcccctcccccgccggcgaagattgacacagctcgagcacccgccccaaccaatgagcgcgtcctggggcgggccctgggaccggctgctccggctacttagagtcgtcggcgcggcggtgggaaagcagagccgagccgggactgtccagtgggagcaggcgccccggccagcgcagacctggaggcgcacgggcgccgcaccgcacgattcggctcggggtagagcggagccgcagccccacgcgcagcccaggacccactcgccaccgccgcttc

SEQ ID NO: 105500 - DNA, 2014 bp, Homo sapiens
  chr2:14773808-14775822
  hyper
gttttcttctgggagttggaccgagttcccggaaggggtcggaggctgtgtggtggcgtctgctctcgcctgacctgtggcggcttctccgcccctcgtacccctggggaggcacggaggactcggctggaaagggtgactccggtgagggcacgtaagctagccggcaggtcccaggggcactgcacgtcttggggagggacaccgaaaggggcagcccggactctgacggtgtctctgcctctctgtgcctccgcagatccccgctcctggccctcgcctcgccacctcattgatgggcaaccaactggaccgcatcacccacctcaactacagcgagttgcccacaggggacccgtcggggattgaaaaggacgaactgcgggtcggggttgcctacttcttctcggatgatgaggaagacctggacgaacgcgggcagcccgacaagtttggcgtgaaggcccccccgggttgcaccccctgcccggagagccccagccgccaccaccaccacctgctgcaccagctggtcctcaacgagactcagttttccgcctttcggggccaggaatgcatcttttccaaagtgagcggtggccctcagggcgccgacctaagcgtctacgcggtcaccgcgctgccagcgctctgcgaacccggcgacctgctggagctgctgtggctgcagcccgcgccggagccgcccgcgcccgccccgcactgggccgtctacgtgggcggcgggcagatcatccacctgcaccaaggcgagatccgccaggacagcctgtatgaggcgggcgcggccaacgtgggccgggtggtgaatagctggtaccgctaccgcccgctggtggccgagctggtggtgcagaacgcctgcggccacctgggcctcaagagcgaggagatctgctggacgaactcggagagcttcgccgcctggtgccgctttggcaagcgggagttcaaggcgggaggggaggtgccggcaggcacgcagcccccgcagcagcagtactatctcaaggtgcacctgggagagaacaaggtccacaccgccaggtttcacagcctggaagacctcatccgcgagaagcgccgtatcgacgccagcggccgcctgcgagtgctccaggagctcgccgacctcgtggacgacaaggagtagccgcctaggggctgccggcccctctgcctcccccgcacctcgctcccttcccttccccgcacccggacttcgcagtcagcggttctcaacctctgccccgccccgccacgcgcgtccgccgccggtggcccgggcccgggctgcacccccgcatccccaagccagcggcaggaagtctcaggaactgccccagggccgaaagggcgccgctgcgagcgcctggctgacagccacagcggtggtgacggtgctgggagaccccgcgtgcgctttccccttgagatgtaaaccgggaacggggaaggggctgaggggagaaaggacatggccttccccgcgagtccatggccagtgactgtggcccgactcgaaaacaaccctcttctcaaaagggaccatcaccgccccgagcgtgcgcacacagaccggtcggaggcgagaactggtctctacagggcacagttcagctcctctgtggatgcgtccccagatcgcaggatttccaagaaatcgagcctgtcccttgtgcacttgggaataattccccaagacagcacttcgggattccgggttatcctgaggctgcccgggacttttccagctctccagccccaggtctcctgacattgtgttccaggctgcgggctaagccagacagtgtttgcctccggttctttccaccgtgggaagcgaacgccacccccacccgcctttgcctgcgagtctccctcgctggcagaagggaagccggcccggtcccgggaggaagatggcgctgcgaattcggtgaggacagccggccccgcccccgacaaggagctcgctcgttcacctggtgtc

SEQ ID NO: 105501 - DNA, 30 bp, Homo sapiens; identical to SEQ ID NO: 37157
  chr2:15044081-15044111
  hyper

SEQ ID NO: 105502 - DNA, 114 bp, Homo sapiens
  chr2:15701351-15701465
  hyper
aagtcatagagaatcgtctcctcctcaccctctgcagtgcctggactcaaagccggccctgactcgggggccgccatgttcgccgaggactcaggcagcggaggagtgtctcta

SEQ ID NO: 105503 - DNA, 30 bp, Homo sapiens
  chr2:15731812-15731842
  hyper
catggtgcccagaacgaaggcggcgtccag

SEQ ID NO: 105504 - DNA, 30 bp, Homo sapiens
  chr2:15732057-15732087
  hyper
atggcggccttctccggtgcgtttgtggaa

SEQ ID NO: 105505 - DNA, 232 bp, Homo sapiens; identical to SEQ ID NO: 37159
  chr2:16079904-16080136
  hyper

SEQ ID NO: 105506 - DNA, 87 bp, Homo sapiens
  chr2:16080304-16080391
  hyper
cgtaatttttttttcttttaatgacaagcaattgccaggctcgcagggtgggtgctgcattgcaccgctccgcgcgcagctggttct

SEQ ID NO: 105507 - DNA, 169 bp, Homo sapiens; identical to SEQ ID NO: 37161
  chr2:16080605-16080774
  hyper

SEQ ID NO: 105508 - DNA, 30 bp, Homo sapiens; identical to SEQ ID NO: 1336
  chr2:16081151-16081181
  hyper

SEQ ID NO: 105509 - DNA, 30 bp, Homo sapiens; identical to SEQ ID NO: 37163
  chr2:16081452-16081482
  hyper

SEQ ID NO: 105510 - DNA, 1126 bp, Homo sapiens
  chr2:16081809-16082935
  hyper
agtttccaaagttgcggagcctcgccaccaccccctgcatctgcatgccccctcccaccccctgtcgtagacagcttgtacacaaaaggagggcgggagggagggagcgagaggcacaacttcctccaccttcgggagcagtgggcagagtggggggcttggagggaagattggggaacctggttagagggggcgcccattgcctatcccctcggtctgccccgtttgcccaccctctccggtgtgtctgtcggttgcagtgttggaggtcggcgccggcccccgccttccgcgccccccacgggaaggaagcacccccggtattaaaacgaacggggcggaaagaagccctcagtcgccggccgggaggcgagccgatgccgagctgctccacgtccaccatgccgggcatgatctgcaagaacccagacctcgagtttgactcgctacagccctgcttctacccggacgaagatgacttctacttcggcggccccgactcgacccccccgggggaggacatctggaagaagtttgagctgctgcccacgcccccgctgtcgcccagccgtggcttcgcggagcacagctccgagcccccgagctgggtcacggagatgctgcttgagaacgagctgtggggcagcccggccgaggaggacgcgttcggcctggggggactgggtggcctcacccccaacccggtcatcctccaggactgcatgtggagcggcttctccgcccgcgagaagctggagcgcgccgtgagcgagaagctgcagcacggccgcgggccgccaaccgccggttccaccgcccagtccccgggagccggcgccgccagccctgcgggtcgcgggcacggcggggctgcgggagccggccgcgccggggccgccctgcccgccgagctcgcccacccggccgccgagtgcgtggatcccgccgtggtcttcccctttcccgtgaacaagcgcgagccagcgcccgtgcccgcagccccggccagtgccccggcggcgggccctgcggtcgcctcgggggcgggtattgccgccccagccggggccccgggggtcgcccctccgcgcccaggcggccgccagaccagcggcggcgaccacaa

SEQ ID NO: 105511 - DNA, 30 bp, Homo sapiens
  chr2:16689408-16689438
  hyper
ccctgcaagtcgggcgcgctcagcccacct

SEQ ID NO: 105512 - DNA, 30 bp, Homo sapiens; identical to SEQ ID NO: 37165
  chr2:16689806-16689836
  hyper

SEQ ID NO: 105513 - DNA, 365 bp, Homo sapiens
  chr2:16790115-16790480
  hyper
cgactcagaccaccacgtcagtgaagaggtgaagctgggtcctgaactgctgctgcgatgggatcattcacatggctattaatcatacaagagcccatttatgacaaacgcaggtcactccctttgcatgacaaggcacatgggtccacagagccccattatccaaaaaaaaacacagagcattgtgggcgatgcaggcgaaggcgagtgcacacacacaagcggacattgtaaggctgtttgcacaaccccgccgtgctcctcgcggatttcctgccaaggagacatttagatctcacagaggcggctgcagacatttgctcattcaacatggcttcaggcagtggctgcggaaacccggtgca

SEQ ID NO: 105514 - DNA, 489 bp, Homo sapiens
  chr2:17699487-17699976
  hyper
ctcccagactttttccgcctcagacaagcgaggcaccagaggcagtcgccagcccgccttaaagacacctccaggctcctcaagacagagccgcttgctactaggtggttgggaatccgggtcctcaggaggcgttaaagaggaggtaggctttctgagctcggccatccgcggcgtgggctgagggagagacatgacagcgaatggaaaggatctgtccgagtcccggcggggctccaatcccttaataggcggttccgggccgctctggtcacgcccctgacccgcccctcaagacctggccttagcctaatctcagggtttgccccaccccgaatccgcccctccacagccccagcctcagccccgccccgcctccctcagtccctcctctccctgcccccacccacgcgccccggttgtctcaccactgaaggtcggagcaccctgggccgttacattgtctatttttagcgcctttttctaatg

SEQ ID NO: 105515 - DNA, 30 bp, Homo sapiens
  chr2:17719365-17719395
  hyper
aggagcgcccggcagcgtaatctccgcttt

SEQ ID NO: 105516 - DNA, 668 bp, Homo sapiens
  chr2:17719769-17720437
  hyper
ttacaaaagcgcacgcgtcgatatcaatcgtaccctacaacagagcatggtttaaagtatcagtgtacattttttcctaaacacaagttgcaagtaagttatctaaaatcgaacaccgccacgaaagagacctccagggtgcaataaataggtatatctcgttgaagtggagaaatggcatcatgaccctttgggttgatgcagattacagtgcggaggctgttctcgagagagaaactagaactcagcgtaaaatgctgtagtaggggaaatcgaccaaagacgagattttgaaagccttttgaaagtcgtttttctagctaaaaagaaaaagtgacttattcaggactgactccccctgccagtcccaggaaacaggagcagcccggcgcgcccgggagccccgcagcgcagtgcgcactgcggctccagagcgaagggctggcgcccgccagattctaaacgtgctcggctgccgcagcccgccggggccgcgcgccgtggtccgcgcgactccgcgctccgggtttccgcggtcaccagcactggcggaagagccctgccgagaggggacagccgcgggcggtgtcccgggagtcccgagagcgcgctccccctttgcgcaaccttcccgaggcgtcctgcccgggaagccagttcctgggttc

SEQ ID NO: 105517 - DNA, 330 bp, Homo sapiens; identical to SEQ ID NO: 1341
  chr2:17721348-17721678
  hyper

SEQ ID NO: 105518 - DNA, 364 bp, Homo sapiens; identical to SEQ ID NO: 1342
  chr2:17721750-17722114
  hyper

SEQ ID NO: 105519 - DNA, 36 bp, Homo sapiens
  chr2:17934472-17934508
  hyper
aacacaccagttgccgcctgcgagatatcatcagac

SEQ ID NO: 105520 - DNA, 34 bp, Homo sapiens
  chr2:17934860-17934894
  hyper
agggaaagcgacagcgcgcgccttcaccctaccg

SEQ ID NO: 105521 - DNA, 36 bp, Homo sapiens
  chr2:17935191-17935227
  hyper
ctggtaggcacgggcggctccgcagtgaccggactc

SEQ ID NO: 105522 - DNA, 343 bp, Homo sapiens; identical to SEQ ID NO: 37173
  chr2:18011853-18012196
  hyper

SEQ ID NO: 105523 - DNA, 1123 bp, Homo sapiens
  chr2:18059017-18060140
  hyper
taaaaatctgcagtttgggggcgggagggggagcgcgggggtgggtcccgaagcgtcccatttctcctcctggctgttaactgagcgctctcgctcagtgcagcgaggccagcgatgccttctggaccacacgctgtcctcgccgaggtcctggtttgttcctcaacgtcggctgaaggcatcgtcccctgacttcctcttccattcgtccttccgaaaggggacccgactggttcctcttctacatatgaggcgcatctgcttggtgcaaatgtccaagcacctcttctgactcggtgagtggaggaataagacaaagcatcttgttctgcactgtgcctgagtcttcaggcagcgggaccgatggcaaacattggcaggaactggagctatatgtactctccttcgcactttgttttaaaacaagtttgggcctcgcgatttcctgaggaaatccaggcaaattagcaaagtgtcgcttgggccgcgactttagaaaggcggttgccccagccgccggggccgcgggggaggtcatctttttcccgcagggccacggcgcttccggcccaggagggcgcgcaggtgggaggcgcggggcgcgctcctggtcccacccggacagcgcctgccgctccggggtgactctgcacttgggcctgggcgggggcgcgcggccggcagggcagcatctaggtctatgggtctgtccgcctgtctggcggtcggagccccgcagtcctcagccgcccgcgccctcggcccggggcgcccggctgcgggcccgaagcgaggggctggcggagctgcgaccaatggggcggcggccgagcggcgggccccgccccgtcccgtccggccccgccccgcccgcagctcccgggagcctcgctctagcggggcgggaccgacggacagaccggccgacgcgggccaccccgctctcctcgccgccgcggcggcaggcgcggggccgcgccgcgaggcctgatccctgcagcgcgggcaggcggcgtcgcagagcggagctagctggatgcgtccggactcctgcaggtacctggctggcgtccccacctccctgcgcgctccggagacttctccgggcgaccctgcaacttta

SEQ ID NO: 105524 - DNA, 790 bp, Homo sapiens; identical to SEQ ID NO: 37175
  chr2:18060198-18060988
  hyper

SEQ ID NO: 105525 - DNA, 30 bp, Homo sapiens
  chr2:18741386-18741416
  hyper
gtcccctcccacaccgtgcccaggccctcc

SEQ ID NO: 105526 - DNA, 194 bp, Homo sapiens
  chr2:18741864-18742058
  hyper
ctccacgggagttccgcagccgccgccttaccggaacccaagagaccacctgtacgcggagaacgctggggcgcggcgggtcggcccctgacggtgcgcgtggggcatgctgggacttgtagtttccctctgggggggtcgcctgattggttgtgagagttcagcgccctgggtcctgcgccctccgtggaagc

SEQ ID NO: 105527 - DNA, 322 bp, Homo sapiens
  chr2:19550008-19550330
  hyper
tgccaagtcctgggccgcccctccagggctggccagcagggggcagcgtggctctgagcgtggaggccagggctggtccgcgccggcagggccagcctccagtgcccagttgggttcccgggcctcgaagttctagcccgcacaggactcaggagcgttcccggaggaggtggggatggggtggtgaaagcccagagcgttttaacttctgcatcccctgccgctttctcagccagcagggcccggcttgaggctgggatttttggtgcctgcagcagggaagcttatagtccagttgtcatccgcggccgccgcgctccgg

SEQ ID NO: 105528 - DNA, 138 bp, Homo sapiens; identical to SEQ ID NO: 1345
  chr2:19550407-19550545
  hyper

SEQ ID NO: 105529 - DNA, 288 bp, Homo sapiens
  chr2:19550611-19550899
  hyper
cgggtgcagagcctcgatcctaggaggggacaagtcccaagcagagaattgtgtctgagggaccctaagggagggagtgatgttggtttggggttccggggaggcagcggtcattgtgtatttgcacccgagtgttgagacccggggaacgggaaatattacagctctgaggctctgtgagggcgggtccttcccaccccaaagccagaggccaggagggaggccttcggttagggtggggaaagacattctcttctcttcttgcaccctaagcgatctcagcaccca

SEQ ID NO: 105530 - DNA, 286 bp, Homo sapiens
  chr2:19551162-19551448
  hyper
cgtccagcagagaaacctggtcctctcaaagagaggacccaaccggtttcctgcgtttaggagggaaattacccatcctgcaatgcctgtaaaataaccgtttatttaatagttaaaaaaaaaaaaaactccagtgataaatgtccgttaccgatggtcagcataaagtgccaatcgcaatataacgcccggctcttggctggctgctccctcgcagtgtcgcggcagcggaggccgggccccctgcagaccccaggcccgaggtccccgtcccgctctcctagtc

SEQ ID NO: 105531 - DNA, 451 bp, Homo sapiens
  chr2:19551499-19551950
  hyper
cgcggtccctagggcaggaggctgaagcagatacagggattacacttttgcaggctccgggggtgggggcaggggcgggaggaggaggtgggagctgccagtgctaaggacttcgttgcctctcctctctccactcactctccgcagtcagagttacaagcttatatggtcaaagacaaaaataaaaaagaaaacgtataaaataacaatagaaaaagtaatacttctgggagaggcgccgctgcggctccgcggagctttcgttctttttttaatgcagtttcccttccgccacgtgagtaccgccttttggccaagagtttagccgcgtcctaggggagcagcagggacggtcggggtcgcggccccgggcggggctctgaagtgccgcgtgcgccagggacccaggggacaatgttggagaggtggaaggtcccgagcgagcgcctct

SEQ ID NO: 105532 - DNA, 407 bp, Homo sapiens
  chr2:19556475-19556882
  hyper
aaggggacccgaccacgcacagcagacgcaattcgcgctcgggatcccgagtccctgcgcagtgcgggcactcgcgtccctcgcgcggtggagcgccaatcccaggtctgcggccagtcctatgctgggcattaatgaagtgtgcagagtctattaaagtggtttattcggggctaattgagcgtgagcaagttaactgcttgcattaatgagaacgggagcgaactccacgagtttgcgcctgggggagcccagcagcaacccaagaaaatcagccttgacatcgaatctccaacgagtggtgacaggcgtccggacccccgtgaagaggactgaccggcaccggatacttctatagcattctcccaacaaacgagatctaacgaacccattggcaaggcggtcat

SEQ ID NO: 105533 - DNA, 1844 bp, Homo sapiens; identical to SEQ ID NO: 37182
  chr2:19556980-19558824
  hyper

SEQ ID NO: 105534 - DNA, 222 bp, Homo sapiens
  chr2:19561250-19561472
  hyper
ttactgggagtccagcgcactccgccaccgcggctgcagcttctgctagctcggagcctgcggactccagccggcgcgaactccgccgcgactctttctggctctctcgctcactgccttcggggcggaaccgcgggcgccggagtggtcccagactcggctgggaccgggcagcctagaagaagggtcccctcagtagagaccaggcctccagctctccgt

SEQ ID NO: 105535 - DNA, 484 bp, Homo sapiens
  chr2:19561523-19562007
  hyper
cgatccctccgtctgcccgggcttccgggctgtggaccgcactgaacccagtcccgcagcaagccctgctgccgccttttcctgggcacgcctgcggtggtgacggcccgctgctcatgtctccacgccaaaccccagcccctctcccgattcctgctccttggtaaagcgccccagcctgtcttcggagtgaaaattgagcagcttccagaaaattaactagaatgtggtctatattgctttgagttgttttggattcaaaaaaaaatgaaccccacctctccgcaccccatagcctaaaaaaaaaaaaaaaagtcctcattttttcaaatgaagtttgctcagcacttgcgaatttttgcttccaacgcaactacttcctgtaactactttgcagacaattgggggtctgctcgttagaaacccccttacgcatgtacagggctttcaaataacctggagatttaggcgtccctctgtattc

SEQ ID NO: 105536 - DNA, 30 bp, Homo sapiens
  chr2:19562795-19562825
  hyper
gaggaaggagagttcgcggtaattaaacat

SEQ ID NO: 105537 - DNA, 343 bp, Homo sapiens
  chr2:19563155-19563498
  hyper
ctgccccaaaccagacgtccttgctctcagatggatgagggcttttgtttgtttgtttgtttgtttttaaataatccgaaattcctagcaactatctgccgccgttcgcttctggtcctgggaagacgatgagcaaagatctactgggaccccatcctgcatttgcaagctcggtccgcgtgcccctcccggcacacccggaggtgagaagtgccctccggtgcctccgtccgcagcccctcgtaggtctgcacgtcctgcttcggatcccaaatcctggctttctgaagaagcgcgggaagaagagagagagtctgtttccgtgaatcgatttccctgaaac

SEQ ID NO: 105538 - DNA, 365 bp, Homo sapiens; identical to SEQ ID NO: 37186
  chr2:20068517-20068882
  hyper

SEQ ID NO: 105539 - DNA, 30 bp, Homo sapiens; identical to SEQ ID NO: 37187
  chr2:20101124-20101154
  hyper

SEQ ID NO: 105540 - DNA, 120 bp, Homo sapiens
  chr2:20101401-20101521
  hyper
gcccaaacaaccccaacgtcgcctccacccggggtcgccgcggccccaggtctcgcgatagttacctcccgggactctcgtcgctggaggccgcgcaagcgcaccggcgaatgtaagcgg

SEQ ID NO: 105541 - DNA, 194 bp, Homo sapiens
  chr2:20101764-20101958
  hyper
cgagataacggttccgctgctggcggggcgtttgcagtggcccttgtgaactatgtttctgccgttaccagtgttggacccgccttcctcttttcctagaaaaggcgcagatgcgtggtcgcaaactgatttccaagtccgttgtctgatgctgcgagacactatccgtttgttacagcgaattgggggccgat

SEQ ID NO: 105542 - DNA, 30 bp, Homo sapiens; identical to SEQ ID NO: 37189
  chr2:20189472-20189502
  hyper

SEQ ID NO: 105543 - DNA, 30 bp, Homo sapiens
  chr2:20189813-20189843
  hyper
ccctcgacaagtaacggttctacgtctcca

SEQ ID NO: 105544 - DNA, 43 bp, Homo sapiens; identical to SEQ ID NO: 37190
  chr2:20190154-20190197
  hyper

SEQ ID NO: 105545 - DNA, 565 bp, Homo sapiens; identical to SEQ ID NO: 37191
  chr2:20212118-20212683
  hyper

SEQ ID NO: 105546 - DNA, 44 bp, Homo sapiens
  chr2:20251335-20251379
  hyper
cagccaaactcaaacggctgtttcacggcctccaaaacccaacg

SEQ ID NO: 105547 - DNA, 164 bp, Homo sapiens
  chr2:20251427-20251591
  hyper
cgcctgcgcactgagcgcagcgacttcggcttacccacccctcttcctccacacaggccaatggggagcggaaggctggatggaccggacttctgattggaagaacttggggattgacaagacctcacgcccaattagaagtgcaactcgcctcagcgagtctc

SEQ ID NO: 105548 - DNA, 81 bp, Homo sapiens; identical to SEQ ID NO: 37193
  chr2:20251797-20251878
  hyper

SEQ ID NO: 105549 - DNA, 30 bp, Homo sapiens; identical to SEQ ID NO: 37194
  chr2:20252210-20252240
  hyper

SEQ ID NO: 105550 - DNA, 30 bp, Homo sapiens; identical to SEQ ID NO: 37195
  chr2:20423099-20423129
  hyper

SEQ ID NO: 105551 - DNA, 738 bp, Homo sapiens
  chr2:20424155-20424893
  hyper
gggtctgcagggggggcgttgtggccgcggtcactgcatccccccgggtcaccgacgggggcccggccgccgcggtggccggggcgaggagggtgggaacgggcgaccccgggcgccgctgtgggctggcgggctccgacagatgtggagacgttttacataattgagcgcggggccccggccccccaccctccccagcgcgggaccggtgcggcacccaccgacagcggaggaaattggggctggagccctggtctcggggctcaccgtcccgggacccgctgggctagcgcgggaagaagggaagtcttcgctccccctccccctccacgtgcacccgccggcatccgcgggtgaccagtcccggcttcccgccgcctccccgcctggccgccggccgcactcaccggcagggccggctgcaggctcagcgccagcgcgcacagccagagccagagcgccgcgcgcctcatgctgcccggaccggcggcgggagagcggcaggctgcgcgggtcgcggctgcgggccggcttcgcgggttccgctgctcgatgctctcttgggcgcctgcccagcgcgccgctgtcccaggcgagggctgcagggtccgccggctggagtccgctctctactgccggattcctctccgctcggctcggattcggcccgcacctctcccgccgagctccgccttataataaacccacaggcccttccttagccgttgcaaaaactgg

SEQ ID NO: 105552 - DNA, 441 bp, Homo sapiens
  chr2:20425309-20425750
  hyper
cggggacccgggggcgatggggccttcaaccgacgggcaaacacacacagacacaccccggctgtcctccagctgcgatgcggctcgctgcgccccgccggcccagattctcccgtacgctcgcgttcttcctgcactccacaaagtgctggagacttggggccttagtttaaacagctgcacccgcacggaagggctgcaagaaaaagggggacgggggcggagttcgcagcgtttttctgtggaagacaacgccctctctcttcatctgagctaaaaggaaaaataagtaacttctttgttccccggtgacctcgggcacgcggatctgaggagcaccgtgcagttgctgctccttcgagatcccctgcgaggccctgggcctcagttcaaaaagctgtggaaggcctgcgggtgtaggggaaacggccgagagagcaa

SEQ ID NO: 105553 - DNA, 30 bp, Homo sapiens
  chr2:20551043-20551073
  hyper
gcgcccacaagagccggacgttaattcagg

SEQ ID NO: 105554 - DNA, 30 bp, Homo sapiens; identical to SEQ ID NO: 37200
  chr2:20646166-20646196
  hyper

SEQ ID NO: 105555 - DNA, 361 bp, Homo sapiens; identical to SEQ ID NO: 1356
  chr2:20646412-20646773
  hyper

SEQ ID NO: 105556 - DNA, 925 bp, Homo sapiens
  chr2:20646843-20647768
  hyper
cgcagtctggttggagctgttgtcttgtatgctcagcgaggcccggagagacccgggagagagctaggccgagtccaccgcccgagtctgctgcccgagcccgcgttacgcacaaagccgccgatccccggcctggggtgagcagagcgaccaccgcccgggagcagcgcggcgagacgcacggtgcgccctatgcccccgcgcccccaccgcccccgccgcggcagccgaagcgcagcgagagaacgcgccaccgcggggcccgggtgcagctagcgaccctctcgccacctgcgcgcagcccgaggtgagcagtgagcggcgagcgggagggcagcgaggcgttcgcgggccccctcctgctgcccgggcccggcccgctcatggcggccatccgcaagaagctggtggtggtgggcgacggcgcgtgtggcaagacgtgcctgctgatcgtgttcagtaaggacgagttccccgaggtgtacgtgcccaccgtcttcgagaactatgtggccgacattgaggtggacggcaagcaggtggagctggcgctgtgggacacggcgggccaggaggactacgaccgcctgcggccgctctcctacccggacaccgacgtcattctcatgtgcttctcggtggacagcccggactcgctggagaacatccccgagaagtgggtccccgaggtgaagcacttctgtcccaatgtgcccatcatcctggtggccaacaaaaaagacctgcgcagcgacgagcatgtccgcacagagctggcccgcatgaagcaggaacccgtgcgcacggatgacggccgcgccatggccgtgcgcatccaagcctacgactacctcgagtgctctgccaagaccaaggaaggcgtgcgcgaggtcttcgagacggccacgcgcgccgcgctgcagaa

SEQ ID NO: 105557 - DNA, 30 bp, Homo sapiens; identical to SEQ ID NO: 37204
  chr2:20851137-20851167
  hyper

SEQ ID NO: 105558 - DNA, 30 bp, Homo sapiens; identical to SEQ ID NO: 37205
  chr2:20851389-20851419
  hyper

SEQ ID NO: 105559 - DNA, 2022 bp, Homo sapiens
  chr2:20865452-20867474
  hyper
ggtgagcaggcgccgcgtctccgcggtggccgagagggcaatggctgaggagttcgtttgggacgaagcagtggagcaggggaactggggagcctgggccgggcctctctgtgggtcccagcgcagcgcagccaggcaggcgtcgggacctaggcggctttggattcggcgggcgacctcgctttgaagctgatcacccgctcaaggtgatcacgacgtgccgacccagtctagattttgagttctgcagaaaatgcaattttaaaggaaaaggacccgcctgcccttcttcggcagttcgtttggcccaggccttcgatcagctgaaagtttccgatctagggggatgtccaggctgccggcggagcagagccgataacccccctctcctgcgcgttcccctgagacttggcctccgcaacctgtcccagccgcggagcaaactgctctgcggcccgcgcgagtgcgccccagggcttcgccgctgccgggcgtcccctccatccacctcgggacccgcgccatcaccgcggcggggtaagaagctcggaggcgccatcccggggctctgcgccgtccgctctcccggctcctggccgctcacgcacacagccggtagctggttttcgttagccgctgccctcgcccagaaggcgggtggaaggtcgccagttggacgcacagccaaactcttagcgcactcccgcgcgagatcccccatcacccggggctgccgtcctcatttcgagctctttctagagcttggctcccgctgaagcgcaacttccgcgcccaaaccttgcttttacgacgggcggtccgcgtccaaaggtctcttacaggcctgccctttcagctcctcgccctcccttcctcccctaccggccccctcccctgctctggccgcccgctgcaatcctttggggtctgtggctgagtggggaaccgccgacccgcgatccggaacgcgactttgaggccgccgggagcatcctgtggcctctctctgcgcggccacccggccgcggcgcgaagcggtctggagggcgagcccttccgcggccccaactctgccgccccgttcccggcattgggaaccagggcagggagggggcgggtgtttctctgcgggggagtggggaggaagctgggcgggtgcgcgcggtgccccgagcctggaaccacggagggcgcgttggtcttgggcggatggagggggtgtcgcactgccgcggggaggcgtgtcgggaggctggggccagtggcagtcgcttggcgagggtgggggcgtagcgctgcggtgggaggaggcggctccggccctggtctccactctaggccggggtggggggcgcatagcggccgccggagctttcagcagggggcgctgctccgggcgttgggcgggggtggggtgggccaggagggggggccgcgggctggccgcgcacacttcccccattattaaacactatgttcaaaaggcgccgggggacttcccggagccacggagcccgcgccgcccgcccgcccggcccacggagcccatggacctgagcgccgccgccgcgctgtgcctttggctgctgagcgcctgccgcccccgcgacgggctggaagcggccgccgtgctgcgagcggcgggggctgggccggtccggagcccagggggcggcggcggcggcggcggcggcgggcggactcttgcccaggctgcgggcgccgcggctgtcccggccgccgcggttccccgggcccgcgccgcgcgccgcgccgcgggctccggcttcaggaacggctcggtggtgccgcaccacttcatgatgtcgctttaccggagcctggccgggagggctccggccggggcagccgctgtctccgcctcgggccatggtcgcgcggacacgatcaccggcttcacagaccaggcgacccaaggtacttacgcctcttctgtgcccgcccatcccgtcaggtcctgggctgagaccagccccggagccgtgccgcagctccgttaca

SEQ ID NO: 105560 - DNA, 865 bp, Homo sapiens; identical to SEQ ID NO: 1360
  chr2:21022198-21023063
  hyper

SEQ ID NO: 105561 - DNA, 138 bp, Homo sapiens; identical to SEQ ID NO: 37208
  chr2:21540142-21540280
  hyper

SEQ ID NO: 105562 - DNA, 30 bp, Homo sapiens; identical to SEQ ID NO: 37209
  chr2:21595656-21595686
  hyper

SEQ ID NO: 105563 - DNA, 127 bp, Homo sapiens
  chr2:23607986-23608113
  hyper
cccgtgattggctccgcccgcccctggctgcgcgccgaagcccgcctccctcgcagctaaagcagacggtacccggagcggagcgagccagaagggagcatggtccccgcgccgcggccgcgccagc

SEQ ID NO: 105564 - DNA, 1950 bp, Homo sapiens
  chr2:23608338-23610288
  hyper
cctcgatgagagccgcgccgcaccgctcatagccgcacaggctgacaggcaggaggaccgacttccctctcccgggcatcctccctgggctgccgggaggcggcggcggcggaggaggaggaggaacgaggggagaaggcggagagcaggaacgcgaggaggaggacctggatccgtttcctccggccaggacccgagcggccccagccaccgctacccgccggcgctgtccgctctccatcagccctcctgcgcccacccgcgaccccgggctctctgcgcgtcgggccggggccggagccgcgcgccggaggtaagagccgggccgggctggagcgcctcggatgcggcgccggagggagacccaggtcctggccgccgcgtggggccgggccgggccgggcgtgggagcggggccggaacccggaaccctgggctcggcttcggcggcggcggcggcgacaggagcctcccgcgtctggactcgcaggctgcaggagcccttgcgcctgcgctgctccagggggaaaaaaagggggggaaaaaacttcctgcccccgggtgtgtatgcaccggggctgcctggggccactgtcacggtgttcggaggtgctggaggcttgtgtgacccctggccggagcagcccccctgctgggcccggcggcgcgcgcccctctccaggccacgttcccctgagcggcccagggccccggccgggcaggagacctggaggcgacggagggctggcccccaggggcggccgcgcgcactgtcctttggggaggtgcgcgcctctgtgcagcgagaagccaggttggggttttctgcccctcgcgtcctctgatctcgcatttggggactgggtctctttactcaatcccaagtaactttcgaggtagatgagctcgaaaaccgtcgggagggaacccgcacagaccttattgtgacccaccccaccccgacacacacacgcacacttcccttgacaccttgtgggtgccagcgtgttgtggggggacgcggaaaggagagctcacggggacggcgaagcggccaggaggtggtgtcgttggggaggggttgttgatgtgtgggacagggtggacctggagatgtgtagtgtgggagtgtgaacgcgcgccccgatggcctcggggggccgggggagcccagggctcgcgtcccggtctccgtggcctggagcgggctgagagcgctagggttatctgcggtcgccgcgcgggtgcccgcgctgggcagcgtcggccccgggccccaagggagggacgtgctcgcctggggccggagcgcggggctgggagccggggtaggtcggaggtggctcttagggcaggtcgcctctgcgttgcctggggaaggcggggacgcgctgcctgcctgcggccagccgtctcggaggagggggtggcggccacgcgcgagtctcggatgcctgggtccacccgctgagaagccagttgtcgtccctgggctgtggaaccaagcggcagacgcggtccgttggcgggccctcgcgcgggcccccagagatgctgatgggtaaggagctgccgccgccgccgctgccatccccgccgctctgcaaacgttctcctccctccctcccgtgcttgcgccgcggcgcgccccgggcgaatcgtggacgcaggtatttatgtagcattaggcgagacctcggcgctggagggaccagaccgtggaggacgccgagctgctgctgcctgcgaaacttccacttcggcagctcagcggcatcccggcccgctgctgcaggttccagcctctctccagtccagcaacgctgggattcggactcctcttgcaatgacagatctgtcctggttacggctgtatttatactagtttcagtctctttaaagtcatctgtctagtcactacagagtttcttcctcgccgtgtggtcttat

SEQ ID NO: 105565 - DNA, 33 bp, Homo sapiens
  chr2:23886283-23886316
  hyper
gccgccccgcggctccgccgtcacgtgtgccgg

SEQ ID NO: 105566 - DNA, 30 bp, Homo sapiens
  chr2:24269851-24269881
  hyper
acccaactttatcccgctacccgctataaa

SEQ ID NO: 105567 - DNA, 166 bp, Homo sapiens
  chr2:24270301-24270467
  hyper
gtgggcggtgatatcggtcctctgataggtgggtggtcctctgataggataggcacgctccgagatggccccgtctattggcttttgaatatgcacattagcagagggttcgtcccactggccaataagctctggctctgccgcacggatcgctgggagtggtagt

SEQ ID NO: 105568 - DNA, 807 bp, Homo sapiens
  chr2:24272436-24273243
  hyper
cagtgggttaatgtcgtcaggcggggccaggctcgctaacagccgggcggggtcccttcccccgggccccgccccggccgaccccacctttccgcgcggctccgccccgccgcccccttgccagtggcccctccccgcgcaggtcccgactccagccgcacctcctccggctctgcagtggcggcgaggaggcgagccggagcgacggcggggctggggccggagccgagccggggtcgggcagcagcagggaccccccagaggcggggcctgtgggaccgctatgggcgtggagatcgagaccatctcccccggagacggtaccgggctccctccggagccaggggaggggaggggtcccggggcggagcccggagggcgggggtctgattcggaggtggcgtggagggtgctgaagggtcggggggctggatggggaaggcaggcggagacgccggacgggattcttgggggtctaggagaccatcctccgccatcctcttccgcgctcacctaggggaatgtaggcggcagctcggaggcgggggtctgcggcccggaggcgggggtctgcggcccgccaccgccccgggcttctcctgtcgcggctgcagtcgttcggttatccgctgctgctgataccccagcctgggtttcggcttcgctttccctgccctactcggcgagctctggaaagcaggacctgctctcggatacccgctgctcggggacctcctcctagcgcgtcccccgccgggcctcccctcggtcgcttccctgcgggccgggctgtgagcggctgtgggg

SEQ ID NO: 105569 - DNA, 174 bp, Homo sapiens
  chr2:24299236-24299410
  hyper
gtcttacgctgagacgcgctgacgtagcagcccccttcgaatagactccggggtaaaaccgagcctgagcgagactcgaggccggaagatggaaaggcgagagtccaagacacttccgggctctgtaccgtaaagggcggggcgtagcctccaaaaggcgagatgttccggtcg

SEQ ID NO: 105570 - DNA, 487 bp, Homo sapiens; identical to SEQ ID NO: 37216
  chr2:24299776-24300263
  hyper

SEQ ID NO: 105571 - DNA, 30 bp, Homo sapiens
  chr2:24306893-24306923
  hyper
atgaacaaagagggcgccctgggtttaggt

SEQ ID NO: 105572 - DNA, 30 bp, Homo sapiens
  chr2:24306946-24306976
  hyper
ctgctgggtgtggagcggtgcacgccttca

SEQ ID NO: 105573 - DNA, 34 bp, Homo sapiens; identical to SEQ ID NO: 1364
  chr2:24307618-24307652
  hyper

SEQ ID NO: 105574 - DNA, 82 bp, Homo sapiens
  chr2:24346200-24346282
  hyper
gattggccgggccacgcgccggtcaccgagaagcagcgactccagccccttccgcaaaccaagacccgccacctagagccgc

SEQ ID NO: 105575 - DNA, 182 bp, Homo sapiens
  chr2:24583443-24583625
  hyper
ggcagctgacggcccgcccgctgccgggcaccgactccccaccctccggagcccgaaactgcccgggcgtggctcctcgccccaggagttccggggcattgaaccctgaaggtctgctccgagtcggtcgggtccgaagcgctcctctctgccctcggggaggccccgaagccccagacctg

SEQ ID NO: 105576 - DNA, 257 bp, Homo sapiens
  chr2:24714924-24715181
  hyper
cggaatctcgcctgccgggaccgcgaaatgggggcgaccgcggcgtccctctccgtcggcgcagccctcgacggcgcttgggtttgaccccggcgcgcttgctcgccccttctcccgagaaggggtttcggaggtagacatgggatggatactggacatgttcctgtcgcggcccgggtttggtccccttcctgggattcagccgaaagggccgaggaagggaagcaaacatgttgacgaggcgattgggaggtggg

SEQ ID NO: 105577 - DNA, 30 bp, Homo sapiens; identical to SEQ ID NO: 37219
  chr2:24739679-24739709
  hyper

SEQ ID NO: 105578 - DNA, 133 bp, Homo sapiens
  chr2:25016063-25016196
  hyper
agtgtgcaaggccgcggtggccgcgtgacaagcctgcgctaccagtgcgcccgccggccaggagaacggagcttgtgatagatcctttcgtaacaccaagtattgtaccaggacctgcggctccgccccagag

SEQ ID NO: 105579 - DNA, 30 bp, Homo sapiens
  chr2:25016567-25016597
  hyper
tgggagagggcgggcggctcaggaaagggg

SEQ ID NO: 105580 - DNA, 204 bp, Homo sapiens; identical to SEQ ID NO: 1365
  chr2:25142479-25142683
  hyper

SEQ ID NO: 105581 - DNA, 30 bp, Homo sapiens
  chr2:25194358-25194388
  hyper
ggccccctagaacgcgggcaaggtatctag

SEQ ID NO: 105582 - DNA, 30 bp, Homo sapiens
  chr2:25194841-25194871
  hyper
tcctcgtccaatggcggagccgctgctctc

SEQ ID NO: 105583 - DNA, 30 bp, Homo sapiens
  chr2:25264761-25264791
  hyper
gctccgcaggtgcacgctgcggcccttagg

SEQ ID NO: 105584 - DNA, 80 bp, Homo sapiens; identical to SEQ ID NO: 37222
  chr2:25265054-25265134
  hyper

SEQ ID NO: 105585 - DNA, 569 bp, Homo sapiens
  chr2:25354446-25355015
  hyper
acaacagggaggggtcggagtccgttttcctcgggagaagtccgccaggaagttgggagcgcagaggaagcccaggctggaagggggcgtgaccctgccctgcctgcgcgcggtgcacagaggaggagggtgccagccttggatctcgggtgtcccgccccaccgctctcagggcccacagtactggagatgttcaacacgctgctgaggcagctgcggctcagcatcgactacgcgctgaccgggagctacgacggggcggtcagcctcggcaccaagatcatcaaggagcacgaggagcgcatgttccaggaggccgtcatcaagaccgtgggtgcggcgcggggccgggccggggcggggcggggccgaggcgcggagtggggaggggaggggagggacgggacggggcccaggggctcaagactgaggcgcagggcggggtggggccaaggggaggaaagagggaccctggaaaggggcggggcaccgggggcggcccggggatgggggttggagagggagggaccgcactggggcgaagggcatccaaccgggcccctgtagga

SEQ ID NO: 105586 - DNA, 744 bp, Homo sapiens
  chr2:25391012-25391756
  hyper
aactccgtctcaaaaaaaaaaaaaaagaccgggttgtcccaagacctcctagcaagctctcggagcctccggaccgccgcgagcccctgggggagaggaggccgccggctccctggagacagcgcctgcagcttcgcggccgtccgcccaggggccggacgtgggccctccagctcagctactggcggcttctcatgccgcagtcggcgcagaaagtttgtcgagaactcgggaccgcggagagccagaggcgcccaggtccgccttcggagccggagccggccgactgcatcgcgaggacggggacaggggatcccggggaaagagcacgggtcccccacgctgcgcccttacctgtctcgggaggctgctctctgagggcggggacgctcggcggcctctctcggtcgcggctcttcttcccctccttcgccgccgcttggtcccgcgctcctctgtccttatatacttgccgagctctcctggtgggcgcgggactttgaccttcccggcagcacaaggagcagctccccgggccaggggaaggggggccgcggggcgtgggaggggggcttccagacgggggacgagcgcggggagacgcgctggaaaggggctggaattagcactgtcctgccgaaggcgcacctggccgctcgccctcaggaagaacttaattatggatggcgttgggtctccgcttagaacgggcgggaggcttagcacccccgtgtggggcaggcc

SEQ ID NO: 105587 - DNA, 234 bp, Homo sapiens; identical to SEQ ID NO: 1368
  chr2:25439138-25439372
  hyper

SEQ ID NO: 105588 - DNA, 121 bp, Homo sapiens; identical to SEQ ID NO: 1369
  chr2:25440005-25440126
  hyper

SEQ ID NO: 105589 - DNA, 150 bp, Homo sapiens; identical to SEQ ID NO: 1370
  chr2:25457151-25457301
  hyper

SEQ ID NO: 105590 - DNA, 140 bp, Homo sapiens; identical to SEQ ID NO: 1371
  chr2:25458562-25458702
  hyper

SEQ ID NO: 105591 - DNA, 96 bp, Homo sapiens; identical to SEQ ID NO: 1372
  chr2:25459790-25459886
  hyper

SEQ ID NO: 105592 - DNA, 109 bp, Homo sapiens; identical to SEQ ID NO: 1373
  chr2:25461983-25462092
  hyper

SEQ ID NO: 105593 - DNA, 449 bp, Homo sapiens; identical to SEQ ID NO: 1374
  chr2:25463163-25463612
  hyper

SEQ ID NO: 105594 - DNA, 173 bp, Homo sapiens; identical to SEQ ID NO: 1375
  chr2:25464416-25464589
  hyper

SEQ ID NO: 105595 - DNA, 775 bp, Homo sapiens; identical to SEQ ID NO: 1376
  chr2:25466754-25467529
  hyper

SEQ ID NO: 105596 - DNA, 99 bp, Homo sapiens; identical to SEQ ID NO: 1377
  chr2:25468110-25468209
  hyper

SEQ ID NO: 105597 - DNA, 311 bp, Homo sapiens; identical to SEQ ID NO: 1378
  chr2:25468876-25469187
  hyper

SEQ ID NO: 105598 - DNA, 174 bp, Homo sapiens; identical to SEQ ID NO: 1379
  chr2:25469473-25469647
  hyper

SEQ ID NO: 105599 - DNA, 124 bp, Homo sapiens; identical to SEQ ID NO: 1380
  chr2:25469905-25470029
  hyper

SEQ ID NO: 105600 - DNA, 163 bp, Homo sapiens; identical to SEQ ID NO: 1381
  chr2:25470448-25470611
  hyper

SEQ ID NO: 105601 - DNA, 193 bp, Homo sapiens; identical to SEQ ID NO: 1382
  chr2:25470891-25471084
  hyper

SEQ ID NO: 105602 - DNA, 30 bp, Homo sapiens
  chr2:25475272-25475302
  hyper
ggcctggttggctgcgagcggcccggggag

SEQ ID NO: 105603 - DNA, 91 bp, Homo sapiens; identical to SEQ ID NO: 1383
  chr2:25497815-25497906
  hyper

SEQ ID NO: 105604 - DNA, 238 bp, Homo sapiens; identical to SEQ ID NO: 1384
  chr2:25505303-25505541
  hyper

SEQ ID NO: 105605 - DNA, 30 bp, Homo sapiens; identical to SEQ ID NO: 1385
  chr2:25522993-25523023
  hyper

SEQ ID NO: 105606 - DNA, 107 bp, Homo sapiens; identical to SEQ ID NO: 37242
  chr2:25565422-25565529
  hyper

SEQ ID NO: 105607 - DNA, 30 bp, Homo sapiens; identical to SEQ ID NO: 37243
  chr2:25600044-25600074
  hyper

SEQ ID NO: 105608 - DNA, 48 bp, Homo sapiens
  chr2:25896706-25896754
  hyper
gtcggcggggtgcccggcccgacgtgactacccgacaaagaatgcaaa

SEQ ID NO: 105609 - DNA, 33 bp, Homo sapiens
  chr2:26100796-26100829
  hyper
acactgagaggactcgccgcagacgccgaggga

SEQ ID NO: 105610 - DNA, 218 bp, Homo sapiens
  chr2:26101333-26101551
  hyper
acaggctgccgctacggtcatgtgaccgctcccgcgcggccgtcactactgtacgcagccggccgcgcgaacgagcgcgggcgcgcccccgcctcccaagcccggccgctgagctatcgagccggcggtctgcggtacctcgccacgcccccgcccttccggtctccgcctctccgcaggagcatgcgcgccaaggaggccccggcagtagctgtagt

SEQ ID NO: 105611 - DNA, 30 bp, Homo sapiens; identical to SEQ ID NO: 37246
  chr2:26205080-26205110
  hyper

SEQ ID NO: 105612 - DNA, 30 bp, Homo sapiens
  chr2:26205591-26205621
  hyper
ccagtcgggtgcagcgcagccaccgcccgc

SEQ ID NO: 105613 - DNA, 30 bp, Homo sapiens
  chr2:26256079-26256109
  hyper
acccagtggtacgacgctggcggcaggcag

SEQ ID NO: 105614 - DNA, 30 bp, Homo sapiens
  chr2:26256348-26256378
  hyper
caatccggatggagcgctcatgtttccccg

SEQ ID NO: 105615 - DNA, 30 bp, Homo sapiens
  chr2:26257694-26257724
  hyper
tgtttcagtgattccgattccaaacgacac

SEQ ID NO: 105616 - DNA, 161 bp, Homo sapiens; identical to SEQ ID NO: 37247
  chr2:26395432-26395593
  hyper

SEQ ID NO: 105617 - DNA, 331 bp, Homo sapiens
  chr2:26395998-26396329
  hyper
ggccccgggaggtggcggcgggcgcgagagcctgggccgcgcgggactgaccgtcggggccccgggacggcggccccggggcgcccatgccatggagaagctggcggccgggctggccggcctgcgctggagcatgggcgccttcccgctcgacctcatcgtcagccgctgccgcctgcccacgctcgcctgccttgggccaggtaccggggtcgctggagatggggaccggggtccgcggggaaatggtgggctctccagccaggggccagagggatcgtgaggagggtgcggcacccgcaccctcccagctccccggcgtgggccccga

SEQ ID NO: 105618 - DNA, 30 bp, Homo sapiens
  chr2:26396727-26396757
  hyper
gaggccggcgggagccgggtctgctgcccg

SEQ ID NO: 105619 - DNA, 437 bp, Homo sapiens
  chr2:26401682-26402119
  hyper
tggtcttggggggcgcggccccagccccatcttttcgcggggctgcttctgtccgcccgcacgggggaggggaggaggaggcggaggcggaggcagaggcccctaggagggcgaaggccggcgggttaacgaggaggcgctgagtgcacggctgggctccacgctgatttctcctaatgaattaataatggcgctcgggcgggcgggggtggccggctgcggaccgcggagagagccgaggggaaggccgtggagggaggaggacggcgactcgcgccgggtggggctgaaggcactgcggggtgactcggtctccaggctgcggcgctctgctccgggagtcagggagacctggcctggccccgtactgtcccccgtcccagcccccgcccctggccctgcgggaggggccaggcgtcttccctgagcatggtgcc

SEQ ID NO: 105620 - DNA, 30 bp, Homo sapiens
  chr2:26402628-26402658
  hyper
tgggcttcaggctgccgcggagggggatgg

SEQ ID NO: 105621 - DNA, 178 bp, Homo sapiens; identical to SEQ ID NO: 1386
  chr2:26407743-26407921
  hyper

SEQ ID NO: 105622 - DNA, 144 bp, Homo sapiens
  chr2:26467719-26467863
  hyper
gcagccctcaagaacggccctgaccgcccgcggggtgaggggccctttctgggcaggacccgccccttggtcccgcagagccttggtacttggacctgaaccttgctccgagagggagtcctcgcggacgtcagccaaggtgag

SEQ ID NO: 105623 - DNA, 623 bp, Homo sapiens
  chr2:26521880-26522503
  hyper
cgatgaggagtcctggggtaggggaggtgtgtgaaagtgtgtgaaagagatggtctcgggagaggccaacgcggggagtgacgaggggaggcacagatcccttagtgcgggttgtgttccgaggccagtgtgggggaaaccagacctagaacgttgtatacggctgataggaccaggtccaccgctgcagcaggctgtgagaggggaaggcacgttcctggctaagcagcgtccaaaactcccgtaataggacccagtctggtggacccgagagtaaaagtgagagtgaaagtgcgccgcaagggaggaaatgggaggaaaagcgtcgaaaccaactcctttggagtgcatgataaaaaaatttttaaaaaggatttagaggtgattatgggatgaaactggatgctcaaaatttaaggacatactgtgaattagaatagccctcttttagtgttggacgactggccgaaggcactacagagaaattggccgtgtgttttaaggtggtgactagggttggaggaccaccagggcattcagacctagtctttgtattgattcatggctaaatgaatgcagccctgcctagcagtttattgtagaacgctcgcagctcatggcga

SEQ ID NO: 105624 - DNA, 198 bp, Homo sapiens
  chr2:26568766-26568964
  hyper
gctagcaaatgaagcgacgaagagagctggaaggcgggacttagtgttgcctgatccacgccgattggacaacagcagtgtcgggggacgggccgctcgagcgggctagcaaccccccctcgatgggcggggagaagcgtgggctgcgcttgcgcactgagaggcggccgaaggggccgaggcggctacgcgtgcgcg

SEQ ID NO: 105625 - DNA, 30 bp, Homo sapiens
  chr2:26569970-26570000
  hyper
tctaaccatccagtcgaccaagcctgaaat

SEQ ID NO: 105626 - DNA, 186 bp, Homo sapiens
  chr2:26726520-26726706
  hyper
gcctggccctgggacgacctatcccaggagggccttttggcagccgggcaggggctggaaagcggcgggagggcgccgcgaggcgcggggctgcggggctcacgcggcacctgtcctacctggtctttggggctcctccttgtgagaccggtttttgccgagcttcatggcggagaacacgctcct

SEQ ID NO: 105627 - DNA, 31 bp, Homo sapiens; identical to SEQ ID NO: 1388
  chr2:26749880-26749911
  hyper

SEQ ID NO: 105628 - DNA, 30 bp, Homo sapiens
  chr2:26785516-26785546
  hyper
ttcaatgccgcctacgtgccccctggactc

SEQ ID NO: 105629 - DNA, 30 bp, Homo sapiens; identical to SEQ ID NO: 37254
  chr2:26915383-26915413
  hyper

SEQ ID NO: 105630 - DNA, 454 bp, Homo sapiens; identical to SEQ ID NO: 37255
  chr2:26915612-26916066
  hyper

SEQ ID NO: 105631 - DNA, 336 bp, Homo sapiens; identical to SEQ ID NO: 37256
  chr2:26916088-26916424
  hyper

SEQ ID NO: 105632 - DNA, 30 bp, Homo sapiens; identical to SEQ ID NO: 37257
  chr2:27008438-27008468
  hyper

SEQ ID NO: 105633 - DNA, 142 bp, Homo sapiens
  chr2:27008749-27008891
  hyper
cctcctatcatcgccgctatatttgtgtctcggtgcatactctcattggccctacctgcagtcgctctacgtaaggggcgttccagagtcagccactgggagtcgctggattcgggttttaaaaaacgccggccgtgaagtg

SEQ ID NO: 105634 - DNA, 31 bp, Homo sapiens; identical to SEQ ID NO: 1391
  chr2:27069031-27069062
  hyper

SEQ ID NO: 105635 - DNA, 30 bp, Homo sapiens
  chr2:27069352-27069382
  hyper
ccttaagcaaaaagcgcagcaccgcccgcg

SEQ ID NO: 105636 - DNA, 98 bp, Homo sapiens; identical to SEQ ID NO: 37259
  chr2:27069892-27069990
  hyper

SEQ ID NO: 105637 - DNA, 2682 bp, Homo sapiens
  chr2:27070260-27072942
  hyper
aagacaggcactgggcctgagcgctctggacagggaagcacccgcgtggcgctgggcaaaatcttctcagtggagagaacgcactccgggttcgagacctccccgggtgcagatgcgaactgcggtggccccaagtggccgtccactttgttcatgagaacagttttcctataacgcccacccggccctttgcatcccgcaatcccgcgggcgtcggagcgggtcttggcgcgaaccaggcggcctcggcggggtcctgcggcggagggcagcgcggccgcagcccgggagaggcggccgcggcattgtttcagcccctggggtgggatccagctgggggaggggaggcggggtgtcctccggaaccgcccccggccctccctggggacccgtgcctcagcgcgtccaggctttgtggtgtcctgagtcgccatggaaacccgagggaacgcggagccgggtgctaggggggtcggtgagttctccggccgcgccctccgtccgctctcggaccccggccctgcagcagggcctgccgggagttgtagtccccaggcggcggcggcgcgcggcgccaaggatgcgggacgccgcctgtccccgcctccccttaacctgctagctgaggtggggagcggcgggaggagccggccgcgcggtgattggcggaggccgctcccagcccccgacacgcgcccctcccccgctccccactctggactcccgcgctgggcgcgctgaggcggcccccgagcgagcgcgcgtgcagccgccgccgccccgagcacccgcagctccggcgccgcggcgagacggagacggaccgagccacgggcccccgcggccgcagcatctcggaggagtgggtgatggcaggggggtcggtgggcttacccctcccgggctaggacatcctcctctcccccttctgtttctgcgtgaggcgcacaaaagggcggggagccgggtgagcctggggcccggccgcaggggacgcggcgggaggtgtggtttggggttgggaggtggccatcggggctaagccggggcgctcttggggtcctctttgtacgcccgcgaagcgccgtgccgggccttgctcatagtaagcgtttaatgcgtgctcgcggggttgcaaagccctggggtgaggaggcggctcggccgaggggtttcgcgcctagcacgcagtgggccgctttcctagccgggcgcggtgcagtggaccgctggagggctgggcgggggcgcctctggccgggggccagtcctgccggtcccaggatctgcgctgtccccggtcccacacaccacccagatacacaccctccgtccttctcgcctccgagctgggatctgcccagcctggacccgacccggcggtctgttccaccgcccggctaacggagcggacgcctgcagaggactcgcccgccgcctccgagcctcccgcctgagccacaaaggcctcctgcggctgcccagcccggagcgggcgccgagccgggtccctcggctggagcccagcgcgggagcccgccttgcagcatcgatctcagcgggcaccgacgtcgacgccccgggcctggggacggggctgtagtctgagctggagagaagccgggagagggcgaggggaggcctcggttgagaaaagatggggatggggaaggctggggagctgggttaggacaggtagtgggtctcggggagcagggagtgggaactagggtttgaggaggaaagagaaggggcgggggcgggtccgaagaacgagggaaggagctcggtgcaggtggcgcccggcgaggctggttctgctgaagaatggggaggggaggagggatgcaggcgggtggaggccgcctgggtttgaggagggaggacgggagcgaggagaagacccgcgctgtgcgggggaggggggcctcctgggaaggggagcctcccgaggagggaggggcaagcagctgagaggcggtctcgggcccgaggatcctcagctccaggcgcggggccccgcggcccaggtggccggctgggcgtggccctcggaccggggttagggacccaggatggcagatccgggaccgggctgggctggcttggtgaggagctttgtctccaggcttgaaaccagccggtagcgactcgcttagggttttgtgatcttccgcggcgcccacggcacgcccttttctcgaggagctgaaaggctttgcccagcagcaggtgctgccagggaggcggatctcccttcggggagacccggagaacaatagccgaccctggtgtccatccgacgacaaaccagggccacccaggacgcgagggtgcagttttctggtgctgggaatactccctgcggaacctccgggcacgtgctggctttggggttttatgggggcctggccacgccgggaatcccgtgtgggaggcgctcccccggcctgggggcctgcagacagccacccccccactccggctcgggtgccttctggtgcagcgccgccgcccgccccgcgctgtccacccgctgccgagacgcggcgtggttagcggcgcggagctgccgggcggcgacgcaggtgccaaagactggaggtcgcctcggtgcagcgcgggttcccccgagcagcggctttgtctgccgaggcggccgtagtctaggggctgcagctg

SEQ ID NO: 105638 - DNA, 62 bp, Homo sapiens
  chr2:27165766-27165828
  hyper
gcagcgccagggaacgctagagtcagaaaatgctgatttctgttccccgtctttgattacca

SEQ ID NO: 105639 - DNA, 30 bp, Homo sapiens
  chr2:27255603-27255633
  hyper
ggccttcacatcgacgctcaatgaacgttc

SEQ ID NO: 105640 - DNA, 43 bp, Homo sapiens
  chr2:27273187-27273230
  hyper
gcgaatgtcgttcgcgtcaggagagcacgtccggagaagccaa

SEQ ID NO: 105641 - DNA, 376 bp, Homo sapiens
  chr2:27274193-27274569
  hyper
ggagggattcccggcgcagtgggctacgtgtttcattttagagacacaagactgttaagcgataaggagtttcacacgatgtctttttatttcgcagttgagtcccagtttctgccgctttatctttcccgcctcccggcaggcaggccgttaaccgtcttccggaagacgctgctagaaccctccggccgctcctgcccgccatcgtccccgaacgacactcgctcaggtacccactaacgtgcgaggaaccctgagagctgaccaatggtagcgagctttactgggcgggtcgccagctgcagccacggccaataggcgagagacttcttgtttcctggcagagcggggtcccggcaccgcggcgctcgggtgt

SEQ ID NO: 105642 - DNA, 209 bp, Homo sapiens
  chr2:27274787-27274996
  hyper
ggcttacgcggtcccgaccccgcccagctccgtggcctcacctctgactcctaggccctccctgcctaatcccctgccgcgggagcccgtctcgaccccttccatgcctcccagtcccaccctgcccagggcaagcccgctcggtgtgacggttccccgcgagtcgagggtggagaagccagcctccttcccccgagtgggactctagc

SEQ ID NO: 105643 - DNA, 196 bp, Homo sapiens
  chr2:27294083-27294279
  hyper
tatcatgcttggcccgacactttctgattgtaagtttcgaaccctgctagccctggcgcggcctcgccactcagctctggggactgggcgctacagccccgggccgttacctggggcggagaaagcgccactttcattcctgcttcttgggattgttgacggccacgtagtgatagagaacgacaagcaagaagag

SEQ ID NO: 105644 - DNA, 163 bp, Homo sapiens
  chr2:27304247-27304410
  hyper
gtggcctctggagaccgcaggtcccagcatgcagcagttcctgtggcttgccttccctcctgcgtgctgcacaccggatgtgctgtttccctgccccgagatagccttactataattatgcaaacaggaactcctggccaactctcaccgtccacagagcctc

SEQ ID NO: 105645 - DNA, 250 bp, Homo sapiens; identical to SEQ ID NO: 1395
  chr2:27308892-27309142
  hyper

SEQ ID NO: 105646 - DNA, 111 bp, Homo sapiens; identical to SEQ ID NO: 1396
  chr2:27309206-27309317
  hyper

SEQ ID NO: 105647 - DNA, 406 bp, Homo sapiens
  chr2:27341650-27342056
  hyper
gccctggctggctgacggcgatgggctcgggtctccggccggccggggcggggtgtcacccacctgctgcggcgccgcgcggctctgggggtccagctccgtgggcgctcctggctgctgcgccgcccgcgcctcgcctcccgccgccagcctcccccgggccgctccacgtggccgctccacgtcgccctcccggctggagccgccgccctggccgggcagagtccggagccagtgccagccgccgccccgcccgccggacctggcccttcgcagctccaccagcgcccccgctgcgcccgcggccggaggggctgcgcgcgcccgtgtgagtgtgcgcgtgtgtgcgtgcgtgagtgcgcatgtgcgcgtgtgcgagtccgcgtgtgctcgtgagtgcgctcgt

SEQ ID NO: 105648 - DNA, 30 bp, Homo sapiens; identical to SEQ ID NO: 37266
  chr2:27346513-27346543
  hyper

SEQ ID NO: 105649 - DNA, 30 bp, Homo sapiens
  chr2:27356907-27356937
  hyper
aggcggagctgaagcgttcctggcgactct

SEQ ID NO: 105650 - DNA, 30 bp, Homo sapiens; identical to SEQ ID NO: 37267
  chr2:27357671-27357701
  hyper

SEQ ID NO: 105651 - DNA, 30 bp, Homo sapiens
  chr2:27435238-27435268
  hyper
ggcgcctcacgacccgggtagtcttacgac

SEQ ID NO: 105652 - DNA, 111 bp, Homo sapiens
  chr2:27435623-27435734
  hyper
tctctacgcacgaacgccatatatcgtgcggtggtagggctgtacttttgtaatgcttgatgagttctttacgtacctgcggtcgttttacaccgcgccaaactagggctg

SEQ ID NO: 105653 - DNA, 225 bp, Homo sapiens; identical to SEQ ID NO: 37268
  chr2:27440127-27440352
  hyper

SEQ ID NO: 105654 - DNA, 397 bp, Homo sapiens; identical to SEQ ID NO: 37269
  chr2:27473081-27473478
  hyper

SEQ ID NO: 105655 - DNA, 1079 bp, Homo sapiens
  chr2:27484880-27485959
  hyper
aaacggacggtcagccgacagacaagatggcccacgggggtgggcagggaggtcggacggccgctcagaggggcaggtggacggtggcggcaggcgcgggggccggcggggcgcgttggcggttctcctgccacccccggcccgctgtcccggccgctccgcgcgcctcatttcacacctcgccgcccccggccccgtctgtgcggagccgggaatacccccgctgcccagaccgcacctgctccttcctcgccgccccctcgcttcccggcggccgcccgccccccaggggcccgcaagacccgcgcggagcccggcccatcctcgggccccggcgcccacagctggccgcggctggagggggcgcgcggaggggagcccccggggcctacagagggagctctgaagcctgggcagcgaggcgctcccgccctgggcccggggcaatgcggaccttggcgcaccgggcgagggctccggcccgaccgagcggcagctgctcccagggaaggcaggcgccgcgggggtggcggaggggtccggcggcctgggacgccggccggaggggagtgagaggccgcttcacccgaggaagtcaggcggccgggaggaggcgtagccggctgtgtagggctgggcgctccgtgtggccagaggggatgaagcggggtgcagcggagcgagggacccgcggtgcgctggggcggccgccggggcccgcgccgagagagacaacgaaatggacggagggtagtagggtggcgcccccgggccgagggccagcccaggtctgtcctacctcttcaaacgcaggctgcctccggcgccaccgcggtcccgggggctcaccaggcgagtggtctccaagcccccagcggctggagagggctccatgttcccggtgccccgaccgtctaggccccaccgaggaagagagaggccgggccggccccgcgccaagtccgagcagcccgccgacccccgggatccccgcagggcggcggggccaccagagtggagcgaactgcagcgactgtggcgcgcggagtccgaactgcagatcccgctgccgccggagc

SEQ ID NO: 105656 - DNA, 30 bp, Homo sapiens
  chr2:27486232-27486262
  hyper
ctctgtgcatgcctgcgcgggggtgtcgcc

SEQ ID NO: 105657 - DNA, 30 bp, Homo sapiens; identical to SEQ ID NO: 37271
  chr2:27546101-27546131
  hyper

SEQ ID NO: 105658 - DNA, 30 bp, Homo sapiens
  chr2:27579781-27579811
  hyper
attccataatgcagcgcggccagagtcacc

SEQ ID NO: 105659 - DNA, 545 bp, Homo sapiens
  chr2:27592813-27593358
  hyper
agccagagagactccgggagggtttgggggcacgagtactcggcgcagccggctgctgggttggcatgaccacggatccgccggcaggcgcgaggcgagccagggatccgcgtggggacgcactgcgcggcggatcaaaggaatggaggggtcaccgaccctcctcacagcaaccagccggtgcgcggcgcgggactgcgctcgagactgtgtagaccggagcccagcgtggcgctggaacggagcggcggggcccaaaggcgctcaaggcccggcactagctgtccggagctcgtcggctccgcgtaccagtaggcaggcccggctcttcactcaccctcgcgaacagccacggccacagcagccatcgccctcagtcctaggctccgcccgccgtggtcacggagccgccccgctgcctcgctccgcggctgcagggtccacagcgccacctgggctggaggctgagccgcagaagcgaagcgcgcagccccaatcggactacaatttccgacgggccccgaggccccgccccgcactacggg

SEQ ID NO: 105660 - DNA, 30 bp, Homo sapiens
  chr2:27603224-27603254
  hyper
ctaggagtctggatcgcccacttcatccct

SEQ ID NO: 105661 - DNA, 77 bp, Homo sapiens
  chr2:27603726-27603803
  hyper
tgattgtgacgaggcggggagcaagccaatcagcggcagcggggagccggccagggagcagcgcaggaggcgtcctg

SEQ ID NO: 105662 - DNA, 30 bp, Homo sapiens
  chr2:27632041-27632071
  hyper
gcaaacggccgctgcggccgcaggctccca

SEQ ID NO: 105663 - DNA, 30 bp, Homo sapiens; identical to SEQ ID NO: 37273
  chr2:27632316-27632346
  hyper

SEQ ID NO: 105664 - DNA, 225 bp, Homo sapiens
  chr2:27651188-27651413
  hyper
tagaactgtcatggcgccttcaagaagaggtaggaggccctctctgcgtccagcagaaccatctggggcacctggaccgggcggtggggtggacagagagacgagccccagctgggaccgaaaacatcgacccctccgagaggtctcggccggaccggcgcaaggggaggagagcgggtggaagcccaccccagcgaacgcccgagggccgggccccgcccaccc

SEQ ID NO: 105665 - DNA, 94 bp, Homo sapiens
  chr2:27712678-27712772
  hyper
aacgtgcgcaagcgcggtgagatctagggcgggcccttgagagggcttcatgaatgttctccttgaccaatcccgtcgccgcatgcaaactcaa

SEQ ID NO: 105666 - DNA, 351 bp, Homo sapiens; identical to SEQ ID NO: 37276
  chr2:27717786-27718137
  hyper

SEQ ID NO: 105667 - DNA, 132 bp, Homo sapiens; identical to SEQ ID NO: 37277
  chr2:27718172-27718304
  hyper

SEQ ID NO: 105668 - DNA, 512 bp, Homo sapiens
  chr2:27805829-27806341
  hyper
ggccgcagccccctcggaagctgctaggcggaagtagaagttcagaagagggctaggcggagccgagcccacatccgggagaggagagcggaagtggcgttggtctggccggagcccttgggtgaaattgttaggcgtggagagggagtgatgtcttccagactcggtgctgtacccgccgtgagtttcttggtttgaccgttatgctttagaggtagcgctgtcgagcccggaacacgcggtccctcgcttttgtcccatgctgagttggttttatcagaggccatcgtaggccccacccttctagatcagatcacctgtccctttttctttacccacgttctgctgcctgttccccacctccttggatttaattcctcgccacattaccattagtttctattccttttacatccccaatgtctctcatatccgttgtcttttcttttggcctcccttttagagcctgggacagggctttgagaatgggggaagacgaaggctctggtatt

SEQ ID NO: 105669 - DNA, 485 bp, Homo sapiens
  chr2:27851761-27852246
  hyper
tcatcagccctgcccgacgctaagaagatgccctggcaaccgccgcgcccctcacccgctcctttctgacgctgtggtggttttcgttcgcagcccagaacattgcggaagtttctctacccatgcggtgtctctatggtcgggtgggtggggccaggaggaagatggcggcgtccgcagctgccgctgagctccaggcttctgggggtccgcggcacccagtgtgtctgttggtgttgggaatggcgggatccgggaaaaccacttttgtacaggtgacgtacacagcatgggtgtagtaggggagcgcaaaaggttgcctccggcaggcggaaggccaggaagaaagggagggaagaggatttggagggtaccggcgcatggctttcgggggcttcccatcaactttagttccttccccggcaaagcctcctcgggccctagccaggttaattaaggctctcttctgcgcaccttcagggcat

SEQ ID NO: 105670 - DNA, 252 bp, Homo sapiens
  chr2:27886205-27886457
  hyper
acgaagaacaggcacggagcccaaggaatgcccaagtccctccaggggtttcctcggtcacggtccgccggcgcaggcgccaatcacagggtcctgaggtcgcctgacgttcagggcagccggaagacggggaggtctggacctgaaccgagacaaggaggtaccacactattcactgctgcgtcgcagagcgggctgggcggctgtctggacctcgagaggcctgaggcaaggatcgcgtcagaccccgaa

SEQ ID NO: 105671 - DNA, 30 bp, Homo sapiens; identical to SEQ ID NO: 37281
  chr2:27886740-27886770
  hyper

SEQ ID NO: 105672 - DNA, 92 bp, Homo sapiens
  chr2:27937850-27937942
  hyper
aaaaaacaacaaacaaacaaacaaaagtaaagaggccgatagagggagaggagaccgagacgtagggagcagtgagtcggtttgggatgaga

SEQ ID NO: 105673 - DNA, 353 bp, Homo sapiens
  chr2:27938252-27938605
  hyper
tgcctagaaatccctcgtgctggactctttcaccctgcacgggggagaagccctcctcccgggagcctgtttggggggcaggcctggccgagtggctccgtgaagacgcaggcgcggccggagggcgcggggctcgggcaggatcgcgccgccgggccgggagggggctgcgggcgcgcggcggatgtcacggcttacctcagagcccaaattagaaggctgaaaaaatcacagcaggaaataatgtgctgcctaaaatagaagcatcaactgggagagaggccggggagtaggtggcatctgaggctcccgccgcgtcctccccagcggctgcctgacgctgcatcggaggc

SEQ ID NO: 105674 - DNA, 30 bp, Homo sapiens; identical to SEQ ID NO: 37283
  chr2:27994669-27994699
  hyper

SEQ ID NO: 105675 - DNA, 215 bp, Homo sapiens; identical to SEQ ID NO: 37284
  chr2:28113198-28113413
  hyper

SEQ ID NO: 105676 - DNA, 30 bp, Homo sapiens; identical to SEQ ID NO: 37285
  chr2:28113732-28113762
  hyper

SEQ ID NO: 105677 - DNA, 178 bp, Homo sapiens
  chr2:28114001-28114179
  hyper
gtccctttttaagacgtcccctagagtggggtggtcattcttcgggtctgagctaacttgtttttctcgaatgttgccccttgggggaaattgcttccccagtgtaacttccctcgtgcgctgtatgacgtcgacgtgacgcagcaggatgccacccctttccgttccatgacgtcag

SEQ ID NO: 105678 - DNA, 30 bp, Homo sapiens; identical to SEQ ID NO: 37287
  chr2:28613747-28613777
  hyper

SEQ ID NO: 105679 - DNA, 30 bp, Homo sapiens
  chr2:28614881-28614911
  hyper
attaactgtaggaccgaaaacatgaaaaac

SEQ ID NO: 105680 - DNA, 30 bp, Homo sapiens
  chr2:28615382-28615412
  hyper
gaacagaccaagggcgctgggcccgggggg

SEQ ID NO: 105681 - DNA, 30 bp, Homo sapiens; identical to SEQ ID NO: 37288
  chr2:28615910-28615940
  hyper

SEQ ID NO: 105682 - DNA, 30 bp, Homo sapiens; identical to SEQ ID NO: 37289
  chr2:28616250-28616280
  hyper

SEQ ID NO: 105683 - DNA, 30 bp, Homo sapiens
  chr2:28616555-28616585
  hyper
ccctgtttcctctccggcccccaccgcgga

SEQ ID NO: 105684 - DNA, 224 bp, Homo sapiens; identical to SEQ ID NO: 37290
  chr2:28617014-28617238
  hyper

SEQ ID NO: 105685 - DNA, 202 bp, Homo sapiens; identical to SEQ ID NO: 37291
  chr2:28617455-28617657
  hyper

SEQ ID NO: 105686 - DNA, 425 bp, Homo sapiens; identical to SEQ ID NO: 37292
  chr2:28789406-28789831
  hyper

SEQ ID NO: 105687 - DNA, 102 bp, Homo sapiens
  chr2:28844562-28844664
  hyper
tgttcctttcagaagtggtaacgtgggccccatgctctgtttgagtctctaagccacaggaagcgatgtcagttcctcaacgtcacgagcaggaagaaatta

SEQ ID NO: 105688 - DNA, 30 bp, Homo sapiens
  chr2:28974198-28974228
  hyper
ttttgctttccacacgcgcaaacccgggtc

SEQ ID NO: 105689 - DNA, 30 bp, Homo sapiens
  chr2:28975474-28975504
  hyper
ctgcctccgattgtcgttccgggagtgaat

SEQ ID NO: 105690 - DNA, 433 bp, Homo sapiens; identical to SEQ ID NO: 37293
  chr2:29033264-29033697
  hyper

SEQ ID NO: 105691 - DNA, 30 bp, Homo sapiens
  chr2:29092880-29092910
  hyper
aggttttccagtgacgaaagacatccagtc

SEQ ID NO: 105692 - DNA, 186 bp, Homo sapiens; identical to SEQ ID NO: 37294
  chr2:29093423-29093609
  hyper

SEQ ID NO: 105693 - DNA, 30 bp, Homo sapiens
  chr2:29118098-29118128
  hyper
cggcttccttctgccgggccttggctcatc

SEQ ID NO: 105694 - DNA, 30 bp, Homo sapiens; identical to SEQ ID NO: 37295
  chr2:29120717-29120747
  hyper

SEQ ID NO: 105695 - DNA, 30 bp, Homo sapiens
  chr2:29181721-29181751
  hyper
cagttggttctggccgcctcctgtctaaac

SEQ ID NO: 105696 - DNA, 163 bp, Homo sapiens; identical to SEQ ID NO: 37296
  chr2:29337888-29338051
  hyper

SEQ ID NO: 105697 - DNA, 589 bp, Homo sapiens; identical to SEQ ID NO: 1403
  chr2:29338158-29338747
  hyper

SEQ ID NO: 105698 - DNA, 297 bp, Homo sapiens; identical to SEQ ID NO: 1404
  chr2:29338809-29339106
  hyper

SEQ ID NO: 105699 - DNA, 248 bp, Homo sapiens; identical to SEQ ID NO: 1405
  chr2:30142810-30143058
  hyper

SEQ ID NO: 105700 - DNA, 185 bp, Homo sapiens; identical to SEQ ID NO: 1406
  chr2:30143137-30143322
  hyper

SEQ ID NO: 105701 - DNA, 768 bp, Homo sapiens; identical to SEQ ID NO: 1407
  chr2:30143382-30144150
  hyper

SEQ ID NO: 105702 - DNA, 690 bp, Homo sapiens
  chr2:30144174-30144864
  hyper
cgcaagtttgcagcgtccttgctctcaccggcgcctcggctcctcagagttcgcaggcactggagcggccccggcggcagcagctgagggcgttcagggcaggggcgcccgaaatcttgccgccccctcctcacccatcatcagcgcccgcggctttgggtggccgaccagagggcggccggaaagcacctcggtgccccgcgaccctccgaacagaggcggcgggaggtaccagctgctaccaccgctgccgcccccagagccgctggatcgcatctgcctgggcgcccgccacttgcagctggctgagccgcgcgagcgcgcgcagggagggggcggggcccggagggggcggggctcacaagccaactccgcgctgctgcccgacccacgcagtccggcctcgccccgccccacccgcaccctccaaccaatggcgtggctcgatcggctcctatgcaaatctgcagaggcctcggcattcattgagaaaaggagtgagcccgccccaccctccctctgttccctctccagtctcttgttcttcccctcctctagattccctgccctatttctctgcagtgtgaaagggagcaaatgtgagaactggaagaggcctttgcaatcaagcactctccctaattatacatttaagagattaaacgggtccgacttcggaaaaacaggttc

SEQ ID NO: 105703 - DNA, 224 bp, Homo sapiens
  chr2:30369367-30369591
  hyper
gacgtgcgatgtctcgcagctgccgcaattagacaggccaagccttcgcctttaagaagctgactcacgtggatgctgtgttgtgtgcgctcagctgaaagggggaggtgggtccccagactgactacattggccgcctcgagagaaggggcagagttagcctctttgattggctgtacgagtccgaggtgctgggtcaggggcggggcgagctgtcgcaagcc

SEQ ID NO: 105704 - DNA, 30 bp, Homo sapiens
  chr2:30369881-30369911
  hyper
gaagagcgacaagccgctggcagccgcgga

SEQ ID NO: 105705 - DNA, 134 bp, Homo sapiens
  chr2:30453519-30453653
  hyper
agtgtgggaggcgttcggctaaagctctttgtttctgctgtcatgagcgactcctcggagaagacgtgggagtcaaggatggggggcggcgtgcacaccgcccgcccacaccttctgcccccgctgcagaccgg

SEQ ID NO: 105706 - DNA, 2030 bp, Homo sapiens; identical to SEQ ID NO: 37306
  chr2:30453784-30455814
  hyper

SEQ ID NO: 105707 - DNA, 30 bp, Homo sapiens; identical to SEQ ID NO: 37307
  chr2:30670289-30670319
  hyper

SEQ ID NO: 105708 - DNA, 359 bp, Homo sapiens
  chr2:31360230-31360589
  hyper
tttttacaggctctttcgtggtgttctgggcacattcaacttccaatgcagctgagagggtcgggaacagttagagaacaggggtggcagccgcccgggaggctgcaaggcgctcgcccgcaacgcacaggcgcgcgcggcgcacccggcctccggcctccccaggtcgggcctggcagctgcgggaaggaggtcagcgcagccgccacacttcgcccgggcgctggcccgacccgaccgccggcgactctctggcagcgcccggagaccgccagcccctgggccgcccgtccgcagagccccctccgccccgggaccctcgcgcgcagctcaagttgggagccccgctccgcaggcga

SEQ ID NO: 105709 - DNA, 125 bp, Homo sapiens; identical to SEQ ID NO: 1414
  chr2:31360630-31360755
  hyper

SEQ ID NO: 105710 - DNA, 958 bp, Homo sapiens
  chr2:31360816-31361774
  hyper
cgcctaccttaggggtctgcacttcaggtcccgtcggcacctccaacttcctcttggttacccagaagaacagcagcaccgtgatccagagcaccccgaagactggcagaaccagccgacgagtcaggcgccgcatggtcccctttgccgcttcctctccgcggcgctacgtcccgggggcaccccccggcggtcagggttggcggggcaggagtcctggcgagcgcctcgctctggggagctctagacccaggatccggttggaggggcggcaggatcctgcaaggcgcccttcccgcttcgaagagaagcgagcctgggtggggggtgcagggcgacccgaaacgtggcagggaaggaccgagggcagccaagctggacgcccgctccagcgggagaagcgcggtggctgccgagatgttccccacgccgccaccgcggctgccgccgccgccgccgccgccttgcccgctgccgccgatagggaaactgactcgagcagcgagagggaggaatccgaggctgtgccaagcaccccgggaggagcacgagggcggagggagtgagcggggagggcgggcccgacagacaggccgactcggagcgagcccaggtgggagtgagcggggctctgagagggggcgctaccgccgcccgccgaccgaaacgctcggtgctgttgcggggccgccagcgccaagccctgggcgcagctcccagaccatcgtgggttggggcaaggcggggcggggcgggagcggtgcactcgggatgcccgccacccccagctgccagctgggacccaagggccggccctcgccaggcggcgctgtgcctgggaggactttcccgctcatcgcgggggctgcacgtggcgctgaagccggggtcccacccccaatgtgctcgtcctaccacagccaaggctgggattccagggcgccggcagggctgctgc

SEQ ID NO: 105711 - DNA, 579 bp, Homo sapiens
  chr2:31456681-31457260
  hyper
gcaactgaaggagaggcgattcaaagcagggagtgtgatgaataggtcaactctgtcctcgcagccgtccctgagagggcgctgttcccaaatcgaagccccagaggcggagactgagacaccggcactctcccactggactgggtcagcatccctctccccgcgcggccgcaggtctagagctgagcgcctgcccacaaacatggcggcgccctgcgcggcttcccgtcgccgcaaccgtggggccggccctgccttgccagtactaggggacttcctctgcgcgccggcttcctgcccagctggcatttaaaccaccgcctggggctgcaggatgctgctgcggatgcagagctgtccgcgggctgggcagcgtcgccgtctcccctgagccgcctcggtccggcaggagcggagccgaagcatcccttgctgcacgcagggcagagcaggcgagggctgggggccgatcggggaccccggcttgggaccccggcatctggcagtttccttgcaggttcaactttaattgccaagatttcacccctcctcctcaagcccagattatttatcctccct

SEQ ID NO: 105712 - DNA, 207 bp, Homo sapiens
  chr2:31457325-31457532
  hyper
cggccctcctagccgcgtgcccgggccatggtgcggctgagccccgcgcttgggtgaggcggcggcgcggctcggagcccggcggaccggtcctacgggacatcttcccctgaggaggagtcttcccctggggctgcgtgccgggggcgagcggcggccgcgatgttcagctggctgggtacggacgaccgccggaggaaggacccc

SEQ ID NO: 105713 - DNA, 178 bp, Homo sapiens
  chr2:32234814-32234992
  hyper
tcgctgccctgcggcgtggagaagcggggctcggcgccgggcacaccgtccttcccgggggtggcagcggccggccgcacgcttcctgcaagccagaggcggcgacaagtcggctggggtccgggagcacgttccttcctcgagcctggtcctgagggagggcgcaggctgccgaggc

SEQ ID NO: 105714 - DNA, 30 bp, Homo sapiens
  chr2:32235225-32235255
  hyper
ggcgggcgggccggcggcctggggccctac

SEQ ID NO: 105715 - DNA, 352 bp, Homo sapiens
  chr2:32235910-32236262
  hyper
cgaggaggcagtggcggctgcagctacgcgcacacaaaagcccagggccggggcctgaaccggggaaggcagacccggagaagagccaacgcttccttactcgccactctaacgggtcctgcccactgagcatgcccagcaccgctgcctacccgccgaggaatctcaacgtgcacgctccgctctccggggtttagcggcagcagaggctgggaggtgggggcagggcgcggggagcaggacgcagccgcaaggcaagccccctcccccagccaacttcctcaaatggagagcacctagggctcgcggatgcggctttccacgaggacagtcccgcgggtatccatcatat

SEQ ID NO: 105716 - DNA, 430 bp, Homo sapiens
  chr2:32264568-32264998
  hyper
aacaagaagagccgcgagttacctgggagatttcaacacgaagactccaggatggagtgcagcccagcccccgaccccgcccctcacccccacctgggcgcgggagcaccacgagcagtagagcagcagagtgggacagtccacgactgggcgcctacatggggtctggaaactctacgacagtcccaagtacctagaataagtgagaaagtgggggaaagggagctgattacccgcgcccaagccgttcgttcttaagagccctgcaccgcgccaccagctcccagcacaaacagctccggccgtaagtgacggctgtcgcacgactgccgcgcctgcgcagaacctcccggcggacaagaagctgggaggcgcgcagaaccatcgtcagtccccgaggctctctgcagtccgcgtgagtcctggccaa

SEQ ID NO: 105717 - DNA, 319 bp, Homo sapiens
  chr2:32288257-32288576
  hyper
ggctaatttaattcccagattgatatccattgcttctgagatgggccaattatccttcggagaagacttaggtcgcctggcagaaaaagatgaaagaaatctaagaaaacgacgacactgagagaggagcctagcgaaccagcagagcgaccccaagccgcaattcccccttccgtggatcgattacgaaggcttcctggcaggagctctccagggctgccgacgtgagccgaactgcacattgggaactgtagttgagtgggaaagccgagaggcgggggccgcacacgcgtacaggggccccggtcaacaaagacgc

SEQ ID NO: 105718 - DNA, 30 bp, Homo sapiens; identical to SEQ ID NO: 1420
  chr2:32289443-32289473
  hyper

SEQ ID NO: 105719 - DNA, 30 bp, Homo sapiens; identical to SEQ ID NO: 37317
  chr2:32391020-32391050
  hyper

SEQ ID NO: 105720 - DNA, 84 bp, Homo sapiens
  chr2:32502954-32503038
  hyper
gccaatcccagcgccgctgtcactgttatggtcctgtcagggtgccggcgtcgtggtgcttgggtggtcgccaccaagaagact

SEQ ID NO: 105721 - DNA, 183 bp, Homo sapiens
  chr2:32581579-32581762
  hyper
taagcttaactatgcgcttccagcacctcgtatctggtacttctgttcaacagaaagccttgggaatggggagggcaggcgtggtaaaaggtacaggtttgggaaggtcgctcggttccttccaatccaaacgagaggcttctgattgtttattctcacaccagagccgtgaccgagacccag

SEQ ID NO: 105722 - DNA, 501 bp, Homo sapiens
  chr2:32852578-32853079
  hyper
tcttctacagcgttccgacagtgttccaaaaacttccctgcaccagcggcaggggcagatttcccacccggccatgattcatgtagagcagtgtcaaaaccagatcctttccttacacgctcattcgccgaaagacccatgctatgctgacggggttccaacctgggcttcaccgactccacgtcagagggtctgtgattccctgagagggtacccttaggctgagagcaagggcccacctgcactctgcgcgaaggactgtggttttcatcgggttgtcgagagcgttctaacccaaaatgctttaagaatcacaactctagcccttctaatcaaactgctttggccaagacgtccgttttgagttgcatttgaaccctagccctcggtgggaggcacactcacttccacgttcacagttcttggaagcggtcccactgggggcggggctgagcgcgaccgcgccctcaactccccctattgcccgccccggggtggggc

SEQ ID NO: 105723 - DNA, 140 bp, Homo sapiens; identical to SEQ ID NO: 37321
  chr2:33171659-33171799
  hyper

SEQ ID NO: 105724 - DNA, 143 bp, Homo sapiens; identical to SEQ ID NO: 1422
  chr2:33172104-33172247
  hyper

SEQ ID NO: 105725 - DNA, 115 bp, Homo sapiens
  chr2:33824327-33824442
  hyper
ctcttcgccggcaacgcgtacactcgcgcatgcgcgacttccccggaacttccaaatccacagctggcgcctcagctcccgcactgcgcatgtccggagcgtgcgcaagaaactt

SEQ ID NO: 105726 - DNA, 30 bp, Homo sapiens
  chr2:33824841-33824871
  hyper
cagacggcagatagcgtgccatttgatttc

SEQ ID NO: 105727 - DNA, 259 bp, Homo sapiens
  chr2:36825135-36825394
  hyper
cggggccgggaaaccgtcggcgcccccacccgcctcggcccccgcctccgccccaggctcggggctcgcgttacagttctcctggtccaggaggctccgggccggctcctggaactcatagaaatcctgccagtccccgtccgccgccatcgccgcccggagcagtcgcgcgccccgcccaggccggcccagcccgcccagcccggccccgccccggcccgaagccccgcccccgcccgctaccgtgctgacagatccc

SEQ ID NO: 105728 - DNA, 30 bp, Homo sapiens; identical to SEQ ID NO: 37323
  chr2:37193466-37193496
  hyper

SEQ ID NO: 105729 - DNA, 231 bp, Homo sapiens
  chr2:37194140-37194371
  hyper
gaacaggctcaaagcgagctacccggtgcggccgcgggaccggggttctcccgccagctgccctgcgtgctctcgcttcggcttcgtgttcggagtttctctcaccctagacgctcctccattctgccaatctgcgggtcgctgtcgctcttgcctttctcttttgactcgaggggctcaaacctgttacctgaccagttttcatttctaaggaacgccgatcacctttct

SEQ ID NO: 105730 - DNA, 30 bp, Homo sapiens; identical to SEQ ID NO: 37324
  chr2:37310976-37311006
  hyper

SEQ ID NO: 105731 - DNA, 30 bp, Homo sapiens
  chr2:37311362-37311392
  hyper
gtcggacaggagtccgtgcgtgtcaacatg

SEQ ID NO: 105732 - DNA, 30 bp, Homo sapiens
  chr2:37312216-37312246
  hyper
ctctgccagggtatcgccttgtgaagttta

SEQ ID NO: 105733 - DNA, 30 bp, Homo sapiens
  chr2:37383552-37383582
  hyper
tcaggggtgaggatacggagtgggaacagg

SEQ ID NO: 105734 - DNA, 30 bp, Homo sapiens; identical to SEQ ID NO: 1423
  chr2:37383979-37384009
  hyper

SEQ ID NO: 105735 - DNA, 32 bp, Homo sapiens; identical to SEQ ID NO: 37326
  chr2:37384212-37384244
  hyper

SEQ ID NO: 105736 - DNA, 741 bp, Homo sapiens
  chr2:37458342-37459083
  hyper
gccagagaatacaacgttcaattcgaaacttttcttttgtaaacagcagtggaaaccggcgtgggaagcgcaccgaacacatgcttcagaggctgggatctcggtcctggacgcccgcgctctacgcagcgcggaagcggcggggcagtcagcctagccaccttcggaactctccacgcctgatcccgttccccggagcccgcggccgttaccttggtgcctccgagccgtaacacttcctccagggagaacccattctcggcttcactagtattatcctcatcctcctcgtccggatcttctactgcctcctcggggcgccaaggccgcttggcatggaactccaaaggctccttgactgcggccatggcgggcaaagcatacgcgcgtgaaactcagcctatttccgctctgccagtggcgtaattcctgtcggggcgtgtcttctcccggaaatggtctaagccccagctcctggcggagcgagctagcctgcgaatttcagcatgagtgtactgctgaggtcaggtttggggccgttgtgtgccgtggcgcgcgcaggtaagcgtcagtcccctcgaagcccggttgccgtggaagccgcgtggggcgccttcctcagctcttcagttgagggtaccgggggatcaagggctcgggggctcacttccaccttgaaggtaccctgggctggaaacgggtccggtacaaacgcaatagggctgcgtagtcgtgggcaag

SEQ ID NO: 105737 - DNA, 30 bp, Homo sapiens; identical to SEQ ID NO: 37329
  chr2:37552530-37552560
  hyper

SEQ ID NO: 105738 - DNA, 332 bp, Homo sapiens; identical to SEQ ID NO: 37330
  chr2:37571655-37571987
  hyper

SEQ ID NO: 105739 - DNA, 164 bp, Homo sapiens; identical to SEQ ID NO: 37331
  chr2:37572274-37572438
  hyper

SEQ ID NO: 105740 - DNA, 30 bp, Homo sapiens; identical to SEQ ID NO: 37332
  chr2:37898086-37898116
  hyper

SEQ ID NO: 105741 - DNA, 30 bp, Homo sapiens
  chr2:37898351-37898381
  hyper
ctctgagtcctggtcgtgccgccggacccc

SEQ ID NO: 105742 - DNA, 30 bp, Homo sapiens
  chr2:37898662-37898692
  hyper
gtggtgcctgctcaccgcattatccgctcc

SEQ ID NO: 105743 - DNA, 1145 bp, Homo sapiens
  chr2:37898933-37900078
  hyper
cggggccaaccggtggccgggcgcgcgcgcgggggggggtcaccgttggaccctcggaggacaatgggcgcccattgttacctccccagcgccaccccccagtaggcgacttctctcggagaagatgccgctttcgactccctaagcacaaagaaaggtcgccggacgctcggtttaaagagggacccggaggtgctgccgcccgggtgcacggggacaataggactccgcccgcaccccggactcccgcactaaaactcgtgcgcccacctctcccgatcccaacaggccgacctagctgtgcgagtggcgggcggtgacccgcagggaagcgaggccacctgagtgcgccgccccggccaggccgcagctccccaggtccctctcagcccgggctccggtgggcgcggagggggagggtcgcgttctgtcagtttctagctcgctcccctcagagctgcagccaaaacccggagagtggaataagcgccctgaagatgccggagctcccggctgagcaactggacacgcgacgaacagcagacgctacaggttctcctacccagagggaggcgtttcttctccctcagggtctttcaaaaggatttgcctaaagctggggcaagccggtggcggctgccccagacgcgcgacgaggcgcaagtggcgcagctgccggcccgagagagtaaaattcaggccgcggtggcacctgcgcccgccggtcacccggccaccgccagcgccgccgcccggcgcgcccctcccctccgccggggccggagcgtgaaccgggttaatgaatgctaattttcttaatcggcctccgtctcttcctcctccgcgagtcgtcggcctggggaaggagtaggcgacaggaaagggcggtgttttccggctgggaggtcccagcccgcatggtcagccaggggagggggctgggacccctgggagtcggacgctgggggcctggcctctgccctgagactctcgggttggatggaaatcctggcacaacgcggagaacctcccggataccttggctttgccgagagatatcagcttcaggtcatcaccgcggtgccctgggtctgtctgaaaccttagagggtgcgccttaagccgatgttgtaaacccaggctga

SEQ ID NO: 105744 - DNA, 31 bp, Homo sapiens; identical to SEQ ID NO: 1426
  chr2:37980872-37980903
  hyper

SEQ ID NO: 105745 - DNA, 30 bp, Homo sapiens
  chr2:38152869-38152899
  hyper
ttgctgcctcggcccggctggtccctgcaa

SEQ ID NO: 105746 - DNA, 120 bp, Homo sapiens; identical to SEQ ID NO: 37336
  chr2:38152926-38153046
  hyper

SEQ ID NO: 105747 - DNA, 14 bp, Homo sapiens
  chr2:38301660-38301674
  hyper
cgcggggggcggcc

SEQ ID NO: 105748 - DNA, 425 bp, Homo sapiens
  chr2:38301762-38302187
  hyper
cggtgcgcaccgggttggggaagtactgcagccagggcatcacgtccaccaggctgcccgcgcccaccgtgcgcccgaactcttcgttgtggctgagcagctcacggaactcggggtcgtcgtggctgtagcggcagccgaaacacacggcactcatgacgttggccacggccacgacggtcagcggcctcgggtcgaggaaggcgccgtccgcgctgccgcgcaccagcagcgccaccagctcgcgcgcctcgctcagcacgtggccctcgaggacttggcggctgcgcggctggcgcgtgaagaagttgcgcatcatgctgtgggctgcgcgccgctgcaccttccagtgctccgagtagtggccgaaagccatgctgcggccgccggacaccacacggaaggaggcgaaggccggccggtcg

SEQ ID NO: 105749 - DNA, 531 bp, Homo sapiens; identical to SEQ ID NO: 1427
  chr2:38302369-38302900
  hyper

SEQ ID NO: 105750 - DNA, 910 bp, Homo sapiens; identical to SEQ ID NO: 37339
  chr2:38302948-38303858
  hyper

SEQ ID NO: 105751 - DNA, 30 bp, Homo sapiens; identical to SEQ ID NO: 37340
  chr2:38304060-38304090
  hyper

SEQ ID NO: 105752 - DNA, 162 bp, Homo sapiens
  chr2:38342432-38342594
  hyper
tcatcctgcaaccacggttaaaaatcactactattcacttcttaccatttgatctgttgacagtttcagccatcagtcactgccggctcccacttcatttagttaccatgtccctcactaacacaagatcgccgtctaggggccaatcgtagaactacaggc

SEQ ID NO: 105753 - DNA, 156 bp, Homo sapiens
  chr2:38604301-38604457
  hyper
gagacgtggttaaccgcggcgcttgggtcgctggtccgtcgccggcgccacagcccctggtgcggttgctgccctcgcgctgcctcgtccccctccgccatcttgtaccgatttaaaattaactccccactgacgtcaaacgccgccgccgcttta

SEQ ID NO: 105754 - DNA, 30 bp, Homo sapiens
  chr2:38604670-38604700
  hyper
gggggtgtccctgccgccgccgtctcacac

SEQ ID NO: 105755 - DNA, 31 bp, Homo sapiens; identical to SEQ ID NO: 1430
  chr2:38690639-38690670
  hyper

SEQ ID NO: 105756 - DNA, 30 bp, Homo sapiens
  chr2:38763518-38763548
  hyper
tgccgaggctcaggcgccccagttcggtgc

SEQ ID NO: 105757 - DNA, 30 bp, Homo sapiens
  chr2:38830726-38830756
  hyper
ttgactgaaggctgcgaggcgcgcgtcggc

SEQ ID NO: 105758 - DNA, 30 bp, Homo sapiens
  chr2:38893196-38893226
  hyper
gtctgagccgagtcacgccccttctcctgt

SEQ ID NO: 105759 - DNA, 30 bp, Homo sapiens
  chr2:38893467-38893497
  hyper
ggtgcttggcttcgccgagttggaaggtgg

SEQ ID NO: 105760 - DNA, 30 bp, Homo sapiens; identical to SEQ ID NO: 1431
  chr2:38977942-38977972
  hyper

SEQ ID NO: 105761 - DNA, 30 bp, Homo sapiens
  chr2:38978639-38978669
  hyper
acgcgggtcatgggcggagggatacgtttc

SEQ ID NO: 105762 - DNA, 194 bp, Homo sapiens
  chr2:39005143-39005337
  hyper
tttgaactgtccgtcgtggcaatggagagggatagccttagaggacatggcggttcattattattattattattacagaacaatcttagactctgtccgcaccctgcactctaggtcccgcgactctcagacctccaagtaggactacaaaacagaggtttctgggggaaggaagtgacgatcggcgcaaagca

SEQ ID NO: 105763 - DNA, 30 bp, Homo sapiens
  chr2:39103053-39103083
  hyper
cggcacagtcccggcgccttctgattggct

SEQ ID NO: 105764 - DNA, 198 bp, Homo sapiens; identical to SEQ ID NO: 37344
  chr2:39187543-39187741
  hyper

SEQ ID NO: 105765 - DNA, 30 bp, Homo sapiens
  chr2:39347262-39347292
  hyper
cccccggctccctgcggcattcccacacac

SEQ ID NO: 105766 - DNA, 30 bp, Homo sapiens; identical to SEQ ID NO: 37345
  chr2:39347971-39348001
  hyper

SEQ ID NO: 105767 - DNA, 30 bp, Homo sapiens
  chr2:39351717-39351747
  hyper
tgctggccaggacgcggccacctggttctc

SEQ ID NO: 105768 - DNA, 228 bp, Homo sapiens
  chr2:39663570-39663798
  hyper
tataataactaccaccgaggcctggtgggcagcagctcccaacctagagcggacgaccccaggttggcgtgaagcaggcaggtttgacaacaccagacccctgctgtccggttcgtcgcgctgaccctgccaacgcaacaaacgcccagaccttctctgcactatggatgagcagtgtggcctgctctcgttctgcccttccctggaaatgcgcgcaagaagggaggt

SEQ ID NO: 105769 - DNA, 30 bp, Homo sapiens
  chr2:39664333-39664363
  hyper
gcggcccgccgccgcgccgaacctggtcac

SEQ ID NO: 105770 - DNA, 30 bp, Homo sapiens; identical to SEQ ID NO: 37346
  chr2:39664651-39664681
  hyper

SEQ ID NO: 105771 - DNA, 103 bp, Homo sapiens; identical to SEQ ID NO: 37347
  chr2:39847386-39847489
  hyper

SEQ ID NO: 105772 - DNA, 996 bp, Homo sapiens
  chr2:39893063-39894059
  hyper
gtctggcggcggcgcgcgagcccaccggcggctgcggcggggcgggaagccatggagccgcgggcgctcgtcacggcgctcagcctcggcctcagcctgtgctccctggggctgctcgtcacggccatcttcaccgaccactggtacgagaccgacccccggcgccacaaggagagctgcgagcgcagccgcgcgggcgccgaccccccggaccagaagaaccgcctgatgccgctgtcgcacctgccgctgcgggactcgcccccgctggggcgccggctgctcccgggcggcccggggcgcgccgaccccgagtcctggcgctcgctcctggggctcggcgggctggacgccgagtgcggccggcccctcttcgccacctactcgggcctctggaggaagtgctacttcctgggcatcgaccgggacatcgacaccctcatcctgaaaggtgagcggcgggcgcaccccgcgtccccggcgcccgcgcgtggagcgcagcccgcggcttcccaggggcgcgccggtccccgcagccccctcccagccgcggccccgcgcctgggcattcttgcatccttcccgccgcctccagtctttatctcttccctttctttccccactgcctcccttcttctccctctccttgactctcttctttcgtccacatcctgcgcgtcctttcaagtccgtgccgcacctcccgcctctgtctccttctttcctgccttcgcctcccattccccggttctctctctctccccgtccttctctgcctttgtacacctgcctgacatgtgtgtcttttcttgacgctgctccccgtgagggggactaaccgtcaaagactcgacttttctcacccgggctccttccttcaagttgtgctccttttggaaataccgtttggaagaaaagtggtgccgacctccgaagagagggaaggggctttgcctgtattgtgcggatgctggtgtcagacggaactgatgtggt

SEQ ID NO: 105773 - DNA, 454 bp, Homo sapiens; identical to SEQ ID NO: 1433
  chr2:40678392-40678846
  hyper

SEQ ID NO: 105774 - DNA, 699 bp, Homo sapiens; identical to SEQ ID NO: 1434
  chr2:40678905-40679604
  hyper

SEQ ID NO: 105775 - DNA, 30 bp, Homo sapiens; identical to SEQ ID NO: 1435
  chr2:40679688-40679718
  hyper

SEQ ID NO: 105776 - DNA, 31 bp, Homo sapiens; identical to SEQ ID NO: 1436
  chr2:42067664-42067695
  hyper

SEQ ID NO: 105777 - DNA, 380 bp, Homo sapiens
  chr2:42068162-42068542
  hyper
ggacgtctggtttccggggacgcagtgataagcgcagaacgggaggtctctgaagcaagatggggctccagacataatctttacctgaataagtcccaacgctgggagtgtcagcccgatcctcctacggtggaaaaggcggcagccaattgctacagtccctttaggcttttctctcccgccaatcctcactctgccctacgggagggttcttggccgcttcagctcggtttgctgcttaccaaccccgcggcccaaggggagcacggctccctggcccgatgcccccggggtatgcagaagggcccagccgggacagcagccactgcatttctttggcttgcgctgcagtccggatggagctcggttctgacccagaa

SEQ ID NO: 105778 - DNA, 30 bp, Homo sapiens; identical to SEQ ID NO: 1437
  chr2:42111963-42111993
  hyper

SEQ ID NO: 105779 - DNA, 1626 bp, Homo sapiens
  chr2:42274302-42275928
  hyper
atacgcggctgaccccgtcagaccccaggcatcttgaggggtagggagcgacccccagctgcatttggggctttagaggcaaggaaaatcagaaacactttggtaaaaggagttgaacagggcatcctcggcgagctcacgagcattcctctatgcctagagctcctgtcccacgcgcgctcgcaggtgctggcccggctgtgcccgcttccccctcaccatcgccccaatccggaatccggggctgagcgaggagccgccacccccggccccacccgcgagagacggggtccacgcgccttccctgcgcccaaaccgccccgaggcccccagtcccaggagggagcgctgagatcactcggatctccgcaccccggacttagctgctcgtcccctccggagcccgctacccgccggcctcgcccctttatctttcccccactccgcccggccggctccgttatccacctcccaatcccgttatccggccgccccggccccgttatccgccctcgcgttgggcgcggagcccccgcgcgcctcctggccgccgccgccccctcccccgctcccagacggagctcgggggaccgcgggctgggcgggaccgcgggctgggcaggaccggagccgcctccgcgccgcttcccaggcccggacggccgcgggaggaggtcccgctgtcagtcagcggggaaggccgggccgggcggccggagggggcggcgccgaggacgggctcgggccgggagctgggaggtggaggcggaggggcgggggagggggcgggggagggggcgggggcgggggcggggggcggctctgggccttataagcggcgggggcagggcggcagggaggcaagtgtcaggccgatgtgtcgcccgcgaggggccggggtcggggccgccggggccatgcgcgcgggctgggcagggggccggcggggcgcagagcggagccgcctcggagcctgagccgcccggggccggggccggggagccgcgcggggccggccggccggggggaggggagcgatgcggcgccggcgggcggcagtggccgcgggtttctgcgcctccttcctgctgggctccgtcctcaacgtgctcttcgctccgggctcggagcctccgaggccaggccagtcccctgagccttcgccggccccgggtccgggccgtcgcgggggccgcggggagctggcccggcagatccgggcgcgctacgaggaggtgcagcgctattcccgcgggggccccgggcccggggcgggccggccggagcggcggcgcctgatggacctggctccgggcgggcccggcctgccgcgcccccggcccccttgggcccggcccctgtccgacggcgccccaggctggcccccggctcccggcccaggctcccccggcccgggcccgcgcctgggctgcgccgcgcttcgcaacgtgtccggcgcgcagtacatgggctcaggctacaccaaggccgtgtaccgggtccgcctgcccggcggtgccgcggtggcgctcaaggcggtggactttagcggccacgatctgggcagctgcgtgcgcgagttcggggtacggaggggctgctatcggctggcggcccacaagctgc

SEQ ID NO: 105780 - DNA, 174 bp, Homo sapiens; identical to SEQ ID NO: 1440
  chr2:42329270-42329444
  hyper

SEQ ID NO: 105781 - DNA, 290 bp, Homo sapiens
  chr2:42329493-42329783
  hyper
cgtgagaaccggagcccggggtgacttgcgggggaggggatcgcttccccgtcgcccacacctgcctaacccacgcccacggcggccgcaaaggcgacaccgcgtgaatctggaaagccccgagtttcaacaggcccaaccatcggcggctttgcaggcgcagcaccaagtgctgctctgcctgtgttcccccagacagcccctggttgtgatttgtcgtttccagtccagctagagtcccaaggccaagaactagacccttgcagcgagatccgcgcccccccccaccc

SEQ ID NO: 105782 - DNA, 371 bp, Homo sapiens
  chr2:42395972-42396343
  hyper
ttccttgcttctgatctgtcccgggccctgcggctgtggcagtggtggtatcgagctagtcaagaagcttcgcccctatttgtcccccaccctattgggggagagggagaacctctccctcttggttgcttctttagtgtccttgtaggacccacgtggtggtcatctcccgtcacgggggtccagtcttggctctgcgggcttcccaggggccacatagggagaggatccttcatgcatcagagtatcgcaggccagagtctatgccttatccccacctgtttggaaccagcttccaaaccgtggtccccagccttcagcaggcctaccgcgcaggcgcaaccaccagcctggcgcgaggcggacaaacg

SEQ ID NO: 105783 - DNA, 150 bp, Homo sapiens
  chr2:42588289-42588439
  hyper
cttgtagtacatgacgcccagagtccggcttcccgcatccgctgccaacgcgaccgccccagagaaggaccccgcctccccggctgtggtcccgagactcagcgcaaggacccggtgctgggactagggctgcccgaagatcgcctaact

SEQ ID NO: 105784 - DNA, 30 bp, Homo sapiens
  chr2:42588681-42588711
  hyper
tgctttaggaggggcgggctccaggcgggg

SEQ ID NO: 105785 - DNA, 289 bp, Homo sapiens
  chr2:42720157-42720446
  hyper
cgaaggtccgccgcatgcgctccagccagcgcctggagggagccgcctcggccccgccggggcgcgcctcgtcgcggcccagcacgcccggctcgtcggccgagtagaaggtgtaggtgtcggacatgcggtcgtcgaggcggcgctggcagcagtactcgaggtgcgcgccctccaggccccagtagatcatctcgttgtagaaggagagctcgcacatccgcggcgcgaagcgcagcttgccgtggccgcgcacgtagagcaggatgaagccgaaggcctccgagtg

SEQ ID NO: 105786 - DNA, 769 bp, Homo sapiens
  chr2:42720772-42721541
  hyper
cgctcctgccctccgctggcccgggggtccctgggctcgagtatctccggcgctgctagtagcgcgccctccgcccggcggtacctgcgggtggccggggagtcctcgccggcgccagcgctgagccccaccggctgggaacgcggctgtgtccgcgccgccgaccctcgcgcccgagggctgcgcacaccgaggccgcggtgccctctcccaagccgcggggccgaccccctgagggctgcgggcgccgaatggagccgccggggcggaatagctccccgtctccggcgctccctgcggccgcgaatccggcggccgccccgccgccgtccagaggcgagaggcaaagtgagcgggttcggaggcggcgaagagccggctcgcggcggcgggggcggggcctctgtgcagtcctcctcctcgcccgccggctccgcgcgcgccgctcacctccctccgcgccgccctccgcttcccgcccgcgcccgcacctccccggcttgctcgggctgggattcccgggcgccccgccctggacctcgggctccccgcctcgtgacgccgtcctccccctccgctccggcccgtagtggcggggaggggtccgcagggcgggggagcggggagcccagcgccgggatgcctgctcccgcgtcctgccctgggccatcgggatgaattgggcagtccccagggccccttttaacagccctggttcaaagcccagtgtggactcgggtgcggggacagacggcgtttggagagcttt

SEQ ID NO: 105787 - DNA, 30 bp, Homo sapiens; identical to SEQ ID NO: 37360
  chr2:42722036-42722066
  hyper

SEQ ID NO: 105788 - DNA, 30 bp, Homo sapiens; identical to SEQ ID NO: 37361
  chr2:42722332-42722362
  hyper

SEQ ID NO: 105789 - DNA, 246 bp, Homo sapiens
  chr2:42795910-42796156
  hyper
gaggtaggcaggctcggcccgacccggcccgtgtgggagcgggttccgggagcggggggccggggcgagtgcacgccaactgccgggagccaagggcgccggggctgaggtcgcagtgggctggggcgccggggcccgcagaggggccgggactccccacccccacccatcccttcccctccccccacgcgggctcgcgagggcccggggccaccttcaccctcgcaccccgcccagtgtttaggg

SEQ ID NO: 105790 - DNA, 31 bp, Homo sapiens; identical to SEQ ID NO: 1444
  chr2:42796455-42796486
  hyper

SEQ ID NO: 105791 - DNA, 786 bp, Homo sapiens; identical to SEQ ID NO: 1445
  chr2:43019538-43020324
  hyper

SEQ ID NO: 105792 - DNA, 84 bp, Homo sapiens
  chr2:43020503-43020587
  hyper
cgcacgcagctatgggaggaatttggcagatgtggacaccggcctcagtgtcctagccctcgggaatctcggggtgttaatgat

SEQ ID NO: 105793 - DNA, 30 bp, Homo sapiens
  chr2:43036976-43037006
  hyper
gccggggctatctccgcgtcctccgcttgg

SEQ ID NO: 105794 - DNA, 196 bp, Homo sapiens
  chr2:43037886-43038082
  hyper
caagcaggaagcagctcgcagtggactctcaataccccttttccgagctacttgttgccaccgcgcgacatccagccgctcgaactcggacatccacccactgcgtccttctagtgctcttcttaggcgggtcctgtaactgcacctagtcccggaccacaggagggcggatggaggtggcgaggcgctccactgt

SEQ ID NO: 105795 - DNA, 30 bp, Homo sapiens; identical to SEQ ID NO: 1447
  chr2:43054969-43054999
  hyper

SEQ ID NO: 105796 - DNA, 30 bp, Homo sapiens; identical to SEQ ID NO: 1448
  chr2:43385829-43385859
  hyper

SEQ ID NO: 105797 - DNA, 288 bp, Homo sapiens; identical to SEQ ID NO: 1449
  chr2:43445792-43446080
  hyper

SEQ ID NO: 105798 - DNA, 82 bp, Homo sapiens; identical to SEQ ID NO: 1450
  chr2:43446675-43446757
  hyper

SEQ ID NO: 105799 - DNA, 621 bp, Homo sapiens; identical to SEQ ID NO: 37370
  chr2:43446816-43447437
  hyper

SEQ ID NO: 105800 - DNA, 141 bp, Homo sapiens; identical to SEQ ID NO: 37371
  chr2:43447695-43447836
  hyper

SEQ ID NO: 105801 - DNA, 347 bp, Homo sapiens
  chr2:43448443-43448790
  hyper
cgtgaaacagctgcccgaggcctggcgtatccaccagaccgccccctcccctccatgctcagctgtgagtcaccagagaccccggctaaggcagggcccgggagggagcggggatgcgaggattgttgatggagcccagctgttgtatatgagaaagcaaactattgctaaatctcttacctaccttggaaaaagtgtctgaactgtgtgcatgagggacggcggtggaggagaagaaacatgaattgatttatgaacccgatttaagttcctaaagtgattgttttaaagttagaaacagccagagtcactatagtaagattttgttcaaccgtttgcgaaatcag

SEQ ID NO: 105802 - DNA, 30 bp, Homo sapiens; identical to SEQ ID NO: 37374
  chr2:43449097-43449127
  hyper

SEQ ID NO: 105803 - DNA, 30 bp, Homo sapiens; identical to SEQ ID NO: 37375
  chr2:43450320-43450350
  hyper

SEQ ID NO: 105804 - DNA, 712 bp, Homo sapiens; identical to SEQ ID NO: 37376
  chr2:43451133-43451845
  hyper

SEQ ID NO: 105805 - DNA, 968 bp, Homo sapiens; identical to SEQ ID NO: 1453
  chr2:43451891-43452859
  hyper

SEQ ID NO: 105806 - DNA, 155 bp, Homo sapiens
  chr2:43453309-43453464
  hyper
cagggcgggaggggcgtcccccagaacctggggacagaggcaaagtccaagaactacaacggctgctgccggccgggcccgctccctggcctaccttgcacaagaagtcgacatcgtagaaggcggacagaagtgtggtcgacatgtttctggat

SEQ ID NO: 105807 - DNA, 69 bp, Homo sapiens
  chr2:43454170-43454239
  hyper
ttttgtactgggcgcgggaattgcaaaatgccagaatatcgcaaccatccccgcggcccggcgggtttg

SEQ ID NO: 105808 - DNA, 30 bp, Homo sapiens
  chr2:43454509-43454539
  hyper
gccagggccaaaggcgcggagtggcgcggg

SEQ ID NO: 105809 - DNA, 30 bp, Homo sapiens
  chr2:43455031-43455061
  hyper
ggcacttctccctccgcgttcatacaggtt

SEQ ID NO: 105810 - DNA, 434 bp, Homo sapiens
  chr2:43822950-43823384
  hyper
ccgccgaatcctggcgataccaaaggatgggaattggtgtggctcgccaggcagccctagcaaaactggccgagccgagctaccgcgggtctggcaggcaggacacctgggagccaaacctcgtgcacgtcggcgtctgagaagagtcgcaggcgcctggtccagtcccggaagcaggtctccttctacggcgtctccgaggctcgcagcgcggtccacggtcgactaccgggtcagggcaaagggagggagagaggggtaacctggaggagtcatcgcgagaattgaccaaacgcagctcctccaatcaggagttcgaggaggtcgtgacgtcaccggggtggccggtagcaatccggtttagttaaccagccactgtaccgtcagcgccgcgcgttcctcatggcgttagggctgacgggccttgttgctga

SEQ ID NO: 105811 - DNA, 931 bp, Homo sapiens
  chr2:43864196-43865127
  hyper
atgaaggtgaccggccgctgcagcaagctctggagtctcgcagttgggacgttaggggtaccactccaggacagagctccctcctggggcagggactgggaggagccaaagttatagccacacccccggtgacgcccggtggtcggctgtggtctcccattggctacaccggctgccagtccctggaggaggcggtgcccttccccgccctctccgagctcggcttgaggcgggcgcgggctgagagtccggggatcccgggggccagtcgcggccgggacatcgggcgctgcggccggggacccgctgctgagatagacaggtgagaaagcccggggacgaggggccactccagagttcctgccaccctgggatccccgcccccttgagggcgccccgtccaggggggctcgcggggccgaggtttggggcgccgggaggagcgggaaggcggggacgagagggacggagcgggctgactcgggatccgccgctgcacctcccgccacagcccagagtcggcccccaagtctggatgtcgccgggagaggtgggcagggggcggtggccggcggtccctcgcgcccgtgggctcccgtgacgttctgtttggaaacactgggcccgggcttctggcgcggcgcgagcggtcccgggggcgcagcggggcagcccagggtccccgagccgagggacccgcgcggtcagggatgccgcgctcgccttaggcttcgggagatccaccaggatctccggggcgaaactttaaactcaaaactttaaagaagcattttgtacacctcgagttgctggcacgtcaaagcaccctaaggtgacctacccggaaaccactgtccccgaagttagtggggcactttttaaaggacaacactttttacccgtcgatattgttgtgcgtaacgctgtggaa

SEQ ID NO: 105812 - DNA, 30 bp, Homo sapiens; identical to SEQ ID NO: 1455
  chr2:44001237-44001267
  hyper

SEQ ID NO: 105813 - DNA, 302 bp, Homo sapiens
  chr2:44223034-44223336
  hyper
gggccgccccggcacgcagcaaccaacgcgcggatctcagcagggctgccattgctcgaacgtccccgcagcgggaagcacgctccgccagaaggacaggaggagcatgtgaccgcagggtagcctggcgcggcagagaccaactgccgggcgtgccaaatgtggggggagcgacggattgttttaggttggaagatggaaaaccgcacttctccgaggacagaagacccaatgtaatatttacataaacgatgttgcttgattcattatcgaagcttttcttttccgtcttccgtctccga

SEQ ID NO: 105814 - DNA, 30 bp, Homo sapiens
  chr2:44314548-44314578
  hyper
tgtttacccggctccgggtcatttttagat

SEQ ID NO: 105815 - DNA, 19 bp, Homo sapiens
  chr2:44395000-44395019
  hyper
cggcgatgatttcattgtt

SEQ ID NO: 105816 - DNA, 30 bp, Homo sapiens
  chr2:44396043-44396073
  hyper
ggcggaaaagccgccggtgctctgacggcc

SEQ ID NO: 105817 - DNA, 30 bp, Homo sapiens
  chr2:44588705-44588735
  hyper
acctcaatctagcacgagcaacaggcagat

SEQ ID NO: 105818 - DNA, 226 bp, Homo sapiens
  chr2:44588950-44589176
  hyper
atggcgtgacagctcggccctggttgccaaggagatgcgagtaccggaaatgcggaattcggggagagcgcgcatgcctggtccggtggagggagggtgccgggcgtcacaggtcctgacagggaagaagttggcaggtcctggcaggggacgagctgcggcggtggcacctccgggtgtggaaggctccagtgagatggagtcgcgagtcgcggacgctgggacc

SEQ ID NO: 105819 - DNA, 30 bp, Homo sapiens
  chr2:44589585-44589615
  hyper
gtctctggtgcgcccgccgctccccactgc

SEQ ID NO: 105820 - DNA, 28 bp, Homo sapiens
  chr2:45029030-45029058
  hyper
ccagcgtttccaagccgggctctggccg

SEQ ID NO: 105821 - DNA, 119 bp, Homo sapiens
  chr2:45029183-45029302
  hyper
cgacccggcgccgactctcctcctcttctccctgcgagggcccgcgccgcccgggcccagtcctgggggatagatccctcggggcccaacggctgggccaccgccggtctccggccact

SEQ ID NO: 105822 - DNA, 49 bp, Homo sapiens
  chr2:45029729-45029778
  hyper
gctcagccgcggtggcggggcccgcgcggtccctccgcagactcgcggg

SEQ ID NO: 105823 - DNA, 97 bp, Homo sapiens
  chr2:45029987-45030084
  hyper
cggctgccccgtccgggacccgctaattacagggattcggtttccccgctctgaaggaatgcattacctgcagcaaaggaggcgcggcctctcagga

SEQ ID NO: 105824 - DNA, 81 bp, Homo sapiens
  chr2:45030317-45030398
  hyper
ggatgcacaaaagctcgacggaaattggagtaacttttggaggcccttgtagctgccgtcaataagcgtcagccccataat

SEQ ID NO: 105825 - DNA, 30 bp, Homo sapiens
  chr2:45034907-45034937
  hyper
acttggaacatttctcggatggggaagaaa

SEQ ID NO: 105826 - DNA, 30 bp, Homo sapiens; identical to SEQ ID NO: 1456
  chr2:45150461-45150491
  hyper

SEQ ID NO: 105827 - DNA, 30 bp, Homo sapiens
  chr2:45154296-45154326
  hyper
gctgcaccactaaagcgaggtgttctgggc

SEQ ID NO: 105828 - DNA, 25 bp, Homo sapiens
  chr2:45155185-45155210
  hyper
gtaggaagctcgaagcgcaaagcaa

SEQ ID NO: 105829 - DNA, 1456 bp, Homo sapiens
  chr2:45155355-45156811
  hyper
cgcagttttgcaaatccttttccctctccccatgcctcgcggtttaagaccacgcgatttcccaaaaagaaaaactcaaaagatgccaggcgccgggctggagtcacttagagccagctctggctgctcctccgcctccccgacccccggccgccgctccgccctgcccctcgcgcctcgaccccttctcccgaaactccgtcctctccgccgaggggctgccttgcccccaacccaccccccgcgtggagaataaacacagttgacatcactcttataatctttatttaaaactgtttccaaggttacaaattgccgagcctcgtatgcaacaggttcctccaaagcggtatcattacagattaactgtaatgtgtaggattagaataaaagcataagggattaggtaaaagggcgacgctccagacataacgcccgagcgcatctcgactgagtcagcctagggagactgcgaaggcgcagggtgtcggggcgccacggggccgcaaagccggactcggttcctccgctcccggccctggccccggccccagagcggtcgggacagcggcgccggaaggccaacgcggccgaaggtttcggagccaggcttcccgggcgtcaggggctagggacgggtccccggagctggggaagatgaggggccgagaggccgtggaggcggaggacgcgggcaagccacggcccggctgggagcttcgggaagcgccgcgcccgggacgcggtctccgggcggggcgaagcgcagggaaggcggcgagggggtccccacacccgcacggggcaccgggtttgtccatgtgggtgacactgccttcaaggcccaggcccgatggggcccttcctggcgtcctcctcacccccactccgccgcgcctcccctgtccagctggggctggggacagcggcaggggctgggcagccgcgcaggccgcccgcacccttccgagcccaggcctcgggccttcgccgcccgcccaggccgtgcgccctattggaccaccttccccccggccttcgcctgcccctctcgcgccaggaaggccctggagctccctctccccctcacaccgcttcctgcggggccagggctcgccgtgctggccccatttggactcaggcctgacctgggccacggcctcaggccgctgacgcagccccgagggctgtttgcgtgttggggtggagggcgcggggctggaaaaacaaacagggcgggggcgcggaggtttggggtgggggccgcagggggctggaaggaagtgcgcagtgtggcgagagcgcgaacaaagccctctccggagccccgtcacccctcggtgaccccaggcccgccccgctgagccgcggggctcccgggcctcgcctccgagcaggccgcaccgcccggtgggcgcacgtcaggcctccgcggccgcccgggccagtgctcccc

SEQ ID NO: 105830 - DNA, 228 bp, Homo sapiens
  chr2:45156832-45157060
  hyper
cgcggccggccccgaaggcgcgagggacagcgcggccggcggtggagcctcactcaggcacggagcccacagagcgaggctgaggaggactccatgctgttgtccgtcgggaaaccggactactctggggcgcgctggagccaccattctgccagcagccggggaggggccgcgagggctcccaagtggacggaagtaggcgaccaacttcgccgcgactcctgcttc

SEQ ID NO: 105831 - DNA, 549 bp, Homo sapiens
  chr2:45157280-45157829
  hyper
ctcgtatccggcgcgcgggcccagtgtgggactgcggctgggagcccgggccctccgggagtgaagatacctttggaggtgagacggcctctctagcgcgttgacactgttgatggaagggattaaaggggtatcaggttattttaatttattgttgaagatgatgactgccccctccccgatccgcataccgtcctcactttcccaccccaaccctagacccgacaacaccgttcagccctttgccccgggcagcggaaatggttagcttcctctaggagtttctgctgaggaaggcgcaggcaaccctagtcggcttagagagagacaaccgcacgcgatcaccgagcacgatttctcccaacaaaaaaactaacaataatagcgatccacacactcaagaggtctcaaacctccgaagttttgccccgagtcttgtggccctggcagaggtgacaagggcatttgggaaagacagagaaaaataaattcgctccagtgactgtacacggggcatttgaggctgtgagaaaacgagttgcttttctg

SEQ ID NO: 105832 - DNA, 1041 bp, Homo sapiens
  chr2:45159698-45160739
  hyper
cagcttgagtctgagctcaaacgtgcgcgaccccctgggtctgcatggggagaaggaggtgtgcacgtgcaaacgcgggactttgggtggagtgtgaggttgatagggctttcggccccagggccctctaggcctcttttaaataccttcatctgcccaatttcttaacctttcaggacaaggagggagaccctccgcgatcctgcgccttgccaccctttgggaaggataggaccatcatctagggcgtctctcggtggactgtggctgggccgggctgaatgggcgggcggaggtctcgaggtcgtctcctggctctcgattgctcccatcacccaagccacctcgaggtcgagtgcgccctggggctatgtctggggaggtcatggcgtctcggggcgaatgatatgcacgttttggggcaaaactctcctaggcctcgcaggagcagctgtatttgtaacttggaattggcctgggcccgcctcccttggcccctcctccagctcctacctcaacacgcagcgctcagcgggctgccagagtgagcttcccggaccacccccaagcaccctggggcctcaccatccttcagggtccctggggcatcctagaggcctggatctggaagaatgggggccaacaagagtggccagggctctcctggggcggttttgcgatgtattcctccgctagaattagcctttcgggcctgcgcgcctacaggtttcagaggccagcgggaacggtggcctcgggtgtgtgggggtgaggggtgtggtgtgtgtgcacgtgttcacgcgcgactagaagcggttccttgtgcatttctagaatcttgtagatgtgttttctcgtgagaatgatgcagacttactgctgacttaaggtcagtttgtttgaaaagggagaacgtcagtccgatggtcggtggttgtgtctctcctgagcattcgtacaaagtgaagccacctcccctccgccatgcagtctcccagaccgggtcaaaggacccaggctccaggtcgctgaggcctggag

SEQ ID NO: 105833 - DNA, 448 bp, Homo sapiens; identical to SEQ ID NO: 1459
  chr2:45161092-45161540
  hyper

SEQ ID NO: 105834 - DNA, 1606 bp, Homo sapiens
  chr2:45161597-45163203
  hyper
cgttggtgggggtgggagggcggctctactctgcgttcactttgggtgcccaggcatgcgaccctgcacgactaggaaccgcgtgcgtgggctccatgtgtggaatgagtgtgagcatgtaagagtgtgtttgtgtgtgtgcgagagagagacagagagactatgcgcccgcaagcgcgcgcgcgcgcctgtttgtggcgcgctctggaaacattttccgacttttcactcggacgccctggatttctcgcctttgcctttctctgcttcccctccctcttctctcgccctcccctcccccacccaggtctaccccaccctaccccactcctaccccggctgctgaggcgctcttctgccggctattgtacggctggcgcgggctccccctggccacatcccgggcctctcacacaagaagaatagttctgtttccgccgtaaacccccacacaaaggctgcccggccaccgggtcccctgtcccccttcccggggacttcggcttttgaggtgctgctgcgcgttctttctccctccccctctcagggcgccagggcccagaccaaggagctaagagtgatcgggacttgggggtaccgggtggaactccttgggggccgcccgccaggcttcctgggctgcaactcggagcccagagacccccaggggaagggcgcctcttcccccaccaccaccccagccgtcgcctgcgggaggagcacggggaacccggcccagccaaagggggaagagggaggggaaaaggaagaaggtcggggaggggctgaccatataaccagaattctttaaacggacttacccggccacctgttgagaatccatgtggggtcggctggctccggagttgcgcaaggtggacacacaaaaccaaaagccggagttgggaaaagaaaattctttctctgaccatgccagacgcggccggtcaggctcgcagctccgcgctaggatcgggcggctgtacaaccaagatcgactttgccctgtcccccaacgcccccctcatcccacggctccacggctgggaggctccggactcagagctcgcggactcggcgctcagggtcagcaccagcagctcggcttaagccggggcaggctctctaagccctgctcagaagtcaagagcagcagtgctgcctctcctcgccgcctttcatgccgcggccgctccttattcttgtgtctcggcctctcccggccccctcggacaaaacccccagagcccggccactctcttcccgctaaatccccttcggggtcagtgctctaccagcaccgggccgcgcgcctctcctgccagccgtgtggctcttaaagagctgcacccctcctccgccctgcgcgatcccccgacccccgcctcccctcccctctcctccggatctagccccccacgccgacgcctgaggtccctgctgccccgaccgatgcctgcggactcccagccccctcccctcgcctcctcccctgagcagccggtgggcctggcctcgaggccacagggctgagttctaccctcgcctcaggtcccctttctcaccagcagcgcacacccctcccttccccgcccctactttagcc

SEQ ID NO: 105835 - DNA, 67 bp, Homo sapiens; identical to SEQ ID NO: 37397
  chr2:45164540-45164607
  hyper

SEQ ID NO: 105836 - DNA, 1305 bp, Homo sapiens; identical to SEQ ID NO: 37398
  chr2:45164656-45165961
  hyper

SEQ ID NO: 105837 - DNA, 30 bp, Homo sapiens; identical to SEQ ID NO: 37399
  chr2:45166299-45166329
  hyper

SEQ ID NO: 105838 - DNA, 30 bp, Homo sapiens; identical to SEQ ID NO: 37400
  chr2:45168906-45168936
  hyper

SEQ ID NO: 105839 - DNA, 822 bp, Homo sapiens
  chr2:45169300-45170122
  hyper
gccgattctcaccaccgctccatacttctggcgagtagcggcggcgggaacggtgcgggaggcggcggcggcgcgggaggcggcagcggcggcgggaacggtgcgggaggcggcggtgctggcggagcaggcggcggcggcggcggcggctccagggcccccccggaagagttgtccatgttccagctgcccaccctcaacttctcgccggagcaggtggccagcgtctgtgagacgctggaggagacgggcgacatcgagcggctgggccgcttcctctggtcgctgcccgtggcccccggggcgtgcgaggccatcaacaaacacgagtcgatcctgcgcgcgcgcgccgtggtcgccttccacacgggcaacttccgcgacctctaccacatccttgagaaccacaagttcaccaaggagtctcacggcaagctgcaggccatgtggctcgaggcgcactaccaggaggccgagaagctgcgcggccgcccactcggcccggtggacaagtaccgcgtgcgcaagaagttcccgctgccacgcaccatctgggacggcgagcagaagacgcattgcttcaaggagcggactcggagcctgttgcgggagtggtacctacaggacccctaccccaaccccagcaagaaacgcgaactggcgcaggccaccggcctcactcccacacaagtaggcaactggtttaagaaccggcggcagcgcgaccgcgccgcggcggccaagaacaggttagtggcggggcccgcggcctggctacagcctcagaggcctgggaaggggagaggggttgagatggggcta

SEQ ID NO: 105840 - DNA, 58 bp, Homo sapiens
  chr2:45170168-45170226
  hyper
cggagaaagtttccgcttgtccgggacgcgcggaagagggggccgggctggctgtggg

SEQ ID NO: 105841 - DNA, 212 bp, Homo sapiens; identical to SEQ ID NO: 37402
  chr2:45171351-45171563
  hyper

SEQ ID NO: 105842 - DNA, 56 bp, Homo sapiens
  chr2:45171836-45171892
  hyper
cgcgcagacaccggcacctccatcctctcggtaacctccagcgactcggaatgtga

SEQ ID NO: 105843 - DNA, 239 bp, Homo sapiens
  chr2:45172156-45172395
  hyper
cccaaaggaccccgacgccaacagacagtcaaacgctgatgttgcgggcagaaaacataaaagaggtgacaattgtatactttctaggacaagcacggcttctcctttcggttcccatggacccggcaccccacctgcatgacgatttatttgtatctgggaaaatattctctctagttaaaaatgatttaaagagtcgactatacaaaaatcaatcaccaccacgaggacaagagggc

SEQ ID NO: 105844 - DNA, 30 bp, Homo sapiens
  chr2:45176486-45176516
  hyper
tgccacggcgcggggcggagatgccgatca

SEQ ID NO: 105845 - DNA, 546 bp, Homo sapiens
  chr2:45176738-45177284
  hyper
catcacccgggaccccggagctcgaagtccattcccaggcctgtggcgcactggatgcactcggcgtcttggagcagtctcttctccctctcttcttcctctgcctccgtggccctgtcagtcccgcctaagcctttgtgtggccgtcacctggagcaccggctgtgcctcagggactttcccgggccttccccttgtcctctctgtcccccagcgctggagctgagatgcccggcccgcgggacgctcgaccccctggtacgcgcgctgaggcccccacggcttcccaccgctccggccctttccggccccagctgagctgaagctccctggccccagtgtgcgggccccggtggccgtctggcccgagggagggcgggggcaggcgagagggagccatggaggaggggagcagtactagcccggctccaatttctccggtcagctgagcacaactttccattcgagtgtattcatgcagcggctgattgagctccactgtgccgggcggggctcggcgggagcgggcaggaacagccaggctga

SEQ ID NO: 105846 - DNA, 30 bp, Homo sapiens
  chr2:45179297-45179327
  hyper
aggcagggtccagacgtgagggggagcgcg

SEQ ID NO: 105847 - DNA, 1113 bp, Homo sapiens
  chr2:45179621-45180734
  hyper
cctgtggctgggcccgcactgcctttggtttgttggattttgcgatatttaccataataattaatttgccgccattcaacagaatatcttagcaaggccccttaacgactggaagcgctgctaattccctgcgtatgcgcctctccctctgcagcccgggacaggcgcagccgccttttgcctgcccctacctcgcccgggacacactggcgccgcctggccaggcccgactgggaggaaggacagaggaccgacggacacttgtacatgtgcgggcgcacggaacccaggccccggccaccgctgcctttcccctgtgtgtctgagctgaagcggctacgcttataccgggaggtgaaacggaagctcagagagggccataatttggccactgtcacacagccaacctccaccttcacccggctacaccaacacactcgatgaccttctctgtcttcctcgccgtgcgctcccgatagcgggggaaatacttttctgagacgcctctctgggcacgcaagatgaggcaaaagcgggagaagggagtgggataggaccgggagcgggcggccctgggctctgcccttctgggcgcgccatcgctcccgccacctgcactaggactttgcaggaacgcgcctcctacgcgctgcctaggaggaccagacgcgagacaagcgctcagcaagcagctacgtgcaggcagacctaccaagccaggagaaagagcggggatttcaggggcctccgctcccacagcggaccggcctccgcttaaaccaccagcacttcccagtgggcctgggaatcgaggatgtgaagtgtgtggatacatgtgaacgttgttgagtgtgcagtgagactgttgtgcagattctcatgaattgcaagagaaatatttaccttgtgcgggtgacaagtctacctgcagatgagcccgggggcttgtccagtgcttgtgagcatgatgcagaaatatcaactaagttctcgaagaatggaggggagagggacaagcacaattgagccctgtcctcaagtttctcacgatccagtaggagggacagttgaggtcaccacttaaaaacaaaccaaccccgtggagttgcacac

SEQ ID NO: 105848 - DNA, 699 bp, Homo sapiens
  chr2:45181674-45182373
  hyper
tctgtcggtggacgccgcgaaccaatcaaacccttgcactttgttccaaaacccattccctaccagaatgggagtcctgtagggccaggtctcctcccatacccacccatttcggcctttgttctactgcacaataacagctggcactggggtgcgggaggacggtgaaagctcgagtcccaggctccaaatcctccaggagtaactggggtgacccgaggagagcagcgcactgggtgagtggaagcgtggcccgtgagaagggtaccgagggtcagaagtgtcgcaagggacccaggacgcgcgcgcctccgaacccctgagtcttcgcaggctctgcgaaacttcagtgcgcgcagcctcctgcacaccgttttcgcgcgacctccttgcctcggtctccaggggtcaagccaacccagcgcgggaatgttccatttgcccttttgggacattcagagaggcttttccgggctgccgcggcgcttccacgcagaggaggcgtcggcttccaggcagcttggcgatcttgttattggacacgcgagagtttagagacccagagaaatggagtgagtcaaagtcaaactcaagtttctcggcccctagtcctgcgattcttccattgcacattgcacccctgggcctttcacatctgctcctagcgagcttggagtgtaggtgcgaccagggcgcatc

SEQ ID NO: 105849 - DNA, 251 bp, Homo sapiens; identical to SEQ ID NO: 37408
  chr2:45182674-45182925
  hyper

SEQ ID NO: 105850 - DNA, 49 bp, Homo sapiens
  chr2:45228527-45228576
  hyper
gggcggaggttcaggcggcaggaatggagaggctgatcctcctctagcc

SEQ ID NO: 105851 - DNA, 108 bp, Homo sapiens
  chr2:45228626-45228734
  hyper
cgactccgccgggcgcttggtgggctcctgggcttctgggctcacccttacacctgtgtactaaagggctgctaccctcccgaggtgtacgtccgccgcctcggcgct

SEQ ID NO: 105852 - DNA, 30 bp, Homo sapiens
  chr2:45229284-45229314
  hyper
ctgacagggacacaccgcgagctccgcata

SEQ ID NO: 105853 - DNA, 239 bp, Homo sapiens
  chr2:45231244-45231483
  hyper
cgcccggccgcggtgccctggtcgctgagggacgcggtcagtacctaccgccactgcgacccgagaagggaaagcctcaacttcttcctctcggagtcctgcccactacggatctgcctggactggttcagatgcgtcgtttaaaggggggggctggcactccagagaggagggggcgctgcaggttaattgatagccacggaagcacctaggcgccccatgcgcggagccggagccgc

SEQ ID NO: 105854 - DNA, 867 bp, Homo sapiens
  chr2:45231696-45232563
  hyper
cggccgccggcccggccgccctgagtccgatttccctccttccctgacccttcagtttcactgcaaatccacagaagcaggtttgcgagctcgaatacctttgctccactgccacacgcagcaccgggactgggcgtctggagcttaagtctgggggtctgagcctgggaccggcaaatccgcgcagcgcatcgcgcccagtctcggagactgcaaccaccgccaaggagtacgcgcggcaggaaacttctgcggcccaatttcttccccagctttggcatctccgaaggcacgtacccgccctcggcacaagctctctcgtcttccacttcgacctcgaggtggagaaagaggctggcaagggctgtgcgcgtcgctggtgtggggagggcagcaggctgcccctccccgcttctgcagcgagttttcccagccaggaaaagggagggagctgtttcaggaatttcagtgccttcacctagcgactgacacaagtcgtgtgtataggaaggcgtctggctgtttcgggactcaccagagagcatcgccaaccagaacggcccacccggggtgtcgagtcttggtagggaaatcagacacagctgcactcccggcccgcgggccttgtggcatataaccatttatatatttatgatttctaattttattataaaataaaagcagaaatatttcccgaagaacattcacatgagggcattacggggagacggcaagtcggcggctcggggggcgcgctcagccgggagcgctgtagtcacagtcccgggaggaagagcgcggtgtggcggggcctcgccaagagagaaggaggaggggcgtatgacgaggcggcgtttaggggcttct

SEQ ID NO: 105855 - DNA, 1439 bp, Homo sapiens; identical to SEQ ID NO: 37411
  chr2:45235529-45236968
  hyper

SEQ ID NO: 105856 - DNA, 719 bp, Homo sapiens; identical to SEQ ID NO: 37412
  chr2:45237181-45237900
  hyper

SEQ ID NO: 105857 - DNA, 15 bp, Homo sapiens
  chr2:45240078-45240093
  hyper
agcccactggcctcc

SEQ ID NO: 105858 - DNA, 66 bp, Homo sapiens
  chr2:45240360-45240426
  hyper
ctctggccctggcgccgcccgcctcgggcgctccatgctgctccgcacctcgggctctgggatgct

SEQ ID NO: 105859 - DNA, 140 bp, Homo sapiens; identical to SEQ ID NO: 1472
  chr2:45240490-45240630
  hyper

SEQ ID NO: 105860 - DNA, 405 bp, Homo sapiens; identical to SEQ ID NO: 1473
  chr2:45240763-45241168
  hyper

SEQ ID NO: 105861 - DNA, 476 bp, Homo sapiens; identical to SEQ ID NO: 37416
  chr2:45241232-45241708
  hyper

SEQ ID NO: 105862 - DNA, 1442 bp, Homo sapiens
  chr2:45395854-45397296
  hyper
ttgtattttgagaaccgctccctttcccgcacacgcattgctgcctcctctcgggcttggttaatgagtctgtgcgccaagccaggtcgctccgggcagttcgcgcttccgcgcctcggcactcggatgaccgtgtcctattcgtctctctcgtgaatgtcgctgaaaaaaaataaaagtttgttctaagcccgtggcatttccgcgcgcagatggaaaggcaagtgggagaggagggtgcaggtgcggggcgggcgcggcggccccttcaggcgccgggggctgggctgcccccggccgggagcagctccgctccgcgcacgtggctgtgggcgctgcggacgggggacggcaggcgggggacggcaggcggggagtggagggtgcagtgcccgcaggtgccgacggcttcctcccagagcccttcgcgccgcgccttgcctggctggtggcgcggggaaaccatggcagcattgcggctccggcgggcgggctctgcgcggggccccaccgagctttccgggagcctctcccgcagccgatgggcatctaggggcgcagaacgaagagtgggcgccgaaacgggtgtaggcgctggaggccgacggggaggcccggggcggtcaggcttctcggtagagagggccgtgcacctcgcggcctgcgggctaaggcggggagccgctcctgcggcggccgggcgcgcggactggagggagggaagcgccacggactggggaaccggggtgacggggagacgggggggctggtggggtgaggtcggcgggcagcagccaagtgttctgcagctccgaaccccgccaccctctgggcgaacggaatggcacccgcggagacgggcggggacgggcgaaagcgggtttgctccgacccgaagctgagcccgggttggagggcgagaccgtaggcgagaatggccgcgcgggctgggagacccgggccggtatggagtgagtggagccgcccgaggtagggtagttggggatggtagttgtgaagacagtcggagtctagctccgggcagacgaaacaccggggcgcgccagggtccgtttcctccttctctctgctttcccaccagccctgtagatacggagccagcagtcgggctagagcggaggctgagggtcgcggttccaagggcggtctctcgccccgggtcaggccccaccccgcggtggcggtcgcgtggcgctgtcctggagttgagctgtccccgcgccgcggcccgcacgcccaggaccgcacaccgccgcccgcaggcagagacgcctgcaacctcgccctctcgcccggctcccagctcggggctgggaaccggaaaggtgcatttccgtgtggggtgggggcgattcccggctgtcggcggtggggctaggccttgcggcggatgagccagaccttcccggctttccagccag

SEQ ID NO: 105863 - DNA, 102 bp, Homo sapiens; identical to SEQ ID NO: 37418
  chr2:45837796-45837898
  hyper

SEQ ID NO: 105864 - DNA, 30 bp, Homo sapiens
  chr2:45838530-45838560
  hyper
aggcggggctagagcgaggatcccgaggga

SEQ ID NO: 105865 - DNA, 30 bp, Homo sapiens
  chr2:45871035-45871065
  hyper
atcagagcgcgcagcgactttgtcactgca

SEQ ID NO: 105866 - DNA, 30 bp, Homo sapiens; identical to SEQ ID NO: 37419
  chr2:45877164-45877194
  hyper

SEQ ID NO: 105867 - DNA, 30 bp, Homo sapiens
  chr2:45877764-45877794
  hyper
gccgtggatcacagcgtcccgggacagagt

SEQ ID NO: 105868 - DNA, 340 bp, Homo sapiens
  chr2:45878652-45878992
  hyper
gacatgcatccctccggatagactgaacatccctccgttcacccccccgccccgcgcggtcagaggcaggcgctgagtgtgcgaagaggatccgggttgaaatctgcgcccccggttctcgtccccgccccgtcccaccgccccatccccctcccggagtcgaaatttcccgggattatgtttcggaaaggtaggtaagcgccgggcgcggcgcccgctttcccgcagtccggagccggagagccagcgaggcggcgaggcagcccccgcggcttgcagcggagccgacagctcgtcttctcttctggaggtgcagctggtggtcggggggagagacttg

SEQ ID NO: 105869 - DNA, 30 bp, Homo sapiens
  chr2:45879201-45879231
  hyper
agacggagtgaccccggcccccactccccg

SEQ ID NO: 105870 - DNA, 560 bp, Homo sapiens
  chr2:46524133-46524693
  hyper
tacgaggacaccgacgctgtggcgcaactgccgtcccccgcagcaatcccggagcccggctcccggccgcccctcggccctgcgcaggctgcctctccccgacgcggagtcccaccccgctacccgccgcccagacgacctcataaacaagtcctcgaagtgcggaggcaggaggcggggcgcagcgcgggggcaggaggcgggccagggtcagggcagaggctgcggccgcgcgtccccattggccgggacgcagtgagccgcccggagctcggcgcgggcggggcctgccggcgcgtgcccgcccacacacccgcgccggtgcccgccccccgccctccgcgcccgccccgtgcccgccccaagccggccgacggagtttttaaagtgggctgccggccgcgggagctttacactcgcgagcggaccgccacacgggtccggtgcccgctgcgcttccgccccagcgctcctgaggcggccgtacaatcctcggcagtgtcctgagactgtatggtcagctcagcccggcctccgactccttccgactcccagcattc

SEQ ID NO: 105871 - DNA, 1567 bp, Homo sapiens
  chr2:46524956-46526523
  hyper
ccgggccgcggggagcggacgagggccacagccccccacccgccagggagcccaggtgctcggcgtctgaacgtctcaaagggccacagcgacaatgacagctgacaaggagaagaaaaggtaagcgggcgtccgggccgatcagggggccggtccgaggccagggccgggctgcgcggggcaggcgcgaccgagagtggttgggagaagagtgctgagaggtcttcggagctcgaggctcggtttggagggctgtgagggggagagcatgtgcccggtttgggggcgcggatcagcagctttgcagtggagacttctgcggctcggaggagtcggggatttgcgcgcacggcgaggccaggaggccgagggagatggcctggaggtcggaggtgcttccgcggtgcctttgaaaatctcccagccgccccgcagcagattaccgtggccaccggcgcttggaaatgtttgtgggtgcatgtcctcgactttctctggtctctcattttggggcagcatccacgtctctatttttctctggattcgcggagtccttccaaatgcgctcctgtgcccgcgccgcggcccaagtgggcaaaggggggcgggaggcggagagcggctcagggacacgatcctaccgaggagccaggacccttcagagcgccccgctgccgggctccagaccccaccgaaggttggagaacccacttcctcgtgccgcaccttgactctggggagagtaggtagtgagtgacctggattgccctgcgggggcagatggttcggtgtgtaggaagcggacggcaacactggatgtccctggcaggtccgggtgtctgtctccgaagaggacagagaagggcagccacgatctgcccgcctgccctcgcgagcctctcggcactgggtgagaggcaactctggccatttcttgctgccctctcgccctctcccggccgctcccagtccagccgggcccggcgctacccgagcgagggttcgagccctctgcgcggccgcgcagaagcaggcagggcctcaacttctgcaaatgtgtgcggctcgccgcctgtcccctttctcctcctgtctccacccgtgcggccccagtggcctggagcttccagccccgcgcttggccgcggcttggcgaggctatgctgcgggaagctggaatccaacgcgcggccggctgaaccgcctgagccgcgggaaaccagcggcggagcggcggtatagaggtgcgaggatgaggaggaccgactcgctaagggagggaggtgactggccgggagggctcactgccgaggttgatttgctcttgttccaacttccactacgggactggagccagaaaccgtgtatcctccggtcgaaagcagcggttcccacctcggggcaccgataaggatttgataaacgggagcgaatcgcgcctgtcctggctcggcgcccgggcccttcactgcgggatcgctaggggaggggattgggccctgctcccctttcctggccgtagtcccccctttctcgtcaccgtcgcgccctcagacccaagacaagt

SEQ ID NO: 105872 - DNA, 30 bp, Homo sapiens; identical to SEQ ID NO: 1479
  chr2:46526744-46526774
  hyper

SEQ ID NO: 105873 - DNA, 173 bp, Homo sapiens
  chr2:46689146-46689319
  hyper
acatctggccaatggcgagcagtgaaaatcaaaaattaggggagagaaggttcaattaagtgtcgtcaaatcgaaacttccaccacttccttcatccctgagtcagcaatgttgtcagtaggagactggtcatgtgtaagcttgcagggtgccttaaacggggagaggtaaag

SEQ ID NO: 105874 - DNA, 609 bp, Homo sapiens
  chr2:46727081-46727690
  hyper
ctaagttttctcatcggtgtctgcaagtctgtttcctcggcagtgagatgtcgataatcagaatgaagtaagatgaaacctggcacggagcttggcctgcagccagaacagggcacctagttgcatttagcaaatgtttgctaattgtgaggctaaatcgtctcgcttcccagtgattagagaagcctgggcttcccagtgcccaggaaaccaaggagagttcccaaaccctcacgtatcctttgagtaacttgccaacttggggtgatgaaaacgcactcccctcctcccgccgccgctgggtcgggctctgaacgcacgagcctcggagctatgaggtcatacacgggtcacgtggccgctgtcgcatctgtcaactgtgatacaattactaagactgtccggacattcaaacctgctctctcctcctcctccctctccggtacgccggcccttttcacaccaagggaccgtctcaaaagtctaggctccaaatgctacgacgtaagaaaggaggagaaagagggaggaaaaaagtcgaagactacacttctcgttgctgccgtttgaaaactatgcctaagccccgttatttaaaatcctttctgc

SEQ ID NO: 105875 - DNA, 30 bp, Homo sapiens; identical to SEQ ID NO: 1480
  chr2:46768929-46768959
  hyper

SEQ ID NO: 105876 - DNA, 8 bp, Homo sapiens
  chr2:46770288-46770296
  hyper
cggaggag

SEQ ID NO: 105877 - DNA, 324 bp, Homo sapiens
  chr2:46770635-46770959
  hyper
aatattcgaggggaccgagcgagacgtggctacgggacttgggagaagggggtggacggctggggaccacatcacaccccggccctttgccggttcacagtgagctggccgcacgggaaaagggggtgacatctcgcggggagcgcccccacgcctctagctgggttgggagaggagggtccgggtggggagcgaaattgccccagagcccaggtcactgtgagcttctctccccgcccccacttctgtccttgcagtcagcgtcaccgtggggggcaagcagtacctcctaggactctatgacacggccggacaggtgagtgt

SEQ ID NO: 105878 - DNA, 30 bp, Homo sapiens
  chr2:46844514-46844544
  hyper
cgttgttttttcttcgcccacaggtctcag

SEQ ID NO: 105879 - DNA, 30 bp, Homo sapiens; identical to SEQ ID NO: 37426
  chr2:46925738-46925768
  hyper

SEQ ID NO: 105880 - DNA, 57 bp, Homo sapiens
  chr2:46926175-46926232
  hyper
ggccttcacctacccgcctccggattggccgctaggaatcccgcccctctaaagccc

SEQ ID NO: 105881 - DNA, 30 bp, Homo sapiens; identical to SEQ ID NO: 37427
  chr2:46926995-46927025
  hyper

SEQ ID NO: 105882 - DNA, 546 bp, Homo sapiens
  chr2:47142870-47143416
  hyper
ctccgaagcagacgcgaagccctccaacgtgagcctcaccagcccccgtccccaaaacgctcttcctcggcttcgccccgccccccccccccccccgacctgccctgcgcacgcgcgctccctgccgcccgcccattggcgccgccgggcccctcccgctggcggcggcgggctgtgaggacggctcgcgtgagtccacgtgtaatcggcccgggcccagcactggcgggactgacgcagttcttctacctgctttcccaagggcgacactcggctccactccagttgggccgctggacgccctaggggcccggcagttgctaggcaacgccggaagccctcaggaacgtagttccacgggcgacgtaggatggcggatccggatggggcggaccccaaagctggctcccaactccgctcaccccctcctatacagggctcttggttcaggtctcttggttcgtcctgctgcaagttgggaagaaagataataggaatgctaattccttcttgatgaaacgaccacaacacgctggagccggcctt

SEQ ID NO: 105883 - DNA, 82 bp, Homo sapiens; identical to SEQ ID NO: 1481
  chr2:47167905-47167987
  hyper

SEQ ID NO: 105884 - DNA, 123 bp, Homo sapiens
  chr2:47168425-47168548
  hyper
gttgctcctgtacgcgtacgggccgctcggccggagccgcagcccggaggcgccgggcggtgcgctgggagctgctggtgctgctgctgctgctgctgcccaccctccgccgcccgggccccc

SEQ ID NO: 105885 - DNA, 98 bp, Homo sapiens
  chr2:47169105-47169203
  hyper
ctaactctgtctaccgtgaaatggtggtatctgcatatcatgagatcagtgcattggctggactctgccccccaccgcggtccgagggtggggtgtcc

SEQ ID NO: 105886 - DNA, 30 bp, Homo sapiens
  chr2:47402892-47402922
  hyper
gagcagctggagctcgagcggggccgagcg

SEQ ID NO: 105887 - DNA, 43 bp, Homo sapiens
  chr2:47403981-47404024
  hyper
ttgtacctgcaatgcgtcactgggactcgcagccgccgccggg

SEQ ID NO: 105888 - DNA, 483 bp, Homo sapiens; identical to SEQ ID NO: 37431
  chr2:47499350-47499833
  hyper

SEQ ID NO: 105889 - DNA, 329 bp, Homo sapiens; identical to SEQ ID NO: 1483
  chr2:47596114-47596443
  hyper

SEQ ID NO: 105890 - DNA, 27 bp, Homo sapiens
  chr2:47596455-47596482
  hyper
cgctagtccttcggcgagcgagcacct

SEQ ID NO: 105891 - DNA, 343 bp, Homo sapiens; identical to SEQ ID NO: 1485
  chr2:47596505-47596848
  hyper

SEQ ID NO: 105892 - DNA, 41 bp, Homo sapiens; identical to SEQ ID NO: 37435
  chr2:47596941-47596982
  hyper

SEQ ID NO: 105893 - DNA, 764 bp, Homo sapiens
  chr2:47629777-47630541
  hyper
gtgtagaataaacccgtaatcccgatgttggcagtttgcttagaaagaaaaagggaggcagtcggagaggggcacacgttttaacaaaatactgggaggaggaggaaggctagttttttttttgttttcaagtttccttctgatgttactcccatgcttccgggcacattacgagctcagtgcctgccggaaatctcccacctggtggcaacctacccttgcatacaccccacccaggggcttcaagccttgcagctgagtaaacacagaaaggagctctactaaggatgcgcgtctgcgggtttccgcgcgacctaggcgcaggcatgcgcagtagctaaagtcaccagcgtgcgcgggaagctgggccgcgtctgcttatgattggttgccgcggcagactcccacccaccgaaacgcagccctggaagctgattgggtgtggtcgccgtggccggacgccgctcgggggacgtgggaggggaggcgggaaacagcttagtgggtgtggggtcgcgcattttcttcaaccaggaggtgaggaggtttcgacatggcggtgcagccgaaggagacgctgcagttggagagcgcggccgaggtcggcttcgtgcgcttctttcagggcatgccggagaagccgaccaccacagtgcgccttttcgaccggggcgacttctatacggcgcacggcgaggacgcgctgctggccgcccgggaggtgttcaagacccagggggtgatcaagtacatggggccggcag

SEQ ID NO: 105894 - DNA, 30 bp, Homo sapiens
  chr2:47630772-47630802
  hyper
tcacggagtgtttacgtcgtgccaggcatt

SEQ ID NO: 105895 - DNA, 156 bp, Homo sapiens; identical to SEQ ID NO: 37437
  chr2:47635538-47635694
  hyper

SEQ ID NO: 105896 - DNA, 280 bp, Homo sapiens; identical to SEQ ID NO: 37438
  chr2:47637231-47637511
  hyper

SEQ ID NO: 105897 - DNA, 148 bp, Homo sapiens; identical to SEQ ID NO: 37439
  chr2:47639551-47639699
  hyper

SEQ ID NO: 105898 - DNA, 151 bp, Homo sapiens; identical to SEQ ID NO: 37440
  chr2:47641406-47641557
  hyper

SEQ ID NO: 105899 - DNA, 135 bp, Homo sapiens; identical to SEQ ID NO: 37441
  chr2:47643433-47643568
  hyper

SEQ ID NO: 105900 - DNA, 201 bp, Homo sapiens; identical to SEQ ID NO: 37442
  chr2:47656879-47657080
  hyper

SEQ ID NO: 105901 - DNA, 111 bp, Homo sapiens; identical to SEQ ID NO: 37443
  chr2:47672685-47672796
  hyper

SEQ ID NO: 105902 - DNA, 125 bp, Homo sapiens; identical to SEQ ID NO: 37444
  chr2:47690168-47690293
  hyper

SEQ ID NO: 105903 - DNA, 152 bp, Homo sapiens; identical to SEQ ID NO: 37445
  chr2:47693795-47693947
  hyper

SEQ ID NO: 105904 - DNA, 99 bp, Homo sapiens; identical to SEQ ID NO: 37446
  chr2:47698102-47698201
  hyper

SEQ ID NO: 105905 - DNA, 247 bp, Homo sapiens; identical to SEQ ID NO: 37447
  chr2:47702162-47702409
  hyper

SEQ ID NO: 105906 - DNA, 206 bp, Homo sapiens; identical to SEQ ID NO: 37448
  chr2:47703504-47703710
  hyper

SEQ ID NO: 105907 - DNA, 249 bp, Homo sapiens; identical to SEQ ID NO: 37449
  chr2:47705409-47705658
  hyper

SEQ ID NO: 105908 - DNA, 177 bp, Homo sapiens; identical to SEQ ID NO: 37450
  chr2:47707833-47708010
  hyper

SEQ ID NO: 105909 - DNA, 451 bp, Homo sapiens; identical to SEQ ID NO: 37451
  chr2:47709916-47710367
  hyper

SEQ ID NO: 105910 - DNA, 780 bp, Homo sapiens
  chr2:47747970-47748750
  hyper
gtgactgagagaagcaaaccacgcccggcggccccgcggcctggagagggtccccggcgcgggcggacgggcggtctacctggaggcgctggtctcggccagccggttgttcatgatgcccagcgcgcccacgccgcccgagaagccgttctggcgcgtgttgacgcacacgctgcgcgggtagccgttggccgtctccgacagctgcttctgcagcagcgccagcgacaccttgttggaggccgtgaggtcgcgcatggagatgagctcgcccgagaggcggcggccctcggcgtcgctgtcgcgggccgcggggtcggcaccgagcgcggccaggcggcggcgcagccgggagcctggggtgatggcattgcgccgggccaggggcgcgccaggagccgggcagcagcgcgcgcagcagcggcagctcagcttgcgcagcatccagttgagcacctgcttgatgaggatggagatgacgttgaagagcgagtaaatgcagcacacgccgagcaggatgaagaggaagttgcccaggcggtagagcccctggttccggtaggcggcgtgctggctgctcaccaggtccccgaagccgatggtgctgaaggtgacgaagcagaagtagagcgagtccacgtagtcccagccctccacgctggtgtacatggccgaggcgcagcaggacagcagcacggcgaacaggcccaggatgagcagcacgtggtacaccgagggcttccagcccgccaggctgtcggcctccgagagcgcggagcc

SEQ ID NO: 105911 - DNA, 2288 bp, Homo sapiens; identical to SEQ ID NO: 37453
  chr2:47796744-47799032
  hyper

SEQ ID NO: 105912 - DNA, 21 bp, Homo sapiens
  chr2:47799123-47799144
  hyper
cggctgcgggtgctcctctgc

SEQ ID NO: 105913 - DNA, 193 bp, Homo sapiens; identical to SEQ ID NO: 37455
  chr2:48009755-48009948
  hyper

SEQ ID NO: 105914 - DNA, 413 bp, Homo sapiens; identical to SEQ ID NO: 37456
  chr2:48010219-48010632
  hyper

SEQ ID NO: 105915 - DNA, 36 bp, Homo sapiens; identical to SEQ ID NO: 1489
  chr2:48011382-48011418
  hyper

SEQ ID NO: 105916 - DNA, 198 bp, Homo sapiens; identical to SEQ ID NO: 37458
  chr2:48018064-48018262
  hyper

SEQ ID NO: 105917 - DNA, 171 bp, Homo sapiens; identical to SEQ ID NO: 37459
  chr2:48023031-48023202
  hyper

SEQ ID NO: 105918 - DNA, 2546 bp, Homo sapiens; identical to SEQ ID NO: 37460
  chr2:48025748-48028294
  hyper

SEQ ID NO: 105919 - DNA, 267 bp, Homo sapiens; identical to SEQ ID NO: 37461
  chr2:48030557-48030824
  hyper

SEQ ID NO: 105920 - DNA, 119 bp, Homo sapiens; identical to SEQ ID NO: 37462
  chr2:48032047-48032166
  hyper

SEQ ID NO: 105921 - DNA, 91 bp, Homo sapiens; identical to SEQ ID NO: 37463
  chr2:48032755-48032846
  hyper

SEQ ID NO: 105922 - DNA, 751 bp, Homo sapiens; identical to SEQ ID NO: 37464
  chr2:48033341-48034092
  hyper

SEQ ID NO: 105923 - DNA, 228 bp, Homo sapiens
  chr2:48131258-48131486
  hyper
gtataacaatgaaaccgtttttaaggaaataatgtataattttaaaaaacatttaatctcaatccctttaaccaatggaggtgtgacaacaaacgcatgtaaaattaaccttaatccgccaactaaaacacgcaaaatgtctcctaacaattctcctcctccttaaaacaacaaccgtacacataaatacggttctgacctctaccactactgcgaacagctaattaa

SEQ ID NO: 105924 - DNA, 17 bp, Homo sapiens
  chr2:48131692-48131709
  hyper
cacaacacacacacgcg

SEQ ID NO: 105925 - DNA, 30 bp, Homo sapiens; identical to SEQ ID NO: 1490
  chr2:48132059-48132089
  hyper

SEQ ID NO: 105926 - DNA, 30 bp, Homo sapiens
  chr2:48338710-48338740
  hyper
tgtgcaaaagcacccgagaaattccaggtt

SEQ ID NO: 105927 - DNA, 31 bp, Homo sapiens; identical to SEQ ID NO: 1491
  chr2:48339288-48339319
  hyper

SEQ ID NO: 105928 - DNA, 30 bp, Homo sapiens; identical to SEQ ID NO: 1492
  chr2:48541249-48541279
  hyper

SEQ ID NO: 105929 - DNA, 30 bp, Homo sapiens
  chr2:48542659-48542689
  hyper
gcctcctttggggccgtggttacctttgcc

SEQ ID NO: 105930 - DNA, 56 bp, Homo sapiens
  chr2:48543150-48543206
  hyper
gattgtgacagccacgtggccggctgagtgtaatagagtgcgctagcggcactagg

SEQ ID NO: 105931 - DNA, 30 bp, Homo sapiens
  chr2:48667624-48667654
  hyper
aatgtttcttcttccggccctctggtcttc

SEQ ID NO: 105932 - DNA, 30 bp, Homo sapiens
  chr2:48668130-48668160
  hyper
ggctcaggagtactcgaaggtacccatcgt

SEQ ID NO: 105933 - DNA, 153 bp, Homo sapiens
  chr2:48756955-48757108
  hyper
gcttcaagagggcatcgaaaggtaactcatagacttaccgcccccgccccccgacttttgcaggagggagcgctctcccctcctctgggaggctggagactcggggacagaagatgcgctggagggaagagaacggagcgtcggacaccagaa

SEQ ID NO: 105934 - DNA, 464 bp, Homo sapiens
  chr2:48757429-48757893
  hyper
gtctgggaaagtttgcgggcgccccgggacgcgggcatctccagggccgctcggcgcctccccatctccccgcgcccgccctggccgcccccaggggcgccctggggcccgcagagggatggcctcccggcagggactcctcggctcccctctgttctgagactgctgctgggaccggggtccgactctaaagagaaaactcaaacagcaaaaaaaggaatatcgactcagttccgagggcgggggccggggctcgttctcacccgcgcgcggcccctcgacctctcggacccgggccaccagctctgcgcccctcacgcctccctcggggtctctgtgtctctctcccgctcccggactccctcctccttctgactgctgttatttgggctgttgtccctccccgctccctggtacctcagctcggaccttagcctgtgcctgcagcccggagtcccctcctg

SEQ ID NO: 105935 - DNA, 30 bp, Homo sapiens
  chr2:48982034-48982064
  hyper
gtgcgcgggtgccagcggcagggcacaggg

SEQ ID NO: 105936 - DNA, 124 bp, Homo sapiens; identical to SEQ ID NO: 1493
  chr2:48982576-48982700
  hyper

SEQ ID NO: 105937 - DNA, 152 bp, Homo sapiens; identical to SEQ ID NO: 1494
  chr2:48982753-48982905
  hyper

SEQ ID NO: 105938 - DNA, 133 bp, Homo sapiens
  chr2:50573243-50573376
  hyper
ctaattaagggaaggcgtgggggcaaaagtaattggcctcctgttgagtgagtcccaggactgcttcgctgtcactgcagtctgggcgcactttggaggaatgtgcgggctggaatctctccctccccgcccc

SEQ ID NO: 105939 - DNA, 154 bp, Homo sapiens; identical to SEQ ID NO: 37473
  chr2:50573484-50573638
  hyper

SEQ ID NO: 105940 - DNA, 664 bp, Homo sapiens; identical to SEQ ID NO: 37474
  chr2:50573691-50574355
  hyper

SEQ ID NO: 105941 - DNA, 283 bp, Homo sapiens; identical to SEQ ID NO: 1498
  chr2:50574401-50574684
  hyper

SEQ ID NO: 105942 - DNA, 375 bp, Homo sapiens; identical to SEQ ID NO: 1499
  chr2:50574738-50575113
  hyper

SEQ ID NO: 105943 - DNA, 252 bp, Homo sapiens
  chr2:50629606-50629858
  hyper
aatagaatgtgggggcgggaaacaacccttgaaacggtaatcagcaagtaaagctgaattcctatgccatagtgtcccctgctggtcgattacggaagtagtagctttcggagagcaagtcaaacctcttggttaggccatatcatgttttgaacaaaaaaggcacaaaaacgaaaggaatgtgtgcatattgttttttgtctatttctttttacatagtcatcattggcagtgggacgaatgggggaagga

SEQ ID NO: 105944 - DNA, 591 bp, Homo sapiens
  chr2:51259210-51259801
  hyper
ctgccttttcagaggcgtcaggcttgagcgtctatctccaggagtgcgggaggggagaacaggcaacggaggggagcaggaggaggaggaggaggagaaggaggaggagggggaggagagggaaagagctgggaaggaaaaggcggtggtggagcctgagaaggctgggttacgtgacgccgggtgctgtccttctgaaagagaagggcggagctgagctctccgcagtaccatggagagcggcgggcccgtcctttggctggggaatgggtgggctcggcccgtggtcgcagcccctccaggtctggatgctgcggagcgaggtgcttttacctttgcatcgtccccttgcagggggagcctgatcctgggggcggggaccttccgcaagcgcttctaacttgtcaccaccctctcttccccatcggaaagaaagaaagagagagagagagagagagagagagagagagagagagagagaacgaacgaacacgaaccagagaaccacgtagcctactgagcatgcccaggcccctgctagacccatggaaagctgtatggagattccacttctccggggtttggtagtga

SEQ ID NO: 105945 - DNA, 30 bp, Homo sapiens; identical to SEQ ID NO: 37479
  chr2:53340315-53340345
  hyper

SEQ ID NO: 105946 - DNA, 30 bp, Homo sapiens
  chr2:53994841-53994871
  hyper
agctgactgagatccgctcggaaaatcttt

SEQ ID NO: 105947 - DNA, 30 bp, Homo sapiens; identical to SEQ ID NO: 1502
  chr2:54013787-54013817
  hyper

SEQ ID NO: 105948 - DNA, 30 bp, Homo sapiens; identical to SEQ ID NO: 37481
  chr2:54015303-54015333
  hyper

SEQ ID NO: 105949 - DNA, 30 bp, Homo sapiens; identical to SEQ ID NO: 37482
  chr2:54197241-54197271
  hyper

SEQ ID NO: 105950 - DNA, 30 bp, Homo sapiens
  chr2:54198323-54198353
  hyper
tcaccggcccagcgcgaggctgcctcaccg

SEQ ID NO: 105951 - DNA, 30 bp, Homo sapiens; identical to SEQ ID NO: 37483
  chr2:54342569-54342599
  hyper

SEQ ID NO: 105952 - DNA, 30 bp, Homo sapiens
  chr2:54342946-54342976
  hyper
aaagctgtgagaagcgcctcccacctaaag

SEQ ID NO: 105953 - DNA, 30 bp, Homo sapiens
  chr2:54557889-54557919
  hyper
tcgccgcgcagtcgcgcacagtgagcaaca

SEQ ID NO: 105954 - DNA, 42 bp, Homo sapiens; identical to SEQ ID NO: 1503
  chr2:54682462-54682504
  hyper

SEQ ID NO: 105955 - DNA, 141 bp, Homo sapiens; identical to SEQ ID NO: 37485
  chr2:54683031-54683172
  hyper

SEQ ID NO: 105956 - DNA, 30 bp, Homo sapiens; identical to SEQ ID NO: 37486
  chr2:54684119-54684149
  hyper

SEQ ID NO: 105957 - DNA, 20 bp, Homo sapiens
  chr2:54784816-54784836
  hyper
ttcccacaatgccttgcaaa

SEQ ID NO: 105958 - DNA, 1162 bp, Homo sapiens
  chr2:54784958-54786120
  hyper
cgaacttacacctcccctggctgtggcgctgcacagcgccctgagagtgactttgtctgacttcttcccggtggctcgccgggccgccgccgcgtggttggcgccagcgcactggggcagtcgcgcgcgcccaggtgcgggccgcgttacctcagcagacgctagagagtgaatgagccgcgcgggcccgggacccttggggctcttcactctccaggccgtcccgtgggcgcgctagccttttcaagtgatagtaatcggagacttttccgttacatgaggctcaacaaaagattgtaattccagcagctctgtttgggaaggcactaccgcggcgagtccagggcccggccgggggtcggcggctgccgggcggctggggcgaccgcggaccgtgcgggaccggtagggggtcgcgggccggctaggctcccccgcgcccctcctcgtggtatagcctgcatttctaatacaatgctgttatgctaatcaggtgacatcaccgcccagcacacggcgagtggctcctgataaaattacaaaccggcggccgccgcgggcagctgggaggaggtgtgcgcgctgcgcccgcgagctcccgggctcggcaaccgtggcatgcttaggattggccatatttaaaagttctgaagtagaacctgcgcctcctctctgcttctccctcctcctcagtaatttatttcgagcttccaggcaagggccacggaagaagggaaagcaagaaattagatgcctgtgtggtaactcctcgcggagctaaggtggactctcttgcagccaacttcccatcagatcaccctgctggacttgcagaccggaatggggctcgcctaaggagccgagcgctgcggaggctgctgcgtgttggatgggagtgggagggggctggagcgagatttccagggcgcagtcctccggggcgttacgccgggcataatggaattgcagaggacgtctagtatctccgggccgctgtcgccggcgtacacggggcaggtgccttacaactacaaccagctggaaggcagattcaagcagctgcaaggtaagccccctcccaaaggccgggcctgtcctgggtgccaacgggggttcttggaggctttatttgtgaccctaatgaagacgggcggcttcacag

SEQ ID NO: 105959 - DNA, 30 bp, Homo sapiens
  chr2:54786344-54786374
  hyper
tatttgattccgggtcgcctctggctccca

SEQ ID NO: 105960 - DNA, 426 bp, Homo sapiens
  chr2:54798137-54798563
  hyper
ctataaaggtttaaacgacttgctgtacaattcagtcttgcaatgacagagagattacacactatctgcaaacaactgccaagcagatgaaatcctggctgtgggaagtctgcggtgaagagtggtgggggtggtcaggagagcagtggaagggaagtggctcagaacattgtagtggtggtttggcgtgcctgtcaagggctgtgggacgttttctctctcatttcagaaacaagggtggtgggaaacacatgggccgtggatttgcataaaccaacagtcaaatcctagctctaccagtgacttcactgagcctcattttcttcagggggaaagaataaatagcccttggggtgattgtaaagcctaattaggtatgttataattgtattaagaggatgacgagttcaccgtttgccagggagt

SEQ ID NO: 105961 - DNA, 94 bp, Homo sapiens
  chr2:54950041-54950135
  hyper
ttagctgttcatggcgtgagcaccttcctgcttccaacctccggttatctgtaaatacccaagtcctctaatttaggacgcaggtcatgggaag

SEQ ID NO: 105962 - DNA, 30 bp, Homo sapiens
  chr2:54950664-54950694
  hyper
gtcctccggggcgtcgctgtttccaagcgg

SEQ ID NO: 105963 - DNA, 460 bp, Homo sapiens; identical to SEQ ID NO: 1506
  chr2:54951618-54952078
  hyper

SEQ ID NO: 105964 - DNA, 30 bp, Homo sapiens; identical to SEQ ID NO: 1507
  chr2:54952331-54952361
  hyper

SEQ ID NO: 105965 - DNA, 90 bp, Homo sapiens
  chr2:55276441-55276531
  hyper
aggagcaacccagacgggtagacaaaagcacctcctaaaaatatctgggtgccaaggcctttccttcctcacctcgaagcccaaccaacc

SEQ ID NO: 105966 - DNA, 30 bp, Homo sapiens; identical to SEQ ID NO: 37492
  chr2:55278254-55278284
  hyper

SEQ ID NO: 105967 - DNA, 200 bp, Homo sapiens
  chr2:55459597-55459797
  hyper
taaaacatcttttacgttgcttaaacctacagtttcgaaagcattccgaaggctaaagtgagaaataagcccaggctagggagaggagaaacgaagttcacgtcctagtctggcaccgggttggattgtcgctgggacggcagtcaggcatttggtgtggtcgcctaaggggtgggtccttcggcgggagctccgggaaa

SEQ ID NO: 105968 - DNA, 376 bp, Homo sapiens
  chr2:55496129-55496505
  hyper
tcgtgaatgcctaacgtgggctcacgcagggattaaatgcatcttggaaaggcttccgaacgcacaatgtttatgaagttcgcgtgatttgtgccactgacacgttaggcgaaacaacacacaccacctgcaccggacaaccctggttaagggatcctacccacttaactcctacctacagccccgggcccctggattctgagcacgggcggagatcaccttctggacccggaagaatggtcggtaggtcagtccgtccccgctacggtccccgccgggcttccggtcccgctggaaaaggttctttccggaattcagagagttgctgtcgccgctgggggtgggactgtctgcggtgtccgcggcgggcgtccag

SEQ ID NO: 105969 - DNA, 582 bp, Homo sapiens; identical to SEQ ID NO: 37495
  chr2:55509212-55509794
  hyper

SEQ ID NO: 105970 - DNA, 872 bp, Homo sapiens
  chr2:55646266-55647138
  hyper
gaattggtcactaaacgtggaagtaagtagaaatcaatgaaagtccatttcggcaagggagaaaaatcccatcgtggaggaggggggcactctccctcctcaaaaaacaccccagagtgaaacgagccgaaatcccaagaagtggcttcgacgacggacaccacgagcagcagcctgcgctggaaatgtctgtaccgggcgaggaggggcagagaaaaggcatctggaggaggaggaagggaaagggggctggaacccaagacaaaaagcccgtcaaggttgtccagctcctggaggatccagaccagcgaaactgctcccaatgaatcaatcccaacgggggctaaatgaaatacgttaaacagagaccacgttaaggataccgaggcgccaccagactcgacctcggcgttccgacctctacacgttccacccaccgatgggcatggagccgctttcgacccgcggagcctccactgcccgcagcccctcagtaccaacaggcagggctcgccccttccccccgagcagacaccattcctccgccgccctcaagcctcgcctccagcccccttcccctcccgggggtgggggcttgaatgtgtgtccctaaccccccagcttcctaagccctgccagcctttcagcgcgtctctgggaatccctggcacaaaatcaccgccgcgctccagccttctccgccctctatggagaagccggagtaacggcctcagaaccgcagtgccgcatcacaccccacccctcgccgcccgccagcgccgcccgccaatgccgggggccgccgtcaaagggagcgcgctgctccctccgcgccgatatccttccgccgactccccgcccctcccgtgcag

SEQ ID NO: 105971 - DNA, 53 bp, Homo sapiens
  chr2:55746534-55746587
  hyper
gcccgtctactgcgcgttttctaaaccttggctcctacgcatttatcagaaga

SEQ ID NO: 105972 - DNA, 30 bp, Homo sapiens; identical to SEQ ID NO: 37497
  chr2:55746810-55746840
  hyper

SEQ ID NO: 105973 - DNA, 30 bp, Homo sapiens; identical to SEQ ID NO: 37498
  chr2:55843757-55843787
  hyper

SEQ ID NO: 105974 - DNA, 30 bp, Homo sapiens; identical to SEQ ID NO: 37499
  chr2:55844279-55844309
  hyper

SEQ ID NO: 105975 - DNA, 30 bp, Homo sapiens
  chr2:55844791-55844821
  hyper
ggggctacggcggccgacaagtcccatgag

SEQ ID NO: 105976 - DNA, 30 bp, Homo sapiens
  chr2:55845698-55845728
  hyper
ggtggatatagtcacgcgctgggtcgtagt

SEQ ID NO: 105977 - DNA, 71 bp, Homo sapiens
  chr2:55921038-55921109
  hyper
cgtttccgcggtgcccgagggacgccggggtaacggaaaccttggccaccttctacgaagactagagaggg

SEQ ID NO: 105978 - DNA, 221 bp, Homo sapiens; identical to SEQ ID NO: 37500
  chr2:56149728-56149949
  hyper

SEQ ID NO: 105979 - DNA, 314 bp, Homo sapiens; identical to SEQ ID NO: 37501
  chr2:56150221-56150535
  hyper

SEQ ID NO: 105980 - DNA, 513 bp, Homo sapiens; identical to SEQ ID NO: 37502
  chr2:56150681-56151194
  hyper

SEQ ID NO: 105981 - DNA, 1846 bp, Homo sapiens
  chr2:56410765-56412611
  hyper
gatccctccaaatacgaagcacctcgcatttgggtcagcagctgtttcccctgcctggtgacaaggccggtgtgcagagggcagaggagggagcttcttccgccacacggtggcgcgcgcgagcctcccaaagaccgggcggccacagctcctcaccttctccccattccagccccacccgcccgggcgcagaaagagccgcgcccccagccctcccgggcaggacagccgggagcgcacctcgagggcccgggcagcggtcgagtggcagctgcgtccagcccatgcgggagctgctgcgggttacgggtggccccagctccaggctcctcctccagccggtcccccaccctccaccccttctcgactccgctctgcaaatcgaaggctttccggagcagcctaggagcggccgcgggcgcagcgaaggcggcaggaggagcgcagcagccttcgggcagccgcggcggcgtcgctagagcagccggggaggcgccgcggtgcccggcgcgccctccaagctaggagaggggagaagccgggggctgcagctgggcaagggggaggaaagtgcgtgtgcgtgcacgcctgtgtgcagggcagagagtgcggggggcgacagtctcggcttagggcggaggagagggcaggggaacggcggtgcagctcccccgctgtccccgaggatttcccgcggcagccccgggctccccagtgcccctcaccatggacttgcgcggagttgggacgggcctcggcagcagcaagcggctggctgccgggccctgggggagcgcgggcgcgcgcgcggggatggcgaggtaggatggccacccagcgcgacccccgccgccccaacccagcggcccctgggcggtgccgctgactcgccggagcgcacaggggtgtgggcggaggcggcctcgccgcgcccgcgccttcgggagtcgcctcgcctcttccacccacttgcacctgccaccccgcggataccatgtcgaaggcggccggaggcgcggcggcggctgcggcggcggcggaaagttgttccccagccccggccggctcgtccgcggccccgcccgcgccggtggaggacctgtccaaagtgtcggacgaggagctgctgcagtggagcaaggaggagctgatccgcagcctgcggcgcgccgaggcggagaaggtgagcgcgatgctggaccacagcaacctcatccgcgaggtgaaccgccgcctgcagctgcacctcggcgagatccgcggcctcaaggtgagcgcgggccaggtggggaggcgcggcgcggctgggagcggggtgccccgaggaggaggcggggccaggcaaactttccctccctccctcaacaggtgaccctccccttctcccggtcggcaccccctacccccagtccccagcccctgtgtaacttttccaaacttcggaggcgtctgctcccctcctctccccaacacggggcgctccactgtctggctgttcggggaggcgctgaggacgctggaaagcagggagggaggtgaagggcacgcgaacctttcatttcttagggaggctggaaaatctgtgcctggggagccgggtttcagtcagttaggcggaaaggccagtgagggggtgaatccaggggatcttcgccttggagggtcgggaatgcggctgctctgggccagcagctcttgggcgggcagagggcgaggaaagggcgccactgccagggagagcggctggcggggcgcccgggagaagcagcgggcgccaccctcagagcagtcttgtgtcaccgggtacataggagttcaagctctgccttcacgtcttctcccaatt

SEQ ID NO: 105982 - DNA, 194 bp, Homo sapiens
  chr2:56412855-56413049
  hyper
ctccttggagagcgccgggtctgcgaggagtgtgcctgcccagctgcagtacactagtggccgggaaccgccctgctggcgagcaccacaaacttcctctccttccagctagcgctggtgcctcctggtattccttcctctcattgttctgctttgtttgtaggaagccagacacaaacgaaatcactgcaggg

SEQ ID NO: 105983 - DNA, 161 bp, Homo sapiens; identical to SEQ ID NO: 37505
  chr2:58273537-58273698
  hyper

SEQ ID NO: 105984 - DNA, 55 bp, Homo sapiens; identical to SEQ ID NO: 37506
  chr2:58274019-58274074
  hyper

SEQ ID NO: 105985 - DNA, 233 bp, Homo sapiens; identical to SEQ ID NO: 37507
  chr2:58274306-58274539
  hyper

SEQ ID NO: 105986 - DNA, 30 bp, Homo sapiens; identical to SEQ ID NO: 37508
  chr2:58467868-58467898
  hyper

SEQ ID NO: 105987 - DNA, 30 bp, Homo sapiens; identical to SEQ ID NO: 37509
  chr2:58468566-58468596
  hyper

SEQ ID NO: 105988 - DNA, 30 bp, Homo sapiens; identical to SEQ ID NO: 37510
  chr2:58655089-58655119
  hyper

SEQ ID NO: 105989 - DNA, 738 bp, Homo sapiens
  chr2:58655394-58656132
  hyper
ataaataaaagagagcgcgaggggggaaggggagagaagggagagggagcgcctgggactcgagacggcggcaggttcaattagctaaacaaagaaatcatggcggattgtttacatttggcagcgcccgggctgcgccgaccgccggccccgagccgccgcgggctccgaggagtcggccgagctgctcccgcgccctggccgggtaagtgacgccggccgcgggcccggggcggccgccgcgcgcgccacccccgctgcctccccgcccccggcggccccggagcacccccaccatcccctgccccctcccccaccggatcgccccagccccctcctcttgcccccggcgcagctgggctccgcttggatttcggtgacgctgtggctctgttcgtttgctgctgctgctgctgctgctgctgctgcagccagggggaaggggtggggagagttggggtgggggcggcagagcagtgtggagagcagtgcccctccactcgtttgttgcctcttggggtcaggacctccccgcctgggccagcccagcggacggccccggtgcgcgctcgccttgcgccaccgcctccgggacccaggcggagcgcgccactcagcccgggaggtggggccgggcagtgaccccgcgcgaagtgccagtgcggagggcgggggtggttaccgaaagatgtaatcccaggaggggccgccgccttcgctgtcccctacctgtaccct

SEQ ID NO: 105990 - DNA, 102 bp, Homo sapiens; identical to SEQ ID NO: 1521
  chr2:58776939-58777041
  hyper

SEQ ID NO: 105991 - DNA, 30 bp, Homo sapiens
  chr2:59529085-59529115
  hyper
ataccacagtgagtacgtcagtccccgtct

SEQ ID NO: 105992 - DNA, 30 bp, Homo sapiens
  chr2:60776698-60776728
  hyper
ctgcaggctcccgccgcgcttgctgcgaac

SEQ ID NO: 105993 - DNA, 30 bp, Homo sapiens; identical to SEQ ID NO: 1522
  chr2:60777404-60777434
  hyper

SEQ ID NO: 105994 - DNA, 217 bp, Homo sapiens
  chr2:60777862-60778079
  hyper
gacccaggagggagaggggtacgagggagcagcctggactgcgcgccccggtctgtcctttgagcccccactgcatccttccgaagaagggcctgactttcccgagtcctgcgaacactgcccttccttcccgccggtacctggccgggctgtaacttcacaccgccgcgcgccgcgtctgatccgcatccggcgcggccgggggagttgggggcgg

SEQ ID NO: 105995 - DNA, 30 bp, Homo sapiens; identical to SEQ ID NO: 37515
  chr2:60779314-60779344
  hyper

SEQ ID NO: 105996 - DNA, 176 bp, Homo sapiens; identical to SEQ ID NO: 1523
  chr2:60780328-60780504
  hyper

SEQ ID NO: 105997 - DNA, 30 bp, Homo sapiens
  chr2:60780739-60780769
  hyper
acgtgacgtccctgcgaacttgaacgtcag

SEQ ID NO: 105998 - DNA, 30 bp, Homo sapiens; identical to SEQ ID NO: 37517
  chr2:60781114-60781144
  hyper

SEQ ID NO: 105999 - DNA, 30 bp, Homo sapiens
  chr2:60781509-60781539
  hyper
gtccggaagggcagcgcccaagtctccagg

SEQ ID NO: 106000 - DNA, 176 bp, Homo sapiens; identical to SEQ ID NO: 37518
  chr2:60782017-60782193
  hyper

SEQ ID NO: 106001 - DNA, 90 bp, Homo sapiens
  chr2:60782777-60782867
  hyper
cggctgtttattcctgtttcgtcttagtaaagtttcaagtctactgtgttagaaaatgactggcttgcctagctcggcggagcttcggac

SEQ ID NO: 106002 - DNA, 1093 bp, Homo sapiens
  chr2:60783806-60784899
  hyper
agcagcgacgattccccgacatatatttaatttcaccatcataatatgcccagggtgaaatgggaagtgccctccgctcccgcccctcccccagccagatttcacccagtccagaaaaccacggctgtgtgtcggcatttgatccctcctggtcgtcgacccccctccccggcccctggtgccctcccctagggcgacaacccctccctcagcactgctggatgctcgctaaagagcccgaaagtgggggaggggagggtttgtatgtgtgtttaaagaaagatgtgtcgttttaagagattttaaaatattacgtaagtattgattaatgatgcaggtggttttgtagagggggtgaaaggtcactttaaatgcgcacacttggatacacaataagtatatttacctttccagaagtggcttttagaaagtaataaattatgacaacgttaaaattattttctggccgttcagttaacttcgtttggggctgtagagctgttgctgctcccattgaaagggtaattacgttccgtgggctctttcccaaacctttggtgacgacactgcgtgtaaactccaggccagcagacgacccctccccttccctcctccccctttttatcttgcccgcggaggagacgccccaggacttcctgcagtatatattctgcctctgatctccgtacttaatagccaagtcctagtttatgctttataatgtgttgacaagttttctaacagactttctgaaataatgcacatatattcacgtcggttagaaacccaccgtatttttagagttgagtagatctataccctaatgcagtgagagagtgtaaatcatacaggatttcatagtcctttcagtagttttcggtatgaagtatgagccgcgtggcctccagacgtaaccttttagaaaaaaaaaaagacagtgcttttattttatggtgtaaagtgcttttagctcaagggctctgaacgtgaatgtggtcaacaaacagctcgaagagggagacttaatacagtcccagccctcggaccgaggatcgcctggcgcgaggaactcgggctgagctggaagatgaag

SEQ ID NO: 106003 - DNA, 324 bp, Homo sapiens; identical to SEQ ID NO: 37521
  chr2:60796320-60796644
  hyper

SEQ ID NO: 106004 - DNA, 624 bp, Homo sapiens; identical to SEQ ID NO: 37522
  chr2:60796703-60797327
  hyper

SEQ ID NO: 106005 - DNA, 406 bp, Homo sapiens
  chr2:60808826-60809232
  hyper
agccaccccagctcgcgcggggccgggctttggggtgtgagagctgggacgggagtcgggtggatgcctggccggagccgccagctcccctcgtcctctttgcttgtcctttagcacaagggcgagcagcgtaggacaaagactcgggcggcagctgcctggttcggcgcgcaggggcggcctcggccacccggggcgcccgccgcctccaccgccccgcgggggaggcccgatgcccgtctttgtctgtgccgccgccgtgggccgggtccgcaggaagcgggcgccatcgtgcggcctgagctggacactgcgcccccggaggcgcggaggcgcgaaccaccaagcgtggctccaagctccacggggacgctggtgtcatcgtggccacgactgcttgtactgt

SEQ ID NO: 106006 - DNA, 333 bp, Homo sapiens; identical to SEQ ID NO: 37524
  chr2:60962744-60963077
  hyper

SEQ ID NO: 106007 - DNA, 253 bp, Homo sapiens
  chr2:60983179-60983432
  hyper
aatttccttccaagcggtctaccggcattgacagtaccgcggacaaaggagagtaccaaataaatactccttcgaaccaacggtatactgagagccctgagcttgtgggcggggccccggagcctcccgggacctaaaggcagagggggcgtggctgagggtggtccagacctccaggggcggggctgagacctgcgagaggcaggctgggaagcggcgccatattggcgtcggccgcgctgtattgtcataa

SEQ ID NO: 106008 - DNA, 214 bp, Homo sapiens
  chr2:61108071-61108285
  hyper
ggggggggggtccccgtatgcaaatacaggaattacagaagaagacaggacccccgccgcagcaccacttccccctacagggcgcaacgtcccgccgctggcgcgggggtggagatttgcatgtgcgaagtcgggaagagggggaaccacctctcgaaaaccccggccgtcgccctcccaggccgggagagtcggccccgcgcgcccccaaaag

SEQ ID NO: 106009 - DNA, 379 bp, Homo sapiens
  chr2:61109140-61109519
  hyper
tgcttcagggtttgcgtgcagaatccaagccacgctctgtaattcgatcctgttgtcatagcaggaaccttagaaattcccaacgacttgattttaggattagggaagtcataagcgaaccaaaggaggacgaagagttctcattaaaaatgtatatgtattgaagatggtggttttatgttttagaacaggaatgaggaaccttcagacctcgggcaagctctctccccctttttagtttaatttcatcaaatgcaaagaggtgatcccccttgtactgacagttgtacaaaatgtgtcacggctttaaaaatcatccgtggtattttaacacgaattagaaaatccgtggtattttaagtgttaatgttgcttcgac

SEQ ID NO: 106010 - DNA, 78 bp, Homo sapiens; identical to SEQ ID NO: 1530
  chr2:61109818-61109896
  hyper

SEQ ID NO: 106011 - DNA, 138 bp, Homo sapiens; identical to SEQ ID NO: 37528
  chr2:61110112-61110250
  hyper

SEQ ID NO: 106012 - DNA, 457 bp, Homo sapiens; identical to SEQ ID NO: 1532
  chr2:61175642-61176099
  hyper

SEQ ID NO: 106013 - DNA, 254 bp, Homo sapiens; identical to SEQ ID NO: 37530
  chr2:61244605-61244859
  hyper

SEQ ID NO: 106014 - DNA, 30 bp, Homo sapiens; identical to SEQ ID NO: 37531
  chr2:61245121-61245151
  hyper

SEQ ID NO: 106015 - DNA, 30 bp, Homo sapiens
  chr2:61245427-61245457
  hyper
ccggaaaggttttacgcaacaggaactcaa

SEQ ID NO: 106016 - DNA, 287 bp, Homo sapiens
  chr2:61293058-61293345
  hyper
cggggttgcgggctcggtagcggcagcttcagggcgcgagcgcgggcggtgccgaccactgcaggtaacagaggcgctgcgagggcagccgcggccctgtggaggtgagcgagacgccgagggggctcgggtgcccaccgcggggcgggaagtgcggcatggggcggtaccgctcacagccagccggctcccgccgcggcttcccaccccgggcggggtcccacttgcccaaacgcccccgaacgcccccgtgcacagcctcagccggccgcgcctcgagcagccag

SEQ ID NO: 106017 - DNA, 30 bp, Homo sapiens
  chr2:61293695-61293725
  hyper
acaaggcttcttcccggtccgggatgactc

SEQ ID NO: 106018 - DNA, 139 bp, Homo sapiens; identical to SEQ ID NO: 37533
  chr2:61404132-61404271
  hyper

SEQ ID NO: 106019 - DNA, 30 bp, Homo sapiens; identical to SEQ ID NO: 37534
  chr2:61697806-61697836
  hyper

SEQ ID NO: 106020 - DNA, 30 bp, Homo sapiens
  chr2:61698724-61698754
  hyper
aggcttttggggtacgggaagcaaggagtc

SEQ ID NO: 106021 - DNA, 30 bp, Homo sapiens
  chr2:61764429-61764459
  hyper
tcgccttcctccaccgccacccgcacacgc

SEQ ID NO: 106022 - DNA, 117 bp, Homo sapiens
  chr2:61765408-61765525
  hyper
gaaccggttgaaaccggttcagactgggagattccatctcggttgagttttcagcccatggcgccgcggagcgtttggaacctgggcctccgcccccagcccgccctcctattggtc

SEQ ID NO: 106023 - DNA, 30 bp, Homo sapiens
  chr2:61766075-61766105
  hyper
atgggggctgcgttcggaaaagggagggca

SEQ ID NO: 106024 - DNA, 96 bp, Homo sapiens
  chr2:61921787-61921883
  hyper
ggaagaggaagtggccgtacaggccgaagccttgtggagcctcagtgcggggcttggccaggtcctagggggcgtggcctcggaggcgaaagcgca

SEQ ID NO: 106025 - DNA, 827 bp, Homo sapiens; identical to SEQ ID NO: 37536
  chr2:61990959-61991786
  hyper

SEQ ID NO: 106026 - DNA, 200 bp, Homo sapiens
  chr2:62081270-62081470
  hyper
gttgctatgggcgccgtaactggggacgctacaggagccgccagggaccaaaagtcacgcaaaatccactcaggctgccagagacccgagtcgggtgcttactggatcatggcagtcagtaccgagtctgttggctggttccgaaggttggcaggctgaacagggcacttattccactcctttgcgtctaaccgcctgaa

SEQ ID NO: 106027 - DNA, 30 bp, Homo sapiens; identical to SEQ ID NO: 37537
  chr2:62115561-62115591
  hyper

SEQ ID NO: 106028 - DNA, 68 bp, Homo sapiens; identical to SEQ ID NO: 37538
  chr2:62115905-62115973
  hyper

SEQ ID NO: 106029 - DNA, 179 bp, Homo sapiens
  chr2:62132599-62132778
  hyper
ctactggaaccaaacggatatttccgtggaggtatcctaaggggatgggtgttgcagagcaaagctgtaagctgccaactctgacccctggggaagccttgcctccaggttccccgaggttccccgtggtggttttgcacaggctatttaggcacatctcggccgccgtggcggggcac

SEQ ID NO: 106030 - DNA, 424 bp, Homo sapiens
  chr2:62422575-62422999
  hyper
ctctgcatgaccccacgaagagaactaaggaccaccccccacccttcctgtcctggacggcttcataagccagaggatccagtggcagtaccaagcagggcaccactctgggtcgtgagcacctaagaggtggagcaaaggtcagaccccagggtggcccaggcctccctcccccgcctccccggcggggccattcctcacccgccccagcactggagggggcggccggggtcggtctagttccggttacaaactggacagaaaaggccactggagtctcgctaggcgatgcgcctagtcccctagcctcagacgaaccgcaagaggggccacccacaactggaggggcggaggctggagctgagtttcattagtgtttttggagctgccaggcatttccaggggggtcgccttcctagaggcc

SEQ ID NO: 106031 - DNA, 30 bp, Homo sapiens
  chr2:62423318-62423348
  hyper
ggagcagtccctgccgccgacaccgccggg

SEQ ID NO: 106032 - DNA, 30 bp, Homo sapiens
  chr2:62423701-62423731
  hyper
ctcccttaccttcccgccgtcccagccacc

SEQ ID NO: 106033 - DNA, 802 bp, Homo sapiens
  chr2:62424204-62425006
  hyper
ccaggctgctagcccgagtcgtgggggtggggtggggcggggtggggtgggtgctgccaggccagggagcgcctgaagccggactctacgagacacccctcgtgggaaggtgggcgtggggggccctgccggggctgcgggcgcgggactggcggctactccagcacggcaggcggacccttctggaggcaataaaccgagtcacccggttaatttccaggccacggtatttgaaactcggggctggggagccgcagaactccctgtacccccatcaagtagaggagccgtcgggagactccccacaagtgtcacagcgtcaaagctcatctttaaaaatatgtacatttataacctgggttggcgaggcggcgctcttctgcccaaaacgtaggggtggttagtttgtagagtgggcttagctcacaggtgcctgagctgtatccccgtggccgcctcagccaccccaacttctcagaaagattgtttagaacaattaaactatattcttttgcccttctcttgttggaaccctaccgtaatatccgatagcgaagccagttggtgaatatagaattctacttgttaaaacaaattcttccggtataattatttgtgcctctggaggtggtaaacgaggtggccgacagggccgggactgggagtgaaaaggcggggaccctggccgagccagtcccggggctccggtgccggcttatagtcgcacccatgcggatctgacagctgacccggagggaggaccggcagggcagggcagggcggtcacttcccattgtcctaa

SEQ ID NO: 106034 - DNA, 638 bp, Homo sapiens; identical to SEQ ID NO: 37544
  chr2:62732952-62733590
  hyper

SEQ ID NO: 106035 - DNA, 274 bp, Homo sapiens; identical to SEQ ID NO: 1538
  chr2:62798172-62798446
  hyper

SEQ ID NO: 106036 - DNA, 98 bp, Homo sapiens; identical to SEQ ID NO: 37546
  chr2:62798511-62798609
  hyper

SEQ ID NO: 106037 - DNA, 30 bp, Homo sapiens; identical to SEQ ID NO: 37547
  chr2:62932081-62932111
  hyper

SEQ ID NO: 106038 - DNA, 3 bp, Homo sapiens
  chr2:63275188-63275191
  hyper
ggc

SEQ ID NO: 106039 - DNA, 182 bp, Homo sapiens; identical to SEQ ID NO: 1539
  chr2:63275326-63275508
  hyper

SEQ ID NO: 106040 - DNA, 1465 bp, Homo sapiens
  chr2:63275877-63277342
  hyper
ggcgcctttcctcggaacctaaggaaggggtatatttcgttgctttctttaaacctcagcacgatcacagtggctccgagccgcgggcggctgaccgcgggcctcgcgggctactcctggtaggggcctgcgcgagcctaaggtgtgtccccgcctgggttagcgctgcgctctgcactgtttcttttcctcttaaagcttctttctcactcactctctccctccttctctctctcattttttccccatttctctcgttcttttattcagctttctctctttctctcccttttgtgaatgggccgcggtgtctttgttctgtagagaagcgcccgtgtcgctgacttttgtgaaccagagaaggatcttgtaaaacctccttttctccttcgtacgcccccactcccacccctcctcccctgcctctttgattagatgttccctcatcgtcaaaaaaaaaatgtaatttcgttggtctggcggccactttctttgaacattagctcgctttcagctccaacttcaattagaaggagttgattttgagagatcaacaaaagaaccgaccaaagccttattaaaggtcctaagaagatctcccgggtcctttgagaagcagttaaggaaacagtgtgccctccatcatattctgttaccgtattttattcggactccaaaggaaagtgtcgcttgggggagggggaagcactttgatgagcggcggccgcggccccttttcactcagcgggctcccccttcgttctcctcctcctcacccagcgcccggtccgctctcggcgcccgaccccgcagcccgggcagcgcgagtgctccccactgcgatgcgcctggaggctccttgacttgccctcacacttaatcctgtgcaaactttttaccccgcctgtcggggtgggggagtgggggagattagaaacaaggggtagaaattcctcgaaagggaataaagtgcctaattttcaggaggaggtgccatttaaaagattcgcctagcttagagttggaacgaaaactcttttttgcacttttaaaagtccacccaggtagacgtgtttgggaagttttttcgggtgggaaatgggcttcgcccgtacgaacaatccggggaaatcgcctcaaggaggatccttacgcagcatgtggaaaaaagttgagggcaggggtctgtggccacattttccatcaaaaagtccctgttagaggcagtctaagaaagagagagaaagagcgaaaaagaaactttcctatcaaaatgtttcaattaagaagtagggtgtacgtgtgaggggaagaggacgctgggctccaacgtttcagtagaagcgcttaagacttgcaaacacccttggtggggacctggaaccccgggagatgccgacgagcaagcaggtaagtggcggcgccctcccagtgggtgctcttcccaggcgcgagagtccggagg

SEQ ID NO: 106041 - DNA, 600 bp, Homo sapiens; identical to SEQ ID NO: 37552
  chr2:63278421-63279021
  hyper

SEQ ID NO: 106042 - DNA, 283 bp, Homo sapiens
  chr2:63279141-63279424
  hyper
cgcgacttgctgccctccggcttcacaaatccccgagaccctttgaggtgctaggccagtcacccttcaccccctgctgggaccctgcggtccgcagcccagactgggcagagagaaggccgggtgcgcgctggcaacgaaggacgctggccgcagctgaggcgctcccgacctcaggccgcatcttggggtcgcccccctctacagtggccccttcggcgtcctctggccctctgcgaagcctgggcccgttactgcggttgaggtgcggtgggatttcgcg

SEQ ID NO: 106043 - DNA, 625 bp, Homo sapiens
  chr2:63281019-63281644
  hyper
gtggcctctcaggctcggccgcccgagggagtttcttttattcccagttcggctttcttttgcgaaggccgagatctgggcctgccaggggcctgcccgagtcctctatcgcgggtccacgtggccaccaatgacccgcggcgcccccgcgtgtccccgcagccactccgcggaagcagcggcgggagcgcaccaccttcacgcgttcacagctggacgtgctcgaggcgctcttcgccaagactcgctaccctgacatcttcatgcgggaggaggtggcgctcaagatcaacctgccggagtctagagtccaggtgcgcactccccgggctccagggtctgggtaggggagctgaggctgctcggggaaggtctaggaaggctcttgagtagttcttgaggagaccatcctgtgggggtgggcttacagactgggcagccgctctcggactccccctagcgctgggccccagccaggaaagggggcaaaagttaaaggaaatggcttagagccctggattccgcctttagccctagggcgccttcggtgtcggtatcgaaagtactttttagaattgccggaggactagggaagctcccgaatgtaaagcgccctgcgggcctg

SEQ ID NO: 106044 - DNA, 314 bp, Homo sapiens
  chr2:63282552-63282866
  hyper
cgggagttgggtccgcggggcggtggagcaacaagctcccctagctccctttgacccactctcccccatccggcccactgcaggtctggttcaagaaccgccgcgccaaatgccgccagcagcagcagagcgggagcggaaccaagagccgcccagccaagaagaagtcctctccagtgcgggagagctcgggctccgaaagcagtggccaattcacgccgccagctgtgtccagctctgcctcgtcctctagctcggcgtccagctcttccgccaacccagcggctgcagcggctgcgggactaggtgggaac

SEQ ID NO: 106045 - DNA, 239 bp, Homo sapiens
  chr2:63283921-63284160
  hyper
actaagagttcctcccgcgcagactgctgccccttcagctgccctcgattttgctccacgcctgccggccagagcctcccggcgtttcttccgccccagcggagtgcgctggggcgcgccagggctaggcccgccggaggagcgcgtccccagccttccgcgcacagagccgcatcccgccccgccctgcgctggactggttcaagcttccgcctcggcgggaacgctgtacatagtca

SEQ ID NO: 106046 - DNA, 1333 bp, Homo sapiens
  chr2:63284465-63285798
  hyper
tgggcgcgggatatccgaagtgtggaggaaacagacaagtcagggtacagaggtgggggttgggcaggggcgcagggctgaccccctcacccggtctaagcacagggtcgcagttccagtttacaaacctaaaacaagaaaaccaaaaccagggaacaaaacaacaaaacaaaacaaaatccgtaaaagtacagcattagggaaaaacaaacaaacccaggccccaaacccagttccaactcctctgtcggcttctctctttcaacacccttgttttgtctagtgagtttttagtgcaccttcgttctccgaaatctgcggagagcccgcgcgcctgtgtatcaattttggctttggccgcttcgtccagtaggtgggaaagtaatttgtaaatttgatttgtctgatgtgaagatcacaaattacttgttgaaatgtaaggcagtccccctcctcctctttatctacattacttcccgaaaataaatgcaaattaatgaacggcttgtcagtgttgctcttctgattccagcccgaggtcctggtctcggggggctaaaagcgagggaaactccgtgttaataacccgcgtgttaatgacctgcgtgaagctggaggccaaaggatgaggcgggaggacttggcaagagaagtccccagaaactttcgcttagggagtgtctccccccacccccaccacgcccctccgcgtcagcctggcctcttcccccaggcgttttgaccccgcatcccccctcgccatccaggacagagacaggtgtcaggactcaattcccgaagcaattcctttctcttcagaggcaggagcctggcactgatttcttcaccctaattgcctgcaccagaaagaagagggggaggggaagagggtcgggaggcgggaaaggatagctctgtaatgctctcagagctgagccaaaaaggaaaagaaagcaaaacgacaaaaaactgatccgtgtcctgcatgttggcagcagacaaccttccttgctgctgagctgtcccgggtggcttcaccgcggctggggaatccgagccattccttccacgtgctaagatgtccctctaagccctcagctcctgccagaagtagccaaattacctttcttcgtactgtaaacttcctttaaaacatacaaactcataacctggaaaagtcgacaaggacgcctttcactttggcaggggaagaagacgactggcttgcatctgggggtcaggaaggacagttccatctccctctgagggaagacggggttgaggggtaatcctcccccagaaaatgcagagcctggaactgtccagactctgg

SEQ ID NO: 106047 - DNA, 226 bp, Homo sapiens; identical to SEQ ID NO: 1546
  chr2:63286358-63286584
  hyper

SEQ ID NO: 106048 - DNA, 54 bp, Homo sapiens; identical to SEQ ID NO: 1547
  chr2:63286693-63286747
  hyper

SEQ ID NO: 106049 - DNA, 361 bp, Homo sapiens; identical to SEQ ID NO: 37560
  chr2:63287082-63287443
  hyper

SEQ ID NO: 106050 - DNA, 490 bp, Homo sapiens
  chr2:63815745-63816235
  hyper
cgtgggggtgatgtcgctaaggggtgattctcccctccctagagttacacacgctatctctcccgccaattgccgggctccatcaggcaggtcctttcctcctgagcccaaaccatccgtttgttgtcgtcctccaatcacaggggctcatcctcagggactactttgcaatcggcgcagagcgcagtgagaagagcttgaaaaaaacctctggtatcgggaagtgtagttcaacacttgaaggaaatgctttggagattgcgccacaaccagggcagcgtaaactacagttcccagagagcgccgcgtcgggagcggagccttttctcgctaacaccgctcgccctctccgagtcagttccgcggtagaggtgacctgactctctgaggctcattttgcagttgttgaaattgtccccgcagttttcaatcatggtgagtgtgggccccgggttcctgcccacctctggccctcgcgcccttgagtggg

SEQ ID NO: 106051 - DNA, 30 bp, Homo sapiens; identical to SEQ ID NO: 1550
  chr2:64067525-64067555
  hyper

SEQ ID NO: 106052 - DNA, 87 bp, Homo sapiens
  chr2:64067904-64067991
  hyper
ggccgcaacgccgccgtaagtgctgctcccacgcgcggtatccccgcgtactgctcagtgcccaactccgacgggctctcaagtgcc

SEQ ID NO: 106053 - DNA, 84 bp, Homo sapiens
  chr2:64068890-64068974
  hyper
ggcagctaggggcgcggcctgccagtgcctcctgcagtacagccctggagggcgtggggacttgggggcggtgaaatagccgct

SEQ ID NO: 106054 - DNA, 30 bp, Homo sapiens; identical to SEQ ID NO: 1551
  chr2:64247015-64247045
  hyper

SEQ ID NO: 106055 - DNA, 30 bp, Homo sapiens
  chr2:64371515-64371545
  hyper
cccgacggtccctccgcctcacaccgcctc

SEQ ID NO: 106056 - DNA, 30 bp, Homo sapiens
  chr2:64371751-64371781
  hyper
ggcgaggtttggaccgccccctcccaccgt

SEQ ID NO: 106057 - DNA, 325 bp, Homo sapiens; identical to SEQ ID NO: 1552
  chr2:64455370-64455695
  hyper

SEQ ID NO: 106058 - DNA, 85 bp, Homo sapiens
  chr2:64681067-64681152
  hyper
tggagggaggggcgcgggtggcacgagcacctgtcacctgaccggctcgggccctcacttctccagccccggccctgcccaccct

SEQ ID NO: 106059 - DNA, 30 bp, Homo sapiens
  chr2:64681720-64681750
  hyper
tgtggcagggcgcgcgcgaggcgcccctcc

SEQ ID NO: 106060 - DNA, 15 bp, Homo sapiens
  chr2:64682188-64682203
  hyper
ggggcctgccctcct

SEQ ID NO: 106061 - DNA, 30 bp, Homo sapiens
  chr2:64751310-64751340
  hyper
gctctgcacgacagcgcctgcgcagggata

SEQ ID NO: 106062 - DNA, 30 bp, Homo sapiens
  chr2:64751581-64751611
  hyper
aaactccgggtgggcgtccatggtgctgct

SEQ ID NO: 106063 - DNA, 294 bp, Homo sapiens
  chr2:64752067-64752361
  hyper
ctccgcgctggctgcgttctccagggagctgttcagaagtttggggctttgcttgggcttcttcgctctccttccccctccctcgtgacaggtgtaaacactgcctccttcaccgaggcccgaggctggccgcgacctgagtgtgctgcttccaagggtctctgaagcaagcgaatttggaatcctccaacaggcagaggggacagccccaaagctcacgcatcccttcctcagagtaccttttctgctgtcttcttgcactcttcaagaaattatctgcgtctcctctccagt

SEQ ID NO: 106064 - DNA, 148 bp, Homo sapiens; identical to SEQ ID NO: 37567
  chr2:64752590-64752738
  hyper

SEQ ID NO: 106065 - DNA, 183 bp, Homo sapiens; identical to SEQ ID NO: 1554
  chr2:64836249-64836432
  hyper

SEQ ID NO: 106066 - DNA, 162 bp, Homo sapiens; identical to SEQ ID NO: 1555
  chr2:64836470-64836632
  hyper

SEQ ID NO: 106067 - DNA, 86 bp, Homo sapiens; identical to SEQ ID NO: 1556
  chr2:64836746-64836832
  hyper

SEQ ID NO: 106068 - DNA, 30 bp, Homo sapiens
  chr2:64871899-64871929
  hyper
tcctcagccgggcctcgcgtgtcctgacac

SEQ ID NO: 106069 - DNA, 143 bp, Homo sapiens
  chr2:64872366-64872509
  hyper
tgccggcgcctcctccgggctctcccgctgcgcaccggccgcgcgggggcccgcagggcaacgcagcctaggctgtttgtgcaagatgagaccctgcatttgacgaagacctgcaggagcaatcctcccggctttcttgacag

SEQ ID NO: 106070 - DNA, 30 bp, Homo sapiens; identical to SEQ ID NO: 37571
  chr2:64879896-64879926
  hyper

SEQ ID NO: 106071 - DNA, 30 bp, Homo sapiens
  chr2:64880723-64880753
  hyper
cccctccagcccgacgccgggagaacttac

SEQ ID NO: 106072 - DNA, 30 bp, Homo sapiens; identical to SEQ ID NO: 37572
  chr2:64881341-64881371
  hyper

SEQ ID NO: 106073 - DNA, 396 bp, Homo sapiens; identical to SEQ ID NO: 37573
  chr2:64994379-64994775
  hyper

SEQ ID NO: 106074 - DNA, 30 bp, Homo sapiens
  chr2:65086545-65086575
  hyper
tggcaggaggagctgcggttctgcagctgc

SEQ ID NO: 106075 - DNA, 358 bp, Homo sapiens
  chr2:65086835-65087193
  hyper
ggaggccgccgtctgcgactgcccgggcgccctggggcggcagcctggcctcctgggctcgaggcagggggcagaggtgtcccggcggggccggggccgggacacgaagagggaggcgagcaggggctaggaactggagccggtttgtgctcgcgcgcctgcaggccctttgcctcgggcacccccgctccagcccagcgggggcggcgccgagaggggcccatggcccagacggaggctcgggctgcgtccattggcggccgcagccccggggcgggagggggagcggcccggcgtcgggttaccggggaccagcacggcagctggccccgggaggcagccgcggggtgagggtgca

SEQ ID NO: 106076 - DNA, 30 bp, Homo sapiens
  chr2:65092599-65092629
  hyper
agggggcctgctggcggctcaccccaggcc

SEQ ID NO: 106077 - DNA, 483 bp, Homo sapiens
  chr2:65215347-65215830
  hyper
ttcccttgtaactcgcgtggccaaagcagatatcaaataaaagatgaaataaacaggaaatccatagaacgtgaacaataaggaaccgttcaggatggccaaaccgccgtctgcgctgttttctcgccagggctcaggcctgggaacggaagaggttaaaatccagtggcttgtgtttcagctttggttacgtggcagaaaccaactggaagtggtggcgtgagagctctgtttcttctagaagagctttgcgtcttaaacgcccataccgcagacagctgcctggcgggcgacccagccccatcctgatggccccaggacacaagcccaggagcgccccggtgcgcgcggttccgcggcccaggggcgccgggtttggtggcacagcgagccccctttctctagcggtatggctgcgttagagccctaatgagcgcgtgcgaaggctccccttattcatccatcctccggtccgtcctttgt

SEQ ID NO: 106078 - DNA, 30 bp, Homo sapiens; identical to SEQ ID NO: 1559
  chr2:65216103-65216133
  hyper

SEQ ID NO: 106079 - DNA, 30 bp, Homo sapiens
  chr2:65216664-65216694
  hyper
cttcccagaacctgcggagcacaactggcc

SEQ ID NO: 106080 - DNA, 237 bp, Homo sapiens
  chr2:65283406-65283643
  hyper
cgtattggtggagccgcggacttagagctgcgattcgctgcgcgaaattgccgaaagccctcccgcggagggagaaggggcgggaagaagggcgtggtcagcgcggccgaagggcgtggttggcgctcggtcctgccctgcgcgttttgggctgcggttggagggccgcagttgcagtcagggtccgccagctcggggccagcgcatggggctgctgagaccgctccggacgtgcga

SEQ ID NO: 106081 - DNA, 30 bp, Homo sapiens; identical to SEQ ID NO: 37576
  chr2:65284247-65284277
  hyper

SEQ ID NO: 106082 - DNA, 30 bp, Homo sapiens
  chr2:65357843-65357873
  hyper
ggctggtaggaggacgtccgctctaagaac

SEQ ID NO: 106083 - DNA, 30 bp, Homo sapiens; identical to SEQ ID NO: 37577
  chr2:65455227-65455257
  hyper

SEQ ID NO: 106084 - DNA, 30 bp, Homo sapiens; identical to SEQ ID NO: 37578
  chr2:65657866-65657896
  hyper

SEQ ID NO: 106085 - DNA, 30 bp, Homo sapiens; identical to SEQ ID NO: 37579
  chr2:65658568-65658598
  hyper

SEQ ID NO: 106086 - DNA, 41 bp, Homo sapiens
  chr2:65659687-65659728
  hyper
ggcggaagcgatgacgtcttcccagcggccagaggtggtgg

SEQ ID NO: 106087 - DNA, 1161 bp, Homo sapiens; identical to SEQ ID NO: 1560
  chr2:66652772-66653933
  hyper

SEQ ID NO: 106088 - DNA, 95 bp, Homo sapiens
  chr2:66654136-66654231
  hyper
cgacctgccagtcaatgaagttatcctccgggagctgggaagaaggggcgcctcgcggggctgtgggctcggttgcgaaccgatgtgtttgtggc

SEQ ID NO: 106089 - DNA, 1945 bp, Homo sapiens
  chr2:66659956-66661901
  hyper
ggagagctctttcaaggcaaagcgcttctgaaggttttgggagaacgtgtgtcagcccttcaggcacacagggtgccagtacggagttgggggcggggaagggtgcagtgcaggcggctgggaaggctcatctgctcggctttatggaaacgctccactgttgggggcaaccaaccccgcgttgactcctgcgaagtgctaaaggaagcgatagatgtcgcctaaggagactacggacgctcggtggaacctcattccagacctatgttctcatgctcgccctgtgtctcctgctcctcggaagcccactctatagaatcttcagtcctacctcgcagacggacgcaaattatcttttactttgcgcttaagagttggcttcaatacattttagagctcctaacctttcccaaacaatcttcggatgaagggatacccccaatcttgctcaaaactctttccctacctacacccccttgagggtgagggttcagtccgcagctggcgagtgggacgtgggtgggggcgatggaggcgcgggcgggctgcttggagggagtcagccttttggccaccttcagggcgggaatagggactggcagttcgcattccccgcagatcgaagctccctgctgatcgattatttgataattgattttccccgcagccaatgcgcggcggcctgggcgggggcgcctcctgattggccgagcactcctccacggctgcctaccgagatttgggtgagctcattttccagtcgaccgcagggggagttttctgcgaggtttcagctggagggagggggaaaaatcctctcggagccgagcgagctgcgagccctgcttgtggatgtgaggtttccagccactggtagagctgctgcggctgagccatctcggcagatcagagcccagcggacagaaatataaatacgaaaataacgccactaaatataatcacaagggagaagcttagagcgggagaataaagagaaggggtgagggggaattaaagcccaggcaataggtgttaaagttaaaaacaaaacaaaacaaaaaacagtggttggttggagcctccgagttgtaggtacaggcagcttttgtctgaaatctcagcttccgaagcggatttctttttctctggcactgggaggtttcgccgagccgggttggggacgggaaagaggagcgcggggaaggatgtctggggtggtgagggcagggcttcgctggagaaagagctagtggggcgcgaggttcttacaggcccgggagaggtcgaggctggagcccctcggcgcctctaagacaaaggcagcggtggctgcagccggagcctagcactccggcagcgtcgcgccgcgccgcgccgcgccctgggcgcacggccgcctcaccccgagcgggtcggagaaagagcctccctcccagcggctccccggccccggctccgcccgcgaggtctgggctgctgcgagcccgcgccgggtttcgctttccgacgatcataaatagcttggtgtttgtaaacaggcgctgggggcacattccccgcgctcagctcattgttccctcccttcctctctacttcgcgcaggacgcctgggctggggctgggagccgccggggctaggaggtgggggagtccagacccgaagtgacaaaatgctagcattttctttcccccggccgggcgtccacctctaacagcaaagaaacctctaagctgggtctgcagaaagcccgagccacctcaaccccatgttctcaggactccttagcagaggctttcccaacctggcttctccctccttttcctccacgatcccgctttgacttttctccttgcagtgtttagttctgagaattcagtactttgcgcatcaccccctgccccgaaaaacactggcagaccccaataatttcgaggaaagtcatga

SEQ ID NO: 106090 - DNA, 352 bp, Homo sapiens
  chr2:66662570-66662922
  hyper
tcattcattcaccacgttgacaacctcgcctgtgattgacagctggagtggcagaaagccatgagatttggtagttgggtctgaggggcgctcttttttttccttttctttctttctttctttttttttttttaaactgatttttgggggagagaagatctgcttttttttgcccccgctgctgtcttggaaacggagcgcttttatgctcagtgactcgggcgctttgcttcaggtcccgtagaccgaagatctgggaccagtagctcacgttgctggagacgttaagggatttttcgtcgtgcttttttttttttttttttttttttccgggggagtttgaatatttgtt

SEQ ID NO: 106091 - DNA, 905 bp, Homo sapiens
  chr2:66802568-66803473
  hyper
tctccccctcccttcgcagagccacaggaaaagaggaaagtcggcttcgactgccatcttttggggatttcgaaaaacgactcggtaggaaacggagggaggcggaggcgcgggagtgggggaaacccccttattatccagtgtcggaactggctcccttaatctgatgcttaaatatttgatgtggaaaaattacccataaaattagttactaacaatttcaaattgaaatcacttatcgaattataaacgcattaaagctgtatggatggtattaggagttcctcgggaggcagcgggtgtctccttgaagtgagccaggcgggcgagtttcgccccggggaaaagagcccccagccgagcccgggggcaaggccgggagggcggcgctgcaacctgggcgcagggtccgggtcagggggatcgagcgggcggccgggtcctggtggaggctgcggctgcttcggctcgcgggggcggggagaaggggaggggaaggagccttggtgggaggctccgaccccggagcagaggcgcctaccagcaaacttcgtagtgaagtcgaaggattctgaaaaggaaaaacgcaagccctgccctccccctccctctcgcgtctcccacgcggcgtgcagacttcgcgctcgactttgcgatcggggttagttgctgtgtgcagtgtcccccaagtctgcgggaggagcggaagggtataggctccagtcctggggttgggcccggctccgtgccccgagaggaaatccagcgggcaactgcgcagagctccagccaggacgtgctacccctgagtccctcgatgcgctgggtcccggcctaggccccagtgcgtgggcgggcaggtctttgcccagagaccacagctctggtcgcggggggtggcgggg

SEQ ID NO: 106092 - DNA, 479 bp, Homo sapiens
  chr2:66803681-66804160
  hyper
tagactttgccacatcgggggccccagactccagagtcccatagtggccctgggagcgcgacccagagagcctgggggctggagggcacatggaacgcgtgcacggcccactaggagggcgttgggaggagagtgcccgagtctggagccgcagccgggaagccgtagacagcaccccgacgccttaggcagaagctcctcaggatcactttaaaagctctgcaaactttccccagcctttcggataccctcaggcccttggcccaccggaaggcagtaaaaacgtaacttcatgctgcaaagctcccgggtaggcgcttggacgccgatggagagaggcgtggaactgggtagtggggcgccctgcctggctgggcacttttccttgtctcattctcgtctcccatgccatgccttacccactggctgctagcggcgcgtttcacttaaggtggccacggtgcggagactacaggagc

SEQ ID NO: 106093 - DNA, 114 bp, Homo sapiens; identical to SEQ ID NO: 1568
  chr2:66808519-66808633
  hyper

SEQ ID NO: 106094 - DNA, 691 bp, Homo sapiens
  chr2:66808726-66809417
  hyper
cgccggccggacgtcggctaggctccttctccccgcgggctgggggccctggggctctgcaaggctctggctccgaacagattgcgcctcccgcctggctgccagtaggaactggggtgggagccgcgtaactaacagttgcgcgcaggaggcgagccccaggtgtgagcgcagaggctctctccccagcccgcgggtctgggaacctttcaggacgcctccctccccaactcctacccatgcgtctgctccctaggccgagcccccctcgtgaggttttaatgaccgcggacgcaggggagcccgcacttgagcgaggaccgacttctctggcgggtccacgctgctcgcgcttgcgtccgcgggtagcgcgctgtgcccgggtcagggggcgagctgcgagaagtaggaggggtcaagacccccagaaatccctccatgggcacacacacaatcaagaatagggttgagggtcttgagaggtagaactaccctaggcagggcttctccaactcggcctttggaccccgcgcgcgcccaagggcgtgcccaccgcggaagcacagatcatcttcccgggactgggtctcctggaccctgcgttgctccctttttcctagcggccccgtagctggctgccgcatgtagggcgatcttcattaacttggacgcccaacgtgattgaaataga

SEQ ID NO: 106095 - DNA, 30 bp, Homo sapiens; identical to SEQ ID NO: 37592
  chr2:67593787-67593817
  hyper

SEQ ID NO: 106096 - DNA, 233 bp, Homo sapiens
  chr2:67624276-67624509
  hyper
actctcagtttacgcggacctgactactacccgaacaacccccaccagtctggaggattttgagcctagacactcctccagagcaggctcctgtcccggctgcggaagtgcgcgcgccctcggcaccttaacagttccgcccctctcccggacccagccaatcagcggccgcctcttgcgcgcgccccaccgaccaaaatggcggctgccgttggtgcggggtgcggtttgta

SEQ ID NO: 106097 - DNA, 30 bp, Homo sapiens; identical to SEQ ID NO: 37594
  chr2:67624825-67624855
  hyper

SEQ ID NO: 106098 - DNA, 30 bp, Homo sapiens; identical to SEQ ID NO: 37595
  chr2:67639753-67639783
  hyper

SEQ ID NO: 106099 - DNA, 30 bp, Homo sapiens
  chr2:68290305-68290335
  hyper
tctacctttgtacccggctaacactcaccc

SEQ ID NO: 106100 - DNA, 42 bp, Homo sapiens
  chr2:68384726-68384768
  hyper
gataatgccagatgcgctcctgcgatcgcacagaatgttcct

SEQ ID NO: 106101 - DNA, 30 bp, Homo sapiens
  chr2:68479254-68479284
  hyper
accattttgctcggcgggtcggcggctcgc

SEQ ID NO: 106102 - DNA, 30 bp, Homo sapiens; identical to SEQ ID NO: 37597
  chr2:68480145-68480175
  hyper

SEQ ID NO: 106103 - DNA, 198 bp, Homo sapiens; identical to SEQ ID NO: 37598
  chr2:68546318-68546516
  hyper

SEQ ID NO: 106104 - DNA, 812 bp, Homo sapiens; identical to SEQ ID NO: 37599
  chr2:68546552-68547364
  hyper

SEQ ID NO: 106105 - DNA, 30 bp, Homo sapiens; identical to SEQ ID NO: 1573
  chr2:68694333-68694363
  hyper

SEQ ID NO: 106106 - DNA, 701 bp, Homo sapiens
  chr2:68870368-68871069
  hyper
tcctttgcaagctcgcggctgagcggggccgtgtccgtccactccgacggcgctgggctgccaaggtgagccgccgaggagccccgtgccccgaggcgggcacagccgccctgcatgggtgcccccggcgcgggattgacgcagagccctgcccggagccccagcgaccccgttcctgccccaggcggccgttccgaagcctgagccgggcaacgcgcagcccgcctggcccggctccctcccgcgcgtcctcgtcgcgagctgccgcctgggagctccagacgctcccgcccagggcgatccggacgctcccgcccagggcgatcccggcctctgcagcccagctggcgacacgcctcgccaagagcccgcacctcggcgcctcacggccaccggaggcggggacagggagtccggcgcgggccgggtcgggggatctgcagcggcggcgcgaaggtaactcccccgccagagccgggaaagagccccgagcagaggaggaagggagcggggacctgcccttcgcctgccggcttctggaagaagcgtctcctgatccggccccggaataagaaacccggaccttgcctgccgggctccgcgatgccgcaggtacagagcgcgccctcccggggaggatgctccagggaccccgcgctgcactggctgcggccgtggggtgcggcggcttctgagtgaag

SEQ ID NO: 106107 - DNA, 30 bp, Homo sapiens; identical to SEQ ID NO: 1574
  chr2:69220161-69220191
  hyper

SEQ ID NO: 106108 - DNA, 1228 bp, Homo sapiens
  chr2:69240027-69241255
  hyper
ggagtaagaaaacacgcacagctcacatgagaatggtaaggacaaggaaatttatacgcgaagcctggaagcgcccccgcccccgacgcactcccgcgggtcccacgcgtgctttcgccgcctttgtccacaaggtggcagcctttgaactttcttccccgtaagaacgcgaaaggggggcagagaggaaggagagaaggcaaagcactgcccccaccaagaacaatttgaaacccccccccccccccatcatatttaaaatctgggacaaagaaccgtcgggacggaactccttccattgcaaaagctcggcgcggcctcgggagctgcccggcggccccggaccgaggcagccctcccctttaaaagaagcggaggacaggattgggatccttgaaacccgaaacccagaaacagcatcggagcggaaaccagaggggaaaccttgaactcctccagacaattgcttccggggagttgcgagggagcgagggggaataaaggacccgcgaggaagggcccgcggatggcgcgtccctgagggtcgtggcgagttcgcggagcgtgggaaggagcggaccctgctctccccgggctgcgggccatggccacggcggagcggagagccctcggcatcggcttccagtggctctctttggccactctggtgctcatctgcgccgggcaagggggacgcagggaggatgggggtccagcctgctacggcggatttgacctgtacttcattttggacaagtaagtgccgcgagttgtcccccccaccccaggctaagcgggcgaaaacgctttcgccccgggccgggctcgttggcagggtcgcctggggacaggagcgcatctccagggccacagagggaccgcgcggcaggcggcggcggagtgctgcgcctttgttggggcgcgctcctcccagcctcggctccagagcccgcagccgaggcgacgccgcttgctcggaaggggacagacttcttttctgtcttgctttctgtgtcccaggagcaggcaaggggcttggaggatgctattgtcttgctgagtttctgtgactccctcccgtgttggtgggaaaggcttgcttaccaaaggcagaacttgcaggcacaggcactcctaaagttagaggcttgggcattttaaagccaatcgtcgcattttgtttttgtttttgtttttttgttttgttttgaaacgctgtcccacggaa

SEQ ID NO: 106109 - DNA, 590 bp, Homo sapiens
  chr2:69533477-69534067
  hyper
ccttctggctggagatgcagccgtgccagcttcctgaattctctcctcaatgtcggctgcgtggggatttaaactcatttaaactggtgggcctgggaccggctgtatccatcaaaaaccaggaaggggagccggcgcggggcgtgcacagctgtaggagggctctctgtgtgcgaatccaggccctgagttcgcacgcccacctggggcggtggtccagccgccaggaacccgcttcccagccgctccccctcacgcaggaagccgggactctgggcgcagctctcccggaccacggccacgtcctggctccagctacggaggcagaaagaagccacagaaacctaaaggacaggaggggaaactgagctttccgcgtgggtgcggctgcccttgacacccgcttgggggctccggagggggaggcagggcggccccgcgctgagggtggaagcgtgaacatccgagcagagagagcggggaggggccgtccggagagatgccccgctggcccgactgtggcccccgggaaagacgccggtcccgtgagcaccgccccttctgttgtctccagacgccccgctgggatc

SEQ ID NO: 106110 - DNA, 30 bp, Homo sapiens; identical to SEQ ID NO: 37605
  chr2:69534292-69534322
  hyper

SEQ ID NO: 106111 - DNA, 30 bp, Homo sapiens
  chr2:69534592-69534622
  hyper
gccgagacgcgtggccgccccttaactgcg

SEQ ID NO: 106112 - DNA, 31 bp, Homo sapiens; identical to SEQ ID NO: 1577
  chr2:69614637-69614668
  hyper

SEQ ID NO: 106113 - DNA, 73 bp, Homo sapiens
  chr2:69664547-69664620
  hyper
ccgccatcttagtccggagtgcctaagggtctccctgacagaaccacgaaagatctgcgcagccgcaggctgg

SEQ ID NO: 106114 - DNA, 30 bp, Homo sapiens
  chr2:69664854-69664884
  hyper
ctggtgctgccttgcgaatgctgtttccag

SEQ ID NO: 106115 - DNA, 30 bp, Homo sapiens
  chr2:69869947-69869977
  hyper
aaccacagtattgccgcatcagcacaagat

SEQ ID NO: 106116 - DNA, 30 bp, Homo sapiens; identical to SEQ ID NO: 37607
  chr2:69870511-69870541
  hyper

SEQ ID NO: 106117 - DNA, 30 bp, Homo sapiens
  chr2:69871084-69871114
  hyper
ctgttgatatcacccgagccgcagggcaag

SEQ ID NO: 106118 - DNA, 375 bp, Homo sapiens
  chr2:69968428-69968803
  hyper
gcatgggtgcaaagacgacctagccctagttggtgtcttcaagaggctgcgtccagcaggggaagcagatatgaaaacacagaactattacaagggatgagcgccgcgccaagccgaacctgggagctacggacagtgtctaaactttagtcactcacaggagtacaaagatccggggctgctcctaactcctactccaaagctttcctggcctgctgggcgcacagggaagagggaagtgctggaaacttttgggaatgtgtgttttcatgtgaaagaggggaatgaaatgtatccttcagatttcactttctacttttccggccacgggctcggcacgacctgccgttgggagacgaacggtttcccgaggtg

SEQ ID NO: 106119 - DNA, 36 bp, Homo sapiens
  chr2:69969206-69969242
  hyper
accccacagtggggcggatccgtcccggataagacc

SEQ ID NO: 106120 - DNA, 276 bp, Homo sapiens
  chr2:70056450-70056726
  hyper
gccccagcaagcgccgagctcccgcaaggagaccaaatagcttcggggttttgccactagcttagcacaggcccataagcaccggggactcaaggcacctttgtagaaacaatgagtgactggagtcccaggtcttgccactacagaggcgcgtatgaaccacggtttaacactacgtctacgccgaagttcgggttagtcagaggccacgcccaccgcaggcccgaaaacaccagcctgcactggcgcgccggattgtgcgcaggctccacctgc

SEQ ID NO: 106121 - DNA, 30 bp, Homo sapiens; identical to SEQ ID NO: 37610
  chr2:70057452-70057482
  hyper

SEQ ID NO: 106122 - DNA, 360 bp, Homo sapiens
  chr2:70120921-70121281
  hyper
ggataatgggtatacggctgaattttccaggaatttctataataacaccaaatcgcatgttttaatgcccaccgtgaacaaagaagaccggaaccctcgcaactcgttttgacgttttctggtcggcggtaaaagctcggttcccggccctcccggaagttgttgcacagttgtttccgggaagcgggactccaaatgggtcgcagtcgcagccgctctccacggaggggtgagtcctgtagcaattcggaggatatggggctctgttggaggcctgtcccttttgttttattttgttttgtttttggtagccgcgtagcagagaggcgggcccttttcccaggcggagagcgaggggtg

SEQ ID NO: 106123 - DNA, 301 bp, Homo sapiens
  chr2:70141868-70142169
  hyper
caatgggagaccggcgaggtgcttgccttctgcagctcttggccaatactaacaaagcaaaagggggcccgggttgttggtatagaaccaatgggaaacaaggaaggagcacgaggcggagttgcgaatcctgtcaccagttggaaagagggggtggagcccgggccttgtcaagtgtgaccaaccagcgagaggagcggactttgcggggtggagccctgaagccctctcccaatcgcacaagtgtaggggcggggcattctttggggggcccaatgaggaacgcggccgaagctggcct

SEQ ID NO: 106124 - DNA, 30 bp, Homo sapiens
  chr2:70142508-70142538
  hyper
ccgactatctggagcggcgggagagaggtg

SEQ ID NO: 106125 - DNA, 30 bp, Homo sapiens
  chr2:70142923-70142953
  hyper
ttgccccgcaccttcgcctgagctggttcc

SEQ ID NO: 106126 - DNA, 689 bp, Homo sapiens
  chr2:70313273-70313962
  hyper
gcttttttaagtcataaaactcgcggaggtggaaggccccggggaggaagaggggtgcattctagagctttcgggccgaccccaatttctcgttggcgacgaatgctaaccacgtgtcgccattttgtgttcaggaaacatggcggccgccccaagggtaaggaacaggggaggcggagtagcgccacgttagccgctttccctgagagattgtgaagcacgttgcgcacggggccctttctggtctggcttagcccaaggaggaaggggaaaaggcagaaatcacaactcataggccagcgtcttgagcgacacttcctcagcgggaagaaccggcaaaaaaggccttccaagatggcgggccctgacggggccgccccccttgagcctggcgcagtggctgcgcccatgggcccgaaaagcagccgcgggagcccaggccgcgcggggaaagccgcagaaacgtcctgaagccctggccggcagcccctgaacaaacgaggcctccacaggcgtacactattgtttctaatgtcggaaaagggtgccgcggtggaaacgacacaagggcaggaggtggggtttctgtggctttaaccgaaagaaacttgcgaaacgcaaacaaagcattatgtaaatggacgccattctttttaggaccacgtttctagcacgccccacaaacagca

SEQ ID NO: 106127 - DNA, 640 bp, Homo sapiens
  chr2:70351164-70351804
  hyper
acataggacagcagccggctctttttttcatcaggatgtggagagtgggcgccttgggaagacgaaattgagtatgtgcgggggaggggtcatatgaaacaaggtcgggaagggggcggggagagctggggctctggaggagcttggggctcgcgctgcgggggaggaagcgccttccgcggtcgctggggggaagtggttaggaggaagcacgggcagtggaggggactgctggagggtcccatctgggaaagcaggcacggatgcggggacatttccgcccgtcaccctggcaaagcgctcgcagggctggagggacagagttctcagatccaagtagagaaaaccgggaacggttccggctctggggactgacattcatcgcggcagtttctggtggcaaaacagaggaaacaaaggaatgatgaaatgaactgagctgccttcatgccccggatgaatgttcagccattagaaaagagtgaatcccagctgggatttggggttccacggtgtactagaaaagcaaaacaaagagaagcgcctactagatgccatcttggaaaacaaaagcaaacgtgtgtgtgtgtgtgtgtgtgtgtgtgtgtgatgttacatgggcatggggaaattacggaag

SEQ ID NO: 106128 - DNA, 30 bp, Homo sapiens
  chr2:70352380-70352410
  hyper
gcagaggggacgggtcggggcgcccctcgc

SEQ ID NO: 106129 - DNA, 30 bp, Homo sapiens; identical to SEQ ID NO: 37616
  chr2:70359575-70359605
  hyper

SEQ ID NO: 106130 - DNA, 296 bp, Homo sapiens; identical to SEQ ID NO: 1580
  chr2:70369035-70369331
  hyper

SEQ ID NO: 106131 - DNA, 30 bp, Homo sapiens
  chr2:70370114-70370144
  hyper
tactctcagcggagcgggtggaagcttgat

SEQ ID NO: 106132 - DNA, 30 bp, Homo sapiens
  chr2:70417398-70417428
  hyper
gaagcgttaacccgcgatgggtttccatcc

SEQ ID NO: 106133 - DNA, 207 bp, Homo sapiens
  chr2:70418109-70418316
  hyper
ctctcttcgcctgccgcggccttttacaaacggggccaaactgttcgctgtaacgacaatcgttattggtcagagccgcccacgcgcggcaagtggccgcccacctgagctcgcgttgtcttatgggagttttagttctctccttcagagaccgctgagacactgggggaatgcggtggtagaacatacgccgacctagcggctgta

SEQ ID NO: 106134 - DNA, 30 bp, Homo sapiens
  chr2:70475560-70475590
  hyper
atggctgctgctgtcgcggcggcgcctcca

SEQ ID NO: 106135 - DNA, 30 bp, Homo sapiens; identical to SEQ ID NO: 1582
  chr2:70475906-70475936
  hyper

SEQ ID NO: 106136 - DNA, 406 bp, Homo sapiens
  chr2:70485365-70485771
  hyper
tgccccgagggcgccgagctgcgtgctccgccagataaaatcggtaggcgagaagggggcggcgcgggaaggtgctggagcgcgccccgcgccgggcggccgctgcgcagtgcgcccagatcccacagccgcgacgcagtccagcggtgcaggccgagccagctgcgcaggtcgcgctttcccccattcacacttcagggcggctttcagctctggtcggaataggactgtgcattcccaggcgtggagaggtgcccacttgaggaatgggcgtggacggggacaggggcgggcgggcaggcaggcgcctagcgtacctgtagcccctgtctcttaggtgtggggctccggggaggcctaggtttctctatcttcccgttgaacactgaccgtgaagactccagtg

SEQ ID NO: 106137 - DNA, 410 bp, Homo sapiens
  chr2:70520656-70521066
  hyper
cggctcaagacattcggctaacggagagggaaccaagggactcgcaggacgcaaataactgaccacttcggtttggctctcacacatacttactttttcaactcgggagggtgagctttgctcatggtgtatactccgcgggctcacagatgccttggaacgcaacgcacggctttcctcacgctcccgctgtaggcccggcgtcttgcgtctggcgtcatcgacctcgttagccaatggattgttggcagtttttacatttcacctcgcgatatctcagcgcctcggtcatcgttgagcttccggttatgtcctcagcgattggccaggacggaggggtgcgtcctctaggcacctttctgaattccgttttccttgtacaaaattgagataacgggtattccaccggt

SEQ ID NO: 106138 - DNA, 30 bp, Homo sapiens
  chr2:70529310-70529340
  hyper
caccgccctcctcccgcttgggaaccggtc

SEQ ID NO: 106139 - DNA, 323 bp, Homo sapiens
  chr2:71295258-71295581
  hyper
gtgcccgtgtgactcgccatcgcgtggcagatgttcagtagaacattacagtaatttctgttacaggtccatgggcgcaggtccctgagcccacagcttcgcgggggtctggccgagcatgcgtcacaacctacgcggccaagagcagtgcgcacgcgcaacctaacgcgggactgccagcaacttccgggcgtttacaggcaggcaggtcagtgatgtgtcctaagggtccgaccgacctagatacccctctttgattcctcctcttgggattagtgtccatctctggaagcaggatccaggaggacgggaggggccgctgc

SEQ ID NO: 106140 - DNA, 414 bp, Homo sapiens
  chr2:71357125-71357539
  hyper
ctactaagcggtggcgcttctggaaggcaccctctgcctaagtgacagcagctgctgtggaacgcgcccccgggggaggacattagatcaaggtgctttggccacgccgaggcctcctccgcccccgaccgccgttcccacgctccctgtcccatggcgaaggtcgccggtgcccggtattcacctacggcattcgcggctgcagccttcagcacccgcgccattttggaaagcaacccgccacgtcaagactagccacggaggttgagagacgcgcggcagagggcggggcgggaggcagagggggcggggacagaaaggtcaggggcgtggcgaaggtcgctgctttcctgctacaacgggcctactttagctaaaacagaaacgtaaggccaggacgggtcaccctttgtg

SEQ ID NO: 106141 - DNA, 30 bp, Homo sapiens; identical to SEQ ID NO: 1585
  chr2:71357785-71357815
  hyper

SEQ ID NO: 106142 - DNA, 1134 bp, Homo sapiens; identical to SEQ ID NO: 1586
  chr2:71453494-71454628
  hyper

SEQ ID NO: 106143 - DNA, 69 bp, Homo sapiens
  chr2:71502820-71502889
  hyper
tgaagaaaaaaagaaaatgaacgtgcattgttctccattgcgaataacggccaccagaattccagggta

SEQ ID NO: 106144 - DNA, 30 bp, Homo sapiens
  chr2:71502910-71502940
  hyper
tggccgaaatctcctcgtgccccacaccct

SEQ ID NO: 106145 - DNA, 931 bp, Homo sapiens; identical to SEQ ID NO: 37625
  chr2:71503407-71504338
  hyper

SEQ ID NO: 106146 - DNA, 103 bp, Homo sapiens; identical to SEQ ID NO: 37626
  chr2:71504755-71504858
  hyper

SEQ ID NO: 106147 - DNA, 30 bp, Homo sapiens; identical to SEQ ID NO: 37627
  chr2:71558954-71558984
  hyper

SEQ ID NO: 106148 - DNA, 30 bp, Homo sapiens; identical to SEQ ID NO: 37628
  chr2:71559295-71559325
  hyper

SEQ ID NO: 106149 - DNA, 485 bp, Homo sapiens
  chr2:71680537-71681022
  hyper
agaggcctccccaggatcccccgtcctaccccgggcggtcgggttgagttctggagagactgctccaatccccgaggcggaaggaggcaaccgatttggcgcagcactcagccagggggtagaagctcaggggaggagccgagcctttctcctgtccaagagcgagatctgggctacgccgggcgcccggagccctagtccagcccccggccatcgcggccgccgcccagccaggtgcaaaatgccgtgtcattgggagactccgcagccggagcattagattacagctcgacggagctcgggaagggcggcgggggtggaagatgagcagaagcccctgttctcggaacgccggctgacaagcggggtgagcgcagccggggcggggacccagcctagcccactggagcagccgggggtggcccgttcccctttaagagcaactgctctaagccaggagccagagattcgagccggcctcgccc

SEQ ID NO: 106150 - DNA, 704 bp, Homo sapiens
  chr2:71693520-71694224
  hyper
ggtgcgcaccgggcccgggatccctggctggtgtggagccttggtcaccggaggcccccgcggagcaggccccacggcgccttgtgcgctctcggaggccgagctgcgcgcccgcgtcagcggcgcctcgttcctggccgggagctgggacccgcggagctagggaccagcacccccacaggcgcccgtctgacccctgtccctccccgcccgccgcgggcagggcggatctgggtaggggccggagggggagggtccgcccagcgggtgtccggtgtcctccctgcagcctctcccaggcattggtcacttctccgcggaggagcagcgaaggcgacagctctcttggcgcggctgcctgggagccgggcgcttgctgggtgggtgctcgggcccggtgctcccgctcccgccctgactgcgcgcctgtgtgccgccggggctgcccagccatgctgtgctgcctgctggtgagggccagcaacctccccagtgcgaagaaggaccggcgcagcgaccctgtcgcaagcctgactttccgaggtgagagccccgtggctgccgcgcccatgctcgggtgctacccgactctcggcgctcactggcgggtctgaagcccctgctccggagctaaccctagtccaggccacagtttctccctttgtcagcagggacggaaatcccagccccgacttctgcagggg

SEQ ID NO: 106151 - DNA, 1675 bp, Homo sapiens; identical to SEQ ID NO: 37631
  chr2:72371578-72373253
  hyper

SEQ ID NO: 106152 - DNA, 30 bp, Homo sapiens; identical to SEQ ID NO: 37632
  chr2:72373674-72373704
  hyper

SEQ ID NO: 106153 - DNA, 292 bp, Homo sapiens
  chr2:72374233-72374525
  hyper
ggacactgtacctggcgctgccgacggcgccgcaggaacacagttttaaatcggcaattcaagctgccaccagccccctcctctcccgactcaattttcggctcccagcgacacagccaaccccagaaagccgagggcgactgggggcttgcagcaccgaggggaggcgaaagcggctcaggaccggaccctcccccgggaccgcgcctcgctaggcgcccccggggcgctccacgccccctgccaggccagccgcgacccaggcaagtccatcttgggagccccctcaggt

SEQ ID NO: 106154 - DNA, 126 bp, Homo sapiens; identical to SEQ ID NO: 37634
  chr2:72374563-72374689
  hyper

SEQ ID NO: 106155 - DNA, 487 bp, Homo sapiens
  chr2:72374713-72375200
  hyper
cgcagctagcggaccccggagtgcagcggagcgagcgcgcccttacctgcagcagccagtggccggtctctccgatgagcgggaagcccatggatcccttggggatgggcagcttgcagctcttgtcgcgagtggcggcccagcgcagctgccacagctgctgcgacacggccagcagcagcgtcacggacaccaggcacgcggcgagggtggccagcgccgacaccagatccaagccctcaaagagcatgttggcggccgctcgggggattggctgtgccggccgcggcgggggaggggagggcccgacgggaggggaccggagcggcgggggaggggaggctgcggccgggggtcctggcacctccagccgaaacagagaaggaggaaggggccaagggaaagggagtggaggctgcgaggggagcggagagagggaggaaaaaaattgcctaaaagaagagaggaaacacgaggcgactggggt

SEQ ID NO: 106156 - DNA, 801 bp, Homo sapiens
  chr2:72375565-72376366
  hyper
ggcgagtggagaggccggagcctaaaagtccctgggctgcccggggcggcgcgctcgagccccagagccgccgcagcacccccgaggcaggagcggcgggcgaggcggcgaggcgggcgctgcggcccgagcgcgggtgcggagccggcgggccgcggccgggacgggacgcagccggcgacagagccccgggcgggcgatggggcggcggcggcggcggcggcggcggcggcggcggcagcgggcgggaggggtgaggcggggtggggttgggggaggaggtggaaaacccgagctgggctattgtatcaattaagaaaaggcagtccgtcccgggacgcggtctctcggctctggagttgctgctgggggaagaaatggggaaaaaagaaaggaaggcaaaaggaatgaaagagggggaaaagcaggaggcaggatttcagggctggtggttttaaaagcttctctcaatgtgaatttgagtccaaagcgaggcgatgcgtgtgtttatatagaggcgggaggctgcgccgtgggcgccccgccagcacccccccgccccaacccgcgcgctcacaaagccggaggcgtggtgagaggccgggcccgcggccggagctggagagcgcagcccggcctcccgccccgccccggccgcccgccgcccgccgcccgcagcccgcccgggacccacttgtagccgccgcaggatcaaactcagttcacctctcgcctcctcttctttctcgccggcgtctcgctgagcccagcgcctacagacggacgagatgagacacacgc

SEQ ID NO: 106157 - DNA, 297 bp, Homo sapiens
  chr2:72376425-72376722
  hyper
tccgcacacacggtgcgcactcgcttagtgcctgcttggcttctaggctccttcccttcctcttttcctccttcccaggtcagcggtcccctcctccagctccgagcagtccctcctgggccgaagccccggcagcggaggtcctggccggactgccccctcgactggcaggcgcccaaagccctcgaaactgtgccttagggtcccgagcttccaacccccgggatcccgctggctcttatctccagggacccctgagttaccagtcccaatccccctaagccagatcccccattc

SEQ ID NO: 106158 - DNA, 640 bp, Homo sapiens
  chr2:72376765-72377405
  hyper
cgccatatgtctcttaccctacggaacctggaggttctcctgtccccgtcagcgtcccaggctgctgactctgcagcccctcctttcctgcacattgggacccccctcccctgcttttgtagtccccctccaccgcccgcagcgtcggggaaccccgatactggtccggcaagtgtcctgcgcggggacaaacgcggcggccccggtacccagaggcgggagaagacgggcacaaacgttcattgatacaaatgagtaaataaacatgctgggtgagcacggccaccttctcagcgctggcagcagagggcccggcgcgcgtgcctgtgtacggtgtgcgtgtggcccggggccgcacctgtgtgttcgcgcgcgtggccttgcgtcggcccgacgtctgaggagcgacgtggtatgtctgtgggtttgtgtattctttgtagagccatgagtgtgtctgcgcatccgtgcatctgtcatctggcctctcctcctgcgagcctgtgttaacatggagctgcgtacagcaaccccgacattggtctagctaatgtctgcccctctctctcccgtgcatcctgcttccctcagccccccttggctctggcgttcactctcacactcccggagccagagtcga

SEQ ID NO: 106159 - DNA, 30 bp, Homo sapiens
  chr2:72377743-72377773
  hyper
cagctccaaagggccgggttgtaggctccc

SEQ ID NO: 106160 - DNA, 710 bp, Homo sapiens; identical to SEQ ID NO: 1596
  chr2:73052643-73053353
  hyper

SEQ ID NO: 106161 - DNA, 30 bp, Homo sapiens
  chr2:73089760-73089790
  hyper
ctcggtcttaccgacgtcgctagtcctgag

SEQ ID NO: 106162 - DNA, 373 bp, Homo sapiens
  chr2:73114129-73114502
  hyper
gccacgaccagggacgcccagcacccagtgcagggcctgccctggaagaggtcagtagtgcaaagttagggctggaactgggaggaaattcgagcatgcgtcccagccggaggctgagcttgcgggcgaagaacacggcagcgctgggaaccgggctagggctttccgtgtgggccgcgcctgccggccctctctgttgtcccacttggcacggactgggctaccgccacggtttgacttccgccaccagcaaccaagggaaccagatcccaagggaaccagcacccctgggcgctcgcggcccgaagcctgaggttcccgccccgccccggcagggcggccccgccgacacccgtagcggtcccgccccccg

SEQ ID NO: 106163 - DNA, 317 bp, Homo sapiens
  chr2:73114709-73115026
  hyper
tggaggccgagctgggcgccgagcggtctggcctgcgcgtggtgcgggtgcccgccgacctgggcgccgaggccggcttgcagcagctgctcggcgccctgcgcgagctcccccggcccaaggggctgcagcgactgctgcttatcaacaacgcgggtaagaccccggggctggagcggactccccatgtgagcgcccacttcctccaccgctggggaatttaagggctactcctaggggtcagataggacgcctagaaatctaaagccctagttgttccagcttgagtagcaagtggaggcgaggtgtacaggaag

SEQ ID NO: 106164 - DNA, 319 bp, Homo sapiens; identical to SEQ ID NO: 1598
  chr2:73141974-73142293
  hyper

SEQ ID NO: 106165 - DNA, 439 bp, Homo sapiens
  chr2:73142352-73142791
  hyper
agagatcttcctgtctcagcctcccgagtagaaatgtcagcatttgaatgcctcacaagggaaggtggtgtaataaaaggtctattgatttagatatgaacaagtatacccagagccacacgaatgaaaggaggtggccagtgtagatgcaagtctaggacggtcggtagattccaagcttctctacctgcccagttaaacaagttcgtggcccctggccagcctctcggtgggggtctgcgacagaacgggtgggattcattaccaggctaggagcgcaaggccctcgggccgggttcagcttgctgggctcctgtcttgtctcagcccccagcacttgctctgtcaccgcagagcacaggcccaggcaacgtttacccaactgaacccgcatccctgtgggaaccttgttccaacaaaatcccgtcgttgtctcctt

SEQ ID NO: 106166 - DNA, 3302 bp, Homo sapiens
  chr2:73142997-73146299
  hyper
ataaagagcctgagacacaaacgagaggaaaagaccatcacagaaagctggaaatctccggagaggccagcgagaacccgcgctccccacggattccatcattccttccgaaggcgcctctgcggtgtctcagccgtgccaggccccggggttcccaggacgcggaggagtgctgggtgcggccgcctcgcctccccacccctggccgcccctccccacctcgcccaagggggccggaacggcgtcggcgcgcgggggcttttcggagcagtcgagtggaaaatagactttaacccgctttgtggcggccggggcgccctgagcgctctccaaaccacggctcccggcgctcaggcgggccgctgccaagacccggcctggagtccccgcagagttgcgcggcgcacggaccccgtggccttggggcgtcaggaggcccaacccagatctgcgcgcccaggcagcgctcaggccgctagaatggaccccggcagcggcgaggaagcggaactctctgcggctccctctccgcagtgcgccggcaaggtccaggtcccagcctccccaccgccgcccgcgccctcctaggcctcggagcggcgcctttctgcggcctcgaaggtggggtgggaaagtttggggagtcccggctctcacagcctgtcgtgagaactgcccccggggaattcgtccgccgtacggaaaaactggccggagcagagtcgtccgcggttccgcggtcgcgggtggaaggtgaaggtcgagggaggtcaggctgcttctgcgtgtcctgacggctggcgtgttctcttgagatgggctcgggctacttggccagcttcaatttaagccacagtgtctccgaggccctgacctggtccggcccgccgacacttgagcccccagagcctcagagaaggcgagggggtggatctcccagtgccgaggcccgccgtcctggtccaagccggtcgcggcaccgtgtctgggcactggagctgcttccagccccgcgaacagctggagggtggcagtgggaccgctccggcggcttctcccgcgcagtgccccgcctggccccttgtgaagggagtgagcgtcccctttccagagctgtcccccgtgacatccagaaaacgcgaaacctcaggaacaaggtcgcagcttcagaccgcggcccaggaggccgatggtgggtgagtgggagagtcccggagagcaggggggcagagagctggttttcgggaaaaccaatgtgttggaccccaaacatccaccctccgctcggatccaagttctctgagaactgaaacgacatcccgggacgaatgggagagttaggctgagctacacaccggggaggggagggttggagtttagccccaagcccttcggacgccttcttcggctcccgcgtgggttgagacggcggcacggccaccagactcagctaaagggcggagtcgcgaggagaagccagtggcgaggggaggaggaggcctggatctccccgcgaaggctccagtccggcttttgcctccgactgcgggctccctccccacccgccgtccctcgccccgccccgccccgccccccaccttggggcaggtgagcggcggccaatgggcgagcgcggggcaggtgcccgctaactcgcgcctcgcagcgctgggcggccggggctgggcagggcagtgcggggacaccgggggctggggtcggtcccagcgggactccgaaaggagggagacgagctcaaccctcgggccttactggcagctcgcagcctagcacggagcccgcgcctgtgcgggcgcctggagctgcccgctccgccgcagcagccgccgcgcctggccgtacgctgtggccggaccccgcggtcgctcgctcacacacccctcgccgctccgcgcctggctcgcccgcgggggccgagcgcgagcgggcgggcgggggaggtgaggggtgcgggcgggtgtgcatgtgcctggctgggtgcacaccccgcaaggcggcggcgccaggacgcggagcgctccccagagcccggctgcctcgcacagctcccgcggctgcgaccatgttccagcccgcggccaagcgcggctttaccatagagtccttggtggccaaggacggcggcaccggcgggggcactggcggcgggggcgcgggctcccatctcctggcggcggccgcctccgaggaaccgctccggcccacggcgctcaactaccctcaccccagcgcggccgaggcggccttcgtgagtggcttccctgccgcggccgccgcgggcgcgggccgctcgctctacggtgggcccgagctcgtgttccccgaggccatgaaccaccccgcgctgaccgtgcatccggcgcaccagctgggcgcctccccgctgcagcccccgcactccttcttcggcgcccagcaccgggaccctctccatttctacccctgggtcctgcggaaccgcttcttcggccaccgcttccagggtgagtgtccacgctgtgcccgccgaggcggccggccggcgcccgtgctgcggcgatgcgggggaggctcgggggcgcgcggggctgtttagaagttactgccgggaaggctgcaggtccgcggaggtagattcccaggcagggaagagctgtgcggcatccacccgcgccttcgccgcgtaggtctccctcccaggaaagcaggtggagacctccaggcttttctagaaaatataccagttcggacgcaagcccaggcgcgtcctcggagcctgtgctggccctcgccacagcctgcccaattctctctcccagctgagccagtctcagaccagagtacaactcctcccgctctccctccgcccggcttaacctcgcaccacgcttctctcgcaagtccaccaccacctccgagacctcagccttcgctggcgcgtccgggcgggggaaagtccattcgcgtgccccagctctgggggaagcaagggcagcagggagggcgaatcggagagttaatgttcagtgtggagggcctggctgtcttgggatgtttctcggcaaccttggcccgacttctccaagtcacacgtgcctctcctacccaaggtggggaaggtttgcagtaagcaaactggcttccgccgttgctcgccgccttcgggagggagcccacccggctgctggaataccgaggacagttttcccgggcagggggcgggggcagagggcttttaaggtcgtagccagtccgaaccccggagtttgcatccagcaatcggcttgctaataaagatcctc

SEQ ID NO: 106167 - DNA, 519 bp, Homo sapiens; identical to SEQ ID NO: 1602
  chr2:73147008-73147527
  hyper

SEQ ID NO: 106168 - DNA, 100 bp, Homo sapiens; identical to SEQ ID NO: 1603
  chr2:73147966-73148066
  hyper

SEQ ID NO: 106169 - DNA, 106 bp, Homo sapiens; identical to SEQ ID NO: 1604
  chr2:73148174-73148280
  hyper

SEQ ID NO: 106170 - DNA, 908 bp, Homo sapiens; identical to SEQ ID NO: 1605
  chr2:73150975-73151883
  hyper

SEQ ID NO: 106171 - DNA, 284 bp, Homo sapiens; identical to SEQ ID NO: 37654
  chr2:73151946-73152230
  hyper

SEQ ID NO: 106172 - DNA, 60 bp, Homo sapiens; identical to SEQ ID NO: 37655
  chr2:73152264-73152324
  hyper

SEQ ID NO: 106173 - DNA, 49 bp, Homo sapiens; identical to SEQ ID NO: 37656
  chr2:73152629-73152678
  hyper

SEQ ID NO: 106174 - DNA, 285 bp, Homo sapiens; identical to SEQ ID NO: 37657
  chr2:73152739-73153024
  hyper

SEQ ID NO: 106175 - DNA, 48 bp, Homo sapiens
  chr2:73298956-73299004
  hyper
agtgtagtttttcgcgtcgcggcgcttacaaccgtagactgcggagag

SEQ ID NO: 106176 - DNA, 30 bp, Homo sapiens
  chr2:73340474-73340504
  hyper
atggggacccccgccgctcccctgaccccg

SEQ ID NO: 106177 - DNA, 30 bp, Homo sapiens; identical to SEQ ID NO: 1608
  chr2:73340709-73340739
  hyper

SEQ ID NO: 106178 - DNA, 30 bp, Homo sapiens
  chr2:73383897-73383927
  hyper
tgatgaaccgagggcgccctctgctgctgt

SEQ ID NO: 106179 - DNA, 30 bp, Homo sapiens; identical to SEQ ID NO: 37660
  chr2:73404194-73404224
  hyper

SEQ ID NO: 106180 - DNA, 30 bp, Homo sapiens
  chr2:73404786-73404816
  hyper
ctgcgcccaggagccgcaggcacttacaaa

SEQ ID NO: 106181 - DNA, 521 bp, Homo sapiens
  chr2:73429315-73429836
  hyper
ctgcgtcaaggacggcgcgggtcagctgaggccaagaccgcaggcactgccctaccgctctccagatcacagctccgcctctgcaaggccccggggaaacgggcatcccttcttcagtgagcaaaggagaaagacggagcccggtggctgggtgtttcgcccaggatcaccagcgagctcagagtcctccccacgaccgccccagggtgggcatttttaaaagcggaggaagggagggaacacactctttggtgctgtgcccaccttgcctcgcacagagcgggcgctcacaggctttgggggccccgcccggaccgcagtggggagaggccgccccatgccccgccccgccaaatttaagagccttcgccgagcgccaggaggttcccagacaaccggtcttgctcgctgccttttgcagaatcttctcacttctcccgagctcccttccttgcgtccgtccgggcaacggccgcgtcatgcctagccccaggccgcgaggcagcccgccacccgctccc

SEQ ID NO: 106182 - DNA, 64 bp, Homo sapiens; identical to SEQ ID NO: 1610
  chr2:73429858-73429922
  hyper

SEQ ID NO: 106183 - DNA, 214 bp, Homo sapiens; identical to SEQ ID NO: 1611
  chr2:73429976-73430190
  hyper

SEQ ID NO: 106184 - DNA, 171 bp, Homo sapiens; identical to SEQ ID NO: 1612
  chr2:73430201-73430372
  hyper

SEQ ID NO: 106185 - DNA, 225 bp, Homo sapiens; identical to SEQ ID NO: 1613
  chr2:73430442-73430667
  hyper

SEQ ID NO: 106186 - DNA, 30 bp, Homo sapiens
  chr2:73441229-73441259
  hyper
cccagttacactcccgtcaacaaaccacgg

SEQ ID NO: 106187 - DNA, 30 bp, Homo sapiens
  chr2:73441801-73441831
  hyper
gggcggggatgtgccgggcagagagaactg

SEQ ID NO: 106188 - DNA, 30 bp, Homo sapiens; identical to SEQ ID NO: 37667
  chr2:73460640-73460670
  hyper

SEQ ID NO: 106189 - DNA, 30 bp, Homo sapiens
  chr2:73461513-73461543
  hyper
tgagtggcgtctcgcgcatccgtcgccatc

SEQ ID NO: 106190 - DNA, 30 bp, Homo sapiens
  chr2:73461758-73461788
  hyper
gtcccagggtgcttcgggcccgcgaaccca

SEQ ID NO: 106191 - DNA, 502 bp, Homo sapiens; identical to SEQ ID NO: 37668
  chr2:73511725-73512227
  hyper

SEQ ID NO: 106192 - DNA, 1568 bp, Homo sapiens; identical to SEQ ID NO: 37669
  chr2:73518215-73519783
  hyper

SEQ ID NO: 106193 - DNA, 947 bp, Homo sapiens
  chr2:73520104-73521051
  hyper
gggcgctccgataaccgcacaggttcctgcggaggcgctggcggcccagtgtgggtgggaatgggggtgcgcaccccaggactcctaagcttcccatcgcccctattctcatagctccaatgtcccagtccctcctggttctcaggtatggtgcgcccccgcgctgcgccgtcgtcgtctgagcacccctgctcgccctccttacctccagggtagccggtggccgcgggagcgtccctggcaggcagccggggcaattcagcgctgggttcggcgcaacagccttcagtggacttgacgaggagcgcgtcgggttcggaaaactcgctaaggtggagcatggcgcggcgccggctgtggggcgcccggggcctcgcccgctgggcttgggggcgcgcgggtggcggggaggctggcggtaggggttccccgcagcgcacagacctaggcgcccgggctcctggcttcgggcactcacctctgggaaaggagtcggggagccgcggcgccctcgctcgcccgcaccggcctcgggcggcggctcctcgcctctccaaagcgctgccgggctcccccagcccacagcccccccacttatatagctgcggcggcgctggctccgggcttccgactccccgggccactgccattttgggaggccccggccctgccgccgtgacgtaaatgcccaaacatggacacaggatgtgtgccggggactcccgaaaaggaaagctcgagctgtgacgttgttgttgtcgccgccgccgccaggctcgcgccgctgcgtgcgcgcgcgctccccaggcgtggagcgctggggccgcggatgcgccagtctggggcgctgcgcctcaccgggccgaccgtccggtagatgcgcttcccacctggaggcagaggccgaggggcagcaggggaggaccgtgttgggtttgaatctgccc

SEQ ID NO: 106194 - DNA, 131 bp, Homo sapiens
  chr2:73612641-73612772
  hyper
tctctgtgcaggggcgaaactcgaccccagccgagaactacactgtccttgcgcggggccctctgcgccccggaaggcgcccagtcccggtttattgtgagcttacagtacagttcgcaaggtcccggccg

SEQ ID NO: 106195 - DNA, 30 bp, Homo sapiens
  chr2:73964398-73964428
  hyper
cctgcccgttagagcgcaaggaaaactcac

SEQ ID NO: 106196 - DNA, 30 bp, Homo sapiens; identical to SEQ ID NO: 37672
  chr2:73964628-73964658
  hyper

SEQ ID NO: 106197 - DNA, 30 bp, Homo sapiens
  chr2:74006650-74006680
  hyper
accattacactttccgtgccaacgtaacaa

SEQ ID NO: 106198 - DNA, 308 bp, Homo sapiens
  chr2:74007132-74007440
  hyper
aagtcggccaaaagcgccagtccggcgccctcaatgccaggataagaccctaaacaggaaaagactcggcagccacctacgccgcgctccagcgtctcgctattgcgcatgtgccaccgccggtcgtgatggcgtagccacgctggcttactgagactcctgatctgtaaacaggactttggtggctacagcgccctctttagccagaggccagtagcacaggtcaataagggcgtgtatgcacccttcagaattcaaacagtgaggcacagggaagtccctctgcccgatccgccccacgccccggt

SEQ ID NO: 106199 - DNA, 136 bp, Homo sapiens
  chr2:74055935-74056071
  hyper
gatggccgctgtgtcgttcgctcctcattggtcggattttccgcaggtgccgattctagccccacctactagctctccgttccaagtcctaaatcactgggaatgtaatagacagacgaacgggagtgggcggagc

SEQ ID NO: 106200 - DNA, 641 bp, Homo sapiens
  chr2:74153737-74154378
  hyper
ttggattgtggaattacgtcttttaaaatgttatttgtccaatgaacaaaaaccactcgcaccgcaactccttttactatcaaattctgcaccgttgcaaaacttccttcactcaacgcttctttacaaacatcgcgatagcggagcggtctcttgggcgcaccccgccgcatgttcaaccccacccacttcctgtctgacgatctccttacgtcaacggtgcgctggagcgagtgagcagcgatacctagggcggaagtgctctcggcggaagtgatcgctgtgtgaatcgtgggtgggatggccgcgggccgcctctttctaagtcggcttcgagcacccttcagttccatggccaagagcccactcgagggcgtttcctcctccagaggcctgcacgcggggcgcgggccccgaaggctctccatcgaaggcaacattggtaagggccggaaagcggctgccaagccttggcctccgccacgcaggcgacagaggctgggaaaggagctgggcccggaatggcctgcgtctgatgcggccggcctctttttctgggctgcgaggagagcctttcccctcgcaaagtgcactgtgtatctttgcctccttgtttttaggatatcgggcctcagtacccg

SEQ ID NO: 106201 - DNA, 253 bp, Homo sapiens
  chr2:74211284-74211537
  hyper
tcctcagttaccctccgcgacgcgcccgttccccctcctctgggaggcagggcgggggtatcggattagtctttgttttcgacgcgaaagaatcgagcgcggcgcgggggaggctggtgatggcagggccgtggggtccacctggacagggcattcggccgtgacccctgcgagggtgcccttagcctctgcccccgagcaaccccttcttgccggccaggctgactcggtacgcaaacgcgcgatgtccccc

SEQ ID NO: 106202 - DNA, 30 bp, Homo sapiens; identical to SEQ ID NO: 1620
  chr2:74211830-74211860
  hyper

SEQ ID NO: 106203 - DNA, 30 bp, Homo sapiens; identical to SEQ ID NO: 37678
  chr2:74212716-74212746
  hyper

SEQ ID NO: 106204 - DNA, 111 bp, Homo sapiens
  chr2:74229980-74230091
  hyper
gtcctctcggatctcggggggattctcagaggagaaatgaaaacaaaaacacactggaaggcgggggagcctgtctgccgtgatccaggcggcagctggaggcaggaagat

SEQ ID NO: 106205 - DNA, 30 bp, Homo sapiens
  chr2:74375118-74375148
  hyper
tcccggccccgccccggaggcctccggtcg

SEQ ID NO: 106206 - DNA, 30 bp, Homo sapiens; identical to SEQ ID NO: 37680
  chr2:74405361-74405391
  hyper

SEQ ID NO: 106207 - DNA, 422 bp, Homo sapiens
  chr2:74405755-74406177
  hyper
aggcccggcgcccgcggcccgaccccactcacaagaggaagctcatcttcggtcctcagaggggaggcgaggggcccctggcccccgcctggatcaggattcggagctggctagagggagcggaccgtccttagctcacgggcagcggaagccgggccgccgccgctcggagccgggtttctggccgctgcgagcctttgcaaacctcggcgcccgccttgcccgcctaccccacctcgcagacccgaaatgcggaaccaacaaaatctcgcgagctaaggtttcgctgcgccgggagggacttgtcgcgccccctttcgctccgcctcgtcctagaactcggccaatcatcgctctccaagccaggacctccctcccccggaggcgtggcgaggatggcggtcctgcggaaggggcagtgg

SEQ ID NO: 106208 - DNA, 1040 bp, Homo sapiens; identical to SEQ ID NO: 37682
  chr2:74425423-74426463
  hyper

SEQ ID NO: 106209 - DNA, 30 bp, Homo sapiens
  chr2:74618810-74618840
  hyper
gccagtccccgccccgcacaccgggctcgg

SEQ ID NO: 106210 - DNA, 30 bp, Homo sapiens; identical to SEQ ID NO: 37683
  chr2:74648475-74648505
  hyper

SEQ ID NO: 106211 - DNA, 30 bp, Homo sapiens
  chr2:74648949-74648979
  hyper
cctctgatctaggccgggggcttcagggat

SEQ ID NO: 106212 - DNA, 30 bp, Homo sapiens
  chr2:74682124-74682154
  hyper
tggttgccatgaaccggaagtaactggttg

SEQ ID NO: 106213 - DNA, 184 bp, Homo sapiens
  chr2:74684551-74684735
  hyper
agatgctgctgaagcgcgaggagcgggcgcggaagcggcggctccaggcggcgcggcgggcagaagagcacaagaaccagactatcgagcgcctcaccaagactgcggcgaccagtgggcggggaggccgggggggcgcacggggcgagcggcggggagggcgggctgcggctccggcccccat

SEQ ID NO: 106214 - DNA, 232 bp, Homo sapiens; identical to SEQ ID NO: 37685
  chr2:74685368-74685600
  hyper

SEQ ID NO: 106215 - DNA, 30 bp, Homo sapiens
  chr2:74699958-74699988
  hyper
tggtttcggcacaacgcatgggggagccca

SEQ ID NO: 106216 - DNA, 30 bp, Homo sapiens
  chr2:74709201-74709231
  hyper
gcgcctcgtccagccgacttgccacctggc

SEQ ID NO: 106217 - DNA, 98 bp, Homo sapiens
  chr2:74710445-74710543
  hyper
tagactgctctctacggcccagctgcccactggaggtcgctgctgcacccaaactttgcaaggaattcggtccagaggattacggcgaagaggtaaaa

SEQ ID NO: 106218 - DNA, 291 bp, Homo sapiens
  chr2:74726156-74726447
  hyper
ttctctcctgcctttctctatcgcgattgccccgcctacaaggaacagagcaacaggtcgctcagttggcgacggtctgcccttttcccttggcactggcggccttccggagccgccgcggaacctagggactaacggaggagaggtgagaagtcgcaggtgcgagtcctggcacgtgggctgaggacaggggaggattagggtgggtggcctgggctgggacaaaggtttgagacggggaaccaggaggagagaggtgaggaaaaggctaagtcagagtccgcgaccttg

SEQ ID NO: 106219 - DNA, 162 bp, Homo sapiens
  chr2:74726598-74726760
  hyper
cggggctaggatgtctgcgatgcttaagagtgtccggggtgttcggggctcgcgtcccgagttcatggtcggccgggctggggcggtccggctgtccgttgcgctaggctccgcaaacgcctgggccccagtgctcggctcccaatccgggcccccagcctc

SEQ ID NO: 106220 - DNA, 1251 bp, Homo sapiens
  chr2:74729486-74730737
  hyper
ctcggattgccggcccggacattccactgaattctgtgaatgtgtagcagggttggaggaccctcggaataacccccttggggaggtggacaaggacaatctcagcgaagagcttgctcccctcctccccacccttaggaaacgtccgtgaaccggagtgagagggcagtgggagttcagggagcaaagtccaggcggaggagcgtgaggcggggcttccgtccgtcccgcacacttctgggattgttttctctttcagaaagcgctactgcggagtgaaccggtccttatatcttagtttcgtgactttgggggcggcaggcctgtgagttgttttccgccctggacgctgttttgcaaagatctctgcgcgcccaccgccaccctcccgggcgtgcgggccgggaagcagccagcggtgggaaactccgacgccctcctcgacacttttctccccccaactccccaagactcacttctagggaagtcctttttcccatcaagccctgggaaagactggccaggctgagagagggacccgtcctcctctgtgccaaaggcgggagcaaatcctggtgctgtcgcctttggatgtgagtcctggaaatggcgggggtgaggaaggtgggcaggggcaaggtttggccctcaggcgagaaccgacgccttgtcccggaagcgcagcacggccgagtgcgtccgggggtgcagacggcgccctggggtggtcctgccgccacctctcctttgactcaggagcgccgcgccgcgtccgggcgcgttctcagtcgcgcgaagccagagaggaccctgggcgtgattctccctccctggcacagacggagacccgagtgaccccggggtccgggtgggcgtggggaatggacccatagacccgggacgagcggcgcggagcccgcagctggccagcttcagccaccttgggagacgcagtgcagctgccgctgctgacagacaagaccaaggctcggctgggccccaccccagatccggcctgagcgccttccgcgctgctcggcctcaaggcgtgagtcaccaagggcaagtcccgtgacttggtcctcagggtctccggcctcggcacattaatcttcagacccggctttttcgacgccgagctgccgcccagccccaatggcagggccttccagggagtcccagtcagactgctccccagctcccgcagctgctcggtccctgcaaagcccccgggagcgtttctactctccc

SEQ ID NO: 106221 - DNA, 42 bp, Homo sapiens
  chr2:74735288-74735330
  hyper
gctttgcagagtctcggagagggtgccgggggatggggagtg

SEQ ID NO: 106222 - DNA, 1535 bp, Homo sapiens
  chr2:74740309-74741844
  hyper
gtaggctgagctgctcgttggtgcccacccgccaccgccaccgcaggatggtagaagcgcccccctctctgagcccagtctcaccggctcagaggcgccagggcccccccgggggccggggcgggccggggaaggtaatgtaattccggcccagctaacccgattaccgcggcctgcaccgggcagggcggcggcgggggcgggtctaaggctcaggggcccgcccgcgggggtcccatccccgggaaggacgcagagttcacgcactcccggctcctggattcatggccagaggtcacaaggtcaccaagcggcttaggtctttccccacctcccttctctgacagctccaggccattttttgagtttgggtggggtaaaatgtttatgggaaacaaggcggccaggatccaaccaaggcctcagtgaggtcccacgtgtcccccgtggcgagatttcgccctcccgccgttgaggaggaagagtgtgagaacagacttcctaggcacagaatggaggggcagagtcctgcattgaggactccctgcacttggggtccgggggtaagtgccagccccaagaacccgccggcctgatttggcccgggttgagccatggtccgttttacacggattttggaaaatcgaaattctaggaaacacaggacaccaattaccggtgcgcatgaacagggctggggggacctacaggagaggccagaaggcgcaccacgatcgccagcccaaagcggccgttccccgcccttagcccctgccgtccccttcccacacctgttctcttcctgggcctgcagctcaccgggcgccgttccccagccgcttcttacgcagccgggaaaccacaacgagatttggtcttcgagagcatttaggcggggaccacaacgaatccgggagttggccagaaggatccatcgagaggcgaagagtgggggctgggggaggaggcacctgcggaggaagccggtgaggcggaggcagcccaaaggcggaggccgcccaaaggcggaggccagcaaggatggaggcgcggtgagcatctccgctgactcagcggcccatgctcgggcccctcccgcgctgagcctggctcctaacaccctggccccctgtccccctccccgcacatctccgccagccagccttccccctgcgcttggcgcaaacaggcgtcccttcccctttaactgctgggccccgcccctgccctacccccagcccccactacccacccgggccgatccgtcagtcactgccccagccggagctggccaaccctctccacccgggacttgggcagcggcgccggcagcccagcgtctatttgcgcttaagagccagcaaggaagctccaggggccccagctggccgtgctcccccgggatgcaagtccctgcgctgacgcccggcagcggctggcacgggcgcggctgctccgggtgcacagggatgctgctgtttcggggaccccggcgccctgccttggccagccccgcgggcccctgaggccactct

SEQ ID NO: 106223 - DNA, 278 bp, Homo sapiens; identical to SEQ ID NO: 1628
  chr2:74741872-74742150
  hyper

SEQ ID NO: 106224 - DNA, 323 bp, Homo sapiens; identical to SEQ ID NO: 1629
  chr2:74742324-74742647
  hyper

SEQ ID NO: 106225 - DNA, 451 bp, Homo sapiens; identical to SEQ ID NO: 1630
  chr2:74742693-74743144
  hyper

SEQ ID NO: 106226 - DNA, 105 bp, Homo sapiens
  chr2:74756282-74756387
  hyper
gactatgttgtggtcgaaaggtgtcacatggttggaaatgaggaccctgacactgtgatcccggagtccggagtcctcctgccgggccacgagccctagcaccgc

SEQ ID NO: 106227 - DNA, 30 bp, Homo sapiens
  chr2:74756619-74756649
  hyper
cggaagcctgggggcgagaggcgaagtggt

SEQ ID NO: 106228 - DNA, 30 bp, Homo sapiens; identical to SEQ ID NO: 37693
  chr2:74756867-74756897
  hyper

SEQ ID NO: 106229 - DNA, 30 bp, Homo sapiens
  chr2:74757206-74757236
  hyper
gggggaggagaccccgtttgacccctgacc

SEQ ID NO: 106230 - DNA, 37 bp, Homo sapiens; identical to SEQ ID NO: 1631
  chr2:74776039-74776076
  hyper

SEQ ID NO: 106231 - DNA, 143 bp, Homo sapiens
  chr2:74776395-74776538
  hyper
gtcctcccgtgccccggacctgctcagatgtctcccaaggctattcatcagggagcaccccaatcccggcctgctccgcccggcgcccgcggcccctcacctgtagaaggccgcgttgaccctcttttcgctggggaagccca

SEQ ID NO: 106232 - DNA, 59 bp, Homo sapiens; identical to SEQ ID NO: 1633
  chr2:74780964-74781023
  hyper

SEQ ID NO: 106233 - DNA, 402 bp, Homo sapiens
  chr2:74781685-74782087
  hyper
gggtgctgcagctcccggctaatccgggggtctccaccattccttctcgctcctctccctcaccccaccgcgacccccccagcggctgccggcgggggccggggaggggcggaaactcctccagggaacccggccccgcctcccgccccgcctcccgccgcagggccaggaagcgcggaaggaaccgccgggggccatggacggagcagtgatggaagggccgctttttttgcagagtcagcgctttgggaccaaggtagtctggcgcatggatgccgaaccttatccgggctagtagtgggtgagagagcccagaaacagggagaggtgggcagcgggctggagagcggcgccgggagttggagagcctgtgactttcccgtgaagttgctttgcacactc

SEQ ID NO: 106234 - DNA, 252 bp, Homo sapiens
  chr2:74782218-74782470
  hyper
cgtcgggacccgggccgcctgcgcacgccactccctctcgagcactctctctctctccctagaggtggaggaagacctgggccgtgctctacccggccagtccccacggcgtagcgcggctcgagttctttgaccataaggggtcgagctctgggggtggccgagggagctcgcgccgcctggactgcaaagtgatccgtctggctgagtgtgtgagtgtggcccccgtcaccgtggagaccccccctgagc

SEQ ID NO: 106235 - DNA, 30 bp, Homo sapiens
  chr2:74881277-74881307
  hyper
cctcccctcagccccgccttcactcaatcc

SEQ ID NO: 106236 - DNA, 97 bp, Homo sapiens
  chr2:74942354-74942451
  hyper
tcaggggtgggagccgaagagagtaatttagggatagaggtgagaacggagttagacacaaaagtaagatcacatgaactccgacttcggatggaac

SEQ ID NO: 106237 - DNA, 1611 bp, Homo sapiens; identical to SEQ ID NO: 37700
  chr2:75060917-75062528
  hyper

SEQ ID NO: 106238 - DNA, 244 bp, Homo sapiens; identical to SEQ ID NO: 37701
  chr2:75062575-75062819
  hyper

SEQ ID NO: 106239 - DNA, 113 bp, Homo sapiens; identical to SEQ ID NO: 1636
  chr2:75146989-75147102
  hyper

SEQ ID NO: 106240 - DNA, 1974 bp, Homo sapiens
  chr2:75426243-75428217
  hyper
ctgcccgcctgcccgcggtggctctgaattcctccactttcaagcttcaggagacgtttgagttcagaagtctggagacagcatctctcttgcggtaaactgaaaaagggaaagaaattccaccggtcacagttctaggaagcaagagatcccccgcatttatgcacctgctgctgcctgcaactcctatttctccttcctccgcagggaaaggcaaagccctgtgctgcgtgaggacttaggagcgaagtgggggcccattgcagcgcgacctgtaaaagttctgagcctatggccaggattctggagcttcgtatccagctggagatttttccttctcttttgctgccgctgccgccgcctgcagtttcgcgggcacctctcggttcgggttgctcagctcgcgagttagctgcgcacgaggcttttataaccccctgcagagacgtcactgggaaggggcagtacctgggctgcgtactcgccagtcccggtgcgcagcgcggcagctgcgccagctgttgacaactgtctcattccaccgccgcagctaccacgccttttgctgcttgctacttgccgtgggagtctgcgagccgggagccccacgcactccgcgagggggcagtaggtggcttggaagtaactgacacagatgcggtccgcagctggaatcgtcgttgcacgaggggtgctgggaggaaggaaggatttgggaaacagctggagtggaggacaatcaacttccagggaatgaagcccagagccctgagacagctctgcagaggcggcttgcctgtggcaatgggaaacggtcatgtgtgggggcgatgtgccagcgccgcgctccgggccgcgctccagctaccgagaagccagaggcgacgactccctggtccaggtgtcccgaaaacaactttcctgaggctgtgtttaggaaacacccccacaaaatatctagctcagttacctggctagctgattcacctgggaagtgacagtctctaagctttgaggacactttcctcagccaccctggtgacttggcccctcgttccaggagaagctccatttgagccctccacctgacccctctggatgagcctctgctcaatcactggggacagggctgagctccctgcgaatcttggtgagcgcaggagccacactcataggcagcttgtcgctcagacgcgcggctctgggctctccgccagcaatcactgcggcgctgcgtttgcctcccggggacctggcagcctccgcctccgcgcctgccaagcctgcaggccagagccgggctcggggtggcatcggtggtccttctccctgttccccttccaggtttgcataggggctggaggacaggtcagccagccttctctgcccgcctccatcctgccctgccgtcttctgactttgaggcctcgtatcccagtccaagaccatttcaaacggtagaactggtgccagacacttggaggaggcagggcaaagactcgccagtccgtataaacccttttggagaagccaagatgggatgagctccgcagcacgttcccgccagactgctgcaggcagagttccgcggaaaactgaaccccgggagtcctcaggggcccatctaccccggtgcaccgccccctcctttcactgcggggactcggagctgtgggactggagcgcgcaccggcagacttgcgcgcaggttggagttggcgcacacccgcgccagccggggagcggcgtttacgcactggtaccgcgagcgctcaaagcatctctcgggaagtgctttaaggctgggaaatttactatacacttatgccgggcaaaaattggatcccacgccggggaggagaatctgctgtttcactctgtattttttcggagcctgggattttagcgtatataggaaccgcacattgctttgccaggttctcctaggcacccgtaaacacactgcatagaaaa

SEQ ID NO: 106241 - DNA, 253 bp, Homo sapiens
  chr2:75787178-75787431
  hyper
ggtggggacccccacgcagacctcccagatagagcagcgtggactgtctgcgcgcccctctccaaaagcaaagcgtcccactgggactttagggggcgccaacagcctttcactccctgatgcactcggctttcggggtcctgggggtcgccaaatgcgcgcggcgagttggctgcctccgaaacaaaccaggtaaatagtccacggtgcagcacgtacatttctggcaggtccgccccgcgcaggcttggga

SEQ ID NO: 106242 - DNA, 582 bp, Homo sapiens; identical to SEQ ID NO: 37706
  chr2:75787703-75788285
  hyper

SEQ ID NO: 106243 - DNA, 110 bp, Homo sapiens
  chr2:75788330-75788440
  hyper
cggtcctccaggctttccccctgctgggacgagcccagatttgaaagcagacctccaagcccctgccagcatccatcctctcattcctgtcccgtcgcctgctttgagcc

SEQ ID NO: 106244 - DNA, 30 bp, Homo sapiens; identical to SEQ ID NO: 1639
  chr2:75836395-75836425
  hyper

SEQ ID NO: 106245 - DNA, 155 bp, Homo sapiens
  chr2:75873842-75873997
  hyper
tgtcccatagcagccgccatatggtggcagacagcaacaacctcgtcgcactgattactgggagctgtagtcttgacgtgagctagctggcatggcggcctgcattgcagcggggcactgggctgcaatgggcctaggccggagtttccaagccg

SEQ ID NO: 106246 - DNA, 30 bp, Homo sapiens
  chr2:75874438-75874468
  hyper
cacctccccctgcacgagcaggtgtgtagg

SEQ ID NO: 106247 - DNA, 444 bp, Homo sapiens
  chr2:79739571-79740015
  hyper
aacaaacctcccttccgcggcagtcactacctttgcagcactctggccctgccctcctcctgccacgtgtcggacccctgctgggctggccctcctttcctactctgcgacacccctatcccccccgcccctatcctgcccgctcccgcacccggtccctctccccgggcctcgcgactccggcgattcagctccgggtccccgcccgcagggtaacgcggttgtcatggacacggcacctgcgccctacggcggtgccccttcgccgccgtcccctccccccacctgcggcgccgagcctgccgcgcctccagagctccgccctaccccgccccgccctttcgggcgctccccaggccgcgcgcgcccgcggccccccacccagccacccctcgatgcccggtgcctttccaggcgccgcggagccacggggaccgcgggggc

SEQ ID NO: 106248 - DNA, 260 bp, Homo sapiens
  chr2:79740063-79740323
  hyper
cggcgatccgggccgctgccgctcgcgcttgggcaggacgcggggcgggcggggggaggggggagcggcttcgcttccagccccgagtgaggcggagacccaggcgggcgggcagagcaggcggcaccgcacctcggccagaggcggctgcagcagctgctgcccttgtccctgccgccgcctctccagtcccttctgtgattaccactccagctgctgggaacgggcgagaaagaggaggaggcgagaaactcccaccg

SEQ ID NO: 106249 - DNA, 243 bp, Homo sapiens; identical to SEQ ID NO: 37711
  chr2:80529665-80529908
  hyper

SEQ ID NO: 106250 - DNA, 342 bp, Homo sapiens; identical to SEQ ID NO: 37712
  chr2:80529985-80530327
  hyper

SEQ ID NO: 106251 - DNA, 178 bp, Homo sapiens; identical to SEQ ID NO: 37713
  chr2:80530408-80530586
  hyper

SEQ ID NO: 106252 - DNA, 1356 bp, Homo sapiens
  chr2:80530622-80531978
  hyper
cgtccccctgcacggagcagatgtgattgtgatccagatagagccacgtgagctgcattaaccccgtgaactggccggcgcgcagctccgagaggctgttgtagcgcagggacaagcccagcaggccggacaggttgtggggcgcctcggtgaggttgagcgcctcgcagtacagcagccgcccctcgcaccggcacagctgcgggcacccgctgggggcggcgggcagcatctgaaagcaggcccccagcagacacaagaccacccccgagggcctcctcagcagccagtatagacagagaccgagcagcaggaaatccattagcgagaatctttccagagagactggagaatgtccattggaagcgctcggtcagaaatctacatcatattttattccgagggaggggaagcgggggagggggagaaaagggcaaaaaatcaaataaatacatagaaataaagaaggacccccctccccaaaaaccacacgttcacctctaagcatgcagaaagctgggcagcatagaaagttcacagccacggaaagatcaaagagatggtgatttggtccatgttagatgctgcagcaaagaaaagggaggaaaaaaaaaatcttcgggaaagaatttaattaaaaagtgtcttacccacccttttccagagagtgacaacctccattcagctgctccctttgtgtgcaggctaattatatgcagggcgagagaagacccctctgtgtttccgaggcagccccggtccgcggccggcggatctggcaggcgcacaatgtctcactttgctgctcggctcggggctgcaagggcggccggcaaggcggggaggcgacttctaggacccgcaagtttcccaactacgtgccggagcccgagcttcgccttcctgccgccttcctttccctctgcagttcggactgtgacgttgtggggggaaaaaactccaaactcggggctcgcgactccccaggatctgacagtctggttaatgtccgtcattggaaacgaccactgaccggcgccaccttttactccgcggaaacagcctgccattcgcgccccgggcagctgcagagagcgggctcactcatgctttgcgggcggcgggcggcgggcggcgggcggtggggaggtgcggacggcggcgcggggagcggcgagcggcgcccgggctccttccctccaccaggcagtgtgcggcgcgagcttgcacaggcacctactgctcactgagtgtcgtaagctgctcacgattgtgcgtcttccccgagcacctcagacatgggcagattgaaaaggggtgggcataaaaccaacattttaccgaaccactaaagta

SEQ ID NO: 106253 - DNA, 313 bp, Homo sapiens
  chr2:80549612-80549925
  hyper
gttcccttgcttgggcggctacgctccccgcggggctgcctgcagcccccgggcccttgcagctccgggacggcgcgcggcggcggaggccgcggggccccaagcgccagcctggccccggcgcagatgcgctgccccggccgcagcccagccgccgcgtgtgttgtcaggacgatcggaaacgcgtgtgtggggagatgggtgccagtgtcgccttgtccattatccaaaacccagtcgcttttgctggttcctcactcagcatgtgagagagattgtcttctcactcggtgccactcgggggccatactcc

SEQ ID NO: 106254 - DNA, 491 bp, Homo sapiens
  chr2:84686315-84686806
  hyper
gagacgggcggcggcgaggccgctgctgccggagaccatggtagcgatgtcagcggcagcggcaagggttgcggtcatacgccaatgacactcccaggcccccggggacctcccaggggcagaggccggaggaggcagagggtggccacagcagtcgcctgaacaaatttccctttacagaggattcttcacgaaacagcgggaatggcaggtgaagacaaagaggcatcctatcggagaggcagataataactcggctccttcctagaaatgtgggtttgattaacattaattataacagcagctgagggaaaaccccacgcgagactggccagcgcgtggcattgtgggcaatgtagtctgacggccgcgactggttcgtagcttttgagtgaggcggcgggaagggagcgagggaagagcggcagtgagaccggggagacaagggacttgaagactaggagggaagaaacagcgaggtgaggtgcgaa

SEQ ID NO: 106255 - DNA, 594 bp, Homo sapiens
  chr2:85107340-85107934
  hyper
gacgcaagacctgtccgctatagagctgtgttgactcgggcaggtcactgagcctcccttgcctgggtttccctcacccacaaaacgttgatgcgaacatctaaagcgcccggctggacacgcaaggctcggacagtggtcactccgcgaacgcactctgtgacctggagcacacaggtcccccgctgagtgtcagtttcccagatcggtaaaaacaagggaaatggcttcaactccctaaagtcccttctaactcaggcactgaacatatgaaggttaagccaagcagcttcagggcgctgttaatattttgataagagcaggtgaaattaaactcttaaggaagagagggaagaagaaacttcaaataaatgtgcccaagttcctggtccggtactccctggcggatccgtcccccgaaagctcgcgaaaatggctggcgagaccccagaggctctctcggacgcccttgggctggcggagggcaaaggccagggcactgagtcgcttggagcctgcgggctgcgcccccgcgggaaaggggaacccgagggcacggagaggagagcgagcaaggagcgccgcggtgctagg

SEQ ID NO: 106256 - DNA, 30 bp, Homo sapiens
  chr2:85108336-85108366
  hyper
gcaggtcagccccgcgcctaggcggcagcg

SEQ ID NO: 106257 - DNA, 30 bp, Homo sapiens; identical to SEQ ID NO: 37717
  chr2:85132035-85132065
  hyper

SEQ ID NO: 106258 - DNA, 30 bp, Homo sapiens
  chr2:85132782-85132812
  hyper
tcttgctgcagcaacgcgagtgggagcacc

SEQ ID NO: 106259 - DNA, 30 bp, Homo sapiens
  chr2:85133247-85133277
  hyper
gtgcctcggtctcccgcgccccagcccagc

SEQ ID NO: 106260 - DNA, 92 bp, Homo sapiens
  chr2:85154121-85154213
  hyper
gttcctacaagggacgcctaaacacagagtcctaaacacagagtcctaaacacatgcagggttggagggagactgacgaactcaactaccag

SEQ ID NO: 106261 - DNA, 30 bp, Homo sapiens
  chr2:85197669-85197699
  hyper
cacaagtccccaggcggtccgcggcctctc

SEQ ID NO: 106262 - DNA, 31 bp, Homo sapiens; identical to SEQ ID NO: 1643
  chr2:85198256-85198287
  hyper

SEQ ID NO: 106263 - DNA, 1368 bp, Homo sapiens
  chr2:85359941-85361309
  hyper
gttgaaaacctgggccgggggtcgcgttggaaccccacaggaaaaaggcgcggaaagccgccgggcattttccggggttccatagatgtccccagtgtcctagtccgtgcatcagctcgcgcactcggagggactctaggcagggggagggccccgcggccagtatgtgcgtccgaggctttcccgcagggggcagtgccgcccgcccgcgcgccgatacggtgggagggggtgggaacctgcgcggagttctggaggttctttgggagaaagttaggggatgcggaggggtgggcgcaagacttccaggactccagggaggccgtggggagggccgccgagggtgcagtgtgaggcgcaggagggggttgggggcggtgcacgttgcagggagacgcagcccctggaagatgcgagtgtgaacgtgtgagtgtgagtgcgtgtgtatgtgtgtgtgtgcgcgcgcaccgcagctctccgggttccgcgaggcgcgcgggtgtcagcttgcagccggggctcctccctccggcccccctgcccagcccggcggtccctcctccctccctccccgctcgcccctccccggcgggccaggggctgggacgccccggcggagcaggcggcggcggtggcgagttggggagccctaggctcggcgctgccggaggggcccgagccgagccgcctgcgccccggccgggcagcgccgggcccgcttcccgcggggccacgccctgtcaaactttgttgcggcggctagcgcagcgggcccgcaagcgggcgggaggggcgccgggccgggccgggcagggcgcgggcggctaggggctccgagagcggcggccccggcccgcggccccaccatgccccagctcggcggcgggggcggcggcggcggcggcggcagcgggggaggcggcggctccagcgccggggcggccggcggaggggacgacctcggggcgaacgacgagctgatccccttccaggacgaggggggcgaggagcaggagccgagcagcgatagcgcctcggcgcagcgggacctagacgaggtcaagtcgtccctggtcaacgagtcggagaaccagagcagcagctcggactcggaggtaaggaagcaccgcggccacccccgggggatcccggccctgcgtccgctcacccgctcttgcctttgtgtctcctccgcaggcggagaggcgcccgcagcccgtccgggacactttccagaagccgcgggactatttcgccgaaggtatgtgcccgctgggacagccccccactctcgattcccgctgcgctccgctgctcagcccgggcggcccaccgtcccccttgcttgggtggacgcacccttgccct

SEQ ID NO: 106264 - DNA, 62 bp, Homo sapiens; identical to SEQ ID NO: 37722
  chr2:85361466-85361528
  hyper

SEQ ID NO: 106265 - DNA, 20 bp, Homo sapiens
  chr2:85361628-85361648
  hyper
gcccccgggcttggccatgg

SEQ ID NO: 106266 - DNA, 199 bp, Homo sapiens; identical to SEQ ID NO: 37724
  chr2:85553951-85554150
  hyper

SEQ ID NO: 106267 - DNA, 146 bp, Homo sapiens
  chr2:85555443-85555589
  hyper
ttggccaccaccatcgtgtgcttgcgtttctatcctctgcttttttcgtggttccctcctggccgtacacaaacgtgctgtgctctggtctctcccatgtgggaataaatccatccgatcacctgcaaagcgttgccttcgcatcc

SEQ ID NO: 106268 - DNA, 236 bp, Homo sapiens
  chr2:85581696-85581932
  hyper
cgcccgggctagttcgctctccagtcaggaggcggaggcagctttgagcactgattaaccagccagccagcgaagagccaactctcaggtgatgattgaccctcccggctctccgtacttcttttgggtttccattgcctactgggaaatgtagttctcggggccaggggagccggcacggaagcggctgtgcgcatgagcagatgaggcctagccgaggcggcgggacccccaag

SEQ ID NO: 106269 - DNA, 30 bp, Homo sapiens; identical to SEQ ID NO: 37726
  chr2:85765069-85765099
  hyper

SEQ ID NO: 106270 - DNA, 30 bp, Homo sapiens
  chr2:85765629-85765659
  hyper
attaatctgctttccggccatcttcagcag

SEQ ID NO: 106271 - DNA, 30 bp, Homo sapiens
  chr2:85766089-85766119
  hyper
ggtctctggagggccggattgccacggcac

SEQ ID NO: 106272 - DNA, 30 bp, Homo sapiens
  chr2:85788367-85788397
  hyper
aatgtctcacagcacgcccccttccccaca

SEQ ID NO: 106273 - DNA, 71 bp, Homo sapiens
  chr2:85788616-85788687
  hyper
gcttccctaggctccgcctcccgacgcgtcagcggctgtgcggccggccgcaaagcgccagcactgtcgta

SEQ ID NO: 106274 - DNA, 66 bp, Homo sapiens
  chr2:85788984-85789050
  hyper
ccgagttgaggacgcgcctggaaatgttgcctgggttttgagccattgcacgaccccttcactttc

SEQ ID NO: 106275 - DNA, 109 bp, Homo sapiens
  chr2:85804637-85804746
  hyper
gagcgactcgagatgcgaggtgggcgggggcaggctgaaagttggagcaagcaggaagtgaactgagggccaccctgggaggaagccgactaggcgaattcacttactg

SEQ ID NO: 106276 - DNA, 30 bp, Homo sapiens
  chr2:85805009-85805039
  hyper
cttccgtgccagcgccgatgggggctccga

SEQ ID NO: 106277 - DNA, 367 bp, Homo sapiens
  chr2:85822390-85822757
  hyper
accaactagagggccgcgggggcagaagtgtccggcggggatccggacagcgcatccggaagcgccatgggccaacgctcgcaggaacctgaacccctgggccagcgccgcctttgctcgcagaggcctctagcatctgtactgtcgaagccctctgagcttcagggcagactgaagagccttacacaccagacacttggacgcgatcgcgccagaaatccccgggaattcagtcttggctccgactccaaaacaaatgattcctcaccagccagatctccatcattggcgttagtctctggtcacctgacttgttcaagccaatgagagggggccgaattagtacttccgctttccgtgctgttta

SEQ ID NO: 106278 - DNA, 236 bp, Homo sapiens; identical to SEQ ID NO: 37728
  chr2:85829250-85829486
  hyper

SEQ ID NO: 106279 - DNA, 250 bp, Homo sapiens
  chr2:85829657-85829907
  hyper
caggacccgggacgcgagagtccccaggtgattcctggaagcccggaggaagggaaggagcccagtacgcacctccccggagcgccccgccgccgccgcaccctgctcggccccctcgtggcgccgactctagctgcggccctcggagcagccctgaaaggtttaaagggccgagcggccccgcccctggaggccccaggcctcgccgcgccgcccgccgggacgtggagtccgcgcagccccggcctcg

SEQ ID NO: 106280 - DNA, 159 bp, Homo sapiens
  chr2:85830121-85830280
  hyper
ctacctgggattgtcgccgtgcacatggctggaggagcgtctctccgccactgcgcacattttgcagcctgcaccggccaacggtgagtcctctaggaagctctctcaacgtggcgccccatgcctgcctctggccagggctgcggtgggtccagagaa

SEQ ID NO: 106281 - DNA, 30 bp, Homo sapiens; identical to SEQ ID NO: 37730
  chr2:85838626-85838656
  hyper

SEQ ID NO: 106282 - DNA, 30 bp, Homo sapiens; identical to SEQ ID NO: 1648
  chr2:85839346-85839376
  hyper

SEQ ID NO: 106283 - DNA, 89 bp, Homo sapiens; identical to SEQ ID NO: 1649
  chr2:85842677-85842766
  hyper

SEQ ID NO: 106284 - DNA, 30 bp, Homo sapiens
  chr2:85843175-85843205
  hyper
caaattttctgcagcgtgatttgtccccag

SEQ ID NO: 106285 - DNA, 841 bp, Homo sapiens
  chr2:85980859-85981700
  hyper
aggtagggagcccgcggacaaaggaggcggccggcggcccagctgttttgaaaaatgcttcctgtttctttaaaggcgctcgcggctcgggcggcccgggctggggaggcggtggcggcgggagctgcctcctctccgggcggcggcgctgactgatctcgcgaactgggcttctgtgtaaactgaggctaaacaaacacagatggagcgcagcgggcgttctccagaaatgctggcaaggaggcagcgacttcagatgacactctgagcgctccgggaacggacagcccggcggcttcccgaagccggcggcgcagctgcccggggcgagggggagaaagggagagagggagggggagggcgggcgaagcgggagagccagagactcctcggcgctgagcgcggcggcggcccgggcagccccacgcccctgcctcgcgcgccgcccgcgccatgaagcacatcccggtcctcgaggacgggccgtggaagaccgtgtgcgtgaaggagctgaacggccttaagaagctcaagcggaaaggcaaggagccggcgcggcgcgcgaacggctataaaactttccgactggacttggaagcgcccgagccccgcgccgtagccaccaacgggctgcgggacaggacccatcggctgcagccggtcccggtaccggtgccggtgccagtcccagtggcgccggccgttcccccaagagggggcacggacacagccggggagcgcgggggctctcgggcgcccgaggtctccgacgcgcggaaacgctgcttcgccctaggcgcagtggggccaggactccccacgccgccgccgccgccgcctc

SEQ ID NO: 106286 - DNA, 30 bp, Homo sapiens; identical to SEQ ID NO: 37734
  chr2:85981947-85981977
  hyper

SEQ ID NO: 106287 - DNA, 169 bp, Homo sapiens; identical to SEQ ID NO: 37735
  chr2:85982462-85982631
  hyper

SEQ ID NO: 106288 - DNA, 762 bp, Homo sapiens
  chr2:86114868-86115630
  hyper
cagctgtatccttccgtggaaaaggattagcagccataagcccgggggagggcagctaaacaccagagggcaggagatgagtctccttcctctctgtgacacccagcacggccctgccacgaggagcaggcaaccactggtgccagatgaagcgcagcacataaaaccattttccccttcaaatgaacgatgcctaattaagcaaaagccgcatgcatgacttaagacatgaggatataaaattcgtcttccgagtcagctagagattctgcaggatcctctaccctcgtaaacgtatttttttatgattagaaaaacccggggcctggaagggacctcggccatcggcagggtaagcttctcaggagagaccatgagcccgagccccacagggggatcagtgtctgccaaggtcaccaagcgggtgtgaggcaagggcagggctcctcggggatgctctcggaaaaccctgcgttacttacacacgcaaggcgtacaatgaatgcacacccgcgtcaagccacggcttacaattcagaagaaatcaaaaggtcgccaaaacctgtcttctccgcaaggctggctgcagagagggtgcagggaaggtcaccggcaaatttctaccagcggccccacatcacgcctccccgatggatgcagagagaggtttcaggagctgctagtaaccttgcagggggttccctaagcccatcccaggaaaacgagttaactcggctctgctaactccgaagcttccagcaa

SEQ ID NO: 106289 - DNA, 30 bp, Homo sapiens; identical to SEQ ID NO: 37737
  chr2:86116369-86116399
  hyper

SEQ ID NO: 106290 - DNA, 204 bp, Homo sapiens
  chr2:86333309-86333513
  hyper
cgccccaccttcctgaaggtcgaggcacgctttcccaacatgctctgcagagaaatcaaagatggcggttgtatctgctgttcgctggctgggcctccgcagcaggcttggccagccgctgacgggtcggcgggcgggtttgtgtgaacaggcacgcagctgcaggtaagagacgcttagggtatccgcgaagaagaccgcgga

SEQ ID NO: 106291 - DNA, 30 bp, Homo sapiens; identical to SEQ ID NO: 1651
  chr2:86426654-86426684
  hyper

SEQ ID NO: 106292 - DNA, 31 bp, Homo sapiens; identical to SEQ ID NO: 1652
  chr2:86428203-86428234
  hyper

SEQ ID NO: 106293 - DNA, 30 bp, Homo sapiens; identical to SEQ ID NO: 1653
  chr2:86564038-86564068
  hyper

SEQ ID NO: 106294 - DNA, 30 bp, Homo sapiens; identical to SEQ ID NO: 37742
  chr2:86564567-86564597
  hyper

SEQ ID NO: 106295 - DNA, 116 bp, Homo sapiens; identical to SEQ ID NO: 37743
  chr2:86565023-86565139
  hyper

SEQ ID NO: 106296 - DNA, 30 bp, Homo sapiens
  chr2:86667751-86667781
  hyper
ctaaatttaatgaacgtcattatccagtaa

SEQ ID NO: 106297 - DNA, 266 bp, Homo sapiens
  chr2:86668218-86668484
  hyper
gaataggcctatggcggagggatcactcgcttattctctgtgtactttaacctaatgggggtcgcccgggagtcggaagggggaggggaaagggaggaggcagccaaggaattgtttttttctctggccccgccctcgcccggggggccaatggtgatgatctgtttcccccggagcctcgcccagctcctgtgtttcagccaatgagcggcggaagcggctccgaggggggcgggtccgggaggctgtgcgtgtcttgtgagagc

SEQ ID NO: 106298 - DNA, 30 bp, Homo sapiens
  chr2:86669097-86669127
  hyper
ccaccggccgcccccgtcgcattttgtttt

SEQ ID NO: 106299 - DNA, 30 bp, Homo sapiens
  chr2:86790459-86790489
  hyper
aaacagccccatgacgaactgaacccgtct

SEQ ID NO: 106300 - DNA, 54 bp, Homo sapiens
  chr2:86850367-86850421
  hyper
gcactgacccaggtggcggggtcggccctccggtgccgcgatctcaagggggag

SEQ ID NO: 106301 - DNA, 139 bp, Homo sapiens
  chr2:86850742-86850881
  hyper
aggatggggcgtcgcggtctctgcagatggaatcggtctcggagggaaaaaaccaataataggccccgagactgctcctccaggcggctacccggctgcctcccggccactcagcgcccgtcccgctcggatgggcagt

SEQ ID NO: 106302 - DNA, 301 bp, Homo sapiens
  chr2:87016716-87017017
  hyper
ccccgcggtgcgtgccgcccccgccccgggcccccgcacgcctcacctgcgccccccgccgctggccggcacgcctctgggcgcagggacaggggctgcgacgcgatggtgggcgccggtgttggtggtcgcggcgctggcgtcgtggtgggcttcgctgcaagagcaacagagcgtggttgggggccaggctggggttatggaggcgccccagccccggcctcgcgcacctttccccacggggacgcctccccccggttttcctgggagaagggatagcagaggagacaggatggggacc

SEQ ID NO: 106303 - DNA, 1073 bp, Homo sapiens
  chr2:87017490-87018563
  hyper
ggagttgctcagggccgagcagaaatagtagccctcgttctctcggcggaagtcgctcagggtgaggacgaaggtgtcccccaacctcttgcccgagaaccgctgggtgtccagcccctcggccgccttgggcttgttttgggagaggtataggaggaaggtgggactggcggcggcgccgcgcggctggaagagccacgagcagcccgacgtcgggttggacagcagcacctggcacttcagctccactgtctcgcccaggttccaggtccgatccagcggcgacacccggaactggctcggcctggcggcgtctgcaggcggcaagcagcgaggctgagcccgcagtcccgcgccccccgccccccgcccgccccatcccctgccttcccgggcgtctcaaactcacggagcagcaaggccagcggcaggagcaaggcggtcactggtaaggccatgacgcgctccccaggacgctgcttggctcgaagctcgggcgcgaggggaggcgcgcgggagccggtggggcgccgaggggggaaagttgcgcccttcggccggcccggagcctgatttcgcatttggaggatgtgatgtcacccgaagcccccgccgaggagagtcaccctccttttcgcggttgtcgccttccagcccggcgaggaggctggggcccgtgaatagggccgtcgaggcagcctggccaggcaactgggggcagctgaaaactgcgggtttggggatgaggaaaagggcttggaaatagtccttggaaatggttgtcttgtgagagtgacagagtgggtgaagggagaccaaagatttcaagaagtgagggcgagagtaggcagcaaaggaggggagtgtcccttcctttgccttcactaaaggcgtctcttgtactgtcaccttgggactttttattggcaaaatgggcactgagggctgaaaaggaagaggaactagcgacctgcccgcttctgaggaactcgctagagcagccccagttttcaccgaggaaggaccctctcccttcccccaggagatttccatgagagcggcagcagccgaag

SEQ ID NO: 106304 - DNA, 769 bp, Homo sapiens; identical to SEQ ID NO: 37748
  chr2:87034563-87035332
  hyper

SEQ ID NO: 106305 - DNA, 119 bp, Homo sapiens
  chr2:87035594-87035713
  hyper
gacactccctatctcgcctgtcacccgcgtccagcaaaatctgatgccctgtcggcccagcagggggcggtgctgctttagttttggcctggtcggggttgagcggaggagggagcgac

SEQ ID NO: 106306 - DNA, 334 bp, Homo sapiens
  chr2:87088801-87089135
  hyper
tgccaagctgcctcccgggcgccccgccaccgcgggctcgacgctgcaccctgccaggaccagggccaggacagccacttatcacctccccgctcaggccccgggagcgcagacccttgggtagcccgcgcgccgccgccttacctgtcagctgcgcggccaagaggagccacagccgcggccgcatcgtggcgcgcccgggacacctggccccgggggctcggcggagacagtcgcggctggggtgggtgaggagctggccgggcggggcgcctgggtcggggagctgggggggcagtggggagggcgggaccgggcgcggtggcggcgggag

SEQ ID NO: 106307 - DNA, 916 bp, Homo sapiens
  chr2:88315896-88316812
  hyper
actgcaataccaaatcgatgcgtagactagatagagtaaactcttactccaactccccgttccaaaactgcgtttaatatagcgttcatcaaacagaagaacataccagatattaaactgataagaacacacactacactcaatcattaaccaaacagcaaaaaagagataccagttacccggggcctcccacgtcctcccttctttcatccaccttaaggtcacggtgagaaacctcaccttcggtaaacatctcacctgctttctgatgtaaatattatattgaaaacataggccctttgagacattttgtccgctccttgactcttagtgacttcgagctttgtcgccccttttccttggtcgcgagggccgttcatttgcatgtcccacccgctctgcgcccgggaggcgtggccaccaaggggccgggccctgcacagcgccctggggaagctggtttgaaagctctggagcgaccccaatgccgggtaaaggacaagatttgcccagacggaagggaatttggggtgaagtggccgtaaaagtgtgggacgaaactgtttcgggcagagcggtgggaactcacctgaggaaagcatgggggaggagtcactaataagaatgagtggcagggacagggcggccttgtaacgccctcggtgttggaagggaagaccgtacagcgcgatggggaccagggcggcgggccgcagccagggtgtgggtgggcgacggtcaaggtgccttgaagcggattctgtcctcgggagctgcggttcttcctcctccgccctcaccggcgggcgaccttaggcagggcgtgaaatgcaacgggagccctggagggagggtgaagccgcgcgtgcaggaggaacctccttttggcgagttcaggccccgcagctgcggaggt

SEQ ID NO: 106308 - DNA, 30 bp, Homo sapiens
  chr2:88354753-88354783
  hyper
cttactctcttccacgtttgggcttttctc

SEQ ID NO: 106309 - DNA, 82 bp, Homo sapiens
  chr2:88355119-88355201
  hyper
ccccgccgccggggcgggaactcaccttctctgaggcaggggcgggcgtctacaactactgtcccccgccccgccaacgccg

SEQ ID NO: 106310 - DNA, 30 bp, Homo sapiens; identical to SEQ ID NO: 37751
  chr2:88650233-88650263
  hyper

SEQ ID NO: 106311 - DNA, 154 bp, Homo sapiens; identical to SEQ ID NO: 37752
  chr2:88751265-88751419
  hyper

SEQ ID NO: 106312 - DNA, 355 bp, Homo sapiens; identical to SEQ ID NO: 37753
  chr2:88751460-88751815
  hyper

SEQ ID NO: 106313 - DNA, 1101 bp, Homo sapiens
  chr2:88751942-88753043
  hyper
gtaaggcgccctggctgccgggggggcgcccggggcggcggcggtggcggcgggcgggggcaggccgggctgcgaatacactccgaagttgtcgccgcagtagagggccatgtcggcggccgtgggcggctgcggcgcggccgcggcgaggggcgagcggggctggtctcgccgctcgggcgagagcatccctttgggggccaaccctgcggctccgccttcacccgcgctgggcgcccggtgctccgggccggggtcgggcgggtgctagcggagcgcctgctagccggcctcttataaccgagcccggcgcggctcctcctgggccggcccggagcggggcggtggccgcgggcctgggctctccacgcccccgccacgccccacctgcccgcgcgcccaaacccggagcccgcccgccccgcccctaccgcccctctgcccgggcccgggagcgtctgggaggccggcgcctccaggtttcgggcaaaaagcagcaccccattcctagcccacgtttcttaacatcataataagtaaagccacgaatattaaagagaagataacccgaacagtacgaatgatttctaaaaagttaacttggggtggccgctcgggccacctgcctagtcatccttttggcttttctacctctttcctcctaaccttttgtgatcgagtcgcggaattcacgtccagtctcaaccgatcggcttccagtcgaaaataatcgatgtgatttacaacgctttggggtatacggtagaggttattaacaggcccgcttggcgtgtccccttctcctcggggattctgtgattggaggaacggaaatcagtgttgagtttttctaaccaaactgtaggttcgctcacattcgggaagcatttattcgttttctgtgcggtttgtacgggctttcgttgtgatttgttatcttcaaaaacataaaggtgaatgttttcaaagacatttaaataagtaccttcggaattagcattttaaacccgaaagtttcaaagttttaagtaatttaaactgtgcaagaagcgctcatttacaaaaacagcctcatctaacgggcaggtctatgacttgccc

SEQ ID NO: 106314 - DNA, 50 bp, Homo sapiens
  chr2:88926935-88926985
  hyper
gccacgtctcagcccggcctctgccgctgccacctgagtgacagcctatc

SEQ ID NO: 106315 - DNA, 289 bp, Homo sapiens
  chr2:88927015-88927304
  hyper
cgcgtttgctctctcattggctgcggccgctgccactccatgttcccaggctggccttgttggggaaggtggactttccctggtggtcaacatcgcacctaccaatcaaatcgtaatttcgtcgttcgaggcccgtccctcttccggacgcaattaccaatgagaaatgcccttccccgacgtctttttacctgattggtgcgctcatcagttcccggaatacctttcctacaacagattggccatcgcggtggttggcctcgccccacaaagcgaggcgctggagaag

SEQ ID NO: 106316 - DNA, 30 bp, Homo sapiens; identical to SEQ ID NO: 37756
  chr2:88990723-88990753
  hyper

SEQ ID NO: 106317 - DNA, 78 bp, Homo sapiens
  chr2:88990955-88991033
  hyper
catactgatattcccgcggctaatggtacttcacagagcgaagtgccggagcccgtcgccggcgattgcgcattccgt

SEQ ID NO: 106318 - DNA, 30 bp, Homo sapiens
  chr2:88991564-88991594
  hyper
gttgtgggtgctgccggggcgcgcctagct

SEQ ID NO: 106319 - DNA, 170 bp, Homo sapiens; identical to SEQ ID NO: 1663
  chr2:89064805-89064975
  hyper

SEQ ID NO: 106320 - DNA, 294 bp, Homo sapiens; identical to SEQ ID NO: 1664
  chr2:89065128-89065422
  hyper

SEQ ID NO: 106321 - DNA, 29 bp, Homo sapiens
  chr2:90413160-90413189
  hyper
ttctgcccccgccaccgcggctttctgcc

SEQ ID NO: 106322 - DNA, 268 bp, Homo sapiens
  chr2:91635152-91635420
  hyper
cgtatgcggcttccggcccccgccgccacggctttttatcacccccgccgctttttgcccccgccgccgcgggtttttgcccccgcccccgttgctttttacccccgccgccgcggctttctgcccctgccgacgagggtttttgcggctttatatccccgctgtcatggctttttgcggccgtggctttttgccccctcagccgtggtttttttgcggcttttggcacccgtcgccgcagctttttcaggcttttggtgaccgccgc

SEQ ID NO: 106323 - DNA, 153 bp, Homo sapiens
  chr2:91635539-91635692
  hyper
gcggctttttgcccccgccgtcgcggctttttgcccccaatgctgcggctttttacggctttttgtgcccatcaccgtagctttttgcctccgccaccacagctttttgcctccgccaccgcggctttttgaccccgccgccatggcttgttg

SEQ ID NO: 106324 - DNA, 162 bp, Homo sapiens
  chr2:95664006-95664168
  hyper
agggagggcggccctcggtggggtcgactgggcggagccgccgcctcctatcttcccttgaaggcacctgcgcagggggacccgcggtgcctgggaggggagggggactttcgcatgaagcccctccttgtcagtccggtcaccgcgcgcccgctctgaagc

SEQ ID NO: 106325 - DNA, 1614 bp, Homo sapiens
  chr2:95690866-95692480
  hyper
ccaagcagagaggcccggtgcaggatcccagcgccgaaccagcgccggctcagtggacgcggaaggggccggcggccgcggccggtcccatcccccactgcagacccccagcctgtggcggtggtccagttccgccaggaaaccgccgcctggagctgtgggtcgcgcacattaacgcatccagcggaaaaatgaaggagacccaaattcaaagttaaagtaatggtgacccgagaggtgccttgatgagaaggtttggggtcccggttactgatggttatcattcttacgagatgctggtcacctacgaagggagaaaggcacgaggagcgcctgaccaaagtggttttgccctgcttcccgcaagaggtggcacccacggctggaacgcaggagtcagacccacagtccccagctctggacgcccgcagcggggcctcgaagaggttcagggcggtgcccgcggcgctcgggccgggtctcccggggcgtggggcggggggcggggttgggcggcggccggggctcctccctcttctgccccgggctcccctgctcttaacccgcgcgcgggggcgcccaggccactgggctccgcggagccagcgagaggtctgcgcggagtctgagcggcgctcgtcccgtcccaaggccgacgccagcacgccgtcatggcccccgcagcggcgacggggggcagcaccctgcccagtggcttctcggtcttcaccaccttgcccgacttgctcttcatctttgagtttgtgagtggctcctggccggggaagggacggggtgggctgagccgtgcgctctctcgggcgcccagcacagctgtcggacgggatccgctagctgcgcaggttctgggagcatcggggcagcaggcgcagggcggggactaagccagggaagtcccctcccacctccggtcctttgtgcccttctagaccaacagaatgaggggaacagtctacaggactatggaggaaaaactgggttcccaactggggtcagatgtaggcagcggggcagggggggacggctcttggttcgctggtcccaaagctgcgcgcggggcccacttgacgcgcgcagcgccaccgaagctcccgccgcgctttgcgcggttgggtagaagtgcgcagcttttacaagggagaaggtttcgttaaaaaagaaaaaaaaatcagcaagagaaacattagtattaccaaccgagatttggagatgagagggagctgaatccggtttattttcttctggccttttaaagtttctggcgagggaacgtatttgcgaccaattcgatctggaaatgaggccatcgtttgcttggccgcagtccttctgccccgtgtgcggggtgggggtggaggagatggggggtggggggtggggggtggcggcgagagcgatccgcgcgcctcgactgaccttgggcaggcccggggcctctgcacctgcggtcggtcccgccttgcacgcacggtctctgcctgaggctgcaggaaagcgcttcctactgagaactcctgataagcgctcacggtgtcgcgaagccgaagtgacctccctcagcctcaactccccgggggccgctggccttcacct

SEQ ID NO: 106326 - DNA, 346 bp, Homo sapiens; identical to SEQ ID NO: 37761
  chr2:95825282-95825628
  hyper

SEQ ID NO: 106327 - DNA, 115 bp, Homo sapiens
  chr2:95831016-95831131
  hyper
aagctgtcgggagtcggaccagctgcacagttaatacatatgtgtcctaggctcctctctccttccaacgcaaatatgtgtacaaaccctgcctggaaccgcagccctgctctca

SEQ ID NO: 106328 - DNA, 30 bp, Homo sapiens
  chr2:95831817-95831847
  hyper
ttgtatgtcggtcccggactttaaggttgg

SEQ ID NO: 106329 - DNA, 253 bp, Homo sapiens; identical to SEQ ID NO: 37763
  chr2:95873227-95873480
  hyper

SEQ ID NO: 106330 - DNA, 218 bp, Homo sapiens
  chr2:96011306-96011524
  hyper
gtccaaacaggactcgcgcttataggcgtggagcggagctggatttctcccttggctaacacagcgggaaggatgaggtgcgggccgtagccgcgctgccgcgctgagtccgtccggcggggatgcccacagtgcgccgcgcccgctggagggcagcagagggccaggctcccggctcaggtctccggcctcgcggctccaaggaccccgggctccgc

SEQ ID NO: 106331 - DNA, 1166 bp, Homo sapiens
  chr2:96011564-96012730
  hyper
cgcggctttccctcctctaccagacccggcaggaagaaagccacccacaaacgaataagcatgcccttgccctgcccgtgcgtggcactccgcatccgcttagctcttccccgccgcccgaaggcgggcgtctccccctctctgcggagcaggcggcggcggctgcgagtccgtgactcgaccaaggtcacgcagcaaagtcagcgaccaagctctgttccgcagacgccagggccaaagcccacactttccctaaagccccgagtgcacgcgcgtttccagaacgggagaactttggagaccaacttctgcattttcaaagggggccagcctgggcccagtttaatctccggcggaggaccggggttgcgggaaatgcgccggggagtgagggcttcccggatcccccgccgccgactccgcgcgggccagcggcgcggggcgggccgggatcagcgcctccccgggagagcgcagccgccgccccctcctctcgggctcccggcccctccccagcccctcggcccccatcctgcgcgtgggagaaaccgccgaccgcgcggcctccaggggctggcggagcagcggtggcgacgcgccagactccgtcctgggctggcccgtgccgggcggggcggggccggctccctccgcccttcccgggcaggcgcgggggggccgcagggacgcctcccggagtggccgccgcgcctaggccaatgagcgcgcggggagcggcgatggaggctggggcggccgggagcgcccgggacccccgccgccgcgccgccgccgccgcgcccccgcgccccggcgcccgcggggctggagagggggcgacagaggcgcagcgcccgcgccgggcatggaggcgccgctggcccgcgctggccgtccgcgctgcgtttcgcgccgccgccgccgccgcgcctcgaagtttgccggctgactcggaaagttgcgctcgggctcggccgccgcgtccggtccccgcgtccagcctccggcctgacccgctcgccgccgccgccgccctccacggggccccggcccagccaacccagcagccccgcctgccgggggcatgtgagccgtcgccgcccccgagaggccgtgcgggctgcaggggccccggtgcctccgaggcagcgcgtgggcgaggggtg

SEQ ID NO: 106332 - DNA, 181 bp, Homo sapiens
  chr2:96068499-96068680
  hyper
ctgctgcatttccccggctggctgcggtcactggtggcagtgctcaggcgcccgccgcccttgaccttcggccccgcgagctctaaccctacagcgcaggaagatcggccgccgcggccaggtaggacgagcctggctgggtctaggccagaagggtgtccgtggcgccggtctcccgcgg

SEQ ID NO: 106333 - DNA, 587 bp, Homo sapiens
  chr2:96192239-96192826
  hyper
accagcttgagctgccgccgctccccgagaggccgcaaaagcccgagggctccaagaactgcctgcagaggctcagggactgcgagctgtccgcgctgacgccgcgctccatgcggggcccagaggaccggggcgccctggaccacatggtcaggatgaccacgagcctctaacagccccgccggggccctcgcgtgccagactatgtgccccgagagcaccttgtgctgggggaagaggcggctggcggtgcaggaaatcctggcggcgcaggaaattccggcggcgcggcgaggggtggggggaggcaggcgcaggaggcgggcgaagaggagggcgcagagtagcataagccgctcggcctagcggccgctggctccacaaaggcctccccaagagccggcctcccacctgcccggctgccggggtcctggggctccgccgcccccgccccgcggacggccagcctcctgcccctgcagtgcctgcagcagagcagcttggggcccagcgtggtggtgcccaggtccgcctcagcaaggtgcccgcgcccaccttccaacccaaaaggccggcgcggaagggca

SEQ ID NO: 106334 - DNA, 30 bp, Homo sapiens
  chr2:96348676-96348706
  hyper
gcgtccccccaccccgtaccagagcccacg

SEQ ID NO: 106335 - DNA, 30 bp, Homo sapiens; identical to SEQ ID NO: 37766
  chr2:96657388-96657418
  hyper

SEQ ID NO: 106336 - DNA, 7 bp, Homo sapiens
  chr2:96781976-96781983
  hyper
tcgcccc

SEQ ID NO: 106337 - DNA, 192 bp, Homo sapiens
  chr2:96782022-96782214
  hyper
cgagcggggcctaggaggtcgggaacacccaggaccagcagccgccctcctacatcctcctccaccggtgcccggggtccctgccgtccgccccagagaagtttcccaagttgtcccgccgccgtccccgtcccgcccgggaccggagaaagtcgcgccctcccgccacgcggatgccgtacgctctggggg

SEQ ID NO: 106338 - DNA, 30 bp, Homo sapiens
  chr2:96811249-96811279
  hyper
caggaaggcgctggcgcccgcgcccgcccc

SEQ ID NO: 106339 - DNA, 30 bp, Homo sapiens
  chr2:96874044-96874074
  hyper
tgcgcgatctgctgcgcgcgccgcacgcgc

SEQ ID NO: 106340 - DNA, 171 bp, Homo sapiens
  chr2:96874379-96874550
  hyper
ccgggatggctccgcgactgctacaccaggcactcctgggcccgggcagcagaccagtcagccctgtggctcctcggcgacctccagcgggcgcccggggccgggatgcagggcgcgcggacagaaacgagacagacagctcaggcccagcagcacgcaagctcccgcgcc

SEQ ID NO: 106341 - DNA, 30 bp, Homo sapiens
  chr2:96874801-96874831
  hyper
ggccgtcccagccccgccccgcggagaaac

SEQ ID NO: 106342 - DNA, 53 bp, Homo sapiens
  chr2:96931552-96931605
  hyper
gggtgcgacctgtgcgcagaaaagaccctccccacgccgcccactgttcctca

SEQ ID NO: 106343 - DNA, 195 bp, Homo sapiens; identical to SEQ ID NO: 37768
  chr2:96931838-96932033
  hyper

SEQ ID NO: 106344 - DNA, 30 bp, Homo sapiens
  chr2:96971166-96971196
  hyper
atccgccatggccgcggctgctcggaggct

SEQ ID NO: 106345 - DNA, 30 bp, Homo sapiens
  chr2:96971408-96971438
  hyper
atgtgggcctggtgcgtctgggtccccgaa

SEQ ID NO: 106346 - DNA, 832 bp, Homo sapiens
  chr2:96987014-96987846
  hyper
caagctgcgtccacgcggttaggaagcatcgcttgggccctgggggatgggcagcggcaaaggagagctttttcctgtccgctcggggaagagcgcccaggggaaaggggttgtgggtcccggcacgcggcactacgctccccgtcccccgcctcgtctttcttcggctcggcccgtggggcttccgccgccctgggcttgcagctgggactcatttccagatcggtcgaaggcaggtcttccttctagggaccggtagctcagaggaaggaccggcggcaaccgctgccctgtccgaaagtgcgtctcctttttcattccgaaatgaaattcgtagttggttaaaacggggcttgccagcacgatttacaaacaagacgagcgctcgctgcaatcacatgaggagaaaaggaaaggactaattcataatgcggtcactagagcctcgatgtgcccaggggagcgcccgccgagcgccagcgggaacagcgcatcgcggacgctgcagggagtgtggcccctccgcaggcgcgtgcacaggctcgcattctggagggcagcgcatctcagccgtgcgcccggtccttgccaccccaaactccggcagcgaacaacgcgtcctgggggcggccccgcggctgctcttggaggcggcggaaaaggcgcgtccgcggcttgggggacggaggcggggtcgggggcgaagggaggcggctcctggggcccagaaagctggcgaggatgaggaacctccccccacctccactcccagctctccgaaccgtgaagacactgccccggcgcaaagcgtctctagcggtcctaggcgcac

SEQ ID NO: 106347 - DNA, 500 bp, Homo sapiens
  chr2:96990881-96991381
  hyper
agggaggccgagcagcggagagtgtgtggccacggcccctccactctcccagcaaacccacgggggcctcggtgcggacagagacccggtgtggggaggccgctgcccctgcacgctgggccacgggggtttgggcggggaggagcttgtactgggtgggcggggaggagcccggacggcgggagcggctgcggcgcgcgggcgccctcggagccgcgtgctgggggtcgtaggggcccaccgcgctcagccagacgttcagacgctcggacaagcatggtctataacccaggaaaggggagcagggccactcccgcgggcggccccagcgatgaaccggacgcccccaccctgccgggaaaaaagcagtggcggtcaggccgcgctgtctctttaagatcgtgttcctactaacactgacggtgagtaacctggccctgggtcccgggagacatcccgaggtaggatgggcccttggcctcctacggataggcgggtga

SEQ ID NO: 106348 - DNA, 53 bp, Homo sapiens
  chr2:97001266-97001319
  hyper
aattccacgaaagacgggccttgctcaccctgctcgacgctgggttcccaagc

SEQ ID NO: 106349 - DNA, 30 bp, Homo sapiens; identical to SEQ ID NO: 37770
  chr2:97001945-97001975
  hyper

SEQ ID NO: 106350 - DNA, 216 bp, Homo sapiens
  chr2:97073200-97073416
  hyper
agcctctctcacccccgttctcaccaaatacaggcacttcctctgagaggacggcagagggcgcagatttagcttctgtcctgcgaatgaagcacgcagtacaaggttccaaactgcaagtcaacagcaagcacgaagcagccacactggaaatggggtgcctccatcgcctggggctgtgggctgccatcctctgccaagcggatgctctgccac

SEQ ID NO: 106351 - DNA, 211 bp, Homo sapiens; identical to SEQ ID NO: 1667
  chr2:97171201-97171412
  hyper

SEQ ID NO: 106352 - DNA, 198 bp, Homo sapiens; identical to SEQ ID NO: 37772
  chr2:97173862-97174060
  hyper

SEQ ID NO: 106353 - DNA, 287 bp, Homo sapiens; identical to SEQ ID NO: 37773
  chr2:97175213-97175500
  hyper

SEQ ID NO: 106354 - DNA, 49 bp, Homo sapiens; identical to SEQ ID NO: 37774
  chr2:97193014-97193063
  hyper

SEQ ID NO: 106355 - DNA, 401 bp, Homo sapiens
  chr2:97193251-97193652
  hyper
cggtttgagccagctcccctttttgagtcagatccggcggcagggccagaaaagcgctttctgaaaccccagcgcggtcctcggtgggggtggaatggggtggggtggggggcgcggccgcgccgctgggcgccctccccgccctcccccctccccacccccagtcctccctccgctgcccgccccccaagcccggtgtcgccccctccgccccctgccgcatccccggagccagtgcccacaggggccaggcagcccgcaggggtcgctcacggctggtgtaggggcttggtccaccacgctagtacttcgggcaccaaaatagaaaaagaataacgcttggaaagaatctgatgtttccgaaggagcatcgaaaatcgccgttacgggaaaagtaaaac

SEQ ID NO: 106356 - DNA, 30 bp, Homo sapiens
  chr2:97202308-97202338
  hyper
agaggcgaggggcgcgcactacaattccca

SEQ ID NO: 106357 - DNA, 269 bp, Homo sapiens; identical to SEQ ID NO: 37776
  chr2:97203313-97203582
  hyper

SEQ ID NO: 106358 - DNA, 229 bp, Homo sapiens
  chr2:97303972-97304201
  hyper
cgatccccacggcccgccactcccctcgaagccaacgctgctctcacccgcggtcttacggccgcgcgctcggccacggccggatccctaagcgcgtgcgcgttaacgcctccacgccccggcgctgcgggcaccgagtaaaacgcggaagcgggttacggcctgggaagggagaggcggtgagcggcaaagcccggaacggatgaagctccggcgcctctgtccggaa

SEQ ID NO: 106359 - DNA, 31 bp, Homo sapiens; identical to SEQ ID NO: 1674
  chr2:97405566-97405597
  hyper

SEQ ID NO: 106360 - DNA, 244 bp, Homo sapiens; identical to SEQ ID NO: 37779
  chr2:97426259-97426503
  hyper

SEQ ID NO: 106361 - DNA, 36 bp, Homo sapiens
  chr2:97427012-97427048
  hyper
ttcaccgaggtggacgatgccgagaccctccacaag

SEQ ID NO: 106362 - DNA, 299 bp, Homo sapiens; identical to SEQ ID NO: 37780
  chr2:97482862-97483161
  hyper

SEQ ID NO: 106363 - DNA, 79 bp, Homo sapiens
  chr2:97523293-97523372
  hyper
cagattctgctccccgggccctctctcaaacacctgagcaggcttgtgtctcccaggggaggtcgtcccccgctactcg

SEQ ID NO: 106364 - DNA, 138 bp, Homo sapiens
  chr2:97523808-97523946
  hyper
ctgatctggccgctcggcgtccgcggctgtcgccctagtcccgccttctcgccaaagctgaccaatcaaacgcctaggccttagctcgagaaccaattgcaacggtagggcggggcttgttgcgcccggccgtgcccc

SEQ ID NO: 106365 - DNA, 30 bp, Homo sapiens; identical to SEQ ID NO: 37783
  chr2:97534042-97534072
  hyper

SEQ ID NO: 106366 - DNA, 99 bp, Homo sapiens
  chr2:97534366-97534465
  hyper
ctcatcctgttcctcgcactgcctcctccgaaacaccagccctctggcggaggggcggtggggggaccgagctcgggtcgagtcggggactccggcggc

SEQ ID NO: 106367 - DNA, 157 bp, Homo sapiens; identical to SEQ ID NO: 37784
  chr2:97535759-97535916
  hyper

SEQ ID NO: 106368 - DNA, 104 bp, Homo sapiens; identical to SEQ ID NO: 1677
  chr2:97779475-97779579
  hyper

SEQ ID NO: 106369 - DNA, 30 bp, Homo sapiens; identical to SEQ ID NO: 37786
  chr2:98207363-98207393
  hyper

SEQ ID NO: 106370 - DNA, 70 bp, Homo sapiens; identical to SEQ ID NO: 37787
  chr2:98261937-98262007
  hyper

SEQ ID NO: 106371 - DNA, 146 bp, Homo sapiens
  chr2:98262415-98262561
  hyper
gtcttgggagtgggcgggctcgagggctgggaggaagccgaaagctgaccgagaggagaaagaagcccgcccccggaagtccctcctgtctctgcagcttgttcccggaagttttgctgctagtcgcggacgcaatggcttcaagg

SEQ ID NO: 106372 - DNA, 30 bp, Homo sapiens
  chr2:98280014-98280044
  hyper
cgtccccgcccggccgcccggctgtcactc

SEQ ID NO: 106373 - DNA, 134 bp, Homo sapiens; identical to SEQ ID NO: 37789
  chr2:98280678-98280812
  hyper

SEQ ID NO: 106374 - DNA, 51 bp, Homo sapiens
  chr2:98612516-98612567
  hyper
gggccccacctcctcgtcccgctctcggaggcctgcggcttcacggccaga

SEQ ID NO: 106375 - DNA, 805 bp, Homo sapiens
  chr2:98703013-98703818
  hyper
tctcagctccgcccacgtccagtggctgagctacaacgaactgccccacctcttttaaagcgtctttctctgaactgtgcaaggaagagagcatcgcctgacagtggtgaggtgaaaattaaaactacacaggggtcaatgctctgctgaaaagtatgaaaagaagttcgtttgtagcgtttcccgcagtctcctcgcctctcctcggcctctggcgccttcctcccctgtctgctcgcaccctatatttctaccccagctcatcagtgtatttgtttgttaattcattcattctttcattcatattctccgctgttgttaattttcccattgacagtaggcgcaaggggcaacgccactcgccctgtccctctagcgtggcctctgtttgggggtctggggtggaggtcgtcccggcccgggtggttccggacgccggctttccgcacctggctcggtgacggcctcggcgccccgccctcttggccacggtccgcagccatcgccccagtgagggcgcggtctgtgggcggggccggctccaggagccgcgctgtgattggccgtgtccaggcaaccgcggagacgccgtcgtcaacagaccgcgctcggaaccagaggcgcgggtcacagagacctagaacagctggaatccttcgcccccggcgcgcagccttcgcccgccggaatcgctgccttatccaccagcgggatgcttacctcgcccgccctctcgggtcaggcgggcccgggaggatgggagggtggctgctgagcgggagccgccacgtcttccacccgacat

SEQ ID NO: 106376 - DNA, 111 bp, Homo sapiens
  chr2:98962789-98962900
  hyper
ctgcctctttcggaccgcctttgaggctccagagcctcaccttactttcccacggagagggaggccacaggctccttcagcagtcgccgagcagagtcctgggccgggagc

SEQ ID NO: 106377 - DNA, 852 bp, Homo sapiens
  chr2:98962973-98963825
  hyper
cggagaagctcaaactttggcagggtaaggatttttaggggctcttgagctggaattttttggggggcgccgggaggtgtgctggggccgcagaccccatacaggaggtaagttagagaaccacacgcaggggagggatgctgctgcttccaggggcgggcgcggcgctgtccgcagcccccggtgctgaaacgggccgcgggctggagagaaagtgaaaaaggatcggctacggcctcggctcccactccccggctcccatacccctccagtccagttcaaaggacaggaagccctccccgtgctccccaagccgatcgcacccccttttactcacgtcccacagccgcgctgggccgagcccgctgagccgtcggggcgggaggcagaaggagcagggctggctcccgctggggacgggtagggcttgcagccgcgaccccaccccatacatttcctcctgtcacgctgtccccggaccgccagtccgggaaggacccacttccccggctccaagtcgggagcgggcgccgcgtcttctcgagtccgcgccgcgccgggggaggttgagtcagtggcctggagggagcagggccgggggaaggcagcggcgaaggactgccccccaacccaggggactattttcccttggggattcaaagagaaaggtaggctgaggaggaggcgagaattaaaattcttttaggagtgcgcggttactttttttaatgataaaatcacacccgggatctcggacgcccggggcttagtgctcggtgatggaggagaaggggcggcgggctctctgatcctctgcaatcccctaaccggataaaggcgccgggctcccag

SEQ ID NO: 106378 - DNA, 923 bp, Homo sapiens
  chr2:98963868-98964791
  hyper
cgcccctgggggccttggcgcgcaggccctcgcagtcccgcaaccccgggccgggtgattcatttttctccctgtgtaatctccctactgagcggcgcagctgggactttaacttcggccctctgcagcgggggtctccggttggcgcggcgcgtgagggaggatgaatggcgctggaacctagaggacctggagccggcgccccggcctctttggcctgaaccaggtgcctctgacacgcagtccgccggctcaggcctcgccggaagctggcgggagcagtcccttgcagcgaagcccggcaccccgacggcagacgctccccatcacatcttccaaaggggcgaggctgggatcagcaggaatggcacccacccgggttcagactccatcccggagtggacagctcggtgcccctaacattatgcactgtccgccaccccctccccccaacacatacacactttcattcatgaaaaccagcaagaatagtgctgtctgggcacggagtccaatgtacagcgtgcgttcacgctgagaattcatgggggacgcgggtggttgggccgggagaggagagatggtcacttgtgtgtggtatccaccaactgggtcttctacgccagagtcccagttgtagaaaagtcggccaggtcagaggacccagatgggatttcactaagctggtgggagcttctttgcgttctttggggtagggggaaggacaggaactccccctgcttcgcaccaatgcccaaacaccgcacttcctcttcagcctcggttcagccacagagaggggcctcctcctgtgtagatgcccggaggggaggagcggtggttcttggggtgactggctggtggaggcaggatcttaatcactttagctgggactttggccgtgactacgtgtgcacttgcct

SEQ ID NO: 106379 - DNA, 236 bp, Homo sapiens
  chr2:99061162-99061398
  hyper
agtaggaattggcgcgagcagctcggtcaccggccctactgtctcagagggcggacccagctcgggctggtagtggggcgggggtcgcagggcgcgggccgggccctcagcgcgcatgcgcgacaagggggcggggccagggcggggctgcgcccggcgtctagagcggcggcggctggctagggctgcggcgcgcgtggagggttcgctgctggtttgccgccgggtcgggctcc

SEQ ID NO: 106380 - DNA, 36 bp, Homo sapiens
  chr2:99224743-99224779
  hyper
ccaccgggagcgcccggccgcgctacctggaccaca

SEQ ID NO: 106381 - DNA, 30 bp, Homo sapiens
  chr2:99225647-99225677
  hyper
gactccgacgctaccgctccctctgctgaa

SEQ ID NO: 106382 - DNA, 101 bp, Homo sapiens; identical to SEQ ID NO: 1685
  chr2:99346430-99346531
  hyper

SEQ ID NO: 106383 - DNA, 258 bp, Homo sapiens; identical to SEQ ID NO: 1686
  chr2:99346574-99346832
  hyper

SEQ ID NO: 106384 - DNA, 242 bp, Homo sapiens
  chr2:99439368-99439610
  hyper
ggccctgggggccccttctcctcatccgggagcacgggcggcgtcggctccgcttccttcgggacactgcgttctggcccgtcgcgagcagagggcgcctctgaggtggcggcggggtcagtctcggggggagtcgtgtccccctcagggatggcggtgggaaacgggctcgcgacgtcttcgggagcacagaccacctcctccgccttgtccgtggccggggcacacgggcctgcgggggg

SEQ ID NO: 106385 - DNA, 30 bp, Homo sapiens
  chr2:99552246-99552276
  hyper
cgcctctccgggtccgaggggcccctggct

SEQ ID NO: 106386 - DNA, 465 bp, Homo sapiens
  chr2:99553202-99553667
  hyper
cctgtgggtcctgagcgtctccaggctaattagggaagctgccgccccgtctggaggtgattcatgggtgtgacaccggcgagtgtgggaagaaaggcagctgatgccgtctcagctgcgctcgcctttctttattttctttctttcttctttttttaaaatcctttttcttgtaaagacagggctggtccatttagggagaccgcgcacggagggagctgccttgggtggtcgcccagcgaatctcctccggagcccgagccgcggctttggtctgcggatggcacagcccggcgaccccgtcccggcctcttccccggcggtgcacgcccagggccaggcaggcgagaggcgcgggagtcgcgtcccagcagggagcccaggctgcgacgagtcctcaggggacgccttcaacccaggctggaagagatgatactaacgtcagacggggagtctcgggtgtca

SEQ ID NO: 106387 - DNA, 15 bp, Homo sapiens
  chr2:99553798-99553813
  hyper
cggctgtcggaggcc

SEQ ID NO: 106388 - DNA, 30 bp, Homo sapiens
  chr2:99757341-99757371
  hyper
aaacaggggcaactcgtgctgccgagcttc

SEQ ID NO: 106389 - DNA, 30 bp, Homo sapiens
  chr2:99758022-99758052
  hyper
caggcgcacgcccacgcagcgcctagacgc

SEQ ID NO: 106390 - DNA, 30 bp, Homo sapiens
  chr2:99758447-99758477
  hyper
tggtcagctctgcacgatcagggctgaatc

SEQ ID NO: 106391 - DNA, 81 bp, Homo sapiens
  chr2:99770996-99771077
  hyper
atgtaaagacccagcgtaatacctgtatgctcaataaaaagtatttgctggtactccttcctgcccgtcgtgtgacctgac

SEQ ID NO: 106392 - DNA, 30 bp, Homo sapiens; identical to SEQ ID NO: 37804
  chr2:99771969-99771999
  hyper

SEQ ID NO: 106393 - DNA, 294 bp, Homo sapiens
  chr2:99797343-99797637
  hyper
gcctgcggataccgcgactccgaatctagttctactgcccgctttagcacagtggctgcagctgtgctctgcgggtcctgcctcagcccggacttcgccataattctggaagttctcctccgcctcaacccaggatgaagttgagcgggtctgctgcgcttccgggaagtggtcatgtgatacccaggcgcctgcgctctctttctagggactttcctgagtgggagggatttcgccggaacaaaaatgcctcagtttggaggtcgcgctcactgcgacggcaggctttgagtg

SEQ ID NO: 106394 - DNA, 109 bp, Homo sapiens
  chr2:99952954-99953063
  hyper
tccgggtacacggccgaactggaaggccgcaaagcattgtgggagttgcagtttcttagtgcgcaggctgtcgtggccggactttctcaggagcgtgcttcagtattca

SEQ ID NO: 106395 - DNA, 233 bp, Homo sapiens
  chr2:99953659-99953892
  hyper
tccgggttctagaacgtggaaaacccgcgggtgtcggctcgtggcggacgcttgagggcagggggcgctcgggctgctgcctggtcggccggtcaaccggagacgctctacccgaagcgcagctctcgatgagccgcgccctgcgtcctcacgccgaggcggctgggcgatgcgcttgcgcactgagaactcacaccatatgtgtcctgttccagtgcgcgggtctgtggaga

SEQ ID NO: 106396 - DNA, 30 bp, Homo sapiens
  chr2:99954384-99954414
  hyper
cgcgctactcttggcgagggtggggaagtt

SEQ ID NO: 106397 - DNA, 30 bp, Homo sapiens; identical to SEQ ID NO: 37807
  chr2:100106966-100106996
  hyper

SEQ ID NO: 106398 - DNA, 950 bp, Homo sapiens
  chr2:100720955-100721905
  hyper
cgccgaggctcgggccgcccgcgcgctgcaacgaaaggcgccgctcaaggtgcatcccagccgcgccagagcggccgccgcccgcccaccgcccacccccaggtcggggctcccgacgccccccgcccccgactccgggccggccgggctggctgcagcggccggcgcactcacccgctccccggcttgcgcgcaggcacactcaagagagagcagcgagctcgccgcgccgccgccgccccccgcccccggccctgcgcccgcccctcctcccctccctcgcggcggcccggcccgctgctgcagccgccgccgccgccgccgccgccgcggtgctctgcgcccgcccgcccgcctctttctcctccgggaggcgcgtgtgcgcgggcgaggccgaggcgcgcgcgcaccgtgagccccgcgccgcgcccgccccgcgcgcccctgtactccccgcgccgctcctcggggtcccgcggcgctcgcaggccgcgccgccctgccgcccctctctcgtggcttttacggcccgcccgcccctcagcagccctggggtgcccggggcggccctgcaagcgggagagagcggcgaggcggcggcgccgagtgcggggggatgcggagccgtgcccggccctgtcgcatccctcggccgcccgcccgcgcccggccccgcccggccttgcccgggctgcacgcacttctcccgcggcccagaatccacttgaccctgctgggcgctcccgcgggcggcggacccgggtgggtgcgggggaattccccggccgcccaggcgcggggagagtgagctgtgccgcccgcagcagcgccccaaacaaaccgtttaaggtctctggagcccgcaagttcagcgaaataaagcggcggcgcggaggaaacctcttccacccggacctgctctccgttgcggtttggcctccagtggtggt

SEQ ID NO: 106399 - DNA, 30 bp, Homo sapiens; identical to SEQ ID NO: 37809
  chr2:100898038-100898068
  hyper

SEQ ID NO: 106400 - DNA, 392 bp, Homo sapiens; identical to SEQ ID NO: 37810
  chr2:100898413-100898805
  hyper

SEQ ID NO: 106401 - DNA, 451 bp, Homo sapiens; identical to SEQ ID NO: 1690
  chr2:100937758-100938209
  hyper

SEQ ID NO: 106402 - DNA, 215 bp, Homo sapiens; identical to SEQ ID NO: 1691
  chr2:100938329-100938544
  hyper

SEQ ID NO: 106403 - DNA, 235 bp, Homo sapiens; identical to SEQ ID NO: 1692
  chr2:100938574-100938809
  hyper

SEQ ID NO: 106404 - DNA, 199 bp, Homo sapiens; identical to SEQ ID NO: 37814
  chr2:100938984-100939183
  hyper

SEQ ID NO: 106405 - DNA, 197 bp, Homo sapiens; identical to SEQ ID NO: 37815
  chr2:101033435-101033632
  hyper

SEQ ID NO: 106406 - DNA, 566 bp, Homo sapiens
  chr2:101033731-101034297
  hyper
cgccaggacaaaacccgcgggttccccggtttttccgtgcgccccgcggcggggagaggggcccaggcgctgaaacccacccgcctgcgcgtccccgagctcaccctactggagcggcgctcgtccgggtccttaggctcctcccctggccctgggggcgccgcgcgggtcgggcttcgccgggcctgtgggcgaagcgcgcggggtcctgggagctcgggaggcccgccccaccttgccccgaggcctccgcgccgcggcccgtcgggtcccgggatgtggcggcggcggcagcggaagtaaggaagacgcccggcgcgctagaccggctttgggggccagaacgccggcaccgcctcacgcggccccctcgcgcctatccggccgtgcgcgccgcctgcccgcgcgcgtccccgccgccgtccccggccgtgcgcgttccagcgggtcgcggggagtggggaggggcgcggccgcgggaccccaggcccggatcccgagtctccctttctgccgctgcaaaagcgttctttctgaccgagacctgcggccggaacaagtcccgc

SEQ ID NO: 106407 - DNA, 372 bp, Homo sapiens
  chr2:101179131-101179503
  hyper
taggctagtcagagcgagacgtctttacaggtttgggccggcagctggaaaaggcacacggccccgggctcctcctccacccagccccacccctcctccgctgaagaccagccctaataaggcagccaccagaattagaaccaggtcaagtgcactccgagcaggacagtaggcagatcctatctggcgcatgcgaacgcttctgtgccagttccttgaagagcaggcgcagactcaaggctgttgcttccgcccttactccccgccgctcgtccctgggcggggcgaaggctgggctgggggaagaggcgtggcggcgctgtgcgcgtgcacaaaagagagctgaggggcgggggcgctgcggcacagctg

SEQ ID NO: 106408 - DNA, 30 bp, Homo sapiens
  chr2:101179882-101179912
  hyper
gaggtgttaggaagcggagggtccggcctg

SEQ ID NO: 106409 - DNA, 486 bp, Homo sapiens
  chr2:101435065-101435551
  hyper
acccccagtccaccgcgggggcctggcgcgcttggggcaaaggccctaggagaccccttctggccacaaaatcgagtatgacagaaaagggccagcgggggcgctttccttccagggccacttgccggaatgtaagagggacggagagacgtccggaaaaggctgccacgctcggagcgctgcgccaggccaggcacctaggccaggggagcggagacctcgtgggagcgggcagggggacctttcccctctcccgggcttccacccaggcgcctccccgctgtgaacgccgccgcccaggtgaaggggaaaccggccacgtttccggacctcggcggggcacacggtctccggttttcaccggctctgtcttggagccccgaagggcatcagacagcagccccggcacccggggattattcctgtacctctgcctccctccgcttggcgtttgcgggaaccttggtaaaatcctccctgtttctc

SEQ ID NO: 106410 - DNA, 796 bp, Homo sapiens; identical to SEQ ID NO: 1699
  chr2:101435590-101436386
  hyper

SEQ ID NO: 106411 - DNA, 1022 bp, Homo sapiens
  chr2:101436605-101437627
  hyper
cggaagagtttgccgcgcgagcagccggcctctcgcaggagccgagggacccgcgcggctgcggcccaggagcggcggccgcggagcccggagacccgcagccgcggcggcggcggcggcggcggcagcagctagagcagcgcctcccgccgccgcccgggaggagctcgccgcgcccgctcgccgcctcgtctcccagcggcggcgggaggcgcgtctccccggcccagtccgcgcccggccccgcggggccgctccggcccgctccgaggtaaggggccgcgcctaggggcgcgggggacccagggtgggtagtacgtgcgcgcggggtcgcaggactcggtcacctgctcgccagcgtggaggacgcgcgggggcggaggggcgctcaggcgcgaggctgcgcggcaccggggaccccggacgcgggggcgcggagaggtgggttcccctccacagtcaggccgctgggggcttcgcgtcctgcaggaggtagcaatcgctgggccggtgggctccgggcgcgtctcgacgcagaagacagaggactgggcatccgagcctcggaatttgggggtcctcggggtgtccgacagggtggagaaggatcgtgccccagggcaacagctttggggattgcccgtggttgtcttcgagacccatcgcgctaccctccgaaacgtcgggcgtcctggacccccggagagtgcggcgtgcgcgccctgggcccgcggtctctcggagtccctgggtcggaattggttccgggccggattgggtgcggaatcggtgcccccaacccccgtgtgcgcagacagcgtgcagcctggctcctcacgtcgctgccgcccccccaccccaactccggagctccccaggttggatgtatgcgtatggttttgttgggagatgtgcccctttcccagccgaggagggacgcacctttgacctttctgaagagctgggcaggtcggtaaccagggaagggacaggcaccacccggctaaattcagaaccagtcc

SEQ ID NO: 106412 - DNA, 30 bp, Homo sapiens
  chr2:101618491-101618521
  hyper
gtcttggttttatccgaagacttagagaag

SEQ ID NO: 106413 - DNA, 705 bp, Homo sapiens; identical to SEQ ID NO: 1701
  chr2:101767138-101767843
  hyper

SEQ ID NO: 106414 - DNA, 30 bp, Homo sapiens
  chr2:101768243-101768273
  hyper
gggggcagaatgcacgccagaaaacctaag

SEQ ID NO: 106415 - DNA, 30 bp, Homo sapiens
  chr2:101869009-101869039
  hyper
gcacttactgggaccgtctggcaccaggaa

SEQ ID NO: 106416 - DNA, 956 bp, Homo sapiens; identical to SEQ ID NO: 37822
  chr2:101924526-101925482
  hyper

SEQ ID NO: 106417 - DNA, 993 bp, Homo sapiens
  chr2:102003273-102004266
  hyper
tctccgaccctcccccgacttcgccaggctcacggaggcaccatcgccttccattatgtacagtgtcgagggtcccatccagggcaccgggcacgtctggtggacccggatctcagtcccgagcggtcgcgagcacgtccctgtccccgtcccccggccgccgcctgaatgccaggccccctcgcgctccccgccgggcgctcaccttcttgtgggtggacacggtggccaggcagccccagacgctggcatgggccagggagcgggcggtggcggcgcgcagtctagggcccgggggcgcactggccgtctggccgccctcgcgccggtaggagaacatcccgggtggcgcggggggcggcctggcccgggcggcgcccgcccggggccgcaggtgcgcgtcctccttgtgggcagaggcggggaagctttgctgccagatgctgcccgaatcctctagcagcgcgggcatagcctcctcagtggaggcgctgtccagctcctcgtccacctcgttggtgacggcccaagacacggagctcacgatcacgtagcccgcggccggggacagcagggcgctgcagcacagcagccaggagaggcgggtccccggccgcgccggccgccggccgcggcgcacggacatcttgcaggcagcacgcccggccgccggggccgccagcagcgctagtgccggggagcccggcagcgccccactgcggcggaagcaaggagcccgagcccccttcccgcccctgcaggatccccgggcgcggtcccccgcgcgagtcccggcgaatccctgcagccgcgcgcgaagctcagaagtccaggctcgcagaagaccaggttccacgcacacgccgcgcatcctgcggagtcctcctcgcgcgccaggtcccgggatgggttcgtttcctgcaggatggcacaggttccgcagccagagggtgggcgttcaaatcccggcttaatacacgcgtctgctcaaca

SEQ ID NO: 106418 - DNA, 819 bp, Homo sapiens; identical to SEQ ID NO: 37824
  chr2:102090422-102091241
  hyper

SEQ ID NO: 106419 - DNA, 332 bp, Homo sapiens; identical to SEQ ID NO: 37825
  chr2:102313749-102314081
  hyper

SEQ ID NO: 106420 - DNA, 153 bp, Homo sapiens; identical to SEQ ID NO: 37826
  chr2:102314091-102314244
  hyper

SEQ ID NO: 106421 - DNA, 42 bp, Homo sapiens
  chr2:102314450-102314492
  hyper
aggagcgcggtcggcggcctggtctgcggctgagatacacag

SEQ ID NO: 106422 - DNA, 160 bp, Homo sapiens; identical to SEQ ID NO: 1706
  chr2:102314986-102315146
  hyper

SEQ ID NO: 106423 - DNA, 189 bp, Homo sapiens; identical to SEQ ID NO: 1707
  chr2:102637362-102637551
  hyper

SEQ ID NO: 106424 - DNA, 129 bp, Homo sapiens; identical to SEQ ID NO: 37829
  chr2:102720909-102721038
  hyper

SEQ ID NO: 106425 - DNA, 541 bp, Homo sapiens
  chr2:102758957-102759498
  hyper
ggaggagccgggccgcgactcgagagcgcccggcagctctccaatgctttggaaccggcgggacccctgcgggctacccggggcagggcggtgtccgcaggggtctgtccagccgcgcctgctcctccgggtggagagttgggacacccggccagctcgctcgcagcccgcggactggcccagccgagccgtctccgcccgttccccgcccccgcagcggcggggctagagccagagccgcgcccggcagttcccggccgcgagggcgggcgcagcttgtggccggcggccggagccgactcggagcgcgcggcgccggccgggaggagccggagagcggccgggccgggcggtgggggcgccggcctgccccgcgcgccccagggagcggcaggaatgtgacaatcgcgcgcccgcgcaccgaagcactcctcgctcggctcctagggctctcgcccctctgagctgagccgggttccgcccggggctgggatcccatcaccctccacggccgtccgtccaggtacggggaagctggagc

SEQ ID NO: 106426 - DNA, 30 bp, Homo sapiens
  chr2:102857445-102857475
  hyper
ctacggcgccattgcgccctctagtggctg

SEQ ID NO: 106427 - DNA, 64 bp, Homo sapiens; identical to SEQ ID NO: 1708
  chr2:102972743-102972807
  hyper

SEQ ID NO: 106428 - DNA, 446 bp, Homo sapiens
  chr2:103095393-103095839
  hyper
accacaaatcgcctccggtcatggactccagcatctacttcctgtatctcctgccacccatcgttctggagggcggctacttcatgcccacccggcccttctttgagaacatcggctccatcctgtggtgggcagtattgggggccctgatcaacgccttgggcattggcctctccctctacctcatctgccaggtgaaggcctttggcctgggcgacgtcaacctgctgcagaacctgctgttcggcagcctgatctccgccgtggacccagtggccgtgctagccgtgtttgaggaagcgcgcgtgaacgagcagctctacatgatgatctttggggaggccctgctcaatgatggcattactgtggtgagatgtcatgtgcccgcccggcttccgggggagatgagggttcggggtggggctggggaccggaggctgtggaga

SEQ ID NO: 106429 - DNA, 1297 bp, Homo sapiens; identical to SEQ ID NO: 37831
  chr2:103235355-103236652
  hyper

SEQ ID NO: 106430 - DNA, 30 bp, Homo sapiens
  chr2:103353077-103353107
  hyper
gctcccagcccccacgctcgcactcaccaa

SEQ ID NO: 106431 - DNA, 107 bp, Homo sapiens
  chr2:103353456-103353563
  hyper
gcacatcatcaatacggtaagcacacaccagtttgtgatgataatgatgatgctctttgtttcctctgggtacagaccctgctgcccctatcgttggaggacaggag

SEQ ID NO: 106432 - DNA, 24 bp, Homo sapiens
  chr2:104069671-104069695
  hyper
tatgcaggccgtgcacggtggctc

SEQ ID NO: 106433 - DNA, 177 bp, Homo sapiens; identical to SEQ ID NO: 1710
  chr2:105458974-105459151
  hyper

SEQ ID NO: 106434 - DNA, 580 bp, Homo sapiens
  chr2:105459902-105460482
  hyper
cggcagggggagtttgcctcccggctggctagcttcgctagactcagtcattactaaggggttgggagggggagcttgtctcttctctcctggcagagccgcgggaggcgtcggaaagtttcctaccacttgagggacgaaggtggatggatcgagagccttgtttccctgctgggatggccgaatgtaccagaagtctcgctggcgagcagcgccctcggcttccccggcaatcatcccaaacgcacacccttcccctggccgaaggaaccccaggttgcctaggaaacggccccgcggacctggcgggccctagggtggagacccgggcggggttggggggtactcgcgaatctgctgcgggcgcagcgttggggtgtctggtccctgcccagccggtaggccgcgtccgccgtcccactcagtggggctttgcgcccccacccatgggagttgcccgttccgcagcagagttcgaaggggaaagtgggggccacgttcccagaggaacagagttccagacctctcagggcactgatggggactccgtcggacccacgggttccgcaaacactccaga

SEQ ID NO: 106435 - DNA, 365 bp, Homo sapiens
  chr2:105460699-105461064
  hyper
acagatgacttaaagcgttccatttctccgcgatccaattttattaggatttactctcatttgtgctccgcttctctggggaaataatgctttgattaatgtaatcctggcccgggatccgccacatgcccctcgaccctctcccaagagaaggaccctatttgacaaacaataacagagcagtaactcttgcaatctgcccacacctttgggggtggctggggagagggtgatacacgttcacacaccgcttgctaaatgcagtggcgagaggagggagcagcgtctacatgaagcgaacttttcaagcgcagagccctgactcccaggcgcgggggctcaccgggaggggcccgggcgagaga

SEQ ID NO: 106436 - DNA, 250 bp, Homo sapiens; identical to SEQ ID NO: 1713
  chr2:105461163-105461413
  hyper

SEQ ID NO: 106437 - DNA, 112 bp, Homo sapiens; identical to SEQ ID NO: 1714
  chr2:105461555-105461667
  hyper

SEQ ID NO: 106438 - DNA, 204 bp, Homo sapiens; identical to SEQ ID NO: 1715
  chr2:105461699-105461903
  hyper

SEQ ID NO: 106439 - DNA, 39 bp, Homo sapiens
  chr2:105462222-105462261
  hyper
ggcccccaaaatggccggagattcgggagaagtcgcttc

SEQ ID NO: 106440 - DNA, 30 bp, Homo sapiens
  chr2:105462965-105462995
  hyper
ggggtgtctcagggccgggggcgcgggggg

SEQ ID NO: 106441 - DNA, 30 bp, Homo sapiens; identical to SEQ ID NO: 1717
  chr2:105467129-105467159
  hyper

SEQ ID NO: 106442 - DNA, 30 bp, Homo sapiens
  chr2:105468114-105468144
  hyper
ttcgagaattaagtacgacgaaaggggggg

SEQ ID NO: 106443 - DNA, 1386 bp, Homo sapiens
  chr2:105468470-105469856
  hyper
caggaaaggaaaacacggggtgctggcaccgactattcaaacgtctgcacctggagatctcagattgattcaatgaaatctgtgttccatcttttatatatacatatacgcatacgtaaatataaaaagcaacctttgggggccgcagaggaaaaaaatccgttctgtttggggtttggttaccaccgcctttggtatctataccttggcaataatggctttgctaaaacctacctacgatggtatctcacccggcaagcaggagctggacaagagcctacataaattctacgcgtctagtgttaatcttgagatcacgcgggggctgcctggctgcggctgggcaggagaactcctgctttcactgagttcacttaactgcgctcggcagaggcacgatacagcgggagagaagggcaggcccgttcacattttaatcggagcgcaccggcggccgctcctcggctgcgtcctgggctgccgctcgggctcgggactgccagatgcaggctctggctgggggcggcgggcgcaagcgggcgcacccgcagctaggggtgcggggtgcacgcacacgcacgctcattaagagccatgtatttattgaatgtccgagttgggttagttcattggaaatccccgaggagggctcaatttgcccttgttttcgttgccactttctcttttttcttggttcgctgaggttcctctgtgcagcgtttccgcttggccgcgtccccccaccccaccccaccccacccccgcttctctcgcctaccgggtgcactccccctcccatcccccttaactctttcagctgggttagagctgagaaagcatttgtcgccgccagccccatccaccacgcaaatccatctgagacagaaaggaaagaaaaaaaagcaccaccatgcctaagaatagagagcgagcaaacccccccaccgctaatcacacacacacacacacacacacacacacacacacacgaggaagcggtggagcagagaagggcgcggctagccgatcccggttctttcgcccggctcctgctgccacagggaattcctaaagccattggggtcgaatacacttacgatgaatctatgggggaaggtcggactgattgcttttcaaatacatcgcacggctccgctgaccggcaccctccaaactcacaagggcacgcacgctacttgcacgaatcccagaggagggaggagggaggaagggagggagagcgaaggagggagagagggggtggaggagccagggagcggcggcagcgagcggtccgtctcgcacgcgcgggcaccgcgctggtcctgggctgcaggtttcccagatgatggcatccgagaacttaaacaaagggggctgccgccg

SEQ ID NO: 106444 - DNA, 960 bp, Homo sapiens
  chr2:105469880-105470840
  hyper
cggtggcggatttccaaggagcgtggccacgaccagagctcttggcgatgcgagcccccgcttcccacccccgccgatcagagaagggggccggctggtgaagggaagaggaaactttgaaaccactggggacacatctgtctataggtattagcttgaatggtacatccgtgccgcgcgctttacaaatctctggcggggcgggggtaagggggtgagcaacccgacgcgtactaggtggggtgggcaggttgctatttttcatgtttcccccttcgttttccttctgattctcttcccccctctcgtccctccctcccttttatctcccctttcttccccccgcccagacctattgcgaacgcccagagccgccgagggaacgccaacgtctgggccggacactaagagttaagatgtggcggagggggcggcgggggaggggcggggaggggaaagtggtgagggggagggaggctggaggacgacagatttccagcttctacgacgctctgcctaaattaaaaagcaaccaatcggaacggccggaaggggggcctcgcgtcctgagccagtcattccgagcctgccaatcacccagcgggtagccaatcagcgggggccctggtgctcgacttccttgtatttgggaaagtgtggtggtgggtgcgcgctcgcggcggagggtaaacattcgacagtccccgctctgagagggagggacagagagcgaactgtcagatcggagcgagagcgggcgcccgagagagggagagagagagagggagggagaggaaaagtgagagagggaaagagagcgcgaacgagggcgcagagcgagctcctgctgcaactctgctccagcacggccagcgccagcgcccgccgtcggtgcactctacgagccgtgcagcgtgcccactggagttgttgtgtatcaaggatcgatcccctatatgc

SEQ ID NO: 106445 - DNA, 1386 bp, Homo sapiens
  chr2:105471039-105472425
  hyper
agactgtgactgttgcgaggagaatgaaaaaggactcttgtttcagaggcaaccaagagctccggcaatagcaacttcagagaaatgcaccatcgcaagaagttttcctaggacagaacaaaacttgaaacgagaggaccagagggggagagcaggagccagcctcccctctccgcactcgcgagcagccagcagcaccacgccttcaaggacgaaaaagttttactactctaagggaaaacgagtgaaatgtgttcctgaggaggagaggagaggagaggagagagcggacaagagaaggagcgggccggttgctggtcatccgtaatttggctaaggaagaaaggagcagcttctttctttgttatctcccgtgaaaccttcacttagcaggtggacggagccccgcgaccgggcagagtccgggctcgcccgaggacaggaggaggagcgggagcccgcgcgtcccgggagagcgccccgagtgcaggtccccgccccgcccggcgagccccgctggagcgagcccagcgcgccggggctggggggcggccacgaccccccctgaagggggtggccacggagcgcaccccgagaagcgagcccccctccccagagcgctgctcctgcggctgctgctgctgctggtgaccaaggccggccggcgacccccgcgccctgccgagcggccttgcagctgcagccgggggccgcggcggcggcggcggcggcgggggcggaggcggcggcggaggaggaggcggcgaaggcggcggggccggcgggggcccggggcgggggcggggaaggagggggggaggaggcgggaggcggggggcgcggcggcggcggcggcggcggcggccgcggctgctgctgcggcggcggcggcggtggtggcggcggtggggtggcgggagcggagcggcatggccacggcggcttctaacccctacctgccggggaacagcctgctcgcggccggctctattgtgcactcggacgcggcaggggctggcggcggcgggggtggcggcggcggcggcggcgggggcggcgcagggggcgggggcggcggcatgcagccgggcagcgccgccgtgacctcgggcgcctaccggggggacccgtcctctgtcaagatggtccagagcgacttcatgcagggggccatggccgccagcaacggcggccatatgctgagccacgcgcaccagtgggtcacagccctgccccacgccgccgccgccgccgccgctgccgccgccgccgccgtggaggcgagctcgccgtggtcgggcagcgccgtgggcatggctggcagcccccagcagccaccgcagccgccgccgccaccgccgcagggccccgacgtgaagggcggcg

SEQ ID NO: 106446 - DNA, 1272 bp, Homo sapiens; identical to SEQ ID NO: 37845
  chr2:105472712-105473984
  hyper

SEQ ID NO: 106447 - DNA, 1022 bp, Homo sapiens
  chr2:105478380-105479402
  hyper
agcagaagcctctgcgtttgcatcctgaactttgcagcctaggaaaggaaatagtgcgcaggctggaggagctgggggtgggggcagcggagatagcaggaggggtacttgtgtaatcagattctttgattttgttagcctggctcatggcctattaattagattactctctctttcattcttgatttcacatccgtgtttgttcctgtatcctaaaatgcgggcgcgagcttggcgagcaggagcctatgatgtcactgccggccagaggcggccgcctggccttctggcgggctgtgcgctgcgttcttgatgagtccggtcttcctcaaggaagagttggctctggaagtgacctcagaggggtctgggaagagggcaacagtcattctcttggcggcacgatgtgtgcgctagtgtgtgcgcgcgcgtgccgtgtgcatgtgggtgcgcgtgaggggagggggaagcggaaattcgcagtctggaccccgaagccctaggggtacaggcgacggggtcaggtgtaaggcctgcctccggtgaaaaccccggatcagaagaggcggagggggagggggacccgaggcagccgggcgtccaaagctcgcttctctccgggagggagggcagggctgggcgcggaggtggggcggtggcggtcgcggtggggcggccgggtccctgctcggcccggcacggccgggcggccagactgtggcagctgctgtgggtcccacaagttgttttcctcgtggcgaccattcagcaaaacgcacgaacctttctcaaagatttaaatttcgcggatgaattaccatacacccgttgcttagcaactaaattcaagcagggctaagaatatgcaagctttttgtattctcattaataaaaatgccactctgacacagcaacccgactttggatcactgcaacttctgtaaaagccgtaggagaatacaaaccgatcctgcctttcaattacagatcaaaatggcttgaaacgcgatgttttgttcatc

SEQ ID NO: 106448 - DNA, 111 bp, Homo sapiens
  chr2:105479913-105480024
  hyper
cgtttgcggattttccgttctgggggtgcagcctcctcccaggagaattgagttgccgcccacgctgctgacggtggagttcagaggggctgagttcaaggcctggctgac

SEQ ID NO: 106449 - DNA, 279 bp, Homo sapiens
  chr2:105480109-105480388
  hyper
cgtgaccccttgggtcttcccggactgtggcccagcccacagaccagggcccgaaattgaggtggggggcgtactctgtttgtcttcccgaaggatgcggcgcgtggaaggagatgcgctgacttgttccaacccataacctttcgctcgggtccccatgtgcgggcagaagaagtcagagcggaacagcctagtgcactggcagggctcattgtctgggaagacaccgaggtctaggcagctgggactgcggagtggaggcaaggccggaggcggccg

SEQ ID NO: 106450 - DNA, 6 bp, Homo sapiens
  chr2:105480629-105480635
  hyper
cgggcg

SEQ ID NO: 106451 - DNA, 488 bp, Homo sapiens
  chr2:105483511-105483999
  hyper
accgcagtcgccctgcggtggcaggagagctactcattcagcagtagcagcattgcgccgctgcagcatcccgaggtcacattcagaaagcccgttcttccaggacagcatcgccccaatactgcaggcggggcgaaccgtgtttatctgccccaggcacggaggggagattgtaaccaaaggaaaagaatctcgcagaaggggatctggaagagggcagttgatcctgggcagatcccctgcgccgggccctctccgctgggggcgagcccggagggaaccgaggggcccgggagggggagctgctgaaggcgcgcaggctgacaaagctataacaaaggctccctacaaaactagtactaaggatctttaaaggatcacacaccttgcaggcgtgtccccagctcccgggacgcagagcccgctgactgttcccccgggctccgcagacgtgcccgggttgtcagaggtgtggggctggaagtcca

SEQ ID NO: 106452 - DNA, 614 bp, Homo sapiens
  chr2:105484038-105484652
  hyper
cgggtaggggtaggtgcccgcgcctgggcccgcggggctttggtcatggctgttccccgggaggctcagttaggcagcagccttgctgggcaacaggccccgcccttggttaatccgggaaggtcgcgggctgcaatctggcctgacgaggcaggccctgaagtctccccgctgggcgatcagaagagcgttcgagaagccgggagctggtggggttggcagggcgtctgagtcacccgagctgcagaacggacgcccccacgacgcgctgtgggcactcacagcggctagttgggcatttcccagcagccaaggctgcgcactccgcccccgctgaggtcccctttggttcccgaggacccagctcctcccgcccctctactcggcgccccctgccaccatagaactctggggtaaccctgggccccgacctccagctggtgggtaggaattgttgggaaaggattggcgccccagcaccgggagactggaagagttgaaatcaacgcaggagaacaattaggaaaaagtaagaaaaaaatcacccggatgacctccaacttcacccccacacccccatggggttctgaaggctccggcgcagctcctacagg

SEQ ID NO: 106453 - DNA, 1705 bp, Homo sapiens; identical to SEQ ID NO: 37850
  chr2:105488275-105489980
  hyper

SEQ ID NO: 106454 - DNA, 133 bp, Homo sapiens; identical to SEQ ID NO: 1730
  chr2:105490035-105490168
  hyper

SEQ ID NO: 106455 - DNA, 44 bp, Homo sapiens
  chr2:105654393-105654437
  hyper
gcgacgagctgtcgcggatcgcgggacacgccccctgatccaaa

SEQ ID NO: 106456 - DNA, 899 bp, Homo sapiens
  chr2:105760094-105760993
  hyper
aatggttggaccatccgaaagcgaggtgtgcgggcgggtggaaggaggaaggtgagggttcttcctagaggtgaccaggtgaggccgggagtcgagcattttcataagattgctcgcggacgcgggggtgggtggagagcatcacgattaagaaggaacacacgcacgcacacacacacctccttcctccttcccctcctcttcctctcaccccgccccccggggggcggtaccctagtctcccgggggaggttttggggcggaggaccgcggaggactgcgcccaggagggtggccggccgcgggaggaggacttggggtcgggctgctgcagctgggtggccagcgccgcggcggcccctcccccgctctccctggccgccgccccctcctcctcccgtcctcctcctcctctccctcctcccggtcccccatcctcctcccggcccccggcagctgcggctcggggagcagccggcggcgccgcggccgcgcagcctttgtctcgggccgccgggcgcgcggggcccagcgcaggcgtaagtgaccggtggccgggccgcggggggtcggcggggagcgggctgggggtcgcgggcgctccctgcagtggggaggccgggccggccagatcctcccgccacgcgtgtcccgggatgctcgggcggtgccggcgcgcgggggcgcgaggagagccgagcggggccaccgcccgggagggcgcgggacgcagagaggggctcggggcccgccgggccgcggggtcgggggagggggtgcaggctcgcggggcgccgcagcttggcgcccacagacgtgcggcttgggtgcaaatcctgtttctctgggcagaggccacgcggggacggaggaggcagagaggacgggctgtgatggag

SEQ ID NO: 106457 - DNA, 30 bp, Homo sapiens
  chr2:105946568-105946598
  hyper
ggaaatacctgctgcgtgaatgaataaatg

SEQ ID NO: 106458 - DNA, 30 bp, Homo sapiens
  chr2:105953944-105953974
  hyper
agtgacgacacacgcgagtctccgcccgag

SEQ ID NO: 106459 - DNA, 843 bp, Homo sapiens
  chr2:106014885-106015728
  hyper
ccccgcgcagaccaccgtgccaggacagcccgctcgggagtcgggcctggaagcaggcggacagcgtcacctccccgcagccgccggctgggacccgcggccagcctttacccaggctcgcccggtccctgcccgcatggcggtgccccacctggtgaggacgcgggctgcagtcctccctctggggatgagtcggtgggctcctctgagctccagcgcccccagggtctagacccctcccattgctccgctcccctctccccgtggtctccccacccccaacccccagggttcggctctcctctcccgggtctaccccacagctcaactcctttctcccggcttctccccgcacggttcgggtcccctctcccagtggtcttcccggacccacagctctgctctcctctcaccagtctccccaactccggctctgctcccctctccttgggtctcgcaccggattcggcccccacttccgagccctggtggctaagcccctcggcctccctccggggcgcagggggttggaggtactcacggcaccgcagcgggccggggactcccggacggggctggagggcgcgggcggctggtggctgcggctccgctgccggccgagtggagcgctgcgcagctcccgccctcgagaaaccccgccgtgtcatttgaccatataaggagatgcacgcctcggctcgctggcaccgggcgtggggcgcggggggcgggcgcccccaggcctcgcggttgccgtgcccccgccccgggctgcggcggtcccggcccgtaccctttgtttgccagggctcctttcttcgtgccctccgggtcttgggagca

SEQ ID NO: 106460 - DNA, 11 bp, Homo sapiens
  chr2:106361758-106361769
  hyper
ggcgcccccga

SEQ ID NO: 106461 - DNA, 215 bp, Homo sapiens
  chr2:106362017-106362232
  hyper
gccagggcgcgtgtgccggggaagaatagccgcggatcgcagggccccggcgcagggacgggggaggccgcgatcggccgggagaacttaaccgtgtttattacaactatttatgttcgcgcacaaagctgctgtcacattgcataaaggaggtcctcgcttcggcgaagggagcttttgtgcccggcttcaggctctgcgccctgccccagatt

SEQ ID NO: 106462 - DNA, 30 bp, Homo sapiens; identical to SEQ ID NO: 37856
  chr2:106362532-106362562
  hyper

SEQ ID NO: 106463 - DNA, 30 bp, Homo sapiens; identical to SEQ ID NO: 1734
  chr2:106685357-106685387
  hyper

SEQ ID NO: 106464 - DNA, 30 bp, Homo sapiens; identical to SEQ ID NO: 37858
  chr2:106810131-106810161
  hyper

SEQ ID NO: 106465 - DNA, 226 bp, Homo sapiens
  chr2:106810963-106811189
  hyper
ggagggctggtgggcggtgcggcgcgccgcggcgcatgcgcgttccggtctgttttccctgagttaaagcgcgcgggtgccagccgggaggtgcggctggattcgtttcgctgaggtgcgtccccaacccaagggcacgactgcagtggccagtttccgagccccgcccggaggggggcacgcggtgggcattccggtgttgcagtgaaacgaaacttatttgcta

SEQ ID NO: 106466 - DNA, 30 bp, Homo sapiens; identical to SEQ ID NO: 37859
  chr2:107159440-107159470
  hyper

SEQ ID NO: 106467 - DNA, 42 bp, Homo sapiens; identical to SEQ ID NO: 37860
  chr2:107501992-107502034
  hyper

SEQ ID NO: 106468 - DNA, 398 bp, Homo sapiens; identical to SEQ ID NO: 37861
  chr2:107502087-107502485
  hyper

SEQ ID NO: 106469 - DNA, 211 bp, Homo sapiens; identical to SEQ ID NO: 1736
  chr2:107502518-107502729
  hyper

SEQ ID NO: 106470 - DNA, 42 bp, Homo sapiens; identical to SEQ ID NO: 1737
  chr2:107502865-107502907
  hyper

SEQ ID NO: 106471 - DNA, 815 bp, Homo sapiens; identical to SEQ ID NO: 1738
  chr2:107503421-107504236
  hyper

SEQ ID NO: 106472 - DNA, 30 bp, Homo sapiens; identical to SEQ ID NO: 1739
  chr2:108160503-108160533
  hyper

SEQ ID NO: 106473 - DNA, 4 bp, Homo sapiens
  chr2:108602900-108602904
  hyper
tctg

SEQ ID NO: 106474 - DNA, 574 bp, Homo sapiens
  chr2:108603014-108603588
  hyper
cggcgccaacacctgtcaactctgcgcgctcccaggttcttggagacgccgagtgaggagccgccctgaccgcccggccccgctccgcactgcaccccgacccaccccgcaccctccctttctgcaccctcgcacccacacccctcgcggttccagggggcggcggccccgggcggagcgctttcgcgtgcagccaccactccaggtaggagcggagcgggcattcctgcgcctacgggcccgcaccctcggaaacgccttgggcaccgagcccgggcggttttagaggggagggacgcggcgtttttccctctcggtgggatgcgagggcgggtttgctgtctggcaccgttgctgtcagggtgcaagaggctacaaagtctgggcgcaggaaatgggtagagggggccgaggaaaggccgcagggggccgggagagcatcgggctgctgcggagaggaacttgcctgcttggttgctcacaaaggcagagaagacacagcccgcgggcgcttcttttgcctcctttaaattccagagaggctgattctttcccccaacgtctcttcacccac

SEQ ID NO: 106475 - DNA, 30 bp, Homo sapiens
  chr2:109065679-109065709
  hyper
aagtgcagcggtggcggcggctggttgcgg

SEQ ID NO: 106476 - DNA, 30 bp, Homo sapiens; identical to SEQ ID NO: 37867
  chr2:109150298-109150328
  hyper

SEQ ID NO: 106477 - DNA, 30 bp, Homo sapiens
  chr2:109150581-109150611
  hyper
ccgccgccgcgctccgtgggctcccaatga

SEQ ID NO: 106478 - DNA, 30 bp, Homo sapiens
  chr2:109151039-109151069
  hyper
atgacccacaggtacgggccgcaccgcgcg

SEQ ID NO: 106479 - DNA, 285 bp, Homo sapiens
  chr2:109335499-109335784
  hyper
gcgtgagccaccacgcctggccctcatttaataagatatgaatttaaaaatgtatgctttagtattcacacatgtccgatgcaacgtatttaaccagtcatctccagaaactttgttccaatttacacgttcaccaaattggcctgagtgctttttttcttccaatgcattgcgcacttataatttagaacaagtgaccaaaacgcttaagagcccatcacgcaaattgttatctgctggaaatctacgccctaggctgtggacactggcggccgaaatctgatc

SEQ ID NO: 106480 - DNA, 30 bp, Homo sapiens
  chr2:109336020-109336050
  hyper
agcgctggtctcacgcgcctcgggagccag

SEQ ID NO: 106481 - DNA, 411 bp, Homo sapiens
  chr2:109402897-109403308
  hyper
tctgatggaacgaccggtctatgtggtgagcgcaacgcacaccaaacttaacaggttaaatggagctggagcggagcgctgcaggcaggtgcggggcctcggtgcccctcaacccgtggcacccaggcagccggggcaggactatcgcggggagatgcaatactactcagttacgaggtgtgtagtgctagcacgagaaacttggaggacgcgctgacaagccgggctgcagtctccgggtcgccccgccccgccctttccctgccgccgtgcgtgcctcgggggggcggggtctggcacgtcgtgacgcactgcggccgcgtagcgccgcgggtttgatgaacgcggttcccggggagactggtacggttgctgtgtgctatggagccgagggtcgtcaagccaccgggg

SEQ ID NO: 106482 - DNA, 30 bp, Homo sapiens; identical to SEQ ID NO: 1741
  chr2:109583297-109583327
  hyper

SEQ ID NO: 106483 - DNA, 581 bp, Homo sapiens
  chr2:109647968-109648549
  hyper
agcagtcggctctgcccgcctcgccgggctgcaccgagtccgcgggtctctagcgcacggcctggccccacgtgcggcgaggagggcgcagtgaagttctgctgtgtgcaccccctgcagctcggccgggaagcgcccgctggaggaacggagagcgccgcttcagcgtcggccacgtgggccgggctctgccggtggcaacctggacgcgctgcgggcgccggcgagacctgcgccaacgcctacctccgggccacaggcgggataaagctgccccactttgcccccagcgaagagaaccctccttcctctaagtattttcttcagcaactaagcttttctgtttgctcaatttcttgtcccgtgagcgctaccacccaccccccgccaccttcttcccctccccccacatccgttcactctctttgaccttttgccaaaactctgaacgctcgctgccctccctcccatttcctcaccgcgtttcaggagctgtaagttcttggtgttcaaaccccctacggttacgtaaacagaactctgcagttatcttctttccctttcttcggagctttgttttc

SEQ ID NO: 106484 - DNA, 1823 bp, Homo sapiens; identical to SEQ ID NO: 37871
  chr2:109744564-109746387
  hyper

SEQ ID NO: 106485 - DNA, 73 bp, Homo sapiens
  chr2:109746462-109746535
  hyper
cggcaggcagcaccccgggttccccggttttcctctccgcggccgcgggcagcaccgccggcagtctgcggga

SEQ ID NO: 106486 - DNA, 1543 bp, Homo sapiens; identical to SEQ ID NO: 37872
  chr2:110370720-110372263
  hyper

SEQ ID NO: 106487 - DNA, 137 bp, Homo sapiens; identical to SEQ ID NO: 37873
  chr2:110372284-110372421
  hyper

SEQ ID NO: 106488 - DNA, 95 bp, Homo sapiens
  chr2:110372665-110372760
  hyper
ggcccgccagaacctccgtgacctggtgatgggcagctccccgcagctgaagaggagcgtgtgtcccgggggcagcagcccgggcagctcctccg

SEQ ID NO: 106489 - DNA, 30 bp, Homo sapiens; identical to SEQ ID NO: 37874
  chr2:110927414-110927444
  hyper

SEQ ID NO: 106490 - DNA, 375 bp, Homo sapiens
  chr2:110962327-110962702
  hyper
atggggtaagggggcgttacaacctgggaaggtaagtaggttgggggcaagctcccaggattaggtggggtcacggtgggaaggcgcagtgcgcgcagctgcgtccgcctgtcgcccgccccagggccctctgcacagcctgaccatacctgttgcttcagctcctgattgcggcgccgcagggcctggagaggatctcgctgtcgtctcgccagcatctccctggctgcggtgctctgattgctccagttgccagggaaaccaaccggcggcgccagaaggtgacgccatcgatgtgcgcccgcctcccagccccgccccgcccgggccggtcccgggaagggtcaaatgttctcttgcggtggtcatcccacg

SEQ ID NO: 106491 - DNA, 170 bp, Homo sapiens
  chr2:111435568-111435738
  hyper
ccatggccagaggacgctggccggcagcggccaaacctgaaccgcaaactagaagccgccgccgattcgaataccccgcgcagccgcagtcggctcgccgaacgtttcagggcgcctgcccattggtggcggcggcagaaggttggccaatcaccggggccgttgctcgg

SEQ ID NO: 106492 - DNA, 30 bp, Homo sapiens; identical to SEQ ID NO: 37877
  chr2:111436544-111436574
  hyper

SEQ ID NO: 106493 - DNA, 836 bp, Homo sapiens
  chr2:111490023-111490859
  hyper
cgcgccggacctcccgcccgggaagccagggcagggcggggccggggagggaggggagaggaaggtgaggagggaggagacgggccgggaggggtggagagggagagggcgtgcgcctggggcctcacctgctgggagctggaggaggcgcggagcgaagccggccctgccagccacgcggagaagcagaggcaggtgagcgcgatgcagccggcgccgggtctggggctcggggactcctccctgcaccgctacctggacggcgacttctggagcctcaagaacgagctgcgcggactcctcggcggcgcccgctcttccggcaaaggtaccgcgctgcggccgtcgcccctgcccgcgcccccgaagccgccgagcgtgtcccctcggtccccggagcgtcgctgcggacaacgccctggcgagggcgaggtggggtgtgcgccgcgcctgagaggcgggtccctgcctcgccgcaggtgacgggctcccctccccaggtgtgtgggcgcagccggccgccgccgacctcttcggccccctgagaggtgccctctcctcccgagctccctcccccacgaagagtcgggtgcagggctgggccccgcggtgacaggcgcggtgtctacgaagaccgtgtggctggaagatcggccttgctggtttgttgaacctgtttcttgagtccccgccccgcgatgtcccacccttggtggggagaaggggacagaaaaccgcgatgggatgggcgcacagggatggagtggccctgtccagggcgtgtctgggcgtcggggtgggacaggcttacaggaccccctcggagtgcaggtgtg

SEQ ID NO: 106494 - DNA, 1140 bp, Homo sapiens; identical to SEQ ID NO: 37879
  chr2:111874607-111875747
  hyper

SEQ ID NO: 106495 - DNA, 30 bp, Homo sapiens
  chr2:111876197-111876227
  hyper
caaagcctgtggtcccgaacaagggccatg

SEQ ID NO: 106496 - DNA, 714 bp, Homo sapiens; identical to SEQ ID NO: 1749
  chr2:111877552-111878266
  hyper

SEQ ID NO: 106497 - DNA, 162 bp, Homo sapiens
  chr2:111879696-111879858
  hyper
actcgtgtctgcggcgcaccaggagagagaggaagttgttggaggagaatagttgccacagccagggcggtgacggccgttagggtctgcccccgacgggccaaaacaaggacaagtggcgaggactgggcctggggatggccctgcgggtccgggcgcggc

SEQ ID NO: 106498 - DNA, 86 bp, Homo sapiens; identical to SEQ ID NO: 37882
  chr2:111880645-111880731
  hyper

SEQ ID NO: 106499 - DNA, 150 bp, Homo sapiens
  chr2:112641877-112642027
  hyper
ccgtgcgactgatgcgaaccccgaagccggactctgtctgctacagtcctggcgtccaagttctctttagctcatgtcactagggacctgaactgccttatagatctcagggttttttcttctggtttcgcttccgcctcctgaccccac

SEQ ID NO: 106500 - DNA, 31 bp, Homo sapiens; identical to SEQ ID NO: 1750
  chr2:112655268-112655299
  hyper

SEQ ID NO: 106501 - DNA, 30 bp, Homo sapiens
  chr2:112656246-112656276
  hyper
aggacaggttcgggacgtccatctgtccat

SEQ ID NO: 106502 - DNA, 638 bp, Homo sapiens; identical to SEQ ID NO: 1751
  chr2:112656486-112657124
  hyper

SEQ ID NO: 106503 - DNA, 30 bp, Homo sapiens
  chr2:112789628-112789658
  hyper
tcaggatcaggaggtcgaaaggacaaggaa

SEQ ID NO: 106504 - DNA, 22 bp, Homo sapiens
  chr2:112791985-112792007
  hyper
ttttgagatggagtctcgctct

SEQ ID NO: 106505 - DNA, 30 bp, Homo sapiens
  chr2:112813598-112813628
  hyper
accatgcccgacgccgtggccctcattctg

SEQ ID NO: 106506 - DNA, 214 bp, Homo sapiens
  chr2:112895963-112896177
  hyper
tagcccaggggccggcgcctccccgcctcgcgcggactgtctcgtgcgggcagctgcgggcgcacctggaccctcgcaaggcccgggcggcgccgatccccgcgggacgcgctgcgctcggggcctcccgcctccccccctgccccagccgccccccggccgcgcggcgccccgcaccctgcagggacggctgccgcatcgctgggacaaactc

SEQ ID NO: 106507 - DNA, 108 bp, Homo sapiens
  chr2:112939134-112939242
  hyper
aggccctggacgggtcgtctgggtctgtggttgattacttgtctctcctttccctactccagagtaagccctttgagaaggggccgtgcctccgtcttggttctgctc

SEQ ID NO: 106508 - DNA, 147 bp, Homo sapiens
  chr2:113012388-113012535
  hyper
cggacgtggccccggactgcctccaatccagaagaaactaagaggcggagtcccgctgagcccctgcattcaaaagatgaaaagatatgggatcacctttcgtcagagtccgtggccgttttgccgagggccgggttggggggtttt

SEQ ID NO: 106509 - DNA, 30 bp, Homo sapiens
  chr2:113032646-113032676
  hyper
ttctgaacactaaacgttacaaaaacagat

SEQ ID NO: 106510 - DNA, 30 bp, Homo sapiens
  chr2:113033018-113033048
  hyper
tgcacagagaagggcgaagacccgcccctg

SEQ ID NO: 106511 - DNA, 30 bp, Homo sapiens; identical to SEQ ID NO: 37888
  chr2:113033403-113033433
  hyper

SEQ ID NO: 106512 - DNA, 68 bp, Homo sapiens
  chr2:113239296-113239364
  hyper
caaaaccgacgctccgggtctccgtagtcgttaagcaaagaggaagaggaagcgcttcttcattaggc

SEQ ID NO: 106513 - DNA, 178 bp, Homo sapiens
  chr2:113240291-113240469
  hyper
cggccactcggggccgcagctacctcccgacggtgaccggtccctgcagcccgggagacgctggccgccggggctgggacctgaggcgcgagtctagcggctcccccgggccgaagcccccagatttggcgggtccgccgcgctgggcgcggctccgcagagcgggcggctggagtca

SEQ ID NO: 106514 - DNA, 30 bp, Homo sapiens
  chr2:113299394-113299424
  hyper
ccagttggacgccccgctgccccatcccct

SEQ ID NO: 106515 - DNA, 30 bp, Homo sapiens
  chr2:113299693-113299723
  hyper
agaccgctctcctccgatcctaattgactg

SEQ ID NO: 106516 - DNA, 631 bp, Homo sapiens; identical to SEQ ID NO: 37890
  chr2:113341820-113342451
  hyper

SEQ ID NO: 106517 - DNA, 30 bp, Homo sapiens
  chr2:113403518-113403548
  hyper
gtgatggctgccggcgctctctgcgtggtt

SEQ ID NO: 106518 - DNA, 30 bp, Homo sapiens
  chr2:113404063-113404093
  hyper
gcgcgtgggtagagcggggtgccccactgg

SEQ ID NO: 106519 - DNA, 30 bp, Homo sapiens
  chr2:113448538-113448568
  hyper
cagcttgcaacaccacgacacccactctgg

SEQ ID NO: 106520 - DNA, 30 bp, Homo sapiens; identical to SEQ ID NO: 1753
  chr2:113469219-113469249
  hyper

SEQ ID NO: 106521 - DNA, 207 bp, Homo sapiens
  chr2:113522192-113522399
  hyper
ttttcttcaaacgccgcgcctgtagccaggaccggcgtgccgcgcgtccacgcgtcctcattggctcctgcgggtttgaaactcgctagtcgtcagcacgggagggcgggacaacaggcaataggctctttgcggttggctctggccttgagaacccgaccttggggccctttgattggaagaacgtgcagcgcacctcggcattga

SEQ ID NO: 106522 - DNA, 30 bp, Homo sapiens
  chr2:113914667-113914697
  hyper
cctgtcaaggctcacgcgtatctggggcgg

SEQ ID NO: 106523 - DNA, 30 bp, Homo sapiens
  chr2:114033511-114033541
  hyper
gggcggcggaggccgcgcggggaggttttc

SEQ ID NO: 106524 - DNA, 4 bp, Homo sapiens
  chr2:114034670-114034674
  hyper
cgcg

SEQ ID NO: 106525 - DNA, 32 bp, Homo sapiens
  chr2:114035443-114035475
  hyper
ggctcccgggcccgggaccaccggctccattg

SEQ ID NO: 106526 - DNA, 89 bp, Homo sapiens; identical to SEQ ID NO: 37895
  chr2:114035830-114035919
  hyper

SEQ ID NO: 106527 - DNA, 30 bp, Homo sapiens
  chr2:114260126-114260156
  hyper
atcaaacaggagcttcgggtccacctgttt

SEQ ID NO: 106528 - DNA, 30 bp, Homo sapiens
  chr2:114513451-114513481
  hyper
atccctggggacagcgtctagacactgttt

SEQ ID NO: 106529 - DNA, 30 bp, Homo sapiens
  chr2:114514547-114514577
  hyper
aaagctggccgttccgtttcacaaactgcg

SEQ ID NO: 106530 - DNA, 30 bp, Homo sapiens
  chr2:114647020-114647050
  hyper
aagtcctgtaacaacgcacaagtacaactg

SEQ ID NO: 106531 - DNA, 30 bp, Homo sapiens
  chr2:114647337-114647367
  hyper
cagaactggaagctcggatagacttctccg

SEQ ID NO: 106532 - DNA, 237 bp, Homo sapiens; identical to SEQ ID NO: 37896
  chr2:115918655-115918892
  hyper

SEQ ID NO: 106533 - DNA, 87 bp, Homo sapiens; identical to SEQ ID NO: 1757
  chr2:115919337-115919424
  hyper

SEQ ID NO: 106534 - DNA, 955 bp, Homo sapiens; identical to SEQ ID NO: 37898
  chr2:115919830-115920785
  hyper

SEQ ID NO: 106535 - DNA, 179 bp, Homo sapiens
  chr2:118572161-118572340
  hyper
aagatatcacggtgcgcgcgtctggaagcatttccgctctggagcattttcgttccgccgggtgccagcgttcctgtgacgcgtttcctgttggccgagctgcgcacgtgcggccggaagggaagtaacgtcagcctgagaactgagtagctgtactgtgtggcgccttattctaggca

SEQ ID NO: 106536 - DNA, 213 bp, Homo sapiens
  chr2:118771323-118771536
  hyper
cctcacccgcccgccgccccctgcccatgcaggggtacctgctccccgcctccaagaagagggtcggcgcttccctgaggtggatacgcctgaggaagggggcggggcgcccctaacgcacccagggcccgctcagcccgccgccccgcggctcggccctctcttcaggaaccccgacgtgtcagggaaggaggaggcgttcttacctccggg

SEQ ID NO: 106537 - DNA, 30 bp, Homo sapiens
  chr2:118771847-118771877
  hyper
tctgaagttttctccgtggcgctctttgag

SEQ ID NO: 106538 - DNA, 30 bp, Homo sapiens
  chr2:118845782-118845812
  hyper
tgattcctttactccgcccacagggtctgg

SEQ ID NO: 106539 - DNA, 815 bp, Homo sapiens; identical to SEQ ID NO: 37900
  chr2:118981041-118981856
  hyper

SEQ ID NO: 106540 - DNA, 202 bp, Homo sapiens; identical to SEQ ID NO: 1761
  chr2:118981945-118982147
  hyper

SEQ ID NO: 106541 - DNA, 143 bp, Homo sapiens; identical to SEQ ID NO: 37902
  chr2:118982253-118982396
  hyper

SEQ ID NO: 106542 - DNA, 732 bp, Homo sapiens
  chr2:119067605-119068337
  hyper
actttactatcagcattaatccggcttagcccgcttaatgatgccacttgtggcactccgaaggcagcggagaagtctataaactacttccattaaaatgcaaatcgggcccgctgagaaaacaagtgacacaaaaagtgggcgccgcgcggccgccgcccgcgatggcgccgatggctgatgccgcgattacgccggcgggggcggcccgcgcgccacgaacgtgcccgacaagccgcgccgcttaatttctgaagagatttatattttttttgttgtcaggaaatgaacaaatacttatcaatgtaaaaactgctatctccgatctccccgccgggtttttcatactgatattctttgcaccccgtaacacaggaaatgaaaatcttctccgcctctcacgtcgccgctgcgccttcaaatcctctgcgagcagactggcctccccccaccggccccctcccgggctcccctccccggtaaacagaaaagaaaacttctgtgggcgaaggagggagaaattccaaggctctggctttccccagccgacttgggtttcggggcagcgcgggctcccttctttccagcgcaggaagaaggggtgagggaggaggggccggggtgctggcactcaacggtaacatctgttttacttaagcagctcgatttcgttttaggatgaaaaagtattccctttcagcatgaggaatcgtgggccctggggcttgtatt

SEQ ID NO: 106543 - DNA, 546 bp, Homo sapiens; identical to SEQ ID NO: 1764
  chr2:119532058-119532604
  hyper

SEQ ID NO: 106544 - DNA, 302 bp, Homo sapiens
  chr2:119566104-119566406
  hyper
tcatcgtgccaggggcgatgaggttcagttgtgcttctggaaggatccagggttgagggttctccaatcgcagcaaagggcccgggctgggtgttgccgagcggtcctcggctccccggtggaccatgcccctccagaggtctggcccagcgtcgctctgctctgcaaaaaagtggctctccgctgatctcgaatgcaccagcgagcctccagattctgggtgaagccgattttggaaatccatatgccgccctagcaaacacatcaggattgaggttaccgcataagagcagcctgcagag

SEQ ID NO: 106545 - DNA, 794 bp, Homo sapiens
  chr2:119590773-119591567
  hyper
gatatggtacatggggctcctggctctccctgtgtaatgtgccccaagttcccctggattccactgaaaatagggagtggaagggtgggtttggagtgaggataaccaggatcgtcacactcacataagcacagaacctcagggatcttcagggctgacaccctgaacgcccaccactttccctagcccccagtgtctcagctctccaggcggggcctctgaggctagaccgctgtctcgcccagggatgctcgcggactgcggcactagcgaacgcgcaattcccttccccagggaagccacgcaggggctttccccgacggcgtctcacagccaagtgagcttgtgaacacggagacggccgaggatccgagacaaggagctcgctcgctcggtttttcccgggctgtgtttgccattcgcgggaataaatgaagcatcggtaatctccataaaagagctttcacgcttcattctctgaaactaagttgaggcttagacggaaaggagaaaagagacttttaatttaaagtaatgatcatcaacactcaggtgctagagggtctctggggaaagggggtccctaccccacccggggtagcgggagggaggccgcctctctgcgcctagccgggcgggccttgacttgctaggattggtgggccaaatcccatctccggggagccttcaaataactctcccatggggaactgaggaggcgcgggagcctagggcggaaaaagctgaagagccgtggtcccggagaaaaggaagtgagcagtctcaatggaggc

SEQ ID NO: 106546 - DNA, 416 bp, Homo sapiens
  chr2:119591658-119592074
  hyper
cgccgcccgggaccccagagcatacctggttcccttcctggtggccggtcctgtttggggccaaagtttgcatgcgatgggcacaaaggactctgcgcctcctttccctaaccccaagccctgggcggtcggagaacccaagacgggttcaatcccgaaaagcaaactttgttaacttctggctgaatttggcacggcggaggggggagtgggcaataatccctccattctcccctccaccaacacccagggtccctcacttacatcgcagtccccaagtcaacactcgacttgtcactttgcaccacaatgcggtcagccctgtgaggacatgaagaatggatatgaaactcgaggccagataagcgtggaactaggttcagccgtcctccctggggtacctacctccctactcc

SEQ ID NO: 106547 - DNA, 1388 bp, Homo sapiens; identical to SEQ ID NO: 37908
  chr2:119592575-119593963
  hyper

SEQ ID NO: 106548 - DNA, 290 bp, Homo sapiens
  chr2:119594490-119594780
  hyper
gtcgttactgggactcgcttttgttttcttcaggattcagtattgaaattgggagtgtggaggcggcttctccccagctctctccgtccagttttccactgtgttctatttatcagatggcagagccgtgggtctcgctgcaggaaatggttgctgtcagggcccgattgctgctgtcagggcccaagcccactcttgcagtagtcgtggttgaatcagaaattctcctgggtcccttctgtctttggactctcatctctctcacaggaggctcccgcccctctgcgctg

SEQ ID NO: 106549 - DNA, 37 bp, Homo sapiens
  chr2:119599149-119599186
  hyper
cgggcccaggagatccgagccccgcgaggctccgcag

SEQ ID NO: 106550 - DNA, 1123 bp, Homo sapiens; identical to SEQ ID NO: 1768
  chr2:119599829-119600952
  hyper

SEQ ID NO: 106551 - DNA, 73 bp, Homo sapiens; identical to SEQ ID NO: 1769
  chr2:119600995-119601068
  hyper

SEQ ID NO: 106552 - DNA, 151 bp, Homo sapiens
  chr2:119602478-119602629
  hyper
tcgtaattagctgagcggggagaaatagcccaagaaatgcacacagccccaaaaaggccccactgcccgttctgcatccgggacatgttgaagtgttgttgtatgtgtgtgcagaggcacggactcttgtaataaaatcgttcctagtctc

SEQ ID NO: 106553 - DNA, 522 bp, Homo sapiens
  chr2:119602828-119603350
  hyper
cgtggctacgttgttcccggccccctgccggaccgggtgtctggagtgctgatcttgggccaaagcttctgccgctctcccagacactgcgggccggggcgtcaggcaggccttggccttctctcccggagcccagctcaggtctcctcctcgggttcgccaagcgcgaggggcacacggaaaagtggtggaaggaaagccgagaaaaacaggcctacggatgccagaagtctgctggatgtgcgggtgaaaaaaggaaagcgccgcgcggggaggatgcgggaaccgttccgcggagaagctacggaggaaactggctctcatgcccttggacacgcttcctggcctgagcctgacctgttttctctcctctcccactgtttttcagctccagaaaaccaggggctgccagcacccacctttttggcaactgcctttccctggtttctacccacccgggtcagactcttttcgctacccagccgggggagagggacggctttcagacgctttcctccctgt

SEQ ID NO: 106554 - DNA, 408 bp, Homo sapiens; identical to SEQ ID NO: 37914
  chr2:119603628-119604036
  hyper

SEQ ID NO: 106555 - DNA, 44 bp, Homo sapiens; identical to SEQ ID NO: 37915
  chr2:119604049-119604093
  hyper

SEQ ID NO: 106556 - DNA, 527 bp, Homo sapiens; identical to SEQ ID NO: 37916
  chr2:119604152-119604679
  hyper

SEQ ID NO: 106557 - DNA, 227 bp, Homo sapiens; identical to SEQ ID NO: 37917
  chr2:119604689-119604916
  hyper

SEQ ID NO: 106558 - DNA, 206 bp, Homo sapiens
  chr2:119605263-119605469
  hyper
tttttgcagggagagcgcgtctccgccagcgccgggctgtttttttttttttttttttttttttttttttcaaatctctgacagctcggatctttgcacaaactctctcgcttaaaaaaaaaatcacccaggcacactttttgccttcaaaccggaagcacgtgagtcagggccgcacgtgtgcggagccaatggcgagccgggac

SEQ ID NO: 106559 - DNA, 124 bp, Homo sapiens
  chr2:119605501-119605625
  hyper
cgcgcgcgggactttgcggataaataatccgggggcgtcaaccgctggcggagagggggcgcctcggcgctggccctgtgcgtcgggtccgccctcccccacccgcgcccgcacccgcgtccct

SEQ ID NO: 106560 - DNA, 459 bp, Homo sapiens; identical to SEQ ID NO: 37920
  chr2:119606040-119606499
  hyper

SEQ ID NO: 106561 - DNA, 131 bp, Homo sapiens
  chr2:119606630-119606761
  hyper
cgggaatgtgagggacgggggtggcgtgtggactgaagctctaggcacctgcgggacttgtctccggattcgttttggaggaccagtatccgactatgctgaagcctgcggtggccgagaaaggcgtcagc

SEQ ID NO: 106562 - DNA, 181 bp, Homo sapiens; identical to SEQ ID NO: 37922
  chr2:119607442-119607623
  hyper

SEQ ID NO: 106563 - DNA, 289 bp, Homo sapiens; identical to SEQ ID NO: 37923
  chr2:119607847-119608136
  hyper

SEQ ID NO: 106564 - DNA, 30 bp, Homo sapiens; identical to SEQ ID NO: 1774
  chr2:119608636-119608666
  hyper

SEQ ID NO: 106565 - DNA, 45 bp, Homo sapiens
  chr2:119609395-119609440
  hyper
gtggtaatcgcatttcgagtgtagatcagatggcggtggggcctc

SEQ ID NO: 106566 - DNA, 276 bp, Homo sapiens; identical to SEQ ID NO: 37926
  chr2:119610098-119610374
  hyper

SEQ ID NO: 106567 - DNA, 399 bp, Homo sapiens; identical to SEQ ID NO: 37927
  chr2:119610540-119610939
  hyper

SEQ ID NO: 106568 - DNA, 254 bp, Homo sapiens; identical to SEQ ID NO: 37928
  chr2:119610998-119611252
  hyper

SEQ ID NO: 106569 - DNA, 604 bp, Homo sapiens; identical to SEQ ID NO: 1778
  chr2:119611311-119611915
  hyper

SEQ ID NO: 106570 - DNA, 47 bp, Homo sapiens
  chr2:119612307-119612354
  hyper
gagctcgccaaatcccgctgggaagccgcgggcgtcccagttttgtt

SEQ ID NO: 106571 - DNA, 31 bp, Homo sapiens
  chr2:119612771-119612802
  hyper
gtccctcccctcccgcgccgatgactcccgc

SEQ ID NO: 106572 - DNA, 876 bp, Homo sapiens
  chr2:119613016-119613892
  hyper
gctggggctggcagccgaggaggctgcagggacgcgcatggaagagccggtgcgtgggagggtttgcgggggggacatcgcgccccctaggggtgaccccagtgggtcccgtgtgctctccgcggagccggcggagccttgtcctctgcacccggcgcgcagcggccccttaaacagtggaaccgtgaggccgctctaagccgaagggctggaatctgggtttctcgggttttattttagaccattcggcaccaagcccgagctcccccgccgcaccgcttccagtcccctttctttccatagagcgacccgaagccggcggtggcgcagggagccgagtctgatgagctcgcgggcggctgaaggccggcttccctgtggggaacgcgccacctgtcggcgccagtgagaactgcgtctgtgtggcgccctcggggtattcggggctgcggggagatgtgtgcctgaagccctgcgcttgcggtggggacgtccggcctctttcctggcaattgacccctgaggcgggagagacaacggaattcccacaaagggatccttctcgggatctccccacctcaagacagctaaagctggaggaaaagcccctccggggggtggggggtgcgggtttgccctgcgattccgaaagcagaaaatacccgagccacacagggacgggcgccgcgttggtagtcggggctacgttcctactccctctacctcccccgcgctgtgtgaccctgggcggaaccccgctgctctctgggcctcagtgttcttattcgtaaactgagggcgttggatgagattggtcctctcccaactctgaccttgaaactgatactgaatctgagcagcgtctgtagacacctg

SEQ ID NO: 106573 - DNA, 239 bp, Homo sapiens
  chr2:119614241-119614480
  hyper
acccgtaagaagggccgaggctagagggagagcgaagactgagccaacgacgcacctgagccctggggtgggggtggagacgtggctcctaacccaaatctccctgccaggcagtgtccgacgagcatcgacggcaggcgtcgagaccagtgcagggtagctcagacctcaagccacgcttgacctttccatgaaatgaataaaactcgaaagccagggaaaggggacagtactttgat

SEQ ID NO: 106574 - DNA, 1159 bp, Homo sapiens; identical to SEQ ID NO: 37933
  chr2:119614602-119615761
  hyper

SEQ ID NO: 106575 - DNA, 569 bp, Homo sapiens; identical to SEQ ID NO: 1783
  chr2:119615982-119616551
  hyper

SEQ ID NO: 106576 - DNA, 512 bp, Homo sapiens; identical to SEQ ID NO: 37935
  chr2:119616781-119617293
  hyper

SEQ ID NO: 106577 - DNA, 347 bp, Homo sapiens
  chr2:119769049-119769396
  hyper
gggggagtttcacgtcgctgggctccacaaacatgacctggggctgctccacccctctgtcccttctgagtagaaggggggcttagtccagtggcggccgcgccgcaggaggttgctttctctctcccggcacgcggggtcgctgcaggccgtgctcagccctccaggagccggccggtgtccgcgctcgcgggcggctctgggaccgggagaggctgcggctccccgctaaggctcctgcggccggcgcctcctggacccacccacccacctcggaagacagacgcctctcttcagctgtaccggccccaggctccgccaaactccctcctcgccctctccttccg

SEQ ID NO: 106578 - DNA, 340 bp, Homo sapiens
  chr2:119913859-119914199
  hyper
agtcaggagggaatgcggtgtggagaggtgaattttctgtttgctggaattctgctgtgggtggggttttggctgatggacagggaaatctgcacaagtatttcgggtcacaaagaaggacgccccaggaagcccgcgctccctctggcctacctccctggccagggcccggagccctccgcttctaggcactgggaggaggctgtctgaggagggcaggctcccggccctgcctgtccagtctaatcaggtttgcaaagtctgtgccgccgcctcaagggctcgggcgtcccttcctcccttgccgggatggggatggagaccaggagcacagccctga

SEQ ID NO: 106579 - DNA, 221 bp, Homo sapiens
  chr2:119914247-119914468
  hyper
cgcagggatttgtcttttccaaaggagatgtcaggaagtgttatgaatcgagagtggcctttgccaaggagccgcgcccgggcggagaccgggcggcctgcagccaccccgcctcgcaccccccgcgcccctaatccgggtacagaagaaagcccgagaacgtgctgtacttgttattattgcctccgtgagccttcccgccatccagcttcacatacact

SEQ ID NO: 106580 - DNA, 230 bp, Homo sapiens
  chr2:119914529-119914759
  hyper
cgtcctgtgcaatggcgctggcccggacctggggacaagcggtgggagcaggtgagccggggcacctcttcccgcgcctttgctcagcccacaccaggcgcgccactcacgggcctcccgcctgctgcttcagggtccacactcccaccccagctccatgttctctctccaacttagtcaactccttccaggtcccccctcctcctcgcgccgacgagtctgggaaatag

SEQ ID NO: 106581 - DNA, 638 bp, Homo sapiens
  chr2:119914968-119915606
  hyper
caacatttggctctacgtcccggtgagcgcggcctcggcgcatcgggaagcggagatactgtggcaccgaggcgcgttcattcccggggctcgcagggtagcccgcgggtggagagaaaggaggctggttccctgggaggttcagggcgcgggcgagggtttacgggggccggtgagtgtaggggtcactgacctgcccgttcttgcagaggtccgcccacatgctggtgccgtcgccgccgcgcatgaggatgtggtaggtgaagaagtagatgccgcgtacctggcagctgaacttgcccgtggtggggtcatagtgattgccgaggttggtgaccacgtcatcgaacttcagcacctcatagccttcgtgggggctcttgagacccacatagaaggcgatcttggggccgctgaaggtggcgctcagcgcactggtcacttcaccctcggaatcgccacctaccccggccccgccgcccaccaccccgacgccgctggccgtgcccgccgtcagttgcagccctggcagcccgggccgccccgagtcgcccttctctcccggagggcccctgggtccaggcgggcccggctctccagggggcccccgcggccctggcttgcccggtcgccccggg

SEQ ID NO: 106582 - DNA, 101 bp, Homo sapiens; identical to SEQ ID NO: 37939
  chr2:119916524-119916625
  hyper

SEQ ID NO: 106583 - DNA, 30 bp, Homo sapiens; identical to SEQ ID NO: 37940
  chr2:119981154-119981184
  hyper

SEQ ID NO: 106584 - DNA, 30 bp, Homo sapiens; identical to SEQ ID NO: 37941
  chr2:120124266-120124296
  hyper

SEQ ID NO: 106585 - DNA, 30 bp, Homo sapiens
  chr2:120124628-120124658
  hyper
tgtctcaggtacagcgcgtgcacagccagg

SEQ ID NO: 106586 - DNA, 30 bp, Homo sapiens
  chr2:120125154-120125184
  hyper
cgagctatgtggggcgacctctggctcctc

SEQ ID NO: 106587 - DNA, 30 bp, Homo sapiens
  chr2:120189303-120189333
  hyper
ggcggcggggttggcggagcccgcccgggg

SEQ ID NO: 106588 - DNA, 459 bp, Homo sapiens
  chr2:120189852-120190311
  hyper
tgtgagaaatgaggcgcgtctggggtggagggacagaatcgacttgcaaagtgaggcttatgtaacagaggatgcgtctcttgggaagttagacctttctgggggtggaggttaggaagaccgtctccctccccaaagctgcgtttggggtgctgggctgggggtggacttgctgagtcgcgcggacacctcagggaaaggctctggcgagggaagaagcccgtgtctccgaagatttggcttctccttagcgtagtgcacgatgtttatgttggctaagaacctacacattcctacccgctccctcgggcctgctgctccccaaagggaagtcagtgggtggcggtaccgctgcccagcgggcgaacttcctttccgcgcaactcgcccgctgcagagtctatccgctggactgtctccaggattagagaggcccgttgacttcgtgtacaaacgctc

SEQ ID NO: 106589 - DNA, 489 bp, Homo sapiens; identical to SEQ ID NO: 37944
  chr2:120281411-120281900
  hyper

SEQ ID NO: 106590 - DNA, 151 bp, Homo sapiens
  chr2:120281938-120282089
  hyper
cgacctgcggcgggccccgggactgctcctcctcggaccaggtggccgcgcgcgctaagccgcccgccccattgatcaggacgcggctttgccggcgcgcctcctccacccggcagggactggcgcggggtcggcgcggaggctggcaggg

SEQ ID NO: 106591 - DNA, 661 bp, Homo sapiens; identical to SEQ ID NO: 1790
  chr2:120301686-120302347
  hyper

SEQ ID NO: 106592 - DNA, 30 bp, Homo sapiens; identical to SEQ ID NO: 37947
  chr2:120436519-120436549
  hyper

SEQ ID NO: 106593 - DNA, 30 bp, Homo sapiens; identical to SEQ ID NO: 37948
  chr2:120436994-120437024
  hyper

SEQ ID NO: 106594 - DNA, 139 bp, Homo sapiens
  chr2:120516994-120517133
  hyper
cactgaggttggggcgacctgctgccaactggtctggttttcccttttaacacacgcttcttgcccactatccggtccctgcggtcagtgggtgcagcaggggtcgcagtccaaacaaccaatcgcgacgcggctgcgg

SEQ ID NO: 106595 - DNA, 129 bp, Homo sapiens; identical to SEQ ID NO: 1791
  chr2:120770808-120770937
  hyper

SEQ ID NO: 106596 - DNA, 218 bp, Homo sapiens
  chr2:120770966-120771184
  hyper
cggagggaggggcggcggcggccaatgaggcagggccgccgagtttcggtcgataccgcgcgacgggccggggcggagggcccggggcagccgggttaatgtttgccgagcggacgcgctccccgagccgcgggtacccctcgctggtccgctgggctgccgtccagcgggagagacaaaagtcgcaagggaaggggaaaaacgaactgagtttgtgt

SEQ ID NO: 106597 - DNA, 30 bp, Homo sapiens
  chr2:120980884-120980914
  hyper
ccgaaggggcctggcgcgctgctgactccc

SEQ ID NO: 106598 - DNA, 30 bp, Homo sapiens; identical to SEQ ID NO: 37952
  chr2:120981259-120981289
  hyper

SEQ ID NO: 106599 - DNA, 30 bp, Homo sapiens; identical to SEQ ID NO: 1793
  chr2:121009840-121009870
  hyper

SEQ ID NO: 106600 - DNA, 30 bp, Homo sapiens; identical to SEQ ID NO: 1794
  chr2:121010900-121010930
  hyper

SEQ ID NO: 106601 - DNA, 199 bp, Homo sapiens
  chr2:121101032-121101231
  hyper
cctgcttctgacttcggtcggcaaactcacacccgccctagttttgcccgccagcttcgggtcggttcctccgattgggagggagggggcgctcggcttccagacttgcaggccgccgcgggcctgcggtcccggccgagctccacggtggcagggctggcccgagagactggcggtgggaggcgggggcaggaggcca

SEQ ID NO: 106602 - DNA, 194 bp, Homo sapiens
  chr2:121101969-121102163
  hyper
cccagagcggcagccgccggcggagcctgcctctggcatcccaggccgcgccgcaccccgctcgcctcgccaggctcggccgcgagggagcgccccgggagggccgggggcggccacggcggcgggagtcgcctctgctggttggggagggcggcagctgggacagaggcagggcctgcgcggcggcggggagg

SEQ ID NO: 106603 - DNA, 30 bp, Homo sapiens; identical to SEQ ID NO: 37957
  chr2:121102417-121102447
  hyper

SEQ ID NO: 106604 - DNA, 143 bp, Homo sapiens
  chr2:121103345-121103488
  hyper
ccttccccagccgccggccgaaccgccgctcccactgacgctgctttcgcttcacccgaaccggggctgcggggcccccgacgcggaaaggatggggagaaggctgcagatgccgaggcgccccgagacgcccgtgcggcagt

SEQ ID NO: 106605 - DNA, 336 bp, Homo sapiens; identical to SEQ ID NO: 37959
  chr2:121103740-121104076
  hyper

SEQ ID NO: 106606 - DNA, 1165 bp, Homo sapiens
  chr2:121104109-121105274
  hyper
cgcgaggacggccgcgtggagatcccgcacctcgacggccacgccagcccgggcgccgacggccaggagcgcgtttccgaaatcatcagcttcgccgagacaggtgggtccggccctccggctgtctgccgcggtccccgctcgctcccgctctccctctccttgctagctccggctgccaccgccgccaccgcagcccgcgcgccctggggcagcctggactcccggcagagctccttcggccgtggccctgcgcgctccgcccgggttgcagtcctcttcccccaggccgcagacccttgcctgctgcctcaaccccccgccgccgatcgcctggccctccacccctgctctccggaatcgggccccagcgcctctgggcgcgcgtccccctcccggcagatgcgcgcggccctggctctgcgggcacttgcttggtgattgcttaatgtttttgtttcccacgatcggagtgtaggcttagcagtgtggatggagatgtgtgtgcttgttgatatacgtgggccggaggagagagagagtgtgtgtgtatctgtgtgtgtgtctgtgtgtgtgtgtgcctgcgtgagaggcccctggggccgcttccatcaccggcggcgtgggcttgccaggattgctgaagcctcgctggggagagctaggcaacctctcttccgattgtgtgggcaccggaatcgggcggaaggcaggcttctcaacaggtccatcatttacacagagaaagccgcggttcggggacagccccgtgcctctcggcttgcctggcagctgcagcagacccctcgcccgagaggcagagtcgtagttaacaaagggtatggctcctttctggaatccgcccccccccccggccccagattgcaaatctctaacactgtctaaatataaaaatcagggagagaaaaatctttcggaactttaaaagaaggagaaaaatgtgcccgcgccaaaatgctgcaagtgctttcgactccgctgtccttttcaggacttgaatgagccaggctggcttttgtgcctggagctcggccccatttgtgccgaggggactgcggagaaggtcgcagagggggaagccccggtgcagttagggcgggggcaagcggggagcctcggtggggggagcggttgtgcccctggc

SEQ ID NO: 106607 - DNA, 1183 bp, Homo sapiens
  chr2:121199616-121200799
  hyper
tgtcatttgccgggcgttccgctttctccactgtaccatgctaatttttcgagggacaattttttgacaatgagtcctccagcccgaacagaaaccctttatggggccggccccagggaggccgcggcgctgccaaggcaaacaaaggctcattgctgccgcggaacatgcctgcgcctttcagggccgggttcgcagagcgcgccgcctccagcccgcgccgaggtaacacctggtccgccaactcctggcgcctaatcaagatatcaatcacggcgcgggggcaggggggcgcacgggccccgaaggctccagaacccggcaagtgcaggtagccggccgcctggccggccagggctgcttggcagggagcgccgggatctggggggaaagaaatcaagccccgaagctgaaggcttaattaggctgatatcatcccgcacaaatgttcctccgagaggaaggcttctgggcaccaaaattattttgtgattaaaagcgaaaaggaaggagaaatgattcggcctttggaggagttcggagggctgggggtggcagcaggaggctggggcgcagcgcagcgccaggggcgcgggacccagccaagctccccactctgcccccactgggacagagaggcgcaagagtccaccaacccctgccacttgtggcctttcctgactgcccagggcttccaacaatgtagaagagtgacagtaaatgtccaggtccctgcatataggtgtttctttaatctgcacaccaggccggaaaggccatgcacgtcgtcgtcatcccatttcgtagatggggaaaattagctcggagaggtgacatcttgcccgaagtcccacggctggtcagtggcaagtggacagtggcaactgcgcctggaaaacgccgtccgtggcgcggtcgcggcgccaggggcatgcctgacagccaccttctctcccgtgaccgccgggctccgcatcagggcgagccactcggctcgggagagcaggaaactggggagggccgagcctccggccacgccttgtcagccccggagcctccaccaatcccgggcccggaaagaccaggcccactgccggccccgcccagcacctgcgcaggtagcgcgcgcaggcgaaccgcaggcccgggcttctggggcctcacgctgcgcggagaggctgcc

SEQ ID NO: 106608 - DNA, 30 bp, Homo sapiens; identical to SEQ ID NO: 37964
  chr2:121245106-121245136
  hyper

SEQ ID NO: 106609 - DNA, 113 bp, Homo sapiens
  chr2:121344942-121345055
  hyper
gccgctttgtgcccgcggccggcggaggtgggggccgcgcgtccccggatccccctgccccggcccggcccgcggccccgagggggcgcccgccacttcgccgccgccagccc

SEQ ID NO: 106610 - DNA, 177 bp, Homo sapiens
  chr2:121412043-121412220
  hyper
cggggcagcggagggcgcagaggtcaggcagctgcgggagggctcgtgagagccaatgagagcgcggaaggcggcgagcgagccaatggacgcggcggtggggcagggggcggggcctgggcgaggccgggggcggaatgggctgagtgccctgtctgaatgcggggaacgtctggg

SEQ ID NO: 106611 - DNA, 31 bp, Homo sapiens; identical to SEQ ID NO: 1799
  chr2:121427431-121427462
  hyper

SEQ ID NO: 106612 - DNA, 31 bp, Homo sapiens; identical to SEQ ID NO: 1800
  chr2:121438058-121438089
  hyper

SEQ ID NO: 106613 - DNA, 30 bp, Homo sapiens
  chr2:121492945-121492975
  hyper
cgcgggaagagggtccgcgtggacccagcc

SEQ ID NO: 106614 - DNA, 2053 bp, Homo sapiens
  chr2:121493195-121495248
  hyper
gtctaaaaaaagtgtcggagattggcgcgtcctttggttcctttctcgaactttccttgtaggtgcgttttctttccttggtgctgggtggggagagtccctgtgctccccctttcccctccccccgccccggcggcgttcgggtccccctgcgtcccccggcagggagcgggcgggctggctggcgggttcttggggcccgggtgtgcccgcaccgtgcgcgcgggggcgctgcgcagtccggcggcgctgatggattgcagaagtgccggcgcttgccagccgaggcagcacggctccgcggactttttttcaaactcccatcaatgagacttcgaggaggagcgggcggcggcggcggctgcgactgcgaacgcggaggaaggccaggagccgcaggaggagccggaggaaagagcttgggccgcgcggcgcgccgcagcctcggggagccgcctgctcgccggcggtaggggctgcgcggcgcccgcccgcctctcggtcccctctcttgcctggcccgccccgccccggctggctggagccccggcacaaggcagccagccgagggtcgccgcgccagccaaggtgggatgggggcccacagccaccgcccggcgcccgagaggccacctgcgtgctagaggcaaacttttgtctctctcggtaaagttgcattggccttcttttgcttgcttttcgtgacgaagcgcctcccacctcggccaagcgcgggccgactgggatgctgcgccgtctcggggggtccctcggccgggtaccggcgcctaggccttgggatcggggccctgggcttcgggggactagaggctagtaggcgcgaccccgcctggggctctggacgagcagggcggggacgtaaggagagtcctggggcttggagctcgtggccagaggtcgatgttgcaccctctccctacctgggggagagcaccactcttctcggggtgcacagcgagccggcctccgcgcgccggcgggggtctgttttttcagggggtggagggtgggatcggaggctgggatgctccgaagctgccgtaggtgggcatgggagcgtgtctgcgggcgtactgagcgcggaggggctgcagccagccacttgagaacttcgaactccacttctccgcgctgcgcgtcccggagccctgcctttctttcttccttcctcaatccttcctccccctcgcccggcccggccgccccctccccctctgctgggctctcctcctcggccccccctctttgcctctcttctcctcctctcctgccctcggccctgagatccgcttgacttcccaaagggatccgcacgtaatcctttgccgggtcctccggttcccccttccacctcactttcatccctgcccccctactcatcgtctctccccacccccgacaatctctcaacaagtatatttgctgaggaatttgaaaaatccactactgcaacttgatctgtatgtgatggatggggagaggcgcggagagagttgggcgccaatcctattaagggtttagagaggggagtcttttccccggacggggcgggggcggggagctgggagggagcgtgtgcttgcgtgtgtgagtgtgagcgcgcccgccgcgctggagagctgggagtccacccagctcggcgccttttcagcccggcggtaactgctgtcatttcctaggaaacccgacttttaccgcgcggggagctggggatggagcccgtgcgcctcaccctgggtgatcggtcgctgaggctctcggggacctcgagcccccccgagggtgcctctttccactaccttctcttttgtgtaattgttctgtggctcctagagttgatcccagctggaaaagtagacctgtccctactgtctggtcccgcgccctgggagtcttgtaggcgtccctctgtcccccagcccgggcatcccgctcggtgcgcgacctctggcacgggctttgcagctcggtggccgcagcggtgtcccgggccccctctccgccgctcttgccgggcgtgtgaaggtttaat

SEQ ID NO: 106615 - DNA, 266 bp, Homo sapiens
  chr2:121499188-121499454
  hyper
cctcctccccgcccccgccgtctggaccttcctctccctccgcgccggcttttccgccacgcggagcgctggctggcgaggccgcgtgtccgagcggcgccgaccgtgccgcggccgggggacattccgtgccccgagcgccccgggcccgcggctgcggccctcccacctgcgcgccggcctggtttgcagctcccaaacaatggccacattgtcgcagccgcacaccggccgccgccggcgagtggcgggaggccggactctgc

SEQ ID NO: 106616 - DNA, 51 bp, Homo sapiens; identical to SEQ ID NO: 37970
  chr2:121499643-121499694
  hyper

SEQ ID NO: 106617 - DNA, 30 bp, Homo sapiens
  chr2:121833102-121833132
  hyper
ccttccttccctgccgcctgtttgggaggc

SEQ ID NO: 106618 - DNA, 183 bp, Homo sapiens; identical to SEQ ID NO: 37971
  chr2:121834573-121834756
  hyper

SEQ ID NO: 106619 - DNA, 30 bp, Homo sapiens
  chr2:121996010-121996040
  hyper
aggcacagacctgagcgctctccaggtgga

SEQ ID NO: 106620 - DNA, 1053 bp, Homo sapiens
  chr2:122042060-122043113
  hyper
taaccacgcgggcctcgggcgaacacgcgcaagaccatcgcgggaagtggggcggcctgcccctccgagcccgccgcccgcccctcgtccaaggaagggcactgcagagggcgcgaggctgggagaggggccccggcggagacgggcaaagagcaggggacgaacttccccgggccgggcaccaggctgctggcaggaagtttcctctgcttctccgatacgcgggggagaggagggccgcagggggcggacgggccaggggaggcggcgggccggcaggtgcgcgccctgcaccctctctgccgcctgggaggagccctcgcagacatagggctctgcgcgctcgcctccccagcgggcccccaactccgcacgtcgggtcccgccggcgtccatctgtcagtccctaggcgggacgctgggcgggtctctcagtccccagagggcggacagcggggaggccagggcccagcaggggcgccccctctccgcccctggacgtccaacggcgcccggcccgccggcccggcccgagacccgcggggaccgcgcgcggcccttaccgcaggtagctgccggagttgtgctggttgtagtgctcgggctgcgtgtgccagaagagcatggctggaactcccagcgcgccgaccggggcgcggcagcaagcgcagacgcggggcgcgccgaggacccagcggcggcttcgcgctccgaacccgcggtgccggccggctcggcgcatttatcggcggcccaggggcgggacagcggtgagacccgccccccaggaagcgcggcccggagggcggctccccgcggcagccgcacctggctgactcccgcgcgtgcctttccggcgagcgagcgcgcctccggggcggccagaccagagggctctagggccggccgggtgctctccccaaactccgatgtggggctcaggtgacccttgccgcccccaacccgctccacacggcccctctggcctctgctccccactctacgcccagggccggtctccagagcggctccgagatttccagcctaggccct

SEQ ID NO: 106621 - DNA, 30 bp, Homo sapiens; identical to SEQ ID NO: 37973
  chr2:122288036-122288066
  hyper

SEQ ID NO: 106622 - DNA, 112 bp, Homo sapiens
  chr2:122288273-122288385
  hyper
agccgccgcttttgcgacccttcgggagcctcagaaaacaaagaattggggtgtcgtcgaaagctgtggaggctggaggtaagctagctaccagaccgactagggcgaggct

SEQ ID NO: 106623 - DNA, 109 bp, Homo sapiens
  chr2:122407189-122407298
  hyper
cctctctatggtaacgccccgcgcaggcgctggcctggccgtgttaggcttcgctggcgtaaagtccccgggagctttgcccctcacggagaacgttagttgaccctga

SEQ ID NO: 106624 - DNA, 266 bp, Homo sapiens
  chr2:122408112-122408378
  hyper
cttcgaaagtgctgggacagcaggagtgagccaccgcatctggcccggaaagtgttttggagcgtagaaaaatgcaaattatagggctgccttcaaggatcccgaaggacccacagatttgccgcatcaggctcctatgcacgccggtaatttgatgtgttgagatgcactgcccagtgcgttgtttttactggaggagcttgtgtgcggagctccttgctagtgtatgtgttgggatgggagagaagtgcgggagaactatgaga

SEQ ID NO: 106625 - DNA, 30 bp, Homo sapiens; identical to SEQ ID NO: 37975
  chr2:122493555-122493585
  hyper

SEQ ID NO: 106626 - DNA, 30 bp, Homo sapiens
  chr2:122494199-122494229
  hyper
ggaggtaatgaaggcgagcacgaaggcaag

SEQ ID NO: 106627 - DNA, 218 bp, Homo sapiens
  chr2:122512895-122513113
  hyper
tgtgcatactctttcgttgtcaaatatttccctccaactgttgttgtgtatgaaataaatacacacatataagctaaccagccccacttgcccgcaccacctacacgcccgtccccgccctccctcaggcccacgtgctccgagggccgccttcgcaggttgtttctggcgatgcctgtctgaaggcctcagactgaggccccgcccactctccctct

SEQ ID NO: 106628 - DNA, 30 bp, Homo sapiens; identical to SEQ ID NO: 37977
  chr2:122513361-122513391
  hyper

SEQ ID NO: 106629 - DNA, 1043 bp, Homo sapiens
  chr2:124782288-124783331
  hyper
cgcgaagaccggcgagaggatgtgcggtgggagtagctgcggggtctgcaagcaggggagcgcgcacaacgttaaaccttgaaaccagaaatcccgatcctatcgagacccatcagcttttcccatttgggaacgagcgcaggggaaattaaatgcgtaattcaagctctgttttcccctcccctccaaaggtgaggtgggggaacgcgtctcgttagctcattacaaagctttccgtgggaaattccctcttcctaatgcgtctgtcttgcaactcctattagcatccttcgacagcggcctttgaaaatctcctttaaatttcaatacctctactcgtttcccaaatggggggaagggaagagaaagccggggggtagagagaatttccttcccctttccctcccaggtagccaaagcgcaccgcagcggcttggcttcctggaggaaaagcgcccgagcggggcaaagacccgcccaggctgctcttataggcgagcgcggggcgggcctggctgggggcggtgccgcgcggccccgctcgcctataaggagctgtccgccacccgggtgctgattccagctctcgcgcccgacgaggtggatttggctgtccaccgagctccggcgcctgtcgttctaattgggtttggatttgcaccgttaaggaggggggaagagaaggaagaggcgggcgaggaaggcgagtccagctagcggctgttgcggggaccgtagccccagctgcagctccgaagaatcccccgccacggtttcggtggagcgtctgggcacgggatggagtgaaagagcgagtgcctctccaagcgggggtgggagggggtcaggctgtgcagaggagagagacagcgagaagaagccgcggctggctactgcgaatttgggattcgattgggagggaccgctcactcgggggaaatggattctttaccacggctgaccagcgttttgactttgctgttctctggcttgtggcatttaggattaacagcgacaaactgtgagtacgaggagctgggggc

SEQ ID NO: 106630 - DNA, 209 bp, Homo sapiens
  chr2:126339276-126339485
  hyper
tggcagccaggacaacggcagcactacagctgggaataaatgataacaaagcatattgattccccaagcctgctgaccacgtgatttcctcaccagctccttgctagcagagataagaaaagcaatcaagagcaaagcatggcaatgatgatggtgaaggacttaaatgttcttagtgtttcaactttgttccacggtctaatgtctaa

SEQ ID NO: 106631 - DNA, 381 bp, Homo sapiens; identical to SEQ ID NO: 37979
  chr2:127413346-127413727
  hyper

SEQ ID NO: 106632 - DNA, 26 bp, Homo sapiens
  chr2:127413969-127413995
  hyper
cggacgccctggtgtcccggtccgtg

SEQ ID NO: 106633 - DNA, 266 bp, Homo sapiens; identical to SEQ ID NO: 37981
  chr2:127414108-127414374
  hyper

SEQ ID NO: 106634 - DNA, 30 bp, Homo sapiens; identical to SEQ ID NO: 1805
  chr2:127464270-127464300
  hyper

SEQ ID NO: 106635 - DNA, 770 bp, Homo sapiens
  chr2:127534436-127535206
  hyper
tggagggaagcccgccgggaagctgaagacagtggtcaccgccctcggtcattacttcccgggacccggaccctaaccctgcgccacatctccacccgcccccagccgtgtcctggctgcgcagctggaaaggttgagcagctcactgctgtccctctgttcggccttggacacatcgcctgaactcctgggcgcctctgctgttaagtgggggacagcactatttactggggaggaaaactccaggaatgtggaccctggggccacgcaggggttgggaagtgaagggcagggaacgcgggcggcgcccggggtctgcgggtaggcaggcggcctggccgcggaggcttccccgagtcctgcgccttcctagagagggaggggctcatatcggctggcacagccaccacgggtaccgaaacttggggacgtgcccgaccatgcctcctccggtggcccgggggccaccccgcattgcttagaagtctcgcttcccgttcctcctctctggttcagctcattactcttccggtgaccctgggtatgccacgcttattctccaggcctcagtttccccatctgtgctgtgaggagtggaaggaacgggatgactaggagccttttaagaccgagtattcgaggttctttccggccccgcggagccaggaggtgccagccgagatgcgcgtgccgcgcgcgccctccagtgcccggttcccgcttctgcacggtcctcgctgggcaagggcgtcccaagaaaggaggaaagg

SEQ ID NO: 106636 - DNA, 196 bp, Homo sapiens
  chr2:127643928-127644124
  hyper
tcaggctcacgtggccgaccctcccagccccctaaccccggtcgggcccatcacccagagccccaaacgcaccctcgcggcgcttcagcggggtgggcgtggtctggtcgacccggtggtgccgccccacagcgccccctcgcgtgcgccagccagctcggcctcagctccccgcgctcctgctcctgcctaagga

SEQ ID NO: 106637 - DNA, 30 bp, Homo sapiens; identical to SEQ ID NO: 37985
  chr2:127729745-127729775
  hyper

SEQ ID NO: 106638 - DNA, 334 bp, Homo sapiens; identical to SEQ ID NO: 37986
  chr2:127782974-127783308
  hyper

SEQ ID NO: 106639 - DNA, 217 bp, Homo sapiens; identical to SEQ ID NO: 1808
  chr2:127783371-127783588
  hyper

SEQ ID NO: 106640 - DNA, 31 bp, Homo sapiens; identical to SEQ ID NO: 1809
  chr2:127810838-127810869
  hyper

SEQ ID NO: 106641 - DNA, 942 bp, Homo sapiens
  chr2:127863361-127864303
  hyper
tccacccggcggccgcgcagcgggtgggagagggggcaggcctggccgcggggcactggggggccaccctggcagaaacacagattctgcaatctcagatttcagagttggagtcgtcaggggaagtggcgtcagcagctggcgtgatccaattcaataaaccagaggtggcttgggatagacaactgaccgggtgcagacccccgcccctcaatctctgcatttcctgcacgctctgggcaccctgggaggccccggctccatcccccattccagctctccgcgaggaggggtcgggtttcctgtggcgccttccacgcgcctcctccaggccagctccccacccggccgtgggctcccaaagccagtgccgccacccgctccccggccgccggaaacgctaagcccctgctggggcgagggcacctccttgcggggtgcgtagccctgggctcccggtggggccgggctgggcgggagcttccaggccgcaggcacctctcgggaaaggaaacccaatccctccttcggcccacggagaacgaaagtggagaagcagtgggaaggaaggaactgtgggtgccggttcgagaagcagccttgggagtccgggggaatagtgtccccaggggcagagggacatactccctctcgccccgagcgccggcccagcctaggttgcctgcatgggcctggagagctgagggtcaccacctggcctcccagcctcccggcccttggcctccaaagcggggtagcctggagcgcgcgcctgagaagagcctggagcagggccggccactgctgtgcagccgagccacgaaggtgcaaagcggggccctgtcctgccccggccgggtgtggggagacagaggacgcaaacctaagagggcacccagagcgccggggaacgcagcctggggacctcgaagcccctcgaaa

SEQ ID NO: 106642 - DNA, 30 bp, Homo sapiens; identical to SEQ ID NO: 37990
  chr2:127864763-127864793
  hyper

SEQ ID NO: 106643 - DNA, 59 bp, Homo sapiens; identical to SEQ ID NO: 1811
  chr2:127865203-127865262
  hyper

SEQ ID NO: 106644 - DNA, 998 bp, Homo sapiens
  chr2:127976385-127977383
  hyper
agtgcgtgctgggccgggcacccggggaggcggacgatgggcgaaggcatcggagggcgccgccgcggctcgggtgcagtgcccctgccacgaagggcgcaacggaggtgggcgtgggaaggacagcactcaggctccaagtgggaagcgtgcggaattcgccggccccaacgccctagcgggtggctgggacccctgggttcctcccacgtccctgcctccagtcccggcgcgaactccaggtgtcgcccccaactccggcttagagcctacggcaccccgagcctccgagcctccgtcccctcttcccccgccattacaaaatacaaaaaggactagaaatgaatacacacggtctcggccacctaaggacaccgagctccgcagagcctagaggagctagggaacctagcgctcccctcgggccggccccaggcagcagcccccctcagccccaactccgcgggtcccgccagctctccactcccaggccccggcggcgtccaccaggcgcccgctgcccctccccaagtctcctcctccgggacctcagccctggtgccctccccgcagtcccattcctggtttcccttcgcggcgccccctccccaggttccccaaccaggcaatccctgcctgggtccctccccgggaccagtccctggagaccctgcccgccgcctctctcgggctaccactctccgaaactccatccctgactcccctccccgctacctcctccccaggggtcccggctggggcccctccaggggacccctccctgccgccacctcccgagacacccatttcccccgcctcttcccagccgttcctttctggccccgttcctcagctccctctgcctgctgcccctctccggggtccgcttcccgaagacccctccccaacgcccccgccccgctcccggttcctgcctcctccaccccggatcgcctttccggcgtcctctccccagcgccccttcctgcgaaccttaa

SEQ ID NO: 106645 - DNA, 278 bp, Homo sapiens
  chr2:127977421-127977699
  hyper
cgcccagtgcccggggatccctgcccgccgcccctccctgggactccccaaccccgcgcccctccctggcgccctcccgcccgcgccgtcagccttctgggcagcagcccgggctggctccctcccggggcggcgcgcgctacctggatctcgtggatgcggctgaagccgtccctgcagaagaactccgccaggttggcgagggtcctcggccccggcatggcggcgaggctccggggaccctcggctcggccccctcccggcggcgaccccggccg

SEQ ID NO: 106646 - DNA, 48 bp, Homo sapiens
  chr2:128051795-128051843
  hyper
ggtggctggaagagcggagagccagcgaccgccgatctgttagctcgt

SEQ ID NO: 106647 - DNA, 218 bp, Homo sapiens
  chr2:128165842-128166060
  hyper
ccctgccgtggtaccgcctggcagcgtccaccccgccgctggggcgccctggaggctcctggccctccgtggggccgtgacaccggcgctgcggggagcggtggcctcgcagaggctgggcatgggaggacggccgccccgggtaaaggacagggccctggaaacgcgggtctgccgggagcaggggacaggaaggagaccgcggctctcccagtcct

SEQ ID NO: 106648 - DNA, 579 bp, Homo sapiens; identical to SEQ ID NO: 1814
  chr2:128173486-128174065
  hyper

SEQ ID NO: 106649 - DNA, 165 bp, Homo sapiens
  chr2:128284008-128284173
  hyper
ggcatgcgagccggcgttctacttcctagaagcaccgctggggccaaaatggcgtctgcccacgaccctcaaaggaatgcagcgcgcaggcgccgcaacccgtcaaccggccaatgagaagacgcaacagcaatgacgccaggcacggccggaaaggagactcct

SEQ ID NO: 106650 - DNA, 169 bp, Homo sapiens
  chr2:128284483-128284652
  hyper
gttactaactggcgcgatccacagcgcctcctctcccggcgtcttcctctctttcattctaaacaacgatttaatttccttgttaagaagccatttagccaacagtaagaagtacacgtctttgcttccagaagggttcccctgatgaaacaccggaggaaggtgaagt

SEQ ID NO: 106651 - DNA, 105 bp, Homo sapiens; identical to SEQ ID NO: 1815
  chr2:128421744-128421849
  hyper

SEQ ID NO: 106652 - DNA, 201 bp, Homo sapiens; identical to SEQ ID NO: 1816
  chr2:128421890-128422091
  hyper

SEQ ID NO: 106653 - DNA, 30 bp, Homo sapiens
  chr2:128432594-128432624
  hyper
tcatggtggcagcgacgccgagccctgggt

SEQ ID NO: 106654 - DNA, 447 bp, Homo sapiens
  chr2:128433043-128433490
  hyper
agcgcggccagcggcgggcgcgggtcaagtccttcccaacccgggctctgctcgccacctcctggattccgggcatagctttccttttaaagggagtaaagttataataaacgcgaacaagcacccccacccccacagccccgccgggacgccccgcccggcgccccctctgcagtccctgggccgccccaaccgcaaacgcgtgcaggagatggtaggcgtgggggcgatgctgagaccacctccctcccgggctttcctagcccggagttcccaccgcggatctgggcactgactccctcccgaggcacccgggaccgccgagtccacgcagtcccgcccccagggaggctaaagccgagaggcgtccctcttcagtcgcaaagctgctttccccgggaaattccgatttcatcccccgttgcgggccatcgccctaacttggcg

SEQ ID NO: 106655 - DNA, 30 bp, Homo sapiens
  chr2:128458830-128458860
  hyper
ggacttagccagaccgcaagggcgcctact

SEQ ID NO: 106656 - DNA, 106 bp, Homo sapiens; identical to SEQ ID NO: 1817
  chr2:128459398-128459504
  hyper

SEQ ID NO: 106657 - DNA, 30 bp, Homo sapiens; identical to SEQ ID NO: 38002
  chr2:128459921-128459951
  hyper

SEQ ID NO: 106658 - DNA, 30 bp, Homo sapiens
  chr2:128568181-128568211
  hyper
ttttgcagatttcacgttaacttcccttga

SEQ ID NO: 106659 - DNA, 30 bp, Homo sapiens; identical to SEQ ID NO: 38003
  chr2:128568909-128568939
  hyper

SEQ ID NO: 106660 - DNA, 30 bp, Homo sapiens; identical to SEQ ID NO: 38004
  chr2:128615611-128615641
  hyper

SEQ ID NO: 106661 - DNA, 30 bp, Homo sapiens; identical to SEQ ID NO: 38005
  chr2:128646900-128646930
  hyper

SEQ ID NO: 106662 - DNA, 30 bp, Homo sapiens; identical to SEQ ID NO: 38006
  chr2:128784607-128784637
  hyper

SEQ ID NO: 106663 - DNA, 30 bp, Homo sapiens
  chr2:128785663-128785693
  hyper
ttccgccgccgtaacgagcctcccgtctat

SEQ ID NO: 106664 - DNA, 30 bp, Homo sapiens
  chr2:128786231-128786261
  hyper
ctgcgcgcgctttccggattataaaggagc

SEQ ID NO: 106665 - DNA, 72 bp, Homo sapiens; identical to SEQ ID NO: 38007
  chr2:128848513-128848585
  hyper

SEQ ID NO: 106666 - DNA, 30 bp, Homo sapiens; identical to SEQ ID NO: 1819
  chr2:128848800-128848830
  hyper

SEQ ID NO: 106667 - DNA, 30 bp, Homo sapiens
  chr2:128849194-128849224
  hyper
cgggctctgttcagcggtcttgaaccttct

SEQ ID NO: 106668 - DNA, 30 bp, Homo sapiens
  chr2:128991277-128991307
  hyper
gccgcggtggggaccgctggctcccctgaa

SEQ ID NO: 106669 - DNA, 31 bp, Homo sapiens; identical to SEQ ID NO: 1820
  chr2:129063668-129063699
  hyper

SEQ ID NO: 106670 - DNA, 30 bp, Homo sapiens
  chr2:129075183-129075213
  hyper
tgggaccacagcaccgaagcggcacgggga

SEQ ID NO: 106671 - DNA, 30 bp, Homo sapiens
  chr2:129079573-129079603
  hyper
gcccggcccccgagcgcccgcggttgactt

SEQ ID NO: 106672 - DNA, 363 bp, Homo sapiens
  chr2:130635072-130635435
  hyper
cagcgagaggctccgcgattgtcccccccaaatcctttcccccttttcgggaatagcaagcgagtccaagagatgaggtcacgtgatgccgtccgaccaatctggtgtgagcagaggcccccattcttccggggagaggggcgggggcggggccgggccgggagcggaaggagcaggggtggacagaacagcctggggagggggcggggacagggcgaagcagggaggggagggggcgggaacagggccaggtggggcgggcgcgcgtgtgggggggcgggcgcgcgtgtcgggggcgggcgcgcgtgtgggggggcgggcgcgcgtgtcggggggcgggcgcgggggcgggcacagcaggcg

SEQ ID NO: 106673 - DNA, 381 bp, Homo sapiens; identical to SEQ ID NO: 38010
  chr2:130737256-130737637
  hyper

SEQ ID NO: 106674 - DNA, 176 bp, Homo sapiens
  chr2:130763500-130763676
  hyper
gaacgacggtgcctccggttgacagcaacctgagcggacccgcgcctaggccctccgccaggcctgcgctgcctcgccccgggagaggaagactgagcccggctcaggcggctggagcgcgcgggcccgtttcctttcagcgatcagtcccctggcgtcccagcagcgccttcccc

SEQ ID NO: 106675 - DNA, 12 bp, Homo sapiens
  chr2:130763729-130763741
  hyper
cggcccagacgt

SEQ ID NO: 106676 - DNA, 30 bp, Homo sapiens; identical to SEQ ID NO: 38012
  chr2:130940021-130940051
  hyper

SEQ ID NO: 106677 - DNA, 301 bp, Homo sapiens
  chr2:131099729-131100030
  hyper
tccttgtcaccctccgcagtttggcaggacagccaataggcacacgagatcctccatcaaggggcgttcccatctggggatccccacgccggcagcaccaaggcctctgggtcagcttctttaagggcaagcgcccttagagaagcagcacggaagcaaccaatcaactggtttctccaattagcccccaagtggatcagcctgctgaactgtcggctagggttataggtggttctgagtccttccggaagctgccgaatcttagaagtcgcgccactgttgtggcgatggaagaaggcga

SEQ ID NO: 106678 - DNA, 30 bp, Homo sapiens
  chr2:131100580-131100610
  hyper
aggctcagcggctccggggctccggggttc

SEQ ID NO: 106679 - DNA, 210 bp, Homo sapiens
  chr2:131113000-131113210
  hyper
ccctggtgccccagcgcatccgggaaaaaggaaccacaaattcctcgggaaatacacagagaagatcccgctgccacttggcctttcccacggcgtggctgcccctccccggcctcccttgggcccggctggagcgcacagcgcgggacgcccccgacccggggtcctctggcacgaggggcagcctgatctcggcgaccgtctccaccc

SEQ ID NO: 106680 - DNA, 214 bp, Homo sapiens
  chr2:131114253-131114467
  hyper
gtccgggcccgaatccgcttcccgtcccgaatccgcgtcccggccatccgcgtgtggtccaggcggtctacctggcccctctgacctcggcttctcccttggtgaaatggggacatgaatgaccaaactggtctaaggattaaatgatgtgggtgaaaagcacttagtacatattgggcgcacacttcgtaggggcgttcgtcactgcctataa

SEQ ID NO: 106681 - DNA, 247 bp, Homo sapiens
  chr2:131129983-131130230
  hyper
agcaaggtgacgccgcgcgcccagcgacccggggcgcacgcggaggacgcgagggggacgctgcctggccgcggtgagtcgaggcttgctccttctcagggcatcatcctgctgtgatccgcagggcggaaccatcctgcagtggtccgtcaggccctggcggccgcggggaccccagccgctagcctggccacgccccgacgctgatgtccaggcgtccctggccacgccccggaagcgccccctg

SEQ ID NO: 106682 - DNA, 770 bp, Homo sapiens
  chr2:131484801-131485571
  hyper
gggattgtcatttaacgagtttccctctcccagggaatctgcattctaagaccccaaaggccggcgagggtcgttgtgctgggctggacagcagagagaggctcggccttggccctcagccctgcagcacacagggcacccgcgcagagagcgtggcctgcgaatggctctgctgcctctcccggcctggggccgattagaccggtcagagcatctgtaaagtacaaggggcccctagggagtgcaggccagggcagctggggcagggaggcggggtccgccccatggcatcgcggtttctctggaaggggtgatgggctttctcagaaccacctttagtttctgtaccgtaatcggccaaaaaggcgcaggcgctgctgctcctggcagctgcgtaacaggctctcagaggaggacgcggttccgggctgcggcgggcgtggtccggggctgttctgggcgtggtctttggctgtgatgggcgtggccttgggctatggagggcgtggtcccagggctgcgatgatggtggtccggggctgtggtgggcgtggccccgggctgcggcgggcgtggtccccgggctgcggcggacgtggtcaggggcggttctgggcgtggtccctgggctgcggtggacgtggtctcgggctgtgacgagcatggtccctgggcagcagtggacgtggtctcacacccagagtctgaaatttctgcctcttcctggccctaaaaatatcctgcctgttcccacgcggctcctgccttct

SEQ ID NO: 106683 - DNA, 908 bp, Homo sapiens
  chr2:131513376-131514284
  hyper
gggtaagactcgtgacgaggctccgggtggccgagcccttccgagagtgctgcggtcggcagggctgggctggctctctgggctgagggggaggggctcccacacctgtgcgctcccggaagaggggacagcggcgggggcgccgtgcgcacgggggcgaggggagacgactgcacctgagggaggcgcagccgcaaccgggtgggaggcagagacacccagaaacagagacggggcgatacgaacagacaaagccggctcgagcgcggcccgagcggcggcgcagggaggcggcagcctggcggagcagcccccaccgcggccggcgcgccccctcgccacccctgcgcgccagcgccggcccgcccctcccgctggcctctggcggcttaaccctcgcctgcccgaccccgcggggcccctggagccgcggtgggtgggtgcgggcgccgggcctccccctcccggccgcggcgcgcggcgccgggagctgaccgtggtgctgagcgcggctcgcgctccgacgcggtgcccgagcctgtcgcggccgcgccctgctgcactgcgggcccccagcggtaagtcgccaaggccccgagaggctgcgttggtcctgccccgcggatgtggacccccggggagggcaaggattggggaatttggtgcattctctggcgcgatggacgggctgagggcaggaagcagggtcgacaccctccacccagcggttcccggcgcagtcaggggcctgggagcggtgacccttttaggtctgggctagggaagcggagaaaccctccgccggcggatgcaggagctgagggagagccaatatcgctgtgaggcccatctccttgcccctgggcaggccaggaccgcccagaggcgccctccaaggaggtgggcca

SEQ ID NO: 106684 - DNA, 30 bp, Homo sapiens; identical to SEQ ID NO: 38017
  chr2:131555455-131555485
  hyper

SEQ ID NO: 106685 - DNA, 360 bp, Homo sapiens
  chr2:131594561-131594921
  hyper
caaggtgagagccggcgtccgggacttgcggtcgggctcccggcgccctgcgcgggtggggaggagcacagcccgcgctggctgctgcgccccgggccgtcccctgggcacccggtgggtggggacaccctcgtggctccccgccgctcccaactttccgacgtgcagaccggaggcggcgtcctgcaaagtggggccgtctcgagcgcggggaaggacggggctccgttgggggcggtagggacggcggcccggggcgagcccctgagagggcaagggcgagcgcctgagccggcctccccgcacctggaccgtcctgggcgcgcggggcactcggagccgctgcctggaccggcctgg

SEQ ID NO: 106686 - DNA, 335 bp, Homo sapiens
  chr2:131594947-131595282
  hyper
cgcttggcgcagtaccagctgttttgggaaggagggctggtgccggcccggtgggtacgggagaagtggttgctgttgttattccccaggctgagagtacgcgagggcgcagcagcggcaaggggctggaactggggtcggggctgttgggctcctgctcggggtgccccctctctggcccgatttccgggcccgctcaccatccgggacccactcagttgggacgcctccacctcgctgcccccacaggaaccccaagatgggccgggggctccggggcactgtcaggggtggccggccacaggttgccaagcccgacctccccaggtgagcca

SEQ ID NO: 106687 - DNA, 6 bp, Homo sapiens
  chr2:131595300-131595306
  hyper
cgctgg

SEQ ID NO: 106688 - DNA, 312 bp, Homo sapiens; identical to SEQ ID NO: 1821
  chr2:131720786-131721098
  hyper

SEQ ID NO: 106689 - DNA, 147 bp, Homo sapiens; identical to SEQ ID NO: 1822
  chr2:131721437-131721584
  hyper

SEQ ID NO: 106690 - DNA, 415 bp, Homo sapiens; identical to SEQ ID NO: 38020
  chr2:131721866-131722281
  hyper

SEQ ID NO: 106691 - DNA, 504 bp, Homo sapiens; identical to SEQ ID NO: 38021
  chr2:131792015-131792519
  hyper

SEQ ID NO: 106692 - DNA, 215 bp, Homo sapiens; identical to SEQ ID NO: 1826
  chr2:131792531-131792746
  hyper

SEQ ID NO: 106693 - DNA, 81 bp, Homo sapiens; identical to SEQ ID NO: 38023
  chr2:131792920-131793001
  hyper

SEQ ID NO: 106694 - DNA, 30 bp, Homo sapiens
  chr2:131850458-131850488
  hyper
caaagctctgcccccgggtttcacgctcgc

SEQ ID NO: 106695 - DNA, 30 bp, Homo sapiens
  chr2:131850894-131850924
  hyper
agaggctgaccctccgagccccgcgtctcc

SEQ ID NO: 106696 - DNA, 30 bp, Homo sapiens; identical to SEQ ID NO: 38024
  chr2:131851157-131851187
  hyper

SEQ ID NO: 106697 - DNA, 96 bp, Homo sapiens
  chr2:132088785-132088881
  hyper
cgccaggggactgatcgctgaaaggaaacgggcccgcgcgctgcagccacctgagccgggctcagtcttcctctcccggggcgaggcagcgcaggc

SEQ ID NO: 106698 - DNA, 240 bp, Homo sapiens
  chr2:132121377-132121617
  hyper
cggaagggcgggcgccgagctctctgcgcccctgcaagggccggtggaggagcccggctggagggcagcaggactctccacagactggcagccgccgccgcctcccggcagagtagccgagcaccgagcgaggcccgcggctgggaagggaaggagggcggtgtcggcaggagccaggggtgtgctttggcttcccaaggctagggccgttcccttcttcctcacccggctccaagacct

SEQ ID NO: 106699 - DNA, 109 bp, Homo sapiens
  chr2:132121651-132121760
  hyper
cgcagacgtatctgggatctctcacgcgcggcgcttcggcttccccagccgccgccgccgcagcccaacctgctgagtgcgcgagcctctggcgcggggcgagccaggg

SEQ ID NO: 106700 - DNA, 256 bp, Homo sapiens; identical to SEQ ID NO: 38025
  chr2:132152275-132152531
  hyper

SEQ ID NO: 106701 - DNA, 240 bp, Homo sapiens
  chr2:132182875-132183115
  hyper
cgcctcggcccgcctcgctccccgagccgccgccgccgccgccgcctgccgaggccccctacgccgtgcccctggcagcgagaactcatccaccggggtgtccccgcagcgagcggccgctgaaggctccccgcgcccgctcctcgccgccgcctgacacggctcccgggcgccctcggccctgtccgcgcccaccgcccggctggcgcgcagacccggttccccgcccgcccggcaacc

SEQ ID NO: 106702 - DNA, 225 bp, Homo sapiens
  chr2:132250190-132250415
  hyper
cttggcggtcagggcgtccctgatagacttgcattggtcgtgctcgcttaggtggcagcacccagcccagtgccaggcatacattgggcgctcagtcaatacctgtttcaagaaagcgtgcaattttctggtccgcaccggtgcaccactaggggtcgctcttcggggggggtggggggcactaatcaacaaccctgcttacgcgcacgcgcattccttgctagg

SEQ ID NO: 106703 - DNA, 29 bp, Homo sapiens
  chr2:132286403-132286432
  hyper
tttatacagggaaacgtgcccaagtgcga

SEQ ID NO: 106704 - DNA, 31 bp, Homo sapiens; identical to SEQ ID NO: 1827
  chr2:132431406-132431437
  hyper

SEQ ID NO: 106705 - DNA, 156 bp, Homo sapiens; identical to SEQ ID NO: 38028
  chr2:132439906-132440062
  hyper

SEQ ID NO: 106706 - DNA, 276 bp, Homo sapiens; identical to SEQ ID NO: 1828
  chr2:132767359-132767635
  hyper

SEQ ID NO: 106707 - DNA, 247 bp, Homo sapiens; identical to SEQ ID NO: 1829
  chr2:132767688-132767935
  hyper

SEQ ID NO: 106708 - DNA, 121 bp, Homo sapiens
  chr2:132795463-132795584
  hyper
tgcccgcactgctgcagcgtccggctggccgcggcccctgcgccaccccatcacccccgcccccgccctccttcttctctcccatagcctccccgcgcagcgccgctctatgcaggccaca

SEQ ID NO: 106709 - DNA, 279 bp, Homo sapiens; identical to SEQ ID NO: 1830
  chr2:132795725-132796004
  hyper

SEQ ID NO: 106710 - DNA, 341 bp, Homo sapiens; identical to SEQ ID NO: 1831
  chr2:132796063-132796404
  hyper

SEQ ID NO: 106711 - DNA, 62 bp, Homo sapiens; identical to SEQ ID NO: 38033
  chr2:133062236-133062298
  hyper

SEQ ID NO: 106712 - DNA, 15 bp, Homo sapiens
  chr2:133062361-133062376
  hyper
cgcaagctaggggcg

SEQ ID NO: 106713 - DNA, 755 bp, Homo sapiens
  chr2:133173627-133174382
  hyper
ccctgcgcagaacaccggcaggctctggggaaaggcagggattctatagtgaatcctgcaagcctgcttggggccgacttcctggagcagcggctgcaagcagcgcagagcccagctgtccttggcaaacaccccacagaggaggcgagggcttgctggctcctctgggacgccccggtcaagccaccaccaaacgggccgtgacctcgccttcgaagggggcccccagggcagcggtggacgtgggggcagtgcgggcgagaggaagtttgtctttctcccagctcgggagggtcgccagcttccccggggctgcacctccttgggacgcttgtcgggttggagcgccgcagctgcctctgcggctgccgcctgggtgacggagggtggggcgggggtgggtcgctcgtagctcgagagccacgatctgatttcagggaccgtgcctatgtgctgagtcaaaccccgccgctgggctgggtctgcagccgggccgctgagcacaatccgctgtggttaatgattaatcgctgaccaccccgcctcccgcagctcgggagagggtgctctgggaatgtggaccggggctctcaagtgccggcagctggaaaggaagaggagtgctgcgaggcggagtgcgccctcggcgaagaggggcagaggcggagcgccaggtgctgcggtctcactcccagccagccaggagtttagaacgttcttcctccgccctctccccgcctcgccccagccacata

SEQ ID NO: 106714 - DNA, 2174 bp, Homo sapiens
  chr2:133426128-133428302
  hyper
cgggttcagatccggcccccacagagcccaccccggaaatcacgaccatcccacgcctcagagccaggcggctcccagcctctggcaggcttagaccactcctgggtctccgggtagggctggatgtggctgacaccggcagggggcggcgcgggtacctagggtcctacggaagaaagtggaatagtgcccgccacccctggaccccggctctagacacaaagcgcccatccattaccaccccaggccttttcccaagaagttgaagggagggtggggacggtaccaccgcaagagtgaagtagctctggagatgtgcgttagctccagcctaagccaaaggatttgcctaattgctaattggttacaaattacttaattactattttggcaccattcgtgattacattcgcagacgtctttttagtttttatttatttaatttttaaagtcagcgtttctgtgccagggctctgaggatccctgagcgaccacctgggaacaacttgggtggaggtgccagacgccaagcgctgctgcgccgcaagtccccgagcccgggtcggcggcccttctccggggccgtccccgcggcgacccgaatggccacagagggtgggaaagggcgtttgtgagcgcgcgcaccctggatccccgaccccgcagccctttcttccaggccccggctttcaggacaaccgttcgactagggtcagtggtcggggttccagctctgcagagcttagtcgggagccagtaggcgaactggagagaggacgcgagacctttgcgcctctggacgcttcggcctggctgttctcggtgtacgcgctcctgtctagacccaactacccacgctcccgcagccccacatctatcgcactctgagcgcagcaacccagcttcagcgtggccgcaggctgcctcgcgcatcgctcacctgtcggcggcgccactcccacggggtgccggaggcgccagacaacttggcagggttcgggagatgtcgccccctctccctcgcccagaacccagcaccgctcggaccctccctcctctcaagcccagcttctcccgacggtgcagccggacaagctgcagcccggagtcccgcaaacccgccgctccccgctctcctcctgcagcgcgggacttggacactttcccagcctcgcgccccggggcaccagtcgcggccgccaactcccgctgggcagccccagcgcagggctggccccgaggtgggcgccttgggggcaaaagggctggcgggtagatggattgtgcgcacctggcctcggctgctggcctctgggtattctcacctggaagcaagaacaatccgcaaaaagttgccgcgatgcctaggacccacattctcccggagtcccggggccgggagagggcaagcgcatcagaggaggcgacagcagcggaggctgccccggctgcagcggctgtggctgccgaggctgctggggcccgcgctgctgccgcggagacgacggtcgtagcttagaggagccgcaggtgccgctcgcggagcctgcatcgcccgcgctcgggctcccggctgcgggtctctgctcctcccgctcgcgctcccgggccgagcaccgcgcctccggagttggcggctgagactgaaggaactactggcgatcgggagcacccacaaaagtctcgccttttctccccacctcccactccaggcatcacgtgacggctgccgagttggggtgggggtggcgggcggggaaggctgggacggtcgcttcacatccccacccccttcctgtcttcctcttctcccgcctccgcacgttcctgggaaaggggcgccggggggcgggagagaactggtagttttctgagatggggaggttgggggagcggcgaggagggcgcagcaggtgccgtggggacctgccgggtgcggactagggtctgaggactgcgtgcccggctggcccttcgcacataggaaggcagcctccccactccacgtcctctgcgccttccaggactggtcggtaccccagcgactgggtccagcccacacaactgaggctgtcccgctgcgggccgcgggagcctggcgccccgggaggctgacaggaagggcgcgcgttcccgtgcgcctggcaaagttccacgcccgcaggctccgtagg

SEQ ID NO: 106715 - DNA, 814 bp, Homo sapiens
  chr2:134023958-134024772
  hyper
gaagcatacagtctgcggggacaaggactgaacggggtagtgggagccaggtgccgaagggctggggctagggtggcggcgcgcagggggcgcgcctgggcggggagtgggctggcgtctccttacctggccttcggtggagcatgctgctgcgggctgggggcggggtgggcgctgcgtccccaggggttgactccgcagcgccttcacttcgggggcagcaaggcgcgcgctgcagagccgggagttgccaaacttgccatgtccagagcgcggaggcagcctgggccacgcgctcaccgcagcccgggcacctcgcgctcctccgctttgttgtgttccgccgccagtccccctgcgcctgcctgccagtgtccccgagccctctcctgccgcgggacgtttcactggcgctcagggaggcccctcgggtgggcagtgccactttcctcctggaggcgcgcgttaaagatctgcctgggagcgcccggcgggcggctcggcttgcgctctgatgaggaggctggggcccatcgattcccaccccctacccactccccctcccctcccctccgccgggcccccccatcagaagctgcttaggatcggcgctgtcaaatccagcccatctgctgcaatcataatcagtctcaaccgaacggttctgacaaatctccgcctggagctggagttggagaagctggagagtgaggggcggggaagggaggtgggggtgaggggacgatggggaccgggcgccctgagagggggcctggagccttctattgtctgcccctaacggaggaactgaaaa

SEQ ID NO: 106716 - DNA, 225 bp, Homo sapiens; identical to SEQ ID NO: 1837
  chr2:134325851-134326076
  hyper

SEQ ID NO: 106717 - DNA, 30 bp, Homo sapiens
  chr2:134877561-134877591
  hyper
ccagaaattgaggacggactcccgccctgg

SEQ ID NO: 106718 - DNA, 1423 bp, Homo sapiens; identical to SEQ ID NO: 38039
  chr2:135475590-135477013
  hyper

SEQ ID NO: 106719 - DNA, 30 bp, Homo sapiens; identical to SEQ ID NO: 38040
  chr2:135675554-135675584
  hyper

SEQ ID NO: 106720 - DNA, 30 bp, Homo sapiens
  chr2:135676207-135676237
  hyper
cgcaagagcgaggccgagggcagaaaaaga

SEQ ID NO: 106721 - DNA, 226 bp, Homo sapiens
  chr2:135809729-135809955
  hyper
ttaacagacctgggcgaagaagcagcactcctacttactagggcaagactcatgaacagggggcgggggctccgggggcggggacgcgccccgttctctttcgctcttcttcccggcagccttagcgccaggcccggcgctcctcaagatggctgccgacagtgaggtgatttctttgctccctacttaatccttgtcactatctaaattcgttcctcatgtcttc

SEQ ID NO: 106722 - DNA, 89 bp, Homo sapiens; identical to SEQ ID NO: 1839
  chr2:136288365-136288454
  hyper

SEQ ID NO: 106723 - DNA, 30 bp, Homo sapiens
  chr2:136288684-136288714
  hyper
tcttttaaatacctcgagtcagtaaaaact

SEQ ID NO: 106724 - DNA, 30 bp, Homo sapiens; identical to SEQ ID NO: 38043
  chr2:136289103-136289133
  hyper

SEQ ID NO: 106725 - DNA, 326 bp, Homo sapiens
  chr2:136289441-136289767
  hyper
cgcggctgcggctccggctgcagctgcagccactgccttgtgcccaccgcccccacccgggggccatgtgaaaagcaaacccctcgaggcctagcggaggaggcaggggaaaggtttccgagtccctgccatggctgctgctgctgcctccgcggctgctcttgcagccccagggactcgggagccagccacagcaggcctgccaagagcgtggtactgctctctcgtgtggctggcgccggtgccccgggctcccccggccgccccacggccgcatcccctggccttgcaccaagagaattttcagcttcgaccggttggtaaaa

SEQ ID NO: 106726 - DNA, 135 bp, Homo sapiens
  chr2:136499397-136499532
  hyper
aaggttgcgggggccgcagagccggacgaagacggagggcggagccggcttcgggactgcggagactacacaccgagcgagcgcctgggcccgaagggagcgatgctgtggttccagggcgccattccggccgcc

SEQ ID NO: 106727 - DNA, 30 bp, Homo sapiens
  chr2:136500119-136500149
  hyper
ttgtgctgcttgaacgcccgtttcgttact

SEQ ID NO: 106728 - DNA, 30 bp, Homo sapiens
  chr2:136633592-136633622
  hyper
gcactgggcacgagcgtcttagggctcgag

SEQ ID NO: 106729 - DNA, 30 bp, Homo sapiens; identical to SEQ ID NO: 38044
  chr2:136634142-136634172
  hyper

SEQ ID NO: 106730 - DNA, 30 bp, Homo sapiens
  chr2:136743396-136743426
  hyper
gctctcttcagcttcgtcccaactgcgact

SEQ ID NO: 106731 - DNA, 3177 bp, Homo sapiens; identical to SEQ ID NO: 38045
  chr2:136873850-136877027
  hyper

SEQ ID NO: 106732 - DNA, 117 bp, Homo sapiens
  chr2:137181204-137181321
  hyper
caggccaggcacttggatttgcgcagccaagggcgtgcgcagcccgcggccggaagcgtcccggcagatcgcagacggggtgttgagggaccccgcgcttttgctttcttatgattt

SEQ ID NO: 106733 - DNA, 713 bp, Homo sapiens; identical to SEQ ID NO: 38046
  chr2:137522036-137522749
  hyper

SEQ ID NO: 106734 - DNA, 544 bp, Homo sapiens; identical to SEQ ID NO: 1843
  chr2:137522848-137523392
  hyper

SEQ ID NO: 106735 - DNA, 604 bp, Homo sapiens; identical to SEQ ID NO: 38048
  chr2:137523516-137524120
  hyper

SEQ ID NO: 106736 - DNA, 31 bp, Homo sapiens; identical to SEQ ID NO: 1845
  chr2:138436702-138436733
  hyper

SEQ ID NO: 106737 - DNA, 30 bp, Homo sapiens; identical to SEQ ID NO: 38050
  chr2:139259138-139259168
  hyper

SEQ ID NO: 106738 - DNA, 30 bp, Homo sapiens
  chr2:139259559-139259589
  hyper
ccacagggacttgccgccatcacccctgct

SEQ ID NO: 106739 - DNA, 859 bp, Homo sapiens; identical to SEQ ID NO: 38051
  chr2:139536963-139537822
  hyper

SEQ ID NO: 106740 - DNA, 386 bp, Homo sapiens
  chr2:139537850-139538236
  hyper
cgcctgcctctcgcgcatctccacttcgcggggcaggactgaggacgccagggacacagcgcggcgcttccctcccggaatccgagcgctgcgccgtgccgcgcagctctggccgggtgggcgggcagggaagggggagggtgggcggaccggaggtgcctctcccggccccccgcgcgcccctcctcggagggggccggcaaagagcctgcggggcagctcgagctccggcacgcggcggggggcttcagtcgcgccttggactctcccgcttggccgggcttggggtgagcgcgtggggcgcctgcgggagggaggcggcggctcgggcgcttgggtgatgggttcagtgcgaggctgccctccagatccgatcccgccgggcg

SEQ ID NO: 106741 - DNA, 1244 bp, Homo sapiens
  chr2:142887728-142888972
  hyper
aggggcctgaatcggcgctttcgccgctccacggacctcgaatgcagcaggtaaggaagttaacctgggagctaagttgagggcggacacgcttaacgcggagaacctggagctcgcaaaagctcgcagttgagggccatcgcggagggaagtctttcggaaatgcgaattctcattccaacatctgcagcgcttagaattcgcggacagaagcgcacagccaagtgcacacactcccggaggggacaaaatggggaccgggaaacggccaaagggaaaagctgtgggggtgccgaggactcaggcacttggttcagaaatcccgcaccgcacctctcacccccgcacagggccagcgcacggtggtcacccggtcccggggagcggagctgcaaggacttaagtttcacactcacttatctgcaagcatcgcccagcaggaaagccaaggaagtcaggggaggggagcggggaggtgttctccttacctcggtcggctcccacggtcagcaccctggcaatcggcaataatcccgagagagtgagtaaggcgaggagaaactcggacattgtggtcgcccggtaaggaagcctgcgctggagactgctcggcggcaccttcggcccggcggcggcggcggcggcaggggccgcttggagcctggaatcgagcggcgtcatttacaaatgtcactggaaattcttcagctcaatgagtccagccagtcagccttctcctgcctggagcaggatgtggaaggtggagggatgcgcgcgtgcgggagagaggaggcagagcgtgtgtgagcgcgagcgagacgcccgtgtgtcttgacttttcaatgcagggtacgtctgatcttacatcacgcaagaggggcagtgagagatgccagcggatgggaattcactgattaatcaccgaatccaccacacaccccttcgtcgttcacataaatcacatctattacttaataagaggcatttaacacaacaggaaaataccaccgcgaacggagagcgccacaaatcacaattattttaatccccttgaagggaaagtaactcgaagctggttctgtggggatttgggtctttggagaagggagagacttctgcattggcctgagccagccaggcgcctacaatgctccgcagttcacagccagctgagaaccctcagccgagcacagggctgcttctgcaggcaaaacaaagcttctcccttcgttcctcggaagctt

SEQ ID NO: 106742 - DNA, 229 bp, Homo sapiens; identical to SEQ ID NO: 1850
  chr2:144694285-144694514
  hyper

SEQ ID NO: 106743 - DNA, 772 bp, Homo sapiens; identical to SEQ ID NO: 38056
  chr2:144694553-144695325
  hyper

SEQ ID NO: 106744 - DNA, 34 bp, Homo sapiens; identical to SEQ ID NO: 1852
  chr2:145090079-145090113
  hyper

SEQ ID NO: 106745 - DNA, 1193 bp, Homo sapiens; identical to SEQ ID NO: 38058
  chr2:145273317-145274510
  hyper

SEQ ID NO: 106746 - DNA, 1364 bp, Homo sapiens
  chr2:145274576-145275940
  hyper
cggggctgggggcgcggggccccggccggacccccgcgctcggacccccgggtgcctgacgctcactttgcccggcacttccccaacaccccccggtccagccgccgcgcgcgccgggctccggcgccggccgcggagggaggctcgccctagagccctgggcgccgccgccgccgccgcctcggttccttttccctttccccctccttctccctgggtctcgagccgcgtagtggcccggaaaagtttggttcgggctgcttcttaccgtttttcctcctgggattggcttgtttgcgcctcttgcaccgggggccatccgccatgatcggctgcttcattgataagagcggatcagatggcagttcgcatggactcggcgccctgcttcggcagcacgcaggctcgatctagcaaccaaacacagcgacaatgtgggcatcgcccgcgcccattgaaacgcgcgcgggccgcccaggggagccgggccagggccccggcgagcacccatccgcgccccccaacgccaaagcgaaacttcggcggccccctccccgccccccacccccagccttggccccgaggcgctttgtgtttgttactgtttggtgtgttgcacccgcgaggggatcagagagacaagaattacatcttcaaaatgagtcataactcctgaccgtatgagggaatgcacacggcggtacagtaagaccgcttgactcagggctaggcggaccctttccttcgaaaagtcctcagcccccggctcgggaacttggggtgaggcgaggttttcttttcgttctcatcttttctcatccccccaccccccaattcccagaggaaacaaacaaacaaacaacgcgaaacagcccctggatgaagcacactcgggcaaattgataatagtaattataggaagcccactcgcccagcgccccctcccctccccttttggagtttatcgaggcactgtctcttcctccccccaccctcgcccccaaattaagatttcccgttttacgccgcaatgataaatataattataagcctctttggacactgtcctttaccccaccccccctcgccactttgacaatatttacttaagtatttccccccacctcactcacacacatgctcccccacactggttcccttaaatagttccagtagaattttttttttcccttaagaaaggaaagagaaagtccaaccactacggcaatacttttaagctctactaaatgatcgtatcctttctggcttcgaaacttttgtacctaaaaatcgagagaggcgctgcattttttcagttgaaactgtcaaaacttggagaagggggacctcggaggcaggcagga

SEQ ID NO: 106747 - DNA, 463 bp, Homo sapiens; identical to SEQ ID NO: 38060
  chr2:145277487-145277950
  hyper

SEQ ID NO: 106748 - DNA, 677 bp, Homo sapiens; identical to SEQ ID NO: 38061
  chr2:145281301-145281978
  hyper

SEQ ID NO: 106749 - DNA, 180 bp, Homo sapiens; identical to SEQ ID NO: 38062
  chr2:145282041-145282221
  hyper

SEQ ID NO: 106750 - DNA, 30 bp, Homo sapiens; identical to SEQ ID NO: 1859
  chr2:148389097-148389127
  hyper

SEQ ID NO: 106751 - DNA, 1309 bp, Homo sapiens
  chr2:148601210-148602519
  hyper
gtaaacaagtatttgcgcacctattacgtgcaaaacagttttcaacacaatgctttgtgtgtaaaaggaacggcgggaatggattcaagttgcgcatcgtgataaatggcgtgaatatcctgagcgggtggacagcccttcctccgtgagttttttctttttcttttctagtcaccaagacagcacgcgtgtgcagaagctgcagcggtgggacgcagtgctaagtctgggggcgcacacaccagctcgcgcgtcgcgagctcgcctgggcagctcggcgggcgcggcgaaacagctcccacgtccgccttccaccgactcctcggtatcagagcggacgaggcgtccccccagaggaaagactgggcgccgcagacgccccttggagaagtccctggccactcgccccacctcggggtcctcttcctcttgggcttctcctgaccctttgggtgggcgctccagacaggcccgtcggacgcgatttggaaacgggtcgtgcccggcctagcccgcatctactcgcccggccacagcccagccacagcttagggactttgaggcgcccgcgcccctttgtcgcggtatctctagcccaagcaggccggacgccgaggcctcgcggtatcgagcctccgtccgccccgcctcctcgccctccactccgccccgccctcgctctctcacccctcccccgctcccgcctcgcttccccgacaatctcctcgcgctcccggcccggcacgcgcgctgcgcccggccgccgctgccgccgccgccgccgccgccgctgccgccgagcgttcctccgctgcgcctggcttccagcttcgggccggaaccggaagtttggggggcggagcccggcggaggccaggagaccgaaaacgcggccgagcccggagcccggagctggagccagagcctggaccagaacttggccgccgcctgcaccgccgccgccgctgccgcccgccgccccttccccgcgccgcagccgcctcgccgccaccgccgcgagctcggccgccagtggtcctcggactttaggtgtctgggttgaaggtcggtccggacatcggacccagtcagttcccagactgtccgggcggcagcggacgccgctgccgccgccgcctcttcgtcgcctcagcctggcgttttgttccgagagacgggagaggcgagcggagctgacagtgattttgacagtgatttaaacccgcttttgttgttgttggcttttcgttgtttggttttgtgtgttgtgcgtgtgtgtggcggtttttcccccgtggtgcattttatt

SEQ ID NO: 106752 - DNA, 216 bp, Homo sapiens; identical to SEQ ID NO: 1861
  chr2:148602727-148602943
  hyper

SEQ ID NO: 106753 - DNA, 30 bp, Homo sapiens; identical to SEQ ID NO: 38067
  chr2:148778273-148778303
  hyper

SEQ ID NO: 106754 - DNA, 267 bp, Homo sapiens
  chr2:149267060-149267327
  hyper
ctggggggcaggctccggagcctcaggtgcgtcagagttaagctgtttcccaccccggaacacgcaccggcatttcagccttcacttgctcaactccagagccaggacgctccagagaggacagagggagctccctagtggccagagcctgcagttcagcccctccgcccttcctctgatcacacagtcaggctgactgagaaagaaacaagaagcaacacagggccggctggagccagggagcatgaggggcgtctctgggagagg

SEQ ID NO: 106755 - DNA, 143 bp, Homo sapiens
  chr2:149402957-149403100
  hyper
cgcagcgctgcttacgctgccgtaagggggccttgccgtaagcggcggccgggaatggcgcaggggatgcgctggccgctcttggcgtacggtctctgtttacctttccacctccctctctcaggcgcggggctaattaatgg

SEQ ID NO: 106756 - DNA, 30 bp, Homo sapiens; identical to SEQ ID NO: 1862
  chr2:149588676-149588706
  hyper

SEQ ID NO: 106757 - DNA, 273 bp, Homo sapiens; identical to SEQ ID NO: 1863
  chr2:149632584-149632857
  hyper

SEQ ID NO: 106758 - DNA, 1805 bp, Homo sapiens
  chr2:149632888-149634693
  hyper
cgcccgccgcgtggtcgcgggcaggtgggccggggggcgctgggcaggggcggggcagggccagggcaggccggtctgcagccggaggggccggagcggagaagctgcccaccttcccgggctcggagcggccggggctgctcagccggccgggctcgcgatgacctgctgagaagcgtcgtcggaggctgcaggaggcggcctagctgtgggcggtgcagctcgcggcctcctccctcgtcgttcccggccccggccccccacccatccccgtgccccctccctaccgccggccgagatggcggatccagccgaatgcagcatcaaagtgatgtgccggttccggcccctcaacgaagcggagatcctccgcggggacaaattcatccccaaatttaaaggcgatgagaccgtggtgatcggggtaagtggctggggcgtctgccttccctgctgctccgcgccgcagctgggcgccccgacgccccagacgcagcggaggtgtttaggccgccccctcggacattcccgcggggctggcctctcgggtggacctgaccagagacccctcgccccgcgcactatggttccctcccgggcgggtggagaggcggccgggagcggcgggccgggcgggggtggcgggggtggggatggggggcgaagacgggctcggcgccgccattgttcgccgggtgggggcccgggtgggcccattgttccccacgctcgcctcgccgcgtgggtagtgtgttcgggtgaccctcaagccgggtgcccaggccccctttaaagtgtgagctctgcaacccgcaaatgcttctgggcatcaatcaattcgatttaccaaacgccttgcctcttcttctcacgaccctagcaaaaaagaaagaaaaaggggtacaggaaaatttctagtcgcgtctcggagctcccgcggcagtgtagacgcggctccccgcggtgttacacctggctccgcgcgcggaaggcggagggttgggggagtactggtggcctcggtgtcccctggaggcctggtgtgtctcccgcttcctctcacgcctggctgccctggatgtggagtcccggcttgatccctcccctctgggatgacctccctcccatgtctgcagaccctctgatgcgcctcacgctgggtggagaggaggctgtgtccacatctgtggggcgagggggctcagagcgcagtagccccctgtgccaagagcagaagttacttcgtgcggctcggacccccctccctctctatctcccttccccaccttttctcccccaccccctccccctacttagctccctctctgcagctggggctgctggtagggggagggaacaccaatggattgtagttcttaaaggaatctgtcagatgaaacaaaccagctcggtcccccgccccttccccgcccgctgtccgtagcgtgtgtggctgatggtgccccctttgtatgcgagccgcgtggggagggaccgagttaatgggagcctcccggtccccgctgacacgttcctggcagcctgctccaggctgctgatgcagccttcccgtccccagcattgattaagtgatgtcatcctgatcactgagcatgctccgactaaccccctcctccccttcctccagtggctggtgtatttaggtcaagtgattgacaggtgacagtttaccgagggtattgcaggagtccgcctggcctttctcaagcgccagaggccgacgttttccagcccgggcggtccccagcatctttgccaaggttgtctgccgcagtcgcagcgaa

SEQ ID NO: 106759 - DNA, 689 bp, Homo sapiens; identical to SEQ ID NO: 1866
  chr2:149645383-149646072
  hyper

SEQ ID NO: 106760 - DNA, 174 bp, Homo sapiens; identical to SEQ ID NO: 38073
  chr2:149894864-149895038
  hyper

SEQ ID NO: 106761 - DNA, 208 bp, Homo sapiens; identical to SEQ ID NO: 1868
  chr2:150061810-150062018
  hyper

SEQ ID NO: 106762 - DNA, 30 bp, Homo sapiens; identical to SEQ ID NO: 1869
  chr2:150153324-150153354
  hyper

SEQ ID NO: 106763 - DNA, 1571 bp, Homo sapiens
  chr2:150186116-150187687
  hyper
gtggggaggctggttccgagtttccgggcatatccgtggagtccttccagaccttcctggggaccttccccggtcaccccggctccccgccggccccccgcgctgctcaggggagagtaggactatgacccacttccactctaaggctctagatcgaaccgtccaggggggtcaaacacgatttacaacaaggaagagaaaaaccaatacgtcccaagagggctgcaggggctttaactggaggaagggttgggcagagggtggcagtattatgccctggacttttttgcaccaaacccataaccggattcccacttcctaagacctgccttcctggctcttcccaccgcctccatgctccgccccgcagcttaggtcttttactgcaaacgtcaagtggtctccgccttccctgggttcggagcttcacttgctcttgagctctgcggtccggcggatttcgcggggcccaggggatggcggggagtgagatttggccagggtcatttcacactgccgggcctgcagccacgcacgcagctgctggcccggctgaggctggcggctagggagaggcgccagggggtcgcgcacaggaaggtatcggtgcaccctgagcaaacactgctcgcttccaacgctcactgggaacaggcttcccgggaaggtcccaaatctctccagttccgctcaccctgcgggcgggagcgcggcgcccgggtgccccacctgcgccgggcggtcggctcccgctggccggagtttgcagacttggcgctcaggccgattctcccggagttgggccgcgcgcgccgggccaatgagcgcgccccgcggagggctccgctccccccgcgcgcgctgattggtcccgcggccctcgaggccgggccggccgcggctgcgggcggcggccagtgcccggcgcgagtgggagtggcgcgcgcgcccctagccgccccccgcctctccccgctgcgctccctcgctccttccctgagctcccgggctccggcagcgggctggcggggcgccgcattgcacactctgggggcgccgcagtgttcgtgggatggggcagcgggctgcagctggcggccggaatccgcgcgcagcccgggtgagtagaggcgggcttcccgggagagcacaaaagaacaggggattggtgccagcggccccggcttaggcggggcctggccaaggcagggagtgcgctgagtccctggaactacccgatgctagggcagtcccctggggccagaggaactggggtcccggcctccggcgttttgcccctagtgggcagagagccccgcgagtagcctggacgggtccagaggggcgtgtgtactcgtgtgtgttgggctggcgcgtggagggtgggatggaaaggtcaggagctgccaagttcaaggctggaggaacctttcccaggagtaattcagcatcttctcacggcccaacatgcgtccaccaggaactccagccggagggagttcctgggcggcggactggcagcaccccacatgttgctgcggggcggggggcagtggcggtagcccggctgc

SEQ ID NO: 106764 - DNA, 30 bp, Homo sapiens
  chr2:150443737-150443767
  hyper
cttcgaaggtgtgtcgtccaccacgtcagg

SEQ ID NO: 106765 - DNA, 30 bp, Homo sapiens; identical to SEQ ID NO: 38079
  chr2:150444421-150444451
  hyper

SEQ ID NO: 106766 - DNA, 2069 bp, Homo sapiens; identical to SEQ ID NO: 38080
  chr2:151341764-151343833
  hyper

SEQ ID NO: 106767 - DNA, 305 bp, Homo sapiens; identical to SEQ ID NO: 38081
  chr2:151344061-151344366
  hyper

SEQ ID NO: 106768 - DNA, 30 bp, Homo sapiens; identical to SEQ ID NO: 38082
  chr2:152118185-152118215
  hyper

SEQ ID NO: 106769 - DNA, 298 bp, Homo sapiens
  chr2:152118444-152118742
  hyper
agtgctgttgccagcgcctgcccagacgccctccgtagttttgcaacttgtggaagcactctggagagaggccgagaggattcctcgacaggaaatttgggaattctctgggtgatgcatcagtgattgcaattttgtttttacccgttttgctaagcagcagcaacaacggcagagttgatttaaaaaaagaaaaaacgcaaaaagggaaaacacatagtaggtggtggccgcttcctgtgttgatactggggggctacgcttttcctaacatcaatcatctcgtagttgcagagag

SEQ ID NO: 106770 - DNA, 30 bp, Homo sapiens; identical to SEQ ID NO: 38083
  chr2:152145855-152145885
  hyper

SEQ ID NO: 106771 - DNA, 30 bp, Homo sapiens
  chr2:152266740-152266770
  hyper
tgtctggtgtcgggcgccggaggaggttcg

SEQ ID NO: 106772 - DNA, 30 bp, Homo sapiens
  chr2:152684529-152684559
  hyper
gctgagctggcgcccgaccgagccgcccac

SEQ ID NO: 106773 - DNA, 110 bp, Homo sapiens; identical to SEQ ID NO: 38084
  chr2:152685151-152685261
  hyper

SEQ ID NO: 106774 - DNA, 796 bp, Homo sapiens
  chr2:152954360-152955156
  hyper
ttgaccggagcttgacgatctctcccaagatccagacagataagagtattcaaattaggacaaaacagaagaaaccactaaatctcaactcgaatcaaaccaggtccccggccccgaggggtctggttactctaggtcgagttatacgaattaaagacatttctccacgcaccaaagatacaaccagacatatttccagctcttaaattcaacgtccctgacttaagccaggtccccaccgaactgtccacacacatgcacaaactaacttcccggggcggtgcggagacgccgggacgcgaagacgtcaagagcccaggctagagggagagggactgagcccgagcaccggccgaggccgggaagagacgcgcgcgggcttgacccgcagctcccgcacgtgtgggccacggccggctccaggacccccgcgccgcgcgctcggcctcctccccatcctggtctcccgcctccttctcatacctgtctgaggatgaagctggtcgaagtggtgctgccatcggatcttttcaacctgctcctccgggttgtggtgcctcgggccacctggactcgacacacgggggccagagagaagccggtgaggaccgcagcgcagagcggggcgaccacccccggctggagtccgcctccggacccgctccctggggtcccctagagcccgcacccaagtctcctccgcgactcccaaatacagcccccacccccacccacccactgcaagcctcgactgctgaaaagatgctcgagaagagcagcccgcaagcacccacca

SEQ ID NO: 106775 - DNA, 307 bp, Homo sapiens
  chr2:152955491-152955798
  hyper
cggtcccgttcttggcgtaggaggaggaggacatcgttcagagccgccgcatggccagcccgtgtgcggtgggcggagggggctggcccccgaggctgggctgcggacggagggggagggcgcaggacttccccacccggctccaggacccgcgccggcgcccaggctccctgcccgcacttcggagagcgcggcaccttaaagggaccgaggcgcttcccccgcgctcgcggcggggtcccggggagggggcttctcggaaactcgcctacccgagcggattgggagaagcgctctcccacctagc

SEQ ID NO: 106776 - DNA, 131 bp, Homo sapiens; identical to SEQ ID NO: 38087
  chr2:152956019-152956150
  hyper

SEQ ID NO: 106777 - DNA, 30 bp, Homo sapiens
  chr2:153032144-153032174
  hyper
gaacaaaggcatctcgccggcgcccgagcc

SEQ ID NO: 106778 - DNA, 53 bp, Homo sapiens
  chr2:153032645-153032698
  hyper
agtttgtttcagagcggcaggactcgtagctagagaacgaggacccacgacgc

SEQ ID NO: 106779 - DNA, 328 bp, Homo sapiens
  chr2:153191509-153191837
  hyper
aaatggtcccaacccggcctggcgctctagagcaggcgtggtttctgcgcgcggacactttggagagaaactacgcgtcccggcagtccgcggggcgagtgggcggagccgggccgggggcgggggccgggcgccgggcgagaggtggcattgtgtaggggagcgcggagctgcatttgtctgctccaggtgctagccaggcaggcgcagccgtggccggctagggctggaagtgtcagcggcggccgcgggcccggcagaaggccgagtaggagggaccacgcgccgggggccgcgatctctggcagggggcggtgtgccagcggag

SEQ ID NO: 106780 - DNA, 723 bp, Homo sapiens
  chr2:153192136-153192859
  hyper
tggattcgcagcagaccgatttcagggcgcacaacgtgcctttgaagctgccgatgccagagccaggtgaactggaggagcgatttgccatcgtgctggtaagtgcgcggcggcggtcgggcgcggggacccggggccccgggccgggcggcgcagctgacccccgcccctccccttcaccccgtgccgggagcgagcctccattcccgagggggaggctcccgctttcccctttgtggccccccagcactcctcttcacccccctggcagtcccccgcgctcagtctctcggggtcccgggatggggatgggggctcagggccggctgcccaaccagcctcgaacccattgtctggctggagaggcacctcacggcgcgtgtgcccgggaggtgcggcgtgggcgtgaagagaaggtggcgcgggctgggaggaggaggtggcgagccgcttaggctttttttttaaaaaaaacaaaacaaaacaaaacaaaacaaaacaccctgagcccctgcggaccatccctcgggcggccagcccgggacctgcgaagtccccggcagatggggcgcatgtggccggccgcgggcgccgcgccgggcggtgagcggaggcgaacttggagggctcacgtcgcggcttggccaaggggagcttccccgaaagggaaagcggagacccacagcagtgcggcgccccggcccttggcgaggagcaggggca

SEQ ID NO: 106781 - DNA, 31 bp, Homo sapiens; identical to SEQ ID NO: 1876
  chr2:153573617-153573648
  hyper

SEQ ID NO: 106782 - DNA, 393 bp, Homo sapiens
  chr2:153573951-153574344
  hyper
ataccaacaagaagcgatctgagtggctggcgcccactggggctaaaggttaaaggctgccctgcgctacggggcgggatcagcggggccaacaggctgacgggcttccccgctgtccaatcagaatgcgccgccgacacgcagctctgcggcgattcgcccccagcctcagcctcactcggcgtcgcctgcatgggggggggggaggaggaggacggaggaagtttctgcgccgagtcctccgtcgggaaaactctaccaacttccccaggggaagggaagacaacagtgtcccagcttcccgagcttagaccgcctcaccccgtagggggtggggcagtgggggtctgccaccttcaccctccccgcccgagttacgtacgccccacaaac

SEQ ID NO: 106783 - DNA, 30 bp, Homo sapiens
  chr2:153575035-153575065
  hyper
aggcctggtggtagcggccactgccgcgga

SEQ ID NO: 106784 - DNA, 30 bp, Homo sapiens; identical to SEQ ID NO: 38092
  chr2:153575584-153575614
  hyper

SEQ ID NO: 106785 - DNA, 1502 bp, Homo sapiens; identical to SEQ ID NO: 38093
  chr2:154333302-154334804
  hyper

SEQ ID NO: 106786 - DNA, 609 bp, Homo sapiens; identical to SEQ ID NO: 38094
  chr2:154335184-154335793
  hyper

SEQ ID NO: 106787 - DNA, 24 bp, Homo sapiens
  chr2:154728880-154728904
  hyper
ctgccagagtgccggggctaggtg

SEQ ID NO: 106788 - DNA, 233 bp, Homo sapiens
  chr2:154729082-154729315
  hyper
gcccaccttctgctctgcttttctggctaccccggtgagttgttggtggcgggggggggggggggagcggctctggccccctctgcgttctggtgacgttcctccgcgggggtggctcggcctccaagcccagacaactttctcgcaccagctgcaggcagccccggctgcgttgcgggcgtttctactcgacccgacaccaggcgctccctgggtcttgggtgtcttcctcg

SEQ ID NO: 106789 - DNA, 793 bp, Homo sapiens
  chr2:154729379-154730172
  hyper
cgccgtgtgtgtctctgcctctgtttctctttctgagccttggtcccctcagtccacactctccggccatgtatctgtttttttctcttattctgtttccctctttctttcttgggatatctgtgtccctgttaatctgtctttccttttgtctctccgttttgcaacatttgttctctttctgtgtctgcttctcgcagcttatctctgtctccctctgtcatctctctgccccgtcttcccgaacaccagccccgcgatcccgaagcgccttggttaggggagcaagccctggcgcatctaatgggtatctccaggtgcagagattttcctgcggggtcagtggggacgcggaggagacagcctgcccttgtccaggctgtcgtggacctgaaggaggggcgcaaggggttagagtggagggcaccgcagcaggctccccttgccgggtccgagggcgctgcgctgctgcgaacctgagcgcactgaggctgctactctggacagcgaaagctgcgcaagcccctcccgcatacccgattctttgactatggttagttgaatttccaggaggagagtctgcctccccaacctttatagccagctgcagaagaacggacagtgagcaggcaaacatagatgctttggggttcagggaaactaacctcgaaagggtgggagctttcttcaggcaaaggtgttgctagcagaggagaggagctttggggactgaggtatgcctgccttaaactaccatgcattcattgcttaggaaagcggtttccttggagag

SEQ ID NO: 106790 - DNA, 80 bp, Homo sapiens; identical to SEQ ID NO: 1883
  chr2:155553935-155554015
  hyper

SEQ ID NO: 106791 - DNA, 1446 bp, Homo sapiens
  chr2:155554076-155555522
  hyper
cgcctcgcatcttccacccggggccaccgaggcgctgacaaggagtgggggaccgaagaaggaagaggcagaggaaaagctagagcggcgctactgtttaacctgaaagtctgaccggcagcccaaggctcgaaccccgtccagcagcaccgctgtcgcctggaaggagggcacagcgccaaggaacccacgagcccccgctcgagtcattctgtgctctgtgcgccaaggatctttctggcagggacagcgcggtgccctcagggaggtgcggagcttgggggacctgcattggcgcccatcgtggtacaccaggaaaagtgggaacgaggaaaacagccgtgagcgcagagtgcgaggccaggctgccgctaccgcccgctgcgccgcctcctgccctctcccgctgggtgagtgcccaggcttcgcgcactgccgtgtctcagctgagcgcgggggcggcctgcgggcccttgagggtccgccggagggccccggtggcgcccgcggaaactcggcggtcgggggacgccaggcggacaggtctctggagtccggaacccgggaatctgagcccggagggcgtgggtagggggcgttgcaccagtgcccggcagacatgcctttgggcgggattttggctaaaagataggagacaggtgcgccgggggtgcggggagcggtcccagggggcgggagattggggagcggcggggaggggggagggtctggtccaggcaggtaaaggcagcttcttaggcagccagcgagttggcaggtgggttgggactcgcttgtcaactcattaattttaagcagtcagtttgggggtactgcaggataatcaggagggccgtggggagtcaagaggtgacccgggatgccggtggtggggaaagaaaagaggagcctctggaagcttggaggcaaaattgcgcttgggttcctgttccttgcatccctcctggcttgagtgcgggagaacactttttaaagactcaccttggaaagaaggcctccgtcccaggggagaaggagaggcgtctgcagggggcagagaccgcagctacctgccgggtgcgccccccacccaggagcgctcgcttcgccccctttcctcccccgcccccacctccttattggtgctagtttgcagcgcccagctcctgcgccttcgcttcgcgtttgaatctggctcgccccttcgtattatgtctgcactccgaaggaaatttggggacgattatcaggtagtgaccacatcgtccagcggctcgggcttgcagccccaggggccaggccaggaccctcagcagcagcttgtgcccaagaagaagcggcagcggttcgtggacaagaacggccggtgcaatgtacagcacggcaacctgggcagcgagacaagccgctacctctcggacctcttcaccacgctggtggacctca

SEQ ID NO: 106792 - DNA, 1353 bp, Homo sapiens
  chr2:157176352-157177705
  hyper
gagcgctcccagccgcgggaagataagcgtacaggcggccccaaggcccctacaggcgcagccctgatctggccacttgactagacgctcgctccagcgctcgcaggcctagggctcattacatgcgttgcgaggagacctgaaagcagggcgggaacgcacaatctatcttcagagctttgggtcgtgagcacacgtgtggagcatggttgtggcatgggcgtctgggcccctctcctagacctccacgaggtgcggacgcgcctctgccccgcccttttgtgcgccctcaccactagaaaaagagttttccccagtgtcgcgtgggaggtcgccccagtccagctcagcgttccaagagaccagagactgaccggaaatcgttgggtgcagggagaagcaggagacgcgctccgcctcctgtgctcgtgccctagcgcaacagacgcgacctagaggcgacggcagcctgttgcagccttcgccctgagggtggggggcgggggggtgtagaacagctgaggaagacgcagggagcagctggggaggaaagggagggacaccgaggaaacaaagttcacccaagtgaatgcgtcctaattgctccaaggctctctccgcaaagtctacgactgcaagccgcaaagtcaaactacgtctccaaaacgcagtgggcagagcaggagggcttgtgtctccattttcgccgcagggcggatcgcggacacaagtcctctccagtaattccgaagcctcgaaataagactatgctgggaggaggggttggggggtgactaataagaaggcgtgggggtgggggtggggagtacgcggcaagaaccctgctttctggaattctcccgccactgtctgcagggcccagagcgcacttcgcggctagggaacaaaattgccgctctcttcgagcgcccccagcgtggggtggggccctgctttcccgcgtcaggaccgccccaccaggcgccctccgacggaagctggacttttcctaaggaaaggcaaagtcaaagtcggaggaaagatctttcttgcggccccagctgtcgctcctaatggtctcggggaacatactaaaggaaaatgactttaaatcacagtcttgccatcctaaatagttatgtgcaatattttggtttctagcaaaatttaaaagtaaaatggggatttccatatgttcattttattattaaaaacgaattactaaaaagtgatgacctgtttggaattcatatcttgctttacgagcagtcagccagtatcgactgaacacaataaatgcaggggtgcgaaacgtgattgctcgggttcgagttctgtcggatgcaccgatct

SEQ ID NO: 106793 - DNA, 338 bp, Homo sapiens; identical to SEQ ID NO: 38100
  chr2:157177921-157178259
  hyper

SEQ ID NO: 106794 - DNA, 32 bp, Homo sapiens
  chr2:157188948-157188980
  hyper
aaagcataaaagaaggcgaactgcatgggctg

SEQ ID NO: 106795 - DNA, 406 bp, Homo sapiens
  chr2:157189364-157189770
  hyper
acgtcacgagcagggccgattttaaggtgggaaccgctctgcgttcaccttggtagccagcttgggtggtttttggtgttttttttcttttctttttttttttccgaaagaggtgtgacctctcccaggtctgcgcagcccgcagcgtcgcgacacttcactttccccgaagcccctgcgcccgcgcagcggctcggccgctcacatgtggggagggtgcaacaaaagcaccggcggaaggcaaggccggcgtggccaggtagtacgcacctggagccgcacggaatgggatgtgccttgcagcgccctaacctctcccacccaccttcgtcacccccttagcggaagagcgtacagatgtcccatgacacgagacgctcagagggctcacgcagttcgggtggga

SEQ ID NO: 106796 - DNA, 233 bp, Homo sapiens
  chr2:157190093-157190326
  hyper
gcagacaatgcagccgagcagcaggcaacaggtgcgccttctgcagaaaggtactctgattcccaccttctgcaaactctaatactttcgatactcctctgtgcccaccaactcgtaccccttccacgagttttaagggaataaatcgatcttcgtttgaaacacaaggtctatcacagcctcaatcttagagcccagaaagactggacaagaaaagcgaagcgggtggggat

SEQ ID NO: 106797 - DNA, 30 bp, Homo sapiens; identical to SEQ ID NO: 38104
  chr2:157198054-157198084
  hyper

SEQ ID NO: 106798 - DNA, 64 bp, Homo sapiens
  chr2:157198321-157198385
  hyper
ggcctctattatctcggcttctcgggaggagcctcatctagtcagtcacgcagaagtttctctt

SEQ ID NO: 106799 - DNA, 30 bp, Homo sapiens
  chr2:157199471-157199501
  hyper
accgaaaacaaaagcgaaaaacctgtcgtc

SEQ ID NO: 106800 - DNA, 30 bp, Homo sapiens; identical to SEQ ID NO: 38106
  chr2:157257095-157257125
  hyper

SEQ ID NO: 106801 - DNA, 460 bp, Homo sapiens; identical to SEQ ID NO: 38107
  chr2:157292162-157292622
  hyper

SEQ ID NO: 106802 - DNA, 425 bp, Homo sapiens
  chr2:158484493-158484918
  hyper
gtaaagatcgtacctcgaaagcaatgtgcgttgcaaaccacacagatttaagctcccactctcgcctccatagcttggcatctgcggcttttggggtattccccgcctcctaaaactcagactaaatcaccacctcccaccaccaccatgccaccatccttgagcagctctcaggggcttagcacagagcgcgtccgacgcatacctgcagccctccaggtccctgcagggtgaacccagctcccagccatgcgcgcacccacaaacgctctcctattttctccgctgcaaactgcccacaaattagtcacccacctcacccctactacttattcccccacgtccctgctgccttttccctcttccgggcggcttcgtccccaacacacctgtctacccctacggctgccagacgtcaggtgccc

SEQ ID NO: 106803 - DNA, 349 bp, Homo sapiens; identical to SEQ ID NO: 38109
  chr2:158484949-158485298
  hyper

SEQ ID NO: 106804 - DNA, 379 bp, Homo sapiens
  chr2:158485511-158485890
  hyper
cccggcagtgagatcgcccagagctggggcgaagaaagagggggcgtggggaagcagtgcggagcctccgggactagatactcaggaatggggcttctcacgggaggaaaagccccactgagactttagggaaacttcaactacgcggcgattgcgcccaggtgatccgctctataacctcccgcagaagagccagcctcctagctctcctgacgtttgttgtccagggtccttaagtccaaccaggttgcgctgtgagagccccgcgggcttcctactggcttgtcccacccctgcgtcctggccatttgtgcctctggggaagggcgccctctctgttcatccctggaaatgaccagttgtccgactgccttctgga

SEQ ID NO: 106805 - DNA, 30 bp, Homo sapiens
  chr2:158732171-158732201
  hyper
gaaaggaatgaaagcgagggggaggcaccg

SEQ ID NO: 106806 - DNA, 1841 bp, Homo sapiens
  chr2:159313053-159314894
  hyper
ctgttcctacctttgacgccagggacaaaccctaccaggcacagttgggattggcagtaaggcaaggaaagcctgccccagatttcagagccagcgctggggaatctccctgtcctctccgccaccccctcccgcgcccgagacctgagacaccttctctctcacacccaccctctccaggccctctcgcgctgaacagcatcggtctctatggcgacctgaaaccgcagctcccattggcctgttcaatatgagggccgggccaatggggagggccagccctctccttcccgccaatggggtggcgggagctggcccggggacggcggcgtgctgacgttcccgggagcccggggctggccgggcgggagggctggcagcggggcgggcggcggcggcggcctctgggcagtagagggggctccggggctgagtccgcgtcgacgccggccgcggaggcggcaccatgggcaaggggtagaggggcaagttggccaccgccgccgccgggggtggtgggagagccgctccgggggcgggggccggtgggggagggaggggcgggcagccgcgccgccgcggcacttttttaattttttcgggtgccgcagcggcgacccctcggcgccgatgtccctgatccctggagcgacgacggccgctgcctaagctggaaagtaagtgtgtgggctcgcgggagggcgcggagactcctgcccacgagaccctcggccctcgccccgaacacgcgccagggccaggacctgcgcgccgggggccgggggcctccctcccgctgccgcgtccccagcgcctcgcggccgccgcggctttcctgccccgcctcgtgttcctgcccgcactcgcctgctgctcccctccccccggcaggcgcacaagtttcaccctccatttgcttttcccggcgattcctctccccggtctcccgtacgcgcagcgcacgacctctgcccacgctgggctgttcggattcagagctcccagccccgaacttgagcgccgcgctgagccctgctggacgccctcgcggcggcttccccgctgcctgccgccgcgcgccccaagtcgccctcgacaccactgggcgcccgccctcctcagcactcggggccggctgtctgtccttctagccccagatcctgcaccttggtcccctccccgtcttcccacgcccctgctgcccgcgcggtcttgcgtttgtccccgaagtcctgtactccttgccggtcctgcccacccctctgcctagtgcgcccctctctaccggccgcggatcctcacgctccacccctcccggctccccagcgccgagcctcgccgctgccctcctgcgccgccgcttcctcctctccctgccaggagttgaagcggagctgcggcacctccctggcggatctggtatccccgcccgctgccgaggctgccggccctctcccctggaccgctacccggagagcgagcggcggggccgggatttggctgcgtgttggctgagtgcgacacaccgcgagcgcgggcagtggaggtgccgcggcggccgtggccgctcggggcgcagcggtagtcaggtgtgtgtgtacagcgggggacgcgcgctgccggctcctgggctggcgacagattgtgcaggaatgcgaggaatgcaccaggggcagagtccacacagcccgccgcggctgccctagcgccttccctccccagctctcgccgcgcagccagaggtcaccggagcatcttcggagctggtgagcctcattccactcctctcctcccatagcttccctccatgcggcagaggggaagcgcggtaattctttggg

SEQ ID NO: 106807 - DNA, 30 bp, Homo sapiens; identical to SEQ ID NO: 1895
  chr2:159660261-159660291
  hyper

SEQ ID NO: 106808 - DNA, 1568 bp, Homo sapiens
  chr2:159825049-159826617
  hyper
gagaggaaggtgccttcgggaacacgcgcaagggcggggattcgcgctgccaatgaggccccggtgtgggccgagcaaggcggggggacgggccggagcggaggctttgctgtggcagctgctggagcggcggccgcctcgggagccggaggagaggcagccgcggagcgccgagctggcctcgccccgaggcccggccctgggtgtggggaaccgcgctgaggagctggaaactttcccggcaggtaactcccgcagcccggactccgccgcgggcctgcgagcgccccgggcatggccagctgccagtgtgcggagaggtcgagagggacccggggtggagagggtgatgggagaagggaaaggcgtgtgggaaagtttctggagcgccccctcctccgccgggcacacccgggagctttccgggaataggcacagacatgttgggcgccccgggccttggtctctcggcggctttggggagtccgcaccttccttgcgcggttcccccgcgccggaccgagccggcctcccctggaaccggtgtggtgggaaccgggaacgcttggggcacgctcgagttctgggaccacccccgcccggcgcgcccgctcgccccctttcccgccttctctgtagccctcgggcttggcaagggcctgggctacgcctggtacctggcgcgggggaggcggggggaggcgcgcctggcaccgcggggtcctgggcgccccccggagtgttggggtgcgcgggtcgcgaagttgccgagagaacttaagccggaggcatggtattgccccagtctgggctgaaagtctattgctttgcttccaagaacactgcgattagcatatccacactcctttattgggggtgggggtgagttaggattagacgttgggggtttttctttaggggtggggcgctgagaagagcggtaattgtcaagattgtgagcccccttgttcttggatgcagagtggtcattttcgggggacgatatcagggcactggcttcctggaggactttggggtgcgggcgcgcagcgctgtgggtgtgcggggctcccggctttggcgcggcggctttccggaacgcctggctgggaaggaagctctaggcattgtgtggtgtgtttgcagacagaaaggtccctggaccggtgttctcaaaacttactggacttattgtgtaaagctccgggaggaaatgtggcgttggccaggtagaaacgcggcgctgcggccaaggggcggaggacgccaggctcggcaacggccttctcccagccccctcctgccagctccagatccgcgtgcctccagtgttgggaccgttctcagtggcgttgttccctgctggagttaacttgggaggtgaggagggaactttcatcttgaacttgaccccagaagcagcgtcgtccgtacaggttacaaggtaaatggaagctgagtcttaacgtgggttggaccgcaaactctggctggcgcggaaaggaagttcctggttcagaatctttgaggaaagggctcaagattgctgagatcgctcgctctggaaa

SEQ ID NO: 106809 - DNA, 507 bp, Homo sapiens; identical to SEQ ID NO: 1898
  chr2:160142448-160142955
  hyper

SEQ ID NO: 106810 - DNA, 30 bp, Homo sapiens; identical to SEQ ID NO: 38119
  chr2:160373206-160373236
  hyper

SEQ ID NO: 106811 - DNA, 30 bp, Homo sapiens; identical to SEQ ID NO: 38120
  chr2:160471841-160471871
  hyper

SEQ ID NO: 106812 - DNA, 323 bp, Homo sapiens
  chr2:160472080-160472403
  hyper
gtggcagacgcagctcgtcagtccgacagggaagagggggcggaggcaaaaaagggcagcaggaggcggacgggggtggggggtgatccagaaactaccccggcagggagtgggggagcagcggatattccggggtaggaacggccatcgcaacgctgacagaggttgttttttaagaagcaaaactgttggcggcgacctgagcgctggaagccgaaggggaagaggaaggagacgcgaagccagggcggccggcacaaaggcggcggactcgcggcggcagcgcctgcccggccgggagcacaacccacggccctactcca

SEQ ID NO: 106813 - DNA, 363 bp, Homo sapiens
  chr2:160472575-160472938
  hyper
cgaggataaacagcggcggagggcgagagggcggcggggcgagcgcctccacgcagcaactccggagtcccccgcttgcccgagcgcagtttctccgctgctgtttccaccggctttgtaacactgggaatttacatcctcacccgcacccctcacgcccgaggattttaaactcacctttactctcgaactgagagttgcggtagatgggatttttgccttttccccagatggttgaaggttaagatttttggaaaccccaccacctccttatttctattattatttctgcaagaaaagtataaagagagttgtagtggaggtgagatttgtgatcgggaaagccttcgactccctccttct

SEQ ID NO: 106814 - DNA, 30 bp, Homo sapiens; identical to SEQ ID NO: 38122
  chr2:160568797-160568827
  hyper

SEQ ID NO: 106815 - DNA, 139 bp, Homo sapiens
  chr2:160569033-160569172
  hyper
gggagaggggcgggcgccattgtgcttcgctgccgactgcatttcctcagtcacgggcctagaactccaaggagaaaggcggcggtgcgtgttgctgcgagtgggacgcgcactggtcggtgccggctcaggagccggg

SEQ ID NO: 106816 - DNA, 679 bp, Homo sapiens
  chr2:160654214-160654893
  hyper
ccagcaaccccactccggccgcgcaccagcaggggaaatcgccaccaacgtccccgcttctcatttcagcccgaaattgccctgaaacggcgcccgtcgtgcgactccaagtccctcagttctccggccaactggcctaatttgggggttccctccccgcggagtggggtctgcggtgaggatgtggactccgaggaagacagagccctcccttattctcggccacctcccctccccgagggcaggcgggtgagaggtgacccggagccaggacccacgggggacgggcgtgcagggaagggcgggatggccggccgggtgttgcgtctgcgggccgccctcgggtgcgcggggacgaagagcgtgcgttgggaagggggcgaaggcggtcgcgcacggtcccggcgagggactacgtaagggcttacccgcgacggcagcagcggcgaggcccagcaacggcagcaggagcgcgggcagcgcggcccggagcatgacggcgggtgcgggtgggcggcagcggctgcgcggccggagaggagcggggcggggcgggagcgggggcggtgcttctcgcgtgcgagtttaatcccccccccgggcggaacgtgaacggcactgggggctcccaccaggagaacccgggtgtcccgtcccgcaggagcggctggcgcgcggc

SEQ ID NO: 106817 - DNA, 279 bp, Homo sapiens; identical to SEQ ID NO: 38125
  chr2:160760619-160760898
  hyper

SEQ ID NO: 106818 - DNA, 423 bp, Homo sapiens; identical to SEQ ID NO: 38126
  chr2:160760959-160761382
  hyper

SEQ ID NO: 106819 - DNA, 850 bp, Homo sapiens; identical to SEQ ID NO: 38127
  chr2:160918582-160919432
  hyper

SEQ ID NO: 106820 - DNA, 658 bp, Homo sapiens; identical to SEQ ID NO: 38128
  chr2:161126280-161126938
  hyper

SEQ ID NO: 106821 - DNA, 126 bp, Homo sapiens
  chr2:161263703-161263829
  hyper
gcccccggcccggcgcgcttctgccctcgccggctctccgctcctgcccctgccccttcctccacttcccaccctgcccggcccgggcggcggcggcgagggcatctcccctgctcaggtcgccgg

SEQ ID NO: 106822 - DNA, 458 bp, Homo sapiens
  chr2:161263896-161264354
  hyper
cgcggagcccctgagcgcggccccctttgtaacgcggggctcgccgacctcggcgcggcatcccggccgccgcctcacctgcttgcgatagggcgtccggcagttgctgctgcccccggggttgccactgctgctggggaagatcatcgctgcgggcggcggcggcgggtgcgggcgcgggcgcgggcgcggggcagcctcgccgcgagggggagggcgcaaggaggtggccggccgggcccggggccgcggcagctctgggaactccctctcgccgcgcggcggcggccggcgggggctgcagctccgcgctgacttcccctccgccttcgacctccgcactcgcctaaaagtacggcgcggcagcgggcgagactcgagcagctcgggcagccgccgccctgcgtgccatggacgggagttcgcgcgcggagctggcggcgtcgccgactctcccg

SEQ ID NO: 106823 - DNA, 327 bp, Homo sapiens; identical to SEQ ID NO: 1905
  chr2:161264419-161264746
  hyper

SEQ ID NO: 106824 - DNA, 43 bp, Homo sapiens; identical to SEQ ID NO: 38131
  chr2:161349351-161349394
  hyper

SEQ ID NO: 106825 - DNA, 228 bp, Homo sapiens
  chr2:161349622-161349850
  hyper
gccgccgccccgcgcgccgcccggctctgcccaggccagcgctatagttagcaaccttccagcaactccgcccggcggtggcgggggttcgccgcgcgcccccctccccaggcctgaccctgcgcgcgtccccgggccccctcctccggccgtcacctctccccggcgcccctttaccttggcttgcagatactgggggtaatagtaggtggcgtactgagggtacat

SEQ ID NO: 106826 - DNA, 212 bp, Homo sapiens
  chr2:161350273-161350485
  hyper
ggaaagtgcggcagcggcggctgcgcttggtgccaggcggcatctggggtgggtgcgcccgatgtggagagaggagaggggctggcgttccgaggccgtgggggaagggcgggcgggggcggggcctgggcgccgccgagcccgggacccgctggaggtgagggctgagttttaaccactcctcacctcccaggctcgcggttggacgggcg

SEQ ID NO: 106827 - DNA, 30 bp, Homo sapiens
  chr2:161350769-161350799
  hyper
cacccacccccgacccggggccacaagact

SEQ ID NO: 106828 - DNA, 154 bp, Homo sapiens; identical to SEQ ID NO: 1906
  chr2:161560559-161560713
  hyper

SEQ ID NO: 106829 - DNA, 532 bp, Homo sapiens
  chr2:162094179-162094711
  hyper
ggaggtgaatgtcctcgggagggcccccccggtgcagctttccccggaggctgaggctgctgccagcggggacatctgctttcttacactccagcctggctcaccccgccccctcagccccgggttgcgtggttattttaccaacacggggggagggagagctcgaggaggtagaaaaggggtggatagaagcttagaagattttcttcccactccccccacgtcccctcctttcgtcacatcttttaaccttcaaggtaaagacttaaggaaacaataagcgtgtccgctggctcgcaggcccgccggggttctcgggcgcggggccttgcccctctccatcctccctgagtccttccccgagtcgggccgtgcttcggcggttcggctgggcgcaggggccggccgggcgcgcccagcctgtggcgcctcctctcccgggctgctgcctcgacagctgcttgtagctacagtaattagactgtcagtgcttgttagaggagagaggggaaaacacgcttctgacagcaga

SEQ ID NO: 106830 - DNA, 31 bp, Homo sapiens; identical to SEQ ID NO: 1907
  chr2:162101443-162101474
  hyper

SEQ ID NO: 106831 - DNA, 127 bp, Homo sapiens
  chr2:162164661-162164788
  hyper
atttcctagccagtcgtctcccgggctggatgtgccgccgtcccagatctcagcggcggccgcagagcgcagaggtagggagagaaaaaggaggcgtcggcggggcgcgagcgaccagggcgctaag

SEQ ID NO: 106832 - DNA, 64 bp, Homo sapiens
  chr2:162165217-162165281
  hyper
caggaggcctgggccgcgagggaggagcccggcctccttcattctcttcgcctgctctcagggc

SEQ ID NO: 106833 - DNA, 768 bp, Homo sapiens
  chr2:162271678-162272446
  hyper
gtacacacacacacacgttttcagtagcgattactgtgttgacaccacttccactctgtctccccagatcagcgcttctgacgagcccatttgcacggggactcggccctctcttttcctggcgaggcttttgaacctgtcgccaagccagtacctcagagagaaggaaatgcagagggacgagaaggatgcatggcgcctgcccccagttagatgttcttcagataatctgcaaccaagtgcgctgataaaatatttaataaagagccggtaaacatcactgcaaatacattaaggcatttcagcccgacagcttatgattatttcaaaacttaaaaaggagatcatagattgtcactgtttctgtactcaaccaagaaaccgaaccttcctgaggtgggtggattggtgggtgagttgctgcttttcgccccctctcctccccccttctgcttgtcgctgtggctctcagcagcagggatttatttatttatgtttgcagtttaaaaggtgggggtgggggcgccgaggacatgtaggatctgctcacaaagcaccagctcaggtgttgtgtgcttttgtattagctggaaaagacagactctggaacttttacagggcgagaagaggccaccggctcgcgctttgtatactttgcacttgaaatcgttacattcaactgaatatttggctcattcagatccgaaaagtctcctagcatcgtcgaattccctcctccgcccctccgctctaaaggggggaaggggg

SEQ ID NO: 106834 - DNA, 318 bp, Homo sapiens; identical to SEQ ID NO: 38136
  chr2:162272996-162273314
  hyper

SEQ ID NO: 106835 - DNA, 583 bp, Homo sapiens
  chr2:162273382-162273965
  hyper
cggagcctacaacagcctcctgtccaactcctcgccgcagggataccccacggccggctacccctacccacagcagtacggccactcctaccaaggagctccgttctaccagttctcctccacccagccggggctggtgcccggcaaagcacaggtgtacctgtgcaacaggcccctttggctgaaatttcaccggcaccaaacggagatgatcatcaccaaacagggaaggtaatactacatttttggctgccgctgctctaggcgcagccggggacaagtgcacctaggctgtgactgccgcggcagcgacgatttggggtcgggagcggagtggaaggcgccctagagttggctagttttggaaagggggaaagtggaagggataaccgccagggtgatgttggtgggggggaccccgttctaggaacatagtgggagagccagtcagtggccagaggaaggcaagaaaaaggaagagccctggccagcggctgggcgatgggagggacgcatcaacactggcatgcacggacaggtggagacgcaggtcgccaacctcgctctccacctgggcagtgat

SEQ ID NO: 106836 - DNA, 244 bp, Homo sapiens
  chr2:162274210-162274454
  hyper
taacatttctggtctcgatcccacggctcattacaatatttttgtggatgtgattttggcggatcccaatcactggaggtttcaaggaggcaaatgggttccttgcggcaaagcggacaccaatgtgcaaggcaagtccttccaattaacacattttcttgacacttatttaggtgagaatgattaattaaagcctttgtggactggctcgagcgacttttaaaacgatcggccaatgacttct

SEQ ID NO: 106837 - DNA, 477 bp, Homo sapiens
  chr2:162274749-162275226
  hyper
ggggctcactggatgcgccaagaaatctcttttggaaaattaaaacttacgaacaacaaaggagcttcaaataacaatgggcaggtcagtggctcaagcgctcgtgttttctctctctctcaccccttcctccctgacatccagttcgtcagtgtaaagcagcatatggaactggatacacgtttctttgcttcattaaaaagacttaaaaattgtatttccaccctccaaatttatattaaatctgtaaagttgttctcattggcaacacctccgtcggcccaattttggagtgcccgaccttcccaagtactaatactgattgattttgagaagaaaccccacaagatctgcaggttgtggaaatctttgttcctccttacaggaggactaggagaagggccctgaggatcgggcggtcggcttcccccttttttccggtgccccggcttatcttcgctcccagaggtgcgaaag

SEQ ID NO: 106838 - DNA, 127 bp, Homo sapiens; identical to SEQ ID NO: 1911
  chr2:162275310-162275437
  hyper

SEQ ID NO: 106839 - DNA, 337 bp, Homo sapiens; identical to SEQ ID NO: 1912
  chr2:162275472-162275809
  hyper

SEQ ID NO: 106840 - DNA, 55 bp, Homo sapiens
  chr2:162279832-162279887
  hyper
ctccgcgccacccctcggctctctctctctctctccctaccccgcaggatctaca

SEQ ID NO: 106841 - DNA, 263 bp, Homo sapiens; identical to SEQ ID NO: 38142
  chr2:162280152-162280415
  hyper

SEQ ID NO: 106842 - DNA, 148 bp, Homo sapiens
  chr2:162280740-162280888
  hyper
cgcccctgcccgcccggccccgccgcggcccggacccccagccagcccctcacagctcttccccagctccgcctccccacactcctccttgcgcacccactcattttatttgaccctcgatggccgtctgcagcgaataagtgcaggt

SEQ ID NO: 106843 - DNA, 40 bp, Homo sapiens
  chr2:162281106-162281146
  hyper
gcagcgattccgacccgccaagtctcggcctccacattaa

SEQ ID NO: 106844 - DNA, 44 bp, Homo sapiens
  chr2:162283132-162283176
  hyper
acctggagggcgctgcgtctagtgaagtccgcagaactctttac

SEQ ID NO: 106845 - DNA, 187 bp, Homo sapiens
  chr2:162283415-162283602
  hyper
aattccgccactagacggcgttccgtggagttttgtctgccacataaaaaagcgaggactgaatttcctttgtgtttctttcccctcctcacatctaagaactaagtaagaggacaaaagtacaagacacggtgcatgtgtggcgagtgaagtggagcagtgcattcgtgtcatcacccacccgacc

SEQ ID NO: 106846 - DNA, 211 bp, Homo sapiens; identical to SEQ ID NO: 38146
  chr2:162283782-162283993
  hyper

SEQ ID NO: 106847 - DNA, 243 bp, Homo sapiens; identical to SEQ ID NO: 38147
  chr2:162284264-162284507
  hyper

SEQ ID NO: 106848 - DNA, 15 bp, Homo sapiens
  chr2:162284643-162284658
  hyper
cgggcgtccgggagc

SEQ ID NO: 106849 - DNA, 203 bp, Homo sapiens; identical to SEQ ID NO: 1916
  chr2:162930081-162930284
  hyper

SEQ ID NO: 106850 - DNA, 639 bp, Homo sapiens; identical to SEQ ID NO: 1917
  chr2:162930338-162930977
  hyper

SEQ ID NO: 106851 - DNA, 30 bp, Homo sapiens
  chr2:163010369-163010399
  hyper
taatacttataaatacggtaatagcttgaa

SEQ ID NO: 106852 - DNA, 35 bp, Homo sapiens
  chr2:163174876-163174911
  hyper
acaggtgaaatgtgcgtgccgctgtccgctgccca

SEQ ID NO: 106853 - DNA, 30 bp, Homo sapiens; identical to SEQ ID NO: 38151
  chr2:163175111-163175141
  hyper

SEQ ID NO: 106854 - DNA, 30 bp, Homo sapiens
  chr2:163175388-163175418
  hyper
caaagctcctccggcggatattttgttttc

SEQ ID NO: 106855 - DNA, 30 bp, Homo sapiens
  chr2:163200960-163200990
  hyper
ggctgacttggagccgcaggttttctggtc

SEQ ID NO: 106856 - DNA, 407 bp, Homo sapiens
  chr2:163694781-163695188
  hyper
ttaatatcagaagaacactcccgctgccattcgaacctcctggctcggtttcacagcctcttaagttgacagagcctggagttgccggtctccccaccttggaagcggtggacgccaagtgcactaacaaggcagaaagcgagggcgagagaagagaacaaacgaacttactttgcccttcaaatttccgaatgatggtccccagaaatgtattttgtggtgccacatgccccctgcgcacaggcatgttggccccggtcttccgaggagcgctcccccggagctctggagttctcccgggatctctcctcggctagagcccaggccagcgcgcgagccgctctttgtggcagagcatcctcttttgaaaccagaattctcttcccattagcaccacttctagacac

SEQ ID NO: 106857 - DNA, 406 bp, Homo sapiens
  chr2:163695246-163695652
  hyper
cggactgccgcgggtgagagggtttgggggtggggaacgggaaggaggcggggtgaggggaggtggcgggggagggaaagagggagggagctgtgggggtggggtgggaagggggcggggagtcacaagggcaatcgatctgtttctcttctcccaaacagcgccaatttcccagtgcaaatgggcttaacctggcggttgcccagagcagtaaggaatggctgaggggggatggaagacttgtgccggttttgctggaaggagagagagaaaaggaggctgggggtcggcggggttgacgtttctatccccgccctctccccctaacacacacacacacacacacacacacacacacacacacacacacacacacacacacgctctctttatcttggtagcttgg

SEQ ID NO: 106858 - DNA, 15 bp, Homo sapiens
  chr2:163695679-163695694
  hyper
cgtgctttagcggaa

SEQ ID NO: 106859 - DNA, 153 bp, Homo sapiens; identical to SEQ ID NO: 38154
  chr2:163695926-163696079
  hyper

SEQ ID NO: 106860 - DNA, 961 bp, Homo sapiens
  chr2:164592552-164593513
  hyper
ggcgcaggcgcagagcgccgcagagccaaattcaaatcactttcacactaagagccaaagatcagttttcaaaggagagagggagaaagagacggaggctgccgtgagggagagaagacgggaggcagtggcgagaggcgggcagtggagagagacgggcagcgggaggaccaggagggagagggagaggcgcacggagcccgcggagctggagggggagaaagggaggcgggaggcgagccggcgagcgagctagagacgcgccagagattcatgggcagggagggctcaatggccgcgccgcgccggccggccggccgctcgggtcatgttacacggccggggccgcggcggccgcccagcctcgccgatgcgctcacgcggcccggagggggccccgaggtcatgattacgcgcgcggggactcgcagctctccctgcacgcactctctggcggcccagcctggggaaaggggagcagcgccgtagggggaagggggctttctttcccacgcgtgaccagccggcccctgcgctccccggcctgcgttggagggcccgggacagagccgcgctgctccccggcccgcgggctcttccctgccggttcccggccctctcgacagctgcggcccgtccgcccttccccaccccctctgcgcacgggacgggatctggtctcgagagcctggacctcaccggcaccctccccggggcccccagcaccagccagaaaacgacttgatctgcttagaagaggcaacttcggggagaaaattcgcgttcgcccagttcccctcccccgcctccctgtgaataaataaaatcctaagtgtctaggtgtgcggtcccctctcgcgctccctggctcccctccctacctcccccaggcggctcgggctggagaaagcagcgcccggggggccctggtgtcggcggctggtgcgcaggcatagacgtt

SEQ ID NO: 106861 - DNA, 870 bp, Homo sapiens
  chr2:165477433-165478303
  hyper
tgctatttataaggcgctgtgagatcgcaatgtcctgctgatccggtaggagccagctcaaaggggattgtcttcagagacttttacaaacttggcccagctctgggcacatggctcaccccctaggaccgcctcctcaccccctcgccggctgcccagccaggacactcccccgcgccctccagggttgcctacctgtctgcagcacagccgcgggtcccgtccggaaggggcaggagcgctcgcgcgtgcagccagggggccggcgccaggtcgtgggcgtcgcccctcccctgggcagcgccacacacctgggcggccagcggcgaatcccgggcagccgccctgctcgcggcgctctgcccatcttgcagggaagtggtcattgtcgccggccggggggctcgggcgtcatgggagactcggcgcgtggggagaaggggtttgcgcggcgggaggcgaggtgccggctaggcagcccgagcgctctgcaggtgtggtggcctcgccgcctgcgctcggggccccggcggctgagacgcgcggccgagctatctgcgaggcggcgggggaggggagggggcggaggaggagggtggggagaggggaggagcggccggtgggtgggggccgcgggcggcgaggcaaggcgcggagggggcggggagggcgcgagagcggctggccggccccgcgcgtggcccggggcgctcggggccactggcattgctcccgcgccgtcccatccgggacgcgaggccgggaccgctgcctcctcaggtgggcaccggggcgcgaggctgagcccagggtctgggcggccccggcgccgctggaggcggggacccagccgagcgggcgctcccgctg

SEQ ID NO: 106862 - DNA, 1525 bp, Homo sapiens
  chr2:165697144-165698669
  hyper
cagaggcgcgcaccccgctcgctcccggaactgtcatgcgggctgacagctggcacaccctcctgtcgccctccacccgcctgcagaaagcccactccctacagtcaccttgacattgctcacctgcctgggcctcagcccatgaccaaggaaacttttgccctccctccccaggagctcacttacaggtatcgtccaccgctcccccagagcccaaacaagggtccctttgttacaatttttgctcccggactcctcacccaattcctggcattcagctggcctgtagcaacccagggcagccccggtaggaaggcaaccaaaaacgacccgagccctccgcccgggcggcctccgagaaggccgggaggaagcagcctccccggccgcgtggaggacagtcagtgagtcaggccgccggcagggcagcgagttgccagccaggtgaaacggccgaggcctcgctgtcctcgccggcctcgccctccccggtgagaggcggcgcggcgctctgggcttacctggctggggcgtcctgcgggcgcggggttcggccgtccatcgccctgcggggcgctgcgcgggctccagctcccaggcggcgcgtcactgctggggtgggagaggccggcgggtcagggcgggacgcgcgccttcccgaggccggagcgaagctggctgagcgtcaagagcccgcccgagccgctccagccccggccggcccgcctcccgggtgcgcttccacctgcgggccccggctcccagcccgcgggcgccgccgccgtctctacaaggtctagcgggcgcccagagcacggcggaggaggcggtggcgctgcagcccccgccccgtggggtttactgggtagccatttggcgcctctcggagggagaggagccgccggggctggaaaaggaggaggagcggggccgggcgcacgggcaccgctgccacgccggcagcgcactcccaggctcctccggccgagtttgcacaaacaaaacgccctaggaaaacttttcccgaagagaagttgggagggctgatctctcttttcccacccaaggctcctacgttcttttccaaaggagacagtagctcgcctgttctccctcgcggcttcctctcctactcttcccttccccggcccgcgctcttgccgctcggctctcaagccaggacttgaatggagaagcggcaacccctgcgaggctcagcccagcgcgggcagggccgactcagcacctcccctgtcccgcgggcggggtgcgggcgctggctgggcgctgggggcctcgctggagcccgctctctcactcaccctgccccatttccctgcccggagtccgggagctcgccgccgcctctgcagcacggccgcacataagtggggaccagctcggcggcattggagcgagggaagcagcgagccggagagaggaacggggcgggggtgggccgggagcaagttggaatttccttcccccagggcttcgggtctttggggtccggctggggaagctg

SEQ ID NO: 106863 - DNA, 247 bp, Homo sapiens; identical to SEQ ID NO: 1923
  chr2:165873392-165873639
  hyper

SEQ ID NO: 106864 - DNA, 476 bp, Homo sapiens; identical to SEQ ID NO: 1924
  chr2:166649933-166650409
  hyper

SEQ ID NO: 106865 - DNA, 791 bp, Homo sapiens; identical to SEQ ID NO: 38161
  chr2:166650454-166651245
  hyper

SEQ ID NO: 106866 - DNA, 198 bp, Homo sapiens
  chr2:166810402-166810600
  hyper
taatggagcaggggcggcggggacccggaggtgagggctgcgagggccgcccgggagggtccgggctgggaaaagggcctccgccggagagtgcagctggaaaaggaggtcacactgggaaacggctgtctgaggacagtgggtgggcgggccgaggaaatggaattcaggaataaaggaaacggagtatgaagaagg

SEQ ID NO: 106867 - DNA, 453 bp, Homo sapiens
  chr2:167232257-167232710
  hyper
ctccaggagagggcgcgggcctctccttccccggcgctctctcagggctgcttctttttctctgggctcctgttgctcaggggacgcctgccgctagcagccactggcacccaggctagcccagcctcagccgagctggcggaattggaaagccgacagccgccgctggagcgctggcgaccgcctgcaagcagactgcgcccctcctgccagggcgcgcccgtggaggtagcagccccgcctccccgagggcagctgcgccgctttgcctcctccactcctcccagcgcgcccgggtccccaccccttgctccctccctccctccctctctccactcctgcgggcggcgcagggcggggacccagctaggggcgcggtggtggcgacgctgtagcctctgcaccatgcgctaatagaaggcggaggagggggttgcacgacctgccatccac

SEQ ID NO: 106868 - DNA, 33 bp, Homo sapiens
  chr2:167232954-167232987
  hyper
ggagccagacaacaccgccaggccagcgcctcc

SEQ ID NO: 106869 - DNA, 22 bp, Homo sapiens
  chr2:167233063-167233085
  hyper
cggtgacgctcaagaccggtat

SEQ ID NO: 106870 - DNA, 30 bp, Homo sapiens
  chr2:167395886-167395916
  hyper
cggcttctcttgcacgactgtttttccgga

SEQ ID NO: 106871 - DNA, 30 bp, Homo sapiens; identical to SEQ ID NO: 38164
  chr2:167830802-167830832
  hyper

SEQ ID NO: 106872 - DNA, 2210 bp, Homo sapiens; identical to SEQ ID NO: 38165
  chr2:168148856-168151066
  hyper

SEQ ID NO: 106873 - DNA, 13 bp, Homo sapiens
  chr2:169104268-169104281
  hyper
tcccgctccgctg

SEQ ID NO: 106874 - DNA, 197 bp, Homo sapiens
  chr2:169104341-169104538
  hyper
cggccctggttctcctcctccctccctgctcgccctgcgccttggccccagacgatcaggcttgccggaggacgccccctggggaccccgagggcggggtcgttgaacggccgccaggttctcacattcagaattctcctgccaccaaagagaacctgaagttcatttacaagttgacgagcgggatacctacatgg

SEQ ID NO: 106875 - DNA, 1391 bp, Homo sapiens; identical to SEQ ID NO: 38166
  chr2:169312408-169313799
  hyper

SEQ ID NO: 106876 - DNA, 30 bp, Homo sapiens
  chr2:169998584-169998614
  hyper
aggcttttccagcaccggatgctagttagg

SEQ ID NO: 106877 - DNA, 1222 bp, Homo sapiens
  chr2:170218318-170219540
  hyper
ctctgggggtcaccgcgggaccaagtttcgccggtggtgggaggagtgctctggcccgcggccctgggcgcgcgaagggatcccgggaggggcgctgcaggtggaaagctgcgctctgagcagagcccgggaccgcgccgcccagcagagaactccgctagggagggcaggctgcaaacggcggagaacctcgttctcccgcaaagtgctttccaggagcatcggaccaacgcccgtgggaacaaagacagggtctccgtggggtgcgctgtcaccgaaactggcggggctgctttctcaagtttgctgccgctcagttcctggcgagcgaagaggggcgctcccgctccggcttcgcgaagcaacctgagcgccccaccgggagcagctcccgcgccgccgcccggccctagcccctgcccggacgctctcccctccggcctcccgcggacccgaccctgccacagccggggaagtgggggctccacgagaggctctggctgggctcttaccttggccactggccggcgctaggcaggcgacgagagccaggagcagcgtgcacgccactgctgccggcccgcgatccatctccgcgacggtccccggcctcgccgttccttccccgggaggtgggcgcgcgtagcacaccgcaccggcagcgcctctgctagcgaacgctcctttaggtctgcacctccgccagctcctagtggccaaaagcctgcccccacgcccgaggcatcccgttttctacccgcgccagtccccaccctccagacagtgcataaagccctttagacccgaccgccccggaacaagcatgcgggaatccagcgggcaggccccctgccgcccggcccgccccctgcactttgcagcgcggggaggagtgggcactcgaacacacgcgtgctcacacagggacactcacacaggcgtgtgcacactcacacacgcactcatacaggcgcatgcactcctaagtgtcacaccaactgacacagattcactcatacacgccagtcacacacgcgcgcacattccacagtcacacttcaacgccgacatacacagtcccctttacgcgtgcatacaagagcacactcctgtgcgcacactctcacaggcacactcacacgtgcacacgcgctgccctcgcctctccgcagggtttgccccgcacagaagccggcgaggcggctcacggggaaatctgcac

SEQ ID NO: 106878 - DNA, 537 bp, Homo sapiens
  chr2:170219962-170220499
  hyper
ttgaaaaagagcgaacgtcttctccatggttccggtacccttttataagaaggagaaacacgagaggttcagggaacccctagcctcccttctttggggccgctttggacaggctggcaaggggcccggaagccaaaagcacaagtggccttacacccgccctcagcgcacgtcctcagcctgtacgtgacatcagagcccacagggaggggtaaaaaaggagggttgatgcaagttatttcccggtggtgggaaccctgtgtgagaaggggctgtttgcgggcctgaggccatcccatcatctccagctccagcccctgaaccagcgcggcagctagtcccaggctccggatcctggtccaagaagtcaggagccctttccctccagcgaaggggccgtgacgcatggaggagacagccctgaacgcacgtggtcgctggacaggttcccgctgcctcccttccccaggggcgagaacctgccaattactgccagcccctttccccggggcacaggtcgtccggggctctgctgac

SEQ ID NO: 106879 - DNA, 30 bp, Homo sapiens
  chr2:170335879-170335909
  hyper
ctcgcatctcaaatcggcttaacgacgcga

SEQ ID NO: 106880 - DNA, 30 bp, Homo sapiens
  chr2:170336152-170336182
  hyper
aaccctgtagagggcgccgccgtgcgcgtt

SEQ ID NO: 106881 - DNA, 205 bp, Homo sapiens; identical to SEQ ID NO: 38169
  chr2:170430255-170430460
  hyper

SEQ ID NO: 106882 - DNA, 30 bp, Homo sapiens
  chr2:170440790-170440820
  hyper
ggagggcgtggtgacgcaagcaggtgaacg

SEQ ID NO: 106883 - DNA, 30 bp, Homo sapiens; identical to SEQ ID NO: 38170
  chr2:170441039-170441069
  hyper

SEQ ID NO: 106884 - DNA, 30 bp, Homo sapiens
  chr2:170441521-170441551
  hyper
ctttcctcctctttcgaccttttcctctca

SEQ ID NO: 106885 - DNA, 30 bp, Homo sapiens
  chr2:170550794-170550824
  hyper
agcgccgtccaaaccgtaccagcatctctg

SEQ ID NO: 106886 - DNA, 30 bp, Homo sapiens
  chr2:170590475-170590505
  hyper
gcggcactagctggcggcttccgagcgcct

SEQ ID NO: 106887 - DNA, 88 bp, Homo sapiens
  chr2:170655248-170655336
  hyper
tttgggattgagggcgggactccagggtccctgggaggccccggcagccgcgcatgctcagagcacagggaccgctccacctcgtccg

SEQ ID NO: 106888 - DNA, 86 bp, Homo sapiens
  chr2:170655874-170655960
  hyper
gggcacggggtaaacgccggagggttctgtggagcctatgggactgactggaggccaaagaactttgggccgcagatgtacaccag

SEQ ID NO: 106889 - DNA, 30 bp, Homo sapiens
  chr2:170680994-170681024
  hyper
ctacctgcaatgtgcggcctggtaggatac

SEQ ID NO: 106890 - DNA, 30 bp, Homo sapiens; identical to SEQ ID NO: 38173
  chr2:170681256-170681286
  hyper

SEQ ID NO: 106891 - DNA, 30 bp, Homo sapiens; identical to SEQ ID NO: 38174
  chr2:170683892-170683922
  hyper

SEQ ID NO: 106892 - DNA, 30 bp, Homo sapiens; identical to SEQ ID NO: 38175
  chr2:170685038-170685068
  hyper

SEQ ID NO: 106893 - DNA, 30 bp, Homo sapiens; identical to SEQ ID NO: 1934
  chr2:171300632-171300662
  hyper

SEQ ID NO: 106894 - DNA, 1039 bp, Homo sapiens
  chr2:171567966-171569005
  hyper
cctgcgattcagtgccgcattagcaccggggaaattctgtccccaccctcccagaacctttagtatagcaacgatttaactaggcagatatgggcaactgcaaaattgagtctccttggcaaggagtggggagatccagccgattaagcaacatcttactgtgaaaggccaaagcattaagaatttgctgaaatgatctaaataatatctagatttttaaaaaatctagcttgagaggggtgactctctggttggatttatgccagaggcatgcgtcccttctagctgcaagaaaatgcccgaggcgaggtaccaagcttgggctggaagtagcaacccctgacttaatcccagagcgcgcagagctggtccgtcccctgcgcaagtgtcactgcgggttcacctaccggcctcttcctctcgcaggtggcatgcagtcggcgctcgccgcccgcccgcaaagaaacggcaatgcaaacttcccagcctgggaaccccgctgcttggagagcagctccgctgtgccagccgccgccaggagactggtattcaacctccccgccccccgccacggttaaagtttgctccacattcgcagctcccaccccacccccatctccgccccgaggcaggaggaccacataggagttcctgggtccaccgtgcgcaaacacacccaccaacaaaagaaagcccattaaatcttccctcctgtgaactcgcgccccaacggatacctctttgaactgacccccgcccccgcagcccccgcgctgtctggggcgcgcctggccctcccgggcttactctctcccccacagctgcgcacttttgcagcgcgctcggtctttgatgtctctttacattatggcagagcagccacacgctcttcccgggcgcggggctttgtgtaatggaactgacatttggccttgatacctgtatctcttggtgattacaacaaatttctaaaataaatattgtactttgatctcccagcattgcatttttaatggacgctctcaacattacttcatta

SEQ ID NO: 106895 - DNA, 131 bp, Homo sapiens; identical to SEQ ID NO: 38178
  chr2:171569930-171570061
  hyper

SEQ ID NO: 106896 - DNA, 8 bp, Homo sapiens
  chr2:171570181-171570189
  hyper
cgtccgtc

SEQ ID NO: 106897 - DNA, 2241 bp, Homo sapiens; identical to SEQ ID NO: 1938
  chr2:171570470-171572711
  hyper

SEQ ID NO: 106898 - DNA, 49 bp, Homo sapiens; identical to SEQ ID NO: 1939
  chr2:171627263-171627312
  hyper

SEQ ID NO: 106899 - DNA, 632 bp, Homo sapiens; identical to SEQ ID NO: 38182
  chr2:171627346-171627978
  hyper

SEQ ID NO: 106900 - DNA, 550 bp, Homo sapiens; identical to SEQ ID NO: 38183
  chr2:171669896-171670446
  hyper

SEQ ID NO: 106901 - DNA, 422 bp, Homo sapiens; identical to SEQ ID NO: 38184
  chr2:171670471-171670893
  hyper

SEQ ID NO: 106902 - DNA, 460 bp, Homo sapiens
  chr2:171671329-171671789
  hyper
tttcattggctaaaacgttaggggtgttttgaactctggggtcaaaggaggaagtggttggaaatgtctcaatctcgtgccacaggtgaagtaaacgaatcttcctttccagggaatcacgggttttgggaaaaggttgaggcgagcgggcgtctatgctggacaatgaagaacgaggggcaccgggagatgtgttgcctcctccttcctgtctcctgccccgtgcgtcttgaatgatttagcactggcacctggctccctgattggtgcgagcgtctcgtttagggaaggctctaggagggccggtggatggaattccgagcttcacctggttgtatgccgcccacttcaagcagcgcagagcagctgccggttgagtggtttggggggacgtttcctacgtggagcagacacccccagcctgtccagccccaagcctcagtgcccggggctgcagtca

SEQ ID NO: 106903 - DNA, 372 bp, Homo sapiens; identical to SEQ ID NO: 38186
  chr2:171671799-171672171
  hyper

SEQ ID NO: 106904 - DNA, 2289 bp, Homo sapiens
  chr2:171673093-171675382
  hyper
tttccctcctctcacccgacagcctgcctatttccaaaggaaaaaaaaaaagcgtgttgagtacgttctggattactcataagaccttttttttttccttccgggcgcaaaaccgtgagctggatttataatcgccctataaagctccagaggcggtcaggcacctgcagaggagccccgccgctccgccgactagctgcccccgcgagcaacggcctcgtgatttccccgccgatccggtccccgcctccccactctgcccccgcctaccccggagccgtgcagccgcctctccgaatctctctcttctcctggcgctcgcgtgcgagagggaactagcgagaacgaggaagcagctggaggtgacgccgggcagattacgcctgtcagggccgagccgagcggatcgctgggcgctgtgcagaggaaaggcgggagtgcccggctcgctgtcgcagagccgaggtgggtaagctagcgaccacctggacttcccagcgcccaaccgtggcttttcagccaggtcctctcctcccgcggcttctcaaccaaccccatcccagcgccggccacccaacctcccgaaatgagtgcttcctgcccgccctagtccctgctctccacgggtgcgctgcgcagggacccccccccccccgcctccctcgtcactcttcttatccctgccctccggattcacgccccggggaagcacggaggctgaggctctagttgaagtggggcaagagcgattttcccttgagcttccatgctgcgagcgcctgtccctccaaagggcgcctgggcagcagcagccgaaggcgctactaggaacggtaacctgttacttttccaggggccgtagtcgacccgctgcccgagttgctgtgcgactgcgcgcgcggggctaggagtgaggtcggagggagggtgtggaggcgatggccggtgggcccttctctgtggggtcctcgatctacccagattagcccgcaatctctctgtcccggggccttcgggcgccatcgcgccagcgccgagagtcgagcaggggcgccgcgcaagatctttgtccgccgcctcctgcgcgctgcgcgcaagttcgtttccccggtgacgttccccatgcttacttaccccaccctctctggatctgtaccgcgagaaatctggggtcctcagggggctaggtagaggagaaacgctgaaaccggaccgaaacctcgccctaggcttagcgatggctaaaaaccggctgggataagagggaggcaagcaacattccgactcgctgctttctggctgtctggagtgcaaggtgactgtggttcttctctggccaagtccgagggagaacgtaaagatatgggcctttttccccctctcaccttgtctcaccaaagtccctagtccccggagcagttagcctctttctttccagggaattagccagacacaacaacgggaaccagacaccgaaccagacatgcccgccccgtgcgccctccccccgctggcccacacgccggctgctgagtgcccaatggggcttgtagcggctcggctggaaaatcgctcactgagcgctcccctgtgctcctagcctagtcccccacacccttgcgtcttgtactggccttggacccccaccccgaccccgaccccgcctcgtctcggcgcttcactccaggtcgcgccgatgcaccgccagactcgagagcggcccagggctacgctccctgcgccccagtaccggagctagcgcgcacgtctcctccgctgcccccacccctgcgcacccctaccaggcaggctcgctgcctttcctccctcttgtctctccagagccggatcttcaaggggagcctccgtgcccccggctgctcagtccctccggtgtgcaggaccccggaagtcctccccgcacagctctcgcttctctttgcagcctgtttctgcgccggaccagtcgaggactctggacagtagaggccccgggacgaccgagctgatggcgtcttcgaccccatcttcgtccgcaacctcctcgaacgcgggagcggaccccaataccactaacctgcgccccacaagtaggtcccgccccaattttctatcaaatgaactgcagggaagatgggggcgctgggacgtcgggaggctgagctggcggaaagggaagggggagcgcggagataatggaggctgggaaataaatggggctctgaccccgtccctgccagaggtcattcggctgtcagggacgctaggtgactcccagggcaccggaaa

SEQ ID NO: 106905 - DNA, 15 bp, Homo sapiens
  chr2:171675522-171675537
  hyper
cggaatgaagagcta

SEQ ID NO: 106906 - DNA, 30 bp, Homo sapiens; identical to SEQ ID NO: 38188
  chr2:171677516-171677546
  hyper

SEQ ID NO: 106907 - DNA, 150 bp, Homo sapiens
  chr2:171678072-171678222
  hyper
tcttgaactcttccacgaccccatttcatgccagtttattttaagctgccactaggctggagacccgccaagaaattatgagacgtttcggtcccagatgcctgtgttccctttctgggctgctgtggtcgccctttgagtctgcggggc

SEQ ID NO: 106908 - DNA, 59 bp, Homo sapiens; identical to SEQ ID NO: 38190
  chr2:171678293-171678352
  hyper

SEQ ID NO: 106909 - DNA, 30 bp, Homo sapiens; identical to SEQ ID NO: 38191
  chr2:171679350-171679380
  hyper

SEQ ID NO: 106910 - DNA, 18 bp, Homo sapiens
  chr2:171679655-171679673
  hyper
gcgggggaagattaacgg

SEQ ID NO: 106911 - DNA, 30 bp, Homo sapiens
  chr2:171785472-171785502
  hyper
ggcgagcgggaacgcgtctgcataaatcta

SEQ ID NO: 106912 - DNA, 30 bp, Homo sapiens
  chr2:171785807-171785837
  hyper
agcagcgcggagcccggctcggccacaccg

SEQ ID NO: 106913 - DNA, 30 bp, Homo sapiens
  chr2:171786301-171786331
  hyper
gaaggcagcctttgcgctttcctaggagag

SEQ ID NO: 106914 - DNA, 251 bp, Homo sapiens
  chr2:171830078-171830329
  hyper
cggggactacagtgcgcgccacgggccaccaggtggcgccgggagcctgggaaagccgcgccccgccagcggccgcggggtctccgggccgccctcgcagggcccctgggcggggccggggcgtcgcggtggggcgctttccgttctttggaagaagggctctggtcccccgctttctttccatctcagacccagtgcggaaacgtgggggatgagcctgggcgccttcaccaaacggaaccccctttaat

SEQ ID NO: 106915 - DNA, 30 bp, Homo sapiens
  chr2:172016648-172016678
  hyper
gagccgggcggcctcgcgtccacctcgcca

SEQ ID NO: 106916 - DNA, 33 bp, Homo sapiens
  chr2:172017401-172017434
  hyper
gcatcagttacaggcggcggcggcgtcacgcgc

SEQ ID NO: 106917 - DNA, 76 bp, Homo sapiens; identical to SEQ ID NO: 1943
  chr2:172289936-172290012
  hyper

SEQ ID NO: 106918 - DNA, 30 bp, Homo sapiens
  chr2:172290549-172290579
  hyper
cggagacctggaggcggcagcaccgcgccc

SEQ ID NO: 106919 - DNA, 159 bp, Homo sapiens
  chr2:172291204-172291363
  hyper
gtgtgccaggtgaccgccagccggccggggcgggacggagggccgcgggcgcgcggcggccgagcctcctgcggggatgcggttttaacgcgctggggcctccctttatagggtcacatgtgatggggaggaggatacaagcccggaatctgggatagg

SEQ ID NO: 106920 - DNA, 172 bp, Homo sapiens; identical to SEQ ID NO: 38195
  chr2:172378954-172379126
  hyper

SEQ ID NO: 106921 - DNA, 891 bp, Homo sapiens; identical to SEQ ID NO: 38196
  chr2:172379338-172380229
  hyper

SEQ ID NO: 106922 - DNA, 153 bp, Homo sapiens
  chr2:172543931-172544084
  hyper
cactgctcgtcgcacgcaggttttccttgttgccggggtttgtagttcttctcgatcgtgtcagtttgtaaggcgagggcggaagttggattcctggcctgagaatattaggcgtagttttccagtttttggcaaagcggaaatacttaaggc

SEQ ID NO: 106923 - DNA, 30 bp, Homo sapiens; identical to SEQ ID NO: 38197
  chr2:172544321-172544351
  hyper

SEQ ID NO: 106924 - DNA, 30 bp, Homo sapiens; identical to SEQ ID NO: 1946
  chr2:172544758-172544788
  hyper

SEQ ID NO: 106925 - DNA, 457 bp, Homo sapiens; identical to SEQ ID NO: 38199
  chr2:172750646-172751103
  hyper

SEQ ID NO: 106926 - DNA, 30 bp, Homo sapiens
  chr2:172778864-172778894
  hyper
cgggctcctggacacgcctcctttaattgg

SEQ ID NO: 106927 - DNA, 30 bp, Homo sapiens
  chr2:172864599-172864629
  hyper
ccatcccacctgggcgcgggggctcagagc

SEQ ID NO: 106928 - DNA, 307 bp, Homo sapiens
  chr2:172945904-172946211
  hyper
ccccacacgcacgcacgcacgctagaccgtttgctgcactaggaattcgagcttgggccccactcgcccaggtgtgaacagtggctgattagtgggcggtctagtctctaaaatgacccctccccagactggcccttctcgcatcgggacccgcgcttgcacgctgcaggagccgcaaacgtcagctgttctggaaaccgagagggtcccagagagaggagatacgggcgcatttgagagcaagggcctacttggccgggactgaagcttgcgagttgagctccagttcggccggcagttccatccc

SEQ ID NO: 106929 - DNA, 30 bp, Homo sapiens
  chr2:172947297-172947327
  hyper
tccagctgaactggccgaaaacctcaccca

SEQ ID NO: 106930 - DNA, 344 bp, Homo sapiens; identical to SEQ ID NO: 38200
  chr2:172947569-172947913
  hyper

SEQ ID NO: 106931 - DNA, 138 bp, Homo sapiens; identical to SEQ ID NO: 1949
  chr2:172948183-172948321
  hyper

SEQ ID NO: 106932 - DNA, 31 bp, Homo sapiens; identical to SEQ ID NO: 38202
  chr2:172948709-172948740
  hyper

SEQ ID NO: 106933 - DNA, 102 bp, Homo sapiens; identical to SEQ ID NO: 38203
  chr2:172949180-172949282
  hyper

SEQ ID NO: 106934 - DNA, 1399 bp, Homo sapiens; identical to SEQ ID NO: 1951
  chr2:172949348-172950747
  hyper

SEQ ID NO: 106935 - DNA, 590 bp, Homo sapiens; identical to SEQ ID NO: 38205
  chr2:172950952-172951542
  hyper

SEQ ID NO: 106936 - DNA, 304 bp, Homo sapiens; identical to SEQ ID NO: 38206
  chr2:172951779-172952083
  hyper

SEQ ID NO: 106937 - DNA, 149 bp, Homo sapiens; identical to SEQ ID NO: 38207
  chr2:172952393-172952542
  hyper

SEQ ID NO: 106938 - DNA, 42 bp, Homo sapiens
  chr2:172952839-172952881
  hyper
gctccccacccgtgccgcccggctggaaccctaactcttcat

SEQ ID NO: 106939 - DNA, 103 bp, Homo sapiens
  chr2:172952992-172953095
  hyper
cgcccgtctccttcttgtctccccggcccaggtccctcccgcctccaggtccatccatcccgtccggaaaagaaggacccagagggaagaaggaacagtggag

SEQ ID NO: 106940 - DNA, 17 bp, Homo sapiens
  chr2:172953124-172953141
  hyper
cgcgaggtccggcccag

SEQ ID NO: 106941 - DNA, 168 bp, Homo sapiens; identical to SEQ ID NO: 1954
  chr2:172955234-172955402
  hyper

SEQ ID NO: 106942 - DNA, 474 bp, Homo sapiens; identical to SEQ ID NO: 38211
  chr2:172955471-172955945
  hyper

SEQ ID NO: 106943 - DNA, 366 bp, Homo sapiens
  chr2:172957707-172958073
  hyper
aaagaaatcctcctccggtccccagctccacaacaaacccctagctccagcgtagacagacaaacggctgtaaaaagtgccttccccaggctcaagaaacatgtcacccccacccaccgctttcctaccccctccctcatcccccaatcttcgaggattaacacttcctgaaacatcaagtgtttttataaaaaggaaaaaaataatcctgacatcgctgacaagaagttttgatggaagaattagctggtgcatacataatcactcccccaccctcctactcccggagcgggagccacggcggcgggcgcagcgcagccttccaaccctctgaaaaatgaaaccggtttccacccttaccttctt

SEQ ID NO: 106944 - DNA, 179 bp, Homo sapiens; identical to SEQ ID NO: 38213
  chr2:172958321-172958500
  hyper

SEQ ID NO: 106945 - DNA, 190 bp, Homo sapiens
  chr2:172959061-172959251
  hyper
gaatccttttccccgcgtacctgctctccccagttgaatgcccgggaggccccgaggggctccccaccctaaaagcagcaactgagaaagtgactgaaccggataccccctcctgccacctcctcctttctttttctttcctgttcccccctcctccttccttcggccccattcccggattctggcaaac

SEQ ID NO: 106946 - DNA, 1329 bp, Homo sapiens
  chr2:172960504-172961833
  hyper
atcctgctagaggccgccagtccccgcaggacctagtgccctagcgccaaggctggaagtaacgcggcccccaggatagcgccccatcctacagcttctaggattcctggaccccaaagttgaattcgaagggaaaggacctatctgtatttttggaggaggagaggatctgtagcttaattctcaaaggagtctccgaccctaaacaggttaaagccactggtggtcgctgttccatggagggaaaggagcgggcttttgacttttgagcgagttcgggggacgccaggagtgggggagttgcactcgagttttactgcccgtaagaacgactttttgagaggggacggggcttcttgctcccggacattgttctcttgggcggaggggaccacttcagagcttctctttgcacccgcctcttctgcccctcgtcttctaccactgaactgtttgtaaacaaagttccagtcttcccccgctctctccgcctccaccaaaccggtatttctcccaaattcgctccatcagtctgggatcgttacacagggcggatattcacaattttcacaagtgatcctgaaagaaggcctaggggaagcctcctaaacggtcccacattgcagcagggctggtgaggcctgggatccattctctctcttttctgcccttcccatcccggagtctcggggccggcggcgggaattccgcgcagccggaggggggtctgcgcccagcggagcgccgtgctggggcgaggtggctgtgggcagagcgtgcaccggggttggggggagaaggggattgaaggggcggggggcgcgggagtacctgggcggcaggcagttggccctggagctcagtgcccgcgttctgcctgagttgggagagccctgccagagggtggagcggagagggccgtgcacccctcactcttcagcttccctccccctgcttcccagcgcttgtcatatcctgtctctggcctgatatttcacgcgagcaattggaaggagattacaatggagatttatgtgtgttctgagcactgctagtttcccagcgtagagagccgagatcgctgcttcccatttccatttttcattcgcgctttggggagctcagtagagcacggggggagcgtgtctgcgcggcggcgggctgatcacaggactccgcgtctccgggcgggccgggagactgtgagaaaggcttgccagcgcgtcgcccccggcggggctggagccggcccccgcctccaggagccaggctttgtttcctcccttgcctacccctccccctttccgccccctcatttctgggacctgg

SEQ ID NO: 106947 - DNA, 271 bp, Homo sapiens
  chr2:172961876-172962147
  hyper
cggaaacacccccttcctctggccccttcaccctcctgctctcggcttcgcaggctccctggggaaaggcacaccgtggcccggcccgaccctgtcgtcactgggtgccgggtaaggtgactccggcgagtctgtggggcctcagcccaccccggagctgggagctcccgccctcccgactcccaggcttggctcatgccaaggcctgttgcgtgattccaacttgggctgacattccctgccccgggctctccagcgtaggcctcttaat

SEQ ID NO: 106948 - DNA, 551 bp, Homo sapiens
  chr2:172963628-172964179
  hyper
gctcgagcacggccccgtgtcgttggggtcggcttgcattccagagcagccagccatgcctcccgagggtgactcacagagctctcagttcagtcccgaagggcggtgggacaaacggaggggaaggttcaaagtagggttccgaccctcaggctgctgcagagctcaggtccctgacaggaggtcccccgcggcggctggggtgccgagcctggccatctaggcgggcgcgggggcggtggcgccggcgccggaggggcagggcaggcggaggctggagccgctccgcgctgagtgagtcaccccgccgccggccggagaatccctcgcggggactcgggagggggcggggcgtgaaacccccggtgcggccccacgcccagcgcgcctgtcctctccttgccgcacctcgcggtgtcgcagcctcggaaagatgtaaacgtagctctcggccggctggcttcccggcctgggcagcggcttgagctctgagcacgtgactgaccggaccctggcaccaagaaaaaagcgcacacatccaatgaaaacaa

SEQ ID NO: 106949 - DNA, 224 bp, Homo sapiens; identical to SEQ ID NO: 1960
  chr2:172964664-172964888
  hyper

SEQ ID NO: 106950 - DNA, 3 bp, Homo sapiens
  chr2:172965295-172965298
  hyper
ggg

SEQ ID NO: 106951 - DNA, 115 bp, Homo sapiens; identical to SEQ ID NO: 1962
  chr2:172965647-172965762
  hyper

SEQ ID NO: 106952 - DNA, 1268 bp, Homo sapiens; identical to SEQ ID NO: 38220
  chr2:172965958-172967226
  hyper

SEQ ID NO: 106953 - DNA, 389 bp, Homo sapiens
  chr2:172967605-172967994
  hyper
cccgagcggctttacgattgtctgccaggcgggctcctgaagtgtgggcatttaacactcgtcacgtgagcgctggcgacgtcacctagcaacagccaatcagaagcaaacggccgcggagctccgggaacgcccggccaaggggcgggcgtcacatggtgggcgctgtggctgcggctgcggctgcagcggccccaggtgcaaacagactgccgccgaatgtgagcagcgaggcgaggggtcgaggtagcgaggagtcagggtggcccgcagcaggaagacagaaggcgtggagacagactggcgttttgcctcagaggaagaagtggggtcccctctcccattctgtgagcaagtgccagttccagtgattcgtactttcatgtccg

SEQ ID NO: 106954 - DNA, 227 bp, Homo sapiens; identical to SEQ ID NO: 38222
  chr2:172968669-172968896
  hyper

SEQ ID NO: 106955 - DNA, 605 bp, Homo sapiens
  chr2:172971055-172971660
  hyper
ggcgctttgctctgccgggctattgggcgtcctccgctgcacagaaagccagcccagttgggtattactggggagaggatgcctcctgtcggcagggagctagggtgggcgcccgggtgccctcagtgcgtggcggggccaggcccattttcactctccttcctcactcgggggatgggagggctgcatgcgctgctgctcctactcctcacagtctcgtcgagggtcccggagacgggagtttccgggccgctggtccaagaggcaatgccagtttcggtacctttgtgttttcgtccccgaagtagtagctctaggaacctgcgctttcgaatccctttggggtttgtcctaaaactcaaagacgttggaagagggcggggatttggttatgagaacctcccagctcagcctttgcgaccaaacccgcagtgcttttgttcttacttcattggctaattgcagcttcttgggacaactctggctgggtcctttcgcattgctggtctcctcaacctgattttccctgcgacccctaaggcagcctcgagggactccgggagccatcagctctccgcagccccttgggccggcaggcagacgcg

SEQ ID NO: 106956 - DNA, 35 bp, Homo sapiens
  chr2:172972855-172972890
  hyper
cacacttacttctcccgggcctggtgctgccagct

SEQ ID NO: 106957 - DNA, 299 bp, Homo sapiens
  chr2:172972930-172973229
  hyper
cgaccgcgcccctctctccccaaagagagtcctggaaggggggttcccctgggagaggaggaggcccgcccggctgcgcagagggtagccccgggaagattcctgaacagactcgagcctctgcggagagggcgggatgcgggtgccccctggcttggcacgtgaagccaagcttgaggacctgatgttttgttcccgctgggattccgccccaagttatctttgctccctgctggggtgtaagtaaaccccaggggcttgaaccgaaatcatcggttactcgacgcttccagccgtgg

SEQ ID NO: 106958 - DNA, 125 bp, Homo sapiens
  chr2:172974001-172974126
  hyper
accatttgtgcccggcgttccggggggaccgggagggggctgtgcttggggggcggcggggcgggggactggaagcgagggggtaagtgtagcagggaggggaacgtcgccggggggtcttggac

SEQ ID NO: 106959 - DNA, 30 bp, Homo sapiens
  chr2:172974722-172974752
  hyper
taccgcgacactcggcgttctcgggcctca

SEQ ID NO: 106960 - DNA, 457 bp, Homo sapiens
  chr2:173037292-173037749
  hyper
ctgcaggtgagggctcgggcggtggcgggccgtggtccggcgcagtttccccgcggcccgctgggtcgcactgtggccttaggaatgtgggccggggcggggcggcttgggagcgcgctgcagccaacgccgcgttcagccccgggcgcaactgcagccgtgccgggggcctccggggccccgaccgaccgacagctctttcagaccgcagcgaagtttgcacacacgacagcacgtcccggggctaggatcttgcccgcctgcggggctgacctgcaccacccttggggaagcgcgaactgccgccccgctgccgggagttaggcgcccgggcctgggtcgcccccacagacggctcggacggcacgaacgagcggaccccaaggatagtgggctggggaggggtccagtcgtggtcacggaaacgggtggtcctcgcgccgggctgcactcattc

SEQ ID NO: 106961 - DNA, 784 bp, Homo sapiens
  chr2:173099597-173100381
  hyper
gggggacactggggggagcagcggcgggcatctggaggcatcgggggacagcgggggacattgaggggcagtgagggcggccgagttgtcggcggtgggcggcgccgggggagccgcgctcggggacagctggcggctcaacggcagcatcggcagcatcgagaaaggtgacgagttctgcaaataacagctgcggagcaatcgttatgtttggacaacgtgggaagggccattgttcacaaattgttctcttcaacaacacctgcatgcacagataataatccattgtcggtctccggcttcaaagacaaaaggcagccgcggagggaggagtcagcagagcctggagataacaggaccactttgcaaccggggagagtgcaaacgaggactccaagtcgcgtcccgggtctgccgcgacggtcgctcaccgcaggggtctccttcctcttctggcagcgagtgcgacctcttttatcctagcaggccaccaccttcgcggcaacaaacatcatttcctatgcagttgcaaagcatgctcccttgcaatcagcgatcaatactggcaaagtggctccaggataggaaaggtcgcacgtgtgttggtaaatggaaaggtttatgaggcgcaggtggtcgtgctccgcggagattgtggtattagcatgtcaaagacaaaacggaaccaaggtatacaggcacagagtctcttcctggggctccgggaaagcttggcacgaccctcttgagccttcagtttaaaatgaaacgctggcgccagatg

SEQ ID NO: 106962 - DNA, 39 bp, Homo sapiens
  chr2:173292253-173292292
  hyper
gggaggggcggggccggcgtcctcgtcacttgataaaac

SEQ ID NO: 106963 - DNA, 381 bp, Homo sapiens
  chr2:173292961-173293342
  hyper
taaacaaagtgctttccgccggttcttccctccgggcgtgtttgctgggaccccggcaggtggcacgctttgctgagcttcacgtgtgtgtttggggctggggtggcgttcagggtcaccgcagcgctgctgtgggtttgcagggagcgtagttccaggatggtctaggcctttcccaaactcacggtgcaccccgtctcccccgcagactggcgcgccccgcacaagttggaaagccactttccatgtgtcctgcatgactttctcagcaaggcgggggcgctccttaggagatacttttacatgcctttgaaaaaaaaaaaaaaaaagatgggggtgggggcgggaattaaccaaacacctgttcgctggactagatca

SEQ ID NO: 106964 - DNA, 30 bp, Homo sapiens
  chr2:173420376-173420406
  hyper
gtgtgcaagcggaacgccgccctgtccttg

SEQ ID NO: 106965 - DNA, 30 bp, Homo sapiens
  chr2:173420874-173420904
  hyper
cggcatgaggctggcgcggctgcttcgcgg

SEQ ID NO: 106966 - DNA, 30 bp, Homo sapiens
  chr2:173478815-173478845
  hyper
gctcgcgggtgcagccgtgaccgccctccc

SEQ ID NO: 106967 - DNA, 1068 bp, Homo sapiens; identical to SEQ ID NO: 38227
  chr2:173600369-173601437
  hyper

SEQ ID NO: 106968 - DNA, 320 bp, Homo sapiens; identical to SEQ ID NO: 38228
  chr2:173940415-173940735
  hyper

SEQ ID NO: 106969 - DNA, 30 bp, Homo sapiens
  chr2:173941030-173941060
  hyper
ggcgcctggaggcgcgggcgcaggccggag

SEQ ID NO: 106970 - DNA, 30 bp, Homo sapiens
  chr2:174075461-174075491
  hyper
ttcatctctgctcccgatagccgtgggcag

SEQ ID NO: 106971 - DNA, 104 bp, Homo sapiens
  chr2:174147822-174147926
  hyper
aggaggcaccgcaagcgaggggtgcaagggctgccagcacactgccacctctcgccttcacagctcactgcagcctcagcctcccgggctcaagcctcagcctc

SEQ ID NO: 106972 - DNA, 71 bp, Homo sapiens
  chr2:174219194-174219265
  hyper
taaacgccatggtgcgtgacccgcgccaccctcacgctgctctcctttaccccccagactccacttttcct

SEQ ID NO: 106973 - DNA, 1062 bp, Homo sapiens
  chr2:174219326-174220388
  hyper
cgcgccactcgctcaggaccgcgcagctgcacaaggagagtggtccccgtagcccctaaagcccccctttctcaaaggggattttaggagtgcccaaggctatcctttgaggtcagaatatataggggggtcgtgttttttccagggggccacctagtcttgcgccatgtctggccgttaccacagcttgcaggacctgtgtcccaacgcgggaaagacagcccgagccccgcccctccgggcccgggtcggcgcgcccagcctgccagccgcgctgctgctgctcctcctgctgtgggaccgctgaccgcgcggctgctccgctctccccgctccaagcgccgatctgggcacccgccaccagcatggacgctcgccgcgtgccggtgagggctgggcgggcgaacccgaggggcgggcgcggtgggtgctggacgcaggcgggcgcgggccgaccctctccaactccgcagcctagcgctgccttaactggtggcctgcctaggcgttgcccgcttgggcaagcccctgattttgtgcacctgggataactgagggccatggggacgttcctgcgtggcgtgcgcacccgaagtgcgggcggcgtggagacttgagtcgtttgcaggatggctagcagcgctggaaagccctaggcacgtgcgtccgccaaaggccggacagcggccgggagcgctggccggtcccgattttgcctgccaggcagagccagcctgcctgccccctgggaggttgtcccgcagcggcccagccctttcccgcacacaactcggagccagtgcgtggctcgccgcgtctatacccgcgctcagtgggtggcccttgggcgcgcaccccgcccggcaagagacgcgtccgcttctaaccgctgagggccagcgcgtctgaggtttaaggtcttgcgaaccggtctcctagaacttgggctgcgcacgcagtgtgaagcgaccgtagtcccgggcggtggttaagtgcatttaaagggcttggtgggtcaaagcgttcgccgaccatttgctcgtttcctacttcctccacccc

SEQ ID NO: 106974 - DNA, 30 bp, Homo sapiens
  chr2:174220590-174220620
  hyper
gtgggtgcgatggggcgtggtttcagagct

SEQ ID NO: 106975 - DNA, 218 bp, Homo sapiens; identical to SEQ ID NO: 1972
  chr2:174349950-174350168
  hyper

SEQ ID NO: 106976 - DNA, 30 bp, Homo sapiens
  chr2:174830503-174830533
  hyper
gctcttggagccgccgcttccctgcgctgc

SEQ ID NO: 106977 - DNA, 30 bp, Homo sapiens
  chr2:175113572-175113602
  hyper
tccgtctggctgcgcggcctgggttacctg

SEQ ID NO: 106978 - DNA, 1244 bp, Homo sapiens
  chr2:175190728-175191972
  hyper
tacgtccgacttgtccgggaatggagcagagaaagaggaaccagaagaaagagaaactcgcgacaacagagttgccgaaagagaagtgttggcgcctcaaacttgaggatcagcttcttgggccccactccagggtgtcgcgggggtcgggttctttccgccgccccccgaaagattctcagctaaccctttccccgccgagaccaagaggccctcactctgacaccactccgggagccaagctactgtaaggagctgataccacccctcgccggcgcgaaccgcccatctccccagacccgcccaccccctgctgcgaatccctgacgttctagcccggcgaaggtcctcttaaattaggaaacaatagctatttaagaagaagcgcaaataacccgcgctctgcgcgcccaatcgtgggattcttgggagttccccgcgggcaaggaagtctgctgctccccgcagctgcggaggagaggagggagcctgcgtgctggggcagggtgtcgcgaacttggggcaacccacctccagagccccgcccccgctttcccgcctgccggggacctgccgaacgcggaaccaccctccttcctgaggcaaatttgggaggggagaggtccagaagctgtagagtcggggcgccaagcgccagattctgccgctcggaagttgggggcagtccccagtcccgcctcaggcccccgcgctcacagggcgctccgccgagggcgcgggccaggcgcgcggtgtcacctccacgaagtcatttacttgccctgaaggagctggccctcgaccccttggaggatggagattcctcccattccctcctccgcctcccccaggtcggcgaagagacgtggaattgagctggaccgatgattccgcgagctctgtaattatgcacacactgaaatcttcaccgttgacttaagttacttggcgctgcgagggctggggccctgcatattgattaaatgcagcctctatttacctaaacaataaatgtagagattagcaacgttcacttgatcacaataatgggattgacaattaaggggcaatgcatcccagatgtagcggaacctatgggctgcgtgcagcaggcagagggcttctcagagaggggcgctgggcagttgcggcggcggaggtagtgcagagcaggaagcagcgcggaagcacagcgggaggcggagggggacgcccagcctcgtcaaggtcttcggccaccccgc

SEQ ID NO: 106979 - DNA, 391 bp, Homo sapiens; identical to SEQ ID NO: 1974
  chr2:175192084-175192475
  hyper

SEQ ID NO: 106980 - DNA, 72 bp, Homo sapiens
  chr2:175192822-175192894
  hyper
tttcccgccaaaccacgaaggccgggaaataaacagcgcctgcccaggctctgggcgcgcgagcccaggaga

SEQ ID NO: 106981 - DNA, 450 bp, Homo sapiens; identical to SEQ ID NO: 1976
  chr2:175193194-175193644
  hyper

SEQ ID NO: 106982 - DNA, 104 bp, Homo sapiens; identical to SEQ ID NO: 1977
  chr2:175193808-175193912
  hyper

SEQ ID NO: 106983 - DNA, 30 bp, Homo sapiens; identical to SEQ ID NO: 38236
  chr2:175196190-175196220
  hyper

SEQ ID NO: 106984 - DNA, 30 bp, Homo sapiens; identical to SEQ ID NO: 38237
  chr2:175196457-175196487
  hyper

SEQ ID NO: 106985 - DNA, 1556 bp, Homo sapiens; identical to SEQ ID NO: 38238
  chr2:175196961-175198517
  hyper

SEQ ID NO: 106986 - DNA, 536 bp, Homo sapiens
  chr2:175199018-175199554
  hyper
gtacagagaggcctatttcgctcctctcggaggagctgtcccttcgcgccccctccccagtataactgtgagagtgaaattgaatctagtggaataaggaattgggtagaagacacacgaaaatgataaaaatcacaagcaagaatgatagatacaagctgaagttgtgttctgtaggcaaaagcctggacacacaaagtgagggctcacatttccgtctccacttgggccctgctggtgcgggctgtgtctgggtgtctcctcccctcctgcctcctttcctacaagtggggagtcgagtaggactgtcagccctaacttgcaacatctcggggtggtttgtgtgtgggggggtgcttgtggctcggtttcattggtacttaaacctggcttggtgcgtgagtgtaaatttttaattgcactgtaatttcttcagtccccagcccgccctcgccccccccccgcaagtatcccccactactcccccccacccccgcggccctagctagctgacttgactggcacgcgccgggagc

SEQ ID NO: 106987 - DNA, 519 bp, Homo sapiens; identical to SEQ ID NO: 1981
  chr2:175199921-175200440
  hyper

SEQ ID NO: 106988 - DNA, 143 bp, Homo sapiens; identical to SEQ ID NO: 1982
  chr2:175200709-175200852
  hyper

SEQ ID NO: 106989 - DNA, 266 bp, Homo sapiens; identical to SEQ ID NO: 1983
  chr2:175200916-175201182
  hyper

SEQ ID NO: 106990 - DNA, 182 bp, Homo sapiens; identical to SEQ ID NO: 1984
  chr2:175201359-175201541
  hyper

SEQ ID NO: 106991 - DNA, 53 bp, Homo sapiens; identical to SEQ ID NO: 1985
  chr2:175201775-175201828
  hyper

SEQ ID NO: 106992 - DNA, 119 bp, Homo sapiens; identical to SEQ ID NO: 1986
  chr2:175202126-175202245
  hyper

SEQ ID NO: 106993 - DNA, 32 bp, Homo sapiens; identical to SEQ ID NO: 1987
  chr2:175202568-175202600
  hyper

SEQ ID NO: 106994 - DNA, 85 bp, Homo sapiens; identical to SEQ ID NO: 38247
  chr2:175202633-175202718
  hyper

SEQ ID NO: 106995 - DNA, 30 bp, Homo sapiens
  chr2:175203257-175203287
  hyper
cctcaataaccttttcgtgggtcgattttt

SEQ ID NO: 106996 - DNA, 30 bp, Homo sapiens
  chr2:175203700-175203730
  hyper
ctagagtcaataccccggaaaagacatttc

SEQ ID NO: 106997 - DNA, 213 bp, Homo sapiens; identical to SEQ ID NO: 38248
  chr2:175203998-175204211
  hyper

SEQ ID NO: 106998 - DNA, 319 bp, Homo sapiens; identical to SEQ ID NO: 38249
  chr2:175204627-175204946
  hyper

SEQ ID NO: 106999 - DNA, 512 bp, Homo sapiens; identical to SEQ ID NO: 1991
  chr2:175206393-175206905
  hyper

SEQ ID NO: 107000 - DNA, 652 bp, Homo sapiens; identical to SEQ ID NO: 38251
  chr2:175206960-175207612
  hyper

SEQ ID NO: 107001 - DNA, 770 bp, Homo sapiens; identical to SEQ ID NO: 38252
  chr2:175208098-175208868
  hyper

SEQ ID NO: 107002 - DNA, 78 bp, Homo sapiens
  chr2:175208996-175209074
  hyper
cggctccggggcagctcgggccggagggtgcgtttcttttcattccaggcagctctccgcgttcgtcccgcacatctt

SEQ ID NO: 107003 - DNA, 319 bp, Homo sapiens
  chr2:175260397-175260716
  hyper
taaacaaactcagccgcctaaccggaactgcgtttccagcagcaagggggaacttccgagatcaaaggtgacagcttccggcaactgatgcctccactggccactcctccctccgtccacctgtcacttcgggtagctgggaggccaggtgaggggcgcgcacgggggaggggcgtgcatagttgagacagaaacccggaagacccaactgtggcgcggcactgcttgaccgaggggctccggagcccagctgcaccggctgcggtttgagcgcccagggccggggtgcggggtggaccgcggcggcccttcgaccaaa

SEQ ID NO: 107004 - DNA, 31 bp, Homo sapiens; identical to SEQ ID NO: 38255
  chr2:175320206-175320237
  hyper

SEQ ID NO: 107005 - DNA, 30 bp, Homo sapiens; identical to SEQ ID NO: 1995
  chr2:175351020-175351050
  hyper

SEQ ID NO: 107006 - DNA, 92 bp, Homo sapiens
  chr2:175351634-175351726
  hyper
agggagctggtgctcgcagggtgccaagcagggagaagaccaccgtcatctcccgcccccagccctcttcgccgagcgcaaccgggtgccag

SEQ ID NO: 107007 - DNA, 30 bp, Homo sapiens; identical to SEQ ID NO: 1996
  chr2:175352180-175352210
  hyper

SEQ ID NO: 107008 - DNA, 1378 bp, Homo sapiens
  chr2:175546697-175548075
  hyper
taacaaaggctcacagcgactgggtcagctgctttcccttacactcacaacgctaacagttctttctttaaaaagaaaagtatgtatagtagaaaaaggtaggggacgcgagactgaagtgaagctgtctctggagagttcgggggatcaccccccctcaacccccgtccccactccgggcgaaaagcactgaccgggactggagatgtctctaaggtcgacgcagacccctaacgcgcgcgtctacgccgacctggggcgagcgggccgcccgggagggccgggagggaggcgggctggagcgcgggaggggcacggttcccatagacaggcaggcgggcggtgccagaacttgagccggccccaggggatgcccgaacgtccccctctgtcctagctggggtgtaggtgcagccccagggcatcgccgcgaagcccctgctcgagacctacggagatagtgggtcccgagccccacggggcggccccgggtccgcggagtccagcggtgagctcagcccgaggcgcgggacccaggctgtccacggccccttcctccccgggccatcagcgggcagcagaacgcgcgggccgctggcctggaattgcgcccctcccgaggccgcgcgcccgcgcccaccgctcgcaggggacgcggcctcgacgtccccagccgccccacccgcgtcaccggtgccaggcggcacttccgtgccccgccgtcgagcccagcccctcccggcgtctcccccggcccccgggagcccggaacccgggtcgcgccagaggcgacgcgtcccttaccgcgcagcggctccggacgactccgcagccccgcgccgcgctgggcattttttctgggaaacttctcccggggtccgcagggctgagccgggcgggcaggaaaagcgctcagcgccgggaggctgcgaccatccgggaacttcgccgagatgtgggccctcccctccggcgccgccgcccccccgccgccccgccacatgtggacgcgccgcgaggccccgccggcccgcgccctgccctccgcgcgcccgcctgccccgccagcaatggggctctgcgcctgcagcttcggcccgcagaggatcgcggcggggcgggatggtcggggctggagtccgcagtttcctcagtcccgctcccctgcgcggcgaggggaccgaggcaagaggacaggagtttgcagaggggcgggaactggaaggggagtctagcccagggcctttccccccaactcttgaatcttctccaccttcttgcggctgctggcggggggatcgggtgggggtgttccctctgttcgagccggaaggaacgccttttcccacgctttcccgtctgctctcaaaaaaagagt

SEQ ID NO: 107009 - DNA, 30 bp, Homo sapiens; identical to SEQ ID NO: 38260
  chr2:175869673-175869703
  hyper

SEQ ID NO: 107010 - DNA, 232 bp, Homo sapiens
  chr2:175870273-175870505
  hyper
gcggggccggtgtgcgttttagctgaaagcccaggttttttcttgaatggaatttgaggaggcgcagagaggagaaaaacgctgttactcgaaagaggaagagtcacaggaggatgctgagtgaacgcagcgcccaggcagggtcatctggggacctggtgcgtgtgagaacatatttcttctcctggcgccctccaggctcactgtggctggagccggtgacctgaagctg

SEQ ID NO: 107011 - DNA, 30 bp, Homo sapiens; identical to SEQ ID NO: 38261
  chr2:176033036-176033066
  hyper

SEQ ID NO: 107012 - DNA, 30 bp, Homo sapiens; identical to SEQ ID NO: 38262
  chr2:176494846-176494876
  hyper

SEQ ID NO: 107013 - DNA, 30 bp, Homo sapiens; identical to SEQ ID NO: 38263
  chr2:176866830-176866860
  hyper

SEQ ID NO: 107014 - DNA, 30 bp, Homo sapiens; identical to SEQ ID NO: 38264
  chr2:176867172-176867202
  hyper

SEQ ID NO: 107015 - DNA, 572 bp, Homo sapiens
  chr2:176937677-176938249
  hyper
tgaaggtggaaacaacgggtcaccgccgccctgaatcagctcctgccaaagggctcattaaatccccctccagagcccccatcccaggactaagtaagtcatttgctggtctggcttggatgaaccaaggatcgcaggaggctgcctgtgtgcctacccgtccccccgcccgagtcccctagtgggcgaacgctgggccgggcacggtatctccctggcgagcacagcctgaacccaaggctggttttgaggtggcagttaattactagcccggaaagccgaagccccggagccgatgtctgggctgacagggttccctcctcagcctcggggcagtcagacgattcctaacaacttctcccaaggaggtagatccctgtttatcaaccagcacaccccgtcggcccttttctttggtaaacactctttaaacaaacagcccatccgccctgttattgccaaagctgctcagagctttaataaaagcccagggaagatcagaacccgcgtccaaggctgctgcttaatccaatgaaggcaatttccgaggataattgcgaacatgttttaat

SEQ ID NO: 107016 - DNA, 30 bp, Homo sapiens
  chr2:176939803-176939833
  hyper
tcggcctaggaaaaacgctcagggccttgg

SEQ ID NO: 107017 - DNA, 369 bp, Homo sapiens
  chr2:176940203-176940572
  hyper
catatttctgagtttggagggcggggatgccagggtaagcttcctccgagcgactaaggagcagcaacaagctctggaatttcctctcggggtggtccgttccaccttaaataacttgggctttttggtcccaaacgcgccctgtagttcaggtttttttgtcctccctgcagcagctgtcaccctgcattactcgcagtcagctaaatgaaacattattctaaacatatgcatcgtaatcagttcggtcacacttacaagaacacgcgttaataaggcaatcaatcaccctggaacaagcaagttgttctgtaacagctcataaacagtgtgtaatgaagaattggaggttaccgtgacatgcgttga

SEQ ID NO: 107018 - DNA, 1090 bp, Homo sapiens
  chr2:176943314-176944404
  hyper
ttgagatgataagaacgtggctttcttctgcgaaatcacttcaggtaacagagataacattaaataacatacattctatgcaccaagaacaatgttttatgtaccgagtctcttatccgtctctcctaatgacttcccttagcgggttgttagtacttgacagcaggtctccgtgcggggaacttttctccaattccacattcaaaggaggtccatcagagagcatgattggcaattttcgtcataatctgcacattattagcatcaaacttgacgtggcagttaacactagtgggttttgatgtacctttcttcaagttcaaggaaacccctccagtagccgggttggcagagcgggtctcagcaacccagcggtggctttgcagaggcgaaggcgcaatagacatgcgtgagaaatatgccaagaaccatttcacccgaggaaaaggaaagcgaggagagaaggggacgagggacatagagagttctaacttagaaaagtgtctaaggaaatgctttaggataatattaatatatctagagattcaagtatttcccagatcgagtggaacccggtagttggaaaactgagctgaaaacgcctctccaaatactacagcgatctatcagtcttacccctaccccaactcccttcctttcccttccctggccgtggcaacctcttttgccatcactttttgcataaaatatgcaagatgcttccattccatcagcactgaaaccaaagaccaaaagagagaaaggtgttggaccgaaaaggaggcggcgcaacggccaccccttccagcacctcggctttgtccttcccggggaaggcggccacatccctacccgccttgctcctgaacgtagtaaacaatctcacaaacaaccaccgctgcccacgctctccatccgtcctcccggccttatcagacctccgttctcccgcactcttcgggcagggtccctaataagctcaggctgaaagaacgtttgccacctcccccaccctcgttgaaagaaaaggaagaaaaacagcagcagcgagaaacctccggggcgactcctcccccgcccccaagcacca

SEQ ID NO: 107019 - DNA, 390 bp, Homo sapiens; identical to SEQ ID NO: 2003
  chr2:176944456-176944846
  hyper

SEQ ID NO: 107020 - DNA, 131 bp, Homo sapiens; identical to SEQ ID NO: 2004
  chr2:176945137-176945268
  hyper

SEQ ID NO: 107021 - DNA, 1286 bp, Homo sapiens
  chr2:176945581-176946867
  hyper
cgccgcagcctgggttagggagcgccccgtgttcccagctcctgtcccaggacctctgccccttccggacctctgaatggcttggtctacttctctccgaccaagcccaaccccgagtaccctgtggtctcccagctgggaaagtgtggacggcagtgtgtggaccgccgtgggcacaccgtcctcaacgaagagggtcctctcccccgcgtccggctgctgctgctcctcaggcttttattcccttacttcttgctgcacttttttgtcccaatccaacctttcctctccctcccgccacccaccagtgccggtctcgctgagcacccgtctctcaatcccaggatttgtacggggattctgggcagcctttgaagagaggctgccgctcagcttttctgagaggtcgccgcgcgaagtcttgagccctccgaactgcaaggacctgcccctaggggcacgggtccgattttgatattgaagggatgattttgttggaatcgtttgccttaaatgagtgggtagagcaatgtctccataaacggggaaggggacgtttccacccctcccaacactatctaataaagacatcattcgtcacaactctaaattaaagaaagcccgatcaaaccagagggagacttccacactcctcccctaccccgtggagattttttcttttttctgcagtgtcgaacgctccatgaagggctcaccaaatcgcctaacctcccggctatctctcccagacgtataataaaattaataacctaaagttatatataaataaggacaatttcgttgcatttttccccgcaggaggttgcccttttttcgttgcccaagaggaaaatgttcaggaaactactgtctcaaaccaatcgattttaaagatacagtatccttttctccgtgtaacgatttatgcggaaaataaatctccaagctcaagagcaaatgaaaagtttcacctctggttcctgcttgaggaacaaagaccaactgggcttgccgcctaggggaaagtggggccgtgggtatgggcgagggggcatctggccaggcgttgggcacaatggagcaggggcgagtgctttcagcattggagtcaccattcgggggccttcttagatccgtcaggccggacaaccgttcggattcggtggccgggaaataaataagccaattcctttggtgactaccccccgcggatttccagacccttagctaaatctagccacccagaaaggggaaaggggaaaaagaaacaatcaacccagatgccc

SEQ ID NO: 107022 - DNA, 239 bp, Homo sapiens
  chr2:176947775-176948014
  hyper
aggggtctaccggctcgctcgggctcttagacacgagcgcagaaacattttctcggactcaggagcgagggcgggtgggcctggtgttccaggctccgcaggcctgagcctggcgggaaagctcaaggagcagaactggaaggcacggtcccagacatgcgtcccgcccccgcccgtgctagctcggtgtagcttgcctgtggagggtctgagaggggaaaaggcaccgggaaaggctg

SEQ ID NO: 107023 - DNA, 30 bp, Homo sapiens
  chr2:176948351-176948381
  hyper
cgggcttaggcgagccgggtgctgcgaatt

SEQ ID NO: 107024 - DNA, 30 bp, Homo sapiens
  chr2:176948615-176948645
  hyper
gctttcggagggaggcggaaaaattgtggg

SEQ ID NO: 107025 - DNA, 30 bp, Homo sapiens
  chr2:176948959-176948989
  hyper
gtctgattaatagagcgcgccgcggcacat

SEQ ID NO: 107026 - DNA, 511 bp, Homo sapiens
  chr2:176949490-176950001
  hyper
aatatcctagagttttgaaagcgctttcttgctacgtggccgcggaggtgcattgggcccgcgcctccaaacggaaatcattaggtcctctctgattttctaacaccgtctgcagagtgagatctgaactcgaagtccccggttttttacttttataatcctgctgatagaaagccttctcgcctacgcattttcctgaggggaaacgaactaggctggacgatttgatagcagaattcgacagctaactttaaacacagtggagatttacagcgccatacgggcgctccgaatccacgctcacgttgccagattttcccctccctcctcaaatagaattatttgcggcaaaggcgctggatttcgaggtcaaaagaggaaagaggagacagccttcttcccctacctccccgctgccctcccttcccctttgcttttcttccttctctctttcctcccctcatcaaccccagccccttacctgcggccacaggtattcccagcgttgggt

SEQ ID NO: 107027 - DNA, 686 bp, Homo sapiens
  chr2:176950074-176950760
  hyper
cgacaactttgatagtcataatgacgccggtggcaaccattttaacgaagatcaatcttcactccaggccgctcctcatctcccgcggttgcgcccacccttccctgaccctccaagcactgtgcccacccgccaacggcccagccggagagagattcgcggacacaggcggaggcgagggaggacggggatgggacgcggaggtccgcccgtgagcttctgaagcggctgagagaccctgacaatctgggcgctgggcgcgggtcctgcatccccacatttagcctcaatccgaaccccaaccagggccccctcttctttctgccgacacacccagaacattggggtgtgttagggggcaagctcgagatctattcgcctatagctcttggcgctttccttttaaccttagacccgttgggggcgcatcaggaatgtaaggggaagcgaggtgtgaagtatatttatatacatatatacacacatatagtcaatgccaaaagtttatcttctgttcccctcggcgccaacttatttcaacaacgcgagctttgcttagaaaatcaattccacatctttaaggtaataaacggaaagctcgataggcaggcggtgcctgggggaacggggaaccggcggggaacgcagagtgggcatccagcgcaccgggactgggacttgaccca

SEQ ID NO: 107028 - DNA, 12 bp, Homo sapiens
  chr2:176950824-176950836
  hyper
cggctttggggc

SEQ ID NO: 107029 - DNA, 190 bp, Homo sapiens
  chr2:176951107-176951297
  hyper
tgcctttattgctgtcgtttggcgcccccatctgttttcctcgcggtttcggctgctgtgagttggttttcaagtcggagacgcagtcactggggactaaggtgaggactgacgaccccttcctctatcactcagcccgaggctctcccacatcttcccttcctctgggacccgacgcctctggtcccaa

SEQ ID NO: 107030 - DNA, 684 bp, Homo sapiens; identical to SEQ ID NO: 38277
  chr2:176952674-176953358
  hyper

SEQ ID NO: 107031 - DNA, 486 bp, Homo sapiens; identical to SEQ ID NO: 38278
  chr2:176956928-176957414
  hyper

SEQ ID NO: 107032 - DNA, 52 bp, Homo sapiens; identical to SEQ ID NO: 2009
  chr2:176957576-176957628
  hyper

SEQ ID NO: 107033 - DNA, 694 bp, Homo sapiens; identical to SEQ ID NO: 38280
  chr2:176957914-176958608
  hyper

SEQ ID NO: 107034 - DNA, 136 bp, Homo sapiens; identical to SEQ ID NO: 2011
  chr2:176959223-176959359
  hyper

SEQ ID NO: 107035 - DNA, 322 bp, Homo sapiens
  chr2:176961516-176961838
  hyper
ttcatatcttactggcgaccgtggacagctaacttcgattttgagggggagggacagagacagagaaacagagagagatatgatcgcgattcaatctttgcagaagaaataacccgtgcacaaggggccacaccatcccccaccttacacttcgggaagggtcgttaccgtttttgtggtttttctcaaaagatgtgttttcatcagaaacgggcacatttttcctttctcctaatcgccaacttcccctccattttttgtgagtcccacactccggagcttcactccatttcccctgtctatttctcgggtttcccatcgt

SEQ ID NO: 107036 - DNA, 30 bp, Homo sapiens
  chr2:176962205-176962235
  hyper
gggaacgaggtccccgtgtcgcgtgattca

SEQ ID NO: 107037 - DNA, 30 bp, Homo sapiens
  chr2:176962643-176962673
  hyper
tgcctgccagacctcgaaagtcataaaccc

SEQ ID NO: 107038 - DNA, 64 bp, Homo sapiens
  chr2:176963189-176963253
  hyper
agccacccaattggtcgccataactcacacaataaagtggcagcgcggcggtcagtcttgccct

SEQ ID NO: 107039 - DNA, 337 bp, Homo sapiens; identical to SEQ ID NO: 38283
  chr2:176963321-176963658
  hyper

SEQ ID NO: 107040 - DNA, 102 bp, Homo sapiens
  chr2:176964047-176964149
  hyper
cagagctcctggtgccgccggaccgcgccctctccggataagtcgagaggcgccggttaatggaaaatgcctccgctgcaacttaaagccggtagaagcaag

SEQ ID NO: 107041 - DNA, 154 bp, Homo sapiens; identical to SEQ ID NO: 2014
  chr2:176964179-176964333
  hyper

SEQ ID NO: 107042 - DNA, 378 bp, Homo sapiens; identical to SEQ ID NO: 2015
  chr2:176964389-176964767
  hyper

SEQ ID NO: 107043 - DNA, 479 bp, Homo sapiens
  chr2:176965264-176965743
  hyper
cggccccggggagggcccgcaagaagcggaaaccctacacgaagcagcagattgcggagttggagaacgaattcctcgtcaacgaattcatcaacaggcagaaacgcaaggaattgtccaataggctgaacctcagcgaccagcaagtcaaaatctggttccagaacaggcgtatgaagaagaagcgcgtggtgcttcgggagcaggcgctggcgctctactagccgcgcgcgtggccagggccgggttggatctgcccttttggacagaggccttgtttggggagggggatctggggctaaggctaaggcttttccttcggttccttctctgctggccccagaagccaccaagagatttacagaccaggccagttgggcctccttgctttcctcagtccctgagaagcccgtgagaaacgtgcggaagtaccagtgcaactctggctggccttaaggcttccacgttgggggactgag

SEQ ID NO: 107044 - DNA, 335 bp, Homo sapiens
  chr2:176968600-176968935
  hyper
aaaacagttttaaaacgagaaaaaaacagcttcatctggcattcaatcagttgggaactcagagggcggcggggaaggggggacgcttttaaggcctgggggttctcccccagggaggcgggctgaggaggcttccgggatgccggcgggtggaagagaaatctggaaccgttgtaaatattcatgtggggggatgccccttcacccttcacccgcctctcccagctgcattcccccctcagtgatagtgggggagggcaaggcgactgccccactgtccttagacaaaggtgatctccccatatttttgttctccagtcgcttgacttaagaag

SEQ ID NO: 107045 - DNA, 417 bp, Homo sapiens; identical to SEQ ID NO: 38289
  chr2:176969196-176969613
  hyper

SEQ ID NO: 107046 - DNA, 403 bp, Homo sapiens; identical to SEQ ID NO: 38290
  chr2:176969676-176970079
  hyper

SEQ ID NO: 107047 - DNA, 362 bp, Homo sapiens
  chr2:176971289-176971651
  hyper
ccgaggccagcactcgcacccttggggtcagaaccggaaagagccaagtcactccactctgaacgcgctgggcagaaaaatatgtaaatcagggctccctgcgccctggagagtggcgaaattactcccgcccggtgaacaagaagcaacaagctcccaggcgggtgagctgcagagggtggcagagtcgcgggggagggagcggctgcagtaaggggggtggggttcggaacctcacaccctcacacctagttcctagcttctagggagcctggagccggggcttccccccctctgctcgctgcttctctcccttcccccttcctccccctcttccccctccttcctcctccccgccggcc

SEQ ID NO: 107048 - DNA, 272 bp, Homo sapiens; identical to SEQ ID NO: 2020
  chr2:176972103-176972375
  hyper

SEQ ID NO: 107049 - DNA, 62 bp, Homo sapiens
  chr2:176972742-176972804
  hyper
cgggggcagtccctgcaccaaggcgacccctggctcggagcccaagggggcagcagaaggca

SEQ ID NO: 107050 - DNA, 144 bp, Homo sapiens
  chr2:176972814-176972958
  hyper
cggcgagggccccccgggagaggcgggggccgagaagagcagcagcgcaggtaggcaccgggtactgggcaagcggtgggcccgggggccgcgggggagggggggggggcggaggcctccctctgcttgcgcctttttatgtgc

SEQ ID NO: 107051 - DNA, 93 bp, Homo sapiens
  chr2:176973289-176973382
  hyper
aagcagatgccccggcgggcctgctcttgtctctgttccctcaggttccagtttagagcctgccttgccctctgcttccccacctccgtgcca

SEQ ID NO: 107052 - DNA, 123 bp, Homo sapiens
  chr2:176973441-176973564
  hyper
tgtccacgcccgcactctctcctgtgcccgcccatatatcatcccccacgacgcaggcagggcctttcggccgcggcagagaacgtccccaacggggccagggcctggccctcgctcagtggc

SEQ ID NO: 107053 - DNA, 116 bp, Homo sapiens
  chr2:176973598-176973714
  hyper
cggcctctctcaccccctggtctctttgccttgcagttgccccccagcggtcccggaaaaagcgctgtccctataccaagtaccagatccgcgaactggaacgcgagtttttcttt

SEQ ID NO: 107054 - DNA, 178 bp, Homo sapiens
  chr2:176974007-176974185
  hyper
ctcgggacctcccagcgaccactgcagcctgcggacgaggccgggacttggccgagcggatcctaataaggggaaaatggtaaatgcaaacgtcccgttacaattttaccgccagtgtgctgtcgttccccctccccctctccgagtcctcgtggggacacggcggggtctgtaggaa

SEQ ID NO: 107055 - DNA, 376 bp, Homo sapiens; identical to SEQ ID NO: 2023
  chr2:176975879-176976255
  hyper

SEQ ID NO: 107056 - DNA, 141 bp, Homo sapiens
  chr2:176976674-176976815
  hyper
cagaaaaaaataagacgcatgggggactgggagaatcgttctgggagcccgcggccgtgcctggagtgcgcggctaccagtggcgaccgagtggcgccggcaggactgtgagttggtgtgcccaggccgggctgggctgat

SEQ ID NO: 107057 - DNA, 30 bp, Homo sapiens
  chr2:176977272-176977302
  hyper
cagtgagccccccggcgaggctccaacgag

SEQ ID NO: 107058 - DNA, 280 bp, Homo sapiens; identical to SEQ ID NO: 38297
  chr2:176980657-176980937
  hyper

SEQ ID NO: 107059 - DNA, 108 bp, Homo sapiens; identical to SEQ ID NO: 2026
  chr2:176981376-176981484
  hyper

SEQ ID NO: 107060 - DNA, 301 bp, Homo sapiens
  chr2:176982118-176982419
  hyper
caagccgcagctctccgctgcccagctgcagatggaaaagaagatgaacgagcccgtgagcggccaggagcccaccaaagtctcccaggtggagagccccgaggccaaaggcggccttcccgaagagaggagctgcctggctgaggtctccgtgtccagtcccgaagtgcaggagaaggaaagcaaaggtcggtatgagcagagttgccaccccagcggggcgcgcagcccgggaacccggcagagagggagtgccggggtgcccagcgccgagccggagcccgacttggcaggtgctgct

SEQ ID NO: 107061 - DNA, 198 bp, Homo sapiens
  chr2:176982517-176982715
  hyper
cgcccgggcagaggaaaagcttgccggttttatttttcctgagctagacctgaacacaacaaaagagcgcaaaggagacctgcggctcataaacacgaccacagagcctcttttctcctgctcagatttgcagttccagttttgccttgagcccaatgatcatgttaaggtgatccagggcaccgtgttcgtgttcaa

SEQ ID NO: 107062 - DNA, 339 bp, Homo sapiens; identical to SEQ ID NO: 2029
  chr2:176983747-176984086
  hyper

SEQ ID NO: 107063 - DNA, 33 bp, Homo sapiens
  chr2:176986464-176986497
  hyper
cctttaagtgcgaaccgcgcgaagcggccctgc

SEQ ID NO: 107064 - DNA, 503 bp, Homo sapiens; identical to SEQ ID NO: 2031
  chr2:176986711-176987214
  hyper

SEQ ID NO: 107065 - DNA, 1040 bp, Homo sapiens; identical to SEQ ID NO: 2032
  chr2:176993339-176994379
  hyper

SEQ ID NO: 107066 - DNA, 124 bp, Homo sapiens; identical to SEQ ID NO: 2033
  chr2:176994497-176994621
  hyper

SEQ ID NO: 107067 - DNA, 199 bp, Homo sapiens; identical to SEQ ID NO: 2034
  chr2:176995070-176995269
  hyper

SEQ ID NO: 107068 - DNA, 412 bp, Homo sapiens; identical to SEQ ID NO: 2035
  chr2:176995331-176995743
  hyper

SEQ ID NO: 107069 - DNA, 30 bp, Homo sapiens; identical to SEQ ID NO: 38308
  chr2:176996244-176996274
  hyper

SEQ ID NO: 107070 - DNA, 30 bp, Homo sapiens; identical to SEQ ID NO: 38309
  chr2:177000783-177000813
  hyper

SEQ ID NO: 107071 - DNA, 635 bp, Homo sapiens; identical to SEQ ID NO: 2036
  chr2:177001060-177001695
  hyper

SEQ ID NO: 107072 - DNA, 149 bp, Homo sapiens; identical to SEQ ID NO: 2037
  chr2:177001781-177001930
  hyper

SEQ ID NO: 107073 - DNA, 30 bp, Homo sapiens
  chr2:177003557-177003587
  hyper
acaagaaaactagttcgtgctgttgccact

SEQ ID NO: 107074 - DNA, 179 bp, Homo sapiens
  chr2:177003831-177004010
  hyper
aaatgtggccaagcacgagagctgaaaacaaagcgtattttcccgtcagatgtttctacaaataaatttcgccagagttctgttttctgaatcagagaggcaagggaaatcgaacaaagacagtatttcaccctgggctggcaggcagctgttagaggtatttacggccttgccgcagt

SEQ ID NO: 107075 - DNA, 75 bp, Homo sapiens
  chr2:177004555-177004630
  hyper
cgcatgtgcagtgaaatggcctagcccgggaattcgatcggcaaagcacgggtgtgggggcgggggggtgggggg

SEQ ID NO: 107076 - DNA, 684 bp, Homo sapiens
  chr2:177005050-177005734
  hyper
tggggggcagcagctcggcgaagagcagtcaaataaataaataaataaacaaataaatgaacggacatataagggcttttcccgcctgggttcgcttaaataatgggggacaagcgcctctgggccacgagcttgttgtttgtcctgggatggggggtaggggatgagaggtggcctcaggtccctcttgctccttccagccgccccaggggacactgtagaaccagcctctggtgcggggagacctccgcctgccggaggaagtcccagcctcaggtttccggggctggtggtctccctgctctgctgtctggcgcctcgtccaggaggaggcgctgtaggacaagcgtctcgccggctgcggcgggccggggagggcgggagcggagggatcggtacccgctcctcccttcccgcgcactctacctccgcgcgccaagtgtgtggggcctcgaacaagggtcgacggtgctgcgccccgtcccccaaggggttcctttccccagactggcagtggaagcagctccgaggcctgggagcctagggccgttccgggttggcgggccacctcgctttctccgcgctcccggagggggcgcgatttcctcgtgctgcgcttgtaggagcagcaacttgaatcctgtgtggggcaagctgggcccaatccgcggatcccaaccagcc

SEQ ID NO: 107077 - DNA, 30 bp, Homo sapiens
  chr2:177016821-177016851
  hyper
gtccacatcccagcccgttagcctgggtcc

SEQ ID NO: 107078 - DNA, 132 bp, Homo sapiens
  chr2:177017331-177017463
  hyper
gcagtgaaccccaactacaccggtggggaacccaagcggtcccgaacggcctacacccggcagcaagtcctagaactggaaaaagaatttcattttaacaggtatctgacaaggcgccgtcggattgaaatc

SEQ ID NO: 107079 - DNA, 30 bp, Homo sapiens; identical to SEQ ID NO: 38313
  chr2:177021872-177021902
  hyper

SEQ ID NO: 107080 - DNA, 30 bp, Homo sapiens; identical to SEQ ID NO: 38314
  chr2:177022107-177022137
  hyper

SEQ ID NO: 107081 - DNA, 104 bp, Homo sapiens
  chr2:177022458-177022562
  hyper
ggtgtgtgtgcgaggcgctagggtgccagggggcgaggggtgaggggcgaggtgcacgcgggctgctccaagacaacaggagttgtaaaaaaccggcccggctg

SEQ ID NO: 107082 - DNA, 30 bp, Homo sapiens; identical to SEQ ID NO: 38316
  chr2:177037295-177037325
  hyper

SEQ ID NO: 107083 - DNA, 30 bp, Homo sapiens
  chr2:177039570-177039600
  hyper
cgagccgggggagggcgcgtttccgcgcgg

SEQ ID NO: 107084 - DNA, 331 bp, Homo sapiens; identical to SEQ ID NO: 38317
  chr2:177042471-177042802
  hyper

SEQ ID NO: 107085 - DNA, 85 bp, Homo sapiens; identical to SEQ ID NO: 2040
  chr2:177042913-177042998
  hyper

SEQ ID NO: 107086 - DNA, 297 bp, Homo sapiens; identical to SEQ ID NO: 2041
  chr2:177043266-177043563
  hyper

SEQ ID NO: 107087 - DNA, 762 bp, Homo sapiens; identical to SEQ ID NO: 38320
  chr2:177052672-177053434
  hyper

SEQ ID NO: 107088 - DNA, 84 bp, Homo sapiens; identical to SEQ ID NO: 2043
  chr2:177053618-177053702
  hyper

SEQ ID NO: 107089 - DNA, 47 bp, Homo sapiens; identical to SEQ ID NO: 2044
  chr2:177053906-177053953
  hyper

SEQ ID NO: 107090 - DNA, 371 bp, Homo sapiens; identical to SEQ ID NO: 38323
  chr2:177053999-177054370
  hyper

SEQ ID NO: 107091 - DNA, 369 bp, Homo sapiens
  chr2:177133915-177134284
  hyper
tggtatccagtgggcgtttacaaatgttactcggttacaaaattctggcttacagaaaggacgctaaaaatctcccagattcccctgccagtcccctgggtgggagacgagtcgggtacttcgcttccacctgcgggcccccagcgcagagcctggaattggctggacggagctagccgcgccggcgccccgtaggacggcgcgggggcggggccggcggaagcgctcgagtgccgttgtcggctgcgccggaagtccctagccaggcctggcggtaaccttgggggcctcactgcagccgccgctgctgttggagtgggctttgcgagtctgaacgttggcggggctaggctcgttaactgccgagag

SEQ ID NO: 107092 - DNA, 30 bp, Homo sapiens; identical to SEQ ID NO: 38325
  chr2:177134722-177134752
  hyper

SEQ ID NO: 107093 - DNA, 1037 bp, Homo sapiens; identical to SEQ ID NO: 38326
  chr2:177502149-177503186
  hyper

SEQ ID NO: 107094 - DNA, 251 bp, Homo sapiens
  chr2:178076954-178077205
  hyper
cctcaggcaggcggcgcagtcacagacactggtccccggcatttggaaacaggaaagatggtccgaggggccgaggagtttttcttgcaacctttaaattacaagcaagaaaaacgtgggttttatttcgggcacaggaatagaatgaattctgaaatggagaactagaggcctgcgtggggaatgagggacaagcgcgagaagaaagggaaaggcctttctctctggtgacgcgcgatcacaaggcgttc

SEQ ID NO: 107095 - DNA, 40 bp, Homo sapiens
  chr2:178128652-178128692
  hyper
gagatggatgacttcgcaaagccgcgcccacagacggccc

SEQ ID NO: 107096 - DNA, 30 bp, Homo sapiens
  chr2:178129888-178129918
  hyper
ctcactttaccgcccgagaatggcgccagc

SEQ ID NO: 107097 - DNA, 30 bp, Homo sapiens
  chr2:178130269-178130299
  hyper
caacatgctgtaatcgtttactctttacaa

SEQ ID NO: 107098 - DNA, 817 bp, Homo sapiens
  chr2:178257218-178258035
  hyper
aggacacctcgagggcggacgtggtttggctctcggtccagctggaccgggctgggccaaccgggagtcagctcgaactcacctgcttggcaggtgcgcgcttcccgaggcgtgacaagggagcgccggcgcggtgggtggggggcagagaatgtgaagctccagacgcatggcacccgccgccaagtcgccgcggtggctgccgggatgcgccgcagcgaatggtcgcgccgggcgccgctctgagtgacctttcacccgcgcccagcggttccgggcggcagcacaaggcggtagccatggcggaggcggcggctgcagcgggtgggactggcttgggcgcgggcgcgagctacgggtctgcagcggaccgggaccgggacccggacccggaccgcgccgggcggaggctgcgggttctctctggccatctgctgggccggccccgggaggctctgagtaccaatgagtgcaaagcgcggagagccgcgtcggcggccacggcagcgcccacggccactcccgccgcgcaggagtcgggcaccatcccaaagaagcggtgagtagcggtatgtggaaggagttagcgtcgagggaccaggccgggcctgtgctgcaggagggcacaggcgaggtgggaagggaagtgacacgggtgggcggaaggcatcccggtccctgaaagtagggacccacctctctttcgagagagtggactagaccctggattctgtcaggaagggggcgggatgggatggtggattttggtcactatgtgagggtaacaggcttgaagaactctcgttggagaagggtt

SEQ ID NO: 107099 - DNA, 389 bp, Homo sapiens
  chr2:178417524-178417913
  hyper
ggcaacagagcaaccggaagcggaagactgccggtttccttgtcgcaagaaatctgttaggaacaaaaagggaccactctcgtcagtctctcaatttcagcttgatcttcaaatactctggactgcggagtggcggcattcaggaggggaaagactactccgggccgttcagagactgaatctactcgtcccggcatgcaccgttccagtggttccgcggcgcgggtcgtagccgcgctgcatgctgggagacgtagtcccggctgtacctaccgaaccggcggcccgtgggggtgcagggtaactctccttccctgcctcttaaagatgaggggcgctcactgtgtctgttatggcaccgtggtctctggcgcggcggaggaaggttt

SEQ ID NO: 107100 - DNA, 355 bp, Homo sapiens
  chr2:178483337-178483692
  hyper
accgcctcggcgtagcgggcatcgcggatgagccggtacactagcgcggtaaactccccgtcggggatctgcgcgccgctcagaccagccataaccaccacggctgttatgcgtgcggttaccacggcaacagggcaaccgggcaaccggaaacggaagacgacgggttactttgccacggaaggaatctgttaggaataaaaagggaccgttctcgttagtctctcaagttcggtttgatcttcaaatattctggactgcagcgtggcggcagtcagaaggggaaagacgactactccgggccgttcagagactgaatcttcccggtcccggcatgcatcgttcctgtggcgcc

SEQ ID NO: 107101 - DNA, 503 bp, Homo sapiens
  chr2:178937350-178937853
  hyper
gcgccgaccccaccccgtggtcctgctactcctgctccgcacaggtgcccagcactgagctgccgccgctgccccggctcctgttccggaaacccgagctatcgctgctcctgttctggctgccgccgctgctgctggaactgctgctgtaaccggatgagtggaccgctgtgacagggaggtagggcaggacacgcccctgagtgaggcacggagcctggagggaggagagaagaggagggagccgcggacgccagaccagccaaagtccacggcccaggctgccaggcggttcctggaagagtctctggacggccggaatcggcgcctgggtacaggactcctgattggaacacgattagaagagggaaacgcaccttgttccttccccgcttcttgctcccttacctccccaaccctccctactcaccgcgccccttaatccgttagcgtttcgaggaggcccagcgggagcccagtgggagtccgagatacaagtgttg

SEQ ID NO: 107102 - DNA, 30 bp, Homo sapiens
  chr2:178977066-178977096
  hyper
gtcagggtcccccgcgtcgccagggggcgc

SEQ ID NO: 107103 - DNA, 30 bp, Homo sapiens
  chr2:178977326-178977356
  hyper
cagcctggacgaaccgcccaacagccgcat

SEQ ID NO: 107104 - DNA, 42 bp, Homo sapiens
  chr2:179059425-179059467
  hyper
ttgcttggggcgggcgccaaggtgcccgcatcgcggcccggg

SEQ ID NO: 107105 - DNA, 30 bp, Homo sapiens; identical to SEQ ID NO: 38334
  chr2:179060102-179060132
  hyper

SEQ ID NO: 107106 - DNA, 564 bp, Homo sapiens; identical to SEQ ID NO: 38335
  chr2:179278306-179278870
  hyper

SEQ ID NO: 107107 - DNA, 30 bp, Homo sapiens
  chr2:179315394-179315424
  hyper
agggctggcagcagcgccgcagcctctcag

SEQ ID NO: 107108 - DNA, 641 bp, Homo sapiens
  chr2:179316083-179316724
  hyper
gcgcccgcccctgccggccctgaccagcctgtagtaactggcccctaggccgcagttctttgtccttagcaggaggccgtttcttgccgggagagagggattagagggattgtccggcgtgggtctagggtcgttgaggcctaaagttaagcctttgtggggaggacggattgggggctgggtcactttaagaaaaagattctaaaattacgaaggcagaattccagggagtctcccgggcctggtcctgaagcttgagaccccggatatatacgctccagggggctgcggtgcgctcttcgggtccccgagccctgtgtttaggaacacgcggggacgtccaaacacccgctcctctcccgccgggcgggctcctttgtcttctgggctttcgtcgcgagatggaacgctgggtcagtgcatcccagcaaaacacgttaggagtaaacgaaggcctttccggggacctgggtagtcggttgtaatggcgtttgcctgggatgcagcacctttggtgggccattagatgacgtgtcgcttctccaggggcttgctaggcactagcagaaatgctcccctgtgcttactcggtgttatggaagattgcttgcacaatgctattcgtacgaaaggatattatt

SEQ ID NO: 107109 - DNA, 30 bp, Homo sapiens
  chr2:179342966-179342996
  hyper
gtgcaactggacgcacgggcagctcgcagc

SEQ ID NO: 107110 - DNA, 30 bp, Homo sapiens; identical to SEQ ID NO: 38338
  chr2:179343243-179343273
  hyper

SEQ ID NO: 107111 - DNA, 510 bp, Homo sapiens; identical to SEQ ID NO: 38339
  chr2:179343484-179343994
  hyper

SEQ ID NO: 107112 - DNA, 30 bp, Homo sapiens
  chr2:179345153-179345183
  hyper
ggggtttcccgggacgatccggcccctttc

SEQ ID NO: 107113 - DNA, 86 bp, Homo sapiens; identical to SEQ ID NO: 2056
  chr2:180129610-180129696
  hyper

SEQ ID NO: 107114 - DNA, 1572 bp, Homo sapiens
  chr2:180725139-180726711
  hyper
cgcacataacagtggcgaaacagatggtcctccccctccccttctcctcgtcccttccgcagtcccacagtgtcctcccacccttccctgacaccttcaccagcgcttagtggccgaggccgcccgtcagggctcccaacaagtgcaaacttcggggaccttctctctgctcctctgcccccatctcatctgggttctgctgcagaactctcccacgaccccaagcttcgaccgctaccctcctcacacacctcggtcccctaactacccatttcccggtcattgagagaaagacaaaccccaaacttccagcccaggtgacgaggcgctgcggctaaacatagcggggcactctcctcgtcctttcccctctccatccgtccttgggaattggagcctaccctggggaacagaggagtatgctcctgtggcttccacgacctaatcctaactccagggactcgcaggagttaggattaggtcgtggaagccacaggcgcctgggcgccctcctctacaagtgggaccttgagacaaagtgcaaactctaccgggaggggggctcctggccattccctcgggcggcgcgcccaggtgcaggctcgctctgcggaggagggcgggggccgggcaagcagagggcgcccagtccgggggcgccggtctgggctgggcgcccagagcttacctcggcgcgcgggccgcgggcgcgtggggcagtggctcctccagccgggaagctgttgctcacgctccggtggttgctgcggtcccgccagggctgcaccggggcttcgcgcagacgttctcccgcgatctgctgcagcccaggcggtggcggtggcggtagcagcggcggcggtggaggtggcgcgggcgacagctcggcccggcgcggcccctgaactgtccaactcttgcccgcgccgggcttaagcgcccggccgctgcccccgcgctgagcgcctgcgcaccgggcctcgcccaggtgaggggcgtgtgcccggagcccgctgggcgcgcccggcccggcccggccccgccgcacgcccgcccccctggcctggccgaggaccccggggtttggacgtgccaacgccactctcgcgcgccgaagctgtgacggtttactaagcagagacttgcgaggcacacagagagggaatgaggcggaaccgttcgggggctcgttgacactgcagagcctcccgcagcatcgctgccttaaatcccgcctttccaggcgtgcgcgcacagcgagccagaggaggctccgtcccgacctggggtcccccgcggtcctcagcccgggggctcgggtccccgaagagatccttggcaatggcagaggtcccaaagcctagatgccaagccccgcgatggggcggatgcttccaatattagtcaacccagagtgaaactctcttcttggagatcgtcagaccaactatttgtttttcctctttgaccacccctgggctagcagagcacagctagcagcttcggcatatttggcggagccgggaaggcccggagcgcaagaaggcatcgcagcctcgcagcagatctgaa

SEQ ID NO: 107115 - DNA, 59 bp, Homo sapiens; identical to SEQ ID NO: 38342
  chr2:180871765-180871824
  hyper

SEQ ID NO: 107116 - DNA, 30 bp, Homo sapiens; identical to SEQ ID NO: 2058
  chr2:181179266-181179296
  hyper

SEQ ID NO: 107117 - DNA, 14 bp, Homo sapiens
  chr2:181844776-181844790
  hyper
ccttcctccagctt

SEQ ID NO: 107118 - DNA, 23 bp, Homo sapiens
  chr2:181844867-181844890
  hyper
cggggcggcgggggactcccaac

SEQ ID NO: 107119 - DNA, 31 bp, Homo sapiens; identical to SEQ ID NO: 2061
  chr2:181846233-181846264
  hyper

SEQ ID NO: 107120 - DNA, 30 bp, Homo sapiens
  chr2:181846276-181846306
  hyper
aaataagcatatgggcgattaacagggtgt

SEQ ID NO: 107121 - DNA, 481 bp, Homo sapiens; identical to SEQ ID NO: 38347
  chr2:182321356-182321837
  hyper

SEQ ID NO: 107122 - DNA, 153 bp, Homo sapiens; identical to SEQ ID NO: 2063
  chr2:182322038-182322191
  hyper

SEQ ID NO: 107123 - DNA, 744 bp, Homo sapiens; identical to SEQ ID NO: 38349
  chr2:182322399-182323143
  hyper

SEQ ID NO: 107124 - DNA, 637 bp, Homo sapiens; identical to SEQ ID NO: 2065
  chr2:182521310-182521947
  hyper

SEQ ID NO: 107125 - DNA, 395 bp, Homo sapiens
  chr2:182542629-182543024
  hyper
ctgagaagattgatccgtggctttgggcccctgccagtgtcgctgcaggatagtgcatggtaaaggcataatttttctcaaactcggcggacggttcgtgtttgaaagagaagttgccattgatgctgagcggcgggctgaggggtccatcaaaggaagggctggtgcaatcagtcagagggctttcaaagaagggctccagcgctgcgctgtaggcgtgcggcggaggcttaacgtggaagacatgggagctgtccatggtaccgtaaggcggactgggcagcccaggcgactggtaggagtaggggtgtacagggaaggaagcgctggccgtcggcaggtgggggggcatgtcctggttctgctcaggcagaaaagtccgaggattgagttgc

SEQ ID NO: 107126 - DNA, 173 bp, Homo sapiens
  chr2:182544330-182544503
  hyper
gggcgcggcgcagagcgctctcccacgcgccggggatcaggtgcggaaggctcctctctaataaacagcccattgaaagggccgcccgctctttattggggcttttcaaagttcgcctcaaacctccctttaaaagattgagtaattataatggtcagcgattggcaaccgcg

SEQ ID NO: 107127 - DNA, 753 bp, Homo sapiens
  chr2:182545194-182545947
  hyper
aaccctggggcctccggacgccgcgcctcctgcgtgggcgaattcctcgtgtcgtggccgcgcgggcgctcaggttatatagcccagttagtgatgctaagcgcgggcggggccgctagctgaggggctagcaggtctatgcgcctgacgcctgcgcacgcgtccaggctgtgcgctccccgttctcccctcctccccacttctccccacgccttgctcgtctcccgccctcctccgacaaccgctcccctcaccctccacccctacccccgcccctcctccttcctccccggcatgcgccatatggtcttcccggtccagccaagagcctggaaccacgtgacctgcccatttgtatgccgcggagcgctccattccggcccctttgtggccagaagaaagtggcccatctgtcgccagttagagactccgcggacctgtttttacccgcaggagagattaaccctttcaggcggcagaagggacggggatagaggggggaggggatttgagggaaggaagggaaaagctaatgttaactaggtctagatcagagcgagtggcctgctttcgcgccggaagtaggacagaggtgaaagaggcagaagcggggagactgaggcacgcagtgaagagtcctcgctcctttcgatttcttgtcctgacactggcatccagagcagcatgactccttgccctctctgaaaggcccatcccttggcttcttctccttggcagacgctttgatcattg

SEQ ID NO: 107128 - DNA, 533 bp, Homo sapiens
  chr2:182546001-182546534
  hyper
cgccatataaaagcggcttcatctgtaaacgcagcgttgagattagttccccaacctccctaaccggatcgtcctctcccagttccttcagtacagaaaagttgtacctgccattctatccctaccatacgtgcaattcttcatgtcctgaccttcagctacgactgttcctccagaccctctcactacgtcagtccccacctccatccccaggatcttgtcctcaaagcgagctagttctcgcgaggaggccttggttccattggcctttgcgctctcttatgtgggagctggggacttctttgacggttgtattctgccttttaaccatggccactgggttgctggaaagggcaccctcactcagccagtccagggacgcttctggttccctggccagcccgccctggacggcctcggctctctagtccaggcattgaccacaagtacggtggtggacacctcgccacagccggacctgcgctcttgctcccctcagtctcgggtctgtataagatacttgattcagacaa

SEQ ID NO: 107129 - DNA, 15 bp, Homo sapiens
  chr2:182546599-182546614
  hyper
cgcctttagcacaac

SEQ ID NO: 107130 - DNA, 104 bp, Homo sapiens; identical to SEQ ID NO: 38357
  chr2:182547283-182547387
  hyper

SEQ ID NO: 107131 - DNA, 107 bp, Homo sapiens; identical to SEQ ID NO: 38358
  chr2:182547437-182547544
  hyper

SEQ ID NO: 107132 - DNA, 185 bp, Homo sapiens; identical to SEQ ID NO: 38359
  chr2:182547746-182547931
  hyper

SEQ ID NO: 107133 - DNA, 727 bp, Homo sapiens; identical to SEQ ID NO: 38360
  chr2:182548061-182548788
  hyper

SEQ ID NO: 107134 - DNA, 206 bp, Homo sapiens; identical to SEQ ID NO: 38361
  chr2:182548819-182549025
  hyper

SEQ ID NO: 107135 - DNA, 386 bp, Homo sapiens
  chr2:182549037-182549423
  hyper
cgcctccgccccgggggaggcagttgggctcccgggtcctggcctgaggctggagctgcccaggctcgacaggcaggcgacccgggagagccaagagcaacgagagacgctattaaaatgcctcgccgtcgccccgagcgcaaaacccatcctccccaaatctcctgggcttgcggcataatcttaattaagataattgattcatattgcacctgcgagaacggaaaaaattgatttcaacccccaaccccacaaatcgcttagagctattggatggagcacgacgcgactgtgatttagggagtgatttagtgccgggcttccccagctcggcctgcctgggcctttttatttattatttatgccctcccggtcccgacggggct

SEQ ID NO: 107136 - DNA, 145 bp, Homo sapiens
  chr2:182549861-182550006
  hyper
agcgtgagcagagggcgcacacctgtttcccggggatcgaggaacagcttgctgtccaaaggggatcgcagggccagggaactgacaagcacacgctatttgccaacctttgccttaatagaaagaagcaagcaaacaaaaatcc

SEQ ID NO: 107137 - DNA, 36 bp, Homo sapiens; identical to SEQ ID NO: 38365
  chr2:182550053-182550089
  hyper

SEQ ID NO: 107138 - DNA, 293 bp, Homo sapiens
  chr2:182607562-182607855
  hyper
tttcctagatcaaaacggttaattctagatagttaaaagttgaccttttagagttctgagattcattgaggtccataatcagcatccatctgaggttcttgctgtggtctcttttctgcatgtaattattttccttcgtatgtttgcccttttgattatacgtggaattttgaggttggtcgcttggtggcactgtagttaatagcttgattttcttgtgtatttttccactgccttcatagcttttgtttttaaattgcaattatgtgaaatatgtgcgacttttaaattct

SEQ ID NO: 107139 - DNA, 205 bp, Homo sapiens
  chr2:182756162-182756367
  hyper
agtctatattcaggcgactctttcaagtgtatgtttcagggtgcccaagcagacacttgttttctcgcgggggatgttttgtgagacttggcctccccacttacgttctatttttaggtgagggaggaggaggaggagaggaggaaagattattaacaaactaatcttgcccattccgcgggcagtagtcgggggctggcctgct

SEQ ID NO: 107140 - DNA, 31 bp, Homo sapiens; identical to SEQ ID NO: 2069
  chr2:182756672-182756703
  hyper

SEQ ID NO: 107141 - DNA, 169 bp, Homo sapiens; identical to SEQ ID NO: 38367
  chr2:182757467-182757636
  hyper

SEQ ID NO: 107142 - DNA, 405 bp, Homo sapiens
  chr2:182818944-182819349
  hyper
agggacccctccccccgcgccccactacccgctaaccgcctcccgccacacacacacacacacacacacacacacacaccccgcgcgcgcgcacacacacacaccccaccccaccaccccgacctccacatacattcccccgaccccctccagcagtgaagtctaagagcaccgcgaagtaatttaaattttcgagggaaagcacagcgccatctgtcggacatcatgccaattactcttgttaagttcctacctgacggttactttatactttgaactgctaggtactccttttggcctaaggacacagtgaaaaatgtaccgagaccttggagagccacgaaccaagaaacttcagaaacctctgatatctgatcaagagttaagagacgtcagaatcatcac

SEQ ID NO: 107143 - DNA, 139 bp, Homo sapiens
  chr2:183580826-183580965
  hyper
gccggagccggagccggatcccgcgcacaccgccacgtcaacctaaacctacaccgccctctccaccccaccgccgcagcgcccgctgggcccgcagcgggtctccccaggcagcgtcctccacgcctttcccacaatg

SEQ ID NO: 107144 - DNA, 151 bp, Homo sapiens
  chr2:183731180-183731331
  hyper
ctgcagcccgagccccgggcacccggagcaggcagagagcagccagggcaagcagcccggcccgcagcagcagcatccctcccgggctgccgcagaccatgatcccggcaggatggggcagggtgcagccgcgcagtggacgccaaaaggc

SEQ ID NO: 107145 - DNA, 721 bp, Homo sapiens
  chr2:183731466-183732187
  hyper
cgcccctgccgcccaggctgctctttcccaacgtctaagccttcggaagcagcaacatctatttattcctctccctctggcagaagcatcagacttcgcagatcagtcagataagagggacacgagaggaggcgaggaagacataaaaacaaaagtagaattcagctgagagctagttggagctctggggtgtctcctcccctagatcacgcacacaaaaagatgctaaagaaagcattaaattccccaaagtgaggaggacagaggggttggggggaaggagggaggaaaagctcctaatgggagagaagggtgcagtaagagtttacaagtcctgtgtgggctaagagctgcggccgccgctgcggctgcgaccctggctggcaggagggacgctcaggaggagccccgcagggacgtctgtgcctctgcccgggcggctctgcactttcctacctcccgcctgagagggagctccgcccctggggcagtctctgccctccagtgccggctgctcttcccgagaatggagtgggcgcccggggaagagaaggcctgggagtcgcaggcggtggggtgcgaagccgtgcgagtgcgagaccccaagacagcgccgagtcgagcgcgccctcacactagggaacccgtctttggccccagaaacgagcccctagcccctcactgaagagcccaccccaattccctacggaaaagtccccct

SEQ ID NO: 107146 - DNA, 105 bp, Homo sapiens; identical to SEQ ID NO: 38372
  chr2:183902296-183902401
  hyper

SEQ ID NO: 107147 - DNA, 567 bp, Homo sapiens; identical to SEQ ID NO: 2074
  chr2:183902442-183903009
  hyper

SEQ ID NO: 107148 - DNA, 601 bp, Homo sapiens; identical to SEQ ID NO: 38374
  chr2:183903037-183903638
  hyper

SEQ ID NO: 107149 - DNA, 164 bp, Homo sapiens
  chr2:183988918-183989082
  hyper
tcaggaagcattcccggatgaaaagcattcacagaaccatacgctggttcgccaccttcccggtgcaaaaaccctttcctcggaaattctcagcgcaaagactttgccctattccaaaatggctccggcgcctacaacttaagcatagcgcaggtccggaagtt

SEQ ID NO: 107150 - DNA, 30 bp, Homo sapiens; identical to SEQ ID NO: 2077
  chr2:184857322-184857352
  hyper

SEQ ID NO: 107151 - DNA, 1570 bp, Homo sapiens; identical to SEQ ID NO: 38377
  chr2:185462254-185463824
  hyper

SEQ ID NO: 107152 - DNA, 392 bp, Homo sapiens
  chr2:187350701-187351093
  hyper
cgccccatcgtaagcgaaagtggactgagaggaagcacaaacgcatggactcaaccagctcgcccagattcaccctcaggccttttgccatctgaaaagggcctatcggatgcgcgacatcacgagtgacgcgtagtcattttcccacgtcccgtccctgccccctcctagtgggacgcagtgggcgcgcacgcgcagctccgcttccgggagccgctcctcgctacccactatgctctgcgacatcgacctgtcgcaaaggccgcgtttgcggggccaatgagcgactcgctttccgtgcggtgcggcgagtgaggccccggtcttcctcctcgtcctgccgcagggccagaacccctgacggtattcagctgcgcgtaagtctggccggt

SEQ ID NO: 107153 - DNA, 30 bp, Homo sapiens
  chr2:187454732-187454762
  hyper
tcccagtgccgccgcggctctcaggcctga

SEQ ID NO: 107154 - DNA, 285 bp, Homo sapiens; identical to SEQ ID NO: 2079
  chr2:187454989-187455274
  hyper

SEQ ID NO: 107155 - DNA, 30 bp, Homo sapiens; identical to SEQ ID NO: 2080
  chr2:187558583-187558613
  hyper

SEQ ID NO: 107156 - DNA, 30 bp, Homo sapiens; identical to SEQ ID NO: 2081
  chr2:187558968-187558998
  hyper

SEQ ID NO: 107157 - DNA, 30 bp, Homo sapiens; identical to SEQ ID NO: 38382
  chr2:187559313-187559343
  hyper

SEQ ID NO: 107158 - DNA, 211 bp, Homo sapiens
  chr2:188418955-188419166
  hyper
atgtttttttcaaaacggagttgaggttattttgtttttccttccaggtattgaagacaggatttatcttctctacttcttcttttagaagcagatcaagaaactggcgattgaagagtaactgaaagaaacgcaatctgatcttactagcagtgaaagagcgaggtaagaatttgactattatccagcctaaagtcgctgctgtctgtta

SEQ ID NO: 107159 - DNA, 1329 bp, Homo sapiens
  chr2:189156401-189157730
  hyper
ccctccacccacctccggttccgcgtgcacgcgcgagatagtccagtgggcccacagataacgaccatcagagattaaagaaggaaagtcagcgagcttgaacacaggcgtcccgtgtggaaatgtccaaggagaccgccagaagtgcgcaagccggagtcggctagagtttccttctcaccgagagggggagcccggcgttcccggccgggagcgacccggagtccccagccccgcgtcccagctgccgccagcgccagttttggattcggcggattaggaagaggagggaggggggagagagcgcgaagagggaggggaccgaagctggagggtcccgagtccagcgccgtgttggcgtagagaaactttccctctcggcctcggagacggcgccccggccgtgccggagtggagatcgccaggctcggaggaaccggcagctctccacgcccctgcccgaagcctgacccgactgcctctctcagtgaggtacggagatttatctaggctcttccctggctgcgaacccaggctccctccaggtagcgtggaatcgcttagaagctgatatcccgaggggcggtgggggtggacagctccggccaccagtgcccgggaaggagggcgcggggctgcgcgtagccgctggccagcaggttgtaaaaaattaggacagctaaatgctcagggagtcgtccagcactaaaggaggctaagacctgttgacgcctgctatggcagcgcttgagaaatgactgggggagtccagcgaggtcggggacgcagcggtctccgggctccagaaacctccttagccttttgtggtaactttggtccggcggcggggggccggtgagcaggaactggagggaggcggtggggaaaccgtggatccgtccggctgagggtgcgtggatcagactgggctgagcaggcaagtcatcgtcgggtcacagcgaggcgacccaggagcgaacttccagggcagcctcccttttgttggcgctgggagagaatgtgggcatgggggtggggaggcgcgaagctccgaggccgggccgcggatactttaaagctcagagctgggagggcccaaaggaaggggcggcgtccacatggttacccttctgctgcgcgggtcaagtagcttcttctggagggcgcaaggcgcggcgggggtgatgagcccttgggttctcgctccgactgctaaattcgcttggccgggtccaccttctcgtggcctcactcgccacacggatcagaatccggagcaggcagttctctctattctgaggctcctgcggctgccgcgctgacttccct

SEQ ID NO: 107160 - DNA, 133 bp, Homo sapiens
  chr2:190305688-190305821
  hyper
caagaacagaagaacggctaatgagaggaacaaaaagctgtacaaggaagagaaagctacctttccacccaataactcaacgctgcgaccgagaaaaccagggacgcgagaggctcgcgtcatcctgcagcgc

SEQ ID NO: 107161 - DNA, 112 bp, Homo sapiens
  chr2:190306061-190306173
  hyper
aaaaggtgcctgcacggaagcggagtcctaccaccgagtctcaggcctagaagggcccgggggtgggttctgtgggctgggaacagccttattacccggctcaacgaaggaa

SEQ ID NO: 107162 - DNA, 30 bp, Homo sapiens
  chr2:190306476-190306506
  hyper
tgcagattgggttgcgtcccccgattcctg

SEQ ID NO: 107163 - DNA, 1337 bp, Homo sapiens
  chr2:190445059-190446396
  hyper
attcctccagaactcgtgtagagttgcttgtctccaaagccccacctgggtttccaccatatgctttcggtcaacgacactcaccacagcatcctctctggcggttgtgatctcccgccctggtcatgacactaggcgaccccgctggctcttctgcggctgctatcgctgctgctgctctcgctgaggtgcttgttaacaggagtgcaaggaactggagatagcacctctaaaaacacaacagccttgggcaaaaagactacaacgacgactttggcaaagaacaaaagaaaaggggcccagggattttcttttttccttctttccaaacttagctaacactgtagctgaagttggaaaggcaaagccttatggaagcggtttgggaggctcagcaggtcgtccgagcctagcggacgccctgagccagctctctccgccgccgccgccgccgccgtgggccgggcccagctcttataccgagtcgggggcggagctccctgcgacctccgactggggccgccccgtccccttcagggccgcccgggcgtccccgcggcgcgagacgagctcccgtcaaccttgcgcgccgggccgtccccgcgcccttgcccggaggagtcgcccaccccgggcgcaagcgtccaaccggccgcagacaccctgcgcggcttgcggggaccttcgcctcgacgcgttccactccccgggttttcctgctctccgggaagccgcgagggcaacctcggggggcggccgtggggctgggaaaaggaggaaggcgcgtggagccggcggggcggcgtagggagattctgcgcgaaactaagcgtcaggtgctggaagaaagcgctgcgcaccggctaccccgcagttcagggaaagggcggccgccggacggtcgcagtgcaaagctccagcgcgagcttggtgggtggggattccttttttaacgaaaataatttttaatacaggtatctaaataaatataattcatgccacagaggccgctttcctggccgtcccattccggcccgcctgcagcagagaatgcctttccttccccggactgcatagcagggcttccctcaaagaaccagaatcaaagggcaggaagggggcgcaaagatcagagtccatccctcttgagaggagcaaacggaggcttgcaaaggtgaagtcccgcagcgagttacagacctacccgtatccccaaactggggcctccaaatccgtcctggagacagaatgaggatgctgcagccccagcaaacccttcaccatcattccttctccctctgtaccctctcaccccgcccccacgcgcgcgtcccttc

SEQ ID NO: 107164 - DNA, 30 bp, Homo sapiens
  chr2:190525798-190525828
  hyper
ttcttttgccaacacggtatctcttaaatc

SEQ ID NO: 107165 - DNA, 314 bp, Homo sapiens
  chr2:190526050-190526364
  hyper
cagccatgcgcaggcgcgaaactcctccccaggccagacccggcctgcgcatgcgttcaagtgagcgcgcagacgctattggtaagactcgcgggaaaagaaagggtgagcgcggctggaagcgcgcatgcgctgtggctaatgccgtaggctccttcagggctgagccatcccgcgtgtcttgcgctcggtggaaatgcccagccgagggacgcgaccagaggacagctctgtgctgatccccaccgacaattcgaccccacacaaggaggatctaagcagcaaggtgagtgtgagacgcgacgaaaaggctc

SEQ ID NO: 107166 - DNA, 30 bp, Homo sapiens
  chr2:190526613-190526643
  hyper
acttttggaaataccgcccaccccaaatct

SEQ ID NO: 107167 - DNA, 30 bp, Homo sapiens
  chr2:190627248-190627278
  hyper
aagcactaccctttcgggccaagaaagctg

SEQ ID NO: 107168 - DNA, 323 bp, Homo sapiens; identical to SEQ ID NO: 38390
  chr2:190649066-190649389
  hyper

SEQ ID NO: 107169 - DNA, 202 bp, Homo sapiens; identical to SEQ ID NO: 38391
  chr2:191044991-191045193
  hyper

SEQ ID NO: 107170 - DNA, 763 bp, Homo sapiens
  chr2:191045258-191046021
  hyper
cgggtctgttcccgctgcggcgccggcagctgcttggtagttgcggggggcgtgagggcggtggcccagaccaaccggctggcagcccagctccgctccgcccgcccctgcctcggaccctgcgcctgaggaagtatcgaggcaaccctctgccacccgaagttcgtgggtcgctcccagagggcgcgccctggagccgagcgcccttgggcggccatctggaggccaggtgcgggccgcgaacccgcgaggagcgcgcggcgggcgcggcggcgacggcaggaggaggggccgggagcccgggcgccgccgaaggacgccccgtcctccacatgctgccacttggctgagccgggcgccggcgagaaggcggcgccgctgccctggcagctggactgcactttgcccccgcccggcctcagctgccgcccgcccagacgccagcaagcccccctcccacgacagggctgctccgggagcttcggagacccgccccgggcctgagcgcaggctgcctccgggaccccacggctgtccggacgtgccatgggcgcgcagctgccgggcaacgtgttgtgtaagtgaacatctgggaggtgggtgactggtgaagggcgggtgtctgtcggtctttgcttgtcagctgtgccttttagatttttcaatggcagaaacccatgagttacaggaggctttaattaaacgagaccgttctcagccagctgccgtggatagagcctcacatctccgtcccctaatcgag

SEQ ID NO: 107171 - DNA, 184 bp, Homo sapiens; identical to SEQ ID NO: 38393
  chr2:191208156-191208340
  hyper

SEQ ID NO: 107172 - DNA, 30 bp, Homo sapiens; identical to SEQ ID NO: 2091
  chr2:191272589-191272619
  hyper

SEQ ID NO: 107173 - DNA, 94 bp, Homo sapiens
  chr2:191273655-191273749
  hyper
ccgacccgcgccctcgccataaacatccctgggaaaaaggaggaggtgagaacctccacacagccccagtgacaaggacgcggccacttgtgtg

SEQ ID NO: 107174 - DNA, 31 bp, Homo sapiens; identical to SEQ ID NO: 2092
  chr2:191400042-191400073
  hyper

SEQ ID NO: 107175 - DNA, 181 bp, Homo sapiens
  chr2:191512940-191513121
  hyper
attacccggccagcgcgacagttgtcaaagctgtacttcggactccctggttccattcctccctcctcctcccgtcccaacgccagagcggaggtggggagggggcaagatgggcgaggcagagatgctctcccagccgccggttcttccagcgccgcgcacctgccgccccttcctccat

SEQ ID NO: 107176 - DNA, 30 bp, Homo sapiens; identical to SEQ ID NO: 38398
  chr2:191513467-191513497
  hyper

SEQ ID NO: 107177 - DNA, 249 bp, Homo sapiens
  chr2:191514201-191514450
  hyper
ttgggggcggtgtccgggggaagcgggctccgcgcggccgccgccggaaggagagggcggccccgggctcgtgtgggcgattcccggagacattctgtgtgccagggcggcggggagcgcggccctgactcgtgcattttccctccgagaaaggttggggtgccgagtccgttttgctaacggggctgggggcgtcacacggcgctctgggggtgtgcgatgtgggttgtgcgcgccggccccagagtt

SEQ ID NO: 107178 - DNA, 391 bp, Homo sapiens
  chr2:191514823-191515214
  hyper
gaatgttgcaggatctcggggaaagggatagttgagatggaatatacatttgtcgattctgcagaccaagctttgcagcgagtgatcgggaggaatcgtagacttgcatgtacttacacctcgctccctgagattcgggaggcacggaaaattttgggatggctgttaatttaaaatttcatctgaaagagtcgatttggagtaacttgtcactaccagttggtttgccagtgacgtgtctgccaactcaaagagtgcaaagatcagaagctgaaagaggaattctcagatcttgtttaaaaatattttggcagttttaatagataatatgagattgcataggaacagaggagccgaatttaaaatagattagtcacgtaggaaatgctta

SEQ ID NO: 107179 - DNA, 30 bp, Homo sapiens; identical to SEQ ID NO: 2095
  chr2:191728884-191728914
  hyper

SEQ ID NO: 107180 - DNA, 84 bp, Homo sapiens; identical to SEQ ID NO: 2096
  chr2:191745040-191745124
  hyper

SEQ ID NO: 107181 - DNA, 413 bp, Homo sapiens; identical to SEQ ID NO: 2097
  chr2:191745184-191745597
  hyper

SEQ ID NO: 107182 - DNA, 437 bp, Homo sapiens; identical to SEQ ID NO: 2098
  chr2:191745656-191746093
  hyper

SEQ ID NO: 107183 - DNA, 81 bp, Homo sapiens; identical to SEQ ID NO: 2099
  chr2:191746518-191746599
  hyper

SEQ ID NO: 107184 - DNA, 253 bp, Homo sapiens
  chr2:191878926-191879179
  hyper
gcccggcccccttccgcccccaccaatcaccgggcggctccgcgctcagccaattagacgcggctgttccgtgggcgccaccgcctccctctgcgggccgctgctccgcccacgcgctggggtatttccgccggcttccggcgggggccgccggctgggtgagctgcagcccagtcccgtgttgccacgctgggaactggcgttctgtttacatatcttagagaacgatcagaaggacgtgctgtgtttgcag

SEQ ID NO: 107185 - DNA, 863 bp, Homo sapiens
  chr2:192015069-192015932
  hyper
tcatgaaaactgtgacgttgcttctgaaaactcagtgcctgtctgtcctttttgcgtgcatttcctagaagatcccactaaaggggcattttgtcccaccgtctgtgagctggtggtgccgctttggctctgtggcctgtagcttgcaaaaggagatgacctgccctaaaatgtcactcgcgcccatcaaagccacagtcaccggctgccgtagctgcaagcttttttctgaaatccaggtacgctaatctaaagtcagacatcacagctctagagaagctggctaagaaagtgaagaggggctcactttcagcctccgcgaggacacacctccgcagccgccgcagctcccctggcccccgcagggagattcgcccgggcaccgtggcgcgggcctgcggagcggtttccgcggagaacccgtgccagggcgcatctgtgggtcgtggagtcgggcgcttccttctataataagcctcctcaggaaggttaaaatgaagcaattgtcaaaacgccaagggaaagcaaagcttcagagtatcctgcataataagcatgtcctccttacaagaggcagccagaaggtgtggtctggccacttacctagcgctctctcagcacaggtcccaggcagtgctcaagtccaaagtcagaagcgcccctcacagtccctaggagaaagccgctgacgccatcatcagtaggggatttgcatttctcctcccacttgaggctttcctgtgcgtcagtgttcgagtctctgggactttacttgggtcagttcccacccactctattctagaaatgctaacacgcagaaactgccaggctggagccccttcaccgggcgtcctcttccctct

SEQ ID NO: 107186 - DNA, 839 bp, Homo sapiens; identical to SEQ ID NO: 38406
  chr2:192109716-192110555
  hyper

SEQ ID NO: 107187 - DNA, 444 bp, Homo sapiens
  chr2:192110584-192111028
  hyper
cgggagggaagaagggcttgtaaactaagttgctcttactttgccccatgcctctcgtacctgtgggcagagtcgaatctcggctgtcctcgtgttcacccacagcccctccattcctctggcccacagctgtttcctggccccctggaaagacacggtgtggcttcctccgggcaggaaagcggagggagaacaatggggcgtcctggggagtggggttcaggtgcggtgtgccccggcggcggcgggggaggaggggcccgggacgctgtgggcctccctgcgcgtgcagctgcgctcgcctcctttgttccgccgcagcggagggggttgccctgggtctcgtttcctgcccgggatgggattgattcacggtcccagagagggaaggggaagggggcggggctggaatggaaaccagattagagacgggagctacgaagg

SEQ ID NO: 107188 - DNA, 55 bp, Homo sapiens
  chr2:192542862-192542917
  hyper
gtcgctgtttgggacgctgggtgtgcggtgttctgtctccgctcccgtttcgctg

SEQ ID NO: 107189 - DNA, 30 bp, Homo sapiens; identical to SEQ ID NO: 38409
  chr2:192543313-192543343
  hyper

SEQ ID NO: 107190 - DNA, 30 bp, Homo sapiens; identical to SEQ ID NO: 38410
  chr2:192587188-192587218
  hyper

SEQ ID NO: 107191 - DNA, 343 bp, Homo sapiens; identical to SEQ ID NO: 2103
  chr2:193058974-193059317
  hyper

SEQ ID NO: 107192 - DNA, 204 bp, Homo sapiens; identical to SEQ ID NO: 2104
  chr2:193059344-193059548
  hyper

SEQ ID NO: 107193 - DNA, 1231 bp, Homo sapiens; identical to SEQ ID NO: 2105
  chr2:193059661-193060892
  hyper

SEQ ID NO: 107194 - DNA, 30 bp, Homo sapiens; identical to SEQ ID NO: 38414
  chr2:196521658-196521688
  hyper

SEQ ID NO: 107195 - DNA, 30 bp, Homo sapiens
  chr2:196522920-196522950
  hyper
gggccttgccagggcgcgagcaacatgacg

SEQ ID NO: 107196 - DNA, 30 bp, Homo sapiens
  chr2:196933531-196933561
  hyper
gtctcagctccctccgcaccagagccgtct

SEQ ID NO: 107197 - DNA, 387 bp, Homo sapiens
  chr2:197035575-197035962
  hyper
agctgggagcaggacgcgtccacgagtcccgatgggaacgcgcccacgccgcagctgggactcgggagaggctagggggaccgcgtggccttgctgtggaagggacccgcgcgggcccgccgcgaagggggccctgcctggcgcgacctggggagagccggggccggccgggtggagggcgcacggggacacacggacacgcacagacacagacacgcgccccgggctgaggagggtggtgggaggaccgccggccgccccccgcgcggagccccagggaacccggactccagccgcaaagcggagaggcgccagcagcaatcagccacctcaggggcggcggagtccaagcccctctcagccggaccgtaccgcctaaaccctcct

SEQ ID NO: 107198 - DNA, 1386 bp, Homo sapiens
  chr2:197457183-197458569
  hyper
agacctctgcagtctcgcgtcctcggaaacgtctacgtctaaatctgcagccccagtttgctccaggccccaagctccagcagaggatgttcacggcacattcccaaccaaaaaggaaatgaagcgtcctctccctcaactgatgctcaaatagaccccaaagtcccagtttccctggagaaccaaaccatccaacacatcctgggcagcggaaaccgaaatggcaaatgaatgaccgcgccggggcgcaagggaggaaaaacaaagccacctcccgccgtccgctacctgcggcgagggccgcgcgctcacctgggctttgcgcccgtcgccacaagctgcgggtggggacccggccgcggggcgggagggcgcccccaaagtcgcccggacccgcggccccggcgccctgcggccggtccgtgcgcgccgaggagaaagcaggcggccgggggcgccgccgcgcgttgcatgcagctcacggctgctgcggccgctgccacggagccgagagtctctgcgctgcagtccccgaccccgagaccgcgagaagcgcccggagagacgcggcgcaggggcagagcgcgctcggcgcgcccctcagcggctcttcccgccgccctccgcagcgggctgggtctcggctcgcctttgtgctggcatcttcctagctcccagcgacacccagagctctcgaggcggctccgcgccgccacccacccccgggttacgccacggcccccgcgcgacccgccgattgtgtcgagtcagcagcggcagcggggacgcgcgaagccatggctcccgcccgcgctcgggagggcgccgggggtcctgcgcctccgggaggtttgtggccgagcgcggcgcggccccgagcggccccgcagcgcccggctccccgccgctcgctctccaggcgccgacccgcctgcgtcgccaccctctcgccgctccctgccgccaccttcctcccgcccgggtgccgggcgtccgctccagccgcggtgccccggtccgcggagagcgaagagtccggcctcctcacctccagccgcgccggcgcccttcccgctagacgcttcggcggcatctgcccgcaccgccctgcgggacgctgggctgggagctggcggcacgtcggggaccggtggaagggaggcgggggcagaggacaggagggacagccagaccttggccagcgggacctccctgaggaaggtgcggaagaacggggcgggtgcggctgggcggaggacgagtcccgaggctgcggcggagcctgagttgctctccttctgcgaagtcgaaggacaggaggattcctagaggtgtcgcggagggtggaggagaccctctgaggtcgtgcagacaacactgttcctc

SEQ ID NO: 107199 - DNA, 30 bp, Homo sapiens; identical to SEQ ID NO: 38417
  chr2:197504439-197504469
  hyper

SEQ ID NO: 107200 - DNA, 91 bp, Homo sapiens
  chr2:197664293-197664384
  hyper
cccttccaagtagtcgatgagttccggactgaaccctgacatgtttacagggtctgtctgtgcaaccccaggaaccgggacagagaaccgg

SEQ ID NO: 107201 - DNA, 696 bp, Homo sapiens
  chr2:198174652-198175348
  hyper
gcagaccgtagcccaccgcctgtgagtggaggctccgagccgacttcacctcctcctcagagggaccggcccgatccgaaagggcggtctccaggggtccccatcccgcaccacgcacacagcctggcgcaactaaagaggaagtcggatgtcacatccaacggataaataaagacagcccggccacacaagagccgcattctgggcaggactcctgctaggtttggggaggggtcccagtctgcgatcctttctccctcttcgtgcagcgtcctcctccccggggcccgggccggcggcgcccacgcaacgcggcgcggtgcgagtcccgagagcacctcgagcccccggccccctccccagccccgccgggcccgcggccgccgcactcccgcacgccggctgcccagcgcccacgggccctgccccagactcgggcgcgcagttccgacggcccagggcggggacggcgcggcggaggggagctgccgccgcgggctctcggaggcaccggcggccgcacacagtcctccccttcgccgcgagtaaacagctcgcgggcgcgctccagccgcgcccccatccccccgccgggctccgcgccgccccgcgcccgcgcgtcccgcccgccggcgccgccgcccgctacctggtcggtgagtttgagcactgccattcttccgctccttcgcgcgc

SEQ ID NO: 107202 - DNA, 122 bp, Homo sapiens; identical to SEQ ID NO: 38418
  chr2:198175714-198175836
  hyper

SEQ ID NO: 107203 - DNA, 30 bp, Homo sapiens; identical to SEQ ID NO: 2109
  chr2:198257066-198257096
  hyper

SEQ ID NO: 107204 - DNA, 122 bp, Homo sapiens; identical to SEQ ID NO: 2110
  chr2:198257785-198257907
  hyper

SEQ ID NO: 107205 - DNA, 30 bp, Homo sapiens; identical to SEQ ID NO: 2111
  chr2:198260933-198260963
  hyper

SEQ ID NO: 107206 - DNA, 107 bp, Homo sapiens; identical to SEQ ID NO: 2112
  chr2:198262739-198262846
  hyper

SEQ ID NO: 107207 - DNA, 149 bp, Homo sapiens; identical to SEQ ID NO: 2113
  chr2:198265014-198265163
  hyper

SEQ ID NO: 107208 - DNA, 179 bp, Homo sapiens; identical to SEQ ID NO: 2114
  chr2:198265428-198265607
  hyper

SEQ ID NO: 107209 - DNA, 30 bp, Homo sapiens; identical to SEQ ID NO: 2115
  chr2:198266164-198266194
  hyper

SEQ ID NO: 107210 - DNA, 371 bp, Homo sapiens; identical to SEQ ID NO: 2116
  chr2:198266478-198266849
  hyper

SEQ ID NO: 107211 - DNA, 433 bp, Homo sapiens; identical to SEQ ID NO: 2117
  chr2:198267317-198267750
  hyper

SEQ ID NO: 107212 - DNA, 71 bp, Homo sapiens; identical to SEQ ID NO: 2118
  chr2:198268365-198268436
  hyper

SEQ ID NO: 107213 - DNA, 94 bp, Homo sapiens; identical to SEQ ID NO: 2119
  chr2:198269811-198269905
  hyper

SEQ ID NO: 107214 - DNA, 30 bp, Homo sapiens; identical to SEQ ID NO: 2120
  chr2:198270121-198270151
  hyper

SEQ ID NO: 107215 - DNA, 82 bp, Homo sapiens; identical to SEQ ID NO: 2121
  chr2:198272717-198272799
  hyper

SEQ ID NO: 107216 - DNA, 148 bp, Homo sapiens; identical to SEQ ID NO: 2122
  chr2:198273116-198273264
  hyper

SEQ ID NO: 107217 - DNA, 30 bp, Homo sapiens; identical to SEQ ID NO: 2123
  chr2:198274673-198274703
  hyper

SEQ ID NO: 107218 - DNA, 30 bp, Homo sapiens; identical to SEQ ID NO: 2124
  chr2:198285175-198285205
  hyper

SEQ ID NO: 107219 - DNA, 415 bp, Homo sapiens
  chr2:198299571-198299986
  hyper
ttggccccgaaacgcgggctcagctcctacgaaagaaaccatagaaaaaggcagaatcctaggaaaaaaggcttttattaggctagcaacgaagaaaacacgtaagcagggaaagaccgcttaccttcgtgagtcttggcgatcttcgccattttgtccactcgaacacacagacggaactggcgctcccaagaacttccgctcgtcgccgccgccacggagaaaaatagctgggggctgcactctgcgcgtgcgccaaacgggagcgcgctccgtcgggtgacacgtgacagaactgccacctagagggaaccgcgaggtgcattgtgggtgggggaggagacacggttgggccctgaagtcgcctgcgtggtgacccaggaaatccccgagccgagccgtaaggtccttaagt

SEQ ID NO: 107220 - DNA, 30 bp, Homo sapiens
  chr2:198317905-198317935
  hyper
tagcctcccggaagcggaccccaggagaac

SEQ ID NO: 107221 - DNA, 30 bp, Homo sapiens
  chr2:198318191-198318221
  hyper
gaagagaccggagccgggctccgggcccga

SEQ ID NO: 107222 - DNA, 30 bp, Homo sapiens
  chr2:198363853-198363883
  hyper
ttaatctttcaccgcgaaaacggccttgtg

SEQ ID NO: 107223 - DNA, 298 bp, Homo sapiens
  chr2:198364581-198364879
  hyper
caccgcaatgagcccgtgtcccctccctccgcctctactcccgccccgcggcaccgcgtgtgcaggcagctcccacccacttcccgtcagcccgggccctgcaatctgcacaccctgcgcgcgagccccgcccctccctacccgcgcagggtgtgctagcgcgctcagccctctccggccggcttagtctagttcccgggcctcgctcggttccagaactttccagaaaatgccgcgctccctacggctcaagggtcaaatcgcgtcatttccgggaggggacgaaggggtagttctt

SEQ ID NO: 107224 - DNA, 30 bp, Homo sapiens
  chr2:198365382-198365412
  hyper
agaacccgggcgcacgcgcagcgtctcacc

SEQ ID NO: 107225 - DNA, 30 bp, Homo sapiens
  chr2:198380450-198380480
  hyper
tcccgtgtaactaacgagagcccataccaa

SEQ ID NO: 107226 - DNA, 62 bp, Homo sapiens
  chr2:198569897-198569959
  hyper
tttttctggcaagccgccgtccattggcggcctctggcgccgcggctttcggcgtgcggacg

SEQ ID NO: 107227 - DNA, 105 bp, Homo sapiens
  chr2:198569977-198570082
  hyper
cggggccgggcggggagggcggtgagggccggcgctcggggccgcgtttcattggctttccggccggaagctgcggcgcgacccggctgcgcatgcgcctctcac

SEQ ID NO: 107228 - DNA, 7 bp, Homo sapiens
  chr2:198570108-198570115
  hyper
cgcttgc

SEQ ID NO: 107229 - DNA, 1300 bp, Homo sapiens
  chr2:198669112-198670412
  hyper
cgggtacaccctggctcgagtacattagccccgctgggccggctcccagttgcagaacacattccattcttcgcgctcgggcacacccctccgcagtgaggattggtcgggccgagccccctcggcgaggcgaggctcctaagaggcccagacgcctgccaatccccaagggctgtcaaaacaagtctccctccctgtcacaacagagctgagtggaggccgccgccgccgccgcacttcctgggaccgctgcgccgcagtccgcgggcaggtggcgggtgcgcccggccgcagtcgcccggctctggcccctatcgggccgccggcgtccgggctccagaggccgcctggctgggcgcccggtgccttttgtctggcgcagggccggcgtttgcatcacatttcggatacctccctctctttttcgcctctccttctgcctcccgctcacatcgcctccccactcccgccaccgtcccccgccggactgctagcctcctagaccgaagcccgaggacgtctctgcccgagcgatgtcccctctccagaaagttgccgccgccgccgccgccgccgccactgccgccgctgggcggtgaaacaaagtctggcggggccgcctcccggtgcaggagcgcaccggtgcctagcggctggactccgctgccgggcgtcccgctttcccccggggagccctaaacgctccaggccatggccgagggcgcggccggcagggaggatccggcgccgcccgacgcggcggggggcgaagacgacccccgagtgggcccggatgccgccggggactgcgtgacggcggcctctgggggccggatgagggaccgtcgcagcggggtcgcactgccaggcgccgcggggaccccagcggacagcgaggcgggcctcctggaggcagcacgggcgaccccccggcgcagcagcatcatcaaggtaagcaaagccgcgccgcaccgggagcgtggctgtgggtgatgggtgggtcagggacccgggcaggatgtgcggtgtccggaggcatccgggctcagcattgttttctcccacctccttcaacgccaaaccttccttccttatccggaggttcccagactcagctgtcagccacgagacgcacaagtgactttttctccccactgacggcagaggaaaagttccgctctgcgtctttgcgttctgatggatgctttccctcattttctctgcaagcttcactaaaccgttgatggagggaggaagggagaactctggataaatgcagacccaccggatggttgtgcat

SEQ ID NO: 107230 - DNA, 929 bp, Homo sapiens; identical to SEQ ID NO: 38439
  chr2:200320440-200321369
  hyper

SEQ ID NO: 107231 - DNA, 390 bp, Homo sapiens
  chr2:200321660-200322050
  hyper
ggaagccgcaggtctcgacacccctggattgggggggtgggggggggcggggaaggaggggaaacacctgatgaaacggcgctcgcgttgtcactgacacccgcaagaagcaagaccccggcaccgtactgcgtgcgcgctgggaatcctcgtgggcgctctggccgcgcgagcagtgtcggcgccacgggtcaaggagacaaggtgggggtggcagggggaggtgaaaggaaggatgcgagatgaagacacggagcaggagggctgagggcgaggcttccgcctgcattccccgacttcgcggtccgagaggccgagagcggcggggaggggacttcgttggccctgggcttccccgaactcccgagcgcggcgcgggagccctcgccc

SEQ ID NO: 107232 - DNA, 214 bp, Homo sapiens
  chr2:200322456-200322670
  hyper
gcggcggcggcgagccggggctgctggttcgcagggcggctagctcgcgaggaggcgcggccagagcggtgggaccggtaacaccaagagccgagaagacgcagggacccgggaccgcgcgcgggaggaaacgcggcggccgcccaagctgtcacctccagcctctcccctctcggccgcctctgccagcagccagagccggactcactgacaa

SEQ ID NO: 107233 - DNA, 782 bp, Homo sapiens
  chr2:200323015-200323797
  hyper
gcgacccaacggcggcggggctgcgaaggaggcagagggacaggcgaggggcgggtgggaggcagggaggagggaagaggaaggggagagtcggcggtcggagcggggtgacgaggacctcatgcacgaggcggcgaaggaccgatggcagagaaccgagtgcggcgcgaggcggtggccgcggccagcgggtgggtgcgtctgggcgcaggcgggcaccggggcccagggtctggtcctcctccttgtggcgggtccagggcgcggccgcctcgcccagcccctaggcgcactcgtcccggcgcggaggcggcggcgacaaggcagtcgctgggtgccgcgtctgccggcggagacgcagaccgacgcgcaagaggcgaccgcggctgcctcggctcccagctctgttaactgcgcggagtactttcgactttggagataggagggcgatcgcctcccccacccaccgcctccgcccaccacccaccgcctccgcccctccgagcaacttttcccggtgcctgcgagctccccctccgcgccgagccgaacgtcccggcccgccgcgcttcgtgccgccgcgcgcgcagggaaggccgcttctccttcaaagctggcacggccgcgagtccggaacaatagtcggggtgtcccgaatgccaggagcacggccactgcccgccgggctgtgggtggcacaggaatgggggttgcgtggtggatgcagagcggggtgcatccctggatggcatcgctggagcgctcgccgctccggcgacatc

SEQ ID NO: 107234 - DNA, 583 bp, Homo sapiens
  chr2:200324028-200324611
  hyper
acttttgccgactcccgcggccgcggccgccggcagcccgactccggccgcggtgctcatttaaggtggcgcgggcactagccgagcaggctggcctctggccgcgcttttgtccctgcgattccgcttgggcgcgctgcctccttaaggaaaagcacgtgggcaggggccgcagcccccgcgagatacccggggcgtcggcggacattagccgctaggaccttaggcgagaaaatgtggacgcatccccgccggccctgaggccagagaatcccccctcaactggttgcacctcatgtccctcccgcacacgttgactctccctcctaatccccaggaccccgagggctctcccacatctcccgcagcaagagccaccgatcccccttaagaagcgttgactgtacggcggcgccagagggccaaactaagttcggtttcgggaaacgctctcgggagcagttctgtaaatccctgctgggagcagagactgcgaaaagctgagtccgccgatcgtgcccgggacaaggctgccttccactcgccctcgccgcatctacctggtaggcggcatgcgcacggg

SEQ ID NO: 107235 - DNA, 30 bp, Homo sapiens; identical to SEQ ID NO: 38442
  chr2:200325411-200325441
  hyper

SEQ ID NO: 107236 - DNA, 542 bp, Homo sapiens
  chr2:200326711-200327253
  hyper
gcagggtgccgggcgcgggacttcggctctcgcctgggccatcccgggctctgagggcccggcatccatccccaaggtccatggctttcaagttcggtcacccaggcagagagaccctgccttttaaagagccctggaaagttgcgccgcgttttccctcaaccctggaacacgcagggaaaactatgggaatcgcccgcgtcaaaagctttcgacggcttctaggaacccaagcgggcctgcctcttcccctggagcttgccctcctgggggcgggaggagggcgggagggaatcatttctttcaaatgaagcccacgccagctctgaagccaatttccgccgcggactgtccgtggagagttggcgaccaacactttctcggacggcataaccgcgaggggcttagactggaaatcagatgcgccaagaggacaagagccaggggccagaataccccagtgggggacgcgccttggaggacggttcgcccagggtgggcttcagccctttcccagagtgctccgggcgtctggggactga

SEQ ID NO: 107237 - DNA, 28 bp, Homo sapiens
  chr2:200327423-200327451
  hyper
ggaggtagagactgtggaggtcctcctc

SEQ ID NO: 107238 - DNA, 1109 bp, Homo sapiens; identical to SEQ ID NO: 38445
  chr2:200327575-200328684
  hyper

SEQ ID NO: 107239 - DNA, 364 bp, Homo sapiens; identical to SEQ ID NO: 2131
  chr2:200329029-200329393
  hyper

SEQ ID NO: 107240 - DNA, 531 bp, Homo sapiens; identical to SEQ ID NO: 38447
  chr2:200329432-200329963
  hyper

SEQ ID NO: 107241 - DNA, 543 bp, Homo sapiens; identical to SEQ ID NO: 38448
  chr2:200331852-200332395
  hyper

SEQ ID NO: 107242 - DNA, 329 bp, Homo sapiens
  chr2:200333429-200333758
  hyper
gactgctctacccctcgcaggcccgcctctgggcaggcctgaggtggccctggagccccgccagcagcccccgcccctcaggccaagctctggccctggcaatctctgcactttgtcatcacgcccgagtatttgacattcgcaattatctgcaaataccctgatcagtttgtatatgaaacactttttttcctgccttaaggttggaatctggtaagtttcagacaagtggttgcagggggagatgacccaggggaccgtgcgggacagggccggtgaacccgattccgcgaggcgggcgtctcgaagggactggtctgcgtgcctca

SEQ ID NO: 107243 - DNA, 625 bp, Homo sapiens
  chr2:200333800-200334425
  hyper
cgagaaagggcccacatctcgagtctccagtctctccttgaaaagagcaccccctaatcccggaggaagggagggtgaaggaggaggggagagcccactacaggcaaggcaggaaggttaatcattttgttaaccggaaagggtgctgccccgcctggccgtcgtcaccgagcgtgtcagtcacccgctctcgatttcgccgcagaattacctgctcaaagagccaccccaagaagccctcagctccgaggtcttcccgcccgtcgtctgcgggaagtaaacggcgtcctccctccaaagaagtggatgccccttcgactctcctccgccccccggcggttcctaaatctaggaaagccagccccggcatcgctcactactcctgcacctcagctctgggatacccgctcagtacagacagaccatcaaccaaaaaagaaaagaagaaaagaaaagtggtggtgggggtgggggtgggcagggagcgtaaagtagcgagatcacttatttgactcttctgttttcttaggaacctgatcctggcccccggcagagcataagggcccgaggccagggacctagaggccggaccaagttcgcgcgaggtgttcacagcctaggcgcc

SEQ ID NO: 107244 - DNA, 95 bp, Homo sapiens
  chr2:200334504-200334599
  hyper
cgaaaccccttcccacattagcttgttgctgtgctactgacactgggcttagtcgatgttcacacctattacatttttccggaaagtgggaggag

SEQ ID NO: 107245 - DNA, 317 bp, Homo sapiens
  chr2:200334886-200335203
  hyper
cagctggagaaggtcgtcacagtctcccgtggaatcttgttgcctgagagccccataacggaaagggctaagacgactcttccacacacaggtcgcagcccctgccgcggaggatccccaggaagatgctggggacgctctgagcatcggcctttctttacccccgactccctggagcttggtctcgggatgccaacttggggcacggaggcgacgggctgctccgaagctggagggtttctgcttgggtcagagggatcacgacctcagcagagccaggagaggttgggtgacacccactgcgtattgcacttgac

SEQ ID NO: 107246 - DNA, 324 bp, Homo sapiens
  chr2:200335591-200335915
  hyper
cgtgtaagcaacctcccactttgaaactaattcgcacccgggtctttcaccccaaaggactttgctgcggacgctgctctgacccaagacgcgggagagaagtcccaaaggctacagccaggggctgggggactcctctgctcaccttagtccttgatttcgaaggccccaattaactatctgttgtgtcagaatcggcgagtgcaaagtagctgcgccccgctgacgcgctctctcctgggtccgggtatcccagggcatccggagctggggagggttgtgcggactacccaaggcacgcgcagataccgggcagggaagaag

SEQ ID NO: 107247 - DNA, 404 bp, Homo sapiens
  chr2:200336130-200336534
  hyper
ggtttacagaaccggcgtttcagatgtttatttgcaactaatttcttgtgctggaaaatgcttgttacccgggcggagcgcttccgctctgcgcggtccggcccggcgggcggtagctcgctgatccctccggcgaagcctccaaggagcgggcggctgggagaggttgtgccacccgggaccaagccatcggcgctgctccggactcccggtagggggagccgccgcgggcgccaggccggattgtgttctggcctcggggcggccctgctgccagcggccgggactctcagcacagagctcgggaggactccacctgctctccagataaggcgccatgagcagagaagggaacagacggccaagctccctcctaattccccgttgttgcagagcaaagaaga

SEQ ID NO: 107248 - DNA, 244 bp, Homo sapiens; identical to SEQ ID NO: 38455
  chr2:200523980-200524224
  hyper

SEQ ID NO: 107249 - DNA, 80 bp, Homo sapiens; identical to SEQ ID NO: 2136
  chr2:200604746-200604826
  hyper

SEQ ID NO: 107250 - DNA, 567 bp, Homo sapiens; identical to SEQ ID NO: 2137
  chr2:200715513-200716080
  hyper

SEQ ID NO: 107251 - DNA, 30 bp, Homo sapiens; identical to SEQ ID NO: 38458
  chr2:200820139-200820169
  hyper

SEQ ID NO: 107252 - DNA, 112 bp, Homo sapiens
  chr2:200820436-200820548
  hyper
tctttctccgacaccgctgaggcggtttcccaccgacttcctttccatacagcaccggcaggcaccggtgtgaagggtcataaaaatggcgctggccgctcgtttgctaccc

SEQ ID NO: 107253 - DNA, 179 bp, Homo sapiens; identical to SEQ ID NO: 38460
  chr2:201170704-201170883
  hyper

SEQ ID NO: 107254 - DNA, 1505 bp, Homo sapiens
  chr2:201171094-201172599
  hyper
gaggtttggggaaaggcgaggaagtcggtctggagcaagcaagcaaagtgcggaagctgtactgggattcttctagaaagtggggtgggaaaggagctagggagggcgtgtggagggacgagatctgtgtcagaacgtgcgtgtgagcggatacaaaacccgagagaggcgtgagcagcgctgtgtttgcgagcgggagcgaggggcgccggctggggtgtgtgctcctggtgagtgacaccgaggggaaggcgggcgggtcggcgggcgggggcagcctgcgaggggcgggagtgtccctgcgtggggcggccgagccggagttgtgtcagtgaaggaatccagtccgggggccgagctggctgcgccctccgctgcaagcgccggcagcgcggggcgagctccggacggcgcgcggcccaggcagcggctcccgctcggcccgccctccgagccgcaggggccgccaccgccgcggcgcctcccctggcgaccgcgcccccgggccccggctccggcccgggacggaggagccggcgctcgacacagaggtaagcccaggaccccctccacgccgggccggctggggatgcagggcgcgggcggacgcggaggggcctgcgcggccgggacggagactcggctgggccgagcattccgcagcccgggccgcccagcctccgccgcctcccggagcgctgggtgtggcccgcgctcggcgccgaggcgggctggtggcgcggaccggacgcgaaggtcgccgtccttcctttctccagccggcgcgggcaagcgggaggaggcgccggctgggacgcacagtggcgctccccgggcgagcgtgtggccgccgcgctccgacgtgtacccgcccgccccggatctgaatcgcccgcggccgccgtccctcgcctgccgtcctcccgcgcgggcgcccccgttccctcccaagccggaaagagacccaccgtcccccaggctgctctctggcccggagccgcaaagcccacgtcagccgcgaccaccccgccctcggatcccagccgggtgcgggggccgcggccccactgaaccccgcgcccctggcgcccagcgggagtgggatgcgttggcgtccgcgctgcgcgggtgggctggggtggccggagcagacgcggagcgccctggccgcgggacgaagcggtcgcgccgccgcatttgggcggggggaccccggagtccgcgggctgcggaccccagcgggagacggggttgtcgtaggatgcgctcgcgctggacgccggcgcactctgaatatcatgctgccgcacacgcggggctgaagggccgagtcttcacctgcgcggggatgcggcggaagcgtcgcgtcttcgcgagtggaggtttcgtgttcccgcggggttggtgtgtttttgaacttcacgagcttctcatcccccccgcaatcctggttttagcagatgtcggggttttggagacctgacacttttcgtgaaagattcttt

SEQ ID NO: 107255 - DNA, 167 bp, Homo sapiens
  chr2:201374885-201375052
  hyper
gggaggccacgtcccgggcacgccacgccacgccacgccccgcccccagattcgtctcgccccagtgggccgcctcggagtcgggtgggtcttccatcccggaggtaagggaaacacacggtagagaaggccagggctgaaccccaagggacggtcttgtgtgttca

SEQ ID NO: 107256 - DNA, 35 bp, Homo sapiens
  chr2:201390686-201390721
  hyper
gcttcaggagacagcggaccgccaccaacacaggg

SEQ ID NO: 107257 - DNA, 437 bp, Homo sapiens; identical to SEQ ID NO: 2142
  chr2:201450484-201450921
  hyper

SEQ ID NO: 107258 - DNA, 72 bp, Homo sapiens; identical to SEQ ID NO: 2143
  chr2:201451013-201451085
  hyper

SEQ ID NO: 107259 - DNA, 30 bp, Homo sapiens
  chr2:201676057-201676087
  hyper
gcctgtgtcctcttcgctcttaagggaggt

SEQ ID NO: 107260 - DNA, 30 bp, Homo sapiens; identical to SEQ ID NO: 38466
  chr2:201676376-201676406
  hyper

SEQ ID NO: 107261 - DNA, 30 bp, Homo sapiens; identical to SEQ ID NO: 38467
  chr2:201676705-201676735
  hyper

SEQ ID NO: 107262 - DNA, 141 bp, Homo sapiens; identical to SEQ ID NO: 2144
  chr2:201727375-201727516
  hyper

SEQ ID NO: 107263 - DNA, 30 bp, Homo sapiens
  chr2:201727744-201727774
  hyper
gcttcgagcaaaatcgaaaatctctaacct

SEQ ID NO: 107264 - DNA, 251 bp, Homo sapiens; identical to SEQ ID NO: 38469
  chr2:201729264-201729515
  hyper

SEQ ID NO: 107265 - DNA, 30 bp, Homo sapiens
  chr2:201753772-201753802
  hyper
tttctttgggccagcggaagttgggcgcgg

SEQ ID NO: 107266 - DNA, 30 bp, Homo sapiens
  chr2:201766377-201766407
  hyper
ttaagggtaataccccgtaagaccagcaga

SEQ ID NO: 107267 - DNA, 30 bp, Homo sapiens
  chr2:201827953-201827983
  hyper
aggactttggcctgcgcctccagcctctgg

SEQ ID NO: 107268 - DNA, 150 bp, Homo sapiens; identical to SEQ ID NO: 2146
  chr2:201828570-201828720
  hyper

SEQ ID NO: 107269 - DNA, 30 bp, Homo sapiens; identical to SEQ ID NO: 38471
  chr2:201934081-201934111
  hyper

SEQ ID NO: 107270 - DNA, 30 bp, Homo sapiens; identical to SEQ ID NO: 38472
  chr2:201934323-201934353
  hyper

SEQ ID NO: 107271 - DNA, 234 bp, Homo sapiens
  chr2:201936490-201936724
  hyper
gtgtctaaggattccgtccccaagcaaggacaacatattatcttccccgcccttctcttttctacagtatctgttacctcagtcagattgaggatgcacatatactgggaaaataatcgacttccagcgtccctcatgtagtctctacctgattcaggaatctctaacccagtatcggaacgttaagcggcttctccgctttcctgccgtgagaaactcgaggtgacaacctcc

SEQ ID NO: 107272 - DNA, 43 bp, Homo sapiens; identical to SEQ ID NO: 38474
  chr2:201980839-201980882
  hyper

SEQ ID NO: 107273 - DNA, 30 bp, Homo sapiens; identical to SEQ ID NO: 38475
  chr2:201981489-201981519
  hyper

SEQ ID NO: 107274 - DNA, 30 bp, Homo sapiens
  chr2:201981858-201981888
  hyper
tagcctggtcagggcggttattttccagag

SEQ ID NO: 107275 - DNA, 30 bp, Homo sapiens; identical to SEQ ID NO: 2147
  chr2:201982295-201982325
  hyper

SEQ ID NO: 107276 - DNA, 250 bp, Homo sapiens; identical to SEQ ID NO: 38477
  chr2:201983184-201983434
  hyper

SEQ ID NO: 107277 - DNA, 30 bp, Homo sapiens
  chr2:202047659-202047689
  hyper
tggcttccacgggttcgtttctaggaagct

SEQ ID NO: 107278 - DNA, 30 bp, Homo sapiens
  chr2:202101384-202101414
  hyper
gaaccctggccccaccgcagactcaacctc

SEQ ID NO: 107279 - DNA, 80 bp, Homo sapiens
  chr2:202315792-202315872
  hyper
ggcagaggataaggcgctatgagaagctgccaagcctcagatgtgcagctgggctgaataccgacgccagcgcctagcgc

SEQ ID NO: 107280 - DNA, 162 bp, Homo sapiens
  chr2:202316089-202316251
  hyper
ctctgtcgtccgcccgcgcttcctcaggaagcccctaatgcagcggcagcctgaaagcagcagccgaagctgctgccgctgctcccactgccagcaaccgcccgggcgtggcagggacaggcgggcgacttcacaacatcatcactcggcgacctcggttct

SEQ ID NO: 107281 - DNA, 16 bp, Homo sapiens
  chr2:202316318-202316334
  hyper
cggcctccacggcccc

SEQ ID NO: 107282 - DNA, 30 bp, Homo sapiens; identical to SEQ ID NO: 38480
  chr2:202316986-202317016
  hyper

SEQ ID NO: 107283 - DNA, 30 bp, Homo sapiens
  chr2:202508272-202508302
  hyper
tctgtcctgccaggcgctgctgggtttggg

SEQ ID NO: 107284 - DNA, 205 bp, Homo sapiens; identical to SEQ ID NO: 38481
  chr2:202644944-202645149
  hyper

SEQ ID NO: 107285 - DNA, 30 bp, Homo sapiens
  chr2:202645907-202645937
  hyper
cgctttgatgatgacgtagaatagagtcgt

SEQ ID NO: 107286 - DNA, 770 bp, Homo sapiens
  chr2:202897428-202898198
  hyper
ccgagaacaaaagaacgtttgccaatcagaaaacgctacccgagaacgaggataaccccgctttgtgttttgaaaactctttaattagcctggtttctaagacgcattaaaacattcctacgcagattctaaatggaggatcaaatggttgcttctgcaacgaagatgggatcccgaaagggcacacgccgcagaaccaaggcacacggggccactgagacgcccggcgcgtcgtacagagtgttcctgggcgctcggtctcaggttacttctagaaccagtctccccaacgccgtcttcgtttccttaaaacctcgctagagtcaccccagttccccagactccaggccgtgcgcgcgggcggggtggcctgagcccgggttccccgctctccctgcttcgggcccttcctccgaggggtccttcctcccgccgtcactcggccccctccgcccgactcgggtttctcctcggaggcggcccctcctcctttttataactcgggggaggggagaggggactgtggcctcgcgtggactctttgggtccggggggaaagaggcgatccgcaaggcgcacccccttctcgtcccgtcccaaaccccacattgaggacccggcgacccgaaagccccgccagagccagcctttgcagtcctaacgcgactcctggtcacgtctctccccgaaggggcgctgcgcggtcctcgctcccctcaaacgccgctggcgaaggcgcccctgctcaggaatgcgcatctgagtgcacc

SEQ ID NO: 107287 - DNA, 30 bp, Homo sapiens
  chr2:202898666-202898696
  hyper
ggccggggccaggccgcgggcacgagcgcc

SEQ ID NO: 107288 - DNA, 1090 bp, Homo sapiens; identical to SEQ ID NO: 38484
  chr2:202898960-202900050
  hyper

SEQ ID NO: 107289 - DNA, 40 bp, Homo sapiens
  chr2:202900071-202900111
  hyper
cgaaccgggccgtgccaacggcctgatgtactttaaggag

SEQ ID NO: 107290 - DNA, 30 bp, Homo sapiens
  chr2:203102498-203102528
  hyper
ggatgaaccaatcccgagtaagaaacggga

SEQ ID NO: 107291 - DNA, 30 bp, Homo sapiens
  chr2:203102930-203102960
  hyper
gtgatgagcgagcccggagaggggcgggcg

SEQ ID NO: 107292 - DNA, 30 bp, Homo sapiens; identical to SEQ ID NO: 38486
  chr2:203103464-203103494
  hyper

SEQ ID NO: 107293 - DNA, 30 bp, Homo sapiens
  chr2:203130630-203130660
  hyper
ggcaggccgtgcggcgccctgacccggcct

SEQ ID NO: 107294 - DNA, 30 bp, Homo sapiens; identical to SEQ ID NO: 38487
  chr2:203130940-203130970
  hyper

SEQ ID NO: 107295 - DNA, 217 bp, Homo sapiens
  chr2:203131607-203131824
  hyper
ccggtttgggctgtgcgaagcttgcgttgtctattagacctgataatgcagttgtgtagatcgggcagttcagtatttcagatttgaagcttaggggaaaacatctgggctggtgatgtcagtttgaggtttggttgttttcgtggggaaagtttgacaagttcgtcagcactgaaatggttgaatggtaagacattcgtatcgcaagatgctgttg

SEQ ID NO: 107296 - DNA, 30 bp, Homo sapiens
  chr2:203132393-203132423
  hyper
tatactgtcctgtaccggatgtgaagagga

SEQ ID NO: 107297 - DNA, 30 bp, Homo sapiens; identical to SEQ ID NO: 38488
  chr2:203241555-203241585
  hyper

SEQ ID NO: 107298 - DNA, 309 bp, Homo sapiens
  chr2:203242123-203242432
  hyper
tcccggctgtttctccgccggtctacttcccatatttcttttctttgccctcctgattcttggctggcccagggatgacttcctcgctgcagcggccctggcgggtgccctggctaccatggaccatcctgctggtcagcactgcggctggtgagtagctccggccggcacgtcccggccactgcccctgcgggtggcgagggagggagcccgcagaggccgaggcctgtgcttgcccttcgccatgcgtccccccgatcgcggtgcagcggagctgcgacccggtgcctgcgcgcctgccccatgcct

SEQ ID NO: 107299 - DNA, 30 bp, Homo sapiens
  chr2:203735544-203735574
  hyper
ccctctactggcaacgccccagcatcgcgg

SEQ ID NO: 107300 - DNA, 30 bp, Homo sapiens
  chr2:203736723-203736753
  hyper
tgagctctctgaggcgtggggaagtggaag

SEQ ID NO: 107301 - DNA, 30 bp, Homo sapiens; identical to SEQ ID NO: 2150
  chr2:203776302-203776332
  hyper

SEQ ID NO: 107302 - DNA, 224 bp, Homo sapiens
  chr2:203776772-203776996
  hyper
ctttgcttgactaacgccttgccagtttttttttctcatacatattcccaaccagaggctcactcggcagaggtttttcctaaatctcgcctctaactgcggcttttagagagaggcgagaggcggaaatacaaagaaaagaacggatgagagaggaaacggtcgacggtggccgatagtggtcctactgtcgtgggactgctctgcgcgctcccggtggggcg

SEQ ID NO: 107303 - DNA, 124 bp, Homo sapiens
  chr2:203879446-203879570
  hyper
gcttcaggtcaccccgcccatccccagcctacgcgaccattgaacagctgccgcccaacggctgggtaaatcctcagcggccgaaatgattagcccagggggcagccccgccccctgctcctcc

SEQ ID NO: 107304 - DNA, 30 bp, Homo sapiens; identical to SEQ ID NO: 2151
  chr2:203879853-203879883
  hyper

SEQ ID NO: 107305 - DNA, 30 bp, Homo sapiens
  chr2:204103848-204103878
  hyper
ctctatccggtgagcgccgtcttggctctc

SEQ ID NO: 107306 - DNA, 30 bp, Homo sapiens; identical to SEQ ID NO: 38493
  chr2:204104156-204104186
  hyper

SEQ ID NO: 107307 - DNA, 75 bp, Homo sapiens
  chr2:204192791-204192866
  hyper
gggctaacaaaggccgccgggaggtgggggcttctccagccgctccagcggcgggcgggcggcggaagggttaac

SEQ ID NO: 107308 - DNA, 30 bp, Homo sapiens; identical to SEQ ID NO: 38494
  chr2:204193363-204193393
  hyper

SEQ ID NO: 107309 - DNA, 30 bp, Homo sapiens
  chr2:204399173-204399203
  hyper
aacctgtcttaacacgaaggcatcctaata

SEQ ID NO: 107310 - DNA, 196 bp, Homo sapiens
  chr2:204399767-204399963
  hyper
gcctcacggccccgcgcccagccggctccctaccccctggccccgagggcgaggctaaccactcaccgcggcagtcggtcggccttcccgcggccccgggcaaggaaaccgccgctcgcgctcctccagccgctgcctccgcctcctccccaggcgcggcgctccctcgccagagacgcagcgactgccagcagct

SEQ ID NO: 107311 - DNA, 30 bp, Homo sapiens; identical to SEQ ID NO: 38496
  chr2:204400326-204400356
  hyper

SEQ ID NO: 107312 - DNA, 188 bp, Homo sapiens; identical to SEQ ID NO: 38497
  chr2:205409781-205409969
  hyper

SEQ ID NO: 107313 - DNA, 898 bp, Homo sapiens; identical to SEQ ID NO: 38498
  chr2:205410026-205410924
  hyper

SEQ ID NO: 107314 - DNA, 31 bp, Homo sapiens; identical to SEQ ID NO: 2155
  chr2:206166172-206166203
  hyper

SEQ ID NO: 107315 - DNA, 664 bp, Homo sapiens
  chr2:206546582-206547246
  hyper
acaaaggatctgagtagtaaacgcagcgagtgtttggggttttattcagaccgggctgacggtgtgtgtcgccgccacgcaccgctgcctgttcgaacgcatggctgagctgccgaccggctcgctaccccaaacaccgtacgccacccaactcctcttgtaacgccatcgcgcgtggcattgtgttgggttctgcgtgtgtggcatcggagtcgtggaatttagggggaacaaggcttttccccccgtccccccggggtctcccttgggtgggggcgacacggccaaggcggcgcgccctgggggtgcccgggggcgcttcttccccagggcgttacgcaccggcggcccggcgcggaggtgcgcgggggcgatcgggagatgcggggcgggcgaggggtggtgggatgggcgccgccttaacttcgatcctgcggcggcccgagagaagccgtcgccgccccgcccgagctgggtgccgcggcactctgctctgcgccgcgcgtctccgcggctgcctctttaatcaggaacacagaaggggcgggccctgagccggcgcgtaatcggatagctctgccgcggctctgacatccacatgctgctcggcctgaaaaggcagtggggagccggaggggaggcagagatcgcgagcgaggcacca

SEQ ID NO: 107316 - DNA, 860 bp, Homo sapiens
  chr2:206549957-206550817
  hyper
agttcggggcaacctcggacccggggtgggatctcagggtgggattcgaagctgggacctgccagggacctccagctccccaaaatgcgatctcaagccgtgagctgctcaggctttcaggcggagcaaagcactggcaccctgggagccggcagcgggtggccagggcgaggccaagccacatacctctgactcacccggtgtgcgccggccgggaagggggcctggttcagccgccgccgccggcgacgagaaccaattctgggaaggagcaagatggggcagaaggtgcgcgcgggggagcaactgagcaaataacacggcggtcgcggcgcgcggcaccttgggctggcgcgtggctgggaggccgcatgggcgacgcgcaccaggctgcccctctcctcactgcgccgcctcgccagaccgcagtgcagccgctagcctgcctccctccctgccccgggcgcccccgccagtcccctgcgctccgctctgcgcggcaggctcgccgcgacccctagagagacggctttgagtggcgggaggccgaggccggctggcttgggaatccaagcgctggcccaactaggtgagaggaaactggggtgggatttcggagaggagggcggagagaggcgggaaggaaccagcttgagccccaggaatgcgcgcaacttgcacagcctctagaagcgccgcgcgcccagcgcccgccggtgcgcaggaacaggtgaagagcacgcggcgtgcggccatccacgtggtggggacgtgatagcccctcagctctcctcctagccctccctccccttccccgccccccagcgccttctctaacgccgcatcgatttgtttgggct

SEQ ID NO: 107317 - DNA, 125 bp, Homo sapiens; identical to SEQ ID NO: 38502
  chr2:206550889-206551014
  hyper

SEQ ID NO: 107318 - DNA, 291 bp, Homo sapiens
  chr2:206551071-206551362
  hyper
cgccggcgagttcccgcctcccctccccagccgcctcgctctttgcttttccacgtgagaaaaagaaatgttcacggccgatgcttcattttcactgattgatttctttttaatatcaacacaagttaatggaggcaaggcgcgctctgattgaagggctgcccccgcccttcgactcgggctggctgtgccgggggtctttcccaccgggtcgcaggcgtccagcggctgggtggcgggcgccggtagccctagtgtttggaggtgggggagggatttggaatagacttg

SEQ ID NO: 107319 - DNA, 63 bp, Homo sapiens
  chr2:206551450-206551513
  hyper
cggcttctgcggctccggctgaatttcttctaaaagataggagatccacgctcaggtttattg

SEQ ID NO: 107320 - DNA, 189 bp, Homo sapiens; identical to SEQ ID NO: 2157
  chr2:206750389-206750578
  hyper

SEQ ID NO: 107321 - DNA, 30 bp, Homo sapiens
  chr2:206812911-206812941
  hyper
tactcctgtgtcagcgcgcaacataaaccc

SEQ ID NO: 107322 - DNA, 266 bp, Homo sapiens
  chr2:206948631-206948897
  hyper
taacctctccaaacacgcccacactggggactggcagtggggggtggcagggtctattaacatttcaatgtcaacactcaagaacaacaaggaggtaagcatagccacgggaaacatcctgtccctgaaaagcagaaaatcgagatttggaaatttatgtttatcactttttttttttttaacgttcagagctcagggcaccaaaatatagctaaaattgaatccatttaaacagaaaacatacgtgtgtgtgtatgaatatatat

SEQ ID NO: 107323 - DNA, 26 bp, Homo sapiens
  chr2:206949016-206949042
  hyper
ttgctaggttccgagggctcttccac

SEQ ID NO: 107324 - DNA, 225 bp, Homo sapiens; identical to SEQ ID NO: 38507
  chr2:206949798-206950023
  hyper

SEQ ID NO: 107325 - DNA, 153 bp, Homo sapiens
  chr2:206950963-206951116
  hyper
gctcctctgccctccgaaacgacaactttcctaccatcttggaggcagagcaaaggggggccagggggaaaagtgcacccgctcccgataaagtacaaatttttacttctcatctctggaaaaaagtccacaccggccgtctacacccgcgcc

SEQ ID NO: 107326 - DNA, 30 bp, Homo sapiens; identical to SEQ ID NO: 38508
  chr2:207024965-207024995
  hyper

SEQ ID NO: 107327 - DNA, 30 bp, Homo sapiens
  chr2:207082549-207082579
  hyper
tgcctgtggctgctgcgggaaagtgcgtgg

SEQ ID NO: 107328 - DNA, 129 bp, Homo sapiens; identical to SEQ ID NO: 38509
  chr2:207139025-207139154
  hyper

SEQ ID NO: 107329 - DNA, 1087 bp, Homo sapiens
  chr2:207139217-207140304
  hyper
cggagtggggccctgaccagggaggaagtgtccgctttaagagcttctggaggggaggaaggggctcctccgcccgggtgggagagtgagtgagtgggtgggcgggcagggggcggtcccgccgctcctgcgtcagaaggggtctggttttcgcaccttccctgacgtcaaacctccatcagggttgcaacgccacgttgccttggatgcctgcgtgagtggagtcgcgactcggggcccgcgtcctgagagacgcgctcccgcgccgcttctcgcctccggaccgcaggggccgaagtcgcctatttctggctccgcgggcagcggggccgtggcgctcggacggtctgggattcgggcgccgccgcggaaccggaataagaagggagagcgcccggctcggtcctcggtctccaccgcggcccggaaggaatccgggcagcctccgcggaggtgagtgccgcggcgggggcggggcgcggccggggcgacgcccgcgggcggggcctgctcgccgggcgcccggggcgccttcttcccgagggacgccaggaccgctcgctgggctcccgcggccgcctcgcaggtcctcggcttccccccaccccgcgtccctttctgcccctgctgcgtgagaggtgtcggcggctccgggccgggatcgaggtggcggggcgagggaaggaggtggggcgcaggctgcattgcgcttctgtccggggccctgggtcagaggggccggcggacgaggcctcgggtccgggcttggggagggggcggtctgcggggtcggattgagggccgggaacccgcggagtcttgcccctgggcacctgtggggccgagatcccgagccacctgtccacacacccccttcccccagtgccctgcgttgggtccagctggccccagacctaggcctttcccagcctcgggcgattatagtttatttgaaaacgtttgatttttgtgttaatgattcttttactaccgccgtgcaacagttgtgtaaatgtggtcgtgttacgccatcgtttttacttgctcctaagaagggccttaccagctcctgcgattatctcacgcg

SEQ ID NO: 107330 - DNA, 86 bp, Homo sapiens
  chr2:207307391-207307477
  hyper
atgtgtgcccatccccgtggttgacaaacaacggatttcccaagatagctgccacacacttggtttctaatctctgtattgcttcc

SEQ ID NO: 107331 - DNA, 126 bp, Homo sapiens; identical to SEQ ID NO: 2160
  chr2:207307547-207307673
  hyper

SEQ ID NO: 107332 - DNA, 1523 bp, Homo sapiens
  chr2:207307712-207309235
  hyper
cgcgctatttttacctccccggctgcaatcctttatatttacatgcaggaagcaaatatataagggattaagaaggagatgcgtggccttagtttatccagagcaggaagaggttggaataggagagggtatgtgaagtctggggtggtggaaaaggcaggtggacttcggctggttgttttctcccgatcatccctgtctctggcctggaaacccccgtactctctttcttctggcttatccgtgactgccggctccccctccaccgcccccatcttttgaggtaccacccgtcacctccgatgctgcttgggctgctgcatcactctgctgctttacccccttccccgccccccaacaaagcatgcgcagtgcgttccgggccaggcaacagcagcagcacagcatccagcaacagcatcagcacccgaagccccgctcgggcgcgctctcggggggcggggcgcacgcccgctccgcgcgtccccgcgccgctcgctcccgcgcgtccccgcgccgctcgctcccgcgcgccgcctcagcatcctcaggcccggcggcagcccccgcagtcgctgaagcggccgcgcccgccgggggagggagtagccgctggggaggctccaagttggcggagcggcgaggacccctggactcctctgcgtcccgccccgggagtggctgcgaggctaggcgagccgggaaagggggcgccgcccagccccgagccccgcgccccgtgccccgagcccggagccccctgcccgccgcggcaccatgcgcgccgagccggcgtgaccggctccgcccgcggccgccccgcagctagcccggcgctctcgccggccacacggagcggcgcccgggagctatgagccatgaagccgcccggcagcagctcgcggcagccgcccctggcgggctgcagccttgccggcgcttcctgcggcccccaacgcggccccgccggctcggtgcctgccagcgccccggcccgcacgccgccctgccgcctgcttctcgtccttctcctgctgcctccgctcgccgcctcgtcccggccccgcgcctggggggctgctgcgcccagcggtgggtatggccccgtgccctttgcgttggctttcccgcggggccctgcagaggaaagcgaagggcgcgcgggtccgtgtgctccgggcttgtccccggctcggcctttccttccctccctgcctgtctttccacccttctcgttcccaaacccccattcatcccagttcacttttggaagtccatttctgttgcattcgcgaaaaacccattccaattcttgttggttccactgggaggtgtttagtggatcctgggtccctcagcgatctctgtgcaacttgcggaggggcaaccagtggatgggaaatacagcgagggagcaagttgctacttgcgtggtggaaccttaatgtgaatgcggggaggatgtagtgataatagtggtaatgggctgtttcctcaaatttcgtatccggcgcattcagtgc

SEQ ID NO: 107333 - DNA, 754 bp, Homo sapiens
  chr2:207506660-207507414
  hyper
atatctcgaggaggcgccttatttcctctgagcccttgctgagtgtcgagaggcagctcatgtccctcctccgaccccaagagtccacagtcttccctcacacccctttattctcggacgaggcccgtgtggtgagcgggaacccctgctgtcccctggaccagcgcggagctgggccctaactttgcagttcccgccgcatcggcacgcacccgcgaggtgggagcgggaagcccagccgcattagaggctcaattccggcaggtgcagagtgggtgcgggtcaaggccaatgagagtgtgtgtggccaagcccgctggtttcctgaaccgaaattctccggggagggagagaagaggagggtgcgggagacggacttggaggcgagaggtggcggcagtttccaggagctttgacgtagacttggagaggcgccgagcactcccactgcttaagtagaggcacggtagcctccaggacgcggaagctggggacagccactcgctcgggagcagcctgagcgtttcctctccgcgtactcgagggaactctctccacgcgttcgagggaacccggaaggggccaggcgggtgagtgcggagggaagcccttgtgccatctgggagtagagccgccgagtcaggaggtgagtggggcccaaaggacagagtgggtccctggcagctccgccctgcggagggtgaggctgcgcaatcaagtgcggggccgagactcagcgcggggctcgtagcgg

SEQ ID NO: 107334 - DNA, 169 bp, Homo sapiens
  chr2:207629919-207630088
  hyper
tgagctgttgtcggcgttttgagcaatctgcgggcggacgcggggatcactcacccgcgatgacgaatttggccatggtcgagagagactcagaggcagggaccgcggcttcgcggtttcctggcaaccacgcagccaagggcaaggcgcaggcgcactacaaagtctg

SEQ ID NO: 107335 - DNA, 38 bp, Homo sapiens
  chr2:207630391-207630429
  hyper
gagcttgggcttagcggcagcccgtatcacatcctaga

SEQ ID NO: 107336 - DNA, 498 bp, Homo sapiens
  chr2:208029820-208030318
  hyper
gtccctgtcagcaatcgctcctaacaccccaaaccaccttcccacccggctcctccgaaccccagaagttcggcaggtctctgataggggacagcaaacccgacaacgtgtgcgcagggatgtgtgttggcgactgaaacgcaggcagctcgcaccggctgctcagctcggcactctacgaggttaggggtgggtggagaggtaagcgcagatgactgtttcagaaaacattttcaacaacagacagccaaaaaggaagaaaaaaaagtcaaacaaacaaacaaaaatttcaacccagagcccacaccaacgcagcccctgcgtctccgccgccaccacacgatttacacaagtaatttaaatcattcacctgctgccaggtctcctccagggatggtaaagctgagaagtagccggtgtcgtggacaagttgtagctcctggaatatactataactagccaacacgtccatgctgctgctgccgggcaaaacgggag

SEQ ID NO: 107337 - DNA, 1360 bp, Homo sapiens
  chr2:208030650-208032010
  hyper
catctatttctgcagcgctgttcgctcctaatgcaatctttgctctttattttgggaggttgcatttttttctctcgcgatcgcttctcttccccccccttcccttccctccccaccccccaccccatccttgctagtttgtagtcttccccctcccttttctcctcctcctgctcttccccctccccaaactccctccctccgttcggttctccgcgcagccgtgggatctcgaggagggcgtccattaggccgcgtgtgaccatgtaaggtaaacagggggctcatgaagtcactgaggaccaatggggagcccggagcagagcctggggcggggcttggccctggcggcgggcgcggattggcacgctgcggatctccctgctgccttacaaggcggtgcgaggcgagctatttttagagggctatataagggggctgaggcggccgcccggcggccgggcagcgcgagcgcaagggacagggagggtcgtggcgacactcgcgccagctcccgggacggctgggctcgggctggtcgccgacctccgaccctccactagatgcctggcagagcccggcgcgtccggagcccgcgcccctcagagggaaggggtcgcgcgtcgccgcggcggccctgaggctgacggtcgggaggtgaaaggccggagtgcggggtcaggacgcctcctggagggggcgcggcgcagggggccgcggggaagccgccgagggcgcggagcgggaaggaaggacagtggccaccccgcctccgcctgggcacggggcagggacccgcgcgaggcggtgccggggaggtcctcacgtactcaaaaacaagcagaaaaggcatccagggccccttcccgaactccccacgggctgccagggtgcagagaagaagcgcctgaggaggaagtgccacacaatgggagagaacaaaggggagcggagcgagaccgcggcctgcgcccgccccccgcttgcgcacagtccccgccccgccccgcgggcgccgccgccgccgccctccctcccgcgcctccttctgaccccgagcgagagacctggtcgggagtccggcggctagagttgattgcaaggggcctgttgctcgactgtgcgttaaagaggctagagggagcctaggtagacgtggggcgcaagctggagccggcagcttgcgagggggcctttacgtgatgaggctcaccatggggtctccagcgaggtgtctgcagagcttcgatggtgagaggaggaactcgatttctcgttttctggagttgggatgtagacatagagagatctgttacatctgagatgaaaaccctgcacaattcacgttagggttggccaa

SEQ ID NO: 107338 - DNA, 30 bp, Homo sapiens
  chr2:208393941-208393971
  hyper
ggcttggaggcctccgagggccgtcgacgt

SEQ ID NO: 107339 - DNA, 31 bp, Homo sapiens; identical to SEQ ID NO: 2164
  chr2:208395299-208395330
  hyper

SEQ ID NO: 107340 - DNA, 30 bp, Homo sapiens; identical to SEQ ID NO: 38518
  chr2:208489652-208489682
  hyper

SEQ ID NO: 107341 - DNA, 30 bp, Homo sapiens
  chr2:208490004-208490034
  hyper
ccgcgtggagcgcgcgctccgctttccccg

SEQ ID NO: 107342 - DNA, 30 bp, Homo sapiens
  chr2:208490572-208490602
  hyper
ggggtcagaagcggcgtaatagcccgcttg

SEQ ID NO: 107343 - DNA, 470 bp, Homo sapiens
  chr2:208575824-208576294
  hyper
ttggaagacaggagcggagcactgagttacaaaaacagttaacaatttgggtgtaaccaagtttagtgagcaaacgaaagctgtcagactcggaagaagagttgctaatggagcgaactctttactaataacggctttctacagagatcattgacacagcttccagttacaaatgcccgtgcgcttccagtaggaccggaaagctcccagcagccagcgatgaatgaaaacccgagtctgggatagcggcgtgaggggctgggcagctgccaggcgggggcggggcagcaggtcacgtgcctggcttcgaggcgggcgccggagggggaactctgaccatgattggttcctcctaaccaggtgaccgcaggtcgcgttccggttggcaggcaccggccagggccagcggccttcagtcggtaggcggcggcggaaggaggaggagctccagccgcgctctctcccggcag

SEQ ID NO: 107344 - DNA, 227 bp, Homo sapiens; identical to SEQ ID NO: 2165
  chr2:208633316-208633543
  hyper

SEQ ID NO: 107345 - DNA, 102 bp, Homo sapiens; identical to SEQ ID NO: 2166
  chr2:208633755-208633857
  hyper

SEQ ID NO: 107346 - DNA, 30 bp, Homo sapiens
  chr2:208634918-208634948
  hyper
gagttctctgcccgcgccctgggtgcagga

SEQ ID NO: 107347 - DNA, 275 bp, Homo sapiens
  chr2:208635443-208635718
  hyper
gggattacaggtgtgagccaccgcgcccggcccgtttacatcttaagacaagatctcactccttacaacaattctgaggcaggtacttcctacaggtgaagaaaccgagactgagacttggccaaggcaaccgagctaatcatagttcccccaagaaagggcgacctcggcaagcaagttcacctccgtattccgatcacctggcacatagtagccgcccaaatggcaaccctgggattcgaacccaggtagttggtcagcggcactcaccatcg

SEQ ID NO: 107348 - DNA, 30 bp, Homo sapiens; identical to SEQ ID NO: 2167
  chr2:208675723-208675753
  hyper

SEQ ID NO: 107349 - DNA, 30 bp, Homo sapiens; identical to SEQ ID NO: 38524
  chr2:208890446-208890476
  hyper

SEQ ID NO: 107350 - DNA, 30 bp, Homo sapiens; identical to SEQ ID NO: 2168
  chr2:209101844-209101874
  hyper

SEQ ID NO: 107351 - DNA, 30 bp, Homo sapiens; identical to SEQ ID NO: 2169
  chr2:209103912-209103942
  hyper

SEQ ID NO: 107352 - DNA, 30 bp, Homo sapiens; identical to SEQ ID NO: 2170
  chr2:209104621-209104651
  hyper

SEQ ID NO: 107353 - DNA, 79 bp, Homo sapiens; identical to SEQ ID NO: 2171
  chr2:209108239-209108318
  hyper

SEQ ID NO: 107354 - DNA, 309 bp, Homo sapiens; identical to SEQ ID NO: 2172
  chr2:209113080-209113389
  hyper

SEQ ID NO: 107355 - DNA, 212 bp, Homo sapiens
  chr2:209118760-209118972
  hyper
gacagcccagtttatccggtttaaagtacagtgctgagtgtactcggtgggacaaaggccaattttaggcccgcaggcactttccaaataaaggtcatgggagcacaatttatctctgcgtgtgcgagggcgtgcccccgcttcgccgcccgttagcaggtcttggggtttgcatgtccttgctcttggcctgcacccgtccttatggccgt

SEQ ID NO: 107356 - DNA, 244 bp, Homo sapiens
  chr2:209120079-209120323
  hyper
gccggggagcggggcgcgctggggctgcaccaccccgaactttgtaacaatctagagcaccacagagtgtttccaggtcggcacaaaagcgaacgggacagggcgccctgggcggcggcagcttggccggcccgctgcctagcgcgcccccgaggggcggtaatggaacgtacctttggctgaagaaagagtgctcccggccagcgcggggtcgcctagggggttccgcgctgcctaatgcaaa

SEQ ID NO: 107357 - DNA, 119 bp, Homo sapiens
  chr2:209130874-209130993
  hyper
gcatctgatccgagcgtcggccgggctgggaggagccggcccccgggaaagatttcggactgggggacaggaaaacagagggcggagtcttgggggggggaagcgagaagccgcatcaa

SEQ ID NO: 107358 - DNA, 30 bp, Homo sapiens
  chr2:209131493-209131523
  hyper
gagtttgtcagaggcgcatccgtaggctgg

SEQ ID NO: 107359 - DNA, 30 bp, Homo sapiens; identical to SEQ ID NO: 2174
  chr2:210051601-210051631
  hyper

SEQ ID NO: 107360 - DNA, 30 bp, Homo sapiens; identical to SEQ ID NO: 38533
  chr2:210288769-210288799
  hyper

SEQ ID NO: 107361 - DNA, 30 bp, Homo sapiens; identical to SEQ ID NO: 38534
  chr2:210289195-210289225
  hyper

SEQ ID NO: 107362 - DNA, 58 bp, Homo sapiens; identical to SEQ ID NO: 38535
  chr2:210636323-210636381
  hyper

SEQ ID NO: 107363 - DNA, 260 bp, Homo sapiens; identical to SEQ ID NO: 38536
  chr2:210636429-210636689
  hyper

SEQ ID NO: 107364 - DNA, 139 bp, Homo sapiens; identical to SEQ ID NO: 2176
  chr2:210636737-210636876
  hyper

SEQ ID NO: 107365 - DNA, 176 bp, Homo sapiens; identical to SEQ ID NO: 2177
  chr2:210636933-210637109
  hyper

SEQ ID NO: 107366 - DNA, 236 bp, Homo sapiens
  chr2:210867112-210867348
  hyper
gagtactgcgaggacgttaagatccaaacagcacaagaaggaaggtcaaaatcaggtgtacgaggcccgtgtgccccgccccgccccaggcggacggctgacagcgccccaccccaggaggaggcgggacttcctcaccgcagagtggctgcttccggtagaatccggaagcctgtacggagaaggggcggggccaaaactgcgcgcccaatcggggtgacgctctagccttgccg

SEQ ID NO: 107367 - DNA, 97 bp, Homo sapiens; identical to SEQ ID NO: 2179
  chr2:211035493-211035590
  hyper

SEQ ID NO: 107368 - DNA, 820 bp, Homo sapiens; identical to SEQ ID NO: 2180
  chr2:211089524-211090344
  hyper

SEQ ID NO: 107369 - DNA, 93 bp, Homo sapiens
  chr2:211341441-211341534
  hyper
tcaccccgcagccccggacagtaacagaagggctattttaccgcccagttcctgccaggagggccaatcagagccttcgccgttcccgagacc

SEQ ID NO: 107370 - DNA, 30 bp, Homo sapiens; identical to SEQ ID NO: 2182
  chr2:212452337-212452367
  hyper

SEQ ID NO: 107371 - DNA, 2934 bp, Homo sapiens
  chr2:213401041-213403975
  hyper
gggaggatgaaaaacgaagtcccccggggcatttacagtttccaatggatcaccttagtatgcgtgttgcaattataccagggatgcacccgagagcttttctttgtgcggccctttcatctggatcactttgtgttttgaacaagtgaggctcgcctttgtgcccccagaatttcaagtacagagtcacacacggaacaacaatggcacgctaatcctcgcgctctaaatgggctcacttgtgggtctgacaattcgcccagggaaacgagaagagacgaagcgagggcgcgagctagtgtcgcctgagacgaggaagaggacagctgcagaactaatttggattacattccttgcagaaattctgaaaagggcttttcggcatagctcaactcggagccgcacagttaataccaaattgctgcggactcggagcggggtcccccagtggcagaggctgaaccagacagcccccagtaggtcgcctcgtagaaattcctctcggctaagcctgcatgtcggtcgccaatgcctttgaatgggtcaatgtgcataatcaacccattgagggaaaatatgaagggactcgaagtggggagggagataaaaagagatgtatctaagaggccgcttggaatgtcaagtccgtgttggtgtgattccggaggtggctggagcgcgggacctggtatgcgtgaagaatttcggagtaattgggagggtgcaaacggccagcacaaacgcctcacatgtgccattcgaaggtcattttgaaagactcgataattgtaacttgttatttactaggcaaaggaggcggcggcggcggcggcggcggagcgggaaaactacagctagccgttttcttggtgaggtcagaaggacaccctccgggggcctaaagcgctccctatcgccactcccgggggctttatcacctcaagctacttcccacgctccagtcaccatccctggatggtttcggaaatctctctggctctccaaaaggcaccccttggccacgtcaagacaccggtcctcctcagacctctcccgtcccactttcatccccaggaaactctagtgtcagaaactttgagctccattgcactgcaggtgctgtcattagtcctgcaagccgtggcgggccagccccgccgcgctgcctctcggggtcaattagccctttgcctgcccaggtacctggggctcgagctctccagcaagcagtggccgcgcacccatcgccgctgccgctttcgcctcgggtggatccagtgacccgcaggctcggcagcctggccgggcagtaaacagacaagtttgaaggactccggccaatagcaagttgaactacaggaagaactcttcccggagccaaacacggcaaccgacgggaaggccgggcttctggctcaagtgtgccaagcctttttttttttttttaagaggtcaggcaggcgagtaagcgcccctcaagtcaatggggagagggctccgggaagccggcggaagaggcccagaactccgggccccggaccgaggcgcgcccgcctgctgcactccggctgcccgggctgggcgcgagttgcgtctgacgccacaaggctcgggcgactgggggcgcagcggtcgccagcagcacacacaggtgcaaagcccgattttctgagcgccgctctccaccgcccttcgggctcggctcgggagaggcccagccagcaccgccccaggaccgcggccccggcggtgcgggttctgccctcggggacccgacagggacagaagagtctcctctgactggggatttgggtctcccatgtcccgaacaacaggcgccaccagaagggatcccgcttaggctcccaaacaaaacgctcgggaaagaaaagcagggggttaaggagagaaaagagggactcagagtgatttttcacgataaataaagcaaacgcacacatacagggtaagtttcaaatggaaagaggggtgaccgaaagcccagggaagaggccccggtcaagcggtccctccacgcctcccgggatgggtgaagagggcaggggagccactcgaggcagccccgccggcggctgcaggttcggcgaccggagtgccagaaggaacccacctgactgagaatcgctgggctggacggtccccgccgccacgagaaggctcacccagacccaaagtcctgtcgccggcttcattttttggaagtctcagatcccgtgctgacaattacatgtccaaatggcatatccccctttcgggcacgcggaggagatcccccagccgggcgcgcgtgggggtgcgaggggggcgggcgcggcgcgcgcggtgtggcgactcccagggcgggcgaccgagtccgcgcccgcgggtccagggccggggcccgaggagggggcgagtgtgagcgcgtgtgtgcgcgtgtgggagtgtgctcggtgtgtgcgcttggcgctctgggccggactgtgcagctatttccccgcgtgagccttcgcttgctcgctccctcctcactttctctctctctcactggttggtcaacaataaaaaaggaaggggggcgaaaggtttccaaaaaaagttgattgcaaagaggcggtaggtttccggcctctccccgcagccgggctatgttctgctccttcttcagtttccttgcacctccagtccaaatcgggaggggagcggggcggggggagcttctcgcttctccccggatcccgtccttctttttcctctcagctttcctcacacttgtccggcggctgcggtaattaaagctccgagcgtcatttccagcgctccgcggtctccagctgcagcccacagagaaattaataagactccagaaaaaaaaaaaaaaaaggtgcggggggcggtgggaataaaacaaccctccacgcaaccaggccggct

SEQ ID NO: 107372 - DNA, 599 bp, Homo sapiens
  chr2:214148841-214149440
  hyper
aggtaattcagagacgacaacgaagtgggaaagaaattacagggtcaaagcgaaagaaaaccaagctgcttgggtaggaaggtgcaatgcaagccaattgtttactgtatcttgtccgctcccagagctgcgcccgagctctcgcgttaactaggcaacatcgttgccacggtaactgggaggcgcgggagggcgacagctccctggactcccggtaacccttacgtgcccggggctggtccgtggggcggggtgagagatgccggaatctcgcgagagctcccgggggccgttgggtagcgtcttcgctgttgcccttagggacggctgtgggcctgctgggggtgggggcccgaagcgccagagatggctgctcagcgagggatgcccagctccgccgtgagggtcctggaagaggcgttgggcatgggtttgacggcagccggggacgcgagggacacggcggacgcggtggcggctgagggcgcctactacctggaacgtatccttcccgtggaggcgcggcccgctgcgctggcgggtaatgggtgttgggacgaaggcgagggcctcccactggcggcgccttttgagccttg

SEQ ID NO: 107373 - DNA, 30 bp, Homo sapiens
  chr2:215275823-215275853
  hyper
aagccagttgttggcgctgtccgtggtgct

SEQ ID NO: 107374 - DNA, 30 bp, Homo sapiens
  chr2:215673995-215674025
  hyper
cggcaggtgctaaccgcacgccgacccgac

SEQ ID NO: 107375 - DNA, 54 bp, Homo sapiens
  chr2:216176511-216176565
  hyper
tttgccccagaggccgtggagtggcctcactttggggtcgtgggcagatcgctg

SEQ ID NO: 107376 - DNA, 54 bp, Homo sapiens; identical to SEQ ID NO: 38546
  chr2:216300253-216300307
  hyper

SEQ ID NO: 107377 - DNA, 785 bp, Homo sapiens
  chr2:216300981-216301766
  hyper
ctgtgggttcgcagcgaacaaaagagatgctgatggcccgccaggactggggcaagacaactttttttcggtttcctttgcggtcatcaaactttttaggggatgggggaagggatgggaagcggctgggaggaaagggagtggctggacttgtgtgaagcgaaggggttgcaagacgctcccccttcccttttcttttttattgggggtggtggtagtgtttgaggacattgcgtcacctctcttcggggtggagggggggaatctctgcttataggagtgtattttgtgaggaagaaaacccataaaatatccacgaccttgcagctgttaagaatccagacttttcagtcccagggcggggctgcctttccccccatcccgctccctttctttggactaaagggtactgactcgggactcccttattttgtcttcacagctccctgttcggacttcttcccttctcagcgctgtgcctgtctggctctgagaaagggccagcgggcgaacggggagcaaaggggaacagagacctttaatgagcttctactaagtaccgggagttccgcggggcgctttgcagatcccggggaagttcagagaatgaagttttcttttgcaaggacaaagtaacagtttacttttttacacatgcaggaaagccttcctttcctggggatgggacgcccgtttccactgaaagtgaaatcactgtgaacaacctgaaaattggaaagttggaccagctgtggggagagaaaggtcttcgtgtcctttcccac

SEQ ID NO: 107378 - DNA, 31 bp, Homo sapiens; identical to SEQ ID NO: 38547
  chr2:216826037-216826068
  hyper

SEQ ID NO: 107379 - DNA, 446 bp, Homo sapiens
  chr2:216946186-216946632
  hyper
gtctccctggtggtcgtaatttcgcccacacctgccccgtctttgctctgcagctccacactccctcagccccgccgagagctcctggctcccgtctccaggttaccccaggtcaccacagccacctctctgcaccagcggcccgctcacgtacccagctccaggagctccttcacgatggcttttccgatgcccgtggccccgccggtgacgatggccacttggccctgcagcaaaccaggcgccaggtagctcctgcccttagcccaggaggccatccctgcagcggggtgccagagcagctgagcgcaggcccttctgggtctcagggacattcgaggcgggcgggcggacagggcggtgctcgagcccacgtgaccaccagaaccccgcaccctccccggcccggccccgccccgcccgccggccgcggcaaagccgcatcc

SEQ ID NO: 107380 - DNA, 30 bp, Homo sapiens
  chr2:216974322-216974352
  hyper
gggaccgagggatgcgctatgagaaaagct

SEQ ID NO: 107381 - DNA, 42 bp, Homo sapiens; identical to SEQ ID NO: 2185
  chr2:217008384-217008426
  hyper

SEQ ID NO: 107382 - DNA, 183 bp, Homo sapiens
  chr2:217236004-217236187
  hyper
ccagcccacccctgctgcagtcggcaaatccgtggcgccctcccctcggttccatcaaaggtcccttcggtcgaggggcaagagccgagagaagggcaggtccgggcgggcgagtggcctcgccttctcctcctcttcctcctctgggtcgcggtcgccctcctcctccggctccgggtcggc

SEQ ID NO: 107383 - DNA, 783 bp, Homo sapiens
  chr2:217236231-217237014
  hyper
cggcgtccgggtgtctccggggcgggggctgctccggctcgtcctctggctgctgcccgccgtccggcgcggtcgcgactccggccttcatgatcctcctcctcctcccccttccctgggggccagccctgagcccccgcgcccgggcagcgctgccatgcaaccagaggcgaggccggcgtgggggtgggggcggctggggagtgaggagggggagtaataaaaaatgaaataatactagtggaataattcggttctcaggcaagagtgcttctggagggtgggggcggaggagggcggctgccgggtctgctcggcagctctgcccccgctacccccaccaagggcggcctcggcccgctctctgcccccccaccccgccccttcctcctctccaccgcctctggctggctaggctcgctgttgctacctctcctcgcagatgcaacgaggtaaggcttgtttgcggtgccagctgaaggtggggaggggggagcgaagcagtgtggccgaggtgggaggcagccggcacttggctccagcttggtcctcgcgactccccaaaaccgtatataaatatatctcttataaaagccgagaggaagcaaatcagattccaggctgctgccaggtgttgtctcgtcttccgccgttgctcagcacccgccgctgcccccactggctcgattcccaaaggggtggtgctggaagggaggtggcggggcggcgagctgaccgtccgagaactggaaacaaggttcttgcagcgagggaggctctcgg

SEQ ID NO: 107384 - DNA, 41 bp, Homo sapiens
  chr2:217277056-217277097
  hyper
cagctcccgtttctcgccaggctcccggcccgaactacaaa

SEQ ID NO: 107385 - DNA, 30 bp, Homo sapiens; identical to SEQ ID NO: 2188
  chr2:217277337-217277367
  hyper

SEQ ID NO: 107386 - DNA, 30 bp, Homo sapiens; identical to SEQ ID NO: 38554
  chr2:217277633-217277663
  hyper

SEQ ID NO: 107387 - DNA, 42 bp, Homo sapiens
  chr2:217363377-217363419
  hyper
ctatggttgtttgtcgccatagtttgcgaatctgggtaaacc

SEQ ID NO: 107388 - DNA, 248 bp, Homo sapiens
  chr2:217497758-217498006
  hyper
ttttgtgttccccagcggttagcccagtgccggccacaggggaagcgcgcaaacgaagtcctcgcgaactgaactgagagcagacaaaagcacgcgctcttctccaccgccacgccggtcctacccaaacccgcgagttatccgtattctccttcaggagtcatagtcaggccagaagagtgcggagggacggggcccgggaagagcagggaacccccagagcccgcagccaacgcggaggtgggcga

SEQ ID NO: 107389 - DNA, 44 bp, Homo sapiens
  chr2:217498224-217498268
  hyper
cgccgcgctgccgaccgccagcatgctgccgagagtgggctgcc

SEQ ID NO: 107390 - DNA, 620 bp, Homo sapiens
  chr2:217498283-217498903
  hyper
cgccgccgccgctgctgccgctgctgctgctgctactgggcgcgagtggcggcggcggcggggcgcgcgcggaggtgctgttccgctgcccgccctgcacacccgagcgcctggccgcctgcgggcccccgccggttgcgccgcccgccgcggtggccgcagtggccggaggcgcccgcatgccatgcgcggagctcgtccgggagccgggctgcggctgctgctcggtgtgcgcccggctggagggcgaggcgtgcggcgtctacaccccgcgctgcggccaggggctgcgctgctatccccacccgggctccgagctgcccctgcaggcgctggtcatgggcgagggcacttgtgagaagcgccgggacgccgagtatggcgccagcccggagcaggttgcaggtaacgcggtctggaacaagtagttgggagaaacttggagggcagcggagaagcccgacgggcggctggaccttacggacggttttaggggcggcagagccgagaccttggaccaaatcaagggggactgttgctagcgggacgcggaagtcaggcccggggaggggaactggagttagagcaagtggaagagccctggcgactcatttggtggg

SEQ ID NO: 107391 - DNA, 88 bp, Homo sapiens; identical to SEQ ID NO: 38558
  chr2:217499271-217499359
  hyper

SEQ ID NO: 107392 - DNA, 1002 bp, Homo sapiens
  chr2:217556787-217557789
  hyper
aactttttggggacccgcccagtggttgtccggctaaaacgccctttccaggagcgcccactcccatcccatctgttcgggaagaagatgtcggcaccagcagcggtggagcgccgccaacccgcaacagcagccggccgggcacctgccttcggcggggtggagtcggagaggagtgctggggagggggcgggtagaagaggcggcttcgggttggcccaaaggcactcagaaggtgggggttgagcaaggggcggcagggaattctacaggggatcttgcttgggactgaagtgtcgtgtgtgtgtgtgtgtgtgtgtgtgtgtgtgtgtgtgtgtgatgcgccctccgtgctcgcctagcaattgcgcgcgcgtgcgctctgcgtgtacacccttcacactagccacatcacactacacgcttggtaaataataagtggagccaggatgcggctgagtgacaccttacgttctttcggtgtgactggattgttacccagggcggtggctcccaagccgggaaatcaattaatgttttccttctccgctaggcttttccaaatccacatcccccaagatgaaggcgggcaggaccgcctttgaaaagtggatcttaataaaaataatctcacaagccggtctctggggttcccagagcctgcacatcctccccttttcctctttttgcaggctgcaacctgcaaaaagatcgactttttgcaggtttggagatcgactacctcttgcaaagctagaggggctggcccctgcgccactcaaaccctgcagggtttgcggggactgaggctgaacacaggaagctctccggcctcctggcaagcgcggacgcactcctctcctgcactatagtgactgaaatttgcacttcagaaaactcatgttagggtgctcgtgagtaacggaaagggacagggagggagaaggggattgcccccgtaactaaactgtctccgtaactaaactacgccaaataaacatt

SEQ ID NO: 107393 - DNA, 105 bp, Homo sapiens
  chr2:217558007-217558112
  hyper
gggggcggcgcaacccgggggcggggcaagcggaggcgaggctcccagtgcgtggcttttctgtctccgccccctgaattttgcattctgcgtttccagggcccc

SEQ ID NO: 107394 - DNA, 1143 bp, Homo sapiens
  chr2:217558851-217559994
  hyper
aggggatttggaccttgtgaccgaataagagctcagaatcagtattcggacagagtagggggagggggcgggcaacgtgtgggtaggaggaaggagaaagagcgaaagctgggatagactcggctagacagttcccccgggtagcaggatcctccagggctccaattccggggtgcaaggaccctccccgactactcccgagctgcaccccagctcgaagccacttgctgcgcaaagcgcgcgggcccagccggtctcgtgtcccccgcccgtgcgccgcgtaactgactggcacactgagcgcgctcaccgatcttgacttgctcgcggtagctcttttcgttgaggcaaaccccgcggccgtgcagcagggcgtgcagcggcttctcctcgtcctgccgggggaggcagcgcagcccctgggcgcagcgctcggtgtagacgccgcacgactgcccctcggccagggcgcaggtcatgcagcagccgcagcccggctccttgaccagctcgcagcccagggggctgggggggcacatggagagggctttctcgtcgcagggctcgcagtgcacgaaggagcccaggctctgggccggccccgcataggcggccagcagcaggaggaccgcggtgagcaacaccatcttctcttagtcgccccctttacctcggggtggggcaggagagcgagagtgcagggataaaggggccaagagggcccccggagatttttttgtttttgtttttgttttaaaatttctggcaggtagagcaggtgccctcccccagacacttgcaaaaatgtagagagaggtggagggctggggtgcctgcgagcaggtcccagttgcaagaattaaagccttgcaacaggttgggggaagcagggcagcgccaggtgcacgcagtgagcggaggccggagaaaccctcaagcctgagcgggtcagaattataggggaaaaaaagccacaaaattgttcacccccaagcaaccaccgaaataatgagatcggatgcagtggagatggcgttgggggtgggagagaaaaatggatttatctttaaaatttttgcttaaaatctaaaatacaccccgctttctaaccctcagctgccagcggtgcgcggcgccgcagaa

SEQ ID NO: 107395 - DNA, 30 bp, Homo sapiens; identical to SEQ ID NO: 38562
  chr2:217905816-217905846
  hyper

SEQ ID NO: 107396 - DNA, 30 bp, Homo sapiens; identical to SEQ ID NO: 38563
  chr2:218296492-218296522
  hyper

SEQ ID NO: 107397 - DNA, 30 bp, Homo sapiens
  chr2:218578408-218578438
  hyper
gtgagaaggcacctcggctggccaggtcag

SEQ ID NO: 107398 - DNA, 30 bp, Homo sapiens
  chr2:218621328-218621358
  hyper
cctcacgtgccctcacgcacgtatgccccg

SEQ ID NO: 107399 - DNA, 242 bp, Homo sapiens
  chr2:218767427-218767669
  hyper
cccgctctgctccaccgggcggggaggggaggggaggcatggggaggaagccaccctggacagtgaccccagtgcagaggatgggggacgaacagctgggactgtcatcccctgatgaatcactgggctgccctctcactgacggggcttcctgttttctgcaaagtttgggggcacgtgacccttgctggcggacagcagacatgcacggtgacacgtctgagtgtcggtacacacagaca

SEQ ID NO: 107400 - DNA, 30 bp, Homo sapiens
  chr2:218795731-218795761
  hyper
tggggagcgagaccacgtgttcactcaaca

SEQ ID NO: 107401 - DNA, 31 bp, Homo sapiens; identical to SEQ ID NO: 2192
  chr2:218802244-218802275
  hyper

SEQ ID NO: 107402 - DNA, 30 bp, Homo sapiens
  chr2:218875452-218875482
  hyper
agggtgtgagcctgcgtgtgtgagtgaatg

SEQ ID NO: 107403 - DNA, 335 bp, Homo sapiens
  chr2:218899130-218899465
  hyper
gatataggtgcaggacggagccgaggatagaaaccctcgggcatccgttgtgctggtttttagatgcggttcctggggtttgtgaaaacagccgtcctcccaggcccctgctccacttccctaatactagcccctggagcagccgagcctggagaaacgaggacccggcatggaaagaccccaggctcaaggaggcagagcacagccagggtgggggaccccagcccaccggggaaacccgcccggcccattgctgcgcacaggatctcactggtggtctcacatccatccttttgggaatgggatcaggcctggggggtcggcactgatgacca

SEQ ID NO: 107404 - DNA, 30 bp, Homo sapiens; identical to SEQ ID NO: 38565
  chr2:219081750-219081780
  hyper

SEQ ID NO: 107405 - DNA, 30 bp, Homo sapiens
  chr2:219082012-219082042
  hyper
tgcgtgggccagcgcgttcgtcttaccctt

SEQ ID NO: 107406 - DNA, 30 bp, Homo sapiens
  chr2:219099189-219099219
  hyper
ttacccaaaggatttcgtttaaatattatt

SEQ ID NO: 107407 - DNA, 30 bp, Homo sapiens
  chr2:219134684-219134714
  hyper
tcacctgggtccggcggaccgggatcaagt

SEQ ID NO: 107408 - DNA, 30 bp, Homo sapiens
  chr2:219135251-219135281
  hyper
tctgaacatggcggcggtggtagctgctac

SEQ ID NO: 107409 - DNA, 30 bp, Homo sapiens
  chr2:219135554-219135584
  hyper
gcctgttggactcccgcgctccaggtgttt

SEQ ID NO: 107410 - DNA, 30 bp, Homo sapiens; identical to SEQ ID NO: 38566
  chr2:219154765-219154795
  hyper

SEQ ID NO: 107411 - DNA, 64 bp, Homo sapiens
  chr2:219157358-219157422
  hyper
gcctctcagagccccgacgacgcctcactaataacacaggggtattttcggatttaaaggcaat

SEQ ID NO: 107412 - DNA, 30 bp, Homo sapiens
  chr2:219188014-219188044
  hyper
gcgtggcagtgggtcgccggctgctggctc

SEQ ID NO: 107413 - DNA, 338 bp, Homo sapiens
  chr2:219232221-219232559
  hyper
cgaagttcctggaccggaaggtgaggggaggctccaccagcctggggttcccattcccccatgggccttaaattcattactgatctctgcacctgattgaaatgcacacccgtaggggctagaaggctccagcgccccttagctctccttggagcgagcggctgggggctcctggggcgcgggggtcccgtccggctgaggctcgggctctgtcccctgccaggaggagctccggctcggccacgccagctatctgcggcagcaccccgaagcccacgcgctcatctccgacttcctgctcttcctgctgctgcgccagccggaggacgtggtcacct

SEQ ID NO: 107414 - DNA, 235 bp, Homo sapiens; identical to SEQ ID NO: 38569
  chr2:219232655-219232890
  hyper

SEQ ID NO: 107415 - DNA, 41 bp, Homo sapiens; identical to SEQ ID NO: 38570
  chr2:219261656-219261697
  hyper

SEQ ID NO: 107416 - DNA, 30 bp, Homo sapiens; identical to SEQ ID NO: 38571
  chr2:219262177-219262207
  hyper

SEQ ID NO: 107417 - DNA, 242 bp, Homo sapiens
  chr2:219262921-219263163
  hyper
ggagacagatgtcccgctcccaggctggaatcccgcctttgcccttgccggtagacccgaagcacgtcgcttcctttcttgaaactcagtttcctcatctgtgaaatgggttaagaaggaggccgttctaaggggtaaatgagattagggggcgcagccagagcaggcctaggaaaacgccagcagcgtgtggcgatcacggtgatgaagcgcaatggtggccgccccgtgggctacccagg

SEQ ID NO: 107418 - DNA, 990 bp, Homo sapiens; identical to SEQ ID NO: 38573
  chr2:219263452-219264442
  hyper

SEQ ID NO: 107419 - DNA, 30 bp, Homo sapiens
  chr2:219433100-219433130
  hyper
cgaccagacaggcgcgtgcgcgtcagtcga

SEQ ID NO: 107420 - DNA, 30 bp, Homo sapiens
  chr2:219433987-219434017
  hyper
caacagtttcagggcgccagttgtgttctg

SEQ ID NO: 107421 - DNA, 223 bp, Homo sapiens
  chr2:219523965-219524188
  hyper
tcagtacctccttccgagagttcccagcgcccaggcccaccctgatcccggggctcgaaaaactttgcctccagctcgctccacccgcattcccttcccagttccgccccgcagccgctcactcacctccagacccagagccggcgggagccgcatctctatggtcggccgcggctggaacggcccccggggcccgctttgtgcgaccgcctccggctcagcc

SEQ ID NO: 107422 - DNA, 30 bp, Homo sapiens
  chr2:219524500-219524530
  hyper
tgtggctggaggcgcgagctggggtgtggg

SEQ ID NO: 107423 - DNA, 30 bp, Homo sapiens; identical to SEQ ID NO: 38575
  chr2:219536855-219536885
  hyper

SEQ ID NO: 107424 - DNA, 30 bp, Homo sapiens
  chr2:219575492-219575522
  hyper
gtcaggtgacgacccgcccctacaggcccc

SEQ ID NO: 107425 - DNA, 30 bp, Homo sapiens; identical to SEQ ID NO: 2196
  chr2:219576524-219576554
  hyper

SEQ ID NO: 107426 - DNA, 900 bp, Homo sapiens
  chr2:219646294-219647194
  hyper
gaaatatcctgccttggcagacgcggcagggaggtgcgtggagggagaattgaattaaaaaaaaaaacaacaaaacacgaatatttagatttctttgttcagcggcccccctccagggatcagatgactggcccccctcgctccgaactgactccgggatcaatccggaaggccattgggagaagccgagggcagcttagccacggccggttcccgttccctccaggacgcgagggtcgccttgggtggggaaccgcgaccgggcgaggacctatcccggtgtggggcttcccgatttcgaaagaatctcgctgcacccccgcccagagttcagaccaagcgaaaagttatttgagaggcctcgggggcgcggggtgaggagtcgtggcggaggccttggtcggggcgccgtggatatccccgagtcaccgcgtccctctcctgcagctcccgcgtcgctgggaggagcgagggagcgagcgggaaggggtctagctggcctttgctcggccctccccagcgcccggctttgaacccgccctgcactgctgtctgggcgggtccggggactcagcactcgacccaaaggtgcaggcgcgcgagcacaacccatggctgcgctgggctgcgcgaggctgaggtgggcgctgcgaggggccggccgtggcctctgcccccacggggccagagccaaggccgcgatccctgccgccctcccctcggacaaggccaccggagctcccggagccgggcctggtgtccggcggcggcaacggagcttagaggagattccacgtctaggacagctgcgcttcttctttcagctgttcgttcaaggctatgccctgcaactgcaccagttacaggtaacccgcgggggcatcgcgtcctggggatggg

SEQ ID NO: 107427 - DNA, 1598 bp, Homo sapiens
  chr2:219723486-219725084
  hyper
ctgcccactgccagccgaatggcatgatgaatggagctgtccctcttccccacggagcctttgatctccccctcgtggggagggggccaggggcatcaaagacatttttgtggcattagaaaatctgataaacgccatctcacctgcagctggctctcccaccccttctacccgggccaggttgggggaggaactcgaggcagggactcttggacacgcgaggccgggctaaagcgaattctgacccctcgatctcttgaaagtctgcgacctccattctcccgctcgcttacaagtgccagcgcttgcgcgcacgccctggagcggctactcttgccctctcatttcccccacctccccgccctagaacgcgggcttgagaggtgggatggctgggggagcgagagcggaggcccagggcttcctcccttcttcaaggagaggctgacgaaggggcatgaggcatcgaacagggacacggaaagagatgacccctccagcatccgcctgtcgggcggtccagtttgacaaccctcgccgaagcaccccgcgccccaggccaacttcctctcttgcctccgcgccagcatctccctccgcaccgccccccgccccaaactccctcattcctgggaagttttctctctttacagtcaacaaacctgtcaaacgtctcccttccagcccgtcccccattcctcagctcctctttctcccccctcacccctctctactcttcttcccagcccttccttgcccccgactccaggcggccgcgagcggcggggggctccaagtccgagagaggcgaggcgagggggcgaagcgggcgggtcccacagcccgaagcgcgctggggccccgccccggcaccccgctcccgccctccgctgcgctccgcgccagccgccccggggcgcacggctcgctcccgagagtcccgctgcctgactgtcgcaactgccacctccctccggccccctgccccccgcccccgcctcggccccgctcccctcccacctccgcccccggctctgatttcttctcccgagcgagctccgcaggagacacaggcgctggctgccccgtccgctctccgcctccgccgcgccctcctcgcccgggatgggcccccccgccgccgccggatccctcgcctcccggccgccgccgttgcgctcgccgcgctcgcactgaagcccgggccctcgcgcgccgcggttcgccccgcagcctcgccccctgcccacccgggcggccgtagggcggtcacgatgctgccgcccttaccctcccgcctcgggctgctgctgctgctgctcctgtgcccggcgcacgtcggcggactgtggtggtgagtccggctgtcctggcgcggctctggaccctggagggtggggaccccgggacccaggacagactggggtgttccgcagcctcccggctctacctgctctccgagcccagctttctggcctcggccgggggcgtttctgaactccacttcgacgttcctaaccctcgggaacattctattgtgtttcctcctcccgggttctctcccaccccccgccaagttatgcgctcacccagctcac

SEQ ID NO: 107428 - DNA, 39 bp, Homo sapiens
  chr2:219725692-219725731
  hyper
taggtctccagagccgcaaaccctcgcccggaatagctc

SEQ ID NO: 107429 - DNA, 30 bp, Homo sapiens
  chr2:219725955-219725985
  hyper
atgcggagagccgtccgacgctagtgtcac

SEQ ID NO: 107430 - DNA, 1050 bp, Homo sapiens
  chr2:219735641-219736691
  hyper
ggcatgtcacagctcccgctgcgggctgagtggggctggtcctcctcccttccaccccaagcccttttttgggttacacccctgacctgctattctctgctttccagggctgtgggcagccccttggttatggaccctaccagcatctgcaggaaggcacggcggctggccgggcggcaggccgagttgtgccaggctgagccggaagtggtggcagagctagctcggggcgcccggctcggggtgcgagagtgccagttccagttccgcttccgccgctggaattgctccagccacagcaaggcctttggacgcatcctgcaacagggtcagtgtggggagggggcggaagtggggctgctttctccctgctgtgggacccgaggagaggagaactggttcgctgaagttgcctgagccccacttccccctcacatgtgtctgggcaccctgcaaggaccctgcctcccaggcccctggggcagccctcccgccgcaggtttcaggtcccaggccccagctgaccgccccagcccgcgctgattgcacctgtctgcattcacagacattcgggagacggccttcgtgttcgccatcactgcggccggcgccagccacgccgtcacgcaggcctgttctatgggcgagctgctgcagtgcggctgccaggcgccccgcgggcgggcccctccccggccctccggcctgcccggcacccccggaccccctggccccgcgggctccccggaaggcagcgccgcctgggagtggggaggctgcggcgacgacgtggacttcggggacgagaagtcgaggctctttatggacgcgcggcacaagcggggacgcggagacatccgcgcgttggtgcaactgcacaacaacgaggcgggcaggctggtgcgtacgggcaggatggagtgagtgtgtgcggaaatgtgagtgtgcgcgcaggagtgtgcttgaggaagtgttggcaggagtgagggtgtgtaggtggaggggggcgttaatgtgtgggggagtgcgcacgggcggaaagatgggctg

SEQ ID NO: 107431 - DNA, 86 bp, Homo sapiens
  chr2:219744550-219744636
  hyper
aataaactatctcaacggccacttctagggttaaaagtctctctaacgcctcctcccaggacgtgccaccccgggcgctcctacgc

SEQ ID NO: 107432 - DNA, 30 bp, Homo sapiens
  chr2:219745002-219745032
  hyper
ccccacacaacccagcgcgctccacacaca

SEQ ID NO: 107433 - DNA, 30 bp, Homo sapiens; identical to SEQ ID NO: 38583
  chr2:219745231-219745261
  hyper

SEQ ID NO: 107434 - DNA, 30 bp, Homo sapiens; identical to SEQ ID NO: 2201
  chr2:219745632-219745662
  hyper

SEQ ID NO: 107435 - DNA, 428 bp, Homo sapiens
  chr2:219748348-219748776
  hyper
gtggcggcatgcagccgcgaactaatccccgcgggccgcggcagacggctcccggccccagccgcgccgctctcagagggcaaccccctccctgccccgctctcccgccccctcccgccccaccgccgcccgggcccctccagccgtccagaagcggctgcccgggacccccgggtcctgcccagctcgggccacacgctcctccctgtcccgccgcctgcgcgccgacacgaacggacgggcctctgcaccattcatgccccggctgggccgggccggcgctcaccgccgccgcgggcccgctcctaccctcgggtttctaggtcgtccgcgctgcccgcagccgcgtttcccttcggggccctcgggtaccccatgaggactccgtagccctggctttggtttctgcccgccggggactgggatag

SEQ ID NO: 107436 - DNA, 749 bp, Homo sapiens; identical to SEQ ID NO: 2202
  chr2:219757350-219758099
  hyper

SEQ ID NO: 107437 - DNA, 256 bp, Homo sapiens; identical to SEQ ID NO: 38586
  chr2:219761612-219761868
  hyper

SEQ ID NO: 107438 - DNA, 233 bp, Homo sapiens
  chr2:219762325-219762558
  hyper
aagccctgcaattaagcccctcgcccgcccctgcgccgcccgcccgtcctccgccaggccgggtctgcgccgccaattgcagcagcacgcagcagctgattacccctaccggagcctggggagcggccaggggtggggacagcgggcaggtcaagggggcagggtccctggggttgtccctggccccggggtccttcactggagcttctgattctagcgcagcttctccgccc

SEQ ID NO: 107439 - DNA, 184 bp, Homo sapiens
  chr2:219763161-219763345
  hyper
cgggccttggggcgcgtagccccagttaattgggtgggtctcgggttcaactcatccgctgccctttgacttgggaaccacccgccctctgcctcgcacggcgcccaaatccgacttcacgggcccattgctttccgccggccgcggccttgctggccctctttcctccgtccctgtgtgctta

SEQ ID NO: 107440 - DNA, 436 bp, Homo sapiens; identical to SEQ ID NO: 38589
  chr2:219773631-219774067
  hyper

SEQ ID NO: 107441 - DNA, 32 bp, Homo sapiens; identical to SEQ ID NO: 38590
  chr2:219824036-219824068
  hyper

SEQ ID NO: 107442 - DNA, 816 bp, Homo sapiens
  chr2:219824276-219825092
  hyper
catcaggagtgcaactcgggagcggattggccgcgtgaggcggggcacggcgcgacgaaaaaaggggcccaaggggtggggctgacgctgcagctggcgcagctcaggattagagcagcggagccgcctagcagccaccttcccccgccagtccgcgcgcccgggccggggctaggccccccaccgccgggtcccccggggctgcagtagcagcggcgccgcccgcggctcccgctggggcctgggcgccggccccgctctgcaggatgggcacagtgctgtctctttcgcctgcctcctcggccaagggccggaggcccggcgggctgcccgaggagaagaagaaggcgccgcccgcgggggacgaggcgctggggggctacggggcgccgccagtgggcaagggcggcaaaggcgagagccgactcaagcggccgtccgtgctcatctcggcgctcacctggaagcgcctggtggccgcgtccgccaagaagaagaaaggcagcaagaaggtgacacccaagccggcatccacgggccccgaccccctggtccagcaacgcaaccgcgagaaccttctccgcaagggccgggatccccccgacggcggcggcaccgccaagcccctggcggtgccagtgcccaccgtgcccgcggctgccgccacctgcgagccaccgtcggggggcagcgcggccgctcagccgccgggctcgggcgggggaaagcctccgccgccgcctcccccagccccgcaggtggcgccgccggtgcctggcggctcgccgcggcgggtcatcgtgcaggcgtccaccg

SEQ ID NO: 107443 - DNA, 851 bp, Homo sapiens; identical to SEQ ID NO: 38592
  chr2:219825130-219825981
  hyper

SEQ ID NO: 107444 - DNA, 121 bp, Homo sapiens
  chr2:219826728-219826849
  hyper
gaccggaatcctcccggtagggtaccagggactgagttgggcctggggccgtgtccaaggtgccaatgatgcgggccgacagagcgggccgcactgtctgtctgtccgtctgtcccggaaa

SEQ ID NO: 107445 - DNA, 547 bp, Homo sapiens; identical to SEQ ID NO: 38594
  chr2:219827638-219828185
  hyper

SEQ ID NO: 107446 - DNA, 1320 bp, Homo sapiens; identical to SEQ ID NO: 38595
  chr2:219845550-219846870
  hyper

SEQ ID NO: 107447 - DNA, 940 bp, Homo sapiens
  chr2:219846894-219847834
  hyper
cgccctcccacgcgatgcagccggcgttcgcgcggtcagccagcagctccagcagaaactgccacagctggatctgtccgctgcctgtggggaggggggcggtcagccacaggcgggagcggggaggcgggaactggggaagagtgctggcgggaaactgacccaccccggcaggaaccggcactgggggaggaaaagtgcaagtcaaactgcagctgcgttcggcgggagaggccggccccggaggggctgatcagcagagtggtgtgtagccttaccgcgcttttgcacaatggaaatgcggcttccactgaagagcacgtagctttccagatgcacggttttgtggaacttgggggttggggggaaggggaagcattgcctccccccacgtgagcgcagcggcgcaccaaggcacttggctttccaaggcgagcaaggacagatatccgccgccactctccatctcagccgggcgcccttatttagggaaaagacgcacaaccgtacagggcggccttgggcagaatgatcggactgccccatcccagctggaccacatccagaggtgggaagggacaggcgtgcagcaggacgaccccaaccactgctggacaaggcccagctagtcccgagtccccaaagacgtagttggacaggctactcctgaggtggagtggtggctggctcccttgggacaccacatccgacaggagtaggaacgaacagtggccccctatacgtgacaggaggggcaagctctcatgggctcactatcctagccaccttcgggtgcgcaggcctctgcgctggccctgagaatttggcctcttattttcggaacaggcgggattccctgcctacgaaggtgccatagttctcggggcctgatgaacaactctgaggaggggaacggaccgagcagctgttgtgcttggct

SEQ ID NO: 107448 - DNA, 387 bp, Homo sapiens
  chr2:219848935-219849322
  hyper
cgcgccggccatctcacctttctgaaccgcggggctcagcggcccccagctcgggttcttcccgtccttgaagagaccgtctccgacgggatctgcaagcagcagaagaaaagaatcaggagaaccccgggcggaagttgtgggcttgacaaaagggccccgggccaaggcttaaggggggtgctgtggtccccaggcgcgaggctgggggcccgggccacccggctcctcctcccggagcctggtccaggcgcgctgcgcggagcccctccatagagcccaagtcaggaaacgcgtccaggaaaaaggaaatccgctttccgaaggggccggctggagccttataaagccgagcggggaactgcgccagccgagctggagcgcgaa

SEQ ID NO: 107449 - DNA, 30 bp, Homo sapiens
  chr2:219850108-219850138
  hyper
tcttatcgtcccatcgcaataaagtctcca

SEQ ID NO: 107450 - DNA, 30 bp, Homo sapiens; identical to SEQ ID NO: 2209
  chr2:219850450-219850480
  hyper

SEQ ID NO: 107451 - DNA, 115 bp, Homo sapiens
  chr2:219856512-219856627
  hyper
cacatggctgtgtgacgacagaggcactcactcacacgtgtggacgatggaatgtgggggaaccctgggcactcaggactgggatggcctcagcgctgtccgtggtgatgatttc

SEQ ID NO: 107452 - DNA, 30 bp, Homo sapiens
  chr2:219856881-219856911
  hyper
ctccaggcgctccagcgaggatagtctccc

SEQ ID NO: 107453 - DNA, 76 bp, Homo sapiens; identical to SEQ ID NO: 2210
  chr2:219857661-219857737
  hyper

SEQ ID NO: 107454 - DNA, 1146 bp, Homo sapiens; identical to SEQ ID NO: 38601
  chr2:219857780-219858926
  hyper

SEQ ID NO: 107455 - DNA, 1583 bp, Homo sapiens
  chr2:219866437-219868020
  hyper
ggagggcccggggcctggcggtcgccctcggtgatctcctggtcctggtcttccgcgagctcagtgctgcacagcgccccgctagcctccgccctcacctgaacgcatctgcggctgacacgtcggcggccgcggcggccaccgcaggtgcgcacctggcccgcccctcctttcccagccaccctccgcccggctttcctggcccctccgcccggcccagcctagcttggcttcgtccccagcccacgccttggagcttgtcccggagcccgggctccgtgtgctcttatactgcctgttcagtccccgcccccagacacacacactcacacctgtccaggcgcccgtttgctcggggcaaatattgactcatggaggcggagcgctcccccctcccccgcccgggctctgagaccggagcttctccgaggccttggtggcgggggcggaggggagggtgctggggaccctgggcgcctctggaacaacaccagatgtcacttttccacccacctgcctctgggagggaggagccgagaagcagaggacagaagctcccgggcgggggttaggaggaaccgagaggtgggtatccatcctcgtctgaggactgattcacagtgggagtcgcttagcagggtctgtggcccgaaatccagtggtgacctcgacccgccccagcctagttcctggccctccgcggcgtgcctcagttcttcctccccagcctcttgggcactcggagctcggcaaatgctaaggggctggccctgggggtgctaagcctccgagcaggcgcggcgcggaaaggtgaggggtggccgccctgcccagtggacacctgcttcgctggccaggcctggcactcagttactgtgcaccaaggtgcgctggggcaaaggccagccaggccccgtccggagcgccctccactggccagacccggtccagcggccggcagctagcggccaggtctcagtccagctgcagtgtgggcggagaggtgcatcctcccgggccctaagttcccgccgcgcctctgcagtccgcccgggctgctccctgccatccttccctctcagagctcgcgcgcgcgttccccctcgtcggggaaataaagtcaaggtagatacagaaaaaagactagatgcttttactggcggtggagagggggccaggcgtgacccctagcggcatgtcggagaggctgggcgcgggcatttacggaaggtcggtaggaagtggcaccaccgggtggagtacctctgcttgctgcgtcggcagcagcgtgtccggggtcagactcctggaagacaaaaagtcccaggtaggcgtgggggcgaggcttcgggcagagcctggctgcccccgtggcccctctcgcgcggtctgcgcggccgctggtcccggcgcccttacctgggcacgcagaacggcggcagggcgatgacgcgtggccgcgaggtgagtaccacctccccgcggctcgcctccaccaggatgttctggatcatgttctccagcagcgcctcctgcaggttggcgaaggccgggagcctgcgagggggcgggggctagcatga

SEQ ID NO: 107456 - DNA, 199 bp, Homo sapiens; identical to SEQ ID NO: 2213
  chr2:219906101-219906300
  hyper

SEQ ID NO: 107457 - DNA, 478 bp, Homo sapiens; identical to SEQ ID NO: 38605
  chr2:219922757-219923235
  hyper

SEQ ID NO: 107458 - DNA, 685 bp, Homo sapiens
  chr2:219923707-219924392
  hyper
ccccgcacctatgcccgcctgcagccctggttccccgcctctctccctcactgccaccgccccctctcgggtccagagcccgggcgtgcgctgtcaatgattgcccagcccgtggcccggatccttatctgcattcctcggcgcccggcccggcccggccaccagccaaccttcggccccgacactggccggccagccccggcgccagggtgcatgctgagggccctgagtctagctgctcttcccaacggatctagaaagccaggggcctgctttcagggggaagcctcgggagaccccgaaggaagggggtgaaggtctctcccctcgcggacctggctgctgggaaggaatttgcgcctctaagcttgggtggagcgcgggtcctactccagcatgcagagactagcgtcagccctggtccctgcctccctcggcatctcagcccctcttttccactccttcccgtccccaccaccaagcccaggaatcccctaagctcagtcccagagcccgaaggccccaataacccacccttccaccgcagtagcacccctcagctctccggacagacacgtgggctcgctgggcaggttccttttcccacctccgcctcccgattcaactcttcctcgctgttcttaaccccagacccagccgggacgctgctcctggaaggggcagc

SEQ ID NO: 107459 - DNA, 1639 bp, Homo sapiens
  chr2:219924438-219926077
  hyper
cgcacccagagattctttgcctcaggggtgccgaaaagtttcaaaatgaaaggggcacagctgtgcagaaggttaggccgggagggactgcgtgggtcctggaggcgcaggaggcagccgggtagaggtacctccgggtgcagcgtctggctgagctgccagtactttggggcagaggagccgccgccaacctgctgggctgtggggcttggcagcggggagctcttctagcagtctcctccgggcttggggatgccgacactcctgcctggacccctggccagcccatcttgggcaggaggcagcggggcttggcgagaggggcaggtgccagggagcgtgccagccagtcgagaaaatgtgccagggggtgggtagggccgggcaggtggccgtgcttcggtggcggcgcgctggtagggcggatcgcgctcacctgggtcatgaggcggtcggcgcctgtgttctcctcgtccttgaagatgatgtctggattgtaattgggggtgagctccttgaagcgctcggagctgcgagcgatcttgccttcatagcgtccgctggcgcccagggtcttctcgggcacattggggctgaactgcttgtaggcgagcggcacgagtttgcgtggcggtcgccggcggctgcccaccacccgacccggcccgcagccccatgccgccggcaccaccagcagcagcaacaggaccaggcagaagtgcagtcggggccggagccgggcgggagacatggccggggagcccgggggagcggcgggcgaggtctcctggtgggctgatgggcaggcgcgtcgacgggagcgctgcgggggctcaggcgtccgggtggctccggggggctccaggcgggggcgccatgggcggcgtggtgcggccagggccggcgggactcaagtgcggggcgggggcccagggcccgagctggtggcggcgcgctgtccccctcggcgcctcgactctgagctgccgggctcgccggccgccaataaataggccggcccgtttgttttggcaacgcggcggcggcggggggcggcgggcggcggggctgcgggccgccgggctgggctgggctggccgggccggcgggctgcagggccccgcggttagcaccccggcccggcggtcaggcggctcgggcggagcgggagctgctgccgtctgcggcgcagcccggggccgagtgagaggggaaatggaagagatccgggctcgggccccgcgcagaccgcaccctacccatgtccctgcctcctgtgcgctcgacagcgaacctgcagcaagggcagcacagcctcctccccctcgggcgggcggccccggcactagccagccctcgtcccgctcgcgcctccgccgcgcgtccgcccgcccgctgccctctgcgccccctgcgctgcccgagtttgccctccccgcctggacgcgccccaccccgccctggcctcgcctaccggctcttcgcggctctggggtgccccgccaggcgcaaacctcccggacaggagctgccacccccacggagaccgcaacccacggcgcggccggacgcgaggggcggggggcagtggccggaccgcacagccgcctacggtgtcccctgcggggaagcaaaccca

SEQ ID NO: 107460 - DNA, 37 bp, Homo sapiens; identical to SEQ ID NO: 38611
  chr2:220025697-220025734
  hyper

SEQ ID NO: 107461 - DNA, 30 bp, Homo sapiens
  chr2:220041337-220041367
  hyper
ggcccaagcagccgcggcctcaaggaagca

SEQ ID NO: 107462 - DNA, 139 bp, Homo sapiens
  chr2:220042081-220042220
  hyper
atgaacaagccaggcgtagcaatggagaagttaatgtgaataagacgaaacgcacaacaggaagttgttcccagttgctttttaggagagatattatacatactcagcaatgcatatgaaaagcgtctgaaaggacaca

SEQ ID NO: 107463 - DNA, 54 bp, Homo sapiens
  chr2:220042709-220042763
  hyper
ccacacggggataccggggcagcaccacactccctagccgccctgcctactgtg

SEQ ID NO: 107464 - DNA, 30 bp, Homo sapiens; identical to SEQ ID NO: 2217
  chr2:220043322-220043352
  hyper

SEQ ID NO: 107465 - DNA, 30 bp, Homo sapiens; identical to SEQ ID NO: 38614
  chr2:220071035-220071065
  hyper

SEQ ID NO: 107466 - DNA, 29 bp, Homo sapiens
  chr2:220071353-220071382
  hyper
gggtggcggagccgcgcatcaacaccctc

SEQ ID NO: 107467 - DNA, 30 bp, Homo sapiens
  chr2:220083707-220083737
  hyper
cacggctgtagccccgcccacagcccctac

SEQ ID NO: 107468 - DNA, 113 bp, Homo sapiens
  chr2:220093843-220093956
  hyper
tgtggaccagggcccgtggagccccggccggctgggcctgggctcaggggttcctgcggatgttgcagggatcgagtcagccttacagctgatagcccgggtgggttggcttg

SEQ ID NO: 107469 - DNA, 328 bp, Homo sapiens; identical to SEQ ID NO: 38615
  chr2:220094204-220094532
  hyper

SEQ ID NO: 107470 - DNA, 30 bp, Homo sapiens
  chr2:220110092-220110122
  hyper
acacctagctagcccggagcctctcagctc

SEQ ID NO: 107471 - DNA, 30 bp, Homo sapiens
  chr2:220110370-220110400
  hyper
gatgggcgtgggagcgggggctgcccaaag

SEQ ID NO: 107472 - DNA, 30 bp, Homo sapiens; identical to SEQ ID NO: 2219
  chr2:220118258-220118288
  hyper

SEQ ID NO: 107473 - DNA, 35 bp, Homo sapiens; identical to SEQ ID NO: 38617
  chr2:220118640-220118675
  hyper

SEQ ID NO: 107474 - DNA, 30 bp, Homo sapiens
  chr2:220119164-220119194
  hyper
ccgacgcctgtgggcggccgaggacccaga

SEQ ID NO: 107475 - DNA, 102 bp, Homo sapiens
  chr2:220143825-220143927
  hyper
taagcatggatcatcgctcatgtttataagaaagtgacagaggaacctgggggccgagcggcttgtttgtgggctgccccagcctccgtgcgagcgcttctc

SEQ ID NO: 107476 - DNA, 30 bp, Homo sapiens; identical to SEQ ID NO: 38618
  chr2:220144311-220144341
  hyper

SEQ ID NO: 107477 - DNA, 135 bp, Homo sapiens; identical to SEQ ID NO: 38619
  chr2:220173085-220173220
  hyper

SEQ ID NO: 107478 - DNA, 100 bp, Homo sapiens
  chr2:220173936-220174036
  hyper
gaccgtgggcactaacggcgctgcagccccccgggcggctgctcagcagcaggaggcagaggagcagccggagacccccggatcccccgagacccccagg

SEQ ID NO: 107479 - DNA, 244 bp, Homo sapiens; identical to SEQ ID NO: 38621
  chr2:220174059-220174303
  hyper

SEQ ID NO: 107480 - DNA, 412 bp, Homo sapiens; identical to SEQ ID NO: 38622
  chr2:220196348-220196760
  hyper

SEQ ID NO: 107481 - DNA, 205 bp, Homo sapiens; identical to SEQ ID NO: 38623
  chr2:220197350-220197555
  hyper

SEQ ID NO: 107482 - DNA, 30 bp, Homo sapiens
  chr2:220222947-220222977
  hyper
ggacccacacagcggcggggtttggtttga

SEQ ID NO: 107483 - DNA, 366 bp, Homo sapiens
  chr2:220223333-220223699
  hyper
gccttgacccctcagcgcgtctcacatggcccggatctcggtcccttgggcactccctcttgcccaactccgaattggagttcttgtagttctagtttccaccccgtcttccgacgtttaagaccccgcttccaagacgccctctggctttctcttcccatcccgcacacttccctagcttctgagctgtgtgcacccaccaacccgcagccctccctcaggatcgcccctgcccttcccccaggtttcctcctgacggtggggactaatggcgtcccagccccccgggcggctgctcagcagcaggaagcagagaatcagaggcacccccgctgggccccgagccccatgcgcgcgcaggggccc

SEQ ID NO: 107484 - DNA, 63 bp, Homo sapiens
  chr2:220223794-220223857
  hyper
cggccagtcggaggccggctgcagcaaggtccccaaccccggctctcccgtgtcttggcgtca

SEQ ID NO: 107485 - DNA, 30 bp, Homo sapiens; identical to SEQ ID NO: 38625
  chr2:220252532-220252562
  hyper

SEQ ID NO: 107486 - DNA, 30 bp, Homo sapiens; identical to SEQ ID NO: 38626
  chr2:220267733-220267763
  hyper

SEQ ID NO: 107487 - DNA, 8 bp, Homo sapiens
  chr2:220283281-220283289
  hyper
ccgtgttc

SEQ ID NO: 107488 - DNA, 263 bp, Homo sapiens
  chr2:220283362-220283625
  hyper
cgggcggggccgggggcctggggtcgctgcgggccagccggctggggaccacccgcacgccctcctcctacggcgcaggcgagctgctggacttctcactggccgacgcggtgaaccaggagtttctgaccacgcgcaccaacgagaaggtggagctgcaggagctcaatgaccgcttcgccaactacatcgagaaggtgcgcttcctggagcagcagaacgcggcgctcgccgccgaagtgaaccggctcaagggccgcgag

SEQ ID NO: 107489 - DNA, 150 bp, Homo sapiens
  chr2:220299484-220299634
  hyper
ggctccctcgcaacccgagccggggggcctaaaaatagcccccaggcgcaatcgccggccgccccggtgaccttctgggtagcacaggccgaaggcgggcgggcagcaggaaggcaggccgccggccccccagacttgtctcctagggca

SEQ ID NO: 107490 - DNA, 238 bp, Homo sapiens
  chr2:220299885-220300123
  hyper
cgggtggtggtgagcgggacgccccagcccagcctccgctggttccgggatgggcagctcctgcccgcgccggcccccgagcccagctgcctgtggctgcggcgctgcggggcgcaggacgccggcgtgtacagctgcatggcccagaacgagcggggccgggcctcctgcgaggcggtgctcacagtgctggaggtcggaggtaaagggcaggtgggggccgcgcccggcaggggcg

SEQ ID NO: 107491 - DNA, 30 bp, Homo sapiens; identical to SEQ ID NO: 38629
  chr2:220348312-220348342
  hyper

SEQ ID NO: 107492 - DNA, 399 bp, Homo sapiens; identical to SEQ ID NO: 38630
  chr2:220348584-220348983
  hyper

SEQ ID NO: 107493 - DNA, 750 bp, Homo sapiens; identical to SEQ ID NO: 2227
  chr2:220349054-220349804
  hyper

SEQ ID NO: 107494 - DNA, 69 bp, Homo sapiens; identical to SEQ ID NO: 2228
  chr2:220361397-220361466
  hyper

SEQ ID NO: 107495 - DNA, 257 bp, Homo sapiens; identical to SEQ ID NO: 2229
  chr2:220361644-220361901
  hyper

SEQ ID NO: 107496 - DNA, 112 bp, Homo sapiens; identical to SEQ ID NO: 2230
  chr2:220361983-220362095
  hyper

SEQ ID NO: 107497 - DNA, 96 bp, Homo sapiens; identical to SEQ ID NO: 38635
  chr2:220362303-220362399
  hyper

SEQ ID NO: 107498 - DNA, 183 bp, Homo sapiens; identical to SEQ ID NO: 38636
  chr2:220362444-220362627
  hyper

SEQ ID NO: 107499 - DNA, 30 bp, Homo sapiens; identical to SEQ ID NO: 38637
  chr2:220362933-220362963
  hyper

SEQ ID NO: 107500 - DNA, 262 bp, Homo sapiens
  chr2:220377744-220378006
  hyper
ggggccaggcctgacgcagggggcggggtggccgttgggcagcgggtggacctcgggctctaatccccagcagctgccgtttccctcagatcgattcctttctcactttttttctcagctgctggttctgcggcttggatcgatggagccacctccccccgcccgtccacgcttcctctccctgctgctcattagcgccccgattaatcagcccccctttcctcccggggacaagggcttcctcccccgtgagggcacatgc

SEQ ID NO: 107501 - DNA, 294 bp, Homo sapiens; identical to SEQ ID NO: 2232
  chr2:220378981-220379275
  hyper

SEQ ID NO: 107502 - DNA, 200 bp, Homo sapiens
  chr2:220407984-220408184
  hyper
gtggtagggcaagacgcgcggctcccaattctccccggcgccttcgccggccccgggcttctcgcgctccgctccgggctgcaccgagttgggccggcgcgccgcgttggtgttgccgcgcggcggcagctcagagtctccaggttggggcgggcctgggccgcacggctcctccacccaggtgacgctgagcaggctca

SEQ ID NO: 107503 - DNA, 57 bp, Homo sapiens
  chr2:220408722-220408779
  hyper
ctgcctggatggtgcgccctgagtgacgtcaggagcagaggccggagctgtccatca

SEQ ID NO: 107504 - DNA, 1400 bp, Homo sapiens
  chr2:220416368-220417768
  hyper
ctcatacttatctcccgggcacagctcggccccctcccgcagccagcacacgtggccccccgagcgggacacagtcacctccagcaccgcccggcggcccaccagaacggtcttctcgcgaggggggtggcggcacatctggagaggcaatgctgggggtagggggcgggggcttaagttaatagggacacgcatggcccccaggaggagagatgcatcttccctccctgaagtctccactcctggccttagccctctatgccaccagtccgttcccttgcacctcagacccaaagtctcctcttgccggggaaacgcgctgccctctgtgacccggcccaggagagcccctcggggggaagggaagagagaggcagcgttcttggggccagccccaagtccgtcagtcccatggcaggagagacaggatgtacactctctgtcgctcccaccccaggtgcttaccctccacttccagtagagccagggactgggcgggccccgcctggaagcggacttcaccggcgtcctcggcgcgcagctcgctaagcaccagaatgtgtttcttccctgggggtgagggggtcgctagcgaggccggagccacctctgaggagcgttggggacgaaggtgggggcccagcaggcccctgggtcggttcggacgccgttagtgtatgctagggtgggcggaacagggatgcggagcgggaagcctagaggtccgggactaggggctgggggcgggggaaagaacagggacgaggctcacagggccgtggggcggggcccgtcggagccaggggcggggcttgtcccggtggggcgggatctgttcgagcctgggcggggcagcgaggggcccgaaagggtaaccaggcgggcagaccttcctgtcggatgcggacgcgggctccgggtctcagcgggcggcctccgagctcccagcgccccgtggtctcgacctccgacacggtgcactcgaacgtagcgccgtcgccttcgcgggcgctcaccgaccgcagctcggagagtaccgccacagtacgctctggggcggagcccggggcgtgagcggggcggggcagagggcagttaccggtcacgccccctccacgccccctttctagaagcacgcgcggtcatcagggtccggggaagacagctccgcaagtctcgcgcccaaagcagtgcccagcctccacatcaccccgtacccaccgcgcacggtcaggcggaccggtccggcgcgggccgtccccaccgcgcagctgtaggtcccggcgtccgaggggccgcagcgtcgcagctggagaaggcggcgcgtgccgagggcctggagccggagccgcgggctaggcgtaagcgcgttcccgtcctaggggcgggagttgcagagg

SEQ ID NO: 107505 - DNA, 1056 bp, Homo sapiens
  chr2:220435308-220436364
  hyper
cgtgcgcgttgcgggcgtggcacacgtagacgccggaatccggcagccgagccgccaggatgcgcagtgccaggctcgcgccggggccgtcctcggcgcggcccggctggagcgcgaagtggctgctgtcccacacttcgtccagggccatcccgtccttctcccagtacagtgtgggctcggggaggccccccgcccggcacgtcagcaccacctccgccccccgcagcacccactgggatcgaggccccgtgaggaagaccggggcgccctccccggaccccggcgatggcagcgggcgctcggcgggctgcagctcggggtcggaggccggcggctccagcacggtgacggcggccgccgcgtaggcctcgccggccgcgttgcgggcgcggcacacgtagacccccgcgtcggtgggcagtgcggcggtcagcagcaggccgtgctccgcgccgtccgccgggaagctcaggcgttccgaggccgccagctgctgcccgcccttctcccacaccactacaggcggcggctcccccaggaccacgcacttgagctcggcctcggcgccacttaccacccgcacaggccgcgggaagcgcaggaagcacggggggctcccctgatcccccgagctcgccttcatcgcggcggccgaccgcctgcagcggcgaacggtgggggggcaggggggggtgcggagggcgagccgaggcccggggcggcggggtcggggcgcggctggggactgggcgcggggacccgcggagctctcccgggcctcccgctcccggctcgcctccttaccctcggccccgagctgcagctctgcggcggcggcggcggcgattcccgggcccgaagcctggcgctcagggggcagtccttcctgtttgcctctccagcgagtggccccgcagcctcccctgcccgctgcctggcttcctgctcttaggagcctctcttcccagccccctcccacagcttgggcctcttccccctcctccctcccacctccagccgccaggtccccagccgcccgccaggcttgggcct

SEQ ID NO: 107506 - DNA, 442 bp, Homo sapiens
  chr2:220462403-220462845
  hyper
tgggtgcccagctccgggccaggaagcccagggaaccactgcagccaccaccgcggtcaggagacagcccccgcaccgccccttttcgattcgtttgcatgatctacggcgcggtttccggcggcagagacatgttttccggtcgtcccttggctcgattttcttccggggcgggacttcctttccatcattgataggcgccgggcagctgagctggtaggaggaccagacggggaggttcggtatgtctgaccaggacttatgttcctcgaaagggcggccaggaggatgctcttcctctcttttctttctcgcctttttctccgcatgacgcctcggtttgcgcggacgccctgggcttttggcactaccgcccacctgaggctcttccgcttcctctttccccccccaggctccgccccccagcgtcccgtggccatga

SEQ ID NO: 107507 - DNA, 238 bp, Homo sapiens
  chr2:220492469-220492707
  hyper
accgcggggcggggcacgccgggcagggcgggggacccgggctgtcccgggcgtggctgggcctcggaggggcgcttgggccgggagcgtgcatccggctcccgggtggggggcgccagcgcaaggaacctgaccccgccctcctcccccagggctccccgctaggccccctcagtggcccctccttctcacctgggtctcgggtcccctagtgagcgagagcgtccccagccgccta

SEQ ID NO: 107508 - DNA, 30 bp, Homo sapiens; identical to SEQ ID NO: 38648
  chr2:220507446-220507476
  hyper

SEQ ID NO: 107509 - DNA, 30 bp, Homo sapiens; identical to SEQ ID NO: 2240
  chr2:220969995-220970025
  hyper

SEQ ID NO: 107510 - DNA, 274 bp, Homo sapiens
  chr2:222435181-222435455
  hyper
aataaccctagggaccgaggggcggcgacggccgagatggcaccagaaccaccagaagccacgtcggaaggagatgggagatccagagggcgagagagggcccctttcctcccaagcgatgtctgtgggcaggtgtataaatctctcagagcctccgtctggagggctccgggtaccggctgcccagccaaggctaagttggtttttggctccctccttcggaacagagaaaacgatagattacacagggatggatggacggatgtctggagag

SEQ ID NO: 107511 - DNA, 241 bp, Homo sapiens; identical to SEQ ID NO: 2241
  chr2:222435634-222435875
  hyper

SEQ ID NO: 107512 - DNA, 2254 bp, Homo sapiens; identical to SEQ ID NO: 2242
  chr2:222435994-222438248
  hyper

SEQ ID NO: 107513 - DNA, 460 bp, Homo sapiens
  chr2:222438479-222438939
  hyper
cgcaatccgcaaccccgcagagaggtggtgcgtgcgtttgggcgagcttttcagccaccgccaagtctcgtgcactagggctactcctaccgtggggctgcggacagcgctcaagaggtcctggagtctgtcgtgactctcgcctgctggatttcaaaagatggaatcggaaagcgtttcaaggagaaactcctaacaaaccttccgggggttgcctgagtggctgctctcggaaaagcggatcctaaataaagcgggagggttatagggcgacgtcgaggagaggacaggtctcgagtcactgctacagtttcaggtcactgggctccgcagcagatcgtgttttctcccgtggctcgagagctgcgctggtttctcatgcaaactcagagccgagctaatgacatgagcaacttttacttttacacaagatgagcacgcgtgccgaggcgctgggcgg

SEQ ID NO: 107514 - DNA, 205 bp, Homo sapiens
  chr2:223104739-223104944
  hyper
tgccgtctcacagcacgaggtcattagaaggaaaataagctcctgccaggttggggctaatcaaaatagcacaaataaaccctgacactcaacaactccccgagtgcctgctgccctgggaggagagtacagattggttatgaatatggccggccacgggggcagtacaggagggcctggccgtgtgctccgttgctccggagtt

SEQ ID NO: 107515 - DNA, 457 bp, Homo sapiens
  chr2:223154493-223154950
  hyper
ataaatagaacacggcgtggtgttctaatagaattcaagttctgatacttccaatattttttaaatggatgatatttctttgctgagttttgcaaggacttcagaaaatatgaagttttctctatagaatcgaaacgacattgaagtcaaattcgtgatcctaacaaatggacttggaaagtgggctggtctgtccacttgaataaaggatccgatgccataaacctatgatcttatacccaatgattttaatctatgggaaagttcgtcccccgccttcccctcctcccaaccttggaccaaaatggcccttcctgctcactaaccgggaaagaaacggcccttcgttttccttgatttcagcagtcccttaatgataagagtgctcttttcatgatttcactggaaataaaatactccaaatacctttaatgcttttctgcgttttaaactgatt

SEQ ID NO: 107516 - DNA, 391 bp, Homo sapiens
  chr2:223155737-223156128
  hyper
cggcgagctaagcttcgagccggccagagagtaggggagggggcggagcggcgcggcgctttggcgcagagcacaggagtgggggcccagcccattgtggcggcgcccgcgggcccgctaggccgagccgggggaggaacagaggcgcccattgagcggccgctgcgcagggcggtgcccacagccccggatgcctcggccaggacttggctcccccggctgcctctgctccagtctcagcgcgggccaggggctagggggattggggatagcgggcggggttcgtgttagtgaaccgcccagccctctcctttctcctgggctatggagctggagggatgtatccagcaagggtgcatcatgcttagcgcgcgcccgttagggagcgcgg

SEQ ID NO: 107517 - DNA, 679 bp, Homo sapiens; identical to SEQ ID NO: 38654
  chr2:223158774-223159453
  hyper

SEQ ID NO: 107518 - DNA, 74 bp, Homo sapiens; identical to SEQ ID NO: 38655
  chr2:223159731-223159805
  hyper

SEQ ID NO: 107519 - DNA, 333 bp, Homo sapiens; identical to SEQ ID NO: 38656
  chr2:223159868-223160201
  hyper

SEQ ID NO: 107520 - DNA, 164 bp, Homo sapiens; identical to SEQ ID NO: 38657
  chr2:223160250-223160414
  hyper

SEQ ID NO: 107521 - DNA, 159 bp, Homo sapiens
  chr2:223161525-223161684
  hyper
ccagggcgcgtgcacacgtacacacacacacgcgcgcctttacgcaccttcacaaacctcagaaataactcattggagagccccagatgtcagccgttaccccccgcccggtcttccccaacacaggggaccacagtctgggagccaggagggcaaggc

SEQ ID NO: 107522 - DNA, 270 bp, Homo sapiens; identical to SEQ ID NO: 38659
  chr2:223161806-223162076
  hyper

SEQ ID NO: 107523 - DNA, 214 bp, Homo sapiens; identical to SEQ ID NO: 38660
  chr2:223162676-223162890
  hyper

SEQ ID NO: 107524 - DNA, 296 bp, Homo sapiens; identical to SEQ ID NO: 2247
  chr2:223162928-223163224
  hyper

SEQ ID NO: 107525 - DNA, 448 bp, Homo sapiens
  chr2:223163472-223163920
  hyper
cggggaggggggctgtcggttcctagtccagaggccggagctggaacccgggaaaggggaggacggggaggccccggagtccaggatcccgagcccagggcggaaaagtttggtacgagtctgggcaaatgttccagcgactggggtccctgaaaagggggctcagagagccacggcgagccggggagcctggtgaggctggagcgcggcctgcctgagtctcctcctgtggtgacaccgagtgcggggatccgggctcgggagcatttattagttcttttacccaaagcttggtcaggagccctgagctgcgattggccgacgggtagaccgtcccgggtggcggagacacgcgctgattgggcaacagcgaccactttctcttcccatctctggtggtgccgaggcctctgctggccccgagggggacccgcgctgcgccccttgc

SEQ ID NO: 107526 - DNA, 170 bp, Homo sapiens
  chr2:223164446-223164616
  hyper
agcacaggcagccgtcgctaggcccaagcactcgttagttgaaggctgggggtatgggggagggtgcagaaaaaaacctggctcctcttcttggtgtaaaaaccgctctggcaagctgcggttctaaatctctacatatagatccccgatgcgtcgacagagatgtgtct

SEQ ID NO: 107527 - DNA, 19 bp, Homo sapiens
  chr2:223165483-223165502
  hyper
taagccacttctcagcgat

SEQ ID NO: 107528 - DNA, 222 bp, Homo sapiens; identical to SEQ ID NO: 2250
  chr2:223166003-223166225
  hyper

SEQ ID NO: 107529 - DNA, 1339 bp, Homo sapiens; identical to SEQ ID NO: 38665
  chr2:223166293-223167632
  hyper

SEQ ID NO: 107530 - DNA, 826 bp, Homo sapiens
  chr2:223168005-223168831
  hyper
agaagacagattcttcggtaactgctctttggtgtgtgtattcggggtgtgtgtattcggggtgtgtgtattcggggtgtgtgtatgtgtgtgtgtgaaagaatctggtgtgtgtgaaaggggtaagggttgaaggaccttatttagctgggggaccgtcttgtattgggagcgggcagcctaggccttggaaagaccagaaaatctgatctgtgcggaggcaggtgaaggctgtgagtgaggtgggggcgggaacagagctggaggaagtgaataaaagaaaccttggggtccgttggtttccttgactcgtggagcaaaaaagtaggcgagtgaccactccaggaactcctgcctccgggcgccggtacataaagagctggggctgtgtgtcctgctcttgggggaggagggtactgggaagggggaactaacaggtctttctttcgctcggatcaggactggactccttctgactccacgcggccccagctcctgaaccagcgcagtgagcctcagccgcttctcaaactgggtctcagaaaatttctcctcgagatggatttcagcggcaggaaagaggggccagtgacgcgaggagcaagaaaagagtaacatgggagatgaatgttcaaacccagatctcctcgctgagcctggaagctcgccaccgtgggatcacgggaaccagaggcaagaggctgcgaatgagtccaacacccgcgttcctcgagttttaaaagcacacctggggccagagactgcacagccaactaaacggagtaaacgcaacaggtggaggaggcagagttgtcaggggccaagc

SEQ ID NO: 107531 - DNA, 52 bp, Homo sapiens; identical to SEQ ID NO: 2253
  chr2:223168916-223168968
  hyper

SEQ ID NO: 107532 - DNA, 2741 bp, Homo sapiens
  chr2:223169337-223172078
  hyper
cgtacgtttgggagcgagggacaggagaataattttgatccagaaccttggagattggagaagcaggtggaaaaattctaaaaagatgaaaactgaccatctccgacacagaaacccatcgaaaggggccaccgagacccgttgattagctggagggagcatgcggcagaagtgcagacccctcgctaacccgccaacctccaagagccctcttgcagaaagctgcccggctccccacggtggccctgcgcgcgcaccatcctcgcggtctcgcttcttcgccccggaaaactctatgaggggcaccccagcctcagccgggttaagacaagtagccccaagaggaaggagcctcagagagcctttcttcctgttcttcttcgtcttcttttttttctaaacgaaatctaatactatctggctgcaaaaatatattatcaccggctctcagcctaagagactaacatttggatatgtaggaaatgtaatctgcatggctaattgattctcagcgtatcagtttaaaggataaagatcgatatctacatgatggatattgtattaataggggcataaataaaggtcgaagagtcgttaccaaaacctttgaagccgcttttcggctctcgggccctccacgcggccagtgggtctctcccacctccccgcccccagctgctgctgggcagggagcatttgcttccccctccaacccgggaccagggtggaggagtctatggttaaagcgaaagtgtttcactgcggcaacgctggggaaaggaggttcttttttcctgggctgcagcaggtggacagtaaggcccgagaaaatgtaatattttaacaaaacgcaccactccccgaaacacacgtatacgacccacacagggacacaaacaaccacacatgtacacacacacacacacacacacactcacacacacacaatcacgcagggcggggagggttctcagcgttccctgagcgccctttggccttagagacagggaataaattcttctttccatccctcggccccctcccagagggcagcgacgaaagccctggccgagcacaaggatcggtgatctgggctcctggaggtaccctctagatggggtaaggacggggaaggatcaagaggttctgcgggaagtgtgcggggctggggggcgggggtgcccgccaatgtccgcagaaggcaaggaggcccactcgaggagggctggatggagacagacttgagtcgggccctgagccccagggagtgcggcccggtagatctcggggcgaggggaacaggatcgggtacacttgatccggaacaagaacgcctcggcctggcggttgcccgttagtcccggatcccagcggccgcttcaccactgagcccgagccgccgagggaattttccaaatgcaaatcaaacacccttggcgccccgcttcttcattaattaagaggaacgtttcgacaaaaccggcgtaatctttattaattacgcagcccttagcgcgccgttcgcatcaatcacgcccaaagcgaaagtgcagggggcgcctaatcccttcccagagcgcgtttggagaaggagccgcgtggccggcgtttccaccgtgacttccacctttctgggctcgcctggcactggctgctcagccggcgcgcagggaggcctttccggaaacaccggctggctgcgcgctagcaggaccgctctagatcccctgacaggccggaaaataacccccactcactatttgggcacgcgctcgtacgcagaaactcgcacagggactcgcgtggacactttatggcccatttcctccgtcccctcacccttaggctcagtggggaccacgcggttctcagtcctcctcttccctaggaccctctaaaaaggagcctggggcgaaatgacagagggaggcagaaaacctcctgttgccccaggacgccccgaaaaactgctctgggggatggggcggggaagaccttagaagttgtcagggcgaccaactcctcccaggtgaccaggttgccataggaccagcacactgctcaggagtgagttttggggagagagagggatcctccagttattgccatagagaaccaggaaagttcgcagcctccgggtcgcaagtgggaaagttgactggagattgcggttagagggggtgggtgcaaactcagggtatttccgggtagccccgcagcagtcttgtccgctgaaggcaggttaccctgggctttcaagggaaaacgccttggggcggggtgtcctgtgcgaccacctctctcagcaaagcagggtttgacctcttggcctgaccttgctccctagtcccaccctatactagtaggtcctaacctttctgcgctttgagcctggaccatcgtcccttcaagagattctactggataaaaaaaaattataaaagctggatcaagcttggcgtcggaggtctggccctcagctggttcccaccctaaaggactggcctgcccaccctcacgtcctcgggcgcccttggctcgagggcctttcggagcctccgcgggaagcagaaagtcgcacctcacactgagcctttccttcgagcgctctgccgggagctactgagccccagcacgcagccttgggcacccggtggcgggcgaaggaacctgccccattgtgctgctgggctgcactagcggagacgagagtgcgtgtgggagtggcccactagcaccac

SEQ ID NO: 107533 - DNA, 66 bp, Homo sapiens
  chr2:223173016-223173082
  hyper
agctgtcactgttgacgtgccagaggtatgagcctcctcccttccggtgatcgtggctcaaaaatc

SEQ ID NO: 107534 - DNA, 608 bp, Homo sapiens; identical to SEQ ID NO: 38670
  chr2:223175903-223176511
  hyper

SEQ ID NO: 107535 - DNA, 488 bp, Homo sapiens; identical to SEQ ID NO: 2258
  chr2:223176719-223177207
  hyper

SEQ ID NO: 107536 - DNA, 580 bp, Homo sapiens
  chr2:223177244-223177824
  hyper
cgccctgccccttgggctcagctgcgagccaccgccggcgtgcgcacccacaaggagagaaatggaggtaatcccccgcttcccaccgactgccggaagctcggcctctgtgcaaaccgaagtatacctgcacccaagagcgtggaaataatttacacgctgaatggctactattaaaaaggatctttttaacagatctcctggcgagtattttaaaacaggactctgcgctagatcagctcgcccgtcggcagctgtcagcgaccagccgacaagctgagattcccctttcagctgtcactggcgatgacacccacatctatcactggcgatgttttgttaatttaacctcgagacttccctgattatccgcataatccgtcctcaaatcccctcgttgtcactgcattttgatgacacgggggacttggaaagcacctattttgtgggggatggggaagcccacagaaaagccccctgatgggggaaggagcaaccgccaccccgcccatgtgagaaaagagcccagcagccaaatgccggtgcaagtatttacttaaccttcctgagaacgcaaagg

SEQ ID NO: 107537 - DNA, 30 bp, Homo sapiens
  chr2:223182912-223182942
  hyper
cctggcagtaacaccgtgaataaaacaacc

SEQ ID NO: 107538 - DNA, 1263 bp, Homo sapiens
  chr2:223183521-223184784
  hyper
cagtttccctctctggcccagcgcgaagggcgaggggcgacagaagcccgagggacagaaaaccgaggctcctcagtggccgagttgggagagagtgtgagtccaggagagcccgggggcagcagggagagggtgcagaagctcgagcgcaccgagccagaggccccctcttctcccgccacgcggggctggaggtgcaggcgccggttccgcggcgtggcccggctatgtgtcgctcctccgcgcgccgcccgccgcagcccgtgccctcgggccgccgccgccgccgctgccccccgtcgagcccgcggccgcaccctcgggccgatacttgagccagcagatgacccaggtgacaacgaccgagaagagtgccaggatgctggccaccgacaggcagatgggccccacgggcgagggcgagggcgacccggtggccggtgcctcgccagggggcgccccgcctccgggggttcccccgccgccgtagtggttgacgaagatgaggccggtgaagagcagcaccaccatggagaggaaggagaagaccacgcacacgcagccagcggtgagcgccgcgcgcttgcagttctggcagctgtcgtaggcgcccggggcgcgcaggccggggcgggctcgaggcccgggggccgcgtcctcggcaggcggcggcggcggcggctgcggtggggcgggggagggcggcggtggcggggccggggtgggcggcggggcagcagcgggcgcgggcaggcgcgcgggcagcggcgggaggcggtcctggggcagcgggtcgtgcgctgcgcgcaaagccagcgggaaggcctcggctagcttggtgttgttgggcaggccgtgcacgcggctgtcgggcagcggcgtgcggtggcggcacaccgggcacgcgatggcgccgggcgggcagagccagggcggcgggcgcggcgggcgctcaggcgcggcggcagcggcggcggcggcggcggcgcggagctgcagctggctcaggcactcctggcagaaggtgtgcaagcacgccagcagcttgggcgcgcgccggtccgcgtcgaagtagttgtagcagattttgcactcgtagtcctcaagcggagggaggccggagaccgtctccgctgcgtcccgggctcctgcgtctccgcagtccggggctcccttcgcggcgaccccagctccctcccggctcccggggctgctgcttgggctctgctggctgccgccgctgtcgctcgccggcgctgccat

SEQ ID NO: 107539 - DNA, 421 bp, Homo sapiens; identical to SEQ ID NO: 38675
  chr2:223185034-223185455
  hyper

SEQ ID NO: 107540 - DNA, 1346 bp, Homo sapiens
  chr2:223288950-223290296
  hyper
ctcccattagtgttacgtctgccgggggaagaaggtggggtggggggttgggggcgccgggagaagagaggcgcagttcggagatcggcactcctccgtccagttacaggcggtcctgcccccgtggccgcccggggccgcccaagccctccgggacggagagaaagggggacgcgttgcgcaaggtggaggcagacacctgggcgggcgctaggacccgggcggcgcacctgttggctgggcccggggccccgcccgcccggcctccgcccggagtgcgggatcggcgggggcgaggcgggagtggcggtgccagcggagggcaccggcccggcgtggcagcggcggcggagcgcggccccgggcacaccatggccgagctgctgcggagcctgcaggattcccagctcgtcgcccgcttccagcgccgctgcgggctcttccccgctccggatgaaggcccccgggagaacggcgcggaccccacggagcgcgcggcgcgggtccccggggtcgagcatctccccgcagccaacggcaagggcggcgaggctccggccaacgggctgcgcagagccgcggcgccggaggtaaccatgggcaggtgttcgccgggtacggggagggggcggctgcggacgtgcgggtccctgcgactccgccacgcggggccggccgggccgagagggcgccgtccccggcagtgacccggctcccgccgctgcgagcggacggggaggcctggccttccagtaaccaggatgccaccctccaacgctgccaggggcaaccgggtctattgagatatccccagacgctttcaatgcagtccatttagagacttcccactttcaaaagtagttaaattcacgtagatgccagcaaatatgtaagagttacgtaatggaacggaggagcggggatgtccttggcacttccccggggagacgttcttagactcccccccacccccgtattcttgcatttccgcccatcccccttccctgatgcgcacaaatgcgggtgcagccgggctcagcgcgctcctcaccgcgctgcaccgccagctctgggcacagaacttggggctcacacagctcctagagagatttacaacctccctgcactacccccggcgatgatgtcttaacagcaactctcgcttgccctcccccagagtctgggggtccctcctgcctggtgggtcttttatggaccgacaccagtgacttctaacagatgcttctgggagggaagctcgctacgctcccgctaggtgttcaaagcgtggttatacaacccactgcggcttggggggaaccagcgtgcgtcgtcgtcgcagtgca

SEQ ID NO: 107541 - DNA, 362 bp, Homo sapiens
  chr2:223520611-223520973
  hyper
aaaccccggcctcccggagccaaaaccttcaggaaggcatgaatgtcgccacattgcccttttggagggaggccctgcctccgagaagaggcgtagggcccaacgtatagggccgccactcactgtaggtgcggcccagggcttggaagagcagatcacgcttcacgctgacagtcggcatggtgtgtcgaactcactgcgcctgcgcagcgagctgacccgggcttccctagcgaagcgcgtaggacccgcctcttcttgtgcgtgttgtcttgaatatcgccattctgctggcaacagttcctgttctctttttaacctaaaaacactcatcatgccattacctcgctgattaaatgtat

SEQ ID NO: 107542 - DNA, 659 bp, Homo sapiens
  chr2:223536120-223536779
  hyper
ggcggcaggagcccgcgctgcccggctcgggctggctgccagttgacccctctccccgtccctcgtgtcccacgcggcgcactctcgccaacgcccggcgcgccagccaatgcgcccgggccgctgtagctgctccggggccagggcgctgggccagctctggcgcccggcgcttgtgattggctgcccccagcctcagcccagcgcgccctcccacccagggcgcagttgggtccccgctcgctgcctagcctctgccttttcctctccgcccagccagtgcccagcgcggggcccggatccggccgggcacttcccacaggcgccgcagagcagcgtgggtgcaggctgcagtggctggcgccgtcctcgcccggccaggccatgaaggtagagtttgcaccgctcaacatccagctggcgcggcggctgcagacggtggccgtgctgcagtgggtcctgaaatacctgctgctcggtaaggaccccgccccccgggccgcggggcttgggctccatatcctccctcgggacggtccggattccaggacctgcatagaaccttccaaccctcgttcccctgtcggccagagcaggcaggtcaaagagggcatttggagctaacgtggactctggtttcctcacgagaacctcatcgc

SEQ ID NO: 107543 - DNA, 137 bp, Homo sapiens; identical to SEQ ID NO: 38680
  chr2:223725609-223725746
  hyper

SEQ ID NO: 107544 - DNA, 30 bp, Homo sapiens
  chr2:224702252-224702282
  hyper
gctgacaggtgaggcgcccggcttagacca

SEQ ID NO: 107545 - DNA, 172 bp, Homo sapiens
  chr2:224702619-224702791
  hyper
ggtcaggcgagagcgcgtggcccgctaggaactccctgcgcggggaactccctgcgcggagaacaccggggacttttcgcgattctgccgcgcgagtgtgtcctgtattccttccgcaaacgtttatcaaacctggcaaagatacttccgatacactcgcagaaagtgccgg

SEQ ID NO: 107546 - DNA, 384 bp, Homo sapiens
  chr2:224808914-224809298
  hyper
ggaagagagcgaaggcggctggagttcctcgcaaagaagcaagccccgggcaccagggtccgcagtgaccagccgccggtcctccacgcttccagaggagacgatttggaactgacccgggagggccaagaaacaccttccgagtaccaggctaaaccccgccagggagagagaccgggacgaaggtcccaggctagtgcgacaccgcaggtcggggttccctggttggaggagcgcggtgggctgggaggggcgcgttggtgcgcactggaacaggggtccccggcttgagcagcgcggtgagacagagttcccgcgctggaggggcgcggtgagacagaggtcctgggctggagaggtgcgttggggcgcactggaaccggg

SEQ ID NO: 107547 - DNA, 245 bp, Homo sapiens
  chr2:224821705-224821950
  hyper
aaggcttttggaggcgtgctgggtcaaaaatagaagctcggtaaatacttgctcagtagtggcctagaacactaaatataaattaaaaatgttttctttttttgaggatttaaatgtttccttaacctgaaagcgaaacagatttttgtttgttttgctgtaacgagagaggaaggaacaagagagtgacagggtgaagcaacttctcccagaaacttttgggcgcaaacgccctcaagtccgga

SEQ ID NO: 107548 - DNA, 30 bp, Homo sapiens
  chr2:224822214-224822244
  hyper
tgcagcagggacatcgctgcctcctggctc

SEQ ID NO: 107549 - DNA, 1435 bp, Homo sapiens
  chr2:224903206-224904641
  hyper
ctgcagtcactcatccgcctcgcaactcccgtttctacagatgatgaaaatagcaaagacctgctcgctcgggttaaatcggctgccagaggccaagttaaaggctttccccacaccgcgcgtcacctccctctgcccaggcagaggtaacaagtaagagtgcgccagtctctccccatccggcggcgcgcagcctaagtccggggtaggggttgccggcgagcagctggaaacctcaggttcagggtcagggccggctcggatggccgggcaggagccacgccggccccggtgctcccagctgcgggtatcactggacgccaccccggggcggccccgccttgccctgcccgggtcccgctcggggctcccggcgggcgggaccgggatgcccggcgagcacccagccccggccaaggcggcccgcgggaggctgagaaagttctctgctccccgacgtcggcgccccagggtcccgctggccccgcagcttcccggccgggcgcaaggtcagggagcagggccggtggcgcgcggagccccggggagcgtcccccgccgagggcagcgccggccgcgcccgggactcaccgcgcagcctgtactcaccgcgctcgctggatccccagggggcggccgcggagggcggtgcggccgcaaccggagcgggagcctggtctcggcggcgcggggagtcggaggacgcagccaagcggcggcggcgaggagggtcacagccggaaagaggcagcggtggcgcctgcagacgccgcgcagcccgggcagccccacagcgcaagctggctgccgcggcggcgggggctttatcggcggcgccgcgcgggcccccgccccttcctgccgcccccgcccccggcccgccttgccccgccttcccgccgcctcctttgtgtggccgcgggccgcagcgtccccgcgcccggcctccaggacgccccctctccgcctgcgacttctcggatgccgccccgccaggggtccgtgtcgtggggctgcgcccggaacgcgccggggagacgcgcagaccccgaggtgcggcgccagcccgggcccagctgcacgtgggtctcccggatgggggtgtgtgaggtggcggggggaataccagggctcgtaccgcgtccctgagacgcagggcatgtcgtcttggctgccccctggaagagacagagggcgccctgagacagcgctcagtcctccgggtgatggggaaacggtgccaggacgcggccgggaaggggcagataacccctcgaggcgttttgcagggtgtcctagagctgacttctccctgcctaggggacagaggaacggcggcaagtcgccttaggcaaatacagacgaggggaaccagaaaactggattcccggctatggtgatagcatgaggtacccgcagcgtcctgggaacccag

SEQ ID NO: 107550 - DNA, 31 bp, Homo sapiens; identical to SEQ ID NO: 2266
  chr2:225381703-225381734
  hyper

SEQ ID NO: 107551 - DNA, 30 bp, Homo sapiens
  chr2:225450021-225450051
  hyper
gatggcggcggcggcggcgacggacaaaca

SEQ ID NO: 107552 - DNA, 54 bp, Homo sapiens
  chr2:225450597-225450651
  hyper
gtcttgaggaggagcgtggggtgctagatgtgtaactacgtcccgaactggttc

SEQ ID NO: 107553 - DNA, 708 bp, Homo sapiens; identical to SEQ ID NO: 38685
  chr2:225906070-225906778
  hyper

SEQ ID NO: 107554 - DNA, 571 bp, Homo sapiens; identical to SEQ ID NO: 2269
  chr2:225906790-225907361
  hyper

SEQ ID NO: 107555 - DNA, 182 bp, Homo sapiens; identical to SEQ ID NO: 38687
  chr2:225907439-225907621
  hyper

SEQ ID NO: 107556 - DNA, 153 bp, Homo sapiens
  chr2:226895455-226895608
  hyper
ataaatatatatgcgcgcatttttctcctgcataaaggagtcaggccgatctctttctatttgatcttaatccctctcccccgccagcgtggcccaggagcacccctctctttctaataaacggctggcagagcaagccgttcacgcagtccc

SEQ ID NO: 107557 - DNA, 360 bp, Homo sapiens
  chr2:226895880-226896240
  hyper
tgagaagctaccacccggccagacaggggaggctccgccctgcccctgcacccgccgccctctccccggccgcacgggagcccggatcccgcaggcatctgtgttcgcaggttctgccgtttgctttcgggaaggcgagcattgttttcctctggatgcaagcttttgctgacccacaccccccttccccaatgcctccgcttcccttcccccttcggggacttgggattgccctgcagactccctggacttgagcgttttggtctctggctgcagtgtttgtgagagaggctgcggatgcgacccagctccggctcagctgcgcgcgtttgcaaatgcggctgcgtccagacagggcat

SEQ ID NO: 107558 - DNA, 30 bp, Homo sapiens
  chr2:227656393-227656423
  hyper
ccccgcgcccgccgcggctcagccgtttca

SEQ ID NO: 107559 - DNA, 31 bp, Homo sapiens; identical to SEQ ID NO: 2271
  chr2:227656659-227656690
  hyper

SEQ ID NO: 107560 - DNA, 30 bp, Homo sapiens
  chr2:227663523-227663553
  hyper
tcctcgccgcggcccggcacatgcaaacag

SEQ ID NO: 107561 - DNA, 30 bp, Homo sapiens; identical to SEQ ID NO: 2272
  chr2:227663896-227663926
  hyper

SEQ ID NO: 107562 - DNA, 229 bp, Homo sapiens
  chr2:227700354-227700583
  hyper
gaacctgggcagaggcgtccgttgggtaggcggccgcgacccgctcgctgcttctcccctagtcttcgggtcccttgaacgcaggtcgcttgtttgccttacgcgtagtcagcggccagtggctatttatggcagtaaggaatattatccacatttcacatggagcttagaggacagggcgagggtccacactctccttactgcgctctgccgcggtcctgccccgctg

SEQ ID NO: 107563 - DNA, 651 bp, Homo sapiens; identical to SEQ ID NO: 38691
  chr2:228028699-228029350
  hyper

SEQ ID NO: 107564 - DNA, 372 bp, Homo sapiens; identical to SEQ ID NO: 38692
  chr2:228029372-228029744
  hyper

SEQ ID NO: 107565 - DNA, 30 bp, Homo sapiens
  chr2:228190400-228190430
  hyper
cttgtgtggttcggcgtctccttttgtgta

SEQ ID NO: 107566 - DNA, 30 bp, Homo sapiens; identical to SEQ ID NO: 2273
  chr2:228337227-228337257
  hyper

SEQ ID NO: 107567 - DNA, 16 bp, Homo sapiens
  chr2:228582819-228582835
  hyper
cgtccagacctttcat

SEQ ID NO: 107568 - DNA, 80 bp, Homo sapiens; identical to SEQ ID NO: 2275
  chr2:228736215-228736295
  hyper

SEQ ID NO: 107569 - DNA, 139 bp, Homo sapiens; identical to SEQ ID NO: 2276
  chr2:228736335-228736474
  hyper

SEQ ID NO: 107570 - DNA, 129 bp, Homo sapiens
  chr2:229044815-229044944
  hyper
aaaatggaaagacagcggtggtcctttgaccctgttccgctggggcagggatcgggagggtggggattgagacttcacttaagagctgcttcaaggagtgcacagaaaccacagcgggccttttctgaa

SEQ ID NO: 107571 - DNA, 801 bp, Homo sapiens
  chr2:229045943-229046744
  hyper
ctccaagctgtgtccgcggaaagtccggctcctggctccacctagggcagagcagacctccgtccctgggccttagaggcgggcacggggctgacccccaacccgtgccactccagcgcacaggccccactcagcatcgcgccctgtggggcagttgacagggtcccctgtagctccagcgaggctgggccggacttatttacaagtgcagtgacccctgtctcctcgctgggagccccgtgcaaaccgaagcgctctggggcaagttggtgagcgactcacaacgcggaacggagtttgatcgacatggtattgggcatagaaagaagcgggtcttaccttggtaccgagagcagggagttgccatccattgttggtgggcgcccagagaagaaagacggaaagtgcaggcgaaggataagtctgtggtgctaggacccagctcccagagtgccagactggcgcgcgccaggagagaggcgcgcaggctggggcggcggcggcgcccacggagactagctcctccctggccagcaagctctgtgcgctgcgaccgcccgctgtcccctcccgccgtcctctctgatcttgcaggagcgcgtggccaacgctcccacctttctgcctggctcctgcctcctgcaggcgggccccagtctcagttgctcgaggatcctgctctatcgctcattcgtgcccagaagcataggtgactccgacaaaattcctctctccccaaccaccatcgtctcccctccctttctcgctggcgtacagtaggtctgagccctgaagttgttc

SEQ ID NO: 107572 - DNA, 432 bp, Homo sapiens
  chr2:230135733-230136165
  hyper
aggcgctccgtggccggctgccacatcttccagccctgggttttggcagaggagacgctggcgagactgtcgatcgcgccggggggcgaggggctggggtcccgctttacatctggggtcggtgtccgcgggatgtgcgtcctggcgctggccaccgccgccgggtgggcgtagggggctgcgagcaggaggaggcgcggcgctcagctgccggcaacttgtgggcacggccgcgcgccggctgtcctggcgcagctgcgagaggactgcgcagctccgcccgggcccggcgagcgcgcggcggcggcgggggcggccgctccctcctcccccgccgccgccgcccggacctgcgcgctctgagcatgcccggggcgggcgcccaggggccgcgcggggcgggagtgcagcgcggccgactctaaatcctag

SEQ ID NO: 107573 - DNA, 1165 bp, Homo sapiens
  chr2:230578041-230579206
  hyper
ctcctgaaaaccccaaattcacgggcggctgctggctacatcccatcgtcccatccctcgcaccgcccccacgctttctggcggcttcccggtgccctgctcacgccccggctgccagccccaagcgtgcgccccgtggagcgtccggcaggaagggcggccctgccagcgccacgtacaatgccccctcgaatgcctccgactgttccaacactgctcctaagcttagagagggctggtcgcaggccgaggggaggcagctgccctcctcgtcctctggctgctttgtcacagccctcaagggcgtaggaagagaaggagaaagtgccccaccacctggcacggggcccaccatcacctgcctcccacaccgcacaccctttacacacacagggtccagccggacgtggagcgtggaccacctggacattgaacacctcgccggggacgctcggagccggctcctccgcgctgccaaggcgggcaccgctcaagtggttcttggctcggcccggcctggaggggcgcgccactcagtggccaaccggagcgtctagagccccgcgcgagaagtgccgagccccggagcggcacaccccgagagcccggctggccccgcccgggaaccagggcgggtaagggaatcagggtcggcccgggggtccgcgtccacgcgggccaagagactggatccatcttcttcccaaagtgggaaagcctgtgtcaggcgtgcccattgtcgggcagcagcagcagggccggcgggaagaggctgctggtcccggaccagcgccccgcaccgcgcccgccgcttccactcacctggcagttggcgccggagatcccggcggggcaggtgcagctgtagccaggctcgccggcgggggccgggtgctgcgggtccggctcagggcgcgaggtgcacacacccccattccggcagggctgcgcggcgcacggcccgggcgcagacaggggcgcggcgggcaccgggttggccagggagctgcctcggggccccgctccgagcagcagcagcagcagggccagcgcgggcagcagctgcgcaccgggcgcctgggcgcggcggggctgcatggccggccgggagggcgcgggagccggagccaggacgcagtgacggcggcggcggtggcagtggcga

SEQ ID NO: 107574 - DNA, 156 bp, Homo sapiens
  chr2:230579414-230579570
  hyper
ggggttgcaggaagacgatgcgggaccccatcccccaggagtgggtcgaagtcacgggtgtgtccagaagcagccctggtacagggagccaggcgacgctggggcaggaaaggggctggagaggtccacgagtgagggaagcggggctttgagggg

SEQ ID NO: 107575 - DNA, 30 bp, Homo sapiens; identical to SEQ ID NO: 2278
  chr2:230785682-230785712
  hyper

SEQ ID NO: 107576 - DNA, 31 bp, Homo sapiens; identical to SEQ ID NO: 2279
  chr2:230786011-230786042
  hyper

SEQ ID NO: 107577 - DNA, 92 bp, Homo sapiens
  chr2:230786753-230786845
  hyper
gccgcctccctccccgcctgctctgacaccctcggggaactactttgtcctcgggctccggttacgggctcgtccgcgggaccggcaccgct

SEQ ID NO: 107578 - DNA, 908 bp, Homo sapiens
  chr2:230932489-230933397
  hyper
tagccccgaaatggccgtccccggtctctcaccccatttcagcctctcttgaggagcctcaatcggaagcgctaagggggcccagcctctgcgcgccctgggtgcgggatcgtgcccgcggggtccggcctcgcgccccacccttcgagcgcccgcccccacccgcgctcggtgctcccgctcccttggcaccccgagaccacatccccacttcgggcaccccgcatccctcggcgcgttcggaagccagcagcccaccggggaagctgggccggctgcagcaccacagcctgtgcagagaggcatccgcaccccgcgaagtccctaggcgcagccccgggtcccccgctctgcgcctcatcactgtccagttcgagtcccaaacgggcctagagagcagccgggcagcgaggctgggctccgggcagaacgcgcttctccagccggacgggggtgcccaggatgacgctcgcggggccccggccagcttgagcagcaaggcgcgcgtccccaagctccgcctggcggtctgccctgaaccgccggttaccctgcccgcccgcagctcccaagcccccgcggcggccttggcactaccacctgccccggcacagtctcgccctccaccgcccgggcagcctttcccgagcctgccttgggctggggctgccccttcccgggggtccctgggggtgcagcggccatctgaaacctaggctccgatgcccccggcgtcgctccattccccaggcccgcggcgcgcgcggcctcggatactcaccgcccgaggcccgctgggctgcggcctcactcggctccacgcccggatcctcgaacttgctgctctgcttggagccccctgagctgctgggtgtagagatttgttgcaatgtcgcctatcatcctgg

SEQ ID NO: 107579 - DNA, 30 bp, Homo sapiens
  chr2:231084508-231084538
  hyper
tgcagctgctgccgcgaagttaactctaag

SEQ ID NO: 107580 - DNA, 30 bp, Homo sapiens; identical to SEQ ID NO: 38706
  chr2:231084926-231084956
  hyper

SEQ ID NO: 107581 - DNA, 70 bp, Homo sapiens; identical to SEQ ID NO: 2282
  chr2:231191861-231191931
  hyper

SEQ ID NO: 107582 - DNA, 30 bp, Homo sapiens
  chr2:231276348-231276378
  hyper
tgcagaaggcagggcggcttgtggctccgg

SEQ ID NO: 107583 - DNA, 30 bp, Homo sapiens
  chr2:231577338-231577368
  hyper
taagagcgctcaggcggaggagaaagggct

SEQ ID NO: 107584 - DNA, 30 bp, Homo sapiens
  chr2:231578452-231578482
  hyper
ggaaccaccccaagcgcagactgcgtgcag

SEQ ID NO: 107585 - DNA, 237 bp, Homo sapiens; identical to SEQ ID NO: 2283
  chr2:231692870-231693107
  hyper

SEQ ID NO: 107586 - DNA, 30 bp, Homo sapiens; identical to SEQ ID NO: 38709
  chr2:231729770-231729800
  hyper

SEQ ID NO: 107587 - DNA, 30 bp, Homo sapiens
  chr2:231852139-231852169
  hyper
gcgccgggaatcgccgcccaggccccaagg

SEQ ID NO: 107588 - DNA, 459 bp, Homo sapiens; identical to SEQ ID NO: 38710
  chr2:231902080-231902539
  hyper

SEQ ID NO: 107589 - DNA, 242 bp, Homo sapiens; identical to SEQ ID NO: 38711
  chr2:231902829-231903071
  hyper

SEQ ID NO: 107590 - DNA, 30 bp, Homo sapiens
  chr2:231917689-231917719
  hyper
atgcctgcaggatgcgcggtgcgctagggg

SEQ ID NO: 107591 - DNA, 154 bp, Homo sapiens; identical to SEQ ID NO: 38712
  chr2:231921280-231921434
  hyper

SEQ ID NO: 107592 - DNA, 30 bp, Homo sapiens
  chr2:231921677-231921707
  hyper
tgacagatacactgcgcagctggaacggcg

SEQ ID NO: 107593 - DNA, 240 bp, Homo sapiens
  chr2:232063174-232063414
  hyper
gcggtcatccagcgcgtgaaccttcaccactgctgggctgtggaccctcacttccgccgccaggaagtttcggggtcgcccaccttccctcccaggctgctccgcgtcggcggcgccccgcgcgattggctgcgccgcccccacgtgacgccggggtggcggcggcggttgcccgggtgacggctgcggaggtggcggccgggctgggatagcgcgagtgtccgcggccgagcagcaggt

SEQ ID NO: 107594 - DNA, 30 bp, Homo sapiens; identical to SEQ ID NO: 38713
  chr2:232260290-232260320
  hyper

SEQ ID NO: 107595 - DNA, 172 bp, Homo sapiens; identical to SEQ ID NO: 38714
  chr2:232260769-232260941
  hyper

SEQ ID NO: 107596 - DNA, 38 bp, Homo sapiens; identical to SEQ ID NO: 38715
  chr2:232260984-232261022
  hyper

SEQ ID NO: 107597 - DNA, 30 bp, Homo sapiens; identical to SEQ ID NO: 38716
  chr2:232276999-232277029
  hyper

SEQ ID NO: 107598 - DNA, 30 bp, Homo sapiens
  chr2:232328431-232328461
  hyper
tatgcctttcccagcgagacaaccccgccc

SEQ ID NO: 107599 - DNA, 45 bp, Homo sapiens
  chr2:232329224-232329269
  hyper
cgcctgtggaaaggcgacgacggcgccctcgtgactccgcgccga

SEQ ID NO: 107600 - DNA, 30 bp, Homo sapiens; identical to SEQ ID NO: 38717
  chr2:232378833-232378863
  hyper

SEQ ID NO: 107601 - DNA, 136 bp, Homo sapiens
  chr2:232379207-232379343
  hyper
cgtgagtcttgagccggggtggagggggggccgcacgtgctgcgcctgcgcgtggagcggacattttgctgcggtctagcgcgggaggcggggttttgggttcgctggtccaggtgcgcgcggtgtcccaggtctt

SEQ ID NO: 107602 - DNA, 131 bp, Homo sapiens
  chr2:232394890-232395021
  hyper
cccggcgcccctggccggaagacacaaatgacccgagaagttgcgaggctccccggtggcggggacggggggcaccccgacggagccctcggacccttcccgccctaggacgaccctgcccgcaccgagcc

SEQ ID NO: 107603 - DNA, 296 bp, Homo sapiens
  chr2:232395054-232395350
  hyper
cgcctgcgcacctaccatgcggcccgcggcccgcgagaccccggcttccaccctccgagcgacggacacagacgcggcgcgggagccagtggactgactgacagcggccccagcccgcgccccgacgccccgcctgtccggccgggaacgccgccagggggcagtgcagtccccgcagcccgggcggcgccccctcccgcactggcggaggacgcggccgttggaggcgacacctccacaagcagcgtggaggcgacacctccacaagcagcgttatctgacggaaccctcacaac

SEQ ID NO: 107604 - DNA, 30 bp, Homo sapiens
  chr2:232477495-232477525
  hyper
caacaacctgctcgcgagaaaccaggcctt

SEQ ID NO: 107605 - DNA, 122 bp, Homo sapiens; identical to SEQ ID NO: 38718
  chr2:232478345-232478467
  hyper

SEQ ID NO: 107606 - DNA, 510 bp, Homo sapiens
  chr2:232479180-232479690
  hyper
gcgagccgcctccccgcccccagcctcccctgccccggctgcccccgagtcctgtttcagggatcctagccctctctccagacgcgctgctctgtccactgtccccgcctccaggacctgcgtcctcccagccccacatttgtgcgcaaagttgacggtcaccgggcccgcgcgcttcggcatctcgcgaaggcgctgcccgcgccctgagtccttccctggggctgtacgttggaaaggacagaggtctcctctgcttcgcagttgcaaaaggcttcacgttttcaccaaggggcagatggggcagtaggggccctgggaggcctggtccaccaaggagggggaacccgcgcgcgcgcgcgcacgcacgtggcccggcgcgcccgggagacctccgtgtgatcaccgcgcgcagcagctcccgggcggaaacacctcccccctccacgggaaagtgggctcaaccgggggcggaaagcgacacggctgggggacgactacgtgctccct

SEQ ID NO: 107607 - DNA, 627 bp, Homo sapiens
  chr2:232526741-232527368
  hyper
gggaattttcacccccgccagaggaagagggcccagctgcgccattagcgcgtgcgagggaaaatggaggctcctggtcccacccgcgcaccggcgcctgcgccctgggcgcccaccccggcccgcgaggcggccacggccggagagagagggcaagggaaccagtgccgtgtcgcgccccaccctgcgcccgagcgcagtgccggcgagcccggctccggcccttgagagtccgctccaggccgctccacaccacgagccgctccgcaagtttgcagcgctccgtgctttccctccagccctttgtgttctagcgcgcgtcggaaggaacgcgggaacgcgcgccgtgctgtgcgcctgcgcaagggttcaggcggtgcgccaagcctggagtcaagagtgggcgaggctctcggccgctccgccccgggccgccttcgctccgcccctcgcccgccatttcgtgctccgccgcgtctcccgcgtctggggcgcggcttccgcgtgatggacgcccggaagccggcacaacaaatgcccaagcgccagggcttcgctgtctgcaggtccttccgctgcccgcggagcgaagatggcgcctagagcttgcagcgttgcccaaatatg

SEQ ID NO: 107608 - DNA, 39 bp, Homo sapiens; identical to SEQ ID NO: 2289
  chr2:232539452-232539491
  hyper

SEQ ID NO: 107609 - DNA, 552 bp, Homo sapiens
  chr2:232545576-232546128
  hyper
ccgtcccgtgcccatcgggcttttcccccacagcggtggcccagcccctgcttggaccccggggactccgagcgcagctgggccgggggtggcagcgggggaggccggtgcacaggttgccggaccgcggcgggggcaggcggcggaggctgggcgggaacccgactctgggcccgcgccccgccccggcgcagatggcggcggcgcgggctggtcccgggccgccgctgggggctcgggtttcggccgagaggggcggggcgagcgcctgggggccccggggaggctgcggcccaatcactgcccggcccggacgctgcccccgaccccggcctccaatcactgcctggccggaccgcccccgctccgctgcgtcctttgttcccgctcccctctgccttcccgggcgccccgctccggccctgcggcttccggcccgcgcggaccctgccgtgtggacgcgtgtgggctgcgcccgccccgggcgcactccgggccccaacgccaggcacaggcccgcttgtggctgggcacgctcgtgtgcccttggcg

SEQ ID NO: 107610 - DNA, 49 bp, Homo sapiens; identical to SEQ ID NO: 38724
  chr2:232571123-232571172
  hyper

SEQ ID NO: 107611 - DNA, 310 bp, Homo sapiens; identical to SEQ ID NO: 38725
  chr2:232572331-232572641
  hyper

SEQ ID NO: 107612 - DNA, 178 bp, Homo sapiens
  chr2:232573065-232573243
  hyper
cgcagcgcgggacgcgccggggcactgccgctttaagcacgcttgtccattgttcggaatcgagccaatgagcgagcgcccgctccctgcgctcagccaatagcggccgggcatgggaagccgagcgccgcccactaatctatattaaagcttctggcgccgcgtgagtcccccactg

SEQ ID NO: 107613 - DNA, 30 bp, Homo sapiens; identical to SEQ ID NO: 38727
  chr2:232573997-232574027
  hyper

SEQ ID NO: 107614 - DNA, 30 bp, Homo sapiens
  chr2:232575540-232575570
  hyper
tgtcctggccggggcggtgcggcctcgcgg

SEQ ID NO: 107615 - DNA, 30 bp, Homo sapiens
  chr2:232575896-232575926
  hyper
agtgggagagggaccgcaggggcatcaggc

SEQ ID NO: 107616 - DNA, 30 bp, Homo sapiens; identical to SEQ ID NO: 38728
  chr2:232645299-232645329
  hyper

SEQ ID NO: 107617 - DNA, 235 bp, Homo sapiens
  chr2:232646070-232646305
  hyper
agccagtaggagcgcgcagcggcttcgcagggggactgttaacgtcaatgggaagggccctccccgggaagtcccataggacacaatattcatctggtgttgttgcctagagtttgtcccagcggagggttggcttcggatctgcagaggctttagggacctgctccagccactgagcacactagccgtctgagacggcagctgagttgcactgtgcgacgcgacagagactaca

SEQ ID NO: 107618 - DNA, 63 bp, Homo sapiens
  chr2:232651382-232651445
  hyper
ggctcctcactccacgcctgcggccctgcttggagcataccgcccaccgtgaggtctgctgca

SEQ ID NO: 107619 - DNA, 2091 bp, Homo sapiens
  chr2:232790015-232792106
  hyper
caacttgagcaaaggcggctcgcgcgcctccgaaggccggctgggcggcgggcggtcccgggccgggctggggctgggcgtcgggtgggccgtactcaccgccgccagggggcgccgcactaacatcccaggccgctcatggagccgattcggtccagcttgaggccgaagcagcccttggacaagcccttcttgttggctcctttgtatttgcgcgcgttggggtgctcttgcagaaggcgagcccacgctgcccgcgacttggtgtccacgcgcaggtcccggagcagtcgcgaccggtcgcccttgagattggcgcccccgcccccgggagccttgtcgcccttcttctgaccgccgcccgcagcctgcggctcggccagctcctctgccggcggggttcgcgggacctgtccgaggaaagagcgggcaggtgaagggacacgcggctgcagcacgggggactctgatgctccagccccacgcgcccgccggcgcggggtgtccctcccaagcccagagccgcccccaccgatgccggccagcttggccccgcatccacctgccacgcggccgccttcgccgctccctccggaagccccctgccctccctttgctgctcgccgggcaggccacactggggtagggggctgcgcatgggccgatgttctccggaggctggagaagtggacccccgaatccgcgcttcgagggctccccggctctcgcccacgcgcatctcggaggagacagccgcctgccttccctctctcctgggtcctgcgcgccgcattctccaagcccccagcctcccacgcctctcccaggctcggcgtccccacgacagcacccaccttcggcggcgccccgggcttggcttcggagggccggagggagagcagcgtgagcagcagggcgcaggccagcagctgggagagatgcatggtgccgctggggtcgaggggcgcacacgggcggcagcgagggcgcgcaggtcggcgggcagaccagcagggggatgcggagcaggctggctgggctgcagggcgagcagggtcccagtgctgcgcggcgccggctgggtgcgctctgagcccgtgactctgctcgcgcctttataatccaacctgccgctgatgtcatcctcccgcccaccgggccgcccgggccaatgacaccacgcacgcggccgcgccgagggccgggagggggccgcgggggctcccctcccttatcccaccccggagggatcccgcggctcggcgggctcgctccaggctgcacttggagctgcagagctgagcgcacaggggaactccatttgcagcgagcgcgcgccctggcctgccgagcatcggtgcgcctggtgccctgtgcacccactaggtcctcatcgcactcactctacctggaagggatacgtagccctctttgcaggtgcaaagacaggctcagaggaatgaagtcacttgcccaaagtcatacaggcataaagttggcgctgcccgaaatccacgcagccctgcttgtcgccaaactcttccctgggcacctgacagccgcgggatggcattgcagctccgcctttcacctgccggtcagggcgggagcgcagaccacagcgacgtcgttaggttggggaggcagaggatggggttggaggactggggtgggaggcgcagggagagcggggttcgcctgggccgcaggggggagcgcaagtcttccacactggagagtgcaggggtgtcgccagcctgagtgtttgagcgcaaggcgggaacgaggggactgcgagcgcggaaccaagatattcatgctcatgcgtgtgctccgcggcatcgtatgctcgccagttactgctctaggttcacgttcagccggtttcggccacacagaacgtcccggggtctgactccgctggtgaactccctctgtgggaacaatgcgcacctgaccttgcctgcacccacgcgaggatccgctgctgggggaagcccgctccagtatcctgtgcactttcacaggctggggagagagcttcctagccagcggcccagtccagcctctgccagccgtgacaggtggtca

SEQ ID NO: 107620 - DNA, 30 bp, Homo sapiens; identical to SEQ ID NO: 38732
  chr2:232794155-232794185
  hyper

SEQ ID NO: 107621 - DNA, 30 bp, Homo sapiens; identical to SEQ ID NO: 2292
  chr2:232826185-232826215
  hyper

SEQ ID NO: 107622 - DNA, 79 bp, Homo sapiens; identical to SEQ ID NO: 38734
  chr2:233251507-233251586
  hyper

SEQ ID NO: 107623 - DNA, 910 bp, Homo sapiens
  chr2:233283249-233284159
  hyper
ccaatgcccagagagcgaccagacatccatgggtagagacccagaagcacgcagaccccagcccctctttccacccagacgagatgaccaaagccccatccctgactgtctcagcttacccctgaaagcctgcactttccctacctgtcgggggcacttgcgcagtgccgcactgacccttggggttcctggctttggcgccagccccagccctcacggagatgtcagcccagcccgccggcgcgtccctccctccctgccctcactgccttccagagggctgggaaattgcggctcccgcggctcggctgaacacttcagttaacccagggaaattacttgcgccttcctcccgcgctctgccgccaagcgctcccctcccctgctttccctttctctcctcttgcgcaccctcctcccacgcgcagggacccctagtcagggccacgccccgggtctgcggccgctggctgggcgctcgggaatcgcactcaggcggatgacgtagcgcgaggagttcctgtaatctaggctgatctagagagagaagagcgcggcggcactgtacacgccctgcaccttgtacagcagctggttgaggtcccagctggttgaggtcccgcgacccccggacgctccgccgcgccgcccaggtcccagcccccgcagtcctccatgacctctagcatgggccgaggactcagtagctctatctcgcgcatgtcgaggcacgaacggaaaaaggcgctcaccttgcactgggccgcgccgccgggcccatccctgggccgtgccagcaggcgcctcaggcgctcctctttctgctcgccgaaggccgcgatggtgccataggtgagcttttcgttgggggtggcatggcgcttcagtcagcagccgcagacgaaaaagt

SEQ ID NO: 107624 - DNA, 83 bp, Homo sapiens; identical to SEQ ID NO: 38737
  chr2:233284386-233284469
  hyper

SEQ ID NO: 107625 - DNA, 682 bp, Homo sapiens
  chr2:233284686-233285368
  hyper
caccgcgaggagagacgcaggcctgggtgcagaggccccagctgccggcctcattcactgcggaaaccagggacgaggagagtctggcggggccaccatccccgcgtgcacagtggagtcttctcccctgtcctcctccctgcacacacgtgtcggatgctggattgggaggcctcttatgggaagggggaggcgctgggcacggggcctggcacgtagggggccttcattgcatctctcttcccttcgcctttcttgtccacgacctgtcctagccaaggccaagtggggtgggggaaggagcagaggctggagtgaggaggtgcggtcaggggcgcgtctatgcggcactttcagctctccgagctggacacagacagacgcttcgcaaaacggccaaagaaccaaactttgtcctcgtggaagtctgcgggatctaccacttcaaacccgctcgctggctccttctgctcggtggcccgacggcccacccgccccttcccaaggggaacgcactattgctccagggtcgcggatacacaacccaccccctgcacggcagtgatggggaacccgagacctgtccgtctctatcccctttccgctccactcctggcttcaacaggttctccctagaacccacacttgcgcgaagtttcacccacgctggggcgcgagctgg

SEQ ID NO: 107626 - DNA, 618 bp, Homo sapiens
  chr2:233285625-233286243
  hyper
ggtgtctccccgctcccgctgccttctctgccgccgccccagcccgccgcccgcctgcctgcctgcccgagggagaggacgcgccggtggctccaccctcctccgcccgtcccgcgctcccttccttcctcctgcgaccctctggctacctggcagcgcggcggcagcggggacctgggtcgggggccgcggagacaggcttccgagggtcgtgcgcgggctgcggtaggggactccggatccagtcgcatcccgggactagtgagggtagcgggtacacccggcaggagtcccctccgatcccgtgtccccactcggaaccgcccaccaaccggttggaaaggagctggagctacgcagctgggggccgtcatggtccagcccacagccctggagcaccacccagggaggactcctcctaaggattgagagggcgctgacggagtgcctgggctgcccgcacagcgcctgcgcagagctcaccttcaccagggagcttcctttacctcctcggaacccctgtccgggatcagctctccccggggtgtctgggcttctggttgtctcgcccccttcccccagcctctgatccacggagagcaacgcagagccctgcca

SEQ ID NO: 107627 - DNA, 247 bp, Homo sapiens
  chr2:233350292-233350539
  hyper
cccagcccgccggcgcgcctctccctcctggccctcactgcctgccagagggctgggaaattgcggctcccgcggctcctctaaacaccgcaattaccccagggaaattacttgcgccctcctcccgcgctctgcctctgtgcgctcccctcccctcccctctcctgctcgtctcttccctcctctcctctcacgcacccgcctcccgcgcgcagggacccctgggcaaggccactgcgccccggat

SEQ ID NO: 107628 - DNA, 435 bp, Homo sapiens; identical to SEQ ID NO: 2296
  chr2:233350843-233351278
  hyper

SEQ ID NO: 107629 - DNA, 27 bp, Homo sapiens
  chr2:233351415-233351442
  hyper
cgtggccgccggcctcctcgtgggcct

SEQ ID NO: 107630 - DNA, 266 bp, Homo sapiens
  chr2:233351467-233351733
  hyper
cgggaagggcggaagcaggctcaggaggcgccgcagccggatggggctcagggtcaccgcgaggagggacacaggcctgggtgcagaggccccagccgcgggcctcattcactgcggaaaccagggactatgagggttcggcggggccaccacccccgggtgcacagtggagtcttcccccctgtcccctccctgcacacacttgagggccgcagggttgggagggctcttattggaagcaagaggcgccaggcaaggggcctggc

SEQ ID NO: 107631 - DNA, 217 bp, Homo sapiens
  chr2:233351789-233352006
  hyper
cgacctgccccagccaaggccgggtggagtgggggaagaagcggaggctggagtgaggaggtgcggtcaggggcgcgtctatgcgacactttcagctctccgcgctggacccagacagacgctccgcaaagcggccaaagaaccaaactttgtcctcgcggaagtccgcgggatcgaccacgccaaccccgctccctggctccttctgctcggtggc

SEQ ID NO: 107632 - DNA, 350 bp, Homo sapiens
  chr2:233352101-233352451
  hyper
cgagacgggttccctccccccactcccaccatctctgtccccgccccgagccactcctggcttcaacaggttctccccagaacccaaacttgggcgaagtttcacccccggcggggagcgagctggctggcgacccccgagccccggcgccgtgcggcgcagtccgcggagcccgagagccgagcccgggagccgcagccgcagccgcagccggagccgcagccgagaggacgcagacaaagccgggaggctccgcgcagtggcggcggcggcgacggaagtggccgcggtggtggcctcagcggcagggactcgggcgccacttacccggcaggtgcgcgcccgagccg

SEQ ID NO: 107633 - DNA, 256 bp, Homo sapiens; identical to SEQ ID NO: 38746
  chr2:233352506-233352762
  hyper

SEQ ID NO: 107634 - DNA, 15 bp, Homo sapiens
  chr2:233352775-233352790
  hyper
cgagtgagggcagcg

SEQ ID NO: 107635 - DNA, 597 bp, Homo sapiens; identical to SEQ ID NO: 38747
  chr2:233367695-233368292
  hyper

SEQ ID NO: 107636 - DNA, 30 bp, Homo sapiens; identical to SEQ ID NO: 38748
  chr2:233386293-233386323
  hyper

SEQ ID NO: 107637 - DNA, 30 bp, Homo sapiens
  chr2:233387289-233387319
  hyper
aggtgccagtgaaccgcatcctgccccacc

SEQ ID NO: 107638 - DNA, 678 bp, Homo sapiens
  chr2:233388480-233389158
  hyper
gcctcctccagccgcgagcccagctgcagggagcttctggcctgggaccccccccaggagctgcaggcagacgccgcccggctctgcgccttctatgcccgcctgtgcccggggtcccagggcgcctgtgcgcgcctggcgcaccagcagtgcctgcagcgccggcggcgatgcggtcagttctgttcacccggacccggacggggggcagaggggagggggcctggccagcctctgaccgccgctccgactcctgtccggtccgcagagctgcgctcgctggcgcacacgctgctgggcctgctgcggaacgcgcaggagctgctcgggcctcgtccgggactgcggcgcctggcccccgccctggctctccccgctccagcgctcagggagtctcctctgcaccccgcccgggagctgcggcttcactcaggtaccccgcgccctccagcccagcccagccctggcccggccccacccgcgcggcacagccactttctccgccgaggcggtaccctaaccctgtgcctccccaggatcgcgggctgcaggcactcggttcccgaagcggaggccggagccgcgcggagaagccaacggtaatgacgccccctgccgaccttcaggaggggataggctgagggcctggacgaggtcggaagcgcttctactgcagct

SEQ ID NO: 107639 - DNA, 85 bp, Homo sapiens
  chr2:233414991-233415076
  hyper
ccatagtacagtggcgccgcgaccgacaaaggaaagcctccgggaggtcaaaagagataccagagagtgcgtcccgcactggagg

SEQ ID NO: 107640 - DNA, 30 bp, Homo sapiens
  chr2:233415638-233415668
  hyper
ggagaccccagggccgtccgaaccgagggc

SEQ ID NO: 107641 - DNA, 30 bp, Homo sapiens
  chr2:233471061-233471091
  hyper
agccttctccgcgccggctggtctcccaga

SEQ ID NO: 107642 - DNA, 406 bp, Homo sapiens; identical to SEQ ID NO: 38751
  chr2:233497773-233498179
  hyper

SEQ ID NO: 107643 - DNA, 181 bp, Homo sapiens; identical to SEQ ID NO: 2304
  chr2:233498345-233498526
  hyper

SEQ ID NO: 107644 - DNA, 302 bp, Homo sapiens; identical to SEQ ID NO: 2305
  chr2:233498571-233498873
  hyper

SEQ ID NO: 107645 - DNA, 449 bp, Homo sapiens; identical to SEQ ID NO: 38754
  chr2:233498895-233499344
  hyper

SEQ ID NO: 107646 - DNA, 30 bp, Homo sapiens; identical to SEQ ID NO: 38755
  chr2:233520329-233520359
  hyper

SEQ ID NO: 107647 - DNA, 100 bp, Homo sapiens
  chr2:233562008-233562108
  hyper
ggtcacgtgacgtgcgtggcgacgtgtcggccatcttgtgttgttgaggctgaggactgactggggttctgagactccctgtcccggaccgcaggtaacc

SEQ ID NO: 107648 - DNA, 100 bp, Homo sapiens
  chr2:233562461-233562561
  hyper
ggagctggagggctcgccttcctctgcttgcttctccgcgccagacacccgcccagtctcggggtggcccggtaacagctgctgcggccagacagctgct

SEQ ID NO: 107649 - DNA, 1234 bp, Homo sapiens; identical to SEQ ID NO: 38756
  chr2:233740541-233741775
  hyper

SEQ ID NO: 107650 - DNA, 30 bp, Homo sapiens; identical to SEQ ID NO: 38757
  chr2:233790029-233790059
  hyper

SEQ ID NO: 107651 - DNA, 322 bp, Homo sapiens
  chr2:234159998-234160320
  hyper
ttgttcctaaactgcgattaaaaataaaagtggggggagacaggccaagaaaaaaaacacgaaaagggttgaaaagcagcaaaagaaaagtaagcagtcaggcggaaacggcccctttcctgcctccttcccgcccggcgctgggccttgcgcagggcccggacgcccccaagcggccacctctctgcagctgacgcttccggctacaggctggcgtcactagcgagcgccctgcgtaggcaccggctcctgagcccgtgcttcgggtgagggggcgggtcttccggccctctcgaaaatcatttccggcatgagccggaag

SEQ ID NO: 107652 - DNA, 30 bp, Homo sapiens; identical to SEQ ID NO: 38759
  chr2:234160712-234160742
  hyper

SEQ ID NO: 107653 - DNA, 433 bp, Homo sapiens
  chr2:234474812-234475245
  hyper
aaggggagcggagggcggggaagactgccactaaaattatcaagcctaaaggccttccagtatgtatccactaatcccatcgttagccctgggggcctaggtgacttccccaaggtttcacatcgagtgtggcggagggtcacttggagatgagaaacgtaaagcgcctagcataggtaccaaatgacaggaagcgctgaaatgcaattatttttcttttcctcagaagaaaactaaaaaaacacaactcgagagtctagcctcgagctcgttgtctgcattcctgaattcccaactcctacggccggccgaggccctccaagccaccacaggcccaggggcgcaaaaaggcagaggtccccgtggcccgaaaccactgccccgactccaggagagcgccgcgtcctcaggcaggcctgggcagcctctcgcc

SEQ ID NO: 107654 - DNA, 102 bp, Homo sapiens; identical to SEQ ID NO: 2309
  chr2:234475309-234475411
  hyper

SEQ ID NO: 107655 - DNA, 134 bp, Homo sapiens
  chr2:234475473-234475607
  hyper
cgccggcccctcgcacggggccttatgggaaatgtaactcttctgctccaagagtttgggaactggagcgggagcgggagcgggcaaggtgagctcgcttacaagtccgctggtgagttcgcgggtccactcgg

SEQ ID NO: 107656 - DNA, 30 bp, Homo sapiens; identical to SEQ ID NO: 2311
  chr2:234652586-234652616
  hyper

SEQ ID NO: 107657 - DNA, 30 bp, Homo sapiens
  chr2:234652665-234652695
  hyper
agacgccccttatgacgcagccacatctca

SEQ ID NO: 107658 - DNA, 58 bp, Homo sapiens; identical to SEQ ID NO: 2312
  chr2:234699502-234699560
  hyper

SEQ ID NO: 107659 - DNA, 91 bp, Homo sapiens
  chr2:234763371-234763462
  hyper
gtctccggccgccacggccggtggtagttgtacaaacagctgtgtgcttattcatcagcggtgctgtgcgagatccggtgggatgcgtgtc

SEQ ID NO: 107660 - DNA, 30 bp, Homo sapiens
  chr2:234821670-234821700
  hyper
gtctggcgcctcctgcgcccttgctatcat

SEQ ID NO: 107661 - DNA, 30 bp, Homo sapiens
  chr2:234837431-234837461
  hyper
tcgcccccatgtggccgccccgttggcttt

SEQ ID NO: 107662 - DNA, 30 bp, Homo sapiens; identical to SEQ ID NO: 38766
  chr2:234991351-234991381
  hyper

SEQ ID NO: 107663 - DNA, 188 bp, Homo sapiens; identical to SEQ ID NO: 38767
  chr2:235404344-235404532
  hyper

SEQ ID NO: 107664 - DNA, 11 bp, Homo sapiens
  chr2:235404550-235404561
  hyper
cgcgggttctc

SEQ ID NO: 107665 - DNA, 517 bp, Homo sapiens
  chr2:235404620-235405137
  hyper
actcgctcgctccccggtcgctccgggcgcattaccgcttcttcttctgcttgagggacttcctgcgtttcaggatcatctcatagagcttgtccatgccctcggtgaggccctcgccgatgatggcgcacgccggctggacgtgataggtggtggccgggataagctcgtgcagcgccagctgcttctcaatctctgccaccggcagcgacttgggcaggtcctgcttgttggcgatgaccagcagcggcgtgccctggttctcggcgaacttggtcaccttgtgcagctccgtcttggcctcctccagccggtccacgtccaccgagtccaccacgtagatgatgccgtccgtgcagcggctgtaggacttccacagcggccgcagcttctcctggccgcccacgtcccagaagtggcagctgatgcccttggccgtgccgttgctcagcttgatcttctcggtgttgaagccgatggtgggcaccgtgttcacgaactcgttgaacttgagccg

SEQ ID NO: 107666 - DNA, 1713 bp, Homo sapiens
  chr2:235859954-235861667
  hyper
gccaggcctgttttacgcgccgggggcccagaggcgcccaggtcagacaaagtgtaaacgattccgaccagagcccttcaatctgcattccgcttcgcaggaaactctcctccttttatgattttcagccggactgccttccctgttgttagtttgtaactttcgctccggcccccgcagcctcgcgcctgccttccctccactgtcctcagccaaggtgtagtaaagcgtctccgaacgcggcgcgaccctcgcccacgcccgctcgcggggggaccgcaccgccccaggggtcctcgctaggggttcccggagaaggggtgggagatgggggtgcgggggggcacaggagcgcgggccagcacccagacctgctcggtaccggggacccagacccgaggatgccgggcggccaaggccccgctaccctggccggctccgggcggaggaagaagaggaggcgcccagactggatacccgcctggacccggagccgcggcaccacccccagcccgccccacgctcgccagcctcagacggccgcgccccgccccgcccctctcccgaagccccgccccggcgcgggaccaccccctccgcggcctcagctccggtcctggccccgccccccgcgcccccgcccccgcccccgcccccgcccccgcccaggcgcgggaccaccctccgcccgccgaggcgggggcccagcgcgcccggcactctcggcggtccgggcccctcgccactaccgccgccgccgccgccgtgagtcccgcggagccgcgcgcgcccccggctgggccgagccgctggccgacgagcggagcctcaggagccggcggggacgccatgcgagccaggtaggcaggcggcggcggggagcgcctcgggcggcagggccctgggggccggcgggggcgcggggtcgtgctcgggggctttgcactcccttgcgggcgcagatcgtgccgcgggcgccgatcgtgccaccgccgcctgagttcggggctgcgcgggtgcctgggcgtggggcggcttcggggaagcctcgcgcgcccctcgccgctcccccgggcgctcgggtctccctggtgctggtgggcagggacccggcccggggttccgggcgccgagccgcagccctccgcgtgcgctcgggccgccccccaaccccggctctggccacttcccggcgggcggccctgcggggtggcctccctgggcaaccggacgcgtcctcgggcgcaaatcggggggcgcgctcggctcacgggggccgtgggggccacgggagggcgtggaggggtcggggcgcccccctcgagcggcgctggggaggagggaaggacgcgcggtctccggttaaacttgttggtgacaatgcatatttcaacttcttcggagatccctcctgtgaggatgaaattgaaaactccggtttctggcttggcgatcgggtgaccgagcagccgcgaggtgacagcgccggcggcccgcgggcggggaccggctgggatagaggcgcgttgttctctgagcgatgtttaccgagaagcccgctccgcggcacgggcgggtgtcagttgggaccccaaccctgggtcccgcggctcctagcccggggcctgcggtgtagacgggggttggggacaggcccagctggccctgaccgggtgtcgggcgcccagagatgccgcgcgggaggagccgcgg

SEQ ID NO: 107667 - DNA, 31 bp, Homo sapiens; identical to SEQ ID NO: 2315
  chr2:235996528-235996559
  hyper

SEQ ID NO: 107668 - DNA, 1940 bp, Homo sapiens; identical to SEQ ID NO: 2316
  chr2:236402217-236404157
  hyper

SEQ ID NO: 107669 - DNA, 1323 bp, Homo sapiens
  chr2:236577969-236579292
  hyper
gcctcatttaaacgcgcagcaggtgagacatgcccctcgttttgttcttgcaggccaagccccagagtgggcgtggttttagggtgcaggctggtgctgggctgggcccctcggaggctccggtccgcgctgcgtcgatccatcccggcgcttgggcctgcacgccgccgcgctcgccgccgccgccgccgccgcgctcccgggactcggccagcccggctgggcgcgcggcccgcggtcccttgcacgtcggcccccgtcgcccgccccgccccggcgcgcgtttccattttaaaccgccgcccgccgcccgccacccgccacccttcggccgcagccggtgcagctgtccgcgcgtcccggagcccagggagtggcggaggctgcggaaccgccgagctgtgcagccggagcgggaggatgcgcacgggccccgcgtcgtagacaatgaagccgcgggcgccgccgcctgccctgggccctgcgcaccgcggccgcacctgccggcgagagcgctctagcgcctgaccggccgcctcgcttggccccgccggcccatggctcggcgccccgggcccggaccccggcactcgggcggcgcggcgcacgggccggcgggtgccaggggcgccgtccccgcagcctgagtgcggccctcgcggtcagcggggggcgtgggccacactcccggcccgcctgccctccccgcttggcccggcgccctcccggcccgcgggctcgctggatgcggcggggccccagcgcgcgggcgacatgtacttgttggacggcagtggcgagcccgcgtcgccacccgcggacgcgatgccgcgcgggacgccccccagaaagactgtctaccgcatctccgtgaccatggtcaggaaggagcagctggccgcgccgggctccggcggcccggacccacgcccggttcggcggccccggcccgcgcgctccccggacgcgcccgggaggcttgaggaggaggccgaggaggcggagggcgccgaggaaccggagggtccccggccgcgcgcttgggatttccgcaccttccgcacccgcagcaccgggcagctggaactggggcggctccggccgtgcgcacgcggcctggaacccgcggacctggccggcagcgccccggccgaggaggagggacgcggctcgcccgcgtccggcagccccgacgtggagggggcccgggccgcgcccctgcggcggagcctgagcttcaggcactggagcgggcctgaggcgccgcaaggccggacactgggcggcggaaggcgccacagcagctccgggagcctggcctgg

SEQ ID NO: 107670 - DNA, 259 bp, Homo sapiens
  chr2:237068293-237068552
  hyper
ccgggccctttaggacgaaggcggccacaccagagacgcaccggcatgacaaaggccgccagggacccagtggctgtgaaataaagagatgaaggctttgggggtgggtgcccggagtgacgtccgcccccccaccccgggcccggccctgcctcaggcttttgcctcgggcccaggccgctctcgagccgtgggcgcgccctcggggctcggcccccggtttcggtctcaggcccccgggagtatcaggagaacaagg

SEQ ID NO: 107671 - DNA, 61 bp, Homo sapiens
  chr2:237068626-237068687
  hyper
cgcagccgggcctcctgcctctctccctcgaggcccacggggtgcacggcttcctgcagga

SEQ ID NO: 107672 - DNA, 373 bp, Homo sapiens
  chr2:237072641-237073014
  hyper
cgaaaaccaagtctgggccattttccgccaccggaactgttgggaacgcggcgggaaagggtgactcggtcgctcccagccttcaccctgcgcctgaagtttgggtggaggtcttggtccccaggcccctccgccgtggggaggtgacggcctgtaagtagtaaaaattaagtcaatattagtactaacccatggcgggccgcgcttccccttcttcggctgagaacctcgccgagggccgagcgccgctgcatcgcagcggctcaccggcctcccctccttcccccactcgaaaggctgaggctggcgaagccccggcttctctcgcgcttcgggctgctggcttggtggcaccacgctcacactcgctggc

SEQ ID NO: 107673 - DNA, 107 bp, Homo sapiens
  chr2:237073056-237073163
  hyper
cgcgcttcggggtccggcagcgagcggacagggctctgagcgcagggccggggttgggacaggagtgggcttggggaccaggcacgccccaccgagatggggaggcg

SEQ ID NO: 107674 - DNA, 543 bp, Homo sapiens
  chr2:237074882-237075425
  hyper
tgctgcccgcggcgccgctgctcggcggggtctcctccagcgcgtggcccgggtcttcctccttgtgagctgcctggccagtcagattgtcatccgagctgtagtccacatcgctctccagcgagaagctctcctccttgcccttcgggtcgtcttccacctttgactcgtctttcccttgccctcggacagccccgactgaaagcaaaaccaaacggcattttattacatttcgcacactggccttcctttctccttcccaccgtcatttggacattccgcgccccccgccccccaccctttagcggattgtctttctatgacattaacacattgtgatttcctggcctttgaggggtagaggaggggtggggggagcgtgagaaagctcaaaggagaggaggcagtacaggcgacggccctttgcccagaaccatcactcaaagggccgccatgcctcccccgcaccctcccagcctcggcagcgtcaggagaagtagcaggaggcgcgaggcccaagagattgcccgctttgtccctggg

SEQ ID NO: 107675 - DNA, 823 bp, Homo sapiens; identical to SEQ ID NO: 2319
  chr2:237075812-237076635
  hyper

SEQ ID NO: 107676 - DNA, 349 bp, Homo sapiens; identical to SEQ ID NO: 38777
  chr2:237076656-237077005
  hyper

SEQ ID NO: 107677 - DNA, 206 bp, Homo sapiens; identical to SEQ ID NO: 38778
  chr2:237077033-237077239
  hyper

SEQ ID NO: 107678 - DNA, 1230 bp, Homo sapiens
  chr2:237077284-237078514
  hyper
cggaccttggggccctgcagccttgtcgaggccacctcgaagggtagcctccggggcccgcacccccacggctgggccgggggcgctttatttcttttactgtatttgccatggaaccaacctgcctgcggctcactccagcgctgggtgctccggctgcgcctggggtccgggcgagggtcctggagttgggggcagggtcctgcccctccggagccacccccggggcgaaggctgggagctggcagcgcctgcccgccgccagaaacccgccgggttgctcgctgtaggtccgcgcaccgggtggggcggggaggctgctgcttcccccatcccgggctgggccctcccgtgagcgatcccgtctctcatttttcatgacattcttaatcatcgcacctatttacacactttgccagcgcgcaccaaaataacaaccacgataattatgataataaagagagtcctttatctgctccatcctcggggaggaaggggggagttgctgtgcctccagattgtataacgtgagattatcctgatgaaagctttatgatgtttgctcaaataaaagctgcgttttgtaaataggcgctaattaagcacgttgcgaacgcaaggagtgctcaccctggcgccgccgcccggtttccagcgcgaggactcgagggcgcgcggttcctctttgctaactgcaggatggagccgatcccctcaggatgtttcccctgttctcgacaacggtaaagacccccaaatttgaaagtaagggaattttggggtggagggaaactagggacgtacttatcccctcttccattttcaaacaaaaaactttcagctcttgtcttccctttaaaaatggaatcacttcttgacaacggcagaccgtgcagagcgcaccagcgcgagcggggcttcctcgagtctccaaggcccgggcttcaacttcccgggtctagacgtcagccctgaaccgccaacagcaccgggttggggagaaggaaagaagggcattgttagttcggtcattaaaaatcagctcacgccgaggagctagtggttggggagttggcccgtgttggacgtgtgttatgtatcacttacaagcacatttaattgggagataaagataaatcgatctttatgaatttatcgacccgattctttgaagctcttttttcgcgttcttcctctttctctcgctctagccccaaggccccccggggg

SEQ ID NO: 107679 - DNA, 53 bp, Homo sapiens
  chr2:237078746-237078799
  hyper
gctccggcagcaggcggtttgaaaggaattcattaggacgctgcctggattgc

SEQ ID NO: 107680 - DNA, 228 bp, Homo sapiens
  chr2:237079106-237079334
  hyper
cagccggggcccttccggcttgccactgacatgccgggggaagctgttattcattttacctaggcaggtttgccatgcactttgctatttcgccgcaaaaatattgttctagggacttttgtcgcctgattaccctctgagaggcagggattcctttgattattttggtgattattctacatttaaagttcagcaagaagatttaggtccgtcgaattatagctgcac

SEQ ID NO: 107681 - DNA, 215 bp, Homo sapiens
  chr2:237079603-237079818
  hyper
gcaaagcgttcagagcgtggggactgcggataataaaagcctttagagtttttcctcggctcctcggatagatttatggacaggagcgatagatgcatggcttatccatcctccggattcctacctgcttagctcgtaacagcctcaaactgcagagtcctccgtgactcagctcggcccagtctacgcgggaaaatcaccgggcacagatgttt

SEQ ID NO: 107682 - DNA, 383 bp, Homo sapiens; identical to SEQ ID NO: 2321
  chr2:237080167-237080550
  hyper

SEQ ID NO: 107683 - DNA, 128 bp, Homo sapiens
  chr2:237081298-237081426
  hyper
ccttcacacctgcgccgccctctccactccagcgacgaggaacaggaggagccacagccgctcggcccgcgaggcgagccctcgtggcatctgggaatgggagggtgggggtggaatgctacacagcc

SEQ ID NO: 107684 - DNA, 17 bp, Homo sapiens
  chr2:237081536-237081553
  hyper
ggccgggatccagatgt

SEQ ID NO: 107685 - DNA, 310 bp, Homo sapiens; identical to SEQ ID NO: 38785
  chr2:237082343-237082653
  hyper

SEQ ID NO: 107686 - DNA, 2072 bp, Homo sapiens
  chr2:237086404-237088476
  hyper
actgggtgggcgcagcgccatccccattgcacgaaccgagacggaggtgcggaggccgtgtctggccctggagagtcctccctctgtcgtctgctctcagcaccaagtctggcatcgccagggcgccaggcacggccttcccagggagaagccttttctgtcatttttgattattttactttaaatatgtgtgcaaaaccttagctacattctcgtgggccagggataggcaacgcgtgcacctagacctcttgcttgcccccacactccgtctccccagggccaccccctcaacccccccatgccatcagagttttgaacaccgctggagatggcgggggggaggggggcgaatttggaggcgggacccgaactgccggccaaggaccaagggctggcctcgcccttcgctcccactgggcaccgttctcgccgcgggaccttgccttgagcgcgccccctgcgggccgcggtggggattggccccttggaaagagggaaataggctgcgcgcgccggggcgggagaggcgctgcctccagtcctcccgggtgggggtctcccctccgagatccccgagggaacccgtcccgtgcactaccggatttccggtctctgaccagctggggcttcatttctacgcgtgcttttactgctctcctcctcctccggcggttttttttttttttttttttttttgaaaggagcaaacatccccagctttaatgcggcccaattatctcgtttgcacgacttaaaatgtttctctttaactcatttcaatctagtaaatatgcttcagcaagtagctaatttctcagggatggcttcgcctcgccatttgcatataaagcgcgtcggggcccggccccttctccgagtgcgcgagtcccttcttccggtgcgcgggtggcaggcagccaggcctcctagtccagggaggtcgcctaggtttggcctagggaaggcggagtctggggtccgcgacagtgcctggggaccagggtggcagggagggcagggaaacttgggccggggagggaccaggaccttctgagccccccaactcccccgcctccccggcctccgccgtcccttattccgaggaggggcgcccgtggggtaacacgttggcgcgagggtcgggggcgcatttatccttaagtgcgtttattaaatcgcgtctggagatggatggacgtggatacaggagaggaaatctcagggctcagtcgagcaatctcctggctttaaattccgaataaaagtctcaaatattcccgggtcatgggggcactgtctcattaaaaccactctcgtcctgaaactgcaatgcagacattaaagtgcagtatttttcaattagagctgacgaattcaatcaaaattccatagattaggatgaaatgaggcatgggtcatttacaggggaatttaattgccgagccattagacaaatagtatatttgccattcccgcgttatccatcattttcgacatcaataccggggccgcatctccccgtcccgcggccgcccggcgtcggctgtaaacactcccttccctgtatcttctgattatatctgatttcatttagggccatgggggattataaatgttcacgcaatcaagttcattaggacttcaaatcgcatttctgattgggatcgctctgccgccgtcctcccagcgcctttcaaaccccagcgcttggctttcaaaacatctttttgaatttaaagcctcacatccttttgtcttccgacgccccctcccgccccacccctcccggcggctgcaagctcttcgggcctccttcccggggcaacagccctgaacccctcttgctgccagcgggtctggggagggtggggctgggctccgcaggctgtcggaaccccctcccacgccgcgcagccgcggggcgctcgtgtccctgaagcctgagctgggcgtggaggacaggccccgcgtgttcgcggatcgcgagtgggggccagccccgcacctcccgtcccggccgggcgctgcgggtagggggagcggagcggagggggcgcctcccacctttg

SEQ ID NO: 107687 - DNA, 60 bp, Homo sapiens
  chr2:237145136-237145196
  hyper
tgtacgccttaaacacgtgccgcttgctgaatgtcaatcacacctcggtaaagctgcttt

SEQ ID NO: 107688 - DNA, 350 bp, Homo sapiens
  chr2:237145398-237145748
  hyper
gagaagcagcaagggcgatgcggtttctgagagagccgcgcgggttcccagcactaaacgtgggcgactttccttaatcttcccccagagacagaaggccatgcaatgacaactccaagggcaggggctggagcattttgactaacagaaaagtcaggatgacacaatgcaagccgagaaaccccacacgagtcctgtgcaaagacaggtggccccgctgcctttccgagacccggagcacacgctgggagggcgctctctggggacgggggctgcgggacccccagaccccgcgcccgggcgcgaactagctgagcggccgctgggcctccctagaggccggcacagct

SEQ ID NO: 107689 - DNA, 15 bp, Homo sapiens
  chr2:237145963-237145978
  hyper
cgctaattaaacccg

SEQ ID NO: 107690 - DNA, 248 bp, Homo sapiens
  chr2:237146288-237146536
  hyper
tcggggcggggcggacgccgcgggcctgtcccgaggtccttacccgagcgaggcggccgtgcggcagaggtgcagaggcgccaggccctcggcgctgagcaggtcggggtcggcgcggtgctgcagcagcaggcggacgcaggcggtgtggcccccgaggcaggcctcgtgcagggcgccgcggccgccggggctggcgtctgggtctgcgccgcggccgagcaggtgtcgcacgcaggcggtgtggc

SEQ ID NO: 107691 - DNA, 30 bp, Homo sapiens
  chr2:237172948-237172978
  hyper
agttgagtgggtagtcgggaaggtaatccg

SEQ ID NO: 107692 - DNA, 296 bp, Homo sapiens
  chr2:237416070-237416366
  hyper
cgggcaggaaaaggtgaggccgggtttgcttcgcaggcacggagcgcgcaggcgcagagaggtgtttcactccttcccgtcgcgacccagagactcgcgaacctcacttcggccactcaggtgggcgcgacgcggccctagcaacggaaacgccgcgcctgcgcattgccttccgcctgccccctccccccccccgccccccgcattccgcgcctgcgccaccgcgggaggcctgggtgggcgcagctgtgggagccggtcggagtccgagcgctccgtcgcggggcccggccgct

SEQ ID NO: 107693 - DNA, 98 bp, Homo sapiens; identical to SEQ ID NO: 2325
  chr2:237436059-237436157
  hyper

SEQ ID NO: 107694 - DNA, 422 bp, Homo sapiens
  chr2:237476437-237476859
  hyper
cggggccagaattctcgcaggcgcctgggccgggtgcccggccgtgcgtgagtgcggaacaagtctgggcgcggggaagggcgtgggtgcgggccgtgggtgggtgcggggcagggcgcggggctgtgggagggcgcgaggccgtgtgtgggtgcggggctgggtgcaggccgtgggtgggcgcggggccggggctggcggggcagggcgcaggctgctgcaaggcggcctcgtggattctggccccggacgcacgaagcgggttctactttttaaaaaaactgcgttgccttttccttcctctacgttagcatcctgtccggggtccccggcccatgtggcctttcttccagcgacagtacacttagctcagaacggattgacacccactctgtgtttccaccgggcgcgcaggctctgca

SEQ ID NO: 107695 - DNA, 30 bp, Homo sapiens; identical to SEQ ID NO: 2326
  chr2:237714754-237714784
  hyper

SEQ ID NO: 107696 - DNA, 52 bp, Homo sapiens; identical to SEQ ID NO: 38793
  chr2:237994046-237994098
  hyper

SEQ ID NO: 107697 - DNA, 30 bp, Homo sapiens; identical to SEQ ID NO: 38794
  chr2:237994910-237994940
  hyper

SEQ ID NO: 107698 - DNA, 60 bp, Homo sapiens; identical to SEQ ID NO: 38795
  chr2:238200161-238200221
  hyper

SEQ ID NO: 107699 - DNA, 152 bp, Homo sapiens; identical to SEQ ID NO: 38796
  chr2:238384222-238384374
  hyper

SEQ ID NO: 107700 - DNA, 1113 bp, Homo sapiens; identical to SEQ ID NO: 38797
  chr2:238395040-238396153
  hyper

SEQ ID NO: 107701 - DNA, 12 bp, Homo sapiens
  chr2:238396164-238396176
  hyper
cgtgcagaccca

SEQ ID NO: 107702 - DNA, 34 bp, Homo sapiens
  chr2:238535950-238535984
  hyper
gtccctcaggtcccgcgtgcccggccctgggcat

SEQ ID NO: 107703 - DNA, 880 bp, Homo sapiens
  chr2:238536004-238536884
  hyper
cggacccccatcgtccctgacacctggcgtctccgccccccgcccccgtcccccgccccgccgtccctggcccctgcagtccctggcccgcgctgcggacctccggctctggcttcccccgggtccccgcggcccccgtccccccgcgtccccgcgtccccggcccagcgcccgctgacgccatgacgccgcggcggagggaggggccggggccggggccgggccggggcggcgcgagcggctggagcaacgggccccgcggcagctgcgggcgacgcggtcgatggacatgggcacccagggatcggggcgcaagcggctccccaaccgggagcggctcacggcggaggacgacgcgctcaaccagatcgcgcgggaggtgagcgctccgggagggcagccggggggcgccgggcgggcgcgggggccggacggctgtcagggtctctccggcgtccgtctgtcccgctgtgcgtctgtgccactgcgcgtccggctccaggcgggtgggccgggcaggcgcgcgccggggcgctgatccccaggcgctgcgccccggccccgatctccgaggcctgcggaccccgcacccgttctccagccccgggcccagcccgcgacgctgcgcgccctcccccaccccggccaccgtcggccgctgcgccctcgggagaggagccgggcgccgccagcgcgcgaggtggcccgggctggccgggtgggggcgagcgccccgctttgttgtgcggcatgggaggaggcgggggcttaggcccgacctggaggcagtggacggtcgccggaggccacatggccctgctgaaatggccgagtcgctcaggtgaccatttgtcatccatccatcgatgtcactcaaggt

SEQ ID NO: 107704 - DNA, 318 bp, Homo sapiens
  chr2:238583488-238583806
  hyper
ttggtggaataaggacgtgcacgcacgtgctggctgttgaactgttgcctctccactgcaaaccctcccttccttgctgcagggccagagctgtgccctatcgggccctgcccccagagagagcctgggcagtgggaggagggagcccggagcacgctgcttcctgcctgcttcctgtttctgtgagcgtcaccccagcaacgggatttcaccctggctgcagttgttggttctgtttctagtgtttttcacacgcccagacaccaccctcaccagtccctcctgagcccccgctctgaggtccgggtccccactcca

SEQ ID NO: 107705 - DNA, 177 bp, Homo sapiens
  chr2:238599863-238600040
  hyper
caatccgcgtcatcccgtcgcttctgcccccagcctggcgaggtcgggaaccgtttcccgcaggactttcattgggagttacgagggcgccctgtgcctggaggtggcgcgggctggagccctcccggaggagaccggcgcctggcagggggtcgtcgcggccgcagcctggacggt

SEQ ID NO: 107706 - DNA, 245 bp, Homo sapiens
  chr2:238617173-238617418
  hyper
ctgtccgtttcaggcggaagcccggctcgctgcaaaacgggcggcccgcgcggaggctcgcgagatccgcatgaaggagctggagcggcagcagaaggaggtaacgcttggggctccttgttgggtcttttcacagtgatttgcgtgctgggcccagggtgcaagtgcaggcacctgttgctgcagacgcacctggctgtctcacgttgctcacggtcagagtgcgtttgcgcctgtgacttctg

SEQ ID NO: 107707 - DNA, 31 bp, Homo sapiens; identical to SEQ ID NO: 2330
  chr2:238791402-238791433
  hyper

SEQ ID NO: 107708 - DNA, 72 bp, Homo sapiens
  chr2:238864558-238864630
  hyper
cccctggaccccaggcgaggccaccagcgcccaccatccaaagggcgacagggaggcgtccccccaaccccg

SEQ ID NO: 107709 - DNA, 527 bp, Homo sapiens
  chr2:238864726-238865253
  hyper
cgcggcccgggtaaccaggtcccatgtaaccgcagcctggtgaagccgtgcgccctgggcgcggctacttggccctcacggcagggcggagatgcgaggccccagggttcggccccgcagcgccgctgagtccaaggaccgagctgggagtgggggcggagccaagaaggggcgcccctgcgcccacaagccgcagcgcccaggaatcccctgggcgcctccgcgtcccccgcgggctgtcccggcaggcaggcagcccaccccagggctcccctcgtggaaggacacccctgctgaccctggccctggttctggcggtgtctccactcagccctcggagggacgcccacctcccgcggagctgggggactgtggcttcctcctgcgcggggaggtcggtgggcgccgtggacccgtcccgcccctgtctgaggagccgagtcggccacagaggggcagcagactagggagggctgatgggccgtgcacttagctccctccgggctgctggccggggcccttgaacg

SEQ ID NO: 107710 - DNA, 30 bp, Homo sapiens
  chr2:238875799-238875829
  hyper
ggcggggcgaggtgcggccgccggtgcacg

SEQ ID NO: 107711 - DNA, 211 bp, Homo sapiens
  chr2:238876149-238876360
  hyper
ggctgcctgccttgtacggaggaagcggggcgtccagcgcctggccaaggtcaccggcccgacgtggccgcagaaaccgggactggactcccgatcggggcaggagtcgcgctaggccgtgaggagcgggggaggtgaggggagtgacaactcgcgcccggtcctcgtacctgcagcgggaagagtaagtatggacgcttacctacaactg

SEQ ID NO: 107712 - DNA, 32 bp, Homo sapiens; identical to SEQ ID NO: 38805
  chr2:238967038-238967070
  hyper

SEQ ID NO: 107713 - DNA, 30 bp, Homo sapiens; identical to SEQ ID NO: 38806
  chr2:238969449-238969479
  hyper

SEQ ID NO: 107714 - DNA, 30 bp, Homo sapiens; identical to SEQ ID NO: 2334
  chr2:238969813-238969843
  hyper

SEQ ID NO: 107715 - DNA, 30 bp, Homo sapiens
  chr2:239068012-239068042
  hyper
cgccctcagcccggcggggcagccttgact

SEQ ID NO: 107716 - DNA, 163 bp, Homo sapiens
  chr2:239072227-239072390
  hyper
aggcccttcaggccgaggggacgtcgccctcgccccacccctgcgcccggcaggcccctggtctcgctagcacctgtcgttcagggctggacccacgcggcgggcgggtgaggggtccctggcgcgcggccaccgctcgctctgtgccaggtgcggtgcggca

SEQ ID NO: 107717 - DNA, 32 bp, Homo sapiens
  chr2:239072429-239072461
  hyper
cgccgggccggtcgctgcgagcctcgccccgg

SEQ ID NO: 107718 - DNA, 39 bp, Homo sapiens
  chr2:239112199-239112238
  hyper
aggctgggtggaggcggcagcagcgacagacactcagcc

SEQ ID NO: 107719 - DNA, 30 bp, Homo sapiens
  chr2:239112555-239112585
  hyper
tttctgtcaagtttcgttgagttcctgtcc

SEQ ID NO: 107720 - DNA, 240 bp, Homo sapiens
  chr2:239140138-239140378
  hyper
cgggggctgcagagccttcatctcttcctccgtcccgggatgtcggagagacggcagcccagcctccgccaccgcaaagctgcttaacgggcagcgcgagtccctcgggcaccgttggaggccgttgctcaccgttgggcaagtgctttaagaagcacgaggatgtcgagtgtcaaatgcggcaaagggctcagagctcgccgccaaggggcgtggcctccgggccgcggcggcctctgg

SEQ ID NO: 107721 - DNA, 1057 bp, Homo sapiens; identical to SEQ ID NO: 38810
  chr2:239148239-239149296
  hyper

SEQ ID NO: 107722 - DNA, 30 bp, Homo sapiens
  chr2:239197767-239197797
  hyper
gcgcggggctcctgcgcacctccggccggc

SEQ ID NO: 107723 - DNA, 150 bp, Homo sapiens
  chr2:239228860-239229010
  hyper
agtcctcaggcagtcgcctctaacgcgagcgaacaccggcttcccgaggccgtcgctcggcagaggaggggccaggcgcccgatcccagatcccctttccccgccccgccgcgccccgcctgctctggcacagccgcactcccgcaaatc

SEQ ID NO: 107724 - DNA, 30 bp, Homo sapiens
  chr2:239335358-239335388
  hyper
acggcccgccggaccgaaattcccagactg

SEQ ID NO: 107725 - DNA, 164 bp, Homo sapiens; identical to SEQ ID NO: 38812
  chr2:239755489-239755653
  hyper

SEQ ID NO: 107726 - DNA, 41 bp, Homo sapiens; identical to SEQ ID NO: 38813
  chr2:239756024-239756065
  hyper

SEQ ID NO: 107727 - DNA, 33 bp, Homo sapiens
  chr2:239756230-239756263
  hyper
cggtgcagactagctgtgcgcccgggggcggcc

SEQ ID NO: 107728 - DNA, 120 bp, Homo sapiens
  chr2:239756487-239756607
  hyper
cgggcgaggacccggcccccgggatgccctccgcgccggggccgaagggggaggcaaaactgaaagtgccgcgccggggggcgggggcggccggcgaaggccccagaacttgtcctgccc

SEQ ID NO: 107729 - DNA, 131 bp, Homo sapiens
  chr2:239756633-239756764
  hyper
cgccctagctcctgacaactatttagcaacccagcccagctagagtttccaaaaaagttagaataacttcctctcccggagacctcggttttgcacaagccggccttgaaatcagagcctttccagcaact

SEQ ID NO: 107730 - DNA, 245 bp, Homo sapiens
  chr2:239756815-239757060
  hyper
cgccccggcgcccccagccccacgcgcgccgggcgggcgccatggaggagggctccagctcgcccgtgtcccccgtggacagcctgggcaccagcgaggaggagctcgagaggcagcccaagcgcttcggccggaagcggcgctacagcaagaagtcgagcgaagatggcagcccgaccccgggcaagcgcggcaagaagggcagccccagcgcgcagtccttcgaggagctgcagagccagcgc

SEQ ID NO: 107731 - DNA, 359 bp, Homo sapiens
  chr2:239757371-239757730
  hyper
agggtaggtgctgcgcgcgcgacgggcgccctccgctgcggggggcgggcggcaggggcgcaggggcattggggcctgctcgtgtctcctcggcgaggccccgcgggccgcgggggcttggatgccgtgcgcttttcctcttagcaaggaaggcgggcgggcgggacgctcacagtcccagggacacccctgagtgcagacttccacgcgagggtgtcagttgggaaccggcggaccggtgactcccccggcgggttctgaagatacttagacagatggtcgcagttttcattctcggtggtgtgtgggtgtccgtggttggcggtggaaggagcgagcatcagaaaaacctcctgggg

SEQ ID NO: 107732 - DNA, 162 bp, Homo sapiens; identical to SEQ ID NO: 38816
  chr2:239757898-239758060
  hyper

SEQ ID NO: 107733 - DNA, 330 bp, Homo sapiens
  chr2:239758125-239758455
  hyper
cgcccgcaggcaggtggagctgacctaggaactgggagccctgagtcccaaccttgaccctggagtacccgggaggggccccgcccatccagccccgcagggatgggcgaggggtccaggctgggaaacgggtctgggggacagggaggctgtgcgcgccgggccctgcgcgaggagaaggctcgggggacacagctgccaggagcactccaagttctggtttcctctggaagagcgattagggcgtcctgcaccgggtccttttcaccagacaccttccaagtccctttagacaagctcgagccacggaggcgccgtccttaggctctg

SEQ ID NO: 107734 - DNA, 241 bp, Homo sapiens
  chr2:240294230-240294471
  hyper
gactcgcactccacacgctgctctgcagctcccactcctacatcccggcctcccggtacaccaggagctctggtcccctctctctacagagtgtacgcggcaacacgcacaagcaagcagtttatacacagcgacagaacagacacactgcttcatgttcagagcaatagcttctttctctctttcctgctctctccaccatcaaacacccaacaggaaacctttgcgtggttgctgtcca

SEQ ID NO: 107735 - DNA, 30 bp, Homo sapiens
  chr2:240321995-240322025
  hyper
agttacataaacggcgcccggccggccccg

SEQ ID NO: 107736 - DNA, 30 bp, Homo sapiens
  chr2:240323076-240323106
  hyper
tctagagggtggggcgtaccaaaagacgct

SEQ ID NO: 107737 - DNA, 30 bp, Homo sapiens
  chr2:240323348-240323378
  hyper
gtcacgtggtgctgcgtgcgcacggaggcg

SEQ ID NO: 107738 - DNA, 30 bp, Homo sapiens
  chr2:240323698-240323728
  hyper
ccagcaggtgtcggcgagggtcttcagtgg

SEQ ID NO: 107739 - DNA, 143 bp, Homo sapiens; identical to SEQ ID NO: 2338
  chr2:240402417-240402560
  hyper

SEQ ID NO: 107740 - DNA, 109 bp, Homo sapiens
  chr2:240874084-240874193
  hyper
tagagcggtagagggcgctggacctcattcgtcctgtcagctgcgattgtctgtcctttgacaggtctcagcgcagcgttctcactgtgacctccgtgcagcatcaatc

SEQ ID NO: 107741 - DNA, 30 bp, Homo sapiens; identical to SEQ ID NO: 38820
  chr2:240964533-240964563
  hyper

SEQ ID NO: 107742 - DNA, 30 bp, Homo sapiens
  chr2:240964916-240964946
  hyper
gttggggcgagggccgagaggtgggagttg

SEQ ID NO: 107743 - DNA, 31 bp, Homo sapiens; identical to SEQ ID NO: 38821
  chr2:240965329-240965360
  hyper

SEQ ID NO: 107744 - DNA, 151 bp, Homo sapiens
  chr2:241172437-241172588
  hyper
gagacccaaaggcgcgtctccctcacccgcctcgccgacaccagggggcgctggagctcagcaaagggcccggaggccgctctgaaactcaggccttaaaatacaggcaggatcagcctttggagccctccctgccggccgggcctgcccg

SEQ ID NO: 107745 - DNA, 30 bp, Homo sapiens
  chr2:241305511-241305541
  hyper
tcagcctcccaccctcgccataccctgggc

SEQ ID NO: 107746 - DNA, 265 bp, Homo sapiens
  chr2:241306312-241306577
  hyper
ctgcatacatgcacacgcacatgcacacatgaatgcacgcacaaatgcacacacgcacatgcacacgtgaatacacacacgtgaacgcacacacgaatatacacatgcacatgcacacaatgtgaatgcacacacgaatacacacatgcacatgcaaatgcacacacacgaatgcacacacgcacatgcacatgcaaatgcacacacacgaaggcacacgcacatgcacacacgaatacacacatgtgaacgcacacgcgaatgc

SEQ ID NO: 107747 - DNA, 219 bp, Homo sapiens
  chr2:241374396-241374615
  hyper
gggagaggtgaggtcgagtttcttggcgagtttcctgcgtgcagcccccacaccacaaaagcccccggtgcgagccggagcccagcgcgagacggctggaagggcgcggggagggagccgctgcggggtgcaggcggggagaggggcggcggctcgaggcgcggccggcgggcggagggtacggaggcgccgggagagcgttctcggggcgcgctgcca

SEQ ID NO: 107748 - DNA, 332 bp, Homo sapiens; identical to SEQ ID NO: 38824
  chr2:241375297-241375629
  hyper

SEQ ID NO: 107749 - DNA, 474 bp, Homo sapiens
  chr2:241375833-241376307
  hyper
tgggcgtcttctgcccgccgctcggcccagcgcgcctgcaggccgggagtcccagccccggggccggctgtcggggcgctgtggggctcggcgtggccgggctttcggggcgccgctgacggtggccgcggaccccttctgctctgtacagacctctctgggaggcgtctccggtcctgcccggggattctcgtagggtctccagcaaaggcagcctaggtgggttttataagctgaccccctcggggggtagtgcggaggggtggggagggagctgggcacttatccgcgggcggaacgccgccgcctcgtagagattcctgtcgaagaacttgtacgcgccggcccccgcctggcgcttgggcagcctcgtgccgcgagtccagctgcaggtggtcggcgcgttggatcccgcccaggggccgtgtcatttctttgtaagaacagcggccctcttggcgccccctaagccct

SEQ ID NO: 107750 - DNA, 30 bp, Homo sapiens
  chr2:241392503-241392533
  hyper
ccgcatccgcaggcgcgccacccccatctc

SEQ ID NO: 107751 - DNA, 31 bp, Homo sapiens
  chr2:241393135-241393166
  hyper
gtgtccagacccctgcgcacccgctccggct

SEQ ID NO: 107752 - DNA, 381 bp, Homo sapiens
  chr2:241393198-241393579
  hyper
cggctggcgactggcatcggggcgcccgggacccccagggcggcgacgctgccgccggtgccgccgagcctttgttccgccgccggggccggtttcacgcctgtcgccctcgcaagcagccgcgggtgacaggagccttagccggcctggggcgcggaccctcccacccggggcagaggtgtccctacgacgcccctcggtttcgggtcgcagtgcgcggcggaggttctgcggcggcggaggggctccttggcgacgctgtcatttgggtgaaatggtggcgggggggcttcgggcagacggcaggggtgtggggaggggagggaagcacgatggggtgagtctgggggccgtggatgccgttgacgaggagctgagatg

SEQ ID NO: 107753 - DNA, 168 bp, Homo sapiens
  chr2:241499836-241500004
  hyper
catgggacgcagagcggtccaaggccccggcgccctggtgaggcccaaacctcccgccatgccccggccccaacgagacccaagccccctgtcccggcccagcgcccgcgggggacccaagccccagcctggtccacctcggaggcctctaggacccgggggcgcccg

SEQ ID NO: 107754 - DNA, 20 bp, Homo sapiens
  chr2:241500039-241500059
  hyper
cgggcgcctgagcccccaaa

SEQ ID NO: 107755 - DNA, 30 bp, Homo sapiens
  chr2:241507359-241507389
  hyper
ctgcgtgaaggctccggcgcttctcgcacc

SEQ ID NO: 107756 - DNA, 30 bp, Homo sapiens
  chr2:241508093-241508123
  hyper
gcctcggcctccagcgcgcagctcttccgc

SEQ ID NO: 107757 - DNA, 30 bp, Homo sapiens
  chr2:241508449-241508479
  hyper
caccgtcacgctgccgcccgagctgcaggc

SEQ ID NO: 107758 - DNA, 622 bp, Homo sapiens; identical to SEQ ID NO: 38828
  chr2:241758385-241759007
  hyper

SEQ ID NO: 107759 - DNA, 1801 bp, Homo sapiens
  chr2:241759042-241760843
  hyper
cgctgcagccgcgcaccctcccaggtgcggcgtcagcgtcctcagccccgctcaccatccctcccctcccccgccgtctgggcgcagcccctcccgcagccccgccggtggctcctctccagggaagcggaatagccggggaagggcgggggtatcccgatcccgccggccgggcgagccctcccgagggcgacccccgcccgcctaagccgagggtcccgctgcagccgagatcgcggcaaagggaccttttccagcggcacctgaagggcggacacccctgaatttcccccattgttctctgcggagatggaggaaggtctggaagtgaaggggcctcgcagtgcctgcgctttgggcggcaacaagggcgccgggccggagctccccgccctgggcgcagtgggtgcaggtgcgggctgcgggcgcgggctgccgggcgcaggtgcggggcgaggggcgcgggcgcgggaggccgggcgggcggcggccttacctctccggcgtcactggcggcggccccgcatgggcactggcatgggcgcgggctctcgagcccggagctgctgccgctcgccggctgctctgcgctgtgacggcgccgccgcgtgacgggctgcgcgcccccggcccggaccgccccgcgcccctcccgaggcgctggttggctgcgcgcggcgtccgagctccagtcgccagctggtttgtcgcgcggggagagggacgggcgacgcggccgccgcggggatggggctggggacggagggggccggggccgggctgtgacgtcaccgctgacaccgcggcgggccccgcggagggtgggggaccgacacccggctcggacgcagcgtcccctcccccggcgtgcccctgagacctcgcgggggagggacccggcggcgccccgtcccgaagccccgcgtgcacctgaacttgcccgcggacccctcgccgggccgtcccccaccctggcccctttcgagtgaaatcgtaaaacgtccacctgcccccgctctgagccagcgacagacgcatcgtggggggcgggcggggctggggagggagggctccttgcgccagggatgctggctccgggtgtaacaggtgcgcggtgaaatcgcatcttgtgtcggggccggggcgccgggggaagagcagcagtgacccaggccctccccgccggatgatgcaacccgcccgcggacccgccgcctcgcctctaccgcggctcgtggggaccccccgccctcctctcgccccacctctccaggcccccattgtcctcaccccagcctgtccagtttaacttccttggacccccaagtcacacgccgctcgggggccaccccggcaaaccccagcctgcgtcacccgcccccagccgccttcctagttccaggggctgactggtatctctgtgcgcgccaccgtcctccctccaccgtcccagggctgggcaacttcgacaaagcctctgggcagctcgcccatgggaacctccccgcactgcggtgcgggggtgcacggatttcgggccaccctgaaccccggggctgggtcccctccagcccagcccctgccatcgagcccctgccatgggcatcctggcgtcgcctggctaagcctccctggcgcccagcaggggcctgcgctgccctagcggcctcgccgttaaccatttcatccacactcctgggagagccggcttcacctcagtcccgacagctgcgtgcgagcgccttgcaggtggctgggggagattcacatccacttctgcaagacacgggccccccactcc

SEQ ID NO: 107760 - DNA, 589 bp, Homo sapiens; identical to SEQ ID NO: 38831
  chr2:241771577-241772166
  hyper

SEQ ID NO: 107761 - DNA, 30 bp, Homo sapiens; identical to SEQ ID NO: 38832
  chr2:241853939-241853969
  hyper

SEQ ID NO: 107762 - DNA, 31 bp, Homo sapiens; identical to SEQ ID NO: 2346
  chr2:241902830-241902861
  hyper

SEQ ID NO: 107763 - DNA, 52 bp, Homo sapiens; identical to SEQ ID NO: 38834
  chr2:241938220-241938272
  hyper

SEQ ID NO: 107764 - DNA, 36 bp, Homo sapiens
  chr2:242041820-242041856
  hyper
ggagctgtgctgagcgttcacggccccgcggggctc

SEQ ID NO: 107765 - DNA, 163 bp, Homo sapiens
  chr2:242088870-242089033
  hyper
gaaaggagcccttccgcgcttttatcccaccgaccaatcgcacagcgactagcaccgattgacaagctccacggaccagccacttgcgcgtatgggcgggactaagctagccagagtctagaagcccgcgctaagggttgctagggacgcaccaaacacccct

SEQ ID NO: 107766 - DNA, 215 bp, Homo sapiens
  chr2:242089532-242089747
  hyper
cacgcctccgaggtcgagacagtgacataagtcaactctcaagcccagggcgtctctccactctgcctagacgtccactccgtctgcctgcagctacggctctgtgcgtcccgcttcgactccctctgctttccttcccagcttctcgcctccagactgttccggctccgccgcctgaaattacctgctctgggggaggcgcggcgcgcggcctc

SEQ ID NO: 107767 - DNA, 30 bp, Homo sapiens; identical to SEQ ID NO: 38836
  chr2:242090249-242090279
  hyper

SEQ ID NO: 107768 - DNA, 335 bp, Homo sapiens
  chr2:242157712-242158047
  hyper
cgcccacgacctgcgcggcttcctcaacttcacgctggcgcgagccccgtcctccttcgccgccgcgcacaaccgcacgtgcaggtgagccccgcgccaggtggagggggccgcgggcgcacgaggacgaggcggagcggggctcgggtggggtgggggtgcggcggtggggagccgggaggggcgggcgccgccgggcaaggccgggggagggggggagctgggggcgccgtgggcaggggctggggggaggttccccgcggtaagggacggagctttgcggggctggagggcaaatcgtggattctaggtgaattgctagttggtcatagtgt

SEQ ID NO: 107769 - DNA, 85 bp, Homo sapiens; identical to SEQ ID NO: 38838
  chr2:242212407-242212492
  hyper

SEQ ID NO: 107770 - DNA, 54 bp, Homo sapiens
  chr2:242254480-242254534
  hyper
tgctcgtgggctcgcggagcactccccaggtctcacctcgggccccacaccaga

SEQ ID NO: 107771 - DNA, 30 bp, Homo sapiens
  chr2:242255759-242255789
  hyper
tacaggtttaggcccgacaaacacttagag

SEQ ID NO: 107772 - DNA, 126 bp, Homo sapiens; identical to SEQ ID NO: 38840
  chr2:242269444-242269570
  hyper

SEQ ID NO: 107773 - DNA, 30 bp, Homo sapiens
  chr2:242295472-242295502
  hyper
gacgccccgcccaacgagccgagcgctgca

SEQ ID NO: 107774 - DNA, 254 bp, Homo sapiens; identical to SEQ ID NO: 38841
  chr2:242448318-242448572
  hyper

SEQ ID NO: 107775 - DNA, 247 bp, Homo sapiens; identical to SEQ ID NO: 38842
  chr2:242498018-242498265
  hyper

SEQ ID NO: 107776 - DNA, 362 bp, Homo sapiens; identical to SEQ ID NO: 38843
  chr2:242498764-242499126
  hyper

SEQ ID NO: 107777 - DNA, 457 bp, Homo sapiens
  chr2:242549626-242550083
  hyper
gtgaggggcacgcgccgcaagtcctgcctctgctcccgggcggccccctccagcctccgccggccccgccccggaagcgcagccccgcctcaggcgccgcatctccgccctctcttgcgcctgcgggaccgggagggccgcgctcgccccccagcgccagggtcacgccaccgcgccctgtttggggagcggcagaggagtcagggcggaggctgggcggcgctgggcggtggggcgcgctcactggctgccacctcacctagcaggcgtcacagggctcactcaagagctccagcaagagcagaggcgggagcctcgccagcccctccacagaccacagcgaccgcgcccctcggcccggaggccccgccctccccactcctgcttccccagccacggggtcttctcccggcccctcatctacttggcagacgcctctcaccggcagcctctgcct

SEQ ID NO: 107778 - DNA, 204 bp, Homo sapiens
  chr2:242575607-242575811
  hyper
aaccctataaataacacgtgccattcccgtctttaaaacttaaataacaccatgcaacataaaacagaaacatctccaaagtggtttttaaagtctgttcgcggttctggtgcctcccgcgtgtaatccgcagaaatctcactgaaataggctgaactcacaaggccttagaggggtttgggccctgccgcgggggcccacgtg

SEQ ID NO: 107779 - DNA, 44 bp, Homo sapiens
  chr2:242576794-242576838
  hyper
acggggacagagctcgcctctgccgcctcgacaactgctcctgg

SEQ ID NO: 107780 - DNA, 30 bp, Homo sapiens
  chr2:242626426-242626456
  hyper
ggggccccgtgtcccgtgcgggcctccgtc

SEQ ID NO: 107781 - DNA, 185 bp, Homo sapiens; identical to SEQ ID NO: 38847
  chr2:242626704-242626889
  hyper

SEQ ID NO: 107782 - DNA, 24 bp, Homo sapiens
  chr2:242640644-242640668
  hyper
atgggattacaggcgtgcgccagc

SEQ ID NO: 107783 - DNA, 113 bp, Homo sapiens
  chr2:242640751-242640864
  hyper
cgtgccttttcggccaaggcatccagatggtgcgggtcctgcctgcctcgagaggtggcagcaaaggagccagtgccctcactggtgctgggcggggcggccgctttcctcgg

SEQ ID NO: 107784 - DNA, 30 bp, Homo sapiens; identical to SEQ ID NO: 2356
  chr2:242642357-242642387
  hyper

SEQ ID NO: 107785 - DNA, 30 bp, Homo sapiens
  chr2:243031011-243031041
  hyper
tgaagattggggatcgcgggcgcgtcaggt

SEQ ID NO: 107786 - DNA, 543 bp, Homo sapiens
  chr3:238172-238715
  hyper
agaaaagcagattggcgacctgtgtgtgcaacatgaaccgagtgaaaccatcggggagggggtggggggcgtttcttttaaatgtcgcttttgcagataaacgagcagggatcctacctcttttgaccggagatgttgaaaagcacgaccaaagtttttggcttggtctcttgctttccacaacgagataaagtctgaagcctgtaactctccctgtcccgcgggagcgtgcaaagggagggaagataagcggcgtgggtgaggggtggcggcgcagaacccaggaagggagcagaggcgagagccagcctccggcaggagggcgtagaccccggtgccagccagaacggctccagccttcccgcggccagagagccagcggcgggaggggacgggcgggacctccgcggacagccccgggtgcggaccagcgggcagcggccggcgagaccctccctggatccgcccagagcttaccggaccctgcgcgcccccgtcccggctcccggccggctcgggggagaaggcgcccgaggggaggcg

SEQ ID NO: 107787 - DNA, 119 bp, Homo sapiens; identical to SEQ ID NO: 2358
  chr3:239006-239125
  hyper

SEQ ID NO: 107788 - DNA, 710 bp, Homo sapiens; identical to SEQ ID NO: 2359
  chr3:239158-239868
  hyper

SEQ ID NO: 107789 - DNA, 57 bp, Homo sapiens; identical to SEQ ID NO: 38853
  chr3:240109-240166
  hyper

SEQ ID NO: 107790 - DNA, 30 bp, Homo sapiens
  chr3:1856280-1856310
  hyper
ggctcaaagcagccacgagttgactaataa

SEQ ID NO: 107791 - DNA, 390 bp, Homo sapiens
  chr3:2139585-2139975
  hyper
tgctgccaatctctacggttaccccgaggtgtggagttgcggcgaagggagccacttctgcaaggaaacagtagattcataatgtagaatgaccgtggcaacgtcgttcaaagcacattctttcgaataacaaggctttcgacatgccccacccccgcgcacaacacaccacaaattgatccttgtacctaatttacagcaactgttccctctgacctccccccgcccccgccccacattccaacctgaaagcactttgcgtggatgagacttcaggtgtgtaacgcagcctgtccagccagtgtcctccgcctaaggacaggcaggtaaaaacctaccaaagccccctcttctggcctaagttcaatgccacccgcccacccacattcc

SEQ ID NO: 107792 - DNA, 110 bp, Homo sapiens; identical to SEQ ID NO: 2363
  chr3:2140037-2140147
  hyper

SEQ ID NO: 107793 - DNA, 253 bp, Homo sapiens; identical to SEQ ID NO: 2364
  chr3:2140181-2140434
  hyper

SEQ ID NO: 107794 - DNA, 622 bp, Homo sapiens; identical to SEQ ID NO: 38857
  chr3:2140827-2141449
  hyper

SEQ ID NO: 107795 - DNA, 258 bp, Homo sapiens
  chr3:2141539-2141797
  hyper
cgtgcattttctctcttgtgcttcgtgtatatgttttactatttatgaagggtgtggaggtgagggtaggaggacgtgggctcctgaatccctctgaaccagccagagagtcggctgcatggaaacatttcgcagcgaagctcctgcgaggaggcggcttcgcgcgtcgggaagatcaggcggttgcttgctggccagggtctgcagattcggtgcgaagaagctggcggaggttgtgtagggcgagtcagtgtgact

SEQ ID NO: 107796 - DNA, 460 bp, Homo sapiens
  chr3:3168310-3168770
  hyper
cagttgtctcagatcgcacgggcatgccgcgcagatgggcttctgagcagctcagggccagccagaggtctggcgagaagggcgtaattaaacgaacccgcgccggtttcctcagggccccccggggctccgcttcgccccagcgggcctcggcggggctgggaaaccggctgaggttcgcctcacggtggggaggagcgacgggaggcggaagcccttcggtccgggccccgcccccgcactcgccctcgccccgccgcgacttcccattcgccgccaacccatgtgcgttggtgacgtcaccgcgttcaccagcccggaagtgcgcgtggcggcggtggcggctgcggcaacagcggggccggtaagcgggcgcgcgccgctcagaggggcagagttggtggcgtgagttgctgccccttccttcctgctgtgggccagaggcgccaccgcgcccggt

SEQ ID NO: 107797 - DNA, 201 bp, Homo sapiens
  chr3:3221329-3221530
  hyper
catgttgtgcgcagcgtcctgctgatctccttcgccggccatgtctgtttacccgcaaaggaggctgggacagggcggtgccgaagactccgagggagggcccgtgtcgcgcggctgccgcgcaccggggccacagcgccccctggcggccccaggggagcagacggcggcgcgtacccaagcctgaaagtgatggcctag

SEQ ID NO: 107798 - DNA, 46 bp, Homo sapiens
  chr3:3221564-3221610
  hyper
cggggacagaacgccgtcccctgccatccacggctgagtgcccggc

SEQ ID NO: 107799 - DNA, 30 bp, Homo sapiens; identical to SEQ ID NO: 38860
  chr3:3221817-3221847
  hyper

SEQ ID NO: 107800 - DNA, 2432 bp, Homo sapiens
  chr3:3840346-3842778
  hyper
agacgcaggttcacgcgcagtttccgaagacctattccgtccccaccctcctccccttcctcggagacacctccacttaacactgccttctcagtccctcgccgcctgtttaaacacaacttccacccctcacaaatcagaaagctgtaatttcaaagtttcagaaacgttttcggaaagcctcctccaatgggaagcgacttcgccgctgagttaagcgtccgaatcctccttcccgcggcagggacaccggcccgggccaggtctgcggaggacgcccccgggcgcgcacacacagcccgaggacgcgccctgtattttaagacgcagggtcggatttcaccccgaaacttggctcccacagccccaggccgaactgtgtctggttctcagcccccgagcccgagttctacgccgcaaagagatggggccccattgtgcctagctggcctcctagcacggacgtgtattttcttttggtctgtcttttgctaaaaaccggcagtgcgcttcgcctccctgcccagccgcagcctgccgtcccctagacaaaaagcggcgaccgcggcccggccacccgagccccgccgcgctgcgcctttgttgggcggtccacagatggtgcccagcacggggccgcgccgagggcgggggcgggaggccgcgaagagggtcgggcgggaggggaggagacggcggagcagccaatccgcgcgcggcccatcagctgaccgcctttgcttacaccaggtgcacgccggctgcggggagcacaaagcggggcgcaccgcgggcgccggcaacgagccggtgaacgaggcgaggcccgtgcgcccgcggctgcaagcgcccgcctggcggggagaggggccgacggcgtcagcccgggcggcggcatccctaggcgcctggggcgccttcctccggacctggccgctcgctgccccgccctctgcaccccacttctccgaccctccttcccagtcctgcctccccctgccctggcctctgagagccgactgagcccagccccgtgcagcagcggttgcctgtgtcgccgcctagtctccggtcttggtgctctcccgggggtgccccaaggagccagtgcgcgctgcgggctgggaaggaggcgccgctcagctagtcctcctcctcctcctcgtctttctcctcctcctgctgctgctgccgccgccgccgccgtgggtgccgggtccgcgcgcaccccaacacccccaccagctgggcctcggggtaagtccctggccggccgcgccgcggcaggaggtgtgggaggcagcgaggggaagtcgaggcaaacttggtggcgtgggagaccctacggggtctggggaacctcagggtaagatcgcgggcctgagggggacgagggggcgcggctcacggagctggggaaaatgacgaagtcgggaaacgagaatatagtgccccgtttccccccgtcccccttgccaaaaaaaaaaaaaaaaaggtgtgggagagcgatagttgggaaggcaggccagatagaaacaggcaaaaaaaggcagtgaccggagccgagcctgctggatttcaggggccgaccaggggagggaggtgcccggggacggggagggaggagggctgccgggatgtgaaccggggaaggcagctggggctggagagcagcgcggaaagggggcccagggagctggaaagagggccaagaggagggcaaggaaggtggcgggcgacggggagaggaaagaaaaagggtgtcttggcggtggccttggtaagagaaaggggcaaggggtataattgacaaggcactgaaagtattgaagtcagagccttgggaaggatctaccgaactctcggcggtccacgcggggacagacctcagcccgtgagccttgagctccacgcggggacagacctcagcccgtgagccttgagctccacgcggggacagacctcagcccgtgagccttgagctccacgcggggacagacctcagcccgtgagccttgagctccacgcggggacagacctcagcccgtgagccttgagctccacgcggggacagacctcagcccgtgagccttgagcccagaaggagtggcagcctcaggacgtttgccaggtggcctggaatgtgagggaagcctcagccccgccaggaacagagctggcgctgagttcccggctcggcccgggtcagaagcgaggaaagtttgccggcgagtgtcctttgtgctgcgtggagaggggtgtgggcggccgccgactcggcgcttccccgccgcccgcccagggagtccctgcctggcaagctggggctcggggaaaagtccagcagcgagagggccgcgtgtcccgggacggttccaggggagcccgcgcggaaacgcggaccaggcgcttcggcccggatgccggatcca

SEQ ID NO: 107801 - DNA, 340 bp, Homo sapiens
  chr3:4344934-4345274
  hyper
ctcctgagaagaaacgaactacaattcccatgaggcggtggggccacgggaccacaagtcccagcatccaccgcgcggcccaggactgtcagggtagtgggcgttgcgtgaggcgggtaaatgttcgcggaagcggcaaagacgacacggccttgtgggatggcggagtttaaggagaagcctgaggccccgactgagcagctggatgtcgcgtgcggccaggaaaacttgccggtgggcgcgtggcccccgggggccgcgccggcgcccttccaggtaggggcggggccaggcggcgcgggaggcgggcgcgcggctcccccacgtggtctcctcaagc

SEQ ID NO: 107802 - DNA, 30 bp, Homo sapiens
  chr3:4508479-4508509
  hyper
taaatggagtcttccggtgaggcacggaga

SEQ ID NO: 107803 - DNA, 68 bp, Homo sapiens
  chr3:4508822-4508890
  hyper
tcctggctccctgccgctccacacagcagcgagagcagcagcagcaagaggacgagacccagctcagg

SEQ ID NO: 107804 - DNA, 314 bp, Homo sapiens
  chr3:4534776-4535090
  hyper
ggggtgactttgaacggctggctccaagccctaccgaccccagccaaggaacaggctcagcagcctgaaagcctcgcaggacgcccctcccctgtccccgcacgcgtctatttagggcccagcccgggcgcccaggggattctgggacttgtagtccctccccgcagcctcaggcgccgccacgacccgctacttggactacattgcccagggagcttcccggcctatataagccacccggagccgctttaaagtgcagtaaccatgtggatgtgctgctgaagcgtttcctcaagctcgctggggtgggagga

SEQ ID NO: 107805 - DNA, 294 bp, Homo sapiens
  chr3:4535654-4535948
  hyper
ccctctcttgcgctccgtggttgggagaataatgcatgtgtaggggccccccgtggggagggtttttaaaaacggaagaaaaccggagaagcggtgagggatgaagtgtggacgaagctcatgtccaatgaggatgcgggcttcggatacttggccttctcgccgggaaacaagtgctttgggatctgccaaacacttcccttagttccagcctcccgcacgttcgaagtttgtgcgtgcctagtctcaattgtcagttacatcctggaaataagtaagcgtagttacctggaa

SEQ ID NO: 107806 - DNA, 30 bp, Homo sapiens; identical to SEQ ID NO: 38868
  chr3:4742260-4742290
  hyper

SEQ ID NO: 107807 - DNA, 827 bp, Homo sapiens
  chr3:4909947-4910774
  hyper
ccagccctatgttcccgcggcctttgaggggaaagggccagggcctagacgttcccctcccgcgtggttttcccgtcagcagctttcgtctgcaagggaaagcggcggccccacccgcagacagctgcgaggcaccgcgccaagcgtatgcgcctgttcccaggcactccctcctccgccttcacccttttgccacctccgccctccacccagccccgccgtgcgcctgcgcgccccggcccgtgggccagcgggcagtctactcacgtgggcctccgcatggcccagcgccgccaagggcaaggcggagcctcgcgatcgccccgccccctccgtgccccgcctcctgtagggagcgcgggaccctcggctggcgcgggcacttcccagcccagcccggggcgccggcttcgccgcgtgcgcgtgcgcatggtggggtttggctggctgcgggatgcggtcgaggccgccgaggccgcaaactccagtgggaaggcggcgtgccgcggccggcttcggtggaggagggggcgtttccccggaaaaggaaggaagtgggtgtcacgggcctcaatacggcccctttgacgtcttgagtgggaaatcacaagatactgctccagattttcccattttatggctaaatccaaatgactcggaccccctgccccatcacatcaggaacttcagcagttccttccaccaaagctcaactattgctgcaagcgctttggtaatcacgagcattatctatgaagctactgctgtggtcagggccccagtcgtcctgctgagtagcagactttgaaagacggtgtccaaggcca

SEQ ID NO: 107808 - DNA, 539 bp, Homo sapiens
  chr3:5018750-5019289
  hyper
gaaccgtggttttgacgcagccgtgacagcccttcatccttattaaaatcacacaatgaagcaggtcgcccaagattgaaagcgcgtttccagggcggaccccggtccccgcctttggccagcaaaagtacattctggcagggagggatctctgagccccgaagtgaggtcatgccagttagcagttagaaaaggaggcatttctcacacttgctaaagagtttgacgcttgtgaaatataaacaggaagcgggagctctccaaggcgacctgaaggaaatacactgccagtttggtcaacttgtgaatgccagttctctaggtcgtcaagggcactgccagttaagactgatcccctaactgcacccgaggctactactcttcgcccagtctcggcagtgaccccatttttttttcaatccttcccacagccaggtcactcagcagtggggtgactgacccgaagcgcagtgggaagggcttacagtcatctctcaactccccgaacttgcagggcaggggagcgcagaggtcagtga

SEQ ID NO: 107809 - DNA, 30 bp, Homo sapiens
  chr3:5020312-5020342
  hyper
cgcggcgtgctcggcggcagcctcagctgc

SEQ ID NO: 107810 - DNA, 31 bp, Homo sapiens; identical to SEQ ID NO: 2369
  chr3:5020396-5020427
  hyper

SEQ ID NO: 107811 - DNA, 30 bp, Homo sapiens; identical to SEQ ID NO: 2370
  chr3:5020934-5020964
  hyper

SEQ ID NO: 107812 - DNA, 30 bp, Homo sapiens
  chr3:5021239-5021269
  hyper
ctgcatctcaaagccgaagattccagcagc

SEQ ID NO: 107813 - DNA, 294 bp, Homo sapiens
  chr3:5028395-5028689
  hyper
tagcccagttctagcggcatccaaatgcgctcagagggaggtgcgggggaggggcgcgcaccccagcctaatgcccactgcggacaaagaggacttctgtttaaaaagcggggtgtgtgagtgtcagggggcgaagcgctggctccggggccaaggagaggtggcaggaggcaggggagcggaggctgggcatctggccgccttcagacagggcgtgatccgccgggcctgccgggatggtctcacccagcgctgacctgccccgcctgttgacacaacgtcacgtttccgact

SEQ ID NO: 107814 - DNA, 30 bp, Homo sapiens; identical to SEQ ID NO: 38874
  chr3:5068716-5068746
  hyper

SEQ ID NO: 107815 - DNA, 377 bp, Homo sapiens
  chr3:5137572-5137949
  hyper
agcgttttatttggacgctctgaatccgttttcccctagcacatcggcagagcagaccgcctgcctcggccttgtcaacgccaagggtgttttggacggatgtgtctatcctgaaagcttccagcctggctttgaacttgacttggcaacggatgaaaacctcggcgagcatccccagacaaccccgctgcgcgtcagagcgctgctcccgcgtcctcctgccggcagaagcccctgcagtgcgccccgcgaccaccagctggaaccaaaaggcggcgcgcaggcgcggagcccacggggagcccaggctggggcgcgtgtcagctccgcctgacctgccaccttccctaggcagcggggggcgggggtggggggtg

SEQ ID NO: 107816 - DNA, 141 bp, Homo sapiens
  chr3:5163863-5164004
  hyper
tgcccaccaggtggcgatgccagcggcgggcgggcctggccggattggccgcgccgctcttgccgtgggtgccgacggcggcgccgggacgggcgtggggggtagggcgagtcatatgatccgctcggcttcctgggtctg

SEQ ID NO: 107817 - DNA, 30 bp, Homo sapiens
  chr3:5164243-5164273
  hyper
ggcaagaccaccttcgtcaatgtcatcgcg

SEQ ID NO: 107818 - DNA, 30 bp, Homo sapiens; identical to SEQ ID NO: 38875
  chr3:5164511-5164541
  hyper

SEQ ID NO: 107819 - DNA, 30 bp, Homo sapiens
  chr3:5229363-5229393
  hyper
ttcctggtgcgtcacgggggagttccttaa

SEQ ID NO: 107820 - DNA, 30 bp, Homo sapiens
  chr3:5229794-5229824
  hyper
acgtgctgggcggccggggccgcggcccgg

SEQ ID NO: 107821 - DNA, 30 bp, Homo sapiens
  chr3:5230116-5230146
  hyper
gggcagcgctcccgcgccctgtcccgtgtg

SEQ ID NO: 107822 - DNA, 30 bp, Homo sapiens; identical to SEQ ID NO: 38876
  chr3:6841364-6841394
  hyper

SEQ ID NO: 107823 - DNA, 399 bp, Homo sapiens
  chr3:6902462-6902861
  hyper
cacccgtgcccagaacgtgggtgtgggtagggaggcttccacagtgagttagggtcgagagctaggctctcgcttgctccccgcaatccctagattccctggggaccacgaaactcccattccgaggaaacctccccccattccccagccgcccacccgtttcccccccttacctcagcacgcagcccctccctgcgtgatgatgcaaaccagtggggagggctggcgctgggaagggtggggagagaaggagagccagcgagggagggagggagtgggaggaggaggagagggagccgaacgaccatttaaagcgatagcagtccctgccctctccccagtgctgggctgttggagagagcgagcagcaagccggtgagcgcgagcgcggcgcgccgg

SEQ ID NO: 107824 - DNA, 169 bp, Homo sapiens
  chr3:6902929-6903098
  hyper
cgcccctccccggattcccccaccctccgtgcctgcaggagcccctgggctttcccggaggagctcgccctgaagggcccggacctcggcgagcccaccaccgttccctccagcgccgccgccgccaccgcagcagccggagcagcatggtccagctgaggaagctgct

SEQ ID NO: 107825 - DNA, 466 bp, Homo sapiens
  chr3:6903188-6903654
  hyper
cgccccgcactcaatccggatcgagggggacgtcaccctcggggggctgttccccgtgcacgccaagggtcccagcggagtgccctgcggcgacatcaagagggaaaacgggatccacaggctggaagcgatgctctacgccctggaccagatcaacagtgatcccaacctactgcccaacgtgacgctgggcgcgcggatcctggacacttgttccagggacacttacgcgctcgaacagtcgcttactttcgtccaggcgctcatccagaaggacacctccgacgtgcgctgcaccaacggcgaaccgccggttttcgtcaagccggagaaagtagttggagtgattggggcttcggggagttcggtctccatcatggtagccaacatcctgaggctcttccaggtagggatgcgctccctccggggcggagcacacagtggctacctgcgcccttaaccctaa

SEQ ID NO: 107826 - DNA, 370 bp, Homo sapiens; identical to SEQ ID NO: 2371
  chr3:6903906-6904276
  hyper

SEQ ID NO: 107827 - DNA, 89 bp, Homo sapiens
  chr3:6904532-6904621
  hyper
cggggccccgtggtcctcctgctccggtgccggagggagacggagaaaaaatgggaggaaggcggatccggggccgctgagcggtgggt

SEQ ID NO: 107828 - DNA, 30 bp, Homo sapiens; identical to SEQ ID NO: 2373
  chr3:8543196-8543226
  hyper

SEQ ID NO: 107829 - DNA, 31 bp, Homo sapiens; identical to SEQ ID NO: 2374
  chr3:8543387-8543418
  hyper

SEQ ID NO: 107830 - DNA, 30 bp, Homo sapiens
  chr3:8543456-8543486
  hyper
tttagagggagtcccgctctccaattaaag

SEQ ID NO: 107831 - DNA, 363 bp, Homo sapiens
  chr3:8809351-8809714
  hyper
gatgtgcacctgcggcgcgctggccaccaggcagccgagccacgtggcgagcactgccaggcggtcggtgcggcggcgcagcgagcgcagcggctggcagatggccaggcagcggtccagggacatgagcagcagcaggtaggtggaggcgaacatgcccaccacctgcaagtacttgaccaggcggcacagcaggtcgggcccgtagaagcggaaggtgatgtcccacagcaactgcggcagcacctgaaacactgccaccaccaggtcggcgatgcttaggtgcttcatgaagaagaagaggcgcgagtgcttctggcgtgtggtgcgcagcgccagcagcacacacgcgttcccgctcag

SEQ ID NO: 107832 - DNA, 33 bp, Homo sapiens
  chr3:8810151-8810184
  hyper
cgccaccccagaaatccccgttggaggtacctc

SEQ ID NO: 107833 - DNA, 540 bp, Homo sapiens
  chr3:8810833-8811373
  hyper
aggcaccccaccacctccactcgggtcccgatggctccaccggccctagccatcccgtccacccctgcttagcacccagctacctgcaccgagtccgcaggcgaacctaaagttgactccccccggggaagttgcacggcgactgacggccccagtgacgcgtgcgctcccggcccgagttgggatggcctgccggctgcacctaatgtgatgctaagctgaggtctctcactggagcctcggttggaatcccctcgccgcagcctggctggtcgctggatgggtacaggaggcgagcgaggagcgcctcccaggctgcgcgcgcggacagcgtctggatgcggcgctgtgcgctggggctgaggctgcactatcgcacgggtccgctagggggcgggcgaggccagccgcgcagacccctccggagcggagctggttcgcccagcgttggtcccagagccttaacaaatgggtttattttgcagtggtttaaaactgcgagagggagggaactcgtcaataacccgcccgtttcttcct

SEQ ID NO: 107834 - DNA, 186 bp, Homo sapiens
  chr3:9005098-9005284
  hyper
cacccactagcctccggcgctccaacaccactcgaaattccccgcgctaccgcattacgtcagcagcccgcgacgcgccagaggcgggcgcggagcctgccggaagttgtagtagtatgtgggcggggcgccgcttaagggcttgtactgcgcatgcgccaggcttctgccgcacttaccttgaag

SEQ ID NO: 107835 - DNA, 30 bp, Homo sapiens; identical to SEQ ID NO: 38885
  chr3:9077066-9077096
  hyper

SEQ ID NO: 107836 - DNA, 68 bp, Homo sapiens
  chr3:9291319-9291387
  hyper
aaggctggactgctcgccctgcagggctggctgagctctcccccactgctcacgtcactagactccgc

SEQ ID NO: 107837 - DNA, 30 bp, Homo sapiens; identical to SEQ ID NO: 38886
  chr3:9344426-9344456
  hyper

SEQ ID NO: 107838 - DNA, 30 bp, Homo sapiens
  chr3:9438862-9438892
  hyper
gagagcaatggctccgtccggtttcgagca

SEQ ID NO: 107839 - DNA, 107 bp, Homo sapiens
  chr3:9595395-9595502
  hyper
gggactggcacggcctaggcgccgcggctcggcgctcccagcagcggctgcctcggcccaggcggcggcctctgcgcggcctccatcttgctcgggttctccccggg

SEQ ID NO: 107840 - DNA, 213 bp, Homo sapiens
  chr3:9691034-9691247
  hyper
gaaggatcgctctgcgccgggggcgggccagtaatcgtaggcggggcgcgggtccagagctccgattggccagagtcggagtaaacatccggcgggacggggcggggccggaagtggaagtggaagtagaaggcggtggctgaggcggttccggaggttctagtgtcggagttgggtgcaggcaggtgccatgggcccgcttgaggcacactg

SEQ ID NO: 107841 - DNA, 544 bp, Homo sapiens
  chr3:9745530-9746074
  hyper
agcggctggagcgcacgcagggctggagcgagtgcagccgccgccgccgccgacaccgcggcacatgggccggccccgccgctgccgtcgcccctagccccagcagccctggtctcgcagcctcctgcggctctggtcgcccgaccagccatgtctctcggcggagcctccgagcgcagcgtcccggccaccaagattgaaattaccgtgtcctgccggtgagcgggccgcgctggggagggcttaggcactggcactgccccagccccagccagccgcggggctcagcctgggcaggggctagacccccggggagaggcgaaattggctggaaaatcacagctgatgacagggcgagtagctggtgggatcgagaagcggggggtcttgggcagccccaccccgaaaaaagggctcagcctgcgggttcagggggtgggtcgcagatatccggtaggagctcggccccaggaggacaaagttctggggcgagccctctttcctgggcccttggagacagtgtgggtgcgttcgcgtccagtcc

SEQ ID NO: 107842 - DNA, 30 bp, Homo sapiens; identical to SEQ ID NO: 38889
  chr3:9746302-9746332
  hyper

SEQ ID NO: 107843 - DNA, 30 bp, Homo sapiens; identical to SEQ ID NO: 2376
  chr3:9746622-9746652
  hyper

SEQ ID NO: 107844 - DNA, 30 bp, Homo sapiens
  chr3:9769053-9769083
  hyper
atccgtggtgtaggtcgggaggtccccaag

SEQ ID NO: 107845 - DNA, 205 bp, Homo sapiens
  chr3:9773214-9773419
  hyper
cgccacaaaccgcccgacgaccccagatcccgagtacggtgacttcagtctccagaaactccactctaagatgggagagctagagaagccctgtggggtgtccagggtcctttctgaatcccggagcacggtctttcgagcctcagcgggcgggcggggatccgtggcgaaagtgcagctcagtagcgccgcggcgccacgttta

SEQ ID NO: 107846 - DNA, 30 bp, Homo sapiens; identical to SEQ ID NO: 38892
  chr3:9773657-9773687
  hyper

SEQ ID NO: 107847 - DNA, 50 bp, Homo sapiens
  chr3:9791600-9791650
  hyper
ctaggtgaaatgagcggtggttgagccctacttccggtggtgctgtggtc

SEQ ID NO: 107848 - DNA, 30 bp, Homo sapiens; identical to SEQ ID NO: 38894
  chr3:9792125-9792155
  hyper

SEQ ID NO: 107849 - DNA, 30 bp, Homo sapiens
  chr3:9811452-9811482
  hyper
ctaggggctcccaccgcccccacgcagcgc

SEQ ID NO: 107850 - DNA, 65 bp, Homo sapiens; identical to SEQ ID NO: 2377
  chr3:9811684-9811749
  hyper

SEQ ID NO: 107851 - DNA, 92 bp, Homo sapiens; identical to SEQ ID NO: 2378
  chr3:9812388-9812480
  hyper

SEQ ID NO: 107852 - DNA, 30 bp, Homo sapiens; identical to SEQ ID NO: 2379
  chr3:9833989-9834019
  hyper

SEQ ID NO: 107853 - DNA, 34 bp, Homo sapiens; identical to SEQ ID NO: 38898
  chr3:9834429-9834463
  hyper

SEQ ID NO: 107854 - DNA, 30 bp, Homo sapiens; identical to SEQ ID NO: 38899
  chr3:9834884-9834914
  hyper

SEQ ID NO: 107855 - DNA, 125 bp, Homo sapiens
  chr3:9851462-9851587
  hyper
cataaggaagccctcgctcgactgccccggggcccatcgcagcccccaaccagccccgagcggtctgatggtgcccagggaatggtttccaaggcaatagcaaacggggcggggcttggaacgga

SEQ ID NO: 107856 - DNA, 31 bp, Homo sapiens; identical to SEQ ID NO: 2381
  chr3:9851988-9852019
  hyper

SEQ ID NO: 107857 - DNA, 30 bp, Homo sapiens; identical to SEQ ID NO: 38902
  chr3:9885149-9885179
  hyper

SEQ ID NO: 107858 - DNA, 56 bp, Homo sapiens
  chr3:9885760-9885816
  hyper
atcggaatggtgaccgggcgggactcagagcctgaggaggcggggcttttcctccg

SEQ ID NO: 107859 - DNA, 441 bp, Homo sapiens; identical to SEQ ID NO: 38903
  chr3:9904285-9904726
  hyper

SEQ ID NO: 107860 - DNA, 276 bp, Homo sapiens
  chr3:9932165-9932441
  hyper
ggattaatttcctgcgcgctccacaagaggcggggctgggcggggcgggggcgagagggaacgagggcgcctgcgcggagaggagtgaccatagagtcggtcctccagagacagaggggccggaagttctcttcacggagccgcgcggctgcgggggcgcaaatagggtcagtgggccgcttggcggtgtcgttgcggtaccaggtccgcgtgaggggttcgggggttctgggcaggcacaatggcgtctcgagcaggcccgcgagcggccggcac

SEQ ID NO: 107861 - DNA, 912 bp, Homo sapiens; identical to SEQ ID NO: 38905
  chr3:9956772-9957684
  hyper

SEQ ID NO: 107862 - DNA, 30 bp, Homo sapiens; identical to SEQ ID NO: 38906
  chr3:9974514-9974544
  hyper

SEQ ID NO: 107863 - DNA, 30 bp, Homo sapiens
  chr3:9975041-9975071
  hyper
tacccgcccttttccgcaccgtgcccgtct

SEQ ID NO: 107864 - DNA, 227 bp, Homo sapiens
  chr3:9975321-9975548
  hyper
ctccgtttcagtggcggggctggcaaacgtcattccctagccccgcggccctttaaagcccggacaggtgcagctcggtgccgcctctggttggctggcgtggggtgacgtaatggcacatggcccgtcgccattggctgggcggcaagctccgccccctggactgcggcgcgggtgggggttgtgcgttttacgcaggctgtggcagcgacgcggtgaggagacgg

SEQ ID NO: 107865 - DNA, 30 bp, Homo sapiens; identical to SEQ ID NO: 38908
  chr3:9975855-9975885
  hyper

SEQ ID NO: 107866 - DNA, 223 bp, Homo sapiens; identical to SEQ ID NO: 38909
  chr3:9993709-9993932
  hyper

SEQ ID NO: 107867 - DNA, 192 bp, Homo sapiens; identical to SEQ ID NO: 38910
  chr3:9993964-9994156
  hyper

SEQ ID NO: 107868 - DNA, 30 bp, Homo sapiens; identical to SEQ ID NO: 38911
  chr3:10028365-10028395
  hyper

SEQ ID NO: 107869 - DNA, 30 bp, Homo sapiens
  chr3:10029220-10029250
  hyper
caaatggtatcgcacgtgttaaaggcgggt

SEQ ID NO: 107870 - DNA, 138 bp, Homo sapiens; identical to SEQ ID NO: 2385
  chr3:10052428-10052566
  hyper

SEQ ID NO: 107871 - DNA, 34 bp, Homo sapiens
  chr3:10052881-10052915
  hyper
gccgttaaaagccccgcccgccgccgctcgccgc

SEQ ID NO: 107872 - DNA, 71 bp, Homo sapiens
  chr3:10067933-10068004
  hyper
ttgcttctctctgacgtcgcctctgggccttctctcgcccctatgcccggctagcacagaactctgctgca

SEQ ID NO: 107873 - DNA, 99 bp, Homo sapiens
  chr3:10068058-10068157
  hyper
cgcggaagttggcgtcacgtcatggcgcgcctcggtggcgtcagagcggcgtcgggcctggcgggaaagtcgaaaactacgggcggcgacggcttctcg

SEQ ID NO: 107874 - DNA, 99 bp, Homo sapiens
  chr3:10157071-10157170
  hyper
tgcccatctcactgcggacactgagtgcgcaacctgagcctggagcagttgagggagacggcaagaccccacgcgccgtgtaacgaccataacgcgcgt

SEQ ID NO: 107875 - DNA, 507 bp, Homo sapiens
  chr3:10183472-10183979
  hyper
ccgcgtccgacccgcggatcccgcggcgtccggcccgggtggtctggatcgcggagggaatgccccggagggcggagaactgggacgaggccgaggtaggcgcggaggaggcaggcgtcgaagagtacggccctgaagaagacggcggggaggagtcgggcgccgaggagtccggcccggaagagtccggcccggaggaactgggcgccgaggaggagatggaggccgggcggccgcggcccgtgctgcgctcggtgaactcgcgcgagccctcccaggtcatcttctgcaatcgcagtccgcgcgtcgtgctgcccgtatggctcaacttcgacggcgagccgcagccctacccaacgctgccgcctggcacgggccgccgcatccacagctaccgaggtacgggcccggcgcttaggcccgacccagcagggacgatagcacggtctgaagcccctctaccgccccggggtccattttgcagacggggaactgaggccccttgag

SEQ ID NO: 107876 - DNA, 814 bp, Homo sapiens
  chr3:10206276-10207090
  hyper
tcaggtattaccaacacctagggagttgcctggcatacagtaggtaattaatggagtatttgatgagcgcatgatgcatggtgtagtgccgatggaagtggggtcagaaggcctcctgccgctgcggcagaattcccgtgtggccttctcccaccagggcctcagtttcccctcgcagttccgattctctggccggcgctggggtggagccggcggggccgtcgtgccgcccgtggccgctggggacgctggtgccctcccgccccgcccacttccccgccggtccgcccctggctagagaagccgcagcccgcagtgtccgacccagtcgtcccgcgccggagccggccccgtagcgtgccatggcctgctacatctaccagctgccctcctgggtgctggacgacctgtgccgcaacatggacgcgctcagcgagtgggactggatggagttcggtgagtgcggcccggggaggggaggggaccagggcgaccggagcccccagcgatcccgcctggagcggccgccaagctccctcgggcacccgggttcagcgggtcccgatccgagggcgtgcgagctgagcctcctggaccgggtccgccgcggacctcggcctgtcacctgaaggtgccgcgtggtctctgaggacgtctgtcgacgagcaggggccgccgccactgcgctctgagtccagagaacggtgggtacgggggccctcctgtcagcgctgctggctcggtgacgtccccaggtggcctctcatccagcccacaacagcctgcaaagtgcgagcctcgaccctgtagggac

SEQ ID NO: 107877 - DNA, 133 bp, Homo sapiens
  chr3:10289895-10290028
  hyper
agcgttaagtgaggcgcgtcagcggacaccacctgcctgcacatctggctggcctcaacttcccgctgttcgagcccacgtgagtggctccgccccatctggcttctgaccaatggacgagcttcctaaggcg

SEQ ID NO: 107878 - DNA, 30 bp, Homo sapiens
  chr3:10290257-10290287
  hyper
ggcggcgggctgcccggcgggacagctgcg

SEQ ID NO: 107879 - DNA, 20 bp, Homo sapiens
  chr3:10338818-10338838
  hyper
gccaccgcgcccggcctgcc

SEQ ID NO: 107880 - DNA, 30 bp, Homo sapiens
  chr3:10362505-10362535
  hyper
acgcaggagcggcgcgccccgcaaagtcag

SEQ ID NO: 107881 - DNA, 30 bp, Homo sapiens
  chr3:10362886-10362916
  hyper
cagagggcgcgccccgccctcccgtggccc

SEQ ID NO: 107882 - DNA, 30 bp, Homo sapiens
  chr3:10547211-10547241
  hyper
gcggcagctggtgccgcggctgagcccagc

SEQ ID NO: 107883 - DNA, 98 bp, Homo sapiens
  chr3:10749299-10749397
  hyper
ttttcgcgcagcaggcgcaaggcgcgcccccttccctcacccgcaggcgccgggtccgcggacgcccaccccggcccgccccgcccgccgcctggtgc

SEQ ID NO: 107884 - DNA, 1 bp, Homo sapiens
  chr3:10749432-10749433
  hyper
c

SEQ ID NO: 107885 - DNA, 478 bp, Homo sapiens
  chr3:10749467-10749945
  hyper
cgctcccgccctggcccggcgggggtctccggggccgagcgcccgcggaagggaagccagcagggaaagtgacaagagaccgagcgagaggggaagaggcccagagcccgggcccggccgcccctgcctcacctgcgccggctccgagagcgagatgctgccgccgccgctgccgccgccgctgccgctggtgcgcgcccggcccggcccggccccgctgcggctgcggctcctctgccgcggctgccccgcgctcgcctgccccgcggccccgccgccgcccgcccgcctccctccctccgccgccgcctctgccaccgctgcactgcgctctgcccgcctccccctcccgccctccctgctcactcctccccgcgcgctccccctcggccctccccaaactcctcacggagagcgccccgcgggaccggagcgcgcggtcccgcccgcgtcctcctccgcgcgcaccagtggggct

SEQ ID NO: 107886 - DNA, 30 bp, Homo sapiens
  chr3:10780636-10780666
  hyper
gaaccgggtccctccgccctaaccatcagg

SEQ ID NO: 107887 - DNA, 30 bp, Homo sapiens
  chr3:10857687-10857717
  hyper
cgcgggaaggacgggcgctgcaggggctcc

SEQ ID NO: 107888 - DNA, 321 bp, Homo sapiens
  chr3:10858054-10858375
  hyper
cgcgcgccacccgcgcgtcaagcgcgacaaggcggtccacgagcgcggccactggaacaacaaggtggagttcgtgctgagcgtggccggggagatcattgggctgggcaacgtgtggcgcttcccctacctgtgctacaagaacggaggaggtgaggtgatagtgaggagaaggggagggggcgccaaccgcccggtgggggcggggagccaggggcgagcgcgagaccccctcccgcgcctgcgtggagcggaacccgagcggagaacctcgactccaggcacctcgcgtgtgagctcgccccggagcgcggcccacct

SEQ ID NO: 107889 - DNA, 30 bp, Homo sapiens; identical to SEQ ID NO: 38921
  chr3:11033851-11033881
  hyper

SEQ ID NO: 107890 - DNA, 861 bp, Homo sapiens
  chr3:11034491-11035352
  hyper
ccgaggagtcgggagcgcagtagcgctgagcccgagcccgagcggccccgcgtcccgagcgcatcggagcggccgagccgcccggatgcagcgcctgtcccgggcagcgcagccccggccgcaggtaggaaagggcggccggcgtcggggcgcggggcgcagagcctgggataacggcgcaggaacggccagagccccgagccgctgccgcgagccgggccgggtggggggcggacacctcgagattcaagcccccgcgccgcaccttccctgagccacatgaaggagcagaggcgccgctcggaccccgacgtgcgcccaggccatccgtcccctgggacactcgggaggcaggagggctggaacagaggcgagagttgcatgccccttccctcccgcggtgccccactggccccgcaagttggcactggattctgctggagccgtcgaagctccctattcattccccagggcatggaggggacgcggagtgaatgacacgagcagcgttggggggccgtgcgccactttcccaatcctggggtcagctgagccgagttagagctatgcccctcatttgttctctgcgggctacggcggggtcgggtgcgacttgaggatgggacgtctctgggacagcccgagctctcagaaacgttggcttaaaagcacaccggggcttgggctgagtgcaccggagctaagcctagtgcaccagagctcgcgccgcgctctcccagccccgactttctccaagagatgtggggtgcgggcggtcccttagagggctggaggacggtgcctccttgctgcttcgggaactgcgctccccttcttgcttttggtctctgcgtgtactcc

SEQ ID NO: 107891 - DNA, 122 bp, Homo sapiens; identical to SEQ ID NO: 38923
  chr3:11035382-11035504
  hyper

SEQ ID NO: 107892 - DNA, 31 bp, Homo sapiens; identical to SEQ ID NO: 38924
  chr3:11258023-11258054
  hyper

SEQ ID NO: 107893 - DNA, 40 bp, Homo sapiens
  chr3:11313875-11313915
  hyper
tctggtaagggagacgctctccatcgcttcccccgggggc

SEQ ID NO: 107894 - DNA, 30 bp, Homo sapiens
  chr3:11314114-11314144
  hyper
cggtaagtgagccgcggcgggcgagggtgt

SEQ ID NO: 107895 - DNA, 903 bp, Homo sapiens
  chr3:11684047-11684950
  hyper
cccggagatgccctcggcggcagacccagggccattgccactttttcaaatcgcacgtagaggatgtccgagggcttaagaaatagatttttctctgactgctaccagagacagttggaaatacaagacagtgggggaagcacctcgcgggcagtaggaggtaataaataacagttcggcgcggctctctctttttcagggcaggctgggggtcggggtgttgtgtaatcgctcccacagggagcggagcgcgaggaacaccccccagtgtcagcgctccccgggctgcacaggaagcgccagcgagacaaagagcccgcctgtgctcgctgacacggtgcccttccggccccacgcgggagagggacattctccgctgtttgggacgctcactcgcgagcacaaaaactcgctgtaactttggctccccctccgtgagctgcagggcgccgtggcccacagcagggtacagtagacggtgcaatccttaccagcccctcccccaaagaggctcaacttttaccggcgtcctacaagtccttcccctaaagacaatattaacggaaatcaaaaatacatacattttaaagagttaaaaatgtgaggcgcgagtacgttgcaagcaacgagcaaactttgaagggtttctacttcactgcctccccgtccagccccctccaccgccccccgcagcctgagatccgaacacactcggtgccgaaccgaacctaagaaacgccggcctttcaagtgccctacaccccggaggaggacagcgggcgcttagaaggcaggcacccagcacactgaggaggagtggccgggacgagcaacgggcagtaattctacaacgggacatctaccttcgtagcacagaatgccgatattgttgttcatcttgtc

SEQ ID NO: 107896 - DNA, 30 bp, Homo sapiens; identical to SEQ ID NO: 38926
  chr3:11685395-11685425
  hyper

SEQ ID NO: 107897 - DNA, 453 bp, Homo sapiens
  chr3:12045466-12045919
  hyper
tgggatgactcctttcgttctcacctccgcatagggaggctgacacctcttatccttccaaaaggagtggggtcggtttccttcgcctccatttcagctgggacacggctctttttctctccaaccaaaaagatggtggggcctctggttccttttccttcccctggggagaaggcctggctcccacgccctccccgcatagtcacgctcaggttgctggaggcctgggtcgccccctcctgcaagccccgagagtcgccagacgcgcggctaggtgccctccgtgagcggggcggggccgcctctgcggcgcggggcgggggctatctctggccccgcccctgccccgcccgctccctctccgcgagcctcgcgccgcgcgggttgcctggcccagaccgccgctgctgtctgcggggtctggtgccggggcctgagtctctgctggctaag

SEQ ID NO: 107898 - DNA, 374 bp, Homo sapiens
  chr3:12045978-12046352
  hyper
cgccaccggaccccgtagccccgcgcgcccccagacctttaagccagatgatgaacttcctgcggcgccggctgtcggacagcagcttcatcgccaatctgcccaacggctacatgaccgacctgcagcggcccgagccccagcaagcgccgacgccgccgccccccggcccgggcgccgcctcggcctaggcggcgcccccgaccgcctcgccgggaccggagcggacgccgccggccgcctaggcgcccgcgccgtaagacgcgccgaagaccgcgcccccccccccgcgcgaacaccgtcggtgggcagcagcttattcagctcgctgtcccaagcggtaaagcagacggccgcctcggctggcctggtgg

SEQ ID NO: 107899 - DNA, 68 bp, Homo sapiens
  chr3:12046377-12046445
  hyper
cgccaggaaggccaaggtgctgctggtggtcgacgagccgcacgccgactggtaggtgccgggcgcct

SEQ ID NO: 107900 - DNA, 89 bp, Homo sapiens
  chr3:12046504-12046593
  hyper
cgccgaggaaacgtttcagaccaataaaaaggagggtccccgaggtcccgctgggaggaggtgcgggctgagcgcgcgcgcgtttgcgg

SEQ ID NO: 107901 - DNA, 1189 bp, Homo sapiens
  chr3:12329040-12330229
  hyper
gggagccccacacctcggtctccccagaccggccctggccgggggcatccccctaaacttcggatccctcctcggaaatgggaccctctctgggccgcctcccagcggtggtggcgaggagcaaacgacaccaggtagcctgccgcggggcagagagtggacgcgggaaagccggtggctcccgccgtgggccctactgtgcgcgggcggcggccgagcccgggccgctccctcccagtcgcgcgccgccgcccccgcccccgcccccgcccccgcccccacccccacccccacccccacccccagccggcgcccgcgcccgcccccgcgccgggcccggctcggcccgacccggctccgccgcgggcaggcggggcccagcgcactcggagcccgagcccgagccgcagccgccgcctggggcgcttgggtcggcctcgaggacaccggagaggggcgccacgccgccgtggccgcaggtcagagtacgggtgcccgcggcgctcgggaaccggctgctggctgggcggggagtgctcagggagggggcgcggagggctggggccgagggtctgggggctagggccgaggaaacgggaactgacggggtcccagacggatgagagctggggagaagggggtctcggctgaggggtccggggctgaggcagggtcatggtccggcaggacccggactgacgggtcgcgggcgggcggctcacgggtgaccgggtgaaggggtcttgggctgagggcacccgggctgagggtcgcgtctaccggagcgcgcactaggggcggagggcgcgggcacagagagccgcggccggtgccgactcgagtggacgcgagccggtgcgtcccggcttccaggacagcccccctcgggagagcgccgggtgggcgcggagccggggacacggggacctccgcgtccccggcggaggtgcgcaagcgtcgggagccgctccgggggaactttggagcagggtgtctggacccggggaagcgaagatccgcgtgcgtccgtcctgaggccgcgcggcacccctgctgaggaggaggtcccgttcgctgtccagagcccaggggcgaccgccgcttggggaccgggggaccgttcagcgaggggcgcgcttgtagctggccaggccctgtgccctgacgcgttgtgctggccctacgcccg

SEQ ID NO: 107902 - DNA, 101 bp, Homo sapiens; identical to SEQ ID NO: 2394
  chr3:12330283-12330384
  hyper

SEQ ID NO: 107903 - DNA, 31 bp, Homo sapiens; identical to SEQ ID NO: 2395
  chr3:12524521-12524552
  hyper

SEQ ID NO: 107904 - DNA, 191 bp, Homo sapiens
  chr3:12525529-12525720
  hyper
ccttgcaagttccccgcatgctgcagcgtacacaggtgcgctgctgtgatcctctttctacattgagaaagatgagatcagtttcctcagggccatttaataaagtcctgtcggtcgcctcaaacatcccatccaccgagggccgaagattctaggtctctcccacctcccacgtgactatgtgacatttg

SEQ ID NO: 107905 - DNA, 30 bp, Homo sapiens; identical to SEQ ID NO: 38935
  chr3:12526297-12526327
  hyper

SEQ ID NO: 107906 - DNA, 51 bp, Homo sapiens
  chr3:12598377-12598428
  hyper
tgccagccaggctccgccccggaggcttggaagtgcgggacaccgagagca

SEQ ID NO: 107907 - DNA, 30 bp, Homo sapiens
  chr3:12599035-12599065
  hyper
ggacgccgagaggacggttacaaatgggga

SEQ ID NO: 107908 - DNA, 30 bp, Homo sapiens
  chr3:12599359-12599389
  hyper
gaggagaaatgcgacggtaatggatggttt

SEQ ID NO: 107909 - DNA, 30 bp, Homo sapiens
  chr3:12705276-12705306
  hyper
tcccccggcatccacgacccggtcctgcca

SEQ ID NO: 107910 - DNA, 30 bp, Homo sapiens
  chr3:12705689-12705719
  hyper
tctccgattctgcgcgagccctactggcag

SEQ ID NO: 107911 - DNA, 354 bp, Homo sapiens
  chr3:12851561-12851915
  hyper
ggtgtcccgctgggcgccttccacgccagcctcctgcactgtctgctgccacagctgagcagcccgcgcctggcggtgcgcaagcgggcggtcggagcgcttggccacctggcggccgcctgcagcaccgacctcttcgtcgagctcgctgaccacctactggaccggctgcccggcccgcgggtgcccaccagcccgactgccatccgcaccctgatccaatgtttgggcagcgtcggccgccaggccggccaccgcctcggtaagggggcagggggcggggcctgggctggcatggtgggcggagcttagggtgagccaatgactcggtaaaggggcggagcttgggccgca

SEQ ID NO: 107912 - DNA, 30 bp, Homo sapiens
  chr3:12882696-12882726
  hyper
ccctggtcgtcccacggcccccaggagacc

SEQ ID NO: 107913 - DNA, 336 bp, Homo sapiens
  chr3:12883130-12883466
  hyper
ataaaataaagacacgtcaaaaaataatgccgcaaaaattctgagtatacatgttttaatagacaataataactaggaataggactgagaaatgtattctacctatccttgggactacgtagaaatttggaattctttctgagctaataagacctggtggagggaggaatttacttccgccagaagtcgaagccaatccgcttttgggctatttccgcccgcgtttcttctactccgaagtgcgcctcttagtggtcagaagagaacaagacagagacttcctaataatttcatcaccgaatttagacagtaaatagtaacgaaaacagctaacat

SEQ ID NO: 107914 - DNA, 428 bp, Homo sapiens
  chr3:13008719-13009147
  hyper
aaacccacagtctggcggacgcaccccgccccgcaggcagctttctctcgcacgccgggcgcccggtcccgacggtcacccgcactcccgcacaggcatccccacagcctgcgccagcccaccgctcagcacccgggaaggccgctcgccccgcgccgcgccctcacccgctgtcaagctctagctccagaagggactgggtcctctccgagttgcagtgcaggcaccacatggcggccgcagtgggagcgggccgggccgggagccgggacccaggcccagcagaggccgccgactcccgccagcgagccgccggatcccggggccgacacccggccacccggagacccgaccacccgccacgcgatcacgtcggggctcctggtccagcgtccgccggctcccgcggctccggccccaagtccgag

SEQ ID NO: 107915 - DNA, 96 bp, Homo sapiens; identical to SEQ ID NO: 38940
  chr3:13009356-13009452
  hyper

SEQ ID NO: 107916 - DNA, 131 bp, Homo sapiens; identical to SEQ ID NO: 38941
  chr3:13009475-13009606
  hyper

SEQ ID NO: 107917 - DNA, 14 bp, Homo sapiens
  chr3:13115107-13115121
  hyper
ggccccttcctggc

SEQ ID NO: 107918 - DNA, 31 bp, Homo sapiens; identical to SEQ ID NO: 2399
  chr3:13138221-13138252
  hyper

SEQ ID NO: 107919 - DNA, 30 bp, Homo sapiens
  chr3:13316595-13316625
  hyper
caggtttcatatatgcgaaatgggatgagg

SEQ ID NO: 107920 - DNA, 30 bp, Homo sapiens
  chr3:13317121-13317151
  hyper
gcctctgctgacacccgtgggtggtcactc

SEQ ID NO: 107921 - DNA, 685 bp, Homo sapiens
  chr3:13323320-13324005
  hyper
ggccccgggtgatcccgaagacagagaggcagaggggcaggcagagggcacagagcagcagaaaccccgccccagagacaccgaagcctcccagcccccttgtcctgccccagatgggcgcccgaaggtccacacggtgaggctgctccgggtttcgacaccgacactcatgggaggcaaacgggaacccggctggcgggctgcgagccggtagggacgctggggtccagggctgctggacagccccgccctgtacctctccccatccctcacttaatcctgggtccgaaatagccccgggtaatcccagggcgaggcagtcgggaattaaccccagccttgaagtaagagacagaggcgtccacagaagagggctctgcgcgtcccggactggacacagcgcagagtccattccagggacaccgcaacccgcaagcgacccaggcccgctccagggcgggatccgcgcggcccgcgacccctccctaccggtctcgggatctctgggtcggaagttctcgccctgctgctccgagacctaggtccgctccccggacagacctccgcccggctcgtccgagccccgggggtcgccaaccctgagtccgcgccgcagcgcagagccaggccggcgggagcgctgagcagctccctggagcccttttccagggaacccagtccccac

SEQ ID NO: 107922 - DNA, 113 bp, Homo sapiens; identical to SEQ ID NO: 2401
  chr3:13324234-13324347
  hyper

SEQ ID NO: 107923 - DNA, 254 bp, Homo sapiens; identical to SEQ ID NO: 2402
  chr3:13324419-13324673
  hyper

SEQ ID NO: 107924 - DNA, 199 bp, Homo sapiens; identical to SEQ ID NO: 2403
  chr3:13324740-13324939
  hyper

SEQ ID NO: 107925 - DNA, 1318 bp, Homo sapiens
  chr3:13460979-13462297
  hyper
gcagcctgaggggaagcgccggcctgcctcgtctcacttcgcctctgtaaagcggcccctgggcttccctccaaaactcctttcctccagggtctccgttcctccccgcgacgctaggcgctgcgcttcgtttcacagactcacttcccacgccagggcgagggcggtcacagacaaacccgagctggggtcccagactcaagggaagtgcggcccagctgccccggcgccccctcccgggtcaggccggctcgggcccggccggcttgggccctgcggtcccagacgccgctccccaggccacccctcctcccgcacaacccagaacacgcgggtcacggccgccaggctgcgcccgctctgctcgcgcctcagcggcgcggaggcccggacggcgccatgacatgagcagtggtggcgacccacgcgcacccgccgctccgagtgctgcagcctagcgcccagcgagagcgcgccgcgcacctgccggctctgccggcctcccggcgcccgcccagcctctcagcgcgaaggcccagcccggcccacggcgcccgcccggcccggccgcgcgcctcaccagcggtagcagccctccgaggcctccagcgtgaagttaacgcgcgtggcccgcgtgaagggcagcagcactttggggatgttgagcttggccgcagcggcggaggggcccgccgccaacagcaccgacagcgtcagcagcagcagcccccggccccgcgccgccatcctcgccgcgcgtcacctcccgcgaccctgcgcccggccgcccgcgccgccccgttgccctccgctcccgcccgcgcgcgcgccaggccagcaggtgatgagcgcgggggcggggcgagggccgtcggcggccgccgcttcctgggcctgagcgcgggaactctgggggccgagctcgcggcgaccccacccccagcccggccctcgcgcagggacgcggggctgggggatgggcgcgcgcccgggcccccggagctgagggagaaggcttggggcgcgcccgcggggacccctggaccctagaagtcccaagggggagcccccggggcgccccgcagcacgcatcccgccctggtatttgcccctggcggtggagccaagccgccggctttggaccttgcgctctggcccggacccacggtcagcaaggaagggacacatgccccaggacatttgggatgcagaaaaccggcgcctgccttgtcccagcccatgcttcccagaagagggaccccgggctcgcaaagggaagccacctgctgaagcgctgaaggcccggggcccgctcccc

SEQ ID NO: 107926 - DNA, 199 bp, Homo sapiens
  chr3:13521509-13521708
  hyper
aggaacaggacatacggtggtcgcgccccttccgcgaggccggggtgaaacccgcttggccctcccgccagggggcggagcttccgaaccaggcgggattccaccgggtatttgcctgcggaggcgggacttcgggcttgatgggcgttgggggtggccttcctgcgggcaggctctctgtgtcgcaacactggcgggg

SEQ ID NO: 107927 - DNA, 193 bp, Homo sapiens; identical to SEQ ID NO: 2405
  chr3:13590447-13590640
  hyper

SEQ ID NO: 107928 - DNA, 11 bp, Homo sapiens
  chr3:13590973-13590984
  hyper
cgggttccccc

SEQ ID NO: 107929 - DNA, 157 bp, Homo sapiens; identical to SEQ ID NO: 38950
  chr3:13692027-13692184
  hyper

SEQ ID NO: 107930 - DNA, 114 bp, Homo sapiens; identical to SEQ ID NO: 38951
  chr3:13697027-13697141
  hyper

SEQ ID NO: 107931 - DNA, 2816 bp, Homo sapiens
  chr3:13919665-13922481
  hyper
gggaggccgcggcgccggcgggagggcggcccgcgggcgggcggggcggccaggggaggttattttctgctgttttccctttctgtctcccccgccacccgtgtccctcctccccgtttctaattaaaaaggagataaagccgcacgcggcccgagtcaatcggctcgagccaatcggccctactggcttcctggatgctgaatgtgcgcggggcggcggggcgcgggccaagatgaagattaaagcaggggaaaaaaaggaaagccacccagacgcgggcgaatcaataacacttaaaacacaccggcaggctggcggtactggcgcgagccccgcagccgcctctccgccgctggtcgggctggcggcccctggtcggctctgcacgcacctgctagcggccgcggccggacaacttgcgaaatccccgctccagagacgtggactggggaagtgacggggtaggggggtagtagtgacaaaacacaaagggtctgccacgcacatcccctcgccgcagcccctgcggtccacccctcctcaaaagggatggtaatgggttcactgctgggggctggaggggcagggtgtgtgagacctaccaagcgggcccttcagcgccagaacctctatccatgcccagatccccccgcccccacaccgctccgagcctcacacgcgttgtcttaagtacaaagggtgaccggctttgcacaagcagctccaggacgcgtcccgagctgccccctcccaccttccagccagagcgcccccgagccccacctccacagaaacgctaggtgaagccggagggctgctcgcgcgcccggccgcctctgctgcccagttccagggggcggggtgtcccgcctctctctagcgcttgtctccctctgtgtctcagaccgcctctcgtcccacctttgtgtgtgtttgttgggggtgggacgtgctgtccccttggcccgggaaggggctctgggagtctaagggcccctggaaattgggtggtgccaaggctccgagcggcggtttatgtttttgccagcgaatgtccttcctcctgggtacctgttccctgtttgcacggaccggccccgccagccacctggggactgcccagtctctaggaacggctgtgccgcgcctcctgagagagttcgtctcgggctccggggactgagctccccgagattggctgtggtcctggcttgatgttcctgctagacctgctgtccctatgcccgggtccgaagggtccccgggatgggctgaacctttgcagcagctagccctcccccagagtccctcaggctggagcgtccctaccggctgtctctggtcctgggggattccagactcagacgtcctcaggatggccagtccccctgcctatatctcctggggtgtcctgcggggggcctttgtgcgtccaccgctcccacaccgcacccacccggcctctcagagaagctgtggaagttggccggcagaggctcgcaggcggcacacctccctccccgggccgtgccaactttgtcgaaacacgcgcggaaagggcgcaggcagcccttacccgatccggaggtagaccatgcccaggctgagaaagaggtggcccaggcagcgccgcgctttccggttcatagtcccgattggccgccggggccgcgggccgggctgtgctgatcccgcgggccggccccggcggggcaatcaacatagcccgcccgggaggcgcgagccgaggcgtccccggggccgtctgtcggtgcgcccgtccgcgcgctccgcgcctgagcctcgccaggagcacgggagccacggagcgggaggagggagggaggagcgagcgcggcgtggggcgacgccgggctgcgcgcgagcgaccggtgcaagtgtgcgagacgcggggagtgcgggggcgctgctgcctccagcccccgcccctccctcctttcccccgtccctcccccgccccctcccccgcccgcctccccggagcgcccgcccagcgcccctgcgcccgcgggacagggccgcctgcacaaggcgcgcgctcgcgcctttccatgcgcgctcccgggggccccctccctgctccggggtgcaggtggcaggctggggagcacagcccggttggaggcggtaggagcccgctcgccccccacccgtcactaacttgcagattgcagggcgagtgggcgtccagaggctgccctcgggtggagtggaccagactcggccgagaggcctagtgccttggtctgctgccctgctccctccagcccggaacagggagctggggctgacagggcacaccccagttccccaaccccagcttcaggggagggcgccccctttcgcggagcgacgggctgactggctcagtgtatttcttccctactcccacctattcgagagtggcggcagggggtgcccaggttgggcagcctcctctgggatcctgctgttagccgacagactgagtcgggctgaggcccagttgccccgcgcggaacagcagtggggcgcctgagccgcgggagcgtgaggggcgcagctggccgctcagagcgcgctcgcggcgtcaccaggcggacgcggcgggtggtgcacctcggcctcgctcccgggaacagaatgctttgagtgccctggccgacccgagggggctaacacccttctttggtgtacacctcatccagtgagctagggggagtctaaccgtccctggaaattgggtggtgccaagactccgagcggcagtttatgtttttgccagcgaatgtccatcctccgggtacctgttccc

SEQ ID NO: 107932 - DNA, 643 bp, Homo sapiens
  chr3:13936737-13937380
  hyper
gtacccgacgcaacccgctgtgggccgaaacgggagctaagccagatggaacaaacgacccccaacccgagcccggcggggcgaacaggacatcccgcgttgttccacctgccaaagagggcgagcgcgcgggccgatcggagcagagcgagagggcggggccaagcggagcggatggggccaagtggacgagccgagggagtggggcgcagccgaaagtagccgagtgaagccgaacagagacgaggcgcgggtcgggtggtgccaagcggaaatgagtggggccgagcggggcagggtggagccgagcggagccgggtggagccgagcggagccgagcgagtgagaagccggaggccgagagggccgggccgacttgaagaggtggggattgctgagggctggtctgtcggctctggaaatcctgtcatactgtcacttttggattccgccgtttccgtcccaacggaaaactggggctcctggattcccctgacccgagttgtaaccaccgacgagaatctttttcactggcggcctcggcgtcggcattttataaaatgagagcggggagggcggccgaagacgagtgtgcggagccttaggccccccgctcgggtccgcttttcgtatattcgggtag

SEQ ID NO: 107933 - DNA, 358 bp, Homo sapiens
  chr3:14166220-14166578
  hyper
cagctgcacctttacgccgtgacctccctctcctctggcagggcgggctcctccgaagcccgcgcggacccgccccctcccaggcctgcccgccgcgcgcctgcctcggcgccctcgcaaccgcggccaggccaacctcagccggaaactacatttcccagcaggtcgcgcgctcctcgacagctctccaggcagtagaaactacatttccccgaaagctttgcagtgcgcaggcgcatcaatgaggtactgcaatgtcccggaccgtatagtttccaggacgtctcgccgcgcgcatgcgcagaaacactgggcacagggggaggtaactgcagtaagtcccgcttggccctggagt

SEQ ID NO: 107934 - DNA, 30 bp, Homo sapiens; identical to SEQ ID NO: 38955
  chr3:14167230-14167260
  hyper

SEQ ID NO: 107935 - DNA, 521 bp, Homo sapiens
  chr3:14219840-14220361
  hyper
cccacggcgcggaacgcgcgcagcaacctccaccaggcctccgcgtctggactcccgccctgcctctgggcctcctccgcccaccggcggcgtctcccgcgaagcccgctgggcctcgctctcaccctcctcctcctcctcacgccgggccttgctcttggccttggatttctggctgcgcagttcgcgtccccgcggctccccgccggccgcgcgtttccgagccatgttgcttgtctgggcaaattccacttcgcgagtgacgcacccggccgcgatgcgctagaacgccggccccgccccgaggcggtgcgcttggccacgccccttcgttggaggcctagtcacgcccctaaaggaagctccaccccatacccgtggccactaaaaaactgcgggaagcaggaaagagcacaacaggtttctctctatttccggtgtattgtatcctcacgtttccggagattgacgttgctcttgtgttctcgcgagaggcgggaaagggcgcagggtttgaaaca

SEQ ID NO: 107936 - DNA, 106 bp, Homo sapiens
  chr3:14443832-14443938
  hyper
tccgcaggcaggaggcgcccagggcgggctgccgcacctggcaacgaacgttcgccgcgcggcatgagggtgtgcgcgcgcgctcggcgagcccgggttctttgtg

SEQ ID NO: 107937 - DNA, 601 bp, Homo sapiens
  chr3:14443997-14444598
  hyper
gcgcgtgtgtccgcacttggggcggggctggaagccccggccccgccccggccccgcccccggcccggccgagctggtatttttccacccagcaggatgggtgatgctgagagctgcctgctcagacaacagacacgcgaggtcaggaagaagccgcttataaattaccgcttccttcgcgccgccgccaacgccgagccccgaggaccgcaagcccagaggacaagctgcgccaagagggagtgctggagctgttcacccagcgggtcagagagcgagccgggcaggccagcccccggccggcggaaccctggcacagcctgagcagatgctgcgggcggcgccgcagccaccccaggtaccggagggaccgggagctgggcgcgcagccggcgctgcccgccgtctgcagcccctccccatccccgcgtcgccgcagtcccggcctcctcccctccgcgtgcgcccatccggcgcccctttcaccaccgcggaagggaccgagagtcgcctgctcagtcccgctggcggggctgttattgtttccccggcaaaagggctccggctcttggtgcgggcggcaggagagtgtgtgtgtgtg

SEQ ID NO: 107938 - DNA, 106 bp, Homo sapiens
  chr3:14444657-14444763
  hyper
aggatgcctacatgtgcctccgtatccctgtgtctgtgtttctgagggtgactgtttcaccgtgtccccagcagcgtgcacatgtgtgttccggtgcatgtctgtt

SEQ ID NO: 107939 - DNA, 1007 bp, Homo sapiens
  chr3:14643705-14644712
  hyper
ggcaggacccaggcgcgggtcctccttcctcctcccgccccctcgcggtcagacaacaggtacgcggggagcagcccgggcggccccgcgcaggggttgagccgcagcgctgctgtgcaggggcaggcccgggcagggggcagtgcggcgagtcagccccctccctggcctcctcgcaactttgagtaaccgcggactccggggtcggcatgggggtggcgccgggcgttcaaaggaaagttgggtgcgacggaccgcagcctcgggggccaaaggacccccaccgtgagcgcggccacctcccgacacccggcgggctggctggagggagcaggtgaggcacgtggccgcctcgccaagccagggctccctccaggagcccgacccgccggccgggccggtggatgccccctcgagggctcagacccttcgctccagcccccggcgggcgccctgccccgggtcccacactcccgcgccccgtgggccccactgctggctttccgggaccaggctccgctccgcagctcgcgtcctgaggtgatcctccaggctccccactttgggaccccctcctgcgcctcgggtgccggcgcctgtcttcgcctcccgcggggaccctccccggcgccccaggcgtgtgcgccccgggccagctcagctctgggtccgccctccgcaccccgcgccgcgcgcgcgctcaccggccgggcagcggccgcgtcttaccttcgtccggcagccgctgcaggcagagcgcgaggttcctccgccagccccgcatccccgcggccgccctgcggcccggcccggcctcgccagcccggccccggccccgcccccgccgggcagggcggcgcagcgcagcgctggggagggccgcgggcccagggagccgcgggcatggacggccgccgagggtgggggtgccggggcggccgccaggcgctccgctccggctcccgagcccgcggctgagcagctacgcttttcgagcgcgcgctttc

SEQ ID NO: 107940 - DNA, 55 bp, Homo sapiens
  chr3:14644749-14644804
  hyper
cggagaggacggctggaggggagcccgaaggcgccccagccgtctcgcaccctcg

SEQ ID NO: 107941 - DNA, 80 bp, Homo sapiens
  chr3:14693106-14693186
  hyper
accttagcagttagcgtcaacctccgcactctatgacctttccaaaatgatggtgaacgtaatacgcaccacactctgac

SEQ ID NO: 107942 - DNA, 354 bp, Homo sapiens
  chr3:14851850-14852204
  hyper
acccccagcgcctcccgcggtgcccatggccacggcccctttaaatgtgcgcagggacgccccggccctcgcctccctgaatctctgaccgagcaggggaaaaaaaaatccttcctcttcgggagcggaggaaatgtctaggagggggtggaggcgcggctgcggcgcaggcagaggcgcaggcggaggcacggcggccagagcgcagcgcgcccggagccgggagcggacgcgacgcccggcgctgccccagccgccgcccccgcgctcgcgccccctcctcctcccccgccccgcgcccccgcccggcggccccgccccggaggctcgcggctcgcgcccccactgccctgc

SEQ ID NO: 107943 - DNA, 511 bp, Homo sapiens
  chr3:14852212-14852723
  hyper
cggagtccgaggcgcgccggggccgggcgggcgccagggggtgcgggccccgcggggcggccgcggagggaggcggtgtgcggagtcgcactgggacccgcggacggactgaaacgccgacggcggcccgggccccgcgcgctgaagatgaacagagcaggtaggaggcccggcgacctccggcgccgaggcacgagcgcgagggaccccggccgggcgctccaagttggagctcccggggagcccggggctagctgcccgaaatcctccgaccttccagtgccgctcggcctcggccaaagcatgcgcggctccggggtcctctcgccgaggaggctgagaaccgggggtccccgtccgaagcgccctgcctcagggaccttctcagccttggcgaggccgcgccctggccgtgcgcgccagtatcccactcgcacggcgttccccggagtgagggtcccttccacgacgaagaaagacgcccctttcgcaaaagcgacttcgtctggcc

SEQ ID NO: 107944 - DNA, 36 bp, Homo sapiens
  chr3:14988814-14988850
  hyper
gtaaccgtgcgcgacgtccacgagtttttaggacga

SEQ ID NO: 107945 - DNA, 30 bp, Homo sapiens; identical to SEQ ID NO: 38962
  chr3:14989116-14989146
  hyper

SEQ ID NO: 107946 - DNA, 30 bp, Homo sapiens
  chr3:14989657-14989687
  hyper
agggggaatggccgcggccccgccttatag

SEQ ID NO: 107947 - DNA, 30 bp, Homo sapiens
  chr3:14989953-14989983
  hyper
ccagataggagggccggggcctgtggcacc

SEQ ID NO: 107948 - DNA, 30 bp, Homo sapiens; identical to SEQ ID NO: 38963
  chr3:15106695-15106725
  hyper

SEQ ID NO: 107949 - DNA, 222 bp, Homo sapiens; identical to SEQ ID NO: 38964
  chr3:15140592-15140814
  hyper

SEQ ID NO: 107950 - DNA, 30 bp, Homo sapiens
  chr3:15160305-15160335
  hyper
cccgccagcagggggcgcccgacacttgcc

SEQ ID NO: 107951 - DNA, 30 bp, Homo sapiens
  chr3:15247803-15247833
  hyper
tctgggctgaggggcgcggcttcgcggtgg

SEQ ID NO: 107952 - DNA, 156 bp, Homo sapiens
  chr3:15248301-15248457
  hyper
tcgcggcttgcagccgccgctcctccacctgtagtcctgactggcaaatgcccaccgttgagccgctttggggggcaggtgttagatatgggtagttagtagccaattcttgctgtcacttgactctgatttacagctagcgggaaatggcctgtg

SEQ ID NO: 107953 - DNA, 243 bp, Homo sapiens
  chr3:15468805-15469048
  hyper
ccatgatggctagccgacccgcgttaatttagtcagccacgctcagggctcaccgtcatcagttcctaaattcacctgcagggctagggccaggcgcactcaccccacagccagccccactgggcctcggaggcagaatacgggaagaaccgcgaaacaaccctaaaccaattctgaggaccacgaattcggattatccgggagttcttttgccatggcaccgcccccgccacttccgctagg

SEQ ID NO: 107954 - DNA, 30 bp, Homo sapiens
  chr3:15469371-15469401
  hyper
ccttccacactattcgttgtaagtcagcgc

SEQ ID NO: 107955 - DNA, 373 bp, Homo sapiens
  chr3:15642963-15643336
  hyper
ccggcatcttccaccgaaaagctctaagcactcacgcagccggcaaacaagcggaatcatccagcaaggcaaacgcgaaatcggcagcacgccacctctggtactgcacctctgacggacaggagggcaaccaactgccttaaacaacgggaaggaagaggcggtctaaattcgtccacttcccgggagaggtgagaatgtaaacacgcgcgttctccaatcagaactgcgctctcttctcggctcctccattcgcgcgccagaatgccagagggaggcgggactagcaggagattgctgcctatgcaaagcaggtaagaagccgaactctgaggcctctcgccattgtctccgagtcggccagctggagcgt

SEQ ID NO: 107956 - DNA, 16 bp, Homo sapiens
  chr3:15901301-15901317
  hyper
cggcatccaaactcca

SEQ ID NO: 107957 - DNA, 341 bp, Homo sapiens
  chr3:15901940-15902281
  hyper
cgaacaggttgtggacgcccaatcgtttttctgcccgtagtcccaatccgaagctaagctgtgtggttttcccttgaaagctccccagccaggcttgctgcctccacccctttcgcatctgaagcattttgcctcccactcgagagaaatcaattttcttaaacaaacaaaaaaaaagatgtgcaggatttctaataaatagcatccttggatggaggagaagaggaatgactccctcatcctgccacacacacccccacgccaccccgcagctctgaaacggcttttctttcttagccagccgcacgctgttgccattccaggctcgtgtgggagaagat

SEQ ID NO: 107958 - DNA, 30 bp, Homo sapiens; identical to SEQ ID NO: 2413
  chr3:16220028-16220058
  hyper

SEQ ID NO: 107959 - DNA, 219 bp, Homo sapiens
  chr3:16306494-16306713
  hyper
aggactagcccttccggcgcataggcaatgacgcaactccgccctgcgcggccaaatggataaccggtagcggtcaccatggagatggctgaactaggggcggagacactgggaagactgaaagcttgctcagcggggtcgcgcaccgctcctcctattgggcggcagcgaccaatagaatgtggggctcgcccgcgctgctacgtcacgtctgggacc

SEQ ID NO: 107960 - DNA, 1245 bp, Homo sapiens; identical to SEQ ID NO: 38969
  chr3:16553593-16554838
  hyper

SEQ ID NO: 107961 - DNA, 322 bp, Homo sapiens; identical to SEQ ID NO: 38970
  chr3:16555196-16555518
  hyper

SEQ ID NO: 107962 - DNA, 35 bp, Homo sapiens; identical to SEQ ID NO: 2416
  chr3:16860035-16860070
  hyper

SEQ ID NO: 107963 - DNA, 106 bp, Homo sapiens
  chr3:16925425-16925531
  hyper
cgagatcctgagccccgggacccttgttccgggccccgaggcctacttggtagttgcccctcggggttccgggtgggtgactgacagttgcagcagctctggggag

SEQ ID NO: 107964 - DNA, 636 bp, Homo sapiens
  chr3:16925583-16926219
  hyper
cgcggcccgatgacccggcctcggtgacagcagccgcgacggcggcaatctcgacagggagctaggcggctcatggtgggtcagggggcgaccgaggagggaccacgcggcctgtagggggcagcgccgagctcgggaggagacagcagccggcgggtggggtgggtctgggctgccccctccgggagctgccccggggccgcacggcgattgtcatacccggccgcccctgcccgccgtgggcttcctctcggcgccgcgggccttaacggggctctgaggggacgtgacagagctcggcacgcggcagcctctggggagttagggtccggagagacccacgcgtcgccccccgcccgcccggggccgggagatcctcgggagccgcctccgcgtgtccagagagtgtcggggcggccgccacttcccctcgcccttcgccggaggtgggcgccttttcctgcgtggcgggtgctccgaccccagttgctctgagccccggggaagcgcgccccgagcccctgacgtgggcgccccgttacctcggggtgggtgcctggggcccctgaggtgggcgcgggttgccccggggtgggcgcccggcccgcgcgggttatttttggcgcccgcagaggc

SEQ ID NO: 107965 - DNA, 92 bp, Homo sapiens; identical to SEQ ID NO: 38973
  chr3:16926261-16926353
  hyper

SEQ ID NO: 107966 - DNA, 353 bp, Homo sapiens; identical to SEQ ID NO: 38974
  chr3:16926665-16927018
  hyper

SEQ ID NO: 107967 - DNA, 31 bp, Homo sapiens; identical to SEQ ID NO: 2419
  chr3:17571374-17571405
  hyper

SEQ ID NO: 107968 - DNA, 30 bp, Homo sapiens
  chr3:17783476-17783506
  hyper
gctagggaaggaagcgtgcttcccggggcc

SEQ ID NO: 107969 - DNA, 228 bp, Homo sapiens
  chr3:18465497-18465725
  hyper
aaattgatctgacaagtgattcgttggggggaaatcgtaaaaacaaagcaaaacccgttatgagctgtacactgtgatggtgctggggaaacgacgtggtgactgaggattctcttaaaaaaaaaaaaatcactgcggacaaggtctccaaaaaggaaaaaaggtctcttcgcgtctctccctccctcctgctcactcgggttcttcggtgtgaggacagaaagtcta

SEQ ID NO: 107970 - DNA, 30 bp, Homo sapiens
  chr3:18466466-18466496
  hyper
ggggctgcttctctcgctctctccctcgct

SEQ ID NO: 107971 - DNA, 1143 bp, Homo sapiens
  chr3:18485177-18486320
  hyper
tggtttcccaaaccccggttctgccggcccgggagccttagcactggagcaataggaaaaggccaccgcgctcgggtctggacagcaggagggaaacacggtgtggactgcgaggctgcacctgtgatgtcccggcccctgctaagaggacggccctttcttctgcctcttgcccaactccaaacccacattcacgccagcagcctctccaggaccggcctcgctacagccagcgagggctcgaaatgaggagtgccgcggctttcaaactccgggctccaacttgagcgccccggcgcccgagtagctcccgggatgcagaagttgccacaaacttcccaggcccctcttcgccgatgcttacaatcagccgcgcaggcagggagcggagggaggcggagatggaccgggaaaggatgctgagcagactcgcgatccggtgggggaacattaccactcccgcagcccactcctccaggcaccttactgcccgcccggctccagaacgcaccgagaggctccccttttccccatttgcttccttcggtcttttccactcccctttccttttctaaaaggggccataccggtgacctgaaggagtttgttcagccagggtctattgggcaggtgtggtggtgtgtccacacccagacagaaaacgaatggcatcttcaaatcccccatcccgaccgctctcccctactctaccagcccacccctccaaggtccgtctgcgtgagaaaaggggctcggaagaccgttgaagccctgcgcccacgagaggggagcccagccgccccaataggggacgaggagtgggtgctacggagaagtttggattgattccggaaaaagagggacagagataaaacagcaagagtagcaaggggaaaagggaggcaaaagagcagaactcactcaggcatggacgttgggggcggcggtggctgtcgagtgcgggcctgaaaccaagaacggctccccgggcgggcgcgccggcgtcggacttccgaggcggcggcttctgcctctcctgccgccgccgccgccgccggagctgcggctgccgcggaagttaattgcaacttgacttcaagttgtcctctttccccatacgaagtgggcgtttaaaggggagag

SEQ ID NO: 107972 - DNA, 30 bp, Homo sapiens
  chr3:18486524-18486554
  hyper
tcccccgcgggagcccgcagccacccggga

SEQ ID NO: 107973 - DNA, 140 bp, Homo sapiens; identical to SEQ ID NO: 38978
  chr3:18486936-18487076
  hyper

SEQ ID NO: 107974 - DNA, 30 bp, Homo sapiens; identical to SEQ ID NO: 38979
  chr3:19188399-19188429
  hyper

SEQ ID NO: 107975 - DNA, 191 bp, Homo sapiens
  chr3:19188894-19189085
  hyper
ttttctataaagttcgggctctgggtgtccccttgcactccccacagggctgtgccgcaggcttgggcgactttccccgcagaacgttggccgagagggagtccccgcggggggggccaggggggaggactgggagagaccactttcgttttctgagacgccttcagttcctggccgtccgccaggctttc

SEQ ID NO: 107976 - DNA, 105 bp, Homo sapiens
  chr3:19189373-19189478
  hyper
tcggggccagtttcccggactaaaagaccctggtgactggggatgggcctcacaactaactcgggctgccctgcccctgtcgcgtgggctcgcaatggcaagtgc

SEQ ID NO: 107977 - DNA, 642 bp, Homo sapiens
  chr3:19189678-19190320
  hyper
cactggctcccggggcgtgggagttgcgctcgctctcctttcccggcgtcccgtggagaccgggaggctcagcgcctctcccagctctcagcgccgccctcccagaccccagagacgtcggtcagggcgcggcgccccgggccactgcgggctctttccgggcgggcgacgtggggggcgaggcaccgcgcggcggcgcctggcgggcactgttgcccgcggagggacggtgggggggtttcagcagctggcgggggtggagggggcgggagagggagcctgcgccgggctgagcctggaggtgcggggcgggctcggggagcgctcttggggctcctcctgccacagccggggcggctggaactctctccctttctccctccatccttccacttcccctgctcggccccgccgtcaggccgggtcccccttccctgccgtcatcaggttccccttctcccttcttggcactttcctttcgaaccatccttctggacaaactttgatggagaatttcacaccacgctggaaaaatgccggttatgaaaggattactggcgccgcaaaacaccttcctggacaccatcgccacccgttttgacggaacacgtaagtcttacacttgaacgagtggtatggcat

SEQ ID NO: 107978 - DNA, 30 bp, Homo sapiens
  chr3:19191028-19191058
  hyper
tgctagcagacggttcgttatcatctgcaa

SEQ ID NO: 107979 - DNA, 370 bp, Homo sapiens
  chr3:19988325-19988695
  hyper
atttcccccgaccccggccgccaggagcccagagaccccccagcctaaataacaatggcgctggagagggcgtggccgcgcgtacctggggtgggggaaggggagaaaggcggccagttcggatctgagccactcgcagggtcacgtgacatcctgcctcgccccgccccgcgaacaaacctaggcggggagggattcgggaaggggcgaggaagcggaaggagcaggcggactggcgatgatgggaagtgacgaagtggcgcagttcgctgcgtgcagcgacgtggcggcggggccggcaccgggcagcggaagtggctccggcggtgggacttgagtgtttgtgttttggttcgtgaaggagccggcg

SEQ ID NO: 107980 - DNA, 30 bp, Homo sapiens
  chr3:19989113-19989143
  hyper
ccccttctccctcacgcgcagcagtgccct

SEQ ID NO: 107981 - DNA, 30 bp, Homo sapiens
  chr3:20081503-20081533
  hyper
gggtgcaaaccccgcgggcagcggaaaaga

SEQ ID NO: 107982 - DNA, 38 bp, Homo sapiens
  chr3:20227786-20227824
  hyper
cccgccccgccaggcgacgtcacgtgacgcacattcgc

SEQ ID NO: 107983 - DNA, 30 bp, Homo sapiens; identical to SEQ ID NO: 2423
  chr3:22335323-22335353
  hyper

SEQ ID NO: 107984 - DNA, 30 bp, Homo sapiens; identical to SEQ ID NO: 38985
  chr3:22412730-22412760
  hyper

SEQ ID NO: 107985 - DNA, 542 bp, Homo sapiens; identical to SEQ ID NO: 2424
  chr3:22413368-22413910
  hyper

SEQ ID NO: 107986 - DNA, 118 bp, Homo sapiens; identical to SEQ ID NO: 2425
  chr3:22413959-22414077
  hyper

SEQ ID NO: 107987 - DNA, 230 bp, Homo sapiens; identical to SEQ ID NO: 2426
  chr3:22414308-22414538
  hyper

SEQ ID NO: 107988 - DNA, 30 bp, Homo sapiens
  chr3:23244622-23244652
  hyper
gcggcggcggctcccggaggtggtggcttc

SEQ ID NO: 107989 - DNA, 30 bp, Homo sapiens; identical to SEQ ID NO: 38989
  chr3:23245385-23245415
  hyper

SEQ ID NO: 107990 - DNA, 31 bp, Homo sapiens; identical to SEQ ID NO: 2427
  chr3:23654182-23654213
  hyper

SEQ ID NO: 107991 - DNA, 44 bp, Homo sapiens
  chr3:23847465-23847509
  hyper
tgttgctgcacttccgcttctctcccagcgagagagagacacga

SEQ ID NO: 107992 - DNA, 30 bp, Homo sapiens; identical to SEQ ID NO: 38992
  chr3:23848497-23848527
  hyper

SEQ ID NO: 107993 - DNA, 167 bp, Homo sapiens
  chr3:23848588-23848755
  hyper
gcagactttgaaaagcgagtggagggcggtgggcggccgcgtgcgcccctggtcaatgccctcctgacagcacccgagttccttatttacactggctgcatggtttgtgtgtttctgttttgtttctctccccctgcaggggctgtttgcggggtggggtggggggt

SEQ ID NO: 107994 - DNA, 30 bp, Homo sapiens
  chr3:23851894-23851924
  hyper
gtcgagggttggtgcggagggagaaaactg

SEQ ID NO: 107995 - DNA, 30 bp, Homo sapiens; identical to SEQ ID NO: 38993
  chr3:23852484-23852514
  hyper

SEQ ID NO: 107996 - DNA, 285 bp, Homo sapiens
  chr3:23957823-23958108
  hyper
atgccagcattttctcggcatttcttctctaaaacattcacacctgccaaacaggtcttggcaaataaacattctgctcttctgaaaaactgtggttctcatgttagcaaatttgggacgaaatccgtatgcagaaaaagcgccgggccgcccgcaatccacccactccatgacccttttttaggacaaaatccctgggcgctggggcctgctggaggagcttcacgcagtctggagctgaagggacacagcgagcgccccgacccgcgacgccccgactccgcg

SEQ ID NO: 107997 - DNA, 30 bp, Homo sapiens
  chr3:23958487-23958517
  hyper
cgcggcgccccactcggcagaactccgcca

SEQ ID NO: 107998 - DNA, 57 bp, Homo sapiens
  chr3:23958862-23958919
  hyper
attcgagctgggcccggatcctggaggaggcgtggggctgacgaatggggcgcccgg

SEQ ID NO: 107999 - DNA, 70 bp, Homo sapiens; identical to SEQ ID NO: 38994
  chr3:23986034-23986104
  hyper

SEQ ID NO: 108000 - DNA, 205 bp, Homo sapiens
  chr3:23986745-23986950
  hyper
cgcgggtcacatggtcgcggctgccctccccgtcagccgccctcgccgccgcggtgcgctggctgcaggaagccgccgcgccgccgcttttgttgtcagggacccagcgaggagcgccgctcgccggccgccgccaccctctctcgctgcagcctgctgtgcgctgcacggcctggggcccgggagccccgcccgctctgcccat

SEQ ID NO: 108001 - DNA, 30 bp, Homo sapiens
  chr3:23987772-23987802
  hyper
accaaacgaaccggcgcctggggaggctgg

SEQ ID NO: 108002 - DNA, 498 bp, Homo sapiens
  chr3:24535350-24535848
  hyper
aaagtgacaactgccgctaagaagggcaaaatccactaagaatgaaaattcccccaaatgagtccttctccgagggggtggaggtcacacagttggcacaattggtatcacaaccaactcgaggagacccagaggaagatgctgcgccaagagaagcaaagcgaaggagcgcgacccaggaggctagcgaaatccccgccaagcccccaggaggcggagagaagcccagtcgccaggcaccggccacggcgcacgccaacatccaggataattctcctttccaagcccgggagttccggggcaggcgaaaaaggggggatgggagacccacagtccctttaaccctcccccctggcctgccaaccttttccgaacccccatgtcacacaacttcctcatcatggaaacttccactgggttcggcgctgaggatgccaaactccatttcacaaggaacatgtcaacagctgggcttggggtttgaggaacagagccgct

SEQ ID NO: 108003 - DNA, 1441 bp, Homo sapiens
  chr3:24535911-24537352
  hyper
cgccgcgcggtgcccgaacacgagagggcacctcctcccagatccggggcgcagaagccccgcggaggcaggtaatcaggctgatgacacccccaccacccacgctcacccgcctgcccgcccgcgcgcgctcggcttagccgcccgcacccctccgggttcttgcgacgctccgtcaccatcccgcccaccctgtggacagttggaactgtcgccccctcctcctctcaccccgctgcctccgcgcggtcctctagccaaattaccagtgccctggagccggttgggttgagcgcccctgcccggggaaggtagcctgcgggctcttgccccgagcccgcggagcaggaggtctcttttccaagcgcactcacattattcatgcaaagttaatccccgccgcgtcacggccgcccgcccgaggatgtgcgccttccttggccaagccccgcagtctccaccctcctccgccccctcctcccggcggcggggtcccggggagcgccggcgactgggcgtcgcgcgagtcctgcaaaatgtcaactccttgggcgaagagaggcggccgcagccagggccgcgccgcacctccccggtctctccacttttataggcgtaggaagctactgcggctggggcaccagagtccccgcctctccgggtcccccgcgtgcccggcccgccccggcccgcttcccgggcgctgtcttactccgggcccggggcgcctgctccgcgccgcgtctgcgaaccggtgacctggtttcccctccagccctcacggctgtccgacttgcgcggcggtggcggcggcggccaagagcaggcaaacccggctccgccaggggcgcagcgaggaaatggcctcctggcgcacaccccgccgccgccgccagccatcgccaccgccccgggctgcccagccggtacagacgccccctgccaggctccgggccagcgctccgacgcgctcacagcgcccggcttgccgaccccgaccccgaccccgagtcctacgcactcgaggtccccgggccggccgcctccgcacctgcctccccaggtgtgggcgctccccctcctcctaatcccggccgtgccctcccagggttggtgacggtgctgtgggtttggtggccgcgcgtccacccacccgattgcctgcgcgcataggtgcgggtttgggcgtcattactctagttggagaagaggaaagaatggggaacgagtgacaccgggaccggagggcgagtcttccaggagcacgtctcggccttctttgcccggcccgaccggcccgacccgtgccgcagcgctcctccctccgctcctaaaccacttgtggcgcgtgtcgggaatacagggcgctctggctcttcttggggcctccgctggtccgaccatctggcagctctcttaaccaccacggccaccccacgaa

SEQ ID NO: 108004 - DNA, 814 bp, Homo sapiens
  chr3:24562964-24563778
  hyper
gaaggggccgcccagcgctctcagccggctcgtagagccagggccgggctcagggagcttcagagcaagaaacaccgaaggtgtaaagcccgagcgagcagctcgagtctcagtcctgcagcctaaggcagcccctccaagccgtgggcgccggccgtccgtctcctcaccgtggcgccctttactcggccacccggggcacagccaggggcttcaccgagccccgggtccaccgtggtcgcggccgccggtcgccgggagcccggagccgggacgcgagggttgggggttggggatgggtcccagtgtcgcgcgggagttcaaagcccggcactggcacggggctccgccgccgcagccgctggagccttgggctcccgccgcggggagagcgggggtagggcgcctgtcccggagtgacccggcggcggaggaagggcgggccgcaggcggcgggcccgggggaccttgagcgggcgggcgaggagcgggtgagaccgaggtcgacagagtgggggccccacgaggcccgcgcctggtcgggaagagagtaggagattcccccgcgagctcagacccggcactgagggaagagacactccgagtcctgcgtctccaagttttgctccaatgcccttgacattgaatgcatgtgtggcgtctatcctggcgcaggcgatttgatattttcaataggcctaacctcaccagtggcgtgcccggcccggctggctagcggctcctgtccccaagacccccgcagtcaccagacctttgcactgcccagcgctggagggggcgaccagagccttac

SEQ ID NO: 108005 - DNA, 523 bp, Homo sapiens
  chr3:24870653-24871176
  hyper
aggcgcggccgccgccgcctccggctcagctcacgcggaaaccccactgggccgtcgtggctccgcgcggttgcgggccagcgtggagaggcgggacgtggcgcccgggggcggggcctggcgccagggggcggggcgcagcgagccgggctcccgctgtctgctctcagcggcggcggcaggggctgagggcacagccagcgggcggcgcgccgcggactccaaggcagcccgccaaaaggtaaagccaggagagcgcgctggcgggtcttcctgttgggtggctgctgtccaagcccctagcgtccccggagccccaagctgggtctggaagaccagggcatttgcatggcatccagggaccggctgcctagcagggattttgcgtgtaccgcggcggggccgggggctgggggttggggggtctgcagcgggagcccgcgaccgatcccaggacatctggactcgcggacaactttgcgcagcagtcctcttccaagttccctttattgctattgtctta

SEQ ID NO: 108006 - DNA, 845 bp, Homo sapiens
  chr3:24871245-24872090
  hyper
cgtgaacccaggagtcgctggcaagttgcacctgccagccggatccgccccggctcccttcgcgtccctgccgggtccagcgctgtcctgcgcaccttagggctgggcacggcgaaacctggcgcccttgggagcagaggttctcgctccattcccctgtggggatctaagctccaggccggggtgtcggacctctgggttgcagcatgctttggggccgaagaaagggcgagaaaaagtttgagcattggctgggcctagggagcgggtagcgccaggctgcacatggcaggagttggagaagagtactaggggcttggcgccggacacagggacgcggccagggaccgagccctggaggctgaggctctaagcctggactgtcagccgcgaaggggttcttgctgtgtgcgcgctttggcaggaagaggctgtgtgtgattgtagagacgatgggcggaaaaacagagaagagagaggtacttggaatctatgtaattgcagtgtgccccagtgtgcacttttctccctccagatattttgaaaaaggtgtgcacgccgatgtcttgtaggtggactcccggaggtgggggtgggggtgggtacgagggataagttttacctagagctagagctggcgttgaaagtgaacaggtgacagaagacgtgtgtgtgtgtgtgtgtgtgtacgtgcgcgcgcgccgtggctaaggatgctcgggtgctggaccgcccgctgtgcctccacacccctccgccccgcccccttccagctctcagcgcggggtgagtttccctgacactccccgccggaggcaagcaggcagaggcgaagtgatggtcgc

SEQ ID NO: 108007 - DNA, 672 bp, Homo sapiens; identical to SEQ ID NO: 39004
  chr3:25469353-25470025
  hyper

SEQ ID NO: 108008 - DNA, 30 bp, Homo sapiens
  chr3:25705593-25705623
  hyper
ccctatggagcgcccgttcgggggacggga

SEQ ID NO: 108009 - DNA, 30 bp, Homo sapiens
  chr3:25705846-25705876
  hyper
gggccgctgggccccgccgctccgcaccca

SEQ ID NO: 108010 - DNA, 30 bp, Homo sapiens
  chr3:25706441-25706471
  hyper
ccgctgtcagtcagcgccatgctgtccaat

SEQ ID NO: 108011 - DNA, 122 bp, Homo sapiens
  chr3:25824792-25824914
  hyper
tccaaaaaggtctccggggtgttctggcagagctcagccacggccggggacgccgagcctgaggagctgcccaatgccgccgccgccatgcttgagcgccagcgggcgccgccgccgcccct

SEQ ID NO: 108012 - DNA, 30 bp, Homo sapiens
  chr3:25825177-25825207
  hyper
ggcaaggggctgttcggaagaaggtggggg

SEQ ID NO: 108013 - DNA, 145 bp, Homo sapiens; identical to SEQ ID NO: 39006
  chr3:25825434-25825579
  hyper

SEQ ID NO: 108014 - DNA, 30 bp, Homo sapiens; identical to SEQ ID NO: 39007
  chr3:25825791-25825821
  hyper

SEQ ID NO: 108015 - DNA, 30 bp, Homo sapiens
  chr3:25831387-25831417
  hyper
agtcactgaggttccgagaggggcgtctct

SEQ ID NO: 108016 - DNA, 2030 bp, Homo sapiens
  chr3:26663870-26665900
  hyper
aaacactcatttgtcgaattgattttaagcctccgcttttcccccaaggagggcaatcaatcccttgcacgttttgctcctttcaccagcttaattcagctctgatctcagtagttagaaaaataggagaaagaatggggccatagcctgctgcaagtagagctgtgtaagggggtgcgaggaaggcaggcgagagcagcagagggagttaatactcctacctcagctggtctccggcagccaacgctcagcccccgcctcctctctccattccggaccccgcaaccgcgaggcgagagagcagcgccggcgaggcactggctgggctctgactgtcacgttaattccctgctgctttttctagtccccagccgcctcgcccctcctccctcattcccagcctgggtttggaggcgatttccctctattgactgagccgactgcatctctgggcaagcggcgctttgcctctctcctgtctttgtctgctcttcctgcaaggctacggcgcctggagcagggtctgcagcggccgccgcagcaacgcgagccaagtcgtgccccgcacggccgcccggggccgcaccctcgctcggtggcggcgcccgaagacgccagccgcgccacgcactgcctgcgtcccgcgccccagccgccgcgcaccaacgccgccgccttcgccgggagccaagcccgccgggccggcccggtcccaggtgggcagctcggcttgcagctggttggaggtggcggccgctgcagccctggcagcgggcacacccctaagcatacgcacccaacgcctcctccctgagccacgaggatggagcagccaccccggcccgggactggcgcaaggtaaggtgcagccgcctgttgcttttcgcagagcgcgggatcatccctctgcccgggtacctaggccgtccctccaaggaacaagtagaggagaactattacaccagttctaagccgtgcctgtctaagcctccctgatcccttttgcgcagaccctgggagagacctcctcctggagagagagagtcgaccctcttcgctcctgttcagccggctgctatacaatagtctgcaaacttttgtgaccccttccctgcgcggtgctcaccccgtgctgtgcaacttgcaggtttagttcttgcccttcccccagcccctcttgccatatgcatctgcccatttctctctgtgtgttcttgccagtcgacttttcactccccgcagctctggctcctgaggcgagggtttgggacccagcagtgctcgtcctgcctctaggagctgggtagggacagagaaggtgaaataagagaggtgggacatggaggatggctgcggccacccctgaagcttcgtccagcgcgatgggagtcagtccatccttgcacacgccacccccaactcggcaatgaaacctttggagtggcttgcggctgtgcgccgtgggaactgcaagtgcagatatgggtgggtgaagtaagtggctcagggagggaaaggctgctcgtgcggtggaggaggaagctgagggtcgggtagatctgcccacggttgagggaaatgaaaaggtactgctaatgtgggcgagcggccagccctgagaggccatctgacgaagaggaaaagggatttgagtccggagggcgctggcctgggtatgtaaatacagatgggggaggggctgggtacctgggggcgcgtggagacaaggaatggagccccggaatgccgggcccttgggtacttgggaaggcaggctgctgagtgcctgggatggggcgatcttcctccccagaagcaaacaaacctccccgcgagaatctgaatgcgttggcatcttgggtggtgactgaatggtcagatcgtggactagggatgcttctccaagctctaagaggaccatagtctgctctcttctctggcacccgcttgcttctacgctccttcacctctgcagccaggtcggtagacccacgcccaccttccctgccaggcactcaggagtcaaggat

SEQ ID NO: 108017 - DNA, 466 bp, Homo sapiens; identical to SEQ ID NO: 2442
  chr3:27410376-27410842
  hyper

SEQ ID NO: 108018 - DNA, 279 bp, Homo sapiens; identical to SEQ ID NO: 39011
  chr3:27410882-27411161
  hyper

SEQ ID NO: 108019 - DNA, 30 bp, Homo sapiens; identical to SEQ ID NO: 39012
  chr3:27415997-27416027
  hyper

SEQ ID NO: 108020 - DNA, 30 bp, Homo sapiens; identical to SEQ ID NO: 39013
  chr3:27525499-27525529
  hyper

SEQ ID NO: 108021 - DNA, 1715 bp, Homo sapiens
  chr3:27754002-27755717
  hyper
gcctgaaataatgcattgcttcggcggcggtcagagatccatgtgacgcgggggcactttagggaccattgctgagggcctggttagcatttgggcagctgaatccttcccttggcgaactccatacgtgccctcggcgacacacagaggactcccagagttgaagaagggggtggatgtgtgtgtgcgcactcgcccacgtctcgtgttttacttttcatttaagtcgtaataaggagaaattcgatgaccagcaaggctggagtcccatcgtcttgttgggggagaggggggagaagaaaaaggtgcctgtaacttcagactgtccaagatatcgcttagctcctgcgcccggaagaaaatccagcgcaggtcgggttccggcgcgcggaagccctgcgaaccccaaatgtgtgcgctgagccgaggcctctaagcggtaggagagaatctgacctccgacattcttttcaagacacgcgccggtggaccgggtcctgggattggcttactcccgggctggaccttggggttcgcatatttgaaagcgtaaacttgaggaatgacggcggggtgatgggtattttatagagtgggactcaatcgtgctcagcaacagatttctccaaattcccttttaaaaagagcctcccagagctgtcgaaatctccgcggggtgaaagctaaacttttggagtcgctgtgtagccgggtagaggacacggcggcgcgagccggaaagataagtgtccaggcgaatgggaaaggaaagatcttaatttttgttcctactgttagctgaatgtccataaaaatcaaagggaatgcggggaagtttttattccagagcgtttccatgacacccgcagagatttaaaaaattacattcctccccctacgcaggtttaattcggaaagaagagactgcagaggagagggaagaccgtgagtctgctttcacctaggtttaaagcgaatcaaagacggctgtaaaaagggaaaccgggaccaaaaacagatttggagcctcgaaactctccattgaaggtttggaagatacgttgctgcagacttgaaaccggctccaaatccggcccaaacatgggctgaaaatatggcgcgctaatctgctgcttcccctcctcctcaagttctttctgactcttcccacctttcccagtttcccttccagacgtctgcggctccccactccacccccaggatagctactctacatcccgacaattcccagcttctacacccaggaggaggaattctggaaccacccagagcgaactcgtgccggggcggggtggggaccggaggaaggtcctgctccgaattctctccagagcagaaaagaattctagaggctacatgtgggctgctttccccccttcttccttttttccctcgcaaaccaacaaccaaaaagtgtttggtgatggaaagaacaccagtggaaaacggcaaataacagtatttccaactccgagtcaggtcctctttgcactgctttttcctgtttcattgcaatttattgattttattgtggttttttgtttatttggggcaagaacggagatgtgaaccaggacgagccagcagacccccgagccagtatctcctccctgggcagggaacaccgcctgcaccggtgcatactaggagaccctggcggagaatgtaaacaaaccgggcgccgagcccttgat

SEQ ID NO: 108022 - DNA, 1202 bp, Homo sapiens
  chr3:27755954-27757156
  hyper
gaatctgctatatcccggcagtgattagcactttggggctttctagagggcagaaataggagagcactgttttcgaaattccatcgcatctcccaatattcggtggttggatgcagatgtaagggggctgttgggggtgtggggaaggcgctgaccaggataggggggctatgagtctcccttccggaatctaaatcagtcatccacagtacatatatcttaaaaagcacatcttcaacgcttttgtccttggctccccggtaaagttcggggcgcctttgccaaagtgttttgagtaggccgttcggaaacgcggagcaggagttcgagcccccaaggtcacgggtggcgcgggaagaactcgggccccagagggacggaggggaagggagacaggacagtcgaggtacaaggtcctggcggccttaattgggcgcagaaggggaggaggtctcggctgattgctcgcctcccagcagctaatcctcttagcagctgcatttccgcgctacacagttagcagaatgatcctcccagctagacctttaccccgggagggtccaggagggggctggaaaggtttgcaatctgggcctgaagccgtctgcagataagcctggcgggacgtctggctggggggacaaaggggaccctccaccccactctttggacctcccagggttcagccaggggatgggctgtccttcgtcttcccgtggagcgtgggccaaataaacggaactaagcgcaaggtgaactgctccaaggtcactgtttgcagagcggcagtgcacggaacgactggaatcctcctttgtaagtgccacgcccgtccctagcctgcgcctcagaccgagtccgggcggagtttgactgcagctactgaggccggcagccggcggcggcgggtgcgcagcgtctgggttcagaagaaagccgcaggtgggcgcagaagctgagctgtgtgcagccccccgctccgccgcgccccagggaccctgaactggtgggcgctcaaagggccacgggggttcccagggagcctaggtgggcctaaggatgggtggccccaagtaagcctagaaaaaagcccagagaacttagtggccaggcgctctgacagagcctggtctccaagagccagaagcggaggttttcgaggcttggttaagtctgatgtgggcaatcggcagcaatcttcc

SEQ ID NO: 108023 - DNA, 1678 bp, Homo sapiens; identical to SEQ ID NO: 39017
  chr3:27762337-27764015
  hyper

SEQ ID NO: 108024 - DNA, 50 bp, Homo sapiens
  chr3:27764421-27764471
  hyper
tgtctgtaatttcgccggaatttagggggacaaagtttggggtctccata

SEQ ID NO: 108025 - DNA, 358 bp, Homo sapiens; identical to SEQ ID NO: 39019
  chr3:27764595-27764953
  hyper

SEQ ID NO: 108026 - DNA, 180 bp, Homo sapiens
  chr3:27765181-27765361
  hyper
agctgcttgtttcttcgctgcgtttcctcagatagattcaagagcggggccgtcatattttatcgtttcattattacggaagcggggggcacgtttcgttgcggataaggagaagcctgaatattcgctgttaataagcaattacagacgccgccagtaatcgctccgggagcgcatttt

SEQ ID NO: 108027 - DNA, 417 bp, Homo sapiens
  chr3:27765400-27765817
  hyper
cgatcacacgggaaactcttcgcccacaacagatgagatggccaaaggattgctgagtgcgcacacgcaagtgtagaacagtgcgaagctttccaacccagttttccaaccacagcagcaccaacatcggcatgtctggggtctccgagaacgaggtccttaatgcacttagactctccagggcatttatcacggttttttttttcttttttgatgtgtgtgttcgcgcgctcgcgcgctcgcgtgtgtgtggtggtgaaacccaggagtgcgcgaagattttcagggtcaaggcacagccacaggggagggggcaagttgagactagtgggctggggcggtggccttgtaggtcctgggacagagtggccaggagcagatcgccagaaagctggtactgagcgcgttctgccctgc

SEQ ID NO: 108028 - DNA, 30 bp, Homo sapiens
  chr3:27766029-27766059
  hyper
gccgtgcagcttgggcggcttggacgacgt

SEQ ID NO: 108029 - DNA, 620 bp, Homo sapiens
  chr3:27771453-27772073
  hyper
atttccttttctcctactcctcgctggggtttgcggtgcccctgcctcctgcatgaaagcgcgctctaaagctagggtttttggactttaggagcgcttctcgcctccccctagacgtttgaagccttccaattgagcaagggctgggaagcgagaaggctcctctggtctctccctcctctgagcgcgggacctcggcggacaccctaatcccgaaacactcctctctgggactgcgcacttgccagcacgacagccaactccgcctcagaggagtcttttagggctctgagcgagtggcgaatgctcccccggtgatgcactatcgctcccacccacgccctggtacgcgcagcccgggaaaaagaaaaaaaaaagtccacgtaggggctcaaacccaggcgtcaggcgctgcagtcagggaaggctcccttaggggctgggttcctggcgcttacgacgcagagaaggataagggcgatggtttcgcaatcccaccccctcctttgtcctcctccccacctcccagcctttggcggcttagatctccaaatgcagtctggatggcactcaggtattcgagcgccccagtttatcttatcaccgccccctacaaatac

SEQ ID NO: 108030 - DNA, 216 bp, Homo sapiens
  chr3:27772589-27772805
  hyper
ttagttccttggagacgtcggagtttttgctagcttgacatcccgggctcacaactggcgggaaatagcttaaaaattatattgatgctttgaggcctttccttgcagctgcttgcgcccacaagctgcagtcctttccccggtcagcagccggctgtcccgcaccccccggcagagcgcagagggtcgaaagatttgcgccgcagaagacgcagc

SEQ ID NO: 108031 - DNA, 350 bp, Homo sapiens
  chr3:28282838-28283188
  hyper
tgggggacggggctcggactttggcccagtcaccgagtgaggcacagtcccaaagtcctgcaggtccgcctccagtcacggccgacccgggtctgcaactggtgcacaagcctcctgaagcgaggctgcgcgcgtcctgcacggtcccgccccaaaggcacgcagacacgccccctttcctggtcattccccctgcgaagtcagttccactctagttacaggattggggcggggccagaaaggcgcaggcgcaacgggcggcggaagtaggagcctgggaaggaagagggaacgggtcctggcggtgctttgcaaagggcccgtgtttctgttgcgggaagctcccgggg

SEQ ID NO: 108032 - DNA, 30 bp, Homo sapiens
  chr3:28283441-28283471
  hyper
gcggctgcttcgcccggtctgaggtcatct

SEQ ID NO: 108033 - DNA, 30 bp, Homo sapiens
  chr3:28390065-28390095
  hyper
ccacccgtccctggcgagtcactcacccag

SEQ ID NO: 108034 - DNA, 1733 bp, Homo sapiens; identical to SEQ ID NO: 39024
  chr3:28616515-28618248
  hyper

SEQ ID NO: 108035 - DNA, 162 bp, Homo sapiens; identical to SEQ ID NO: 39025
  chr3:29322327-29322489
  hyper

SEQ ID NO: 108036 - DNA, 355 bp, Homo sapiens
  chr3:30647758-30648113
  hyper
aagctgaggggaggcggcagatgttctgatctactagggaaaacgtggacgttttctgttgttactttgtgaactgtgtgcacttagtcattcttgagtaaatacttggagcgaggaactcctgagtggtgtgggagggcggtgaggggcagctgaaagtcggccaaagctctcggaggggctggtctaggaaacatgattggcagctacgagagagctaggggctggacgtcgaggagagggagaaggctctcgggcggagagaggtcctgcccagctgttggcgaggagtttcctgtttcccccgcagcgctgagttgaagttgagtgagtcactcgcgcgcacggagcgacg

SEQ ID NO: 108037 - DNA, 262 bp, Homo sapiens
  chr3:30648803-30649065
  hyper
agcagcggcccggagcggcagcctgagctgccaaagcagccagcgcacctgggccactccgcccatggcgatgccgcgtgcccacccagctctttctgagccacccgttcaaaaggccagctcctcagtccttagctcctggagacggccacgctttccctcaggccggcttcttggcccggagtttttggaaacaagtttcaagaaaataatcgatttccaaaagaaagttagctggctccactgacgccttggcatggat

SEQ ID NO: 108038 - DNA, 30 bp, Homo sapiens; identical to SEQ ID NO: 39028
  chr3:30682923-30682953
  hyper

SEQ ID NO: 108039 - DNA, 30 bp, Homo sapiens; identical to SEQ ID NO: 39029
  chr3:30804983-30805013
  hyper

SEQ ID NO: 108040 - DNA, 30 bp, Homo sapiens; identical to SEQ ID NO: 39030
  chr3:31064170-31064200
  hyper

SEQ ID NO: 108041 - DNA, 277 bp, Homo sapiens
  chr3:31574047-31574324
  hyper
gcttgagctccgcccggactccagggggctcctccccctgctcctttcggctgggcgggcggcgggctagagagggaatgtcattgcttctcagagccgtggtgccgcctccgtctgctgcttctttcctggcgccctcgtcccgtcggctttcgccgccgccgccgcagctgcactggggatacggatggctagtggggcgccggggccatctgggttgagagagcggcgattgcggccgctgctgaggcggagactccccgccgccgcttcctcc

SEQ ID NO: 108042 - DNA, 30 bp, Homo sapiens; identical to SEQ ID NO: 2458
  chr3:31575314-31575344
  hyper

SEQ ID NO: 108043 - DNA, 43 bp, Homo sapiens
  chr3:32023041-32023084
  hyper
ctgcagggtgggcacgccctaaatccacgccaagtcacccacg

SEQ ID NO: 108044 - DNA, 161 bp, Homo sapiens; identical to SEQ ID NO: 39032
  chr3:32148436-32148597
  hyper

SEQ ID NO: 108045 - DNA, 182 bp, Homo sapiens
  chr3:32279558-32279740
  hyper
cgccctcaaagccaagcgattaagttggttcctcaaattgttcccgacaggaggggcaggaaataacaccgggctctggcggcggccgcagcaggagggggagaagagcgggccgtctcccgggcagtgctggcggcctctcatcgatctcgggtctaaggtccggccgggtcatcattcct

SEQ ID NO: 108046 - DNA, 30 bp, Homo sapiens; identical to SEQ ID NO: 39033
  chr3:32280465-32280495
  hyper

SEQ ID NO: 108047 - DNA, 1104 bp, Homo sapiens
  chr3:32433046-32434150
  hyper
cacacatccgcagccgcacccacacaaaatcccaggaggctcagtaccagctgtggtccgggccttgcccacctcggagaggccacgacccaaggcatccggtttcctctcgctccagtctaacttccgcgcatctacgagggccgggactgccgctacctttctggaaggcgccggccggccagtcaccggagggatcccgccagaggcggctccgcgtctccagcagcggggcagggacccgggcgccccgccctcgccagcgcccgcccccgcccgcccccggcccgccctctgtatctggcccctgggcagctgcccggggaggcggccagcgagctggggccgcgcaatgtcgcacggagccgggctcgtccgcaccacgtgcagcagcggcagcgcgctcggacccggggccggcgcggcccagcccagcgcgagccccttggaggggctgctggacctcagctacccccgcacccacgcggccctgctgaaagtggcgcaaatggtaagtgagcgcggggcgcgaggccgaggttctacagggcgtcccgggaaagcaggggtccgggagcggacgcgccgggcgtctggacccggccggagcccagggagcatcgcgcagcgggcggggcaccgcgtcgctaaagttcgcggcaggcttcctccgggaaagttgctgccgcagcccccgcgctggagctcagtccccagagccgccccggcccttgctcccgcggacccaggtcgccagggtcgcaagtttctccggccacccccctgcgaagcctgacccgcctactgactgaaaccacgggcaaagttccttttcgtctttcttcctcttctctgggccgcgccgcttcgaacccgagccgggggtggaagagtcgcccaggcggcggcgctgagggagcgaaacccgacctcttccccgtccacggcctcctctttcctccgaacccagcgcggcagggcttccctgctctgtgtgcagtttcgctcgaaggaggaggtcagagggtcttgtgttccatagtggggaaaaagaactgggaccgttgagacggccgtcctggtcccctgcgccctcaagttccg

SEQ ID NO: 108048 - DNA, 173 bp, Homo sapiens; identical to SEQ ID NO: 39035
  chr3:32442877-32443050
  hyper

SEQ ID NO: 108049 - DNA, 413 bp, Homo sapiens; identical to SEQ ID NO: 39036
  chr3:32443152-32443565
  hyper

SEQ ID NO: 108050 - DNA, 30 bp, Homo sapiens
  chr3:32544061-32544091
  hyper
ccccagcccgggctcgccctccctgaccgc

SEQ ID NO: 108051 - DNA, 30 bp, Homo sapiens
  chr3:32611861-32611891
  hyper
cagggagcttggagcgcgagcgggtggaga

SEQ ID NO: 108052 - DNA, 330 bp, Homo sapiens
  chr3:32612446-32612776
  hyper
cgtggctgcctggccggcgctgaggggctgagcgtacgcgggcggcggggtgggccgctatgctgcaactgaagcccagtgatctgacagtatggaagtgctttccttccgctcatccgcggccctgggctgcggcaggggggttgggtgtgtcaggtgaaaagtgctccctcccacccttcagacaggtccccaaaccctgcggcctgcgcggaattcctgcattgtcattgccggcccacccactgttcaggctgagagcggtcccccgcccaaaccggcgcttcgccggcgccaagatagaaatgggtcgcccggctggtaaagagg

SEQ ID NO: 108053 - DNA, 30 bp, Homo sapiens; identical to SEQ ID NO: 2464
  chr3:32668904-32668934
  hyper

SEQ ID NO: 108054 - DNA, 294 bp, Homo sapiens
  chr3:32726507-32726801
  hyper
aaaggacagacgcgcgtacgtcccaccgcgtcagccctgtgaacatccagaggttccagccagagtacgtccggccggaggcggggcgcggaggggacgtcggcgtggggcggggccagtagcagttcccacgccggcgctccaggcgcggcaggctgccgcccccggaagtagtgggtaccgggacgccgtgaggcggaagctgtgtatggcgggaggctgtggcggtcccttggtggggaagctgttgctgttgctagacgacgggaactagctctcgtcacttcctcagcc

SEQ ID NO: 108055 - DNA, 30 bp, Homo sapiens
  chr3:32823170-32823200
  hyper
agaagggcggggaacgctgtcaagcccagg

SEQ ID NO: 108056 - DNA, 1240 bp, Homo sapiens
  chr3:32857718-32858958
  hyper
gagttctttaaaaaacgtaaaaagaaaaaaagaaaaggtgggtaaaaaccgagatctcccgggcagtggatatgtctcggttgagccagggattcagaatgaaatcttttcttttcttttttaaataaacggaagagtcgttctctgctcctcgctcagaaggtttcaaaggtcgtcacactgaagcccgggggcgttcatctccccagcggccgggagaagggaggaggttggagggcggagggagggagcacacaaaagcgggccgtgctgagagggctaatgtttcctgtttgcctggagccccctcccctgcctcccctcccccagccccctcccagcactcgggcggaagtgagtttgctcctttggagattaaaaggattccgaattccgatcagtcccaataaccggcgtactgaagagaagaggaggaggaggaggaggcagaggcggcaaagcagagaaagagggggcgcgcgcgcgcgcacgcaacccgaactgggggagttgtgcaaagccccaggaggccggggcacggcgggagcaaagctcggtaggcgcagcgcggccgaggccacccgcgtccggatcggcgactcctttcagaaagaagatgacgcgggcgcgagccggcggcgttggccacgcggctcccgagctcgccgcgcggggctgttgccggttccactgattccagcgcgcccgagaggagcctccatccccgaggctcgggatcggaggggggaccaaggcgagggcgaaatggcccgatgacaaaggaaatgtgatcccccttctctgccaaggtttcagagaggacggacgtgaggaggaggaggggcgcagggcgcgcgcggagctcggatagcattgcacgacggcccgcgcggagcgggtacatctaatatcttcctgccgatgaataattcagggcggcccgcggggacctgcggccccgcgcgctaagccgaaggggaaggagcgtgcgtgaggcgcccaggccaggcgaggcgggggcacgagggctccgggccgcgtggggcgcgcgtgcgtgttaagcgcgggcagccgcggcccggctgggcaggcgcgcggaagactcgaggcgcgtgggacgcgcgtgcgtactgcacgcgtgcggccgcggctgggccaccacgagctgcagctgctgcggggcccaccgccctgcaggggaggccgtgcctggctgtgcgcaagccccaagcgcagcacg

SEQ ID NO: 108057 - DNA, 29 bp, Homo sapiens
  chr3:32859255-32859284
  hyper
cgctcgcccctcgcctgtcggggcttgtt

SEQ ID NO: 108058 - DNA, 888 bp, Homo sapiens
  chr3:32859417-32860305
  hyper
gggcagcgctgctctggtgccggctcccggattgcaggcctaatcgatgcatttttctgagtgagtcggtgactcccccacccacctcgtccgctctctcctcctcctcctcctcttcctctctggtctcctccctcctccgggctgggttgcaaatggcttcgttccccgagaccgatttccagatctgcttgctgtgcaaggagatgtgcggctcgccggcgccgctctcctccaactcgtccgcgtcgtcgtcctcctcgcagacgtccacgtcgtcggggggcggcggcgggggccctggggcggcggcgcgccgcctacacgtcctgccctgcctgcacgccttctgccgcccctgcctcgaggcgcaccggctgccggcggcgggcggcggcgcggcgggagagccgctcaagctgcgctgccccgtgtgcgaccagaaagtagtgctagccgaggcggcgggtatggacgcgctgccttcgtccgccttcctgcttagcaacctgctcgacgcggtggtggccactgccgacgagccgccgcccaagaacgggcgcgccggcgctccggcgggagcgggcggccacagcaaccaccggcaccacgctcaccacgcgcacccgcgcgcgtccgcctccgcgccgccactcccgcaggcgccgcagccgcccgcgccttcccgctcggcacccggcggccctgccgcttccccgtcggcgctgctgctccgccgtcctcacggctgcagctcgtgcgatgagggcaacgcagcttcttcgcgctgcctcgactgccaggagcacctgtgcgacaactgcgtccgagcgcaccagcgcgtgcgcctcaccaaggaccactacatcgagcgcggcccgccgggtc

SEQ ID NO: 108059 - DNA, 125 bp, Homo sapiens
  chr3:33137819-33137944
  hyper
ccgcacctcacctattcgcctcgccagccctgccccgatcaacgatggcatcccccggcagcctgcctattccccccctcaacctggacccccaaacgccgaaggaaaacggtcccacaaataca

SEQ ID NO: 108060 - DNA, 30 bp, Homo sapiens; identical to SEQ ID NO: 39045
  chr3:33138261-33138291
  hyper

SEQ ID NO: 108061 - DNA, 151 bp, Homo sapiens
  chr3:33138857-33139008
  hyper
gcagcttgataacgcgcctcggggattggacatgaatcatggtctccctgttccctggctgccttgagagagcagaagagggaaattgttaatcattaaacctaaacgccctagatggaatccgcgtctcatatacgggctctttgaataa

SEQ ID NO: 108062 - DNA, 243 bp, Homo sapiens
  chr3:33155229-33155472
  hyper
tagattatatagaccgtagggccgatgtatataatctattagggccgcgtcggccttgcaggcgggtctccaagtgaatgagcggcagagtcccatcatgcgcatcagcctgcgtgaaccagtgcgcagcgcgcctttcccgggcaccctctaggtgctggcagctggcgcccagatcccccggctgggtggggaggggcggccggacggggcgggccggaggctggcgtccccgccccgaaa

SEQ ID NO: 108063 - DNA, 30 bp, Homo sapiens
  chr3:33155901-33155931
  hyper
cctgctgcgccgcgcgcactgcctcaagcg

SEQ ID NO: 108064 - DNA, 1076 bp, Homo sapiens; identical to SEQ ID NO: 2471
  chr3:33259727-33260803
  hyper

SEQ ID NO: 108065 - DNA, 171 bp, Homo sapiens; identical to SEQ ID NO: 39049
  chr3:33318844-33319015
  hyper

SEQ ID NO: 108066 - DNA, 30 bp, Homo sapiens
  chr3:33481268-33481298
  hyper
cgagaggctggcgtcgaagtcgtgcaccag

SEQ ID NO: 108067 - DNA, 30 bp, Homo sapiens; identical to SEQ ID NO: 39050
  chr3:33482796-33482826
  hyper

SEQ ID NO: 108068 - DNA, 30 bp, Homo sapiens; identical to SEQ ID NO: 2472
  chr3:33758841-33758871
  hyper

SEQ ID NO: 108069 - DNA, 71 bp, Homo sapiens
  chr3:33759876-33759947
  hyper
agccccctgggaggcgggccgttctttgctagccgctgtcagggcaccctgccctcgccctgtgaaatgtg

SEQ ID NO: 108070 - DNA, 265 bp, Homo sapiens
  chr3:33839851-33840116
  hyper
tccggggggttgttcgagtggaggaatactcttacgtgaaagtgctcagtacaccactgcggcaggaaggaggaagggaagaattccagatggggagaaagtaatattttgcagcacagtacagggtaaactgggtccaggtgggcgtagccgccgcgacaccttcacgtgaccgcggacagcttaaggaccccgcatccagtgcgcctgcgctggagctcccggaagttgccggacccggaacgcaggcggagcgcaagtctgt

SEQ ID NO: 108071 - DNA, 30 bp, Homo sapiens; identical to SEQ ID NO: 39053
  chr3:33840454-33840484
  hyper

SEQ ID NO: 108072 - DNA, 14 bp, Homo sapiens
  chr3:35680720-35680734
  hyper
accgcgggcgcccg

SEQ ID NO: 108073 - DNA, 912 bp, Homo sapiens; identical to SEQ ID NO: 39055
  chr3:35680814-35681726
  hyper

SEQ ID NO: 108074 - DNA, 369 bp, Homo sapiens
  chr3:36421688-36422057
  hyper
cccccacccagtgccggcgtgcgcccagccttcccccagccctttccagggcgctgccccctgcctgccctcactactccaggcgctggccgcgcagccccgccctggagctgcctccccgcctccttcctcctcctgcgggcgagcagaagcccgctcgcccgctgccgagtggcagtcacgactgtgaggtcgccggcgaggtggccgcgggcgcggcggggcggggcagggcgcactctcctccacgcccgcggaagtgccggggaggtgggcagggcggggagggagagggagcgaggctggaggagggcacgtcggcgcctcggcgaggatgggagtccccaggacccggagctgagcagcctg

SEQ ID NO: 108075 - DNA, 398 bp, Homo sapiens
  chr3:36422076-36422474
  hyper
cgcaggacagaagcctcgctgttcctccgggagcccaacaccgttcccgcgcggccacgatgatccctccgagcagcccccgcgaggacggcgtggacgggctgcccaaggaggcggtgggcgccgagcaaccgccctctcctgcatccaccagcagccaggaatccaaggtaccgagcacgcttgcccccaagagaacacaaactcactctcctctcctgtcggtccagctttgtctctcctcctatctagcacgggcgtgggggtctgagacttgctagttagcccagggctgtaggacttgaacgtccggtaggacccgctgctcacgatgctggaccacgtccctgtggacccagccttcccgcccacacattcacacacgcaattcatggtgg

SEQ ID NO: 108076 - DNA, 89 bp, Homo sapiens; identical to SEQ ID NO: 39057
  chr3:36805376-36805465
  hyper

SEQ ID NO: 108077 - DNA, 12 bp, Homo sapiens
  chr3:36805524-36805536
  hyper
acacacagtcct

SEQ ID NO: 108078 - DNA, 554 bp, Homo sapiens
  chr3:36805575-36806129
  hyper
cgcacggagcggggtccagagttagggcgaatgagtcctcccgcccccgccaaggtggcgcccagaacgggtcggtgccggagcgcacggtactcacccggggcaggccgcgccgggcaggctggggctggccgggccgggggcggcggcggctgcggggctggagtggcggcgggcatggcgcggcggcgggctcggggagagcctggagcagaggtggcagcgcggggacgcggctcgacggtcgagcaggcgcgggaaggcggggcgagacgagcagccacgagcccgcgccgactctccctcttctctccctcccgccgcccgccgcccgcctgccagccccgcgccgcgcagcgcccggcgacagccaccgggaacgtctccgggggcgcgggacttagcaaccgcgcaccagctgcagccgccctctctgcgccggtcccgccatgcgcgccgctcctggccctggaggccgggcggggccgggctttgaacttgctcccacaccccctgcttctccagtgagcgcccaaaggcggtcccgcctctcc

SEQ ID NO: 108079 - DNA, 1137 bp, Homo sapiens
  chr3:36985556-36986693
  hyper
ggagttgggaggaaacgcaacgcgcctcccaggcaacagactccgagctccggttcggaaacgctccgaggcagaagcaagggcttctaagggctccgcttcccagccttgggtccctactactaccttccccctagactcggtgagcccaggctgatggaccgtgcagtccagtttgagccagcccagcagccctcaatcgggcgggcagggaagaaggcctcctactgccgggaagaggccagcgcgctccaagttccccgcaaattccgcccttcccgcctggcacggttcccttgcaccgctgtgctccgctcccaggtttctgcccgccaagaatgcttgccccgggggcgcgctcgctggtcaggaacctgtcggcagcccccgggaacccctgaggatgcggaggtgggcccgagagctgcggcttcgatgccggggtgggagctaggcaggccgcgcgccgccgcagtcctgtcgcagcgcgtgccctggtccctccggaccgaaaaggccgaagccgtcccccgcgaccgaccccgcgcaactggctcgggtctgcacctagatggctgtgggccccacagggatggccgggcgggcccgttcggccgctacctcagggtcgccagtccccgcgcgcggccgcctcccgccaggaagggtggcgggcccggaaggccagagatgccccagtgcttcccgcgccgctacgcacctagctgcccgcgggtcccacatggctgcggccggagggtccgcaccaggaccgccgccgcctggggaagcgcttccctgtgggcagggcgcggcgggcagtgcggaagcccgaaagctaccggagcccggggcaggggcggcgcgatgcagaggcggcgttcgggggcccccagctgcctgcggctcggctacccagccgcgatcagagggggcgggggacgcaggaaccccggcgtccgggcggtgtgcagccgcagacctattccaagtttccacgtagttgcgagagcccaaaaactgtcacgtgcacgtcgctgctgagtgggaggaggtgtttgtcatcgcgttcaaaaggggcgtttcggtgtctcccgtcatgcaagcaaatggtatggctctcggccgcctttgaat

SEQ ID NO: 108080 - DNA, 1449 bp, Homo sapiens
  chr3:37033964-37035413
  hyper
actcagggcctacaccgcggataaagaccaggaggtagttctcataggccacaaaagcctggtcgtccaaggcaagagaataggctttaaagtccctggctcggttaaaaagctggttgcgtagattcctgtcaatgctcaggatcctctgccttgtgatatctggagataagtcaacgccttgcaggacgcttacatgctcgggcagtacctctctcagcaacacctccatgcactggtatacaaagtccccctcaccccagccgcgacccttcaaggccaagaggcggcagagcccgaggcctgcacgagcagctctctcttcaggagtgaaggaggccacgggcaagtcgccctgacgcagacgctccaccagggccgcgcgctcgccgtccgccacataccgctcgtagtattcgtgctcagcctcgtagtggcgcctgacgtcgcgttcgcgggtagctacgatgaggcggcgacagaccaggcacagggccccatcgccctccggaggctccaccaccaaataacgctgggtccactcgggccggaaaactagagcctcgtcgacttccatcttgcttcttttgggcgtcatccacattctgcgggaggccacaagagcagggccaacgttagaaaggccgcaaggggagaggaggagcctgagaagcgccaagcacctcctccgctctgcgccagatcacctcagcagaggcacacaagcccggttccggcatctctgctcctattggctggatatttcgtattccccgagctcctaaaaacgaaccaataggaagagcggacagcgatctctaacgcgcaagcgcatatccttctaggtagcgggcagtagccgcttcagggagggacgaagagacccagcaacccacagagttgagaaatttgactggcattcaagctgtccaatcaatagctgccgctgaagggtggggctggatggcgtaagctacagctgaaggaagaacgtgagcacgaggcactgaggtgattggctgaaggcacttccgttgagcatctagacgtttccttggctcttctggcgccaaaatgtcgttcgtggcaggggttattcggcggctggacgagacagtggtgaaccgcatcgcggcgggggaagttatccagcggccagctaatgctatcaaagagatgattgagaactggtacggagggagtcgagccgggctcacttaagggctacgacttaacgggccgcgtcactcaatggcgcggacacgcctctttgcccgggcagaggcatgtacagcgcatgcccacaacggcggaggccgccgggttccctgacgtgccagtcaggccttctccttttccgcagaccgtgtgtttctttaccgctctcccccgagaccttttaagggttgtttggagtgtaagtggaggaatatacgtagtgttgtctta

SEQ ID NO: 108081 - DNA, 92 bp, Homo sapiens; identical to SEQ ID NO: 39062
  chr3:37038108-37038200
  hyper

SEQ ID NO: 108082 - DNA, 100 bp, Homo sapiens; identical to SEQ ID NO: 39063
  chr3:37042444-37042544
  hyper

SEQ ID NO: 108083 - DNA, 75 bp, Homo sapiens; identical to SEQ ID NO: 39064
  chr3:37045890-37045965
  hyper

SEQ ID NO: 108084 - DNA, 74 bp, Homo sapiens; identical to SEQ ID NO: 39065
  chr3:37048480-37048554
  hyper

SEQ ID NO: 108085 - DNA, 93 bp, Homo sapiens; identical to SEQ ID NO: 39066
  chr3:37050303-37050396
  hyper

SEQ ID NO: 108086 - DNA, 281 bp, Homo sapiens; identical to SEQ ID NO: 39067
  chr3:37053309-37053590
  hyper

SEQ ID NO: 108087 - DNA, 114 bp, Homo sapiens; identical to SEQ ID NO: 39068
  chr3:37055921-37056035
  hyper

SEQ ID NO: 108088 - DNA, 95 bp, Homo sapiens; identical to SEQ ID NO: 39069
  chr3:37058995-37059090
  hyper

SEQ ID NO: 108089 - DNA, 155 bp, Homo sapiens; identical to SEQ ID NO: 39070
  chr3:37061799-37061954
  hyper

SEQ ID NO: 108090 - DNA, 372 bp, Homo sapiens; identical to SEQ ID NO: 39071
  chr3:37067126-37067498
  hyper

SEQ ID NO: 108091 - DNA, 150 bp, Homo sapiens; identical to SEQ ID NO: 39072
  chr3:37070273-37070423
  hyper

SEQ ID NO: 108092 - DNA, 110 bp, Homo sapiens; identical to SEQ ID NO: 39073
  chr3:37081675-37081785
  hyper

SEQ ID NO: 108093 - DNA, 65 bp, Homo sapiens; identical to SEQ ID NO: 39074
  chr3:37083757-37083822
  hyper

SEQ ID NO: 108094 - DNA, 166 bp, Homo sapiens; identical to SEQ ID NO: 39075
  chr3:37089008-37089174
  hyper

SEQ ID NO: 108095 - DNA, 94 bp, Homo sapiens; identical to SEQ ID NO: 39076
  chr3:37090006-37090100
  hyper

SEQ ID NO: 108096 - DNA, 115 bp, Homo sapiens; identical to SEQ ID NO: 39077
  chr3:37090393-37090508
  hyper

SEQ ID NO: 108097 - DNA, 362 bp, Homo sapiens; identical to SEQ ID NO: 39078
  chr3:37091975-37092337
  hyper

SEQ ID NO: 108098 - DNA, 178 bp, Homo sapiens
  chr3:37284436-37284614
  hyper
ccctgtgttctttgcggtgggcccgtcggccctgctgccatcgatagaagcagcactctccccgtctgatttcgcagggccaaagcccaggtgagagtcagggtagtgttcagactagcccacgctccggttctgagccgcgacggcggtctccgcacgcaacgaaatcaggcaggac

SEQ ID NO: 108099 - DNA, 1039 bp, Homo sapiens; identical to SEQ ID NO: 39079
  chr3:37493090-37494129
  hyper

SEQ ID NO: 108100 - DNA, 1 bp, Homo sapiens
  chr3:37494424-37494425
  hyper
c

SEQ ID NO: 108101 - DNA, 30 bp, Homo sapiens; identical to SEQ ID NO: 2480
  chr3:37731246-37731276
  hyper

SEQ ID NO: 108102 - DNA, 899 bp, Homo sapiens
  chr3:37901939-37902838
  hyper
gcaaggcctgaagtgcgcgcgcaacctagcaggcggaggcaagcagctcttcgcctcaggccgcccactgaaccctgcccaccgacgtcgcgccctgtaggccctcccaggccctcctgattcgtggagagcgcgcgcgagcgctcctgccccacccccgagcccgccctcctgcggcactaccccgcccccccggcttacggggctgcagagtgtggcctgcaagttggaagcgcaggacgcgggcgtccaaaggccccgacgctcccaggctgaggaggcactttgtcgtctctcccacgctctggccgtcgtcctaggcctgacagtggccagctgccttgcacaagcacagtccctgccagacttggtctgccaccagcgccttccgctcttctgccctcgacggactcccccggtccccttgctgcacagcacccgaaaatgcccactgcccaggcccctctcagtcacgacaccctcacgtgcaggaggttggtccttcaggacccgccgcccctcacgcgggctctggggccgaatgctgacgcgagtcccgccagcatccgaacaacctgagcctctggcccggtccgcagactccctctctgcacagatcactcccgatcccgctcactcctgggacccctcaagctggggagcgcagccctgggcctctccgaaccttccccacgctccccggtctccatcacagcagcgccgcgcccgggcccctctgcgggccgtctgggtgtcactaccgctcctgggcagcccccacttctgcacaccgcttccctccgcactcacgtcccaggcccctcggttccctcgcctggacgcccctcgcccagcaccttcccgagacaccctcacagcacctccgccagcacttcccg

SEQ ID NO: 108103 - DNA, 644 bp, Homo sapiens
  chr3:37903408-37904052
  hyper
ccgggcctcccgctccgcctccccgtgcgcggctctcccgggcgcggctccggggttcatggtgacgaggcggcggccgctcgagcccagcggcggcggcggcgggagctggggcgcgggcccgggccgcctctcccagagcgcggggccgggcggcgggcgcgcccaggcagcggctgcgagcgcccccccgcgccgcgcccccgcgccccccgcgccgcgcccccgcgcgcttggcttgcggggggccgggcctgcgggcggccgccgcgccgcgcacccatggacggcccggccatcatcacccaggtgaccaaccccaaggaggacgagggccggttgccgggcgcgggcgagaaaggtgaggaggggcgcaggcggccgcgggctgggggcgagcgcacaccccgcgccgctggagttcactgccgggcgccggcatgggcctgggggaggggtgcacagggcccggagggtgcgtgggtgtggggtgcgcccggaggagagcgaggctgccagagtgcgtgtgccgactgagccagtgtgagtgtgcaggggctggcggagagactgggagcgagtgtgtgtgcatctaaccgggaggttgtgagtttgtgtgcgcgcacgcccgcagagaagttgtg

SEQ ID NO: 108104 - DNA, 301 bp, Homo sapiens
  chr3:38035773-38036074
  hyper
cgcagggggcgtccagcgacctgcactactgggtcgggaagcaggcgggtgcggaagcgcagggcgctgcggaggccttccagcagcgcctacaggacgagctggggggccagaccgtgctgcaccgcgaggcgcagggccacgagtccgactgcttctgcagctacttccgcccgggaatcatgtgagtgcgggggcgaccggggcaggagggagccgtggaggcggtgccttggctggggcagtcttgggatggccatcgtccacatccctgaatggggcaagccgggaggggttgggt

SEQ ID NO: 108105 - DNA, 30 bp, Homo sapiens; identical to SEQ ID NO: 39085
  chr3:38065521-38065551
  hyper

SEQ ID NO: 108106 - DNA, 30 bp, Homo sapiens
  chr3:38066770-38066800
  hyper
aggagccggagcggcgaattctaacgccac

SEQ ID NO: 108107 - DNA, 55 bp, Homo sapiens
  chr3:38070614-38070669
  hyper
aaggagaattttggtcgttcttggatgctgtttccttccttcgccgcccctccgt

SEQ ID NO: 108108 - DNA, 584 bp, Homo sapiens
  chr3:38070745-38071329
  hyper
cgtaccgcccgcccacccaccccccgggctagatctcggacaagcctggaaacgcccagggtcgtgcccggcagtcccacccagggagccgcgggctgagattttcccagtccggagaaggggcagagaggcgggcccggggtggtgtggaggcggccgaaggagctgggggctccctgtccagggcccggaacagctttccaggggtccacccctgcagggtctcccgctcgcgcgggccaggcactcaccgtgcagggtcaggaagtcccggcccgagtccatgcccgacgggcggcgcggcgggaggggcaccgcgggactcacttgagtagcgacagcaccggcggcctggggtccgagcggagtgcggtgcagggacctgaatggaccgcggtgggaggaggccgggggtggtcccgggacaccgccccgcccccgctgccctgcgcccccgccccctgagcccgccaaccctcgtctctccccgcccccttctggggacgcgagagggagggcagagctgggggcccggaggactggccaaccctggcccgggccagcgggcgcgccccgaccagaaa

SEQ ID NO: 108109 - DNA, 401 bp, Homo sapiens; identical to SEQ ID NO: 2484
  chr3:38080607-38081008
  hyper

SEQ ID NO: 108110 - DNA, 78 bp, Homo sapiens; identical to SEQ ID NO: 39089
  chr3:38081153-38081231
  hyper

SEQ ID NO: 108111 - DNA, 154 bp, Homo sapiens
  chr3:38178728-38178882
  hyper
aacccgcccctccccgccaccgcctaccaagccctctataggagggcccacaggcaccgcccagccgagctttccactcaatgccccgcctaccttggcctaccgcagccaaccagaaggtgtatctttacgaatccccgcccagaaatgcaga

SEQ ID NO: 108112 - DNA, 83 bp, Homo sapiens; identical to SEQ ID NO: 39091
  chr3:38179800-38179883
  hyper

SEQ ID NO: 108113 - DNA, 147 bp, Homo sapiens; identical to SEQ ID NO: 39092
  chr3:38179984-38180131
  hyper

SEQ ID NO: 108114 - DNA, 30 bp, Homo sapiens; identical to SEQ ID NO: 2486
  chr3:38180464-38180494
  hyper

SEQ ID NO: 108115 - DNA, 30 bp, Homo sapiens; identical to SEQ ID NO: 39094
  chr3:38180825-38180855
  hyper

SEQ ID NO: 108116 - DNA, 30 bp, Homo sapiens; identical to SEQ ID NO: 2487
  chr3:38182009-38182039
  hyper

SEQ ID NO: 108117 - DNA, 55 bp, Homo sapiens; identical to SEQ ID NO: 2488
  chr3:38182281-38182336
  hyper

SEQ ID NO: 108118 - DNA, 159 bp, Homo sapiens; identical to SEQ ID NO: 2489
  chr3:38182625-38182784
  hyper

SEQ ID NO: 108119 - DNA, 46 bp, Homo sapiens; identical to SEQ ID NO: 39098
  chr3:38206258-38206304
  hyper

SEQ ID NO: 108120 - DNA, 183 bp, Homo sapiens
  chr3:38206942-38207125
  hyper
cggaggcgggcccgaggtggggcgtgaccagcgcagtgacgtcagcgcgctgcgtgtcggcaggtggaggaagaggggaaagtttggcccgtgcgtggggctggggtggagggcgggacagaggggctgggcccaggcaaagcttctgtcgctgctgctgcggaggccgaggacaggacgtgg

SEQ ID NO: 108121 - DNA, 30 bp, Homo sapiens; identical to SEQ ID NO: 39100
  chr3:38388723-38388753
  hyper

SEQ ID NO: 108122 - DNA, 78 bp, Homo sapiens; identical to SEQ ID NO: 39101
  chr3:38495096-38495174
  hyper

SEQ ID NO: 108123 - DNA, 52 bp, Homo sapiens; identical to SEQ ID NO: 39102
  chr3:38495213-38495265
  hyper

SEQ ID NO: 108124 - DNA, 102 bp, Homo sapiens; identical to SEQ ID NO: 39103
  chr3:38495678-38495780
  hyper

SEQ ID NO: 108125 - DNA, 1235 bp, Homo sapiens; identical to SEQ ID NO: 39104
  chr3:38496020-38497255
  hyper

SEQ ID NO: 108126 - DNA, 157 bp, Homo sapiens
  chr3:38537734-38537891
  hyper
ttgtcaccagggggcgtgcgaggccctcagcttggcgggcggtgaggcgtggggtgacggggggatggcgggggccggcatgcgcgcgcatgcgccgtggtaaaaggccggtacctcgggcaagatggctatcaagagtatcgcttcccgcctccgg

SEQ ID NO: 108127 - DNA, 402 bp, Homo sapiens; identical to SEQ ID NO: 39106
  chr3:38690810-38691212
  hyper

SEQ ID NO: 108128 - DNA, 53 bp, Homo sapiens; identical to SEQ ID NO: 2494
  chr3:38691468-38691521
  hyper

SEQ ID NO: 108129 - DNA, 212 bp, Homo sapiens
  chr3:39093353-39093565
  hyper
catcacatggctaccggccacacagcaactaacagcaccgaggaaacacaacagcctgtttaccttcagccccgccactaacccttggccaaagggaaaggggcaggacatcctcccgctctgagccacctccggaagtgacgtcggagtgtcaacatgcaagatggcggcccatcaccggcagaacacagcagggcggaggaaagtgcagg

SEQ ID NO: 108130 - DNA, 278 bp, Homo sapiens
  chr3:39148231-39148509
  hyper
atctccatccggctgcgggaccctctcctcaccctcacagcacactccgttctaggaaccccactccgtctccactctccggaagcctgctcgcccagacctccatgtagcggcatctaaaggctgggaccctccccagctgcaaacgctctcctcgaggattctgcagcactctcccggccctcccgctccccactatcccgtggctggtttgcaccggtcctctaccctcggaagcccttacgaccctacgactggcaggacgcgcgccgacgggc

SEQ ID NO: 108131 - DNA, 252 bp, Homo sapiens
  chr3:39149005-39149257
  hyper
ctgctcagcgctgacgcccaggcccatggcagcggctccgctcggcacccaggtccagtcccgctgcgcctacccggaccgacccgacgccagtagcaccgactcgctctctcggcgctcgattcctgcgccttgtgacgtgaggcgttttgttcctcccactccagacactggacgctcctagcaaccggctagcagctcggtttccaaggactgtaacgccttcaaccgcccgccgcgatagagtgccca

SEQ ID NO: 108132 - DNA, 30 bp, Homo sapiens
  chr3:39194534-39194564
  hyper
acctgctccggccacgcgaggaacttctga

SEQ ID NO: 108133 - DNA, 30 bp, Homo sapiens
  chr3:39195343-39195373
  hyper
cctaaaggcgcggacgactcaagccggcag

SEQ ID NO: 108134 - DNA, 76 bp, Homo sapiens
  chr3:39250103-39250179
  hyper
aagaacaaagaccgacgacaactttaggccctcatcagcctgaaggtggcaccagaggagtcgacacagcagactt

SEQ ID NO: 108135 - DNA, 228 bp, Homo sapiens
  chr3:39448004-39448232
  hyper
cccaaagtcacaagcgccccagatccgaccaggatgccgctaccggctacagcccagaggcccgctcctgcggcgcaagcccgccttcctgaagaaaaagcccagtcccggcagcgttcttctccggctccgcccttcttccgctcgactttctttgccattggctgacaacggagtacataaggacgtcatttcctgccgcctgtcttttccgtgctacctgcagag

SEQ ID NO: 108136 - DNA, 1643 bp, Homo sapiens
  chr3:39850393-39852036
  hyper
gcgggctcactaacccggcggttccgcagctgtgtttgggagacttgggggcgcattagcctggacagctccctgatcggtaacccctttgatgtgtgttgaatgaatgagcgtcgttagcgtagtagtaaatttatgggagaattaaagcaatccagataggggtcactacggagactttaattacccagggactgtgaagtggggaagagctgtctgtggaggagcgccacaccatgtcttagattcaggcaggccccggattctggtgacccattactctacggtcactgagggtccgggcccccaggactcagaggcaggagacaggaaaagcctgacttagaatcggggaaggacctggagtcgcacatgggggctcccgaaccgcggccccaatactgcactgcgccgcagggaagagccccgggaggggcgcgggtccccgccccgggcgcgcgcagccctgccccgcctcctcccggtgcgccccgcccctcccggcgcgtgccgcccgcgcgcccgaggtgctctggaggaaccggcccggcgggcaccccctgccccggcgcaggcgcgatcgcgggccgcccctcccgccgggcgccctgcacgcgcccccgccccgcctccgcaggctcccccgctccgggcgcctctgattggctctcggccgggccagcaggtgtcggcggtggctgcggccaggctggccctggctgcctgcggcgcgggcgcctccctcgcagccgctgctgccgacgccgctgcgctcccgcctcctgtcggttcccgggttcccgctgcggctgcggttctggcagccgagcccccgcggtgctgcagcccagctttagcgcgcagaccgacccgcgccccttcttcgccgccggcagcctctaatccacgcggcgcgttgcggcaggtgccctgggcgtactgaggcgcggtggcctgagcccggccgccatcgatgaccccggtcgcggacttgcttcaggctggccaccccccgtgagtaccgtccgcctccctcttctcccctctggcagctttgcgccactctcccctcaacgttgccgcaacttcgggggtgggtgtgtgaaggtgtggaggtgtctctcacgctcccccgcaccctgtgcgcgtccggagccaggaaccctaggcgcggccagtcagcctctgcggaggggcgaggggcgcgggtacttgaacttgctcagggatcatcgcggagccagaatcgcctctttctctcgctgctggggtgggagctcgcctctgcgtttccctcgcgttttccgatcccggatggccacgtagtgcttgggctgcggttcaccgcgtacctactgtgctgcgggcgcaccggcgggacgcctcaaaccatccgttaagcgccccgcaagcagcccagcgcgacggacctgactcaaactcttaattctgtaaaacgggggtaatcagggactctctcaaggtcacagctggtgctcagagttagaacacaggtggattgcgtctggccctcgcccgcgggctgcctggggaggggagagctgttggcggggcggtcacttcagcttcatcccgggttcctcctcatactccctttccgccacagccgccagacttgaaga

SEQ ID NO: 108137 - DNA, 117 bp, Homo sapiens; identical to SEQ ID NO: 39113
  chr3:40350786-40350903
  hyper

SEQ ID NO: 108138 - DNA, 35 bp, Homo sapiens
  chr3:40428623-40428658
  hyper
ggccgccccgcccccgccccgctatacccggcgcc

SEQ ID NO: 108139 - DNA, 30 bp, Homo sapiens
  chr3:40494477-40494507
  hyper
caggggacgggcgacggtttacaggacagc

SEQ ID NO: 108140 - DNA, 169 bp, Homo sapiens
  chr3:40494718-40494887
  hyper
ttgggtgtagcagacggggcgtggctcttcaggtagaggccgaaggggctgagagcggtcccaggcggccatcttgattcctggcatcactctcaacgtgccctccctctccgtgattggacgagcagggcgggccttccggaggcacacagccgaccaaccagagatc

SEQ ID NO: 108141 - DNA, 397 bp, Homo sapiens
  chr3:40498460-40498857
  hyper
gagaacgtgaggagcgaacagacctagccatgaataaccaacaaataaaactcgaggaaataaaaaggaactcaaatggcatgcgaccaacggaagacatagcttctgtactcttaaccctaaattactaagcgatgaccctcctgcagctttctaatccaaatcaccaaaaacaatctcgccgcccaactttgccaaaaagcaacttaacgccagccgactccgccatgttttcccagtgagcttgcgagcgcgtgcgtacgcacgcacgcacgcacgcaccaaccaatcggtgctcacgtcggtgactcgttaccgcaggggcggtgcgttcttctacacatgcgcagggttgggcgggtcttcttccttctcgcctaacgccgccaacatggtg

SEQ ID NO: 108142 - DNA, 228 bp, Homo sapiens; identical to SEQ ID NO: 39117
  chr3:40547353-40547581
  hyper

SEQ ID NO: 108143 - DNA, 31 bp, Homo sapiens; identical to SEQ ID NO: 2500
  chr3:40547838-40547869
  hyper

SEQ ID NO: 108144 - DNA, 179 bp, Homo sapiens
  chr3:40566233-40566412
  hyper
actccagccagaggcgatgccgacggctgccggagaaagccgggcttagagcgccacagttccacgcccgccgccggcctctcagcccagccggtcgccgcaacctcgcctcttccgcagggcggggccagccatgaaaggcggggcgggtctggccacggggcgaccgagatggcggc

SEQ ID NO: 108145 - DNA, 30 bp, Homo sapiens; identical to SEQ ID NO: 39120
  chr3:40924946-40924976
  hyper

SEQ ID NO: 108146 - DNA, 183 bp, Homo sapiens
  chr3:41240160-41240343
  hyper
tgcgggcttggcgcccgttctacggagagttcacagccttcgtgagtggggacagaaggcggctcggcccggtgattcaggtcgaaattcaagctgaacagcctgctgagaggtgggatccaccatccggacagtggggggctttgggggtgctgtgagactgggctgcgacccaggtccagc

SEQ ID NO: 108147 - DNA, 92 bp, Homo sapiens
  chr3:41240628-41240720
  hyper
gcgcggggcgggggcgtcgggcttgggacaggggaggataccagggccaccttccccaacccaggccgcgggggcccggcctccccgatgca

SEQ ID NO: 108148 - DNA, 55 bp, Homo sapiens; identical to SEQ ID NO: 39122
  chr3:41240947-41241002
  hyper

SEQ ID NO: 108149 - DNA, 30 bp, Homo sapiens
  chr3:41241597-41241627
  hyper
ggcgagttggggttcgggcgctgaggcaga

SEQ ID NO: 108150 - DNA, 42 bp, Homo sapiens; identical to SEQ ID NO: 2502
  chr3:41266109-41266151
  hyper

SEQ ID NO: 108151 - DNA, 47 bp, Homo sapiens
  chr3:42003538-42003585
  hyper
cacttggctgctcccgcggttgcgcgcatctcggcctctgcctcagg

SEQ ID NO: 108152 - DNA, 30 bp, Homo sapiens
  chr3:42055705-42055735
  hyper
gcggcgtgagaggccgggcgccgggaccct

SEQ ID NO: 108153 - DNA, 30 bp, Homo sapiens
  chr3:42056369-42056399
  hyper
ctgtgagtgtgtattcgggactggtaacct

SEQ ID NO: 108154 - DNA, 162 bp, Homo sapiens
  chr3:42056667-42056829
  hyper
tggaatggtcatactcggttgctctttgatcttggacctcagctttgtcacagaggttcccagcccagtgtagcctaagccagctggaaagctgagcccggctctgggggatgctgaatcggtttaaagcccttgtctcagggctgcgagtttggcaacagt

SEQ ID NO: 108155 - DNA, 51 bp, Homo sapiens; identical to SEQ ID NO: 39125
  chr3:42304892-42304943
  hyper

SEQ ID NO: 108156 - DNA, 414 bp, Homo sapiens; identical to SEQ ID NO: 39126
  chr3:42304981-42305395
  hyper

SEQ ID NO: 108157 - DNA, 855 bp, Homo sapiens
  chr3:42542854-42543709
  hyper
cctccttcaggtagccgcacattctgctcagggctctgggacccgctgccctctccgcctctccactgaactccgcctctccttctgtcacacggctccgccagccactctatcctgccgccgcgaccacatctccagcctcgattgtgcaggctcgagcccgtagaaagagggctagcagccacctgcgcttggtccacaagaagacgcgctcccagggcgcagagctggtgaccccgctccccatgccagggacgaataaacgagaaaaggggctgacccggtgtcacccagcggccgagcagccgccccttggaagctcagcaccaaaggcaggcggccagggtcctggcccctctctggaccccagtatccccagctgtaaaatagggaatgcaggaggaggacgacgtctgtggatcgttttaggtcagctgcggagtcggcctgcgggctgggagcagacctcgctccccacgcgagggcgctggcacttcagcccagcctccctggggaggtgccctggacgagacccgcgagggtgcggacacctcatcctccctggagcaggtctcccgaggcttgaagggccagggcacccaacaggtgctgagcgcgccccaccaggtcacccgggagcagggaacaccaaggaacccagagtcgggcctctttcgagccctcgcttcctctcgcctggcttcttcggcgcgaaggatgaattggggttgttgaaaattgatcaaacaacccgatctctgtcagcgcctggacacttgctgggccccagctcgcagcctgggaagataagtggcacttcctgtctcgtaatcggatttgcgcgcacgaaccctc

SEQ ID NO: 108158 - DNA, 30 bp, Homo sapiens
  chr3:42544086-42544116
  hyper
ccagccctgagctgcgcctcttagctctgg

SEQ ID NO: 108159 - DNA, 30 bp, Homo sapiens; identical to SEQ ID NO: 39128
  chr3:42622935-42622965
  hyper

SEQ ID NO: 108160 - DNA, 644 bp, Homo sapiens
  chr3:42623200-42623844
  hyper
cccatggtcaaggccgggactgagggccgggtgggccctgggccgcctccacctctgggcccgccctgcgccacaccctaacccgcctgctcttggctaacgggccgcggcacccgcctccgcccgccagccctcacctcgcccggacggcggccttcggaagtcggcgcctgccagctacccgccgcctcctcagcaatcttagccgaccgggagggctcggcccaggtcaccggcagcccaggcgcaggtaggccgtggtgcgcgtgcgcgagtcttgagccaccccacctcccccctaccccgcattcgctgctgctaagcgacacccgcacccaaaccgaccaatcccggcgcgcctccacagcccccgtcccggcgaaggcgcgaacgtagtggttcttaaagggctgcgacccaaacggagagggagtgtgacgggggcgcgcgcctcccaactttcttcccacctcccggctctcaccgcggcggtttgagatccaagcctgtaattctcacgtccggaggtgagaaggagccttcgtgatctaagctcgattcctgccggggtagcaaccggactgacgtctggaggcggggaggctccgcgtgacagagtgataacgcccggggcgtatgttctg

SEQ ID NO: 108161 - DNA, 30 bp, Homo sapiens
  chr3:42632360-42632390
  hyper
ggcggtcgtggttccggaggttcctcggga

SEQ ID NO: 108162 - DNA, 30 bp, Homo sapiens
  chr3:42632607-42632637
  hyper
atcagcacaggcgccggggcaggaccccgg

SEQ ID NO: 108163 - DNA, 46 bp, Homo sapiens; identical to SEQ ID NO: 2506
  chr3:42641735-42641781
  hyper

SEQ ID NO: 108164 - DNA, 143 bp, Homo sapiens; identical to SEQ ID NO: 39131
  chr3:42642018-42642161
  hyper

SEQ ID NO: 108165 - DNA, 30 bp, Homo sapiens; identical to SEQ ID NO: 39132
  chr3:42642574-42642604
  hyper

SEQ ID NO: 108166 - DNA, 30 bp, Homo sapiens; identical to SEQ ID NO: 39133
  chr3:42695565-42695595
  hyper

SEQ ID NO: 108167 - DNA, 385 bp, Homo sapiens
  chr3:42696176-42696561
  hyper
acggcaccatggtacgcagggccctgcctgtccccccgcttatccgcccacctgccagctctgacctcccaggcacacggcccgcgggcccgggtggaggggctggagggatcttcccccctcccccggtctcccggctccatctgctgggtcccgcgggccgggaatgcggcgctgtggcgctgctctcggtggggagggggttaaattcctgtggtgggggcgccggcgcgcgaggctgaggtcttgctaggcaccggcgaaggggggcgctcccctgcgcccggacggcgccgccctcgggctgggtaatggggggaagagggagtcggattcccgcctgggccttgggccacgtgggcgctggagccgccctgcctgggga

SEQ ID NO: 108168 - DNA, 759 bp, Homo sapiens; identical to SEQ ID NO: 39135
  chr3:42814257-42815016
  hyper

SEQ ID NO: 108169 - DNA, 34 bp, Homo sapiens; identical to SEQ ID NO: 2509
  chr3:42845261-42845295
  hyper

SEQ ID NO: 108170 - DNA, 303 bp, Homo sapiens
  chr3:42845896-42846199
  hyper
ggctcgcagtcccccggcttgtttcgcttacctagagcgagaaaacctctcacaccccaaccggcttccgatccctgcaggcgcacccagtcctcccggcttctccccacccacagccgtcccagccaatcagaggccagcggccgcaaaaggacgcgtgcgtgtgcgcggcgggtggggcagtgcagagcgggtcctggattggctgggccggtgagtgctggcccactaccccggctctagcgtactggcggagacagacgtgagagctcggcgcctggggttcgcgcccgggcacttgag

SEQ ID NO: 108171 - DNA, 105 bp, Homo sapiens; identical to SEQ ID NO: 2511
  chr3:42922531-42922636
  hyper

SEQ ID NO: 108172 - DNA, 30 bp, Homo sapiens; identical to SEQ ID NO: 2512
  chr3:42922845-42922875
  hyper

SEQ ID NO: 108173 - DNA, 326 bp, Homo sapiens
  chr3:42947482-42947808
  hyper
cctgcacccctaccccggtagcggtccctgggatcgtccgtgtctccaggagaaccggaccgctctcccctccctccccgagcgagaaaggaggaccacagagatgcggcgccctccgccgtcctagagcaaccggagcggcccgagccccggcctcccggatgctggggcctggcgggtgtggagcacggggagtcgggcgtggggcgggcagggagtggagtcggggtcttactccggtggctgcagggcgcagggtagccgtgtcaggcctgcccaggtgcagagcgctcttccgcgaccccaacagcctctggtccggtctg

SEQ ID NO: 108174 - DNA, 230 bp, Homo sapiens
  chr3:42947832-42948062
  hyper
cgacctgggctatggcggccgtggcgctggcgagcgggacacgcctcggccttgtcctcgagctgctcccgggacagcccgcgctgccccgggcgcgccgggtgagtgcggggccggagcctggaagcagtcttggccctgccctgggttctaggcccggagacggggtggtgcggcggctgggaaatgggggtacaacccagagtgaggggcctcgagggacaggcagc

SEQ ID NO: 108175 - DNA, 726 bp, Homo sapiens
  chr3:43020688-43021414
  hyper
agaccagaagactgcggctggccgagcccccggcagggcttttattgtgaagggagcttccccctcccgcgctttcaggggaatggggaagctgggccgggacgcgcggcagggactttgcaaactctgcaaaagtcccgagtagaccgcagaggctcgcggccgcgggtaggctccctcagatccccgtagatctcagtagatccggcgtgtattccccacccgcggagtatcccggtgtgcagcgatctcccgagagttggcgcagggccacttggctgcagagaacgtgtgcaccttcagtccgggaaacccgccccagccgagtagccgcgcatcctgggaagcctggcgagccacggcgccgggggcggccaaggggaggcgggatgagtctgcgagccggctgagcgcgccgaggagccggccggggcaccgccggggacatggtaggactcgcgggaaggaacgcgcgagcggagggtggggcgatcaccaggacaggtggctgcagtcaacgcgcagcggcccagggcgcgcgcagcctgcgcggcctcccgaggccggagttgttccccgaaagttgcatggggcggcggcggctttcatttctgcaccagagctgggggcgatcggctttcctgccgctcttagtggggcggaccgtaataagggggcttttattactaatctgcactccttgacctaaccgtaacccactcgcaa

SEQ ID NO: 108176 - DNA, 704 bp, Homo sapiens; identical to SEQ ID NO: 39144
  chr3:43147023-43147727
  hyper

SEQ ID NO: 108177 - DNA, 30 bp, Homo sapiens
  chr3:43329331-43329361
  hyper
gttaatttataatctcgttacattgctttc

SEQ ID NO: 108178 - DNA, 30 bp, Homo sapiens
  chr3:43431410-43431440
  hyper
aacaaaacaaaacagcgggttgagtcagag

SEQ ID NO: 108179 - DNA, 38 bp, Homo sapiens; identical to SEQ ID NO: 39145
  chr3:43662918-43662956
  hyper

SEQ ID NO: 108180 - DNA, 215 bp, Homo sapiens; identical to SEQ ID NO: 2516
  chr3:43663333-43663548
  hyper

SEQ ID NO: 108181 - DNA, 30 bp, Homo sapiens
  chr3:43663851-43663881
  hyper
ctgtcactccgagccggggcggcatgtggc

SEQ ID NO: 108182 - DNA, 360 bp, Homo sapiens
  chr3:43731958-43732318
  hyper
aggctcctgtgagtcgccctctccccctggccccccaacccgcggggaaaggctggcgggacgccacacagcacctcgattacgccatttcatttgccactgcaccatctatcggacactagctaggctcttccaggaccggacgcacctccgtccccaaggtgccacctgacagccaacaccgacggggtgatgcatgaatacagtcattattcaaattagctaaaacacctaactcattcgggtgagtctcgccagtccctctgggctgactgtcccgccccgcgcttacacccgggagcgtcgggcgggagaactagtgcatgctggctggggatggcggacgcaaagccggaggca

SEQ ID NO: 108183 - DNA, 30 bp, Homo sapiens
  chr3:43732978-43733008
  hyper
cccatcgcggcttccgtctacaggtactac

SEQ ID NO: 108184 - DNA, 30 bp, Homo sapiens
  chr3:43733219-43733249
  hyper
aagatagagatacacgttcaaatgtcataa

SEQ ID NO: 108185 - DNA, 31 bp, Homo sapiens; identical to SEQ ID NO: 2518
  chr3:43811143-43811174
  hyper

SEQ ID NO: 108186 - DNA, 481 bp, Homo sapiens
  chr3:43935655-43936136
  hyper
cctcacttcctcgtccggaaattgaagctaataagagcactgacttccctgggcggcggttgaaggctacctgtgtggatctgggcacagcgaagagcggagccttaacagggtgagcacgccggttgcgcgctctccagagcagcccagcatctcccgccagcctcgctgcccgctccgccccggcgcaggggccccaagcccacaggcaacgccagcgcgctcccaaccgctggagacagaaacaatgtgcgcgcgcacacggcccacgtgcacgcgcgcacgcccacgcggcatacaggcgcgcacgtgcacacgcgcgcctgcacagctctgcggctctgctccggccccacaggcccatcttaaagtgtttcgtgctctaacttaccaaacacgtggcagccggcagaacgaaaaggaaaataaatgaactgcgacgaaataaagcaggcctttccgcagtcggccacgtccaaca

SEQ ID NO: 108187 - DNA, 30 bp, Homo sapiens; identical to SEQ ID NO: 39150
  chr3:44035436-44035466
  hyper

SEQ ID NO: 108188 - DNA, 3812 bp, Homo sapiens; identical to SEQ ID NO: 39151
  chr3:44036213-44040025
  hyper

SEQ ID NO: 108189 - DNA, 1049 bp, Homo sapiens
  chr3:44040056-44041105
  hyper
cggcttcctgggaaggatcggggactgcagctcccgcgacgcctcctcctcctgcgcagggagcaggcctgagttcctccacgtaatgacctgggagacctcaggcatcccggggcctggtcggagggtcttcgggccctggagctgggcggtgtctgcagtgcaccgccgtgagtttctctcgggtacaatgtgctggtgtgcagagaggaggaaaggaaaaaaaaaaaacccaacaccactcttaagtggcactggcatctatgaagtggcagtggtctacactgagcgtgcccttgcctggaggtgtagggggcggttactgcagccgaggggagggtactgcggccaagggcagggcgagaggacagtcaaggccggctggccgcgtgggagcctttcctctccgggttcagcggccggaatcaccagcactgcggctaaaggggctggtaggctctcctgcaccccgcgtgctcctccgccttctctgtgtcccccggcttttccaggaggaagatggggtgcccatcgcgaatggggcgcgccgggccgcctggccgggcggtcacgtgtcccccctcccccgccactgcggcgggagttccaatcagagcgcgccagggggctcctcccgggcaggaaccacccggctcggcggcggagggtgggccgccgtcacctgaccgcccgcccccgccccccgcgagtaaggggcggtggtagcgtctgctcggttacaaatggcccctcccgcccggctcgcccgctcgctcgggctcggcgcggacccgcctgggcgtgctcctcccgccggctccaggcgtcccaccgccctgcccggcgccagcccgcggtcccagccactcctgagggcgcgccgggcacccagcgcgtaggctcgcccacggaggtcgacacggaagtctggaccgccgaggcgtgtggctcgtctaccggcaggtgagcgtgcaccgcgggcgtgggatgctgtggggacagtgcgggggacgtgtggggtcttcggatgcgaacgcgagtccgtgcga

SEQ ID NO: 108190 - DNA, 831 bp, Homo sapiens; identical to SEQ ID NO: 39153
  chr3:44063211-44064042
  hyper

SEQ ID NO: 108191 - DNA, 30 bp, Homo sapiens; identical to SEQ ID NO: 39154
  chr3:44379518-44379548
  hyper

SEQ ID NO: 108192 - DNA, 51 bp, Homo sapiens
  chr3:44379863-44379914
  hyper
taccagggtgctgacgtcagctagaggcagggcaccgcggaaggttgaatc

SEQ ID NO: 108193 - DNA, 30 bp, Homo sapiens; identical to SEQ ID NO: 39156
  chr3:44380123-44380153
  hyper

SEQ ID NO: 108194 - DNA, 243 bp, Homo sapiens; identical to SEQ ID NO: 39157
  chr3:44481212-44481455
  hyper

SEQ ID NO: 108195 - DNA, 233 bp, Homo sapiens; identical to SEQ ID NO: 39158
  chr3:44518641-44518874
  hyper

SEQ ID NO: 108196 - DNA, 30 bp, Homo sapiens; identical to SEQ ID NO: 39159
  chr3:44552042-44552072
  hyper

SEQ ID NO: 108197 - DNA, 583 bp, Homo sapiens; identical to SEQ ID NO: 39160
  chr3:44596540-44597123
  hyper

SEQ ID NO: 108198 - DNA, 580 bp, Homo sapiens
  chr3:44626178-44626758
  hyper
gccacccagatgctcggtctctttccgccctaaccaagccccctgcccagcttccaccacttccagggccctcctcacattggctgaagtcgccaagcccttccatccaatgatagggcaaagcccggaagggaggcagggccagagcgtcggccgaccgcgcggggcttctgaggggcggggggactccagcccgcgggcacagagatgtggaaacctcacgaagcctagaagggccggagggacaggctgggagttagctgggagttgctgacgcagttccttctgcgctttgttcaagatgtgggtctggcgctttcggtgaggggtgctctacagtctggcgtggggggtcgggccgggttctgggagcgtgtgggagacgcaagccaggaggccagggctcctctgcggctgcccgctgctgagatgggcgcggcagccaaggggtcgttgtgggcctcccctttctctcgttcagtgctgcccctttgtcttgggtccagtctctgactcctcgtagctgctcgcttggaccaggctggccgtggtgacagcactgtgtcgtccccgctcctag

SEQ ID NO: 108199 - DNA, 566 bp, Homo sapiens
  chr3:44666347-44666913
  hyper
ccggtctgaaacagcggccagttcttgttcgatgtaaggaacactagtacccaagggctcaggagttccgcctctcttccccagttctgggaaaagaaacgaaccatagagatgtggcttcctagagatccgggatgaggggcggggtgcaaccggaagtcgcagtattctcggctcggccattattctgtgcctcggctgccggaagggctcgttcctgtgtcatctcctagcggcctggcgccgaggcggcggtacgcaaggctggagccgcagcgggagcccccggtgagcggggtgggctcgggggcgggtgggcgtgcagggaaggcggcccgggacgcgggcctgagcttgctgggactgcacagccctcggtagcctctcccgggccctgacccccggcatggtccgtcgccagcttcgtgttggggttcgacgtcgtggcctcggctgggcaggcagccggcccgagggaagtactgaggacagcagctccgagtctgtgtgtgtttgtggaccggtgctcctgtctaacggactctgctggcgctttgagaagagct

SEQ ID NO: 108200 - DNA, 624 bp, Homo sapiens; identical to SEQ ID NO: 39163
  chr3:44690078-44690702
  hyper

SEQ ID NO: 108201 - DNA, 327 bp, Homo sapiens
  chr3:44726882-44727209
  hyper
ttgacgagcgactttccccttacatcaagtgcacagtaagcccaagcgccggggccgcggggattcccgccagtcactcccgccactaccgccacccggccccgccgccagcgcagcccgcagccccggcaagcctgcgcccgctcggccccggtctctttcgctcaccagaggctacggggcgcccggccccgcacacccaagaaacactgccaccgcgacgcgcctgcccccaggatcctctcgcgagcttcagtacccaaggaagatgggccgtcccggaagtgcggccggggcgacttgcaggcccctcgccgaccgctctag

SEQ ID NO: 108202 - DNA, 328 bp, Homo sapiens
  chr3:44754084-44754412
  hyper
atcagagaatggatgcgcgagctcgctgctgacgcactaccggccgcgccaccattcttccggtttcagaagttaaggctggtgtcctggccccagtccacctctgggagcgcctgcgccgctccgcggagagtccgtggatctcacagtgagcgagttgggacccagggaggggaaaagagaggaccccggcgagccattgctggggcggcgggctggagggttatctgggaagtcagccccggcctcggtcctctccacgttgctgcctacgcgtgctgcccggacgtagggcactcctagcggctcggcccgcccagcctgcagc

SEQ ID NO: 108203 - DNA, 338 bp, Homo sapiens; identical to SEQ ID NO: 39165
  chr3:44770921-44771259
  hyper

SEQ ID NO: 108204 - DNA, 806 bp, Homo sapiens
  chr3:44802847-44803653
  hyper
gggtccgagttccaccggaattgggttcgagcgcgggtgaaaagagggacccgacagcacccaccctccaagtagaggcaaaagttgaaagtggcgggctggctgcgcttccgaagaaacacgactggcgaaggctcaccttagtctctacggtgggtccctccctgtagccgacccgttccttgaagcgggccagaaacgccggctcggctggccgcacgtacgatacctggttccgcttgctcatggtagctctgggtaaagacagaagacaggttccgcgacggattcgcgacgatacagaggcgcttagctgtgacgtcactgggccacgcccccgatgcgtaggccgggcaacatggcggcctccatgcgggcgtcaacgtccgatccaagcgccaaattcaaatttgcggccatcttgagcgggcggaattcagtcgcgcgcggtgcagtcgggaggtggaggcaccggctgcattgttttcgggatcgaggggtgagggcgctatggcacccggctgcaaaagtaagtctgggcccccggcttcgttaccctatttttgcccccaaatacagctgtgaaaggatggcagcctcggaccgcccgcaaggttcttgctaggcatgaactgcaggagctgagtgaccggcggggacgtttgggaatcccgctctgtcgctcaaagacaatacgctagccgaaaagctcatcccttccttcagtgtcctgtgcgcatgccaggagtctggcgcagttctaggcgctcgggatgagcagtggacctgacgttcttccctttctt

SEQ ID NO: 108205 - DNA, 30 bp, Homo sapiens; identical to SEQ ID NO: 39167
  chr3:44903536-44903566
  hyper

SEQ ID NO: 108206 - DNA, 30 bp, Homo sapiens; identical to SEQ ID NO: 2533
  chr3:44931198-44931228
  hyper

SEQ ID NO: 108207 - DNA, 189 bp, Homo sapiens
  chr3:45017825-45018014
  hyper
ggtagctacagcagcggcgttgggtcggccgccgggttcagcctggccctgcgggtcgcggcctgccctgggtttgccagtgaggaggcagccgagctgcggcgactctccgtttaccttgtgattaaacggttctgctgccggcgtttgcaattcagagctggcaacgtggacgtttttaggactgtt

SEQ ID NO: 108208 - DNA, 411 bp, Homo sapiens
  chr3:45186916-45187327
  hyper
cacaggtcactgggacgtgttggtcccttcccccaaccgaaacaactcgaaattcacacatatccccggaacaacagcctcctgccctcaaagtccactgccaaaaagtgcgaggggcgcgggaatgtccagtctctgcggtggcgcagatgcctggcggctttctctgggaccccctaaaagaaatccgggcgctttcatttttgcaccaacgctcttcaactttaggagagggggaatgcagcgtgcggacgggaaaaaggggatctagtgggaaatgcggacgtgaaagcactttttttgcaccttctctctggaccaggcgaggaggtagagggcgagcctggagaggaaagatctcttcccacaccctgcctgggtgctttcaagaatcccggcaaagaccctggg

SEQ ID NO: 108209 - DNA, 16 bp, Homo sapiens
  chr3:45188139-45188155
  hyper
gcgaaggtcgcccata

SEQ ID NO: 108210 - DNA, 30 bp, Homo sapiens
  chr3:45267961-45267991
  hyper
gatcgcccggggtgcgtgcgggcgggcggg

SEQ ID NO: 108211 - DNA, 30 bp, Homo sapiens
  chr3:45430530-45430560
  hyper
ttcacgttagggctcggaggtcctcagaaa

SEQ ID NO: 108212 - DNA, 30 bp, Homo sapiens
  chr3:45635436-45635466
  hyper
gctagagcgtgggacggacttgtggggcac

SEQ ID NO: 108213 - DNA, 33 bp, Homo sapiens
  chr3:45635675-45635708
  hyper
cgcgcgcgccgatccgccgccgccatcggacaa

SEQ ID NO: 108214 - DNA, 30 bp, Homo sapiens; identical to SEQ ID NO: 2535
  chr3:45636045-45636075
  hyper

SEQ ID NO: 108215 - DNA, 30 bp, Homo sapiens; identical to SEQ ID NO: 2536
  chr3:45729879-45729909
  hyper

SEQ ID NO: 108216 - DNA, 88 bp, Homo sapiens
  chr3:45730474-45730562
  hyper
ggcaaaacagacatcgcgagccagccaggagtcgaacctagaatcttctgatccgtagtcagacgcgttatccattgcgccactggcc

SEQ ID NO: 108217 - DNA, 78 bp, Homo sapiens
  chr3:45730623-45730701
  hyper
cgggtaccaacgatccattttgcccttgcgccgcgctcccgctgctctgcctttccccaaaacgcgccccaccaatcc

SEQ ID NO: 108218 - DNA, 73 bp, Homo sapiens
  chr3:45730960-45731033
  hyper
gcgacggcggcctacgagcagctgaagctgtgagtcccacgggccagaggcctgaggcgcggcgggcggggcg

SEQ ID NO: 108219 - DNA, 713 bp, Homo sapiens
  chr3:45837556-45838269
  hyper
gcccccgggatggggcgaggggttcccgagggcttgggagggcggcttgggagagagctccggctccggaacgaggtgtcctgggaacactcccgggtctgtaacttcggacaaatcacgctcgctttcccggcctcagtgtgccgttctgtaacttgggtctaaccccggctcgcacacacggcggggacgcgcacagagttgggctggggccggggcgcggtgggcactcacctccgccgtacatctggcacaggtacgggaatcgccacacgttgcccaggcccacggcgtacgagatgcaggcgaacacgaactgtagcgagttggcccacagcggccgcgctttctccatggccccggcctcggcgcgctcggctccggctcgggggtccggcacggcagtctcagtgcgcggtcgccaggcgcgccgtcccaccccggctcggcttgggggtggccccgcgcctccgccgccgacgcagctagctggtttttaaattgctaatctcattaacggcgcgcccgtccgagaggcgaggctggtaaatggatgacggcgagccccaccccgcccgatcgtcgcggccgggaaggcacccgagattgcagaggacagggcggagtcccctggggtcctccggctcggcggggcctttcttcaggctgcggaactcctcgaagtgggcgccttccctcggccactcacctgt

SEQ ID NO: 108220 - DNA, 30 bp, Homo sapiens
  chr3:45883366-45883396
  hyper
gcggccagacccaacgaggccacgtaatca

SEQ ID NO: 108221 - DNA, 30 bp, Homo sapiens; identical to SEQ ID NO: 39175
  chr3:45883613-45883643
  hyper

SEQ ID NO: 108222 - DNA, 30 bp, Homo sapiens; identical to SEQ ID NO: 39176
  chr3:46036556-46036586
  hyper

SEQ ID NO: 108223 - DNA, 69 bp, Homo sapiens
  chr3:46037442-46037511
  hyper
cccagtccccggaccgactgtcccacccgcgacccatgctggccccaggttaacgcctgcaaccccgga

SEQ ID NO: 108224 - DNA, 30 bp, Homo sapiens; identical to SEQ ID NO: 39177
  chr3:46735439-46735469
  hyper

SEQ ID NO: 108225 - DNA, 30 bp, Homo sapiens; identical to SEQ ID NO: 2537
  chr3:46774362-46774392
  hyper

SEQ ID NO: 108226 - DNA, 88 bp, Homo sapiens
  chr3:46854158-46854246
  hyper
gtcctctctctcttcgcagctctccgtggactcagggccctccacctcatcgggagcctcccaggcactcagcgtctcctggcctagg

SEQ ID NO: 108227 - DNA, 30 bp, Homo sapiens; identical to SEQ ID NO: 39179
  chr3:46866850-46866880
  hyper

SEQ ID NO: 108228 - DNA, 501 bp, Homo sapiens
  chr3:46886709-46887210
  hyper
ggaggaaatgagtggcgagaggttaagcaatttgccaagatcacacgaggcaggagtaaagcggggcttgaacccagggccctgggcagggctggggtgcgggggctggcagggtatcgacccagggtacacaacacagcagtcaaacagatagacagagttttggatgagccaacggctgagatgggacgagaagccagcgcctcctccctgcgcgtctgtctgcaggccaggggctcacacgggagccggctcctgccccctggcccagggccagccgtcatccccatgaggtcagccacagctggcgatttcggggaaataccagctccttattaaaaacaggcggtggtcaggcccccgctgctttcccagtagaaactggagtgtttgttccaaaaggaacaagagtgggcagggcctggccagggccctgaggcgggaggcttgagctgcagtacctggtcagggtgtcccgggagctgcggggagaggaagtgg

SEQ ID NO: 108229 - DNA, 30 bp, Homo sapiens; identical to SEQ ID NO: 39180
  chr3:46887958-46887988
  hyper

SEQ ID NO: 108230 - DNA, 1440 bp, Homo sapiens
  chr3:46923053-46924493
  hyper
aatgggtcgagactcggagacccggacccgaagagacgctgggcagggagggagcgggatgtgtggctgcagacctgggcgggggtcggggctggcctagggccgagaggaacgacaggcctgggatgggactgagggcaggggacgaggcgagggtggggctggacgtgggggagggcggcagcagccaagccgggctcggggctggcagccgagcggcctccccagggaccccgacccggcccgaacgggagcccagtggactgacagcgtcgcggccgggggcgcgcgggggtaccgggcagcctcctcaggggattcgcccatgatgaaagagggctcgcttctcggctcagggtctctattcgccagcgggggccggatgatcaagggaaaaaaaatttaaaagcccgtgctttccagaagagaatgaagcggcggcggcgtcccgggttccctgctcgggtctcgatgttacagctgcccccgccccgtctccccagcactcacatcccgccgccgtaagactccgggcctcggcctctagcgcaatgtcccggggcggggggcggaaggctcctctcggcctctccacactcccgcgtcggcggctgcggagggggtgggggcgggagaggcccgggagggcgcgggggagggaagaggcgcccggccggggagaaggggagcggcagacgccgaggcgagggatgcgcgcggcgggcggtggctccgagcggcggccgggcggggggcgctggaggccaggccggccagcggggggtatcccgagagctccatgaagtccccccggggccgcggacggggcgctggcttggggaggctgtcgggggggccccgacatccatggcaaggcgggggccgcggcggcgcgctcggagtaagtcggggctggggacccgcgccgaggggaagtggccggagtcggggaggagcgactccgggcctggccggagcagccaggctgctctgtctcggtgtcagtcggcggcgcctcctcggaacccgggggagtcgccagccccgcgccgctcggctcggtggcttttttggaaacttgcaaatgttttcgtagagagaaaagggggagggagggagcgagggagtgaccgaaacggagcttggggccgctggaagaactgaggccaaggccgggggagctagagacggactgacagacaggcagaccgacagagcgtcggggccgctgcgcgcccgagccgcacaggcgcaagcggggctctggccaaggatggggaaggggtgcgggaggcggctgccgagggtctgggatctcaggaggccgaacggccgggggctggcggccggaacacctaagggctcagtgtggctgcaaagttgagatcgcaccccctaactgcacgccccgcgcggctcagaacgcgccccctgcccggc

SEQ ID NO: 108231 - DNA, 155 bp, Homo sapiens; identical to SEQ ID NO: 39183
  chr3:46924941-46925096
  hyper

SEQ ID NO: 108232 - DNA, 138 bp, Homo sapiens
  chr3:46933849-46933987
  hyper
acacgtccggctcgcgtcccatactgacaggctggacagtctccatgtgagaacgcgcacggacgggcacacacaagtgcacgcgccggccactcgagaatgcgctgccactcgcgcgcgcacgcacagggacgcgca

SEQ ID NO: 108233 - DNA, 238 bp, Homo sapiens
  chr3:47018179-47018417
  hyper
cctcttcctctagccggcccacaccagccgtagttgcctccatcttgcccgcgtacgcccctccttttctcccgtcttgcatcgcgcaggcctaaggagagtggataaatgtctcgcggccaatccaaggacgagaatgagagactgggaggtcctgaaagccaatcaatgcggggttattatgggcgagccctccccgccttgccccgccccgccccgccccgcccttattcttccg

SEQ ID NO: 108234 - DNA, 278 bp, Homo sapiens
  chr3:47020745-47021023
  hyper
caaaagttgcgtttcggtcttcccataaagcgacagagtagcacctggcatttgataagcgctacaaggggtcgtcatggtggtggtggagattattgttgaaggaccctcgccacctccacgcggcccgccgccccttccctgaatggcggcaaatgcagtcaggcgagcagcgtcctgggcggattcagaccctggggaagtctggaattcctcaccccgaccctcgtcccggaggctcaggctggcccttccaatggcactggtggggcagggca

SEQ ID NO: 108235 - DNA, 84 bp, Homo sapiens
  chr3:47021079-47021163
  hyper
cgccctttacatggtcccaggagaggcggggcggcggtgactgcagcgaagtgcaggaagctgggcggcggccggcagtgagga

SEQ ID NO: 108236 - DNA, 30 bp, Homo sapiens
  chr3:47021542-47021572
  hyper
cggctccgcacacacgtgtgtgcccccagc

SEQ ID NO: 108237 - DNA, 79 bp, Homo sapiens
  chr3:47050738-47050817
  hyper
tggcggtcctcgcggcgcatctcccaggtgtcctcgggagagacggaatacaaccctactgaggcgcgctgaacctggc

SEQ ID NO: 108238 - DNA, 80 bp, Homo sapiens
  chr3:47051151-47051231
  hyper
ggttctcccttctcggcaataaaccaggcctagttttgtagctgctccgtctccgagtgtgcgttcgcgcgcagcgtctc

SEQ ID NO: 108239 - DNA, 454 bp, Homo sapiens
  chr3:47205419-47205873
  hyper
gcggctggagacggcgacgcgagccccctccccgcagcagggcgacgcgggggaggggaggggaggaggccgcaggtccgaccgcggcggcggcggcggcggcggcggcggcggcaggggcggcccgcgtcgctacctcgctcgtcgctccctccctccctcggacgcccgccagccgctctctccctctcaccctcacaccgggagcgacgcacaccccacccgcccctcagcttcgcaggcccggccccttaaagagacacacacgggccaccgatctgccgccagtcggcgtgccttgcagctgttggcttgaccccaggccgggacgggcagagcggaacactgcccggcgggtccaggccgaccgtgcctgtggctctccggaacaataaacccccggccccagtgatgtgggccagaccggacctggagaggcggcaccgcgacccct

SEQ ID NO: 108240 - DNA, 30 bp, Homo sapiens; identical to SEQ ID NO: 39187
  chr3:47206632-47206662
  hyper

SEQ ID NO: 108241 - DNA, 30 bp, Homo sapiens
  chr3:47323540-47323570
  hyper
ctcacccaatgtgccggacccccgcgtgga

SEQ ID NO: 108242 - DNA, 168 bp, Homo sapiens
  chr3:47323998-47324166
  hyper
cgacgctcccgggacgcgactgccgcaaccgaaaccacctgcactccccacgcggggctgcctggctgtgtacatagtcgccatggcaacgggtcgcttccggggattccggaagtgtcggggtggcggaaatgaagtccgaggtcctacgtcgaggatacgggtgag

SEQ ID NO: 108243 - DNA, 80 bp, Homo sapiens
  chr3:47324507-47324587
  hyper
ctgagttgcctagtcgcggctacggcgtcatggaggagatccggcggcagggcaagctgtgcgacgtgaccctcaaggta

SEQ ID NO: 108244 - DNA, 30 bp, Homo sapiens
  chr3:47324894-47324924
  hyper
tatggaggcaggggcggtggccggctccac

SEQ ID NO: 108245 - DNA, 96 bp, Homo sapiens; identical to SEQ ID NO: 39189
  chr3:47422257-47422353
  hyper

SEQ ID NO: 108246 - DNA, 30 bp, Homo sapiens
  chr3:47422557-47422587
  hyper
ggccgggtggccggcgggtgccagccgcca

SEQ ID NO: 108247 - DNA, 30 bp, Homo sapiens; identical to SEQ ID NO: 39190
  chr3:47516986-47517016
  hyper

SEQ ID NO: 108248 - DNA, 30 bp, Homo sapiens
  chr3:47554369-47554399
  hyper
cagtctcctctgagcgcctgggacccccca

SEQ ID NO: 108249 - DNA, 30 bp, Homo sapiens
  chr3:47554934-47554964
  hyper
ccattccccggggtcgtgcgcaccgcctcc

SEQ ID NO: 108250 - DNA, 30 bp, Homo sapiens
  chr3:47823106-47823136
  hyper
tgcccagccagacccgcaccgaatccagct

SEQ ID NO: 108251 - DNA, 30 bp, Homo sapiens
  chr3:47823509-47823539
  hyper
gccttggaatagcacgtcctgcggcctcag

SEQ ID NO: 108252 - DNA, 30 bp, Homo sapiens
  chr3:47823805-47823835
  hyper
cacccccagcggcccggcggcatttgtgaa

SEQ ID NO: 108253 - DNA, 171 bp, Homo sapiens
  chr3:47844165-47844336
  hyper
cccgagctggaaaccgttccccgctcagccatgacccgggctgtttattcgcatcaggaggcgcgggtggctcgcagagggcgagaagacccttcccgctttcacactgcaggcagctaagtcgccgagaaaggcagcaacttgacgcccgaccccgccacccaaacccgc

SEQ ID NO: 108254 - DNA, 30 bp, Homo sapiens
  chr3:47844640-47844670
  hyper
ggttgggggagccgcggctcatgcgcggtg

SEQ ID NO: 108255 - DNA, 582 bp, Homo sapiens
  chr3:47890800-47891382
  hyper
ggcgtgctgatggccggcctctaccccaacctcatccaggtgctgcctctgggagggaatggagttcaccaggtcccagcctccttccctgtctgcagctccttgctcagccccacccgtcttttcctccatccctgcaggtgaggcagggcaaggtcacccggcaggggaagttcaagcccaacagcgtcacatataggaccaaatcaggcaacatcctgctgcacaagtcgaccattaacaggtgagggcatgcaggcctggatggggcagctgggatggtccaaaagggtggcctcaccagccctgtgttccctagggaggccacacggttacggagccgatggctgacgtatttcatggcagtcaagtccaatggcagcgtcttcgtccgggactcctctcaggtgcacccgctagctgtgctgctgctgaccgacggggacgtgcacatccgtggtgggtgcctgcaggcctcccgcccaccccgctctgcagctgctcctccggggcctggcctcaccacagttccccaccatcttttccattccctcagatgacgggcgccgggccaccatctca

SEQ ID NO: 108256 - DNA, 30 bp, Homo sapiens
  chr3:48129929-48129959
  hyper
cgaccctcgctccgcggctcagccccatcc

SEQ ID NO: 108257 - DNA, 30 bp, Homo sapiens; identical to SEQ ID NO: 2542
  chr3:48130378-48130408
  hyper

SEQ ID NO: 108258 - DNA, 88 bp, Homo sapiens
  chr3:48130784-48130872
  hyper
taacttgggaggggcgcggggcggggcctaggtcgcgggccatctgggctctggaaggaacccttagaggagcgggaggacgccacag

SEQ ID NO: 108259 - DNA, 30 bp, Homo sapiens
  chr3:48229303-48229333
  hyper
aggttggtgacaggcgacagtcccccggcg

SEQ ID NO: 108260 - DNA, 30 bp, Homo sapiens
  chr3:48229828-48229858
  hyper
gcagaaaaccaagccgacctacacctctta

SEQ ID NO: 108261 - DNA, 197 bp, Homo sapiens
  chr3:48282459-48282656
  hyper
tcagcattttctctcgccctgcacaagccgcatttcgccccgagaactacgcttcccggcaggctgcgcgccgcgcggtgacgcacttcacccagtcctgcttctttcttctggcgccgccagtggcccgcggtgcgcattctaatccgtttcacacacggtgctgctacctcgtttgcttcgtgcgtgcgtgcgcg

SEQ ID NO: 108262 - DNA, 30 bp, Homo sapiens
  chr3:48282890-48282920
  hyper
cggtgctcactccacgactcttcaccgggc

SEQ ID NO: 108263 - DNA, 16 bp, Homo sapiens
  chr3:48342763-48342779
  hyper
cgtacccggggcctaa

SEQ ID NO: 108264 - DNA, 541 bp, Homo sapiens
  chr3:48342984-48343525
  hyper
gccctggagggtggcgggttttccaggcgcatgcatttgccgcggacgggacgagaggatgaagccgttctgggcgccggaactcgcttgtgggaaccgcccctcggaagccggcctgggcgccctcggaagccggcctgggcgccctcggcgggagggagtgctgggccgggtgctggcgcagcgctacgcagggtggcggaacccagaggaccggacgggctcgttcagggtggcggcccggcgggggcgatgcccgccagcagagacaccgatggaaaccttgcccagttattttctttgcccagggtagttcctggaacatggttgatgcccagtatttgtcaaaagtacgcggagggcaaagaacttaagcgctcgatagcgaaggcacaggcccttcaaagtcttttgagctctgagcgatacattagcatgaaggatcgtagctaatatgggggttgatgaaggaggatccttggctggagcccaggtgtgcatagggcatgaggaaagcaagtcataacggcctttcacgtgt

SEQ ID NO: 108265 - DNA, 219 bp, Homo sapiens; identical to SEQ ID NO: 39194
  chr3:48470349-48470568
  hyper

SEQ ID NO: 108266 - DNA, 72 bp, Homo sapiens; identical to SEQ ID NO: 39195
  chr3:48471201-48471273
  hyper

SEQ ID NO: 108267 - DNA, 333 bp, Homo sapiens
  chr3:48481453-48481786
  hyper
ccctcctacggttccgattctaccctggcaggacaaccctagctcctcgtacctggcgtggcccgaccaatcgtctgccactcagttgacctctgacctgttagtacccgcccctggagcgccgcatccggtagcgagagttcaacttcctgactaggagccaatcagcggggccgcctcgctgtctacgacagagggtggggcagacgctccgtttccggtggcagggtctggggaagcggcggcaggcgccatgtccggccgcgaaggtaagtgttccggaaccgtgaggactgcggggacggcggggtggggaccgggcggcaggggcag

SEQ ID NO: 108268 - DNA, 214 bp, Homo sapiens
  chr3:48487960-48488174
  hyper
ccggcccgcctctccggtaacgggtcgcgccgcactgagtccttgcagcaaacctgccgaatcccgcccgtggacctctaaacaccgggcggggccgggtgtggcggcgcgctcggacgttcgtcattcctccgcgccctccgcctgccagctgattggcccctgggccaggggcggggcactcgcggcggaggcaagcggcggcgcgcggacg

SEQ ID NO: 108269 - DNA, 30 bp, Homo sapiens; identical to SEQ ID NO: 39197
  chr3:48488408-48488438
  hyper

SEQ ID NO: 108270 - DNA, 158 bp, Homo sapiens
  chr3:48541364-48541522
  hyper
ggtgctgcccggctcgttggagaggcagcgcggggaagtgtctgcccggtcccagggcaggacgggccgcccccacccccggctcaccacccggaggcggcgttagcagcagcagcaacagcaacggcaacaggatccgcggcgcggggaccggcgca

SEQ ID NO: 108271 - DNA, 30 bp, Homo sapiens
  chr3:48541889-48541919
  hyper
tcaggcctggagggcgtccccgggaatatg

SEQ ID NO: 108272 - DNA, 313 bp, Homo sapiens
  chr3:48594204-48594517
  hyper
cgccatcccggggccgggatgagtcggactgcgccgcttccaacccagcagccgggccacctcgggccacccgaggtcccgccccttgggccccgcccctcctcaagccgcgacagcccatgtctatcttcccgcaggtcccgccccagagtgagtaggctccgccccagctgaaaggggcccggcctccgaccacgcatgcccaactcacctacccgcccgttttggaacaagtgggcccagttcttcaggccaggatcgagaatgcgcatgctcaactccggattgtactggtcccgccccagttcaaggc

SEQ ID NO: 108273 - DNA, 30 bp, Homo sapiens; identical to SEQ ID NO: 39200
  chr3:48594953-48594983
  hyper

SEQ ID NO: 108274 - DNA, 30 bp, Homo sapiens
  chr3:48595762-48595792
  hyper
acactgccctctagcgatgtcatccacaac

SEQ ID NO: 108275 - DNA, 30 bp, Homo sapiens
  chr3:48632463-48632493
  hyper
cacggtgcagtgccccgggccgggtcctcc

SEQ ID NO: 108276 - DNA, 40 bp, Homo sapiens
  chr3:48672960-48673000
  hyper
cttgggccaatcagcgcgctggggcggggcctaagtggcg

SEQ ID NO: 108277 - DNA, 303 bp, Homo sapiens
  chr3:48693397-48693700
  hyper
gacggcgggaccgaccggggggacgcgggtgcagcgaggtcaggagaccccgggcggggcgtcaggggaggggcggtgtctcatggggatgccaggacggggcagtcaggaatctgagtcagggcgggtaggtgggggcggcggggaggcgctcagacacggggcgggcacctacgagagggacagcgtaaggtggaatcgctgccgcaggccgcgaaacatgacgaacgaactgggcgggaaggagcgcgcagccacctcgcagcgcgggccctcgaaggcgccgcctgccgggcactggca

SEQ ID NO: 108278 - DNA, 279 bp, Homo sapiens
  chr3:48693851-48694130
  hyper
ggccccttcaaagaccgcgcgcccagaggccgggtgccaagacccccgaaaggtcgccctcttcggtggacacgccccttccgtctggccccgccccctccccagtctcatcgctgcctcggcggcggccccttccggccacgctctacggcttctggcctaagcgcgtccataccaggccgtggcctcagaagtgactcccagtactcactcgcattgtggtcccgcccccagccttggcccgtgcttcccccagctctggcccggcgccctgctcac

SEQ ID NO: 108279 - DNA, 121 bp, Homo sapiens; identical to SEQ ID NO: 2547
  chr3:48698889-48699010
  hyper

SEQ ID NO: 108280 - DNA, 1208 bp, Homo sapiens
  chr3:48699376-48700584
  hyper
ggggggctgtcctttctgctccggatgtcgtggctctctcgccctgacccttgctccctgttgcccataattccccacagcagcgcgcggtgcccactcttttgcgggagcctgtcccagcgttccgctgggaggacaccggcttgggaccgtggtgccgaatcaaaaagtctgaagggaggggcgagctgttccccgagcccgggacccctgaggacagagcccctggtgacagactacctctttgcaaaggtcctgtccgcccgcaagaggagacctctgggcgccagtataacacagaccctggtccctgtcctgtctctcgttcgcggctgcccaatggctggacgccgtgttcaatccccagctcctcattcggctgctcagggggccctcgactattccgggcgctttgccttctccctcggagccccacgaagataggctccctgacccccaggccaggccccccatcctcccggaccccggaagactccggacaaagagctaaggctccgccaccgatatgcgcccttggccccgtagtggcagctaagcctgggtcccagccctggtgcccaccgccccccagctcctcctggctgagggggaacaaagagaggagaaggagcaggagtatgggggtcgaccgtcccccgaggccccgccacggcggccgcctcgccatcatcccccgcctccctgcacggcctccaccgccccccgccccggtccgggccttgggctggccccgccgctcgggccccctcccgggcccctgccgccgccccgggcccccgcccctccgcctgtctctccgcacccccgccgccctctgggcaccatctactccgcggccggagcccctccggcgtgcggccctggctttttccgcccccaccacagcatccccgacgctgctgccgcctcccgccgctccaacatggctcccggccgccccgatggttcgctccacctctgccccggcgcccgaaacacggtggtacaacccatcgcgcatggcagctctgaggaccgaagatgttgccgccatctttattgaggacgtgagcgttgctcctggtgctgaacagagcgcgaaggttcgccgtcgttgggtccgccctccccactttcggtcgccgccttcacccacctccctccttctagggcgctgtcccagctccgtctcccagcctttttctgtc

SEQ ID NO: 108281 - DNA, 732 bp, Homo sapiens
  chr3:48700955-48701687
  hyper
ccaggctgcgagtcccgagtgctctgggatgccacgtggagcccggcgttgccccatggctgcgggccccgcttcttcgggtccccgcccctcgtccgtcacgaccgcatgccttaaccccttgaagggactgacacagaaactcagtcctccccccaccctcggtgcattccagctctccctgcgtaactcctggcacgcgccggtctcgccaggccaatgggtggacctggcgcaacagacgtcacgagaggagcggaggcgaggggtgaacgcggagcactccaatcggtcagtcattgtttctattggcacaatgggaggccccgcccctcacggcggactcatcgcatgggggagggggctccgcgggttgccggctaaccgtgagagagtccgggaggtacactatacggaccggcctccaaaggcggaatcgataacgagctgcagcgccgggtgcagaggacgcgggcatcccgaagcccaggaagaggtcagggccgggaccccagaacgctccacagggtgcggctcccgcgatggggtggatcctggttctaacaggcgaggaactcctggccaaggcctctggcccgccccgaacggtccctatgacatcaccatcaaccaatcagtcggcgcatcctttcgccccttgactgctccgcttccgggaggcggggcttctgcgggttccacctcccgagcgccccttgtggctaccaaggt

SEQ ID NO: 108282 - DNA, 30 bp, Homo sapiens
  chr3:48722955-48722985
  hyper
agaggtcctggcctcgggtcccggagaggg

SEQ ID NO: 108283 - DNA, 30 bp, Homo sapiens
  chr3:48754579-48754609
  hyper
cgagctttacctgccgcctcagccgggttc

SEQ ID NO: 108284 - DNA, 57 bp, Homo sapiens
  chr3:48754856-48754913
  hyper
ggccggaggtctgacgggcggttgggtggatagactagctgcgggccgatggacagc

SEQ ID NO: 108285 - DNA, 30 bp, Homo sapiens
  chr3:48884882-48884912
  hyper
gactgaggctggggcgcgggcctcgcgcag

SEQ ID NO: 108286 - DNA, 48 bp, Homo sapiens
  chr3:48885299-48885347
  hyper
ctggttgtgacgcacgccaccgcgggcgtgcgcgtccccgcttagcac

SEQ ID NO: 108287 - DNA, 30 bp, Homo sapiens; identical to SEQ ID NO: 39208
  chr3:48935918-48935948
  hyper

SEQ ID NO: 108288 - DNA, 392 bp, Homo sapiens
  chr3:48955803-48956195
  hyper
tcttgcacggtgaccgtaagtcggagaactgcgcggcgaacgaggcctcggcaggggaagcgaaagcctggtgtggttgcggctctggggccaccctgcgaccgcctcggggtgtaggcagaatttcccggcccagctcccctctgaccagatagcggccgagaaacaatggttatctgctccactgacgccaggatgtcttctccgtgcccgatcccggagtacaaacagtgaaatgagaagccggtgagaaacgcgctggttaaaaacatctcgacgggagacgctggtaggcgaatagtggctccagacgcggtcggcgcctgccgtaccctggtcagactctgggtcagagcgctaagtttcaaggaggcggcgctaaacaggccctc

SEQ ID NO: 108289 - DNA, 203 bp, Homo sapiens
  chr3:48956725-48956928
  hyper
gcggggaaacgcgccgcctcggggctcaccactcgagtcatctttgggagctctcgcagcgctgcccgcgcggtttaacgcccgcctgtggagggtatccccagctcgcgggctccgcgtccgcgcgaatatcccggagcccgcggcgcccctagggatgtgcggccccggagctgtgccgccgcctcgccagaagctggttg

SEQ ID NO: 108290 - DNA, 498 bp, Homo sapiens
  chr3:49027048-49027546
  hyper
gatgccccctctgacggcctatgaaaccttgcacatcaggcagcttcttcctaaggcctgcctgactccggcgagacttcccgggagatccggaccgaccgcggaaccgagctccaagaatgcctgcgaggaggctgtgggtcctaccctatcgccgcttacgcagtcccagcctccgcggcgcccccaaatgccgcactgttgagtcatctcagcgctgcctcctccgcgctgcgctccccacccccgctcctggagcaagaagatgcagacgatacttttcccggaggcaagagggcgtcttcacgcaggcaccgagaagctcccactagtgtatgccttaatggtgccgctcttgtccgcgtctacgcttgggaccttggcttctgacttggagagtgtacagctctgcccgacggcaacccagcttgggaagagaagccccagcgtgggctggggctcaaggcgcaggaaggccgagcccggcgcggacgcagg

SEQ ID NO: 108291 - DNA, 395 bp, Homo sapiens
  chr3:49027802-49028197
  hyper
gggcgacggcgaggacgcaccggtgcgtccgctgtgcaagccccgcggcatctgctcgcgcgcctacttcctggtgctgatggtgttcgtgcacctgtacctgggtaacgtgctggcgctgctgctcttcgtgcactacagcaacggcgacgaaagcagcgatcccgggccccaacaccgtgcccagggccccgggcccgagcccaccttaggtcccctcacccggctggagggcatcaaggtgaggacctccctgccccgccgcgctccaggccctgcacggctgagcccgagaggaccggcgctcagcccgggtccccacgctgcccccggcgctgctctgcgtcggtcccgcgcgctcccactcactcgcctgctgtcgctctccgggccgg

SEQ ID NO: 108292 - DNA, 294 bp, Homo sapiens
  chr3:49044448-49044742
  hyper
cccaccccgccagccgcgatacggcgcagttcctatattcatgttatttattgtgtactgactccatctgccccgtcaaataaaaaaccacaaggttcgagccgccgggcccgacaaactccgggtcggcgaaacagagtccgcgataggtgcagcgggctggcagctgggagcgccccgcaagcgtcacgtgagggggcgaggggcgggatgcccctccgcgggccccgccaatgatgagctggattgcgtgggacgaagggtcgtcattggacaaccgccgcgggcgccctg

SEQ ID NO: 108293 - DNA, 30 bp, Homo sapiens; identical to SEQ ID NO: 39215
  chr3:49055306-49055336
  hyper

SEQ ID NO: 108294 - DNA, 30 bp, Homo sapiens; identical to SEQ ID NO: 39216
  chr3:49056081-49056111
  hyper

SEQ ID NO: 108295 - DNA, 138 bp, Homo sapiens; identical to SEQ ID NO: 39217
  chr3:49057920-49058058
  hyper

SEQ ID NO: 108296 - DNA, 30 bp, Homo sapiens
  chr3:49058318-49058348
  hyper
ctgggaccgggtcccgatccggattagatc

SEQ ID NO: 108297 - DNA, 32 bp, Homo sapiens
  chr3:49058560-49058592
  hyper
gtccacagagcagccgcgggacccccggaaac

SEQ ID NO: 108298 - DNA, 30 bp, Homo sapiens; identical to SEQ ID NO: 39219
  chr3:49059194-49059224
  hyper

SEQ ID NO: 108299 - DNA, 30 bp, Homo sapiens; identical to SEQ ID NO: 39220
  chr3:49059656-49059686
  hyper

SEQ ID NO: 108300 - DNA, 69 bp, Homo sapiens
  chr3:49066684-49066753
  hyper
cttgtaggtgaggccgtctccgcagttgaagagctgctgtgctgtgagtccgtcgtctggcacgtagga

SEQ ID NO: 108301 - DNA, 205 bp, Homo sapiens; identical to SEQ ID NO: 39222
  chr3:49066961-49067166
  hyper

SEQ ID NO: 108302 - DNA, 30 bp, Homo sapiens; identical to SEQ ID NO: 39223
  chr3:49130790-49130820
  hyper

SEQ ID NO: 108303 - DNA, 287 bp, Homo sapiens
  chr3:49131390-49131677
  hyper
cggccccgccgcaccgccagggaccctggttctgccgtcgtcgctccaagaccgacagggttttctcctcacagctccctgggcgccatcttacattcaaccctcacagccaataggagccgattgctcctctcgcgataatcggggcgtcggatcccgcgagatctgggactgcctaccggccaaaattaaagtgaacgcttcagcaggggaaggtggccgcgcttctggccgctagagcggatagtggatcctagggtatggagcggctcgctccgcccatggac

SEQ ID NO: 108304 - DNA, 275 bp, Homo sapiens; identical to SEQ ID NO: 39224
  chr3:49142030-49142305
  hyper

SEQ ID NO: 108305 - DNA, 39 bp, Homo sapiens
  chr3:49142557-49142596
  hyper
gcgagtccctgtcacgcttttgacgccacagctttggag

SEQ ID NO: 108306 - DNA, 30 bp, Homo sapiens
  chr3:49157754-49157784
  hyper
atgacacctgccaccggcgcctccttcttg

SEQ ID NO: 108307 - DNA, 189 bp, Homo sapiens
  chr3:49158288-49158477
  hyper
cgtcccggcgccgccgccaccgccttagcggcttgttttgtttcgacttctagctaaggccgagggaggcggagcgccaagctggtgacgcacttccggcgggaatgggctcggagcgacccgcagctccggggcgggcccgagcggaaggaggcggtgctcgggtggcttagcggtgcatgggttctg

SEQ ID NO: 108308 - DNA, 188 bp, Homo sapiens; identical to SEQ ID NO: 2557
  chr3:49171170-49171358
  hyper

SEQ ID NO: 108309 - DNA, 244 bp, Homo sapiens
  chr3:49203301-49203545
  hyper
cagaggctcctgcccggcctccgacttcccttcacacgtgcccccggggaaggcaggagaagttgacggaagatagggcgtgagagaggcgccacacaggcagaccgggggagggggcagatcggggccctcaggctgggaatgcacgtccttagggcccaagccgtgaggcgggggtcactgaggcagcgaaatgtacagggtgaacggtgctagccctaccgggaccgcacagccccagggt

SEQ ID NO: 108310 - DNA, 30 bp, Homo sapiens
  chr3:49203784-49203814
  hyper
tgcgcttccgcttccgggacccagcccgcc

SEQ ID NO: 108311 - DNA, 30 bp, Homo sapiens; identical to SEQ ID NO: 2558
  chr3:49208499-49208529
  hyper

SEQ ID NO: 108312 - DNA, 30 bp, Homo sapiens; identical to SEQ ID NO: 39228
  chr3:49209145-49209175
  hyper

SEQ ID NO: 108313 - DNA, 311 bp, Homo sapiens
  chr3:49395158-49395469
  hyper
tctcttcgttcttggcgttctcctacaggagagaagggcagctagaacccggggtcaagaggaggagagaaacgttctaaccacaaacaagggagattttctatgagtcaccgggattttgccctccatgcgcaatcccaagggcggagaggaatttcagcagctacgagcaacagaaaggaaacgagagagtagccagactctccgcgcatggagccgacggcacccaccagcacaccgccggcgcccccagccactactgcacgtccgcccccgccccgccccgctccgcccggcgcacctgatgccca

SEQ ID NO: 108314 - DNA, 240 bp, Homo sapiens
  chr3:49395699-49395939
  hyper
agcagcacacatggcgcaattgtccaagaagccagcggagcgccccgaacaagcactgtaaggggaggccagcaggcgcctccttttaactggccggcggcgggtcacgtggcacaggcagttttccgggcctgagggtcccgcctcatccggcccccgccctacccggagggctcggcccctcctcagccaggaaaaggctggagagtgcgcccgagcgggacgcgtgctcctcctaag

SEQ ID NO: 108315 - DNA, 30 bp, Homo sapiens
  chr3:49448856-49448886
  hyper
aactccgacagccacgcgcgctttcagcgg

SEQ ID NO: 108316 - DNA, 104 bp, Homo sapiens
  chr3:49449334-49449438
  hyper
gctgaagaccagaccgtggactaacgagagaaccgacggaggaccgcgggcggcgggagggtagcgcgagagagcgagggcgggcggcggcgggagggcgggga

SEQ ID NO: 108317 - DNA, 525 bp, Homo sapiens
  chr3:49449454-49449979
  hyper
cgagtgcccagcgggctcgagccggcacaggtcgcggccccgcgcacgcgcgcgcactcacagctcatccactattgctcaggagcccgtccacgccctaaaagcaaaacccttaaccaatcattgcagccgcgtggggcatcacgggaactccggggctataaaagacctggttgctattttgtactcccggagtcactcatcccttaagcaagcagggtggggttaggtgcgcgtgcgcggttttaatactcctccccgaactgccaactcttcacgcacgcgaagtaggccccaccctggctgggtttacgcgtgcgcactaacgggcctggtcccggaagaccacacgcgtgcgtggtggggactacggtgacagtaccccgggtggggcgagggccagtcatggcggagtcctggtctgggcaggccttgcaggctctgccggccacggtgctgggcgcgctgggcagcgagttcttgcgggagtgggaggcgcaggacatgcgcgtgaccctcttcaag

SEQ ID NO: 108318 - DNA, 123 bp, Homo sapiens; identical to SEQ ID NO: 39232
  chr3:49507370-49507493
  hyper

SEQ ID NO: 108319 - DNA, 85 bp, Homo sapiens
  chr3:49577214-49577299
  hyper
gagcagctctgggccgaagagggagacagtgtccgcggcctcccaggaggtggcgccagaggattaagtcgccagcggtgggcgg

SEQ ID NO: 108320 - DNA, 846 bp, Homo sapiens
  chr3:49591666-49592512
  hyper
agggctcagcgcgacgtcccagaggccgcttctagtggcaggtgcccctcctcacagggccctcgcagccccgccggcccccgcccggctccttctcagcatgatacaaccgcgtcggccctggacagcgcatgcgcgggcgccggcggctgtttcccagcgaccccgaggctggcgggagcgcgcacaggggaaggggggcgtgtgcagggaagggggcgcgagacgcgcatgcgcagcggcaggcggcggcgcgagccgagctgggagatggcggcggcagcggcggcgccgagagtgtgagcaccgcccgggagccgccggcccgggcgcagcgcgaccccgaccccgcccgcccgcctgcccgccatgggcaacgaggtcagcctggagggcggcgctggcgacgggccgctgccgcccggcggcgccggccccggcccgggccccggccccggccccggcgcaggaaagccgccttcagcaccggccggtggcggacagctccccgcggcgggagcagcgcggtcgaccgcggtaccaccggtccctggccccggccccggccccggtcccggccctggcccgggcaggtaagcgcgtgtctcggcgcccggggggcggtgagctgcagcctgaggccgggacccgggcccaggatcccgcgatctagtgtggacagcgaggttcgacgtccggccgcactctgaaccctgccggattggcgtgaactgggtggtcgcgggaagcggcccttcctttccagctgccccgccttggcgtggcaggatgacgagcgcagggtcagtcggggcctgcagaccgtgactccgtcacgaaccccaa

SEQ ID NO: 108321 - DNA, 150 bp, Homo sapiens
  chr3:49711248-49711398
  hyper
cacgctcacgctcacgctcacgctcacaggctcccggctccacattcctcgcagggctccaatccggacccgcccgccttgcccttcatcctcaaagactcattggtcccattcccctcgggccccgcccttcgcgtgcttgggccatgc

SEQ ID NO: 108322 - DNA, 30 bp, Homo sapiens
  chr3:49711632-49711662
  hyper
tctcgctcccaggccgggtcctctcaccgt

SEQ ID NO: 108323 - DNA, 30 bp, Homo sapiens; identical to SEQ ID NO: 39236
  chr3:49761196-49761226
  hyper

SEQ ID NO: 108324 - DNA, 243 bp, Homo sapiens
  chr3:49761708-49761951
  hyper
cacaaagacagactcgcctccgtttctagcggctttatttttgacatacacgacctcagacacaagcggggcgggcagcgctaggtgtacagaaaggagcgggctcggaccgagcaccccctcccccgcacgcaaggtccaaagcaaacgcaactgcggcgggagccaccggcgcaggcctcgggcggtggagacaggcttagcttccaggaaagagcagcagagagcgattcccagaacgcg

SEQ ID NO: 108325 - DNA, 30 bp, Homo sapiens
  chr3:49823879-49823909
  hyper
aggtggctgagcaccgctacagcggcctct

SEQ ID NO: 108326 - DNA, 30 bp, Homo sapiens
  chr3:49824145-49824175
  hyper
gaaagcgtggggcacgtgactgtgacggca

SEQ ID NO: 108327 - DNA, 30 bp, Homo sapiens; identical to SEQ ID NO: 39238
  chr3:49840132-49840162
  hyper

SEQ ID NO: 108328 - DNA, 110 bp, Homo sapiens
  chr3:49841072-49841182
  hyper
agcatccagctggccgtgctgctggaacggcgcgggaggagagagtggaagggggacttctttgggggcggggcatggggcggcaagggactaacgaggtgctggcgctg

SEQ ID NO: 108329 - DNA, 130 bp, Homo sapiens
  chr3:49851237-49851367
  hyper
aacagtaggctgcagcgctcagagatagggtctttgtgtaggtggcggtgacagtaggggccagtgccctgctgtagccagtgcaaacaggaaccaaggccaagcgaataagggacgctgctggtcacag

SEQ ID NO: 108330 - DNA, 400 bp, Homo sapiens
  chr3:49893730-49894130
  hyper
tcaaggccctgaagcggtacccgggcaaacaccgggccccaacactgcagtcactcaccactgcaagtggaaggtgtggccgcagtggatggcggccacgtcgcgggagtgatcgaagaagtcggagcagatagtgcacagagcacggataggcatgatggctggactcaaggggcccaggcagccaaagaaactgctacaggtccggcttcgtagacgcgcccccgcgcctccgcttgcttcaaatttggctccgcagcacgacttcctggagcgggccggaagtgacaacacaaaactttgggcggagcgtgaatacttcgcctggattggacaaattctcggatgggcggaactatgggcggggcttagcggccccgaggccgtagagaatcctggg

SEQ ID NO: 108331 - DNA, 717 bp, Homo sapiens
  chr3:49906716-49907433
  hyper
ttggagcttcctcccccaccccgcggcagccccgcccagccccctccgggttgtcgcccataaagaactctccgttgtcatggaaattagtgactgctaagcgggagggaaggggcccggggacagttgggaggggctggaggcggctctgggaacggggagggacggctcagctctcggcccctatcctcacgggggaccacgaatcttcgagggttaatcttttcacaattccgagccgcagaagcttccccccagaacccccaagccgtccgaggtaatggggaactttagcccgaccccgcactccctcccccaaatctgcaaagcccgcgcgctctgaccccgccaggacctcgagccctcgctgcgcccccgcgcactctgcatcccgcacctcgagccagggaaacaatcccccaaggccccacaacctgcgttcgggaagcgcccccagcccggcccgccccgcacctgcagcgccggttggtcacagggaggaagtgatcgcgggctcagcggggcgccgagggctccggggacggcgggcagaatccgctccgagcacgcggggcagacgcggcgccagatgcagccgcttcggctagcgaacctccagcatcgccagccgcttgccggcaccggattcgcaccccgggccgggggcgggctgggggcggggcctcccaaccggccccgccccgaccctggcggagc

SEQ ID NO: 108332 - DNA, 30 bp, Homo sapiens; identical to SEQ ID NO: 39241
  chr3:49966758-49966788
  hyper

SEQ ID NO: 108333 - DNA, 16 bp, Homo sapiens
  chr3:49967160-49967176
  hyper
cggccccctgcgtaca

SEQ ID NO: 108334 - DNA, 30 bp, Homo sapiens
  chr3:49967447-49967477
  hyper
tctaggggcctgggcgcctcctccgagtct

SEQ ID NO: 108335 - DNA, 68 bp, Homo sapiens
  chr3:49977375-49977443
  hyper
agggcgggtaagcgcgccttcttattggatggcgatggacagcgtgctcttacgacccaccccagaag

SEQ ID NO: 108336 - DNA, 30 bp, Homo sapiens; identical to SEQ ID NO: 39242
  chr3:49978363-49978393
  hyper

SEQ ID NO: 108337 - DNA, 40 bp, Homo sapiens
  chr3:50126251-50126291
  hyper
gcgaccacatttcccggcagccctcgcacagccaggccgc

SEQ ID NO: 108338 - DNA, 30 bp, Homo sapiens
  chr3:50126696-50126726
  hyper
cccttgtggatacacgtcccctaatcttca

SEQ ID NO: 108339 - DNA, 30 bp, Homo sapiens
  chr3:50127188-50127218
  hyper
ggggggcggggggccgggctgttcactact

SEQ ID NO: 108340 - DNA, 30 bp, Homo sapiens; identical to SEQ ID NO: 2563
  chr3:50192037-50192067
  hyper

SEQ ID NO: 108341 - DNA, 173 bp, Homo sapiens
  chr3:50192567-50192740
  hyper
gcgcaggacctgggtacgccgcgaggaaccgtgcagcccagcgcggccgcccggcccgggtccagcagccaggagagcgcagcgcttcgaagccgagtgcgcgccaccgcccgcgccccgcgctggggaatgcgccctcggcgcgccggccagggggcgcccgcagcccaccc

SEQ ID NO: 108342 - DNA, 115 bp, Homo sapiens; identical to SEQ ID NO: 39246
  chr3:50192965-50193080
  hyper

SEQ ID NO: 108343 - DNA, 49 bp, Homo sapiens; identical to SEQ ID NO: 39247
  chr3:50242720-50242769
  hyper

SEQ ID NO: 108344 - DNA, 599 bp, Homo sapiens
  chr3:50243055-50243654
  hyper
ggtacagcaggaggtcggcggcacccggggctgggaccacaggacgccttgttgggggctcgggcggcacaccacaggcttcctgaggcagggcccatggggcaggctggagagggcccgaggggaggacccaagaggggcctggagcagtccctggagcgctgccccgacgggcgcctgacaggcagagcagcccggctggcacgatgggaatccgggtatatttatctcggctgctccggacaagggcttgagggcagatcgggccgggccgcctgaggggccgcggggtacatgctggtcccagagccggtgccatttgcagaggagccagcgggcacagcgggcgcagggcgcgagtggctccctgacctgaggccggggcgccgtgcgagctcctccccacctggcgctgggtagggtgtaagttagagcccgcgcagcgcacggcggagagaaggaaccaagacttggtttgcaagagcccgcccccgcccggttggccccttcgattggccacagcaaatgcgtgcgtttgtttacacccaggcagggggaggccaggggagggacctgcggggacccgcccttttcccccc

SEQ ID NO: 108345 - DNA, 706 bp, Homo sapiens
  chr3:50374289-50374995
  hyper
ccaaactgctcggtcggctttagtcatagctggataatgcccggctcaggtctaccacaagccatacagctgctttttccgtgttcaacctgtctgtgacagaaaccaagggggccccggcacccagcatctaggcggtggaatcggggtcttacgcacggttccgcgggcaggtccccggccaggacccgcggggagccacgtagccaggagggtggggctgcccaccgacccaggacgcggcaacggaccggggagggcggagctccagcgaccgcttcccctcccgcccgccggcaccccctggctcccacctggtcccggcgcggcctgcgagctagcgaggttcgcgcggtgaagtactgctcgagctccgagtccgagtcctcttggctgcagtagccactgctcgtcgtgctgctccaggtcatttcgaaagaaggcgcctccgcctcgcccatagccgtacccgcccgtcccccagtcctgcgcgtccgtagccgccaaccaccgccccggtcgcgtgcgtgcgtgtacgcgtgtcagtgtgcgcgtgcgcccgggccagagccgcgccgcaaccgttaagactgaaacgtagatcgccgggatctagctcttgtctcattggggcaggaacgccggggcggggacacgcacgcttcgcccccaggaatgacctcatcgctccggagctccactcaca

SEQ ID NO: 108346 - DNA, 328 bp, Homo sapiens
  chr3:50375232-50375560
  hyper
ttagaacgctccttgcgcgcggcacccaggcagccctcgagaatgcctgcactgtggcctgcccatcctcgcccttcccatacgccctcggccccgcgctcaccacgttcgtgtcccgctccaccgcgggttcccagcccaggtcccggggcccgcaacagtccaggcagacgagcgcgcggcagcggtagtggcaggtgaacttgcaatctgcagagaggcctggcggtgaggcggaggagctccaggtcggggaaatgtcccggagattgaagggaagccccagggagagggccgctgctcgccaggctccgcaggcccgacctat

SEQ ID NO: 108347 - DNA, 272 bp, Homo sapiens
  chr3:50377895-50378167
  hyper
cgaccccctctgccgcgacttgacccgcggcgactgcgctgccccttggctgccccttccgctctcgtaggcgcgcggggccactactcacgcgcgcactgcaggcctttgcgcacgacgccccagatgaagtcgccacagaggtcgcaccacgtgtgcgtggcgggccccgcgggctggaagcggtggccacggccagggaccagctgccgtgtggggttgcacgcggtgccccgcgcgatgcgcagcgcgttggcacgctccagccgggt

SEQ ID NO: 108348 - DNA, 619 bp, Homo sapiens
  chr3:50387961-50388580
  hyper
agaacgtccctcttcccgcccagtcccgcgagcccgggtggcacctgataggtgatcttgggtcccagcgtggggtggaactcgctgaagaatatgcattcgatgcggcagccgctgcccatggcaataaccgggcccaggcccgtagctcctcgttcctcgcgcagaggcgtccccacctcctgtgaacacttgtcagagacagcctcgaggcctgtgtcgctggggcacgcaagcttgccaatccctctgcccaatggcgcctgcgcagcgcgactcagaggcgtggctggggcgggggacggctcgtcccaggaagtcctgggtgggtagacgtcgcacccggaagtaaagcggctccgtgacggagcggcggtgcgcgcggcagggcccggagtatcccgctttctttggaggaaaccaccgcatcagatctgcgctgcggcagaggcaggcaagtccctagcgtggaggggcagcatgctggcagcacttggggaggcggtgcgctaagggattcacgctgtaactgggaccgcagcagggaactacaatttccatagtgctccgcgccctcccagctggctctactgccggcgacggcgtggtacacgctggg

SEQ ID NO: 108349 - DNA, 30 bp, Homo sapiens
  chr3:50396721-50396751
  hyper
gccctggacggctgcggcacgcccgcctac

SEQ ID NO: 108350 - DNA, 870 bp, Homo sapiens; identical to SEQ ID NO: 2571
  chr3:50402180-50403050
  hyper

SEQ ID NO: 108351 - DNA, 31 bp, Homo sapiens; identical to SEQ ID NO: 2572
  chr3:50526893-50526924
  hyper

SEQ ID NO: 108352 - DNA, 1176 bp, Homo sapiens
  chr3:50540206-50541382
  hyper
ctctggctgtaaagcgccggattcccaccagggagggaacgtggggcagatgcgcggctccaactccgccggacaggggtcgctggccgcccctctcacccaacccgggtttccctctcaccgggtcagcggcaggggaatcagctgacaagctcggaccgcccccccccaactcctcccggggcttgaagatcttgccttgcctcattcgggggatttgggggaagcaggggcaccgcggggaagtttcgcgacgcagccagagcgccgggaccgcggctgccagccttcggggcttggggccgtcgcccccgggcgcagcgggcagccggacccagcgcctctgccctggcgcggagcgcagggaaggagtagcgcggaccgggggcagagcggggcgcaaggctcggccggggtctcgcggccggccgaggccacttacgtgtgctgctgggggaagctgtaggcagaggcgccgggggcggcgagcagcggtagaagcggcagcagcagccacagcgggcgcgggggcccggacgtcgggcgccgggtgccggggccagggtgggggccgcagccgggccaggggcgcgcagtccgcgctgggccgggccgagaggcgccgcaggtccgagccggcaccgccatgtttccattcaagatgcggcgccgcggggagggggggcagtggcggcggcggcggcggcggcggggttgggggggcgcgggcggcgggcggtaactcggcctctcctccgccgccgccttctccgcgaggggcctccggggctgcacgggccgcagcgcctctgcgggctgcgcgctgctatctccctgcagcgctggctccaagcgctctgagcgcccggcccgggacctgcgctcaaatagcagccgccgccaacctgccggcaccgccctcttctctccctccctccctctctcttcccgggctggcccgcccccgcgcgcccccgccgcggccacgcgcccacccgtgcccgcgcgcctctcgtccccgcgcagcccgaatcctgccctactggctcgggcgtcctgcgccccagctgctacccgagcgccccgggtgcgcccccgcccccacacctcagaccctgccgctcctccccaccccacccgcgggaagagtcccgggccccgcggcccaaggcagga

SEQ ID NO: 108353 - DNA, 30 bp, Homo sapiens
  chr3:50541596-50541626
  hyper
gcggaaacctgggcacggctgtacggttgt

SEQ ID NO: 108354 - DNA, 470 bp, Homo sapiens
  chr3:50604942-50605412
  hyper
tgactggcaggaggccggggcggggggaacccccaagcccggcgtctggggctgcgggtccgacccgagatccgccctccctgcaagccccgagccgctggccaggcccgctactgcgcaccagccgcatccgcgagcgctggctctgccggcctgagctagggtgggtagggccgggacccacggcggaggtggggccgggccgagcagcctcgggggatccccgaagctacagcgccttgcctccctgcacgctccgcgcccccggcctccgattggctgtcgggcctagagcccgcccagaattggaccgttcgcttgtcgctcgggtctggctccacccccagagggagcctagaacctggtcgcagtttttagagactaccctcaccccgtggcctgcgccgaagttgggcggaggacagtgggtggccaggcccttccgggccagaactcgggacccctgccag

SEQ ID NO: 108355 - DNA, 257 bp, Homo sapiens
  chr3:50606622-50606879
  hyper
gcctggttcctaaacgccagctcggagcaatccccttgggctggagccaaatccctgctgtgattttaaggaagaccggcaggtccgggcccccaagggtcaaccccacacacatccccgcactttcctgtatgcaggcctgcgagcgtagagggagtggaattcacagcctccccacccatccgcaggggtctcctgggaggaacccaccagcgataggaacactgaagctgggctacggcgtccgcccgagcctt

SEQ ID NO: 108356 - DNA, 30 bp, Homo sapiens; identical to SEQ ID NO: 39259
  chr3:50649146-50649176
  hyper

SEQ ID NO: 108357 - DNA, 202 bp, Homo sapiens
  chr3:50649439-50649641
  hyper
ccaggaaaacggggcggggccccgcgagctgaccaatcgcgacgctgaaggtggagccgagcggtcggggagggccaatagcagcgcgtggacccggggctgaagctacccagaggggcaggtcggagagatcagtggggaaagaccgggtcggggaagttaaggaggggcccgggctcagcaacccgcgcccagattgcct

SEQ ID NO: 108358 - DNA, 30 bp, Homo sapiens
  chr3:50649979-50650009
  hyper
tgaaggagaaagcacgccccaacttttcga

SEQ ID NO: 108359 - DNA, 30 bp, Homo sapiens; identical to SEQ ID NO: 39261
  chr3:50653382-50653412
  hyper

SEQ ID NO: 108360 - DNA, 60 bp, Homo sapiens
  chr3:50654359-50654419
  hyper
gtgtccctggaaaccgaggaagtaaccgccccctcgggaagccacgcctcctattttgtt

SEQ ID NO: 108361 - DNA, 30 bp, Homo sapiens
  chr3:50654943-50654973
  hyper
ggtgccactagaagcgccaggctggggccg

SEQ ID NO: 108362 - DNA, 921 bp, Homo sapiens
  chr3:50712099-50713020
  hyper
agcgagtggggagtccgggtagagggagtcgcccacctgaccggcttcgccccctccggggtttgctgcagctgagggccccggaccagcgattctagaagccggtccggggccgggcagtccaatagcttctcgcggatttccctccgctggcgcgcagcagcggcgcgtggattcgcgcgcgggctcgggacggcgcgagcccgggcagcgcgagcccctgcgcggcagggagtggcgcatgcgcgggcgtcctgcgagcccgctggggcgagccgagccgcggcggcgccgggagccgggcggcggagctgtgaagaagcaagcggcggcacgggagcagcggcgacggacaggtggcgagccttcgcccgcgccgccaggggctgctgggccacccgcggagcctcgcggtccagacgtggcgggggtggcggcggcatcccggacggcctgtgagggatgcgccgcccactgccccgcgccgcctgaccgtccccgcctcgactcgcggtgcgccacagccgggcccgcggccgtccccgccgcgttgtcgcccggtcgccgcgcccgcggggccgcgcccggcacggccatgtggacccccacggaggaggagaaatacggcgtaggtaggtgaggctcaggcctggccgtggcgggggttctgggggacgcgcccagctcccggccccgcctggattcgcatcctcgtgcccccgccactgcccgcaggctgcgcggcctcggcgcggggcgagcgcggggtgggggcaggtgcgggtgcgggtgcgggtgcgggggtgggcgcgggtctctgtgcagagagggcggcagggggcgctggcggtgcggccttggcaggtgcggcccgcgggaggggtgggcaaggcccgggcagttgcccgaggtttctggtgt

SEQ ID NO: 108363 - DNA, 30 bp, Homo sapiens; identical to SEQ ID NO: 39264
  chr3:50751133-50751163
  hyper

SEQ ID NO: 108364 - DNA, 30 bp, Homo sapiens; identical to SEQ ID NO: 39265
  chr3:51705048-51705078
  hyper

SEQ ID NO: 108365 - DNA, 30 bp, Homo sapiens; identical to SEQ ID NO: 39266
  chr3:51705665-51705695
  hyper

SEQ ID NO: 108366 - DNA, 312 bp, Homo sapiens
  chr3:51975953-51976265
  hyper
gcctggcaagaccccgcgtattgataggcttccaccgcccgccgggccccgcctcctactgctccattgggtccttctgcaggctctgccacgcccccaggcacccataggatgcacgcttgtagccccgcctcctgaagttcctaggctcccgcaccaggctcgagtaggaagcccgcatctccacggcgcttccggcctgatgctgtggcgcttgcgctctgctgctggcccacttcgaagtcggagcaagagccttctctgtgtttgcgccccttggccgctggggggcgccagagacgcggcgccctt

SEQ ID NO: 108367 - DNA, 190 bp, Homo sapiens
  chr3:51989926-51990116
  hyper
ccatgccgcgccgctcgcttcctctccgccgctctgctgccggcctgcacgctcggggtggccgcacttggcctggcacgctaccgcctcatcgtgcacccgctgcggccaggctcgcggccgccgcctgtgctcgtgctcaccgccgtgtgggccgcggcgggactgctgggcgcgctctccctgctcg

SEQ ID NO: 108368 - DNA, 291 bp, Homo sapiens; identical to SEQ ID NO: 39270
  chr3:51990359-51990650
  hyper

SEQ ID NO: 108369 - DNA, 196 bp, Homo sapiens
  chr3:52001296-52001492
  hyper
cccaaacttcgcggcccgccgtgccccgcccggcccgcgccctacctcgctggggctgtcctgcggcggcggcggcggcggcacggcggctgggccgctcagtcccacattgtccccgggagaggcggccgctcacaactgcgagtgacatcagctgcgaacaatgaggggtttgacaggcgcggagcccggccgg

SEQ ID NO: 108370 - DNA, 204 bp, Homo sapiens
  chr3:52001980-52002184
  hyper
tgcgcgccatcctccgctcgggcttgcgcccaccaagacccgctctcctcggccacccacagctgcatggcccggccctcgtccgcgcaggacaggctggaggaggggcctgagagccgtgtggccctgtgcacccgatcctgtgataaccccaaatctacccccggaattccttttggggatagggtcgcaaggaacgggctc

SEQ ID NO: 108371 - DNA, 30 bp, Homo sapiens
  chr3:52007732-52007762
  hyper
gaaaggcgacccgccggggatgcggggtgc

SEQ ID NO: 108372 - DNA, 116 bp, Homo sapiens
  chr3:52008006-52008122
  hyper
acgggaagcaggcgcgtgctggcggtgacctggggccggaggaggaacgctgggaagaggccgggccccatccagcgggggcggggactgggccgtgctccggggcgccctcttgt

SEQ ID NO: 108373 - DNA, 30 bp, Homo sapiens; identical to SEQ ID NO: 39273
  chr3:52008929-52008959
  hyper

SEQ ID NO: 108374 - DNA, 616 bp, Homo sapiens
  chr3:52009562-52010178
  hyper
gtgtctacctgtctgcgtgtgtgcatttctgggggtttgtgtgtgtgtgcgtgtctgctttcctgtgcatgtgcctttcttgtgtgaatgtgtagtcttacggttgtgtgtatgaccgtgcttgagtatttctgaggatcagcctgtggttttcaaagtgtgcatctccatcagtctctctggcttcctgatgcctgactgtgtgcgtgatgtagagggtaccattacaagggattaattgcacacgggccagtgtgtgtgcaaagaggctgcatgtacatgcagggaatagcttgtgcaaaagaaaagcgtgtgggggcaagactcgtatttgtgcgtgtgtgcacctgtgtgtcattgtcaacgcatattccaatgacctaacccgggcacagtttaccctgccccccgcaaacccccgcaggcggccagctgcaggtccactacaatttcctagtactgcgggcaccctcggttgccaaggcaacagcctaagccccgcccttcccgctttggagaagcgcgggggcgccccgagtgggcagcaaggaaatgtccctcgcgcccggtgggaatctggactaacgcccagttagagacgcgcgtctgaggttgt

SEQ ID NO: 108375 - DNA, 3 bp, Homo sapiens
  chr3:52016823-52016826
  hyper
cac

SEQ ID NO: 108376 - DNA, 211 bp, Homo sapiens
  chr3:52017370-52017581
  hyper
gcccgaaccagaggcgggcggggacatccgcgccgacgcggccgctggcgccgggacggccctcactgacggtcttcggtctccgccccgacatccggcctcggccacgtggtgggcggaccggggcggtcctgagcctgcgacctcgcaggcgacctcgctggaccctaagtccaggccacagtcagggaagggcgctgagaggcgagcg

SEQ ID NO: 108377 - DNA, 189 bp, Homo sapiens; identical to SEQ ID NO: 39276
  chr3:52029758-52029947
  hyper

SEQ ID NO: 108378 - DNA, 30 bp, Homo sapiens
  chr3:52091267-52091297
  hyper
ttgggaagggatcgcgagccctttaagaaa

SEQ ID NO: 108379 - DNA, 30 bp, Homo sapiens
  chr3:52188058-52188088
  hyper
gagaggcccgataccggccccaggtcacac

SEQ ID NO: 108380 - DNA, 30 bp, Homo sapiens
  chr3:52188403-52188433
  hyper
gccgaaggcagctgcggtggccgttgcggc

SEQ ID NO: 108381 - DNA, 30 bp, Homo sapiens
  chr3:52188710-52188740
  hyper
tccggctactctaacggcgagcgcagcctc

SEQ ID NO: 108382 - DNA, 16 bp, Homo sapiens
  chr3:52232453-52232469
  hyper
cggccccttccggcta

SEQ ID NO: 108383 - DNA, 30 bp, Homo sapiens; identical to SEQ ID NO: 39277
  chr3:52272675-52272705
  hyper

SEQ ID NO: 108384 - DNA, 104 bp, Homo sapiens
  chr3:52273292-52273396
  hyper
tgcgcacgccagcgcgttcctctgtggcaggagaggggggcctgcgtgtgaccgagcgtgcgtgggaggacgcgcgtgtgtgtctgtgcgccctgatcacggtg

SEQ ID NO: 108385 - DNA, 132 bp, Homo sapiens
  chr3:52280022-52280154
  hyper
cgcacgaggacgcacgctaccctggaatgcaggctacgccgagtgagtgcccctccccgacccccagctcaggcccgggcctgaacccgcttcgggtcctgcgcccgcctagaaagcgggaggagctgagtg

SEQ ID NO: 108386 - DNA, 30 bp, Homo sapiens
  chr3:52312791-52312821
  hyper
tggcagggagcggccgagacgtgcagggcc

SEQ ID NO: 108387 - DNA, 30 bp, Homo sapiens
  chr3:52321752-52321782
  hyper
cccctcccggacaccggcttcagccagagc

SEQ ID NO: 108388 - DNA, 30 bp, Homo sapiens
  chr3:52322091-52322121
  hyper
gccttctttgatggcggggaggagtcaaga

SEQ ID NO: 108389 - DNA, 30 bp, Homo sapiens
  chr3:52445211-52445241
  hyper
tcctactcaaggaacgtcttggcccagcga

SEQ ID NO: 108390 - DNA, 31 bp, Homo sapiens; identical to SEQ ID NO: 39280
  chr3:52477535-52477566
  hyper

SEQ ID NO: 108391 - DNA, 30 bp, Homo sapiens
  chr3:52489859-52489889
  hyper
agggtctgcgattgcgaggagggggctggg

SEQ ID NO: 108392 - DNA, 140 bp, Homo sapiens
  chr3:52570461-52570601
  hyper
ctccagagctgaggcgcctgcgccagctccttcgaggccctgctcggcttcagggagcacgcgcgccctgccgtgctctgattggcggagctgcacgcccccgctgcagtctgattggcggatccgcctcgctttagaag

SEQ ID NO: 108393 - DNA, 30 bp, Homo sapiens
  chr3:52719339-52719369
  hyper
acccggaaaaaatacggaaagaaaatcact

SEQ ID NO: 108394 - DNA, 322 bp, Homo sapiens
  chr3:52720016-52720338
  hyper
gcgtaagtgcgtgacgctcgtcagtggcttcagttcacacgtggcgccagcggaggcaggttgatgtgtttgtgcttccttctacagccaatatgaaaaggcctagtaagtggggtcgggaggcgggcgtggagggacccacgtctggaagttgctgcagccaccacgacgctcttctacggctacggctttgtctctgctggtatgggggtgggagcctacgcgtaggccttggccctatttcctggtagaaccgagagttggaagtccctacggcgatcatgttaaccgcgcgggctcattctgcggaacgaagccgggc

SEQ ID NO: 108395 - DNA, 226 bp, Homo sapiens
  chr3:52739476-52739702
  hyper
ggaaagtgatgtgacgctccggggatcccaccaggctcagagatacccctggttagggctccgacaagtcgttcccctcaaaggctcgccgcggccgcccttactgcaggcgatggaggagatgcggatgcagcccgcgccccgacccgccctgccagctcagcgcccgcgccgcaggccccggagcccagcccgttgtctggccgcccgcgttccctgcacgctg

SEQ ID NO: 108396 - DNA, 123 bp, Homo sapiens
  chr3:52740138-52740261
  hyper
gggcttagaaggcccggctactgacgcgcagtgccagaccttacccctcacggtccttaagtctcggtcgccctcgcctcgcagcctgccacccgcgctcagctgcccgcctcctcagccagc

SEQ ID NO: 108397 - DNA, 323 bp, Homo sapiens
  chr3:52804892-52805215
  hyper
ggattgctggggcccggcccgcgacgacgccgctgccatagcgatccgggccgggagcagttctgcgcatgctcctgcgtccccaaaggacggccatagagcggacgccacgagcggccagagaggttccgcagccccgggaggacccgccatagagcagaggctccaggaggccagagcgactccgccaggctccgcgcactttctgtgcgtccgttccaccgtccggatccccgccacaacagagtcagggaaagcttcctctttttgtgcacttgtttgtcctaaggccgttacaagtattgttcgttcattctgcaaat

SEQ ID NO: 108398 - DNA, 30 bp, Homo sapiens
  chr3:52931291-52931321
  hyper
gggtcccagactcacgcattaacgtgctga

SEQ ID NO: 108399 - DNA, 199 bp, Homo sapiens
  chr3:52931642-52931841
  hyper
agccaaggttggggcgggcctcggccgcggcagctctccccacccgcccccgaggggcggggctccggccgggccacggggcggggtcgcgggtcccgctcccctctccaaccccgccacgcccgcaggtagacaggccaggtgagccggccaccgcagaccggaatgagagcctgggaatcacgagctccaggtccgg

SEQ ID NO: 108400 - DNA, 30 bp, Homo sapiens; identical to SEQ ID NO: 39285
  chr3:53080425-53080455
  hyper

SEQ ID NO: 108401 - DNA, 304 bp, Homo sapiens
  chr3:53164408-53164712
  hyper
ctgcccatagcctccgcgccaggctcagacaccaggaaatgccgccgccactccgtttagtcgcgataagatggcgtcacggcgcgcctcgctgtctgattgatggccttgagagaggggggcggggcacgagaagttctggtcctttaagtgggcctgtctcgggccgtctgttatggcgcctggctctttctatttcggtaggttttgcgctgtctgtcgcttgtgcgctgtctgtccctctcttccccgtataaacgaaatagtgtggcgagtactaagagataccgttaaagaatccaaa

SEQ ID NO: 108402 - DNA, 148 bp, Homo sapiens
  chr3:53190591-53190739
  hyper
acgcggctgggcgggcgtctgcgcccccggctcggaaaggcttccctgaggcggggcggggcggggcggggcgggagggtggggcccgggggactttgtgctggtgcacgggggtcgcgccgactggcgtgtacgtggttgtgcggtg

SEQ ID NO: 108403 - DNA, 30 bp, Homo sapiens
  chr3:53191038-53191068
  hyper
gagctaaatgggtgccggggatgggggcgg

SEQ ID NO: 108404 - DNA, 30 bp, Homo sapiens; identical to SEQ ID NO: 39287
  chr3:53195014-53195044
  hyper

SEQ ID NO: 108405 - DNA, 30 bp, Homo sapiens
  chr3:53195301-53195331
  hyper
gccgcgcggaggcccgggccacacctcact

SEQ ID NO: 108406 - DNA, 227 bp, Homo sapiens; identical to SEQ ID NO: 2578
  chr3:53195773-53196000
  hyper

SEQ ID NO: 108407 - DNA, 30 bp, Homo sapiens
  chr3:53288993-53289023
  hyper
caggacgtcactcccggcgctagggccctg

SEQ ID NO: 108408 - DNA, 30 bp, Homo sapiens
  chr3:53289275-53289305
  hyper
gaaggccgggcccccgagtctcctgcaaga

SEQ ID NO: 108409 - DNA, 265 bp, Homo sapiens
  chr3:53289955-53290220
  hyper
catggtgcggcaggcggggaccgggcgcacacgcggacacacagagatagcggctgctcccgcggcgacaggcggctgccgaggccgggcgcggggcgggggcgcgttaagtcgccgggcggggcggggcggggatgggagaggcggggcagggggaggaggcggggctcggatcaccccaggccttcagccccgccccgcctggggccgcctcctgcccgctcccctcccctaggcgctgggccgctgcggactgcgaggttag

SEQ ID NO: 108410 - DNA, 303 bp, Homo sapiens
  chr3:53381570-53381873
  hyper
ggtgggggcggagtcgcggacaggaaagtgccatcgaggcaaaattcccccatctgcgtcagtcccctcaacttccgcctctacgcgggcctcgcggcagggcggtacgtcagccattctggtccgccgcgcgcacgctccgggcgccgggttccggcgttgtcagggtccgcggccctacgatgtgggcggtgtccaaggctgcgtagtggagcttgcaggctggagctccggcgcttcctttccctgagctaaaacgactgggtcctgggatctggcctctagctcgcctgccgagctctt

SEQ ID NO: 108411 - DNA, 582 bp, Homo sapiens
  chr3:53527818-53528400
  hyper
cttgaacaacacgagcggtttgaaagaccttggctttgacttccctgtacctgcctccaaacacacgtgggggcggggtggggtggggggagatattgccccccatccccgttgccttccgcgacgccaggccaggcgcagggcaggggagaagatggggggcgccctggattcgcggttccagctgcaggcagttacctggggtagtgagtgctctctacagacccgggctaccccaacccccccgattccagaaagggccggagaaaagcagggggcgcctgccccgctccggagcagccagggagcccggccgagccttgacgaggatgagctcggagaccgcagcagctaccgcccgctagcacctgagctcccagggggcggggcctcctccaggtgtgcgcagaggaggccggcgcggagtcggggccggcgcgggagcccgagctgtcccccagcccagaaatgcgcggggaggagcggttcatccgcaccccagcgccgcgggagacactggcgccgcctgcctcctccgggtcccggggggagagcgcaccgtgcggcgcggagggggttaac

SEQ ID NO: 108412 - DNA, 230 bp, Homo sapiens; identical to SEQ ID NO: 39293
  chr3:53528642-53528872
  hyper

SEQ ID NO: 108413 - DNA, 30 bp, Homo sapiens; identical to SEQ ID NO: 39294
  chr3:53529244-53529274
  hyper

SEQ ID NO: 108414 - DNA, 416 bp, Homo sapiens; identical to SEQ ID NO: 39295
  chr3:53879617-53880033
  hyper

SEQ ID NO: 108415 - DNA, 30 bp, Homo sapiens; identical to SEQ ID NO: 39296
  chr3:53880702-53880732
  hyper

SEQ ID NO: 108416 - DNA, 30 bp, Homo sapiens
  chr3:53916120-53916150
  hyper
tgggtcattatggccggagacacccaccaa

SEQ ID NO: 108417 - DNA, 30 bp, Homo sapiens
  chr3:53925216-53925246
  hyper
tcggtctttttacacgttgtagacagaggc

SEQ ID NO: 108418 - DNA, 274 bp, Homo sapiens; identical to SEQ ID NO: 39297
  chr3:53925897-53926171
  hyper

SEQ ID NO: 108419 - DNA, 30 bp, Homo sapiens
  chr3:54121883-54121913
  hyper
atggcttttcttcccgagccatctgggacc

SEQ ID NO: 108420 - DNA, 93 bp, Homo sapiens
  chr3:54154848-54154941
  hyper
gacactgcccgcgggcggggcgcacctggcgctcctggagaggggcctgttccttgcgttgccccccaaggtgggagcgcgacctgccagagc

SEQ ID NO: 108421 - DNA, 274 bp, Homo sapiens; identical to SEQ ID NO: 2582
  chr3:54155218-54155492
  hyper

SEQ ID NO: 108422 - DNA, 1104 bp, Homo sapiens; identical to SEQ ID NO: 2583
  chr3:54155524-54156628
  hyper

SEQ ID NO: 108423 - DNA, 248 bp, Homo sapiens; identical to SEQ ID NO: 2584
  chr3:54156654-54156902
  hyper

SEQ ID NO: 108424 - DNA, 6 bp, Homo sapiens
  chr3:54156978-54156984
  hyper
cgccgc

SEQ ID NO: 108425 - DNA, 668 bp, Homo sapiens
  chr3:54157005-54157673
  hyper
cgcgtcgggcggcgaggccggggtgggatgctctggcccctgcccgcaggttgccgagtgagatctggagaggctcacctcaagtgacggcaccaactttggagcctggttaccgaatccaacttccatgggccgctgaatttcccccctctttgctctactgccgccccacttctttttttgggggggggatgggtggatttcttctgactgctatttgccaggtgatgcccagtttggggggtcgagtcctcgggcagtggttcgaatgaaactcagtggtctttttagagagcctgggagactttgcgcattcttaactccgcgacccccctcgggccccctcccgcgctgcgctttgcagttttggtgctggcagtttctaccaagccgctttttctatcttttcttcttttaaaacatgttacatcgcactgctccttcagccatagtcccatgtgtgcgtgtgcgtgtgcgtgcgtgttgactgtgacacgggtgttacatatcttcctgtgccccttctccctgtagggtgaagctctgggcctcggcttttggtggggagataaaatccattgctgctaagtactccggttcccagcttctgcaaaaggtaaggtttctgtggtggcaggaagcgatgatttttccggcacagaaaatgg

SEQ ID NO: 108426 - DNA, 30 bp, Homo sapiens
  chr3:54157885-54157915
  hyper
atggctctcgtctccgtgtcggtattgctg

SEQ ID NO: 108427 - DNA, 30 bp, Homo sapiens
  chr3:54888032-54888062
  hyper
cgcgcgggcaccgccgagtacccggtcccc

SEQ ID NO: 108428 - DNA, 30 bp, Homo sapiens; identical to SEQ ID NO: 2587
  chr3:55237864-55237894
  hyper

SEQ ID NO: 108429 - DNA, 610 bp, Homo sapiens
  chr3:55518993-55519603
  hyper
cgaggcctcctagggcgacactctccttcccaagcccagaagaagaggtaccaaccctgtgtccagctggccgagtcccatttgctgggctggacccgtggccccttccgtattgcagcggccggcggcgcagcgaaactggtcctctgggggcctccgagggcccctgctgggagagtggggtctggtggtcgggagggatgaagggagcaggggtgggagggagaggggagcagctgcccgcccgcccgccccaaggaaccgaggctcgcaggagtcctacctcaaggcggccaacagggggcagccggcaccgcaccgcggggaagaaaaggccgcggggatggctccgagttctgcgcgcatagtgctaaccccttgagcaccggagcgcacgggggaggggaggagaagacaggggactcttgggccgggcctcctggggagggtcttccgttgagagggtcggggggtggaggagacgaaggctactacgtcctggacccgagaacaactcccctacacacacaaacacacacgcacacacacgcagccaaggatccacacactcggacacacacacatttgtcggcccgcggttcgctgcgca

SEQ ID NO: 108430 - DNA, 2005 bp, Homo sapiens; identical to SEQ ID NO: 39306
  chr3:55520344-55522349
  hyper

SEQ ID NO: 108431 - DNA, 760 bp, Homo sapiens; identical to SEQ ID NO: 39307
  chr3:55522551-55523311
  hyper

SEQ ID NO: 108432 - DNA, 40 bp, Homo sapiens; identical to SEQ ID NO: 39308
  chr3:55523370-55523410
  hyper

SEQ ID NO: 108433 - DNA, 30 bp, Homo sapiens; identical to SEQ ID NO: 2591
  chr3:55749866-55749896
  hyper

SEQ ID NO: 108434 - DNA, 1440 bp, Homo sapiens
  chr3:56501325-56502765
  hyper
aatcacagagggaaccgacaattcaccgctcggggagtaaattgcctttcatacagcaaaggcaggtagccgcctaaaatcgatccactcctaaaagagcggaccctccctctctggcaaggagaacagagacccttaagtacaaaataaataaggcagggccgaacggagagtttacgagcgctattttattaccccgaaccaaagcagctcttaatcttcactgtcctaagacgatctttcaaaggctcgtacggtattttttttaattaggtacaccttcgtaagtatccctttttttgtataattaggagatggggaggaggagagaagggatgccgttcagttcaatttcacatcgtattccttttcatacaccatcccctagccctccccgataaatcggcttcattttccctgacacgggttttttaaaaaaaaatatgctcccctctgaacccacccaggcggccagccaccccacccccgggcgggggctccacctttctccactttgttctgcttaggattgctcaagacccccgaccccgcgaacaccccacccctcgaggcaagaggggacgccaggcagaagagggggatctgagagaagaaaggcgatggcagtgagggtggctgccggagagggactgcgggaggtggcccgggcagccggggctagcgagcggcgcccgcgcgctggaggaaaccgtgcacttgttccaatccgggggtttatacatcagggcaaagcctcccttaggccgccccatccctccccccgcccaagaaagccccgtaggaggcggatggttcacccttaggctccccacgataacgcattgcagctccccacgagcgagggggacccggcacgaggaatgcccgggcacgggcgccccgagggagccgggcaccaggcggccccggccccggcgtcggcgtctcacctttccgatgctcgccccggggccgtcccacatggatttttacaacctctcgtcgccttggccccgggcggccaggaggagcaggagccggcgccggagccggagaccgagcgagcaggagcgggaggcggaggaagaggaggagaagcggggcggggaacagggagggaggaaagaagggaaggaggaggacactgctcggagggccagggccaggcgcggggccgggcggggccggcggccgagggggcggcacccgccgcagtcccgagacgcgcgctcgcgcggcgctgccaggcgctgcgctcggcggggcccccacccggccggccggcacgctcgcccgctcgcagaggccctgactcacattcccagcattcccgaggagccgctaggggggacggggctggggcccgggcgcctccgctgggggcagcagaaagcgcccggcatgggcgggggtcttcgcagcgcctcctcccggcaggcc

SEQ ID NO: 108435 - DNA, 260 bp, Homo sapiens
  chr3:56590945-56591205
  hyper
ttggaaggctacaattgcgagaagcgcaggtctccgccaccgaagctttagactcataagccgggtcaggccaaattccgctgtgcgtaggggaacaaacggcacaaacggggcacaaaaggggaacaaacggcatacgcaaccgtccccgcgggagccccggcccagctcagcgcacccgccagcatgccccaccctgattggtccacttgctcagctcgccggcacccctatatccaattggcgtagcgcttgctgag

SEQ ID NO: 108436 - DNA, 30 bp, Homo sapiens
  chr3:56835858-56835888
  hyper
ccgctgaccctaggcgactacaaaactccc

SEQ ID NO: 108437 - DNA, 899 bp, Homo sapiens; identical to SEQ ID NO: 39313
  chr3:57112573-57113472
  hyper

SEQ ID NO: 108438 - DNA, 779 bp, Homo sapiens; identical to SEQ ID NO: 39314
  chr3:57198369-57199148
  hyper

SEQ ID NO: 108439 - DNA, 30 bp, Homo sapiens
  chr3:57199457-57199487
  hyper
ccaccctcagtcctcgtgtgctggccccgc

SEQ ID NO: 108440 - DNA, 517 bp, Homo sapiens
  chr3:57204027-57204544
  hyper
cgcctggcctgggaccgccttgcctgggacgaaaggccccagactcagctgattcctccagactcttcctgtctaggacgccaaaaacatggccttcctaaacccagccttggcgcctcctgcacagcccagagacccagggcggcggacaacagaaaacctggggcggcggacccaaccctgcgcccagaaatcccaggacgcccaccccatagttctggagcggtgcgtaccttggccactacacggaattcaccggcccacggccacttcccgtttcttttcccggaggaaaagaagagcggatgtctagtctccaaggtaaccgcgagggggcgcgcgcagtccaggtcggagaccgccgccccagactaccctgcactgcgaccgcacaacaagtctttctagatcaaagccgccagggcaggtgggagtactctgctgttattcagagctggtgctaagctttaggggaagtagagtccagggggtcgtaagaaaacggatcaaatgggtc

SEQ ID NO: 108441 - DNA, 219 bp, Homo sapiens
  chr3:57261347-57261566
  hyper
ggggattaagactggacgcttcgagcggagttgggaatgttatcatctgaggaaactaaaaggcgccagcagtaggactttctccaaggtctctgacaaaatatgttgcgggaaaagtcaacccgccccaaattcccccgtgtggccctaactcgaggctctggctcctcgcgccggcaagctgaggaagagacggtcccctgcgatttagatacaaac

SEQ ID NO: 108442 - DNA, 175 bp, Homo sapiens
  chr3:57261814-57261989
  hyper
cggagagggcgggccggggtcagctgcggcgggcgggccggcgcggggagctgtgggcggcagctgcgtctcctgccaccgccctccctccgccacgatgccggggatcgacaagctgcccatcgaggagacgctggaggacagcccgcaggtgaggcgcgggagctggtgggcg

SEQ ID NO: 108443 - DNA, 140 bp, Homo sapiens; identical to SEQ ID NO: 39318
  chr3:57262339-57262479
  hyper

SEQ ID NO: 108444 - DNA, 197 bp, Homo sapiens
  chr3:57541811-57542008
  hyper
actttcgacaaaaccgtggaatctagtattttcctctgacacctttatattttcttcacttccctataattctgacctatcgtgtaggtaaaaattaatcttcagagtattacagacatgcgtgcccacgcgctaggcgaaagtgcgagtcggaagcacttcattccctctcttcgctagccggaagtcgcgagatc

SEQ ID NO: 108445 - DNA, 30 bp, Homo sapiens; identical to SEQ ID NO: 39319
  chr3:57582312-57582342
  hyper

SEQ ID NO: 108446 - DNA, 30 bp, Homo sapiens
  chr3:57583059-57583089
  hyper
tgctaggcgactggcgcggcagctccggct

SEQ ID NO: 108447 - DNA, 306 bp, Homo sapiens
  chr3:57583319-57583625
  hyper
ggctgaggcacatgcgtactgggagacggacaaagtcccacaatacctcgcttcgtcactgccaaatcagactcagggtgagacgcttccgcccggatgaaggtattgtcggggtgatagtccttgcttccggaaaggcgagctgagcattatgggttaggtgaggaacctcgccctcttctattacggtacgcgcgatgggtattccctgatgccatgaacttacacgtttcacacacgggaccagacgcttgctttagttgacgcatgaagaccggtccggtcttttgcggagaaaagtggtta

SEQ ID NO: 108448 - DNA, 42 bp, Homo sapiens
  chr3:57741911-57741953
  hyper
gccctctaccaacacggcttccgtggcgtcgttcacgtgaca

SEQ ID NO: 108449 - DNA, 30 bp, Homo sapiens
  chr3:57742505-57742535
  hyper
gaagcctaggcgtccggggaccaacttcct

SEQ ID NO: 108450 - DNA, 63 bp, Homo sapiens
  chr3:57742968-57743031
  hyper
ccaagggggaaaagcggccgcgatctcaaaccaaacacaagaattggcgtgtgactcatctgc

SEQ ID NO: 108451 - DNA, 30 bp, Homo sapiens; identical to SEQ ID NO: 39322
  chr3:57993964-57993994
  hyper

SEQ ID NO: 108452 - DNA, 623 bp, Homo sapiens; identical to SEQ ID NO: 2597
  chr3:57994557-57995180
  hyper

SEQ ID NO: 108453 - DNA, 167 bp, Homo sapiens
  chr3:58203324-58203491
  hyper
taccacccatgccaacgcgccaggacttgtcaccacgtgggtggcagatctgaagcagcctgtaactatcaagttggcctttccaggctgaccacaagggtgcatggtgaggacacaggaccgagaggcaaagggcttctcacagcgcctgacgtgggaaccagcag

SEQ ID NO: 108454 - DNA, 49 bp, Homo sapiens
  chr3:58223131-58223180
  hyper
tgtgtgtggctctgcgggctcagaggccctccccgcgccccgccaccgt

SEQ ID NO: 108455 - DNA, 30 bp, Homo sapiens; identical to SEQ ID NO: 39325
  chr3:58223512-58223542
  hyper

SEQ ID NO: 108456 - DNA, 180 bp, Homo sapiens; identical to SEQ ID NO: 39326
  chr3:58224036-58224216
  hyper

SEQ ID NO: 108457 - DNA, 145 bp, Homo sapiens
  chr3:58292071-58292216
  hyper
gccccaagccttggcgggtccttgcggcgaataggagtctggtcaggcgtcaggctagtccgacgaagagtgggtaggtggaagccttccaaagagcggcggttgtctgggagccgtctcagttggccgcgacccgggcgcatgc

SEQ ID NO: 108458 - DNA, 65 bp, Homo sapiens
  chr3:58318384-58318449
  hyper
ggtgttccctggtccgaagcccggagctaagggcaccgggtctgcggtgcggctgcgaggagcag

SEQ ID NO: 108459 - DNA, 30 bp, Homo sapiens
  chr3:58318745-58318775
  hyper
aaggtgctgctggacgacacggtgccgctg

SEQ ID NO: 108460 - DNA, 30 bp, Homo sapiens
  chr3:58319089-58319119
  hyper
tccgagttggggggcgggggcgggggctgc

SEQ ID NO: 108461 - DNA, 485 bp, Homo sapiens
  chr3:58419467-58419952
  hyper
gaatacaggccgcgcgctgctgcctacctcccgaaggggtctccgcaccaagccagacaccgccgccatcttggtcgtgtcctctatccgctgccaaacgacaacagaggggccggcagacgtgagcaggccccgcctccaccggcgcgggccaatggcaaggcgcgccggctgcgtgacccgcccacccgcccaccgggtgaggggccgcggggccgggctgaggtggcgtgtgggtggccgtgcccctctgcctggagccgcctcaaatcaactttattgacagtaggcggtgaccgacaggcggggtgcacgctgggcacacgtgcctggtcggtgttacttgaagcgtggggactagaagtcagaccctgaggagcatgatctctggaagctggagagaccttaagagttaggccaacctgttgtgggtgctggaatcctttgggcaccaagaagtgcttgcacacgctctactgatgggg

SEQ ID NO: 108462 - DNA, 30 bp, Homo sapiens; identical to SEQ ID NO: 2600
  chr3:58474980-58475010
  hyper

SEQ ID NO: 108463 - DNA, 204 bp, Homo sapiens
  chr3:58571200-58571404
  hyper
ggatctcccccaggcggggcttaagcgggaagggcgagcagttccagagcgggccgcgcggggcgcggggacaggcaccgccgctgcagacgcggcagctggtttgcctcgcgcttttggctccagcggtcggcaggcaggcctacgggtggggcgagctccttgcccaaggcagagggtagctggcccgtgagcccaagtccc

SEQ ID NO: 108464 - DNA, 63 bp, Homo sapiens
  chr3:58572570-58572633
  hyper
ttgctcccacttacccgaccggagcagcacagcccggtagagcccggtggcatcggagggccc

SEQ ID NO: 108465 - DNA, 495 bp, Homo sapiens
  chr3:59035463-59035958
  hyper
ggtgggaaagggcttcgtgcttggcccagacttgggcaggctcttctcagcccctccggcccctggtcagctccatctcccgccctccatcagcaccattgcggctccagcctccgcggtgcccgggtctggggagggcgcagctgcctggacggactccgggccgtccctggggagtgattgtgtgtgtaacctacgtgacggggcgcccagtcgcggagccacagacaaccgcccgctggcctaggaaaagcgggcgcgctcccgctgccgccccaccccagaatcaaaccgcgaaagagcagcgccgagcgccacccgcgttccggccgcgcccattggttcccactgggcgcctgcgcgttgcgctctctaggcttctcgccgacgggcacgggaggatacgcggtgacgtagcgttgcccaggcaaccgcgggactcctggagaaatggtgggcggtccaaacggtgagcagcacgctccttacttaggt

SEQ ID NO: 108466 - DNA, 579 bp, Homo sapiens
  chr3:61237048-61237627
  hyper
gcccactgggtggccgcctgagggacccgggaacagagggcaaaaagtcctgtgaccggacagagcagagcggggactgcaattcccagaagaccccacggtaggggcgggacccaagatggccgcttgtctggggacaggagcggaggccaatacgcgcagagcatgcgcctacgccgggccaattgaaagccatagtgacagtaaccctgattcaggggcgggaaacactgaccacagaagacaagttgaggtgagaatccccttacaagggggtttggggcataaatcgcacaatctttggctttttctaactagaaaaagaaacatgattcttttcacgtgtaacgaaaggctgtaccgcacttttgcttttttctttcctcccaaaacgcgtttaactatcccttcacgacttcccactggctggatttcttttcgtttcatttccccactctggatctttctggattccttaagccttcttttctttatgtgtctctcagaaacacagacttgcagtccctggcttgatccatcaaataatgtggtcatttacgactacgctcagccctccct

SEQ ID NO: 108467 - DNA, 30 bp, Homo sapiens
  chr3:61237849-61237879
  hyper
acatagtaaatacaccgtattttcaataat

SEQ ID NO: 108468 - DNA, 2752 bp, Homo sapiens
  chr3:61546307-61549059
  hyper
gcctagtcctcccatttcccccggacgcctctccccgattgctaaagaagcagccgctccccgggtagctgccaggaaatcagtccggccccgcggcgctgctttcaccctgcagggtgtaagaggcgcacttcctgcgccctccccgcggccaaaccggggtgcgggaaccttctccagagaagctgcgagttggggaaactccgccaccgatccatcgtggcgccgggaaaggggatgcggggctcggaagggctagatttcgcaatcctgggatcgacattcctcccctcccccactttccccagccttggactgggccaatgaaagcccgaaaaagaaaaaaaaaaaaaattaaatctcaatgtagccggagtgcaaaggccgctcggctttgtttcccggcgggggaatgcgctgtgttggaggcgcgaacaggagccgcagacggtgagcctcaccgctgcaaatgccagggcagtgaagccgaacagaaaaccccatcgctttaaaaaggcagctgtccgccctccccctttcccctcgccagggcgaggggcccctcaagtccgggatccgcgagctgcgcggaggatctcgccaaacccgagcaccgtgcggcgtcttttaagagctcgaacaacgggaatccagcaaaaaacaagccggccccagaaggcagcctccctcctctctccgcgcacgggctacaatcgcccccagtccccaaactgtcccagtagaggccgcgcggagagagcagagccgagggacccagcgcaaggcgggagccaagcgcggctgctttaagaacgcggagagcgcgcgcccgccgccagctggcccgggctgcgcgcccccgccgccaccgcgcgccccctgttcgctcgctccttcgctcgccggctttaaagtctctgccaggatccatgctcacatgttacttcctgtatggaggcatggccagtttccagccccgcgctcttcgttccttcccagcctgcgccggagccacaactttcaggagcatggactgaaggcgccctcgccccagcgcccctctgagatcctttgtgttttcctccgtttcctccggccgtttctattttggggggctctccgctccccctgcctctcccctccccttcccctctcgcaaacatgcctccttccttcccggggccctggaaggagctgcctgcctgaagcccggagacgccgcgccgcgctcagccccgccgccgcccgccggctctcgggctgtgctgcgctgccgactcaagttggggatcctcggctgctcgccgccgccgcccgcggtccctgcctgccccaggcccggggcatcgccgccggccgccgactccgcgccctgcccgatcggctctctcctttttaaacggaaagcagcctttctccgccgagaggatcgtccccagcgtggctctgcgttcccggtcactttttgagattttccggggggcgctcggcggcttcccggattccaaggggactcgggccgccgagcgcggggggcccgtggagcgggcgagccggggaagcgccccggcttagcggaggctcgcacggaggcaagaacttattcaacaagtttacctccctgctttcctcttttcgatgtgcgttttcggacatgcggaggttactggaaccgtgttggtggattttgttcctgaaaatcaccagttccgtgctccattatgtcgtgtgcttccccggtgagtgccggccgccgaggggatgcggccccggccggcgcgcgttggggatgcggagttgtcgcctgggcgcggagctccggcgcccgtccgggagaccctggagagggtggagggtggcccggcgcccggataggagaaaaggattgctccgctggcttggatgatgtttagggaggcaggctagtggtcgaggaaggtggaggcaggggctggccggggagggggctgggggacgcgggggtctgctcccgctcccttttgggggtcctggggagctggaatcgggagaaagggggacttgctttgctgactcgtcgccgatcgggagaactcgagttgtggggcggttggggagactgaggccatggaaaggatgcttctgtgggtttggggggcccgggatgagccccctcgctctggcgggtattgaaggaactcagaaggtgggggtttgctttgctgttctccatccctttgggagggctaggtttcggggaatggaagtcggaggctggctgcggaggactgaggatgtgtggggagcagcctgcgttctgggtcgggggcgtcctccctctctctgggggctggggcgcgggcagcacttcggtgccggcgtgaggcagcctccttgggcgcagtgagacggcagggcgcaggcggtttcggagagatccgtgtctcccctagccccggcccgtggccctttccctccgctgctctgctcgattggattgcctgggtctggacgcggggagggggcgggggcggtttcggcggccggggcggtttcggcggccgggttgctgttcgcgccggggctgatttttttcctgtctcgcgcgccctgcctaccttcatctttgcccttttgcaggctgttcgcggctggcagacccagtctcgctcctttctggccaggttaagacaggaacaatactggccgttgataagaataaatcaccgcacgtaacggtgtgcggctcggcgaccctccacttccagctctc

SEQ ID NO: 108469 - DNA, 91 bp, Homo sapiens; identical to SEQ ID NO: 2603
  chr3:61656125-61656216
  hyper

SEQ ID NO: 108470 - DNA, 207 bp, Homo sapiens; identical to SEQ ID NO: 2604
  chr3:62254619-62254826
  hyper

SEQ ID NO: 108471 - DNA, 29 bp, Homo sapiens
  chr3:62304493-62304522
  hyper
gaccctttcaagccaccctcccgcgcgcc

SEQ ID NO: 108472 - DNA, 597 bp, Homo sapiens
  chr3:62304566-62305163
  hyper
cgaacttttcgcgccccaaggcggccctttataaagatgcggtgacgtcaccgcgcgccgcgcgtgcgcaaatatggtaacgtgaccacgccctggcctgcgctaaggccccggcgtcggcgcagtagctggtgccttcccggaagggctcagaggcgggctcggtgagtggagtcggacagtgggtgggtgccctgactgcctgacggccgcgcagggccttgcaggaccgctggggaggatgttgttaacgtaaagagccaggctgatgaggaaggttcatgagtcctttgggtataagcgggagttggggcggccggagggcagatgactctgagaaggtgcggatcttcgattctaaggggagaatgtgatttggttttgtctaaagtgctgatagtgggcctcacagaaaagttaccatgaaccgactttccgggattcccttggcgctgcattaattggcctcgttgcaaaaggaaaccgagaggaaggcggcaagacttggcctgcgggtgatgttagcggaaaatatctgtaatttagaccccggagggcgggcctgtgagcgattgctgtccgcggtgctgaaggaaa

SEQ ID NO: 108473 - DNA, 621 bp, Homo sapiens; identical to SEQ ID NO: 39339
  chr3:62353297-62353918
  hyper

SEQ ID NO: 108474 - DNA, 88 bp, Homo sapiens
  chr3:62354296-62354384
  hyper
cccgccgtggaaatacgcgtggggtcagctcccagccacactcgccccctcaatggggaggttgcgtggaagcgcactcccgggcccc

SEQ ID NO: 108475 - DNA, 116 bp, Homo sapiens; identical to SEQ ID NO: 2607
  chr3:62354445-62354561
  hyper

SEQ ID NO: 108476 - DNA, 86 bp, Homo sapiens
  chr3:62355812-62355898
  hyper
ctgtcgtggagtttgcgcacatgtttctttaagtcaaagtttctgcaaaaccctttgccgcaagtggcgcacgtgaaaggcttctt

SEQ ID NO: 108477 - DNA, 115 bp, Homo sapiens
  chr3:62356104-62356219
  hyper
cctgctcaaaaaaggcgacgcttggctaggcgggcgcgacctcttcgagtgaagaagttgtcaaacttcgtaagcgtcaagccgggtgctctcccgacaagaccgagactgagtc

SEQ ID NO: 108478 - DNA, 25 bp, Homo sapiens
  chr3:62356366-62356391
  hyper
cgcacgaacccgggcttcatccttt

SEQ ID NO: 108479 - DNA, 14 bp, Homo sapiens
  chr3:62356630-62356644
  hyper
ctttccttctgtcc

SEQ ID NO: 108480 - DNA, 400 bp, Homo sapiens; identical to SEQ ID NO: 39343
  chr3:62356792-62357192
  hyper

SEQ ID NO: 108481 - DNA, 50 bp, Homo sapiens
  chr3:62357278-62357328
  hyper
cgaacggtctggctccggtgtggaccggcatgtggcgggtgagattatag

SEQ ID NO: 108482 - DNA, 52 bp, Homo sapiens; identical to SEQ ID NO: 2610
  chr3:62357618-62357670
  hyper

SEQ ID NO: 108483 - DNA, 381 bp, Homo sapiens; identical to SEQ ID NO: 2611
  chr3:62357735-62358116
  hyper

SEQ ID NO: 108484 - DNA, 332 bp, Homo sapiens
  chr3:62358336-62358668
  hyper
cggcgagcagaggttgagcagtttcttgccctggctgccgtccgcctctagcgctccaggccggggctcaaagggcgcacggggctccgacgtcttggccatgatgcgctcgatggaaaaggccagtgtcttggaagtggccggcgacgctccggcgcgcgggcaggccgggggcaccatggtctccagggaagccgagcttgccatggcgcgcggagctgagccgagccaggctgggccagggcgcagcctctctcctctaagtctgcattccggaaaaggcaggggggaaaactgcaatttaataagcacctagtcgggcccgggtcacc

SEQ ID NO: 108485 - DNA, 1746 bp, Homo sapiens
  chr3:62358929-62360675
  hyper
accggagagccacctcgcatttacctctttcccccaccaccaaggagatgcgttccgagccatgcagcgtgtctcttctgtcacattttgatggcaaacatcttcccctccgcgtgagatcactgtcttttacattcagctgacatcacatgaagtcacttgaagtggaatgacatgggcggcggcgcggctcccgtagcggcccctgtgttcccccgcgcctgccggccgccgccaccaccgcccctcaaactttaaaaggaggcaactggcgcccgcgctcctctcgggaaagtgcgagcggtttgcgaatagggaaagagggaagagacgggagggggagggggaggaatcgtgatggttttgccggtggaaggaaagggggggggggacccaaacccaaacctaggcagagttccgtgcgtgattcacaactttggaggcctgcaggtttgggggacgcggggagggcggagggtcccggacgcggcgcccccaaagggcccctgggtatcagtctagtagccgaagtatcccttagccctccgcagccgagctgggcatcgtgctaataaactgccatttacccacggaaccggcgccagccccgaacacgcgcaaatgataattacctcattaggatgtggcgcatggacgcgggcgccgcgtttggaggggggaacttgttaatggggaaatattaatttatgcaaaagcaatgagctcgccttggctggcgtcggaggtcgggagaaagctcccactgactaaggacgaccccgaagcgtcacggagagcaaggccgctcgccggcatctcgggggcctcggcgccgcgcaggtgcgcctccagctttatggccagctctgggtctgaggctgggggagactaaaccgagagctggaagactttcggagatcctaatagatcagaattgttgatttatgatcgggtttctgaggcaaagccgagttctgcttctggtttagggctgcgtgcggggaggattcggagggcagctctcccagctgatgggtacttactgtttgtataattgagaaggtcccatctccacctgtttaaggagcagattgaaacagcagaacctccccctggatcctattaaaacgtttttcctcctaaggccattcagtcgaaccaattttccgaagtgattcatagagctgaattctgccaaggcagctctttcacttttagccactaaagcaccgcgtggaaccgggttttgtgtttttctaaaataaagagaaggattatcagagaggagagggagggggcctgaagggggacgggcagagacttagtgtggccagaggtacaagcagagggaagaaaagacccttttctagacaggccccaagtaagttcggaggaattcagcgttttgtgcctggcgcacaaaagcagcgcgctccgcgcttggtttggaggggctgaattcatctgtttgcagaccattccacctgcgtatcacaacaaactgctcaaagacgctccagcactttcaacaggccgggtgctcttggcgacaacaaaagtggtcgaggctgagggttcttacggaggggggtggtggtggctagcaagagagcgagcgagagaattaggtttaggaaagggggaggactgggtgcaagggttttttgaaaagttttggctggttttgttcgcgggacaattatatcttgctagccagcttttgcaagaccacgagctttgtagccg

SEQ ID NO: 108486 - DNA, 30 bp, Homo sapiens
  chr3:62360877-62360907
  hyper
gagaacgttaagggacgggggagaaaagct

SEQ ID NO: 108487 - DNA, 30 bp, Homo sapiens
  chr3:62361464-62361494
  hyper
ctctcctgtggatcccgtttgccacaagta

SEQ ID NO: 108488 - DNA, 92 bp, Homo sapiens
  chr3:62362644-62362736
  hyper
tgaggcctactaggccgcagaacgcgctccgctccagggcaggagtcctaggttgccctgtgtaatccccgggcgcccaggcccgtggcctt

SEQ ID NO: 108489 - DNA, 100 bp, Homo sapiens; identical to SEQ ID NO: 39350
  chr3:62362816-62362916
  hyper

SEQ ID NO: 108490 - DNA, 66 bp, Homo sapiens
  chr3:62363627-62363693
  hyper
tctccccagggagccgagcagcttgggaggagaaggcttgcttgcggctcccgagtttggggaaac

SEQ ID NO: 108491 - DNA, 20 bp, Homo sapiens
  chr3:62364156-62364176
  hyper
ttcgggtaccctcccggagc

SEQ ID NO: 108492 - DNA, 51 bp, Homo sapiens; identical to SEQ ID NO: 39353
  chr3:62364279-62364330
  hyper

SEQ ID NO: 108493 - DNA, 676 bp, Homo sapiens
  chr3:62364747-62365423
  hyper
ttaggaatctgatccaatacccgcgtgcagcaatttgccagcagacgtgtcattttgtaaggcgcagtgagggaaggaagtcgtctcgcctacctgggttttccacttgctacgcgattttggtgtgcaacccaaaggaaataatcgtttatagagaacgatgatgatgtatttttatatatgatataacacacacatccgtgtatgcatatttgaaattaaaaggcgttttggtgactgactggccctgcgtagttgagagatgtcggtttccgactccctgggaagacggcttaggatcctccgcgttatttaacttggcagctggttaaactccgcggtggagcctgcccaaaggtattagcgttaagtgctgagagcaggagttaagccggcagggaaaagggaccggaaggggtacaggggtgagggaaaccgatttcagacttcccccaacttctgtaagtttgccaggcaatgtaggtctgagttagatggtgcattgaataagaacctgaagcgttgtgatcgctttgcaagcgaatctctcagctctgttttgtttgtttgttttgtttggctttgataagaacttctcgtgtgtaccggcaaacggaaaagttctctcttgcccgcatctctggagctctcagtcgaatcccatcttttctttacc

SEQ ID NO: 108494 - DNA, 2112 bp, Homo sapiens
  chr3:62859446-62861558
  hyper
gagccagaaggtggcggcgaagtcaccttgggaagaggagaatagggtcaaagacaggacggcggaggggctgacccggacggaaggaccagagggcgtgcccctgctctggggtcagtgaggaagggtcagggggactggtgagaactccagccataaggaagcagtgcccgaggacactttggcgacgctagtcggtgatcagctgacccgggcagggagaggagggtgcccttcgcagagtcacgggaagcttcgccttctgggcttgctttctcccgcctgcccctgcggttgctctctgccccagcgagcggagcgctgctccaagacgctcttctccctccacctcggcgcccccacctgccgttgcccccgcccgccgaacgcacgcccaggagggcgggcccggagttgagcgcagccgcccgccgctggagagcgctgggagccctgcaagcgagcaaggcctctctgggcgccgcgggcagcaaatcactccccgagcctctcggtccacaaagcgggacctgcctgcctcgctcaccaacgctcccgggctgggggggctcgagcaagcggcgctgcgctccgcggccctcgccggtcccagtcagctccaggagcgctccaggctgggttgggctgggcctgggcgagcccggccgctgggagggggcctcgtagccctttccccagggcgcggtctccacctctcctgctcctcctcgccagctgcgccgccagctcccattgttcaccccgcccgcctggcgacgtccgggtgctgctccctgggcctcccaggcgcacctaccttctgctgccggcgagccatgtcggtgggctgcttggcattaaaggggtaggcgatgcagcgcatcacgaacacatacagctgcagcctcttcttcctctcctcctcctctttctgcagccgctccaactcttccttctccttctcgctcaccaccgacgggctggggctggagggccggccgccgccagcgcggctgctgggttgcagccccccggccccgccgccgctgctcgcgccgctgcccccgccgccgcctgcacccaccccggctccggcgccggcgccgccgccccccagcccggcgctgccggccgagccctcgctggtacggctgggagacaggcgcgcgccggacggggccgagccgagcacctccttgccgctctcctcctccacgatctcatccgattcttcttcgctggacgaagggtccagcatagtggcgcctggggagcggggtctctggagcccccggcttggagtgcaaaaggtggggggcgctggaggcagccggggatcagctctcccgggtgggcgcttctccccaggtcagggagcgagagcgctgctgctcagcctcggccgccgcgactgatcctctgcccggcggtcgcgagctgggctcagacccagaagcgcgaagggaggaggggaagggagaggtgcgtccgtggactcgaggtgggcaagggggagaatcaattgcgagccccgagcccgcagccggatgccatctgcggctgctgaaggaggcgcctccagaaaagatgccgagtgttgcaagctgtcgatgcagccaagagccgaagaggcatcttgccgattggggagggagcggcgcttacgtgtttattggcttaactctcccgtgtccgcggcgtaaagggctgctgcagagggctggaggggggagagcgcggagcgtcctcagagcctcagtacttctgaccccaataccttgccaccctcctcccctgccggcttcgtggataatttttttgttgatatctggctctcattgcctcaaccccttttcccctcccgcggacaaaaagttcttgggggagggagaaatccagaaaccagccgagcgggctgtttggagacgctaaatcgagaggtcttacttaggaggaggaagtccgtgagatcttatacgggaaagaaagggtccatctcctttccccaggcttctttacacctggggcgtggggggcgtgggggctgggcagcgtgtttgtcccacctgtgtaaactctgattccagcaacttattccgcatgcgcccagtc

SEQ ID NO: 108495 - DNA, 179 bp, Homo sapiens
  chr3:62861812-62861991
  hyper
accctaagaactcagcggcgtcaacatctaatgcgtcgactgtcgcactctgttcacccctgcctctcgggtaaactattaatacaaagcagcagatggtgcctgccttccccgtgctcctttcacttaggccagtaaacctggtaaacgagggagctggccaacgtgctgaatgtaac

SEQ ID NO: 108496 - DNA, 144 bp, Homo sapiens; identical to SEQ ID NO: 2618
  chr3:63263852-63263996
  hyper

SEQ ID NO: 108497 - DNA, 930 bp, Homo sapiens
  chr3:63264062-63264992
  hyper
cgaggccccctgccctcgccgggctgctccagggtgtcgctcctctggctgctcccgaaggggcttctggccctgaggacggtggtgccaagcgaacttcatttttaaaaagaactggtggatgagaagagcgagcgagggcgagctatggaccctgtgagtcaggtgagacagaactgggcagggcggctggctgggagcagggggcgggggatgccgcggcttgggagaggcgcccccagccccttcctcacgctttgctttctctctctcgcctcattcccccaaagctggcctctgcgggcaccttccgggtgctgaaggagccccttgccttcctgcgagccctggaattggtgagtagcagtgtgtgtgcagggaggggcgccaggcagccagctatcaggtgaggagaggtcggatggggtgctccctgctcagttctgctccaagccggagattcaaccctcaagccggggatttcaatcctgccccctcctaagatgccgttccaaggtggtgaggacaaaatcgaggcaccctgcttggaggcgggagtgtggacgcatttttgcaggggcttagacaagtgtcgtctcacctcaccgcttgcagacgcgcaggggctgtggaaagaaacctcccccttgggagataggggaggggggcgcatggaagggctgccgctgggttctggcccctcacctggaccttcgtggggatgaggggatgggtggagggacccatagttgagcggaggagccgggaagacttggccaagctcagaaagttggtcagaactgagacagctcctctgcgggactgggatgctggaagcgcgtgttcaactgctccgcgggagcttcagggagggaaagatgctgcgaagctattacagactgttataaacggcggcgggtagagagcaga

SEQ ID NO: 108498 - DNA, 30 bp, Homo sapiens; identical to SEQ ID NO: 39360
  chr3:63848680-63848710
  hyper

SEQ ID NO: 108499 - DNA, 41 bp, Homo sapiens
  chr3:63850066-63850107
  hyper
tcgctgggggtccccgcgaagttggcgcccacgcgcgctgg

SEQ ID NO: 108500 - DNA, 30 bp, Homo sapiens
  chr3:63898583-63898613
  hyper
cttcctgggaaggacggtgagtgtccacgc

SEQ ID NO: 108501 - DNA, 30 bp, Homo sapiens; identical to SEQ ID NO: 39362
  chr3:63967884-63967914
  hyper

SEQ ID NO: 108502 - DNA, 30 bp, Homo sapiens
  chr3:64009127-64009157
  hyper
aacttggttacgaccggctgcggcagcgga

SEQ ID NO: 108503 - DNA, 30 bp, Homo sapiens; identical to SEQ ID NO: 2621
  chr3:64232467-64232497
  hyper

SEQ ID NO: 108504 - DNA, 696 bp, Homo sapiens
  chr3:64430604-64431300
  hyper
gcgcccgccctagaccgggctggtgctcccggaaagggggcagcagaggacaccccaaaagacggccctaaagtccccgctagagctccaagtggctggacgctggagctttggtgctgggattccgatttgcccggagggagggggctttccagggatcccccagactgtgaccctgagggccacggttcgggtctcactgtcgcccagccggggggtcggaacttaacccctcccgcgccttggagcgctctctcgcgccctggacgcgccccgcccgcggggccggcttacctggggccacaggtgcgcagccgcggggcgcagtggggctgcgcgcgggcgctcgcggccggctggaggtgcccggcgatcggccccgctcgagcgggggacactcaccgagcggctggagagtcttttccgggagctccggctgaacatggccggacgcctcctgctcgcagcgccgtccgtcggtccgtccgcgccgcggccgggagggcgggtagcctgggcgggcaccctcggcggccgctggcctggctgtctccgccttgcagtccccggctcgctccggagcgcacgcctacccctcctcccttccctctgcctctccctccacgcccgcaggtccctccctctctcccggcatccccccgccctcccgggttcgccccgcggtccaccggctct

SEQ ID NO: 108505 - DNA, 1324 bp, Homo sapiens; identical to SEQ ID NO: 39365
  chr3:64671300-64672624
  hyper

SEQ ID NO: 108506 - DNA, 814 bp, Homo sapiens
  chr3:64673124-64673938
  hyper
gagaagcctccgctgcggggtgcccctgcccaggagcgaggaccgggaggcggcgtcggggccggcggggtcccgggggccggagcctggttaccttgcctcgggtgcagcctgtccttgcgcacggccgccgcggcgtctgggctccccatctcggccaggtcccgcaccaggagcgttagcagtgtggcccaggatacaaactgcatggtgcttcccacccctccctccgctgcccccacccccctccctcctgccctccttggctgcggcggcgacgcgaggcagcggccgtggagagcgcgcggagcccggcgcccgccgccaacttttgactttaggagtcgctgaggtctcgctgcgagggtcccgtctgcgctcggctgagcaacgccgccgcctgccgagagctgagccgctcgggccgcaggaggagccggaggagcaggaggaggaggaggactggggctcggctgcttggccgcataatgcccagcgagcgggcaggagaaggcgaggaacttgcgctccgaggcgcgccgggcgccctgtgctggccgggatagctgagcggcttcttgaatggggggctgggggggcggaggcgggggggccgcgggtccacagcctctcaaatgcccccggtgcacgcctctaagaggaggagaggggaggagaaagcgagacgaacggggaccgcctccttccagaccatgtcccctcctcggccggcccgtgcgggactcgcagccggaggccctgccggctgcaagaggcggaggccagaggcgtcaccagcgccggggcagctgtt

SEQ ID NO: 108507 - DNA, 30 bp, Homo sapiens; identical to SEQ ID NO: 39368
  chr3:64674299-64674329
  hyper

SEQ ID NO: 108508 - DNA, 188 bp, Homo sapiens; identical to SEQ ID NO: 39369
  chr3:66023465-66023653
  hyper

SEQ ID NO: 108509 - DNA, 30 bp, Homo sapiens; identical to SEQ ID NO: 39370
  chr3:66023861-66023891
  hyper

SEQ ID NO: 108510 - DNA, 1447 bp, Homo sapiens
  chr3:66024121-66025568
  hyper
tcgctcccctgcacacgctcgcgcactcaagccatcataaaacaaactttctgggcttccccgcgagccccgcacaggcgcccgcgagctttgtttgcattccggtgcctctgggtccacgttccggcgcccgcccgtgctctcccggaccagagtccactctgcgccgctcgggttatttttttttccttccttcctttctctcttgccttttacaaatgcggtgcctcctctttgcctcccgcccggctcgcctctcctcgctggcaggctgttactgagggtgagggaagcccttccagccagttgccgggagccctgaagacgcggtggcggggcggcggggagcagggcgggaggtaagtgctcgcggcccctttaagcagatacaaaggctcggcttgttttgttacagttcattctattccgcgccgcggagcgcagcggccggcgacaggagacgcgcgcgcatgcgccccgcggccgccagccggccggcccacccctcccctcctccccgaagggagagattccaacgtgcttcccgatgggtcctaaaaccgacctgccgggagaaggcaactcccccccaacccttcctgaacccctatcctctctccttttctttcagtgccctggactccgcggattcctttggggctggagggccgcacacgtgttttactccaactgtttgcaacttttgaaacccgggcaatctggctttggcatttgaaaaccatttcaaacaggtgggggttggggaggctgccacactcaccctggcgctcacactcacgcacacgcgcacgcactcgcgccggccctaagcctcctaaccgccctcggccagtggctggccaggctgtcggtcacccagcccggctggttcgccgccccccttgccgcaggtcccactgaaacccccgagacccgccccggggcgctcgccgcctccctgcctgccctgcgcttgcgggttcgggtcctggcgcggggtctgccagggtctctgcgacccgggggagggggacggtgggatcctccggttccccaactgggatccctgtgcgggtcacacgcgctcttacacacacccgcatccttaaactttgggaccaactttttaggacacgggaaactacaggcaagagagagaagccatggtgctagtgtgggttcaggtattcaaccaaaaaagagatccctctagcttttcaactgccctgccagcagagactgctggacccagtcaatcatctgccccggcctcaagttcctggcagggccgagaagcctgcggacctactccggggccaggagataaggatccccgccgggcgcggacatgccctgcgtcctggcgcccgcgggggcgtgagagaactcggaattcgcagcccgggggtagctgcggcctccggaggtcgcccgggggtgcggatgg

SEQ ID NO: 108511 - DNA, 1605 bp, Homo sapiens; identical to SEQ ID NO: 39372
  chr3:66550297-66551902
  hyper

SEQ ID NO: 108512 - DNA, 30 bp, Homo sapiens; identical to SEQ ID NO: 2632
  chr3:66879269-66879299
  hyper

SEQ ID NO: 108513 - DNA, 1094 bp, Homo sapiens
  chr3:67048276-67049370
  hyper
agcttgatttcataccggaagctagtcactggcaggaagtttacggaagaagaaaaaggtaaaaaaatgtgccgggggccaggagagaggcctaaaatggggaaattcgcacttgaagagctttccctaccccagcccctcagaatgacagttctcctccgccagaagactacctctcccggcaggcactgcgcgctcgacggccacaggctggccagctccctgctctccacctccatccgaatcagccaataggaattcccggcttgggcctccgcccgacccggaccacgcgggagccggggcaatcaaactacatttcccgacacgcatgtgctcgcgtcgtggccaatcagcgccaggaattcggaggctaggggtggagccagatgcacaggacaccccattggccaggggaagcttagaagagccggaacccgggagctagagaagcgaaatgacatttcctttttaaatagctggagtcggggccccatcgagaaatggccgcgtcggcaggtgggtcgtgtggtggccagggcggcgtggagggaggtgagggggaaggtgggccggggccggccacaggcagtgggatgaggacgtagcggtgcggagctagagggaaggatgaagcggtggaggggaatgagaagagggaggatgaatggtgcggagggcggtgggcggtccggcgggaccgggatggggaggctgggtacccgccggcgctgcgccccaggaggcagcgggaggcggcttgagggggcaccggcggccgccgttgttcgagcttccctcgtgaggctctgccctcggctctcggcggagtccgcgcagacgcctctcctgggctgcgagcgcgtttcctccgcgagcacgggtgccgggctcgccgggctccgcaggagcaggctggcctttgaacttgttccgccgatcgcgctccgccctctgtctcccagatccttaactcgcggtcccacgaggtcgtgcgtatatccacagacatttgtatatatcttgtagggggaaaaagcctagcaagcagacacacaaacagaaaaatcccgcgatgccgtaactggctcggc

SEQ ID NO: 108514 - DNA, 583 bp, Homo sapiens
  chr3:68056797-68057380
  hyper
tggggaccagttgcgcgcccaagtttctgatgctcagttctgaagtgctcccagccctccacccgcctctccaaatcccatcaatggcctcctccccccatccgtcgagcttcctcctgctgcgtagtccagcgtctacgccctcgcctttccctggctcctcagtcggcctggacaccgatactaggctcttctgtacagccctccagcaataccttccggggccccgcttgctgcctcctggggctcagcttccctgctgggggcaggcatgtcagagcgcggatgcagcccagggtcctcccgcgcgcctgcaccaggctgcagcgagcgcgcaagcctgctgggtgctggagctcgggccgccccgggagaaggggtggggctggcttgtgctaggggctgaggctgggggctgtttctgggccctgccaccctgtttcccccagccctggtctgacagggaaggcgagggggcgctggtgcccctgcaggtgggcagggaaaccgccctcttcaggacgcgcttgtatttctgcatcctgtgtcctgagcctggcgcgggaaccgccactcaaaccct

SEQ ID NO: 108515 - DNA, 883 bp, Homo sapiens
  chr3:68980931-68981814
  hyper
cggggggacgctgaccggctcccacctgcttgctcctagaaagatcctagctcagattaaagggatgaagcgctaaggtcgacttgtccagaaaagagctcacggtgagttcaccaccccctataccaattcatcgagtggcctcctccgcatcagcagagcacccccggggattctgtcagacatgaaccccgaaactggaagcggccgctgcctctctccagccacacatccttacttcggagtgccccttccaacttcgggttgcacgccgacctcagcacaggcactctccccggcgccccagagagccgggatgaggggagctgcaccgagctgagttaactcggtaccagccgagaggcagcggctgcccacgagacagcacctaaatacagggtccaaatccacccccaccccatcctctcgcccctccttatcccttccaacccttcttactcgactagagccggcatccaagtcggaccggcgcgtccggaactaggtactgatcgccgcaccggagcccgaggacgctcaccgtgccgcctccccgcgggagccccgggagcggcccatcacctctgcagcctcgccaggagaagaaaagttcccacgtctctaccaggagaagcccgaagctcctgcgggagaagcctgaagctgctgctggagaagcggcagctgaggcaggactcccgatgtttgcccgcagccgcgcgcgcagtcggtgcgccccgtccagggcggcgcgcagctagcagtgcggagccgagcccagctagcgcgctgaccaggaggggccgggcccgccgcggaacgcgctgattggccgggccgcccggctgctcctgtccctgcctggccccgcggtccacgtggg

SEQ ID NO: 108516 - DNA, 121 bp, Homo sapiens
  chr3:68981851-68981972
  hyper
cgcgcccccactgccggcctccaggcgcctctcccgagcgcctcgctgtggccaccactccgcaggtgctgagcaaaaggtattcttcctgaatacctgagagtcgcgttgagctccacat

SEQ ID NO: 108517 - DNA, 159 bp, Homo sapiens; identical to SEQ ID NO: 2636
  chr3:69062097-69062256
  hyper

SEQ ID NO: 108518 - DNA, 30 bp, Homo sapiens
  chr3:69101207-69101237
  hyper
ggagagctgggaggcgttgaaccaactcat

SEQ ID NO: 108519 - DNA, 30 bp, Homo sapiens; identical to SEQ ID NO: 39380
  chr3:69101560-69101590
  hyper

SEQ ID NO: 108520 - DNA, 30 bp, Homo sapiens; identical to SEQ ID NO: 39381
  chr3:69129003-69129033
  hyper

SEQ ID NO: 108521 - DNA, 30 bp, Homo sapiens
  chr3:69129620-69129650
  hyper
ccggcagggaggtgcgaggttgactgcggc

SEQ ID NO: 108522 - DNA, 30 bp, Homo sapiens
  chr3:69134072-69134102
  hyper
tgctgtctgccaaccgcaaagccgaccgag

SEQ ID NO: 108523 - DNA, 30 bp, Homo sapiens
  chr3:69134380-69134410
  hyper
ggggtccccctacccgggacaccgatccgg

SEQ ID NO: 108524 - DNA, 731 bp, Homo sapiens
  chr3:69434905-69435636
  hyper
acaggtggagcctgcttcccacgagtgcccggcatcctgctggggccctcgggtgccgcgcgctccagctcacctggtacacgtcctgcagcccgcaccacgtccgcagcacctggtggcaagcccgcagcctctccgtgtaccatctccgcagcgtggacacggtcaagttccatacgaagcggctgccgctgaacagcaggtcctccacgccacacatgaacaccgaagccatgcctcctccttcgctctgaacccgggcgtcccggctctcgtacgtgcagccccgaccccagcggcctgcccgcctgggctcccgacgccggcttctgctggcagccggggggtcaagcctgccaccaaactcgtctttcaccgtgcgtcctggccaggctccggcggcatgccctgggattgggtgcccgccagccaacggctgcgactggcacacagaagcccagtgtccacccccgcccgctcgcagcgccgagcaagctgtgctaagctccaccaagctggccctcgatgctcccggggcacgggaagccctggccggcgaggactccccctggcgcttccccagggcgcggggcagggacggaagcggagcaactctttgcaggcagagaggggagctgcatttcagcacacttggcttccacgtcttgcgcgcgcgcgaacacacacacacacagacacacaccccccacaccggacgagtggtctcctaa

SEQ ID NO: 108525 - DNA, 186 bp, Homo sapiens; identical to SEQ ID NO: 2638
  chr3:69590940-69591126
  hyper

SEQ ID NO: 108526 - DNA, 198 bp, Homo sapiens; identical to SEQ ID NO: 39384
  chr3:69591779-69591977
  hyper

SEQ ID NO: 108527 - DNA, 90 bp, Homo sapiens
  chr3:69592068-69592158
  hyper
cggaacttgattctgcctcaccggcttcaggcatcccaggacctgagtgctgttagaataaagggtatgaggcaccggtggcagagggag

SEQ ID NO: 108528 - DNA, 801 bp, Homo sapiens
  chr3:69788413-69789214
  hyper
acaggagttgcactagcggtgtccaccacgttgcctctcccccgcctggccttctgggagctgtagttttcgtgggagcggctccccaggcgagctgggaatgccccgcccgggccgaactacagatcccaggcggcgctcggccgccagcccctcccgcccgggtgcgagtgtaaactccccgcgctggggcgggcggccgcgagccggcgagcgggcagagctcggcactgcgccggggcgcacggctcgggggacccaggcccagctaccttccctccgcccccgggctctgttctcactttccagcagtggaaggacgggaagcgggagccatgcagtccgaatcggggatcgtgccggatttcgaagtcggggaggagtttcatgaagagcccaaaacctattacgaactcaaaagtcaaccgctgaagagcaggtgagtggtgacagctgggcagaggcgcaccgggcggctggggggcactgcgtctgccactctggggcgaggagagcgggtcgcgggagctctgggacaaggacccagtgcccttgccccggagcagagggcgaactgcccctcgcagttgggggccgcgcctgcccggcccaagtgcgcctttaggaagctcggatggagcgcacttcgcgggggcgcggcgggtcgccggggacgaagcgtccaggcgcggggaccctcggccgaggatgccagctgctgagactgattgggggctggggagcgacctggcgcgatgtgggggaggaggagcgccgggccgggacgctgtcccggtggga

SEQ ID NO: 108529 - DNA, 30 bp, Homo sapiens
  chr3:70787571-70787601
  hyper
ttcctttgatacacacgaggcaaggctaac

SEQ ID NO: 108530 - DNA, 1739 bp, Homo sapiens; identical to SEQ ID NO: 39389
  chr3:71113095-71114834
  hyper

SEQ ID NO: 108531 - DNA, 1335 bp, Homo sapiens
  chr3:71630564-71631899
  hyper
cacattcctcgctcccggtgccttatcgctaggctcgcgccaccccggctggctctttggggacggagaacccctagtgccgcctggggctctccggtgtccctggaccccgcgcccgcggccgcctcgacttacccgcggagtccggggagggagtaggagcgccgccttcacgcccgcggaggaggcgccggcagcaccatggtccccggcgccgctgccgctgcccccggcccgctcgctcgctcgccgcgcgctctcttcctcttacaaactttcgggttctgcagtcgacaagaaaccggggcgaccctcagcaagtcttccccgtgcaggctggggggaactgaaggggacgggacgggtgagtaggccgaggggccaggacagagagggcagcgggctccgaggacccgcgagtgcgcgtggagggaagagaggatgcggctcagggaatccctgcaaggatccagagaccgggaaatcggcccgagccaaagtctcagcaccttccccaggatctcacaaagttgcaacaacaaaaaggaggggggaggaatagggagaagggggtgggatggggatacgatcacgggcgcaaggtttggagttacaactgtttatttagtccttattctcacagggggcgggagctgcgcgggaatggggggctgcaggcagcgatttcgaagcaaacacatgggaggggggcatgcgactttgtttccgggagcggagctccccagagcccgtgtgtgtcactgccagtctcccgggaccaaggcggagctcacaacaggtggggaggggggctcgtcgagggccaaaaagaagaaggaatctaagtttccgagcgcgacgttgtctgaaaaggagggaggcgggaggcgggggcgagggaaggcggaggcagcaaatgaccgcgaccccgcggcaactggcaaactcctcggctcccggcgccgccgccaccgccgtggtccccactcgaagcgcacgccgcctcggctcgctggctccagggagtcgtctcggcgggacaggaatagagcgcagggagctcgggaggaaggctgcgcgcaagcgagggacggagagccatcggccgccaggacagggccggagggacgaggcgacacgcgcgcgacgcaggacaaatcggagcttgggaaatctccccgtcccccaagcttcagaggggggtaaaatcagaaaatgtgtgtgatggtgggagagagatccgggcgcggcgactcctcgcagcgcatccggctcccgcacccacccgtggatctggccacggctgttgcggactcgtctcgggaaagcggaggc

SEQ ID NO: 108532 - DNA, 30 bp, Homo sapiens; identical to SEQ ID NO: 39392
  chr3:71632109-71632139
  hyper

SEQ ID NO: 108533 - DNA, 63 bp, Homo sapiens; identical to SEQ ID NO: 39393
  chr3:71633201-71633264
  hyper

SEQ ID NO: 108534 - DNA, 30 bp, Homo sapiens
  chr3:71633589-71633619
  hyper
cgaagatgggaatgcgatggctatttgctt

SEQ ID NO: 108535 - DNA, 1266 bp, Homo sapiens; identical to SEQ ID NO: 39394
  chr3:71802517-71803783
  hyper

SEQ ID NO: 108536 - DNA, 101 bp, Homo sapiens; identical to SEQ ID NO: 39395
  chr3:71803826-71803927
  hyper

SEQ ID NO: 108537 - DNA, 1599 bp, Homo sapiens
  chr3:71833527-71835126
  hyper
cgcgggggaaagccccggaacccagaaggaagctcccacaattgcttttcaaagcgctcacatggccctggaccaagcgatttcaaagggtttctgcggaggacgcatcggggagcaaactctttgactgtaggattaagactctgggcacttggggaattcgtcttggtcctttgcatttcaggaaggggccgtcaaattttaaggttcgaggttggagagcctccaaaagtacttgagaagactcagagagaaacttctttcagcctaacagaagaaaaatgcgaggagtgaggccgtgggtgatgagggagaagtaagcgggagaaggtggtaataaaggtggtgggcgacatccttgtcactgtttcttccaggacgcgcccagtgtccccagccgtctgctgcttttggatctgggtattttcccaagtgcaccaaggggcgacaggggcaggtgtccccgcccagggcgaccctccctttgcctctagcctgcccttcagggtccccgtcccaagccccctgggcacatcccaggcgcgcatcaggggcagacaggtgcgcccgggccgcttaccccggtgatcacggcggcgtccccagcgcggggcgtgagcagcagcggcggcagcagcaagaggagcaggagtggggcgcagcacaggctcctcatggcgccctcgggactgggcggccgccggaggcagttgggggcgcggggcccgggtgcgctgggtggagcgcggagcggcgggcggacgggcgcggcggctcccgcgagcctccgggccgttataaaggctagccccgccgtgactcacgccggcgcccgcccggcagcacacgcggggggcacggcgcgggcacacaccccacgccccacgcgcacacgcgcgcccgcctcggcccggccggctcccagacgagcacgtgctatgcgcggccccccgcgcccccgcctcgggcgccacgcaggcagcgctcccggcggggcgccccgctctgcgccgttccctccgccgtcgcccagccaccgcctttcgcacgcgccggaaccgcttttgtggtctccgagacactcatttgctgtcctggtttccaaagctccacgtgctcagcgccgaaaacttgcaaatcatttgctgtacagatgtttaggggtcgcctactacgtgcggggcgctgtggacacatagggggcggggggtgggtgagggggacacagcagcccctgaatccattcgtttgttcagcaggtctatactgggcgcccgctgcgtgccaggtactgccaccggctctctcctcacggtggaataacttaacagagaagacagacatcaatcaaataccctggaaacgtggaaggcaggggaaagaacaaagggagagcaaaatcgccccaatcccacatcacccgcgacgtgaaaggatttgtccttccagctgcgggactcctatttgtttatttcaagtcagaggccttccctttatgcccacatctgttcccgaccctctcctctgattttcctcacatgtatttcctcccctcttcagccccgcgccagctccaggcacagccgttcagggtgatgc

SEQ ID NO: 108538 - DNA, 30 bp, Homo sapiens
  chr3:72004929-72004959
  hyper
cctcaaaaaggaagcggtgacaaatgggtt

SEQ ID NO: 108539 - DNA, 403 bp, Homo sapiens; identical to SEQ ID NO: 2649
  chr3:72149791-72150194
  hyper

SEQ ID NO: 108540 - DNA, 30 bp, Homo sapiens
  chr3:72495850-72495880
  hyper
agacgcgggtgagccgtcgtaatttcgcag

SEQ ID NO: 108541 - DNA, 353 bp, Homo sapiens
  chr3:72496510-72496863
  hyper
gcccggcggggcgcacgtggccgcgcccgggagctggcaactggcttcgggccccgcacggcgccccgtgaggctgttgccgggaccccggccccgaagccgccccggggaagtagttccacgcagtttgcgcgcgccgcgggagcttgcaacagcctcaccgctcgcagcgcctcgaggcttgcagtgcccaggggccgacaaggtccacctttggaccgcgttcccccgcgcccctctgttcctctgccatgcggagctttgtatttgcctcttctgaagtccctgcgtccggccgagacgctggcccgaagccccactccctgtcaggcccctgtcgcgggagggaacag

SEQ ID NO: 108542 - DNA, 30 bp, Homo sapiens
  chr3:72598603-72598633
  hyper
cgcagcaggtgcatccgcgaagacaatgcc

SEQ ID NO: 108543 - DNA, 559 bp, Homo sapiens; identical to SEQ ID NO: 2651
  chr3:72787764-72788323
  hyper

SEQ ID NO: 108544 - DNA, 31 bp, Homo sapiens; identical to SEQ ID NO: 39401
  chr3:72896942-72896973
  hyper

SEQ ID NO: 108545 - DNA, 255 bp, Homo sapiens
  chr3:72897525-72897780
  hyper
tctcactgccgccgcgttcccgccacgcaaactctccaactccccacgcgcaggaactctcggtgtgagggacggagcttccggctcgaggcggaagtgctcgcgcgtaaggcaggaagtctctccccacgccaatctccatggagacgggacgccgttcgagaagaggcggaactttcaaaacccccgggcggagaaagggcgtggcgagtggtgcctgggagccggcgttgaaccggcgggatgactagcaac

SEQ ID NO: 108546 - DNA, 30 bp, Homo sapiens
  chr3:72898054-72898084
  hyper
agccacagcagcaccgttacagtggtttcc

SEQ ID NO: 108547 - DNA, 31 bp, Homo sapiens; identical to SEQ ID NO: 2652
  chr3:72937967-72937998
  hyper

SEQ ID NO: 108548 - DNA, 259 bp, Homo sapiens; identical to SEQ ID NO: 39403
  chr3:73045502-73045761
  hyper

SEQ ID NO: 108549 - DNA, 30 bp, Homo sapiens; identical to SEQ ID NO: 39404
  chr3:73046488-73046518
  hyper

SEQ ID NO: 108550 - DNA, 392 bp, Homo sapiens; identical to SEQ ID NO: 39405
  chr3:73673261-73673653
  hyper

SEQ ID NO: 108551 - DNA, 581 bp, Homo sapiens
  chr3:73673951-73674532
  hyper
cgaagcggtccagctcgaagcccatggtggcggccaggccccggggtcgccgccgggcggccgggcgccccctccctccccacgaggcggcccagacaggccggctacgccgcccgcgcgctcgctggctctccccggactgagcctaattgatccagacttcctcggaaaatgcccgaggaacaggactcctccggccgtatttgcgcgagcgcgagcgcacatacatcgtgccttggatgcctcccgccagccccccgaaaaagggaggaggctggaaggcagaagcgcgtgggaggacactgaggctcgccagaagggacgggccagcccaggacgccagcctgaatcttctcgggaaactcctttctgttctcttacagtctacgctataggagacaaaacgccagccgagaaaagctcgctgagtttggagctgaggctactgctttctcccaagggttctcttcgagccccttcccgaacggatcaaaacttttttactcccttctccctcccccttcctctagtggctgattgcagaggactaaaaatatcttggggcccgctatctcagcact

SEQ ID NO: 108552 - DNA, 655 bp, Homo sapiens
  chr3:74663365-74664020
  hyper
tccccagagcaagtccgatgagagaagcatcttttattctcgacccgtcaggtgcatttccctgcaaacaaacttcggggctgaggagccatgaagccagggcgtaaagtttgccctggcaggtggctcatccctgtggcccggccggcgccaggagtcgggcatcccggacttacctggtctctgcagctcgccagacgcccgccccgacggcccactcgccgccgccgccgccgccgccgccgccgccaccgccgccgccgcagttagtccgggcccggggggccgccgtgcgcgcccgcgtaagccgccgccgccgcaggcgcagcaccctcgtccgcacggttcccggcccagtccacggcgccagcccgcccgccgctgccaccgccgccgccgccaagcgccaggctgctgtggctgctgccggcgcctagcgagcactgcccgtgcctccgccactccggctccggctccggctccgacgcggacgctggagggaggggagaccgggcggactggagggagggaggggcggggagcgcggcggagcagccaactgggtcccgagcctcgcgtctgcggcgcccccagcgcctctgcgccggccggaccccgcgcggccctgcgctcggccgcgtgcacccacgtgtgt

SEQ ID NO: 108553 - DNA, 82 bp, Homo sapiens
  chr3:74664045-74664127
  hyper
cggcgcgggctgggcggcggtcaccgtgtcacctccgggtggcctcgtgccacgcagttagggccctcggaacacggggtta

SEQ ID NO: 108554 - DNA, 30 bp, Homo sapiens; identical to SEQ ID NO: 2657
  chr3:75168992-75169022
  hyper

SEQ ID NO: 108555 - DNA, 73 bp, Homo sapiens; identical to SEQ ID NO: 2658
  chr3:75471466-75471539
  hyper

SEQ ID NO: 108556 - DNA, 124 bp, Homo sapiens
  chr3:75955872-75955996
  hyper
cgctgcgccaccacccggaggagggagcgcggtagctgcaggcaggggagggagaggaaagaaaaggaaggacggctcccagacagagagtgggagaaaccggggagcagcgggagcagcaggt

SEQ ID NO: 108557 - DNA, 347 bp, Homo sapiens
  chr3:75956026-75956373
  hyper
cgttattcacacggacgctgcggagcttcccagggctgcttccctgtccccctgggtggaggctgccgtctaaacctgactccaggtgagttcggcaaagaggtgaaccgaggggtctcgaaccagagacgtggcattggcgaggctgctcagctcccccaagcgctgctgcctttatatttcccaaattcacggaaggtcttggcggtggctgcacaggctgggagggggcggagggtcggtgggtggttgcgatcctcacggccagcgtgggggcattcggatggaattagcttaagtgaatggggttttaggaaatgtccccaaaggcacgcgttatatatgtg

SEQ ID NO: 108558 - DNA, 30 bp, Homo sapiens
  chr3:76473866-76473896
  hyper
gatacagttatgcgtcgaaagtgatgatac

SEQ ID NO: 108559 - DNA, 30 bp, Homo sapiens
  chr3:76473962-76473992
  hyper
ttttttattgccaatcgtgctacaataaag

SEQ ID NO: 108560 - DNA, 340 bp, Homo sapiens
  chr3:77087669-77088009
  hyper
ggctcttcctcagacggccccttctggagagaacctttcctaatattttccagtagggggaactaaagactcaccatccagcatttagctcggctcggggacctgcgtgagttcctataagccgccttctcatcatctgaacaagcatcaaacggctaccagcgagcctgtgatcacacgtgggcccggccgcaccggggcaccgccgacaccggcacccctttgatctaacgtgaccttccttcatcatccccggtcctgaatggcatcctttggtagtcttggtcttaattttcagagttttgtcgtctttgggctgaaattcggcttctttttgagc

SEQ ID NO: 108561 - DNA, 30 bp, Homo sapiens; identical to SEQ ID NO: 39412
  chr3:77400955-77400985
  hyper

SEQ ID NO: 108562 - DNA, 361 bp, Homo sapiens
  chr3:79067250-79067611
  hyper
accctagtgcttagacgtgcgtttgcccagagtaatctgggcgtgccctgaacttggcaaaaggccgagatctgcaaagagtcttgaggaggttcaggggtggaggggaggttttggggagtggggaaaaagagacaaccccaaatgcgaactaggaacattttcgcctaaaagtctagcaggaatcgagcccctccggccttaggagggaggggtaaccaaaatacacttctgggtttgatcgtgcaaagtggagagggggcgaacagggaggatcaagggtgaagaaagaagacgcggggttacctgaacagagacatattaatccaaacaggtaaaagtgagcgggctccgcaatcat

SEQ ID NO: 108563 - DNA, 730 bp, Homo sapiens
  chr3:79067816-79068546
  hyper
aaggtttgtcttctccggccccaggatttccgaggaggctcagacactttcaagaaccatccaaagcgaacaacaaagagccgaggcagaagcgcagtagtgccgtttcctgcctccacggtcttgcggagcctcccggcgtgcgcccccacaatgtgcggccgagcgccgctgcgagggcaggcgcggcggcggcggcaaagttggggtgtgagagctgctgagggagggccaaaaagtgcttctccgtctcccggcgagcccagtcagcagcgggccacccgcggcggcggcgatagcagccaaagtagaagcagcagctccggaggaagggctcggggtgccgggagtgtgactgggtgactccgcgcgcagagagcgagcgagggggcggtgcggcgacagcggctgcctgggcgggcccttgttcccatcacttgggggatgcggagggtactggagacagcagcaggaccgcggacactcgcacgtcttctgggcgcccccagccccgcgcggcgcccaacatcgccctcggcccctcgccctctggggcgctcgcaggcacccctaaactacgcagaagcccaaacttcctgggggcagctgcctgcacccctggctcgtggaagctgtaaagaggcagctcccggctctccccggggtggcagagaagggcagagaggatgctgctgcgggtgggagagacggccgccgcggctcaccccag

SEQ ID NO: 108564 - DNA, 74 bp, Homo sapiens; identical to SEQ ID NO: 39415
  chr3:79068798-79068872
  hyper

SEQ ID NO: 108565 - DNA, 514 bp, Homo sapiens
  chr3:79815580-79816094
  hyper
caccccacccatctgcgtgggacacagtgactcctagaagggtatcccaggattttagcggccaggtgtgagcgccctccacgcggtcctccgagacctcagggcgcgtggcaactgggcagaagccgtctctgcagcgccgctgccccgggtggagcggcagcccaggctgcagcagtggggttgccacgccgagttttccgcatcggccgcccgcagggctcgcctgcttctccccattgtgttctcagagctgtgggacccagccgcgcgcgcagccgcacccgcgccaacgctggaaccgaaggctcatggaagcggggctggcaagatggggcagggagaaggagcaagaaggggccccagaagggcacggcgtttcatcaataatgcagaggctcctggacctccctgcaatacgttttccagctaaacgccaccaactggagcgcttcctggttcgtcccactcgtgtggtttttgtgtgtgaaagatgggacgcacctttttcatt

SEQ ID NO: 108566 - DNA, 1055 bp, Homo sapiens
  chr3:79816293-79817348
  hyper
ttttcaaagcccccacgcgcatccattcctggagaatgctttcaaagtttggaagctccctgcagcctgcccgtgtctatgcctcagtcagctcacatcacgaacaacggtgcggtcagcggcactgagattaggctgcaaagttgcccggccccagcccactacaccgctgatgctcgccgcatccctagagcaaattccgctgtgtgcccccaagaagccaaaagcggcacgaaacctactccaacaagggttagcccagccacacacacaacaaacaaattccaaaacttctttgttaagcagccgcagcctacctggaacggacactctgcacaactggcaaggaagaaacaaacatcgcatccctgcaggaaaacttgttgaatccctcccgatcgcaaggctgcaatttccgatttagcctgaaggtttttgattctaccccaaaacaccctggcgcatcagccacaatttctggataaactgcagagtcctctcggcaaccattctgcactccaacaaccactagtgtaaaacccagcgtgtccccttttacaaatcaaaagccagctgtcacttcccttgcaaccatttccgagacttacccttccataagactgttttcagcaatctagaggctccgtagtgcagacgcagccctgcaactttgctgtgcactgagacctttccgagtttaaaccaagcgaaaggtgacagacttttaaacctaagagtggggaaatagggagagagtgaagtcgggtttcttctctgtatcagcaccctggaaaaattcaatccttcttcagtagagaattctttcaaacccgttatctgtattactattaatgcgcagagcagaaggcattgcatacaaataggtccaagtgtgcgcttctattggtggctgcggaggcccctgggtcctactgctccggtctaaactacacagcaacactaggcacgcagctttggagacgccgaggggaaaatggatttaattgattcgttacctctggtattgtaatgcctgctgcgatgtttaaccgagg

SEQ ID NO: 108567 - DNA, 126 bp, Homo sapiens
  chr3:81810244-81810370
  hyper
cacgtaccctatggcgcaagaccgctgattagaacagaggggaaaggggatgaggaaagaagtttcttcagcgcccgctccgggcaccagcgctgtcaaacctgccactacggaagccacagaacc

SEQ ID NO: 108568 - DNA, 84 bp, Homo sapiens
  chr3:81810984-81811068
  hyper
tttcctccccttaacggttttttcctgctggcggaggtcattctaggaggtgggtcccaagctgacctcgctcagccttggcct

SEQ ID NO: 108569 - DNA, 92 bp, Homo sapiens; identical to SEQ ID NO: 39419
  chr3:84597194-84597286
  hyper

SEQ ID NO: 108570 - DNA, 1008 bp, Homo sapiens; identical to SEQ ID NO: 39420
  chr3:85007717-85008725
  hyper

SEQ ID NO: 108571 - DNA, 501 bp, Homo sapiens
  chr3:85008802-85009303
  hyper
cgggctcctgctacaaggtaatccccgccccggcgcagggaacatcaacttctcgcccattccccatcttccccattccaccccatatttccactctcccctcccagtctccctgtccccagcgatttccaccccctccccctactctctggtgcggcagggggcagtggcagtttgcaccagcccctcgaatttctaacactggctcagccctgccttcccagcagtcagccccttacgcggcaccttttgccttctcattcacctgagcttccttcatctcactccattcccgccagcatccccctcccacgccttttggctggcaacttgtgcctctctgaacattccaccctcccgacaacccccaccagccacctcccacatcacgctcttgagcgaccctctccatctcttgtcatctctttaacctcccccttttcaggtcgccttttcttttccccctcttcccaccatcatcatatccgtgtgtctttaaaa

SEQ ID NO: 108572 - DNA, 117 bp, Homo sapiens
  chr3:85009748-85009865
  hyper
aatattatcctttcacgtgaaatgtaagaacctctgcgaccgcagcagtggagggaaaccgcacaaaacgctgttattatgcaaatcactgggtttggatgccggatggctaaggaa

SEQ ID NO: 108573 - DNA, 140 bp, Homo sapiens
  chr3:85010661-85010801
  hyper
cccgggtgtctgacacgttacttaggtttttaatccgcgctgagacaatctcacagagaccctacttcacctctcagtaacttgcatttctcagctctgctgtgtgtgtgtgtatgtgtgtgtgtgtgcgcgcgcgcgcg

SEQ ID NO: 108574 - DNA, 30 bp, Homo sapiens
  chr3:85616398-85616428
  hyper
gcagatggttaatagcgccccctgtaggcg

SEQ ID NO: 108575 - DNA, 30 bp, Homo sapiens; identical to SEQ ID NO: 2663
  chr3:85617271-85617301
  hyper

SEQ ID NO: 108576 - DNA, 1159 bp, Homo sapiens
  chr3:87039595-87040754
  hyper
gctgctctcccttcccggctctctcgggatggctttctgctcaaggacgctcccgcagatcccagagcatcctctgcgccacgcgtgccggcgggacgtcgccgagccccagaccgatactctcgatgcccttcgcccccgcccccagcaggctgcccgtccggtgactcacctgctggccaggttggggcgccggctgatagtaggctgtggggcaggttgtcgctgccatggggttgggcagatactgggacgctccataaggctgggggtgatacatcacctccgcacaactcatggcagccggggcagtggcggcccccgagctgccgccgccgctctacgcgctggcgcgaggggcgcgggcgccgccgccgccgcagctgccgcctctgtcgctgctccagctgctactgcggcgaaggcgggtcctcggcggcctcgggctccgcgcggggcgcggggtcgggagggactggcaatcagcgggggcccatgcgcgggcaccttcatcttcagcccctccggatgttccctgccgcgcttatatagcggctcagggacgcagccgcccgctgcgccgctggggcattaccgcgtccggctcccgcgagggctgcggcgcccacggcagcgccagtcacagccacagcccaggcccgggtcgggcagccgtggggagcccagctccggtttgcatatacacaatgcacgcccggggctcgtcctatcacgggtgctcccggctgtgcgaggacagggaggcgggggcagagggagggggaacgccggggagaagggggagcactttgcctccccaggctctgacgcggaactttgcaaagtttctccaactcgctttgcagcgggcgggtcaccctgcagggggaccccggggaaggctggctgcggattggagcgaagtttgcagccctctccgcctcccagcatgggatggtggtgggaggggaatggtatgcagaggctccgcgccctcaaggctcggcaggttcccaccctgtctctgtcacctggccgccagggcgagggcttccctactccaaggagattttacagggaacaccaactcagaggctgggaccaaacaaaagccgagtgtacaaaggggtaaaacagagcaggcgcagaatacacgggg

SEQ ID NO: 108577 - DNA, 66 bp, Homo sapiens
  chr3:87276368-87276434
  hyper
gaggaaagcggccgcggcttcaaactccgtagtgcgcaggcgccacacaacgcgcaggcgccgcct

SEQ ID NO: 108578 - DNA, 1100 bp, Homo sapiens
  chr3:87841625-87842725
  hyper
ccccgcccttctccacgcatcagtgaaagaggagggaggagacggaggagagaagaggcagggaggcgaaaaagtgacagaagcaagagagaaagggagagaggggtgttgaaggaaggaagggaggaaggcaagaggagagggctgctaggcgtgctggagagcctggggcgtccgcccacccgcaggcgccccggacccgcaagggcggcgcaagacttccccagcgcgcagtcagcgtcgcggccccgaaagctggcgacaggcgctgctgtcttcccgccccgtggggtcgcccctgccctcccgcgccccggggctgggggcgccaccttgccagctccgactgctgcagggagcgccaggggtgagtgtgcggatcagcgctgagcccgggagtgcgggtcacgcccgcagctggcgcgcaggtggggaaggggtgtggggacgtggggagtgggaggctggacagcgcttgctctcggcggaaacgctgggaagccggcgccaagtcctttcccacactactttgatctaacagcgcaggaattcaagaattgccctttcccttttctgcccacaacctctgctccctgggggcgaagttctgtggtgctaggcggagatagtggtcaaggctgggaggaagggaggggtctgacccgggcccaagggcgaggggtggcggtccaagccggcgagaccccacttagggcgcaggctcctggcgctcctacctcgggaagccgctggggtggagagagacggggcacgggccagaatccagcagcggaaggaggggagagtcttcgaatccatctctcggtgggatcttgagaggattcgcgggggggacggtaagataaatctgaggagctggaagaagccgtagatcggaaatcgcttgcagttttccaactttatttcccgcgggtacgaaccattaaggtaaaagggtcagagagagcttctacctcgcggctgcagcttgcctagttgccgcaggtctgactcaaggtagggttgttggcgccttcctgtttggaggggcaatcaagcaaaagagaaagggggatccgagagaccggcggaatgagggt

SEQ ID NO: 108579 - DNA, 163 bp, Homo sapiens
  chr3:88198586-88198749
  hyper
ttgagaggaaagtccgctggaaggcggccaggcacagtggattatctatttttaacttttcatactataatgttaaacaaaactaaattattttaatttacttaatttaaggaaccaaactaccggctcacccaactcagaagtggccgcagaagacattcaa

SEQ ID NO: 108580 - DNA, 148 bp, Homo sapiens
  chr3:88199141-88199289
  hyper
cgggcccagtgggccgtaggggcgacattgttgccgttgtctttcccccccagtcccggggatggagatgtcgggactcagcttttcagagatggagggctgccgtaacctacttggcctactggacaacgacgagatcatggcccta

SEQ ID NO: 108581 - DNA, 533 bp, Homo sapiens
  chr3:89156552-89157085
  hyper
tttttctcagcaccgcggcctcatcacatcttctgtgtttcctgtcccatgggcgacgcccccactcccacccggtctccttcccgagcagctctgggctgcagagccagctgcgtgccatcccgctctgcttcagcgcacgctgaagacggcactaggacccagggaagtccccgagcggggttcgcggaaaggcagccagactcctccttatctccagtgtcaaacttgacatcagcctgcgagcggagcatggtaacttctccagcaatcagagcgctccccctcacatcagtggcatgcttcatggagatatgctcctctcactgccctctgcaccagcaacatggattgtcagctctccatcctcctccttctcagctgctctgttctcgacagcttcggggaactgattccgcagccttccaatgaaggtaagccaggtaccgcgacgcacggagctctgccccgcggggctcacgctcttcaaagcacgttctcaccgaagccttgcacgtcgggaaggtgcctcc

SEQ ID NO: 108582 - DNA, 381 bp, Homo sapiens; identical to SEQ ID NO: 39427
  chr3:89163678-89164059
  hyper

SEQ ID NO: 108583 - DNA, 39 bp, Homo sapiens
  chr3:93692749-93692788
  hyper
cggaggagaccgcccgctcccagcgcccagcccgagagg

SEQ ID NO: 108584 - DNA, 126 bp, Homo sapiens
  chr3:93698753-93698879
  hyper
agcttatctccggacgctccggttgcctagttacgagaacgagctacctcgagctccgcctccttcttatagagtactcccctttctcttttcctagtctcgcgcaggggcgggtagccaggactc

SEQ ID NO: 108585 - DNA, 30 bp, Homo sapiens
  chr3:93699337-93699367
  hyper
ccagctgtcctggccgtcctaggggttgga

SEQ ID NO: 108586 - DNA, 375 bp, Homo sapiens
  chr3:93781638-93782013
  hyper
ttctaaggtccggccgcccaaagctacgccgaccaatccaagtagcgaaagtcgctttggccctggcccgttacctccgcgtcctgggaagtatcagcctttaccagctaccggaagtaactgcgcacgaaatctcccgcgggagctaagcctcttcgacaagaattctatagcgcgagcaaatcagtatctcgcgagaaattgaagaggaaacgtgagaatgaaagtggatgcccgcgaatcccggaagtcagactgtttttttcagttccctggaggctttttgatactgattcgcgtacacctgttgtttgaaagctctcagcgggacaatgctgacccaggtgagacctggggcccggctgggtacctcta

SEQ ID NO: 108587 - DNA, 2326 bp, Homo sapiens; identical to SEQ ID NO: 39431
  chr3:96531739-96534065
  hyper

SEQ ID NO: 108588 - DNA, 30 bp, Homo sapiens; identical to SEQ ID NO: 39432
  chr3:97115818-97115848
  hyper

SEQ ID NO: 108589 - DNA, 52 bp, Homo sapiens
  chr3:97483451-97483503
  hyper
aatgtatagttcctcggcgcgcctctgaccttttcccggagctcttcaatcc

SEQ ID NO: 108590 - DNA, 31 bp, Homo sapiens
  chr3:97483736-97483767
  hyper
ccagatttccatcccggagaccgatacgagt

SEQ ID NO: 108591 - DNA, 101 bp, Homo sapiens
  chr3:97483833-97483934
  hyper
cgccggtttttaaagccagcgccaccctctgtccccgtcagttttagaattcctctttggtctttcccatgtttttcactccacgcgtgtagttgttgcta

SEQ ID NO: 108592 - DNA, 30 bp, Homo sapiens
  chr3:97540478-97540508
  hyper
cagcaagtccggggcgccccggtactgcag

SEQ ID NO: 108593 - DNA, 272 bp, Homo sapiens
  chr3:97690770-97691042
  hyper
ttcacagctgtagagcgtgtctcttaggcccgacatgacgcccggcggcgcagcccacgtggaagccgtgctcgcacaggcagttctgccaccaccgggcggaggccggcaccaccctccttgctaagcctccaaactttccgtgcgctcgtcaccggtgtcgcgaccattagcaggccacgtgtgcgactctctgtaaccaaggcttccgcgaccctacccctagatccgggccccacccaccctgccccagtctccggggaggtgggacg

SEQ ID NO: 108594 - DNA, 38 bp, Homo sapiens
  chr3:97691377-97691415
  hyper
acccggcggtgttccgcgttcacgcccgggcgtttctt

SEQ ID NO: 108595 - DNA, 30 bp, Homo sapiens
  chr3:98241153-98241183
  hyper
gactcaaggcagatcgcgctgagtcaaata

SEQ ID NO: 108596 - DNA, 30 bp, Homo sapiens
  chr3:98241543-98241573
  hyper
cgccctagagggctcggccctgggacaaat

SEQ ID NO: 108597 - DNA, 33 bp, Homo sapiens
  chr3:98241907-98241940
  hyper
ataggcattcctggcgccgcgcgcggcgcattg

SEQ ID NO: 108598 - DNA, 93 bp, Homo sapiens; identical to SEQ ID NO: 39438
  chr3:98311893-98311986
  hyper

SEQ ID NO: 108599 - DNA, 210 bp, Homo sapiens
  chr3:98312339-98312549
  hyper
caaggccatgttcccgcactatcacctggagcagtgcctgcgtcccagagccctgcgtttgagccccccacccagacccccggagtattgagccggcgagctgcacaggcggaaagaacctttcgagaagagccgctgcagcgtcgggctccggaggcgggggcgggaactggggcgcgctgggagctgtagtccggatcctatcgccgc

SEQ ID NO: 108600 - DNA, 1545 bp, Homo sapiens
  chr3:98450986-98452531
  hyper
aaaagataaaaagtacgaacacatttgcccttgaagggcagagccccggaattcaggagctctctgaacactcctccccttctgatagggaccaaaccttctgctgagccttgtgtcacagtcagtccgcggcgccacaagcctcagtgtttacttctgccgcctgccagccgggcggggaaggggagtacccggccacccctcactttagctcctgcagctttccaaacaaaccagggcgggatgggagtgtcttcttggctgtggaaatcgatcctcctaccttgtcctgaagccacccgccgcctttcctcgtccctcccttcgcggtgattttccggtcccggcgcccggcgagggcgcgcggctggtgtccgccccgcccgaaaggtaggggttcggctgtgctcccgcctggtccccaacgcctcaccctccgggagacccgcagcctcccaccactttgcaccttcctcctcgaatttgggggcggccaccgtgcaactggcgccagccgcggagcaggaggagcttcccgcgactccggaggcgctcggcgcagtcgcccgggattggggctggcgggagcctgagactccgggcagggctgctccctcctctgctcccccgccagatccgcggggaaggaatcgtgcccgcgccgcccctggcccgcgccaccttcctttggtttctgccggcctcgggcttctgcggcccgatgtggcaggcgccgcgagagaggcagcagccggctggagcagcggcccctcaggtctcggagcccggtgcgcctctgcggtcgtcgctcctgggcctcggcgggtcactcttgccggccggcttcgctgcgggtttgcactgcccgggtgagggaaattgggggtgcgggaagaccggtctgggccggggtccgggcggcctggggtctgtgctgccccgaccctccggctttgcagcctctgaggctcagggttgggggtggggacacggagcgctgtttgcccctccacatatcctgccagcaccaaggaggtggcgtgcggaggcgtaaagggaccatgggcgctgggacccgcgagccagccggcgtgcgccgcagccaccgccgagagggcacccggggatcctggagccccagtgaagggcgggagggacgcgcagcctcgcgggtaagcccaggagccgtgggggccgagagaatctgctctgggaccctcttttgtcgaatcgccggcgaggttgtgcaattgggaagccaagaggagtgtccagctcctcgttcactattgttttcttgtaaaagggtctgtacgcgaggagggttgaggggtctggaaggttctggtctcttaccgtataaagtttttcgagaaaccctttttccctccacaatggaactagacctaacaaaacaagctccgaggcagtttaggagaaaggaggacggtgagtaaattgcagtgtttgggctgctgttaattttcaagataagggagaagcaacttgtcattttgaggccgccggctccggagatcccggcaa

SEQ ID NO: 108601 - DNA, 42 bp, Homo sapiens
  chr3:98452764-98452806
  hyper
tatcagaaatcacaccgagtctaaagtcgtaagtcccatttg

SEQ ID NO: 108602 - DNA, 1438 bp, Homo sapiens
  chr3:98619761-98621199
  hyper
caaaaagtaaagccgcgccaacttgggggacagacgggcaagaccttgcctttgcaactcaaccccgtgagtacccagccaggtccggccacgcacgaaagcgcaccgcgcctccctgcagcgtctgcagatttgttcaggggccaagagacccgcagccccgacggaggttcccccgccgctcactcccctgggaccactcaccttgctgggctccagcgtcctcgagcagcaggagcaggacaagtaagagcaggaggaacagaggcatggagaaggaggaggagttggagcagggagggagggagcgggagagggggagcgcggcccaggcgggggcggcggccgcggcccggacttggggacactgcgggcagcgcctggctctcaccaccgcccggctcgccatcgcggcggccggcagtctgcctgcatagtgcgggtgcctcggcagccccgcgcgcctctggccgcggcacccgaccaggagacggcggcagcggcgggagaacaagaggcagccctcgcctcaccccgcgccgggacccttccgcccctcaccccgctttcacctactcctccttcgtcccttccctccgctccccgcgccgagaccccaggccggagcgcaggggaggggagggaaggaagcggagtcctcgagccgcggaggacggccgcggcggagctaaggaacgtgcctcccgcgccgcgctcctcaccagggtcgccgctcgccgcgctcacccgcggctccggctagctggcaggcaggcccgcagccagctccctcgcgctccctctcgcgcgcgccggccacgccccctaggcaccgcggccaatcctcggccagctctggtccgtctccttccgcgaaacccaatcagcatgctcgctcctcgctcgacccgctagttctccggcccattcctcgagctccaccgccccttacctccctcttccaatccccttcggcctttggaggcgtcccacccgcctcctccaatccaggtcccgccctccagcttcggatccccgcggcccccgcccggcccgggcgcctgttattgttgggccctcagcccaaactgatcccgcagaggcggcagccagctcgtcagtgacttccgggacgtcccccatcccgcgctccctgctcctcaggcccagcttgctccttgctcctttctcctcgctcctccgacgcacatcagaccactggaagggggtgggaaacctggatcctgggttgttttagctgggagctgagtctaagggactttttttttttttttaatggcagagcgtggcttgttttgttaaaactgccgccagttgttgcaacagctccgagttagaataatagatgcagtgttcagtttttaatatatgtgttccctgttttctctgctctttttatggcggggggtgggggaca

SEQ ID NO: 108603 - DNA, 30 bp, Homo sapiens; identical to SEQ ID NO: 2676
  chr3:99357066-99357096
  hyper

SEQ ID NO: 108604 - DNA, 118 bp, Homo sapiens
  chr3:99536599-99536717
  hyper
ctgcttctgcctgtcggcgcctgtgtggaaactgcgacgagtctgggagcggctgccggagaggcggggcagaggtgtgacgtcatcgccgcggggcggaggcgacagtgtctagcgg

SEQ ID NO: 108605 - DNA, 30 bp, Homo sapiens
  chr3:99537038-99537068
  hyper
gagattctttaacacgtgaaacagacagct

SEQ ID NO: 108606 - DNA, 546 bp, Homo sapiens
  chr3:99594775-99595321
  hyper
agaattcattggatgcgctttgcgaaacctgtctgcagtttgtgatgctgagacagctttaacagccacccacagacttgctacctggctgtctgacagcagtgccccttggtggagcgaagttgctctcccgggcttacctgaactgcctgcgccggggccgggcgggggccgggccggggccgctgtagtgccgcgctgcgagccgactgtgcgcgctccgagagtcgcccgaacaatgcgagcggggcgctgagcgcgcccggcctatgggcgttacgtcactgttctgccttataaggcgctccgcgtgtgcggcgctgtcggcgggggcgccggtgaccgcgggaccctcggccgcggcggcggcgcagccacacaccccagctcccgcggatgttccggccgtgtgaacggaccgtggttcccggctcccagcggagggaatgagtggtgggccggtgggccggggcgccggcgccctcctgtcgggctaacaaagtcattgggaggcagggtcgatccgcttgtaacttttttccctct

SEQ ID NO: 108607 - DNA, 57 bp, Homo sapiens; identical to SEQ ID NO: 39445
  chr3:99787817-99787874
  hyper

SEQ ID NO: 108608 - DNA, 30 bp, Homo sapiens
  chr3:99979564-99979594
  hyper
gcctccaactgggacggcgtccaccgcgcc

SEQ ID NO: 108609 - DNA, 30 bp, Homo sapiens; identical to SEQ ID NO: 39446
  chr3:99979837-99979867
  hyper

SEQ ID NO: 108610 - DNA, 132 bp, Homo sapiens
  chr3:100053357-100053489
  hyper
ccagcacaccacctcgacttaggccgttcccttttgccctttgcctttcgaggcatgctttttccggactgtgttgcaattaaccatttctcgttggtccgtcctggtgttacaggcgcactggaatgaacg

SEQ ID NO: 108611 - DNA, 30 bp, Homo sapiens
  chr3:100119283-100119313
  hyper
cagtaacctgtcatcgagctactctatgcc

SEQ ID NO: 108612 - DNA, 449 bp, Homo sapiens; identical to SEQ ID NO: 2678
  chr3:100120033-100120482
  hyper

SEQ ID NO: 108613 - DNA, 30 bp, Homo sapiens
  chr3:100211141-100211171
  hyper
ctgtttaaacaaagcggtctgtctaaaagg

SEQ ID NO: 108614 - DNA, 30 bp, Homo sapiens
  chr3:100211409-100211439
  hyper
gggcttgtgccagccgcggccgccgaggcc

SEQ ID NO: 108615 - DNA, 30 bp, Homo sapiens; identical to SEQ ID NO: 2679
  chr3:100306083-100306113
  hyper

SEQ ID NO: 108616 - DNA, 30 bp, Homo sapiens
  chr3:100428130-100428160
  hyper
gcgtggtcacgccccgcgcatgcgtgcatc

SEQ ID NO: 108617 - DNA, 30 bp, Homo sapiens
  chr3:100428383-100428413
  hyper
ttgttgggtcagcgcgattggccggggccc

SEQ ID NO: 108618 - DNA, 30 bp, Homo sapiens; identical to SEQ ID NO: 39449
  chr3:100428854-100428884
  hyper

SEQ ID NO: 108619 - DNA, 982 bp, Homo sapiens
  chr3:101231398-101232380
  hyper
gcctgttcagcagaacgagacccggagaggcattgtatcaaagaaaaggagtctccggtcgcaagccccacctttcctccccagcagcagctacctgctgagggaaagaggagggagaggggaagggacgcaaagtcgagaatcaaaggaagagaggaaagtggggtcaggcgctgagaagccgaaatgaaattggaacattggtggaattacgaggaaggcgtggcagagagtgacaagccaaccgggaagatccatgggccgatgagacgcaaggagggtgttcgcgggaggagggaaaaaataaaaggggttttgaggtgaagagcgcccgaggcttcgatgacagctcggaccgggtcttcgactccaggggcgggggcgacccgggagccttccattgtgcgcgccccttcctctccccgcccccgccctcgcccccgcggcttcgggccgcaaccccagctgccgcctgcgcctcccgtttcccccgggtaggagacaatatgttcagcccttctctgaccctttctcaccggatgaagatggccgtcgcccgagctttctcttgtccatcttctcccgctgctgaaatttcagttgcaggcgctgtcacctcaggacccctccggcttggagagggagggggaggggaaaggaaaaaaaaaaaaaaaaaaaaaaaaaaaaaaaagcccgcaaagtgcgaagcgcgcttgcgcaagagccgtcgcctgcccttcgaccggaaatcagccgcccctcccaccttcgaccggaaatcacttcctgggacttttcactgtgggctgcctcttccagcgtttttttggtggcgtttatttcatgatctgagcccctctggggaggtgaaccacctgggtgctcgattttagctttgttgactttgaagattagattgacaaaaattaaaagggaaaaacaggaactcctccggttcactggatctcgcgaggtggccaaa

SEQ ID NO: 108620 - DNA, 496 bp, Homo sapiens
  chr3:101280470-101280966
  hyper
taagccaactggcccggcccagaagaagtttttaggatatatggaggaaaacacaacacaacacagctacaactccgtgacaactgagagcgtagtcttcgagtacccagttgcctactgacagccgtctcctctaaggcgcttcttttagccaagaaagcgttctttgcgtgctgtgacgtaaaaagcagcgccggaagggagagggcggaacttccggctgagccccagcgaccgctctggtcggctgtgtagactgttgggtaggctgcgtgctagcttcggcgcggatccctgggcgtccgtacgtcggagtccttcgtcctccagggtccctgttctttgcgccagcgggaaccactatctctgcactcctggtaagcgagtttcttctttcgcctaatgtgtgtgttgggggtgggaggacgccggagacgttccaagatgcacttagtggagcatgtgcgttcggaaggcccacgggtaagaggaagcc

SEQ ID NO: 108621 - DNA, 190 bp, Homo sapiens
  chr3:101292845-101293035
  hyper
cagcactcttagaccgcccaaccttcccagctcttccttccgaggcggctactcgatgacatcacatccacttccgcttccgaaggcggcctcttttcattcctcgggaccgctctaggctgccaccacgccggctggccccaaaaactcgatggttgttgggcggggtcgtgacgtccttggcgtggct

SEQ ID NO: 108622 - DNA, 30 bp, Homo sapiens
  chr3:101293417-101293447
  hyper
gggaccaggagcggcggtgcaggagccgct

SEQ ID NO: 108623 - DNA, 100 bp, Homo sapiens
  chr3:101395080-101395180
  hyper
agcctccactgccgcgagccacacgccacctccagagggccggggcctacagcctcaaggggccgcccaaggaggcggacctggcgcagcccaggcgtcc

SEQ ID NO: 108624 - DNA, 70 bp, Homo sapiens
  chr3:101396029-101396099
  hyper
agccctgattggagcgcactctcgttttctggcttgatggagccgatccagtgacgtcaggaatgcgggt

SEQ ID NO: 108625 - DNA, 185 bp, Homo sapiens
  chr3:101405382-101405567
  hyper
aaaactgcacagctcgaccctgcaacaaaaagtgaaagtccatcagggagggtgtctacagccatgccagggacgacagagaggagttctgcccgaggatgtaagcggattgggaaccacgggtcgtgcttacttcatggcgacagctccacggaaagacaaaagatggcgaaaagaaagagaga

SEQ ID NO: 108626 - DNA, 473 bp, Homo sapiens
  chr3:101443393-101443866
  hyper
gcagccaattgggccgtctgggagccgtgcatcctgggagttatagtttccggctccctccttcagattacaagctccacagagccgcgggaggacggttgcctggtattattagcaagcagcaaatatggcggtggcgcgcgtggacgcggctttgcctcccggagaaggtaaggcgatccctaccccgagtcctaaggtttacttcacggagctgaattaaatagtggagagcagaaaacctaggtttagatgtgcagttctggaccagttcttttgatgcggatctgtggtcgtcgcggaggcgggctaccctctgggagttgtagttcacctgccgttcccagctctccggcgtcgcggtgagggccgagcgggggactacagcccccagaagccttcgcgcggcccggcgccctggctcccgcgctcccgatgctgaggaggcggtggatttcgggctgcgatgacct

SEQ ID NO: 108627 - DNA, 31 bp, Homo sapiens; identical to SEQ ID NO: 2684
  chr3:101475323-101475354
  hyper

SEQ ID NO: 108628 - DNA, 465 bp, Homo sapiens
  chr3:101497829-101498294
  hyper
acgtccgaagttcacgaggagttgggtcgtgagaggggccagacctcgatccgcggggcgacagctgcagtgtcgcgtcgcgagcaggagcttggcggcgtagagcgccagggtgccaacttcgcttccaggcctgtgggttccgcccggcgcgtgctgctgtcagtcaacgccctcggcccgcccccgccgaagctccaccaatcgtagccgggggtcggaggtgaggagacgtcgccgggtgaggaagcggggggctagcggcctggcgctgcggcgaccgaccggggcgtcaggatccctggcccccggagagcgaagggcgggcgggtcccggaggtgagtgctggatgtggtctgtgtgcggacgtcgggaggggccgctgcgggcggagcgacccattgcccggctctgccagcgcgctcctagactgcgaagcccctccctccgcgcgcatctgctcc

SEQ ID NO: 108629 - DNA, 104 bp, Homo sapiens; identical to SEQ ID NO: 2686
  chr3:101498503-101498607
  hyper

SEQ ID NO: 108630 - DNA, 205 bp, Homo sapiens; identical to SEQ ID NO: 39460
  chr3:101546675-101546880
  hyper

SEQ ID NO: 108631 - DNA, 30 bp, Homo sapiens
  chr3:101567850-101567880
  hyper
acagctcgccgcgccggggcaggcagaggg

SEQ ID NO: 108632 - DNA, 30 bp, Homo sapiens
  chr3:101568488-101568518
  hyper
tgctggacgacagccgcggcggagaggggc

SEQ ID NO: 108633 - DNA, 30 bp, Homo sapiens; identical to SEQ ID NO: 39461
  chr3:101568836-101568866
  hyper

SEQ ID NO: 108634 - DNA, 30 bp, Homo sapiens; identical to SEQ ID NO: 2687
  chr3:102392762-102392792
  hyper

SEQ ID NO: 108635 - DNA, 30 bp, Homo sapiens; identical to SEQ ID NO: 39463
  chr3:105085506-105085536
  hyper

SEQ ID NO: 108636 - DNA, 30 bp, Homo sapiens
  chr3:105087190-105087220
  hyper
ctcaggcccgcctggcggctgacacaagtt

SEQ ID NO: 108637 - DNA, 580 bp, Homo sapiens
  chr3:105087450-105088030
  hyper
catcccttcagctgtcggcaagctcaggtcacagaagaggtttgaaagcctctgaatctctcccaggaactggcggggagaggggtttgggggccagagcctgaggaagagattacaagtgtttgcgagctgctgctgctgctgccgttgctgtgtgtgtgggcgggaggagtgccctctccagatctctttattaaagttacatttctgggtgaggtaatgagctcacctgatgtttctgaggctgagggaaaaaaaaggcgtctgcgttctctgacaaatctcgggctctggggcggggactgtgaaaccatagttcaaccggatttaaagcaggtgtcctagtgtaacaacgctggggaggtaggtggaaaggcgagacccccttgggcctggcacagtgtggatttcactttttcgagattccactgtccgatggaggaaaggacactttggagccagggaatgagccaagaagggaggacaagggtgatgtcggtttgtaacatgcaaacgtccacacgcccacagttggttttccgattaaccccctcgagacttggagaatgtaatctcaccc

SEQ ID NO: 108638 - DNA, 474 bp, Homo sapiens
  chr3:105088087-105088561
  hyper
cgggccacgtcgcaggataggtttttctacacatttaactgctaaaagggggaaagttccgctttcagacctccttcacggtggttcttttggcgccacaggctcgtgtgtccagggggcaccgagctgcgcgctttcggcgagcggctagccccggctcaccgcaaccagccaccgtgaatctgaggatccgatatcggccctggaccctcagatccgtggtttcggtgaattaccgagctggcattgccgaaattctcattgcagtatcagtgtgttttgaaaggaaaggttacagcactaaaggcgccgtgtctacactgaggaagcaagtcttggacagtaagtgcgccttcttcggagccctctgcatagcagagcccggtgggggcgcggtgccaaaggccggcttcatttgagcggggtaactgccttccctgccggccactcttcatttccggagcagttttaata

SEQ ID NO: 108639 - DNA, 41 bp, Homo sapiens
  chr3:105587994-105588035
  hyper
cctcctcgcgctgccgccccgtccacgtcctccacagtaca

SEQ ID NO: 108640 - DNA, 237 bp, Homo sapiens; identical to SEQ ID NO: 39466
  chr3:106959642-106959879
  hyper

SEQ ID NO: 108641 - DNA, 348 bp, Homo sapiens
  chr3:107148754-107149102
  hyper
caagccccccccaggcgcccaggctgggaggcccaagtcccggcagctgctgcggtggacttagaggcagcagctcctgcttctgccccaaacgttcagtgtagtcggattcccggggacagcagggcagtctgcgcgcacatccccggggcatcgcaggacacctgctgccccctatcggtggtgagaacaataacccgaacccggttggaatcaactggaagaggccttttgaaaaaaagaatattccaggactacgcagtagccagacgactctctaagaacatgggtttccgcagtcagctccgactgcctcgttttaatgcagtttttcgccattgtaggaga

SEQ ID NO: 108642 - DNA, 254 bp, Homo sapiens
  chr3:107149809-107150063
  hyper
gaatagatagacgaacgaaggtgcgtgcaagaaaggagggaggggaggaggtacggtcggcttgcacaccagactgtgcttgtttgagcaggaatagtggcggggtgtcttcgagaggataacggaaatgccccaccacacgcccacagcgcaagtgccggcgtccccaatcggccagtggcagcagcagaaccggggtccacttggcacctcaggggctctcgcccgtccgctctgggcgtcgggctgtccag

SEQ ID NO: 108643 - DNA, 30 bp, Homo sapiens
  chr3:107150894-107150924
  hyper
cgctgactatttggcgagggaccaccacca

SEQ ID NO: 108644 - DNA, 30 bp, Homo sapiens
  chr3:107241621-107241651
  hyper
ctgtctacaggtcccgaacattagaaaata

SEQ ID NO: 108645 - DNA, 30 bp, Homo sapiens
  chr3:107242609-107242639
  hyper
tctgcgttggtgaccgggaacagcagccca

SEQ ID NO: 108646 - DNA, 209 bp, Homo sapiens
  chr3:107243051-107243260
  hyper
gctttgcctggtcgcgatgacagaaaacttgcagatcctttatccggggatggggtcgatgcctctagaaagagctccctagccctcttaagccacactcgtgttacactgttatttgctgcgatccgggtcgctagtaaattacagaaatcagactcgaggtttcttttcctcctccacctcgtctcgctcactcaccctctgaaatt

SEQ ID NO: 108647 - DNA, 30 bp, Homo sapiens
  chr3:107243775-107243805
  hyper
cagttctcttctcccggccgcggacgccgg

SEQ ID NO: 108648 - DNA, 387 bp, Homo sapiens
  chr3:107244653-107245040
  hyper
tgggtgtttgggagacggcagtggccgcccaggtctgaaaggctgagggcttcgatacctggacccgctgccgccgcggtggcacctcccgccgtctcctgggcaaggcgaggctcgggctgcctatcgatccctatgatttggttactggtgtgtttgtcctgggggcggtgatcacttgtgcaagttgatgaatgatcgcggtgtggtttttgcgtttgcagaatggatcaactttctgctttgtacatgtggggagtaggaagcgagggtacgggagataccctagaatgccagttgggttgccccccagcctctgccctttcaatacggggagcttctttgccttctgttcccacagttctccagtgtcggggggtggtagag

SEQ ID NO: 108649 - DNA, 394 bp, Homo sapiens
  chr3:107646509-107646903
  hyper
ggaggaccagtggcccgccctctggcggccgcgagagacagcgtgccccgcgctccaccaagccgcgacagggaggcggggagggtgcgtgcgaacatgtaagttaaaattagatcaatagtcagcttagcggcctcaatcaatgcttcgcagggagagcatgcaaccatctatttataagctaacaccggcattatcttcctcttttaggacgcagagatccattactgcgcgcggcggggaagaggacgccgccgggagctggtgcgtgacacactgcagcctcgcgggctgcccgggacttcatcaagcccgggtcggctcggggcgggcaggggtaggatccataccgccgaactgcggccccgctgctcgcagccgctcttccgggagc

SEQ ID NO: 108650 - DNA, 30 bp, Homo sapiens; identical to SEQ ID NO: 39470
  chr3:107647106-107647136
  hyper

SEQ ID NO: 108651 - DNA, 709 bp, Homo sapiens
  chr3:107940769-107941478
  hyper
ccaagtcagggctgcgtgagctccacggacctcccgggagtttggggtgaagtgcccttccctggctaggaagacggaggcaaggaattgctaacccgctctcacgaaactggttcccagcaggaccaaggagggcatctccctgggggctagcaggcacccgggcgctcggggacgccggcacccacctggacggggccttcaggttgctcttccggaggaactcctcctcgtagcggagcagcttcagcttctccaccaagtcctccatcaccacgaacatgtggtaggccgcgccgggcccccgctccaagaccacttccccggtcccttcgccacgggacctaggcaccccatcttccaaacccgacgtcgtgacgacggccagagcagcagtcatcgcagaacggacagagtccagcgtgggctcaggcccacagacctctgcggcctaagccgccagccctgccgccgccagtacagccacgaccggttaccaggcgaccaccggacaatccgtcaccagggaaactagactccgcctccttccctccaatcagggcggctttcctgaatgacgtcacctgtggccctcttcttgccctgcctctgtggaaatggtggtcgggaagcagccccgcccctcatggaggcgtggcgttcgcgccccactgccggctgcgtcttctccctcgctgaaagtctgaag

SEQ ID NO: 108652 - DNA, 35 bp, Homo sapiens
  chr3:108307931-108307966
  hyper
gcgctcttgcctctcgctgcggccagcggaacccc

SEQ ID NO: 108653 - DNA, 100 bp, Homo sapiens
  chr3:108308518-108308618
  hyper
atctcgcgatttctcgggagaggaatcggttaggagaagggggattcctcactcagctgtgcgctctgatttcgtgcgcttcctcgtccttcatgttgga

SEQ ID NO: 108654 - DNA, 30 bp, Homo sapiens; identical to SEQ ID NO: 39474
  chr3:108308856-108308886
  hyper

SEQ ID NO: 108655 - DNA, 30 bp, Homo sapiens; identical to SEQ ID NO: 2692
  chr3:108976491-108976521
  hyper

SEQ ID NO: 108656 - DNA, 1976 bp, Homo sapiens
  chr3:110789508-110791484
  hyper
cggtactgtgcgaggcgggaggatggagagggcagggcggagagccacctgggatgagcgagggtcatggtggaccacagacgctcttcttatacgggcaaatgtttaatacttcccgaggtcgcctctctgccatcaaacgaaaacaggcaagaaaataaaactacacatacgaacatgcaaaggaaacaaaaccaaagaaaaacaccaacgcactcgttgggggaaatccatggcctcctgttgccagtcgcccggcgcggaaagtggacagcccagcggccagtgagaagcaagagcaagaaagcaaaccttctgaagacccctctcctcgcccagctccgccgaccattctaccaagctgccctcccagaaaaaagagcaggaaaaatgcctgtgcaaacgtgccttggcgagcggggaataagtgggctgggaagaagggaaggattcggagagcacagctgtcccggggaacaggaaggaggagaaagtctctccctcccttcagtgccccgcgccccagcgaggaggaagattactagtccagcaggctgcgtccagcttcctacacaggaacctttagcatgggcaacggaagggcagccccctcctgccttcccctccccaccccaccccctcgtcccaggtccccgccacagggagagcgccgcccgggagaggagaaggccgagcgtgattgtcccgcagccctcgcctcagtcggcgccggggcccccgtggacccgcgaggggtggagtgggcgagaccattggaaaggcagggaaggggggaaaccaggcaggaacgaggggcggggccgactaacctattccagattttcctgtcccttttaaatctctgctgtgggagaaaccccgttatcaaagtggatgaaaagaatatttttttttgaaaggggaggagcatgtgtaggagggcggggtgggaggagacagggcttgcgcccggggatcagacgggaggtggagttgcgcggggagggcgggcgagtcgggcgcccgctctgagagtcggtttcttttccccctcttgcgtggggcggggtggtgcgttccgagttcccaggagttcgacgcgggcgggtgccgaggggaggggagtggcggcggcggcgggcggctcccgcttcagcctcggcagtggcgtcggcgacggcggtgtcgaggcagccgccagcgttcggccaagtgtcagccggcagcgacggcgctagagctgggagctggggacgcgcgcgccggaccttccacagcctccgcccagagcctgaggcgccggggccgggggagccggggggcgggcgggcgagcgggccggggggagggtgggggatggcgcggaccctgcggccgtccccgctgtgtcctggaggcggcaaagcacaactttcctccgcttctctcctcggagccgggctcctgctgcagcccccgacgccacctccgctgctgctgctgctcttcccgctgctgctcttctccaggctctgtggtaggtgaacctcggcggccggcgtgggctgagggagccgccactgagggtgcgggcgccgcggccggctctgccagccgttctctggagcagcgaggcggttggttgtgcgagcgagtgccgaggactttggctggaaacttttcgccgcgcccggggcgaggccctggaagggccaggccagcgaatgctgagccggcggcccgctgccctcccccgcggccgcgcgggtcgccgtgcggatggccgagggttggcgatggtgcttcgtgcgccgaactccgggtttgctccggggaccgttacttcctcgctcattctctgggaaccctcgtaggttaaggtgccgggatgcacgtttgccgctttttttcccggtgaaacttgagctgtgagcccagaaaccctagggaccggagcccgatggaatgaagcctccgggtccacttctcatggcctt

SEQ ID NO: 108657 - DNA, 124 bp, Homo sapiens; identical to SEQ ID NO: 2694
  chr3:111393431-111393555
  hyper

SEQ ID NO: 108658 - DNA, 1491 bp, Homo sapiens
  chr3:111578039-111579530
  hyper
atcatcaccctaggacgtaaaccctcccgcccttctttcagctcttaaaaaaagcctgccacgaaagtccctactgcgttgctgcgaacgtagctttgagaagctggcgcccagtgatggggcaaacagccatgcccttccagcagccgtgaaagccccaacagcaaactgcctgggagcggggcaggtcaccaacttcgttgctcgaactccctgggtgcccgccgcggtggttacaaagggggtcaagagtgccggacccagccgcgcggagcccaccattgcggcccgagggggacccgacgggggcccgacggtgtggcgtggcgcaaggagcgcgcctgccttctctcgccgccgggaacgggctgcaccaatggccaggtgaggaggcggcggtggtcgcccgggaggagggggtggtgccgactccgtgtgccaggagtgcgtcccggggacgctgcctcccccgcggccgagttggttgccgccggttgcgctgcggagggttgggggcggagaggaggcagtggctgcccgggccgaggaggggcgcgctgactgctcaccgcgagtcaggaggggccggcgggctcacggagggagacagggtgggcgggggcaaaggctaggcgctagggcggcggcgccagcgtagagcggcggtttggaggaaagatgagacggtgagtgggctccggggacacagagtttctttgcttctttacaggctgtagggacaaaagcccgggctggggtcggcagtgcccaggctgcgcagctgggtgggtgggggtggcgaaccccgttgtgcatgactctcggggggctgggtagatctccggttgaggggatcccggggagggagtgtctggtagggaagatgcttccagagtgattgtagaaaacaggcagaatgtgggggaactgggggcaactttttccagcaactctggaatgcacatggagagagggatggggatccttgggatagctccctgagaaagagaaggtccgctgctggatggtgtagggcgcgggattcagagaagactccctccccgcaaatatttggctagctgcgcttctagttccactttctttcaagagtgaacctacgagctttaaccgccaaaagcggctgatttcgatttggcctttgaccccccactgaaagtttacagtgtggccgtctcggcacccctagagatagcagctggaaggcttggggagtattttaaccctctgtttctccagctccctgcgcggcggaggcgcagctgaatcgtttgctggttcgcttaataacttagccctagcagtcatcacttattaaagcgccgaggacctggctaactcccgccaccaccaggaaattaaaaggctgacaggctgtccctcccagggttggggtttcctgtttgaaagagcttgagaagtcaaactgcttcgcggttcctcacttacctttcttatgtaaaagagggagcg

SEQ ID NO: 108659 - DNA, 15 bp, Homo sapiens
  chr3:111579579-111579594
  hyper
cgggcgcctggccct

SEQ ID NO: 108660 - DNA, 250 bp, Homo sapiens
  chr3:111697739-111697989
  hyper
cgaaagagccacgacgctctgcgcatgtgcgctcttcgcaagctgaaaatcttgcggggagctctttagcaagttccgccttccagcctgaagcgcatgcgcagcctcggttccgttgcgtagcgtgtccctcagtgggacactgcagggtgcggggacaactacgaagatggcggttgcgcgcttggcagctgtggcggcctgggtaccttgtcggagctggggctgggcagccgtccccttcggtccc

SEQ ID NO: 108661 - DNA, 30 bp, Homo sapiens
  chr3:111698250-111698280
  hyper
gcaccccgggccctcgctggcgttttacac

SEQ ID NO: 108662 - DNA, 433 bp, Homo sapiens; identical to SEQ ID NO: 39483
  chr3:111804990-111805423
  hyper

SEQ ID NO: 108663 - DNA, 347 bp, Homo sapiens; identical to SEQ ID NO: 39484
  chr3:112051793-112052140
  hyper

SEQ ID NO: 108664 - DNA, 302 bp, Homo sapiens
  chr3:112052251-112052553
  hyper
cggattttgccttccaaagggtggtttacaggcagctgctggcgtccagattctccattccaattgcctgaaaaaaagatgcaccaggccggggctccgggggctcttgatccgcgctgacgaagctggcgcatcctccgggcaggctcggctcggctcactggctccagctcccaaaactggggaggcacagcctattttaaactgcccccaaaagggaaagagaaatgctgtattggttccatattggcaccaaaagctgcggcggagatacagatttccaggctcgctttctccgggag

SEQ ID NO: 108665 - DNA, 30 bp, Homo sapiens; identical to SEQ ID NO: 39486
  chr3:112280226-112280256
  hyper

SEQ ID NO: 108666 - DNA, 36 bp, Homo sapiens
  chr3:112709772-112709808
  hyper
gcagcgggaagtcacgcacgcgcaacccaggccaca

SEQ ID NO: 108667 - DNA, 30 bp, Homo sapiens; identical to SEQ ID NO: 2699
  chr3:112710254-112710284
  hyper

SEQ ID NO: 108668 - DNA, 30 bp, Homo sapiens
  chr3:112738040-112738070
  hyper
agactccgaagacccgggtgagcaagggtt

SEQ ID NO: 108669 - DNA, 30 bp, Homo sapiens
  chr3:112738362-112738392
  hyper
ccatcctcgcccggcgcctcactcaccaag

SEQ ID NO: 108670 - DNA, 55 bp, Homo sapiens
  chr3:112930381-112930436
  hyper
agaaggaattgtttgcgagttcagtcatccaaaaagcttcttccatatggaggga

SEQ ID NO: 108671 - DNA, 158 bp, Homo sapiens; identical to SEQ ID NO: 2701
  chr3:112930455-112930613
  hyper

SEQ ID NO: 108672 - DNA, 987 bp, Homo sapiens; identical to SEQ ID NO: 39490
  chr3:112930655-112931642
  hyper

SEQ ID NO: 108673 - DNA, 94 bp, Homo sapiens
  chr3:113233978-113234072
  hyper
ggaaccgcggagcgcgccacaggttaacccagccagcggcttccgggctgttgcctgggttaccagagctccgccccacgcccttgcgtatatc

SEQ ID NO: 108674 - DNA, 1191 bp, Homo sapiens
  chr3:113251173-113252364
  hyper
gagagaacgtgatgacgtgagactctccatggagagtaggaggtaataaagaaataaaacaggtgtctgaggagaggttctattagagaggggagaatagagagtaattatcgttcagacaggcaagagttctctgcaggtagcagcctgggaaagcgaactcgcgcaccctcttgggggacgggctcttttgctttctatttcttctcctgcagccagggtgcacacgtatttgaaacagaccgaatttcctcctcgatgtggcgtcaggttgacttttcgagactagcgggtatttctttttaatgactccaatgcctttttattattgctgttattgaggttgagggagaagagatcggtctaaattctggctgggtaagtggggggattctcggcgatgagaaacgggggacttagaagccggaggaaaatcagcagccccacatctccacttctccagtccgccctactctccacccgtgacctccagtggagaccccaggcggcagcatcagtatttgatcggcccttcgtcagcacgctgccagccctggccggctgggttcgccaggcatcacccgctcggctctgaagcggacgcctggccctgcaccgggctttggaaggaccctctctgcgctcgccccctccccagggtggctccgctttcgagcccgggcgcggtgcccaccatgcgcggctgcctgcggctcgcgctgctctgcgcgctgccctggctcctgctggcggcgtcgcccgggcacccggcgaaatcccccaggcagcccccggcaccgcgccgcgaccccttcgacgctgccaggggcgccgatttcgatcatgtctacagcggggtggtgaacctcagcaccgagaacatctactctttcaactacaccagccagcccgaccaggtaagacactcgctcccctcgctcgactcctagaacttgccagatctcagagccccgtcgctgctttggagtcccctgggaattgaccttgggagacttcggggaccaggggactttctttccctttctcctccgaagcaatcgctgccctgccctagctgcctcaacacgcctcggggacaactctgcttcgcctcgcgcctctcctggcctggtcaagggcattgctgggctttgcagaggcaccagttccccgcaccgtctgcgggtcctg

SEQ ID NO: 108675 - DNA, 30 bp, Homo sapiens
  chr3:113414893-113414923
  hyper
tgcacccagggcagcgtggggcccctctcg

SEQ ID NO: 108676 - DNA, 218 bp, Homo sapiens
  chr3:113415720-113415938
  hyper
ggagggccggggggcggaggtgtgcaagttgggttgaagaaacaggaaatattcttaaaggtagagtgacggacaggaaggaaagccagtaggtgaatgggaaagaggtgggcctggttccttaaaggggacgccttgagaacctagaaaagaaggtgttttaagaaacttctttgtatcttcttctgtggtctcttttcttcgtctttcggtaggag

SEQ ID NO: 108677 - DNA, 30 bp, Homo sapiens
  chr3:113416437-113416467
  hyper
cctccacctagttgcggttatagatttcca

SEQ ID NO: 108678 - DNA, 30 bp, Homo sapiens
  chr3:113464364-113464394
  hyper
aaggtgtcaaacaccgcagttccagagttg

SEQ ID NO: 108679 - DNA, 30 bp, Homo sapiens; identical to SEQ ID NO: 39493
  chr3:113464978-113465008
  hyper

SEQ ID NO: 108680 - DNA, 30 bp, Homo sapiens; identical to SEQ ID NO: 39494
  chr3:113466178-113466208
  hyper

SEQ ID NO: 108681 - DNA, 79 bp, Homo sapiens; identical to SEQ ID NO: 39495
  chr3:113557397-113557476
  hyper

SEQ ID NO: 108682 - DNA, 253 bp, Homo sapiens
  chr3:113557554-113557807
  hyper
ccttcaggctaacccggtaacacccatcgtcaggaatccttcacggccgccagagggcgcaaggagctgcggctggaagtactcggagggccggcggaggaggcgcgcggagcctgtaactcgcagcgcgcgctggaggtgggcgcggggcggtgcggtgcggtgcgcgcggggcggtgccgcggcggcggagggagccgcgatggagggcgctccgactgtccgtcaggtaagccgcgggcctcgctggggc

SEQ ID NO: 108683 - DNA, 85 bp, Homo sapiens
  chr3:113666355-113666440
  hyper
tcaccgcctgttgccggagtctgaatgaaggctggcggctccacggtctcacgtagttcggaaatcctccgggttcccgggtttc

SEQ ID NO: 108684 - DNA, 30 bp, Homo sapiens
  chr3:113666886-113666916
  hyper
ggccgagcggagcccgggtcccggagactc

SEQ ID NO: 108685 - DNA, 30 bp, Homo sapiens; identical to SEQ ID NO: 39496
  chr3:113774943-113774973
  hyper

SEQ ID NO: 108686 - DNA, 378 bp, Homo sapiens
  chr3:113775218-113775596
  hyper
atcaccttgggactcggcttccttgtgaaccgtttccagcgattcagccccatccttttctttgagaaggaccttccctgaggcgccaggagcattttccaagttcgagcccgaacctcggccaaagctgcagcaaccgcccttctgcccgggctgcctccgggtcacgctgggaattgtagttcctccgcccgcaaggaaagcaggcataggacaccgtcgaaccaccactcccacgaggctctgcgcaggccgctcgcgttggctcagttaccatagcaacggcagaggtccctcgctcttgccgtcatcaaggctcgcttgaatgtcggctttgctttttttctggcgcccagtgatgacgcagtactccctgat

SEQ ID NO: 108687 - DNA, 30 bp, Homo sapiens
  chr3:113871600-113871630
  hyper
ccacccaggccgaccgcttagcctctgact

SEQ ID NO: 108688 - DNA, 30 bp, Homo sapiens
  chr3:114865458-114865488
  hyper
gccgggagctccggcgtctggagagacatc

SEQ ID NO: 108689 - DNA, 242 bp, Homo sapiens
  chr3:114866220-114866462
  hyper
caatgagaatgggacgcccctcgtgaggttgccgcccataaacaaaatgcactcttccttctcccctccgcccccccgtccccgcccctttcttcctcttccctcatctctgtcaccttcgattgggctaaaagaggcccaatccgctatctcaaacatccattgggacgcggaaacttcgctcagagaagtattaacaggcgattggtggacaatccttccacttcgcccacccccacaac

SEQ ID NO: 108690 - DNA, 400 bp, Homo sapiens; identical to SEQ ID NO: 2705
  chr3:115231422-115231822
  hyper

SEQ ID NO: 108691 - DNA, 703 bp, Homo sapiens; identical to SEQ ID NO: 39500
  chr3:115377287-115377990
  hyper

SEQ ID NO: 108692 - DNA, 30 bp, Homo sapiens
  chr3:115503505-115503535
  hyper
cactgctgccccctcgtggcaggagcaagc

SEQ ID NO: 108693 - DNA, 30 bp, Homo sapiens
  chr3:115503949-115503979
  hyper
gaggatttgacatccgtgagaggtaaagtt

SEQ ID NO: 108694 - DNA, 30 bp, Homo sapiens; identical to SEQ ID NO: 2707
  chr3:115881799-115881829
  hyper

SEQ ID NO: 108695 - DNA, 616 bp, Homo sapiens; identical to SEQ ID NO: 39502
  chr3:116163676-116164292
  hyper

SEQ ID NO: 108696 - DNA, 30 bp, Homo sapiens
  chr3:116164496-116164526
  hyper
ccgccctcccctcgacgtggcccctcgctt

SEQ ID NO: 108697 - DNA, 223 bp, Homo sapiens; identical to SEQ ID NO: 2710
  chr3:117715480-117715703
  hyper

SEQ ID NO: 108698 - DNA, 361 bp, Homo sapiens; identical to SEQ ID NO: 2711
  chr3:117715762-117716123
  hyper

SEQ ID NO: 108699 - DNA, 371 bp, Homo sapiens; identical to SEQ ID NO: 2712
  chr3:117716213-117716584
  hyper

SEQ ID NO: 108700 - DNA, 30 bp, Homo sapiens; identical to SEQ ID NO: 39506
  chr3:118753078-118753108
  hyper

SEQ ID NO: 108701 - DNA, 30 bp, Homo sapiens
  chr3:118753723-118753753
  hyper
ctccccccaactcacgccccgctactccag

SEQ ID NO: 108702 - DNA, 30 bp, Homo sapiens; identical to SEQ ID NO: 39507
  chr3:118754082-118754112
  hyper

SEQ ID NO: 108703 - DNA, 175 bp, Homo sapiens
  chr3:118959825-118960000
  hyper
gaggctggtccgcccggctctgcacgcgcctggcgctccacccccgccaaatcgaccacaccgggcgctggaaggagcaccgggagggaaacggagggttgacgcctcggcctctgggtggctttaaaaccctgtgccaatagtagactgggtgctgagcgcttcccaaattcca

SEQ ID NO: 108704 - DNA, 30 bp, Homo sapiens; identical to SEQ ID NO: 39509
  chr3:119012706-119012736
  hyper

SEQ ID NO: 108705 - DNA, 30 bp, Homo sapiens
  chr3:119013030-119013060
  hyper
cgcagaactgctctcgggagaacgcgttct

SEQ ID NO: 108706 - DNA, 34 bp, Homo sapiens; identical to SEQ ID NO: 2713
  chr3:119041463-119041497
  hyper

SEQ ID NO: 108707 - DNA, 283 bp, Homo sapiens
  chr3:119182267-119182550
  hyper
tcccagcgttggaacgctgcaaaccagctgcttggacgcaggcagcccccgcctagagaatcaagaaaaggtgtccaggcttcgggctgccagactcagacccagactccgacgcagttccagtgccagagctaaagctagagccagagcctgatacttcagcacccatccctagcctccattaccgcggagctgagcagacgtggcagcgcacggcgatgacgtcagctacgcgaccgcggtctgccccagccgcgagtgcgtccccggaatcagccggcac

SEQ ID NO: 108708 - DNA, 254 bp, Homo sapiens
  chr3:119187876-119188130
  hyper
gtgggctagctcgccgcttcggctctggctgctgttgttcctcctgccctcagcgcagggccgccagaaggagtcaggtgggctccgggcagtgccgagcctgccccttgggctcggggtctggccggagtcccgaggcgctcccccgcgcggccggctcccgggaagatgccgtggccgctgtagctcggagctgggcagaaggcaccggggcgccttgcggcggagagtgaggtgccggggtctctgctcct

SEQ ID NO: 108709 - DNA, 30 bp, Homo sapiens; identical to SEQ ID NO: 39512
  chr3:119217118-119217148
  hyper

SEQ ID NO: 108710 - DNA, 120 bp, Homo sapiens
  chr3:119298796-119298916
  hyper
gggagcgtgtcaaccgccccgtttctttccaaagccgggcatggcccggaagcagctgatcagatcttagttctgaatgtatagttcgggtacgagaatgtgacccgtgaaagttcagag

SEQ ID NO: 108711 - DNA, 30 bp, Homo sapiens; identical to SEQ ID NO: 39513
  chr3:119396210-119396240
  hyper

SEQ ID NO: 108712 - DNA, 285 bp, Homo sapiens
  chr3:119421924-119422209
  hyper
cgggaggaaagaggcggcaccatgagccacgcagtaaccatcgaggagccccaggcccagccgcaggtgtctcaaactcggtaccgggagaggtcgcgggctgggagccacatctcctccaatcgagcgtatgattttctgtacggtaaggaccgccgcagaccttcctccgcgtccgtcgcctcctaggccaggtgggctcccagatggtgggacctggccaggggcatggcgaacgaaacacgaccctctggactgacctcttgcccacggttgtccttggtc

SEQ ID NO: 108713 - DNA, 30 bp, Homo sapiens
  chr3:119812587-119812617
  hyper
aaaaatatgtatcacgtgaaacgggggcaa

SEQ ID NO: 108714 - DNA, 30 bp, Homo sapiens
  chr3:119813508-119813538
  hyper
tttgcggctcctcccggaaaaagccgatca

SEQ ID NO: 108715 - DNA, 225 bp, Homo sapiens
  chr3:119813912-119814137
  hyper
gggcgtctataaagcgctgtctcattggcctgaagcttaggcgctggagttggggcaaaagggagagggagggagcccgaaactcgcggcggcggccaatcggctctcactgccgtccaatcgcaagacctagctgcagtgtgattggccttcggccccggtcccaggagcggggagatgcctgactcgggtcgtggctgacgacccgacggttcgcctgcggcc

SEQ ID NO: 108716 - DNA, 123 bp, Homo sapiens
  chr3:120003912-120004035
  hyper
ctgctatgtgcaggacgcccacggtcccccggcgtctcgcgcgttcgcggggctggaaggggcgggaaggggcgggccggggcagagacaggggcccgcgcccatcgccgcgccgggagcctg

SEQ ID NO: 108717 - DNA, 299 bp, Homo sapiens
  chr3:120004079-120004378
  hyper
cggggcgccgggcgcctctggccggggcactggctgagccacgcctgcccgcccctccctggcgccgcccgcgtggcgcgcctcgaccctgctctcccgcgagggccgggagggctccgggaccttgcagactccacgcgcctcacggctcctccagctcctcggatctttctccttgcgtcgccgccgagtcccctggggcggccccgcctccggccgtctcctcagagaccttccctggggggcgccttcccctcagcgccccttcccgggcctcgagccagcggctgccgcaggag

SEQ ID NO: 108718 - DNA, 30 bp, Homo sapiens
  chr3:120068370-120068400
  hyper
attgtcatctgagccggaccgggtttcggc

SEQ ID NO: 108719 - DNA, 31 bp, Homo sapiens; identical to SEQ ID NO: 2716
  chr3:120068919-120068950
  hyper

SEQ ID NO: 108720 - DNA, 1033 bp, Homo sapiens; identical to SEQ ID NO: 39518
  chr3:120168943-120169976
  hyper

SEQ ID NO: 108721 - DNA, 120 bp, Homo sapiens; identical to SEQ ID NO: 2718
  chr3:120170066-120170186
  hyper

SEQ ID NO: 108722 - DNA, 30 bp, Homo sapiens
  chr3:120315106-120315136
  hyper
aacctctgctaacgcgcaggcgcacttcct

SEQ ID NO: 108723 - DNA, 30 bp, Homo sapiens; identical to SEQ ID NO: 39520
  chr3:120315445-120315475
  hyper

SEQ ID NO: 108724 - DNA, 1311 bp, Homo sapiens
  chr3:120626722-120628033
  hyper
acatcccccagagcacgacccccagcatactggccaataccgctgtcaatcaaatacctcacctacttctctaaattcccccctcccactgtcattggctttaccttcggcctatccacagatttcttctgccctggagaccacagaacttaccctatcgaatctaggattggcgccgaagctactcccgccctttgacgtccccgggcaccccgcccccttcacctcccagctttgccggggaagaagcagggcggggcaagctaggggccggcccgggggcggggcctgcctcccacggcgggagggcggagcctgctctggagcctgactgctcggttaggacctcggagagcgccaggcgccgcgaccagagggcccagagaagcggccggagcccgcctacctcggccccctcagcttcccgggctggcaggcggctagaggcgtctgaggaaggtgcctaagtcctgggtcagatagtcatccctctgggacgccgccgccgctgccgccgtccagctgtggctccctcgcacctgtgtgtgtctgtgtgagtgtgtgtgtgtgtttgagagagagagagacagagagagacagagacagagagcgagcgcaccagcgcgcgaatgcccgtgtgagggtgtttgtgtgtgttctggctgggagcgcgaatgcctcggcgtgaggtgtttgtgtgttcgcgcgcccgcgggcgggcgagagccccgcgcctcagcgctgggcctgggggagggacagcgggagcggcggctctgcgcgcccagcaggctgaggcgggactcgggccgcagccgtcgccgccaccgcttcacgtcccccgagagcggctgccgtgcagcggggagagcggacggcgggcgggcgaacaggcgggagagcgcggcggcggctgcgggcagaggtggagggaggggagcaggagatggggagaggggggaaagaggacgcggggagggagatgagggggaggtgagggggaggcggagggacaagtggaaacagacggtgtcgccgttctcctcctccccccctccccggcagctgttgctgtgggtcactcgcagatgttttggggtccgggctgctgggggatggggactagaaaaagtacccccctccccgcctttcatagtgacaaaaaaggaagcgttgaagctgatgggggaagagcccggaaggtggtggcagagtaaataccggctcccccaacgtcgtttttctgaaaataaaatactctgagccgaacgtttcgaagaaggaaagtccgcccttaagagagagacagag

SEQ ID NO: 108725 - DNA, 33 bp, Homo sapiens
  chr3:120628276-120628309
  hyper
tctttttttccagtcggtcgtaaccaatgctca

SEQ ID NO: 108726 - DNA, 34 bp, Homo sapiens
  chr3:120628525-120628559
  hyper
gtggttccgtacatccggcggggactgcaggggt

SEQ ID NO: 108727 - DNA, 260 bp, Homo sapiens
  chr3:121264678-121264938
  hyper
ctgattctgaacgccgccgtttcccactccgacgcagaagattcatggcaaactcttctcggccgatcagggcaagccacagtcccagcgtcctccctctcgggagaaccctggcctggcaacagctgcggacatcttcccgccagtcttcaaactcaaacctcccggcccgccccggaaccatagagttctccgtggcttaagtaacccgaaagccatagactcgtggggaaggagcggctctcgctggcgtctaagac

SEQ ID NO: 108728 - DNA, 30 bp, Homo sapiens
  chr3:121468012-121468042
  hyper
tgatttcttttggtcgcgcctccccttcgg

SEQ ID NO: 108729 - DNA, 30 bp, Homo sapiens
  chr3:121468245-121468275
  hyper
gcgcagggtgaccccgaaggcccaccggag

SEQ ID NO: 108730 - DNA, 198 bp, Homo sapiens
  chr3:121468537-121468735
  hyper
tcgggaagcccgtacgcgacaccttccaccgccgcgccccgccagggactcagccactagcagttgggacggaagatgggattaagacaccgaccaatcaggactatcggcaggacgttaccagggagaccaggcacaccttgtttgttaccaacctatcaacaatgacggaaaccaatcaacgacagaagatgctcc

SEQ ID NO: 108731 - DNA, 30 bp, Homo sapiens
  chr3:121468969-121468999
  hyper
agactgcgggcacccgctgccattaggatt

SEQ ID NO: 108732 - DNA, 102 bp, Homo sapiens
  chr3:121553925-121554027
  hyper
gggactaggagcctcggagtcaaggggcggagcgccctttgctaataagccaatcagaacgtgagacgctccggtggggcggtgcgcgtcgagcgcggggtg

SEQ ID NO: 108733 - DNA, 30 bp, Homo sapiens; identical to SEQ ID NO: 2722
  chr3:121634394-121634424
  hyper

SEQ ID NO: 108734 - DNA, 271 bp, Homo sapiens; identical to SEQ ID NO: 39526
  chr3:121741106-121741377
  hyper

SEQ ID NO: 108735 - DNA, 288 bp, Homo sapiens
  chr3:121902661-121902949
  hyper
aagagtttgggcacgcgatttgtatttattttactgtgaatctctggccttatatcagaaaaaaaaaaattgtgccaccctcggcacagagaacgttggtggcgtcgtaagcgccctaagcttctttccatcgccaaggagtaggggtcagggaagaggacagcgggaacaggatttgagagccgggaacccctggctcggcacgggagagggcaggagaggacctaagcgcggggctcgccgtctgctggggacccgagccggcctgtggccctcggggaaccgaag

SEQ ID NO: 108736 - DNA, 228 bp, Homo sapiens; identical to SEQ ID NO: 2726
  chr3:121902990-121903218
  hyper

SEQ ID NO: 108737 - DNA, 211 bp, Homo sapiens; identical to SEQ ID NO: 2727
  chr3:121903323-121903534
  hyper

SEQ ID NO: 108738 - DNA, 286 bp, Homo sapiens
  chr3:122101936-122102222
  hyper
ggttcatactccctcgcaaagcagggaatagggtctggggacaaaaggaggcacatgcctgccacatgaggaaaaccccatcacctggaactcggcgaactcctcacagttcacaccgccactgggcgccgccatattggacaaacacgaggaccccgctgcaggccaatcaccgcggagcaaaggtgaccgcggagtcgcctgacaaaaaatatagtacgaggggaatccttaggaaagctgagtgcaaggcttgagttcaacgtggtccgcatccacctcggaa

SEQ ID NO: 108739 - DNA, 30 bp, Homo sapiens; identical to SEQ ID NO: 39531
  chr3:122103138-122103168
  hyper

SEQ ID NO: 108740 - DNA, 274 bp, Homo sapiens
  chr3:122134805-122135079
  hyper
accgccgcttttagcggatttcagaagctaaaagcctacgaagccaccgaaactggaaactctggcctgtcggctacttttgctcgtaccagcaggtgtgcactgccgcgtcaatctccaacaaagccggaaaagcagcctggcgcatgtgcaaaggaagtccctcctaccactaccgagccgagatgaccaatgggagacggccatctgcgcctgcgcaaaaaagtcgccaatgttcatttccggtctttttcgccccgcccttcaaatgcga

SEQ ID NO: 108741 - DNA, 30 bp, Homo sapiens; identical to SEQ ID NO: 39532
  chr3:122135386-122135416
  hyper

SEQ ID NO: 108742 - DNA, 30 bp, Homo sapiens
  chr3:122233569-122233599
  hyper
ggaggggccggggccgcaaggccccagcac

SEQ ID NO: 108743 - DNA, 354 bp, Homo sapiens
  chr3:122282988-122283342
  hyper
ctggccctgggacccgggtccgcgcccgtcccccttctccccgcccacctcgagcctgcaggagaggggaccccgagggcccagaggcaccggacctactcacccggcaggccgctctcctcggtgcagacagcacagggaggagggggaagcggctctgccgggaacagggagggacctccagggaagcgaaactgaaactttgcgcccagtccgcagggcgggccgcgcctttaccgcccagctgcctcccggagcccccgcgccctcccgacgcgcagagccatggcctcccacctgcgcccgccgtccccgctcctcgtgcgggtgtacaagtccggcccccgagtacga

SEQ ID NO: 108744 - DNA, 30 bp, Homo sapiens
  chr3:122283568-122283598
  hyper
tcactgtgcggtggcggacagggacggggc

SEQ ID NO: 108745 - DNA, 232 bp, Homo sapiens
  chr3:122296548-122296780
  hyper
tgagtccaggggctccgacccccagagaacttatgcacggagttgcaggtgttacttccagagccggacgagatcgggaggcggggagcgtgctgccggccgggaaccgtggggcgcggaaggcctcccggcgctcttcctcccggagtatggtgaggagcgcgggggacgggtgcgggaaggggacagcagggctgagcctggggcccgcaagacccagcagcccgagcgg

SEQ ID NO: 108746 - DNA, 30 bp, Homo sapiens
  chr3:122398349-122398379
  hyper
gcaaagagcgtgttacgctctctgcttcca

SEQ ID NO: 108747 - DNA, 97 bp, Homo sapiens
  chr3:122399329-122399426
  hyper
aaagggtcggcttgcggcaaaaattaaatgatctttgcgtttgggcaaggtctggtgccccaaagctgccgacttgatctgcggttggggcgagcgg

SEQ ID NO: 108748 - DNA, 255 bp, Homo sapiens; identical to SEQ ID NO: 39536
  chr3:122399766-122400021
  hyper

SEQ ID NO: 108749 - DNA, 30 bp, Homo sapiens; identical to SEQ ID NO: 39537
  chr3:122512698-122512728
  hyper

SEQ ID NO: 108750 - DNA, 30 bp, Homo sapiens; identical to SEQ ID NO: 39538
  chr3:122513050-122513080
  hyper

SEQ ID NO: 108751 - DNA, 637 bp, Homo sapiens
  chr3:122513918-122514555
  hyper
ccggaggccgagggcgaccacagcagcctccgcctcctgctgctcaggactattctgcgctgggctagtcggcggtgacccggactgcgcccggcagtggcttcgcgggcgacgcgtcgccatgggctctcgctggagcagcgaagaggagaggcagccgctgctggggcccgggctcgggcctgggctgggggcctcctggagaagccgggaggcggcggcggcggcgctgcccgcggcggtcccgggtcccgggcgggtatacgggcgccgctggctggtgctgctgctcttctcgctgctggcgttcgttcagggcctggtctggaacacctggggtcccatccagaactcggcgcgccaggcctacggcttctccagctgggacatcgcgctgctcgtgctgtgggggcccatcggcttcctgccctgcttcgcgttcatgtggctcctggacaagagaggtgaggggtcgcggagcgccagcccgcgctgtctctcctccgggagcaggcgcctgcccgcgctccaggcctgccagccgcctcccttggccccggcataggggttgtgtgaggtgatagagtgttgctagcattccatttctgacttaggaaccctccgtccccaaagcgac

SEQ ID NO: 108752 - DNA, 30 bp, Homo sapiens; identical to SEQ ID NO: 39541
  chr3:122705777-122705807
  hyper

SEQ ID NO: 108753 - DNA, 30 bp, Homo sapiens; identical to SEQ ID NO: 39542
  chr3:122745545-122745575
  hyper

SEQ ID NO: 108754 - DNA, 541 bp, Homo sapiens
  chr3:122746000-122746541
  hyper
ccgggtccccatcgccgctgcagcccagatgcgccgaccacagccctggcagggcccagtgcaacccggacccaagctggctggcggcgggaacgcagcagcgatgagggctctcaagccgaggtggcagcgggaggcgcggaagccaggggaccccctgtcctcccgcccgcagcctcacctacctggcttcaacttgccagagcccggacccctacctctctaccccgatacccacccgagttgctgaagtttgcaagttgcagccccaacccgcgcaggggaagcgcccggggctcccgggactcacctcccagaggcgggtgcaggtgcccggttccccgcggctcccgactcccgggcggcgcggagcggcgggagctaaccagatgggctggcggccggtctgggaatggggcggccgcgcaggaacggcctccagctctcagcgctccggtgcagtccccacccgggcccgcgcccgctgcgctcgggctcccagcagccgctggatgcgctgccgacccgcccggctcggcgg

SEQ ID NO: 108755 - DNA, 726 bp, Homo sapiens
  chr3:122746828-122747554
  hyper
gtgtggtgaccagcccggtgggccgaagccccttccccggccggcattccggcggcaagacctaggactccgagcacttgccgccgtttgccacatcccgccttgccgttctcggtcaccccatctcgaatgtgacatccccgagggccatcggcgcggcctgcccaccccaacactcagggcctgaggaagctcccccaaaccccactccggactcccacattccccagccccgtcagttcggaacgatcttcctgcctgtggatttgaaggggaagggacctcgtgtaaaacgggggagagccgttataacctgcagcggcagagagggaggctaggctgctgggctgggctggaaagccagaactggccggattagggttaaccttgcaaactgtacgataccgagcgaacctctccaagcctcagtttcctcagctgtaaactggggttagtaatacgcaccctacagaattgtgaagaacgagtaggggatacggggagtaaaataacatcaggaacagtgggagggcagccaagagatgagcgatccggggaggtggtggagcgttctcagctgaggacggaaggtttagcgcaatcacaaggagcgaggccgaattgtttacaagtttaagtgatctagtgtttctgatggctagaaggcgggagagaaagattcaaggggcaagcttcaaatcctagctgcccgggctgcaagaggga

SEQ ID NO: 108756 - DNA, 164 bp, Homo sapiens
  chr3:122785819-122785983
  hyper
agcgagcacttcttcccggccgcctctccccagctgctgcgcatgctttggcagacgtggcaccgggaactcggaggcggggagcggctgggaagtggccgtggtggttggccgcggtggagctagcaggcgggcgggcgggagcgggcgccggagtggagaaa

SEQ ID NO: 108757 - DNA, 30 bp, Homo sapiens; identical to SEQ ID NO: 39544
  chr3:122786487-122786517
  hyper

SEQ ID NO: 108758 - DNA, 187 bp, Homo sapiens
  chr3:122920575-122920762
  hyper
ttctggcgcaggtgcgagagaagctgccaatctctcctggagcgggtgggactaaggagggccccgggagctggggggttgttgtgtccttcctgcagaacccgattggcctgggtgagctgagggaacgggggcgtggtttgattccgcgggcgcgagccacgttggacgcgccgcagcgtcgccg

SEQ ID NO: 108759 - DNA, 30 bp, Homo sapiens
  chr3:122921183-122921213
  hyper
tggggattccctggcgcccaggtgtcagaa

SEQ ID NO: 108760 - DNA, 1267 bp, Homo sapiens
  chr3:123167300-123168567
  hyper
gcagagcggtgttcggggcctccccggggcgccggcgccgcagtcttctgcgccgcgtagcccggggggctcacgcttttggagccggacatccccccctcggcctcgtcgtctccttcctcctcccccggaagccgggccgggggtctccaaggggagggcggacggccgagcagggggaccaggctagggtcacacgtcgggggcggcccggggccctgcgctgcagcggggcatcttggcacccccgtcctgagcggaggaggagggcacagccccgaggtgagaagtagctgaggatccgcgtcagaagtcccaggtccgaaatggagttgcctccgaggtggggtcgcagggactggtctggctgctgctgcgccgcacgcggagagacgtccgggatcctggctcgcgtcgagctcgacgagggccggagttgcggacgagacgggacggagtggtgtccttgcgggcggtgcctcctcgggccggcagtgcccgggcgcggcgctcgctgattccgcctaagcggagcccagctgctctcggggctcggcggcggcgagggcggctcggcgggggtcccggcgaagagacactgcgggtgcgctttcctcgcagcggactgggagcgactgggaggtgcgggcgccagccagcattattttcttacgaggggtggggaggtgggatgggaggtggagaggacgggggagggggcgacgggcggagcaacagctccggagccccgggggggagggtcctggagcccgggggggccgttgcccgcatcccccacctctcgcggcgagagtggatgcgtggccccggcgaaagccgagccgagccttcggcgcgtccgcgcagggggcggggtccgggtcagggaccggctcctgcggtgcggcccttcccctctcgcctctccctttcccgcaaacggagcggggccggccgggacctgccggcccggagagctgtcgcgcccgcttcgcaagccccaagctcctcgtcgccggctgcgggcccaccgcggccggcgcggaacgactaggcggaggacggaatccggcgcagcgctgccgcggttctgccccgacgcaggcaggcttctcccggggagtaaggcatccagagatccagcgccggggctcagaagcagccggcccagaggggcccgcctgagagccgcggcgcccgagaggcgctccgggggggcccgcgggagcccggctcagggcgcgccatgcacgcttcgggccctgcg

SEQ ID NO: 108761 - DNA, 511 bp, Homo sapiens
  chr3:123168581-123169092
  hyper
cgcgccgctcctcccttctcgcccgctcgccgccgccggagagccctccgcatcccctcctcccgctgcctccccgccccccgcgccgcccgggcctcggctcacagccgcgcgaggccgcctccgcccccggcctggccatggccccagcctcggcgccccgcgggcatcctcaggcctggccgcgggcaccccagttccccttcctcacctaaaattctcgctgcgcccctccctccctgggactaggagccgcatccagcctgcggtcccgtcaccagacctgggtggagcgcggtcttcccccgcccccggccagggctccagcgcccccagtcctagctcccctcttttgtatccccctttaatccccctccccccatttaacccaacttcagccccggcgctgcgccccccttccctggcccggctcgattggccgcttccggagctgtcagactacagtccggcgctcttattgggcgattctctggcccggcggctgtgccaa

SEQ ID NO: 108762 - DNA, 30 bp, Homo sapiens; identical to SEQ ID NO: 39547
  chr3:123170279-123170309
  hyper

SEQ ID NO: 108763 - DNA, 483 bp, Homo sapiens
  chr3:123602701-123603184
  hyper
cccagaggccgtcaccgagtcctctagcgagggtctgggagctgggagaagggtccgcttctcctccgcccctcaaatcaaaggcacccccttcggatgattcctagaaaggcaatcgcatcagtgtccccaagcacttcatctccccaaaagaaaactcgtgcagcctggcgtcactggggtcgtctccttacgcccctgactcctcgccgcaccccggggcccctctccattaggggagtcgggaggcacagacggtgggggtcccagcccccacccagaactcccaccctcggagccttgacttccagggcccgcgcctggacaaaagcatggggcgggctcactcacccgcgcggcgaaggcggcccgggagccggggcaccggcgctcggcggggcgccccggccgcaggcgcacagcgcgggctccgagctcgctcagcgccctgctgccgaccgggcggcgcggggagcccgcgag

SEQ ID NO: 108764 - DNA, 294 bp, Homo sapiens; identical to SEQ ID NO: 39549
  chr3:123603206-123603500
  hyper

SEQ ID NO: 108765 - DNA, 30 bp, Homo sapiens
  chr3:123680013-123680043
  hyper
tgaccatctctcgccgcctcagagaagccc

SEQ ID NO: 108766 - DNA, 121 bp, Homo sapiens
  chr3:123680448-123680569
  hyper
agaaggaattgagcgcgactttttgggttttcgctctttatttttagtttggcatcgtgtgccttttggaagattttgttcttgatattctataaaaataagacctcggggttgttacctt

SEQ ID NO: 108767 - DNA, 1610 bp, Homo sapiens
  chr3:123751654-123753264
  hyper
cggaggaggtggccgcggggccgggaggagcaccggcggcgcgagcggagaagctgagcgcgcagcgcccgggccgcagagccccctggacaagcctggcgtgtgccctgcagccccgggctcgcccggcggccccgccccctccctggcccgggcttttcctgcggagctcaggaagccggcctagcacagcctcgaacaatagctcgggactcgggctccgctccccgggaggccggcgcggggccgctgggactgggggcgtaggcgccgccgggggcccgcagcgagccctcggccccggccggagcttcaattcagctcggcgctcccggggtcattgttggccgggactgagggagcgggagccgggggaggagctggggaggcggctgctgcggcggcggcggcggcgggagccagagggggagctagagagcgagcgagcgaaggagggaggtagcgagtgagcgagtgagcgagggagggaggaggtagggagacagggagggtgggagggaggaggaaaaataaagaggagagagcggagcagggctgaacaatagagacaggcagacgggcgagcaggagagccagctgccgctgctgggggacagcgggcgcccaggcagcccgcaccccggccccgggccccggccccagccagacagcaggcggccagcgccctggggaaggggtaccatgggggagctggcggcaggcacccccagcccgccgcgcgcctccgcctgagggaggctcagcgtcctctgccccagccccgccgcccaacgcccgccctcgaagctccgcggccgccagctctgcggccgcagcagctgcgccccgcgccctccgcccaccgggcgccgagcagccctcggccccaggcttcttcggctcccggctgcccgcggacgccctcccacagtcatgaacccccctgagggagcagcggaggaaggaggagcagcagactcggacgtggacgcctttttccggacaggtaagccgggcagggcgcggggggccagggctgaaggctactgcctcggacgcggcgtctcggacaagtttggggaaggagggctgttgctgccgcgtgcgtgttggggggcagtgccccctcggcgtcggggctggagttgccgagattctggttgttatggcagtgctggctgcgtctggggagggcgtgggggctgggaactccgcgcccctccgccttcaccccagttgcgggagtctgtgttggggaggtgggaggcggtcccctcggaccgccttctcccagagcgcggggatgggcggtgttggctcactttgcagcgcgccgctccggctaccggcgtcccggcccctcccttggctccccctcccctgtgcctgtcagcggggctcccggcggccgccctgggtcggcacccctcctcgccgtcgggggcccggggccctgatgtgcacagaggggcggcggggacccggagccgcgccggctgcagactgacaggagtggggcggaagacatcggtctcgcctggtgcgtgtggggagctggtccctctgacttgagaggcagacccagctgggagggcggtgggcgcctcgga

SEQ ID NO: 108768 - DNA, 30 bp, Homo sapiens
  chr3:124339673-124339703
  hyper
ttacacaggagaacccgaggtcgaggagac

SEQ ID NO: 108769 - DNA, 30 bp, Homo sapiens; identical to SEQ ID NO: 39554
  chr3:124449089-124449119
  hyper

SEQ ID NO: 108770 - DNA, 30 bp, Homo sapiens
  chr3:124449417-124449447
  hyper
tcccccatctacatcgatctgcggggcatc

SEQ ID NO: 108771 - DNA, 30 bp, Homo sapiens
  chr3:124597916-124597946
  hyper
cattcaaggagccaccgcatccggttgatc

SEQ ID NO: 108772 - DNA, 524 bp, Homo sapiens; identical to SEQ ID NO: 39555
  chr3:124605379-124605903
  hyper

SEQ ID NO: 108773 - DNA, 112 bp, Homo sapiens
  chr3:124606486-124606598
  hyper
tcccgttgcttagccgcccgtcgccacgggaaaggggcggggcacgctgtattaggcgagccgagattacttgggccaaaggcggttgctagactgcgagagggagagcagg

SEQ ID NO: 108774 - DNA, 617 bp, Homo sapiens; identical to SEQ ID NO: 2736
  chr3:124773768-124774385
  hyper

SEQ ID NO: 108775 - DNA, 30 bp, Homo sapiens
  chr3:124775097-124775127
  hyper
ggtcagcggagccacggtgctgcaactttt

SEQ ID NO: 108776 - DNA, 30 bp, Homo sapiens
  chr3:124931712-124931742
  hyper
agaggctttccctccgcaagggtcgggcct

SEQ ID NO: 108777 - DNA, 441 bp, Homo sapiens
  chr3:125094185-125094626
  hyper
cgccgcggtcgccgccactgccggcccggtgcattgtgggaagccccgcacacgggaagcgctccgcggcgcccgccctcgtctggcgcagagacctggctggaaagacacagcgtggcttcgattccggcgcctgcgtgtcaccagcccagggtggccgtggaagctggacccgagccgcaggccccccaggctgggcctgggaggaaagcggtttgaaaaagatcggaactgaggaactctcttagagcgggggactccctgctcctacagccttaaccaatgcccagcgcttggaaagtggaggactcggggattcgggagcgtttcaggcctggggaaatggaagggtcggggacctaggtgaaaggttatttgccagaaatgtcttggctttttcatttattctgtcttacctagcccttcgccgccacctccagt

SEQ ID NO: 108778 - DNA, 34 bp, Homo sapiens
  chr3:125239048-125239082
  hyper
ctgcgccgccgccgcgcccgcggccaaccagtct

SEQ ID NO: 108779 - DNA, 30 bp, Homo sapiens
  chr3:125239294-125239324
  hyper
acttgaagtaggcacggcgatcctaaagcc

SEQ ID NO: 108780 - DNA, 72 bp, Homo sapiens
  chr3:125314509-125314581
  hyper
gtccctgaaggaggcggaggctctgggagctggtagctgggcgactggctgatgggcgagggagggcgaggg

SEQ ID NO: 108781 - DNA, 31 bp, Homo sapiens; identical to SEQ ID NO: 2737
  chr3:125635404-125635435
  hyper

SEQ ID NO: 108782 - DNA, 31 bp, Homo sapiens; identical to SEQ ID NO: 2738
  chr3:125677241-125677272
  hyper

SEQ ID NO: 108783 - DNA, 23 bp, Homo sapiens
  chr3:125690916-125690939
  hyper
caacatgcatcccgccggagctg

SEQ ID NO: 108784 - DNA, 178 bp, Homo sapiens; identical to SEQ ID NO: 39562
  chr3:125691029-125691207
  hyper

SEQ ID NO: 108785 - DNA, 1305 bp, Homo sapiens
  chr3:125898664-125899969
  hyper
cggggcctgagctctcgatagcggggccccaggagccacgttgtggggtctgctatccggcctccctctgcacgcgcgaccgtccacttgagcgcagtggctggagctgggactccagcgcagcccctgagcgctcacgtcgacccctccaatcacaagaggccctcgtgccaggcccccagatttggccaatcagggaagacctttccctgtcacagaatggggtcgaggggcccaggaaacaggtagtccccagtcacaaatcatcgcgtcgccttcgctggtccctttctcttatcgagcctcagttttctcttccataagccgggccagcagtgcccaccccacaggttggcgccagctccgtaagggccctaccaccgcggccggccagatcctcggcgggccagtcctggcgctgcggtcatttagcctgatgacccctggccaggttcagcctcaattgctccaaagaactccggacccgtaccccgagcccggcgtcccagcggcgaagttgatgggccccgcaggagcccttgcggtgagaaccgagtcctggagcccctggagcccccggagcccccggagctgcagccggggcagcctcctttccgccgggagtccagcgctctcgagagcccagaaactcaccgcgcgcaggagttggtgcgggcgtcccgggcaggttagacttctgtgagccgcagccccgaaactgaggttggtgcagacccgtcctgggagccaggaggtgggacctgtccccgccagtccgcgagctctggttaaggccagagcccgtgaggggaggggcgcggggcgggcggagagtcagccgagtgggggcggcgctcaccggtggtgggactatggcgggagcgcagcgcaccctctccgggcgggtctataaatgccatgtaaaagccaaccccgcaggggcctgcgctctttcccgcttaggtcaagaagacttactgtggacccttggagaattcccagggctttgaaaagtcccaagcacccagcagggctggcagttctgagcgctggcaaggctaagtgggtcagaggagaccctcgccaagccggtgactcactcactcgctcaccctctctcactcttgatgggccaagtacctgccatgtgctacggacacagcagagcgaaaggagacgctgccctccgggaatttgcagccgcttgcagaggcggccccttagcagctgcgcatccgggtggatagcggcgcttctgcccgcccagtgcctacccgcctctccgagagaaaaacagcccctggt

SEQ ID NO: 108786 - DNA, 745 bp, Homo sapiens
  chr3:125931774-125932519
  hyper
ggaagcagcgaaccccgctgtgacggcttcaggccccggcctgtggagggtgggggagtcgcccttgggaggggctgggccccaccgccggctctgcttctcacggcaggggcgcccccaggaagggacaggacagggagctttgtcccgcagcgaacgggaacgcggaggcccggcctctcgcctccccaccctccccaccctccccgcgccttctcgggcctccgcgtccgccctgcgccctcggaaggcgccgcccggcggccgcggcccttcgccgcagccagagtgctttgtccgagctcaaaaaagccgtctccatggaagcggcccttccgctcggagcccggcggcctggagggagacccggcggggatgcgaggattccgccccagccccagaggacgcggcggagagcctggaggaggcgctttgagagtcgaggtctcccgcccgcgcgcctccctggcgcagacctcttttaactttttggcgtggagtgcgcgtcctgacgtgccccctgagctacagcttactgagctttactggcttcgccggacagccgtccccaggtggagagacagcgcgtcgcgcgctgcccgggccccgcagggcctggcgcctggggcccttgcgccgctttggggcgaggggatcacaccgcgggctcccggagcttagcgtcttccacgcggcgctgtgtgtcatccacgcagtgtgctctcgctgccgtgttcaggtcact

SEQ ID NO: 108787 - DNA, 435 bp, Homo sapiens; identical to SEQ ID NO: 39566
  chr3:125986251-125986686
  hyper

SEQ ID NO: 108788 - DNA, 1421 bp, Homo sapiens
  chr3:126074821-126076242
  hyper
ggggacacgctgttccgggcacagtccccggctggccgccggactccgccccctcccctggcccggccaggcctgctgtttatcctcccggggacacagcggctgcaggaacaacatgtaattgataacaagcccagcgccggccaagggcttgccattgggtcagcgtgcaaatcacgggggtggcggcgggggctgtccttcaaaataagagtctccggtccctgagccgcccgcaggccccaaagtcgcagagtccgggcgtcctcacacctgtagggcggcagggtctccccaggggccacctggtccggggggacagggggaaggagatttgaggctctcaaacaattgttgattttgtcacctccgagggccgtgggagaaaacagcccctctgtgccctccgtgagaggggggttccatgagtaacaccaaggcggggagggaagagtgaaccggaccaccatatgggatggggacggcctctctgccccgccgccgccatccctcggtcaggccatggctttggtaatgttcggtctgagcggacggggactcagcgtggagtgagacgcgtgaacggtgcgggtgtgcgtgaaggggtgtgagttcctgtcgtgtgactgcgtgtgcggggcgtggtgcgcggcagccgctgtggctgtgcgggaggctgtccgcgaaggactcgcgcgtggagccgccgtgggtgccggcgggtgaggggaaacgtgcgtgggaaatgaagagagccggctcagaccccttctagagtcctggaccgctgcccgctgggcaccatgccctcgtcccacgccccccccttgcccccgacactgctgcggtgaccgacagtaacccctccgtctccagcccctccgccccccaaccccgggctggccagcgcgtccgctctccccctcctctcaccaggccgcgccggtgcccaccatatgggagggccggcccgcaaggcgcgccacggaatcgcccggccaggcaccgaggcggcggcgcgggcctcagcaaagtgctggtgggcgaccggggcggggggggtcacctcccccgggccagtccgacccctgcccacctccgcgggggcccatcccgctcctccgacattcctccagcactcgcgcggtgcctccgagagctgcgcgggagcacggccacgcgccccgaggccggccagccctctgatcacccggggccgcgtccacgcggccggccggccccgccgcgcctctcccacctgaacttggcgcacgccggaccggcggccaggccccggcggtcctgcggccgggcgggctgggctgggggcggcggctagactctcggtccggcggcggccgggggccgagccgcgggtcctgcgctggctcgatcgcccgccggcccgcgggtcgctgcgg

SEQ ID NO: 108789 - DNA, 30 bp, Homo sapiens; identical to SEQ ID NO: 2745
  chr3:126077031-126077061
  hyper

SEQ ID NO: 108790 - DNA, 197 bp, Homo sapiens
  chr3:126113459-126113656
  hyper
cttcagtgcttggcacgtggcgaataaaccaatcaggatgaaaggagccaacccaagtgcggagtgttgaacctcagaggaagaaacccgcgttcaccaggcccaggcctgggccaggcgctgtcctggcggcgtcagggaggacatcgtgcccagagctcggacccagcagcccggccccgcgccctccctgtccc

SEQ ID NO: 108791 - DNA, 138 bp, Homo sapiens
  chr3:126113794-126113932
  hyper
cggagcgagccggggcagtcggggtcggtgggtgcgctcgcggtccggggagagggggcgcgcggggtccgtgagggcgcgtgggggcggcggcaggggtgcgaaaccagggcccgaggggcgcgcgtggccgggagc

SEQ ID NO: 108792 - DNA, 30 bp, Homo sapiens; identical to SEQ ID NO: 39572
  chr3:126194147-126194177
  hyper

SEQ ID NO: 108793 - DNA, 319 bp, Homo sapiens; identical to SEQ ID NO: 39573
  chr3:126195082-126195401
  hyper

SEQ ID NO: 108794 - DNA, 847 bp, Homo sapiens
  chr3:126242790-126243637
  hyper
ggtggggcacgccaccgcgacaatgcctcttggccttgggtggataatggcacccctgggcaaaccctaggggcggggcccagaggcgaggggcttccccaatcagtctccgccctagcgccctggacttcggccccattccattgggtgagggtgggggcacgaaaagaggagcgggcttgcggccccaccgtgtcccgcctcctcagtccccagcgactcgcaggggctggtggggctggggtccagctgccgtgctcccctgccctgcgccgcgccgcgcgtcttggtaggcgctgcgctgccggggccgggtcctgggccagtgcaactccgcccccagccgtatccagcggactgtcctccgccgcgcgcccggcacagcatggggaggcgctgctgccggcggcgcgtgctggcggccgcctgtctgggcgccgcgctcctgctcctatgcgccgcgccccgctccctgcgcccgggtgagtgcccgccggccgagccgcgcacccccaaccaaacctggctcctcgcgctttccaccgcggcctgacccctcgacagcgcgggggacacctgttgtctccttcctggctggggctaggggtggcgggcaggggcgctggtgaggcacagaaaggctctagacgcccccgcgagcaaaggctcttgctcctcctccggagttacctccccactcccagagcggtgactgttttgagtcccacagccggtgcctggagaccggggtcagttgtggggggtagaggacaattggccaatccgggaaggccatctcccttaccttcacccccttcccctgcgcaccccacggcccctggacatg

SEQ ID NO: 108795 - DNA, 683 bp, Homo sapiens; identical to SEQ ID NO: 39575
  chr3:126373467-126374150
  hyper

SEQ ID NO: 108796 - DNA, 30 bp, Homo sapiens
  chr3:126398342-126398372
  hyper
gcaggcgacggggacggggcacgtgcctcc

SEQ ID NO: 108797 - DNA, 203 bp, Homo sapiens
  chr3:126422877-126423080
  hyper
tccagggcctccgccggtacacatcttcggcctcagcctaacgcactctagcaggcacagaccgccacgcccccacccctccagacggaaggactgcaatccccacaaggcaccgcgactcagcgccacccgattggtgaagcctctggcgtcggccaataggacgtggctttgttggcgtgtgccgcggccgcgcgagtcct

SEQ ID NO: 108798 - DNA, 359 bp, Homo sapiens; identical to SEQ ID NO: 39576
  chr3:126701038-126701397
  hyper

SEQ ID NO: 108799 - DNA, 193 bp, Homo sapiens
  chr3:126854311-126854504
  hyper
gggggcccttgagcccgagccctccccgcccgcgctgtcaccagggccacggggctcgggttaactgatcgcagggaaaaacccattaagcgcctgcctctcccagtcatccgttatcgcgcggacggtcgctcttcttcacgtaattggagaaacttttcccattacccgctgtctctgcgaggcggctctc

SEQ ID NO: 108800 - DNA, 231 bp, Homo sapiens
  chr3:126854536-126854767
  hyper
cgtcacgcgggttcttttcctcctccttaagaggctgacctaatttccactctttgtcattttctcccgaccaaactcggagtcggctttctccaggagctgctaggagcctgggctcccactgagcaatccagagcagcgtctccatttcctgggctctccaggccatcgcagcccccggccctgccacgcaccggcgcagcccctgcactcgggcggccctgcctcggc

SEQ ID NO: 108801 - DNA, 141 bp, Homo sapiens
  chr3:127174690-127174831
  hyper
cggcgccagcgccacggcccaaaccccagcctctacaggtgctcactgcgcgactgcctgtcccaggcgctcgggctgggcgccctctctagggcctgggagcagcgtgagtcccgggggcggcccggcatgggcctccca

SEQ ID NO: 108802 - DNA, 31 bp, Homo sapiens; identical to SEQ ID NO: 2750
  chr3:127175258-127175289
  hyper

SEQ ID NO: 108803 - DNA, 205 bp, Homo sapiens
  chr3:127176066-127176271
  hyper
tcccgccagccctgccggccgctgccctggagaaggagctgcagatggatccccagtgagtaggaggcagccgtgtgagtcaggcagcggagggaacgggctgcatcgcggagaggaggtgcgaagcagcgcgccgtttccgggctctggaagccgagctgccgaggcgtaagctgggaggtggacatgacgggggagtggggaa

SEQ ID NO: 108804 - DNA, 56 bp, Homo sapiens
  chr3:127177694-127177750
  hyper
cctctttcaggaccacggagagctccttggctgccagccaccgctagagcaggggt

SEQ ID NO: 108805 - DNA, 30 bp, Homo sapiens; identical to SEQ ID NO: 39579
  chr3:127308788-127308818
  hyper

SEQ ID NO: 108806 - DNA, 341 bp, Homo sapiens
  chr3:127309527-127309868
  hyper
aagaccgtctttttcgtccagcccaaattgcgaaaacggccacagtcccacaagtcccagagtcccagagtccctgttatcactcaggcccgccctctaacctccagcagcctataggaataagtcatcactgggggaaaaaaaaaaaaaagtgggagagaccaatcaaattcccaagaggcggagcagcccgctgacctcttaaagagacagcacagaggaggtgcagagacaagacgctgcttcacggaagagagaggcctgcgtttctcactcggaaagcgggcggaatcgaagactggaaagctgaggacgcgccacctctcgccctacgcgccttc

SEQ ID NO: 108807 - DNA, 30 bp, Homo sapiens
  chr3:127310116-127310146
  hyper
gcgccgccatgcctcgggcactcctcttag

SEQ ID NO: 108808 - DNA, 40 bp, Homo sapiens; identical to SEQ ID NO: 39581
  chr3:127316968-127317008
  hyper

SEQ ID NO: 108809 - DNA, 30 bp, Homo sapiens; identical to SEQ ID NO: 39582
  chr3:127317451-127317481
  hyper

SEQ ID NO: 108810 - DNA, 469 bp, Homo sapiens; identical to SEQ ID NO: 39583
  chr3:127347861-127348330
  hyper

SEQ ID NO: 108811 - DNA, 30 bp, Homo sapiens; identical to SEQ ID NO: 2752
  chr3:127391206-127391236
  hyper

SEQ ID NO: 108812 - DNA, 118 bp, Homo sapiens; identical to SEQ ID NO: 2753
  chr3:127451673-127451791
  hyper

SEQ ID NO: 108813 - DNA, 30 bp, Homo sapiens
  chr3:127540455-127540485
  hyper
gatggcacatgataacgaccagaggagaag

SEQ ID NO: 108814 - DNA, 30 bp, Homo sapiens; identical to SEQ ID NO: 2754
  chr3:127541157-127541187
  hyper

SEQ ID NO: 108815 - DNA, 30 bp, Homo sapiens; identical to SEQ ID NO: 39587
  chr3:127541440-127541470
  hyper

SEQ ID NO: 108816 - DNA, 379 bp, Homo sapiens
  chr3:127634094-127634473
  hyper
cggggagaccctgtgcagcgacaccggggctgtagtcgccgtctggaaccagcgcgggaataggtgcgcaggcgcacagtggctggagggcagcggcggcgtggtctcgggccacttccaagcagagggcagcacctgtcccctcggaggcgctgccagcgccctccctcctcctccgcagggcgcgggacctctatttatatcgcccagccagcacaggcccatattgggcagtggcctcagtcaggcccgctggccgccctgccacacggtagcgtccaagccaggtcgtggcccagcgagtggggacgcgccccgaaccaggcagcaccttcgtaagtaggggtagcgccccgggggaacgcggcccccagtcaca

SEQ ID NO: 108817 - DNA, 30 bp, Homo sapiens
  chr3:127770911-127770941
  hyper
gccaccagggtctccgcctgcctgcagggc

SEQ ID NO: 108818 - DNA, 30 bp, Homo sapiens
  chr3:127771746-127771776
  hyper
taagtaccccaaatcgccaacaaagaaggt

SEQ ID NO: 108819 - DNA, 899 bp, Homo sapiens; identical to SEQ ID NO: 39589
  chr3:127794263-127795162
  hyper

SEQ ID NO: 108820 - DNA, 49 bp, Homo sapiens; identical to SEQ ID NO: 39590
  chr3:127795229-127795278
  hyper

SEQ ID NO: 108821 - DNA, 104 bp, Homo sapiens
  chr3:127795649-127795753
  hyper
gtaagtgcagcgtgccgtgtgcggcgtcccagcccgcaccccgcaccccaccatgtccctctgggtgcggggtccgcatgcccgcgccctccccgcagctgccg

SEQ ID NO: 108822 - DNA, 29 bp, Homo sapiens
  chr3:127796073-127796102
  hyper
cgacaggcagcccccgtggccggcccacc

SEQ ID NO: 108823 - DNA, 314 bp, Homo sapiens
  chr3:127842607-127842921
  hyper
cagctaggacagtgcgcccggcgcctgagttaccatgcggccgttactagggcaatttgcaaaggcccgcctagaccggctttccattggtggaagcgggaacacctccgctctccataggctcacggctgcgcccatcgcggctgctgctagagctccggtcacccacttccgtctgtgtctccgggttggcttcccccgtagccggcgcttcctgccgaggctggggtcgggagcacagtgggaccacgccccggatttgatctagggctggggcgttgcacgaggcagtggcccccgggtaccactcctaa

SEQ ID NO: 108824 - DNA, 85 bp, Homo sapiens
  chr3:127872077-127872162
  hyper
ggatccctccatctcgggctcctagaggcttcaggcaggaggagccacgtgagagagaaaccctgcctacggtgacctccagttc

SEQ ID NO: 108825 - DNA, 30 bp, Homo sapiens
  chr3:127872412-127872442
  hyper
ggcgctggcgcgggcgctaagcaccacagc

SEQ ID NO: 108826 - DNA, 334 bp, Homo sapiens
  chr3:128201958-128202292
  hyper
ccccaaagcagggaacgatttaagcctcataaatcacttcgccctgaaaaaatatatttattattcttagcattttacgcattatttgcagagtggagggtattagaaatttcaaaacagcccagcgagaggcaggactgagctgaggagactctaaaaactcgcagagtccggaaacagatacacgaagtttccttatcttcaggctgcagatgtccggataggaaactccggcaggagatccgaaagggcatttttttaaaatcactcaaatgaaaatacacagtataggtgactccatggaaaaataataaagggcaggtttttttagtgg

SEQ ID NO: 108827 - DNA, 711 bp, Homo sapiens
  chr3:128202349-128203060
  hyper
cggggagggctgagccacaaggaaaagtacttcatggccctatttttaaaaaagagctaagcagaggccagaggacaggagtccggcccgtggacactcaacttcggggatcccggagcagagtggggtggcgcaagggtgcccggtgggctccctatacccgaggaggaaatctggcccgaaagaatctggccagaaagagagacgaccccaactgacatcccagtgcttttcatgataaaagaggatttcaagcggcaaagcgtctgcatttgaaggagtttttttcccctgtaattaaccgccagctcctgcccagcagccccctcccagccacctgtgcccgctcctaccagtcttcgcttgggcttgatgagtggtcggttctgcccattcatcttgtggtagaggccacaggcattgcacaggtagtggccggtgccgtcccgccgccagagaggggtggctgtggccccacagttgacacactcccggccttctgcaggggaacagggagagacacgggggcctgcttaaccggcaagttctcgggagggagtccagggcaggaaagcagccagccgagcagtgccggtgcctctcaggcacacggttggcctgggcctggctgcaacagcctgggcaggaagagggacgagagggtctcccacatgggagggggcacaggtccagagtcgtttaaagccaaat

SEQ ID NO: 108828 - DNA, 3942 bp, Homo sapiens
  chr3:128205403-128209345
  hyper
agaaggaaccccaccggacagaccctacagggaaccctcacaggccagctggaagtgggcagaaaccctgtgggtcccagaccctccccaatcggccgctgctcccacctctcccgccccaatttttcagcagctcgattcctgcggatcctacatccgggaagcaagcagacgggccctcctcccctccctcgcctggcgcgcggcgcctgggttctcatcaccacgggcccagtgctcaccgtgcgcggggctgtaggagacgcgcgcccgcgcgtgagcggggttggcatagtaggggttgccctgcgagtcgaggtgattgaagaagacgtccacctcgtctggaggcagcagctgcgcgggttccatgtagttgtgcgccaggcccgggtggtgtgagtcggggtgctgcgcattcagcacggccgggtgcgccatccagcgcggctgctcgggcgccacctccatggccggcggcggcggctcagggtctgggtgcagacggcaacggccctgcgcgaggaagggggagtgaggcgtgccgccagcgcctgacaccccccaaagtcccaccacgaggtgtcccgcacgccacggagccccagcccagatccggcgagaaagagcaccagtcccgggtgggaggaaagcccaaggctcaaaacgaaaggaaggcgggggagggggttcagccacgcacactcacgtggtgacccgcggctccagaatcacacacccgtgcacatggggtcacgcccggggacgggtcccgacaccagtgaccccaacaaacgcacagagcagcacttcagtcagacactcacactgagcccccccgcccggtagacaaacacatgaacacagactcaaaagttggagacaggcgcccgggcacccagtgtggcacttgatcccagcgacacgcacacacccacacttggcgccagatacacatactgatctcaaccccgaaaacatgcacacgcagccccctgagcgcagtactaagcggcacaatcaggacctctcaacaaagcacaccaaagcagtcgcccgcagcctggccccccgccctaagtccccccagagtcccctcaaagctaggagcgccccaggcccccagccggctctcaaaccccaaacttacacacgcagccgtggggaggggagggactcggcctctgagagtgaaggagttccggcgggagccccgagggcgacgggcccagggacagcacgtccggaggctggcggggcttacagggtaggagctgggggtagagtgcgcctcggcctcgggccctcccggctccggcccctcggcatcctccggccgccctggcgccagctgccgactcctgcacagacatgaagcgggggccgcgcacgcctaagaagcccaagccagccaatcaacgccgcgcgcctcccagcctccgcctcccattggctgcgtccgcaattcccgaaccgctggactccgggactgacccgcgggccggcccccctcagccggcgggccccctccctgcgcgctcctggcggcccctgctgccaacgcgccccaccactaagggaccctcaccccaaggcccgacccctgcagcccctcttgcgaacactccgggatccctcgatgctctgggcctccctagcagtaactaaccaccaactgccccctccccaggagcccgggccgcacaccctctggatggcctctccccgagaccctaaccccgccacgctccttcaccgctgaacgtggtcagtccgagcgcagttacctacccagaccgttccctcccctagctcgggcgctgtctgggtggactgggggttgggatggttcggacgacagcggcggaacagcaggagccgagaggggcagagaggggcaggaactacagggctctagagggcacctgggcctcggacacgcggccgctcagggctgtgcttgacccagtggaggtggcccggccggtggctccagaaagggggagggggcacccctccccgggcgtggccttcgcaggccaacgggcccaattgcctggggcgaggccgtggagacccggactggcgccggcgccagctggagggagacgcccccgggcaagaggtggcattttttttcctccggggggggtccccgaggtggcctctggtgagggggaggcggtggtctgaggtctccgtcttctaagtcacctggaagtgctccccactcacttctagcccggagatcggctctatggttcgtgtgggccgggcgcacaagtcttcctccctcccattgtacagactggggagacggaggctcgaagggagccccgggccgaggagggaggtccaggacaaaggcattttgggggacctagacaggtgccgagtactggggggactcaacagcgtcctccagccctcttccctgttgggcccgaggctcccggggtagatgtccagagggcccccaggtgggtcgggggcaggaggagggctggggtcccggccacccccgggagagtgggggaggggcggcgggattgacagtcggtaattgggtaactggaggcggcttctccggccgggcggccccgccaccgcgacgccgagcccctgacgtcacccgattcgccaggaaatgaactttttaataatccgaggagggaggaaagccctcggtcccctcggctccgggggcgcccggctgggcccagctccgcgggcgcgcccccgtcaccccctcccaggccagttcagggcagcgccaaggggccgcgggctcaggctgaggcctcctcctgcctaggcgtctggcgtccgtttgtctgtccgaggcctcagcgcaggtaaagcgcggggctggggggcgcagagctccattgggctgggaaccagcgcgtctcgtgcccttgggggacccgcctgcccgagccgcctgctaagcctcccgctcccctccacgctggagcgcgcggagcccggtctgctcggaactccactctgcgggagcggaggccggcgccagcccgggaagccgcgcagggggcgggaggccgagcgcgaggcccttggcgccgggcctccgcggccaggccgggcaggtgagcagtctccgtgcctcccggttggcgttcccctcaacgcgtgcggtcccgccggggcccactgtctctccgtccgtctgtctctcaacttttcccatcctttagcttacgattcttcatcaactcgtaaaatgagatcgccgcggagctcgagcctatttggcgtctccggagactagcaagaccctctgaaagacaccgcgtccccagggataatcccccgtgtccggcaaagctgccccgctcgagcgcgaaccctgggacccagcgcgggaggcagaccagcagctggccgctgggctgtgaacgccaggaccgagcggaagcttcccgcccggccgcgatcggtgccgcggctctcagggaagtggctacgcgcgtccctcgggaaagcaggtaattcgcctttttctcccaccggcgcggtaaaaattaccctccccctccccgttccgtgtgtattcccagtttcagcgcagcgagctcggcgtctaacccctccgcggcagggtcccggccactgcggtagtggaggtggccagcctggctgagtcccctgcccaaacgtcagccctgtgctgccgcctgcctgacgcagagcggagcgagggaggggatttaattaccccgctcggcagctcagaaaatcgccgcacagaggggcttagcaggacggttaaggagtgcttgagcaggggcctcgggagacccgaaccagcctccttgcccgcaatccggtgtagaggaaaaaaaggaaacaggagttctgccaggtcctttcaggccttggggttgccttcctcgacaacgcaggcaggagccggcttga

SEQ ID NO: 108829 - DNA, 337 bp, Homo sapiens; identical to SEQ ID NO: 39599
  chr3:128216308-128216645
  hyper

SEQ ID NO: 108830 - DNA, 407 bp, Homo sapiens
  chr3:128216698-128217105
  hyper
cgggattagctcatctccaggcaggtcaaacccaaagtcacacaacctgcgacgcgggccccgcccccactccccggccgcccctcccctgccccggccccggccccggccccagcccggcgacccccggctgctgcccaagcgcaggcgcagagcgccacctggcggcggcggggtctcgggtggggtccgcggagccggtgcccgtgcagaagaggtggggtgagggtctctacctccagaaggcgggctctctgggagcaggggctttgctttgtcactgctgttccccagggccagactaacacacagtaggtgctccataagtgtttcttgaaaggatgtttggagggatggatggatggatggatggatgggcaggaaattatagacgggggcaaactgcc

SEQ ID NO: 108831 - DNA, 162 bp, Homo sapiens; identical to SEQ ID NO: 39601
  chr3:128273889-128274051
  hyper

SEQ ID NO: 108832 - DNA, 346 bp, Homo sapiens; identical to SEQ ID NO: 2761
  chr3:128274308-128274654
  hyper

SEQ ID NO: 108833 - DNA, 30 bp, Homo sapiens
  chr3:128327484-128327514
  hyper
actttgttcagggccgagaaccggaggagg

SEQ ID NO: 108834 - DNA, 628 bp, Homo sapiens
  chr3:128336498-128337126
  hyper
gttctgttggagccgcgccgcctttaaattagccccacgcatgcgcgacttttctagcccgagcccgccgtctgcgcctgcgatttcgcccatactccccggtgcccgcctcgtgacgtgccgcagtgttacgaagggacaccagggcgcaggcgcagctcgctcctcaggcctgcgagaggcccgccggcccagcagagggcgcccaccaatctgcacgcgggcccagcgagttatcttgatttcggccaagctttctgactgctccaaaaaacgaagaaaaagattcagggagagtaagaggatgaagagagctggtgaagcagctgaccaaatggcccgaggtggtatgcagccgcggtaaagcagggcccctccgtgaggcacagccgcccgggggttccctaggggaagcaggggctgcggcagacgcctctcgggcaggtcagggtatgcaccctcccgcaggggctcccaaggccgggcgtgcgtgaggccaggtccacgggcacaccactgtgaacactgattaaacgtggcctccacggcttccaacccccaggacaggaccaaccctctgcccccggctcaggccagagctcggcgagaccgtcgctgtttaacaagc

SEQ ID NO: 108835 - DNA, 30 bp, Homo sapiens
  chr3:128369461-128369491
  hyper
ccgccgcccaggtgcgccaggaccacctcg

SEQ ID NO: 108836 - DNA, 137 bp, Homo sapiens; identical to SEQ ID NO: 39604
  chr3:128369738-128369875
  hyper

SEQ ID NO: 108837 - DNA, 24 bp, Homo sapiens
  chr3:128399546-128399570
  hyper
cgcccccacgccaggccatgaccc

SEQ ID NO: 108838 - DNA, 30 bp, Homo sapiens; identical to SEQ ID NO: 39605
  chr3:128400139-128400169
  hyper

SEQ ID NO: 108839 - DNA, 30 bp, Homo sapiens; identical to SEQ ID NO: 2762
  chr3:128417344-128417374
  hyper

SEQ ID NO: 108840 - DNA, 46 bp, Homo sapiens; identical to SEQ ID NO: 39607
  chr3:128564767-128564813
  hyper

SEQ ID NO: 108841 - DNA, 30 bp, Homo sapiens
  chr3:128597837-128597867
  hyper
agttgtatccagaccgctctgtgactgaac

SEQ ID NO: 108842 - DNA, 121 bp, Homo sapiens
  chr3:128598080-128598201
  hyper
ggaggcagctgagccggcctttaggtttctgtacacagggagatttcccatggctggcatttatggaaacaaccgctggtatgtgaaaaacaggtccgtcaccgccgtcacgacggccaga

SEQ ID NO: 108843 - DNA, 3 bp, Homo sapiens
  chr3:128598701-128598704
  hyper
cga

SEQ ID NO: 108844 - DNA, 30 bp, Homo sapiens
  chr3:128598922-128598952
  hyper
ttgtcaggggaattcggaaaactctaggct

SEQ ID NO: 108845 - DNA, 71 bp, Homo sapiens
  chr3:128713001-128713072
  hyper
gtgcggcctgggggcggggctccgcggggcggggctttccccctcagccactgcgcgcagtttgtcaaatg

SEQ ID NO: 108846 - DNA, 79 bp, Homo sapiens; identical to SEQ ID NO: 2763
  chr3:128720063-128720142
  hyper

SEQ ID NO: 108847 - DNA, 183 bp, Homo sapiens; identical to SEQ ID NO: 2764
  chr3:128720163-128720346
  hyper

SEQ ID NO: 108848 - DNA, 115 bp, Homo sapiens; identical to SEQ ID NO: 2765
  chr3:128720418-128720533
  hyper

SEQ ID NO: 108849 - DNA, 699 bp, Homo sapiens; identical to SEQ ID NO: 2766
  chr3:128720566-128721265
  hyper

SEQ ID NO: 108850 - DNA, 48 bp, Homo sapiens
  chr3:128764558-128764606
  hyper
aggtccccgcggtcccggtcccccgcccgggacatctgatggaccgag

SEQ ID NO: 108851 - DNA, 87 bp, Homo sapiens
  chr3:128839593-128839680
  hyper
aggcgtggccaggccggaaattctgacaaaaagttttggccctctggtcctaaaagcaactacttcctgatcgctcctagtcctggg

SEQ ID NO: 108852 - DNA, 189 bp, Homo sapiens
  chr3:128840083-128840272
  hyper
accctccgagggagcgccttccaggggccctggccggcctcccaccttgacccgcttgccctggatctccagcgtcttcatggtgaagtcgacgccgatggtgcttccctggcgctccgagaaggcgccggtcttgaagcgctgcaccacgcacgtcttgcccacgcttgcgtcgcccaccagcaccag

SEQ ID NO: 108853 - DNA, 30 bp, Homo sapiens; identical to SEQ ID NO: 39615
  chr3:128880045-128880075
  hyper

SEQ ID NO: 108854 - DNA, 30 bp, Homo sapiens
  chr3:128881029-128881059
  hyper
gactccctccaccacgggacctaactagtg

SEQ ID NO: 108855 - DNA, 30 bp, Homo sapiens; identical to SEQ ID NO: 39616
  chr3:128902362-128902392
  hyper

SEQ ID NO: 108856 - DNA, 30 bp, Homo sapiens; identical to SEQ ID NO: 39617
  chr3:128902661-128902691
  hyper

SEQ ID NO: 108857 - DNA, 30 bp, Homo sapiens
  chr3:128903073-128903103
  hyper
cattagcttggggccgcagaaagtttctcc

SEQ ID NO: 108858 - DNA, 121 bp, Homo sapiens
  chr3:128968528-128968649
  hyper
gcattgcgccccaccgactccactatgttgaagaaattcgacaagaaggatgaggagtcaggtgagggggccaggcctgggtctgagggaggccggacccccacccgccgagctttccttc

SEQ ID NO: 108859 - DNA, 30 bp, Homo sapiens
  chr3:128998218-128998248
  hyper
tcacccggaggaggcgaccccagctagctg

SEQ ID NO: 108860 - DNA, 30 bp, Homo sapiens
  chr3:129033589-129033619
  hyper
ccactcagattaaacgagagaggctgaaag

SEQ ID NO: 108861 - DNA, 30 bp, Homo sapiens
  chr3:129034455-129034485
  hyper
accagcgccttgatcgagtacttgaggtag

SEQ ID NO: 108862 - DNA, 30 bp, Homo sapiens
  chr3:129035125-129035155
  hyper
ctctggcgggagggcgcttctctcggcttt

SEQ ID NO: 108863 - DNA, 30 bp, Homo sapiens
  chr3:129035568-129035598
  hyper
aaactaacacagggcgcgccctcacgtggt

SEQ ID NO: 108864 - DNA, 153 bp, Homo sapiens
  chr3:129118189-129118342
  hyper
tctgtctcaaaaacaaacaaacaaacaaactcaccgagcaggaaaaagaagcaccaaggaagagagaagggatgagagagcgccggggctgatgggaggtaacctctgggtcctgacagggaaaaggcaagcacttccggctccgggtcctta

SEQ ID NO: 108865 - DNA, 30 bp, Homo sapiens; identical to SEQ ID NO: 39618
  chr3:129118646-129118676
  hyper

SEQ ID NO: 108866 - DNA, 160 bp, Homo sapiens
  chr3:129158869-129159029
  hyper
atcaaatccattctcgaggaagacgcaccgcccccacacgccccgaccaatcgctcgcgctctggttgcgctggcgccttaggggctccagtgccaccattgcttttgctgcttttctggctttccctttcggacatgcgcgctcggagcaaggcgccct

SEQ ID NO: 108867 - DNA, 30 bp, Homo sapiens
  chr3:129323581-129323611
  hyper
cacctagccctgtcccgttgtaccagtgtc

SEQ ID NO: 108868 - DNA, 1286 bp, Homo sapiens
  chr3:129324047-129325333
  hyper
atctggatctctgcgcgctcccacctgtgacccactcagctcacgacccgctcggttcccgcccgcccccgcccccgcccccgccgccgccgccgccgccgccgccgccaccgcccgggtgtacctggatgttgagcttgcgctcacaggccggtcccgtgccctgcaccacgctgtcgagcaccgccaccacgtcgggcgccggttccacgaagcaggcggtgcgcgcagctcggatggcggctcgcacgtcggcgaagcggaaggcgcagagtgcggccggagcagcgcgggccgcgggggacccctggggccgctcgaagacagcaaagagccgctcccgggctgggaagaccgacaccaggcggctgtagaggtcgccgcggcccgcgccgcccgcgcactgcaagcccaactggatgtaggactcggtgagcttcttggcgtcgccgccggcgccgtggggcaggcagatgcgcgccagcaggctccgcgcctggctctccttgtcgcccgcgcgcgcctcgctgttgagcgccaggtacgcgtaggactgtgcacccggcggcgggtcggacgggtgcaggaaggcgctcacgaagcccagcttgtgctgctccttggcgccctgcttgatcttgaggatgttgtcgtcggaggggttgaggtcgaaggtgaagagcttggccaggtcgccgcgcgtgtccagggagcggatggcgatctcgggcgtgttctcgaagcggtggtcctccaggctgcggttgcgcgggaagaaggagctgccgtaaccggtgtacgtggcgcccacgagcaggcggctgccccccgcgcccgcggcgggaggcagaactagccccacggtggacgcgttcgggtggttggccgccacgttcagcatgctggggaacaccgtgacgggctcggcgggcggcgcggcgggcgggaagcgcacggccacggccgagatgttgccccggcgccgcagctggcagaagccctggtagatggacccgcacacgactaccaggccctggccggggtccagctgcaggatcttgttgtagttgtccgtgaggcgccgcgggtgctcgcacgaggcctgcggcagctgcggagcgtgacacagcgggctgtcgggcaccgggcccacggccgcctcggcctccaggctcaggttggcgcccgacagctgatagaggcggttgacggccgccaggtacacggtccccgccgcgccgtccagggcgaagttgttggtgggcgtgggcgaggggaaccgacgc

SEQ ID NO: 108869 - DNA, 25 bp, Homo sapiens
  chr3:129345778-129345803
  hyper
gcctcgtcctcccgcggccagaggt

SEQ ID NO: 108870 - DNA, 795 bp, Homo sapiens
  chr3:129345876-129346671
  hyper
cgtgctcgtcccgcctcgcttggagggagcaagggctccgagccctgggcccaggtcctgtgcctccgcttccccggctgcgggtacacccccagcttcccgagccccccgggccctcgctgctccacccagaagttgcggtgactgcggccccagcaccccgttccctggccgggcatcacttgcgcagcatgctgcccccagaggacagggctacagttagtcgcccacacctcattcacccccttgggcccttgagcgtcttagaagccgcagatgccaaggaggggacgctgcctcgcggatggtcacttgggagcaaagctggggactaaaggaaccagggacagagattcctgctctcgccaaattggccgctctgggccaggcactgaggacacaccgcgaagccggatagccaggtcctgtcctcagggccctgtccggaagaggactgggcagcctcgagtccgcggcaatgaatgaatgttcaattgcacagatggggaggcgaaggagggagggagggagggagggcagtcgcttgggcggtcattggaggctctgggaggctatgcgccggcaagaagcagcggggtggaggcagccctgcgggagtcggcgagggccgcgtggatgtgctcggtggttttgaggccagtggctggaggggcgtgagagtgggagaccagacttgaggggagtggctggagttgagactcaaatccaagaaggaaacggtggggcttggaccacttgcctactgagaaaaatggaagtcgggaaggctttaga

SEQ ID NO: 108871 - DNA, 30 bp, Homo sapiens; identical to SEQ ID NO: 39621
  chr3:129346923-129346953
  hyper

SEQ ID NO: 108872 - DNA, 77 bp, Homo sapiens
  chr3:129611906-129611983
  hyper
gctaacttctgggacgccatggcgatcgagggctcctaaaaccccagattccgacgggaaccggctcctaaacagtc

SEQ ID NO: 108873 - DNA, 30 bp, Homo sapiens
  chr3:129612788-129612818
  hyper
aaagctctaggaaccgagccaccctcgccc

SEQ ID NO: 108874 - DNA, 81 bp, Homo sapiens
  chr3:129693118-129693199
  hyper
actctcgcccgtctgcgttctacattggttctgcggccgtgtccctttcgtgtgtgtctgccctgtgtttctccgtcgtct

SEQ ID NO: 108875 - DNA, 194 bp, Homo sapiens; identical to SEQ ID NO: 2771
  chr3:129693304-129693498
  hyper

SEQ ID NO: 108876 - DNA, 392 bp, Homo sapiens; identical to SEQ ID NO: 2772
  chr3:129693954-129694346
  hyper

SEQ ID NO: 108877 - DNA, 164 bp, Homo sapiens; identical to SEQ ID NO: 39626
  chr3:130064445-130064609
  hyper

SEQ ID NO: 108878 - DNA, 119 bp, Homo sapiens; identical to SEQ ID NO: 39627
  chr3:130064780-130064899
  hyper

SEQ ID NO: 108879 - DNA, 30 bp, Homo sapiens; identical to SEQ ID NO: 2773
  chr3:130132286-130132316
  hyper

SEQ ID NO: 108880 - DNA, 355 bp, Homo sapiens
  chr3:130235708-130236063
  hyper
gccttcagtgcgcctcggatctgcacgccctgcctatctttggggtacagagaaggcgcgtaccatgaaagccccaacttcccctctttcttttctcccacggtcgggaccttagggtaggagtttcaagaggggagaagccggtggagcagtaacagccttcataatgtctccagtcccgcttccgtcacctccctaaggctgcgcccccctcctgggggacgtgcgctgggcccggggccgccggggcggggaagggtcgggcccggggcggggagaagcgtttatatgtcggcgaggggcgtgggagctgccacccgcttgcctgcgggacaccggagtcaagaggctgccc

SEQ ID NO: 108881 - DNA, 101 bp, Homo sapiens; identical to SEQ ID NO: 2775
  chr3:130236173-130236274
  hyper

SEQ ID NO: 108882 - DNA, 220 bp, Homo sapiens
  chr3:130465367-130465587
  hyper
actgggaaagctctcggggtctcagcagagagaagaagccacgctaaagagtctccacaagtaccccgggatttgacccctccagccccctaacctgccctgggggacatgcgttcccgggcctcgtcttcctctagcgcggatcgctacacccgtccgagccctcctcgagggcctcaccaccgggcggggggagatggaacccgggagagaagtgcag

SEQ ID NO: 108883 - DNA, 30 bp, Homo sapiens
  chr3:130612278-130612308
  hyper
gggaagtcgccccgcgattaccggctcccc

SEQ ID NO: 108884 - DNA, 30 bp, Homo sapiens; identical to SEQ ID NO: 39632
  chr3:130612856-130612886
  hyper

SEQ ID NO: 108885 - DNA, 183 bp, Homo sapiens
  chr3:130613295-130613478
  hyper
gcgtgagctggggacgttgcgggcacacgacggggcgggtgcgggatcttggggaggggggctcccgagatagtggctgggcggggaactccttcctcagcctctcgtcagcgccgcttctcctggtttctcttgcagatgctgctgctaggggtggtgggagcagccgtgggacgcgtggcc

SEQ ID NO: 108886 - DNA, 61 bp, Homo sapiens
  chr3:130745639-130745700
  hyper
cctacttgggtcggcgaacacttccgccttggtgccgcctcgccccgacttcccagtatgc

SEQ ID NO: 108887 - DNA, 502 bp, Homo sapiens
  chr3:131080675-131081177
  hyper
ggtgccttgcggcaccgcccacgctcggattggtccgaggtgagattcgcccttgtgccctcgtaggccttcggaacagcggaagagcagtgtcgggccatggccagggcccgcaggctggagctggccgaggccctggcgctggggccaggctagaggcatgcctgctatgcgctcctgcacgcgccggaccctggaattctctctggccgcctccctctgcgctacgccatactggtgaggagggcgcgcgcccggccactctccgctctggccttgcaccttccttgcggcgctactctcgggtgtccctgccaatcccagcttcctcctctctcagatgcagatgcgctttgatgggcgcctgggcttccctggcggattcgtggactcgcaagacagcagcctggaggacgggctgaaccgtggtctgctggaactgctgggcgaggcggcggccgccttccgcgtggagcgccctgactaccgcagctctcacgcc

SEQ ID NO: 108888 - DNA, 429 bp, Homo sapiens
  chr3:131221627-131222056
  hyper
tgggcgccgacctgcgtcagcagcctccaacccggcatggattagcccgggaagactcgactcacgacttccgggcgccctgccgctctgctttcagggagtccccacgccaccgccacgtggacgcagtagccgtggggaagttttcgcaatggccgccggaacggtcgccggccgatgctctctgcgacggaaagaaagccgccggacccacttccggtgcgttttacaatgaactccgggcactcgagtcgctccccggaaactatagttctgcttccaccgttgtcctactttggatgtgagttggagtaggtaggggtgggaagggactgactcgcctctccaggggtaaaataaaagggatgttcagagtttaaactttagaagaataaggacagacttcctgaggacgctaaggaaaatgaa

SEQ ID NO: 108889 - DNA, 228 bp, Homo sapiens
  chr3:131245721-131245949
  hyper
cggaccccgccctgccgcagcaagcggatcagcctggcctccggctttttcgcccgcctggtggagctgttctgtagccgggaggacagctctcgcccaagccgagcatgccccgggcccccgcctccttcccaggagcccctggccctggccatggagctgagccggcgcgtggccgagctgggggacacccgggccggactcagcgtagagcacgcgcacagcctc

SEQ ID NO: 108890 - DNA, 70 bp, Homo sapiens
  chr3:131246019-131246089
  hyper
cgactgccatgtgatagaggaggggcgggaactgcttaggttcctctcagacctccggtattctcccagc

SEQ ID NO: 108891 - DNA, 143 bp, Homo sapiens; identical to SEQ ID NO: 39636
  chr3:131752687-131752830
  hyper

SEQ ID NO: 108892 - DNA, 1233 bp, Homo sapiens; identical to SEQ ID NO: 39637
  chr3:131753055-131754288
  hyper

SEQ ID NO: 108893 - DNA, 30 bp, Homo sapiens
  chr3:132136761-132136791
  hyper
ggtctggttcctttcgttggacgccccccc

SEQ ID NO: 108894 - DNA, 30 bp, Homo sapiens
  chr3:132378738-132378768
  hyper
ccgttgctgagcaacgcttgcccgctgaat

SEQ ID NO: 108895 - DNA, 30 bp, Homo sapiens
  chr3:132379230-132379260
  hyper
aggcgctgggtgcacgtccccagggctctg

SEQ ID NO: 108896 - DNA, 43 bp, Homo sapiens
  chr3:132440490-132440533
  hyper
aaagcggggaccaggcgcggtggctcactcctgtaatcccaga

SEQ ID NO: 108897 - DNA, 282 bp, Homo sapiens
  chr3:132440592-132440874
  hyper
cgcgatcgtgccaccgcagcgagaccctgtctccaaaaaaagagacagaaaaaggggagggttaaggaatcatttcagactcgaagagaatatggcctctcaaattaaaatgggcagtttccgccgaactttcaaagccgcttggtttggagagggagcaggacggccgtgcttcccaagggtctcccggcgtcgcggcccagcccggcgttacctgcagttcggcccgcagccgcttgttctccgtgtccagcttggcctcgcggcggcccatggacaaca

SEQ ID NO: 108898 - DNA, 30 bp, Homo sapiens
  chr3:132441927-132441957
  hyper
ggctccctggcgggcgtgcctcacagggag

SEQ ID NO: 108899 - DNA, 436 bp, Homo sapiens
  chr3:132756101-132756537
  hyper
ataagagcttggctacgctgaacgacaaaggttctagctggccagtccgaaaacactgagtccttaggtcaaatttgagaaatgacagggccagtgggagtcctaacttctagactctggaattactgacagaagaatatttggacagtttttaagaccctcaaggcatattattttacaacctctttagcttatgcctgaatttgtgctgtgactgttagcttcccggatgttttctccacatgcttctttctgaactagcctgtatagttctacaacaaattgttacgttttgagaagcagggaccacttataccacttctctggccaagtgtctggcaccgcgccactcagacacacacgcccaaccctttaggattaacgtagacacagtgttctcttccatggccattccgtctccacttctggttccaca

SEQ ID NO: 108900 - DNA, 538 bp, Homo sapiens; identical to SEQ ID NO: 2778
  chr3:132756941-132757479
  hyper

SEQ ID NO: 108901 - DNA, 452 bp, Homo sapiens; identical to SEQ ID NO: 39640
  chr3:132757536-132757988
  hyper

SEQ ID NO: 108902 - DNA, 50 bp, Homo sapiens; identical to SEQ ID NO: 2780
  chr3:133276457-133276507
  hyper

SEQ ID NO: 108903 - DNA, 141 bp, Homo sapiens
  chr3:133292197-133292338
  hyper
aaccctcggccaatcgggaaaccggagtcgcccggcacgtcacttattttgcatatgccctcctctccccgcccccatgcttggactccgccccgtctgggtcagggattgtcacctaagagcttcgtcctggcacctgat

SEQ ID NO: 108904 - DNA, 30 bp, Homo sapiens
  chr3:133293484-133293514
  hyper
ttgagctgaattttcgctttcagcagccgc

SEQ ID NO: 108905 - DNA, 30 bp, Homo sapiens; identical to SEQ ID NO: 39643
  chr3:133380464-133380494
  hyper

SEQ ID NO: 108906 - DNA, 30 bp, Homo sapiens
  chr3:133380705-133380735
  hyper
cccctcccccgactcggcgccgcccctacc

SEQ ID NO: 108907 - DNA, 250 bp, Homo sapiens; identical to SEQ ID NO: 39644
  chr3:133465041-133465291
  hyper

SEQ ID NO: 108908 - DNA, 386 bp, Homo sapiens; identical to SEQ ID NO: 39645
  chr3:133524470-133524856
  hyper

SEQ ID NO: 108909 - DNA, 30 bp, Homo sapiens; identical to SEQ ID NO: 39646
  chr3:133615104-133615134
  hyper

SEQ ID NO: 108910 - DNA, 561 bp, Homo sapiens; identical to SEQ ID NO: 39647
  chr3:133646156-133646717
  hyper

SEQ ID NO: 108911 - DNA, 237 bp, Homo sapiens; identical to SEQ ID NO: 39648
  chr3:133748100-133748337
  hyper

SEQ ID NO: 108912 - DNA, 550 bp, Homo sapiens; identical to SEQ ID NO: 39649
  chr3:133748401-133748951
  hyper

SEQ ID NO: 108913 - DNA, 53 bp, Homo sapiens; identical to SEQ ID NO: 39650
  chr3:133969906-133969959
  hyper

SEQ ID NO: 108914 - DNA, 272 bp, Homo sapiens
  chr3:134032171-134032443
  hyper
aaggcgggctgggagcggagtggggcagccgccggggggcgcccgcaagggctagggctcggggccgggtttgggggcgggtaggggcgggcaggggcggggcaggagccggggctgcgagctggccgcggcgcaaggaatgcggcctttggctggtcccgggccggcattccggccggcgcaggaatgtgagcagggtgttcactgcgcgctctgagcgcacaagtttgttctcctctccttggagaacgccggcccgctctgtgccaccc

SEQ ID NO: 108915 - DNA, 1049 bp, Homo sapiens; identical to SEQ ID NO: 2783
  chr3:134092502-134093551
  hyper

SEQ ID NO: 108916 - DNA, 239 bp, Homo sapiens; identical to SEQ ID NO: 39653
  chr3:134093626-134093865
  hyper

SEQ ID NO: 108917 - DNA, 599 bp, Homo sapiens; identical to SEQ ID NO: 39654
  chr3:134125147-134125746
  hyper

SEQ ID NO: 108918 - DNA, 30 bp, Homo sapiens; identical to SEQ ID NO: 39655
  chr3:134204506-134204536
  hyper

SEQ ID NO: 108919 - DNA, 367 bp, Homo sapiens
  chr3:134204739-134205106
  hyper
cgaacgcattcccgcgcctccaaaacctaggccgggggcgctggaaacccttaccggcacccggccaccgcggcagacgcttgctcctgccacgccccccccccctcccccgcatcacgtgtctgcactcgctttcctcggattcccggatgtgggtgagttcatttgctcgcgtgcaggggaagtctggagaaggcattgtttcaattattaaaagtgtgggggcagtgggcggaacaaacgcgccgactacagaggctggacgtaagcttagcggtggcgcgcgtgcgcagcgccggcccgaggtaacggcgggaaggctcaggggcgtgcttgcggcaaccctgtaaccgccggtgcgcaagtt

SEQ ID NO: 108920 - DNA, 30 bp, Homo sapiens
  chr3:134319883-134319913
  hyper
cggcgactgggactcgtcgcccgggaaaca

SEQ ID NO: 108921 - DNA, 6 bp, Homo sapiens
  chr3:134369512-134369518
  hyper
gccact

SEQ ID NO: 108922 - DNA, 575 bp, Homo sapiens; identical to SEQ ID NO: 39656
  chr3:134369552-134370127
  hyper

SEQ ID NO: 108923 - DNA, 75 bp, Homo sapiens
  chr3:134370181-134370256
  hyper
cgctgcctcatccccacggtctccggagggttctcgagagggctggagccgacctcccacgagaagcccctggca

SEQ ID NO: 108924 - DNA, 2575 bp, Homo sapiens
  chr3:134513741-134516316
  hyper
agatgaacgaaggctcgtttgatcatttaaagcggatccagtcctgggtgggatgtaagggcacgaggcctccccagctccttcgctgggcaccctatggggggacagggtgagttgggcgggccgctgcggttctccgagagcaccacgagggggagcccggacccctcctagcgccttccgagccctcccgcacagccttgcaagcaaaagtttttcttaaactaacaatgccagtgtaaggaggtgctcgcgcctgattggccgggggaattttgcaggtttgattccttgattggacaggaggtgttaggggtggggagagagctgatggtgggggatcccgctccctcccgcgtcagtctggccggctccgtcctcccgtaggctccgctgtagctagcaatgtgacaccaggacgcactcgctctcgcgcgctctcccaggctcgttctccctcgccctctctctctcacacacgcacgcacacacccacctctcccataaacacacacacacacatgcacacccacacccacgcgcgcccgcaccgccccacgcgcacacactcctgcccacgcccacgcagcgctccgggaagtccggtccgggcgagagcgcgaaaggataccgagaagccacccgcggagagcgcagcggcgccctgggacgcggcgctctcccggcgctgctgcctcggcttggtctcggcctgcgggccgtcggccggcgatggccctggattatctactactgctcctcctggcatccgcagtggctgcgatggaaggtaacgtaccctccacggagcaagttggctgctggtgccggccgccttgggactgctgtgctccgcggttcgcggggttcctctggctgctttgcggtgcaggcatcccgggacccgagggcaaggaggtttgggagcctcggccgctgccgagcgcggggcttgggcggcacccaccagagcgcccccggctggctcttagcgcccgaaactggctcgcgagtcccccggcttcctcgccccggcactccctggtagcctcggtctcccgcagcccccgctcggagagctcggagcccgctgcattgcggtgcatgctccttagctctggggcagagccagagctgggcgttggggagaaaggggtgcctctggccatccggctcctggagtactggcgcccgtctgctcccaggcacggatacgcttctgagcagccgcgcgccacctccttttctccagctcgcagtccacgggctagtggactctgcttggcgtgcaagcactgcgcgcgggggccggagaagctctgccgtggtatcccgcaagtggccgccgaaggagaggggtggagttcattggccgtacccttggggaccagtctggtggtccgggcgcctgcgggactgcaggtttccagggtcagtcggggagaggtggaaacccttttcgcctcttgagccttggaacaggagtgggctggggtgagtggtcggtcctacctaaagtctcccagcctctccaccaccccggagaggatactcggcggccgggagtcgtcgggcagcgtcactctctgccagctcagacttggcggtgcctccggcttggtggctgggaaagcgcgctccaaagacaccgtgcccggcgcagcggggagcctgggcgctcggtagcgctcgcgaatccctgtgggaaatcccggcccagctccccgcctcccgccccttcccccgcctctgttcttcgcagcctagcagcggccgcggcagcctcctgggaacacagctccgcgggagagcggagttggagttgtcgggagaaaaccaactctaggggtgatgcgctgccgcagtccggctagcagccccactttccggtgtcctgctccggatggaactcctctgggggactccaagccggggaggagcagctcttggcgaccgcgcagcgttcccatctgggagctcgctccgcttgttactcgttcctcgcgaaactgtgaccggttgcccagtggaaactcccccaaacacgatggtttggtgccccccgccattccggaaagctctgcccttctggaagtgaagctggaggggcattccgggccctgaggcgcggctaagattcccttcccttttggcgaagaccaccgcatcccacgtttgttctggtggcggcgtgggggtgcggcgattaatgcctagaaagctctcgcttgcttttccgaaggtggctttttgtctgccctcagtctcctgcttccctcagggactgctgggctttgtagggaggggagcaaggaggggtttgctttttggaacgtgcaggagaagactggagccgtgtggagtgccgtcaacaccctggcgcagggatgcctgggtttgacttattgagagacacgtgtgggagcagttgaaattggaaattcaaggggatatatacccccaaaccgggcaggaaagccagggtgagcgcatttgcaagggcaattccagactggacttgcagcattggggtggcgtcatgcaggtccgaggctcggtccggcccgcggctctt

SEQ ID NO: 108925 - DNA, 30 bp, Homo sapiens; identical to SEQ ID NO: 2788
  chr3:134592951-134592981
  hyper

SEQ ID NO: 108926 - DNA, 30 bp, Homo sapiens; identical to SEQ ID NO: 2789
  chr3:135684317-135684347
  hyper

SEQ ID NO: 108927 - DNA, 834 bp, Homo sapiens; identical to SEQ ID NO: 39662
  chr3:135684609-135685443
  hyper

SEQ ID NO: 108928 - DNA, 30 bp, Homo sapiens
  chr3:135913318-135913348
  hyper
ctggggcaaagttccgcgccgggttctcca

SEQ ID NO: 108929 - DNA, 30 bp, Homo sapiens; identical to SEQ ID NO: 39663
  chr3:135914132-135914162
  hyper

SEQ ID NO: 108930 - DNA, 279 bp, Homo sapiens
  chr3:135914740-135915019
  hyper
gcggcggcgcccctcgcgcctcagtcgcacactccggggtcaccagactcaagcgccgccccctcactgcccggccattttttcggcgccacacacacagacgactcctccgccgagcacgacggccgccgccgccctcagcactccccggccgcggaaggcaagcgctcacaccgccaggccccgccgccgcccagcgcacacagcaaggccccgccgcaggcccctcccccgtgcctcgccgccctcaccccgactccacgcgccactccagctcgg

SEQ ID NO: 108931 - DNA, 30 bp, Homo sapiens
  chr3:135915541-135915571
  hyper
tgtggtgaaacattcgttagctggcacatc

SEQ ID NO: 108932 - DNA, 30 bp, Homo sapiens
  chr3:135915948-135915978
  hyper
aggctgtatgtaagcgtggaggctcgaacc

SEQ ID NO: 108933 - DNA, 30 bp, Homo sapiens; identical to SEQ ID NO: 39665
  chr3:136470419-136470449
  hyper

SEQ ID NO: 108934 - DNA, 65 bp, Homo sapiens; identical to SEQ ID NO: 39666
  chr3:136471112-136471177
  hyper

SEQ ID NO: 108935 - DNA, 30 bp, Homo sapiens; identical to SEQ ID NO: 2793
  chr3:136471619-136471649
  hyper

SEQ ID NO: 108936 - DNA, 1327 bp, Homo sapiens
  chr3:136537642-136538969
  hyper
cttgcgacttttaagcgcaaacaatgggtggaaatggacagaaactgcctccgtgcccacttgcagcggactacgtagccctggcagacaggcaattgcttcaaacaagcgccctccaagggcgtaagctagaggggcccgggcgggcgctttcccgtggaccctcccacctcgcgggtagaggaagtccttcagttcaggcacaaccctgagcgtcccccgcagtctccaactccggcgccagtcaggttgtggggtgggggcggcggagggcggagagcgcaggcgcagagtccgcgcggcggcgcccctctccctccgcagtactccgggcagcgcccgcctcgattttcccaggcgagggcacgcccgcgtcagtcgcctccggggcaccttcctcgccacgacacgcaggtaaccgggccccgggagccggtcggcggcggcggactgggaccttgatcctgcctgcccggccgcccgacaagggaatgagagcggaccccgaactccacacacccgcgtttagccgccacacctaaggggcacaacagtctttttgggtaagggccgggctgggggcgacgcgccccgcccgctttgcagacttcggggtgctctgcacgacgcctgaaaggccgcggggcccgcatttctctgtgctgccctcctggagaaccgggacacggggacgggagggccagcatcggctacggcccggtttcccgtttctttccgctgtcgcgtgtctgggccctcctgcagcgtccatgatgaaggccaggggctgttgctttcctctcgcccagtagccaacccaagcaaggggtgagtcactgtggcgtcatatgggatcaatttcaaatacaagttttaaaaaaggctggatgattttagaaatatggccaagaatttgtattttccattactctcttgtctcatgtccatgactcttgaacgccagtctgtgggcgctgagattttcgtggtacatcgacggtttgtagacatcttttcccaagggaagacgagggcaagggttagtggaggaagggcctcgtcacggccgagagtggcggagaaggctcagggcaagtccgcacagcctccagcagccacggggaggaaaaggcgaatctttcctcacagtgctctgggcgctgtagaatttctacgccacgtgcacccatttggcctcatttgagaggaggagagggaagaagggtcgcgcgggccggcaggaaagagactcgtgttgcggcggatgaaggctcagcgcggacctgcatctcgggccaggttttctttcacccggctccgcgaggag

SEQ ID NO: 108937 - DNA, 30 bp, Homo sapiens; identical to SEQ ID NO: 2796
  chr3:136580754-136580784
  hyper

SEQ ID NO: 108938 - DNA, 30 bp, Homo sapiens
  chr3:136581705-136581735
  hyper
ccccacccaccggccgttttctagtctggg

SEQ ID NO: 108939 - DNA, 30 bp, Homo sapiens
  chr3:136732881-136732911
  hyper
attacatccacgggcgtctggcgccacctt

SEQ ID NO: 108940 - DNA, 479 bp, Homo sapiens
  chr3:136751320-136751799
  hyper
acaaaaatttgtttcccactccgtcctcttcccggatacttggagacagcagcgtcagtggcattgtttggcgtctctgaacgcggctttggcagagccctccggagccagctgtagttcccggagacgccactaggtgacaatgtaggtcttggttggtcaactgcaggctacggttgatttggttgggtcccagcggagccttagcgtcctctccggcaaaataacaaatgtccgtcgtgcagggcactttcttcgggaaggactcctgggagctcaggagtttgcatacgaagccgagggagcgaggggcttctgataatgatattcagcgtcgaacagagtcgctcatatgcagagccggagtctctcccagctttgatatatgagattattatggagagtaatgcaggccgagtgatgcttgctcggcaggctgtggatgtggattcctatgtggattgcgaggccgggcgcaa

SEQ ID NO: 108941 - DNA, 668 bp, Homo sapiens
  chr3:137479124-137479792
  hyper
tggacacttgggggggtgggccggattaactgtcttgtctctaaacacctgggtgcgctggcgctcactctcagctgcgagctgaagcccacgctgctctcaggcttcccgcaacaggcacctgcgacttcgctcaccaaaatcttccagtggccacagtgagcgggcaggactggtgccagcaagccccaagcatcccaggccctctggacgcaggtgactcttctggcctctttggaaagccattggagctcgagaggcatagccagctgcctcctttccgtccatccccaaccgcgttctctaagccacgttctgtgcgccttactcccagcactcagccattccccagccccagaggccttggagtagtgacctctgcccaccagagaggagggggccggagggtggggcggagccttgtggcaaggcaggtgggtgcaggcctctggggccccagactgccgcgtctggctctaccaggctgtgtctcgggccccgtgcctgcagctgcaaggcggggaaagacctatcgggaagatccacctcggcctgggcagaaggaaactttactgagagtcttctctgagtttggaattatgcggaaattgaacccaagatgaataacacgcagccacagccccagagaagctcgaagtctagtgggc

SEQ ID NO: 108942 - DNA, 1317 bp, Homo sapiens
  chr3:137479991-137481308
  hyper
aaggcgcatcctggacgctctgcgccctggagggagacgaaaggcccggagagaagcagattaggtcggtgcccttagaggcctcttccttcacttccgggaaacagcggcggttccctgacaaaatccctgttgctcgggggttcggacgccttgctaaggctggcacgcagcggaccttgagtagctgcgctgtgtactgaacgtgtgcacagcttctccaggcaaatgtgcaagcggaaagacctcatccaagcgttatctccagccctggaggagaatgaactggtagcctggggccaaacttcaggccgtggacaaagcaggaggagtatttaggcaacctctgtcctaatgcttgttctggttgtgaccgaagttgctgactctcctcaggggtcacgtctccaggacgtgctacccggtggtttagacccgtcagggaggcacagcgtgaagggacagcgcagcgcagtagaggcacctgctggagacagcaccaggccagaccccaggatcacgggaactcctgctcccgccacagctctaaagagtgttgaataaaccggtggtcaccggtactgcgtaaggggtgtgcgtggctttgcagttcgcctaggagacaagctgatgcacggcctggaaggtgcagccctcatccctgcgttccctccccgcgcggagttcctgtctcaaggccaagacgcgcagcgctgatgctggccccttcctaggtcagtgcagctggaccaggcaatcggggtctccgaaacgtcggggggtcagctggcgccctgcccaccatcgaacgcccttcgtatcactccgctcctcattgcgaattggactgcgcattggctgcgacccaaggctgaacacaagaagcttggagaggagctcgggcgtttgaggagaaggaaatatgaggaattgcaggaaggcgctcgcctgcccgaactgcctccgggcaactggaaaggattgtcctggaaactgagaggagagaaaggacgtaggaccttgtgccagatccccttgctgagtaatttccaagagcttggtttgcattaacccagaactttgggtgtgcgtttggtgtcccctggggggttctagagtgagagattggcgggtcccctccgaacgctggatctcgctgcagatatcagtatttctctcattccttcccaaagccgtcgggatcgcccagtagaattagaattgggtgattcctgaatctcctatccctggctggctctgaatatagcgcaccgctggtcagacctgagtaggggttgccagcgacgctcggaaacc

SEQ ID NO: 108943 - DNA, 318 bp, Homo sapiens
  chr3:137481935-137482253
  hyper
cgcgtttctggccggtcctcccaagagagaatggtgcaaaagccaataagcctggaacacacgcaggtcccgccgggcctgggacaatggtttccatttaataaatatttcccccaagggcatttcacatcgggcaggcaattattcaaaggaaacaggcgcgcaggttggctctgcgggttatttcgtcctctttacccgaagaatgctcatttgacgcaagaaacgagtctcgcagcctccctgggtgggaagaggcgcccagggacaaaccgaccctggttgcgatacaccgtgagactccgctgtagggccgct

SEQ ID NO: 108944 - DNA, 974 bp, Homo sapiens
  chr3:137482463-137483437
  hyper
tctgcattgcctgacgcgaggccttccaggagcaggtcagacaacattgctcagccacccagggtcccagcgctacgcccgggcgccgcatcctggggcaggggtggatgcctagttgcaggggcttcccgggagaacactgccaaagcaccgccgagggtggggcgcgaaaagtttatttcgcttttaccctgagcctgctatatgttatttttctcttccaaggatatttgacaagagggcaaagtgctgtccttgcatttcgcggcaaagctgtcctatttatcaacacaagctctcgcctcgctccctttgctgtcccttccccggcctttgtatttcaagccctaattctctttcacaaccgggaaaggaaacaggagacgcggaagagttttatttgttgacagtgcccgagacaatgtggaaccgaagtccccagtctagagctagcctctctgctctagccctctctctgcctctgtccctcacacctctccccgcccccaccagtcgcgctctctgtttcttgcaccggcgtgttggcaggtgcgccccctcggcttctctgctgctgattggcgcccaggttggggagtcgccgccccgcgcttatgtcagagtgcgtgcagtcccggcccacctcgcctttgaacttcgccgcttttggctctcgttcaccagcctccccgcattctcagccaggtgcagcgctaggcgcggcagctccgggaaagccacgggaagggggagccacgactggaaacgcaagaggagagaagggaactagagaaggcaaaggtggagagggggagaaggaggagcttcttgccctggctaaaaaattacctggccacttaatcccggagactccgatacttgggtcccagcccctggtgcctgaagccccccggccgatcgccctctcctcccccgccctttctgcccccactcgctcccccggggctgcctgg

SEQ ID NO: 108945 - DNA, 512 bp, Homo sapiens
  chr3:137483513-137484025
  hyper
cgaggggagcgcagaaccccggctcaggacggacagacagacggccagccgcgcccaggctcgtctgcagaacccttgcactccctacccccacccacctagccgccgggaccatgtccaaaccttcagaccacatcaagcggcccatgaacgccttcatggtatggtcccggggccagcggcgcaagatggcccaggaaaaccccaagatgcacaactcggagatcagcaaacgcctaggtgccgaatggaagcttctgtccgaggcagagaagcggccatacatcgatgaagccaagcggctacgcgcccagcacatgaaggagcaccctgactacaagtaccgacctcggcgcaagcccaagaacctgctcaagaaggacaggtatgtcttccccttgccctacctgggcgacacggacccgctcaaggcggctggcctgcccgtgggggcctccgacggcctcctgagcgcgcccgagaaagcccgggccttcttgccgccggcctcg

SEQ ID NO: 108946 - DNA, 545 bp, Homo sapiens
  chr3:137484084-137484629
  hyper
cgaagtgccccacaccttggctaccggcgctctgccctacgcgtccaccctgggctaccagaacggcgccttcggcagcctcagctgccccagccagcacacgcacacgcacccgtcccccaccaaccctggctacgtggtgccctgtaactgtaccgcctggtctgcctccaccctgcagccccccgtcgcctacatcctcttcccaggcatgaccaagactggcatagacccttattcgtcagcccacgctacggccatgtaacccccagcccggcccggacctgaggcgtggtctgaaagccgggtctgcaccctgtcctctgagcctagccccggcctgcagacgcctccggggtcagccctgccgctgtcccttacaccacccagacttttcctctctcttccagggggaagggtggggcgtcctcccggacccaaggcgcagacaggtaccggaaacttgcaaacgttatgtcagctacacagctgcccctatcccgactctcccaaaacaaatctccgactgtaccccctttggacaa

SEQ ID NO: 108947 - DNA, 278 bp, Homo sapiens
  chr3:137485307-137485585
  hyper
cagcttggtggtctgcgggttgggtgtagaagggcctagagcttcggatccgtccggaatgcgccctggagattgctttttgcctttagaggctagacaaaggtatcgttccctgggacttcactctctcctcccattcttcccaaaagggtcaggccacttcaaggaatgaatgaactaagtcaaaggccgacccagaccgctgagatctgggtgagtttactttttaaaaaaccaaacgctgaaggagcagggagaagcaccgagtctcctgggaa

SEQ ID NO: 108948 - DNA, 470 bp, Homo sapiens
  chr3:137485831-137486301
  hyper
aagggaaaaggaaggcgacattgtcatggctcaggcaaggagtttttaaaaatcgtaaaaaatcaaataaaagcacagcccatgacgttaaacaaggaaaagagtccttttctttcccctccgggtgaatgttttcttgaagattattgtctttcctgagaaaggaccctccgatgttatccagcaaaactctttggaatttgttctcaaaatcgaagggtgctttccacccttggtcttggagtctcaccccaaaagccgcgctcacgcgtggttttccttaatttgcgtgcttttcccactggctttgatatgctgtggggtgggaggtggggcagcctagaggtttgtgggctttctgctgctgttgagagatttgtacgcttgcctccgctgtttccaaaggagtcggtggctcgaagtgcacgggaaacgttgtcaacagacaccaaagccgaaacccgcggatt

SEQ ID NO: 108949 - DNA, 250 bp, Homo sapiens
  chr3:137486570-137486820
  hyper
agataaataaatgagcgatcaggcgaaggtaaacaaaggcgggctgagggaggtgtagggggagtccgggctggctgcgccacgcttacttagcattacaaaacccttttacaaatcgagacaattaggaagtgacttgcctctggtggccgtccggtctgggggcctgggcgcttagggaaggcccctcctcccgccccctaggaagcccaggaggcctgggacggagacgccacggttttcctgtctg

SEQ ID NO: 108950 - DNA, 757 bp, Homo sapiens
  chr3:137487030-137487787
  hyper
gaaaggggcacgtggcgagtgcgagggcaaagtgcgaggggcaaaggcctcggacggtggctgaagctggaaaaccgaaaccagggttccgggttgcgcttggtcttaggctcagatggggaattaggaaactagggtgcgctgtagaagagaggcgctcagggggctgcggcctcactcagaggtggctgagacctctttccagcctgcaaagagccgggggcccagttcgggtcctgagacctaaagtcaaagacttggctcgggcggtttttggccatcacacttcgtttccttccttctcagactggccttccccagccatctgccctccttagacctggtcccaacctctgcccccacccccatccccgcaagagcctgcctcagctttgcctccgtcgccccgagggctgcggagcgtccgccgaggtgcgcggccgcgactcgccctaacaaacagccaaaatcctgctcgtcacgccgctgacaggggccgattactgactttgaagtcaggcgcagacaaaaagaaatcccctggggggtgtgggggggcagcagtccctgtcaaacctgtttgctcacaactgtctctttctttcaagaaaatcattaaagcaaacctgtagggagaggagcgccccgcccgcccggagtggagaagagccgcttctcccgagcgcgcgtcgcgcagcaaagagcagccaagagttgccctggacagactcctggcatccggagaacctgaactccg

SEQ ID NO: 108951 - DNA, 153 bp, Homo sapiens; identical to SEQ ID NO: 39685
  chr3:137487850-137488003
  hyper

SEQ ID NO: 108952 - DNA, 492 bp, Homo sapiens
  chr3:137488090-137488582
  hyper
cgccggcgcggcaggagcagagttgtttgggttttacctaggtttgctttcttaaaccttggctgccatctggctcaggggtacactggctacatcttcagagagatgtggaattcttgacccctttccgcctctggcctccctcattccgagaactccgtcagcctttcatgcacttctcggttttggatctgactccaaaaatctttgattcccttccagtttccgagtttttctatttaaatattaatttccttaggcccgatgactttaaagacggaaaagaccagctactttgagtaaattacgctgaggtgtgagtgactgacatctgagaccccctgaacgtttgcattttggaactggagcgagctaacctgtaggaatctccggtgaaccaaagcgggatgatgtttccgtctgagtagggccaaggtactttcaatacagctcaccatttagggaagtgtgtcccgccggtcagcttctctt

SEQ ID NO: 108953 - DNA, 370 bp, Homo sapiens
  chr3:137488985-137489355
  hyper
gcctggaaccagaagcgcaggagctgggccacggcagagtaattaagaaaataatgaaattgatggcggatgggggcgctagaaatcctggggcgtctacttaaaaccagagattcgcggtcggccccacggaatcccggctctgtgtgcgcccaggttccggggcttgggcgttgccggttctcacactaggaaggagcctgaagtcagaaaagatggggcctcgttactcactttctagcccagcccctggccctgggtcccgcagagccgtcatcgcaggctcctgcccagcctctggggtcgggtgagcaaggtgttctcttcggaagcgggaagggctgcgggtcggggacgtcccttggctgcc

SEQ ID NO: 108954 - DNA, 141 bp, Homo sapiens; identical to SEQ ID NO: 39688
  chr3:137489557-137489698
  hyper

SEQ ID NO: 108955 - DNA, 1172 bp, Homo sapiens; identical to SEQ ID NO: 2810
  chr3:137489875-137491047
  hyper

SEQ ID NO: 108956 - DNA, 738 bp, Homo sapiens
  chr3:137833932-137834670
  hyper
cggagcaggccgagggggccgggctgcagggccgcgccgggccagaagggcgcgccctgggcagcgcggacgcacgcagccggctcctcccgcgccccgctgcaccccggcagggagttcgcccccgctaatgtttaacctcccgaatcgctgatccctcggactgcagccaagctacccacccgccccgctcccgggacgaattcctggcatagttttcccgcgcggcccgctcaccgtggggtctcctggagccggggacggcgggaagacgtctcgaggtggcggctcccatactcgccccacgtcccgcctccagacttgctccaccgccccagacagcccagagatggttcccggaatgctcaccgcccgccgttcccgggatgcttccccagccccacgcagtccgggcgctctctgcggcggaggcagagcctgcccggcccactccagtgccgccaacctgcgggaccgcggacagagagctcctcggtgcgtcggtcagctcgtggcttggggtctctggtgcctccagctcctactacagccgccccgccccacctcaagaagaggtggagcctctcccggcccctctcggacgagctatttttaggtctgtaacggatgggggaaggcgggaatgccacgtttaatccgttagtaaaatccaggatccaagtgaatggcttcctggccttgctgagaggctggacttgccccggtttccccacaccc

SEQ ID NO: 108957 - DNA, 30 bp, Homo sapiens; identical to SEQ ID NO: 39692
  chr3:137893255-137893285
  hyper

SEQ ID NO: 108958 - DNA, 261 bp, Homo sapiens
  chr3:137893549-137893810
  hyper
gccccgggccgcgccgctctgccagcgccagcgtctcatagatcttatccagctcgccgtggcagcagccagccacagccacccgcattctgccggcctgaggaggtgagcgctgcctgcaacgccctacaccacagccagcccaggaccgactgatcgctcagctcccgccaactttaataagtatagccaccgcctgggtgtagactcctgcaaaataattcacttccggtttccagatctcgcgagagagggaccggg

SEQ ID NO: 108959 - DNA, 159 bp, Homo sapiens
  chr3:137906198-137906357
  hyper
aggacagcccctgacgccattcccttttgcccttctttctgcgggcctttccggtacttgagcggtgtccagagcgtggccagttctcgtctatctggctgcctttagggagcggtgcctagcgttggccaatagttggctgtcgaaagtgccggcccc

SEQ ID NO: 108960 - DNA, 30 bp, Homo sapiens
  chr3:138048086-138048116
  hyper
accctcctcttccccgagcccaacccagag

SEQ ID NO: 108961 - DNA, 131 bp, Homo sapiens
  chr3:138048355-138048486
  hyper
caaagtgaacaccccgcgaggaagcggagcctgcagtccacgggctcgtggctcgccgggcggttttctggggatctgcgaagccccctccccaccccggagccggccagggggcgcgcgcagaggccgga

SEQ ID NO: 108962 - DNA, 122 bp, Homo sapiens
  chr3:138048731-138048853
  hyper
ggacacgtaagccacgcccactctgggcccaacgcagtctctccgcggaggctctgaacccagccagggagaggcaggagggagtcccgccccttgccctccatatcggaccataggaaccc

SEQ ID NO: 108963 - DNA, 1116 bp, Homo sapiens
  chr3:138066746-138067862
  hyper
ttcaaaaggtggaattttatggtgttgaattatatctttatttttttaacggggggaaaatgacgccgctggagaggagttagcggaactgaaacaatgaaatggtgcgcgagtgtcgcctgtccccgtcgcatccatcccaacgaagtttgggccctggaacggtgcacccagaaggcctgcggggagagacgctggggcatgatctggaagaaagacgtctcaggattcgaagggaatgcagctaaggtggcggcggaggttcgcctaggactggggaggcgtccctaggctcagaagttggcccggccggagcggagatttaaaggttggagcgcagaggctcttaaagaggccgagtcgaattcccactcggcgtccaccttaaagccagctccccggcaccacggatctgacccgggtaagtgctgggccgcgggagaggctgcggcgccgaccccagcccctggcgctctagcgcgccctgccgggcccaggggactcggcgcgggtgggctggacttcgtaggcgcgcgtcctgggggccggggtgcacgcgggggcgacagggtcgaggcacccggcccgggctccccactggcgcgcccgcagcggcgctctatttttagcaggcgctgtggcaatataaggaatgcgcggcgcgctaggcgctcggggcgcacgctggcggcgcggtcgctttaaggaggcgccggggcggggacggaccggagtggccggctggcggggagccgtcagtccggcggccgcggggcccggcgggcgcgacgctgcctcctcaccggcgcaggctaggagggggcggcctgagtgccgtagccgagccggggctggagcgcgcggtgagtggtcgggcggccttggaggggagggggcccggccgcgccgcctctcgccccggccgtcgctttgttccggggcgggaggtgtggccgccctccgggctcggccgcgctctccgcttgcggggtgcgccctgggaccggctgtgcgtggcgttttgcccccatcgcgggctcccgcgtaacggtgtgcgttcgtgaaatcggccacgaccaagaccccagtggggagggcctgcgcgccgctcagaga

SEQ ID NO: 108964 - DNA, 1021 bp, Homo sapiens; identical to SEQ ID NO: 39697
  chr3:138153255-138154276
  hyper

SEQ ID NO: 108965 - DNA, 15 bp, Homo sapiens
  chr3:138154497-138154512
  hyper
cggcgccgggccccg

SEQ ID NO: 108966 - DNA, 573 bp, Homo sapiens; identical to SEQ ID NO: 39698
  chr3:138312853-138313426
  hyper

SEQ ID NO: 108967 - DNA, 162 bp, Homo sapiens
  chr3:138327434-138327596
  hyper
ggcaggaagactggacgcactgcgggacatggtgatgtcctgggttggggctgaggaaggcctatgcgcggagggtgcggccttcggctaaggcagaggaccagggttgggtccgtggcggcgggaggggtggcctcctgcgctggtcgccccaggggacct

SEQ ID NO: 108968 - DNA, 44 bp, Homo sapiens
  chr3:138553745-138553789
  hyper
cgccgccgaacccgcgcccgtgtgcgcgcgcgccagcctctcag

SEQ ID NO: 108969 - DNA, 157 bp, Homo sapiens
  chr3:138634846-138635003
  hyper
gtggagcttcttcacggtctgtgaacactacgcgcaagccctcgggcgcggtatgggcgagtgccctgccctggcgggggtcccagggatccgcagggaggggaaggcctccgaacagaagtcagggcgccacctggcggccgcagcccacagccca

SEQ ID NO: 108970 - DNA, 458 bp, Homo sapiens
  chr3:138654714-138655172
  hyper
gccccttccggtcgtcgaggcgctcttaatttggttggagagacaagtgcactacaagaaacagaggcagccaagcgcctgggccaccatcaagtaaggttgaaaaggggagggcaggtagatcgggacccgtgggcgccaatcaatgctatggtggcggagagtaaaggggacgaacacagcctggggccatccccggagtcccccagcgtccgcctgtggccgtgcctggttggccgcggatcccggcgggcgccgcaaagcggcgggattgccagcgcagagctccggctctctgccttgtccctgggtccgagcaccggagcctctggtgtctgcggggagaagtctcggattgagaaatacgggagggtctcgtcagtggctgcaggtgcggcagccactctggggacccagtgagaatggggtcgcctggctctgcgcgaacccctcacgtg

SEQ ID NO: 108971 - DNA, 867 bp, Homo sapiens
  chr3:138656627-138657494
  hyper
cgtgcacagtacacacgcgagcacgactgtctgtgcctggagacaccgtatggcaccggaggagctgctcagccgtcggtgccacctgggaagtagggtttcgggtgctgctctggagcgcgggaaagtccggatccgggtctgctggtcagcgcttcggcgccgccgggctcctttatctctcatccgccggccggtgagcggctccagtttcaagacccccgatcctgccggtgaggggagggagcgagaaggagtgcgctccgggcccaagaggctgcagggccccactccccaggtctgtcgtccttcctttatctcctcaggtcacacccccacttaaaataaagaagggtgcctgactcattcaggtcagggaagtcggcccccgggagcctcctgccctcacaagccatggtgaagggaggcgaagccagggtttgccacggcctgggagaaaatgcggctgcagggtctctttgggctgcagcgctggcccggggccccaagactgttaaggtgtgtgtgggaggcgcgcagtgtggctaccgaagagccctccatcaccgcaccggcaggccgccgggctcgtcctcctctcatgcttccaagggttctgagctgcgcagcactcgcatcacccagaagtgtctgtggagaaaacgacctcaggtgtaagcccaaggctgctgcctgcaaaggcaatgccgtggagactgggttccacagcgacctgggtttttaagtcaccgaaagctacagggcagggtcacaaacactctcccgccttctctgcagaaccgtgcggctgacaggagagcgttgcgcagaaaattcgaggccgggcgctggaggagtctccgcggc

SEQ ID NO: 108972 - DNA, 679 bp, Homo sapiens; identical to SEQ ID NO: 39702
  chr3:138657617-138658296
  hyper

SEQ ID NO: 108973 - DNA, 160 bp, Homo sapiens; identical to SEQ ID NO: 2816
  chr3:138658703-138658863
  hyper

SEQ ID NO: 108974 - DNA, 47 bp, Homo sapiens; identical to SEQ ID NO: 39704
  chr3:138659080-138659127
  hyper

SEQ ID NO: 108975 - DNA, 145 bp, Homo sapiens
  chr3:138662281-138662426
  hyper
cgcaagaaccggcggatctatcctatcagaagtcggaagtcatctatcccatcagaagagtgaaagccgaccaccccctaatccgcctgggagaaccagactgcaaccaggtcaaacgcctgtgtgcctgcgcggaagcatggat

SEQ ID NO: 108976 - DNA, 180 bp, Homo sapiens; identical to SEQ ID NO: 39705
  chr3:138662793-138662973
  hyper

SEQ ID NO: 108977 - DNA, 120 bp, Homo sapiens; identical to SEQ ID NO: 39706
  chr3:138663607-138663727
  hyper

SEQ ID NO: 108978 - DNA, 241 bp, Homo sapiens; identical to SEQ ID NO: 2818
  chr3:138664141-138664382
  hyper

SEQ ID NO: 108979 - DNA, 67 bp, Homo sapiens; identical to SEQ ID NO: 2819
  chr3:138664701-138664768
  hyper

SEQ ID NO: 108980 - DNA, 533 bp, Homo sapiens; identical to SEQ ID NO: 2820
  chr3:138664802-138665335
  hyper

SEQ ID NO: 108981 - DNA, 131 bp, Homo sapiens; identical to SEQ ID NO: 2821
  chr3:138665396-138665527
  hyper

SEQ ID NO: 108982 - DNA, 976 bp, Homo sapiens; identical to SEQ ID NO: 39711
  chr3:138665539-138666515
  hyper

SEQ ID NO: 108983 - DNA, 357 bp, Homo sapiens; identical to SEQ ID NO: 39712
  chr3:138668327-138668684
  hyper

SEQ ID NO: 108984 - DNA, 351 bp, Homo sapiens; identical to SEQ ID NO: 39713
  chr3:138668757-138669108
  hyper

SEQ ID NO: 108985 - DNA, 254 bp, Homo sapiens; identical to SEQ ID NO: 39714
  chr3:138669140-138669394
  hyper

SEQ ID NO: 108986 - DNA, 22 bp, Homo sapiens
  chr3:138679270-138679292
  hyper
ggaggaaggaaggcacgtttcc

SEQ ID NO: 108987 - DNA, 27 bp, Homo sapiens
  chr3:138679565-138679592
  hyper
cgggcacagacgcgcaagcccagagca

SEQ ID NO: 108988 - DNA, 255 bp, Homo sapiens
  chr3:139062830-139063085
  hyper
ctcccaaccacttccggcgcaagtggcttctgataatcatggcgcccctcggaacaactgtattgctgtggagcctcttgaggagttctccgggcgtggaacgggtctgtttccgggctcgaatccagccctggcacggtggcctgctccaaccgctaccttgctctttcgagatggggctgccacgccgccggttcagctccgaggccggtaagtgaccttccggactttcgctggggcgttcttctgggagac

SEQ ID NO: 108989 - DNA, 808 bp, Homo sapiens; identical to SEQ ID NO: 39717
  chr3:139258159-139258967
  hyper

SEQ ID NO: 108990 - DNA, 447 bp, Homo sapiens
  chr3:139396509-139396956
  hyper
tcctagtgggctgacgaggggcccacgctgcgcttacctgctatttgcagggctcagcaacggcgctcggcgagtctcgggggactgcgggggactaggggacctgctgggcctagcaggggctgtcggtcagcgcgcggcccggcgcccgaggtccgagagggaaacgacgtttggtctcgggactcaaggctgcctccggcccgggcagcctcaggtctagatcccctagtacctgagctggaggcggggccaaggcgaacttgaccttgcgctcccttagcggccccgggcagatggagtctgagggaaacagatctgcgccccgccccttcgctggggcgggccctaaggagacccggccctggccccgcccagggtcctaagccccgccctctcccctgcccccgcccccgcccgctggctcccaaccgccaaggctctttt

SEQ ID NO: 108991 - DNA, 1784 bp, Homo sapiens; identical to SEQ ID NO: 39719
  chr3:139653417-139655201
  hyper

SEQ ID NO: 108992 - DNA, 1526 bp, Homo sapiens
  chr3:140660222-140661748
  hyper
cctatataggagtatccgtgcacaaacctttttatgcattgtgcgagggttactctgagatagacaccaagggaactgctgggtcataaatccaattttttcaaagtaaatccgcttgcgaacccggaaccaagtcgatttttcccgccccgccagttccctgttcaggagagtgcagccgtgattggcgcgttcactcaggccaggggcgccccaggtctcaggtgctaggagcgcggtgacctaccaccctccgggcacgcgttctggccacgcctcgcggcccctttcattgaaagagcccgtagggatcacgtgaaagaacactgcagagtgcgtgacgtcacgacgctcacaccaatgggagcctctgtttatgtcgggagccatcaaatagtcatcttccccctaccatcccccgcccactctccgtcgcgctgcgctgcgtcgctttcagcctctggtgaagggcggcgcgcttaggcaggcggtggcgcggctggagtgccgcggggagggctgtgccggttgctttctgcagccgcatctcggccagctctcctcgccgtccccggggcgctgtgcgtctccagtccgggaccgaagccgcctgccgtagcgggcggccagatccgcgtcccgcctcagcggccggaggacatgcgggagagagaatgagccagagggacacgctggtgcatctgtttgccggagggtaaggtcctggcggggcgtgcgcactggggctgagggtgctggggccgaagacgcaggcgaggggggcgaggggggccgaggggggtgggggggtgggggggcgggagtgaggcctgggcggggagctgccacgggcctgcgggtgaggggagcgacccagcccgtgggtggtgaggggggctccggttcggggaagcaagggggtgaggcccgggcccgagggcgagagagtgaggcccgggcaaagagggttgaggcatgaaacccgggccgggagtgaggttttgggcccgcggggccggggtgaggcggaggccgaatccatgcgtctgaggagacgcgggcaagagctggggtcggcgcttgattacccggacgccgctggacctggccgcacgccgcaatctagcaggcgtcggggatccagggccgctttgaggagcctggcttcggatttcgcgtaggttgcatggcccaaggggacggggcggaaagtgcggaggctgaggacaaaatgggcgccggagactcctttagccctcgctccttgcagcgctcgcttgggcctctgcacgtcactcacgccccacctcggacctcgggccgctcatttccgggctcggctttgcaaggtgggtggtaagggggctacgggatcgagcggggaaggctttggtattctcccgtggttgctgtagggtgtttctagcccttggaaaatttcttgcccgaggttttccaggtggtgaatggggtgcaaagctttccagtacctttggggtcagattcctttcgagaaaaccacccct

SEQ ID NO: 108993 - DNA, 30 bp, Homo sapiens; identical to SEQ ID NO: 39721
  chr3:140713624-140713654
  hyper

SEQ ID NO: 108994 - DNA, 871 bp, Homo sapiens
  chr3:140769430-140770301
  hyper
gattgggttagcaaatgactgcgtaatggacctaaagtcaattctgggagcacagacgagggccaccaaaccaagaactttcaatttccccaaggaagcgcagataccagaagcaccctcgaggcttctgttttggccacgccctttaccccatcgctcagttcaggctcccaatgaggcggcccaccatcagcgctggtagagcaaagagaccgacttcctgcgcctcgggtgggcggggaacgctccttgagcaggtgcggtatgaaattggactttaagagatgagttggagcctgatctcaaaaataaagtgtggacgtgtgtgtctgaggaagggggataataaaccacccttttttcctcctggctgctatttcccacgtgcgttgagtaaaggcaccaaagctgcctagtgactgggtgtctcctccccgtcaggggcacccaccctggcgctccaggagcgcttgaatgaatccgggaggacccgcgcgcaggaatgaatgcgagagctagggagtgagcgggcgagtgggcgggtgagtgaatggcgaccgcgccgccgccttggcacaggggcgcgggcgcgggctccacttccctctcccgccagctggtggcctcgagaaggtggcggcgccggcagcggcccgagctgggacggccggggcgcgggatggtgggggaaggggcgttcccggcgaccgcgccttccgcggctattggattagtggccttcagggatgagctcagccagatcggctttcagctgcagcctccgggccggccgggaaggcggggagcgggcggcggcggcggaggagggggaggcggcggcggctgcagcatccagagctggccgtggcgg

SEQ ID NO: 108995 - DNA, 182 bp, Homo sapiens; identical to SEQ ID NO: 2831
  chr3:140770407-140770589
  hyper

SEQ ID NO: 108996 - DNA, 1209 bp, Homo sapiens
  chr3:140770643-140771852
  hyper
cgcagagggggcgctgctgccgggcatcagccgtgaggacgcgcccctggccgtgcggagagagccggcatttgcgggtcactcgggcgcccctgagtgggcggcggcggcagcagacccctctccagggagtccaggacctgccagcgctggggattcttcccgaacaggcgcttgccctctcttttatggtaagtactctccagctcctggtgaggggcgcgcgggggccgggagccgagatccggctgcacggactttgtgcgggccagcactcgacacagctggcgctcctgacgtcccagtccctgagaattcctctctgcaggttgtggcagttcgagatggttgatttgcgcgcagccctggggcgtttggggcccggcctttggtatcatgggttctaagccctttgcttctctgcgtagcggacaacgcacaaaaaactgccatccgattcacccgctttggtttggatccaggatccgtcactcactggctgagtgaccttggacagggcgccaaacctgtttcctcatccgtaggatgggaatgataattgtgcacattttataggggtattggaaagatctatgggatggtgttcgtaggtagacatgtgctgggcacacaggaaacactcaatcatatgttagctagtattattattagctttgcgagcccaagcttgttatccaactttccgaagctgcagcagttccgtcgtccgtgtaatggggacaataattcctgggggtctgttcgtccggggtattcggagaggtggaagtaaagcacgggtcacgcaataggcaccggtggctgttgttaccgtttattcctgactctggggcagtgaggctggtcgcctggcccgagagcgactcagggaccagtcctggccttgcttgaatacaaacttgtctatgctcgggaagggagggggttgggagctcaggaaaccctaggcgcagggctctgggaaggagggagggggtcagagacttgagcgcggcaaatgtgtccgccctggtcgctctgtacgcgccaggggctccaagccagaaggggacgccgagcccccgacctctgactggcgggagaaccgggggagtggctgctcccgccggcccatggccaagcgcagacggctgccggcaggaaggagaggagggcacttttctgtaccgctgtcgcgagaaggtggag

SEQ ID NO: 108997 - DNA, 238 bp, Homo sapiens
  chr3:140950011-140950249
  hyper
tgggaagggcgactgcgcggggccacgacctccccgggtctctgcagaccgttggagacggagcagcagcgaggactagagcaacacaaggccggatgtgttctgagccggaagaggagtgtgggataggccgaaaggggtggggggtggggggtgacagtttgggtctacgtggcagcaggcgcaccccagacgcgcgcgcccacccggcgatagcatcagcggcgccagggcaggc

SEQ ID NO: 108998 - DNA, 176 bp, Homo sapiens
  chr3:140951286-140951462
  hyper
cggccgcaacttcgcggcctttcccggagacggggctggctcctcttggcagccacctgcagcctgacgcctccgggagtcccgggcctggccacggggccgcccgagcgcaggttaacattcctggatgcgcaggttaggaccgtgtggtgtagacccacgacgttgcttttgct

SEQ ID NO: 108999 - DNA, 110 bp, Homo sapiens
  chr3:141030360-141030470
  hyper
tggcgctgcccctgcgtccccatcatggaaactaccacctgctgcctaactgccagacgcaaaagtgcccaagcctgtctctcacgttccaccccataaaccttccccac

SEQ ID NO: 109000 - DNA, 103 bp, Homo sapiens
  chr3:141030521-141030624
  hyper
cgcacgcctctttcccacgccgcagagcgatagaacccgcaacaggaaaacggaaaggccgtgcgccggaagaacaggtagggactacgactcccagaagcct

SEQ ID NO: 109001 - DNA, 30 bp, Homo sapiens
  chr3:141121001-141121031
  hyper
ggcatggggccttacggggccctcacgggt

SEQ ID NO: 109002 - DNA, 31 bp, Homo sapiens; identical to SEQ ID NO: 2834
  chr3:141121566-141121597
  hyper

SEQ ID NO: 109003 - DNA, 30 bp, Homo sapiens
  chr3:141206333-141206363
  hyper
tcggtcgtggggagcggcctggacgcgggg

SEQ ID NO: 109004 - DNA, 512 bp, Homo sapiens
  chr3:141378761-141379273
  hyper
tgggtgatgcggggacgcggctccctgggaaatcgtgttagcggctccagggctggtccacggcggccttgggagcggcggcaacaggctggagcgtccacgcttcggaggcctctgtctccccaagattccccactgatgaacagggacgccggtccgccttcctcaacttcccctgttccctgccaggcagcgtccctcgcagcgacgttggctgcgacaagtttgacctgcagcgaggacaccaggatttctcagtttctccaaatccaagcccgagcccgagcccgagttccgaccagtcctgacactgcttcccgccgccacctgcctcctcctccagctcccgctgtctccccggcgccggcgccctgggtggccacagtccctccagcctccgcccctcgccgcagtctccagggcgccggacgccacgcgggcagccggcccgggacgcagggagagtgagagcgagtgagtgcgggcgcccggcggggcgggcaggggccgga

SEQ ID NO: 109005 - DNA, 30 bp, Homo sapiens; identical to SEQ ID NO: 39728
  chr3:141456867-141456897
  hyper

SEQ ID NO: 109006 - DNA, 79 bp, Homo sapiens
  chr3:141457300-141457379
  hyper
atgtggagctgggacgtggagtgcgatacgtgcgccatctgcagggtccaggtgatgggtaagcgctgcacgcgagtcc

SEQ ID NO: 109007 - DNA, 568 bp, Homo sapiens; identical to SEQ ID NO: 39730
  chr3:141516152-141516720
  hyper

SEQ ID NO: 109008 - DNA, 30 bp, Homo sapiens
  chr3:141594629-141594659
  hyper
gttaagagtaggagcgtctgggcaaaagct

SEQ ID NO: 109009 - DNA, 30 bp, Homo sapiens; identical to SEQ ID NO: 39731
  chr3:141868444-141868474
  hyper

SEQ ID NO: 109010 - DNA, 30 bp, Homo sapiens
  chr3:141943880-141943910
  hyper
aagaggcaagcgagcggcccaggtcataca

SEQ ID NO: 109011 - DNA, 231 bp, Homo sapiens
  chr3:141944303-141944534
  hyper
cccgcacgcctctccgctacagccgcctacccagagggcgcgctacaaatcccaatgctccagagtccccgggcggcccaacccgggccccaacccggctcagccggagagcctagagaggcctggcccctgccgccggctccaccccgacgccgtgacgccacgggcgcgcgccggcggccgcgcgggaggggtggaggtgagcgggtttgcgccgtgatctgcagcccc

SEQ ID NO: 109012 - DNA, 34 bp, Homo sapiens
  chr3:142166774-142166808
  hyper
ggggactcccatttcgatcgtcaacactaatccc

SEQ ID NO: 109013 - DNA, 30 bp, Homo sapiens; identical to SEQ ID NO: 39733
  chr3:142167042-142167072
  hyper

SEQ ID NO: 109014 - DNA, 30 bp, Homo sapiens; identical to SEQ ID NO: 2837
  chr3:142297280-142297310
  hyper

SEQ ID NO: 109015 - DNA, 30 bp, Homo sapiens; identical to SEQ ID NO: 39735
  chr3:142297722-142297752
  hyper

SEQ ID NO: 109016 - DNA, 30 bp, Homo sapiens
  chr3:142315551-142315581
  hyper
caggtgttaaatcgcgtatttacactgctt

SEQ ID NO: 109017 - DNA, 30 bp, Homo sapiens
  chr3:142442696-142442726
  hyper
aagggacgattgagcgaagtcttcctcaga

SEQ ID NO: 109018 - DNA, 837 bp, Homo sapiens
  chr3:142443117-142443954
  hyper
cggacgggcgcggaccggctcggccggggcgccggcggctggggaggggtcgctggccccggggccgcgcatgcgccgccaccaacttggggctgtcagtggagggcgagtgctggttctcaggggaggcgacgcccttcggggccaacgggcctcgagccgaggcagcagtgggaacgactcatcctttttccagccctggggcgtggctggggtcggggtcggggtcggggccggtgggggccccgcccccgtctcctggcctgcccccttcatgggccgcgatgatggcggccctgtacccgagcacggacctctcgggcgcctcctcctcctccctgccttcctctccatcctcttcctcgccgaacgaggtgatggcgctgaaggatgtgcgggaggtgaaggaggagaatacgctgaatgagaagcttttcttgctggcgtgcgacaagggtgagagttaggcccctttctcctctggacgcccctgtcctccagacctttagtcctctcccccgcctcaacttatatcggggcattccctctgtctcaggcgccgagtgtcttcccgcctcgcctgctgcctcaggcggtcttctcctcaccgcctctgccctgtgagtgtggagctggcgggagagtggagctggggctgcgccctcggagcgctgcaccgtcgggggtggctctggccttggggtccggggtttaggtagcgccttgggagccccgaccccagcgttttagcgccgcccttgctactgaccgcatgaatgacctggtcttctctctggctcgcagttcattccttccgggagtcgagaggctagtttc

SEQ ID NO: 109019 - DNA, 1030 bp, Homo sapiens
  chr3:142607213-142608243
  hyper
gagcggctccctaggcgccgcgccgctagggttgttccctagtttacgtctctgggcaaagcctctcggggaaggaaaaaaaacagcggtaaaccaaaatccacatatttgggccccagtgcttccctctggccccatagacacgaggagaggggagacacaagtcagattaagccccgccacgtggtggccaagccagctgcagggccatccggcaggccgggctggggacccaggagggagccccgcgagcaaggatgggtcccgaagtcccgggcttagcctacccgagggtggcggacgcctgcaccgcgcgggagcgcagggtcgagcgctgggtcacccaggcgcgccgaagcgggttgagtaaagcagcaggcgaggctgcaggggtggaggaagggaaaggagagaaagggagcccgggcaggggtcgcgttacctctctggggactgctgccgcgagagctgggtggcggcagccagcagcaggcagagtggcgcccaggcgttcgcgcccctcatggcagcgtagacgctcggggtttgcaccccacggcgcgcgcgccggcacacacgcccctccgcacccaccgcgctcacaccgccgctcacactggcagcagcgctggctcacaccggcgctcggctgcccgcgcgctccctctcacgcgcgcaccgccgcggggcggcccaggtagccgggggatacgcggccggcagggcggaggcacttttaaaggcgattatggtgccgtctgactcgacgcttagtttcccctgaggagctgctctggcagccacaggccactgctgaatatcccgtttgttctccggcggcaggaggggcggctccgaggccagagccgccccctctcgtggggcgggcgaacgtctcctcccggcaccccgggaccgacgggtcctctctcgtccagccctcagggaccccggggagaagaggaaccccttgcggagtggcaccccagcggcccgggccccgacgcccagagacgattctcagggaggg

SEQ ID NO: 109020 - DNA, 282 bp, Homo sapiens
  chr3:142681712-142681994
  hyper
ggtagaagaaggcggcgcgcagacgcagcgacaggcagctgaacacgtgcgccgtgcagctcatggcgaaggtcagcagcactcccgacgcgtagcaccacaacggtagcagccacgggtggtggaagggcacgtcgccgccgctcaggaagaacagacggcagaacttgctcaggaacagcagcagcgggatgaagtgcgtccagaagttgagcgtctcgttggtaggcttcagcaccgaggctaggcactcctgggccgtgcacggcagacgccggtagc

SEQ ID NO: 109021 - DNA, 1008 bp, Homo sapiens
  chr3:142682049-142683057
  hyper
cggcttggcagacgctggggggtcccgggaggcggcagagtgggagttccgggcggcccccgaagctgccggggccggggccggagggccttttgtgcccgcgccccggggctgcaggcgccgcggcatggtgcccggggctcggctagggcgcgcgcaggcgacctctggcgccggctcccgggcgctgggcagcccccgccggccgccgtcggagcctttgtgcccacgccgggggcgtcgctgcaggtttaggagaagacccgtgcctccgagcagccgctcctaaaaattaaataaatcaataagagaatcaattaataggcagcgctgcgaccgccaggagcgcggagcgcgcgaggctcagcggcttcctcgccaagcccctgctaccggcgcgcggccgcccgcgctgcggcagcggcggcggcgcggctgactgcggcggcagcgcggcagcggtgactgggcatcgcgcggtgcgggtgcctccgccgccgccgcccccggagcgggaggtggggatgtgcgagccgaggcgcggagggagggacgggcgcaccgaggaagggcgggggcctcccaggctagggtttcgcggccgcttcgggggatagagttgtcccctgtctcgagttccgtaccatccccctcctcgggccgccgcagcccgggccgccccgttaatgattgatgcgggggccgcaggctggtcggcgacgcggcggcgcgcgcgccgagtactagagtcggccctggggttcgaaacccgacagccacgcgggcgttctggaggacactggggagccgcgttcgcggggggcggggagctgcggctgcggggggaggggagggcgccggagccgggcagggcggagagatgcgccagcggtaatctccggaggtcgccggggaggggggcactccggaagtcggggggctttaagcccgcgtccggatcggggccgtgtcattgtcagctacctggggatgcgcctctcgctccct

SEQ ID NO: 109022 - DNA, 30 bp, Homo sapiens; identical to SEQ ID NO: 39741
  chr3:142720222-142720252
  hyper

SEQ ID NO: 109023 - DNA, 522 bp, Homo sapiens; identical to SEQ ID NO: 2840
  chr3:142837796-142838318
  hyper

SEQ ID NO: 109024 - DNA, 167 bp, Homo sapiens; identical to SEQ ID NO: 2841
  chr3:142838479-142838646
  hyper

SEQ ID NO: 109025 - DNA, 196 bp, Homo sapiens; identical to SEQ ID NO: 2842
  chr3:142838876-142839072
  hyper

SEQ ID NO: 109026 - DNA, 321 bp, Homo sapiens; identical to SEQ ID NO: 2843
  chr3:142839204-142839525
  hyper

SEQ ID NO: 109027 - DNA, 126 bp, Homo sapiens; identical to SEQ ID NO: 2844
  chr3:142839562-142839688
  hyper

SEQ ID NO: 109028 - DNA, 118 bp, Homo sapiens; identical to SEQ ID NO: 2845
  chr3:142839783-142839901
  hyper

SEQ ID NO: 109029 - DNA, 183 bp, Homo sapiens; identical to SEQ ID NO: 2846
  chr3:142839944-142840127
  hyper

SEQ ID NO: 109030 - DNA, 20 bp, Homo sapiens
  chr3:143566685-143566705
  hyper
tcattacaaaaacaaacagc

SEQ ID NO: 109031 - DNA, 198 bp, Homo sapiens
  chr3:143566766-143566964
  hyper
cgtgtgagaacatgactgtgacatttgctctcgtgacatggcaaatttcggcggcttgtctgtaaagagattagcattcgttacgctgcagcacctttcatcaaactaatgacatttcaatcagcacattttctccagtttcggtactttgctatctgagcacaagtctctaattacgctcaagcaacaagtttcaca

SEQ ID NO: 109032 - DNA, 30 bp, Homo sapiens; identical to SEQ ID NO: 39750
  chr3:143690478-143690508
  hyper

SEQ ID NO: 109033 - DNA, 30 bp, Homo sapiens
  chr3:143690913-143690943
  hyper
ccggagtcggagggcggggagctaggagga

SEQ ID NO: 109034 - DNA, 30 bp, Homo sapiens
  chr3:143692072-143692102
  hyper
tgtggatctttcaacgccagagggagtgcg

SEQ ID NO: 109035 - DNA, 171 bp, Homo sapiens
  chr3:145878028-145878199
  hyper
aacgagagacagcaccgggctcaagaaaagggtaggtaaggggagcagctgtgtgtccacagcttccccttcagatcccaaaggaagaaagctgccgcctggaggtactgggtagccaggcagccttactgaaaacaactaaggttttcgagcgagcgttgtttttggcaa

SEQ ID NO: 109036 - DNA, 884 bp, Homo sapiens
  chr3:145878416-145879300
  hyper
tctgcagggaaattcgggcacgctgagttcaccgagaactccaaggagtcaacgagggcgggtgcccctacacttccccagggaccagcgccgcccgaccgcaattctggggaagaccccggcggtcctggagaggagggacaggcccccactactcacctggccagccccgcggaagggctggtggatgaatgaactgcccccccgccggccgagcctcgcgggacagcggcggaccgcggggtgctcacctgtggggatgctcgagggcttctccgagtccgcacccagacagggattccaggggtggaggacgagcgccaggagcagcagctgaggcttcaccgtgcatccccccatattcggccctcgagggccgcgcgggctcaggcgcccacggccccgcagcgccgcgcttctcgcgagaacgcagagacccgggtccgccctgagccgccgattgcgggcgggagccggcgggcaaggcgcgcggccggcagccggagcggcgcgtaacgcagctgagtgaggtcgtcggtggaggcacggagcagcaggcgcccggggcgctgcggaggccttataggctccccgaggggaggcgacggggcgggccgcgccctggctattggccgccggctgacccgccgccgctgcgcgcccggtgcggtcgcctcagctcgccctcctgggccccacgtctggactgtttgctcagcgcggacgctatttaaggagctgcctgcggctacgtgtggaggctcacgcagcgcttctggctggaacggggaagcctgcacttagctttgggagtgggtttgggagagggaggaggagccgccgggagtctggcgggagggcggtgttcccgtctgggttcctct

SEQ ID NO: 109037 - DNA, 674 bp, Homo sapiens; identical to SEQ ID NO: 2850
  chr3:145968331-145969005
  hyper

SEQ ID NO: 109038 - DNA, 30 bp, Homo sapiens
  chr3:147072636-147072666
  hyper
ccgcgccgggcgggccggccgctcacaatg

SEQ ID NO: 109039 - DNA, 661 bp, Homo sapiens
  chr3:147073957-147074618
  hyper
tttggaggaagactgcgacagcttaggccaccggaaaatgacccagaagttcaacttctgcgctctccggggaggctgggtcagagctccagctcaaaaatgtcttaaatccgttcgggaagatcatctcgcactgaggccatttgacctggtgataccaggttgttagtaacgcttgatgtttggggagttcggcatatttgactctccctgcggctcctcctcctagcccacccccagcccccagatctgggccccttggaaacactctggcctccgcagaaaattttgaagaaaatgcaaagggagaactaatattgttttcctattattcgatttgcgttctctgggttcttaattccagcctttcctaggtgctattctgcgccaagaagagttaggttttgccaagcactcccacatccaggattcttgaccacacagagggatttagaaaacagaaaactcgttaattttgagcgattttttggaaaaaaagttgggtgggaaggggacgggtgctgcactaggaagaatcaagaatggaccggccttgccccgatgcaatcggcttcctaggatgggatggggggtaggggattgcatttctttaacccagatccacgtgcctccccacctgccccggcgctgggcggttaat

SEQ ID NO: 109040 - DNA, 261 bp, Homo sapiens
  chr3:147074974-147075235
  hyper
gattgggctgtctggcgcggcttccaattccagtcttttccgccaggcgcggctccagtttagaccgcggcggtggtctaaattcttcgcctaaggaaccaccgcctaaggaacgatttgccatcggatttgtcctcggcaaatgtctcaccaagctgtagatggatgaatggatagatacatgataggtagatcgatcgatagatagttagagaggtagacagacggatagatccccgaagcttgcggataaatgttctg

SEQ ID NO: 109041 - DNA, 271 bp, Homo sapiens; identical to SEQ ID NO: 39756
  chr3:147077094-147077365
  hyper

SEQ ID NO: 109042 - DNA, 182 bp, Homo sapiens
  chr3:147079013-147079195
  hyper
ggtctctacaagcctttcaagcgccttcaactttggcggcggcagcagcaggttgcgttgccatggatactgtactgtatggctgtggcggcggccacggcggccgcagctcgaatcccctaaacaatgccgagccaagtgcaggtttctcgcccttttccgtgcacttttctcttctaatg

SEQ ID NO: 109043 - DNA, 42 bp, Homo sapiens
  chr3:147079785-147079827
  hyper
cactgccaaaccctccgctagggggcgcgagaggaggtttac

SEQ ID NO: 109044 - DNA, 1077 bp, Homo sapiens
  chr3:147086644-147087721
  hyper
tggtgaataggcagtgtcacacggtagcatgctctcttgtcaagaccgattgtgttttaggcaaacatttgcgcaaacataaaggcaaaggtcaaggactgttcagtcccagtatgtgctaattcacctagcgaaccaatggggcaaaagttgcattttatatgctcgcccccgccagacccaaagcaggagtcgctcctgctaatgaacaaaatcgcctctgatcagctcccttgtcaatttctcttcggctctctgatccatttctctgggcttcctcagaaatacaactggtaaagacgtgtttgccaacatctggatcagctccgcccaatttctggggcagcacatgtttattccacgtttctggtagcagaaagctaataataataaataaaatctagcttgctgcagacgcttgcaggtactcaaatgaaggattgctcattgctggcgtctgaatatccatgccatgcagaaaaacaatattatttaaacctcagaatcgaatctcaaagctgcaggttagtggcaggaaagtgcatttgtaacacacgtttgtggaaatgtggtatgcgcgcgcactgggagccgcgtttctttgggacacttccctacgttcagcgaatacagggcatcactttccagtgaaatatgcctcccccaccaatatatctacaccgtctcccacagataatgccagttatttttccagcccctaaaaaaaaatacaaatgatttcaagtggatgtcaacttgagcaactcggaagtggaatatttttagggttaaacaaacgtgcgcacgcaccaaccggtagggtttactctgcatcaatagtcatttggcaagaaccaatggctgagtttttgcaaatcgtccatttaaaggaatagtttttttcccttgataaaccccagagtcgcagctgtgcgcatccacaggcaagtagtttacacgtgcaaaattcattcctgagtcaggcgagccacaggctcagctgcggcgcggtgcggcgcttgcctggggctagagagtccacgacttgttgcctctgcgacccgaaagcggctctcc

SEQ ID NO: 109045 - DNA, 516 bp, Homo sapiens
  chr3:147088251-147088767
  hyper
gtgtgcgcgcgcgcgcgtgtgcggatgtgggcagttagttgcttttaaaaagacatcgttgtccttcagagtaataaaagtgtagcccccatctttgggtgtggggattttacatgcacttctcatttcagttaacttttttcgagctgagaaaagctgctagcttactttcgggagactttgctcgttattcatctgtttagtcgcctcagaggcacaaaagcggatctgcggcgttatgaaaaatggcctgggcgcggagaatgtcacagtggtcggcgtattattttagcccttcttaaaaaaaaaaaaaaaaaaaaaaaaaaaaaaaaaaaaaaactcagggaaagtttgcttttgatgaattcaataaaagcaaagctgcaacggaagagattttcagctaaaattatacagcatggggcagagtttaaaacagccagatggccaaaggtagagggaccctctcggtttcaaaccccagatatagaattccaccggcgagcctcttagttt

SEQ ID NO: 109046 - DNA, 325 bp, Homo sapiens
  chr3:147088980-147089305
  hyper
gcctgaggcggtaggcgggttcattgcaggccaccattcggttccaggttcaaatcccgcagcctttgacctctcaggccacctgtggcttttgaatataaggacgaatatattcattccaacccctcccattccgtaccacaactggggaaaactagaagagcctggtcactctcaaccttgccccctcatggatccttccctctcctgtaatcgcaactgcagagccttgttattcccggtaaattcatcagcacttctccccataattttcttaggaatgaggaacacacaaactgaggtgatcaccgtggcttcccagact

SEQ ID NO: 109047 - DNA, 432 bp, Homo sapiens
  chr3:147095402-147095834
  hyper
cgaaaggtgggccatcgctaaagttggaccatcgctatgttcaggtagccaactctttctttgaaagagtgggcagatgagtcccagatctactgaaccggactcctgaagtccttaccatagaatcttgctctaacttgcctctttctgctgggtgttttgcgacccagctggccacgctgctcacgctcctatcaccctcaggcaaagctagcgcccctctcccgtcaaggatcaggcaagtcggtattgctggcggacagacaggcagcttgaagggcttgagctccaagatgcgatcactgaccccctttcttgcctttcattggcgtgagtcatccttctattttgcattagaacctattctcacattaccaccaggaattgccccaccacctatccctagcccaggagaggcgggggcctaagtaa

SEQ ID NO: 109048 - DNA, 30 bp, Homo sapiens
  chr3:147096059-147096089
  hyper
cgccgtttccctggacgactgtggctggga

SEQ ID NO: 109049 - DNA, 30 bp, Homo sapiens
  chr3:147097547-147097577
  hyper
cagaggttgcttctccgcccagtataaaat

SEQ ID NO: 109050 - DNA, 540 bp, Homo sapiens
  chr3:147098147-147098687
  hyper
cgtgaaacgctgaagcgtgatagcgccagttggccaggacgcgccccttttgttttcgggggacgatttatgtcctttataaaaatgtggtttggaaaaatagaaagggccttgaaaacgttgttacaatgaaaaagggacaaattagaagacattttccgtgatcaaaggagagcgggagagagcgcatgggcattcacaaagcttgacttattcacttccctcctttgcaagccagggcaacaagcgtgtcccccattgacaaggagccctattcagactgcaggtgcgaagtgggccggcgcgcccgaccacattatgtcaaggttgttggagattagtgttcagccctaataactaaagcgcttgatttacattggaaaaaagccccctcagccgtgaaaacaaaatctttgaacgcgtgatcattgcgagggcggctgatatcctaatacgtgcattgttctcggcctggcccaggcgcgccccggcctccttaggaagggcaaggcctgggctgctggccgtggaccaggtccc

SEQ ID NO: 109051 - DNA, 30 bp, Homo sapiens
  chr3:147102427-147102457
  hyper
tcctgggcgccctctcgtgcaaggctttcc

SEQ ID NO: 109052 - DNA, 203 bp, Homo sapiens
  chr3:147102662-147102865
  hyper
gtttctcaaagaggccgggtcgaggagaggcccctctaacctgtccgcgagacggaggaagggggccctttcgcgaaatgaacgggagggggcgctaactccagtgttaatgcccagggacctcctttctcagggacatgtcttggtttcccctcatggcctcctttatcacacctgcgcgtctctcgcgcgccgggatcctt

SEQ ID NO: 109053 - DNA, 97 bp, Homo sapiens; identical to SEQ ID NO: 39763
  chr3:147105107-147105204
  hyper

SEQ ID NO: 109054 - DNA, 30 bp, Homo sapiens; identical to SEQ ID NO: 39764
  chr3:147105636-147105666
  hyper

SEQ ID NO: 109055 - DNA, 290 bp, Homo sapiens; identical to SEQ ID NO: 39765
  chr3:147105884-147106174
  hyper

SEQ ID NO: 109056 - DNA, 103 bp, Homo sapiens; identical to SEQ ID NO: 39766
  chr3:147106207-147106310
  hyper

SEQ ID NO: 109057 - DNA, 130 bp, Homo sapiens; identical to SEQ ID NO: 39767
  chr3:147107634-147107764
  hyper

SEQ ID NO: 109058 - DNA, 30 bp, Homo sapiens; identical to SEQ ID NO: 39768
  chr3:147108234-147108264
  hyper

SEQ ID NO: 109059 - DNA, 961 bp, Homo sapiens
  chr3:147108610-147109571
  hyper
ccctaataccggaggcggcggcggcagcagcagggccaggtggtagctcggggctgaggatcgcggcgggggcagccgctatggggcccaagccctgacacacgtaccattcgctcaagtcggcggtacgcgccgccaccgccgccgaggaggccacctgggacttgtggccgcagtccgacgagggcgacacgagggcagacggtgtagccgaatcgtagccagagctgggcggcggcgagcgcccgtgcaccttcatgtgcttacgcagcgagctggggtgcgtgtagcacttgtcgcagccccgcaccttgcacgtgtatggcttgtcgctagtgtgcacgtgcgaatgcttcttacggtcgctgctgttggcgaagcgccgctcgcagccctcgaactcgcatctgaagggcttctcgcctggcggaggcaacgcagagacattagtgcttgtgggtcgtgttcccgtcaggtgcttgccaccctcccccattcgtctctcattttctggaaaagaactacaaaatattttcagaaatccctttccacggcgcctcaggtcgagcacccctttccctcgtgcagagagcgcccccggtgccctctcttgaacgcctccatccctcccgccttcctcctctgggctcatggggagggtatggaggaggagcgacagtgactccatcttagtcgagtttccatcctcgaaaatcctgatccactcgggttgtttcctccaaattttctccacttggaaccagaagcacctctgctcggaaatacattaacggaggagctcacaatatagttaacggggaagctcacatctgctcgatttaaagttgctgtttcagactaacttctctgccgctaccccgcccagccgttcatcccccccacccacccccatcctggcccaaattgtttcctaaagtaggttttgcgcaaacgccaaagc

SEQ ID NO: 109060 - DNA, 104 bp, Homo sapiens; identical to SEQ ID NO: 39770
  chr3:147110010-147110114
  hyper

SEQ ID NO: 109061 - DNA, 454 bp, Homo sapiens; identical to SEQ ID NO: 2858
  chr3:147110228-147110682
  hyper

SEQ ID NO: 109062 - DNA, 305 bp, Homo sapiens
  chr3:147110994-147111299
  hyper
caaaaacaattatttcgctccagacgaggagcagaggagaaaacagcagtgcactgagtgataccggcagccgggaagttcgcaggcccctaggaggccaggtgaggccgcgccccagcttgctccggagctgcaggaggcgccctggtctctgcgcttgacatcacccccgccccccgccaacacccggcctccagtccttccccctccctccagctccctgcactgcgccctgggtgggtgggtgaatgtgaagaggcggcgttgggctaggcccctgcagcccgctcggagcgtcctaggcc

SEQ ID NO: 109063 - DNA, 98 bp, Homo sapiens
  chr3:147111702-147111800
  hyper
gccttcaaagccaggccccggattcaggtcagggagaatctcagctcctgagaaatttgctcctgtttgccgcttctgctactcgaggaaatgaaacg

SEQ ID NO: 109064 - DNA, 657 bp, Homo sapiens
  chr3:147112048-147112705
  hyper
tcccccaccccccaccgctaatgaatcaggaccgcgaaccgaaagaacgcacaaaattctgtcctgaaaacacgaaaacctgagccagccgtggcgcactgaacttgcttctctgctgtaggtcgactgtgctaagaatttaaccattttctgcttcacagaattcaaacagtgggccggcaaagagctgtaaaagtttgtttgtttaaaaaaaaaaaaaaaaaaaccctgtcattaaagatgagttccttctccagctcaggactgcgagtctaccttccgggtgtccgccgccagctcccggagtagcaggcctggggccaggattccagtgtgacctaccgccccttcccgaagctaaaacctctggtgagggggtgagatccatgcgacattgtgggaaaccctgaaaagaactcagggaaaccgtacacttccagacaagctttagaaataaagtgccaggctccaagtggactttggtctggtctccgcatgtgccagtgtccgggccatggaccttccccgggaagggagagtttggggagaagataggcgttagaacaactagccttaggaagttctttgactccaacaattgtcgatgttccagcaagaataggggcgagtaaggcaaggcaccgggcagtaggagaa

SEQ ID NO: 109065 - DNA, 14 bp, Homo sapiens
  chr3:147125098-147125112
  hyper
aaagggcagtcccg

SEQ ID NO: 109066 - DNA, 30 bp, Homo sapiens
  chr3:147125516-147125546
  hyper
gagaaatgcaaccttcgtccccacaacccc

SEQ ID NO: 109067 - DNA, 31 bp, Homo sapiens; identical to SEQ ID NO: 2860
  chr3:147131373-147131404
  hyper

SEQ ID NO: 109068 - DNA, 42 bp, Homo sapiens; identical to SEQ ID NO: 39775
  chr3:147136958-147137000
  hyper

SEQ ID NO: 109069 - DNA, 295 bp, Homo sapiens
  chr3:147137075-147137370
  hyper
cgcgggctagagagagaaccaagcagaggctccggcctgtgaaagtcgctggctaggctcccaaaatagtgcggcggggtagctgcacgtgtttgttttcaaaccgcgctggtttaagtgagttcacactgcggagccgacagcagagggtagagcaacctggggctgctgccattggaacggcgagttgagcgggcctgtcagggcctctccgccgagggccgggggctgcatggtgctcgagccccagccggccacaccccagtgcatcgggtggctgggcttccagtttaca

SEQ ID NO: 109070 - DNA, 10 bp, Homo sapiens
  chr3:147137428-147137438
  hyper
cggctgttct

SEQ ID NO: 109071 - DNA, 591 bp, Homo sapiens
  chr3:147138407-147138998
  hyper
tcctacccaaactcccgagtctccgagctcaataacgcaaggatggctgaagagcgtctgctccatgtctctttgccggactcaacgaccctcacccactgccaccgagtgctaggcccacagaggcctggcagaagccactcacccctcactactcatgactaggaagaaagtggccggggcatgagggttcgagttctgtcctaggtcccggaagccagggctcccagcgtctagtcaggggcgcagaaaccctcgttcctccaaacccccgccacagggaccactccagaagaaacccattcgtgatttgggtccctttgtgtttgagtattgtggggagtgggctatctagactctaaggactccaagctaacgatgacctgtgtgggccttgctctgaacagaaaactcaaactcagcgtgggttcccgcgtcttccccaaaaggccaaggcccaaagaacccttttcatttggcgaggggcttgaggaagggaggggctggggcgggagagggtcggggtctgcaagccagcggcccggcgcagcggacttgtccggctgctcagcttggcagctagcgtccgtg

SEQ ID NO: 109072 - DNA, 199 bp, Homo sapiens
  chr3:147139250-147139449
  hyper
cgtagacctccccaaattgcccgtctccggtatgactgaatctgtctgctggcctctcagctaccaactctgcccgaaatctagatcccagacctggtaagtcgcgttcctcccctaccccgccccgccaccttactagcggactctgcccgcgacagcgtgcgcgcgcgtggcctgaggcgcgcgctgagaagttggg

SEQ ID NO: 109073 - DNA, 30 bp, Homo sapiens
  chr3:147140128-147140158
  hyper
cgggcagttcgttaacgaggatttgataca

SEQ ID NO: 109074 - DNA, 163 bp, Homo sapiens; identical to SEQ ID NO: 2862
  chr3:147141097-147141260
  hyper

SEQ ID NO: 109075 - DNA, 30 bp, Homo sapiens; identical to SEQ ID NO: 39779
  chr3:147141589-147141619
  hyper

SEQ ID NO: 109076 - DNA, 15 bp, Homo sapiens
  chr3:147142382-147142397
  hyper
cgcccggcgtgggca

SEQ ID NO: 109077 - DNA, 412 bp, Homo sapiens
  chr3:148415427-148415839
  hyper
cctgtacccccagctcgctctccctcacgacccctcgctaggcggggttcgggaccaggtgaacgctgatctgatagttgacacgggacgactgtggcatcatccttgctgccgtcaatatcccgagagggaggaggttgggccgggagggtctcccggggcggggcggaggaggagggaatgcaaaacagagcctcgtccccggaacccaagaagcagcaacgcccctcactataaattcggagctgcctcctcgccaatgattccagcgcctgacagccaggaccccaggcagcagcgagtgacaggacgtctggaccggcgcgccgctagcagctctgccgggccgcggcggtgatcgatggggagcggctggagcggacccagcgagtgagggcgcacagccgggacg

SEQ ID NO: 109078 - DNA, 65 bp, Homo sapiens; identical to SEQ ID NO: 39781
  chr3:148415861-148415926
  hyper

SEQ ID NO: 109079 - DNA, 30 bp, Homo sapiens
  chr3:148708914-148708944
  hyper
aagcgtaaattttacgtttcattcaagcag

SEQ ID NO: 109080 - DNA, 30 bp, Homo sapiens
  chr3:148709338-148709368
  hyper
ctcctcgctggccgcgctccctcccggtgc

SEQ ID NO: 109081 - DNA, 215 bp, Homo sapiens
  chr3:148709992-148710207
  hyper
cccgggcgcgagccccgtctggtgggagggcgccggctttggcttcacttgttgcgaggcgtccgggccactccacgagttagccccagcactgggaagctccgagttagctggtccttccgtgtcattgaggctaatagccagggttattacagcagttgaactgccacaaagattgcaggtgtaacccagagttcagccgtctttaggaagat

SEQ ID NO: 109082 - DNA, 743 bp, Homo sapiens
  chr3:148803821-148804564
  hyper
tttgttaaataaagcactggccgagatgctttaagccccaggccccccacagtcggtgacagagatttcccaagtccctaacacgggactcgccctaggagcccctactcgccagcgaagacaatgcatttatttctccggcggccacatatgcgaccaacagaacgaatacagctgcacaaatcgcccagggaacgcagaggaacgcggggaaggtcaggttcatttggggacgcctccaggccgttagaccgagcgccccaccccctccgcccccttcacctcttgaacatccaggacatggcgctgagtgggatgacaagaggagcgcctcggctcccctggatcgttttcgagccgcctcgatacgcctccttccaggccccgcagccctgaagccggggacaaattccgagcgccggatcaggagcgcacgactgaaaggtaagtcgccgcgagtccagtcagacgtcgacgccgtctccttctgcaacaatctgggagaccagcgtcgctctgtgactggcactaggaaagcccaatcacgaagaggagagtgcggagccaaaccagtcagagcacagaagggagggcaactccgccccgctgccattcaaagacggcggggggtccgggctgcaagggtggttccatccgggttcttccccgcccccaaggcgggcgcgcgggaaagccacgaggccccaggagtgcgactgcggtgcctgcggtgccggtgtttt

SEQ ID NO: 109083 - DNA, 30 bp, Homo sapiens
  chr3:148847119-148847149
  hyper
atgaattgtcagaacgtactcaaaagccaa

SEQ ID NO: 109084 - DNA, 30 bp, Homo sapiens
  chr3:148847588-148847618
  hyper
ggcggggggcgtgacgcgcttttcgtggcg

SEQ ID NO: 109085 - DNA, 1292 bp, Homo sapiens
  chr3:149375045-149376337
  hyper
ttgctgcccaggcggcgggagcggagggggcgccgaggccggattcatcttctgcaaaaagaaggtcagatcagccttttatttaaagtcggaggaagtgggtaagagggttacagggtgagagggcgagatggtgggagaaagaatagagggaaaaggaaacgaggagacagataattgcccgcctggagatcccagacactcagcggtaagaccagcaggatgggggaggggtccctcctggcctcgagaattatgcaactttcttgaagcaaagaagttgcctggaggaggagaagatagggcgaggggtggagggaataactgcactcggggcttgctgaaccgcaggatggcaaaggaaaggtcgcacgattccaggacaggcagccccccgaaagaagttcagcccgagccaactccaccacgtctcgactccggaagcccgaggagcctggagccctggagtggtgccggatgagcgcgcgagctccagcgggcactacctgggcgggcagcgaagctgagcctgagcgcgcggcggccgccgtcccgcccgaacttgccgtcgggcctgggtcgctcgggtgagtcccgagattgcggagctggagccgaggcttggctgacaaatcccgacccgactctgtgcctggcagtctaagggcttcggctctcacatcccccgagctggcctaaggcgctagtgctgggcgaaaaggaggcgcaggagaagcagacagcgcggccgcagcagctcccggactgtcccataaacaaagtttggagcaaactcccacccccaggaaagaggcgggcccgaaagttgagctgttgaattatgtatgacctcctagtccctagccggccagcccccgctcgcccctcctcttcctcctcctcctcctcccacctcggctccagaaaaccctgggcgtgatgggtactttactgggtaagaggagacgggtgccccccacccactcctcccggccgcgcggacctctcccgctcagacctgcatctgcattcctttgagtttaccacggacttggggcgggatcaaagggaaagtggcctgagcctgtttcatcaaggggttgtggaccgaaaccaaggccgggggtggcggagggcacgcggatgaggggctcaggcctaggaagggccggtcctggacaccgcgccctcccctgcagccaggcgccgaggcctgcagcacccggagcgccgcactgacccgcgattctgcccgaaggccggcccgggtgcgccccggcgcggggagacac

SEQ ID NO: 109086 - DNA, 30 bp, Homo sapiens; identical to SEQ ID NO: 39785
  chr3:149376657-149376687
  hyper

SEQ ID NO: 109087 - DNA, 30 bp, Homo sapiens
  chr3:149470360-149470390
  hyper
gcgttacactcggacgttccctgcagcgca

SEQ ID NO: 109088 - DNA, 30 bp, Homo sapiens
  chr3:149530972-149531002
  hyper
tgaggcgcgtggggcgggacttccgcttcg

SEQ ID NO: 109089 - DNA, 162 bp, Homo sapiens
  chr3:149687758-149687920
  hyper
taactggggataaccgtatatcgatgaatctccatatgagaagagaaatcaatggcagttcgccatcttggagaatttaaaaaaaaaaaaaaaacaacctatagagctagagctgaagtcgagattcacgaatccacctacgcggtcggcgtacatctctcg

SEQ ID NO: 109090 - DNA, 30 bp, Homo sapiens
  chr3:149688568-149688598
  hyper
gtagccgacaatggcggcctcctggcagca

SEQ ID NO: 109091 - DNA, 373 bp, Homo sapiens
  chr3:149689310-149689683
  hyper
ctggtgacgggatgcggagcgtttcctcctttttgttgtgggggcggctggtggcaggggcagctggtggcagggttgcccacgctaatctccgagtctctaagggcaccgtctttcctggatccctcttgcgcctcgtccataaaggcagacccgcgggcgcgcgccggcaacctgaaatcagagcaggcgtccgtggcgctcaggaaccttgctgagcttcgccgatctttcattgttgcttcatttgggtaccaagggcctctcattctgtggattctttgcctggaggagcccccttaatgttgctaatcacgtgtggttaaattgctcgtaaattccgaacaaaacaaatagcgacctgtgttacact

SEQ ID NO: 109092 - DNA, 30 bp, Homo sapiens
  chr3:149902007-149902037
  hyper
tcctgggtggtggacggcgacgtccttgtc

SEQ ID NO: 109093 - DNA, 30 bp, Homo sapiens
  chr3:150126170-150126200
  hyper
ggagctgcagccgccgcttcagcagtttga

SEQ ID NO: 109094 - DNA, 55 bp, Homo sapiens
  chr3:150126520-150126575
  hyper
ccaccgcccgcccgcggaccttcagccagctccggcccgcggctcccggctgaat

SEQ ID NO: 109095 - DNA, 30 bp, Homo sapiens
  chr3:150127757-150127787
  hyper
ttttgaccagactgcggagcgggacagcgg

SEQ ID NO: 109096 - DNA, 30 bp, Homo sapiens
  chr3:150128664-150128694
  hyper
cctgcagccgtgcccgctccaagcgtgcct

SEQ ID NO: 109097 - DNA, 30 bp, Homo sapiens
  chr3:150263338-150263368
  hyper
taatttggttcagacgaaacagaattatgt

SEQ ID NO: 109098 - DNA, 358 bp, Homo sapiens
  chr3:150264351-150264709
  hyper
ctggagaaggagggcgaaagcaggcgcaccctcccaagctctgtcaagcgtcgccctagatttgcgcgtgcgcgtttgggcgccttttccgcgtcactccgtaaccggaagtgaattggccccgaggctgatggctccggaaacaccaattcgctgtctccacgcatgaggagacgtgtaggggccgggttcggccctggtgaactctcacccgagcggtttctctttccgggacaacatggcgccgtccacgccgctcttgacaggtgagttctgaagaagcgagggactctctttcttcagactagtttcttatttttgtctttgcctttgagaactacccgaggagccggggagt

SEQ ID NO: 109099 - DNA, 228 bp, Homo sapiens
  chr3:150320965-150321193
  hyper
acagtgaaacaggtcggctcttcactccaggagtgtgcgcgggcgccgggccgcgcaggcgcattactgctcccctcccccgaccttggctgatcgcgcctgcgcagtggggagcagctcgctcctgggctttgggctggctgcagtctgtctgagggcggccgaagtggctggctcatttaagatgaggcttctgctgcttctcctagtggcggcgtctgcgatggt

SEQ ID NO: 109100 - DNA, 349 bp, Homo sapiens
  chr3:150421684-150422033
  hyper
tggctggcgggaggcgggattacagccagctctttggccgcggccccggtcggctctcgcgagcgcgagcctctgttgtgcgttggtctccccgggcaactgcttgccctgcgccaccgagcctcccggatttaaagcggcaggagctggttagccggatagaatgtgggtgccgagggccggtgggggccaccgcagacttctttctgtccctgctcttcagcgtctctgaaacccctggcagcctgcggagaaacgatcttttcttcgtctctcagcttatttggggcctttttttttttttttaacttgggtggaggaagtggcttctagcgacggacacacacgg

SEQ ID NO: 109101 - DNA, 30 bp, Homo sapiens; identical to SEQ ID NO: 39790
  chr3:150479745-150479775
  hyper

SEQ ID NO: 109102 - DNA, 30 bp, Homo sapiens; identical to SEQ ID NO: 2870
  chr3:150480265-150480295
  hyper

SEQ ID NO: 109103 - DNA, 30 bp, Homo sapiens; identical to SEQ ID NO: 39792
  chr3:150481111-150481141
  hyper

SEQ ID NO: 109104 - DNA, 287 bp, Homo sapiens
  chr3:150481641-150481928
  hyper
ggctcgtatagcaggccgaggagggagctcatgggcagcgttggctaagagttcgagatcatctagaaatgtcagaaacgtaggttgggtcgtgaggtctctgaagacagtgggtgaaactccagtgtaaggcgctgcgtccgcttggtagagagccggccgaagtccgagtctttgttgcgaggcgtagggccaccctgcgcgcccagcagaagcgctagagggcacggttgcccggggtgaaccgcatgtccaaatgtaactgtgtgctccgagttaaaattgtt

SEQ ID NO: 109105 - DNA, 31 bp, Homo sapiens
  chr3:150505713-150505744
  hyper
ctggtgcagctgcaggcggtgccaccactag

SEQ ID NO: 109106 - DNA, 197 bp, Homo sapiens; identical to SEQ ID NO: 39794
  chr3:150802802-150802999
  hyper

SEQ ID NO: 109107 - DNA, 1870 bp, Homo sapiens; identical to SEQ ID NO: 2872
  chr3:150803025-150804895
  hyper

SEQ ID NO: 109108 - DNA, 252 bp, Homo sapiens; identical to SEQ ID NO: 2873
  chr3:150804936-150805188
  hyper

SEQ ID NO: 109109 - DNA, 38 bp, Homo sapiens; identical to SEQ ID NO: 39797
  chr3:151556891-151556929
  hyper

SEQ ID NO: 109110 - DNA, 109 bp, Homo sapiens
  chr3:151986595-151986704
  hyper
cattaggagctcgacgagtccgccctgggcttcctggtggggctgggcgggcgggggaggggccgcgcagcagcagcggaagccagacctcggcgataagaggctgcac

SEQ ID NO: 109111 - DNA, 30 bp, Homo sapiens; identical to SEQ ID NO: 39799
  chr3:151987529-151987559
  hyper

SEQ ID NO: 109112 - DNA, 175 bp, Homo sapiens
  chr3:152016857-152017032
  hyper
agcatagtaatgaacgtctgacaggcgcgacctttcataagacaacccacactattggctttctgcccagaatattgctgcaacactatctgtgattggttatctctctatcatgcattgcttcacaaggggaaacggcccctttttttaataaatctacgatggctggctgcaa

SEQ ID NO: 109113 - DNA, 1426 bp, Homo sapiens; identical to SEQ ID NO: 39800
  chr3:152552394-152553820
  hyper

SEQ ID NO: 109114 - DNA, 30 bp, Homo sapiens
  chr3:152878601-152878631
  hyper
gcacctcccgggagcgccagcccagccaag

SEQ ID NO: 109115 - DNA, 30 bp, Homo sapiens; identical to SEQ ID NO: 2875
  chr3:152878836-152878866
  hyper

SEQ ID NO: 109116 - DNA, 187 bp, Homo sapiens
  chr3:152879614-152879801
  hyper
ggctgagtgaatggcgtccttgggcctttgataacgggagttggcaagaccacagcctactccatccctgaggcggcccgccgcgcccacgtgcttctcgcagagccgccgcccttgtccaccactcccacagctgtaaaataaagcggcctgcatgcttcctacagcgctttcctcgctcccatat

SEQ ID NO: 109117 - DNA, 1 bp, Homo sapiens
  chr3:152879855-152879856
  hyper
c

SEQ ID NO: 109118 - DNA, 33 bp, Homo sapiens
  chr3:152880083-152880116
  hyper
cgcgcgtcccggcccgacgcgcaattagcagcc

SEQ ID NO: 109119 - DNA, 30 bp, Homo sapiens
  chr3:152880967-152880997
  hyper
gcagatgaactacgcggcgcagcccaacgg

SEQ ID NO: 109120 - DNA, 1179 bp, Homo sapiens; identical to SEQ ID NO: 2877
  chr3:153838773-153839952
  hyper

SEQ ID NO: 109121 - DNA, 174 bp, Homo sapiens; identical to SEQ ID NO: 2878
  chr3:153840317-153840491
  hyper

SEQ ID NO: 109122 - DNA, 326 bp, Homo sapiens
  chr3:154042064-154042390
  hyper
tcgaccaccccctccgccgccgccgcctcctccggagcctcggttacctccatgaccccctgctggcccccctccatagcccccaccggagctgcggggacccccatcacggccccagttctgatggtagtcataactcattgtcctggcagactacaacccgtcagaaccagcaaccgctggaaatggcgtccgggcccggaagccactgtgcgcccacttccgttttgcttccgtagcaccgcacaagagggcgggccatttagcgtcacaagcagtggtttctggtgacgtcacgggaggacgaccccggtggtctggagggt

SEQ ID NO: 109123 - DNA, 686 bp, Homo sapiens
  chr3:154145708-154146394
  hyper
tgagtgccggatctgcgcccgctgcctattcaagactccaccagaaaggcacagtctacaacgtgggggacgctagctaggaaacaggcgtccgtgaaacccgcatctgattctccgaatggcctttgtcgcctccctggaccctcacctccgcccatgcgcgctcgtcacagtggggcgccactctgccacctcttaatcggcttcctcctggaaggaggaacaaaagcctgttttgttccctgtcttctccctccacaactgatctctcctcccctctatcccgccctgctggagatgggcgtcgtcctctctaggcgggaatggaacggcgagaaagggatgacagaaggttgtggggaaaaaaccttttaattccctctttccttttctgaatactctctgattttgctgtgtgagacaatatccttggccaccaccgatatggaaaactaagtcgctcgcgacggaaagcgatccccatgcccctgacttttgaaaggagaagcatttagtagtaaaggtttcgcagccaactagccctgtcccgaactgccttcttctaagtgcatgtctaaaacccagcgagatacacttggaagcggacttcactgtgtgtctcttggtgactccccaaaccggcgacgccggtcccaacactcatttacactgtctggcacacacac

SEQ ID NO: 109124 - DNA, 497 bp, Homo sapiens; identical to SEQ ID NO: 2882
  chr3:154146488-154146985
  hyper

SEQ ID NO: 109125 - DNA, 671 bp, Homo sapiens
  chr3:154797106-154797777
  hyper
aagcattatagtctccggtccacaggggagagatggagccccctcaggactagagaatcccgaagagcccgtgtattgttttcttgaaagccccgaagctaagcaattctaaaaatgtttagcaaagcccttttgggaatggtgagatggggggtggggaggatgggacattttcattgccaccgcccgccccccgtctccccggccccctcacatgaagtgactggatttgggagacctagcggaaaccttcaggtcacccagggaactgctcctctctctggtcctgcagcggcgaggcggggtagggggtggggggggtgggccgtgagagcgccgagacgcgcggggcgcggagatgtgcaagtggcgaagcttgaccgagagcaggctggagcagccgcccaactcctggcgcgggatctgctgaggggtcacggtgagtctctgtgggtgcgggtcggagggatgcccaggtgcctcgtcgccccacggcccgggcggaggcgggtccggaacctcccccaagtccggcctcagcctggagcccgcgcgccttgggcggatgcacggactgagaggcgcttggctgggctctcagcccgccactgccacccggccccgtgcgctcattggtcgggatgtgtcggctcagcagcctccaacttctc

SEQ ID NO: 109126 - DNA, 363 bp, Homo sapiens
  chr3:154797835-154798198
  hyper
cgagcgcccagggcgctgggagcccgtgggacgggcacggggagggcagagccagccgaggggagcggctgccgggaggtgcgctgagcagggtccgcagctaaggtccagcgcgatccgagcgcccaggaccctgcggccgtggaggaggcgtgccctgggaaggagccgctactgggacctgaagagtgaggggagggagaggggcccagagggtgacctggaggagggctctggaagtcacgtcaggttggctcttcaggttcatttccatagttccctgcggcctctgccttggggagttatgttttgttaccgagatccgcgctaccagattgcaccggggctgatttgggggctggg

SEQ ID NO: 109127 - DNA, 1287 bp, Homo sapiens
  chr3:155461743-155463030
  hyper
ccattttcttctgtccgtgatcaaaacggtaacaagggaagggaaaagttgggtttttttttttaatttagttggttattgctttaatgctgaactctcaacgtcaaaatgtgatcacaaattgattcgcagaaggaaacaaatagaaaaagcctcgggaaggaggggagagggcgtcgcagacgctcaacagggaactgggtttaggggctcgcggggtggcgtctcggacccgcagctcagtcgccaaggaaacgccgcgcaggcgcagagcgtgccgccgcggggccggggtttgcctccaccaccccgcgccgctcgggcgctcttggttcttcccaggaaagggcaatggagtatatcctcctcgcgctgagcacacctagtctctaagaggtcctgagcagggtcaccgggcgcaggaaaagctgtgagactccccaagtgtaacggacgctgcactccccttgctgggaaacgcggacctgctctcctggcggcgtctggcggtcagagagagggtcccgggaccccgcgtgagggtgaagcatcctgcagcgaggctggaccttccaccgggcgaaacgccacccaccaccaccgcaagggacccgagagttacattatttcgcggacacacacacccaccctcatccttctgaattatgggaccctgaagagcggccgtggccagttccccgcacggggccttaggggatccccacgcacagcactcacagtcctaaacaggcgtgtgccggctgtggctgccgagaaaggaacttgggccacctgctcactcgctcatcggactggcgtaccagttctctttttcctgcacacccccttctctcctgggccccttcttcccccgaaagcactgacctcctcagctttgagtgttcagtagctgaaggactcctcggagtccgtggcacaaggagccacctccgaagtgctggggtgatgagttattggcccctgtgactccaactccaaacccctgccaagggccagaaaagcccccctagaagagcacttctccccactagccagcagaagccccagacgagcggggaagagcagggcgccgccgccacaacctgctttctcattcaaatcctcacgctcacacaggagcccccctccctctcggccccgcagcttccgaggaaatcaggaactggagttgcggagagcggactggagcgcctgctgcctcctctggcccgggcgggatgggtgtacggaaccctagggctgcacgtggaaccccaaggctgcacc

SEQ ID NO: 109128 - DNA, 30 bp, Homo sapiens; identical to SEQ ID NO: 2885
  chr3:155523726-155523756
  hyper

SEQ ID NO: 109129 - DNA, 91 bp, Homo sapiens
  chr3:155524158-155524249
  hyper
cagtcgccagtgggcgggccccagatatcagacgtcttaacagtgccccaaccgcttttatgcagggtgattccacgatgcaggagatctc

SEQ ID NO: 109130 - DNA, 30 bp, Homo sapiens
  chr3:155571183-155571213
  hyper
cgcccaaccatcgacggcaatgtcctgagt

SEQ ID NO: 109131 - DNA, 353 bp, Homo sapiens
  chr3:155572030-155572383
  hyper
ctgaaggagacccccgggcagcagcgccgggctcgaggctggaggtgtgtgccgtggtgccaggatggaaaccagctcctacctgcggcgggatcgaacggctggtctcccgacccaacacctccagctctcgctgctatcaatgcggcagagagcactttctctacaggactccagaaaaagcatataacttcctgcctcgcgcttcaggaagtggtcccagtctctaacaggtcccttcccagcctccagagcaagccaatcagggacacgctctcgtggcccagttcggaaacaatgcttggtgggaacctgcaatcttggctgccggaaccttcggggaggattaacgc

SEQ ID NO: 109132 - DNA, 30 bp, Homo sapiens
  chr3:155588001-155588031
  hyper
taaggccacgccaccggctaagagttccgc

SEQ ID NO: 109133 - DNA, 30 bp, Homo sapiens; identical to SEQ ID NO: 39816
  chr3:155589060-155589090
  hyper

SEQ ID NO: 109134 - DNA, 30 bp, Homo sapiens; identical to SEQ ID NO: 2886
  chr3:155589558-155589588
  hyper

SEQ ID NO: 109135 - DNA, 42 bp, Homo sapiens; identical to SEQ ID NO: 2887
  chr3:155722291-155722333
  hyper

SEQ ID NO: 109136 - DNA, 222 bp, Homo sapiens; identical to SEQ ID NO: 2888
  chr3:156009077-156009299
  hyper

SEQ ID NO: 109137 - DNA, 494 bp, Homo sapiens
  chr3:156009318-156009812
  hyper
cgtgcagtcaccatgaatgctcagctctaggcttctgtaaaaacctcccccactgcatggatttggctgtttaatcagccgagattacagcccgggaagatttgcaaacctgattctccctccagctgctgtgacaacttcggggccgtctgtttacttctctgggtccccggggactctttcctgcatcgcagccccttgtgccactttgtgggcttggctcgaaagtcagccgccaggactcctctgacggcatccccaggaagggggagcaaggagggcttaaaagaaaagcagaaatccccgcaactgctcaacctctcgtgactgcctgtgttctggggttctgagagggaccgtgcgctgcctggggaagcaatgcaagtctccatagcctgcacagagcacaatttgaagagtcggaatggtgaggaccgacttctgagcaagcagagctccaccgcccccaatgtggtgaacgcagcccgggccaa

SEQ ID NO: 109138 - DNA, 30 bp, Homo sapiens
  chr3:156272670-156272700
  hyper
gccgggtcctgccacgtccccgcccagccc

SEQ ID NO: 109139 - DNA, 66 bp, Homo sapiens
  chr3:156273034-156273100
  hyper
attggccagcttggcgccactagataggcttccgggcgtgattgggcgagcgggccagacttccgg

SEQ ID NO: 109140 - DNA, 30 bp, Homo sapiens; identical to SEQ ID NO: 39821
  chr3:156391900-156391930
  hyper

SEQ ID NO: 109141 - DNA, 35 bp, Homo sapiens
  chr3:156392397-156392432
  hyper
gagctggctggactcggagcgcggtcgaggctttc

SEQ ID NO: 109142 - DNA, 30 bp, Homo sapiens
  chr3:156393757-156393787
  hyper
aaaagttgcgcgcgcgcgcttgcgtgtgta

SEQ ID NO: 109143 - DNA, 30 bp, Homo sapiens; identical to SEQ ID NO: 39823
  chr3:156406981-156407011
  hyper

SEQ ID NO: 109144 - DNA, 30 bp, Homo sapiens; identical to SEQ ID NO: 39824
  chr3:156435624-156435654
  hyper

SEQ ID NO: 109145 - DNA, 133 bp, Homo sapiens
  chr3:156533964-156534097
  hyper
atttctcagccccgacggctgtggttactcaaactgatctcatcgcaggtcgtcacgacacgcgcttcccctcgcctgcacgcggcgtggcgtgagaggggccctggcagccggcgcgcccacccctgatcct

SEQ ID NO: 109146 - DNA, 292 bp, Homo sapiens
  chr3:156534392-156534684
  hyper
cgctggcgaccccttcccgggtctcctagccctggccgggctgcccccgcgcccgcccccgccctcgaaatccaggcagtgcgggaggccgccttgctgctctctccgcccgcacagggccgcccgacggagcgggcagggagcaggcgccaaggaggccgagaggggcccaggggcgaggtcgactctcagcccgctgtccccttatcccacgtttcgcagcctgaggtgtttgttgtatatcgggaactgacacttttcggcgttaaaatgagggcgtcacctgctcgaa

SEQ ID NO: 109147 - DNA, 30 bp, Homo sapiens; identical to SEQ ID NO: 39826
  chr3:156543818-156543848
  hyper

SEQ ID NO: 109148 - DNA, 168 bp, Homo sapiens; identical to SEQ ID NO: 2891
  chr3:156799360-156799528
  hyper

SEQ ID NO: 109149 - DNA, 30 bp, Homo sapiens
  chr3:156806514-156806544
  hyper
ataacatcaggtgacgcctccagccctccc

SEQ ID NO: 109150 - DNA, 30 bp, Homo sapiens
  chr3:156806887-156806917
  hyper
actgatttccccagcgtcgggggaggcagc

SEQ ID NO: 109151 - DNA, 30 bp, Homo sapiens; identical to SEQ ID NO: 2892
  chr3:156877181-156877211
  hyper

SEQ ID NO: 109152 - DNA, 245 bp, Homo sapiens
  chr3:156877882-156878127
  hyper
tagtcttagcgagccgcacgcaagcccaacgcagccggaacccgaaacaagactaaccagcgttctcggcgcgacggatattcccgtgaccgccgggttctgggccgcttcacgccgcgtgcgcttccgccctgacgtcaccacgccgggcagccgcgcgccaactagtccctccaggccgcgcctccgccctcggcatctgggcctgcgaggggagtgttgggtgctgcgacagaccttgggat

SEQ ID NO: 109153 - DNA, 30 bp, Homo sapiens
  chr3:156892597-156892627
  hyper
ggtccggccgccggcgccaagcctcaaggc

SEQ ID NO: 109154 - DNA, 18 bp, Homo sapiens
  chr3:156893032-156893050
  hyper
cgcgagcttgactcttcc

SEQ ID NO: 109155 - DNA, 214 bp, Homo sapiens
  chr3:157154536-157154750
  hyper
attcaggggaactcccgttaccgcagtgccaccagcattactcattcatccccattcaggctttcctcagcatttattaaggactctctgctccagcctctcactctcactctcctccgctcaaactcagctcacttgagagtctcctcccgccagctgtggaaagaactttgcgtctctccagcaatgcatctccttgcgattctgttttgtg

SEQ ID NO: 109156 - DNA, 1107 bp, Homo sapiens
  chr3:157155187-157156294
  hyper
gggaatgccaggaacgggctgcaacttggcaccaccgagggaggtcagcttttacaaagcacatccaaggcaggcctgggcgggctgctaacgtgtgtgtatcccgtactctagccacgccgtgcgcctgcggtcaggagcactcggaatgggacaagctcttcatcatgctggagaactcgcagatgagagagcgcatgctgctgcaagccacggacgacgtcctgcggggcgagctgcagaggctgcgggaggagctgggccggctcgcggaaagcctggcgaggccgtgcgcgccgggggctcccgcagaggccaggctgaccagtgctctggacgagctgctgcaggcgacccgcgacgcgggccgcaggctggcgcgtatggagggcgcggaggcgcagcgcccagaggaggcggggcgcgccctggccgcggtgctagaggagctgcggcagacgcgagccgacctgcacgcggtgcagggctgggctgcccggagctggctgccggcaggtaaggaggcaagcggggccgggacctcccactgcggctttgttccgggagcgcgcgtaacggcaagccaagccaggcaaccttctaggggaagctttcatgggaagcgcgcgcgcgcgcgcgcacacacacacacacacacacacacacacacacacccctatttctgcatgcgcggtcacagagctcaggcacaccatacaaggcgggaaaattggctttaaaaaagtattcctcagtcctaaggagccctaaagagagttgtggaggtaaccatcacagtcttgaaatagacgtctagggccccttacacccgatccgactaagcgctgcaggagtccactggcccgttataaccgtgatccctcttgccgcccagcttccctccgttagggatttccacgtcttctaattttatcctgcctctgtctttagaggagctctggtttcccgcactatttcagggcccaggctaacgtttagggatgttttccagcccctcagccggcccctcctctccgcccacccattctcagcaagaaacttgaggctaaagctaatctcccgaagggtcagcggaattcttcaggg

SEQ ID NO: 109157 - DNA, 633 bp, Homo sapiens; identical to SEQ ID NO: 2894
  chr3:157217105-157217738
  hyper

SEQ ID NO: 109158 - DNA, 326 bp, Homo sapiens
  chr3:157260918-157261244
  hyper
gggaaaaaaacgaggcggggtgggggaggtcgtgtcccagggttctgacagtggagccaggacgtccgggagctgacaatctaaacgcgacctgggaaggggcggtagcgggagtggctgcttcctgggaggtggtgctcgcaaacctggcagctgactgggtggggcgtgccttccctggcagtcgcggaggggaaggctgagggacccggtccccgccccgcgtgctcaggctgaacagcttttcttccctgatctctcggaggcgccggctgctggccaacgcagggcagcctcctgcgtgcgtgctgtgggtttctccttca

SEQ ID NO: 109159 - DNA, 67 bp, Homo sapiens; identical to SEQ ID NO: 2896
  chr3:157812190-157812257
  hyper

SEQ ID NO: 109160 - DNA, 1168 bp, Homo sapiens; identical to SEQ ID NO: 39835
  chr3:157812436-157813604
  hyper

SEQ ID NO: 109161 - DNA, 176 bp, Homo sapiens; identical to SEQ ID NO: 39836
  chr3:157813669-157813845
  hyper

SEQ ID NO: 109162 - DNA, 1127 bp, Homo sapiens; identical to SEQ ID NO: 39837
  chr3:157815378-157816505
  hyper

SEQ ID NO: 109163 - DNA, 180 bp, Homo sapiens
  chr3:157820688-157820868
  hyper
cccagcggggccacacgtgcatccacacgaacacacacacacacgcacacacacacggacgaaaacagcacagcaaatcctgttaccagatttgtcgcaaaaaagaatagagaatccttccccctcgtggaatcctggtccggcttctcaacccacccggaggaagaatatcccggagaa

SEQ ID NO: 109164 - DNA, 505 bp, Homo sapiens
  chr3:157821536-157822041
  hyper
gcagactcgaccctaaacgcttaacccacagagatcaacaggttcaagcggaatattcgcgatcctcggtttctattggttgctcaaagccttttcatgcaaccagcagctcggatgtttaataaaatatgaatttttctgctctgggtttgcacacatccgttgccactttcctgtccttctcctccctttaaaaacaggagctcttctagtgtgagcatatacagccaccatatatatatccccctggaacctttatcctctgcgcccgaatcagagactccgggttttaagaagtcaaagctgagtttagatagtcgaggctgtttgcagttcttcccagcgcaggatccaggccagcatgggtgttaaaaatcatttccggaagagccggtctgcagagaaattaatacttgccctgagcttggaaatcaacaatcccaggaactgcgcccgccgggggttcagacctgaacctcgccgtcaggcgcgctggcgaacctgt

SEQ ID NO: 109165 - DNA, 108 bp, Homo sapiens; identical to SEQ ID NO: 39840
  chr3:157823011-157823119
  hyper

SEQ ID NO: 109166 - DNA, 694 bp, Homo sapiens; identical to SEQ ID NO: 39841
  chr3:157823138-157823832
  hyper

SEQ ID NO: 109167 - DNA, 66 bp, Homo sapiens; identical to SEQ ID NO: 39842
  chr3:157824080-157824146
  hyper

SEQ ID NO: 109168 - DNA, 134 bp, Homo sapiens; identical to SEQ ID NO: 39843
  chr3:157824211-157824345
  hyper

SEQ ID NO: 109169 - DNA, 504 bp, Homo sapiens; identical to SEQ ID NO: 39844
  chr3:157824404-157824908
  hyper

SEQ ID NO: 109170 - DNA, 510 bp, Homo sapiens; identical to SEQ ID NO: 2908
  chr3:157825059-157825569
  hyper

SEQ ID NO: 109171 - DNA, 30 bp, Homo sapiens; identical to SEQ ID NO: 39846
  chr3:157827667-157827697
  hyper

SEQ ID NO: 109172 - DNA, 30 bp, Homo sapiens; identical to SEQ ID NO: 39847
  chr3:157828150-157828180
  hyper

SEQ ID NO: 109173 - DNA, 39 bp, Homo sapiens; identical to SEQ ID NO: 39848
  chr3:158288779-158288818
  hyper

SEQ ID NO: 109174 - DNA, 296 bp, Homo sapiens
  chr3:158288886-158289182
  hyper
cgcctcgtcctggtgacgtcacagagcaatgtccaatgggaaagcagctcggtgtcacgcacctcctatcccggcgggcaccgcctgcgccgcggcgagtgaggcgtcgtccgtactggaggctagctcttgtcgcggccgcggcgagttaacatcgtttttccaatctgtccgcggctgccgccacccaagacagagccagaatgttcaggatgctgaacagcagttttgaggatgaccccttcttctcgtgagttacgggagccaggagtccggggtcgcgcgggaattaaggt

SEQ ID NO: 109175 - DNA, 289 bp, Homo sapiens
  chr3:158362203-158362492
  hyper
tccaagtcggcagacggcgcgcgagcagcgtaggcactgctccgcctccaatccagttgctcttctttcttttcctcactctctttttcctcgcgtcctttgccccggaagtgctcttacaacattggctgccggcgtgactttgaccgcttcccggtgcgttaccggcagctgaacccacccggcgccacgggactttgacgcgtgctctgcgcttgccatgagactcctgggagctgcagccgtcgcggctctggggcgcggaagggcccccgcctccctaggctgg

SEQ ID NO: 109176 - DNA, 225 bp, Homo sapiens; identical to SEQ ID NO: 39850
  chr3:158449683-158449908
  hyper

SEQ ID NO: 109177 - DNA, 457 bp, Homo sapiens; identical to SEQ ID NO: 39851
  chr3:158449969-158450426
  hyper

SEQ ID NO: 109178 - DNA, 161 bp, Homo sapiens
  chr3:158519499-158519660
  hyper
agaagggcagcgcgcgtcttggcgaccccagcgcagttcgaactactccggagtctggtgtggagccgagagggagccccgcacttttctccccgcggagctgcgctgagtctgaaataggtgtacgcgtcagcggggcaggaaacggaaagacagtgcag

SEQ ID NO: 109179 - DNA, 1078 bp, Homo sapiens
  chr3:159480855-159481933
  hyper
tgaggtcatcctcagcgtgcagcccggaggggaagggaaacgtgagctaaagcaacaggttccacccacagcctgaacttggaaggggatgcggcggcggcaaggcggctggagctgcgcggtggagggagaggaagcggcgaggaggaaggtggaagggaaatgatggtgcatgaccaccgagcacacgtcactcgggctcccacatgggcttgtgtatgtgcgtgtgtgaggggagggaggtccttcacagggtcactcgggcacttccgcgtggaataggaggcgccaggctcgtgctttgggatgccgggtggcttcggcggggtaacgagtcacgcagagacggcttgaggcaagccaagaaaatacgggtgtcggcgtgaaaatacaccactcttcccagcgcgccgcccttgctaactggctggacctgcgcccctaacgcccagtgcccccttcttttgggcctatcttggcccctccaaccccatcccagcctgcctcctgctccagcctgccgccgcgaaaaccgggactgcggactgcgccgcgcccggcagcctctgggcatgctcggtggcgggaccggctccaccgccaggagggcgcgtcctccctcccctagggcggtgacggcgcctgcagcgacttgccgccgcgccccggccaggcacaccttttggggaggcgggggaccaccctgcccggcgtgggccgagagcgccccccaccccgagccttccggcgggtgggaggaggggccggccagggagacgcggaggcgggagtgagacctccgactgccagcggttccttacaaagtaaagctcagctcgcgcgcggacccgggctcccagccgcgggcggggaaggggcggggcggggcggggccgggccgggccgggccggggcggggggtggtctcagcgcctagagcgagatgcgaaattagtagccgcccacccccttctcagttcccgcccccagggaattataatttcctgggaaagtgtctggttctcggagaatccttggggcggggtaaaggggcgcgcctggcgcaaaatggttaata

SEQ ID NO: 109180 - DNA, 884 bp, Homo sapiens
  chr3:159482433-159483317
  hyper
ttgatgagtgggcgccggaggaggacggggaggaggaggaagaggaggacgagcgcgaccagcgagggtaccgggatgaccgctctccggcccgggaaccgggggacgtaagcgccaggacccgcagcggcggcggcgggggcaggagcgccaccaccgccatgccgcccccggtgcccaacggcaacctccaccagcacgacccccaggacctcaggcacaatggcaacgtggtggtggctggccggccgagctgttcccggggcccccgccgggcgatccaaaagccccagccggctgggggccggcgcagtggccgcggcccggcggctggggggctctgccttcagcccccagacggcgggacgtgcgtccccgaagagcccccggtgccacctatggattgggaggcgctggagaagcatctggccgggctgcagttccgggagcaggaggtacggaaccagggccaggcgaggaccaactccacctccgtaagttggccggggtgcgtgcccacgcgcgcacacacgcgtacacaccccgcgcacagcccgcacgccccctccctgcgctcccgcccgcccgcggccccattcattcttcctcgagggtgggggccaggccagagagcctgccgtctgctcccctggggataaggttgctcggtctgtgagctgtctgggtttgcaggatgggcggagaggaaggaggagcagccagagggcagcggaaagtcgggttagtggaaccggcgactcattttaatggaattacttatggagaccaggttgtgagtcacttgcctgaaaataaatccggggagattctggcaccaaaagtcagtgcctgcgggggatatttcaaatcgtaatagttgtggc

SEQ ID NO: 109181 - DNA, 30 bp, Homo sapiens
  chr3:159706532-159706562
  hyper
agacacggggcgtccggctaaggccgggga

SEQ ID NO: 109182 - DNA, 212 bp, Homo sapiens
  chr3:159706813-159707025
  hyper
gtcctgccgcgcctcgggacaattataaaaatgtggccccctgggtcagcctcccagccaccgccctcacctgccgcggccacaggtctgcatccagcggctcgccctgtgtccctgcagtgccggctcagcatgtgtccagcgcgcagtgagtactcagcccgccaggtctttggctcgctcgggtgcggaggggcggctgcttgggaaga

SEQ ID NO: 109183 - DNA, 425 bp, Homo sapiens; identical to SEQ ID NO: 39856
  chr3:159756611-159757036
  hyper

SEQ ID NO: 109184 - DNA, 30 bp, Homo sapiens; identical to SEQ ID NO: 39857
  chr3:159942817-159942847
  hyper

SEQ ID NO: 109185 - DNA, 1451 bp, Homo sapiens
  chr3:159943209-159944660
  hyper
gtagcagccgcctcccgcagcctccgcgcgccgcgggctcctcctcccgcccaagcgtggccaagtgaggactgctccggccgcaggtagctgaggcgcgggaggcggcgcgcgcgggacccgagcggagcgccggggaggggccgacggacgcgagggcggacggactccccagcctcccgtcccggacgttagccgaggtctgcgcgggccatgtggggacccggggtcactgctgagggcctgtcggtggctccggcgccgccgcctctgctgccgctgctgctactgctggcgctggcgctggtggcgccctcgcggggcggcgggggctgcgctgagctggcgtgcggcgagcgggagcgctgctgcgacgcgaccaacgccacggcggtgcgctgctgcaagctgccgctgcacgccttcctggacaacgtgggctggttcgtccgcaagctctccgggctgctcatcctgctggtgctcttcgccatcggctatttcctgcagcgcatcatctgccccagtccacgcaggtacccgcgcggccaggcgcgcccgggacagcggcccgggcctccggggggcgccggaccgctggggggcgcggggccgcccgacgacgacgacgactcgcccgctctgctgcgcgacgaggcggcagccggctctcaggactcactgctggacagtggcggcggcggccggggccggggaggcggcgggcgctcggacccctcctgcgcctcagagcacgagatgcgtgtagtgtcgccggtcttcctgcagctgcccagctacgaggaggtcaagtatctgcccacctacgaggagtccatgcggctgcagcagctcagccccggggaggtcgtgctgccagtgtcggtgcttggccgccctcgaggcggggtcgccgcggagcccgacggcggcgagggccgctaccctcttatctgagcgctcggggatcggcggctggtgcagggctgggggctgcgggtggcaagcaacggccggggtgccgccgccaactgcctcagaccttatctggcaccctggcctaactgcccggcaccccgcgactgggttggggtcactcgtctccctcgcgttctcccgggatcttatgtttctctgcgtttcattccgttcaaagaaacgtggggcacgcgcggcgggtgcggctgcagcaggcgaccctccagcgcaccttcgaaggacgtccctgccctctgccttgcctcgtattgtggttcactagtaagtgcctgcttccctagtcaaagagaacacgtgagccctttggtgcgtcgagagaagggcggtcttctttagggctgaggagaaaggaccgcagttccactcctttccctacctgccgcctggacaggtctcccagggtgggcagagggcgaggagccgttgaggaccagccgcgaccagggactgct

SEQ ID NO: 109186 - DNA, 30 bp, Homo sapiens; identical to SEQ ID NO: 39859
  chr3:160116795-160116825
  hyper

SEQ ID NO: 109187 - DNA, 84 bp, Homo sapiens
  chr3:160117325-160117409
  hyper
cgacaataagatggcggtgataatcgccgcactttttttcaaattagtggatcccagaaatcattgcgcgcatttgtaacgaat

SEQ ID NO: 109188 - DNA, 36 bp, Homo sapiens
  chr3:160118169-160118205
  hyper
tcctgacccggacacgaactcgtttctccacgtcgg

SEQ ID NO: 109189 - DNA, 30 bp, Homo sapiens
  chr3:160118595-160118625
  hyper
tcccccggccccagcgaccatgccccgtaa

SEQ ID NO: 109190 - DNA, 30 bp, Homo sapiens
  chr3:160118851-160118881
  hyper
gacatctgaaggtccggtgtcggtccggta

SEQ ID NO: 109191 - DNA, 70 bp, Homo sapiens
  chr3:160167182-160167252
  hyper
aacgcgcctccacctcggcacccgcccgtccccaaccccgcgggactgaccgactcggcggcgtccgctc

SEQ ID NO: 109192 - DNA, 520 bp, Homo sapiens; identical to SEQ ID NO: 39863
  chr3:160167468-160167988
  hyper

SEQ ID NO: 109193 - DNA, 30 bp, Homo sapiens
  chr3:160282383-160282413
  hyper
atggcctctcacgccgggggtgtttttttc

SEQ ID NO: 109194 - DNA, 30 bp, Homo sapiens
  chr3:160282997-160283027
  hyper
ttacctccaagtcgcggcctttgttcttga

SEQ ID NO: 109195 - DNA, 30 bp, Homo sapiens; identical to SEQ ID NO: 2917
  chr3:160283640-160283670
  hyper

SEQ ID NO: 109196 - DNA, 30 bp, Homo sapiens
  chr3:160283988-160284018
  hyper
tgtgactaagcacccgcaacagttaggaat

SEQ ID NO: 109197 - DNA, 1657 bp, Homo sapiens
  chr3:160472421-160474078
  hyper
ccgcactcttctccgcggtggctactctccgctcatccagactcccgccctcactgcgccttcttcctgcgatgaccgaggaggtggtgggagaccaccacttgcgagcttccaaaggactttcaaacctgaaccgcagagtcagagccctcgcgccgtagaaaagtcaggagcgccccggggcccccatcggaagcttcgtgccttcccgtggaaaggtcgcgagcagggaaggccttcgtggccactgagtcccctactccaggggcggcggccgctctccgaaagagcggcccttctcgtccctcccgaggttatcgtcagagtgcacttccttggggaaacagaggtcattctgtcgagtcccccctttctgctgttctcgggagggagaaggctgctggacccaggctcgctccccgcctctcgggagatccgggaaggcctctattgctgaacgccgagacagcggccagcggcccgatcgtctccctaccgctttgcaagccgggagaagtgcgtcccttctcgcttgccttatggctggcgaagcggggaccgcactatagtgcagccgccgaaggggggaacgctcacgtatggctctcggcttcccagtgagcagcaatagttcctggaaaaccaacgctaagactaccggggtcagtattagcttgtcttaggagccggcacagggggaaggaacaacgattcgcaagagctaggcagcggacctccctcttttctcccccttggctgtcctggaccgcatggggctgcgagcccgcaccggcggccgcggaacttgctcagcctctgacagctgggtgggaacacctcggggtgtcgagtcccgactcaaggggcgggacggggcggggcgagcgcgcggggggcggagcgcgcgcgagccgggacgcgaggagggagcgcgcgagtgaagccgagctgagccgagccgatccgagccgggaggtgcctgggagaggcaggcagagcccagccggccgcctgcggctcagtaccgaccgtgccgcgtcgccgggctctgcgtacccctgtctctgcccaggctcccgcaaaacttttattctctggggcccccggggtgtgtgaaggaattggaaccttccgccatctccgcgctccccttcggcggcgaccgaggggacctgcgtccctcgtccgccgggctctggagccctgcgcctcacctgctgatcgctctccggagtctcgagggggcacccccggagggaccgcgcgggcgccggcgcccctgaactctcccgctcaccgcggcagacccgcccagcgcaactttaacttgattcttcttgcccaaccggggcaccagcggctgctgctgcggcggctgctgctaccgccgccgccgcggtctcacaaaggggctcagggaagggaggcggcgcgggcggcagggacgggcctccgggccgccgaggcggggagacaaaagggaagctgcctctgctcgcgctgcctgctcggagccgcttgctcggctgcctctggctgggctccgcgatcctctcccccaccctcgggcactgctccgcctccctcccggcgggctgtccccgcagtgctcccggacccggcgagccttcggggcgcgcgtcgctggtggtggttg

SEQ ID NO: 109198 - DNA, 801 bp, Homo sapiens; identical to SEQ ID NO: 39866
  chr3:160822406-160823207
  hyper

SEQ ID NO: 109199 - DNA, 30 bp, Homo sapiens
  chr3:160939431-160939461
  hyper
gggctggtggagagcgggagggcccgggcg

SEQ ID NO: 109200 - DNA, 212 bp, Homo sapiens; identical to SEQ ID NO: 39867
  chr3:161089232-161089444
  hyper

SEQ ID NO: 109201 - DNA, 769 bp, Homo sapiens
  chr3:161090003-161090772
  hyper
agcgcagcaggactgcgtctgaaactcggcatcaggctgctaagtgagcccagggctcgggctggggcagcgggcggccaagcaagcatcccaccccatttatttgtcaaaaaccgaagaaagcaaagccttttagcactggcagctaattttggtgcctctgaacgtgtgaaacgcccctccccgccccactcgcatcctgccaccttgcccgcggtagctaggaggttaatcgttaaaaaggtggactcccccagggaaatagatgaaaggatcgtgcccggagaacttgtgtgtgcccactcacaagtgcagagaattaatctcggcccggactgcggcaggagggcaaactggggaaagaaggctgggaggcggcccggtggtgcagagacgcgcggcgcctgctcccgcggctcccggggctggcgtgccctgcgcttacgctccgcgctcgaatatcttccccggagggctcgggaccagcgcgagcaccttccctggaagcccacatccatcacccagcgatctcctctccatcgagagcagggcttgctgagagtggcggaggaccttgaaggctcccggttctgtatctccgtggccgagacgctttctgctcgaggcccaggggagtccgggagcgaaagcctcttttgatgaatgagcatttgggcagtatctgcccatcagcccccactgccgaaggaggagacactgcacatgctcggccagggctgattgtgttaaagcgcgaattttagctgct

SEQ ID NO: 109202 - DNA, 330 bp, Homo sapiens
  chr3:164911332-164911662
  hyper
ctgaaagacttggaccgagtttctcctgcattttgcttcgatcccgttgcaccaggaattcttttgttgtgctgcaggtcaaagccttcgatagcccctggattcaacagcatttcttttcttccactttttaaaaacagagacaagccaattctctggaaggagatacagaccacttgggtaacaatggtacatttcacattgcgccaccgggaaagacctcgcgggattggggtggatttaaggatttggatgcttttgtccgttctttctctttcttattttttaaactcaaatatttctccgtgaaattttcggggagtgaatcct

SEQ ID NO: 109203 - DNA, 293 bp, Homo sapiens
  chr3:164912383-164912676
  hyper
ccagctgccggcacccgcaccctcccccccatcccccgcccagcactttgggtacccaatgtgcagaggcggtgactatttatcgggtgttatcggaacccatgatgtgatggaatcgatgggtaacccggaggctgccctgagcttccagatgacggtaaatgttgtctcggcaatgaagtctctgttatttcttgaactaaaaccccttacgttctggacctgggctgtgtcctaaaggctatctcacctttttccttttctttagctcaggatagcgcgtctaaaggaca

SEQ ID NO: 109204 - DNA, 1661 bp, Homo sapiens
  chr3:164912982-164914643
  hyper
tgtcgtcaggcgaaacgcacaatggtctgtttagaaacggaaaattattaaaagctcaagcctttttccttctacctcttacaacaccagcgagcattccactgggggaggggtccttcgctccgccacctggcctatttgttggagttacttacgatgtcttcacccagaaaagaggtccgagggtatgttagtctccggtacccctccttccaccaacgtccttacacctaactgatccaattcaaaactgcaacaaacccctagcacctgtgagcgtacagaatacaccgcggccaaactcgatgtgctctacaatgcacatcctacatacgagaaatactggtttcaattaggcgaagtaggaaaggatggcggcgagtacctatggtgcagagcgctcaggatctccgaggtttgctgcgaggggctacccagcaggaggggcaaactctctgcgaagctgaattgtatccatcatactgtagccttgtagcttctcctcttctggccaccaactttccgaaaggctaccgaatcacgcttgtaatccgtttaaatgtttccacctttgagacttgcagggaaatggtcgctgcataccaatgggagagcggggcgcgcacctagcgcggcgatgccagcgacagggagctcacgaccacagctccctatgccctcgatggttggtaggcaggcaggcagagtgagtgtcccaggactaggttcctttgatttaaaatctcggtgctctggatcagtggagagcttcgttgttcccgagagcctgagctcagtctctggatttctctctttctctcttcctcaaaggttgtcactcacagcgcaatccctgcccgaggcctccttccatccgagaagatggaattagcccttgcttttccagggtgtctttgctctttgccctttaggtgggtgggagtgggggttggtggcgtgtagatgagagaagaaaagggtggggagaggcggaaaggaggcaggaagggggcgactagatctcagatcccagcattggtcagacggcgaaggtggggggaaagaaggagagggggagagaagatacaaatacacagtatggctgtgcacaccaaattccacttggatttgggagatctcaggcaaagcacgaaggtgaagcgataccgttggcagagagtgagtcctctgaccgctcaccattcaagcaccctcacttctcgagcgggagaaggtgcgggggaggggggtgggagggggaggggactgctgaacgtttcaggccaaggagacgctcgcggcggcggcggcggcggcatcttttaagactgacctgctttaaaagtgccactttaatggcctaggaaataactaaaatcggattacacgttacttaccaacgtctcctcctaaactggagcgccaggtcgtgtataaggagtcaatataggaaacgcagggctggaacctgaatgcaaatccatcagccgcccccaaatcgcgcaccaagggagcggcgctcgggagcccccagatcagcccatcgccggagctccgccagcgcgtcccccccgcacccccggcccctcctccgcgccaactgtgtaaatcagccgccgcagtcctctcgccgcgcatcgcaggcaaaatcccggcttagg

SEQ ID NO: 109205 - DNA, 281 bp, Homo sapiens; identical to SEQ ID NO: 39871
  chr3:164914762-164915043
  hyper

SEQ ID NO: 109206 - DNA, 158 bp, Homo sapiens
  chr3:164924660-164924818
  hyper
cagctgcttcttaacgcctccagatggcgtgctggtgctcgttcgcgcctcccagcgaccggccagttgccagctgctggagagaatgagcttggagccgcagggcttaatcccgcgcggctcagagatgggtttctggactcgcgaagcagctgcaa

SEQ ID NO: 109207 - DNA, 423 bp, Homo sapiens; identical to SEQ ID NO: 2926
  chr3:167097865-167098288
  hyper

SEQ ID NO: 109208 - DNA, 30 bp, Homo sapiens
  chr3:167452469-167452499
  hyper
agccccgtccgctccgcctgccagaaccaa

SEQ ID NO: 109209 - DNA, 30 bp, Homo sapiens
  chr3:167452748-167452778
  hyper
gtcccgctcgccggcgttgtccgcaattcc

SEQ ID NO: 109210 - DNA, 352 bp, Homo sapiens
  chr3:167453719-167454071
  hyper
cggtgcaaaacctctcgggtgaaagatttacatttttcgactttaagggcaaaaaagcaaaaggaagcttgactctgggtataaagggcgtggttagtgtttttggtttgagttgcaccagtaaaactgttctgggagatctgaagattgagaaaaatcctgctaattgaggacgaggtggatgttatctggtggatgttataggtgcgtagcctataaaaagcaaaaattttgctattgatatagaataacttctgaactatttcactaggaaaataactttgcattcttcttcagtgtctaccctttacgttggtttatcagattgtcctgctaccgacctgttatccag

SEQ ID NO: 109211 - DNA, 30 bp, Homo sapiens; identical to SEQ ID NO: 39874
  chr3:167813479-167813509
  hyper

SEQ ID NO: 109212 - DNA, 412 bp, Homo sapiens
  chr3:167966490-167966902
  hyper
gatttttattttcacgaaacagactccagaggtttgtggccttccagacaacagctggcaccgggcagaggcacagcctacggcctgagctgctggcgactgcatcgcgcttggccgtgcgtcccaggctgcgctggccagcaccgcagccagagagcttcccgctccgagcaggagcggacgctgttcgtctctggaggggccatggtgctcgcgactggctgttcctccttatatttgggggaaaggagctggtttgaaggaaaggagggattaagtttgtaaaagcgttggctcctccttataactctggtgcctaaagggggtgagatgatagccaaataaaacgaagagagatgaccccgttttgagtgaggaggatttctggatgagccggcgatatgtcctgcaa

SEQ ID NO: 109213 - DNA, 1250 bp, Homo sapiens
  chr3:167967245-167968495
  hyper
gcgcccagcccccgccgcggctgggtgaagaggaggggtcgaggagggcgcagggcgtgggggacgcccagcagcgcctcaagcccgtggtggcggcggggctgtctctttaagcgctccggaggggctggggcgggagggcggcgagcgcgtttccatggcaccggggctgcgggggctgctgggccactgggctcactcggtttcagttgctcccggcggagcaggggcatgcagctcagcggccaccgagcctctggggctcgcccggccgctcctcgcgctcccagacgcctgtgacgcctgttggggccaagctgctgccgttccctccgcagacagacgcgccgcgccagcctcacgagccctgcaccaacttctgcccgacaagcccaacttctgcgccgggttcggacttgcggagccggaacggcgcaccgcgcgcagcccgggcggcggccagggcggatcagcctcgccgagatgtcctcgcgactgtggctctggtgcttctgcctgggcggttgccggctggccgccaggaagcgccctacagctccggctgggcatgtaagtggcgcccgcgcgctccggaacgcttggagagagcagacaacagtatgccccgccccacctcggacctggtgcggacaccgcggcccgagcccgggaagggatggggggcaggaggtggggacagacacctgcgggggctgcgggctgtcccgggcggagcgcggcggaacgcagtccccagctagtccttggggagcgccagcccgggagcggagaccgcgaccggggcgggtgtgctctccacccggtacttcctcagcgcctgacagatttttgtcccccgcccccaggtttgggtgtgtgcgcgcgtggtatgtgtgtgttttcgttatttttctgttttaagagtaattggctaatgactaccactttgtgacagggttgtgaatgaaatcctgtcgaacaccgagtttgacatttttttctttgtagagaccaatgagttcgtgcacatgtattctttctttttttgggggaagtatcgccgagtcggacggagtggtttattccacaggtttgaccagaggcaaatcctggctcgtctgccgaagtgaggagctggggagatgagtatatgaaggattgagtgctcggccacttagctgctagtccccttattagagaactgaagagttagtaggaaggtgactcaaacgcatcgtctcaggatgggc

SEQ ID NO: 109214 - DNA, 31 bp, Homo sapiens; identical to SEQ ID NO: 39877
  chr3:168754776-168754807
  hyper

SEQ ID NO: 109215 - DNA, 1002 bp, Homo sapiens; identical to SEQ ID NO: 39878
  chr3:168863845-168864847
  hyper

SEQ ID NO: 109216 - DNA, 379 bp, Homo sapiens
  chr3:168865074-168865453
  hyper
cagatcctccgcagcgccttcgcgggtcctggaccctcacgggatcgtcccctttcgcaactccaagctcagccgccgggtttctatttcatgaactgtctctttaaagaggatctgctcggccatccagaaagaacccggggcgagggagaaagggagctatctcccgccgcccagagtgatctgatcggaagccagacgggctcctcttttaaatttttaaagtgacagcagcctcctctggcgggagaggtcacaaaaaggtcgccaagacccaagtcctatagggacagactgattatggatgcaccatcccccttaaacatgtagatttctccgggtaaacaaccaatggggagatctcgccaggcaggatttc

SEQ ID NO: 109217 - DNA, 235 bp, Homo sapiens; identical to SEQ ID NO: 39881
  chr3:168867254-168867489
  hyper

SEQ ID NO: 109218 - DNA, 267 bp, Homo sapiens; identical to SEQ ID NO: 2928
  chr3:168960220-168960487
  hyper

SEQ ID NO: 109219 - DNA, 898 bp, Homo sapiens; identical to SEQ ID NO: 2929
  chr3:169375889-169376787
  hyper

SEQ ID NO: 109220 - DNA, 677 bp, Homo sapiens; identical to SEQ ID NO: 39884
  chr3:169379260-169379937
  hyper

SEQ ID NO: 109221 - DNA, 54 bp, Homo sapiens
  chr3:169380560-169380614
  hyper
gccgcccgccgccgccgccactgtggctccctctgagccgcctaccctacccaa

SEQ ID NO: 109222 - DNA, 88 bp, Homo sapiens
  chr3:169380982-169381070
  hyper
gctggggctgcgctccgcctgccctccacccggggccccggcgcaagaggcagcccgcgctccctcccggagcgctagagacagatat

SEQ ID NO: 109223 - DNA, 263 bp, Homo sapiens; identical to SEQ ID NO: 39887
  chr3:169381407-169381670
  hyper

SEQ ID NO: 109224 - DNA, 682 bp, Homo sapiens; identical to SEQ ID NO: 2931
  chr3:169386024-169386706
  hyper

SEQ ID NO: 109225 - DNA, 323 bp, Homo sapiens; identical to SEQ ID NO: 39889
  chr3:169386972-169387295
  hyper

SEQ ID NO: 109226 - DNA, 30 bp, Homo sapiens
  chr3:169480953-169480983
  hyper
atcttagtccccgcacggtggctcacgcct

SEQ ID NO: 109227 - DNA, 985 bp, Homo sapiens; identical to SEQ ID NO: 39890
  chr3:169482161-169483146
  hyper

SEQ ID NO: 109228 - DNA, 260 bp, Homo sapiens; identical to SEQ ID NO: 39891
  chr3:169487220-169487480
  hyper

SEQ ID NO: 109229 - DNA, 30 bp, Homo sapiens
  chr3:169490738-169490768
  hyper
ctatggcagagatccgagtacacatgcagc

SEQ ID NO: 109230 - DNA, 30 bp, Homo sapiens; identical to SEQ ID NO: 39892
  chr3:169492085-169492115
  hyper

SEQ ID NO: 109231 - DNA, 733 bp, Homo sapiens
  chr3:169529938-169530671
  hyper
caaagggcggacccacgggaactcctctccgtggactcctctcctgcccccggtcgcaaagggcgaccggggactcttctcctgccctcgtttctgggcgccccaaacctctggccacagctggggttcccaggggcccccctcccgcctcgacgccttgggctggcgggctgctgggaggactcctgccgtgcgaccccggcgcccctcgcgcgttttgtctgggccaggccgcgcagacgtgctccctacttcttaccgcgctggaccgccagggccgcgcccggagtactggcctgagtggaggcccaagccggggacctggccggcgcacgggcggcctcccgggagctccccatgctcctctcacccactggccgcggcggctgcgctgccatggcgaccgcgcgcgcacttacagtccgcctgcagctgtgaggcggctacacgagcctcggcgccagcctgcttcgagtcccgctggctgtgcctgcccgggccctgaggcctcactgctaaggcagtgaccgcctactctgtggaggtcctttgtcaccctgccctggttaaaggcagcctgagggagggcgtcctggctcctttgcagggaggagttcccgaggtttgaggggctccgctgctgagctagggctggggctacaaagaagattatgacaaagcccgctcctacaaagtgtgcaccggcctgccgggccagcgaagaagcagagta

SEQ ID NO: 109232 - DNA, 48 bp, Homo sapiens; identical to SEQ ID NO: 2935
  chr3:169645351-169645399
  hyper

SEQ ID NO: 109233 - DNA, 316 bp, Homo sapiens
  chr3:169684380-169684696
  hyper
ctctgcttcctccacgtcctaacgattctccagttcccgcacagcaggagcggagggaagaggggagagaaggcaccgctaaggaccgctggccccgccaggcggccgacctccccattccaggggcgccagccggcggattacataacgggcctcggggcgcgttctcgcgaggtttccaccgccccctcctcgctccacgtcagagggaaccgggcggagcggccaacatggcggaacgcaggagacacaagaagcggatccaggtagcaaagccgagctctgggcagggggcttcggcgcgctggatagtgga

SEQ ID NO: 109234 - DNA, 406 bp, Homo sapiens
  chr3:169684927-169685333
  hyper
ggagttcctgtggtcgcgctgtcccgggcctgagctggaaggtcagcctcccctggggcgcagacgctgacccttcccggggctcctcccctcccttcaccccatcctctggccttagctggcctgaaattaaggccacggtaataggggtagcaggaggcggcggactgacctaaagcagctggttctttgtgcgcatagaccgtaagggggaatgatctggacttggtcagctgcctcggggcctaggcagggatctgctcatccagatgttcagttgcgttgcccttctttcccttcaatattattaacttaatagtccacttgaagcttgccggcttttttccgggcgacgtggtgtaaacaaccacaacctcgttggtgctgcaacgagctggtggagccc

SEQ ID NO: 109235 - DNA, 183 bp, Homo sapiens
  chr3:169755580-169755763
  hyper
actgagcccccaagcggctcccgcactgcgcacccctggctgcgtccctctgccagcctcaactcagccctctcctagccggcggggggtgacagtctctgtgatatctttccgtcccgccggcaggcggcgccctccggcccttgtttcgttgggcccggacgggacgtgcgcgctcaaagg

SEQ ID NO: 109236 - DNA, 30 bp, Homo sapiens; identical to SEQ ID NO: 39897
  chr3:169756185-169756215
  hyper

SEQ ID NO: 109237 - DNA, 30 bp, Homo sapiens
  chr3:169756515-169756545
  hyper
ggcgcccccgcccgcgcccgccactgggat

SEQ ID NO: 109238 - DNA, 57 bp, Homo sapiens
  chr3:169899555-169899612
  hyper
cggagaggcggggtcggctcagcccccggagccagaggtcacgtggcgtcctcagct

SEQ ID NO: 109239 - DNA, 68 bp, Homo sapiens
  chr3:169940143-169940211
  hyper
tggctggatggttgcgcccgccctaccccggaatgtgggcctttggagcgagcgaagtgggagggacc

SEQ ID NO: 109240 - DNA, 33 bp, Homo sapiens; identical to SEQ ID NO: 39899
  chr3:170073883-170073916
  hyper

SEQ ID NO: 109241 - DNA, 255 bp, Homo sapiens; identical to SEQ ID NO: 2937
  chr3:170074115-170074370
  hyper

SEQ ID NO: 109242 - DNA, 78 bp, Homo sapiens; identical to SEQ ID NO: 39901
  chr3:170075431-170075509
  hyper

SEQ ID NO: 109243 - DNA, 30 bp, Homo sapiens
  chr3:170076052-170076082
  hyper
ccagggagagggtgcgcgggggggtggatt

SEQ ID NO: 109244 - DNA, 459 bp, Homo sapiens
  chr3:170136454-170136913
  hyper
tgttttactttgcatcgccggactgcgctgcggacggggtggggcggcccaatggcccccctggggttactctgctccccttcacgcttccctcccggccccgccccgcgattggccggcgcgccccggggctgccgccgattggtgctcgccggccggagccgcggggcttaaagagggggcgggggcgcgctgcccagcagcgctgctgtccccgccgtgcgcccttcgccgctgagctcgcagcctccggcgcccacctccacctccagtgtcccgcctcgggccgtcgccctccagcggctcgcgagcgtgggagacgtacctgggcaggcactgtccagcccaggcccaggcacagccgtgaggggcgaggcacggggacatcctggcggccaccatggtggccacgtgcctgcaggtggtgggcttcgtcacgagcttcgtgggctggatcgg

SEQ ID NO: 109245 - DNA, 30 bp, Homo sapiens; identical to SEQ ID NO: 39902
  chr3:170138442-170138472
  hyper

SEQ ID NO: 109246 - DNA, 653 bp, Homo sapiens
  chr3:170302489-170303142
  hyper
gaactttcagcaccgcggacagcgccattccctgcactcagtcggaggaggagagctaccttgcccccagcgctctcctagaccctatacctagggggaggcagggtgacatcctgcggcccttgggcaattcgggccagtgacgttcaccgacactcaggcggggatcccttcgccagagccagttcctttgagtgtctccgctcaaaatctcaaggaaacgagcttcacacaggtggggggatgaggagtgccagaacaggagcgagccccgctgctctagccttcctgcatctcttctcgcctttgctttgctcactcttcaatcgcaatataaaatactcatttggggagggggcagggtgacacaggagagagaaggagggtgggggctgcatcccgcgtggccacgcagccctaacctggccctcttggattagaggggagctgatgtgctttggaatgggagaagagaggagactgagggttgaagcagtgcaggagagctccccttgctggggctgccggctctgggcagggagcttccctggacaccgctcccgtcacgtcctcttcgccgctcccgggagagtcaccactctccggggacagacgcccctcggggcgccaccatcctggtcggggtgctgggc

SEQ ID NO: 109247 - DNA, 115 bp, Homo sapiens; identical to SEQ ID NO: 2941
  chr3:170303379-170303494
  hyper

SEQ ID NO: 109248 - DNA, 178 bp, Homo sapiens; identical to SEQ ID NO: 39906
  chr3:170303554-170303732
  hyper

SEQ ID NO: 109249 - DNA, 30 bp, Homo sapiens
  chr3:170587679-170587709
  hyper
gcctccctctttcccgcgtgtccaaaacca

SEQ ID NO: 109250 - DNA, 30 bp, Homo sapiens; identical to SEQ ID NO: 39907
  chr3:170588195-170588225
  hyper

SEQ ID NO: 109251 - DNA, 1429 bp, Homo sapiens
  chr3:170625810-170627239
  hyper
tggggaggtgggatgagaagtcgcagaggagctcgctgagggtggggacacccgccctgggcgctcctccgtgctggaaacagcaggttgcggcccccatcgccccaccgcagaagccggcgaccttcccccgccgcccagccctcggccgccgccccgaaccctactgcgggggacccagcccaggccgcaggtccccgcgaaggatgcggggtaacagaacctggccagcagcacccggccctctgctagctggcgcgcaccccgccctccacccttcaacgtcgccgccgcggccgcacaggcgccccctgttctgccggcatccagggctcagctcggcccggcccggccccactagggcctgagccccggcgggtcccgcgctcgcctctgttcccccatccattctccttctttctctcggtcagcgctcagttctgggcgccttccccggccctgcctcactctggccccatccccaccagcttttccccaccagcttttccccaggtcttcacctttcagctggcaaagagcgcctttcgtctgcgcacccgcgctggtcccctacagcagcggcgccggcagcggcggtggcggccgcggcagttccaagagacggggcggggccgccacactttccacaccccagcctccccgcccttacccgcccccactcagccctatttccgggataggccccggagcgtcacaggcaccgccctctcgggctaccattggctaccagattcccgaggctccgcccagtcacgtgaagagcgccctggcaaccccacgtgctgcggattagtgcacttccggcgtggagcgcactttcagcagtctggttgccgagggtgagctcgctggcagaggaacttgcgccttccaactcttaggtttgttgcgttcgggtcgcagtcgactttaatgggaaccaagcaaagcacccaatggcccctgccatcaggtgcgtggcagttatcacatgacgatcgtcagaactcgcgaggcgcgcagattcagcgagtgccagtgtggctggctgtgaagcgaactttgggttcgagcttctggttcagcttgcagcctttcttggggttcgaacctcctcctggtccttaaagaagaattcaggtgcagtattttattacccagctcggcaccgcaggtcctgaggaccccccattcaccccttggtgagatttttggcagcgactgccgccggatgcccctgtagagtcagcactgctccctggggtgggaactcccgaagcgtccgccagctaacaagccagcagtgaaatgaattaacccacttctcacaccaaaggctgttgggaagttgtggaggcgaagggtgtctgactcctacggcattgtgggtccagagaggtgttctgccgactcatccattctttcctcc

SEQ ID NO: 109252 - DNA, 350 bp, Homo sapiens
  chr3:170746073-170746423
  hyper
gtctctgtgccgcgtcgtaaatgataccggtgtggtttaccaacctttgtcttttgaacctgccttttcagaaacggaatttgccttgagtgcgcgggcggccagtgagcctttaacttcttgtgctcagccccggcctgccggcgcggagcacggcggcaggaaaccattctcttctcccattgggagcgcgacccgccattcactagcgggccttcggggcaccctgatcagtttcctcaggttcagccaaggcctctgtggttctgctctttctcagaaatgaatgagtaatctctgcaccatctgggatatgctaaaactttatctccgtgcggggagggggtgcg

SEQ ID NO: 109253 - DNA, 31 bp, Homo sapiens; identical to SEQ ID NO: 39911
  chr3:170819237-170819268
  hyper

SEQ ID NO: 109254 - DNA, 200 bp, Homo sapiens; identical to SEQ ID NO: 39912
  chr3:170878636-170878836
  hyper

SEQ ID NO: 109255 - DNA, 61 bp, Homo sapiens
  chr3:171176894-171176955
  hyper
tcaatacaatgaaacggcgtctgaggtaattcacgtgaaggtaaacgcaaaccagtggggc

SEQ ID NO: 109256 - DNA, 285 bp, Homo sapiens
  chr3:171178161-171178446
  hyper
ttgtgcgtggatggcggctgcattggctgttataatgagacacatcaactcctccactcagcagggggagggtgggggtggagaaccacgcagaactgtctatcaccgcttcctgggaggagtgaagggggagtggggaggcggaggaggcgtggtcttggactggggagaggccgcgcttcctgacccggtccctctgcaccagcgtggaggggggaggggcgcgcaccctttccgcccaggcttttgcgggctcctcgggccgaacccgaaggggctgttcct

SEQ ID NO: 109257 - DNA, 994 bp, Homo sapiens; identical to SEQ ID NO: 39915
  chr3:171527554-171528548
  hyper

SEQ ID NO: 109258 - DNA, 197 bp, Homo sapiens; identical to SEQ ID NO: 39916
  chr3:171757154-171757351
  hyper

SEQ ID NO: 109259 - DNA, 30 bp, Homo sapiens
  chr3:171758004-171758034
  hyper
cgaggaatcttcgacgtgtcactttctgag

SEQ ID NO: 109260 - DNA, 30 bp, Homo sapiens
  chr3:171758300-171758330
  hyper
ggtaaccggcggccgcggccggacttggcg

SEQ ID NO: 109261 - DNA, 155 bp, Homo sapiens
  chr3:171758578-171758733
  hyper
cctcgggctgtgcccgcgaactttcccagaggtccgggtcccggcgtcccgtgggaaccggaggacccgggcccgccgtctcgggagactgggctgcgccgcccggcggcgcctttggcggggaggcttccaggagtgcgcggtcggagttggag

SEQ ID NO: 109262 - DNA, 405 bp, Homo sapiens
  chr3:172165379-172165784
  hyper
gaaagcctgagcgcgcgctgagacccacccagcattttcacggtttgcttgtggttctggtccctgagcgaggcacccacgacagcatcgccgcgcctcctccgccacagcttcctgccgatgagactgtagaggaccgtgagacagaagacaggaaggaagaagaagatgctggacacccacaccatgaccgtgagcagtccagagcgcaccgcaaactcggtggggcggcactcgttggtgtcccaagggtcggtgccgttctcgtgctccaccccgactagcacgaagatgggcccggcgctgcagaaggccacggcccagatgacgaagatgaccagcttcacccgccccttggtgaccaccaccttggcccggagtgggaagcagatggcgaagtagcgc

SEQ ID NO: 109263 - DNA, 646 bp, Homo sapiens
  chr3:172165866-172166512
  hyper
cgccgaagttccagggccggtactgccagaggcgaacgaggtccaggggcatgcagaggaagatgagcagatcggagaaggccatgctggacaggtagaggttggtggtggtgcgcagctcgcggaagcgcgacaccaccagcatggtgagcaggttgccagcgatgcccaccacgaagagtgccacgcaggtggctgtgacgcccgccagcagcggcgcggggaagagctgcagcagctcgtcgcccagcgagtcgttgccgggggaagcatcccagtccaggtcggccagtgtgaggttgaaccccggctcttcgctgggcgtcgcgttccacatgctgccggctcagctgaacaggctctgggacgtgactgcgctgggaggctggaccgagctggctcccgaggaggtccgcttaggcgcgggagggtgcgagggaggagcgggtgcagacgcgtagggaggatgcttggagaagaaagagagggaggtgagaggcagaagccgaggaagaaggtgagatggggacaaggaagagggagagagactggtggtcagtgggtgagagagtgacccactgctttctctgacacctcccctttcccccaccaactcccccaaagtttctcccaacacatcctccgg

SEQ ID NO: 109264 - DNA, 12 bp, Homo sapiens
  chr3:172166672-172166684
  hyper
cgctggactagt

SEQ ID NO: 109265 - DNA, 142 bp, Homo sapiens; identical to SEQ ID NO: 2951
  chr3:172167331-172167473
  hyper

SEQ ID NO: 109266 - DNA, 291 bp, Homo sapiens; identical to SEQ ID NO: 2952
  chr3:172167595-172167886
  hyper

SEQ ID NO: 109267 - DNA, 288 bp, Homo sapiens; identical to SEQ ID NO: 2953
  chr3:172240997-172241285
  hyper

SEQ ID NO: 109268 - DNA, 163 bp, Homo sapiens
  chr3:172313932-172314095
  hyper
cccaagaaatagaaacgaatagaaatagaaatctaatagaactagaaatagaaatatttcccaagaaatagaaagtaaaactgacaaagccaatgcaaagaaatcagttcggaagctgttaattttcacacgatctgtgttcagtaaccgccctctatcggct

SEQ ID NO: 109269 - DNA, 30 bp, Homo sapiens; identical to SEQ ID NO: 39924
  chr3:172428411-172428441
  hyper

SEQ ID NO: 109270 - DNA, 231 bp, Homo sapiens
  chr3:172428840-172429071
  hyper
ggcaactttctgcccgcggcagctgctcattcacgcgtttcttataagcccaggagccaatcagaggctgcgtcgggaggaagttggagcgcggacatgccccctctacggtgtccttgcaaagtgtggcagtcactacaggtttgaggaaggctctgtcgctgctctggccgtaggcacagcggactctggaggacactggtttgtactgcatgcgtgtgaggatggctt

SEQ ID NO: 109271 - DNA, 30 bp, Homo sapiens; identical to SEQ ID NO: 39926
  chr3:172468142-172468172
  hyper

SEQ ID NO: 109272 - DNA, 121 bp, Homo sapiens
  chr3:172468994-172469115
  hyper
cttatctcagagtgcgccgtggttttattctaggattcatcctggcttctttgcgggaagtttaatttttcgtttttgcaagataaatccaggccatccgcccctcgtcctccccagccac

SEQ ID NO: 109273 - DNA, 847 bp, Homo sapiens
  chr3:173113090-173113937
  hyper
tgcgttcacactactcgcacggaacagtctacagccaacgaacgcttcaattcagagattactctgcctctagctagaggaagcagaggaaagagaggggagtttggtggctagagatttaccaaaaagaggggggcgggggaaagaagaggcacagtggaaggctgttgcctccaactccgcgctctccgtcaccaagacgaaaacgcctggaaccggagcacgatgacgccgagaagacagaaactcagagcgtccgacgcctcgcgtctgggcggtcgtgcccgttcactcacacgccgctctgagtggtttggcgaacctcacacgtgactccctgggcccttcacccctcctgccgccgcgggcgctgcggaagctgcgggcggaggacgctcggctgccgcgggaggagtaagggaggagggcggaacttgtaaagggaggggccatcaccagcaccaagtctgccaccgccggacccgcgcccccgaagcccacccccaccaagatcgcgcctccgaccggcgggaggggcgcgcaggggaggggacgctgtgcaataaaccgggcggggagagggaggcagcggagggagtcctggctctgaggggggcaggattgggtctggaggatggtctggcttgattcagactcctgcacccgacaacgccacggagtgaggggagagggagagagagaaggtggcagtgtgtgtgcgcgcgtgtacgtgtgtgtgtgcgtgtctacaggtagcagtggcggcggcggcggcggcggcggggaccggagcaggggacgcatctgcagccacctccccgcctatgattttcggaggcgattgctc

SEQ ID NO: 109274 - DNA, 612 bp, Homo sapiens
  chr3:173114149-173114761
  hyper
ttcgctgtcccctcccgtttacagaagcatctgtggtgcttttcattttggatttacatgcaggaaacgtatatatgtttatataccgaccgcataatatataaatacatatacgcgtgcccaagggcctggttttcgtctctcctccccacgaaacggaatgttttggagccgatggataacaagaacactattaacattcttttgagcctgttttttaaaagggggagggagcgtgaagaattgtttaacatttggccatcgtttggctgcacactaagcaccacgaagtatttatggttgcagatcaggtgcaaacggggcttagagagaaaggtaagggagcttcctgcgtccgccgagctccggcgtttaccttaatcccggggattgccgagaacttcctattccctgcctctccttcgccttccccaccttccacccacccttctctgctctctctcttctgtaaactcaacccttttccaatcccattggggtgggggtggggggtgctggaggtataatcgtctatttgagtttaaatgcgtctctctttcccaggctagtagctgagttttccaatagcctttctggcggttttaggaaatc

SEQ ID NO: 109275 - DNA, 1016 bp, Homo sapiens
  chr3:173115047-173116063
  hyper
tttgccagagttgagcgagacgaagccgtgtctaaataagtacatgacactaaatttccttttaaatccaccttttacaccatggccagtcgcttgtttaactcccgttcaagggacacggttttcaaacgtgaccttttggggagatgtgggaacttcccctcatttcttcttctgtgccgctaacctctttcctcctccgcgcggcatctccagccccggcagtttgtaaattgcccgttttgcccaccctcctggtgggcgttctctcccccactccactcctgccccctctgtcctttcttcattggcgtcttcggagcagatgcatcttctttcttcttggcctcactctcccgttcccccgtcagtccccccacccgcggctccccacttgccccagctctcctcgccgctcctccccgcctccccgcggagggttgacccttcaattcggagtcccggcctgtgggcgggcgggggagcgccgcggctgtaagccgaggatcaggcggcggcgcggagagcgcgcccgggcggccagcgccgagcgcgcggagctggcgtggggagacacggcaggaaaggcgagtcggagtgggtgatgagaggccgggagagcccgtccgagccggagagaccggagagaagggagcgagcgactgtgcggcgctcacgctgccagagcccgggcggagtgcagtcgcctccaaagccttagagcggcgccccagtcactgcagctcttcaccctagagctgtgccctgggaccacagagaccaagagcatggaaatcggctgagaggtacaaaagaaataaggaacagattacgagaaagcggggagggtttcctggcgaaatacggaggctgagcagatggaggaacaatgccgcctccagaagaaaacccttgcctgaaccctcggcggagcgcagaggagctgctttcagccttctgctctccccaggccctccggctagttctggggttggttccgccggttagtttgacag

SEQ ID NO: 109276 - DNA, 30 bp, Homo sapiens; identical to SEQ ID NO: 2956
  chr3:173302127-173302157
  hyper

SEQ ID NO: 109277 - DNA, 257 bp, Homo sapiens
  chr3:173302411-173302668
  hyper
agccgaaagaagtaacgttgtttgatcatttgtatttcttgcctgatggtcggatttacatggaggtggctttgggtccccaggattctggatcgtggttgcatctggagagaaaaaaggatcaatcgacacgttttagaagtgtccgtgggtgaataaaaaaggaggggggggtgcaaaactggggttgcggatgcttaaagcaaaaaaagagaaaaggaagcgtcttgaatcctggaacaagaattaccgggtgc

SEQ ID NO: 109278 - DNA, 687 bp, Homo sapiens
  chr3:173302734-173303421
  hyper
cgaagtgttgtagagaccgtctccttgaatcattgcaaagggaccggggaaagatgagggggctccctctgtggatttatcttgctgagggtaagtttgtggctcttttattgggagggggctgccagggttttgtgccactgcgcggaaggtgatgcggacgcggtgcctgtgaaatggagagagaaaggggaatataaaaccacctcgcgcatccccggggggatcgctagggagctacctagatcgagctaaaaaaccttgtttttgtggcgtcggtgggggagccaagcagctctccaagctctcaactttgcattgaaaatctctcagttgggagacgcttcccagatccagtgctttctcctagcaatactttaaggagaggaggcagcggtgccttggaaaacctgcatgtagagcggaaaagcccaagtagaaatcgctggtgcttcggccgccgtttctgcggctgtcgtggcttctagggggatattttgcagggggaattggctgttttcatgttgtctcctcccccacccctctcttcctaccccttcccgcttcccgcttctctcaaccggacactaaagggttacagggtcactgcaccggatagagacagtagaagtgggtggctggccacacatgttgtcttgtaattcacttgcacgactttccataata

SEQ ID NO: 109279 - DNA, 1074 bp, Homo sapiens
  chr3:174158357-174159431
  hyper
aattcaagtaacttgcgtaagtcacgaagctataaccaggaatttggctctgcaagcaatgggctttaaaaattcttttaaaagttttattagattcaaagactatgtataaaatatatgcaaattataaacgaaacatatcttttgatgggcaccatgggggcaagtttccagttttgcccattaaaaaaaaaatccttcccaatttttgaggcttgtgccattgaacactgctgcccgcggctcttcttcccacttggctcgacaaacgcgtcttttattatgactcagcccagcccgttccttgccaagcggctgacgctcgcggcggaggcgccggggccgccgctcgggggcgagggttcgcgccgcggctcgcgcccgcttctcccgctttacggctgctgaaaatccggcctggcccggcagccgtaccgcagacgagcccgcgcccgcgccgctcaggtaatcggagtccttttcttttcaaagttttgccaaaacaagctccgcgctctgaggcggcgcggcctcggccgagcggtccgtgtctccttgctcctccgtcctacccaagctggcgcgactgagctgtgggccgcacccctgcgcggggcccggggcgccgacccggcgtgaagtacgggggccgaggggcgcccggccggcggcgggttctgagcgactccgcggggtggcgcgcggggcacctggctctggcagtccgcgaggcgcgctggccaaaggagctcccaacccgctccaaggcccccgcccacctcccgaagccgcttgtcttaggagaggagcgtagcagctccgagtccccgcttctgacacgttcacacacgtatgcagtgcacgccggccaggcagcccgacacggcgcgctagcggggcgcaggtaaagagcggcgccgcgggcccgcgcgttcgaaatggcgcgcagcacagttccgcccccgcgcgtggaatgccgctccagtggacgcccaggatggctttcttaaggaagtttatgagaagccatggaaagagcagcctgggatcagagcctgcgctgctggttctacc

SEQ ID NO: 109280 - DNA, 30 bp, Homo sapiens; identical to SEQ ID NO: 2961
  chr3:175414760-175414790
  hyper

SEQ ID NO: 109281 - DNA, 30 bp, Homo sapiens; identical to SEQ ID NO: 39936
  chr3:176914193-176914223
  hyper

SEQ ID NO: 109282 - DNA, 30 bp, Homo sapiens; identical to SEQ ID NO: 39937
  chr3:176914740-176914770
  hyper

SEQ ID NO: 109283 - DNA, 91 bp, Homo sapiens
  chr3:176915777-176915868
  hyper
ccgcgtgtccggggggcggcccggcggcgttgggggctgggcgcacacgcggcgggcatgtgggggagtgcggcgcggcatcatatggaca

SEQ ID NO: 109284 - DNA, 31 bp, Homo sapiens; identical to SEQ ID NO: 2963
  chr3:177077212-177077243
  hyper

SEQ ID NO: 109285 - DNA, 30 bp, Homo sapiens
  chr3:177077578-177077608
  hyper
gtggtaaaagcttccggggggaggcattag

SEQ ID NO: 109286 - DNA, 30 bp, Homo sapiens
  chr3:177078338-177078368
  hyper
gtgtgcgcgcgcgcgcgcgcgattctctgt

SEQ ID NO: 109287 - DNA, 160 bp, Homo sapiens
  chr3:178789081-178789241
  hyper
tgtgcatgcatacacacgaacccacacacgcacctcaacccggtatggatgccatcacgaaggatggaatcccccgactcccacggggcgggggcaactgagagggccaaggcagctgcacgcacagatgatccacctggtccacgtgaaatgcctgaaa

SEQ ID NO: 109288 - DNA, 322 bp, Homo sapiens
  chr3:178789519-178789841
  hyper
gccccctccgcagccgaaggctgactgtcaaaagtcagtccaacccgacccacagggaaacagctgcaggaagtgactgcggaaccgggaggcggtggaggaggagactgagggcgccggctcggcgtcgccactgcgcatgtgcttggcggagcaggcccggcagcggtggcagcggtagcagtggcggctcccgcatccccggcgggcggcgcgtgggtcaggtgccctggccgcgagcgcaggggcgcggggttaggccggcgtggggaacaaaggcacgagtgagaggcgggagggtcccgccgccaatctcagcaga

SEQ ID NO: 109289 - DNA, 30 bp, Homo sapiens; identical to SEQ ID NO: 39942
  chr3:178865266-178865296
  hyper

SEQ ID NO: 109290 - DNA, 158 bp, Homo sapiens
  chr3:178865535-178865693
  hyper
ttagccactgacagcggcggttagccaccgcacctcctctcacccccgaactaatctcgtttcctctatgggtgtaaaagtgaaataacccacttgctcccaatattcctttctatatctctaccccagctcgcctgctgctcgtagaaacaaatata

SEQ ID NO: 109291 - DNA, 30 bp, Homo sapiens; identical to SEQ ID NO: 39944
  chr3:178865989-178866019
  hyper

SEQ ID NO: 109292 - DNA, 177 bp, Homo sapiens
  chr3:178866989-178867166
  hyper
ttagctgagacaaacgcttagatctttcattcatagacctgagacactgactcatgtgacttgtctctttactaagtgtattatgtgatgcctgttccatggctcttaagtggctcggaaaggtagggtagggcccgggattgggctatgtaaacaccagacgttcagccggcgtgt

SEQ ID NO: 109293 - DNA, 30 bp, Homo sapiens; identical to SEQ ID NO: 2966
  chr3:178916861-178916891
  hyper

SEQ ID NO: 109294 - DNA, 30 bp, Homo sapiens; identical to SEQ ID NO: 2967
  chr3:178921538-178921568
  hyper

SEQ ID NO: 109295 - DNA, 39 bp, Homo sapiens; identical to SEQ ID NO: 2968
  chr3:178936067-178936106
  hyper

SEQ ID NO: 109296 - DNA, 30 bp, Homo sapiens; identical to SEQ ID NO: 2969
  chr3:178952070-178952100
  hyper

SEQ ID NO: 109297 - DNA, 30 bp, Homo sapiens
  chr3:179040454-179040484
  hyper
ggcaagaccactcgcgtcctttcccttgag

SEQ ID NO: 109298 - DNA, 30 bp, Homo sapiens
  chr3:179041211-179041241
  hyper
atatggcgggatggcgttcccctcccccat

SEQ ID NO: 109299 - DNA, 30 bp, Homo sapiens; identical to SEQ ID NO: 2970
  chr3:179041479-179041509
  hyper

SEQ ID NO: 109300 - DNA, 41 bp, Homo sapiens; identical to SEQ ID NO: 2971
  chr3:179064153-179064194
  hyper

SEQ ID NO: 109301 - DNA, 445 bp, Homo sapiens
  chr3:179065417-179065862
  hyper
gcctggcatagatgcgcttccggccacggagccaaacagaacagaggaggcaagaggccggaagtgaccgccctttgccactccccctgcctcctctccgcctttaacttctcgggaagatgaggcagtttggcatctgtggccgagttgctgttgccgggtgatagttggagcggagactgtgagtgccggctgcctcgacagcacgtttgcgacgctcggagtgaccttcgagcgactggggaccgggggcgggagtcgtgcatgcagcgttgtgtgacgaggcgccgcccgccgcggtcctgtgggaaaggagagagccagctgtcgggcgaacggggctggcggccgagtcgagcccacggagcccacgaggccgtgctcgggggtgggattgggggatccggacctagacggtcgtgcgcggggcgggggtgggctctgg

SEQ ID NO: 109302 - DNA, 1132 bp, Homo sapiens; identical to SEQ ID NO: 39952
  chr3:179168655-179169787
  hyper

SEQ ID NO: 109303 - DNA, 117 bp, Homo sapiens
  chr3:179280317-179280434
  hyper
aaaagaaagaaatccgcattccccacagtcactggacaggaatctcggcgtggagacacccgttcaatttccaggggtctaccttcccctacccgggttcccgccgctcctcagcgc

SEQ ID NO: 109304 - DNA, 30 bp, Homo sapiens
  chr3:179280637-179280667
  hyper
ggatgcggcgcagccgcattctgattggct

SEQ ID NO: 109305 - DNA, 128 bp, Homo sapiens
  chr3:179281447-179281575
  hyper
ctgcgccccatgcgcgagctgcctcacctttcagtaactcttgcctgttttttggctgcggagtctccagagtgactcgtgggcgggtctgtttgagatcaattcaggagcacgtgtaatttaaggat

SEQ ID NO: 109306 - DNA, 30 bp, Homo sapiens
  chr3:179322231-179322261
  hyper
tgttctcggcatctcggcatctcggcaacc

SEQ ID NO: 109307 - DNA, 254 bp, Homo sapiens
  chr3:179322629-179322883
  hyper
ggtttcggttactgcggtggcagctctgtctggccggccccttggcactcgcctcggatttgggggcttcctcactcgtggctttccgaaggctgctggtgggtgctggcctagggagaacgggcgtgaagcgggtgcggggcgagaaaagggaggacgcttccagggtgaccttggtgggatccggagggagccgggacaagttgtgggcttggggcttgacaggagagacggagcacgagctatatgagggg

SEQ ID NO: 109308 - DNA, 35 bp, Homo sapiens
  chr3:179367208-179367243
  hyper
ggattacaggcgtgagccaccgtgcccagcatagt

SEQ ID NO: 109309 - DNA, 80 bp, Homo sapiens
  chr3:179367504-179367584
  hyper
aatttcacgagtgccacagtaccaggtctgtaatgatgaggtttcttcacccgtccagtagagggcgcactcttgcggcg

SEQ ID NO: 109310 - DNA, 36 bp, Homo sapiens
  chr3:179370450-179370486
  hyper
gcccctatccaatccggggacgtcaccgccctagtc

SEQ ID NO: 109311 - DNA, 30 bp, Homo sapiens
  chr3:179370806-179370836
  hyper
tggattaaaaatagcgtcgccagtccgccc

SEQ ID NO: 109312 - DNA, 30 bp, Homo sapiens
  chr3:179371495-179371525
  hyper
ttgcagatcgtttgcgtcctccgcggggca

SEQ ID NO: 109313 - DNA, 115 bp, Homo sapiens
  chr3:179754077-179754192
  hyper
gggtttcctctgtttcgattccttgatcctgtttaaagaaacaggctcagggaatgcacagaaaacaaacttccccaatcgaagttctgaggtcttccctccccttctcccacct

SEQ ID NO: 109314 - DNA, 521 bp, Homo sapiens; identical to SEQ ID NO: 2973
  chr3:179754238-179754759
  hyper

SEQ ID NO: 109315 - DNA, 69 bp, Homo sapiens; identical to SEQ ID NO: 2974
  chr3:179754803-179754872
  hyper

SEQ ID NO: 109316 - DNA, 241 bp, Homo sapiens; identical to SEQ ID NO: 2975
  chr3:179755086-179755327
  hyper

SEQ ID NO: 109317 - DNA, 226 bp, Homo sapiens
  chr3:180319828-180320054
  hyper
ttccgtagtctcgctcggtttcgcgagatcgaggctgagctccgccgcgccgccgtgggggcgaccccagaacacttccgggtgtaactggttgtgctgtctgtgtacttccggcagcctccagacagtttcttccgcttcctgtaccacccggctcaagtagcggacacggaacagggaactatcagcccgtcggcctccgggccctgcattctctagccatgga

SEQ ID NO: 109318 - DNA, 319 bp, Homo sapiens
  chr3:180320087-180320406
  hyper
cgggtcgtctttgctctctctacttcggagcgaacagcaggacaatccacacttccgtagcctcctggggtcggccgccgagccagcccggggcccgccgccccagcacccgttgcagggcaggtaatgagacgttggtgccactgcgccacggaagaggggacgcagctctggcagccactaccgcagccccgggtttgcgtctagaggaagtggagccgcggccgtgagcacaggacgatcgcgcgctggtgtcttgggctgggtggacggggggcgctcctgggttgtgcaatgcgggatgcgggctgaacttttt

SEQ ID NO: 109319 - DNA, 54 bp, Homo sapiens
  chr3:180396750-180396804
  hyper
caaggaaaaagcgggcgccggaaccagcctttcctctctcgccaggaggaacga

SEQ ID NO: 109320 - DNA, 966 bp, Homo sapiens; identical to SEQ ID NO: 39960
  chr3:180397083-180398049
  hyper

SEQ ID NO: 109321 - DNA, 191 bp, Homo sapiens
  chr3:180630142-180630333
  hyper
aggcactactcggccgccgcggtgcgaactgcgggcactgtggggcggagacctaggggcgggtcaacaaaggtcgggcgattgtgtctggaggcaaatccgacgtagacggcggcaggcggagcccaaagccggtgatgcagggtgcgcagggatcccacctggagagtcggggcggcacgttgagaccc

SEQ ID NO: 109322 - DNA, 40 bp, Homo sapiens
  chr3:180630765-180630805
  hyper
cttggttgctagtgcggttcttggcgggccggtgggaagc

SEQ ID NO: 109323 - DNA, 55 bp, Homo sapiens; identical to SEQ ID NO: 2977
  chr3:181413013-181413068
  hyper

SEQ ID NO: 109324 - DNA, 916 bp, Homo sapiens; identical to SEQ ID NO: 39962
  chr3:181413421-181414337
  hyper

SEQ ID NO: 109325 - DNA, 237 bp, Homo sapiens
  chr3:181418233-181418470
  hyper
aggaaggggacatggcgatacctcgttttttataagagattgacatagaggaagatagaaatgcatgggggcagaataagcaggaaatattacctgagagaaggaattacagagcatggcgaagctggaaggtgggagggtttctgcgggaagtcgagcgaggggtgatggggcttgctctttggcgccctctaatggcaacttgaaccaatgttttactttcgtaatgcagtactg

SEQ ID NO: 109326 - DNA, 96 bp, Homo sapiens
  chr3:181418701-181418797
  hyper
cccaattagccattgcgggcgggggagagggtgtaggattcgtttcctacctgaacagcattctgactcttctaacatactcgagaggtgtagggg

SEQ ID NO: 109327 - DNA, 106 bp, Homo sapiens; identical to SEQ ID NO: 2979
  chr3:181419690-181419796
  hyper

SEQ ID NO: 109328 - DNA, 645 bp, Homo sapiens; identical to SEQ ID NO: 2980
  chr3:181419915-181420560
  hyper

SEQ ID NO: 109329 - DNA, 1094 bp, Homo sapiens; identical to SEQ ID NO: 39967
  chr3:181421144-181422238
  hyper

SEQ ID NO: 109330 - DNA, 455 bp, Homo sapiens; identical to SEQ ID NO: 2982
  chr3:181422661-181423116
  hyper

SEQ ID NO: 109331 - DNA, 611 bp, Homo sapiens; identical to SEQ ID NO: 39969
  chr3:181428195-181428806
  hyper

SEQ ID NO: 109332 - DNA, 1086 bp, Homo sapiens
  chr3:181429280-181430366
  hyper
acgagttggacagccgccctgagccacccactgtgccctgccccacccccgcaccttagctgcttcccgcgtcccatcctcatttaagtaccctgcaccaaaaagtaaatcaatattaagtttaaagaaaaaaaaacccacgtagtcttagtgctgtttacccacttccttcgaaaaggcgtgtggtgtgacctgttgctgcgagaggggatacaaaggtttctcagtggctggcaggctggctctgggagcctcctccccctcctcgcctgccccctcctcccccggcctcccccgcgcggccggcggcgcgggaggccccgccccctttcatgcaaaacccggcagcgaggctgggctcgagtggaggagccgccgcgcgctgattggtcgctagaaacccatttattccctgacagcccccgtcacatggatggttgtctattaacttgttcaaaaaagtatcaggagttgtcaaggcagagaagagagtgtttgcaaaagggggaaagtagtttgctgcctctttaagactaggactgagagaaagaagaggagagagaaagaaagggagagaagtttgagccccaggcttaagcctttccaaaaaataataataacaatcatcggcggcggcaggatcggccagaggaggagggaagcgctttttttgatcctgattccagtttgcctctctctttttttcccccaaattattcttcgcctgattttcctcgcggagccctgcgctcccgacacccccgcccgcctcccctcctcctctccccccgcccgcgggccccccaaagtcccggccgggccgagggtcggcggccgccggcgggccgggcccgcgcacagcgcccgcatgtacaacatgatggagacggagctgaagccgccgggcccgcagcaaacttcggggggcggcggcggcaactccaccgcggcggcggccggcggcaaccagaaaaacagcccggaccgcgtcaagcggcccatgaatgccttcatggtgtggtcccgcgggcagcggcgcaagatggcccaggagaaccccaagatgcacaactcggagatcagcaa

SEQ ID NO: 109333 - DNA, 868 bp, Homo sapiens; identical to SEQ ID NO: 39972
  chr3:181430443-181431311
  hyper

SEQ ID NO: 109334 - DNA, 30 bp, Homo sapiens
  chr3:181432957-181432987
  hyper
ttcttaaattggcagcgcgggtccaagcct

SEQ ID NO: 109335 - DNA, 210 bp, Homo sapiens
  chr3:181433436-181433646
  hyper
actacttgattcgctcgtcttcccccacccacggggaccaggaaccaacaatcgggcacttttaagagcacgggtttgcttcccacaatttcaagagcttgtgtcaacttgctacaactttggagaagttggaatccggcagcgtcttccacccttgagtaaagtacccgctgcagccactaagttagctcatcccgttggtttgcatct

SEQ ID NO: 109336 - DNA, 523 bp, Homo sapiens; identical to SEQ ID NO: 39974
  chr3:181437060-181437583
  hyper

SEQ ID NO: 109337 - DNA, 187 bp, Homo sapiens
  chr3:181438166-181438353
  hyper
tgtattaaataaggagcggtgaattcttcccaagggttcttatcgctggcggccaggccagaagcgggactgcgcccccacccccacctcgtgacgtcagggcctgcagggctccggggatgaaatgattcgtttgagtgttccagaaagggcaatccgaacgcttacagggcgaggccagtgcagc

SEQ ID NO: 109338 - DNA, 153 bp, Homo sapiens
  chr3:181440929-181441082
  hyper
tgcccccgcccacttcgccacttcttagtcccggatctgaacattttagctgaaagagggaggggtgaggaaagggccaggacagttccctcagtgccaccactgcgggcaaggacagttccctcagtgccaccactgcgcctggagagatcc

SEQ ID NO: 109339 - DNA, 529 bp, Homo sapiens; identical to SEQ ID NO: 39977
  chr3:181441348-181441877
  hyper

SEQ ID NO: 109340 - DNA, 345 bp, Homo sapiens; identical to SEQ ID NO: 2990
  chr3:181442080-181442425
  hyper

SEQ ID NO: 109341 - DNA, 586 bp, Homo sapiens
  chr3:181442963-181443549
  hyper
ctggaagagcacatgaaactcagagaactacaatgcagacgacaacgcctagaaggaatgggtccccgctgctcgaatgaaagattaattacatttgccccaaaagccccaattctaacggtctctatcgcggcttttgccgtcactgaaggaccgctgtctctggggtcttcagacatcggagtcctttgcaaatgaagagcccccaccatttggaattcgggtcaaggagaaagactctgagcctgcagcagtttttgtttttgcgtgtgcccgcctctccattttattcaacttcttctgcctgtcgggaagcagaacaatcgctccccacccacccccctccgccccgtttctaagataaacaggaggtgcaaaatgctttgcctgcacacgcgccctcgtggcccagtcttcctgcaacccccagcgcaccggccatgcatctgtctcccaaccagacgtgggagaagacatccccccttcactcttcccacctgcatttaaaaaccatcacattgactgctctagagtcaggttcacatttttggccctccatgccaccttccagtttcttcccggtcca

SEQ ID NO: 109342 - DNA, 95 bp, Homo sapiens
  chr3:181444050-181444145
  hyper
cataattatgcactgcagattctccagcctcctcgccctcaatcttggtaacctggtctttggttaataatatcgcaactcgggacttcaacgct

SEQ ID NO: 109343 - DNA, 178 bp, Homo sapiens; identical to SEQ ID NO: 2993
  chr3:181444346-181444524
  hyper

SEQ ID NO: 109344 - DNA, 336 bp, Homo sapiens; identical to SEQ ID NO: 2994
  chr3:181444612-181444948
  hyper

SEQ ID NO: 109345 - DNA, 736 bp, Homo sapiens; identical to SEQ ID NO: 2995
  chr3:181444988-181445724
  hyper

SEQ ID NO: 109346 - DNA, 196 bp, Homo sapiens; identical to SEQ ID NO: 2996
  chr3:181445799-181445995
  hyper

SEQ ID NO: 109347 - DNA, 332 bp, Homo sapiens
  chr3:182399998-182400330
  hyper
aattaaagaaaggttcgaagtttagtttgacattcacctctgcctttataaaacaaacacagcctataaaataacttaaacgcccagagtgccgagtttcgtcgggccctggctgcgccgggccgagccctgccccgcggaggtcgccgcccagcacggtctgcagatggcagcctctcgcggaaagccccgcaacgccgcttcctgcctgggggcggcacttggggcccgcgccggggtttcagaaacctgttcgagccgttcctttatggcggaacgttcttatttagtaaatatttattccactccccgaggacccagcactaatcact

SEQ ID NO: 109348 - DNA, 30 bp, Homo sapiens
  chr3:182400824-182400854
  hyper
agcacgtggggtggcgtttgccccagcatt

SEQ ID NO: 109349 - DNA, 30 bp, Homo sapiens; identical to SEQ ID NO: 39986
  chr3:182401172-182401202
  hyper

SEQ ID NO: 109350 - DNA, 293 bp, Homo sapiens; identical to SEQ ID NO: 39987
  chr3:182510866-182511159
  hyper

SEQ ID NO: 109351 - DNA, 171 bp, Homo sapiens; identical to SEQ ID NO: 2998
  chr3:182511622-182511793
  hyper

SEQ ID NO: 109352 - DNA, 37 bp, Homo sapiens
  chr3:182512111-182512148
  hyper
tctagccccctcagcgagagacgtttctccccaggac

SEQ ID NO: 109353 - DNA, 30 bp, Homo sapiens
  chr3:182697295-182697325
  hyper
tgaaacgcgaagagcgtccagcagagtcag

SEQ ID NO: 109354 - DNA, 193 bp, Homo sapiens
  chr3:182697831-182698024
  hyper
ccccggcttcggggcggggggaggctactcacccggaaccccagaccccagtccccgaccagacacaatggagccggcagaggggcaggggcaaggccgttgccccctcccctccccccgccccaacgcctcccccacccgcgccgggccccggcaaggggcaccggggccgctccccgcgccccaaactccc

SEQ ID NO: 109355 - DNA, 146 bp, Homo sapiens
  chr3:182698590-182698736
  hyper
gtctctggtgggggcgccgggggacaccccacctccgtttcctacgcggttccttccggacgaccacggccgggtctacgcaggctggaagcgggcacgagcggcggcggataagttgagcagctgggggcggctgaaacggatgg

SEQ ID NO: 109356 - DNA, 423 bp, Homo sapiens
  chr3:182833876-182834299
  hyper
ccatgaaggactggccggcggccaatggggggctaaaggggcttgttgtcatgggagcgaggatgtgatctatatgctgcacctgcggctctcctgctcatgcgcactgactgcacccgctgttcccctgcccatgcgcactgactgcacccgctgttcccctgccggtgcagactggctgcacctgctgttcccctacccgtgcgcactggctgcacctgctgttcccctgcccgtgaggactggctgcacctgcttttcccctgcccgtgcggactggctgcgcctgctattcccctgcccttgcggactggctgcgcctgctgtttccctgcccgtgcgcactgactgcgcctgctgttcccctgcccgtgcggactggctgcacctactgttcccctgcccgtgcgcactggctgcact

SEQ ID NO: 109357 - DNA, 446 bp, Homo sapiens
  chr3:182880263-182880709
  hyper
gggaagcccttggacgcgccacacctccctacccgcagcccgtcctgtggcgcccgggactccagagtgcgtttagatgaaaggggaccgacacgtcagggccaccgcgggaagcgctgagggccactcaccggccagggacgcgaagagcgcggccgccgcgctgagctgccggggcatggtgggcgctgggcgaggttctgcagcgtgcggcgaagtccgggcaggccccgaatcggtgccagagaaacctacctgtgccggagaaacgaaaccacctgcttatgagaagcagccgaaaagcccgcccagggccgctgggcggggagggaaactccgccggccccctcctacccctacggagcagggaggggcggggactcggcgcagccgccggggcccgggcctctgggaccgtttaccgcacgcgcgtggtcccggcagcg

SEQ ID NO: 109358 - DNA, 225 bp, Homo sapiens; identical to SEQ ID NO: 39995
  chr3:182896563-182896788
  hyper

SEQ ID NO: 109359 - DNA, 260 bp, Homo sapiens; identical to SEQ ID NO: 3002
  chr3:182896847-182897107
  hyper

SEQ ID NO: 109360 - DNA, 334 bp, Homo sapiens
  chr3:182897157-182897491
  hyper
cgcagggaggtcagctctcctgggcggaggtcctcgggcgcagcgccctcgcctggaaaccagccgtcgcccccgcaggagccagccggcccgtggacgccccagcgcgctcctcctcggtgctgcgggtcgccctgcaattccgagaagaaagtcagagacgccgtggcccaaagaggcgcttagtctttcctcgctcacactcacgtttcctcctcatcgcgttcttctttttctccctggctgctttctcccctctccaggaaagcagatttggaggaacaggtttcgtgactgtcgtccgactggaaaaggcccgcgagctggaagggag

SEQ ID NO: 109361 - DNA, 1656 bp, Homo sapiens
  chr3:182970888-182972544
  hyper
agaacaaactggggcggggcccatcaccttcacctacgcgccgggagggtggcggctggcgggcggggccgggctcgggccgtgacgccgagagtgcggggcgcgcggctgggagcctcgcgcccccgcccgggcccgcccccatcccgcccgcatacagcccgcatcccgccggggaagcgagcccagtccagcgctgcccgtccagtcctcgcccaagatttaaagcccgcaagttttgttcttgagaccagcgactttagctccgatgcgggaaggaaagccgacctccgatttggacatttaaagagctgggcttgaacttcgtgagtttcgctctaaactgcccttgaaatgaagctggacttggaggtaaagtcactgggaagctggcctggggcggggtttccccctcttctcgtattttagaaacggacagcggcagtgcagccctagtttgctgtaagtttccttactttgttactgaggcccccagagctccacgcataagtggtgtgaccagaaaccttttaacaagacccgcctgagcctgcgttagagctcccgctcggaaagtaaaagaccatcctaatccgcggcgctgcggaaccggtgtcccgtgtgggaggaaccgcggcgttccctgggcgtagggcccgcgaggccagcacagtccgcctcttggcggagcgccctgggccggtggttccgcgcggagttagtctgtggtcagttacgtggtgaaaacacggctgtgccgcggccgcatctttccgcggccgaggcctctctgggtgggagtgttggcttcctttccggatcgctaaatggggaaagttctggccgctcggcgggatacgtctccaggccacggatggttcgttctccgtgccgcggccccgagctgggctccctgggtctccagcgcgggctcccggcattgggggctgcgggccggcccctccgccccgcccccgccccgccgcgcctcctcggccgagcggctcgcggtctccggcgcgggaggctccgagtctgcccactccgggccgagcgaggtctctggaggagaagagtggcgaggaggtgagggcacgccggccctcgcccggcgggtggcgccaggacttcaggtgggaacgcgcgcttgggccgggggcgcgtggctggcgtggacaccggatcggggcccgccgccctggcccggaccgcgcacggcccagcgccgggaagtcgggaagccggggaggcctctcccaccgcgggccccggcagcccgccctctgaaagcgcggcggagaaggaggctcgtcccctccccggaacgcctttgttccctccggcctgcccgcgcgggtggccagcggctgggacccaggccgggccgccgcccaggtgcggcaggtaggctcgggggccgggcagctccggttggggcggcttcccggggcctgcgggtccccgtccctgaggagctccggctcctcggtggcgggacaggcccgtgcgcgggagccgcgaggcgaacgccgcgcccaccaattcggttgccggccgggggccccaggcttgcggccacccgcctccggctggagggctgaattcgagtcgaaagcccgtgtcgggctggaaagaagaaaccgccaacctgagaac

SEQ ID NO: 109362 - DNA, 1397 bp, Homo sapiens
  chr3:183145433-183146830
  hyper
ggagctcaacggactcggcaaccacctggtgaaggcaccagcctcggccccccgacccccaccagcggcgcgccccagggatgccccccgctgggcaccgcaggcaggacccagagcagcgaggcccagatgccgggcaaccccccaggaagcgcgctgccccggggcagcgggtgaggccaggagccagatgaagcccagagaccatcctcacccgccattaataaaacgcaggaaaaattaaagcttcgtttaccgacatgagtgatcactgtggccagtcgccgggtgagctcctggggaggcatctcttcttttaagcaagacagcatttcactgaaaaaccattccgtataaataaagccaaacaaaactgtttctaccgctgcggtggatgattttttaaaggcatctccgcccaaggatgctctgccctcgccctcttcctggctctccaggcaagaaacgagagtccctcgcagcctaggccagctctccctcgccacgccccgcgggggctcccgtgacagaccaagtctggcgctttcccagcgtcgcagctggaccgagagaggagcggccgttctgcaaaaggaagcaagtcgccaatctcgccggaaccgcgccccggctcctccggccgggcgagctccggggcttccagaatcgcggtcccggccgccaggtttccggcgccgcctccagggactgtagagtgagggatgctccgccaggtgcaggggaggcggcaggtggccgtggcttctctgcgccgccggccccacgccccagcgcccacctcgtccagcccacgggtggcgcccggggctctcggggaggcacgcacgctcccaagcgccgctcgttttggggtcgggaacgctgcgcacctttccctgcggggagcccgcgctccacccccggagtggagctccggtccttactcggaaccgtggggcggggagacagtgactgaggcgctccagtcgcaccggggtccggatcatcagacgcgcgccggccaggtctccgcccctccttcttccgcgccgggtgtctgcggaggagccgcggagagaagggggctggcccggagagctgccgccatccggcaggacccggagcgggaggctgggtgaggcgccgctgcttgccccacctcctgaccccgggggcggctggcgtgtgttttcccccacttggggttgttccacgcagttcttgacctccgctggccacacctgcactgggagcccggcgcccgggctgcgctccgacaaggctgagcacgcgtgggcgcgctcaccccctatgtgggcgttttccttcgtgcagctgcgcccttgcctctgctccgtctgtcacctgtcaggcacgccagtgctaccttctggagg

SEQ ID NO: 109363 - DNA, 822 bp, Homo sapiens
  chr3:183165025-183165847
  hyper
gacagtctcccgccccgtttcttcacctcagttctctaaagattgaaggtcaagaggagggtttcttgccctggagcctgcgatagggtgggcccttgcggttcttgggcggaaacggcgatagggacacccagggcctaaggaggctggggacagagcagatcctcccagcccccaacatcaccccggagtagatgcagacccccagggtcccggaggccgagaccacaccccgcgggcacgagcccgattggcagattgtagccgagtggtttcaacggtgacgccccccacccgaatgcctcgctgggattggctcatttcttggttcagacctggacggtggccagaggaggacaagaggcttttacaccgaacggaggtgatgtggacgacaacggagacgcagccgcacttcaccaagcggccggtccgaggggacatggcggcaacctctgcagcgtcagtgctgctggcgggtgcaagaaactggtggcgacactgcctgagcccgctgctgttgccaaggtgacgaggcataaagccgcggtggatcggtgcgtgggggcgcggggtgggtggtgaagggagaacgaagctcgagcggaaagacaggaccgcgaccgcttgtcaggggattcggcttccagtcccccttccagagggcgtccttctgcagccaggcctctgtcttcccccgcccccacacggtacgagctacagaatgcttttctgttttctctttttctatagtaaggaagcgctttcctttctcccccgtttattcatttgcttacttctggttcccgtgtccttttaaca

SEQ ID NO: 109364 - DNA, 30 bp, Homo sapiens; identical to SEQ ID NO: 40001
  chr3:183353036-183353066
  hyper

SEQ ID NO: 109365 - DNA, 109 bp, Homo sapiens
  chr3:183353357-183353466
  hyper
ccagggttcgctgacgctcagtgttttggcccggacggtcacatgtttcctttgttgtgagctgcggcagagactggtggctggaggagacgccggcgctggagagtgc

SEQ ID NO: 109366 - DNA, 30 bp, Homo sapiens; identical to SEQ ID NO: 40003
  chr3:183354800-183354830
  hyper

SEQ ID NO: 109367 - DNA, 80 bp, Homo sapiens; identical to SEQ ID NO: 40004
  chr3:183415418-183415498
  hyper

SEQ ID NO: 109368 - DNA, 744 bp, Homo sapiens; identical to SEQ ID NO: 3007
  chr3:183542792-183543536
  hyper

SEQ ID NO: 109369 - DNA, 30 bp, Homo sapiens
  chr3:183602425-183602455
  hyper
gcccagacggcctccgcccccgaggataca

SEQ ID NO: 109370 - DNA, 374 bp, Homo sapiens
  chr3:183602723-183603097
  hyper
ggagcagtctagagcgcccccgcgcggctgagcggcagccgaaccagccacggtgcccggacgactggctggcgcccttctgtcccaccgcttcccctcccactgctcagctggctccgggagcgacctgcgagagtggcccggcctcccggcatttgcagatgaggaggatggggccagagcgaagagggacaactgtcattttttcgagtaacggcacataccaggcgctttgcctaagatcgcatttaatcgtcacagcactgctagaggtagatgtcatcactgtttcactttgcctctggtcagaggggataggacttgcccggagttgcagggctggtccctagaggaaccaacgtggcaagccaagt

SEQ ID NO: 109371 - DNA, 88 bp, Homo sapiens; identical to SEQ ID NO: 40007
  chr3:183676017-183676105
  hyper

SEQ ID NO: 109372 - DNA, 117 bp, Homo sapiens
  chr3:183736069-183736186
  hyper
gcccgcgtctaacccgttgagagtcgtcaggccggccagccccagttcttatctgttgtggcagatacgattgcttgctcatggttcgaccctgcagtctgcgcagataccgccttt

SEQ ID NO: 109373 - DNA, 87 bp, Homo sapiens
  chr3:183851914-183852001
  hyper
ggtccccctaggcgggcgccggagcacgacgggtcaagtcggaatcgccacgtggaaacagctctcagcatcgcgaactccaaatcc

SEQ ID NO: 109374 - DNA, 46 bp, Homo sapiens
  chr3:183852314-183852360
  hyper
acaacttactggtgcgcctggatccacccccgtctccactctgctt

SEQ ID NO: 109375 - DNA, 30 bp, Homo sapiens
  chr3:183852741-183852771
  hyper
ttctagaatgaatacggagggctacatatt

SEQ ID NO: 109376 - DNA, 30 bp, Homo sapiens
  chr3:183853145-183853175
  hyper
gcggaagtggtgaccgtgagagaagaagat

SEQ ID NO: 109377 - DNA, 30 bp, Homo sapiens
  chr3:183872911-183872941
  hyper
gactgcagaggagtcgccgatcccacttgg

SEQ ID NO: 109378 - DNA, 30 bp, Homo sapiens
  chr3:183873414-183873444
  hyper
gccagagccatgggcgagaccaagatcatc

SEQ ID NO: 109379 - DNA, 53 bp, Homo sapiens
  chr3:183892562-183892615
  hyper
gccgcgaggcctgacgggatttgtagtcggcgctagacgccggcgcgcacgcg

SEQ ID NO: 109380 - DNA, 30 bp, Homo sapiens
  chr3:183893050-183893080
  hyper
accccctacccctccgcgcaaggacaattt

SEQ ID NO: 109381 - DNA, 30 bp, Homo sapiens
  chr3:183903535-183903565
  hyper
ggcctgactgggtacgcaccagcagcagac

SEQ ID NO: 109382 - DNA, 30 bp, Homo sapiens; identical to SEQ ID NO: 3011
  chr3:183903765-183903795
  hyper

SEQ ID NO: 109383 - DNA, 124 bp, Homo sapiens
  chr3:183904301-183904425
  hyper
gcacagcggcagcgcggacttcgagtctgtggatgacctggtggaagctgtaggggaactattgcaagaggtgtccggggacagcaaggatgacgcgggcatcagggccgtgtgccagcgcatg

SEQ ID NO: 109384 - DNA, 30 bp, Homo sapiens; identical to SEQ ID NO: 40011
  chr3:183904637-183904667
  hyper

SEQ ID NO: 109385 - DNA, 30 bp, Homo sapiens; identical to SEQ ID NO: 40012
  chr3:183947054-183947084
  hyper

SEQ ID NO: 109386 - DNA, 30 bp, Homo sapiens; identical to SEQ ID NO: 40013
  chr3:183966619-183966649
  hyper

SEQ ID NO: 109387 - DNA, 118 bp, Homo sapiens
  chr3:183967306-183967424
  hyper
atagttttcccagccggaggattcttcgaagagcgcttagtaaaggacggaagttccacgtgtttgtgttgagcaactgcaggtggtgggcggagacaccagcgccccgccttctgca

SEQ ID NO: 109388 - DNA, 30 bp, Homo sapiens; identical to SEQ ID NO: 40015
  chr3:183978329-183978359
  hyper

SEQ ID NO: 109389 - DNA, 30 bp, Homo sapiens
  chr3:183978863-183978893
  hyper
gtttctgggtcaggcggcgactccgggccc

SEQ ID NO: 109390 - DNA, 136 bp, Homo sapiens
  chr3:183979773-183979909
  hyper
tgactggggaaggcacgaacccacagcgcgggaagagctcgggccagtgggatggtgcccttgccgctgacgcgctcttgtactagttgctctgctggtcttaagtagatcgtcagggtccgtgcgcctctgagtg

SEQ ID NO: 109391 - DNA, 458 bp, Homo sapiens; identical to SEQ ID NO: 40017
  chr3:183980143-183980601
  hyper

SEQ ID NO: 109392 - DNA, 30 bp, Homo sapiens; identical to SEQ ID NO: 40018
  chr3:183993891-183993921
  hyper

SEQ ID NO: 109393 - DNA, 30 bp, Homo sapiens
  chr3:184016806-184016836
  hyper
gggcgactatggcgcgggggaggctgggaa

SEQ ID NO: 109394 - DNA, 30 bp, Homo sapiens; identical to SEQ ID NO: 40019
  chr3:184032268-184032298
  hyper

SEQ ID NO: 109395 - DNA, 73 bp, Homo sapiens; identical to SEQ ID NO: 40020
  chr3:184053511-184053584
  hyper

SEQ ID NO: 109396 - DNA, 30 bp, Homo sapiens; identical to SEQ ID NO: 40021
  chr3:184079739-184079769
  hyper

SEQ ID NO: 109397 - DNA, 250 bp, Homo sapiens
  chr3:184080987-184081237
  hyper
gcctattgcttccccgccctgggcagagccacctggacatgagacccgccctcaatgccgaagcctctcggaagcaatctttcgggacggaagttaagtagccccgagcgggaggctgtggcggaagtggtcgcgttaccgcttgtttgtgcgcatgcgccactctcgtctggccgccgcgctttcaggaggtgcttttggttctctccggtcttgtccacgctagggggtgcacgtactcccaactgtg

SEQ ID NO: 109398 - DNA, 225 bp, Homo sapiens; identical to SEQ ID NO: 40022
  chr3:184097687-184097912
  hyper

SEQ ID NO: 109399 - DNA, 281 bp, Homo sapiens; identical to SEQ ID NO: 40023
  chr3:184098371-184098652
  hyper

SEQ ID NO: 109400 - DNA, 149 bp, Homo sapiens
  chr3:184099331-184099480
  hyper
cgcgggacccggagcatcgcagttatagcgaccgcggggagccaggcgctgaggagcgggcccgtggtgacggccacacgggtagggggctggcgaacagcggggttgtggttgaggctgggccaccaaagcggcgtttgacagtgctc

SEQ ID NO: 109401 - DNA, 30 bp, Homo sapiens; identical to SEQ ID NO: 40024
  chr3:184231698-184231728
  hyper

SEQ ID NO: 109402 - DNA, 404 bp, Homo sapiens
  chr3:184243071-184243475
  hyper
acaccccccacaaacgcacgtaaaacctctataaagggagaaccgccttgctgctgagggcgcggtgggacccgtcgcagggccagctgctccggcaggtgcccccaaagggtcccgcaggtgatcctcggggactgagcgcccatcgcccttcctacgcactcagatccgccgagcccagcgcccgccagagcccagagagtcctcggggtcagagtggtcacgtcaccgtcattcttttcctgcccgactagtcgctctgggctccccggggccgggggccgggggccgagccgccgccccgattccggcttcacccgcccgcagcgcgcggcgccccgcgctccattcgcgctacctggcggctggcaggctgccccaccccaccgcgggccacacacagc

SEQ ID NO: 109403 - DNA, 1513 bp, Homo sapiens
  chr3:184278876-184280389
  hyper
ccggacactggccgtcgccctcacgtacgctcgaggaactcttcctcctctgcaataaagctccttacactctacagcgatgacttaatcccacgtcctccactgctaagctagtaacacaagcctctgtcttgtccattgcggtagcacccgcaggtactacagtctgacacattgtgggcgctcacaaagatgtgctgaatgaatgactaaatacgcagcccagtgaaagaatgaagaaacgatgaagtcccttgtcacaggatacatcgcggtgggggtccccccaagtagcactaagctacagccacatgagggcgtcgcagggcagacgcgggccacatgggggcgcccccggtccgtcttagctggttggcacctcctcggactcagtttaggttactaatcgccaatgggcgccaggaggcggggttctccctctgatggacagcatcgctccgcccaatctaattcatcttttccttagccccgcccactccggcccctgagaccccgagggtgggcctggcggagacaccgccaactgaactccagctgagtgctctcgaggccgaaccagcgggcctggcggtctgtgagtgggtggccagccgctaggggcggggcctcagcgttgacgggcaggcaggccgtcccacccctctcgcccagagcggccgcgccagcgctggggacagcagaagtgagtacgtgagcggcgcagcaagatcccagctcggaccccggacggcgcgcgcccccgaagccccggatcccagtcgggcccgcagctgaccgccagattactgtgcatcccgaatcacgaccacctgcaccctcctgccccggcccgccccccaagtcctcaggcacccagctccccggcgccccggatcctcctggaccggtccgtccagattcccgcgggaccgacctgtccgcatccccaggaccgccgggctcggtgcaccgcctcggtcccggagccgcccgcctggattgcattccctcctctcctggatctcctgggacccgacgcgagcctgccccggagcccgccgagcgcaccctctctcgggtgcctgcagccccgccggcgcggcccggcccggcgcggcccggctcggctcctagagctgccacggccatggccagagcccgcccgccgccgccgccgtcgccgccgccggggcttctgccgctgctccctccgctgctgctgctgccgctgctgctgctgcccgccggctgccgggcgctggaaggtgagcggcgtcggggggcgcgcccgggaacaaggtgcctggggtcgcggggctgcgggctagcagcgtgggtccgacccggattgagcgcacgtcggaggaggccccgccaccggcgcccgctccggggcccagggatggggtggggaggccgcccctggagccgcctcggaggctggagctggctcggaggcaggcagcccgcgggttggggggtcgcggggagctagactcgggacgaacgtccc

SEQ ID NO: 109404 - DNA, 30 bp, Homo sapiens; identical to SEQ ID NO: 40028
  chr3:184287181-184287211
  hyper

SEQ ID NO: 109405 - DNA, 396 bp, Homo sapiens
  chr3:184301274-184301670
  hyper
ccgcgcggaggaggccgcgggcgaaggttgcagggtctgctgcgtggcgcactcccggccgcggaagccgacggcgatcggaggagcctgggagcggccctggcagcggccctggcacagctggcggcggcgcgggctcctcaggccgcccccgtccttcaccgcgcgctcccgcgctggggctgctcggcggcgcccgctccttagtattccccccacggagcccagccgcgccgccgcagccggcccgggggaggggcgccccgcacggctaagctctctgcgtccccggggcggacgcggggaggggaggggaagggacgcagcctctccgccgaggcctccttcctcccctagtgggggggaggggctgtgcgggggcaggggcgggcgatg

SEQ ID NO: 109406 - DNA, 30 bp, Homo sapiens
  chr3:184302073-184302103
  hyper
gccctggaaaccacacgatcaggggaactc

SEQ ID NO: 109407 - DNA, 337 bp, Homo sapiens
  chr3:184319505-184319842
  hyper
ctggggtccttggcccgggagccccagcccgcagagcaaggggaaggctgcggcccgagccggcccccgacccacccgccccgcctcggcctcgtacaagcacctttgatctgcaaccttcagggggattaagagcctgagagcccccctccccggggtaccccgctccccaacgccctccctccgggctgacctcccagtctgccgcccgggccgggggccggctccgccgccggtggtccccgccgctcctggcggccgcacctccgggcaggccacttggattacaggggcagcagccgcggctggcggcttcggggagccccggggctggggc

SEQ ID NO: 109408 - DNA, 358 bp, Homo sapiens
  chr3:184319873-184320231
  hyper
cggcgggcccctcctggccattttggccggggaatctgtgtaaagtgtttaaaaagaaaaactctccggaggaggacgtaaccttttcttaacatctggggctcaattagctaatgacagcaaagccttctccggtgtcgctgacccctgggcggcagcccagctcccccacccccggtatttatacagctgcggcccctcgctgggacggggggcagggggcttgactgggttatctctgcggagatccgccgcccaccccaaaaaggagaaagaaaaggcttagcacacggtcccacccaccgcccctcgatcctccttgttgcccctcggtcctcctcgtcgcccctcactcttt

SEQ ID NO: 109409 - DNA, 111 bp, Homo sapiens; identical to SEQ ID NO: 3018
  chr3:184321762-184321873
  hyper

SEQ ID NO: 109410 - DNA, 378 bp, Homo sapiens
  chr3:184322209-184322587
  hyper
cgccccttgccaaggtcaatcaaaccctcccacgctccggaggcgcgcgctgcgtgctctaggcagcggggattggggccggaggggcgcgtcccggcggggccgggcgagggtgggtggggggtctggcctggggggcgcctcccgccccctcttggggaaggtgctcggagactcccgggccctgggcggagagtgtggggaggctgggctaaaggcagagacccaggccgagggctctgacccacccaagaggaaatagctactaattagggacgggacgtttttatgctaatatgcacctggctgggcttttctggaggctgagaaagtgtggagtggaagggaagaagttccggagagcgggaaacttccgga

SEQ ID NO: 109411 - DNA, 30 bp, Homo sapiens
  chr3:184322804-184322834
  hyper
gtgggaggtgtgcgtcgcgggacagagtcc

SEQ ID NO: 109412 - DNA, 156 bp, Homo sapiens
  chr3:184429619-184429775
  hyper
aggcaggtgcagagcgcgtacacgggccgaggggtgtgggagccgccgcgcaagccccgggggaggggttggacagcggcagtgacggcgggagtacaaggagcaatggcagcgggagctttgtggctgctgggccgcaccgcacgggagtcaaac

SEQ ID NO: 109413 - DNA, 30 bp, Homo sapiens
  chr3:184430001-184430031
  hyper
tgaaaagtcgggggcgggggaatgtaacca

SEQ ID NO: 109414 - DNA, 64 bp, Homo sapiens; identical to SEQ ID NO: 40034
  chr3:184430243-184430307
  hyper

SEQ ID NO: 109415 - DNA, 30 bp, Homo sapiens
  chr3:184529854-184529884
  hyper
gcgtggtgaagaggcgcggaccgcccagga

SEQ ID NO: 109416 - DNA, 230 bp, Homo sapiens
  chr3:184530228-184530458
  hyper
gtcgtacgttggcccggaactgggtcgggcaatttccacttactggttccaaatgaatgtgaaaattcaaatgggcttaagtaaaaagggatttattggctccaaacctggaaggggctgaggtatcactaaatccagtgactccggtgatgtatttgtgtatctctccctttctgcaaagggccagtaacccctcagttccctatctactttgcgactataattgcaag

SEQ ID NO: 109417 - DNA, 1188 bp, Homo sapiens; identical to SEQ ID NO: 40036
  chr3:184870164-184871352
  hyper

SEQ ID NO: 109418 - DNA, 30 bp, Homo sapiens
  chr3:185216531-185216561
  hyper
ccgataccggaacccgaatctccgaatctc

SEQ ID NO: 109419 - DNA, 30 bp, Homo sapiens; identical to SEQ ID NO: 3021
  chr3:185233301-185233331
  hyper

SEQ ID NO: 109420 - DNA, 166 bp, Homo sapiens
  chr3:185303808-185303974
  hyper
tgggccttgtcccacgggccggctccggattggctccgccgaagagaaaaccctgccgacagcccttccgatctcgtcagcgattgggccgggaccgtcccacaattactcttgttgctgggctcggaaatagggagcggtgctaggttgcgcgtgcgcagattga

SEQ ID NO: 109421 - DNA, 373 bp, Homo sapiens
  chr3:185541059-185541432
  hyper
agggggggcacgcacggaactccacgctcgggctccgccttcgggcgcccccaaggggtctcctacccggatcgagctgggcgaacttggttcccagtagaaagaaaggtgggcgccccgtgtctcgggacaaggcgaggagggtgcgagcccgggtcggaccccaggtatagccgtgggtggcattaccggaaaaacaaatttaataaagagcggcgccaatttgaaaggatgagctcatttgaaactcaagctgcagggctggcgcggccccgctgctctcccggcccccacctctccattccgctaatccggggcccgaaggctccaccgggctcccctccctgccctctcctcccggtggccccgagaa

SEQ ID NO: 109422 - DNA, 138 bp, Homo sapiens; identical to SEQ ID NO: 40039
  chr3:185541794-185541932
  hyper

SEQ ID NO: 109423 - DNA, 237 bp, Homo sapiens; identical to SEQ ID NO: 40040
  chr3:185542333-185542570
  hyper

SEQ ID NO: 109424 - DNA, 828 bp, Homo sapiens; identical to SEQ ID NO: 40041
  chr3:185543196-185544024
  hyper

SEQ ID NO: 109425 - DNA, 30 bp, Homo sapiens
  chr3:185655533-185655563
  hyper
tggcccgaggccgacgggcctagaaaaaga

SEQ ID NO: 109426 - DNA, 714 bp, Homo sapiens; identical to SEQ ID NO: 40042
  chr3:185825459-185826173
  hyper

SEQ ID NO: 109427 - DNA, 1076 bp, Homo sapiens
  chr3:185826424-185827500
  hyper
cgatcccccatccactcgggagcccccgcactcgcgctccggggcgcctcccccacgacgtgtggaaagccgctctccccgcgctccggaaccgttagccgcacccgcccgacgcctcccaggaaccaaaccggaccgggccgcggggggagggggcggtcaacccggggggggtcaccccagctactgcaccccgactttgaagattctgaatcagcccgtgaactctagccggctgggcctgtcggaccagtggccggacgccccttccgatctcccccctgcccccgcaaagccccctcacctgaggcggcctctctcctccccttgcagcggccccggcggcgcaggcgcgctcacgcacgcgcgcagcgggcctgggcgcctgggcgaaaggctgggccgaaccgctccgaagacggtgaaccgctccgcgcaccagcggctggactctgcgccgcagctgccaaccaggctggagcgctggcccggccccccgcggctcgctgctccgcccgccgccattggcccgcggccctagcccagccttgttcccattggccagaggccgttcccgcggctgtccatcacctcttgtttaccctgtctgcgggcaaatccaaccaagccgccccatcaactccggcccccattggccagcggtgcatctctctccaccccctcaggggtctgttttacataatttatgcaccgggggccattggccaatcagcacaggcttgtttatataatgaatgtaaggacgtttttcattcataaaaaacgcgacctgagggggaagcttagctgagtcagtgaagcacttaaaggggccgaggccaggaggagccgccgttacttcccttctcgccgctctcccgacttttcaccgaggcacgactcttcccccttacccactcacccccacttctccatccagcaaagccccgaccagaattgggtctcttggcgccagacgttcgcagctgcagcaccaagcaaagttatcattttagaattcaggggagaggaattcgtcattccacacaaactcgctgaccgacctgggcgtttag

SEQ ID NO: 109428 - DNA, 30 bp, Homo sapiens
  chr3:185827761-185827791
  hyper
aaagaaatcctctccggggacagcagcagc

SEQ ID NO: 109429 - DNA, 54 bp, Homo sapiens
  chr3:185977469-185977523
  hyper
agacagccccgggcccggggccggccagtagagggctctcgagcaccggcccgg

SEQ ID NO: 109430 - DNA, 1081 bp, Homo sapiens; identical to SEQ ID NO: 40045
  chr3:186078689-186079770
  hyper

SEQ ID NO: 109431 - DNA, 484 bp, Homo sapiens; identical to SEQ ID NO: 3029
  chr3:186079818-186080302
  hyper

SEQ ID NO: 109432 - DNA, 165 bp, Homo sapiens
  chr3:186285248-186285413
  hyper
atctaggctggggtcgagagtccgcaacagtggcacctggagccagacccaccgctttctggtgtcgcgcctttcaacccgggggggtaggaagctttctgttgctccgcataactgtggtcagctaatagctgctggtaagatcagcacgctttcatcagaaat

SEQ ID NO: 109433 - DNA, 82 bp, Homo sapiens
  chr3:186287891-186287973
  hyper
tcaccactaagaagcggtggaagccgaatccgaacttaagtcggtctgtcatcactgtagcctttccgagacagttgtctta

SEQ ID NO: 109434 - DNA, 30 bp, Homo sapiens
  chr3:186288321-186288351
  hyper
ccctctgacgtctccgcttctaattggtca

SEQ ID NO: 109435 - DNA, 49 bp, Homo sapiens
  chr3:186288737-186288786
  hyper
ggggcggtgattgccgggtgaggaacagacactcgcagacaacggggcc

SEQ ID NO: 109436 - DNA, 131 bp, Homo sapiens
  chr3:186334978-186335109
  hyper
cagccgaggacgtgcgcaaggtgtgccaagactgccccctgctggccccgctgaacgacaccagggtggtgcacgccgcgaaagctgccctggccgccttcaacgctcagaacaacggctccaattttcag

SEQ ID NO: 109437 - DNA, 30 bp, Homo sapiens
  chr3:186463930-186463960
  hyper
ggcatttcctgtcgtcgagtccaacgcaca

SEQ ID NO: 109438 - DNA, 30 bp, Homo sapiens
  chr3:186490286-186490316
  hyper
cccagcccttgtgggcggcgggcagagctg

SEQ ID NO: 109439 - DNA, 139 bp, Homo sapiens
  chr3:186500724-186500863
  hyper
ccatttttccttctcgcgctgcaaaatgtaccggtaaaccggacttcccgggactcgctgggtggccgacattttccctagcaggaattttacgtttccaagatctgaatggatgttaacggtcgggctaaatgccagg

SEQ ID NO: 109440 - DNA, 30 bp, Homo sapiens
  chr3:186502024-186502054
  hyper
gggggctgcctttccgggcatccgcaggcc

SEQ ID NO: 109441 - DNA, 41 bp, Homo sapiens
  chr3:186524285-186524326
  hyper
ccggtaggaatacgcgggcacgtaacgcgtcacttccggtg

SEQ ID NO: 109442 - DNA, 30 bp, Homo sapiens
  chr3:186524735-186524765
  hyper
ccctcttgaggacacgtggcttttacttct

SEQ ID NO: 109443 - DNA, 48 bp, Homo sapiens; identical to SEQ ID NO: 3030
  chr3:186544978-186545026
  hyper

SEQ ID NO: 109444 - DNA, 30 bp, Homo sapiens; identical to SEQ ID NO: 40051
  chr3:186648160-186648190
  hyper

SEQ ID NO: 109445 - DNA, 343 bp, Homo sapiens
  chr3:186648467-186648810
  hyper
gaggggagtcctgggcagggccgggctggggaagacgcctggggcactgcccggcgttaacaaagggagccgataccgaccggcgtgggcgcggagcgggcggccgccaccgagcgtgctgagcaaccgcagcctccgcggccgagagtgcagcgagtgagtagggggtgcggtgggcggcggcgcggcccgggctatcccgggaggagtgtgatgcaaaggggcgcgggaggatagcggaggcgcggggcccgcggcgcgcgtagggcgcagggaatctctctccagctccgcctcagctgccttggctccggggctggccgccttttggttgggggtgtgt

SEQ ID NO: 109446 - DNA, 496 bp, Homo sapiens
  chr3:186649396-186649892
  hyper
tgctgggtgcactattgtccccgcactccggcgattgcctctgtggggatattttggtcgcctcctcagcctgcgggaagaatgtacgagtcgcccagtgcggtcttgctctttgcctctgaggcccgtgtccgtgtgcccagacaccccagatgtcactagccccttttggcttgttaatgcattttcgcaagcaaggccagccgagacctcgtattctagctggggacgtacaattttcagttctgagtttatttgaaagaaattccgaggtccggaaaaagagaactcttgtttgttttgctttttctttgcttacatatgctcagctcagctttgcagatgttaatcggacacgatctgcagcggggagatggtttcgcggtgaattggtctctgaggcgatggtgttggtgcaggttgtgggcgtgcagtgtgagcaggaatggaggcgccgccgccccagtgtgtgcctgctgagcgggcgggctgctgc

SEQ ID NO: 109447 - DNA, 639 bp, Homo sapiens; identical to SEQ ID NO: 40053
  chr3:186857082-186857721
  hyper

SEQ ID NO: 109448 - DNA, 59 bp, Homo sapiens; identical to SEQ ID NO: 40054
  chr3:187387556-187387615
  hyper

SEQ ID NO: 109449 - DNA, 76 bp, Homo sapiens; identical to SEQ ID NO: 40055
  chr3:187387844-187387920
  hyper

SEQ ID NO: 109450 - DNA, 240 bp, Homo sapiens; identical to SEQ ID NO: 3034
  chr3:187388006-187388246
  hyper

SEQ ID NO: 109451 - DNA, 2901 bp, Homo sapiens
  chr3:187455276-187458177
  hyper
caccagaaagccccattttctcgctcacacataagagcacaaacaccagccctgcgcgccggggcaagcctaggcagacttcgctaccccaccccgaccactccgtacctgtcttccagggactgcccgcccctgggcgatccacctcgaagccccccgcaaggcgcgacggaggctttgtggtatgaccgtggcggcccttaatttagttacattcaaataaaacttttggtgcacctcggtagctaacattgtgtgtatgcctttttttttttttttttttttttcctgttacgccgtcaatgcagcaggcaatgaggggaatgacacagccctctcattcccggaacgtagtcaatctcggctctgcggatttcacagaacacactttgcctattgccggctccaacaagaagtaactttccaggaagctgccggccccggcagccgccaggatcgctgcctgcgctgcgctggccgccggggattcacccagggaggcggggccgctggggaaggctcgcggggaatacagcacactttcccctaaatccctcgtccgcgccgagtgcagggctctcagagttcacctagtcccacctctcacccacaacagtttataaatggggaaggtcagacaagttagtagcagagctgggtctagaacccaggagttcgaatacaatccgaggctcatatcgagactttaagttgtccgattccgaagtttatttgcttttttccctctttttgccttccattctccctcacccccgttcttttaggggaatgtttgagcgagacttcaaggtcaaaagatggagtccctaggggctgagggtctccatcataggcgccccaggcaaggttggagaaaaactaaacagaaagccccttccgcctacgttggcaagaacgggaacccagctccacttggtttccgcccaaagtctttagaacaggagctgccaagccgtaaggatttccgaatccgatttccccgaaaccgtagagacacagcttggactcggcaaaggccggggccccgacccctgcgcgcgcactggcactctccaaagttgcctcgccttcctgtggccctcccgggaattataacccccgggtgccatgtcctaattggtctcggtagcaggctccggggtgcgctttcgggggctaggggacagcgaaagactcagccacaaaggccgcagtctggtcctaaaactagccagtggcgtcacactgcgccgctcatcccttctgcggcaagcggaagggtcagagtcggtctgcaaagaacgagcctttggcctcaaaatcctacattgaggctttctcaccccttcgcccggtgggataaaggtgaaagagacggttgggatttaataaggggtagggatgagaatctgggaagttaaaatgaagtaagtgcatttattggaaattaggagtcccgtggttccgggagctcaaaccgaatggtgtttttaccgctgcctaacgctagagagagccctccatcaaggtttgaaaccgtcaacccctttctcgcccctcccctccttcccattgacctagtttggccagagcctcccgatttggagaatgccttccgcccttcccccctcctctccagccagagaggctacagaggctgttggattattggtaatctaataactccaataacccgctgaaaaatccaaagggaaatctgaaagtgtaaagcactgtttagggacaaggacaaggaattttaataaggctgcaactgccgtagtgaaccccgcatcaggggccctgccgtggggctcccggtctcagcagtgtttcagccaactagctgcacggctgcagacaccaccgtggtccggcggcagggggtgaggtcaaatcgcggagctgtttttattcttgggggaaaacactcttcgccctcttggctggggaacgggagggtgcaggagacgacagtaaataaaagcgaatttgataacgcgatggcctcgacagccgctttggataaccgaggtgttcggggacattgtgtcctgactttcatttctatcacgtttcctgccaacagtgctcttgcaagcctgcaagcttctaggaaatgcaataaaacagagggatgtgttttatcatcaagatctgaagaggagttgcagaagggacgttccccatacgctcagcgcgagacagccttccagaagggcccgaagacaatgccagcaaatcgcgtcccggagcagagatccctcggccgtcctggctggactgggctcagcctttgcaaaaaggctggcgggggaggggagaagcatgatctcctcaagcaaacaatgcctttaaaaatccgatctggaaagaagtcagccaaggtccttattcacgttaatgaagatggaaggcactaactgtccttggaaagcgatgagtcaaacttgaccgcgcttcaaactcgttcccagattcgtttccagtccgaacagaggcgcgtttctccgacgcggcctccgacggctcccgcagtgggaggggccgaactcgatccccgccgacccgggcgggggcgacggcgctgtctccccctgcagagcgcgcctgctgccgctaggggccgccagcatgcggacgcgcgtttgccatcttaagtcacgagctcggagaaagaaaactttacggaggaactgttgtggcacaaattctggcctatccacatgacccccaccccctcacacacacacacccggtttctcgccaggctactatgcagaggatgttaggaaggggaagagagcgatttcagaatcgaggctcgccctgcaagtctttggtccaggccttaacccccctcttaacacgcaaacccccgagctccgagacccacaccct

SEQ ID NO: 109452 - DNA, 1090 bp, Homo sapiens
  chr3:187458573-187459663
  hyper
atggtgtgttcgaagcgggttatttgtggtttttcttagtgcaaatagatgctcatcgctgagtgatgggcaagcagcgaggcctttctgattttcatccctcttgccaaaactttggaggttgtatgccatccccattggagggtgccctccttctgtcagtcctagcatctggtcagggtaccgccgcccgggaggtggaacggcgagcccaccgcccatggccgcgaactcgatctcagcccaccgctaggtggcaggccagcccgtccgagaatcgccgcgcggccgcagcttccacaccgatccctacccgcccctctttattttctgtctggtgggggcgagggttgggggtgtgattgcctctaaaagcaaagctagaaaacatttaatttagtgtatgtaattccgttcctcccgatgctcccgcctctagcaaccacaacgcggtatctggagctggtttcatgtatcataagttgatttctcccccagcctccgaaaagctttatgtactgggaagggaaagaaggtgcacttgtcttcaaaaggcagaatggcactcgacagtattggcagagattcttgccaaacactggtcatccagcaaagaaagtcgggaataaactcctgatcttctcggaggaaaggggcgctgggggccgagtgctggatcccactcaggctcactgcgcctggcaaagcgggggagtggggagtcgggtatggtcttttggtgaagttgtgggtctcggagtggacatcgggagggttgggaggggccgttcctggtttccactggggcaaagagaaaccagccagttctgccaccacgctgcaccctcgctgtgctcgcggcggcagcggcggtcccacttgttgcgcagtgctggaaaccggcacgcgccattcgatgttgattcacagagggctacagaccagcctaccattgctccacgccatccacaaacctcctcaacacaccccctacacatacgtcctgccaccgccggcaaaactacagcatttccagccactatggtgttttacaccaaaacatccctcactatctcggtatcagacaggc

SEQ ID NO: 109453 - DNA, 57 bp, Homo sapiens; identical to SEQ ID NO: 40059
  chr3:187461960-187462017
  hyper

SEQ ID NO: 109454 - DNA, 368 bp, Homo sapiens
  chr3:187462444-187462812
  hyper
taaaagaccgaggccgatggaagagagccagcggggcgagcgagcgggcagcctccctttttgcctcccggagttacccagaaggacaggggaagggaaggaagaagaggcgaggaaaaagaggagggagggaagcggaggccaggagcgacggagcaaggaaagcagtttgcaagcgagaaaagagggaaaaaacacagccgcacgaatccagagagatcacaagccgtacgcaagcagcagcagaaagagcgagagcgcgagcgcgcgtcctctccgcggtctggggccagacagcccccagactagcccgaatcaccccccaagcactgtctcgtcctctctgctccggccgccccctaattccc

SEQ ID NO: 109455 - DNA, 228 bp, Homo sapiens
  chr3:187463099-187463327
  hyper
taatgatcatgagcagcggcggcggcagcggcaccagcggcaacagcggcggcggcggcagtagcagcagcagcggcggcagcaacagcaataatcacctggtgtccggcctttcctagaaacttcttgcatcaccacttctaagaaccccagttctaagaatcaacagagctcaattctcggaatttgagcttcggactttaccactgctacgtggcaggggaggac

SEQ ID NO: 109456 - DNA, 30 bp, Homo sapiens
  chr3:187463547-187463577
  hyper
ctctgtgacgtcggcgccttcgctgtagca

SEQ ID NO: 109457 - DNA, 229 bp, Homo sapiens
  chr3:187871095-187871324
  hyper
tcctcacgtgccaagcggacgggttggaagttggtctttgccagctctgacaccttgtaagttttgagtcttgctgggaatccagggcggggctcacgaggaaaatcttggaaggggatttcatggctggatctcttccactcaagctcagtgccctaatttgacgccttaatagtagacgcaggcttttccattttccaggagccccctgacgcggccgcttcctcct

SEQ ID NO: 109458 - DNA, 92 bp, Homo sapiens
  chr3:187871523-187871615
  hyper
gcttcgcgggcacacgccttcccataccttacatggacaaatgcgtgcaggcaaagtcaggaattcaggcccctgacgtcagcctccagcgc

SEQ ID NO: 109459 - DNA, 30 bp, Homo sapiens; identical to SEQ ID NO: 40062
  chr3:187871821-187871851
  hyper

SEQ ID NO: 109460 - DNA, 30 bp, Homo sapiens
  chr3:187872338-187872368
  hyper
gcttagagctttcgcggaatcacagttgtc

SEQ ID NO: 109461 - DNA, 30 bp, Homo sapiens; identical to SEQ ID NO: 40063
  chr3:189508455-189508485
  hyper

SEQ ID NO: 109462 - DNA, 30 bp, Homo sapiens; identical to SEQ ID NO: 40064
  chr3:189645917-189645947
  hyper

SEQ ID NO: 109463 - DNA, 834 bp, Homo sapiens
  chr3:189838065-189838899
  hyper
ttgtagggcactctgcgctggaagtcgctgcgcacatcctcgctgacgcggtggcgggatgcggggcccccgaggcgctgggtctcacagctgcgataacagcgcgcccgccccaacaaggagcggaaaaggggcagctcagcgccggggccctcgccggggggcgggggcgggagcgggtggcgcgccgcgcagtggcgggcacagcgcgtgcggatttcccgcaggcgccggtggctgcgcagcgccgcttccaagtcgcgcaccgctcgctcgtagtctccgctgtagtaggcggccgcgccgctggcgtagagcaggtcgaagggctgcagaggcccgggctccagctccagctcccggcgtgggctgtccggggggccgccccacagtggcggcggcagtagcagcggcagcagcagcagcagcggcggcgcccagatgcgctcccgcatcctccgcctcagagaggcgcgggacggttacgctcgagagggcttcggggcacctcgcgtccgggtcccctctcccaccttccctcggggaagcgcgccgactccgccgcgatctggccgctccgcgagccccaggtgaccgccggcgctccgcgtactgagaggcggaggccgtgcctggccagccgctcttaaagggacgcccacagctcacacgctcctcctgctgcctgagactccgagagccgctctcccaggctccccgctgcagcggcggggctgccaggggcggcacactccagcgccagccagagagctagcgccgcttgaggccggccggggacgaggcgctttacacgtgagctcccttctggttgta

SEQ ID NO: 109464 - DNA, 28 bp, Homo sapiens
  chr3:189900046-189900074
  hyper
gcgcccagccggtcgtttatctcttgaa

SEQ ID NO: 109465 - DNA, 30 bp, Homo sapiens
  chr3:190040360-190040390
  hyper
cgcgcggctggcggcgtggggaccacccgg

SEQ ID NO: 109466 - DNA, 62 bp, Homo sapiens
  chr3:190164467-190164529
  hyper
ggtagcctcagctaccgctaaagtcagcataaaaactttcttaataccgtatgtttctgtca

SEQ ID NO: 109467 - DNA, 74 bp, Homo sapiens; identical to SEQ ID NO: 40067
  chr3:190231323-190231397
  hyper

SEQ ID NO: 109468 - DNA, 32 bp, Homo sapiens
  chr3:190231800-190231832
  hyper
aggccgtggccaatcgcgccgctccgggggag

SEQ ID NO: 109469 - DNA, 38 bp, Homo sapiens
  chr3:190232235-190232273
  hyper
acgcggttgtgggacgtctgctcgttgccgcccccatc

SEQ ID NO: 109470 - DNA, 84 bp, Homo sapiens
  chr3:190529733-190529817
  hyper
atctttgtacacgtccgctattgattcctaattatcaccaggagatggcgctgtgcattagtaaacatccggcttacaaaagta

SEQ ID NO: 109471 - DNA, 449 bp, Homo sapiens
  chr3:190580489-190580938
  hyper
aggagctaggagaggcgagttctaatctgcgggagctcccggtgacgcccagagctcccggcgagcgccgctctgtgatttggtgagaggctgtcaaaccggtgacgtgagccaggagtcacccagcagaagacaaagtcactcgcgctctgggcggccaccgcgccgggaccagggacctgccgatctggccaccggccgtggggcagaggcaggacctccggccctctcgctccgggtgcgcggcgctgcttcacacccggccccagtgtggactcgccgcgggcggggagacgggcggggagacgggcggggagacgggcggcgaccccgcagccgggaccgaggcgagggccgggctccctcccgctccacgcgcagcgcggggcagggccgagccgggccgggcgagaagatggtccaggtgcctggacgtggggtaagaaaag

SEQ ID NO: 109472 - DNA, 541 bp, Homo sapiens
  chr3:191046934-191047475
  hyper
cccccacctaaagacgcgaccctcccgtaggaggggggcagggcccgggggcgggagcacagcggggccccagcctcaggcggcgcgtcactgagcacaaaggagacaacagcgaggcggcagcgggcgctgatcttcgctcgccagccactcgcaattgcggttacagacctgcagctccccctcccccagccggcccgcccgcctttctgtctcctctctccctccgtactggacggccccggtccatttccgggctccggatatttggtatcgattggggccggggacgcggagcaggtggccgcggcggggcagctgggccgccagcttggtgcctcggggaccgtctcccgctgctttggtcaccagcccctgcccgcccgacccgctccgttctccggcctgcgagccctgccggccggactttgcgccgcgtccggcgctgctgctgcgctcggggccccgctcggcgccggcggtgaccgggaagcccgcgttaaaggggcaaccgggaccctggcccggtatggctgaagtc

SEQ ID NO: 109473 - DNA, 30 bp, Homo sapiens
  chr3:191906116-191906146
  hyper
gattgaaactacgcacgtgtttttgtgttt

SEQ ID NO: 109474 - DNA, 45 bp, Homo sapiens
  chr3:192125783-192125828
  hyper
ggggagcccactctccgggcttctactgacctggtctccgcctca

SEQ ID NO: 109475 - DNA, 595 bp, Homo sapiens; identical to SEQ ID NO: 3044
  chr3:192126115-192126710
  hyper

SEQ ID NO: 109476 - DNA, 586 bp, Homo sapiens; identical to SEQ ID NO: 3045
  chr3:192126786-192127372
  hyper

SEQ ID NO: 109477 - DNA, 174 bp, Homo sapiens; identical to SEQ ID NO: 3046
  chr3:192127556-192127730
  hyper

SEQ ID NO: 109478 - DNA, 274 bp, Homo sapiens; identical to SEQ ID NO: 40074
  chr3:192127936-192128210
  hyper

SEQ ID NO: 109479 - DNA, 398 bp, Homo sapiens; identical to SEQ ID NO: 40075
  chr3:192231877-192232275
  hyper

SEQ ID NO: 109480 - DNA, 286 bp, Homo sapiens; identical to SEQ ID NO: 3049
  chr3:192232532-192232818
  hyper

SEQ ID NO: 109481 - DNA, 102 bp, Homo sapiens; identical to SEQ ID NO: 3050
  chr3:192232849-192232951
  hyper

SEQ ID NO: 109482 - DNA, 255 bp, Homo sapiens; identical to SEQ ID NO: 3051
  chr3:192233094-192233349
  hyper

SEQ ID NO: 109483 - DNA, 30 bp, Homo sapiens
  chr3:192386059-192386089
  hyper
atcgtggaaccagagcggcaacccacagct

SEQ ID NO: 109484 - DNA, 30 bp, Homo sapiens
  chr3:192444969-192444999
  hyper
ctttgctctccatttcggtccctttcgagt

SEQ ID NO: 109485 - DNA, 91 bp, Homo sapiens
  chr3:192445295-192445386
  hyper
gagctgtcctccgagcgtggtgctgcaggtgtagtgacagatcatcccactttgctctctggatgcacagcagatttgcatgggcgctggc

SEQ ID NO: 109486 - DNA, 188 bp, Homo sapiens; identical to SEQ ID NO: 40080
  chr3:192445421-192445609
  hyper

SEQ ID NO: 109487 - DNA, 761 bp, Homo sapiens
  chr3:192634598-192635359
  hyper
agcccccgacgtctccgcggttggaaactctgggcacctctttcggccagcgctaagacaatacacaaagagcagggaaccggcgctcctctgcggccagagctccgcgcctagtcacggaagagctgggaattaagaattccgagctcagcgagagccctgaagaagcaccggaaatgcttccgatcgcttcataagagaagtcaatttgcaaatcaaagttgcaggaactccggacgcctagactacttcagcgggttactcgggaacacccaacaagtttggccaccgggggctcggcatgacagcgccgcgccgcgagacgacagaagcaacttgtcgctcgggcgccaagccagagccctgagccgtctccgctcccaagctcgggagagcacccaagagccggcgtcgggaaagcggaggtccctgcctccggcagccaaatccctcaactgaaggcacctcaggggctcacctggactgcactcgcttccaggggcttcccccaacagtgcaacgcttcaccgcgaacgcctcacctgcctgccagccccaggtggcggagaaattaacaaaagagcaagcgaacagggggaaagggagacccggcgtaaagtatagtaaggaggggagggcaggcagctcggctttcggcggagaaagaagagagaggcggaacagagatggcttatacccaaggcaccggctcgggaaggcaacccagaagggaagaggtcgagaagcggcaatgggttttc

SEQ ID NO: 109488 - DNA, 547 bp, Homo sapiens; identical to SEQ ID NO: 40081
  chr3:192635621-192636168
  hyper

SEQ ID NO: 109489 - DNA, 30 bp, Homo sapiens; identical to SEQ ID NO: 40082
  chr3:192636409-192636439
  hyper

SEQ ID NO: 109490 - DNA, 30 bp, Homo sapiens; identical to SEQ ID NO: 40083
  chr3:192958711-192958741
  hyper

SEQ ID NO: 109491 - DNA, 31 bp, Homo sapiens; identical to SEQ ID NO: 3055
  chr3:192959658-192959689
  hyper

SEQ ID NO: 109492 - DNA, 197 bp, Homo sapiens
  chr3:193310836-193311033
  hyper
cggaagcaagagggcggggccccgtgagaggcgatggattgctccagtccgttcccgacgcactgtgcgcatgcgctggtcctccgcggaccgttcgtgctgcccgcctagaaagggtgaagtggttgtttccgtgacggactgagtacgggtgcctgtcaggctcttgcggaagtccatgcgccattgggagggcc

SEQ ID NO: 109493 - DNA, 175 bp, Homo sapiens
  chr3:193506052-193506227
  hyper
cttcacggacactcccgtttcagtgtgactgcctttggggcctatagggggcactaaggaactatgggatcttgttgcctctgtggcggggtcagcgctcagacctccagccaacccagccagcaagaagaaggaatggggctggggctgggacaagggtcggttatagtgggta

SEQ ID NO: 109494 - DNA, 30 bp, Homo sapiens
  chr3:193688143-193688173
  hyper
actgggggagctctgcgggctgttgaacat

SEQ ID NO: 109495 - DNA, 30 bp, Homo sapiens
  chr3:193720801-193720831
  hyper
tcgttcatctcttaacgtggggacttgccc

SEQ ID NO: 109496 - DNA, 649 bp, Homo sapiens
  chr3:193721032-193721681
  hyper
aggctccgggcacccgagatccttaactgcagcttccaaagccctggctgatcctaatcagtgtgggaaaggagcgccgggcccagcccgccggccggagacgccgcctcttttcataaactttatcgccgcggtgcacagccgctgataaagcaccataaataaacgagcgggcgggagtgcgcggctgtctggaggctgccggagcgcacgccctgcctcggccctgcagctcccgggggaaatgaatcacacgccgggctgcaaagagcagcatgttctcctctccagaccaaggccgtaaataataatgcgttctttccctacgtggagaccctcaccttttgtcttgtgcattccgtaaaaagctcaggagtttccttccggctgcctggcctcccctccttgccccggggggttaggagtgctctgttctgacttaggcgtttccctagggtggagctcctgggcctgggttgggcctgggcgtgtggctccgtgatcgtaagtcccctctggctcttgcacaacagaccgaggctggagcagggcagggaggccgcagtggggcctgggttaggaggggggtggtttgacatctctagtggtaagtgatggtgagcccggttcccgccgtggtggccacgga

SEQ ID NO: 109497 - DNA, 478 bp, Homo sapiens; identical to SEQ ID NO: 40087
  chr3:193775944-193776422
  hyper

SEQ ID NO: 109498 - DNA, 30 bp, Homo sapiens
  chr3:193789055-193789085
  hyper
cccacagtctggggcggtgacacatggcgc

SEQ ID NO: 109499 - DNA, 31 bp, Homo sapiens; identical to SEQ ID NO: 40088
  chr3:193852179-193852210
  hyper

SEQ ID NO: 109500 - DNA, 367 bp, Homo sapiens
  chr3:193852643-193853010
  hyper
acacacaccccccacacgcagcgcgcgccaatgagcccgggccaggcgcagggggcggggttttcccaggctcgagcacagcagctgctatttaccttcttggcttctcccggggaccaggaaccggcccccgctctccgccgcccgtcgccgccccccgcctccctgcccccggggcgcgcgcacacacactcactcacacacgcacgcacacacacatcctcccggcccggccgcagccgcggcggcaataaaacatcctggcacgtgctccggctccaggcgcgcccacgccggccggctgatgtcaaactgcagctcggctggtgtagctcttaaagggcccgcgggcgccgggggccgaggc

SEQ ID NO: 109501 - DNA, 30 bp, Homo sapiens; identical to SEQ ID NO: 40091
  chr3:193853211-193853241
  hyper

SEQ ID NO: 109502 - DNA, 636 bp, Homo sapiens
  chr3:193853735-193854371
  hyper
gccctgggctcaggcgcgcgccattggccgccagaccttgtgcctggcggccaatgggggggcgcggtccacgagcggtgccgcgtgtctcctcctcccattggctgaaagttactgtgggaaagaaagtttgggaagtttcacacgagccgttcgcgtgcagtcccagatatatatagaggccgccagggcctagggatcacacaggatccggagctggtgctgataacagcggaatcccccgtctacctctctccttggtcctggaacagcgctactgatcaccaagtagccacaaaatataataaaccctcagcacttgctcagtagttttgtgaaagtctcaagtaaaagagacacaaacaaaaaattctttttcgtgaagaactccaaaaataaaattctctagagataaaaaaaaaaaaaaaaggaaaatgccagctgatataatggagaaaaattcctcgtccccggtggctgctaccccagccagtgtcaacacgacaccggataaaccaaagacagcatctgagcacagaaaggtaagggcggtacctgtatctctttgcagcccctcaaaattaagtaggggttggggggcttctttctgtcttgaaaccccgggatggcagattc

SEQ ID NO: 109503 - DNA, 31 bp, Homo sapiens; identical to SEQ ID NO: 3061
  chr3:193854613-193854644
  hyper

SEQ ID NO: 109504 - DNA, 312 bp, Homo sapiens; identical to SEQ ID NO: 3062
  chr3:193858569-193858881
  hyper

SEQ ID NO: 109505 - DNA, 282 bp, Homo sapiens; identical to SEQ ID NO: 3063
  chr3:193858949-193859231
  hyper

SEQ ID NO: 109506 - DNA, 122 bp, Homo sapiens
  chr3:193859655-193859777
  hyper
ggcggcaggccacgccggggcaggagtgggcagagcggcggggtgaggccatcccagcccacagagccgtcccaaaaaagaccttgccaccagacagcaaccctggacgcctaaaaaaaaaa

SEQ ID NO: 109507 - DNA, 151 bp, Homo sapiens; identical to SEQ ID NO: 40098
  chr3:193987503-193987654
  hyper

SEQ ID NO: 109508 - DNA, 30 bp, Homo sapiens
  chr3:194033378-194033408
  hyper
gaagcaacctgtgccgagcggctgcaaagg

SEQ ID NO: 109509 - DNA, 41 bp, Homo sapiens
  chr3:194207833-194207874
  hyper
cgatttataggccccgcccacccatcgcctttgccaccctc

SEQ ID NO: 109510 - DNA, 283 bp, Homo sapiens; identical to SEQ ID NO: 40099
  chr3:194207974-194208257
  hyper

SEQ ID NO: 109511 - DNA, 77 bp, Homo sapiens; identical to SEQ ID NO: 40100
  chr3:194208467-194208544
  hyper

SEQ ID NO: 109512 - DNA, 116 bp, Homo sapiens; identical to SEQ ID NO: 3066
  chr3:194278584-194278700
  hyper

SEQ ID NO: 109513 - DNA, 572 bp, Homo sapiens; identical to SEQ ID NO: 40102
  chr3:194353931-194354503
  hyper

SEQ ID NO: 109514 - DNA, 30 bp, Homo sapiens
  chr3:194392824-194392854
  hyper
gctgagtctgatggcgcataagggcccgtc

SEQ ID NO: 109515 - DNA, 247 bp, Homo sapiens
  chr3:194393107-194393354
  hyper
gatagatttcctggcgaatgtctcgagtttggataaatgactgagttaaaagaatggtccattcttaatttgtgcgtcggtctttagcgtccggcgagaaactagagcacgtcggaaacatggcggttcctattcgcggcactagctccgccttccgctgcttccgtcaggaggacgcggagactcggaggaagagtgtttcggtggcgctgggacgggggcgtttcccagcgctggttttctgctg

SEQ ID NO: 109516 - DNA, 117 bp, Homo sapiens; identical to SEQ ID NO: 40104
  chr3:194406435-194406552
  hyper

SEQ ID NO: 109517 - DNA, 477 bp, Homo sapiens; identical to SEQ ID NO: 40105
  chr3:194406589-194407066
  hyper

SEQ ID NO: 109518 - DNA, 710 bp, Homo sapiens
  chr3:194407278-194407988
  hyper
aattctgtgtgcgcgcgtgtctcccccgcaccaaccttttttgcacactcgaagctgaatattttcttttttagagaatttacccgcacctcctgcggggttcctaagcactctctctgctcccctccccccaactccctaccacagggccgctcccagtagttttattcttcgatcttgcccgggccgagcctggcaggggccggtggctcagcgggcctcgcacccggcgctccgccgccgccgccgcccagctgcgccggggcgccctccggagatgctgccgtggaagaagcacaagttcgagctgctggccgaggcgccgccgcggcaggcgtccaagcccaagggctacgctgtgagcctgcactactcggcgctcagctcgctggcgcgggcgtgccccgaaggcgcgcttagccgggtgggcagcatgttccgctccaagcgcaagaagctgcacatcactagcgaggacccaacttacaccgtgctctacctgggcaatgccaccaccatccaggcgcgcggcgacggctgcaccgaccttgctgtgggcaagatctggagcaagagcgaggcgggccgtcagggcaccaagatgaagctgacggtgagtgcgcagggtatccgcatggtgcacgccgaggagcgcgcgctgcgccgcccgggccacctctacctgctgcaccgcgtcacctactgcgtgg

SEQ ID NO: 109519 - DNA, 772 bp, Homo sapiens; identical to SEQ ID NO: 3069
  chr3:194407996-194408768
  hyper

SEQ ID NO: 109520 - DNA, 281 bp, Homo sapiens
  chr3:194408838-194409119
  hyper
cgtcgccggcgctccaccgtggctacccatccgtggtcccgacaacctccctgtcccttgcccgcccccaggaagggggaaatggggcatttggggcccagacctacacttggagcccaggtccagcgttcccccgaccgctttcccctacctcccggcccccgctcccgccccagcacttttggctctgttgcgcgtggggatgcggggagatttgagaggggaaaaccccgccaggagggagagagaggcacccctctgggatgcgggtgagggaaggt

SEQ ID NO: 109521 - DNA, 31 bp, Homo sapiens; identical to SEQ ID NO: 40109
  chr3:194602924-194602955
  hyper

SEQ ID NO: 109522 - DNA, 253 bp, Homo sapiens; identical to SEQ ID NO: 40110
  chr3:194827127-194827380
  hyper

SEQ ID NO: 109523 - DNA, 30 bp, Homo sapiens
  chr3:194958875-194958905
  hyper
ccgacctccccgcctcgtgtgactgggcag

SEQ ID NO: 109524 - DNA, 259 bp, Homo sapiens; identical to SEQ ID NO: 40111
  chr3:194980252-194980511
  hyper

SEQ ID NO: 109525 - DNA, 30 bp, Homo sapiens
  chr3:194980751-194980781
  hyper
aggaaggaaatgaccgcccgccgcagcccc

SEQ ID NO: 109526 - DNA, 30 bp, Homo sapiens
  chr3:194981259-194981289
  hyper
cctcccgtcccgggcgaggcacatccagga

SEQ ID NO: 109527 - DNA, 30 bp, Homo sapiens
  chr3:194981331-194981361
  hyper
aggccctgccaccttcgctgtgggtattag

SEQ ID NO: 109528 - DNA, 195 bp, Homo sapiens
  chr3:194992080-194992275
  hyper
cggctgagaaatggcgccctacgcggcgagccccagaggatatccaagctgagtgttgaagggaatggaggcgcccgaacagaggaacttaggttagccaaaagcgaagctggaggcaccaagaggtaaaactttaatctctgcaccttttttccctcaatttcttggaggctttaagccgtctcggcctctccc

SEQ ID NO: 109529 - DNA, 30 bp, Homo sapiens
  chr3:195162897-195162927
  hyper
gcggttgatcacagcgcttccccccgcgat

SEQ ID NO: 109530 - DNA, 30 bp, Homo sapiens
  chr3:195163515-195163545
  hyper
ccggttacctgaagcggggcgagtccttca

SEQ ID NO: 109531 - DNA, 288 bp, Homo sapiens
  chr3:195163845-195164133
  hyper
tggcggccaaggggcggggcatccggcagcaccgcctgcgggcgcccgggcaacgggtctgagcgacggcaacccgagccaatgagcagcgcgaccgtgggcacctccttgccacaaccgcccccgagggccaaccgggatgcgcgggcgtcgctaggcgggacgcaccggttgctgggaggccggcagctgaggttccttgggaaggaagtcacgtggctgcggccgcgcttccctccgagcccccgcctcttctcctgctccccgagccccgccctgctgagctgc

SEQ ID NO: 109532 - DNA, 30 bp, Homo sapiens; identical to SEQ ID NO: 40113
  chr3:195269693-195269723
  hyper

SEQ ID NO: 109533 - DNA, 30 bp, Homo sapiens
  chr3:195270300-195270330
  hyper
aacctgcgggagagcgcccgggcttgctgc

SEQ ID NO: 109534 - DNA, 2324 bp, Homo sapiens
  chr3:195599089-195601413
  hyper
agggccctggagtcccgagcggggccaggtcagcatccatccccgcccagtactcactcgtcaatcctgtccgggaagccccagcagtggcgggggtcactgtcgccatgccctgtgtggatgaagctgttctgcaggggctggctgatgtcctgggccgacaggccggccacggaggtcaccacgttgcgagggaagggccccacacacagcgtccgtgtgttctggccacgccaccagtagttctcggccctgcgcgacagagatggcacggtgaacgccaggcgtggcggggcagccccggcactgggaccctcctcacaccctggccactgtggcagaagggggatggagctcaggcctcaggaccaggctgtgtgccaccggccctcctccccaacagcccccgtgacccaccatgccccgtacaggcctgtttgcacacggccttacccacaactctctaggtgggtcaggcagctttccctatggtttgcaaataaggaggcacgctggaagctgctgcagcaggcaacatgacctgtccacggttaccagaaagatcccagcagacctgggacccaacgccagctttcaggtctgtggggccagcgccccgcccacacctcctcctcacccctcagttccctggcaaggccggggccccagtcctcttctggccacttgatttcactcctcggctgggttccaggagttctgagaggtgcgggggtgccgggggacacctagggccttgcactaggctgggggccaggcctccagctacaacctgcctcccgaatgcagacgcgggagagtctaggagcactcgggcaactcagtccctccctccaccgcttcacctgcttccggagctttccaccacctcccggaaggcctgcgggagcctccccgtctcctcaggaggggctctacctgtgtccaaaagggaactcagctctcccacagtgaccagacagtagggctgccagtccccctctgacctcagacacgaaacctctgctgatgtggcctaagccggggcctgggcaggggcaggggcaggggcaggggcaggcaggccaggaagcacagggctcccgcaagacactcctgactcccgaaggctctcacaggttgtgaggctcccgcgtctgctgctggacttgtcatacgtgatgccgtgagcagagtctgggcaggcgggggcggtgagagccccgtgggcagtgtctgggcaggcgggggcggtgagagccccgtgggcagtgtctgggcaggcgggggcggtgacagccccgtgggcagagtctgggcacgcgggggcggtgacagcccagagctgctagggtggacacgtgtggcaccacactgcacgccctccccaccaacccccacttctcctgtcccagggccaaagcgtgaagaagggctcctctgaaacccagccaggccggggagagaggacggaggaggtggcgacgcctgggcacccagacccacagccttgtaaggtgacgaggcctggctggagcggggtgactccggaacagcccatcccagagaccaaagtcaaacccgagagcaccacggtcggcggggaggcggggggcgcggggcgcggggagacggggctgtgctccccctgcccagcctcctcatacacagggccactggcctggccccaccacacacagccaccctgtgattcccaccctgcctgcagggagggaaggaaggagagaggacagtaccccgagacgagacgagtcccatctgaaaaatagcagggccactcgaaggagcagagccccggctccccagcacgcacacagcctcccacggcggcccgtagaggaggaaccccggcaccggctgggctgcggctctcccgctacacccacgggctccccggtggctgccgcgggccagacgccggactctgctctccacacctcttcagaggcgctcagtaactgggtgagaatgccgctgaggccgagaccttgctcagagcagcgtgactcgtgcccaaggcaggtcactccgtctggcctctcccttccgccaacactgcccagctccaggcacagaagcctcctttgggacccacttctgagagggaaaggagacatcaagcccacctcccttagtgcaggtatggccgaggcaagagcccccatggctgctgggagtcctgacaccactcgagaaaacatgcttgctcctgggggaaggagagtaagagtgcggaggacgtgtgcaagaagctcccctcgggatggcgcccacgcacactccgaggcacaagaaactccccctcg

SEQ ID NO: 109535 - DNA, 142 bp, Homo sapiens
  chr3:195610105-195610247
  hyper
ctcccggatgaagtcgtccatggcttctggctggctcaggacatcgggcttcaggcacttcacagccacactcacctgcccagagcgggatttgcaaggactcaggacttgccaggtcccagacacgcggagccaacctgct

SEQ ID NO: 109536 - DNA, 14 bp, Homo sapiens
  chr3:195621964-195621978
  hyper
cccacataaacaca

SEQ ID NO: 109537 - DNA, 982 bp, Homo sapiens
  chr3:195622064-195623046
  hyper
cgaaggggtctggggcccaggtatctggctatcccctagccttccccattacctgcggtccctcctcgcccccagccaggcgctggtaagcagatctctcccccatggagccccaaatcccagcggctgcggtcagggagagaagcagcgcccgcagcccccgccccgcagcggcaccggcagcgtcactgccctgcgtcctggggggccgggcctcgagcatcctccagaagtgcagggccgctactgcgtctcagcccccatagcctcatccgccatcggccggcggccgggtggtcgcgcccctcctcctgccggcctgcggccattccctcctgcagcccgtcccagctccgttcctcctctccggggcgcggctcccaccctctcccagtgagccagctgtgccagccccgggctgacccccaccgagagccggggctctgccttcgccggccgcggaaccgggctccactcagccctcagcccgcctccagggccccagagccaccaactggggccttggggattcacgagtcccccgtattcacggtaaggggccatccgagaagcccacagcagaggggcctccgtccgactccatctgagaccccctcctccgaggcatcccggggctgcagcccaccccgcccccagcctgccccggcggccactctgctcccagaacgccgggcgcccacctgccccgcagctcggccctgcgctcagccggctccgcgccgcctcccagcgcccgcctcccgcgcaggccacgcccccgccccgaggcccccgcggccggttccccgcgcgccactcccgcaacgccgcacgcgctgtgcgctgggcacgcactgacctccttgacttcagagcggtgacacgagggcccggactcctgctcaaaagccgcccaacacaggcccacgcgggggtgccgcgcccagcactggcgcgaggccatcgccggcacaggaagtcc

SEQ ID NO: 109538 - DNA, 30 bp, Homo sapiens
  chr3:195635422-195635452
  hyper
gttcccgccggccgcggcctgccctcaggc

SEQ ID NO: 109539 - DNA, 34 bp, Homo sapiens; identical to SEQ ID NO: 3074
  chr3:195636197-195636231
  hyper

SEQ ID NO: 109540 - DNA, 506 bp, Homo sapiens
  chr3:195808864-195809370
  hyper
atgaagggaggacacgagggtcggtgtagttctagaagcccgcactcacactagcgcgtcctccgtcccgagccgccacccgatatcccgacgctctgaggggatggcggcccctaaccggcggtttatagcctggccccgcccccggcccccaggggggctgtgcgtcacttcctgaggcacgtacgctcgcgaggtgctctgacagatcgcccggggggcggggatgcgcgcgcagcgggcggggccctatgcggagggcgctgcgggcgaggcgaaggccaagggaaaaggcgccaaggcagcaggtgccccgaggagccgcgcgatgggcgcactggcctctgcctcggcgccttcctccaccctggtagcctggcagcctccgcctgaccttgaccaacctccagtccctgcagtgctaggtccaatctgttggcgttgacgcttaaatgttggatattgcactgcggcagtgccttgaaatgtacgtgcaggatggaatg

SEQ ID NO: 109541 - DNA, 159 bp, Homo sapiens
  chr3:196014678-196014837
  hyper
tgacacagtagttccgcctcctcagaggcccccgggatgaagtgacccagcagaaataccagagaccggagacggaatggcccagggtcagcctccacccggaaccggaggatgcagcgaagacgtctccttgaagtgggatacggatgtgaaccggcc

SEQ ID NO: 109542 - DNA, 30 bp, Homo sapiens
  chr3:196044617-196044647
  hyper
actcaggacgccatcgcgggtttcccaggg

SEQ ID NO: 109543 - DNA, 19 bp, Homo sapiens
  chr3:196045320-196045339
  hyper
tgcagaagtaattgcggcg

SEQ ID NO: 109544 - DNA, 176 bp, Homo sapiens
  chr3:196158443-196158619
  hyper
gcaggaggccccggcgccatcgtctccgtctttatgattttattatggggaggtgggaaacgccaccctggattcttccaggcctcccctattcagcttgggggttccccctcattcttccctcaaagcctcagtccctgaggtcctcctcagcaccccccgcttctggcggcctg

SEQ ID NO: 109545 - DNA, 30 bp, Homo sapiens; identical to SEQ ID NO: 40120
  chr3:196158960-196158990
  hyper

SEQ ID NO: 109546 - DNA, 43 bp, Homo sapiens
  chr3:196230642-196230685
  hyper
agcaacgtcacaaccgcccgccaaaatcgcacttcccacccag

SEQ ID NO: 109547 - DNA, 33 bp, Homo sapiens
  chr3:196255598-196255631
  hyper
gggtgtcttcaagtacggagaactgcggtgtcg

SEQ ID NO: 109548 - DNA, 30 bp, Homo sapiens
  chr3:196295744-196295774
  hyper
acaggggcggtgagcgagccgctccggtct

SEQ ID NO: 109549 - DNA, 30 bp, Homo sapiens; identical to SEQ ID NO: 40122
  chr3:196296017-196296047
  hyper

SEQ ID NO: 109550 - DNA, 82 bp, Homo sapiens; identical to SEQ ID NO: 40123
  chr3:196366354-196366436
  hyper

SEQ ID NO: 109551 - DNA, 30 bp, Homo sapiens
  chr3:196366654-196366684
  hyper
aggtagcccagccccgcgttcggctgctct

SEQ ID NO: 109552 - DNA, 30 bp, Homo sapiens
  chr3:196439552-196439582
  hyper
gcggtcccggctcccgggcctctcggcggg

SEQ ID NO: 109553 - DNA, 47 bp, Homo sapiens
  chr3:196466462-196466509
  hyper
tgtataacagcaatcgtctgtcagcgtcttccgtcggcagagacctg

SEQ ID NO: 109554 - DNA, 31 bp, Homo sapiens; identical to SEQ ID NO: 3077
  chr3:196467926-196467957
  hyper

SEQ ID NO: 109555 - DNA, 31 bp, Homo sapiens; identical to SEQ ID NO: 3078
  chr3:196476222-196476253
  hyper

SEQ ID NO: 109556 - DNA, 30 bp, Homo sapiens
  chr3:196594461-196594491
  hyper
tcttttgctttcggcgcaggggtgacggga

SEQ ID NO: 109557 - DNA, 30 bp, Homo sapiens; identical to SEQ ID NO: 3079
  chr3:196594752-196594782
  hyper

SEQ ID NO: 109558 - DNA, 30 bp, Homo sapiens; identical to SEQ ID NO: 40128
  chr3:196669202-196669232
  hyper

SEQ ID NO: 109559 - DNA, 30 bp, Homo sapiens
  chr3:196669613-196669643
  hyper
cctgctgcacagcccgcagctggtggaacg

SEQ ID NO: 109560 - DNA, 224 bp, Homo sapiens
  chr3:196695304-196695528
  hyper
ctgggcaaatgtcaccgctgcctccgtccccctaggtccggggcgggtcagtgcttcgagccagcggaccccggcctagggacaggtgcctgcgagaatgcggggggcggcccccagctcccctgccctcctccctagaggctgggcctgctggtctcccggctgcgcgcaaggtgggaacgcggccgacttggtccgctcgccctccccgcacccgctcctct

SEQ ID NO: 109561 - DNA, 30 bp, Homo sapiens
  chr3:196697049-196697079
  hyper
cacactaaaaacgacgactttattaagatg

SEQ ID NO: 109562 - DNA, 523 bp, Homo sapiens
  chr3:196755863-196756386
  hyper
acggggcgggggtggcggtggcttcatcgtttgcattgatgagtgcgtcgcctgcggccacagcggtgccacgaactccatcccctcggcggtcgccgcccgcgatccccgcgagccgctccccgaggtcccgcctcccgtcccaccatcccgggccctgactccccggggcgccgacgcgaggggacccggcctccgtctccacctccatccctgcatgtgccagaaacccccgggcggactcccgcgcctgccggtcagtccctctgaatcttctcccgcgggggctcgggagaaagagctgctccgagcccccaaagtcttcctgagttcctgcgcccgtcgggaggggccgccctccgggagctcctctccacaccccgaggcctccccaccacgcctcagcccgcgcttctccttggagcgtcggaagcctcgggtgttcgaggccgcctcctccaagaagccttccagacttccccgtctgcgcttcagtgctagttccctccgccgtcctcactcg

SEQ ID NO: 109563 - DNA, 240 bp, Homo sapiens; identical to SEQ ID NO: 40129
  chr3:197023960-197024200
  hyper

SEQ ID NO: 109564 - DNA, 30 bp, Homo sapiens
  chr3:197024694-197024724
  hyper
tcggaactggggtgcgccccggccagactc

SEQ ID NO: 109565 - DNA, 30 bp, Homo sapiens
  chr3:197025186-197025216
  hyper
ttcgcttaaaagggcggccgctgaagtggc

SEQ ID NO: 109566 - DNA, 678 bp, Homo sapiens; identical to SEQ ID NO: 40130
  chr3:197025625-197026303
  hyper

SEQ ID NO: 109567 - DNA, 503 bp, Homo sapiens
  chr3:197183232-197183735
  hyper
aggaactaagggaagcggaagtatcagtaaggagcctccgacagaaatggtaggctggcaacatcctgatcagcagcagaagtgattttcccgtgtccccgtgtccctgctcaccacccacgctcccgagagctcccaggccaggcctcacagggctccttccctgtgggagcggaggtttgccgcgagccatcgcccggcacgggacacgtctcagggggaaggaacacgttttctctcagactgagcgctcgctgaccccggctcccaggcaccacgtctaccacgtgactggattcctgcggccgccgcgagccgggagaattctaatagcgcagatgcccggaaccgctgcagcagcccgagccggaagtgccagactcctacttcccaccggatgcggggctcggcaggctcggcaggctcctccgcaggccacacagccggcggcacaggcctcctgcggggaaccccaccccaccggccagcccggtgctctgccc

SEQ ID NO: 109568 - DNA, 97 bp, Homo sapiens; identical to SEQ ID NO: 3081
  chr3:197222651-197222748
  hyper

SEQ ID NO: 109569 - DNA, 294 bp, Homo sapiens; identical to SEQ ID NO: 40133
  chr3:197237061-197237355
  hyper

SEQ ID NO: 109570 - DNA, 30 bp, Homo sapiens
  chr3:197281431-197281461
  hyper
ccaggacatttgcagcgtcacaaaagatcc

SEQ ID NO: 109571 - DNA, 156 bp, Homo sapiens
  chr3:197281701-197281857
  hyper
ccgctagggaccgaccggagcgctcaaacccacagggtatctatcaggcgcgcgtcagcacgtaagcagagcgcgagaacgcccgagacggcggcgcagccaatcccagagcagcgctccccaacggccggccggagggcggggagagaggggggc

SEQ ID NO: 109572 - DNA, 238 bp, Homo sapiens
  chr3:197281920-197282158
  hyper
cgcgcgggtgcgccgcctggactcccaccctggccagtcccgggcccaccaccactctggcatccccagcctgtccccgcggctcctcctccttccccggccctgtggcctgcctgctgtccagcattcttccccagggcgctgtggcgcggagggaggactccccaaaccccgggaacagagccttgcggaggaccccggaggaggaggaggaggagggacgcggacgggactggga

SEQ ID NO: 109573 - DNA, 30 bp, Homo sapiens; identical to SEQ ID NO: 40134
  chr3:197463363-197463393
  hyper

SEQ ID NO: 109574 - DNA, 30 bp, Homo sapiens
  chr3:197463830-197463860
  hyper
gctcccgcaggacgcgtcctccaatcccag

SEQ ID NO: 109575 - DNA, 30 bp, Homo sapiens
  chr3:197476514-197476544
  hyper
ttcagaggtgcccgcggtctagcatccccc

SEQ ID NO: 109576 - DNA, 247 bp, Homo sapiens
  chr3:197476865-197477112
  hyper
ggtgggagccacggcgacttcttcgccgccgccgaaggcccgcagcaatgaaaacctcgacaaaatagatatgtctttgggtgaggggccgagttggaccgagttggagtgcgggggagggcgcgggtggaagccggcggcgcggtttgtgggggcaggggcggtcggcagcagttgccggcggagttttctcgctggtgggcggacccgagcggaggcccggaggacagccgggagcgcaggctcg

SEQ ID NO: 109577 - DNA, 191 bp, Homo sapiens
  chr3:197517982-197518173
  hyper
gcgcatcatgtgggcgggggcaagcgcctggctgcgccggggggcaccacggtgctgcccatcacgggaaccgtccggggtcggtccgtgagcccctttctccgcccacccagcggtccggccgcgcatgcgctgagctggcgggcccgagtgttgtcggctgggaaatggcggccgcgggcttggtcgct

SEQ ID NO: 109578 - DNA, 30 bp, Homo sapiens
  chr3:197687814-197687844
  hyper
caggtttcttttcacgttatgtcgtcactt

SEQ ID NO: 109579 - DNA, 1180 bp, Homo sapiens
  chr3:197807081-197808261
  hyper
tctgagggtgcccagcgccctccaaggcccccgtcccaggggctgcggggctgcggggaagccgggcctggggaccccctcccaccccggctgagcccccgctacctgtcctgggcatccacgtcccggcacctgcgcgccaggcggcgctccacctccgcggcgtcgcccttgagggccgccctgtggatcttccgcagttccgcgtccctggtgtggtacgcgggacccgggtactcgtggtcgatggagcccaggaccgcccggcccgggcgtctcccgaagctgaagagcttcctcatggggcgacttctcctcagacgcccaccaccggctcctgagcccccgcggctcctcgtggcctttccactaaccctaaccccaaacccgagatgtagctcagaatccgcgacccggccgggtccaccacagccttcagcagcgacactcgcagcctctgacctctcagcccgcgaagccgttaggcgcgcgcctgcagctcagcgcccgcgcggactccggaagccgctcccaagcccgcgctgccggcagggggcggctgcggctcgggcgcaggcgccgctggcttgcgggttctcctgggctcgcccgggacgtcccgtagtcgcaggcgcgcaacccgcccggcctgagggcccgcctggccgtgacccccgccccgctcctcctccgaagagagatcggggccgctggcaggggccctccgcagccaccagggatggggctgtggggcagttcccgccccggtgcagccgccgccgggcagaccgcctggcttggctgcagccgcggcatctggctccggttctgcgaggctgggagctccagcgagcttgggagctgccaggcggctgctgcgagcaggcagagggcgcctggagcttgggccctcaggcggcggagcatggcctgggcggcctctggatcgcgagtgcacctggcctgagagcctgccaggccctgcccccgctcggctcctcctctgccggagctccggaccgctagccaggggccctctgcagccaccgggaatggggctgagggcgggttcccgcccctgtgcagccgccccagggccgactgcctggctcggccgcagccactggtacatctggctccggttctgagatgttgggagtgcgggcgggctcgggggttg

SEQ ID NO: 109580 - DNA, 28 bp, Homo sapiens
  chr3:197808320-197808348
  hyper
gaggggcatggcctgggcggccccggga

SEQ ID NO: 109581 - DNA, 40 bp, Homo sapiens
  chr3:197808380-197808420
  hyper
cgtacctcccgccccactcctccaccgcagggagttcgag

SEQ ID NO: 109582 - DNA, 1497 bp, Homo sapiens; identical to SEQ ID NO: 40138
  chr4:330715-332212
  hyper

SEQ ID NO: 109583 - DNA, 30 bp, Homo sapiens
  chr4:332466-332496
  hyper
gttcagaaatgaagacgggtgtccagaggc

SEQ ID NO: 109584 - DNA, 32 bp, Homo sapiens
  chr4:379915-379947
  hyper
gcatccgggatctggcgcggcttttgcctttc

SEQ ID NO: 109585 - DNA, 237 bp, Homo sapiens
  chr4:380157-380394
  hyper
gggaaatggcggcggcgggaccgagtctgtgaagagagtcccctctgccgccgctcagccctcgggcctcagccccctccggtgagggactctggtttctgtcggttcccgcagggtggctctggcccagcctgcagccctccttgtgcagctctgcccccgcagccgcgcaccttccctgggctgtggggtgaggaggagctcatctggaagacgccgacgcggcgtgcgcagtgg

SEQ ID NO: 109586 - DNA, 30 bp, Homo sapiens
  chr4:380627-380657
  hyper
tccccttgccctgtgcgcctcctccgcgtg

SEQ ID NO: 109587 - DNA, 30 bp, Homo sapiens; identical to SEQ ID NO: 40139
  chr4:468025-468055
  hyper

SEQ ID NO: 109588 - DNA, 235 bp, Homo sapiens
  chr4:492841-493076
  hyper
tacctcgccgtgggcggcgaccgtcgcggactcgccgggaagacggccccacggagccgggaacaccgcccgctgttcgtatgtccgaggtgacgccccgctgtggcgggctggcggaagtgacgcgctgctgtggcgcgccggcggacgtgacgccactgtcgctgcgacgataaggcctggcgttattgcttagaggcggctacctggagccggaagcgcggctgcagcaggg

SEQ ID NO: 109589 - DNA, 407 bp, Homo sapiens
  chr4:568245-568652
  hyper
tctgaattaccagctgctctgcgtctctgtctgctcttcctccgtgggaagtcgccgtcctggggcgctcgctctgtccccctcgcctcggaccaccaggcagagcagccccagggtttggacttgccaagaaaagtgcagtcgggctagccaagcccaaacatttattgtaaacttgaaaatggaatccagatatgaacgacacaaataagaagagaaacctcccagatacagaaatggtcacatcaggggccccctcctgtggtcacggagcccgcagagggggccaggccggaggctgcaaagccacgtggaagaggcggcgcccctgaggcctggccctggaccccgccccgctgcccgtcctcccttgccgcgggggtcctgagcggggcggggtgggtgga

SEQ ID NO: 109590 - DNA, 68 bp, Homo sapiens
  chr4:569047-569115
  hyper
ggagccgccgcggggccgcgccagggcccggcctcccctccgcctgccgcgccgaccgcgccgggcct

SEQ ID NO: 109591 - DNA, 161 bp, Homo sapiens
  chr4:569274-569435
  hyper
cgccgggggccgagcccggcgccgagccgggggccgagcccggggccgagccgggggttgagcccggggccgagccggggctcgaacctggcgcccgcgggggcaggcagtagtgcgagtacttgcgctccaccagggacacggtgtcgccgtcgatcacg

SEQ ID NO: 109592 - DNA, 272 bp, Homo sapiens; identical to SEQ ID NO: 40142
  chr4:569460-569732
  hyper

SEQ ID NO: 109593 - DNA, 14 bp, Homo sapiens
  chr4:570063-570077
  hyper
gggaaccgatgcgg

SEQ ID NO: 109594 - DNA, 160 bp, Homo sapiens
  chr4:570310-570470
  hyper
cggcgcgggccgctgcggaaacgcagctctccacccccagctggctctcccggaccccctgggccccaccctcagcgctccccaccgctcggcgcccctgcgtctgcgctcccctctctcccctctctatccactgggtctgggccgcacttcccgccca

SEQ ID NO: 109595 - DNA, 1040 bp, Homo sapiens
  chr4:570830-571870
  hyper
gggttgttcaagggatggggacgatcagggtctctgggaagtgctgacgtgtgcgcgtgtgcggtgtgttgcttgtgggtgcgtgtgtggtgtgtgcatgtgtgtgcgcgcgcgtgtgtgcggggtgtgccgtgagcgtgtgcccgcggttcgggggatgagtaggggcgctgacttttaggaccagccatttgagtcaagctggagacgacgtcttagaacctaggatgagtctcgtttggttttagtctgcaaagctcgtctgcatcagacaggaattttccccagacgcgggtgcacgtgaattaattcatcagaaggcggttcacggcctgagtgagggggacgagggcggcgaattcctccgcctcattcctaccctgacgattcgaggtgggtgagaggaaggcgtggggcggctgggtgcgtggggtgggggaaggtcacctcttcggcctctctgggccctccagcctcttcctgagaggagctcgcctcggccccttggttggggggatgggagcgtctccggaaggccctcggccgagcagctgggcctgcacccctggtcccttccagttcgtttctgctgcggcggcaagaggctggggagccgatgactcaccctgccggctaattgcagcgttaaataactttgcgccggattcggtggctgcagcagggaacgcgctccgggcgccgggggaggtggagggacgccctgagaacgcacctccgtccctgtcaccagccttagcaagttctggcctgtggagccgtcatccagagcgcacagcttcatgcccttgaagggcgcagtgtgtcccgtggtgcccggtgggcccggacagagaccccagaggctctgtctgaaggaagctgcacccacagactccatccaggcagcgcgggcgcggtcctgtcgcctacctttctcggaagccatctgcccatgtgaatctatgtgaaggcccttcatgcgctcctggacatctgcgtgggatttacttcaactgctatcgctgcgaggaggacgagca

SEQ ID NO: 109596 - DNA, 509 bp, Homo sapiens
  chr4:657348-657857
  hyper
tgcgtcccaagccgacgatggagccgctggtggagagctgggcaccctgaggagggccctgagcagcaggcggattaggggtcccgcccaccgagggcccgagggcgggggcgtgagaggcacaggcagccgaggcggaaggggcggggtccccgggcaccctgagaggtggccgcagggcgcctgacgcgctgggcataacctccgcagaccctgaacatctaccagaacctgaaccggcggcagcacgagcacgtgatccacctgatggacatcgccatcatcgccacggacctggccctgtacttcaagtgcgcgccttccgggagggggcgcctcgcggggcgggcgggtagcctgggacccccggcagacacgggggcgcagcggcggcacagcccgggggacgcagccccggattccgtccctgcccgccggccccgcgcaccccggatggggcctcgctcgggctccgcgcctccctgcagacgggcgcttggggcggggtc

SEQ ID NO: 109597 - DNA, 227 bp, Homo sapiens; identical to SEQ ID NO: 40146
  chr4:667539-667766
  hyper

SEQ ID NO: 109598 - DNA, 30 bp, Homo sapiens
  chr4:668278-668308
  hyper
ctgcgcagttgctgcgtgaggcgggatctg

SEQ ID NO: 109599 - DNA, 31 bp, Homo sapiens; identical to SEQ ID NO: 40147
  chr4:699369-699400
  hyper

SEQ ID NO: 109600 - DNA, 30 bp, Homo sapiens; identical to SEQ ID NO: 40148
  chr4:699935-699965
  hyper

SEQ ID NO: 109601 - DNA, 30 bp, Homo sapiens
  chr4:775685-775715
  hyper
ggagccaatcatgtcggcccacctagcatg

SEQ ID NO: 109602 - DNA, 458 bp, Homo sapiens
  chr4:779828-780286
  hyper
gagcgatccgaaccccggagtccgcgtgcaggagggggacccaggccccgccgccctcgccccgcccgcagccccccgtctgctatggctgtgctcctgagtgcgggcccgacaggcgcccaccgccgcgaacgcgcgcacaggggtggtcgcggggctgcccttcggcggccctggcctcgggcgctgctgggtgggcggtaaacagcaagagaaaggggcgtcccaggcgatggggctccagccacccgcgggcagaggagcacggggcggactgggggggtcctgggggcgcgcgccccttgccgggtgagggaggcggcgggcgcgggcagggcgggcctggggctatggcttatatcggcgtgggggctgcgctctgctcgtccctcaggggcctccgcggaggatctgtagggggaggggcgggggctccgcggggccgctgtcccgcgcgc

SEQ ID NO: 109603 - DNA, 31 bp, Homo sapiens; identical to SEQ ID NO: 40149
  chr4:781538-781569
  hyper

SEQ ID NO: 109604 - DNA, 345 bp, Homo sapiens
  chr4:785954-786299
  hyper
cgcagggctgcgcatcggaatgcgggcctaggaagcccgccagggctggcgctgtggtcaggagcaggaggggctgggccccacagagggagcccaacccggagcccccacccctcacccctccgccactctgaagcccccaaagggtaggaggcccagggggacgcccgcccctcttccgggcagccccttccacccaggcgggatctgggtccccgctggactcagggccgccttcccgcaggcggggccggcccggcgcgcaccttgtctcggatgccctggcgcacggcctcgcgctccgcctccatcttggcgtacttggccttgcgctcctcctccgcc

SEQ ID NO: 109605 - DNA, 30 bp, Homo sapiens; identical to SEQ ID NO: 40151
  chr4:789490-789520
  hyper

SEQ ID NO: 109606 - DNA, 298 bp, Homo sapiens; identical to SEQ ID NO: 40152
  chr4:819436-819734
  hyper

SEQ ID NO: 109607 - DNA, 31 bp, Homo sapiens; identical to SEQ ID NO: 3089
  chr4:824547-824578
  hyper

SEQ ID NO: 109608 - DNA, 144 bp, Homo sapiens
  chr4:926346-926490
  hyper
ccagctcccggtaccgttccccacatggtctgttttgtgggaggctccttctcaggtgtctccggtttaagcgcttcgccatcctctgggtggagtcagcctcccgtttgctgttagcgccgcgtttgcgaatgggttcgcgaa

SEQ ID NO: 109609 - DNA, 310 bp, Homo sapiens; identical to SEQ ID NO: 40154
  chr4:966932-967242
  hyper

SEQ ID NO: 109610 - DNA, 30 bp, Homo sapiens
  chr4:991538-991568
  hyper
ggagggtgggccctcgggcctgtggactga

SEQ ID NO: 109611 - DNA, 118 bp, Homo sapiens; identical to SEQ ID NO: 3090
  chr4:995875-995993
  hyper

SEQ ID NO: 109612 - DNA, 74 bp, Homo sapiens; identical to SEQ ID NO: 3091
  chr4:996100-996174
  hyper

SEQ ID NO: 109613 - DNA, 43 bp, Homo sapiens
  chr4:996495-996538
  hyper
cgacggcccccccccgccccgcagatgaggagcagctctgggc

SEQ ID NO: 109614 - DNA, 30 bp, Homo sapiens
  chr4:1003777-1003807
  hyper
tcgcagccacgtttccgcacacctgtcccc

SEQ ID NO: 109615 - DNA, 30 bp, Homo sapiens
  chr4:1004020-1004050
  hyper
ccgccgggaggaccacgcggcggtccctgg

SEQ ID NO: 109616 - DNA, 397 bp, Homo sapiens
  chr4:1004392-1004789
  hyper
ctgggatggtgactccgcggagtcgagggtgtgaggcgggatgtgggcaggccgtgaggtttgtgttgcaagactgggaggcaggatgaggggaggccatggggcggctggaggtgcggcctgggagccctgcgtgctgggccctgggcagggacggcaggcgaggcgtgtggaggaagagccgcgaagagctgggcgctgtcttctccacgcctccgtttcttcatctgctcctggggccgcctgcccggtagcggagattgaatcgcatgttgacgtctattacgatgattaatgttcttgtcattcccgtcactagcaggtgagaggctgggaggcctcaggtgggaacatacctttggccaaaggcaccaggtaacccgaacgccccggggag

SEQ ID NO: 109617 - DNA, 30 bp, Homo sapiens
  chr4:1005055-1005085
  hyper
ggacccgacccgggcgcgcgcgggcgcagg

SEQ ID NO: 109618 - DNA, 30 bp, Homo sapiens
  chr4:1005979-1006009
  hyper
tgttgtgtgtcctgcgggcagggccggagt

SEQ ID NO: 109619 - DNA, 30 bp, Homo sapiens; identical to SEQ ID NO: 40158
  chr4:1006225-1006255
  hyper

SEQ ID NO: 109620 - DNA, 378 bp, Homo sapiens
  chr4:1036244-1036622
  hyper
acacccacacacacaccgacacacacaccgacacacacacctccacatacacccccgcacactgacacacccacacacacaccgacacacacacctccacaaacacaccccccgcacactgacacacacccacccccacacactgacacatccaccccccacaccgacacacacctacagtgacacccgcacactgacacacacccactcctgcacactgacacccactcctgcacactgacacacacccccgcacagacacacacccacccccgcacaccgatacacacacctacccacacacccaccccacacaccaacacacacccacccatccccgcacaccgacacacaacccacccccgcacactgacacac

SEQ ID NO: 109621 - DNA, 30 bp, Homo sapiens; identical to SEQ ID NO: 3094
  chr4:1037600-1037630
  hyper

SEQ ID NO: 109622 - DNA, 30 bp, Homo sapiens; identical to SEQ ID NO: 40161
  chr4:1040647-1040677
  hyper

SEQ ID NO: 109623 - DNA, 318 bp, Homo sapiens
  chr4:1049471-1049789
  hyper
gcttcacgtggtggtcggctgctgttaactcggttaactcgagtgagataacaaagttctttgacactttttaggtaaatgcaaactaaaagattagaactaaccccataagcctcttttccaaccctgtgtggtcccggctggcgggagagacctgggctctgagactctctgggagccacgtgcacgggggcgtctcctgcaggagaccccaccctcctgacggatgaggaggctccacccacgcaggccgcatctgcagggtgagctcaggcccggaattcatctctggacctgacggagattcacccgctgaag

SEQ ID NO: 109624 - DNA, 1153 bp, Homo sapiens
  chr4:1165449-1166602
  hyper
cgtgagcgccccctgcccccaccgcatccccggaaccgcacaccgcaggcgctcggcaaacattctggtgttagagtctcccgacgtcagcacgccccagactgggaagcgccgccgtgcagctgtgcggggggctccggcgccgcagccctcctggtggagcaggaggcgaggagggggctgtacttacccagcagcgaagaccactgcgcaggggggcggaacagggggtactgcttggggaaggccgtctggctccacttgcccgtgaaggtgatgctgtatttggccagggctctggcggaacagatggactctcccccaagaggctggccggcggcgccgagagtggccaggaggagagcgcagagggccttgcccagggcggcggccgggctggggttttccatcacctgggagcacagaggggagcagccgcgcgctggcaccgtcgtggcagcctcggggtggaaagccgagagggctgcggcactttgggctctgaggacggccccgagcacccgcgaccccctccctgctccgcaaagctctcctgcggtgcttccgagacccccatcagcggaatggacggcgcggggttagatcgcccgtgcgcctgcgagcgaccaggggtaacgggcaggttttcagtccgagtccctgcagcttgccgggccggtctgggtgcggcctccgggatgccttcgccgtcgcagggacccggggccttggccgactggctgcccccgggactagacccttaaagctcggtcgcagccagtcctgggggtccctctggaggtgccacaaggttctgggccgcggggaaagtgcaggaggcccgggccctctctgggtgtcccgggggcacgcagtactcacccggcaggagcagcgggagcgcggccggcagcggtcgggtcccagccagagcccggagctcctatttaagcccgaggccggcgccccgggccggccaatgaggctccagttcctcctgtcttcgatgctgcacggcctggcctccagcgagaggcagataggacgtgggagaaaggaggagaaggggctgcgggggcggcgggggctgccgctttcccaactcgccctgcccagcgaccttccccgggtcggatcaccctcttcccctggc

SEQ ID NO: 109625 - DNA, 141 bp, Homo sapiens; identical to SEQ ID NO: 3096
  chr4:1243420-1243561
  hyper

SEQ ID NO: 109626 - DNA, 31 bp, Homo sapiens; identical to SEQ ID NO: 3097
  chr4:1310814-1310845
  hyper

SEQ ID NO: 109627 - DNA, 2050 bp, Homo sapiens
  chr4:1331674-1333724
  hyper
caactgactctgtccccgcctatgaatgtctttcatgtgacctgcctcaggcccagagggcagtgagtgtttcgcgattgctgctggtacctggctgtgccggggtatgaatgagactcaggccccctcccttgtcccctctttgtggaactctgggcgagagggctggcgtgcttgcccactgcctgttcctaggtgccagcagaacgtccctgctgggtggctcttgtcctgcctggagaggttgcgtggccggggagagggcggcgggcgacggagccactctgtgcctgtggtcctggtgctggaggccggggtgagaaggcgcaggcttcttgtctccaccgaggcctcagtggggctgtttagctgtcgagtgcagcacttcctgtgcctcgaaagacagccccgtgtagtcagcatggcgcccacatagccagaagggcacgcagcccagggcagagtggccacagggggctgggctcaccccggctgccctgagtggcccccaacccttccttgacccgatgctcagacagtgctacaaggaggacggcagctccaagagccctgactgccctgtgtgcagccgctccctgaacaagctggcgcagcccctgcccatggcccactgtgccaactcccgcctggtctgcaagatttctggcgacgtgatgaacgagaacaatccgcccatgatgctgcccaacggctacgtctacggctacaatgtgaggggggcagggcaggggggccaggctggcacgcatcgccatcgggacagggctgtgtgggacgggcagggcaggggggccaggctggcacgcatcgccatcgggacagggctgtgtgggacgggcagggcggggggccaggctggcacgcgtcgccatcgggacagggctgtgtggggcgggcagggcagcggggccaggctggcacacgtcgccattgggacagggctgtcctctcgccccaccctgccttagcttcgttcgaaatggatgaaggggtgggaaggacaggcgaggtggccccgggatttctttggcaggtgtgccttcgggaaggaactttgcctgagaggatgagtcattccctggtggttcattgtggggattttccatggaaatccgtgtgtacgttgtagtcgcttgccttaatgcattcccggttttatttttcagtctctgctttctatccgtcaagatgataaagtcgtgtgcccgagaaccaaagaagtcttccacttctcacaagccgagaaggtgtacatcatgtaggccccacgtcgtgaagcgcacgcctcggggacgggctgcagtgggcggggaggccacgccttcctcctgtcccacgctccagcctgccgcggcgtttctgtttcttgcgaccaaagatccgtgagcaacgataaatactcttaggaagagagaaaataaggtttcataagtttgtacttgaaaacatttggattggtaggattttgtaacacgtcaaccatttgatgcttctgaaaagtactttcaacttgcgaaggaaactcttctttaaagactgacctaaacaccgagggaaacttaagaacgtttaaaatataggagtccgtgatttccctgtgttttcagtttctttccttctgtgaacgatgagacttggagaacgggctggtccttcaccacttcctgttggccctggcctggccggggaaggtggcagcggcaccggactgacctgcagtgacccgcgatgccgcgccacgagggacacttatggcttcattcgagagctgctgccaaaacgcctggcgccgccaccgtcgggggctggcttcgaggacgcccgcctgcctcgcgggtcgtgtccgcgggactgtgttcgtacgtgcatagtttcgatatcacatcgcggggctgtgttcgtagctgcgtcgtttcgatatcacaccctctgtgtgccgccttacttcctgcttcgagaatgtataacgtggaaatccacgggaccaaatttctgcagaggccttgccggatggttccataactgtaga

SEQ ID NO: 109628 - DNA, 30 bp, Homo sapiens
  chr4:1340897-1340927
  hyper
cccaggtcctgatgcgtccggcccagggcc

SEQ ID NO: 109629 - DNA, 30 bp, Homo sapiens
  chr4:1341560-1341590
  hyper
aacagcaacagtcacgttggggaaaagctg

SEQ ID NO: 109630 - DNA, 725 bp, Homo sapiens; identical to SEQ ID NO: 40167
  chr4:1395971-1396696
  hyper

SEQ ID NO: 109631 - DNA, 102 bp, Homo sapiens
  chr4:1396923-1397025
  hyper
gggcagccccgtgccaggcccggcccccggtcccggtccgcccccgccgccggtcggagcgctggtgtcggcgcccgggttctgcttcttccacttggttcg

SEQ ID NO: 109632 - DNA, 987 bp, Homo sapiens
  chr4:1397259-1398246
  hyper
cgcgccccccggcgccgctgcacctcccggtgggccctgggcaacgggcgagttctcgcggggtccgggggccgctgcctcgtcgacggtggctccgggggacgcgtcggtctcagccgcgccctggcaacccgacccgcgggccccgaggccgccgccgcctccccgcgcctcctccgcgcctcgcgccgcctccgtctcgggcgcttcgtcctcgtcgtcgtcctcgtcgtcgggaacctcgtccccgctgtccgcgctcgggctgtggccgccgccgccgctgctgtagccgttggtgtcgttggtctcggcctcccctgccttgaaggggtcgccggcgtctgcgggagggagggacaaggacagggcagggcagttaggaccggccggttcccagatcccgccctccgcgcgccccgcttcctcccccagggttccctcccgccccctgctcagcgcctcctgcttcgtcacccgcctcctctctctctccttcgctctgtcgtttccctcccctcggcctgtccttccctcccgccgcccgcgtctcctctcggtcccttgcttgtttctttctatggagagggtccccctcgccccgcgctgcccgttctcgcggcgccgggcgtttttgcctgagcggggctggacgggtgctgcgggccgggcccggctgcggagatcacagcggagtggaagctctgatcgatccgcagggctgatacacacttaattaaactcattttgtgtagtgtacaaactagttaaggccatttaatttatttcggcgtatattaccccccaattaccgccggcgcagggccagccaattgccgggcatttaataacaggcccggcggtggggccggagccggccgagagaatggggcttgggggacccaaatcctatgccctggccccgaccctacctcaagcctccaggccctgagcttcggtcgcgagggtcagccccggctcccctgc

SEQ ID NO: 109633 - DNA, 451 bp, Homo sapiens
  chr4:1398263-1398714
  hyper
cgcagagttgccgcgggtagggccctgctcggcctcaccaggagggctgggcgggcgtgcaggtcggagtggctccccgcggcctaaaggcccggtcggccgagtctgaacagcagctccgcatcctccaagcagaggccctgaagtgactgcattttgagtctctgaaatttggaagaaagcatctctcccaggcagggtcgcctatgccccggcactgggggcctaagtcaggaggagtcggggcaggtgccctccacagagctgcccagcggcagccgcggcctgctctccggccaggtcggaaccgaaatctccggtaagaaatgaccaatcgctcctgtcagattcctccagggcgactggccacctggcatggaggccagcaggtggtctgggtccccgcgaccctcagcaggagtaggatccgcccctagacgaccgcgagcgc

SEQ ID NO: 109634 - DNA, 425 bp, Homo sapiens
  chr4:1399207-1399632
  hyper
aatgggatatcgacccgaccgggggcgcgggccgccccattaccggccgctttccgccgctaagcacatttccccttaactgtaatcgaagggatttaattgtttttccagcgataaccagcgttttgtcacaattagtctgatttgtccaaaaaaaaagagagagagggagaaaggagggagggagggaggcctcgggcgggcacagtgggggcggggaggtcacgggccagccaccgcgagcggcccctcgcctcctgcaccaactacccttctaggccggagacgcgcggaggcgaaccctggaccggcctcacagccctgcagcccctgggcctgacccggctaagcttctccagaggagcctggcgatgcaggccctgcagtccgggtcggatggaggccacgggtgggctggtgcggac

SEQ ID NO: 109635 - DNA, 349 bp, Homo sapiens
  chr4:1399665-1400014
  hyper
cgtgggccagacccaactcgccacggtgtcccagggtcgtaaacgcatagaagcctccggtcccccgtccctgcgacctggtgccgggcgcatcctactcactcggcggctcagctccggcggctccgactcccccggcgccggcgagggcgcggcgctccagctcctccgcgcgtggcgggcgtcccgaggcggcgggtgcaggggcgcatggggccgaagcgcaaggggcgcacgcagcgggagccactgggcccagcagcacgcaacgacgcctcctgctgttgaacttgttggggtccaggatgtccagtaccgagaaggaggtggggcgcaggggcgctgcggg

SEQ ID NO: 109636 - DNA, 227 bp, Homo sapiens
  chr4:1400112-1400339
  hyper
cgtccatagcttcctgggcagcggcggcgggagcgggcggtgcgggccccgaacctggctggggaggcggcggtagcgcgggaatgtccccaggagcctcggggccgctagcgctcatgccggcctcccgccgctccggcggctcgggccccgccacctactgggctcccatccctggcggcccccgcacctccacacgaccccgcgcaggcggccgctgctccgct

SEQ ID NO: 109637 - DNA, 197 bp, Homo sapiens
  chr4:1400997-1401194
  hyper
cgttccgtgggtctcggtcccgcctctctcacttgctcccgcttggggtctccttttgcgtctccagggtctctcttgctcagggtctgtgcccctccatcccttcccacgcccgcccctttcacgtcgtcaaattagggcccgacctggagtgccagcagaggggcggagccggcggtccccgggccgctcattag

SEQ ID NO: 109638 - DNA, 82 bp, Homo sapiens
  chr4:1401439-1401521
  hyper
cagggccctgcggcccgcggccctcggccctcgaggattgggcctggcgtccggagtcccagtgcgggatcgtggtagctcc

SEQ ID NO: 109639 - DNA, 227 bp, Homo sapiens
  chr4:1401642-1401869
  hyper
cgcgtgcaccggcgggtgtgcgcgccgccttacactgcggtccccggagcctgttccgcgcgcagggcggtcctttgcaattaccgcgggcaatgatcctttggaagcagaaattaaaagttgggagaaataatggtggaccgatcggctgtaatttgggccaagctcggacacgctgagccccagggagcctggaactggttgggcggggcggggggggggcgcag

SEQ ID NO: 109640 - DNA, 252 bp, Homo sapiens
  chr4:1402196-1402448
  hyper
ccgttcacgagcatccgttcacgagcacccaggcacacaagccctgcagagccctcacaaacgcgctggcatccctgcatctccctcttccccgccagcgccagcgccagctccgcgctggtgttggttcctctttcactgtttcccgaggaggggcacaccagacactttccagattgctgcgccccctccccaggagaccgctgggtggcgggcgaggcctgggtcggggagggccgggcaggtctcaag

SEQ ID NO: 109641 - DNA, 18 bp, Homo sapiens
  chr4:1404047-1404065
  hyper
cgggggcggggggtgcgg

SEQ ID NO: 109642 - DNA, 609 bp, Homo sapiens
  chr4:1404120-1404729
  hyper
cgcgccacggcgacccatgttgatcaccggagtttgggaagtcagaggggagccctctgctttcaggcctgggttccttctctaagatatgcccacttaggggcctgtgactcctccagaatgagtgtaccacactcgggacaccagaagcgagaggggacacaggctctgacctcgagagcacgtcagctctggagacccgcggccccagcctcgtgtgcctccgcacagggcagcttcagcactgcgaacagcgccagcaccgcggacagcgcgctcccacctcgcccccggaggccacgggctcgggccgtgttcagcaccgcggacagcgccagcaactccgagggtctcctggcctccagcccgccgtctctgacctccctgccccgccctcgactccttctcaaactttgggatgccccaggggaggaagagggcggcaggctgtgtgtggagtcttggcacggcgtacattacacagcccgatcaaaagccagcccgttcacctcgaccaagccagcatccaccaaagggccagaagtttaccaggccgctcaccgcgtgggcttccattctcctacctgcaagctgcgcgagttaaggagg

SEQ ID NO: 109643 - DNA, 472 bp, Homo sapiens
  chr4:1407531-1408003
  hyper
tcctcgtggctcctccgacagggtgggcactgtggcggtcgtaaggggcagggatgagcgcgctcagggagaccccgcggttaccgcagcctttcagggaggagggaggcggcggatgcggtctgggagggctccaggcgtgagaaggcggcccttgcctggcgcaggggagcagggagcttccagggtgggtgcggggaggaaggaggagtaaggggttagaggccaggtacacagcaggtgctcaataaacgagttcggcaccgtcatcccgccctgcagggccgctctgggttcggagggcgcgtagggagggcgggtcaggccgcacaatgagcttaattgaggttaatgcctcccgcagctccgcgattattaaattatcatcatcacgcgcgtgaatcataattaggagtttgaggaacgctcctgcggaagccttggagagtgattctggcgccaccgcctgctt

SEQ ID NO: 109644 - DNA, 201 bp, Homo sapiens
  chr4:1408541-1408742
  hyper
cgcgctcacgtggcgcgcccccggctgagcccaaggccggggtctcagaaggccccgcccaccccgcagcgaccccccccccacgcccctcgcaccgccgagcccctcccccaggggccgttcccttccgggcctgcaccgcccccgcagctgccctccccccagagcagcgcccgcccccctcctctcggcggttgggag

SEQ ID NO: 109645 - DNA, 30 bp, Homo sapiens
  chr4:1514996-1515026
  hyper
cggccgtggggaggcggcggggccgggccg

SEQ ID NO: 109646 - DNA, 30 bp, Homo sapiens
  chr4:1713359-1713389
  hyper
ctaactcgggctgacgccggttcagctgac

SEQ ID NO: 109647 - DNA, 55 bp, Homo sapiens
  chr4:1714964-1715019
  hyper
agctgacggccccgcggatccagccaactagaaccccaacgggtgcactacacct

SEQ ID NO: 109648 - DNA, 30 bp, Homo sapiens; identical to SEQ ID NO: 40178
  chr4:1734223-1734253
  hyper

SEQ ID NO: 109649 - DNA, 30 bp, Homo sapiens; identical to SEQ ID NO: 40179
  chr4:1750427-1750457
  hyper

SEQ ID NO: 109650 - DNA, 20 bp, Homo sapiens
  chr4:1794935-1794955
  hyper
ggggaccgggcgggagcggg

SEQ ID NO: 109651 - DNA, 2173 bp, Homo sapiens
  chr4:1794972-1797145
  hyper
cgcggaccgtcccccactggctgcggcgcgcggggcagcccaggctcagtgcgcggtggcggcggcgtcgcgggcagctggcgccgcgcggtcctgctctgccggtcgcacggacgcaccggcgggccgccggccggagggacggggcgggagctgggcccgcggacagcgagccggagcgggagccgcgcgtagcgagccgggctccggcgctcgccaggtccgtgcttggggccgggcaggctcgcggaggggtccaacggtgctcgcggaggggtcggggcgcggctgtcgcggaaccacagaggtccctgcagcgggccgggccggggcgcgggcttcccgctccggaaagtttgccgccgccgccgccctgggagggctttgcagcagccagggagggaagggggaggagggagggaccgcggcggggaggaggcggccggcgccaggcggcccgggagccctgggcggcggcggcggcgggcggggcggctgggggtcggaggggtcgggacgcaggagccggccaccgccgctttcgtccctgtccgcccctctaacgagctgccttcctcctcctgtagtctcccgagcggcgcccgcctcccgccggtgcccgcgccgggccgtggggggcagcatgcccgcgcgcgctgcctgaggacgccgcggcccccgcccccgccatgggcgcccctgcctgcgccctcgcgctctgcgtggccgtggccatcgtggccggcgcctcctcggagtccttggggacggagcagcgcgtcgtggggcgagcggcaggtaagaagggacccactaggcacgggagaggccggcccgtgcgggcagaggcgttggggacgggaaccggccccgggtcggaggggccgccgggtgtgagtgacgccccggggttagagcccggattccgctgcctccttgccggagagcgcggccagagctagcgcggcgacttgtggtgcgcccggagccgcagctaccctccaagtgcgaggccaccacggggagccaggctgggggttggcgtccgcagccccgatcccctgcgactccctagccctggcctgtcgggagggcgcggggggccccatttccacgattcccgctgttgttattcgggttctgcgcagacggaaagttcccattgttggcgtccccctcccccgggccccagtttgtggccagcttcggccaaggcgagagaccggacttctaagggtgggtgtgcgcgtcagcgaagcccggcccctgcccgcccgaagaggcagcagcctccagcgtccccgctgccgaccctgcccctgcctgggggccgagggcgcttccccgtgggtgcgcgccgagctccaggcaagcgaggggcgcgtgtcccagcgtcgcgggccctagactgggctggcggtccaggtcccgcgggacgtcgagggtctgaagggaggtcccaaggggcgaggggaggggaaggggcgcccggccggacctgcacacgcgccgcggttcctcgtgggccgggccgagagctccggtgccgccgccgcgtacacccgcagccggctccggacgggcgaggggggcgcgcacagctcagcccggcggccgcgcggagggaggccttggcccggtgagctcgcgccccacccgggccgaggcccgaacagccgcttctttgtacctcgacgcggccacagaccgcgcattgatggcggctcggcggctcgcggggaggtgtgagcgaccgcgggcgcggcgggccggggagggcgcctggagggccgaggcagatggcgtccgccccgcccgcgcccccgcgcccctttctccgtcggcggctgcagcctcccggaacaatgtcattttttttatgaatgaaagtggcccggcgcttgaatgtgcgtgtcattcagcggcgtgacaggggccgtcgggaggtcagcgcgcgcttttagcgtctgctcgggcggccccgcttccaggggtgccggaggggcggccgcggggggagcttggctttcgcattctcattcagataaagatattactccctacggcccgggaatgtcagccagccccggggaagggcggcggccaggctgcggagcctctcctggaccccctgcgggcgcgcggggcctcccccagtcgctcctggaacgcc

SEQ ID NO: 109652 - DNA, 42 bp, Homo sapiens
  chr4:1811796-1811838
  hyper
atggggctcgaagcgcgggccgggagcgccccctagcgctgg

SEQ ID NO: 109653 - DNA, 509 bp, Homo sapiens
  chr4:1828220-1828729
  hyper
caccttccccagctcccggtgctgcccgttcacagacgcgcttgtctccatgtctgctgctgtcacctggagtgctctctgaacaggatcatgcaggagtcacctctggggttccctgaggacccactgggggtgctatgggtgtgccgggttaggcctctcactgccatgcggcattctgcagcatgcgtgccctccttagccgaacccttcgcccactaagctgggctccgccagttgatcaggaatgaagatgctttctgtctgctttcttctccctgtcctcctgggggctggctggcctccgtttgatttcgctctggtggtctggagtctgtgcagcattttcagtgttgctctggggatcacgatacacaatccacggacgcagctcactgtagtgcagtggagtcggcgctccacccacgaaggcaagtgctgaagcttcccctccgtctgttctgagtctcaggtgtcgcctccactcgcatcgtcgcctccacccacac

SEQ ID NO: 109654 - DNA, 30 bp, Homo sapiens
  chr4:1872454-1872484
  hyper
ctgcggccgttaggcgggaagagcacgacg

SEQ ID NO: 109655 - DNA, 43 bp, Homo sapiens
  chr4:2010686-2010729
  hyper
cttgggggaaagcgcgcgccgctgccccggcatcttatgaaga

SEQ ID NO: 109656 - DNA, 48 bp, Homo sapiens
  chr4:2011066-2011114
  hyper
gtgcaggtgtcaagcgccgcagacttgctgctcgcgcggtggggcgga

SEQ ID NO: 109657 - DNA, 30 bp, Homo sapiens
  chr4:2011412-2011442
  hyper
agtcgggctggagccgccaggcaggagcca

SEQ ID NO: 109658 - DNA, 30 bp, Homo sapiens
  chr4:2011709-2011739
  hyper
catgctcctgccgccgttcacagctattgc

SEQ ID NO: 109659 - DNA, 90 bp, Homo sapiens
  chr4:2042168-2042258
  hyper
cgagcgggcgcagcgtgggaccgaaggggagaaggacgcctgcggcccggcgcgtccccggaggcacgtcccccccagggctccgcggcc

SEQ ID NO: 109660 - DNA, 1774 bp, Homo sapiens
  chr4:2042655-2044429
  hyper
gcagtcccagcttgtgccgggaagaccaccggccagaaccccgggggttgggggtagaggtcggctaggctggggaggggggcgcccgaggctccgggtcctgcacggcgagcggggcggcctccaggtaggggtgcggctccgcccaccaagaagagggtctggcgggaggtgtggttagtccctgagctcccggccacagcgcgggctgctgggtggggtggggggggagcgggggcgccagcacccacgtgcgcctggggcgccttctgaggaggccaccgcctgtgtcggtgtcggcgtgggggcctggctccgacggctgggaccatccctcccagggcgtccggggcccagattcgcacttgccgggcgcccccgggggccactggctgcacggcgctctttaaggccaacagccctgagttcacgggactgaaatcggcacagagaggccgaggacctgtggtcggggctccgcgcaagcggttctccggtctccgaggacaccgagaggcggagaggaggaccctgggttgggggtgggtagccgggagggaccgagcaggctggtgcccaccctgacgcccgaggatcggggagaggctgggccagggaaaagccgggcgagggcggatcccccgagccgatcccccagaccagctctctccgggcggtgcgaccccacactggaccccactcgcccgcggtcggaggccaagcgtttgcatgcgcagctccccgcgcctcgcgagcatcgagcagctccctcaggatcgctcctgacctgctgagctccagccacagatttcccacttcctcagcttttctcccgccggccttgcgctctggaggtctcgccccggcgccgcctcctccaggcagtcctctagactgcatccgccatgggcctggacgctgctcccgggggcagcccccggccagggccaggcacacccgattcctggagcgtcctaggttcctctaaacccgcggccagcgcagtctcgggtttccatgacgacgacgtcggatggggaacccgggcggggtcgggtcggagcgcatgcgcgttgcgcgccggacgcggaacgtctgccggtgtccccgcgctgctggtcccggggtccctgaaccgcggtaagggcggtggtgcgggcgtccgaatgggcgttttctagatacggggcgcggactagaggctcgctgggcccggagaccggcggactggagtcggggaaccggaggtggggagggggctcccgggcccggggtgggtgggtccagggctcccaggcctggggcttggacaagggtcgtggggcccgcgggaggggacgggggctcaccggcccggggcgggcggggcgggcgccgctgacccctcgctggcttcagggcggccccgctccctctgctggccatggcccccccgcccgcgtgccggtccccgatgtcaccgccgccgccgccgctgctgctgctgctgctgagtctggcgctgctgggcgcccgggcccgcgccgagcccgccgggagtgccgtccccgcgcagagtaggtgccgggggccgggttccggggagcggggcggggctggcgacaggggcgtgcggggccggggctctgcggggaggaccgcgcctcgcctttgttcccgggagcgggtcctccccttcgcgggagatggtggcttggggagtggggacgtgcgctctttggcactgggtggacgggcccagagtgcgtgggggccttgcgggtgaccccccctg

SEQ ID NO: 109661 - DNA, 83 bp, Homo sapiens; identical to SEQ ID NO: 40190
  chr4:2060071-2060154
  hyper

SEQ ID NO: 109662 - DNA, 155 bp, Homo sapiens; identical to SEQ ID NO: 3110
  chr4:2060173-2060328
  hyper

SEQ ID NO: 109663 - DNA, 1174 bp, Homo sapiens
  chr4:2060919-2062093
  hyper
ctcccccacccccgcgatcacatggtgacccccggcagccaatgcagtggacgctaggaccctgcgggccgcgggcgccgcgactgcaccggcgccgccgcattataaatacttctccaaaatgcggcgcagctccctgcgcgcgccccggccgcccgccgcctccgccccgcgcccctgagctgccgccgccgccgccgccgctgccgccgccgccgccgccgccgcgggtccgagggcgccgcgcccttgccctgggcccggccgtgcccgccgccgcccggccgcgtccccgctgccgcgccgcccggccgggtgcatgcattgtgggcctcccgacatggtctgcgagacgaagatcgtggccgccgaggaccatgaggcgctgccgggggccaagaaggacgcgctgctcgccgccgccggcgccatgtggcccccgctgcccgccgcgcccgggccggccgccgcgccccccgcgcccccacctgccccggtggctcagcctcacggcggggcggggggcgcggggccgccgggggggcgcggcgtgtgcatccgcgagttccgtgcggccgagcaggaggcggcgcgccgcatcttctacgacggcatcatggagcgcatccctaacacggccttccgcggcctgcggcagcacccgcgcgcgcagctgctctacgccctgctggcgggtcagtgcgccgggcccccggctgccgcagtccctcgggccggcgcggagctcccccgccccggcgtccacgcggaccccgcgcccggctcccggggaccagcctgggaagccccccgctttctgccgcgccgggccccgcgcagggctggctatgggcgtggggatgggcgcagggccccgagcgggccggagccggggagggtccggggtccgcacctgcgtccccgccgcgcagccccccacccccaccgcctcccctgtcccctcccgggcatcctgggtgggggcgggtgccagggcaggtagcgcccgccgcggctgggccccggcgagtgcctaaatataatctgcgggcgggggaggccgcctcccgctcggtgctaatttatgaggggaagacagccggcgccgcggggggtgcgcgcgcctggcacagccggggcggtcgcagagggcggccccttcagcgtctttggg

SEQ ID NO: 109664 - DNA, 30 bp, Homo sapiens; identical to SEQ ID NO: 3113
  chr4:2062493-2062523
  hyper

SEQ ID NO: 109665 - DNA, 1000 bp, Homo sapiens
  chr4:2418903-2419903
  hyper
cccgcccttggtcgccgcggtgaccccacccgagccgtgacctcccccaagatctcagggcccgggcctccccgctgcgccggccccagggtgccaccctcggacgcccagatgcgccctggaccctgcgccgggatcctgaacaccgccgcgccttcatcccgcgccgagcgcgcccggccctgctccggctgcagcgggcacgagccccaggcgggcggcggggacgcagcgcccgcagtgcgactggcgcagccgctgaggcacggggcgcgccgcccggaccccgaccccgcggcgctaggagaggcgcgggcgccggctggagagccgcacctcccgccccgccgaggctgctggccacgggcgcgctcgccccaagggccgggcggaggacctgtcccggattccagaggacgtgggtggggaagggacaaggatagggacaagggaggggacgcgaactgggccgaggtgtgggtcagtcctggttcgggaagggaggccgttggcagggccatcaggatcctctctggacatggaaggacgggtctgccctggacccagggattgggaaatgtgggttctctcagaacctggggaagtggggagagggtctgttctggagtgcggagggagatctattccgggcccaggacaatgggggtgggggcaggacgggaatgagggggcattcctggtgcagggaggggagacggagaagtagtagggggtctgctccgggcccgcgggctggggaccacgaagtgtaggagggcaccgtccaggaccgggatgaggagggagaggggcccgttgtggccctggatagagggggagggaaagtgcgccccggcccgagaggaggagcaggagggtcagtcctggacccgggcttaggaagccgggagggaggttcggatccgcctcagagacagggcgatgaagatctgtccaagtcttggagtggagggaaggatgtcggcggtgggggaagagg

SEQ ID NO: 109666 - DNA, 30 bp, Homo sapiens
  chr4:2420511-2420541
  hyper
ggggcgacccgccgcgcccgggtatccaag

SEQ ID NO: 109667 - DNA, 69 bp, Homo sapiens
  chr4:2421164-2421233
  hyper
aggcacaacgaggccggcgtgccctggctgtgggggttgcatccagatcacggcggatctgggtcggcc

SEQ ID NO: 109668 - DNA, 91 bp, Homo sapiens
  chr4:2470685-2470776
  hyper
ggcggaaagaggcgcgttttaaagtggtaacagatggttttcttatccaataggattaaaaaatttgtccttacccggccgaccgcggaag

SEQ ID NO: 109669 - DNA, 30 bp, Homo sapiens; identical to SEQ ID NO: 40196
  chr4:2471010-2471040
  hyper

SEQ ID NO: 109670 - DNA, 30 bp, Homo sapiens
  chr4:2471712-2471742
  hyper
cgcctttgatccatcgagggaagagggaaa

SEQ ID NO: 109671 - DNA, 30 bp, Homo sapiens
  chr4:2538919-2538949
  hyper
ggtcgatggcggtacgcggttgccgttccc

SEQ ID NO: 109672 - DNA, 31 bp, Homo sapiens; identical to SEQ ID NO: 3117
  chr4:2760070-2760101
  hyper

SEQ ID NO: 109673 - DNA, 466 bp, Homo sapiens
  chr4:2765764-2766230
  hyper
cgcggaggaggggctggtatgggaccctccgggtgggcgcggccccgcggggccttgcggccacaccgccaccgtgcccagcggccccatcagcgcatattcaggatgaaccccggacacgcgcccagaaccgtctggtgacccagtgatgaaagctcgaatcttataggatccgtattcatttcccgtgggctcaagcccagcctccgcgggcggcgcgggccctcgcggcgagtgtccacgaggaggcggtgtggacccgcggccccagaccaggcctcaggcagaaggcgagcgcgagcgccccgcccagcccctccccgtcccgcaacccgcgccccgaccagcgcccccagcacctctccaccctcgctctcgagcagtctccacgtttgtctcagaggagacccactttgctccccagcgtgggcccctgagcgctgggggaagttggttggtttgttaa

SEQ ID NO: 109674 - DNA, 331 bp, Homo sapiens
  chr4:2795140-2795471
  hyper
gcagcagcctcccccgggccccggggcctccgtgtccttgccaaaggacgcacggggcctgggcacggcgggcagtgcccgagggagcgcggcttcggggcgggggccgggtgtcccttgccgggggctcaggggtgggaggcggtgcgacgcgtctgtttcgcacccctcgcgcccctctggccccgcggcggggcccctttacgcgaccctccccacaagactcaaaggctgcggcgggcactcgctctccgcccttcccggaatccaaacttccctctgcagcggccgcgcttcacggagggcaagaaaagccgcccactggcgctga

SEQ ID NO: 109675 - DNA, 30 bp, Homo sapiens; identical to SEQ ID NO: 40199
  chr4:2936116-2936146
  hyper

SEQ ID NO: 109676 - DNA, 30 bp, Homo sapiens
  chr4:2964649-2964679
  hyper
ggtctccaagacggcgagagtttccaggtc

SEQ ID NO: 109677 - DNA, 30 bp, Homo sapiens
  chr4:2964895-2964925
  hyper
cgtggcgcgtcttccggcccaggatctgga

SEQ ID NO: 109678 - DNA, 231 bp, Homo sapiens
  chr4:2965176-2965407
  hyper
agaagtaaacaccgcgcccgcaggctcggcttactcgccgataggctcagcgactacaactcccagcaggccacgcgccgcggcccgccgtgtactcttggcgcagggccttctgggagctgtagtgccccggccgcggcggcgaggggcgctccctcttcagctaagccgttagcgccgagcccgcccgggagcgggtcgccggccgcggcgggcgcccctgccagtgag

SEQ ID NO: 109679 - DNA, 137 bp, Homo sapiens
  chr4:2965826-2965963
  hyper
gctgctgctgaaagcgcgtcaaggtgggtgcgcggcaggcgcccccgaccccccccccagagaaccccgaatcccggggaaccctggcccccctgaaggaacccgacatccccggagaaccccgatttccctggaga

SEQ ID NO: 109680 - DNA, 30 bp, Homo sapiens; identical to SEQ ID NO: 40202
  chr4:3039193-3039223
  hyper

SEQ ID NO: 109681 - DNA, 169 bp, Homo sapiens; identical to SEQ ID NO: 40203
  chr4:3076403-3076572
  hyper

SEQ ID NO: 109682 - DNA, 75 bp, Homo sapiens
  chr4:3371550-3371625
  hyper
gcgtgtgccagatcccgctggctgccacccagtaagctggtgcatgtggaggcttagaatagattcattggcagc

SEQ ID NO: 109683 - DNA, 155 bp, Homo sapiens; identical to SEQ ID NO: 3119
  chr4:3445266-3445421
  hyper

SEQ ID NO: 109684 - DNA, 207 bp, Homo sapiens
  chr4:3464872-3465079
  hyper
gcggctccagtggccgccgcgggacggtggggccagaggggcccgtgggggtgggggagccgcccgcaggagaaggagccccgcccgcgccggccctggagtcgccggtgtcgccgccctgcccgcgggcccgccctcctggcccagcccagggccctgcgagctattttgaaagtgaccctgggctggggcgccggggcgagcgcg

SEQ ID NO: 109685 - DNA, 30 bp, Homo sapiens; identical to SEQ ID NO: 40206
  chr4:3482492-3482522
  hyper

SEQ ID NO: 109686 - DNA, 23 bp, Homo sapiens
  chr4:3534148-3534171
  hyper
cgactggcgctgcgcggagaaaa

SEQ ID NO: 109687 - DNA, 31 bp, Homo sapiens; identical to SEQ ID NO: 3120
  chr4:3573649-3573680
  hyper

SEQ ID NO: 109688 - DNA, 1340 bp, Homo sapiens
  chr4:3767150-3768490
  hyper
ggctctgacggggagcgccgatccaggatctggtccggaccctgagctcggcaggacctgtgcgcacgcaggtagcgtcgcgtcctcccccaggctgcgagaggttgctctgccatcaggccatggaccccgagccgcccgtgctgcgcgcgcgcgtgtgcgcgcccccgcctgcgcccatgcctgcgccgggggaggcgaaggaggctccagtcttagaaagagcagcttctggaactcaccacccaggccggccgccgctcggccccgtcccgcaggctgcaggcggccctggagggggcgccctcgccgagcgcgcgccccgcgccgccgccccggactcctccccggcgccgcgcgggcaggttcgaccaggcggccgcgggctccggttcccggccagctccccagggcccgcggcccgccccgccccgcgcgcccgccccgctgcgcaactcgacccaagttggaagccgatcgcaggcggccgcactcgcgcccagcgcagggcggcggcggcggcggcggcgcagctccggcgagcgaggcggcggccgcacggccaagcgtggaccgcggggggcgcccgcgcccgggagcagccggaggactcgcggcggcgccggcgccccgcccgggaaagtaaagttggagacggagggagcgcgcgggcgcgggggcccggaggagcggcggccggcgccccggcgcgccgagccctagccggccggatgggaggcggagcgcccgggccgccgccgcctgtcgcctgcgccccggctgggctccgggaccgcggggccgctcaggcacgcccgctcgggcgccgcgtcgccgtgggctcgacgccggggcgctccccgtgagccgggccgagggcggggccgcgcgaggaccccgggacctgcccccctccccccgcagccgcgtcgccgctcgctccgggcgcctcctgctctgcacttacacgctcggcagctgcggggagcccggcagccacgctctccggcgcgccgcccgcggagccaccacggccgagggccggctgctgggcgccgcggtccccggcgggcgcgcccgagcagcaggcggcgatgcgggcgccgaccccggctggggggcgcccgagctgccgcggctgcgccccggctccaggagggacggcgtagctcgcgggaggaccatggcgtccccggcgctggcggcggcgctggcggtggcggcagcggcgggccccaatgcgagcggcgcgggcgagaggggcagcggcggggttgccaatgcctcgggggcttcctgggggccgccgcgcggccagtactcggcgggcgcggtggcag

SEQ ID NO: 109689 - DNA, 44 bp, Homo sapiens
  chr4:3768905-3768949
  hyper
ccgccagcccgacggcgccgcctacccgcagtgcggcctcaacg

SEQ ID NO: 109690 - DNA, 115 bp, Homo sapiens
  chr4:3768994-3769109
  hyper
cgccctgcctcatcatgggcctggtctacgcgcgcatctaccgagtggccaagctgcgcacgcgcacgctcagcgagaagcgcgcccccgtgggccccgacggtgcgtccccgac

SEQ ID NO: 109691 - DNA, 3 bp, Homo sapiens
  chr4:3769559-3769562
  hyper
cga

SEQ ID NO: 109692 - DNA, 98 bp, Homo sapiens
  chr4:3873083-3873181
  hyper
actggagggcgatcgcgggctccaccgggagggagcagctgtgcgccttgacgtaaaatccccaccctggctccaatggcccgcacctgccctggggt

SEQ ID NO: 109693 - DNA, 693 bp, Homo sapiens
  chr4:3873271-3873964
  hyper
cggatctgggtctacgccgccccacctccctcctggccacaccgctgcggagaaggtgccgcacctgcgcgaccgctgcctggccggtctagagcccaccgcggtggagcgtcagccctcctgagtggcggttcctgtgggcgggacgcctgggttgccatggagaccgagagcccagccccgcggagccccgggtgtgcaccgggacaggaagccgaaagcagagcgggagactcgacttgcactttaataggctctcccaggagccgttgtccagagggagcggggttcgcggggctggcggggacgtggcggggcggtggaggggtgagggggaggggaaggacggcggcgggggcgggggaggtgcacggtggggccgcggggacggggcgggggcgtcgcagggcgagtgcgcgcccccactgccatccaggccgtcgcggcgcggctcgaacactcacagaggaagcacctactgtgcgccaaccctgcgcccggcagcgtgcgggagacagaggggaacccagtacttccctgccgtgggggctctcggtgggctcgaggtcatgtcctggtgaggaattacggtcccttttactgatgaggaaacggaggcgcagacggcactgggtccaagttgcccaggcctccgaggtgcgcgcagctcctagccgggccttctgtttggag

SEQ ID NO: 109694 - DNA, 47 bp, Homo sapiens
  chr4:3873974-3874021
  hyper
cgggctgcgagcccgggtgaaatggccttaacgcacggtacaaggca

SEQ ID NO: 109695 - DNA, 359 bp, Homo sapiens
  chr4:3882076-3882435
  hyper
caggtgcggactaagcgtctgctgcgctgccagggcgctgtcaggatggcgcccagaggacgggctgctgccctggggctgcctgaggagggtccgcagaagttccctctcgagcgggaggaggggatttgcatattcacttagaaggatgaagcgctgcggggaaccttcccacccccaaggagctgttctgcccagatgctgagctgggagccgtccctcccccggccacacgcctgcaggtgacccccctgccccgccccgccaccaggcctgggcaccccaacctccacccctgccagaggcgcctgcaccgggttcctcctgcagatctgcaaactcacgcccgcccagctcag

SEQ ID NO: 109696 - DNA, 30 bp, Homo sapiens
  chr4:4144818-4144848
  hyper
aagcgcgctcacacgcggcccgggtccgcg

SEQ ID NO: 109697 - DNA, 30 bp, Homo sapiens
  chr4:4145266-4145296
  hyper
ccggggtcccgcgggcggcgcctcctcctc

SEQ ID NO: 109698 - DNA, 75 bp, Homo sapiens
  chr4:4250036-4250111
  hyper
cgctgtttagttagcgagcagctagggtggagtcggcctcaaaggttccgctctcatgtcggcaagtgtgatttg

SEQ ID NO: 109699 - DNA, 30 bp, Homo sapiens
  chr4:4291680-4291710
  hyper
gacggtggaaatcccgtccctcccctactc

SEQ ID NO: 109700 - DNA, 30 bp, Homo sapiens; identical to SEQ ID NO: 40214
  chr4:4292479-4292509
  hyper

SEQ ID NO: 109701 - DNA, 1579 bp, Homo sapiens
  chr4:4387592-4389171
  hyper
acggctgatggaaaacgccccggaccctccgtagtgccgcggggaagtccccggaaagggtgtgaaaaagtatcgaatttgggtgatgcctcctcctcgtccagcgcctgacagggcccagctcctggcccaggtgcccaggaggcaccgatccccgcagccggcctcctcccgcgcgggctccactcccatttcggcctcgcccccacaccccatagtctttcatccgtgagtcctgcaggcaggacgggttggaggtctgcaaacaggaccctctctgggaagccgcgacagcggctgagctcggggtttgggggcgcaggtcgggctagaaccaccccccttctctccgcgtccgggcatcgtcccagcggcccctcctctgtgcccaggatgctcgggcggcggctgcagtgggacctccaccttctctgccaaccagagcggaggaacctttccgcctccctccaagcggcgcactgagcgctctttgcctagaacgacttccctcccgctgcctggggcagcctcaccctgggcgcccacaccccagccctgggagagcgctactccgcctcccgcaccaccgaaaacctcctcctcctttacgggccgcgcctcctttacgggccgcgccccctttatacgcggacgcgccctcttttggtcgccccctccccaacccagcactaaggagcaccctgctctggtctccgccaccacccagcgcctcctggacccatccccccaaacccttgaacgtcctcaggacccccaggtgagcgcggcgcgctgcgggcggggaccctctctgcacctccccgcacccctgggggtcgctctgtccctacggtccccgcctcccctttctcctttctaagcgcctcgcgcccaggccgccgcccggggtggcgcagcccgcagccctcccgctccgggcgccctccgccgctccgagaccccctgggggcgcgtcctctcccgctcccctgttccctcccccggctcagggcgggcgcgtggtcccaggggaggctcccgcccagccccgcactcctttgtgcggccgggcgggcgctgcgtcaaggtggaggcgcggccacacgcgcgcacccacccgcgcgcacccagcccccgggagaggcaggaagggaggcggcggcgcgaggaggagggagcggccgtggagcccaatcgttcgctccccttcccgggtccgcgcgcggcgccgcctccgccattgctgcgagcaggagcaggagacgcggagctcggagcgctcagctgacctgccggagccgggcgtgggtgagtgcggccggccgcgcctgggcttgccgaggccagaccttgcccgcccaggagcagtgcccgggggatgcccatctcccggagtacgcgggacggggctgtgaacagcgggtcgcccgggtgcggcggccccaggaccggggaccgggtctggaggtgctgggcaggggcggcgcccccttccctggccgcggtgcgcccttgcgcccggcgcttgggtcctgcgagatgagggtctagaaatacacagcaccacccgacccccgca

SEQ ID NO: 109702 - DNA, 726 bp, Homo sapiens
  chr4:4389207-4389933
  hyper
cgagacgaagcggggccggggagctcgcggacgccgggacgccggtgggtgtgggtgcccacttcccccccgccccgccccgggtcttgcttgtggtgactccccccggccctcccgccgcaggctgcagcctcggagctcccggaacgatggtgaagttggggaacaatttcgcagagaagggcaccaagcagccgctgctggaggatggcttcgacaccattcccctgatgacgcccctcgatgtcaatcagctgcagttcccgcccccggataaggtaagcccccccacgcccctccacgttgccgggtgtgcacccccaaatctcgcacggcgggcgcaacaaaagaaacgcgccgcgtgcgctgggtacgcgaagtgggggcgggctcgggaggccggagggagcgcggcgaggacagtgtacccgcgcgggattctggatcgcgggatgctgggcgggggaggggagccctgccttagatgatattctcgtcctgacagtggaacgcggtggggcaagattccttcgcgtttttcctgggagcctcatccgagagggccctggccccgcagctgccctgctcctcccttgccccgtggccccaggggctctggatcgggggtgagcctaggggcgggcgaggctgcccctgtaccttcccgggtgtggcagttcagcccgacttgccccaccgaggcgggggagcgttctccttggtcag

SEQ ID NO: 109703 - DNA, 30 bp, Homo sapiens
  chr4:4543459-4543489
  hyper
cccggggtccctgtcgcaggactgccccct

SEQ ID NO: 109704 - DNA, 240 bp, Homo sapiens
  chr4:4543749-4543989
  hyper
ggcgcgaacccggccgctgaaggactggtcctgccccacacgcctccccccggcaacggcgacgcgagaagaaaggttccggcctgcgccctgctaccgcggcgggaggaaaaaggttccggcctcagccggcgcacctggcggaggaggaacctcgcgacgcgctctcgggcatcggtttctcccagcaaagcttggagggtttagctgcgcggagagctcagcgagctcttctgtgtc

SEQ ID NO: 109705 - DNA, 710 bp, Homo sapiens
  chr4:4854481-4855191
  hyper
cctcgtgttctaggacggcagggatgaatcactataggctggctctctctagctcagcccggcctgctgcggcctggggccactgctcctgggtcctcaggactgcctgggggaaggtagtgcattgtgcagcgcgcggtccagaagtgaaaagggaggcgcggagataagctgccggcggaagttccctctcctgcctgggccgacccggcgctttactgcttctcacgaaggtgcgccggctgctccagaaatcgcagactgcctccaggaagaacttgctggagtcacagcagcttctcagcgacttgacagcagtgattcagacttcaacttgggcggaggggcgggggaggagaaagagatttccagagaaaacgactgagcggtagggaggggaagagagaccgagccacgcgcctcgagaagcagtgcagagagcggaagagacagaggctgcgagacctacccacagagaccaagagagacgctcggaggggagaccgccttaggcgcagagattcagaggcagacagacaggcagacagaaggatacaggaaaggaatgtcgccgaaaggcagggacaaacctgagtcccagaaaaataagagacaactcccacacaccaggctgtccgcgggccgccttgtcacagaaaggcagctccccagccccgcagagtcccgacagctgcccccgcgaaggtggg

SEQ ID NO: 109706 - DNA, 414 bp, Homo sapiens
  chr4:4855230-4855644
  hyper
cgcccctcctttccagcctcagctctggcctttctcggcatccccagcttgccttcagtttcactccatatctgggtctctcagaggcctcgggaggtcttccgttctctctgtcgccgtgtccacggaaggagcctccccaaccctctgtggctccgcgcctcttgggccggagcatctctgtcttccggagtctcttgatcattgctcctgcccgtcctcgcccatttcaaagacgaccaacagaggcttagaaaaattggccctccaccctcggctggttacctggctcgtagccctgggtctgttttcttctcagagagacctgagatcctcgacatttcctaaattcatggaaaacctcgacagtgttcaggactcccaaagaaggtggtgggcgggagggggaggagc

SEQ ID NO: 109707 - DNA, 198 bp, Homo sapiens; identical to SEQ ID NO: 3124
  chr4:4856358-4856556
  hyper

SEQ ID NO: 109708 - DNA, 768 bp, Homo sapiens; identical to SEQ ID NO: 3125
  chr4:4856593-4857361
  hyper

SEQ ID NO: 109709 - DNA, 152 bp, Homo sapiens; identical to SEQ ID NO: 3126
  chr4:4857407-4857559
  hyper

SEQ ID NO: 109710 - DNA, 28 bp, Homo sapiens
  chr4:4857620-4857648
  hyper
cgacaacaaatgccgaagtgagaagtca

SEQ ID NO: 109711 - DNA, 236 bp, Homo sapiens; identical to SEQ ID NO: 40227
  chr4:4857870-4858106
  hyper

SEQ ID NO: 109712 - DNA, 776 bp, Homo sapiens
  chr4:4858130-4858906
  hyper
cgagataacaggctcagccccagggcctgcctgctcgctgaacccctgggccgggaaatcggtaaagtcctagacaaaaaataactcagagaagtctccctctcactgcccctgtaactcgtggctttcctcccgcgggaacaaacaacgccctgggaaacaggcagacattttatttcttttatctgactcctttctcttgagactgccggcacctttctttctctcgcaatccaggggcagagcaatgggaaagccccgcgcttttctgacacggaattgagtctgaacccccttctctgccgatgcactcttctcgcctagcaacgtttacacgcggttaacctgccgcgcggggcgacagcagacacgaacccaggccgaacctataaagaagacaccgtggcgttcagacccggctcgggaagccgaggggctggctgcggggccggtgctgcggggccaggcgatttgctccccggaggcaggggcgcgacttcaagggcccgtgcgccgggtgcagcctttgatccggccgccgctggcgccttaaaacaacatcctagtctgcctattaggcgcgctgaggaatcgtgacacattgtttatccccgcaattagcgatgcggcccttttcaggccgcccgcccccgggccccccgcccccccccccccccccgcggcggagtccaggccttgctgcgctcctcaactgcgaccgccgcaagttccacactagcccccgctgcaccatgcggcttcgctctctgagttca

SEQ ID NO: 109713 - DNA, 30 bp, Homo sapiens
  chr4:4859260-4859290
  hyper
gcaatagaagttcgccgtcctggaatcgct

SEQ ID NO: 109714 - DNA, 14 bp, Homo sapiens
  chr4:4859756-4859770
  hyper
gtaaaattcagatg

SEQ ID NO: 109715 - DNA, 326 bp, Homo sapiens
  chr4:4859810-4860136
  hyper
cggcctgtggacagatgggaggctaccaatcgctccggcgtccgcagcccgacccctgccgccagaccccggacgtcttccggataataaagttcccgctctaattcattttccctaatctggacgcccctaatctacagcttttattgcgcccagttaaaagtcgagggaattcgctgtccctccgcgctcggataattacccctaaatggccacggcagccccttgtgtttcctggagattagaaccccgcagtcatcaatggcagggccgagtgagccgccaatcacctccgctcactccctgagagccgctggcctgggccg

SEQ ID NO: 109716 - DNA, 30 bp, Homo sapiens
  chr4:4860452-4860482
  hyper
accttaaggccagatcggtgtttcattgac

SEQ ID NO: 109717 - DNA, 2231 bp, Homo sapiens
  chr4:4861086-4863317
  hyper
cagaagagaaggaacgagaacaagggaaaatcccccgggaacacagaaagatagagacccaggggactcccgcagagagggcctcttgggcttcagcgcagaggaaagtttcccgggcaccccctctcctcccctgccctccgccgcctgggccctgccctgcgtgcccccaggcccagcgcgcctccgggcgagtccccaggagcgcggcccaatggatcgctccgggcccgccccctcgcgcgctgattggccgccgccccgctggcctcgccttattagcaagttctctggggagccgcggtagggcccggagccggcgagtgctcccgggaactctgcctgcgcggcggcagcgaccggaggccaggcccagcacgccggagctggcctgctggggaggggcgggaggcgcgcgcgggagggtccgcccggccagggccccgggcgctcgcagaggccggccgcgctcccagcccgcccggagcccatgcccggcggctggccagtgctgcggcagaagggggggcccggctctgcatggccccggctgctgacatgacttctttgccactcggtgtcaaagtggaggactccgccttcggcaagccggcggggggaggcgcgggccaggcccccagcgccgccgcggccacggcagccgccatgggcgcggacgaggagggggccaagcccaaagtgtccccttcgctcctgcccttcagcgtggaggcgctcatggccgaccacaggaagccgggggccaaggagagcgccctggcgccctccgagggcgtgcaggcggcgggtggctcggcgcagccactgggcgtcccgccggggtcgctgggagccccggacgcgccctcttcgccgcggccgctcggccatttctcggtggggggactcctcaagctgccagaagatgcgctcgtcaaagccgagagccccgagaagcccgagaggaccccgtggatgcagagcccccgcttctccccgccgccggccagtgagtagccagaacccaggcgcagagggagggggccgggtgggggccgggtggggtgtgggacccgagggctcctggtggcctccggcgcctgcgtacctgcagccggtgctagggagccgtgggctgcaaggccgggtcttgcgcctccctccactcccacccaggaagaaggttccagacctcctcgccttggcccagagacgctgcgggtgggagttaacggataggacaccgatgtctgggcaccctgtcctcctgcccccaccaaacgacctcaggggtccatgatccctcatctgatcccaaactctgtttcatcggcttcaccccagcggatgaatgtgtgtggtgcggtatcttccctgcacccggagtttcactttctcgcagtaggagctggtgtcccccagcccctcttccctttcaagtacctctttgcctagaggttccgaagctcctacagaattctacctccccatgccctttgagtttgaggcagatagttggtgctttgggcggatggatgattcaggggtggggacattcaggttccagtggagggggcggggcaccaagtcaattaggggaaggcgcccccgctaatcctatgggaagctcccaaacgtctaggactgagccattaaagtggactccaggtgcccaaggcggttcgctccaaggcctcacggccccctggctgctctactcagagaacacgctcggagatatttcaggagcacgggaaattcccaagttttcctcgtttcctccgattattttgctcggcataatagcagccagatttcaatggcgtgatgctgaggaatgatttttatctggggattaaacgtctttgaaaggccagtccctccctaagcctaatggccggagaaggtggccccgctctgggttgtcgccgctgaagggagtgacgtttctctcggcgcccgcccctcgggcggcccggcggaaagctagttgggggccaagcgcttcccggactcccggtggcctccagcagggaagaagcggggtgttaacacgagatttcgtttgactcacatcctggtggtctgaaagtccaaaggatcgttgtgttttctttgttttgttttgttttttctgtttgtttgtggttgttttttagagaggtgtgaaaaaatgcatacttaggcaaaacccgcgtggtgaaacatcttcgatttgaattcactttctg

SEQ ID NO: 109718 - DNA, 12 bp, Homo sapiens
  chr4:4867440-4867452
  hyper
tcttggcttact

SEQ ID NO: 109719 - DNA, 901 bp, Homo sapiens
  chr4:4867482-4868383
  hyper
cgcgttcgtgatagggaaatggcagggcaggatcgggtgtctcccccggccccggctccaggacctcctggctccttggagtttggcaatttagggtagaggcaaatttagagcaacataattgcggtaatgagcaacggctcaccctctgcagacgcgtcgcggctccagcgaggcggtagctgcaggcgaggcgggcgcgcctccccgccccctccctgcgccgcagcccgggtgcgagggcccggcctccctgggaccccggcccgcgcgcgcctccgcctctggctgctggccttggctaggggcttccttccacttctgggcctccgaatctccccatttttgtttctgtccgtctagcccattctttgccccccttttgtttccgcattccctctctgaacagggtgtgcacacagaaggtgctcgataattgtttgctagatcggagcggcacgctggtgtggggagaacacccagagccacagtcagccgggtccggccggaaatcgcggctgcgcttccggcactgcttctcgtccatcccagtccttcgaactgtgttccctggtttatcaaccgagggcggagtgggcaggggtttcctgggtctgttcctttacggaccaatttccttctctggcaagaaacatgggatctaccaggcggagaggtcggccaccttccgcgctgggaggtagtgatggagcagtctgcactcacagcctactgtgtgccgggagttcccgctcacgctgactcccaacacacctaggagatttttatagcgcaaaggactgcagctcagagaggtgacatggttttcccaaggttacacagttaatgaaggacatagcaggaattccaacacggattccactcgaggatccggtttttc

SEQ ID NO: 109720 - DNA, 328 bp, Homo sapiens
  chr4:4868464-4868792
  hyper
cggagcgcagaatccgggaactagttctgaatttaactccttgcgctctaaccacgaacaggcactgtcccttgaggaatgataggggcgtctcaccggccctgcacgctgtgaaagcgttttcgttttgttggggaggagacggaagcctcattttgcaaattcagcttctgaccacgcagtcaagaccaaagcagtccgtggcgtggaagcggggcagaaatgaggttacctggcggcaagggacctggggcgcctcgagctttgagcataggtccgcagggccggggcggttggggaccgggaggctggggtggggctgaagacc

SEQ ID NO: 109721 - DNA, 171 bp, Homo sapiens; identical to SEQ ID NO: 3133
  chr4:4868828-4868999
  hyper

SEQ ID NO: 109722 - DNA, 126 bp, Homo sapiens; identical to SEQ ID NO: 3134
  chr4:4869131-4869257
  hyper

SEQ ID NO: 109723 - DNA, 68 bp, Homo sapiens; identical to SEQ ID NO: 40235
  chr4:4869481-4869549
  hyper

SEQ ID NO: 109724 - DNA, 30 bp, Homo sapiens; identical to SEQ ID NO: 40236
  chr4:4870111-4870141
  hyper

SEQ ID NO: 109725 - DNA, 30 bp, Homo sapiens; identical to SEQ ID NO: 3136
  chr4:4870467-4870497
  hyper

SEQ ID NO: 109726 - DNA, 1183 bp, Homo sapiens
  chr4:4870848-4872031
  hyper
gggctagcgcaccagcggggtgcaataaagatcggcctttgtgtgtgtgtggtgggggggaggagtggggggtaggtagttaaaagcgaattcaaaagcccgccctcaatttggggcctgattaggggcagatggaaggaagggtccccgaccctacgtggcagcctttgttgcacattttacaggcgaggagacagtggtgggatccaagcccgctgctgtgggacctcaggagttgctttctccttcaccagctgggtgcagattttgatgatgcacagggcgcggcctgacagtgcgtgtgtgcgcccaccgggcgctgctgccagagtttgcggggttcagggagcgggaggagggtctgagagaccccaaagcctcccctttgcgagaccactccttgcttcccccgcctggcgctttccataaccctctgcggcgccctgcctctttgttgccccttagatgagctgccccaagggcgggctggactctagtgctttgagtcgctgtttctctgacgatgctgcttttaaaaagaaaaccccgttccctctctgatgactctcgtggcacccgggtggcagcaggggcttctccaccggagaaacagccacatcgactaaaagggaatgtgtgaggcaggctgagaccttgggtggggccccccacctctcgagttttccaagactcaggttccatctctgttaaatggacacaatcctgacccctggcaggtcctgaaagagtagaagggaaggggttctccacgggctgtaccatcacttgcgtccccagttcggtgatggtggtgaggtcatcacagttgttccgcctgcggtgactgcagctgacatgtatgcgcgcttgcctatggatcacaacccttagaatctaagttttccacgcgggttatcccaacgaatcctcactaccaggtgggcacgtgccattgtgacccgtgtcatagactgaagcatagagagttgaatgactcagacaagatcacacagctagtgagagtgaaacagagcttccaactcagacagccggtgccaccatctggcgcccctaaatctcagttccctggtccgcggaatgggaacactttcgggctggtgcagaggaaactatgggtgactccaaaggcagcgcgcggtaagaactccgggtgagaagggga

SEQ ID NO: 109727 - DNA, 432 bp, Homo sapiens
  chr4:4872059-4872491
  hyper
cggagcatagaggcaggatggtgacctgagcgctctttgctggccggctctgctctccgcagcgccattggaattccttactctccagtcccccgagggtgtgtgtgggtgaggggaggtccctgaggcggaagggatgagcggagtggaagcggaggagagtgttcttgctcttggaaagtgtcagaaagtgcctgtgcgccactctggacccggaattaagacaccttcacctcttttaatcttctccctatgacgcaggcactcttattaatctgtttcaagtgagaaaaccgaggcacagagagcgtatgtgacttgccaaatgtcacataggtgtctaagacccggcctgtatttcccaccaacctctgccgctgcttctggcatgaatgcagaaagcagccaacagccgaccggcaactgggaagc

SEQ ID NO: 109728 - DNA, 1983 bp, Homo sapiens
  chr4:4872705-4874688
  hyper
ggttcgtgatttggccgagatccggcagaaaggctggacagacccggcatccccaattttagtccagcttccttaaattaattcattcggcggggttgaacaagaccagcacactaagaaataacgaattcgggtagagctgaatgcttctaaggggaaaagtaacaagacgggggcaggaagcacagtcggagcctatttttggcggagcggtcaaggcaggcctctcggcggaggcgacttaagggttgagacttgaagggtgaggtggagccgtagtttgaagaaggaatctcccattgagaggggtcggcaaatgcaaaagccccaaggagagctgaggccggcgcggctggaaccggccttaggcgagtttggagtaggcttagcgttttgtgatgctctggcggccacttggaggagaaagatgggggcgaggtagaaggggccgcgtgcccttgtaggagagggaagtgtcaatggccgggaccaggggtggctgcctgagacgtgcctcgtctttggtgattcccctacccccaaatcagagagggttccggaagaaacttcgcagccttgcagagtgaagcatcgccgggacccaaggatgtttctcttccctacggagctcacccggattccttggcgcccagctgcggccccggagtccccgaactcggctgtgccagcccggggcggggccagctgaacctcagttgtggggcggagtccgttgcggacaccctcaccccccgggcaaccgcagctcccaactccgctggctttcccctccctctgacaccctgcgcggctcctgcgacccaggtgcgtgccagctgtaggagcctgctccgcctgccctcctggaacgcagtcatcctccaggccctgcccgcgcccatttcgcggcccaggaaactgaggtgtggaagcctgtgaagggagggactgctacctatcgattcgtaccggatccagaccctgtgctaaacgctcggcgtgcatggtgccccttaatcctcacaaaagtcgagcgacttagggaggaatattatcccattgcacacacgagcacactgctgcgcagaggcacgaaggtacctgcccagggtctcagctagtcccatttccaacccaggaaggcaagggagcaacccgggaagcaaaatgtaaggagacactttcagggttgtgcaagtgtggggtgggcacccggggagaagggaggagggatgaactatccagagaggaaggcacgcccggccccgacttatcggaataattgtctccattccgcttcggcggtgtctgttgtgtccattgaacagaagcagaacgtgagtccgtatctgcccctcgccaccgccaccagcacctgggatttgactcacacttcaattcctgccctaggaattgatgccagcgcccagtatggccccgcgtggggaatcgagcgccccatccctcggtgagggcttactctgagcctgagtctgtggcaggcccccccatagctactgtctgccttaatccacgccaaggcctctaaaggaaaacattgccttggttctttttcacagacgtgtcaactgtggaccagagatgtcaagccacgtgcccaaggtcaccaagcagtttctgggtgagccctcagggaatcctaaatcccgacccaaacccgggatttcccctcgccctcggggcctccaaggggagctgcgagaggcggggacgcaaggaggcgctgggaccagtttgctctgagtgctcctgctccggactgctccttggagaggcggggccttgggcagcagaatcccaagctcctcccggtgggaaatccggcagctcccgtctgagggtagggccagcagaccacctggcccagtaaactccaccggcttcgggggtggggagttggggcaggtgcgccccaggggctcggtatacaaagccatgcctgagccacgtccttaatttcca

SEQ ID NO: 109729 - DNA, 144 bp, Homo sapiens
  chr4:4874972-4875116
  hyper
cctgccccgcagcagcgcaggatctgagtggaaactggtggcactaagaaggaacggaaaaataacactaccaagccaggcagtacataaaacagagcggcgagatagcgatcggggtgggggttttcccgaagagggaacatg

SEQ ID NO: 109730 - DNA, 1605 bp, Homo sapiens
  chr4:5052364-5053969
  hyper
attccctgcagtcccggagagctgggcccgcaggactgcaaggcagggggacctgcctgtccctcagggagcgtcctgggaacccgcgctcgccccacacgtcttggggcgcatctgccgcaccccttacttaggcacccgcaactgtggcgcgtatctcccgatccaggctcccgccgcaggagcccagggaccctcatgctagcctcgcccctaaatcggacgccgatgccgcccaattttgggggaatcccgagactcatgcccagccattcccagggagaatggtttggggcaaactatggctgtctggggcctcagtttccccatgtacaatgaaggggtcagattagtatctaatcttaaggggtcagaaagtaaacagatactttcattcattaaacactgagaaaaaccttaagaggaacagcgtcggttggagagccagcagacactccactgcccatcccaatatgaatgggcaaatacaggctagcggggagtcctgggactcccttcgcagccggggccgactaaccacagacctaagagcccctctacctctagacctccgtctactgcgctctaaaatatgaacgatgctttcttactgctgggttgtcggaggcggatgtgggatggtgctaacaaagcgcgtagccgaggcctggccatagtgggtgctgacaaaccgcttactgcctgcagggaccgagctcccggccgagggaggagggccgagcagggattcagattcttccgggccgatccctttctcagctccttccgccctgccgccgcccactgcgtgctgccttcgtccgtcccctcctcccccgctccttcccctccttcccctgctcccgcgccgcctcgcgtctcccgcccgctgtagccggcgaggagcgccgcacgttggccccggcgcgaggagctcccgggttcccgggcgggcactggagtaaggagctgcgagcgcagcccgaggcggggcacggcggaaggcgcggcgagagcggggtccctgcgagcgcagtcggaagggcgtccaggagaagggggacgccgtccccgcccctgcacggtgctcggccccctcgggctccgcgcgcggctacaacccggactgggcgcgcccccggcatcccgcatctctgcgcgcgtcccacatcccgcatccggcatcccagcggccgggcatgtagcagcggcagcaacggcggaatatgggcgggaaccactcccacaagccccccgtgtttgacgagaatgaggaaggtaagagagcgagaggtgcgaattcccgcttcgcggggcatccccttcctccaccaccctcggccgagccctgcggggcaccgcatgctgcccggcgcggggacccaggcatggccacttcgcccagcgaatgcagtgtgtgcccgacccgtgccaggcgcggcgcttctgctgaggcaactcctaggtacccagtgccgtttagtagtcgggacggtgcctagcgcgggactggggaggcggcttcagagagttgaacccgaaacctgcacttgggggtgtggaagggaggagttgacttcggaggccagtcgggatggttctagg

SEQ ID NO: 109731 - DNA, 265 bp, Homo sapiens; identical to SEQ ID NO: 40245
  chr4:5709719-5709984
  hyper

SEQ ID NO: 109732 - DNA, 65 bp, Homo sapiens; identical to SEQ ID NO: 40246
  chr4:5710450-5710515
  hyper

SEQ ID NO: 109733 - DNA, 448 bp, Homo sapiens; identical to SEQ ID NO: 40247
  chr4:5712783-5713231
  hyper

SEQ ID NO: 109734 - DNA, 78 bp, Homo sapiens; identical to SEQ ID NO: 40248
  chr4:5713393-5713471
  hyper

SEQ ID NO: 109735 - DNA, 401 bp, Homo sapiens; identical to SEQ ID NO: 3146
  chr4:5889212-5889613
  hyper

SEQ ID NO: 109736 - DNA, 920 bp, Homo sapiens
  chr4:5889852-5890772
  hyper
ggggggcgcccctgccggcgccccgtggatctggaccctgccgggcgcccactcccagcccacaaaggccagcgcggggcggcgggggcgggggccgcttaccgtgatgtgcgggatgctcttcttgccctggtacgacatggccccctctggcgccctcggcccggccgctgacctgcggggctgtctgactggaaccggcgctctcggccccgctcccagcgggcgcgctgacaaaggcccgggagggatagagacacggacggaggctcggcgcccgtggatgcccacgcgcggctgccccggctgctcggcccgcccgccgccgctccggctgccagcaccgcccggatcggcgaggagggcgggagaaggaggagggagaggcgagggcgggaggagggggctgcagacagctcctcccggcggcgcggagcgaagccggattcgcccctctcggctcgaaccaggaagcgcttcccttccgatctcccaccccgccccccgccccccacccgcccagccccgccgacccccgccctgcgcacacgcccttggcgggccctggcctcgctctcgcgatccagagagtatggttttcagggctcctttaaaagaaaaagacggcgcggtcagggcccgcgggcggcgccacaggtgtgtggccgcgcgtctggaggcctccccggaacatctgcgggggtgtggggggagggagtgtgggacgggggccaaggatcggcccaagctgctgggaacgttcttgtccctccaggatcgcgcccaaggaccgctcccctcttgcctctccttccatagcctccgtttatccttcccgagtgcctctccctgaatgcaccaagcactttttccatctcggaccccaagcctttattcacgctgtaccctctccctgaata

SEQ ID NO: 109737 - DNA, 263 bp, Homo sapiens; identical to SEQ ID NO: 40251
  chr4:5891818-5892081
  hyper

SEQ ID NO: 109738 - DNA, 141 bp, Homo sapiens; identical to SEQ ID NO: 40252
  chr4:5892109-5892250
  hyper

SEQ ID NO: 109739 - DNA, 218 bp, Homo sapiens
  chr4:5892316-5892534
  hyper
cgagtgctttcggagccccgggagcgccagaggcgctgccttttgtccggtgcctgagaagccatggagaaaggcagaggggaccacagggagaagaggaaggagtaggggagaggaacgggagaggtgaagcgaccagcgtccccaagggtcagggcgcagctgcggggctggcccaggctgcgccctgggggagatgctggcgttggtgacattga

SEQ ID NO: 109740 - DNA, 170 bp, Homo sapiens
  chr4:5893912-5894082
  hyper
tggaccaacacggaacggagctccagttcttttcacaaaacagaatgaggggcctgggttagattcatcccagaggttccttcgcgtttaagcgtccatgcggtagctttagccaacttcccctctcagaacctctctccctttctgtagaagaggagccgggactggac

SEQ ID NO: 109741 - DNA, 33 bp, Homo sapiens; identical to SEQ ID NO: 40254
  chr4:5894599-5894632
  hyper

SEQ ID NO: 109742 - DNA, 292 bp, Homo sapiens
  chr4:5894812-5895104
  hyper
cggcccagggaggggaggggcggggcgtggcgcgcgccggggcggggccggggcggggcctctgggcggctgcgggctagcggcgcggccagctacaaaggaccaggaggcggggatcgcggctggggcggggagggacggtgacgctcccgagccgcagcgcggagggcgggccgcggcaccgcagtgccctcgccgcaccccccactctccgcccccaggcggagcgcagggcgcgaggagagcgcggggcaggagccgtgtgcgtacactcgcgcgcccacacgctctg

SEQ ID NO: 109743 - DNA, 30 bp, Homo sapiens
  chr4:6021759-6021789
  hyper
catgtgaaacaatgacgctatcgagtcctt

SEQ ID NO: 109744 - DNA, 420 bp, Homo sapiens; identical to SEQ ID NO: 3150
  chr4:6200872-6201292
  hyper

SEQ ID NO: 109745 - DNA, 1382 bp, Homo sapiens; identical to SEQ ID NO: 40257
  chr4:6201349-6202731
  hyper

SEQ ID NO: 109746 - DNA, 39 bp, Homo sapiens; identical to SEQ ID NO: 3152
  chr4:6223660-6223699
  hyper

SEQ ID NO: 109747 - DNA, 823 bp, Homo sapiens; identical to SEQ ID NO: 40259
  chr4:6271358-6272181
  hyper

SEQ ID NO: 109748 - DNA, 383 bp, Homo sapiens
  chr4:6339371-6339754
  hyper
aatcacagggggcaccggtgctgggtgtcacagggcagaacgagtggccaagtatcctaccagcctccagcaggaaaaaccgcaaagatcaaaggctgagagaacaattgaatcgatagtggaaacaaagccaaacggcgctggcccttgtcgccccactgctggctgtactcgggcatttctgagggtttttaaggacacaaggaacaggaatgcaaacgatagatcggaagggatattaataagcctgaaaaaccattcctaaaagttcctctttttctttttagacgtttctatgaaatttttgatacaatagatttttttccaaaagatagtggaatctactattccatatcaatcgctgcccccgagtacgcacgcaa

SEQ ID NO: 109749 - DNA, 30 bp, Homo sapiens
  chr4:6340037-6340067
  hyper
tctcatggctcgagccggttccctgacaac

SEQ ID NO: 109750 - DNA, 30 bp, Homo sapiens; identical to SEQ ID NO: 40261
  chr4:6472430-6472460
  hyper

SEQ ID NO: 109751 - DNA, 349 bp, Homo sapiens
  chr4:6472723-6473072
  hyper
ggctccggctccgctcggcctcatttccggcagagccaggcttcgaggaggcggacccagccgcaggagcccggtctccgccgcctggcccactcggtctccctgacacaggcacccacgcgcacctgccccgcgggacccgtgcccagggcccctcccactggggcacccacccggggaatccgcgcacacttctgcggccgggccgccagcccgtgggttagcggctgacagtccccgcactcgggcagggctccagcacaggcggccccgagcccagacctcccggtccccatcctccatcggggtcactccgcgggccctgcctgcgcacggaagctgtccccac

SEQ ID NO: 109752 - DNA, 915 bp, Homo sapiens
  chr4:6473622-6474537
  hyper
ctgcctcccggagggcggcgcggaggagggcgctgccctgtgccggcgctgggcagcggaggccggtaccctcgggctccctccctcctgggccccgggcagggtgggatgggatggggtggggtggggtgggatggggtggggtggggtggggcggggggacacgacacacatcgcgcggtccaaaccttcggagggcattcggtgcgacggcatccccacgccgcggccggccggaggggtctcagacaacacgtacgttaccttcagtcacatagctgtggtcccgcaggaagctgtggttaattttccgcgtgtccgtgtcctcgcccattgaaggccgtgcccggtgctctgggcatgccccgccgccacacaccgatgcaatccgcagaggtcgcgccgggcgcgcgggccatgccgccgcagcctagcaggggcgcgggccgccggggccccgaagggagggcatcgcggcagggggacgggcgggggcggccgggggcgggcgccgcggtcaagcgagcgcgcggtgggcgggcggcggccgcgggttcgggcgggccggggcccaggcgcgcatcccggccggcccgtgcgcgctgcgtccgtgcgcccggcggcggggcctggtgccggtgcgcctggctgcggcgacggcggcgaggggacgcgcgcggcgctgcgctgcgccgaccaagccggggccgagccgggctgcgcgggctggggccgccgccgccgccgctgtcgcaggcccctccctcgcgccgcccgctctccgcccccgcggccctgcaggtggagccggcgcccaagccgaggctgcaccgccgtgctcgggccctcgcggtgggcaccttggtgctgggtgcgccacgggggagggaggaaggagaccgccagcttgcgggg

SEQ ID NO: 109753 - DNA, 1049 bp, Homo sapiens
  chr4:6564715-6565764
  hyper
aaccagagcagcagccgggcctgactcagcacccaccggcgcgggcagcgggaggagcgcgtagacgctgctggatggtacccgcggccgggactgaactccgccgcattgggtcttaccccggactccgagccggaccccgcgcccgcaccttcagccgggcagcgagggggggctcgagcgcgccggttctcggccgagacgctgtggctgacaccggtggagcgatctgccctggctcgcgcggcgagcaagtgctggaggcagggttccaagccggttctgtcgggttccctcaagaccccgagagcacgcgctccggagggaccccggcacttcggaccctagcagagccagccctgccccaggaccgccccggggtcggtgcccgggctctctgagtctcgcttctggcccgcgaagacgcgccctctcctccagtcgcgggagtcccgcacccgagggccgcgtccccgggcagggtgaggtcctgcggggctgggggtgaggcggggtgggcgcgaggcggctccggagcggcggggccgggcgccctgcagcccgcgcttaccttcggaaacttcgaggtcggcggccccattgagctggcacaggcaccaggagccctggtcggcggcgggcgcggcgggcgcggcgggggcgcggtcagctggcaaaacagcaagggcgcgtgagcgcgggcccggggcggggggcggggggcgggggcgcgcggcgaggctaacccggctgctgggccatgggcggctccgcaggctgcgaccgcgacgggcgtcctccgggcggctgcggggggccgggcgcggcggccgctcctcctccgcctcctccgggctcggctccctgcgcgggcgggcgggcggggaggcgcgcccagaaggctccgcccggagcgcgggtgcggggcgcggggtgcggctgcgggcgccgagggtgggcgcggggcgacgatcgcgaggcgcggatcgcagggcgcggatcgcggggcgcggggccgggcaccgggtaagaggcgcggggtgcgggcg

SEQ ID NO: 109754 - DNA, 30 bp, Homo sapiens
  chr4:6576744-6576774
  hyper
caggcgccctgccccgctgagggccccgcg

SEQ ID NO: 109755 - DNA, 30 bp, Homo sapiens
  chr4:6642418-6642448
  hyper
tcgccgttactctgcgcgtaagtcgcttgt

SEQ ID NO: 109756 - DNA, 427 bp, Homo sapiens; identical to SEQ ID NO: 40265
  chr4:6675572-6675999
  hyper

SEQ ID NO: 109757 - DNA, 30 bp, Homo sapiens; identical to SEQ ID NO: 40266
  chr4:6711877-6711907
  hyper

SEQ ID NO: 109758 - DNA, 123 bp, Homo sapiens; identical to SEQ ID NO: 40267
  chr4:6717791-6717914
  hyper

SEQ ID NO: 109759 - DNA, 11 bp, Homo sapiens
  chr4:6784155-6784166
  hyper
caagctgcacg

SEQ ID NO: 109760 - DNA, 31 bp, Homo sapiens; identical to SEQ ID NO: 3155
  chr4:6890788-6890819
  hyper

SEQ ID NO: 109761 - DNA, 341 bp, Homo sapiens
  chr4:6894038-6894379
  hyper
gcagaataagtgacgcgtttcatctggaggagacacagaagggtccgtttccaccccatgactctgcagatgcgccactgacagtgtgtggtttccttcttggcagcgtccagctctccggcaagtggctgcagatcaaagaaagcagcggaaacctctaggggacacagcctcccagggactgtgaagctgaacagggcgtggcgggaggagccctggctgacagaaatgcaccccctccccttttccagggtcaagccccactcccagccctgtgggaggagggagcaggaagaacccagtgtgtggcgccagagtgcctggctcgaaattaatcctgg

SEQ ID NO: 109762 - DNA, 31 bp, Homo sapiens; identical to SEQ ID NO: 3156
  chr4:6897665-6897696
  hyper

SEQ ID NO: 109763 - DNA, 30 bp, Homo sapiens; identical to SEQ ID NO: 40270
  chr4:6912195-6912225
  hyper

SEQ ID NO: 109764 - DNA, 30 bp, Homo sapiens
  chr4:6988770-6988800
  hyper
acggccggtggggccgtaccacggggacgc

SEQ ID NO: 109765 - DNA, 31 bp, Homo sapiens; identical to SEQ ID NO: 3157
  chr4:6989299-6989330
  hyper

SEQ ID NO: 109766 - DNA, 30 bp, Homo sapiens; identical to SEQ ID NO: 40272
  chr4:7044720-7044750
  hyper

SEQ ID NO: 109767 - DNA, 30 bp, Homo sapiens
  chr4:7069479-7069509
  hyper
gcccgcccgctccacgcttcccaagccctg

SEQ ID NO: 109768 - DNA, 224 bp, Homo sapiens
  chr4:7069842-7070066
  hyper
cgcctcagccaatccgtaatcgcttttcctgttatggacaggcaatagtcaccaataattgtgggtcacggaagagcatctttccccaccccccggtgggcggggcctgaggcgtaccggaggccctgaagaggtgaaaggtgaagtgagcattgggaggagcctcctgtgggcgtggcgatgccgggaggagccaatgaggaggcagcgtgagggggcggggc

SEQ ID NO: 109769 - DNA, 156 bp, Homo sapiens
  chr4:7070679-7070835
  hyper
aagaacagagggccgcgtgttcttatggccccggtgccggcccccaagcggggttcccgcaggagatagggcctggctcccgcttcagcaccgcgtggcctggagtgcagttctggcggccaagatctgagggctgtagcccgtgccctcaccagg

SEQ ID NO: 109770 - DNA, 30 bp, Homo sapiens; identical to SEQ ID NO: 40274
  chr4:7105257-7105287
  hyper

SEQ ID NO: 109771 - DNA, 1151 bp, Homo sapiens
  chr4:7194114-7195265
  hyper
ctggaggtggggccgcgctcgggtacgccgggcttcccacgagcgcctgggcggcgggccggccggcaggtggcggtgcgcgctcggcgtcgcgggtggcgccggggccgccgagtcccctcctcccgccgctccctcccctcgccggctcctttctctgcgctctcgctcgcgctccccagcgccctcctgctctcccggccgcggtcccctcgtccgcgccgccccgccgccggctccgctgccgcccctggcgaccatggcgcaccgggggccctcgcgcgcctcgaagggccccggccccaccgcccgagccccgagccccggggctccgccgccgccgcgctcgccgcgctcgcggccgctcctgctgctgctgctgctgctgggcgcctgcggggcggcggggcgctcccctgagcccgggcgcctgggtcctcacgcccaactgacccgggtgccgcggagccctcccgcggggcgcgcggagcccggtggcggcgaggaccggcaggcgcgcggcacggagccaggcgccccgggtccgagtcccggtcccgctcctggtcccggcgaggacggcgcccccgccgcgggctaccggcgctgggagcgggcggcgccgctggccggagtggcttcgcgggcgcaggtctcgctcatcagcacgtcgttcgtgctcaagggggacgcgacgcacaaccaggcgatggtgcactggacgggcgagaacagcagcgtaagtgacctccacgcgctcgccgcggcccctacccgggacaccgcgggacacccgggcgggaccgccacggcccccaccccagatccccactatggtcatcaggggcgggttcttggcgacttgggcacttgggtcacctcggccgcgcccctactggcctctggtcactggttacttggggagaggtcctcagattcgtacgcttgtctcaccgcaggggacattcccgcagatttcgggatcctgggccacctccgatactcccccactggcctccaggtcttgggttacggaggaggaccccagaaccttcggaagcctgcaggtccttgagggtaccccagctcggcgttacctcccctgcccccagactccaccagctgagcgtcgcgttctgggattttgggct

SEQ ID NO: 109772 - DNA, 9 bp, Homo sapiens
  chr4:7195308-7195317
  hyper
cgcctccgc

SEQ ID NO: 109773 - DNA, 682 bp, Homo sapiens; identical to SEQ ID NO: 40278
  chr4:7940409-7941091
  hyper

SEQ ID NO: 109774 - DNA, 650 bp, Homo sapiens; identical to SEQ ID NO: 3161
  chr4:7941129-7941779
  hyper

SEQ ID NO: 109775 - DNA, 626 bp, Homo sapiens; identical to SEQ ID NO: 40280
  chr4:8159728-8160354
  hyper

SEQ ID NO: 109776 - DNA, 141 bp, Homo sapiens; identical to SEQ ID NO: 40281
  chr4:8160429-8160570
  hyper

SEQ ID NO: 109777 - DNA, 30 bp, Homo sapiens
  chr4:8160877-8160907
  hyper
ggcgcagggaaaagcgagcttggtgcagct

SEQ ID NO: 109778 - DNA, 463 bp, Homo sapiens
  chr4:8201024-8201487
  hyper
ggagacagccccgtggggccagccagcgctgggccaggagcggccacctggttcctgcgtgctacggccctgtgggcctgggagctgcctctgaggaacacgccgcaggtatggggggctccggggcaggcggggcgtggactggccgagcaggctgctgtctgccagtcttgccatggttggatctttacactttcttgaggacttttctgacctgtttgggatgggggtggagcgaaactgcgagctgggggcctcggggaggtcgtcggcaccctcagcagaccccactcagagctcacaggtgctggcagtgccaatccgcagtgattgagggcaatgatttcagctttgaccaagcacccttgcttctgggacctggcctgaccccgtgctggcccttggcatgagcggccctgggggtctgggagcagagccagcctgtcgctggattccaagtcca

SEQ ID NO: 109779 - DNA, 770 bp, Homo sapiens
  chr4:8271294-8272064
  hyper
agcctcgggttttctcgaccaggccgaccagagtcccaaggcctgccgggtgggtccaggcccggaaggccaggcggggccctgtcggggcctgggcggggctggcggaggggccgggccgccccttccagcgagggcgggctgggcggtcgcctttaaaggcgcgggacccgccgcccgcggaccgtcaggctggagggagctggtccctgcgctccctgcgccctggggatgcccctgccgccctgacgcccgccagcctgagccaccggcgcatgtgaccgcgcgtccgccccagtcccatccgtaggcgcccggcgcccggccccgcagcggcctcgttgtccccgccggcccccgcccggtctcccgcgctgccacccgccgccggccctgccgccatgcaggcgcgagcgctgctcctggccgcgttggccgcgctggcgctggcccgggagccccctgcggcgccgtgtcccgcgcgctgcgacgtgtcgcggtgtcccagcccccgctgccccggcggctacgtgcccgacctctgcaactgctgcctggtgtgcgccgccagcgagggcgagccctgtggcggccctctggactcgccttgcggcgagagcctggagtgcgtgcgcggcctatgccgctgccgctggtcgcacgccgtgtgtggcaccgacgggcacacctatgccaacgtgtgcgcgctgcaggcggccagccgccgcgcgctgcagctctccgggacgcccgtgcgccagctgcagaag

SEQ ID NO: 109780 - DNA, 30 bp, Homo sapiens; identical to SEQ ID NO: 3166
  chr4:8313111-8313141
  hyper

SEQ ID NO: 109781 - DNA, 30 bp, Homo sapiens; identical to SEQ ID NO: 3167
  chr4:8313537-8313567
  hyper

SEQ ID NO: 109782 - DNA, 30 bp, Homo sapiens
  chr4:8430379-8430409
  hyper
cgactctggcgagtcgctgccctctcggag

SEQ ID NO: 109783 - DNA, 30 bp, Homo sapiens
  chr4:8442626-8442656
  hyper
gtggctggagaggccgcaggtggcaaacaa

SEQ ID NO: 109784 - DNA, 39 bp, Homo sapiens
  chr4:8582086-8582125
  hyper
tgccaattcattcccgcccctaccgcccctataagccac

SEQ ID NO: 109785 - DNA, 30 bp, Homo sapiens; identical to SEQ ID NO: 40288
  chr4:8582550-8582580
  hyper

SEQ ID NO: 109786 - DNA, 43 bp, Homo sapiens; identical to SEQ ID NO: 40289
  chr4:8594309-8594352
  hyper

SEQ ID NO: 109787 - DNA, 31 bp, Homo sapiens; identical to SEQ ID NO: 3170
  chr4:8594372-8594403
  hyper

SEQ ID NO: 109788 - DNA, 132 bp, Homo sapiens; identical to SEQ ID NO: 3171
  chr4:8609442-8609574
  hyper

SEQ ID NO: 109789 - DNA, 281 bp, Homo sapiens
  chr4:8858766-8859047
  hyper
gacactgcactccagcctgggcgacacagcggaccatctcaataacaaaccgaaactctggctatctccaggtagtcgaacttgggatgccttttgttttcagtgcttgtaattttctgaatttttaaaataacgaacagagtctccttgcgacattaaatgcaatgcagccgccgaggaagcgtcggggacagatggggttggacgccgtccccacttcctcccctgcagccgcctccaggccgccaacctcgcccagccggagcctcagtcctggaggg

SEQ ID NO: 109790 - DNA, 556 bp, Homo sapiens; identical to SEQ ID NO: 40293
  chr4:8859381-8859937
  hyper

SEQ ID NO: 109791 - DNA, 192 bp, Homo sapiens
  chr4:8860397-8860589
  hyper
gtgacactcaggcacacatacaccaatgccccgggcccgctagggacgctgagctccaggcaacgaaaaacgaaggtcctggagtcggtcctgagtgcattcctccactgggccccgtcgagaatgaaactctcggagcatcgtcactgggaggtcctggggggacactggggtgggcgagcttcttcaaag

SEQ ID NO: 109792 - DNA, 109 bp, Homo sapiens
  chr4:8861436-8861545
  hyper
tatgtgacgtggagtcgcactgggacccgaatgaggacatccccccgccccttcgtcatcgtgggaataccgtggaacaaggcgggcaaagggctgatcagctcccgtc

SEQ ID NO: 109793 - DNA, 147 bp, Homo sapiens
  chr4:8861605-8861752
  hyper
cgggcagtggcccacggctctgggcccggatctgtgtccacctctggatacccaattcccgccaccatgttgttgggagcaaggaggcacaactgcccgtggtgggagtggagggcttaggtccccattagaaccggcagagccccg

SEQ ID NO: 109794 - DNA, 893 bp, Homo sapiens
  chr4:8861918-8862811
  hyper
cgccaaatggaagtgggggcgccccctggcctttcctatacccggggccaaaaccgctgggaccgatatactgcaggagtccgggcacaggctgaggggaccggcccgtgcgttgagcgcctcggaggtgctccgggtcatggtgggtgctgagcgggaacacggaaggctgtgtacacagcagcaagcaatgcacccgcgctcccgtcattacatcgcgccgccttcacccccgctacgatgaccactccgcagatgggcaagacgggctcagagagatgaagtgactttcccaaagccacacagcgggccagtgaaggcaccgcgcacggtccaggaatctaacccttcctggggagtggggagggaagggctcgacccgaaggggccaggcggcagagagccccgcgtcccccgccacgggctaagacgcaaggcggcccgccgtgtctccacctgcgcgcctcgagcttcgctccgctctagccttcgggttaacaccgcttccttccagaagcctaaggaggcccgggcggatcagacgcctcccttctccgcagccccatgccctgcccgcagcttgagctcaccgcccttctcggggtggcggtgcggagaccggacggctccactgtgcagaccccgaggggtaaggggccgggtaggggaggggagcgagaagtggcgaggtgagaactgaggggcgaggctgaaggctgagccagacttccagacgccagagagacgccaggtgagccgggcgggggcgggggcgagggcgggggagggggcggggccggaaccgcggggagggggcggggcgcccgggagggccgcgagctgggaaggtcccgggcggccggagacggtgaagaggcggggccgagtcgcgt

SEQ ID NO: 109795 - DNA, 94 bp, Homo sapiens; identical to SEQ ID NO: 3173
  chr4:8863143-8863237
  hyper

SEQ ID NO: 109796 - DNA, 203 bp, Homo sapiens; identical to SEQ ID NO: 3174
  chr4:8863323-8863526
  hyper

SEQ ID NO: 109797 - DNA, 39 bp, Homo sapiens; identical to SEQ ID NO: 3175
  chr4:8863856-8863895
  hyper

SEQ ID NO: 109798 - DNA, 118 bp, Homo sapiens
  chr4:8864564-8864682
  hyper
cttagctgttctcggcgcccgatcctgtgtgtccttccgtgcatgacacgcagagcttagctctgtgaggacagggctgtcccctctccggcccacctatgaaggggtgtccacctct

SEQ ID NO: 109799 - DNA, 295 bp, Homo sapiens
  chr4:8864763-8865058
  hyper
cgaatttccggtggctgggacccacttcccagcgggaccctggataggcatgcccactctggctaccagaagggcagggtggccgaagggtatgaagcatatgagtgcacaggcggggaggaacagcagcagcaccagcgcaggagtagcccgctggcctccctcaggcgggtggaggagggcgccggggagcctcagtgccaccgtgctccagaattcctgcccctctcagaaccccggtttccctttccaacaagttgcaaggtggggcggaaggccacgaaagactcttggg

SEQ ID NO: 109800 - DNA, 14 bp, Homo sapiens
  chr4:8868831-8868845
  hyper
acaacccggaggct

SEQ ID NO: 109801 - DNA, 339 bp, Homo sapiens
  chr4:8868931-8869270
  hyper
cgcgagaggggtagcacagccctccgggccggcctgctgtctgggtcccaggaaagggacgtttagtgttgggggcagtctgtggggacagtcaccgctcagccttggacagccggttcgtagttttcctttgttgcgctgggcttggcctgagggcagctgccccgggtggccatggccgaccgctcctcgctgaggccggggggtggccgtggcgccgggggctgcgcagcccagagtctctgcatggccccctgttcgagtggggatccagcctggcaaatgggtggggcgtcccattacattctagaggcgctccccacagaagctgaggcccgc

SEQ ID NO: 109802 - DNA, 748 bp, Homo sapiens
  chr4:8869368-8870116
  hyper
cgtccacacaggtccacagggtcgtggggagagggcccggcaggcggggctcacaccaggccaggcatctgcgcccgcagaaagggcacggaggcggcggccgggaaggcggccagcgggtaggcgagggccccggagaagccgagcagcggtgggggcggcgcgggcgcggcgggcgccagcgggaagggcagggtggccgggggcccagcggcggctgcggccggggggctttcgtggtagagcaccggcacgcggaccaggcgctgcgctcccggcggggacaggctggccgcctccagctcggctgccagctgccgcttccacttgttgcggcggttctggaaccagatcttaacctgcgtctcggtgagctgcagggaggcggccaggccggcgcgctcggcgctgctcaggtagcgcttcaggtcgaaggtggattccagctggaagacctggctgcgggagaagactgtgcgcgtcttcttctttcggccgccgcccacgccaacgccgccgcgtgtctccccagccgccgcagggacctcggccagctccgacgcctcctccgtgccggccgccgggccacgcgccgccagctccgctgcctcccgctgcaccgctcccggcccggggcctcgcggccaggcgccctccgcacggcccatctcctcgcccgtctccggtgagtcccggtcgctggctgcaggggagagagggcaccaccgttggttctagggcactgatt

SEQ ID NO: 109803 - DNA, 156 bp, Homo sapiens
  chr4:8872916-8873072
  hyper
ctgacccaccctccccgcgccctcactcactgtcaggactgaggccgcctccatagccaccgtgcgcccgtgggtaccagcgcgctgcgcctccgcagcccagagcgaagggcggcccgggaccggggggcggccgaggaccgaggcccagcgcgc

SEQ ID NO: 109804 - DNA, 258 bp, Homo sapiens
  chr4:8873773-8874031
  hyper
gggcgcaggcggggggtcgcgccgggtccgatcccgcgtgatcagttcccccgtcccgcgccacccgctccgtgggggcggggcctgggctgagcggccacccattggctgtggggccccgatgaggaacgggctggccaatcaccgtccggccagagccgtaattaccccgctgcgaggagggtgttggaccgaccgtgagtaactgtgtgtgtgcgcgcgcgtggtgtgtgcacgagtgtgcgtttgaatggctgt

SEQ ID NO: 109805 - DNA, 38 bp, Homo sapiens
  chr4:8874496-8874534
  hyper
agttcgggaacataacgcaccctggagctgtctccgtt

SEQ ID NO: 109806 - DNA, 168 bp, Homo sapiens
  chr4:8874772-8874940
  hyper
cggagaaaactgacgggagaagagagaagagactcccccagagggtaggtggctccggcaagcctggaattccttcactgatgccccggagtccggctggttggcagggcggtggggctccaggagcggctgaggcctagccagctgggccctcgcggcctgggttcg

SEQ ID NO: 109807 - DNA, 99 bp, Homo sapiens
  chr4:8879494-8879593
  hyper
ggagcctggaaccgccggggccagctgagaagccgcctccgccgctggagtccctgggaagggtcccctccacctgcccacagccagcctgggaggcag

SEQ ID NO: 109808 - DNA, 15 bp, Homo sapiens
  chr4:8879647-8879662
  hyper
cgggaggggacgctg

SEQ ID NO: 109809 - DNA, 30 bp, Homo sapiens
  chr4:8880109-8880139
  hyper
ggggggagacagtgacggtgcacacccaac

SEQ ID NO: 109810 - DNA, 51 bp, Homo sapiens
  chr4:8893424-8893475
  hyper
gaaacgaatccgagccgcagctgcacgtttgaaccccgcaaagccactgtg

SEQ ID NO: 109811 - DNA, 41 bp, Homo sapiens; identical to SEQ ID NO: 3177
  chr4:8893684-8893725
  hyper

SEQ ID NO: 109812 - DNA, 313 bp, Homo sapiens; identical to SEQ ID NO: 3178
  chr4:8893815-8894128
  hyper

SEQ ID NO: 109813 - DNA, 627 bp, Homo sapiens; identical to SEQ ID NO: 3179
  chr4:8894330-8894957
  hyper

SEQ ID NO: 109814 - DNA, 544 bp, Homo sapiens; identical to SEQ ID NO: 3180
  chr4:8895231-8895775
  hyper

SEQ ID NO: 109815 - DNA, 133 bp, Homo sapiens; identical to SEQ ID NO: 3181
  chr4:8895964-8896097
  hyper

SEQ ID NO: 109816 - DNA, 212 bp, Homo sapiens; identical to SEQ ID NO: 40309
  chr4:8896117-8896329
  hyper

SEQ ID NO: 109817 - DNA, 31 bp, Homo sapiens; identical to SEQ ID NO: 3183
  chr4:8966280-8966311
  hyper

SEQ ID NO: 109818 - DNA, 716 bp, Homo sapiens
  chr4:9154788-9155504
  hyper
ccctaccccaggcttcgccctcatgacgttcatcctggccacaccccaggccccgccctcctaacgctcatcttggccccgccctagagtccgcccccaggacgcacctcctgaccgtatccccaggccccgccccctctctgcccccgcgcactgccctcggcccgccccctcttcagtccaggcccggcttcctccaggtctccaggcaacgctgcggctccgcccacgtcatggcgcccgaggagaacgcggggacagaactctggctgcagggtttcgagcgccgcttcctggcggcgcgctcactgcgctccttcccctggcaggtggccggcggggcgagcggagaggcccgcgggggtcgcgggagtccaggggcagacgggatgggtctcggtgctgaaacccctggcgctccggccacgtgcgttcctgggctctccccggtcagggccgcgagacccggtccccgtccctggggcctggccagagtcgctcgcaccccttctgccccgcgagctggcggcggaagctgggggcgtctccaccgccctggggggcagacgcgcgttcggtgtggggcacagttcacgatcattttcacgactttttaaaggcagtaatcgttctggtcactgggacacagctgcgctcgcccattctaaaaagtcagcgccctcaggcccgcgggtaaccaccgcctcctgagcgcg

SEQ ID NO: 109819 - DNA, 30 bp, Homo sapiens
  chr4:9499423-9499453
  hyper
cgctggtggccgccgcggtctcctacctgc

SEQ ID NO: 109820 - DNA, 223 bp, Homo sapiens
  chr4:9499998-9500221
  hyper
ggtcttcttgcgacccggccccgctccagatccccccagctctcggcctcggacccgggccgcgtgtgagcgcgctttgcacctcctatccccagggtccgccgagagccacgattttttacagaaaatgagcaataaagagattttgtaccgtcctgactggggagtcccaggccgcgtgggacggagtgcccctcggatgcaagcccgtctggcccagcct

SEQ ID NO: 109821 - DNA, 106 bp, Homo sapiens; identical to SEQ ID NO: 40311
  chr4:9534313-9534419
  hyper

SEQ ID NO: 109822 - DNA, 210 bp, Homo sapiens; identical to SEQ ID NO: 3185
  chr4:9684932-9685142
  hyper

SEQ ID NO: 109823 - DNA, 30 bp, Homo sapiens; identical to SEQ ID NO: 40313
  chr4:9766951-9766981
  hyper

SEQ ID NO: 109824 - DNA, 298 bp, Homo sapiens
  chr4:9783125-9783423
  hyper
cgcccctacactctggcgcgctgagggcggtgagcgagggcgccaaggcacaggtggggcgggagtcgagcgcggaggctcggggggcgggacgcggggcctgggagcggccagggaccgcggcagcgcctcagtgccagcctggcgcccgcgactgcctgccccagcccctcagtggcggcttgctctcttctctcgctccgaaccagacacagccgctgccgctgccgtccggcgcgctacagactcccgagaacagccctggctgtcagcgagcaccagccgcttcctgtcccca

SEQ ID NO: 109825 - DNA, 78 bp, Homo sapiens
  chr4:9783500-9783578
  hyper
cgcagcccggcgcagctcatggtgagcgccctctggggctcgagggtcccttggctgagggggcgcatcctcggggtg

SEQ ID NO: 109826 - DNA, 59 bp, Homo sapiens
  chr4:10089889-10089948
  hyper
taggccgggaaacacgctcatactcactgcgtaaatcccaccgtcgtgggccttgcttc

SEQ ID NO: 109827 - DNA, 237 bp, Homo sapiens; identical to SEQ ID NO: 40315
  chr4:10090132-10090369
  hyper

SEQ ID NO: 109828 - DNA, 30 bp, Homo sapiens; identical to SEQ ID NO: 40316
  chr4:10117784-10117814
  hyper

SEQ ID NO: 109829 - DNA, 30 bp, Homo sapiens; identical to SEQ ID NO: 40317
  chr4:10118444-10118474
  hyper

SEQ ID NO: 109830 - DNA, 1036 bp, Homo sapiens
  chr4:10458330-10459366
  hyper
gcgtcccgctcgccgcgagggaaggccggggttcttccaaccgaagaaaaccaaaaccgtcaacgctcagctccgaggcccgcaggaggctttaaaaatggcctcctgacgacacttcctgctcggcgcggacggtaggagccctcggaggaggcatccttcataacgctgggggcggggagcgcaggccgggccagcggcgccacacgaacggccccgcgggacgctgccacccccgcctcggtcgccccggcgcgtcggccgagtccgcggggtcgcggcgcacaaaggcgagctgggggcgccgggccggaccccgaccctaggccaggcccgcgtacctgctcaacgcgcgccaagccgcggcccgggcccccaccccagccggtgccccacgcccaccagccggagcccgcgttcggcctacccggtgccacttgccacgacgccagccctcagcgcgggcacgcggggccgcggccgctcgacccgccccggcctggccccgtcaggcccccgccccgcgcgcccccacgacccggccgcagctggcgcttcggtcacgtacacgcggatccgggggccctcgccctcccgctcagctacttacccggcaggccggattcgggtgccaggtcccggcgaaggggcgtctacaccgccggccgcagaccgccggcgccgcgcccgctgtaggtccctacccggggggcggagcccgcgccagccccgcgcgtgcgcaatgtgaagcggcggcgcggctccagcgaggccggcgcctgaggtctctaaggctgcgcccgcccccgccgggcttctaagctgtccagagcggggagcctcagacccagccgagccccacttctgggcttagagcttgacccaacacgttcgcaccgtagcgagcgaggtccacatttagccatgccgcaggcaaaagaaggattcggcttcggtcctggcccagtctgccatcccggggcgcctgccttgtaccgggtcccgcggagggcggccttggcgcctgcctccctgg

SEQ ID NO: 109831 - DNA, 192 bp, Homo sapiens
  chr4:10462855-10463047
  hyper
gcgtggctaaggcagggaccacgtcccagccgccctttcccgccctgcggcgcaggcccactctcttggctctcctggcccgcacactcagctcggccgccgcggctgccgcggaagcgcgcagtgaggctagtggggccacgagcggcgcgctgagcatgcgcgcccgatagagcctcgagatgcgccggg

SEQ ID NO: 109832 - DNA, 397 bp, Homo sapiens
  chr4:10463072-10463469
  hyper
cggcctgcagtgtcgctgcgagcccggctggcccagctcggcgtgtagagctctaccccgcgcggcgggcggtgcagccccgcgctcacctgggcgtcttcgctcccgctcgccccgcgcttccgaaaatcgggaatgtaatgttttgtttttacattccaatttgctccctccccaggctggcgtggaatccgagggttcctgatgactgcagctcctcgcccctcccgctgtgttcccgccgcctctgggctgaaagcgccatcaggacccgtggcgcgtgggctttgttaagtcattaactgcttgggacatagcaggagcatggtgcgcggcacagaacaggcttggcttccacggcccatccaggcggagccgtcagcgtcccttgcctaga

SEQ ID NO: 109833 - DNA, 31 bp, Homo sapiens; identical to SEQ ID NO: 3191
  chr4:10577054-10577085
  hyper

SEQ ID NO: 109834 - DNA, 623 bp, Homo sapiens
  chr4:11429087-11429710
  hyper
tttctcggagcgcagcgcaaagacagtggatttggagtggcctccctagaatccccccaaaagcatcttggcacaagttgtagataaaaatagctcatgataacattgtgggaaagggaggagcgagactcgcgcaaggcgaggcaagggtaccactggatctgcaaaggaggaggaagagggaggatgcaacccttggcccaagagagcgccctgagtgtgcgaggaatcgctggctcccaggggagggaaagagatggaagacctatagcgcctataactgcagagttatagacctataactgcagagcccagcacaccccatcccgcgccggcacccggctttggctccagcttcttcttcccatcatccgcctacgttctgggtctgtcctccgcttcctgggacaggctggggctagaaggaggagcagcgcgccgtccgccccctggctggtagagcgcacctggagaggtcaagctccgcgaataagacccttcctgggagctggggtctaggcgttccaaccgcgggttcgcaccccgccatccctcacctccatccgctgccactacccaagggcccggaaatagaaaaccacgaagggggaaaaaaatcagta

SEQ ID NO: 109835 - DNA, 94 bp, Homo sapiens
  chr4:11429924-11430018
  hyper
gtggtacccaggatccgttgagtgctgcgctctcgctgccctacagggtcctatggtgaagctgcggtcgcgaagcggccggcaggagcgaacc

SEQ ID NO: 109836 - DNA, 938 bp, Homo sapiens; identical to SEQ ID NO: 40323
  chr4:11430338-11431276
  hyper

SEQ ID NO: 109837 - DNA, 30 bp, Homo sapiens; identical to SEQ ID NO: 40324
  chr4:11521627-11521657
  hyper

SEQ ID NO: 109838 - DNA, 224 bp, Homo sapiens
  chr4:13486088-13486312
  hyper
tccggcgggagaggcgaggcgctgcgtttcccttcaggagacagttggctagaagaagaaaagaagtgttcgttcaaattaaggagagaaaacgggagcagagcagctttcaggcgttccatcaaattcccttttctccttccctcttgagaaagtctctgaagggaatggttcagcctgacggggtggagcagtgacgcccgggctacgcgccagggttgcct

SEQ ID NO: 109839 - DNA, 30 bp, Homo sapiens
  chr4:13486567-13486597
  hyper
aggctcccatggttcgttcatcagacgcta

SEQ ID NO: 109840 - DNA, 232 bp, Homo sapiens; identical to SEQ ID NO: 40326
  chr4:13524019-13524251
  hyper

SEQ ID NO: 109841 - DNA, 111 bp, Homo sapiens; identical to SEQ ID NO: 40327
  chr4:13524529-13524640
  hyper

SEQ ID NO: 109842 - DNA, 10 bp, Homo sapiens
  chr4:13526768-13526778
  hyper
cggagccagg

SEQ ID NO: 109843 - DNA, 30 bp, Homo sapiens; identical to SEQ ID NO: 40328
  chr4:13529536-13529566
  hyper

SEQ ID NO: 109844 - DNA, 85 bp, Homo sapiens
  chr4:13529794-13529879
  hyper
ccgctcagcagtggcgcaagtgcttcctccacttgcgtgggtggcgtctcagcgaaggtccgcgcccttcgagtgtctggaaagg

SEQ ID NO: 109845 - DNA, 30 bp, Homo sapiens; identical to SEQ ID NO: 3195
  chr4:13530079-13530109
  hyper

SEQ ID NO: 109846 - DNA, 261 bp, Homo sapiens
  chr4:13536101-13536362
  hyper
gcccccggcctcctccgcaaacagggattcctagaagccagtcaccttggtgacagctctgcaccccatccaggatgcacacggaggacgtcctgctgcagcctgactttggcaggaatactctcgacccgtttgtgagcaggtttactacttggtttttgaattctcaagagcatcaaatccattgacgcccttcccaaaaacacaagccaaaaggaagtagaccggcacaaaccccaggcctgccgatccctcgaagct

SEQ ID NO: 109847 - DNA, 30 bp, Homo sapiens; identical to SEQ ID NO: 40331
  chr4:13537287-13537317
  hyper

SEQ ID NO: 109848 - DNA, 30 bp, Homo sapiens; identical to SEQ ID NO: 3196
  chr4:13537744-13537774
  hyper

SEQ ID NO: 109849 - DNA, 148 bp, Homo sapiens
  chr4:13538785-13538933
  hyper
ggagcctctgcgaaccggatccgaacaggatttggaaacgcatcacctgtaacgttccagacaaaagaatggagttgtttttgttgttcttcttattgttcaatattgtttggttgctcccccggccctccctcggattagaagcctc

SEQ ID NO: 109850 - DNA, 30 bp, Homo sapiens
  chr4:13539272-13539302
  hyper
ccttcgacagttccccggtttaggagaact

SEQ ID NO: 109851 - DNA, 61 bp, Homo sapiens
  chr4:13543519-13543580
  hyper
cttggcggggcgccccgtgcaggctacagcctacagctgtcagcgccggtccggagccgga

SEQ ID NO: 109852 - DNA, 125 bp, Homo sapiens
  chr4:13544277-13544402
  hyper
ggaggtctgggaggccctgggcccgggagaccagtcttagactcttgccccactgggtatcccatctaggcctcttctggggagggcggcagactcagccgctgtgtcaacgctgtgttgtcgag

SEQ ID NO: 109853 - DNA, 98 bp, Homo sapiens
  chr4:13545287-13545385
  hyper
gaacgcaaggggcagcggttctcccaacccagtctaatgcacattggcccaggatgtctcaggcctcaccccaggacgtagggctctgaggagctact

SEQ ID NO: 109854 - DNA, 971 bp, Homo sapiens
  chr4:13545940-13546911
  hyper
cgcccctctggcgcggccagcccgccgcgctcctctttcttgttgaggatcgcctggatggagaaggacgtcaaggtgttggcgccgcgcacagccatctgcgccgcgggcaggagcggccggcggggcgggcagctggggcgccgagcagctccgagcgggacagagagcgccggcggccgcagcgcgagtgagctgggtgtgcgaggccgccgccgcccactgctgcgcggcccagcagctcccgccccactccgtcccaggatcagcgccgaccctcgcccccaccttagaggcccaccccgcccggagaccccctccccccgaatccagagccagacgctctcctttcgcagctcagctggattatctcatcgcttctcgcccttaggggcgggctggggtctgccccctcgggggacgtgaaggaggattggcgggggcccctccgtggcagcagtcccctcccgagcgccgccggggcgcacagcccgagtcactttttctttgcgcgtctgtcccttcctcgcctgcaggatttcgctcctggcccgtcctccccttccctgctgggcaggctcttccggagcccacccccggcggcggcggcggtagccgcggccgcggccgctggattccgagaggcgcggggaacttttttaccccctgccctggttttatctgtttcttttctctttccttcccttgcgttccactgtaccacccccctcccgcccgggtgtcattcctcactgctgagtgacagcctgaggccacacccctccactgggctgtcccgggcgctcccggccgtccattggctggctccagttgggcgacgttgactttaacagacaaaactgggcacgttgcgccgctaaagacagggtctgacttaaccccttctctcctaagcctggtcctcgaagcaccctccagcaacaaggaggctcatccgacccaaaccacgt

SEQ ID NO: 109855 - DNA, 20 bp, Homo sapiens
  chr4:13548569-13548589
  hyper
acgttccgcgtcttccggag

SEQ ID NO: 109856 - DNA, 1256 bp, Homo sapiens
  chr4:13548634-13549890
  hyper
cgcttagtcgatcattaggtctgtgggtgactgtaggcagagccgggagttgggtgcttggcgcggagggtgaactcgcgggtcttgagctgcaactagaagctgctcctagcaaggggtcgggtggagatgaaaagactgtggggaaggggaggtggttgtatgcccagagatatcccggcgtaactacggagtccaggcccagagtggcggtgtgtggcgaaggcgcagcaggcctgcgcctgtcggaggacggcagatctggacgcgaccgcgcgggcgtgcctgggtcccgcttcctgcccatcgagggcgacttccttcgggctcagctgtgagctccaggaactctgcaacctcccgacgggcgccacgctccggcttgggccggcccgggagttggcggagctgcgcggcccggccgggcggccggtgaggctttcgagaggcaccgggctcgctcagcgtccgcgcctctctaccccgccgcgccccctccgcgcccacgggcccattttttcctagtcttctgcctctcttccttcttcctccctcccctcctcctccacacctttgtcttcttcctcctccctcctcctgcttctcctccgcagtttggatcctacgggccccctacgtgccgcgcccttcggtccccggaaccgcccgggctgggggtgctgctgcgcggtgagacttccgcgggcggcgggcggagagcgggatttgactgcgaaagccaagggggcggggaaggggaagccccggccctcgggggcgcgcagtaaactgctgcacacgtgcccgcgctcccgaggggggcgcccagtgggctcgggatttcctggctgcgccaccgcgcgcctcgcccccgacgcccgccacctgtgccctgggccgccttccctgacgccagcggccggaggtcgcgcgcgccgggtgctgcccagcaacgaaaggccatgcggggttcgtccctcagatgccggtgaccttgattgaagtcacctgccttctctagcttccagtcctttaaaacgagggtttggacccggtgccttctgaacccggtgcttcactgagtgagcaagtgaagggtgtgtgtgtgtgtttggggtgggggcgggggcgaggggagggaggggcagcgttgccggctccccagagccaggtccaggcagaggtcgcgcccagcactgaccgtcggtcccaatccgcagactcccgagggcgatccaaaccgcctaagcatccca

SEQ ID NO: 109857 - DNA, 45 bp, Homo sapiens; identical to SEQ ID NO: 40337
  chr4:13550559-13550604
  hyper

SEQ ID NO: 109858 - DNA, 70 bp, Homo sapiens
  chr4:13629533-13629603
  hyper
ggggtttaggtcaccggcaggggtctggagtccctggaggttagggcttcgacccgcgcgacacctgggg

SEQ ID NO: 109859 - DNA, 34 bp, Homo sapiens; identical to SEQ ID NO: 3200
  chr4:13655882-13655916
  hyper

SEQ ID NO: 109860 - DNA, 30 bp, Homo sapiens; identical to SEQ ID NO: 3201
  chr4:13669550-13669580
  hyper

SEQ ID NO: 109861 - DNA, 30 bp, Homo sapiens; identical to SEQ ID NO: 40341
  chr4:15003261-15003291
  hyper

SEQ ID NO: 109862 - DNA, 30 bp, Homo sapiens; identical to SEQ ID NO: 40342
  chr4:15005214-15005244
  hyper

SEQ ID NO: 109863 - DNA, 30 bp, Homo sapiens; identical to SEQ ID NO: 40343
  chr4:15005898-15005928
  hyper

SEQ ID NO: 109864 - DNA, 123 bp, Homo sapiens
  chr4:15006619-15006742
  hyper
ctcgggcggtcagtcgagccgctcccaaagctccgcccgatcaacctgctggcagcgccgcaccctgggccgccggcccaggagggagtcgggagggagcggccgaccgccctcctcgcagga

SEQ ID NO: 109865 - DNA, 93 bp, Homo sapiens; identical to SEQ ID NO: 40344
  chr4:15412548-15412641
  hyper

SEQ ID NO: 109866 - DNA, 30 bp, Homo sapiens
  chr4:15682907-15682937
  hyper
agtgtatgaaccagcgtcctggccccgcca

SEQ ID NO: 109867 - DNA, 108 bp, Homo sapiens
  chr4:15683191-15683299
  hyper
cagagggccccaggcgcctagggagtcgttaccgccctggcattcaaataactcccgcgagaggcggaaatcccgcgagactgccgacagagcgtagggaagtggaaa

SEQ ID NO: 109868 - DNA, 30 bp, Homo sapiens; identical to SEQ ID NO: 40346
  chr4:15683676-15683706
  hyper

SEQ ID NO: 109869 - DNA, 1040 bp, Homo sapiens
  chr4:15780069-15781109
  hyper
ggacaaaccctgctgccggctctctaggagagcccaactctgtcttggcgtcagtatcctggtcctgatcctcgtcgtggtgctcgcggtggtcgtcccgaggtggcgccagcagtggagcggtccgggcaccaccaagcgctttcccgagaccgtcctggcgcgatgcgtcaagtacactgaaattcatcctgagatgaggtgggttggcgactaaggcgcaccggtgggcactgcggggacagcagggccccgcgcgcagggaagccgcccggatcgcccggaaccgggcatcttccgtggcgggtcagccgagagcccgccgggtggtgctgagtagggagtcccgggctcggggctccgcgggccgctttcaggagcagctggccttggcaccgagcgtgcccgcgggaggcgggggggggcgctgctcggtggctctgctgcgtagccggtgaacacttggcaccgatgcccgccttctgggcaaggtgccctgagcccagcccctcgccgggctgcagcccaccctcggcgcgctcagcccgcttcaccgcttcagggacggaatagaactcgcagatgcagggtgtcgctgacattttcaactttttctgcggtttccgcccgctgtctctgacccgaaagtgcccccggacggttacagaggacacttaagtggtttgcaaagcctgtggtaggggaggagggtgtagaagggccaaaccacggaacttagttttattcatttatataaagcagcactccgattctttttgcgcggcctgaaatgcatgtgaccagagaagtaattaacaaaacaatgtcaacttctaaaaccgagacattacttagatgataaggcgcagcaactcggtgaatctgtacaaaccttggaaaaaaaacacattagtctatgggaccttccagttttctcatgctcctttccagctactaacctctcctaaagggaacaaccactttttggatttgattcccaggcctcgctttcaccgggaaattatcgttgcttgtaaaac

SEQ ID NO: 109870 - DNA, 1015 bp, Homo sapiens
  chr4:16083803-16084818
  hyper
ggctcctaggataaccgggacagaaaggacggtgagaaaagaaaaatgagtaacatcacacaagttgaatcatatgaggttgacgatattcacatcttccatccaaaaaaccgacaatttcttatgattcaacccaacatatcgcagcggttgttcgtgtcgcatgagtctcggggggcactcaagaactacgatcgtgcacttgctttcttaacaaagaacagctgccgccctcaggaactccagcaaacctttctccagaaaggtcagtcgccttagcgggctccaggagcaacctgttgcagaatgaagcctggggcgccggcttccccgccctttacctccaaaccacctccaggccaagccccctccaggcctagctcccttctgggcggaagcctctcgcgagctgcgggacacaaaagaatgagcggcggggcgggcgcgggaagccaagagactccaggaattcgcagccgcgcaggggagggggttgccggagtaacttggctgctctgagcgcgtcggcgccagttccccgccgcggcccctgttgggcaccgatcgggggcgatcttgccagagagaaggggttctggagctagttcctccctccgatccgactccctgcccctccagacacgggctttcggggaaactgatcccgagcctctgactttctacagccgtgaagctcctggtctgtccacgctcctctttgttgtccggtcggcgtgttctggcagggtgcgccttgagcaccccagttctccatctagcgatagccgcgggtccccgcgcatgcaagcagaagggccgtggagcgagaggctgggaaggtgcttcaagccaggggtgcatgctttctcccacggacgcggggagatggcctcgctttgtacccccatatccctactcccgctgtggtcggctgcacagtgttggcccatttccgcactcagccagggaagctcagcgcctcacgtccccggggccatccctagagtttccttta

SEQ ID NO: 109871 - DNA, 135 bp, Homo sapiens; identical to SEQ ID NO: 3203
  chr4:16085166-16085301
  hyper

SEQ ID NO: 109872 - DNA, 250 bp, Homo sapiens; identical to SEQ ID NO: 3204
  chr4:16085351-16085601
  hyper

SEQ ID NO: 109873 - DNA, 8 bp, Homo sapiens
  chr4:16085674-16085682
  hyper
cgagccct

SEQ ID NO: 109874 - DNA, 139 bp, Homo sapiens; identical to SEQ ID NO: 3205
  chr4:16228990-16229129
  hyper

SEQ ID NO: 109875 - DNA, 275 bp, Homo sapiens
  chr4:16229202-16229477
  hyper
cgaacactaagcttcctggaaacttccctagacctaaacttgagaaccgcatataaatgggccttgagggttctgtcgtcagtagcgggttacgtgattgcaaacgagcaagtttaaaacggagtgggctttgggctgcagagccgcctggcattctgacagctgagcaggaggcagaggtgagagtccaagatggactaaaaatgtcccagcagctgggagcccaacctcggcccaacctcgttgaaaggaggaacattcggtgcagccgtcgg

SEQ ID NO: 109876 - DNA, 30 bp, Homo sapiens
  chr4:17326171-17326201
  hyper
ctcttagatcactagcgaccccacgtggcc

SEQ ID NO: 109877 - DNA, 30 bp, Homo sapiens
  chr4:17513882-17513912
  hyper
gacggggacatcggcgaagcccctcctccc

SEQ ID NO: 109878 - DNA, 7 bp, Homo sapiens
  chr4:17578659-17578666
  hyper
cagcgct

SEQ ID NO: 109879 - DNA, 172 bp, Homo sapiens
  chr4:17578690-17578862
  hyper
cgccccgcctccgccccacccatcgtgtgacgtcaccatatcggtcccgcccctctacttcgcgttgctcccgggactgtcaaccgcgtccggaagccccgccttttcgcccccgcccgcatgcgcgggcgcacacgaatgcgggcgcacacgaatgcgggcgcacacgaat

SEQ ID NO: 109880 - DNA, 30 bp, Homo sapiens
  chr4:17579257-17579287
  hyper
gctggtcgaagccgcggtgtcctgggcgcc

SEQ ID NO: 109881 - DNA, 272 bp, Homo sapiens
  chr4:17616176-17616448
  hyper
gctcggtcctgtcacgtgaccacgcctactacaccagccacgtgagcttctgagccggcttccgcgcaggcgcagtggatctctcttgcgccattccaaacatggcggctccactagggggtatgttttctgggcagccacccggtccccctcaggccccgccgggccttccgggccaagcttcgcttcttcaggcagctccaggcgctcctagaccttccagcagtactttggtggacgagttggagtcatctttcgaggtaatataagac

SEQ ID NO: 109882 - DNA, 758 bp, Homo sapiens
  chr4:17782722-17783480
  hyper
gactcccggctcgggcgccccgggcgtgcagctcgctggcccgctgcgccccaccttaccttggtgagctgggcgatcttcttgcacattttcacgtgcatctggggatcacagtccattctccagccggcgccaccgtcggctttggagccctggcaagtgccgggcgggttaattttgctgttgagagcagaagccatcgctaaaacgcgcccagcactcagactctctcgttttctccctgcccaccgtgtgcacgtgcgtgcgcgcgcgggcgtgcgagcgtgtgggtttctcgggagaggtggcactgcagtcccgtcgcctgcaccgccgcgtggccccagcttcccgaaggtctccgcctcccgggcccacccgcgcgcccaccctttttcctctcctgctggttctctggctggctggctccgcgggcacccgcaccctgcggcgaggcgtcggcgccccgcacgtgccgctggcgatcagtctgcagttccccagccagtgcaggtttcgtgtgcaaggggagagcttccgcggctaggagctgccggccttggggggtttgcggtgggcgggcactgcgctcttggacacgtgggtggcgcgcggccctggacttggtggcgacggaccctgcccgaggtggggatcccaggctaaagaggaagaagagcctccggagagggacagggcacagtgactggcggcctccggagagggacagggcacagtgactggcggctcccgagtct

SEQ ID NO: 109883 - DNA, 251 bp, Homo sapiens
  chr4:17812337-17812588
  hyper
tggcaaggccactccgctcagctcccgcgccgacgctacttccggccgagtcaaggcccctcccccttagaaacgccacttccctccgtgaaaacggctggacaaggttgaacctagacgcatgcgcccaaagcgcggggtgcgaggtgggtggacccatcgcttcccgctctcttctcccaaagcgcttacggcagtctcgcgggatttccccctctcgcgggaattatttgaacgttcgagcggtaaat

SEQ ID NO: 109884 - DNA, 30 bp, Homo sapiens
  chr4:18023086-18023116
  hyper
cgccgctcccatctcgctcccccaccgaac

SEQ ID NO: 109885 - DNA, 234 bp, Homo sapiens
  chr4:18024245-18024479
  hyper
cttcggtattcaaggcgaagagatctcggaaagccagaatatttgcaaggactaggaaaaagatgcgggtttttttcactgaaaattacttgcaggggactgggtgtagccggctgaaaactgcagaaggaaaattttctttataagctcctggagggcagcgacccactgagatctctgtaccgtgacatctgtcactcgctagaccctagtacagtgcgtgacacgggatta

SEQ ID NO: 109886 - DNA, 941 bp, Homo sapiens; identical to SEQ ID NO: 40358
  chr4:20253115-20254056
  hyper

SEQ ID NO: 109887 - DNA, 534 bp, Homo sapiens; identical to SEQ ID NO: 40359
  chr4:20254239-20254773
  hyper

SEQ ID NO: 109888 - DNA, 341 bp, Homo sapiens; identical to SEQ ID NO: 40360
  chr4:20255026-20255367
  hyper

SEQ ID NO: 109889 - DNA, 761 bp, Homo sapiens; identical to SEQ ID NO: 40361
  chr4:20255524-20256285
  hyper

SEQ ID NO: 109890 - DNA, 194 bp, Homo sapiens; identical to SEQ ID NO: 3215
  chr4:20256382-20256576
  hyper

SEQ ID NO: 109891 - DNA, 96 bp, Homo sapiens; identical to SEQ ID NO: 3216
  chr4:20256841-20256937
  hyper

SEQ ID NO: 109892 - DNA, 30 bp, Homo sapiens; identical to SEQ ID NO: 40364
  chr4:20702362-20702392
  hyper

SEQ ID NO: 109893 - DNA, 153 bp, Homo sapiens
  chr4:20985812-20985965
  hyper
gctgcagccagcgggcgagtacttcgacttcagagctgcgagggaaacgtctgtcggagaactggagactttgcagtgtccgtggcgagaagggacactcctaggaaacttgcccgggagaacaccgcgcgcttccctcgctgaggacgcgag

SEQ ID NO: 109894 - DNA, 30 bp, Homo sapiens; identical to SEQ ID NO: 40365
  chr4:21215998-21216028
  hyper

SEQ ID NO: 109895 - DNA, 30 bp, Homo sapiens
  chr4:21305842-21305872
  hyper
gcagaggccagaagtagcagccggataaag

SEQ ID NO: 109896 - DNA, 112 bp, Homo sapiens
  chr4:21305986-21306098
  hyper
cgaggaaacatgaggcccggcgcggaggagatggctctgcgccccgggactctgcgcgccgcgccgccgccaccagtggctttgttgggccggccagttgccttggaaacaa

SEQ ID NO: 109897 - DNA, 457 bp, Homo sapiens
  chr4:21949838-21950295
  hyper
ttaggggaaggaagcgtgcggtctggagtcatctggcagatgcataaacaacctcggaaattttcagagaaggcaaaagtacgcacaggatcgcaggggaccctgccaccggcgagtttcaaacacacttcaaacatcttttcttccccgacctggatcttgcatgcacccccctctcctttgcaccccattcctgccgctcccacctccccttcccagtcccgccaggtgactgtgtctcatgcagcgaaggcaacaagcgtccccagccgaggaagggaaggggcagccgtcttggctcgcgagggaaggagggcggaagcgggcgcccgctcgcaagcttattgcatcctaccgcctgtagagctggcctcctccagctgagccgaaatgctttccaccctcctcacattcatgtctagggacgcagggtgcagaagcgagactcgagagtcca

SEQ ID NO: 109898 - DNA, 104 bp, Homo sapiens
  chr4:21950721-21950825
  hyper
cgaggtgacttcgggctgggcaggacacccccgggagttgccagcggctctcagcgggcgcctctaggaccccttgtcactgcgagcagcgcctgctctgggga

SEQ ID NO: 109899 - DNA, 30 bp, Homo sapiens; identical to SEQ ID NO: 40368
  chr4:22358598-22358628
  hyper

SEQ ID NO: 109900 - DNA, 30 bp, Homo sapiens; identical to SEQ ID NO: 40369
  chr4:22458521-22458551
  hyper

SEQ ID NO: 109901 - DNA, 31 bp, Homo sapiens; identical to SEQ ID NO: 3217
  chr4:22516749-22516780
  hyper

SEQ ID NO: 109902 - DNA, 1010 bp, Homo sapiens
  chr4:22517044-22518054
  hyper
tccacacaaaggcgcgtgggtgccggctggaccctgctccaaagttgagcggagagataagaaagagccgagcgggagaggacccagcgtcgcgggagatactcacagggtgaccgtgcggttgggcagagtatctgggggcaggacctgcgcgagttccaggctgctgcacaccaccttgccctcggcggcgcccgccgccctgccagcccctcggggccgcccatcgtgcttgcagccggcgggcagcgccgcggcgccgccgccgccgccgcctcccagcagcgcgagcagcgctaacagcgagagcggcagcaacagcggcggctgcgcgcggccccgccggcgtccgggtggctccatgctgcgggccggggcctgcggggcgagcggcggcgcactggcctagcgggccgccccggagcccgggcgggcaggagcgcggcgcgggcccagcggcgaccggagccttatggcggccggaggacgggccttccccggcgcggacatgctcctttgtccgctgcggctgcgctgggcctctagggagccgggggtcacggccgcatgggtcccagcgccgctctaccgcccggcgcgagcaccgcctcctcctcctcctctgccgccgccgccgccgccactgcctcctcccctggccaggacccgcgcgcggcggctcctccccgcccgccgccggcggccgcccccgccccttcccctcctctttcccggctctcctgctctccccgtgtctgcagctgcccgggacctcggggaggaggcgcgcgctcccgggacctgccgagcccgactccgacccggtgcgcgcccgggcctcggcctccgggcaggagttgtggggagcccgcgggaaggcagtaactcgtagagagaacggaggaaagttcgagtccgaacggaggaaagttcgagtccaaactccacccgcggtggccactctcctgctcgtttcccttcgccgccaccgcgctcgcaccgcgggcaca

SEQ ID NO: 109903 - DNA, 30 bp, Homo sapiens; identical to SEQ ID NO: 3219
  chr4:23890875-23890905
  hyper

SEQ ID NO: 109904 - DNA, 197 bp, Homo sapiens
  chr4:24471686-24471883
  hyper
gtgcctgagtttcacggccccggggtgcaggtcggaggcacgcgcctggaaacttgtcctaacgcctctgactccaggactggggggcgcggcgctgccgaggatgcccgaatgccggccgggcttgtaccgggtgcgtggttcaagcctttcgtacccgcctcagtcctcaaagacgagcagggcttggtttctga

SEQ ID NO: 109905 - DNA, 1036 bp, Homo sapiens
  chr4:24471942-24472978
  hyper
acacactctctcacacaggcaggcacgcggacgcccgctcctggagagctggagtttgcggagccggagtggtcgttggctctcggcaatcctgggcggatgcaaggaagcgtggagagcacccaaggcccgccaggcggggcaggatagcctgaaggaagccaccggcgccggccacgggcagccgggcaccctccgggccccgatcgtgcttctccaggcccccagctccagcgccggcccgaccacctcagtagctcctgcaagtttctactcgcagcgaggcctcgtgtctcccggctgcctcaccgcgaatcctcactccgcgcgcctgggctgccctcccgccccgcccgaacggccggcgtacttcccgggggcagcccagacgcccccacccgcggcggcggcccgacggtctgcccagagctcgccgccgcctcccgctgctgctgccgcggcggcgggagcctctccaaggctccgggcggcccttatgtattattcactcggatggccgcagcgctttctggagagcccacgccggagaggtcttcacctggcagctagtagtttggcgatttgtttcttggaaacttggggtgatgcggaggcggcggcggcgaacatttttcggttgctttcggggtttgtcttctctgccgggagctcgcaggaacgcgctgcgccccgggcccgggagggagcgcgccagcgccggcgagcgcggcgggcagccccgcaagcggccgaggctggctggcgggctccggaggagaggcgccgcggaggccaggcgagccgggctgaacggagctcttttcctcgacaccccccacccctagcgggccagctccccccgcggtgcgcgctccgcggggcccgggaatccccggcgccctggaccgcccaccgagtagctaatgcctttcaccattgctcctccaccgctcctctggccccaactttccccagcccagacacgcgagcgcgcgcgcacacccacacacagacacacacccgcgtgcacacacac

SEQ ID NO: 109906 - DNA, 403 bp, Homo sapiens
  chr4:24473240-24473643
  hyper
acgccccccttccggcgtctacccccagcgtccctgggccccccgagtcacaccgacacgcacacctacaggccggcggcgtggagcgtctagggcacgatgcagccggactgcattgcacagtcatcaaagttaagtgtgtttgtggggtgcttctgtgccccaggggaggcgcggggtcaggaggagcggaggctccactctgcaccccaccccccccacctccgcgggtcaggggacgcctctacttgagattgcagccattttagggaaagaggcggctcgggccccgaggggagtggaggggggacagcacgtcgcggggggcttgcggctctgcagcccctcggcgcaactggaaggcgggtaggcgccgggcgcacaggggcgcggcgcccgcggc

SEQ ID NO: 109907 - DNA, 437 bp, Homo sapiens
  chr4:24474653-24475090
  hyper
cgcgctgactccgccggctgccggggacagcctgtactacagccccggccactaaatcagaccacgccgccagaccttttgcagcccgcggccggccggccgccttctccgacctcctcgccatagccgccgggccatgcgcgtcccgggacggcagggggcgcgggtgaggccgcgggcaggtggatggatgggtggggagtgggccgccctgagcccgggaagaggaaaaatgctcgaggaaaaacacaggcgcccacccccccgctacgtccggcaacctcctggcaagccttccttccgccctgtttgaagatttttttttttattcctaaaattgcttttccatgcagagacccctcttccagccactggaaaattattttcacatagttgctatgtcccgcttttcttgctttcgcgatccctccagcccc

SEQ ID NO: 109908 - DNA, 30 bp, Homo sapiens; identical to SEQ ID NO: 3220
  chr4:24585266-24585296
  hyper

SEQ ID NO: 109909 - DNA, 30 bp, Homo sapiens; identical to SEQ ID NO: 40377
  chr4:24586251-24586281
  hyper

SEQ ID NO: 109910 - DNA, 30 bp, Homo sapiens
  chr4:24802345-24802375
  hyper
ccaggccaactgccccgcgtcttcagctgt

SEQ ID NO: 109911 - DNA, 610 bp, Homo sapiens; identical to SEQ ID NO: 40378
  chr4:24914264-24914874
  hyper

SEQ ID NO: 109912 - DNA, 627 bp, Homo sapiens
  chr4:25031936-25032563
  hyper
gctcaggtcctcaccgtcctccccgggggccaacactccacccacgtcccccacacaaaggcaaagaaggggcctggggagtgggtcagggtcgcgctggcccggcgccagaggcaactccctcgcggcggcggacgcagggtggggcgggacgggatgggggctggaggggtcccactcacagggagctgatgtcgcccggcacgatcctgggcacccaggaagagcccacgcagatgatagactccttggtacagctgcaagtggcggggcagcgcgccagccgcctcacctgcgcgctccgcggtatcaggcacgcggcgcccagcagcagcagcagcagcccgagcgctccgcagccgcctctccgcagcgccatgcccggtccccgctccccgcccgggccccgacccccaccgccgcgccgcgcgctcggacccggcgccgctgcagacgcgggcgccgctcgctgctctgccgccgccgctgctggcgaggactagggagccgcgggtgtgggaggccgagccgcagccgagcagcatgctggccgccacccccactcggcgcccccccacccgagcccgggctgctgggcggccgccgccgctgcgcccgccgcactcg

SEQ ID NO: 109913 - DNA, 30 bp, Homo sapiens
  chr4:25032793-25032823
  hyper
gagcggtggaggatccgatgcctgcaatac

SEQ ID NO: 109914 - DNA, 234 bp, Homo sapiens
  chr4:25161801-25162035
  hyper
agcaccagcggggacgcccggcggagccagagccccggggtcgcggcggctggggaggggaccgacagctcggtaccttctccagaagcagccgtatgaggtgctcatgcgagcggcgggcctcacagccctgccgcacgtaagccggcgacaccagccgctctcccgccgcgaagctctcgcggttcatgacagcggtggcgacagtggcgaataagcgggagcactagctcc

SEQ ID NO: 109915 - DNA, 128 bp, Homo sapiens
  chr4:25235354-25235482
  hyper
tgtcagggagaagccgcttttggttgcaggagggcacctctttgaaaattactcaccttcccgccctccactgggagtaaagcgagctgtgcccagcttctccccgcgctcacggaagcaggtggcgg

SEQ ID NO: 109916 - DNA, 159 bp, Homo sapiens
  chr4:25314270-25314429
  hyper
gtgggcggggactgcgtttcggggcgtggcctccgccgcggcagcccccgcccaagctcctcctaagcgcctgggggcgctgtgggtcgctttgggtcgcgggggcgctctttctcagcattcttgtttcgtactgaggctttcgggacggcggcggga

SEQ ID NO: 109917 - DNA, 30 bp, Homo sapiens
  chr4:25314634-25314664
  hyper
cctgtatttttacccgcctctttccctcac

SEQ ID NO: 109918 - DNA, 30 bp, Homo sapiens
  chr4:25378423-25378453
  hyper
cagcagagaatttccgggaaaacgggaaag

SEQ ID NO: 109919 - DNA, 30 bp, Homo sapiens; identical to SEQ ID NO: 3225
  chr4:25378959-25378989
  hyper

SEQ ID NO: 109920 - DNA, 30 bp, Homo sapiens; identical to SEQ ID NO: 40384
  chr4:25379421-25379451
  hyper

SEQ ID NO: 109921 - DNA, 779 bp, Homo sapiens
  chr4:25656788-25657567
  hyper
cacacgcaggtgacacgaggcagagcaggatgtgaaacgagcgcagtggtttgccaaacccgcagcaggcttaggacggagtggtgagaacagcccccttccttttcctcagcttgacggtcccagcctttcccattgcggacctagagcccagactcccagggcagaaagcgccccacagactgataaaggtgaacaatccaggctttgtttccaagggctttatccctgactttccaactggcttttatctgtgtcttcacgtctctgacctcttgagcctcacaggagctagactagaaggttcaagttcttgaggagaaggcaggggcgggagagccccacttgcgggaatctcgtgcggaccgagtcggggcgggagagggcgcgcaccagccaggctagggcgcgcggggcgccgaggggcgcggggccgtttggggccgttcgggccagttcgcgcggcggggcccgtcggagcttttctctcggcagcctggctggccgcgcgtcttctccgcgcagcgggcgaagtcgcgatgggttcattaaggcggcaggtaggcagtgccccggcggcggctgcggcaggcggtcctggaatgtgcgaggggcgtgatgacagcggccagcctctttgcgcaacaccttcgccatatatacccggggcgctgcgctccacctggccgccgcctccagcccagcacctgcggagggagcgctggtgagtaccgccgccggggcaggggcgcttcctcgctctttcaaggactttgatt

SEQ ID NO: 109922 - DNA, 624 bp, Homo sapiens
  chr4:25863666-25864290
  hyper
aagtcaccactctggcggtaagcgtgttacagagaactagatttctttccggcatccgcaacttggctggagtgaccaaggaggagttgaagagcgctggagatgcgaggtgcgttggcagaaaactgtccgggccgggaggacccggtggaaactaaaaggagggtcgacgcgggtggcgggcgccgagagtaagaggcgaagttgggcacgggaaggaaaggagctgcgagaagattgagagggaagcccaggaggggtggggggttggggggtgctggagactgcgcgcggcggggcggggagcgaactccgggcggcgaggctcccgggtggagtcgaggacaagaaggggtctcgagggtaacccgacccgggtctagagagagtccaggagggaaaggaatgagcacgagcgagagagcagcttggcaagtccggtccaagcgcccctctccacgcccggggtacctatcccaggtgccgggaacgcccggggcgcagcgacgaggaagagagaaaactagcagcggcgtccccgccccgcgtggcgggtgtccccggccgcccccacccgcgtccccggggccccgcgcggaggggaagacccgggcagggtccggc

SEQ ID NO: 109923 - DNA, 424 bp, Homo sapiens
  chr4:25915658-25916082
  hyper
gcacagcacggaatcccggggaaggcggagggcggggtccgaggccccgcctgtgaccccacccctttcctggccccgcccccagccttgaggccccgcctctgactccacccctgtctctttctccgctccgcccctcctcctcgtccctccctcaaggcccggaagcgaaagcctctccacctcttccgagcggggtcacggcccggccgtcggtaacctggtttccgagagtgccgggcggtcggcgggtcagggcagcccggggcctgacgccatgtcccggaacctgcgcaccgcgctcattttcggcggcttcatctccctgatcggcgccgccttctatcccatctacttccggcccctaatgagattggaggagtacagtgagtgatctctaaccccttgcggtgacctgactccc

SEQ ID NO: 109924 - DNA, 30 bp, Homo sapiens
  chr4:26029887-26029917
  hyper
accggccagcgcgggcggaaccagggcctt

SEQ ID NO: 109925 - DNA, 161 bp, Homo sapiens
  chr4:26030404-26030565
  hyper
ggcctgggtgattttacgtgcggatgcagaggaggggcagcgtcggggcggcggagtccgacctcgggggattcaccctgagggttacaggcaaggccgctccaggcacgcagcacctgccgggcgccacccaggagggggcagcagcgccattcgcaaag

SEQ ID NO: 109926 - DNA, 144 bp, Homo sapiens
  chr4:26321223-26321367
  hyper
ggggcacgttctcgcgaggtttaggaaatttcccacggccgtgttgtgtctgagccgagtagtggaaggcggtgggaaggaggtgtagcgtgagactggactgcccgcattgggtacatgcgcagtgccgctcgcgcgggccgc

SEQ ID NO: 109927 - DNA, 30 bp, Homo sapiens
  chr4:26322680-26322710
  hyper
gggaatcggagcgccgggaaccgggaaagt

SEQ ID NO: 109928 - DNA, 30 bp, Homo sapiens; identical to SEQ ID NO: 40392
  chr4:26323531-26323561
  hyper

SEQ ID NO: 109929 - DNA, 30 bp, Homo sapiens
  chr4:26374588-26374618
  hyper
aatggctcagatacacgttggcagaaagcc

SEQ ID NO: 109930 - DNA, 69 bp, Homo sapiens
  chr4:26585706-26585775
  hyper
gtgtaataaggtcccggagaagtgtcactggccctgagtgggacccggtagcccgttcgctccgcgccg

SEQ ID NO: 109931 - DNA, 183 bp, Homo sapiens
  chr4:26862029-26862212
  hyper
ttcgctgccctctacgaggctgaaactcgccctcaggatgtgggacgtctggactcttctctccgtccccttgtagccccccactccccctcgcggtggtaccgtgaatgagggagaggtacacgtcccccttcttccccgcctcctatcttcgcggctcgctaaagcgttatcagccgcccc

SEQ ID NO: 109932 - DNA, 179 bp, Homo sapiens
  chr4:26862441-26862620
  hyper
gggttggtgtttggcggcgccagagcagcggatcccggtctcgccgcagcagcagcgcgggtgtcgtgcaccgcctgaagacgccgtacctttctaccccccaccttttttttttttttttttaaataaccggaaccaatgaacgcagccgggatcagagctccggaggccgccggtgc

SEQ ID NO: 109933 - DNA, 30 bp, Homo sapiens; identical to SEQ ID NO: 40393
  chr4:26863097-26863127
  hyper

SEQ ID NO: 109934 - DNA, 627 bp, Homo sapiens
  chr4:27086304-27086931
  hyper
atttttcctaatgaacgtttctttctctccttacgcttatcggttttaacacatgccatttaccacctcccacccgctgattagggggctggaaacgggcttacatcactgtcagggcaggagaggaaaaattgcaaagtaaacggcaagatgttgccgcgatagcgagcaggaaaatctgcagtgcttaggagaatgcgggacccaaatgaaattccgcgtctccccgcggcgggtgccgcagagccaccggcgaggggcgggcgccaccacgtgactgattattcaaatggaccgatgattaactcggtttatattgatgcaaataatcctgccggagcctgcaacggctaatgcattttggaactgtggtttttccattgatagcacaaaatattgtagaggaaagccattttcataatattaataatggaattacagaatcaggtcacttaaaggaacggcgctgactcagcgacagcagcgtggaggttgaatgtggggattagcactgagcaaaacgaatacaaaccttttgcagcgatctcattgcataaaacgcacatccccttccctttttctttttaaaagaaaaagagcttcagaaatgaccgtggctaagtacaa

SEQ ID NO: 109935 - DNA, 30 bp, Homo sapiens
  chr4:29137491-29137521
  hyper
ctctgaatgtaaccacgtaactataacagc

SEQ ID NO: 109936 - DNA, 30 bp, Homo sapiens
  chr4:30718495-30718525
  hyper
tctccagttctggccgccaaagcagcagca

SEQ ID NO: 109937 - DNA, 584 bp, Homo sapiens
  chr4:30718953-30719537
  hyper
cccgtacccctaccccgcccatttcctttgcttgcccagaacggcgctgcagggcaaagccgccgccacttctttgctgctctggcagaaaggtcggagcctgggactgatgggggtgggagcaaagccagcaggcttcttggcccccgcagtctgtcctcgctgttctccatgcagcacacgtcggacccatttcccacgctggcttggctccgccgcgaagttggtaggaatgagagtgaggagggcgggctggagacttcctcccgctcgcaaagaggaaaccactccactgtgaaggacgcgctgcaactccctagtcatccgggaagaaatgtgcagcgcgctgaggaaaagccgcccactccttcgcgccccgctcaagtgtgcgcctggagagtgcgcgccagagccgcgagcaaatgctttgaagatgcggagaggcttattcaagtttatggtctggagagggaagagggagtgcacaacgtttctgcccaagcggctgcctgaagtttgcaaaatcttagtaaggcgatgaggggagtgagtgcactgcaccatattgccgcgcatcggaatgc

SEQ ID NO: 109938 - DNA, 270 bp, Homo sapiens
  chr4:30719763-30720033
  hyper
cgcgcggggcttttctcgctgatgctgcagatacagagctgagaggttcgggtgccagcagcgggagggttagcgggaaggccgggttccctgccctggcctcggaggaggagccaccacccctggggtgatgctactttcacagactggaaaatactcgccagctccctgacacacacttagacacacttccatccaacgggcatctacgatcccctgtagggagagcttggaaatctctgccgcctctccctcctcattcctgttcct

SEQ ID NO: 109939 - DNA, 283 bp, Homo sapiens
  chr4:30720054-30720337
  hyper
cgctacatctgctcgttgactttattggtgtttgtcttgtttaaatcattctgcctcgtcacccaggtctcgtaaagaatacccacactggacagattttattttttcggctttaaatttttctttgaggggaggcccttaaatgtgtatggatacgtcaggcgagctgaagactaagcaaatcccagcagcggccctttctctctttcgagatggtaaaaattctccccaaatacctacagtccgtctcagtcgtcttaatcctagccgggcctcttcgttt

SEQ ID NO: 109940 - DNA, 1145 bp, Homo sapiens
  chr4:30720644-30721789
  hyper
ccaggcgcgcacacacggtctacccccgcaagcaagcacgacgacaggaatgtcaagcatttaaacaaagacagacatccttcaccctccacccaccgccgcccctgccccccgcaaccatccaaagtctgagctcccaaaaaaggatctttctccagctctctggagtttgatgttctctcttcactactgcagcccgtcatggtttttcagaacagagtggctttctgggcgctcgtaggttccccaggaccccgataaccatgtcctaaccaagatcctaaatcgcgaaccggagacactttccggggggaggaggacgtcgtctgagagggagggagaaggagaaacctatcctgacaccagctccgaaagctctcacgcgtgaactgggcattagtcaagggaggaggaaatttaccagcccgagggagggaaaacaagtcccccagagaagacggcggtactcgctagggagggggactgggctttggcttaaagaggactggctgggattgggcacactttgagcggcccctggagctgaggctgggctttcccgagcgcggcggctggctgacgctccctcccgcctccttatcccgggccctcctccctcgctctctcctagtgtgtagtttcggcggctcggctgctactgccgccgccgctgcagcagcagcgtcagggacaagcctgatccgtgagcgagcgagcacccagcagcaaccaccactttgggcaacttgcgggtttcctgctcgcgggtagcgaacgggagattcccactagcggttcagtgtctccgagccgctgcagcccgaggggcggcgggagcgcccgcaccagactctcccagacgcgaaaagggacgagacaactgcggaattcaccagccgtgccagggcacttccgaggccacaaccgactgacactttttctccccttggcaaactggatttttttttttaagctacttggcagctgtctctgactccacctccccctccacccccgcccgaaagcctttggcttttcttcggaaatccagacagaattgggcatctttgttaattgccgttggggacgcccggccgtgcgctttcgccggctaacgtcgcctgtgctccgagcctggtttgctc

SEQ ID NO: 109941 - DNA, 1504 bp, Homo sapiens
  chr4:30722008-30723512
  hyper
cagatcccactgctccgacatgcgggccgaatgcaggtgagaaaaggcacggactctgcggctgcgaacccaaacttgggcaccgcacggtgcgcactgctcagccttcgcccccgtgggcgaaaggctgctgcggtttcaggcggctgcttcgtgactaatgaccttgcgcagagttgttaagaaaaaagagaaacccgcgctctccggggtgagaagggactgactctgggcgtctctgaagatggctcgggcttctctttggcgcgccggggggaccctgacactgaccgctctgtgacgcgagtagtctcccctgcaccgtgcccgaagcgacgtgccgggggatttttcattctcgatctgttgactggctcccccgctgcatgagcagagtcggagttgagactggcttgttgctggccccagcgcctggtgcaggaagcgactcacgtttgtctgggtggccggagccggagcagagcctgggtttggagtgagtgcctggaacgtgaattggactcaactcgagtagcagcaaagaccagcgggctggcaggcgggggaggctgcaggctcattccccacctcttcccagccccactgcccgtctgccggagcggttctggccccttccgacagagcggggactagagccggggattctccgcccgctgaggggatgactctgggttgggggagcgccgaacccgcggcgcgcagtgtcccgtgaactgtgagtactgcgactgaacggcggcaggcgagcgggcgattagcacccattgcatgaattatgaaacaataactttcggaagaagcaggaggaaaaaaagaagcatctatcgctgccctcccacccccattcccggccaactctccacgccgcttttgccccctccctcccctccctctcgctccttcctttccgggagaggggagaggactcgggggagggcaggcggccggccccggaggaggggggcgccgagggggctgtggttagaaggagcagtagcagcagcagcaggagaagatgctgaggatgcggaccgcgggatgggcgcgcggctggtgcttgggctgctgcctcctcctgccgctctcgctcagcctggcggccgccaagcagctcctccggtaccggctggccgaggagggccccgccgacgtccgcatcggcaacgtggcttcagacctgggcatcgtgaccggatcgggtgaggtgactttcagcctggagtccggttccgagtacctgaagatcgacaacctcactggcgagctgagcacgagcgagcggcgcatcgaccgcgagaagctgccccagtgtcagatgatcttcgacgagaacgagtgcttcctggacttcgaggtgtcggtgatcgggccctcgcagagctgggtggacctgtttgagggtcaggtcatcgtgcttgacatcaacgacaacacgcccaccttcccgtcgcccgtgctcacgctcacggtggaggagaatcgg

SEQ ID NO: 109942 - DNA, 207 bp, Homo sapiens; identical to SEQ ID NO: 40399
  chr4:30723855-30724062
  hyper

SEQ ID NO: 109943 - DNA, 304 bp, Homo sapiens; identical to SEQ ID NO: 40400
  chr4:30724126-30724430
  hyper

SEQ ID NO: 109944 - DNA, 799 bp, Homo sapiens; identical to SEQ ID NO: 3234
  chr4:36245408-36246207
  hyper

SEQ ID NO: 109945 - DNA, 145 bp, Homo sapiens
  chr4:36246257-36246402
  hyper
cgacttggccgcgcctggcaccctcgccacctggcgcacctcggcccggaggcgtcagaccccgctggggaagctgcgggggcgcgccctggagcccagagcgacaggggcattacccaccttcccgggacggagatgcccagga

SEQ ID NO: 109946 - DNA, 151 bp, Homo sapiens
  chr4:37245430-37245581
  hyper
cgcacacaagaagctgctgcccacagccagctccgatttctcgcaccccggtcccaatccacggccacctgcactttgcgtaacgttgcgctggggggcgctccagagaacccacaccctcccgcccggcccaggtgcgcacccggccgcg

SEQ ID NO: 109947 - DNA, 524 bp, Homo sapiens; identical to SEQ ID NO: 3236
  chr4:37245836-37246360
  hyper

SEQ ID NO: 109948 - DNA, 210 bp, Homo sapiens; identical to SEQ ID NO: 3237
  chr4:37246489-37246699
  hyper

SEQ ID NO: 109949 - DNA, 222 bp, Homo sapiens; identical to SEQ ID NO: 40406
  chr4:37247015-37247237
  hyper

SEQ ID NO: 109950 - DNA, 51 bp, Homo sapiens
  chr4:37247293-37247344
  hyper
cgaggtgagttccttgagactctcctcctgcaggtgcgatggtgccctttg

SEQ ID NO: 109951 - DNA, 794 bp, Homo sapiens
  chr4:37455035-37455829
  hyper
tggtggtggcgcccccgctgtttctaggtccatgtagctcatacagggctggccatggaactcacagcaggtctaggcggcgaatgccagaaataaggaggaaactgaaaaatgccaagttctcggggtttgggagtacacaactatttgccagcgggtgcatttgttttgtgtatccccgtactccagtcccttgatcataggaagctcccttctctccagcgcaacattggagtaagcaccccggagtttcccgtgatggcaggcggttggcgcggtcgtttgtgctcagaggccaacaagcgcgtggattttctgcttcagtgcgcccgggactgccaccccggccccggggatgtcggacatcgtactccagggtttcgagccctagccccgccgcatcctcggggcgtgcaggtaaagggttacgcgtgtcgggaaggctcacccgcagcccgggccacgtgacgcgcgggcccaatgacagcgctggggcggccgctgcgagctcggcgggctcagggcagcgcggagccgctagcgtctcccggcgcggctgcccgaggccggcgaagccatgggcgccgggaccccgccgccgccgccgccgccgccgtctggccccaggtagggacaatcccccgccccgcgcgcgcaaagagggctttagtcctgcggaacttggctttggggcgagctttcccccacttctctccgagtcgcctacttttaagtttaatttcttgatttgcttttgccctgaaaaaaaaaattagagacgcaattcaaagttt

SEQ ID NO: 109952 - DNA, 30 bp, Homo sapiens; identical to SEQ ID NO: 3241
  chr4:37526315-37526345
  hyper

SEQ ID NO: 109953 - DNA, 30 bp, Homo sapiens; identical to SEQ ID NO: 40409
  chr4:37687714-37687744
  hyper

SEQ ID NO: 109954 - DNA, 87 bp, Homo sapiens; identical to SEQ ID NO: 3242
  chr4:37688563-37688650
  hyper

SEQ ID NO: 109955 - DNA, 30 bp, Homo sapiens
  chr4:37828031-37828061
  hyper
tgacatgtgcctggcgcgcagcaggaactc

SEQ ID NO: 109956 - DNA, 30 bp, Homo sapiens
  chr4:37828485-37828515
  hyper
gccctctccaggcgcggcgctgcttgctct

SEQ ID NO: 109957 - DNA, 301 bp, Homo sapiens
  chr4:37891997-37892298
  hyper
ggagaaggggtaaggcgggggagagcaaggtggcttggtcgcccccggcccccgccccccatgttgtgtgcagtttccaccacgtctgtttcggagggagaagaggagggtgcagatgaggcgaggcgccttcgggagcgcggagagcgggcaggcagtgccacctgctgagagccactcaggccgagcaagcggcgggcagtgccacctgctataaataggccgccaaggacagggtgtgcgactgtacatcccgccacgagggcctgcatcacgcgcggggccccgcgcccccggctcc

SEQ ID NO: 109958 - DNA, 30 bp, Homo sapiens; identical to SEQ ID NO: 40412
  chr4:37893298-37893328
  hyper

SEQ ID NO: 109959 - DNA, 212 bp, Homo sapiens
  chr4:37978650-37978862
  hyper
gcttttgtggaacctcggagagggaggaattcttagatttctgaaagttgtgcgaaacggaccccagaggcctggaaaggcgcgtccccagcctccagggtttcctgcgcagccctgggcatctcggaagggggcgaccccagcatgtcccaacttcccgccagcagcggagcgcgggggtgggcggggtcggctgcgcgccctcccctcct

SEQ ID NO: 109960 - DNA, 30 bp, Homo sapiens
  chr4:37979288-37979318
  hyper
ggtcgttagccgcgcgtttctcattcatta

SEQ ID NO: 109961 - DNA, 31 bp, Homo sapiens; identical to SEQ ID NO: 3244
  chr4:38098758-38098789
  hyper

SEQ ID NO: 109962 - DNA, 30 bp, Homo sapiens
  chr4:38320746-38320776
  hyper
tgagaattcccattcgtgaggtcaaatcga

SEQ ID NO: 109963 - DNA, 30 bp, Homo sapiens; identical to SEQ ID NO: 40415
  chr4:38320994-38321024
  hyper

SEQ ID NO: 109964 - DNA, 31 bp, Homo sapiens; identical to SEQ ID NO: 3245
  chr4:38664663-38664694
  hyper

SEQ ID NO: 109965 - DNA, 30 bp, Homo sapiens
  chr4:38664937-38664967
  hyper
ccagggggacccgtcgccccagggcacaaa

SEQ ID NO: 109966 - DNA, 156 bp, Homo sapiens
  chr4:38666036-38666192
  hyper
gggcctttatttctcgtcggcggcgccctgcaccgcgcctcgcaaagtaagtcccgtctccctcacctctgctccgcaccctggtccctgccgcccccctcctcggccagtctggtttcattttttctcctggagggggccgcggggaatgggtcg

SEQ ID NO: 109967 - DNA, 355 bp, Homo sapiens; identical to SEQ ID NO: 40418
  chr4:38666433-38666788
  hyper

SEQ ID NO: 109968 - DNA, 88 bp, Homo sapiens
  chr4:38732941-38733029
  hyper
agggaggcccaggcacgcggagcttctagttcagggccggggtcctcttgagggttctcggagcaccttctcgcggctcagagggttc

SEQ ID NO: 109969 - DNA, 741 bp, Homo sapiens
  chr4:38868923-38869664
  hyper
gccaaagctaatacatcggagttttaacccacagctccaaactggccttctggaaagtgggttttcgttgtttgtttggggtttgtttgttttaaatctatcacactcccaccgacagggcaagggagtgctgcttaacgcagaatcaggagatcaaactttagctgaatttgagcgacctcttcccagtgacacggcggggggttttccaagcccttttaaggaaaggaaagggatctggcgaaccccgagacccacccgccctgggctggagaggcggcgcgctctggctttccgcgctggcacaggggtgggacaagccaagtttccaggagactcgcccagcgcgggcccggccctcgcagcgtgggggtggccgggcgtccccgcggcgctcctcgtggggcggggcgcaggcggggcggggccccctctccagccgcccgccctccggccgcgtccccgccggccctgcagacgtggcggggcgggacccgctgggcactcccgcgcgtactcggccgcctgagcggtaagagccccgggcactcggtccccatccccttccccggggggcgggcgagcgcgggggcggctgcccgggggtggtgggaacaccataccttggcgcctcgtccgggacccacgaatcctgccctctgcgttagtgagaagcagtggtcagggaggacccggctctggggtgagggtctggggcggcgcggccgagggacctgcgtg

SEQ ID NO: 109970 - DNA, 313 bp, Homo sapiens; identical to SEQ ID NO: 40421
  chr4:39047090-39047403
  hyper

SEQ ID NO: 109971 - DNA, 347 bp, Homo sapiens
  chr4:39183809-39184156
  hyper
gacatcttagtcatcgcggtccaaaatttacgcacgcgcctttgagggctcacagagcccgtctctcccggacgaatctcatccaatcagagccagccaggaagccgaggctcagcaaggcctcgcgacgcccaacttcccagggttagcgtctctgatgtcatgtgattccaccctccgcctctcacccaccctcgcagagggcggtgcgcttggcccggcccctcgaggcaccgcctttcaattagcactcgctgattggtcgctgctcgcgcggtctcctgggtgacgggaacgcggtagcctgcttggtggagaccgggtgcgcctgcgtacttcatagttcg

SEQ ID NO: 109972 - DNA, 167 bp, Homo sapiens
  chr4:39367986-39368153
  hyper
gcgcgcggtgatgacgtcaggaggcgcgagctttgcttccgtcccgcccagaggcgggaggtgcgacgcctgcccaggtgctgccccgagggcaggcgggccgctgacatcgagaggaaccacggtgctttggtgtgagctcggtttttggcgggggcgctaaagta

SEQ ID NO: 109973 - DNA, 30 bp, Homo sapiens
  chr4:39460085-39460115
  hyper
gccgacgcaaggcccgtttttccaccaaac

SEQ ID NO: 109974 - DNA, 30 bp, Homo sapiens
  chr4:39460657-39460687
  hyper
gagcgacgtaatttcgacctgtcctttccc

SEQ ID NO: 109975 - DNA, 30 bp, Homo sapiens; identical to SEQ ID NO: 40424
  chr4:39461140-39461170
  hyper

SEQ ID NO: 109976 - DNA, 30 bp, Homo sapiens
  chr4:39528458-39528488
  hyper
tttcttaagaggggcggcatgagaaaagca

SEQ ID NO: 109977 - DNA, 250 bp, Homo sapiens; identical to SEQ ID NO: 40425
  chr4:39529279-39529529
  hyper

SEQ ID NO: 109978 - DNA, 293 bp, Homo sapiens
  chr4:39529692-39529985
  hyper
ggccccggggtcaaccgcgccctccgggccggcaacccagggtttagtcagattcctcctgacccaccgcttctgggaaagaggcgcctcccgtcaggaggatgctgagttcctcatgactggaccagtgagtgtccactccctggtccctggcgagagaggcgggacccccacgccctcctggcgctctttgcagagatgttcctcaggcccaatccgggatttgggatgtctgtgcgtgctgtggagcagagagtttgcaacatgtaagtgccgtgcgtgaggaagagtaa

SEQ ID NO: 109979 - DNA, 30 bp, Homo sapiens
  chr4:39638547-39638577
  hyper
acagaaactgaaactcgggaaacccctgaa

SEQ ID NO: 109980 - DNA, 351 bp, Homo sapiens
  chr4:39638991-39639342
  hyper
gaaaaaatatctcaacggcaaacactggagaaaagattcgttaaggggttcatgttataccacaaggacatacccttcaaggaaataatctaaactcataactcttcctgggtttgataaggagcaattaactatcacgtactgttgttctttcttgctgttaaccactgaaacacctcaattaatgagttctcgggggtgaagcggtgttcttaaacaccacgttggaaaaaaaaaaaaagttaggacaaaaaggtttggttttctggtcgcagtgctgtcgacggccgcggagagcggcaagttcggagcaggctacactaaaggaatctgcgcggccagccaccctaa

SEQ ID NO: 109981 - DNA, 127 bp, Homo sapiens
  chr4:39639611-39639738
  hyper
tgaaaacatcctaccgactctctacagctagcaaaccatctcggctaaaatcctggcacatataaacagccactttggtgaagtctgcctttaaacagcaacacgggacttcgggtagagccggtaa

SEQ ID NO: 109982 - DNA, 30 bp, Homo sapiens; identical to SEQ ID NO: 40428
  chr4:39640543-39640573
  hyper

SEQ ID NO: 109983 - DNA, 75 bp, Homo sapiens
  chr4:39699543-39699618
  hyper
aggagcggaggcgccgggaagggccgggggggccggctagggccggccagcttggaagccgcaccctcgcggccc

SEQ ID NO: 109984 - DNA, 233 bp, Homo sapiens
  chr4:39978125-39978358
  hyper
agcgatcttcccgtcggcactcacgacgccacagagggcagtggcaggcttgggctgcgcggtgaagtccatcctgggggacaacttttggttcacagtcctctaccggcctctatcggtcagaaaaccaaagttcagcgggaaaggggcgactttgtaacctcttttttcatttcaaatctctctaatctggaaaaggccctgtctccccagaggccggggacccggcagcg

SEQ ID NO: 109985 - DNA, 13 bp, Homo sapiens
  chr4:39979357-39979370
  hyper
cgcttgtgtccgt

SEQ ID NO: 109986 - DNA, 30 bp, Homo sapiens
  chr4:39979773-39979803
  hyper
tttatctttcgcagcggcgatgagctggtg

SEQ ID NO: 109987 - DNA, 30 bp, Homo sapiens; identical to SEQ ID NO: 40431
  chr4:40057226-40057256
  hyper

SEQ ID NO: 109988 - DNA, 30 bp, Homo sapiens; identical to SEQ ID NO: 40432
  chr4:40057544-40057574
  hyper

SEQ ID NO: 109989 - DNA, 30 bp, Homo sapiens
  chr4:40058065-40058095
  hyper
cagaacccgacactcgaagaagggcttgct

SEQ ID NO: 109990 - DNA, 434 bp, Homo sapiens
  chr4:40058591-40059025
  hyper
cgttgtgcgttcgacgacgcggcaccggcttcgacgccctctgcccgctccagaagcaggtaaaggcggcgggtgggaggcagggaggcgggtccaaggtgagggccctggaggttaggggtcccggggctccgagccgaagcggagggcctgaagcagcggcgggcggcgcggcgaatgaacccccaagccctgaatgtggggcccggcgcgggccgcctccgatctgacccgcgggcccggctgcccggacggaagggaagtgaggcgtcggcgagaggcgggccctggcgctcagcccgaggccgggcgaaggcgggggccgcggccgcttccttggcctccgagtgcctggcgggcctccaggccccagacacacccctctcgaccccccgaggtttcctcccagatctgttcccgccgggacctgacct

SEQ ID NO: 109991 - DNA, 30 bp, Homo sapiens
  chr4:40059469-40059499
  hyper
gctcttcctttcggcggcagtctttgtaac

SEQ ID NO: 109992 - DNA, 30 bp, Homo sapiens
  chr4:40319161-40319191
  hyper
cgttcttcactaagcgtttgcagaaggtgc

SEQ ID NO: 109993 - DNA, 30 bp, Homo sapiens; identical to SEQ ID NO: 40433
  chr4:40569239-40569269
  hyper

SEQ ID NO: 109994 - DNA, 54 bp, Homo sapiens; identical to SEQ ID NO: 40434
  chr4:40631724-40631778
  hyper

SEQ ID NO: 109995 - DNA, 336 bp, Homo sapiens; identical to SEQ ID NO: 40435
  chr4:40632133-40632469
  hyper

SEQ ID NO: 109996 - DNA, 745 bp, Homo sapiens
  chr4:40751828-40752573
  hyper
gaaacaggtgtctccgcgcgctgggggaagagcgactctcccggcaacaggtagcacccgccaaatcccgcgggaacggccctcgcgccgcgccccctgccccacctccgctcgcggttgccatgaagacccggtccgggagcagtcgactgccggagactcgggaggctgagctttcctcggcctgagccagccagaccccgggcaccgcgctcacccctcttcgccgccacgtccgcgaaggcctcacgcgcgaggccaggcgaggccccgaggcgcccaccacttcacgacaccggagcgaaccgggcgccagaggctgcgacccccctgccccgaatcctgccggtgggagtggctgcatttgaaccaaacggccttcgcgggcagcagccgtcgccccgcagtcccggggctcccaagggcctgtgaccgacgccgccctccgcgtcttcgtccccgaagccccgggaaccatccgccctcggggtaagggaggagtcgggggagccggtgactgggctgtggggacgcggacggggctccgggggcagctctgcccccagactggcttgagggaagccgtcggtctccttggggctcttctccctccgccgctgcacccctcctcgcttttttttttttttttgagcgtcccaggctcgaagtctgggacactcagatgggacgggaaatgctccctcttagtctttaaggccacaacgaagggggccacccacagggg

SEQ ID NO: 109997 - DNA, 31 bp, Homo sapiens; identical to SEQ ID NO: 40438
  chr4:41003481-41003512
  hyper

SEQ ID NO: 109998 - DNA, 31 bp, Homo sapiens; identical to SEQ ID NO: 3253
  chr4:41168397-41168428
  hyper

SEQ ID NO: 109999 - DNA, 139 bp, Homo sapiens; identical to SEQ ID NO: 3254
  chr4:41216264-41216403
  hyper

SEQ ID NO: 110000 - DNA, 30 bp, Homo sapiens
  chr4:41216840-41216870
  hyper
acccaaaggcaggacgtgcagtgcagcccg

SEQ ID NO: 110001 - DNA, 316 bp, Homo sapiens; identical to SEQ ID NO: 3255
  chr4:41218382-41218698
  hyper

SEQ ID NO: 110002 - DNA, 78 bp, Homo sapiens
  chr4:41258710-41258788
  hyper
ggaacacccaccaacaaatcccgtctccacaaccaccagattatctcaccggcgagtgagactgcaaggtttgggggc

SEQ ID NO: 110003 - DNA, 788 bp, Homo sapiens; identical to SEQ ID NO: 3257
  chr4:41259085-41259873
  hyper

SEQ ID NO: 110004 - DNA, 519 bp, Homo sapiens
  chr4:41362243-41362762
  hyper
tgtacttcccggcgccgggccaggggctgccccgccttgcccctacctctgcggccaggaaggactgcaggtgctgcgcggccagtgcccgcgcgtcctactgctccggtgccgcagcgcccgctcccccgggcccgggtgcgccccactgggcgcgcgtctcccatatgatgccagacccatccgcccgcccctcagcagccggcggggcgcagggacgtgcggggcggccagcggattccctctatcgggccgggtgtgaacgggagggagacacgcagcgctcgctccgggttatttttagtccgtagctgtgctccccctccccgggggcggagcggccctcgaaggtggggaggagaagaagctcccggcgcctccgcgctcgctcccgcgggtcactcacggcgcgttggagcccgggcggcgccgggaacagctgccgcggcgtcctctagcagcgcgcggctctcccgggacctgcgccggccgggggcggggagaggcggggaggggagg

SEQ ID NO: 110005 - DNA, 1058 bp, Homo sapiens; identical to SEQ ID NO: 40445
  chr4:41362780-41363838
  hyper

SEQ ID NO: 110006 - DNA, 385 bp, Homo sapiens
  chr4:41746748-41747133
  hyper
ctctgcagccagttacgtggactgcaattgaccccaatccaaagcagtgccaaaaagttcagtaaaagctggtggaagaagaaaatgccgacggggtaggcgggagcgagggggaaaaaaagagttgcgaaacatgagacacattttgcagagtttgcagatgaaaaggcatctcatggatagggcatctttcagggccgaacggctgcaaagattcggggttgggagttgcaactgtgtggggttccgatgcgctaatggcgggatggtgttcagcgaggtgggacaggcaagggggtgcgagaaagtcactccggccgccgggacagtctgagcaagtcgtcgccgcagtgacccgaacccaaggacacgataggaagggggg

SEQ ID NO: 110007 - DNA, 32 bp, Homo sapiens
  chr4:41747504-41747536
  hyper
gccccgcgtccaggccgcgctgctcacaaccc

SEQ ID NO: 110008 - DNA, 123 bp, Homo sapiens
  chr4:41747888-41748011
  hyper
cgctggcgaagggacccccaagcgaatccgggatggaggtgatggggccggggccgggagcccagccttgtccagggcccccagccgcagccaggcctccagctgccgccgctgccgctgccg

SEQ ID NO: 110009 - DNA, 165 bp, Homo sapiens
  chr4:41748143-41748308
  hyper
cgcagctgggggtggggttgggattgggacctgggcccccagtgctgtccgggtcagtgctcttggcctctttgctctcgtcgtccctggaagagtcagactttttgcccgaggagccgttcttggccgcggccgctgcggctgccgctgcgcgctcctgcttgc

SEQ ID NO: 110010 - DNA, 485 bp, Homo sapiens
  chr4:41749306-41749791
  hyper
caccccacacctccccggaccagtgcggcggagcggggtcggtttccaggcgcgcgtacctggactcgcgcctctgtgaggtcgatcttcagggccagctcctcccgagtgtagatgtcggggtagtgagtctccgcgaagaccctttccagctctttgagctgggcactggtgaaagtggtgcggatgcgccgctgcttgcgcttctcgttgaggccgccgtggtccgtgaagagtttgtaaggaactagagtatgacagaggagacagaaagtgagcaaatcagccggcagctcgccggccgtggagctagaatgtgaggactccaaggtcaggtcatacggcagccgctacctacacccgcgcgagagagttgccgagagaagctgcgggaagaaaccgaggaaatttgttatctgcggaaacctgggctcaaacttcgggcttggcggagtcctttctggcacaagcgcctttgggtggat

SEQ ID NO: 110011 - DNA, 408 bp, Homo sapiens
  chr4:41750096-41750504
  hyper
ttaattattttctaagctttacgtctcatcgcaaagtaaataaattatgcctatcattttggcagcttaagataattttgttggcggttcgggtgtgactaggatagtgtaaccctgtaagtgaattacccctccctgcaatcgcttctaacgtgataaattctttcatttgtgtaagcaaatttcgtttggtaaatactaaacacatttccattttcaaatgcaatcaaggcttcctatatacgggcggaaaggcggcttcctccgctgagaaagctgaaggtccttacctgcggcgtacggactgctctggtggtccctgagggtgcccaggctgcaggatcccggcgtgagggaagggcagccggacgtggccccaaaagtggtccttatcgggttatactggaa

SEQ ID NO: 110012 - DNA, 30 bp, Homo sapiens
  chr4:41750985-41751015
  hyper
aataccacaccattacgcaccgagcccctg

SEQ ID NO: 110013 - DNA, 30 bp, Homo sapiens
  chr4:41751251-41751281
  hyper
tgtaagagtgttacacgctcaatttaacaa

SEQ ID NO: 110014 - DNA, 396 bp, Homo sapiens
  chr4:41751610-41752006
  hyper
gtctgtttgcattagcgcaagccttggttggtttgagtttctgtgaggttgttcgttttaattacaccataactggcaagcgagcatgaagtgtacccaaatgtatctcctctttcatctctttcgggcgctctccctctttctcgcctctttttttttttcaggtgcccacaatcctccacagacccggggattgtgtctgtttgccttttaggtttgcggactgtagtgagggaaattcttgccatgtaaatgcccaggcaagggctccaggtcgggcacctttcttgtccgattcctcaggcttttgggtgctggcagcgaggcacagacaaaggagcgagcagtgatttgtggacttcagtggccccatgatttaagcggagggtaattttc

SEQ ID NO: 110015 - DNA, 1690 bp, Homo sapiens
  chr4:41752226-41753916
  hyper
gtctttataggggcatttaggcgttcagtgtttgccaaactaagtggtttaattcgatgctagtgccggggagtggatgggctcccgctctcccctgccaccgtgttttattgcgcactaaactgccgcggacgcagtaatggattaaacggggacagcggtcccccagccttgtgcttctttgcagggtgagtttcaggctcgtttcaggtggttgcaaatcctcggggcgtgaggaagcgctaaagtcgggagtgcagggagccggacctaccgaggatcctggtgatagttttatggggagggctgatagttttattgcagttgtatgttgtacaatgcgtatttgataaagaagggcccttggtgaccagtgtgcacttttttgtgcacgggggtgaaatgaaaataaatgtatacaaggttttactgcggcgggaaacaaattgcaacgctctaaatggtttttctttatggtcaccagacaagaggagaaaagggatgcaaacatctgtcttcagtcccctaaacctaaaggccagcaaagacggatgcgaatccaagtgctattacagcggagatttgtctttatttatcccgctctcatgaatatgaatttgcatttgggccgggaggtggctgtatccctttggactccacacatggaatttcccccacgctcatccccctccccaaccacttaagggaggtgggggataggttgtcaagcacaaggctgagatcgtccaagtttcttcgttccctcggatttcgggttgggggatgtgcttgctggttttctgaacgcaactctgccgccgaggcctgcactcaggagatgtggatgtagggagcacaggccggggtgtccaccgccagcccgctcctctgctgtagggtttaagcgcgtttccctgcagaagagagtgaccaggggtggtcaggaggtgatgaatttcggctccaaggcctatttttgacagtaaccaggttcacaccccgcttggcactagagccttactgcacctggggtgtgtctccgcgtggtgcagagcgcgcgctctactccggaagctacggccgggtgccgcgccaccgctgtgcgccctgggcctgatccctacgccctagtcgagtgcagggcagggcaatttcgccgtgggtcctagtttgctgacagttcccaggcccctttagcttttggggaggaggcgagactaggacctaaaaagtgctgggagctcggagtagaggggttcatgttgccagtttctgaggattgctcttaggtgaagatgtggaacttggaaatttaggtggtgcacagaggcacttcctgagcgaaagggagtgttggggtggggagttcagtgggcacctcaggggacctggatgctgacggggcatcagagggtgtcaaaaggagaagctaagggatctgggcgaggtctcagccgaagggcgctggcaagggaagtgcttggccggggagggtgcccggggggcggtcaaggggcaggcccggggctctgtccctcccggtcctggggtcccttcccgtcccgcggttccggaacgcctcgccagccctctctgggcgccccctgctgccgggcgccccctgctgccggccgccccgggtcggggtgccgtgagccttctcgcctttgtaccaggagacctttcagcg

SEQ ID NO: 110016 - DNA, 76 bp, Homo sapiens
  chr4:41754030-41754106
  hyper
cgtccctctgcccgtcttttgtggcccggggtcctgcttctgcttggagatgaaaggcgtgcggggctgggccagg

SEQ ID NO: 110017 - DNA, 53 bp, Homo sapiens
  chr4:41867462-41867515
  hyper
gctgcgcgcgaatcacgtctggcaggctgctccagcccgcagtccacacaccc

SEQ ID NO: 110018 - DNA, 50 bp, Homo sapiens
  chr4:41868094-41868144
  hyper
gcagcgagctaaccccgggacactcccaccccggccggctgaacaggttg

SEQ ID NO: 110019 - DNA, 155 bp, Homo sapiens; identical to SEQ ID NO: 40454
  chr4:41869044-41869199
  hyper

SEQ ID NO: 110020 - DNA, 333 bp, Homo sapiens
  chr4:41875454-41875787
  hyper
taggttgcggaaaggcgttcgcagggtggaggagcgggtagttggggaaccgggcgcgcctgatggggcgcaggaaggaaaaactgatcgacgcaatggcccccgccaccggccatttggggctttcaaacgccctaacgaggagtccgagcggccactgaaagcctccctgttcctgggcagggcagccagagtgccctcccctctcccttcccagcctcccggcggcgccaccattaacccggagccagacccaggcggaggccccggcgccgaggcccgcggaagcaagagacagccctgatagtcttctaaacccggtccagtttcgag

SEQ ID NO: 110021 - DNA, 230 bp, Homo sapiens
  chr4:41881201-41881431
  hyper
cgacaggaggctgcaggcacgtcctgcggctccggggcgaaggctagggaaggggatagagggaggtcgctgcggggagggggacagaggcaggcacagagtcctaaagagatttgagactcgcgctcctgcactttctatcccacgcgcccccatccgaggggacctcacccctgggaagactccaataaatgcaacccggcgccactcgattccgggataatttttaa

SEQ ID NO: 110022 - DNA, 30 bp, Homo sapiens
  chr4:41881813-41881843
  hyper
agccctgagtgaagacgtgatctcttgcac

SEQ ID NO: 110023 - DNA, 76 bp, Homo sapiens
  chr4:41882162-41882238
  hyper
cgccctgccgcggaaacccttcccgtggcctcgaactggtccccgacgactgcggggtacgcggggcccaaagcca

SEQ ID NO: 110024 - DNA, 61 bp, Homo sapiens
  chr4:41882651-41882712
  hyper
cgctctgagccaccgaacaaacttggccatgcccggaaaggattcccgtgctcagggaacc

SEQ ID NO: 110025 - DNA, 1372 bp, Homo sapiens
  chr4:41883149-41884521
  hyper
ggtgagggggtccgcgcagcggcggaccccgcaccccggcccccaacggcgcctaggaagttgtcactcctctcatttaaagcctcagaaaaatgcattcatgagattgtttctttatttttcctttctgcccctctccgcattctttgcctatttgctttacggcttttcagccttgttgaggccaagaaaagaaaccaggttcttttctcttgcgattggatccgtattcccagttagggcgccttttgatgtccccatttagcgcctttgactggtcagctgaatggggccgcctgcttttgtcctttcccacaagtcccttcagaaagatccctttaaacgcccggtacccgctgatggatccgttttcaaacggcgcggggacggcagtgccggaggccgcgtctccttagtaatcgcgcgggcagggctcggcaaggggtcgctgcaagggtcgcgctcacccgccccgggtttgggcgctgggggtggggaagggagagaaggttcgaacagttttgtctctcccgcgccccggctcccccagggtgctgcgcctccagccgccccgaggcgcttcccccggcgtccgcgcgctcctctccgcaggggtctcgcgcccacggtgccgcagccgcgcggctcagccgccctccgcacccgcgcctttccagcgcccgggttcccaaaccatcgctaaaggcggacggggggcgccaggagtaacggctgctccccggagaccccaccgagcccagcgcccgcccccgccccctgggcgccctgccccattttctccctttcccaactatcccagacccccagaagggccagaattttccagaactgtcccactccacccgcgcccagggcttctgcacattgcccttggcaggacgcgagccggtcgaggggcatttaggggtggccctgcacggccctcactgctgtcccttcttctccctccgttctccgggccagggtcctcggagaccccgttccgcggcaagtacccctcccccacccccggaggcgggtgcagtgcagggcgggggcggcggtcgcagcggctcagaagccgaccctccttgaacccgaagctgccctggcccgagtatccgcactggcctgggcccgagcgaggctgcaaccctgtgaaaccccctgcaaggcggaagcctccaaacccaaacgaccccgagggcgattccgccagaaatccaacgcgggcccaaataaagtccgaggcctttttgtcggaagcccgggaggtgcccggccaaggtgtcccctgcccggccaaggtgggggctcgaaccctgagcggccgcgccggctacttacgttgaaggtgcgcgcattccagacg

SEQ ID NO: 110026 - DNA, 30 bp, Homo sapiens; identical to SEQ ID NO: 40459
  chr4:41884967-41884997
  hyper

SEQ ID NO: 110027 - DNA, 30 bp, Homo sapiens
  chr4:41937378-41937408
  hyper
cggcctgtgtgtggcgcgaggcagggaagc

SEQ ID NO: 110028 - DNA, 178 bp, Homo sapiens; identical to SEQ ID NO: 3264
  chr4:41991960-41992138
  hyper

SEQ ID NO: 110029 - DNA, 30 bp, Homo sapiens; identical to SEQ ID NO: 40461
  chr4:41992606-41992636
  hyper

SEQ ID NO: 110030 - DNA, 30 bp, Homo sapiens
  chr4:41993088-41993118
  hyper
ggttactcacctccgcggttggaaattgcg

SEQ ID NO: 110031 - DNA, 180 bp, Homo sapiens
  chr4:41993655-41993835
  hyper
ccaggtgtggtggtgcgctcctgtagtccagctactcgggagactgaggcaggcagatcttttgagcccaatagttctaggctagccttggcaacatagtgagctgtctgtaaaaacataggtttgaaaaaacctgtaacatgttcgtgacctcctgaaagaagtcggaagttgcagtca

SEQ ID NO: 110032 - DNA, 30 bp, Homo sapiens; identical to SEQ ID NO: 40462
  chr4:42119644-42119674
  hyper

SEQ ID NO: 110033 - DNA, 450 bp, Homo sapiens; identical to SEQ ID NO: 3265
  chr4:42152961-42153411
  hyper

SEQ ID NO: 110034 - DNA, 41 bp, Homo sapiens; identical to SEQ ID NO: 3266
  chr4:42153591-42153632
  hyper

SEQ ID NO: 110035 - DNA, 1206 bp, Homo sapiens
  chr4:42153881-42155087
  hyper
ggcccggccgggcccgggggggtaggagctctgcgcctggaactgctgcggcggcggctcgctgctgctgatggagacggcggcgtgcggcgcgaagggcggcgggggcggcgggggcgcccgcacgtgcggcagctccaccagggtgggtcgctcgtagcgcttggccagcgccggtctcttgctggggaacgtcttgaggacgctgtaggggctgcgctgcttgtagattttggggacgctgggcccctcctctgccggctgcatctcttcctccatccggcgcctcggggccggtccctcggagcacgtcccctccccgccgggcgccgggctccgagggtgcctccgccgcctgcccgccgggtctgccctggtgcgcgcgtgtgggagggtgtgtgtctgtgccgtggccgccgccgccgccgcctgtcgctgaggctggcatcgccgagcccccgcgcggggggctgccgcccgagctcctgattgacaggctgcctcgccaatgcctggagggagaaaggaggtaaagagcaagtgtttagggtaatatctgctaatgataatgggggcggggcggggcctggcgccgcagccgcccgcggggtctgcctggcggctccgcgcctccgacggggagcgggggaagggggaaagcgaggacctggaggacgcccgggaactggtgaagaaggtggggatccgggatctggctacggcgagactttagagacccagatgtggactcgaggcttctgcggctgcgggcggggtccggcttccgaaacgagctcgtggcgccccctgcatgaccccaaactctcggggttgcacagaggaggggctagtcgttggggcggggtcgtcagagtacgtgtgtattacagcaagttcttctaccaatcgggaattgctctccgatccttctgaaaagaacctcttgaagatcttggcccgggtggtcgcgcggtgtttacggggctttggggtcctgctttccccgagcatcgcggcctctgagctcatgcggaacataaaagctcgcaaggcgtagaactttttcacgttttcatttgtttcccgtaggggccccgagaacgtgcatgacaccatgatttcccccccattataaagatgagaaaaccgaggctctgagaggttgaagggaattgcccaaagtcagacactcgggagtgtgcggct

SEQ ID NO: 110036 - DNA, 2289 bp, Homo sapiens; identical to SEQ ID NO: 40466
  chr4:42398814-42401103
  hyper

SEQ ID NO: 110037 - DNA, 1079 bp, Homo sapiens
  chr4:42657888-42658967
  hyper
agagtgggaatcagcgatgatggcaagatagatttctgaaaaacatgttattccaccctctgcaggattcaagtacaggtttatgggagaggacaaacaaaccttgggatatttacagtcttggctttgacgcgagcaaaatcaaataatatttacagagtgcctgccacatggcaggcaggatgttgagggctcctcggagacgatgaagagtctgggccctcggaaagcttacttgcttctaccccggagcatctgttgctcagtgttgacaaccatggccattcaagagctggccccaggtggagcaaagaaaacagcttccacctggctgaaaagtcagctcagctggccgaagtgagggtttcgggcaaaagggaaacacaaaaacgaaacctcagacgcgagccggtgggactccgctgcaggaggcagaattgcagaagctgtaatgcagggaacccactcggcacccgaccccgatgaaggctccccgcgcttcgagagccaagggactacggatcaaaggatcctgcagccggggaaaagcaaactcgcttcgctgggagctcagatagggggttgcaaaacggtgggcgccggaggcaggggcggcgggctggggatctgctgagtggaaatcgaactggtggggagggaggtgggcagggcgagtgagctcagtgactgggacctaatggtcacactgcggtgcaaagcacgcctcggggctcccgcggagaacacccattcgagggtactggagcctggaaagggtctgcgagtacactgggggcagcgcggggggaagggtcccctaggggccgggcgcgacagtcggactgccgccggggaagaggtaggatgcggtctcttccaggataaacacacacgctcacacacacactcgcttcccgaccccgggctagccccgagcctcggcggccccttaccttcggcgcgcgagcggatctccgacacggtcctccgcatggtgggcatcgcggcggcggctgcaggtgggtcctcagcccggactctgcacctgtcacggcgtggtacacgcgggagacccggct

SEQ ID NO: 110038 - DNA, 30 bp, Homo sapiens
  chr4:42659276-42659306
  hyper
gccccgccccgcttcggaccgtatcacgac

SEQ ID NO: 110039 - DNA, 139 bp, Homo sapiens
  chr4:42659534-42659673
  hyper
ccggcaggcgaaggcgaaagggtctgggactacaaggtttagctcccagccagagcaggaaaggaacgactgactgttcgccatctgggtgtaattctaacctctctgcacgcccagcccgactcgtggcctgagccgc

SEQ ID NO: 110040 - DNA, 30 bp, Homo sapiens; identical to SEQ ID NO: 3271
  chr4:43770052-43770082
  hyper

SEQ ID NO: 110041 - DNA, 260 bp, Homo sapiens
  chr4:44448454-44448714
  hyper
cccagctggcttttcgtttgtccaaatcgctctctagtcgttgtcttttcacttcataaacgccactgagaattgtgcccaccacagccccaccccactcccaatcccactcccaatccccaggttcagattatggtatttggtatagttcttgaactccacatagcccgctccggaagcgcactgcaaaacgcaccccagatgctttcccaaatctattccttcattctctcatttcagaaaatcgctctatttattca

SEQ ID NO: 110042 - DNA, 32 bp, Homo sapiens
  chr4:44449061-44449093
  hyper
aactggaggctcccgcgcggcagctgcaccaa

SEQ ID NO: 110043 - DNA, 198 bp, Homo sapiens
  chr4:44449371-44449569
  hyper
aagggggagtagagacggaaatatccgaatcggtgaaatgtaaatcgtgtctactgcataagggaatcgtgcagggagagccgctctctataaggagttaaccagcgcctgccccggacacccccgcggggcctccagcggggctcaaactggcggcggctcagcagggggcgaggggtgctgggaaacgccggggct

SEQ ID NO: 110044 - DNA, 90 bp, Homo sapiens; identical to SEQ ID NO: 3273
  chr4:44449652-44449742
  hyper

SEQ ID NO: 110045 - DNA, 205 bp, Homo sapiens; identical to SEQ ID NO: 3274
  chr4:44449971-44450176
  hyper

SEQ ID NO: 110046 - DNA, 373 bp, Homo sapiens
  chr4:44450741-44451114
  hyper
gagagaggagctccgccggtgcggcggcggcaatggagaggcaagaaggagctgctgctcctttggggcgagggcggggaagtgtgagagagacttgcgagaggctctagggctgctgctcggctctccgtggggagggcgggaggaggggccgaagcaaagaaaactcgccgccccggcagcttgcaagcgtgccgcgaggccggagcgccgacggtggcgctaactactcctggcagcacgggaggaggcactgacgtcaagccccggactgggacccgagcctcagctgtcatttaaagagataggctgcagccgcggctcccgggctccgacgctagggggcggggccgagagccgagcctgcaagagg

SEQ ID NO: 110047 - DNA, 63 bp, Homo sapiens
  chr4:44680329-44680392
  hyper
ctgtctacaccctgcgttttagggagtcaatcgaaagcctccactcacgtgaccactccacta

SEQ ID NO: 110048 - DNA, 208 bp, Homo sapiens
  chr4:44680669-44680877
  hyper
tgcgcacgcgctctcgcgccacgagccactggggccgcgcttctggtggccccggggccccggtccgcgccgacccttggggctgctccagagtcctgggctaccgacaggctctacagctccgcagaattcaaggtgactgccccctggaatctgatttagccaagttttcaaacgttggagtgccccatgcgatcttggacatgta

SEQ ID NO: 110049 - DNA, 219 bp, Homo sapiens
  chr4:44728535-44728754
  hyper
aacacccaaccacccgagagcgaccccagctgaccagtggagcgcgaatcccacggacccggatgcagataaaggcgcaggaaggaaccgcggcgtggctggcgggcgctgcgcatgcgcaccgcctttaggacgcctgaggtgagacgcgaggagttcggtccgagtgcggtgcggctgggcgctcttcttgcctggaagatcgcagtttctgggtca

SEQ ID NO: 110050 - DNA, 30 bp, Homo sapiens; identical to SEQ ID NO: 3276
  chr4:44833239-44833269
  hyper

SEQ ID NO: 110051 - DNA, 1528 bp, Homo sapiens; identical to SEQ ID NO: 40478
  chr4:46391144-46392672
  hyper

SEQ ID NO: 110052 - DNA, 935 bp, Homo sapiens; identical to SEQ ID NO: 40479
  chr4:46995371-46996306
  hyper

SEQ ID NO: 110053 - DNA, 255 bp, Homo sapiens
  chr4:47033393-47033648
  hyper
ccgtttacacatgctcgtaggatcccctgcgtggaaacagcagcttgtctctgactacccggaggacatggagcaccccaaataggaactttagagggattgaaatctgttgcctgttccactaggaatattgtttgcaaggcacaaggtgtcttttggtagtgagcgcgctctgcgcatgcgcaggtccattcgggaattactgcccagcagccgactaagttgcattccttgaatcttcgcagaaaagacaat

SEQ ID NO: 110054 - DNA, 1091 bp, Homo sapiens
  chr4:47033892-47034983
  hyper
tgctcattttgaatacggtccctacttcttccccttagcaccaatgaacccagcaacatgtcatacgtgaaagagacagtggacagattgctcaaaggatatgacattcgcttgcggccggacttcggaggtaacgcttcatcttttttcaacctgtaacccatccttagttctccttttctgtcaaagataaatgtcaaaaaaaaaaaaagaaaaggcatgtcattttcgtaagcgtgcactataccctgggcacacacacacacacacacacacacacacacaccccgggtccccagtctcaggtggatgaatcctcaggcggaggcgaccttctcccgggccgacacaccctctgcatagtcactgcatcacgcgtgtgcccacacctgttttcccaggcagtcccctgaaaggggtggtggggggagcagggagggagcccgttaagaatggagtaagggctgggaagcccccagaccctccccagcctgctgtcactgagagaatctgttcctaatgtggcccacctccccggcagggccccccgtcgacgttgggatgcggatcgatgtcgccagcatagacatggtctccgaagtgaatatggtgagtggcctcccgaggggcccggcggttcggcttacgcagatgggaaatggacaggtccctttgccctctgcgtttcattggcggtcacctcgcccctggcccctgaggtcccactccgcacccgctccccgctccggcacacacacccggtcgcccctggtttgtaatttcgacacacacgggctactgcggtgttccaggggaaacgtgctcggcactattttgggaaggacgagtgactgttgcgccgtggatctgctggggcggagtctgagcgttactttagctgggtttccctgcgtgtttggatgaggagggcaccatctgctggcagccgggcggcctgcactagggtccccggaccggtggtcggcagccatcacctccccaggcgcggtgctggcaatccccatggccctcgcagtccgcgagcccggatgcaccaaggccctgccaccgagagcacagtctgggtttca

SEQ ID NO: 110055 - DNA, 185 bp, Homo sapiens
  chr4:47465717-47465902
  hyper
ctaaagctacgactcgcccacgtgactctcgccggcggggaggggcgtggacccaagaagtccctgtgcgcttgcgcagagaccgaactaccgctttccccgtaaccagggagactgcagtttgcagtgatgtggctaagatacccttgtgctattaaaggcacatttacgtatctttcaacgca

SEQ ID NO: 110056 - DNA, 440 bp, Homo sapiens
  chr4:47487072-47487512
  hyper
aaccaaaccgtcaaccgcgagcaacctgtacttgggaggtgaaagtcagaggtgagattgtaagggctctgggtcactggggcatctgcgctgggcagaagggcagctcggtcaaacagctggagctgggagccggtcagttgccaggccctgccgctgctacgtcacggagggcggggcggtgggcgattggcggtgcactgcagctcgggctgctctgcagcctggcggagacgggaggaggagcggagggagaagtaggttgcgagctcagcacaggctccggcgctggctcccgcagctgagtttgggagatgtctaagtgattttttttttttcccggaaggcaaatggctggcgtggaagcacaacccgctttcactcttcgaatttgtgcttagctcttttcttgtaccttgcgactcgtgaccaacatgctg

SEQ ID NO: 110057 - DNA, 30 bp, Homo sapiens; identical to SEQ ID NO: 3282
  chr4:47569090-47569120
  hyper

SEQ ID NO: 110058 - DNA, 315 bp, Homo sapiens; identical to SEQ ID NO: 40484
  chr4:47838719-47839034
  hyper

SEQ ID NO: 110059 - DNA, 361 bp, Homo sapiens; identical to SEQ ID NO: 40485
  chr4:47839261-47839622
  hyper

SEQ ID NO: 110060 - DNA, 396 bp, Homo sapiens; identical to SEQ ID NO: 40486
  chr4:47839675-47840071
  hyper

SEQ ID NO: 110061 - DNA, 30 bp, Homo sapiens
  chr4:47916178-47916208
  hyper
tcggcctcggccaccggccacctggcgcca

SEQ ID NO: 110062 - DNA, 401 bp, Homo sapiens
  chr4:47916483-47916884
  hyper
cgaagacagaaagccggaggagaagtcgaaaccgcctcctcagcctctgcgggagcgtggtaggggaagagtcacagactgaccctgcgtctcccgccgggaaccaactgcagtggtacaccccacggaaagctacgtctccttaccgactgcgcacgcccccaacagactacaactcccagaagcccccgcccgcgttccggcgactgcgtggcagcacgggccgcttccttatccggtaaagtgcgggggttgggtgggagggaaaccccaagcgcctgcgctggcccgaacaggcctttgggaactacaactcccggcgtgctctggggctagggaggggtcgaaggtcataggggcgcgtggtggtggaggcgggcgggtccggagggtttcgtgac

SEQ ID NO: 110063 - DNA, 30 bp, Homo sapiens
  chr4:48018939-48018969
  hyper
ggtggcgaagagaccgggtgggcggtcccc

SEQ ID NO: 110064 - DNA, 30 bp, Homo sapiens
  chr4:48019332-48019362
  hyper
ggagttctgcgctgcgccctgcgctggctc

SEQ ID NO: 110065 - DNA, 30 bp, Homo sapiens; identical to SEQ ID NO: 3284
  chr4:48226149-48226179
  hyper

SEQ ID NO: 110066 - DNA, 461 bp, Homo sapiens; identical to SEQ ID NO: 40489
  chr4:48271820-48272281
  hyper

SEQ ID NO: 110067 - DNA, 30 bp, Homo sapiens
  chr4:48343075-48343105
  hyper
aactgtctctccaccgccgggctgagcgcc

SEQ ID NO: 110068 - DNA, 130 bp, Homo sapiens; identical to SEQ ID NO: 40490
  chr4:48485158-48485288
  hyper

SEQ ID NO: 110069 - DNA, 879 bp, Homo sapiens
  chr4:48485589-48486468
  hyper
cgacaacgtgaccctgctcttcgcccctctgctgcgggacaactacaccctggcgcccaatgccagcagcctgggccccggcacggacctcgccctcgcccctgcctccagcgccggccccggccctgggctcagcctcgggccgggtccgagcttcggcttcagccccggccccactccgaccccggagcccacgaccagcggcctcgcgggcggcgcggcgagccacggcccttccccgttccctcggccctgggcgccccacgcgctcccgttctgggacacgccgctgaaccacgggctgaacgtgttcgtgggcgccgccctgtgcatcaccatgctgggcctgggctgcacggtggacgtgaaccacttcggggcgcacgtccgtcggcccgtgggcgcgctgctggcagcgctctgccagttcggcctcctgccgctgctggccttcctgctggccctcgccttcaagctggacgaggtggccgccgtggcggtgctcctgtgtggctgctgtcccggcggcaatctctccaatcttatgtccctgctggttgacggcgacatgaacctcaggtacggatctgtctattccttgggcatctgtctcatcccagacgcgcgtttacggccgtgggctcacgacgaaggacagaggcagtggaggggttggaattaggcgtggaggaaggaggagaaaaggagaggaagttgatgacgccccggctttagaagtcaaggccgacctgcaggttgtgctgctaggggagcaagctagacggcgagggagctgctccaaggctgggattccatgcgcagcgcggcccttcagcagggtccctcgccgtcctccccgagcgtcggggtggcagcgca

SEQ ID NO: 110070 - DNA, 522 bp, Homo sapiens; identical to SEQ ID NO: 40492
  chr4:48492096-48492618
  hyper

SEQ ID NO: 110071 - DNA, 30 bp, Homo sapiens
  chr4:48781317-48781347
  hyper
ggcaatctacaggccgagtcagctcgcggg

SEQ ID NO: 110072 - DNA, 30 bp, Homo sapiens
  chr4:48782377-48782407
  hyper
ggaacagcagtcctcgccctccactggcct

SEQ ID NO: 110073 - DNA, 524 bp, Homo sapiens
  chr4:48833078-48833602
  hyper
cagtgcctccgggtcgcggtcattttgagcccctgtctggatgacttcttgcggctgttctacccctccccctccccgcggtaccttgcacttttctccctccctgccccctctcgagtccaccctccgggccttctgcccctgatcgcttggttttccttgcagtcgcctgctgctgtcgtcgggaggtgggtgaggtgacgcaaacagccccgttgttgccctccgcgtatcccctcaccacctttgcggccatccacgactttcgcaccttccgccattttcctgcctgtgagggtggacagatcgcgctcgggtctcggcctcctgagtgccggtgactgcgggaggcgacggagtgcttctgggggtgtgagctggggaagttcgtggtcacggatgcgtgtggggttgctgctcagtctgtaacggcaggtgggagacggacactgggtggaggatggagtgcggtaatcagcggttgtaggccgcttaggctttaatccagcgttgttttgtgtaaa

SEQ ID NO: 110074 - DNA, 257 bp, Homo sapiens
  chr4:48908454-48908711
  hyper
agcctactggagtccgctgccatccctggccagaagcagccagcgccaccccaagctccccagcccctcgcccgtgccggggccgccggggtccgagttaggggagagtggggggcggccaccgctgcaccgcgcggccttcgaaggactgccctgcggcgccgcgttcccccgaggccaccccctcccgccgtcaacactccccggggcgggggctcacctgtgtggtctgggtcgcctccgaggccgagtccctc

SEQ ID NO: 110075 - DNA, 532 bp, Homo sapiens
  chr4:48988033-48988565
  hyper
gcagcgctgcatccccggggttgcttcgggttcgggcccaatagcagagtcagagccgagacgcatgtcccctgcaccggccaagggtgccgctggggctcgcgccaaggaggcaaaggcggggaccagaggcgccggaggcggcgcaacgcgcacaggtggcgcccggcctggccaggctctggcaggcgaggctgggtgtggtcgtgaaggggcgggcggaccggccccacactgcctcggttcggcaagtgggtcagttggctggggctcacttggcaacgggacgcgggaacgaggggcgcggacgcaggcccgggaggacgcggcggcgggaacctgggggcgcagggctagggcagcgggcccgacccgcacggctttcctggaaagcgctgcccctcgccgcggcgatgccctcgctgtggagagaaatcctcttggagtcgctgctgggtaagccgaagcccctcgccgcgagttcgcgggtgccagctccccgggccatgtccagagccgtggagccaggcca

SEQ ID NO: 110076 - DNA, 30 bp, Homo sapiens
  chr4:52708380-52708410
  hyper
ttcttagatgccgccgggggtctttcacgg

SEQ ID NO: 110077 - DNA, 30 bp, Homo sapiens
  chr4:52708694-52708724
  hyper
tggaaattaagacgcggcaattcttaatcc

SEQ ID NO: 110078 - DNA, 30 bp, Homo sapiens
  chr4:52709341-52709371
  hyper
gctggtggggggaccgcgaggcgagcgcgg

SEQ ID NO: 110079 - DNA, 294 bp, Homo sapiens; identical to SEQ ID NO: 40495
  chr4:52710792-52711086
  hyper

SEQ ID NO: 110080 - DNA, 207 bp, Homo sapiens
  chr4:52904505-52904712
  hyper
cgccctggcggggactgggggcacccgctgctcacaccctcccctccccagcccgcatccctgacgacccgcatcccagccctgcgggctcaggctctgcggcggcccctgcacctaggaccttggcctggggcgcgttgtattgcacaggggccagaaggggcctatggggattccgctccaccccgggccgcctgcagattcctc

SEQ ID NO: 110081 - DNA, 973 bp, Homo sapiens
  chr4:52917367-52918340
  hyper
taacttctgcttttctggacacgcgtgggcacccagaaccccgaatggggaggaatgctgtagacgccctgctgccctccagcccgcgcggctgcgcgtctcagtccacccctggggcgcgcggctgtcacccagggcggggcggcgcgggcgttgccacgacgcgggccgcgcgcgtccctggcagccaacccgtccacgtcaaggtttgtttaataatcgccagggtatctatggccgggctcaggcggctgctggggagccaggagaccgcgcgggacggcggatgaggcgcggcggctgcggcccagggcacctcccctctggcttcccgaacccggccaggtccgacccgagggggaggatggaaacacctgccgcgctctgagccccccagaagagaacacccttcccgccatatcaccccacggtcctgcggaggccaccgcctggtccccccaagtctccatcgcgcagcgtggggccgagaggaatagtgagcgatggcggaaaacctgaaaagactggtctcaaacgaaactttacgaacgttgcaggaaaagctagacttctggctgaaggagtacaacgtgagtctgggtgaaaaacccccggggttcgccctcccataggttccagcacagcccttgtcggggatttcttagggctggagttggtggccactttgcaaagcctccgcggttgcgattcctaaccaggatctcagctttcgaccgggatcgctggggaaggaaggacatgtgtgtacatgcccttgtctcagagcttcgggaggcggcgcgcaggcggcctgcggagcgcagcactaggctgcggagactggagagtgcttccaatcagtggtaactaaggacgccggcgacctagcaatagggaagccctgctgtccgcggctggtctggtcatgcctgccactctttcccatcccccttgccagcgcaatccacaccgc

SEQ ID NO: 110082 - DNA, 30 bp, Homo sapiens
  chr4:53525388-53525418
  hyper
gctggcggggaggccgggcggcagcgcggc

SEQ ID NO: 110083 - DNA, 35 bp, Homo sapiens
  chr4:53578476-53578511
  hyper
gcggccctccaccccgccccgctcaggatcttccc

SEQ ID NO: 110084 - DNA, 30 bp, Homo sapiens; identical to SEQ ID NO: 40499
  chr4:53588580-53588610
  hyper

SEQ ID NO: 110085 - DNA, 749 bp, Homo sapiens
  chr4:53617147-53617896
  hyper
cctggagcccaaggtcggccggggttgggttcctgtcgccgcacgcgtggcccgcccgaaacccgctacaaagtagcggcgtgtctgccctagggaggcaaagcgcaaacttgttaccgcgccgggacctgccccgggattctcccagcggctccgcaggacgcagcgcctgtgcctcgcgcggccctgggacgggcacggccgtccgccccctgggccgccgagggctgctttacccctccgttctggccgcgggcagcagaggagctcggggcgggcaaagctcgaggggacacggggcgagcccagaccctgcctgggagccctccccgccggagaccaaagggcagaaacgcactcacagtgcaactccgagggataaactggccgacgatcgccgccaggccagaagaccaagaagaaggctcgcggcgggaactgaagtgagcggggacacacgagggctgggaagatcctgggttggggcggagcggggctgggaagatcctgggttggggcggggcggggcaccgcagagcggacagccggattcaggcaccaggaacccaccggtcccactggccaggtgctccgagctgggtgattttctcccgctcaagactaggaacatacctgcgctttcggcgcagggaagactctgggcgagggcggggctgggaggagggccgcggggcaggcagccaatcccaggaaacttcgggacgagggcaggacgggggctggacggg

SEQ ID NO: 110086 - DNA, 910 bp, Homo sapiens; identical to SEQ ID NO: 3290
  chr4:53728016-53728926
  hyper

SEQ ID NO: 110087 - DNA, 171 bp, Homo sapiens
  chr4:54244102-54244273
  hyper
ctgtctctgtctctcgggttctctcaggcctcccctcttggccctcaaacggccggcgtccctggcctctcgcgccgccgcttcgggcctctggttgggagtcctgtccggcctgacttaggccgagcgcggcgtgcgcgtgcccccagtccccgcggcggtctcccgcct

SEQ ID NO: 110088 - DNA, 30 bp, Homo sapiens
  chr4:54244534-54244564
  hyper
tgctgtacaactaacgtcttgtttcttgat

SEQ ID NO: 110089 - DNA, 146 bp, Homo sapiens
  chr4:54774733-54774879
  hyper
ccacttttttggggtcggcaccgaacaaccatcattaaatggtttctggcgcaaagtggcaggcttgggtaagctgaaatgtttatgacaccaaaataaagatgttccacactgctgaaaccggggagtcacgcagagaacaactg

SEQ ID NO: 110090 - DNA, 30 bp, Homo sapiens
  chr4:54775126-54775156
  hyper
aataagcagtgtgctcgtaaaagtcacttt

SEQ ID NO: 110091 - DNA, 66 bp, Homo sapiens
  chr4:54930697-54930763
  hyper
atccgcccagaggccgacacctccacaagcacagacgccgctgccgccgccgcagcagcagcaact

SEQ ID NO: 110092 - DNA, 176 bp, Homo sapiens
  chr4:54931049-54931225
  hyper
tggaggccgcgacccgcgactccgacaacgcagcttggaatgtccagtgggacatgcagttccccaaagtcatctctaaccaaaacaaacaactgaaaagaaaagccctggctggaatagacacatttttgtgcgtgtcattgccagtttatctaataatcgcatctcgcttttcc

SEQ ID NO: 110093 - DNA, 30 bp, Homo sapiens
  chr4:54957539-54957569
  hyper
aggggccgggcacacgcagacacactcctg

SEQ ID NO: 110094 - DNA, 30 bp, Homo sapiens
  chr4:54957965-54957995
  hyper
agtacacttatgctcgcgctcatgcacact

SEQ ID NO: 110095 - DNA, 30 bp, Homo sapiens; identical to SEQ ID NO: 40504
  chr4:54958526-54958556
  hyper

SEQ ID NO: 110096 - DNA, 88 bp, Homo sapiens
  chr4:54961837-54961925
  hyper
caacgcttggcttcacgtttgcaagttaaacgggcagaaacccggctgaaactcccacgccagacgccagggacgtttccctccgccc

SEQ ID NO: 110097 - DNA, 1641 bp, Homo sapiens
  chr4:54965612-54967253
  hyper
gaaacaaggaagggtcgttggtctgagtggccccaggagggccccaagtacaaagacacttcagaccttgtcgaacatcagcatgaaaagcttgacggtttcttagctgggaggcctcacagttctgcgccggacagtcctgaactaaccacctgaatgacctctgccaagtccaaaagctgtggacaggggtaggtgtaaccgtggccagagctgcgctcagggactggacgactgccagtccgtcgcccgcacaatcctgctccaaaccgcaggcctcacacttcaccgcgccgcagccacccctaccacagaggagctggaaacactgagcattcctattaaataagcctccaagtccccacctggtacgctttgcggtggggcgtggggaagagttgggctgcggccagggtagcgagagggggtgggatggaggatgcagcgctgtgatttctcagtaaagcgtggagaaagagggggaggaggccggcctccccgggaaattaacaaaacctacactttgcaaagtctcccccatccccctcccccgagttcttccccgccgcgcgcccgcccctcctcgcggcttctgttgtgactcgggcagcctatcccgagggtgcggagctgccgaggagcctgagccgagcggtactccgcagcatcacgtgccagggtggggggctataaaatacccgagccggggcgccgggcgggggacgtgaggaccagccctctccggggacccctttgttcccagcccagacgccaacacctctgcgtccccaagggcttgactgcccgtgtctgcgcggctcccagggcagagcttagaacactagaggagaggggtcgccgcgaactgccggggcttccagccacccacccctctcgacatgtcgcgctccttctatgtcgactcgctcatcatcaaggacacctcacggcctgcgccctcgctgcctgaaccgcaccccgggccggatttcttcatcccgcttggcatgccgcccccattggtgatgtccgtgtccggccccggctgcccgtcccgcaagagcggcgcgttctgcgtgtgccctctctgcgtcacttcgcacctgcactcctctcgggggtctgtgggcgccggcagcgggggcgcaggggccggggttaccggggccggaggcagtggggtggcaggggccgcaggggcactgcctctgcttaagggccagttctcttcggctcctggggacgcgcagttttgcccgcgggtgaaccatgcgcatcatcaccaccacccgccgcagcaccaccatcaccatcatcagccccagcagcctggctcggccgcggcggcggcagcagcagcagcggcggcggcggccgcggcggccttggggcacccgcagcaccacgcacctgtctgcaccgccaccacctacaacgtggcggacccgcggagattccactgcctcaccatgggtagggcggggtcttggggcacctgcgctccgcgcctttcgcgctcctggagcaaactttccacctccagtggaggaagtgggagcccggggacagggtgaagagagaggacgggcttttagtgtaaccgtagagtcagccacagaagttccacgaaagtggaagtta

SEQ ID NO: 110098 - DNA, 421 bp, Homo sapiens
  chr4:54967452-54967873
  hyper
ttttggctaagcctgcgcgcttctccgcttggctcaaagggaggcgatcagatagtgcaagcccccatccctctttaatcctgtgacttcgcatcctgcgcatcgaagacctttatttgctttgcacgtctcttttcttccccgctaagcaaccacgtgccttgaaatgggaaagggatacagatgttcggctgggcttccccgggtgggtccctgaaatgcgtcctggttagcacatggggtgggagcaccttgcccgagccttacctctctaccctctcttcgccggtccgcaggaggctctgacgccagccaggtacccaatggcaagaggatgaggacggcgttcactagcacgcaactcctggagctggagagagaattctcttccaacatgtacctgtctcgactccggaggatt

SEQ ID NO: 110099 - DNA, 17 bp, Homo sapiens
  chr4:54969755-54969772
  hyper
tctttagcgcgcgcgcg

SEQ ID NO: 110100 - DNA, 616 bp, Homo sapiens
  chr4:54969831-54970447
  hyper
gaaggaaaatccctcttcgttccgtcaagggacatagggaggagggcccgcactgtgtgaggctgaaaagggagctgccggcgctttgtgcaatgtgctgagctctgtcctgcgcagaggtcccagacagccggctcactactgcctggcctgggaagctcaggcctctggatctctttcctcctgtctctcacgcgcagagctccgggctcttcgccctgcccgccacgaaagggaggaggcgcaggccggctgcctttccaaaagattctgtctcccttcttcccaagaagcaggcctctccgcgcgcgagaacagaggtgggaggacgggagtttgcaggcgcaaagaacaggagtttaagcagactatttccaccaggggaaataagaagcacaaagagcgcctgctgcagctctttgcgctcttgcccaaagctaagcttcctctgggctgtggggagactcctctggtccccgttccatctacccagcccggcccctctggggctcagcgcttgggtttagccctcccctatgtccatgactagccccgatcacagtctcttaagcctctcccggcccccggctcccaggccctgcggagccaagcactt

SEQ ID NO: 110101 - DNA, 40 bp, Homo sapiens
  chr4:54975351-54975391
  hyper
agggcctggatggcccgaggcctccaagatatcagacgga

SEQ ID NO: 110102 - DNA, 56 bp, Homo sapiens
  chr4:54975875-54975931
  hyper
ttgccacctgaacaacgtcgcctctgcccacgtggaaagcctcgcttgtctggcag

SEQ ID NO: 110103 - DNA, 125 bp, Homo sapiens; identical to SEQ ID NO: 40509
  chr4:54975990-54976115
  hyper

SEQ ID NO: 110104 - DNA, 1 bp, Homo sapiens
  chr4:54976170-54976171
  hyper
c

SEQ ID NO: 110105 - DNA, 30 bp, Homo sapiens; identical to SEQ ID NO: 40511
  chr4:55083828-55083858
  hyper

SEQ ID NO: 110106 - DNA, 809 bp, Homo sapiens
  chr4:55093023-55093832
  hyper
acactgggagagcgcggcaagaactagccccaccttcccccgacgccccggactgactgccgggcgcagacccgacttctcccgaaccagcctcggaccagccttagaaggcggaaaacaggattcaaacccgcctatgagcagtggtaggggcgggggctgtgggggcaggactcggtttaaggaaccaaccgcctcggttcgagggcctcctgtccggaggttgctcctgaccactgggtttattttgcttttgcagaggaggcagatgttgacctctcttctttgcacagtctctccgcaaaattttcccccaaccatttgctttcttgcgccaccccccaccggggcactatccctggagtcagctcctcaggcctttaaaccttccagaatgtcacacatggaaacctttagcaaatgtttgttaatgatcataacaaaggcatcattcaaattaggcaggtaattactaccagaaggacaactgggtgctcgcttgctcatccattgctttctgctttaaactcccgaggagtcgctgcctggagacactcccgcccggactgcttctcgggccccattaaacggctctgaaatgaactgtgaagttaccatttgtgggcggagagcgctggggccctgcggacggaagaccctggcttgaccggactaacagtgtcgccgaagcaaagcagcccctctgggtaggctgtctgtctcgcctcctaccctctggggcaactagcctaaaaacccggttctcaacttaacagcatgtggcccagcacccgcttttgccttttatt

SEQ ID NO: 110107 - DNA, 205 bp, Homo sapiens; identical to SEQ ID NO: 40514
  chr4:55093888-55094093
  hyper

SEQ ID NO: 110108 - DNA, 456 bp, Homo sapiens
  chr4:55094319-55094775
  hyper
agcgatgaaggtgaacgcgctcccctcccccgctgtcgctgggaagccccactctgcccaggtctggttcctggagcatcagcgccccctttccctcgccggcaggatcgtttcctcccgacactggcctctcgccttgggcgcagggtttggggctcagctgtcaattccaaggaattcgtagggttcgacccacgcggcgggagggaacggagggagaatcaaaaggcatcctcccccacgacgcggaggcggtggtacgattcctcaaacgcccaagcttgagctttttttgtatgcgagatagaagccagggcaacctcgcccagataaccccgaaaacaaaggcacgaccagataagtgacttcaagggagtaaaggtcgttctatcggagaacgttccaaacctacacagaccctcttttctttgtaccgtatttcagaccacccagtct

SEQ ID NO: 110109 - DNA, 32 bp, Homo sapiens; identical to SEQ ID NO: 3295
  chr4:55095429-55095461
  hyper

SEQ ID NO: 110110 - DNA, 440 bp, Homo sapiens
  chr4:55096170-55096610
  hyper
gaggcgggctgggctcggctggagaccggacctcggtgttggcctacagcacagggagccggccgaatgcgcgtgattactggacggcgctgctctgggagagagtcggggccagatttggcgcggcggtgaggcggctgcgggacaagcagaggcgcgcgggcgtgggcaagggtttggggcgctctggagcggtttgttgggtcagtgaggtgccagggagagcgggtgcctgccgggcagtgtgctcgggttgcacgccctagcgcgggggcgacagcggcggcgcgggcgggcggtctggaataatgacaaacacatttggccctgagtgaagaagtcgtcgtcgcctcgcattccagcaactgggatttgaggaatttcgaaccgcacaccaaggggccctcattgtgctccgtggcccccgcccccgcctgtct

SEQ ID NO: 110111 - DNA, 30 bp, Homo sapiens
  chr4:55097184-55097214
  hyper
gtgtgcgagagctgccgatggcctggcctc

SEQ ID NO: 110112 - DNA, 30 bp, Homo sapiens
  chr4:55097657-55097687
  hyper
gcgcacctccccagccgccgcgctgtccca

SEQ ID NO: 110113 - DNA, 151 bp, Homo sapiens
  chr4:55097941-55098092
  hyper
cccgtcgttagcccccggtgccctggctcttgtttaaatccttagatcgagaaggacttgaaggagatcccaggctcccagctctgcgcccctgggccagtttcctctcgggacgcggactgaggagggatgcagggggaggggcattggg

SEQ ID NO: 110114 - DNA, 487 bp, Homo sapiens
  chr4:55098209-55098696
  hyper
cgccttcctgcagaccccacagggaagtactccctttgacctccggggagctgcgaccaggttatacgttgctggtggaaaagtgacaattctaggaaaagagctaaaagccggatcggtgaccgaaaggtgtgggtctcagggttccccgggtctaactcgccgggtccaaccgcagcatcagccttggggcggcagataatctttcggtctcgcctggggcgcaagatgcaggatcgggggcaaatggcttctcccaacttccccctaattcgggttctgccagatggttgtcgtttgctgaagtggctcggcggcatttccttttgttttaaactgatcaatgagcgaacctgggatgggctgaaaaagtagattgtaggagggaataatgggaaacccgacttggggcgcctccttccctgcctcctactgcagtttctcggcccccgcgaaaggggagcgacaagcgcgggtgggcgcggac

SEQ ID NO: 110115 - DNA, 1294 bp, Homo sapiens
  chr4:55099050-55100344
  hyper
ccaggaacggttcttaaatgccgagagggcgcatgctagctctcctcagcattcccggtgagccgctacccacggccgtgcggctctcgtgcccataggaggcgctggcgagctcctgtaaccctaaacccctcggcccctttccccccacccgcccggattctcttcccgctctcccccctctctccacacccgcccggccccctctcgggtctcagttgaaaacaatgcaaacgcagagcgtcgtgcctggggcgcagcggcctctgcagctctgaggttcagagcgcggcgcgcaggggcgcaggggcgcaggtccccggagcggctgggcatcgccgccaaccccgggacaaccaagccgccgaggacttggtggaggtgggagggagagcggaccgcgcagtgttcctctgggtcccggggtcagaagccggacagtggcgggggctggacagtccgagcgcagagcctcccgggcgaagtctgcgcgcagcactcccggctgcgctgtcggggaccaggagcctgggctgcgggcgagctagctggcgagccgggtaagattcgcggggctgtcgcgccctctagtgggctccggggacgcatcccgctttccccagccccgggcggtcggcgccgctatctcagtggagcgcagcgctggaaccccgggggcccggagcggaggctaatctgggtcacctttcccctcctccgggcagccagtggactcctcgcaggctctgtgtgggcccgggaggcgccgggtggacgagagggggccgaggtctctgggtttggattgagaatgggacgtccttgtaattcaatgtgggagaagcaggggagtgtggaggaggacgggtcccgtgcgttcttggggggcaggcgccgtcttctgcgttccagcccctcgccagctcccttgccccgcgggcggcctgttgctgtttgtttgttttacgaccctgcgttattgtgcaacggtaacagtcgtttccaatcagctgcgcggccgtcgcggccctcgccaggctggtttatgggggcggcggtggcgcgcggacagataggacagcgcggcccgggaacggcgtcgaggtccaggcggtccccctgccccgagggggcggaaatgctgaggtggcgagagcgtgggttgcacagaaccctagtagcgagtccggctgagcctctgcggcctagcccagcagcgtcgtcttcccggctccgaagacgtcttcccgaagccccgctgccccggcgcaccagctcccggtgatggggatga

SEQ ID NO: 110116 - DNA, 1681 bp, Homo sapiens
  chr4:55523741-55525422
  hyper
gcaggtggcgggcccgtgccctaacgtgtgcgtggtgcccagcttcacaaagcgagcgggcagcacctccttggtccgggaacggcctcagcctggccgtccacatcccaggggtggaaaggtggagagagaaaggggctccggagtcaagagcggggagagagggcgcgcgcgccctcctcctcccggcgggcacggccccccggcattaacacgtcgaaagagcaggggccagacgccgccgggaagaagcgagacccgggcgggcgcgagggaggggaggcgaggaggggcgtggccggcgcgcagagggagggcgctgggaggaggggctgctgctcgccgctcgcggctctgggggctcggctttgccgcgctcgctgcacttgggcgagagctggaacgtggaccagagctcggatcccatcgcagctaccgcgatgagaggcgctcgcggcgcctgggattttctctgcgttctgctcctactgcttcgcgtccagacaggtgggacaccgcggctggcaccccgaccgtgcgactactcggcgaagcctgtgcctgggagggtggtacccgccagggtgcatccggagagaggactgcgggccctcagtgcccgtgcgttccagcctccggggagactccaggtggccctcggactctccggcgccctgcctcgctcacctgcgcgaggagaccccagctgctggtggtgggggacgcgaatccggggttcttcgggaatggggacagcaagagggggttaggcgtgagcgaggctgcaggctccgtgcgagtttggggtggcttttgtgccgacgttgcgcggggggcggaggcggggggctcaggggtttgcaccgagcgccttctcttgccgtgcgaggcgcggccgcagcttccttttgttaaaagttgcgtgtgtgtgaccggcgcccgggaggacctgcctgcaggttctccgccgcgctgagggcaaagttagagagccctttctctgctctgcggctactgccttccaaccgcaggcgctctttgtgcccagagctggggaccgacccgctgccgcctctgctcgcggcgccacccgtggagaccaatcgaaggctgcggcgtttccccgcctccgggttaggcttttgcgctgggagtgcgcggcgtggggctgttgtggggccggactcccgcgagcctggaggtggtggcgacagggacaacttgggcagggcgtgtggaaagcagccgctaggttgcagactttttgctttcgtacatcccgtgctcgcccctttctgccgcggcgccgtttcattcctgccgcgcgccccggggcggctggaggctgtgtttgccgcctgctccgggaaggcaagggacagcgtgctgggactctgcgttccctgactccaaccgcctagcacgccggccagagtgcccggcctgcctggcgggttctgaaagcccctagttcccggtgtctgcgacctgtattcgcaggtcctgttttcttcggaaatttttgagattcgtgaccgcccgcctccccgcccccgggacttctatacttcagggctgcctgggggtggggtgggagatggcgtggaactttctgcaaatcctactcagttcttaaagctataacagaaatccaggtatatccgcgcgggaactgggtctt

SEQ ID NO: 110117 - DNA, 230 bp, Homo sapiens; identical to SEQ ID NO: 3297
  chr4:55561713-55561943
  hyper

SEQ ID NO: 110118 - DNA, 92 bp, Homo sapiens; identical to SEQ ID NO: 3298
  chr4:55564468-55564560
  hyper

SEQ ID NO: 110119 - DNA, 30 bp, Homo sapiens; identical to SEQ ID NO: 3299
  chr4:55565886-55565916
  hyper

SEQ ID NO: 110120 - DNA, 76 bp, Homo sapiens; identical to SEQ ID NO: 3300
  chr4:55569949-55570025
  hyper

SEQ ID NO: 110121 - DNA, 30 bp, Homo sapiens; identical to SEQ ID NO: 3301
  chr4:55573295-55573325
  hyper

SEQ ID NO: 110122 - DNA, 30 bp, Homo sapiens; identical to SEQ ID NO: 3302
  chr4:55589780-55589810
  hyper

SEQ ID NO: 110123 - DNA, 46 bp, Homo sapiens; identical to SEQ ID NO: 3303
  chr4:55592093-55592139
  hyper

SEQ ID NO: 110124 - DNA, 303 bp, Homo sapiens; identical to SEQ ID NO: 3304
  chr4:55593415-55593718
  hyper

SEQ ID NO: 110125 - DNA, 30 bp, Homo sapiens; identical to SEQ ID NO: 3305
  chr4:55594000-55594030
  hyper

SEQ ID NO: 110126 - DNA, 63 bp, Homo sapiens; identical to SEQ ID NO: 3306
  chr4:55595496-55595559
  hyper

SEQ ID NO: 110127 - DNA, 35 bp, Homo sapiens; identical to SEQ ID NO: 3307
  chr4:55598030-55598065
  hyper

SEQ ID NO: 110128 - DNA, 43 bp, Homo sapiens; identical to SEQ ID NO: 3308
  chr4:55599305-55599348
  hyper

SEQ ID NO: 110129 - DNA, 97 bp, Homo sapiens; identical to SEQ ID NO: 3309
  chr4:55602682-55602779
  hyper

SEQ ID NO: 110130 - DNA, 30 bp, Homo sapiens; identical to SEQ ID NO: 3310
  chr4:55604624-55604654
  hyper

SEQ ID NO: 110131 - DNA, 270 bp, Homo sapiens
  chr4:55990891-55991161
  hyper
gcatgaagacaacaacgggccgggtcccgcaaagaggcagaaccgagtgtaccgtccgatccgggagacccggcctgagattccggcaaggttttcttccccgggcccggactaggatgttgcgcgcagccagacaacttttcaccgcctgttctcgcctgcggaggcacctcctgcctgccaaccccaggcgccttcccaccccagcctcccaagagcctgagggtgtgtcggcatctcaggacatgctccagccgaggtccctgtcgc

SEQ ID NO: 110132 - DNA, 233 bp, Homo sapiens; identical to SEQ ID NO: 40536
  chr4:55991392-55991625
  hyper

SEQ ID NO: 110133 - DNA, 287 bp, Homo sapiens; identical to SEQ ID NO: 3312
  chr4:55991802-55992089
  hyper

SEQ ID NO: 110134 - DNA, 108 bp, Homo sapiens
  chr4:55992152-55992260
  hyper
cgcgcgtctgaagtggccgagaatctgcagcagtttggagccacaagggagaagcggatactcagccaagtatgccgggtcgcaagctggcagcgactcctgccagta

SEQ ID NO: 110135 - DNA, 110 bp, Homo sapiens
  chr4:56212200-56212310
  hyper
cagacacgtggtctcgtctgttttgcgtctttgcttctgatgaatcatattctggagctccatctaagaatccccatgcccagattagggactgcgagcgaccacccagc

SEQ ID NO: 110136 - DNA, 30 bp, Homo sapiens
  chr4:56212670-56212700
  hyper
gtgtggggagccgtcgcgccccgccgcctg

SEQ ID NO: 110137 - DNA, 268 bp, Homo sapiens
  chr4:56261512-56261780
  hyper
ctggacaagggcaacgttagccatttttggtctggggtaattataggcagtatcttaaaacaaggcttgaaaaatgtcatgttatttccaaatcccatttcagaactttaaaaaaaaaatagcattttgagctcctaagaacgtttttggcggtaggtggccacatggagggtggcacagaggctcggcgggggagagcggaacagagctgggcgtggcagtgcctgcgagtcagcgccacgtaaccagaggcgctcgcactaatttg

SEQ ID NO: 110138 - DNA, 35 bp, Homo sapiens; identical to SEQ ID NO: 3314
  chr4:56412389-56412424
  hyper

SEQ ID NO: 110139 - DNA, 179 bp, Homo sapiens
  chr4:56413700-56413879
  hyper
gccagaggagggaagcgaaaggaggtcgggatttatttgctcatttggagatttttcccttgcccttttattaaaaatcaagtgacagtgtaatggaagatggagaatgaagcatcagaaataaaccaggaccctaatttgcatggatttcctcgttggaacaacgtgtgactactact

SEQ ID NO: 110140 - DNA, 1438 bp, Homo sapiens
  chr4:56501426-56502864
  hyper
tatctcccctggaacgtttgcgttctgctcggctatgtctccaaagcttcagatctccttccctgaccttgcgtttcctatttcttccctctaagccaagctcagcatgtccctattgttatcaaatcacatctgccatcacttgctgtagctgtcgcactgcctgaaagcctggcttgcacacttgcctctccgactttatgtgatgagaagttctctattccttttcctgatctagtgcctgaaaaccgataaggcacaaagcccactccttcccttctaagcggttagcgtggggcccgttgtaccgctcaggtttatctcagcataacactagctcactcaccaaagaggctgagcactcgccaagtttaccttgcctcagcggatgaagtatcaaactcactcttgttttgcttcaaccatcaatctctccaataattgcaatcaaagggaaaacattttaatgttcactattttagtacccgtttccacgggccggggggtctggaaatcccgaggatgagggaaccctaccagtctccatctatcgcagccggcccggcgcagggtctccgctgggcatcaacgagcagggcctgggtatttcggccctggccgggccccttgctcctacgtcgctagttgccctggggaggcgacctgtgcctgggaggcgggaaaccccgcggcaccagagaagccaagtgaagtcccagaagccaagtaaaggtgagagaaagagggtggaggagagcggtgagtggagccagagagaggcgcgcatggcgtggaagcggccgggtgcggggccgtcttacctcggcaggcgcccgcgcaccaggcgagcagcagcagcagcagcaggagcggggacgccgcggccacctgtccggcgggcgacctggggcggcagctctctgttcgcagcatctcggcggctgcgggaggctcggtgctagggacgctgcgctgcgccacgcgtagctggtgctccacctggtgccctggctgtgcctcggggcccggacacaggactgagcgcccggcgagccgccaacttttaaatctcgcgcacaagtgggctgggctgcgcggtccccgccgcgcgtcacctcgccgcctgccgcccccggcctacctcgcctcaccccgccccgctgcctgcccgcgccccaccctgcagcaggacccgagccccctagcctgagtttctgacccgagtaccacgcattttcgctctgggataaagagaatggaatttaaataatgcaccattcccacctttggaaggactggactgggaacagggtgtggatggcaaaccaggccgtctgagtttttaaacttggtagtggcgacgctctctggtgtcctgggtctacgtgggacaccctttctccttcacctcttccagagctccggcagtcactagtac

SEQ ID NO: 110141 - DNA, 85 bp, Homo sapiens
  chr4:56503479-56503564
  hyper
ctcctgcccccgcaccgcccctccccgccccctctcccccgcgccataggccccagtgtgtgaaaaccggcgaaaaccggtctta

SEQ ID NO: 110142 - DNA, 202 bp, Homo sapiens
  chr4:56659664-56659866
  hyper
tccaggagtcggggtcgcctcgctgcgatggcaggttcagcttcggttcactaatcgcaaccagccccaccgcgggagacggggagagccctggctgctgcaggccggcacctgggtagatgttaccttttcccgcacagggtcagtccacagacgtgcaccagcaccccggcgaccggtcacagccttcccctcgccccgg

SEQ ID NO: 110143 - DNA, 87 bp, Homo sapiens
  chr4:56659934-56660021
  hyper
cgcactccccgggtatgctgcgggccctctccatccggggaggcggggtccggggaggacacatccccggcccggcctctccgagag

SEQ ID NO: 110144 - DNA, 126 bp, Homo sapiens; identical to SEQ ID NO: 40545
  chr4:56719666-56719792
  hyper

SEQ ID NO: 110145 - DNA, 419 bp, Homo sapiens
  chr4:56719823-56720242
  hyper
cgtgcccggatataggaagtgttgggggaacggccgcttcccgttcaacgctttattgaggggcgtatcctagtggcccccatccggtctccgttttggaagacccgcctcggcacagccaggctcagtccggccttgcggtaagccttcggccgcggctgcccggtagtcccggcggcggcggacagacgagctgacaggcaccagggtctaaggcggctcctcagtccggctgctgtctccacgcctggggtcgggcaccgctccttctgaccttcctttccccgtttgtcccggtaagacgaagtttggtcagagcattctccagtcccttgtcctcgggtctaggagaatgcggagctgggagggcagtcctcacgggccccattacggttccgcccatcggaaccagattttgt

SEQ ID NO: 110146 - DNA, 30 bp, Homo sapiens; identical to SEQ ID NO: 40547
  chr4:56751724-56751754
  hyper

SEQ ID NO: 110147 - DNA, 30 bp, Homo sapiens
  chr4:56814916-56814946
  hyper
ttgctggccgcgggcgccgacctccagggg

SEQ ID NO: 110148 - DNA, 30 bp, Homo sapiens
  chr4:56815248-56815278
  hyper
agggccagctgcggcggtggtggcgccttc

SEQ ID NO: 110149 - DNA, 30 bp, Homo sapiens
  chr4:56815495-56815525
  hyper
gcgtctgtgtgggccgtgcagacaggcttg

SEQ ID NO: 110150 - DNA, 981 bp, Homo sapiens
  chr4:56914934-56915915
  hyper
aatgttctcgccacacgcaggatgagcctcgctgtgagcccaccactgtaacctcagaccccacgagttcagcactccctcgagtcaggctttgcagaagccgggagggcactggtcaaccccacgcccctccttggggcccgctcctggtttctgggcacccctggggaggggagccatctggtgtgcgccactcccggagggcgcgagaaggaagccggcgcctcacgctcagctgtccctgggcgaagccgggcggggcggcggcgcgggtccgagcgcccgaggcgccggcggagcatgtgaccacgccgcgcggggccgggcgcgcagtgccgcgcggtggcggcagtggggagagcaatggaggccacggccgactgagaggcgggtgcgctgctggtgctgctgccgcggcggctgctgatgcggaggctgccgcgcgcagtgccgccgagtccgccgcccgcccgggaccgccggtcgccggccagccgctctgccagccggagcgccaggcggggacctcaggtgagcgcctgctcggcccgcggccggagccagacaatggggacaggggcgggcttctctcctccactcgcgcccctccgggccgggcccccgcagcgccccgggactccaggggacctggccccgggggcgtgggctcggcgcggcgggcggtgggcttcggggcggtgtccccatgtgggaggcgcggaccctcccggaggaacctgcgcgcggcttgcgcgctttggatccccgcaggggaacctgccgccgggctgcaccccgggaacttgcggagaatatgggacctcgcctgccttctcctcttcccgcgcctcgccatcctgtccccaggtccctggctcggtcccgaccgcggcaagggccagaaccagacctcaccgtccgggatcgcggacgccgtccgggctcagccctctccccaccgcccccggagctgcattgctt

SEQ ID NO: 110151 - DNA, 178 bp, Homo sapiens
  chr4:57253558-57253736
  hyper
attcggccctttcccggatagctcgtcgcggatacttctcacagcgaagcagcagctcccagaagccgtaaagctatcccagagcgaggcaccatacgtaaatcttccgcgtcgctacgtgacgtcagtgcgagcgaccccgggccggctgcgtggagctggcgctgcctctcctgaa

SEQ ID NO: 110152 - DNA, 30 bp, Homo sapiens; identical to SEQ ID NO: 40550
  chr4:57301338-57301368
  hyper

SEQ ID NO: 110153 - DNA, 173 bp, Homo sapiens
  chr4:57301957-57302130
  hyper
cacgtggaaatctccgttattttccagcacccaacagtagcgtaatgggagtaacggacttaacctcatttctctttcagagcatttagccttcatatgcccttccctgcatgcttcccccaggccgtcaagacttggtacgctccaacttctgagtcgctcccgcagccgag

SEQ ID NO: 110154 - DNA, 128 bp, Homo sapiens
  chr4:57333252-57333380
  hyper
cttacctttcctcacgtttgcttctctgccagaatgtcttcccgcactttccccagaacccaagttctcctaatcatctttcaagatccctttccctcaaccacagatgagccgtgcctatttctcct

SEQ ID NO: 110155 - DNA, 189 bp, Homo sapiens
  chr4:57333685-57333874
  hyper
agacactcccaactcggcgacgcttagcaatcatcgacttcctcctcctcttggctgcctcggagatcctgttccggggcagaggtctccccgccccgcccctcgtctcctccaagatggcgagcggcggcagcgggggggtgtcagtacctgcgctgtggagtgaagtgaaccggtatggccagaacg

SEQ ID NO: 110156 - DNA, 30 bp, Homo sapiens; identical to SEQ ID NO: 3317
  chr4:57334148-57334178
  hyper

SEQ ID NO: 110157 - DNA, 386 bp, Homo sapiens
  chr4:57371656-57372042
  hyper
ccaccctgcctggcccgaggtaatcgcgctagggacgctttttctgcagcaatgatataccccgccgaactgtcccacgtcctggttgggacctcttggtttcgcttggctgggctcaatccatccgtacgcctccgcccttccctctttgcgaacccctgcgggttcagcgaatcggctgcaagaagccctgcatccgcgaggtaagcggcggttggcggcggtgccggggttggcagcgcccgcgggttgtctacgccgcggggcctacgtctctgtcgggcgtgcacctcgggagccacacctggggcccagagccaccgctcagcacgcgggcacgcggcgggagggaaggaaaccgcggcgctggggatggagagggggaa

SEQ ID NO: 110158 - DNA, 30 bp, Homo sapiens
  chr4:57372336-57372366
  hyper
ccccaaggcttttgtcggccgttcagaccc

SEQ ID NO: 110159 - DNA, 839 bp, Homo sapiens
  chr4:57396530-57397369
  hyper
cttagtccccagatgcgcccagaaggtcctggagagtggtgcgtccccttggcaaccgtacaacgcgcaggaaggcggagtgagatgaggctgagtccggccggggcggggctgtgtgggactagggcggggctcgggggctagaccggggcggggctgtgtagggctggggcggggctcggggcggggctcggggcggggctgggcgcggggggccccggcagcccttatcgtatcgcgcagagagcaaactgcgcctgggcaaccagtcgggagggtgagtcccgcgcgcgacagaagcttctggcgcgaatggagaaccaagagtttctaagttcatctgcgccgtccgaggtgaccgatgggcaggtctcaacagaaatatccacttgctccgaagtcttccagaagcccattgtgctcaggattctcgacactcacagagagcttgaggagtccgaggatcccgagaaacacgagaatcccgaggaacccgaggaggtcagggagcaagaccagagagacgagtccgaggaatgtgatgagcctcatgagtcctatgagccccacgctccctatgcgccccacaagccccgggactcctatgcaccttacgaactccatgggccccatgcagcccccaaactcctcaaggcccgtgaaccccgccagctccgccacacccgtgagccccgcaagtcccgcgaggccaaggaaaccgagttgcttcccagcgccgcagtaatgatctccccctctctgatcaccagagccccgccacggcctcagctgtctttcctgggtggtaggtgttccccttccctcgtcccctctcctgc

SEQ ID NO: 110160 - DNA, 40 bp, Homo sapiens; identical to SEQ ID NO: 3319
  chr4:57521355-57521395
  hyper

SEQ ID NO: 110161 - DNA, 158 bp, Homo sapiens; identical to SEQ ID NO: 3320
  chr4:57521505-57521663
  hyper

SEQ ID NO: 110162 - DNA, 682 bp, Homo sapiens; identical to SEQ ID NO: 3321
  chr4:57521700-57522382
  hyper

SEQ ID NO: 110163 - DNA, 396 bp, Homo sapiens; identical to SEQ ID NO: 40556
  chr4:57522419-57522815
  hyper

SEQ ID NO: 110164 - DNA, 575 bp, Homo sapiens; identical to SEQ ID NO: 40557
  chr4:57687531-57688106
  hyper

SEQ ID NO: 110165 - DNA, 30 bp, Homo sapiens
  chr4:57773753-57773783
  hyper
ttctcatgcatgcacgccagggctgggggg

SEQ ID NO: 110166 - DNA, 30 bp, Homo sapiens
  chr4:57775279-57775309
  hyper
ttccggccaaacagcgcctcgagcttgatc

SEQ ID NO: 110167 - DNA, 146 bp, Homo sapiens; identical to SEQ ID NO: 3324
  chr4:57775638-57775784
  hyper

SEQ ID NO: 110168 - DNA, 30 bp, Homo sapiens
  chr4:57843494-57843524
  hyper
gtgggttgcggctccggatccaggatgtac

SEQ ID NO: 110169 - DNA, 206 bp, Homo sapiens
  chr4:57843819-57844025
  hyper
acccgagacgaaagcgcgtgggtacttgggagctgtcctggttggttttgcgtctaatcccgtcagttctcgcgatttaagctctgagactgagaacctacttaaagctatggcaaaggcactggaggattgagctaggtgggcagaaaagagcagtgagtgttttgggttttttcactttcaggcttaacgcctcactgctagca

SEQ ID NO: 110170 - DNA, 67 bp, Homo sapiens
  chr4:57844897-57844964
  hyper
aatcagcccggcagcggcggcccacaatttacgcgtgtgcaaccctaaccccggcccaagcttgacc

SEQ ID NO: 110171 - DNA, 30 bp, Homo sapiens; identical to SEQ ID NO: 3326
  chr4:57944966-57944996
  hyper

SEQ ID NO: 110172 - DNA, 1587 bp, Homo sapiens; identical to SEQ ID NO: 40562
  chr4:57975869-57977456
  hyper

SEQ ID NO: 110173 - DNA, 774 bp, Homo sapiens
  chr4:58029750-58030524
  hyper
ttcctgagctgctgcgtgagtcagtgattcccagtgttgctgtgcctgaaaacccaccactaatgtcagcgccttgtgctgttgagttgcacgcggcgcccctgcagtccagggctggggctagcccggcgagcgcgcggcaggcagagcattcccggacgagtccggtagatggtagcattgtgcagccgatgcgtcctctcccagcttgcgtctcatttttccctctccccctttcctgggctcagcggtgaggctcaggtaccggcgccgccctgatgcctactatgccgcgccatctccagatggtccgcacctggcgggtcacgacgagtctcaatccacagcatggggctgactcggactcaggagtttttgtggctccaggcgtaaccgttgctttggataaaattggtccagttcacttgaccaaggagaagtgcagaggaggataaacgtccccatcccagtggtgtcctctcccgactcctttcgtgtagtgagctttatttttagagactcccgcgcctgccagccgctcatgctcgggttccccaagcggaggggctccgcgtgcagtgtgatgcccactgtcgccggcagagggcaccgtcgtcacacactgcgcaggagccggcgcgggaaggcggcggggctgtccttcccggtcagcgtcctacgcgtgaccttgggacccgcaaatgtctgcgccggaggcattgcctcttcccgactatgggggatactgcacggggctcccgatggcctcttcca

SEQ ID NO: 110174 - DNA, 282 bp, Homo sapiens
  chr4:62065788-62066070
  hyper
agggagagcgagcgccgaggcgggcctcgaagccactggagaggtaccctttgtctgacaaaccctgaaagggaagcctctagtagcagccctcccgttcccacctccaagcgtttgccgaactgctaggtggagcccgcgccgcggagcccacgagcactccatatccgggttttgccggccacccctttccctggcgcgagccccctccccggctctcggagctcttgccgctggcccgcccgaccgctgctcattctggcctccgctccggccccggct

SEQ ID NO: 110175 - DNA, 1383 bp, Homo sapiens; identical to SEQ ID NO: 40565
  chr4:62066133-62067516
  hyper

SEQ ID NO: 110176 - DNA, 665 bp, Homo sapiens; identical to SEQ ID NO: 40566
  chr4:62067536-62068201
  hyper

SEQ ID NO: 110177 - DNA, 773 bp, Homo sapiens
  chr4:62068237-62069010
  hyper
cggtgttgcacgaatccgggcggccgcggcgccggggcggggtgggcagagcattggtggtcgcggttggcgggttacaggtaggagagaaggcacctcggcgcttctctgaggagaagggaaggctccaggctgcagcgcagcgtctgagctgccgcgacccagcctccggtcccacgtcggagctcagaagcttagggtgccaggcccccagcactataggtgggtgtgtgtgtgtctgtgcgtgtgtgtgtggtgtgtaggggtgggggcgacctcctctaccagccttacttggcggcggagtcagcgtttgagtgtgtgcgcatttttgcgccccagggacggcagagagatatttgcggggatgccggagctgatgctgctggagctgagcttgcttattgaaatcgcctgggatcctcttaactggaaaatctggtttgaggaggccacgggggcccccgcagggtggcgaggaaaccttgccgtgtccccttcccctggagaggcgcagctcggcgacatgcgtgcggcgcgtgagagtcgctggtgcagcgctcgatgcaccccagaatggccctgatgagaacctcatagggtagtcatctctccagcaggttgaagtaatcgagtccagccagcgtaactcctggtccctggaattctctggccactttcctacctctgatagaaacatgcgctgcttttatttatggccagagatatcatagcagttgggagaactcgaggcttgcgagccacctccaggg

SEQ ID NO: 110178 - DNA, 129 bp, Homo sapiens
  chr4:66534211-66534340
  hyper
cctccgcgagtaatgcgcccttgggctgagacccgagctcagtccgggtgtgggagaggagcaagcgctgctggaggggacccaaaggcagaggtctcaggtccaagaggcaggcggacagaggggctg

SEQ ID NO: 110179 - DNA, 30 bp, Homo sapiens
  chr4:66534653-66534683
  hyper
cccaactgtgtggggcgccttctgtccttc

SEQ ID NO: 110180 - DNA, 420 bp, Homo sapiens
  chr4:66534894-66535314
  hyper
ccactccttcaagcccgaaatgtcacttccccacgcgccttaagtgaggcccagccgcacccatccccctggaacgggcctccattccccaaaggaggcctcgacctcctttcccccaaggttttccaccttcccagccccccaaccagcctctgtccacacgcatgttccttgcccagcactccgcagctaacgtcaaacaatgcaaccaaaaaccgcagaggggagcgaaaaggccagtggaaggggacgacaaataccaatttgagatgagactgcgatttagtctgcagcagcagcgtccagcgcgctgagacctgaactcccaggccccgcctagcccctccgccccaggtcgccacggtccccacccccatctccctaccttcgttgctggggctggccaggagggtccggagt

SEQ ID NO: 110181 - DNA, 132 bp, Homo sapiens; identical to SEQ ID NO: 40569
  chr4:66535350-66535482
  hyper

SEQ ID NO: 110182 - DNA, 173 bp, Homo sapiens; identical to SEQ ID NO: 40570
  chr4:66535574-66535747
  hyper

SEQ ID NO: 110183 - DNA, 714 bp, Homo sapiens
  chr4:66535966-66536680
  hyper
aaaacaggagagcagcgagcaaaagcaaagatccagagttcaaagagactggcagaaggaaatagctgcgggctgagtgctgaagaggggagggactgacggctgccggccggtaggagcgcggagctgcgctgcggcggcccaggagctgctgcggttcccgctgctcggggagcaggcggtgtgtgcgcggctgcgaagtcgaggttgaaactgcaccgccaaggcgcgctcctgctgtgtctggagctccggcgtctcctctgcctcccagctcagcgcctcccaccctccttccctcctcctcttcccagctcccccgccctctgctgctcgcagcctcgccagtgagaatctactgtaagtgtgagttgcttcgacgaagtcacacacccacggagggaagtaatctggaggctgccttggtgagtgttgcctagcggtctccgggaaaggcgcgtcttcctcccgggataattagggcaaggaatcctgacgacgctggcgaggactggggttcccgggaggcggaagggagatcagccccagctcagccggcggcccttagagacgcgggtccctccgtttggcatcttgcctgctgtccctcacaggctgtggcatcaacaaccttgtcgtcacatcgccgcgcattcgcaggctctgctggtccgtggctagtttcttaaacacccataccgcttaccgctgctg

SEQ ID NO: 110184 - DNA, 30 bp, Homo sapiens
  chr4:68410558-68410588
  hyper
aaattatttcgagacgtacttgttacataa

SEQ ID NO: 110185 - DNA, 214 bp, Homo sapiens
  chr4:68411139-68411353
  hyper
agccgagcaagaaacgaatcgccggaataccaggccgcggccaagcaataaccttaagtctcaggcgactgccgcgagagctgcgatccggaaggcgcgcgctaacaacactcccccgccattggctccgccctcaacaaacaagaacgcttggcctgtgcctgggtttgaacccggagacacatgcgcaaaacgggccgcgccgtccaatagg

SEQ ID NO: 110186 - DNA, 81 bp, Homo sapiens
  chr4:68567003-68567084
  hyper
gtgtggccgcatggcgtgctgtggtgcaggtggccgaagggggcgttactgttgcgactggcatccgcatccggcagatgt

SEQ ID NO: 110187 - DNA, 30 bp, Homo sapiens; identical to SEQ ID NO: 3337
  chr4:71467461-71467491
  hyper

SEQ ID NO: 110188 - DNA, 110 bp, Homo sapiens
  chr4:71479319-71479429
  hyper
gcagctttccagctggagacccgcgcctaacaaccggtttgataattacttaaagataagctctagcgagcacagagaaggaaatgaccgtgggtttttcagagtgaatg

SEQ ID NO: 110189 - DNA, 30 bp, Homo sapiens; identical to SEQ ID NO: 3338
  chr4:71553539-71553569
  hyper

SEQ ID NO: 110190 - DNA, 108 bp, Homo sapiens
  chr4:71554110-71554218
  hyper
ccggaatcgactggcgttaaagggcacagtgaaaaggaagttggtatcaacgtgatctcgactaagggaccgagcggaagtcctcaatcgtacgccacgcggagagca

SEQ ID NO: 110191 - DNA, 30 bp, Homo sapiens
  chr4:71571156-71571186
  hyper
ggaagctgttctcccgaggcgcccggtgag

SEQ ID NO: 110192 - DNA, 30 bp, Homo sapiens; identical to SEQ ID NO: 40575
  chr4:71571610-71571640
  hyper

SEQ ID NO: 110193 - DNA, 30 bp, Homo sapiens
  chr4:71704486-71704516
  hyper
tcctcaaccctcaacgctccctcccattca

SEQ ID NO: 110194 - DNA, 30 bp, Homo sapiens; identical to SEQ ID NO: 40576
  chr4:71704869-71704899
  hyper

SEQ ID NO: 110195 - DNA, 57 bp, Homo sapiens
  chr4:71705635-71705692
  hyper
gtgcctggcacatgcgccgcgggcactgggtggggggcctccgagagtcggaaggag

SEQ ID NO: 110196 - DNA, 730 bp, Homo sapiens; identical to SEQ ID NO: 3339
  chr4:71767777-71768507
  hyper

SEQ ID NO: 110197 - DNA, 177 bp, Homo sapiens
  chr4:71768550-71768727
  hyper
cgtctctgccttcgctcgcattcccgggcttgtttgtgcgcttctcgtgggtatctcccactcgcctgcacaatccgtatccaagcggtgctcggttgaatggctccgtcgcggctgcccattgctcttttctgggtcccaagcacagaagataagactgtcgtactttcccctgtc

SEQ ID NO: 110198 - DNA, 47 bp, Homo sapiens
  chr4:71859072-71859119
  hyper
tccaaagcctggcacggcccactgcaggtgacgccctctgccctcca

SEQ ID NO: 110199 - DNA, 30 bp, Homo sapiens; identical to SEQ ID NO: 3340
  chr4:71859615-71859645
  hyper

SEQ ID NO: 110200 - DNA, 30 bp, Homo sapiens; identical to SEQ ID NO: 40579
  chr4:72052105-72052135
  hyper

SEQ ID NO: 110201 - DNA, 30 bp, Homo sapiens
  chr4:72052529-72052559
  hyper
ttgctcccgaggggcgcctgggctgggctc

SEQ ID NO: 110202 - DNA, 85 bp, Homo sapiens
  chr4:72052854-72052939
  hyper
gcgcgggtgactggcgccccgctcgctccgcgcccggcgcagacaacttcccgcggctcggccccgccgcgtcccgggctcgcgc

SEQ ID NO: 110203 - DNA, 30 bp, Homo sapiens; identical to SEQ ID NO: 40581
  chr4:72053382-72053412
  hyper

SEQ ID NO: 110204 - DNA, 653 bp, Homo sapiens; identical to SEQ ID NO: 40582
  chr4:73433656-73434309
  hyper

SEQ ID NO: 110205 - DNA, 652 bp, Homo sapiens
  chr4:73434678-73435330
  hyper
ttccacttcaccttctcaccccgtcctcccaacacagagtgtgcaggagcgagaaggtgctgtaagcgggcacaggctaagcctgggagagggggaagggacgaggggctttccaactatctctgcccaaagcagctttttcgaggcttttcgagcaccattggtccctaaggttagcgcggagaatgcttgggttccccggagcacagcagggggaagtattagcgagagagacgagcgagcgggagcgggagaaagaggcagggagagggcgactccgccgcacacgcagaggtgggggcgggaggagcgaaggggaggaggagaaggcaggcggaggaggtgggaggagtgggccgctcgccggctcctgttgctcgcagcgcggcagtctgctggctgctggcgacccgcggggcgctaataaggcgtccggagctccccggactgcccctcccgccgtggcgcccacgtcatgcggggcccgaacccgcgccccccgcaccgtgtcaggattggagaccgctcgggggctggtgtggcccgggctcgacctcccaccctggagcctctccttctccgcctagggcgagaggaggggagggtccaggggcgccaccggtcccgactggcgggacgcgcgttgagttaa

SEQ ID NO: 110206 - DNA, 30 bp, Homo sapiens
  chr4:73935071-73935101
  hyper
gcgtgacagcaccccgtaaggccacggtgg

SEQ ID NO: 110207 - DNA, 397 bp, Homo sapiens
  chr4:73935362-73935759
  hyper
gcatttctgcaccacggcggagcccagatcccgggcctcacaatccagcggacatacaccggccagccaaggctgatacgcgcacgcgccagcaacagcgggcataaagcgcatgcgcgcctgcctgcagccgcgattgaccttcccagtcaagccggtgacgtcttgcgtcgcagtggatgtgacgcaagagataggaaagtcccgcctttcccacgcggcactggacaggcctactgcgcacacgcgaaagtttcccgctgctagggtgtagttagtccgaggccggaccaaaactgcagagacatgggtggagcctgctgccctccgccaggctgggtgttctttagggagctctcgccttgtaaagttcatctacaccgtgtaacttaccatt

SEQ ID NO: 110208 - DNA, 344 bp, Homo sapiens; identical to SEQ ID NO: 40584
  chr4:74702405-74702749
  hyper

SEQ ID NO: 110209 - DNA, 30 bp, Homo sapiens; identical to SEQ ID NO: 3345
  chr4:74730215-74730245
  hyper

SEQ ID NO: 110210 - DNA, 289 bp, Homo sapiens
  chr4:74734858-74735147
  hyper
atctggggcagaaggcgaatatcccagagtctcagagtccacaggagttactctgaagggcgaggcgcgggctgcatcagtggacccccacaccccacccgcaccccaagcgctccaccctgggggcggggccgtcgccttccttccggactcgggatcgatctggaactccgggaatttccctggcccgggggctccgggctttccagccccaaccatgcataaaaggggttcgcggatctcggagagccacagagcccgggccgcaggcacctcctcgccagctctt

SEQ ID NO: 110211 - DNA, 177 bp, Homo sapiens
  chr4:74735193-74735370
  hyper
cgcgctgctctctccgccgcccccagcaatccccggctcctgcgagtggcactgctgctcctgctcctggtagccgctggccggcgcgcagcaggtgggtaccggcgccctggggtccccgggccggacgcggctggggtaggcacccagcgccgacagcctcgctcagtcagtgag

SEQ ID NO: 110212 - DNA, 407 bp, Homo sapiens
  chr4:74809922-74810329
  hyper
ccggagaccccagggcgccgggacccatctgccgctcgccggccggaggctaccaggagcaggagcagcagcgccgcccgcagtagccggggagcgcgggggacagcggggggcgcggcgcagttcaccgggctcagaaggcaggtcgggcggcggtgcgaggagcgggagagctggcagggaggtgcctgcagcccaggctctgtggctccccaagatcggtgaaccctttttatgcatgattggggctgaaaagtctggaacccccgggccagggaaattctcggagctccaggtctatcccgagtactgaagaaaagggctggccccacccccggggtgggtgggtggtgggcggtggctggttacccactggtgcagcctccccggctcgccttccagagtaa

SEQ ID NO: 110213 - DNA, 1188 bp, Homo sapiens
  chr4:74903959-74905147
  hyper
agtcggggaccccagcggtggcagcggaagcgcggggcgggacttacatgacttcggtttgggcgcagtggggtccgggggaccttacattcacactttggatgttcttgaggtgaattccctgcagtgtctgcaagcactggcagcgcagttcagtgaccacggacgctcctagggaagaatagactcgctgattgagcggggctgtcggcgcggggcgcccaccccagccgcgtccggcccggggaccccagggcgccgggacccacctgctgcgcgccggctggcggccaccaggagcaggagcagcagcgccacccgcaggagccggggattgctgggggcggcggagagcgtggcgtgggccatggggctcagcagacgcgtcgggaagctgtgcgagaagcgggagagctggcggggaggtgcctgcgacccgggctgtgtggctccccaagatcggcgaaccctttttatgcatggttgagactggaaagcccggagcggccgggccagggaaattcccggagctccagatcgatccggagtcccgaaggaaggcgacggccccgcccccggggtggagtcggatacgggtagggggagcccactggtgacgcctacgcctcgccctccagagtaacccccgtgcactctgggactttgggatattcattttctgccccaaattcctggagaggcagtgagtccacctcgctgaagatacagcctgtgaggggggaccttaggtccccgatgaccccccgcgtacggggtagggttggaggaaagagctggggggacccgtgagaaccaggacaggaaaggcacgacttctttagaggaagagagctttgtctccttagttatcagatttgctggggacccggagacaggcgagttttccctcagctatcctctctctatatagtctatcctctatgttaacctcccggtctctgcctctctcattttcggtttagcgttatttcatgtacatctaacatcatgctctctgtgaaagtacagccatcgtctcggattccagagaagaatgttctacttgttccttgttttgcatattctctaatcacacttagaataccttgtttacgttttccatttggtggcaacagattatcagtgtcaaaatttgaattcagtgttagtgtccgtggaagccagggc

SEQ ID NO: 110214 - DNA, 712 bp, Homo sapiens
  chr4:74964528-74965240
  hyper
gggcgcagtggggtccgggggacttcaccttcacactttggatgttcttgaggtgaattccctgcagggtctgcaagcactggcagcgcagttcagtggccaggggcgctcctagggaagaagagactcgctgattgagcggggctgtcggcgcggggcgcccaccccagccgcgtccggcccggggaccccagggcgccgggacccacctgctgcgcgccggctggcggccaccaggagcaggagcagcagcgccacccgcaggagccggggattgctgggggcggcggagagcgtggcgcgggccatggggctcagcaggcggttcgagcggctgtgcgaggaggagagctggcaaggagctgcctgtggcccgggctctgtggctctccgagaacggcgaaccccttttatgcatggttggggctggaaagcccggagtcccgggccagggaaattcccggagctccagatcgatcccgagttcggaaggaaggcgatggccccgcctctggggtggaggggggtcggggcactcacgagtgacgtccgggtctgactgtcttgcgtaactcccgccaactgtgggatgttctctttctgccccgaatccctggagcgggagcgagagcccgccgctctcagagataccgagataaccgcctgcgaggaggcgcttcgtgaacccagtgcagtgcgtcgtgggtcagat

SEQ ID NO: 110215 - DNA, 341 bp, Homo sapiens
  chr4:75023525-75023866
  hyper
ggccttctctgtgccgtcgctatgggaatgccagctatatgttggctgggtgcggggcccagtcgccaggccacactgcacgcttccacatcctcagagggcccgggacttgggtcctggccccgccccctgcggacccggcactctgtcagttccgtccccggtcctgggaaccgctctttaccccactctgcgtgtctgccggaacctggctgggaagcgctacttgctgccctgccagcccgggtgagggcggagccaggcctccagccgcgaggactggagtcgcgggaggtggagccccagtccggaagccggggatccgcggccatgacggtgcc

SEQ ID NO: 110216 - DNA, 398 bp, Homo sapiens
  chr4:75230456-75230854
  hyper
aggttagtaagtcacacgcacagctctccaaaggcatgtatggggaacgccagccttggctaaaagactgattcaagttatgtccgtcaccctgagcaaccaaaaccacccactacagggcaggtgaccccacaaagcaaaccaagccatctggtccacgctccccacctcccggagggagatggaaaagtttcgggagtagtccccggccaatcggaaagacattttttcattcctcaaccactactctcaggtgctccagggagggaggatgacttcctgacggtcctcctgccgctcctccctcgggccaattatgaaactctgggcactcttgacctcaccccgttagggcccgggaggggctccctagtataaagttcgcagcaccagacagt

SEQ ID NO: 110217 - DNA, 30 bp, Homo sapiens; identical to SEQ ID NO: 40591
  chr4:75231162-75231192
  hyper

SEQ ID NO: 110218 - DNA, 30 bp, Homo sapiens
  chr4:75719335-75719365
  hyper
aaagttctccaacccgcgcctgccagcccc

SEQ ID NO: 110219 - DNA, 92 bp, Homo sapiens
  chr4:75719942-75720034
  hyper
cctaccccctagggcgtaaacaaggtagggagggagatgtaaagaatccgcgtggaggggtgtcgggggttccggtcgggcctgcaggctga

SEQ ID NO: 110220 - DNA, 1718 bp, Homo sapiens; identical to SEQ ID NO: 40593
  chr4:75858216-75859934
  hyper

SEQ ID NO: 110221 - DNA, 36 bp, Homo sapiens
  chr4:76439683-76439719
  hyper
gacgcagtctccgtcgttgacgttagtcgcagtctt

SEQ ID NO: 110222 - DNA, 713 bp, Homo sapiens; identical to SEQ ID NO: 40595
  chr4:76555325-76556038
  hyper

SEQ ID NO: 110223 - DNA, 279 bp, Homo sapiens
  chr4:76598655-76598934
  hyper
acccccgagcacagcgtcagccaatcacgcatctcctccagagccggacccaaccttcccgtgtccctctgcggagcacgcgcagtacgctgccgcgctcgcacacgctcgcgcccggaaagccggggaaccggaaccggcctaaagccaagataagagtccgctgatttgacgtcacaagcaggctgcctttctccggtcccgaggctccagccttgccgcccttcttcctgatcgcgcaagcgagagctggttcgcagcaacgcagtgtcttttgta

SEQ ID NO: 110224 - DNA, 30 bp, Homo sapiens; identical to SEQ ID NO: 40597
  chr4:76649531-76649561
  hyper

SEQ ID NO: 110225 - DNA, 72 bp, Homo sapiens
  chr4:76649920-76649992
  hyper
gggcccaggccctgcggagggcgggggaagttgtcttcttttttttccggaggggccggtaaacctggtggc

SEQ ID NO: 110226 - DNA, 113 bp, Homo sapiens
  chr4:76650651-76650764
  hyper
cagatccggcttttcgggctcacccaaatatatatcatttggcaaatgctaccttgaacgtagtagggatcttaagcgctcaaactgctttggggacacgtccaccgctttct

SEQ ID NO: 110227 - DNA, 30 bp, Homo sapiens; identical to SEQ ID NO: 3352
  chr4:76861088-76861118
  hyper

SEQ ID NO: 110228 - DNA, 30 bp, Homo sapiens
  chr4:76861790-76861820
  hyper
ggcggggagtaaagcgtccccgtttaaagc

SEQ ID NO: 110229 - DNA, 30 bp, Homo sapiens
  chr4:76862263-76862293
  hyper
tcccgtccccgccgcgcatccactagcccg

SEQ ID NO: 110230 - DNA, 30 bp, Homo sapiens
  chr4:76911200-76911230
  hyper
atcaaaaaccactttcgttttgtcggtact

SEQ ID NO: 110231 - DNA, 30 bp, Homo sapiens
  chr4:76911795-76911825
  hyper
agaagaataggcggcgagcctggatcccag

SEQ ID NO: 110232 - DNA, 129 bp, Homo sapiens
  chr4:77069656-77069785
  hyper
gaaggcgccaagggcgtaggaggtgggtggttgtgagggaacgcccccagccagctcacttccggtgggcttcacatgctgtggggtgtcactgttaaggtaaaatgctgggacgctcgcgagggtgtg

SEQ ID NO: 110233 - DNA, 350 bp, Homo sapiens
  chr4:77135171-77135521
  hyper
aggcccggcctggccgctcccagcgccctgcaccgcaggcccagcgctcgccccaccgaaattgccgaacctggttcacacactcatttactcattccgcagataggtctgagggcctcccatgggccacgcgctggggattcaaggtggctgggacattcccctgctctagaggcgctcgcaagttagcggggacaccgttaccgcaattacaacacaatgtagcaagtgcttctaccaggtgcctgctgagatcatgccagcaagcatgttctgcctggatgacctagggccccacattgaactggggcctgggggatgcataagtttgtcacgtaaggggcatgtgc

SEQ ID NO: 110234 - DNA, 622 bp, Homo sapiens; identical to SEQ ID NO: 40602
  chr4:77172533-77173155
  hyper

SEQ ID NO: 110235 - DNA, 1274 bp, Homo sapiens
  chr4:77227270-77228544
  hyper
gagctggcggcggagcggagcttccactagggctcccagtttccccgcaccgcgcccgccgtcctccgggccacccatcccacccgaacgcgccaccgctctagcccgcgctccagcccgcgcgtcaccgacgcccgcggcctctcccacctctaagttccaggaagctctcggcctctagctgaccgcgttgctgctgagcttccctggggagaaggcgccgaggtgcccggtgcgggccgaggcagggctgggcctcgcgggcagcaggcggaagaaggaagggcggtggggcaggtcccggctgcgcggggcagttgtgcgcacttgggttcttcacgcgggacacacgtggaacgccgacccctgcgcccctggccgctggcaactggcaaggccgggaacagaaagtgtagggacagaagagcgctggagtcttccccgggagggagcccggggctgcagcccaggggcggggagcggggcggggctgggaaagttgagtactggtcgctcagggccgggctccgccggagtgcccggcgcagaaaccgtaaaaggctggagcgggcggggtaggtgtggctctgtgtgcgtgacctgagccccggtcccagtccctgtagtctcctgcggccgcggcctctcagccatgggcgccgtctggtccgccctgctggttggagggggtctggccggagcacttttcgtttggctgctgcggggcggccctggcgacaccgggaaggacggggatgcggagcaggagaaagacgcccctcttgggggagctgcgattccgggaggccatcagagtggcagcagcggactgagccctggaccttccgggcaggagctggtcaccaaaccaggtattcttccccccgtgactccagggcacatctgccagagctttgaggttcatcgaggaagggagcaaagagacaaacccacctggagctttcctaggggcccattcctgcggacgggctctcctaaggggactgggccatccccacgcccctcggtttcccaggctggttggtacgcgcaggcaggtttcttgtctggtcctccaagggccgcgcccttgccgagtccctcagcgcccgcgcctgaggacttggtcctgcccctccggcggggatgagctcctccacttggcggcgcttggtgcagtgcgggcggctgcagtggcggcgccccttcccggcctttggaaaggggggcttaggtttaggggatcctacaagcctcttcgatctctgcccaag

SEQ ID NO: 110236 - DNA, 470 bp, Homo sapiens
  chr4:77610245-77610715
  hyper
ctctgcattttacaacggggggaggttaattaaggcacctttctgattgaatgggcagagggactgagggtgtgtgcttcggtccggtccccttaataccgtaaggacccaaggaccgcggaggggcgagtggagcgcgacgcttccaccccagaatccgttttcaaaccttagggagccttctttgccattgaaatgcaaatccggtcctgagctcccgggccaatccgggaggcttcctgtgggattacctggtggcgagcgagcgccgagccagcgccgagccagcgcggcccctcgggtgcggcgggcgcggggtggactgagcgggcccgggcgggacgagaggtgggcgagcgccccgcaccctcggcgcgccgcgcgggatcagcgtcctccagccgcgctgccccggcccaccgtgcagctgtagccgcggcgcggtggcgcggtggcgcagggcgctgctg

SEQ ID NO: 110237 - DNA, 30 bp, Homo sapiens; identical to SEQ ID NO: 3358
  chr4:77611005-77611035
  hyper

SEQ ID NO: 110238 - DNA, 1063 bp, Homo sapiens
  chr4:77818096-77819159
  hyper
ctgctgctgcagggtcgaataatgcagggagctgggggtcagcagctccggccggtctccgcggggagcggggccgggcaggagagcaggcggggaagccctgcttgtcgcagcctcgacggtggcgggaggcgagtgagccactgcaggcacaggcgccggctcagctagcgcgccttcttcccgctccctggaagccccgcggtcatcctgggcaggcagagcccgtgccggcttctcctccgcggtggccgagtgcgggagtgcgccgagctctcccggcagtacagccaggttgttctggaggcattcccagcagcagcggccctgcgtcttcgccgccgcgcagctcgctctcgcctgggcccctgccgctgcagctgcgggcaccggcggcctctgtccgggactgcccttcgatccgccgcccttcccgggcgccctacgggagtcgctgcccgggagtccattgcaagctgcgtcggcggctctggctgctgcacctgctggctcctcctccggctccttctcgcgccgccgccgcctgggctgctgctggggcggctccccccggcgcgcgcctcgcggggagcagggcgcagctccccctgcactgggggcggccgcgggcggctcgcggggtcgctgcagcccctcctcccccaaaaggtccctgtatctcctcttgagcaccacgtacttggtgccgtcggggtcctggcgcactgcggcgaccgagttgacgaagcccttgaagagctcgcggcggtgctggtgctggctgggggacgcgtcggggtctcggagaaagctcttgaagtggctcagcaaggcagcgttggtcacgcggcccccagcctggcacagaaagtccagtagtgcctcctggctcagctctcgggccatcgctgccttgtcctccgccccagaggtgtctgagtctcgccctcccggggctctccccagccagaggaaaccctggccgggcgagtgtcacctgcgcccggggcggcactagccgcccccatcagccgcggaggccagcgctgcccgcagcccgtga

SEQ ID NO: 110239 - DNA, 458 bp, Homo sapiens
  chr4:77819271-77819729
  hyper
cgcaacgagtcctcacagcgaaagttcccgggatagggccgagtcggtttcacctgcgccctggcggcacctcctccctgcctctgggggaagggtcaggcccgcctcctcgtgtccctccgccccctgaggtctcccccaccccctgccacccatcccagaagagtcaggccggagagccagccggtaggtgaggttggcggcgaaccgagccggcagcgaactgctctgcggccggggaagtggaaggcaggtaggcgaccggccgttcctctaagtctccgccacgcaggaaacaaaagcgatagaaggtccgttcctgtcctccggtgctttgatgagttcaggctgaagccgatgggggaggaggagaagctgcaagttaacaggcaatctgagttatctttctttattaacgctgtagaggagtacttcagatttctcgaggctgtattgag

SEQ ID NO: 110240 - DNA, 30 bp, Homo sapiens
  chr4:77871355-77871385
  hyper
aattctttgaggcgcggcgtgtctcagccg

SEQ ID NO: 110241 - DNA, 43 bp, Homo sapiens
  chr4:77997173-77997216
  hyper
ggcttcctcggctccgccctcgcggaccgattcctagactcgc

SEQ ID NO: 110242 - DNA, 30 bp, Homo sapiens; identical to SEQ ID NO: 40608
  chr4:77997550-77997580
  hyper

SEQ ID NO: 110243 - DNA, 30 bp, Homo sapiens; identical to SEQ ID NO: 40609
  chr4:78078305-78078335
  hyper

SEQ ID NO: 110244 - DNA, 30 bp, Homo sapiens; identical to SEQ ID NO: 40610
  chr4:78079010-78079040
  hyper

SEQ ID NO: 110245 - DNA, 112 bp, Homo sapiens
  chr4:78079531-78079643
  hyper
ggggctctggcggacgtgactggtcccttcacccgctccttgtcggggtgtgctggggcgacccttgctggaggtactggcctcagccctttctcccgcttccccacccctc

SEQ ID NO: 110246 - DNA, 30 bp, Homo sapiens; identical to SEQ ID NO: 40611
  chr4:78739387-78739417
  hyper

SEQ ID NO: 110247 - DNA, 30 bp, Homo sapiens; identical to SEQ ID NO: 40612
  chr4:78740065-78740095
  hyper

SEQ ID NO: 110248 - DNA, 30 bp, Homo sapiens; identical to SEQ ID NO: 3361
  chr4:78783067-78783097
  hyper

SEQ ID NO: 110249 - DNA, 44 bp, Homo sapiens
  chr4:78978693-78978737
  hyper
cgacgcaacgccgacgtatggtgccaagcgaactttaaaaagct

SEQ ID NO: 110250 - DNA, 29 bp, Homo sapiens
  chr4:78979218-78979247
  hyper
tattgcctcatcattccgaaggtgagaga

SEQ ID NO: 110251 - DNA, 268 bp, Homo sapiens
  chr4:78979306-78979574
  hyper
cgtgcagtttaaaaatctcagcaggttttatggtatttcggtgaggtggaagtttttctgggaagggtgaggtggaagtgaaactggaataggctttttctgataagattcctactcctgattgttttgtattcggattacacccccgaaacggcctccctctctgccctaagtgcttttgggtgggtgggtggccgatggaggtgacatctctgaaactgatcctttttctttccaccacctacctttccccgaagggaaagcaact

SEQ ID NO: 110252 - DNA, 785 bp, Homo sapiens
  chr4:78979791-78980576
  hyper
cagtacggagaagcacgaaccagcctgcttcccagaacaaaagtggttaataagagtttaggttcattcttttacttcaccctccgcctcctggttttcctccgaggctccaagctacctgtaaaaccccggagccgcaggagagaaaaggaagccgtgagactagttgtcgccatgatatcaaatgcaatccgggctcagccaaataaatgagtcaataagtaaatcaagagtttggggtcatgggatgccgggcctggggacgcgaggcgctgtgagctccctcctgctccgaggagccagggaagtcgccccgccagtgcttagggagggggaagggagccggcgggctgggaggaagacggcttaatccacagcgcctggctctcggcttcccctcccggctccattcattattcatccagctgcgggaagaagagttcacctgcccagccgcaaaccagagccgcggctgggcggcggcggcgggcgcagggcgggccgccttctccgccctggtgcctaggaaggggcgcggggcggctcccgggagtcgagctctggcgcaggactgggggctgcgggaggcccggggaggacaaagctctgcctcgggtcgacctccagtcactggagcagctgccttttctttgctggcttcccaagagaaaggccttgggaatccacgcacaagggtgggggactttcccgtgggtccaggtgctgccttctgcactcttccgggatgtgtgtcaagtgtgtataatctccgcgaaaggcacatc

SEQ ID NO: 110253 - DNA, 30 bp, Homo sapiens; identical to SEQ ID NO: 40618
  chr4:78980804-78980834
  hyper

SEQ ID NO: 110254 - DNA, 292 bp, Homo sapiens; identical to SEQ ID NO: 40619
  chr4:79472690-79472982
  hyper

SEQ ID NO: 110255 - DNA, 164 bp, Homo sapiens; identical to SEQ ID NO: 40620
  chr4:79473033-79473197
  hyper

SEQ ID NO: 110256 - DNA, 30 bp, Homo sapiens
  chr4:79696693-79696723
  hyper
cttcccagcacaagcgtccgctacagagcg

SEQ ID NO: 110257 - DNA, 30 bp, Homo sapiens
  chr4:79697727-79697757
  hyper
gagggcggcagcggcggcggagcggcgggt

SEQ ID NO: 110258 - DNA, 534 bp, Homo sapiens
  chr4:79860212-79860746
  hyper
acggcaggtaggcccggtagccgtcggtgatgtacgggttgtccttgagggacccggggatctgctcgtaggtgtacaggcggatgccacggggcaccaggaccggccagtactggtagctgcccagctcgatgtaatgcgcgctcttcagcagcttctgatgcatcgttcccggccgccgccgctccccggctcgggagctcccccaggtcccgcctccccggggagggggcttcgccgctggcgcccccgccccggagcccgcggacgctgcgcgaggtcctaccgcgctgccgctgctgcccagggcccggctctgcgctcacaccggccactgccgccagcgccgcggcggacccggcagcgtcgcagcctcctctgacgtcagcgcgccgcggcggccccgcccctcagccctagctgggaggggcagggtgctggggcgcgcccgggtgtgctcgagcgtgcgctggcggcggcccgggctcccgggcgtctctcacgctgtgttttggcggcgcctggggtcttcgt

SEQ ID NO: 110259 - DNA, 788 bp, Homo sapiens
  chr4:80993247-80994035
  hyper
ctgtggccgatggagcgtggcccgcaagaggccacactcccatttcccaagaggccaaaagactggcaaacagtgaataccccaactccccaaagagccaagtagcccggggctccaatcactacccccgacccggctgatctccgcccacacagatccgaacgcgcttgccctttgaaagaagacagcaacagggcacccctccgcgggtttccaacaccactccccggggtgcgcacacgcatctcagcctcagccccagctgatccagtgccgccctcaccaggagaccctggacctccctcgcacactcacttgtccaggacgaagtagagatcaaaggctcttctgcaggagggctgctcctgggcgcgcagcagccccccgggaccgctgagcaccaacagccacagcccggggaacagccagctcccggggctgcgggccggggaccgctccgccaccatcctgcggccgggggcctgagactccctcccgctcgcagtcccctaagctcaggagggtcgcaaaggtggcgggagtcacccggcacgcactctggggtggggggcggcgagcagctgagacgccggcgcctgcggcagcgggacccaccagctgacagggagggagagagggaggtcctgagaggacaaagggagtctccgccaccgccgcagctgccgccggaactcttgacgaatcccagtggaagcgcgatccagtcctccccctcccgattccggagagttcctgcagacaatgcgggcccacggcgacagctcgcg

SEQ ID NO: 110260 - DNA, 1326 bp, Homo sapiens
  chr4:81105152-81106478
  hyper
gccgccgaggggcccgcagtagctgcgctcccggggaaggagccccacagtccccaggtaaggaagccgcggggcaggcgaagggcggggaaggaggagcctgagcgttccggtacccaaccctctctctttcttgaccttcctcccctctgccccttcatcctgggcgcggagggcggaacagtttctggaccagagcacccgcgagaagcagggagcggccgcacagcagccagaagagggcgccagcaccccggggccggggctacagggctggctctgccccggcgtcccgcccccgccccggggaacgctgcctctgccgcaaagatgcccccttccgctggaaagcggtaatgcccaccgcccaccgcgaccaccccttccccatttttctcagttctaactgtactcctctctcgtttcctttttgcttctctctctctctcccccctccctcgtcctctcttcctctctctttctctctgcgcttgttttcttacttccccctccctccccgcttgcaccccggtacttttccttttcttttctgatcactggcggggggagggtttgtcgcccgccggaaggtagtgtggaggggatggatgtgtttcacgctcaggttctggctctggctcctctccataggtgcctccctgggtgctcgcgaaagcagccctgagaatggcagctctcagaggttgaagtcattcttttcgggggacggggcacggcgactgtttgattggggggtgagttatgcacttggggcagcgcttccctggaatgcagagctggggatttcccttgctagacggatgcttaaagttcagtggctttgtactgagcccctttctcccctcgaaaagtcatgacagtcaaaagtatctctctttctctctcccccgccccccacttctctccaaaaccctaaagacagcctccccggacagtcttcaccgttttttttcagaagcagttgcgctgggggtggggaaagggagggaagggacattgaaaggccgcagtggctggcaactccgcgcccgtccgatgtcctctctaatcccccagtgttctggcgcgtacccacagtgcccccagaccctccgctcgcccgtgcgccgaggtcgttgggttttagacccagagagcacgttccgtaagctcccggcccaaatcccctcggaaaaattaatcacaaccaccagcggatgcaaaatgtgtgcctgtgttgagtctgtcttttaatcccgaacgtaattctaaaaagcagcatcagacaagagctttattaatcccttacacgagcaaatgcgatct

SEQ ID NO: 110261 - DNA, 906 bp, Homo sapiens
  chr4:81122997-81123903
  hyper
taatcatgtggtgtgcgtgtgtgtgtgtgtgtgcgtgcgtgcgtgtgtgtggtgtttgctcactaagcagggtcgtccccttacacatgcctggaatgcagccaacgtttccagtttgagttcccctatgtggcgcatctgcgtttccgctgccccaagagacttcacagcgctgatataagtccccaagacgaacaaggcggcggcgtgggcaccaaggaccacgggggcggcggcggcggtggcaaagaccagcagcagcagcagcaggaggcacctttaggcccgggtcccaagttttgcaaagccggccccctccaccactacccatccccctccccggaaagcagcaacccatccgctgccgccggcggcagcagcgcgaagccatccacagacttccacaacctggccagggagctggaaaactcccggggaggcagcagctgctccccagcccagagcctcagcagcggtagcggcagcggcggcggcggcggccaccaggaggcggagctgagtcccgacggcatcgccacgggcggcggcaaaggaaagaggaaattcccggaggaggcggcggagggcggcggtggcgctggtctggtagggggccggggccgcttcgtagagcggcccctcccggcctccaaggaggatctggtgtgcacaccgcagcagtaccgagcctcgggcagctacttcggcctggaagagaacggccgcctcttcgcgccgccaagtcccgagacgggcgaggcgaagcgcagcgccttcgtggaggtgaagaaggctgcccgcgcggccagcctgcaggaggaggggacagccgacggcgcgggagtcgcctccgaggaccaggacgctggcggcggcggcggctcctccacgcccgcggccgcgtca

SEQ ID NO: 110262 - DNA, 782 bp, Homo sapiens; identical to SEQ ID NO: 40624
  chr4:81124121-81124903
  hyper

SEQ ID NO: 110263 - DNA, 1569 bp, Homo sapiens; identical to SEQ ID NO: 40625
  chr4:81186746-81188315
  hyper

SEQ ID NO: 110264 - DNA, 133 bp, Homo sapiens
  chr4:81188384-81188517
  hyper
cgggagggacagcaggtattcgccgggacacaggctcaccttcctgagcccaggccactgggaccaagctgatactcagaaacagccgggcgggttgggtggagatgcatctatatggcgtgcgcacacgcac

SEQ ID NO: 110265 - DNA, 174 bp, Homo sapiens
  chr4:81189713-81189887
  hyper
cgcaagtgggtaaggcggtaggctggctagcctcctccggtgggttaagggggcctaatgcggaagacctgatggttcatgctgagagaaaagcaggtctatgcccgcccctctgcgcctgtctagtctatctgatcgcgctgattcagcagcctgcggcgcacgtggtgaggg

SEQ ID NO: 110266 - DNA, 513 bp, Homo sapiens; identical to SEQ ID NO: 40627
  chr4:81256777-81257290
  hyper

SEQ ID NO: 110267 - DNA, 87 bp, Homo sapiens; identical to SEQ ID NO: 40628
  chr4:81951400-81951487
  hyper

SEQ ID NO: 110268 - DNA, 43 bp, Homo sapiens; identical to SEQ ID NO: 3373
  chr4:81951826-81951869
  hyper

SEQ ID NO: 110269 - DNA, 383 bp, Homo sapiens; identical to SEQ ID NO: 3374
  chr4:81951928-81952311
  hyper

SEQ ID NO: 110270 - DNA, 568 bp, Homo sapiens; identical to SEQ ID NO: 3375
  chr4:81952363-81952931
  hyper

SEQ ID NO: 110271 - DNA, 207 bp, Homo sapiens; identical to SEQ ID NO: 40632
  chr4:82135680-82135887
  hyper

SEQ ID NO: 110272 - DNA, 285 bp, Homo sapiens; identical to SEQ ID NO: 3377
  chr4:82135919-82136204
  hyper

SEQ ID NO: 110273 - DNA, 741 bp, Homo sapiens
  chr4:82136243-82136984
  hyper
cgcagcgtgggcccggggctgccggctcagtcgctccggctacgtgtgagccgggggcgcgggttagcgcgatgcgggcaggagctgcggcggcgtcggtgctgccgcctggctccgcggcgggggccggtgcagaggagacacgcagggagggagggaagagaggagggaaggaggagggagggggtcagccggggctactgcctggatagttgggcgccggcttccctaaaggtggggtcacccgcgcccgcacgcacactagcccgaacctttactcccgacacagccgcagtctgcactttataccccataccctccatagtgaggcaacttaagtagggcgataacatcgtggttgtaagcatttttgttcatgttattatttctatttcaagtgtgtgggacgaggggagaggaaagttcagggaggtgttcattttttccttcccctccctttcctccatccttccagtctgttttcactgcaggctctctccacttcgccttccctcccagagctcaaacaggcgcacgtaccctggacatgccctcctctgtcacaccaatgcctttctacgaagacatgtgaccccgaagcagctcgtcgacgcgcccctcccggactctggggccataacttacatctagtttgccagttcacgtgatgctgggggcaggggttgaatcgagtttcgagggacagagattataccttccgaatctgcaggtctttgggaa

SEQ ID NO: 110274 - DNA, 30 bp, Homo sapiens
  chr4:82391561-82391591
  hyper
agctactgttttcacgaggaaagggcaatt

SEQ ID NO: 110275 - DNA, 671 bp, Homo sapiens
  chr4:82391836-82392507
  hyper
atacaccatatccaccgaattcatcagggaggatggacacatctacattccgaagagaaaatcgccgtctagacaatctccttgtgttatctgccacacttgtgccaccctcggcagtgtcagaggattaagctacgttgcttttgcctgaactgcgccgatttggttggggcaagacagcaagcagtattgaaatggtacgtccatacacacacacaaaggcgcgcgcaccccagcccccgtctcgcccttttccctggtgcagcacttaagttgttttcacagctcccttagaaagaacctcccttaagctgactgcccgcgaggctcctagatacctctagctcatctgagattccccaggcaggtgacccgaggcgactcaactgagctctggcaaaagcaaggcgactcagtgtctcccaagtttgccaggtgaacaccgaaggatgacagcacatcaccttgtcggtggcgagtatgtgacttctgttcccttgtcccttcctacgagtcagactttagattacatggcactgacaacaaaaataaacagctccccctacacacacacgcacacaaaactggtcaagaagtggaagaatcaacctaggtatgcacacgaaggaaagaagggatgaaaaaaatgatggacgcgattacaactcaag

SEQ ID NO: 110276 - DNA, 30 bp, Homo sapiens
  chr4:82393163-82393193
  hyper
cagctcaccgcccacgccgccgccacccgg

SEQ ID NO: 110277 - DNA, 808 bp, Homo sapiens
  chr4:82965101-82965909
  hyper
gaagacccccaggcccgccaggggtccctgaggggacacaccctccacctacctcaaacatgggagaggcgcccttgctcggcaacgtgcagcccaggagctcggcgagaaactttgccatatacaagcggtgaggcagggtccctcccgatgcgccgtttctgtcctttccccttgccagagcccgagcgccaggatcctgcccgcagcccgcccgccagccggggccgtggctcggggctgccccgcggctgcggcggaggggctgggccgggcggggagagctcggcggccgcccgccccgcggcgtccagcggtgcgagtgcgcgcagccccgtccgcagcccgagcctccgctctgcgggagccggggcgccgtcgccgcgctagccttttcctctgaatgtcactattaccatagtaaagggaagggccccgccgagggggtggcgggagggccaacggcgcctcaggatgggcgccaagcgtgagcaagggcagccggcgggcgcagcgccttggcgcagacaccggcccgacccacgcctgggcagggccactcttgcaacactgccgggcgggagcagacgccttaagctccgagggagagcgggcggccggggcgggggagggtctgtggatggaagccgccgggctgacccacttccccagttttcccctcggcagcactcacggaggtggaaaggcgggcgcctcgctctgctgactgacccgggagagtcgctgctgccagatgccagtggcccgcaggagctcctgcactggccggcgccgccccacccttcct

SEQ ID NO: 110278 - DNA, 30 bp, Homo sapiens
  chr4:83206237-83206267
  hyper
ccgagcggtcctagcggagctgacactgac

SEQ ID NO: 110279 - DNA, 30 bp, Homo sapiens
  chr4:83206519-83206549
  hyper
gagctggcgctgcacgtgctgggtttggtg

SEQ ID NO: 110280 - DNA, 365 bp, Homo sapiens
  chr4:83293751-83294116
  hyper
ccaatagctgagggcgcgaaaagggtgcgcggttagaataactcagtggggtgggggaagggtagatgctaggccggagataggaacagctccagtcaagtgcaggcccgatcgactaagaacttaaccagagcccgcggagcaaaaccaatgtaccaacaagaaactcggagcatttcaccagacccaatttggtctgcatgtcaaaatgtagggcctgtatgagtatgccattgtgcgatagcgtatggtggagaaaatgagtaaatccttaggcgaaacttattcaaaatcccaagaaaacagtcggcctaaggccgacaagggagaggcagaggtggacagcctacgcgttccccaaaaca

SEQ ID NO: 110281 - DNA, 9 bp, Homo sapiens
  chr4:83295288-83295297
  hyper
cgttgcaca

SEQ ID NO: 110282 - DNA, 30 bp, Homo sapiens
  chr4:83351438-83351468
  hyper
gcggaggcggtgggcggggagggggctgga

SEQ ID NO: 110283 - DNA, 880 bp, Homo sapiens
  chr4:83482617-83483497
  hyper
ggtcaaacttggggtcgcttctcacccgagtccacccgataacgagatgatggggcggcgggtggggacacctgtcaaaggacggggccggggccggggccggggccgcagcgggcgggctggctggcggcactgcggcggcggggaccgaggcgcgccggctcgggcgttcgcaggtcgcggggcagagccggcaccgactcctggacttgccggggagcgtgcgcccgcggagggctcgggcgggcggccccgcgcccgggacgctatgggagggggccgcagccgagcagggccccgcagccgggcggacccagccgccccagccgcgctgcagcccccgccgtccccggtctccgcctgcgggctgcgcacggggccgggccggacgccccctggctgcgcgacgggcccaggcaggggagggggcgccgcgcctacctgctctggtgcggcggggccgctgtcgcctcgaggggctgtgacctgctgcggtggcggcggcggcagcagtagcggcgggtagggcgcttccttcaggaaggggtgggatctgctcacccgcccgcccggccccctcctgccgcgccggggcccgcccccgacttattctggggtccccgctgctaggccttcggggagagttgatcccctgggtctcgggcttctgccacccccccggggcccctaatagtcacccggggcaggagccgggtgtgggcgggcgagccgcttccttccgaagcctttgtggacgcgtttgcctggcgctcctcatccaacaaaaggaaggacagaatcttggatcctccgcctggtggttatttattcctgacctgttgtaaccttctgcctggctctctttcgtccgcacacctag

SEQ ID NO: 110284 - DNA, 131 bp, Homo sapiens
  chr4:83718792-83718923
  hyper
ctctcgccatgggatcggtttgctcaccgagaaacttcaccgagaactgcaaatgggcatagaagattgcggagggggcagggacaggggccttggagaggcaagaggggaaccggtatcttccatctggt

SEQ ID NO: 110285 - DNA, 498 bp, Homo sapiens
  chr4:83718966-83719464
  hyper
cggtccaactcccttacttgtcctcatctctgtccccaaggtccgtgacccgcggaggtgatgggggggataggagagccccagggaccgcagaggtgacacaatcgcccgcccgtcctccctcgctgggagccgattcagcctgtgccgagcctctcccttcgcgcgcctctgcgcacagcggtggcaccgcaggactccgggtcccccccggctctccatcgggaagccggcaaatgcgcttcctcaggcagaccgcggcggggtgggggcggggggggggcggaagttgaaatactgggacagaaacacctgcccgtcccaagggacggaaaactggatgccaagggggccgcggcgcgcagcgggaggcgaggggagaccgggggtcgctgcgcaccgcccgcagccgaggggcgagcggcgacctcgcgcgccccagcgcggcctggccacggaggccggggcgcagggggcgccggcgggacttaccccaga

SEQ ID NO: 110286 - DNA, 375 bp, Homo sapiens
  chr4:83719880-83720255
  hyper
atcttggcggccggcgtctgttgctggcgtatcccccatatggctgcccgggctgaactcggccgcgagaaagaggaggcgcgcgcggggcgggaggggcgcgcggccggggaggaggagctgtgaaaatggaacggggccggcgacgctggagggagcgctccgaaggagcgcggaagaaagccctgcttagctacagccaatcaggagcgcccgtgcggcgcttatagacaaaggcgcccccctttcggcttttcggggccgaactggggagcccgctgggcgggagttggccgcctccgcccgggggcgggtggaaggtggctcccggggcagggagcctgcagggcggctcacagcgcttctgctcttgtg

SEQ ID NO: 110287 - DNA, 284 bp, Homo sapiens
  chr4:83812350-83812634
  hyper
tccaacgtggcagccgcagccgcagccacgccctgcgcccaacacttccgggagcgacatctttccccgcccacccgacgcacagcccgccacggcacttccgggaccggcggtagcctgggaggcggggtacggctccgctggttggtggcgctctgcggtcatcgcgccccggcgatcgtagaaacccttttctgaggggcggcgcgcagaatgtggatggggtagccaggactagtgggtaaaggactagtgcagagggtgtccccgtctggccgaataac

SEQ ID NO: 110288 - DNA, 235 bp, Homo sapiens
  chr4:83821697-83821932
  hyper
cgcggagggaggagcggtcaaatgcacgtcttcaggctcaggcccttccgattggctgctgggacacaacgtggcctgtcattggctacggcaccggcgcagggccttcggagaggaagtgtggaagtcccgcgcctctaaagcccgcctttcgtgacaaataaaggtcgtagccgcagagtcaacgggcggagctaaagtggtcgtgattcatgctgtcgcgggaaccccgaag

SEQ ID NO: 110289 - DNA, 30 bp, Homo sapiens
  chr4:83852148-83852178
  hyper
ttgagaggataacttcgtcttggctgctgt

SEQ ID NO: 110290 - DNA, 30 bp, Homo sapiens; identical to SEQ ID NO: 40644
  chr4:83931887-83931917
  hyper

SEQ ID NO: 110291 - DNA, 30 bp, Homo sapiens
  chr4:83934354-83934384
  hyper
agagaccgtcccttcgtctagctttccttg

SEQ ID NO: 110292 - DNA, 202 bp, Homo sapiens
  chr4:83956036-83956238
  hyper
gaaacggaactttgcgaaaacgcagtcgttttatgtaccggctactcattggagttacaccagagactcactactggagttcatcagccaatccaaagtccaagcgtgagagccagagcctgtaggagagacctgggcaggcctcagacctgaggagtggagctccgcatcactcaaccctgggggcggagctagcccaggc

SEQ ID NO: 110293 - DNA, 30 bp, Homo sapiens
  chr4:83956633-83956663
  hyper
tgtgcaggggccttcgaggctatagacttg

SEQ ID NO: 110294 - DNA, 306 bp, Homo sapiens
  chr4:84030839-84031145
  hyper
cgggcttcaggaggcggggagtgggtgggtgggcttcttaccttctctgcccgctctgcactcgggaaggggctgtgagcggcagctgcgcgcggggctcttcgatcaaccctcaccccgccggattacgcctcccgccagcccagctctgggacccctgggtctcctctgctgggaccagacctgcctgccggtaaattcttaagagcagcccgcgcagaatctatcccaaggagaccgcccatttttgctggggcaatcagggaactgcgtctgcggatggctgccctcgggggaccattcgcc

SEQ ID NO: 110295 - DNA, 268 bp, Homo sapiens
  chr4:84205946-84206214
  hyper
ttgacgtcattccccggcaggcatgcgcagtggcacccgcaggatgcaatcctagtctgccaggctgggcggcggtgtgggcagaacctttcctcatccttacttgtgaaattggggtcatcgtggtcgcttactctagggaggaatacttaatgaaaaagggatttctattggcaaaaggcaaaaaaattacaataaatttagttgtaattttttacaactcgatcttgattgactttgtggttccattatcgggcaacactcagaa

SEQ ID NO: 110296 - DNA, 30 bp, Homo sapiens
  chr4:84256319-84256349
  hyper
ggcttcctgacgcacgtgttctgcgcgctc

SEQ ID NO: 110297 - DNA, 86 bp, Homo sapiens; identical to SEQ ID NO: 40648
  chr4:84292569-84292655
  hyper

SEQ ID NO: 110298 - DNA, 572 bp, Homo sapiens
  chr4:84376735-84377307
  hyper
tccgggcacgagctcggccgcggtgggagcgccaaaaatacaccccaagcttggacggttccttttggggagagacacccgccggcggatgcgggaaccacattcatccatggcaaggacccagggccctattcagacgtcgttctcagtgacccagacgctaagcccatatggaagggagagtgggacgccggagcccgcttctacatccaccttgggaaaagaccccaagttagctctcagggctcgcggaccggaagcacgcataaacttctaccctgtccaatcataagcctcacgtgacctgccgcgtagggagggcacgaacagaaaggtgctgcgcatgcgtattgaaaaacctcacctactctcgcgggtcctcagcgttctcctgcggaacctttgaacggggtactcgagcccacaggggaagagcagcggaaggggcctttcggaacgatttggaacgaaaggaagtggaagaaacgcggaaccatggccgctgtggttgctgtttgcggtggtctagggaggaagaagttgacacacttggtaacggctgctgtcagcct

SEQ ID NO: 110299 - DNA, 30 bp, Homo sapiens
  chr4:84405856-84405886
  hyper
agctacaggggcgccgaggaaagatgggag

SEQ ID NO: 110300 - DNA, 30 bp, Homo sapiens
  chr4:84406187-84406217
  hyper
aagcccgagagcaccgccgacgtactctcc

SEQ ID NO: 110301 - DNA, 62 bp, Homo sapiens
  chr4:84406473-84406535
  hyper
actgcagagggctgcgaattgcttttggtggcctgcgcctgctgagcgacctgtcacaaaca

SEQ ID NO: 110302 - DNA, 211 bp, Homo sapiens; identical to SEQ ID NO: 40651
  chr4:84456994-84457205
  hyper

SEQ ID NO: 110303 - DNA, 228 bp, Homo sapiens
  chr4:84457806-84458034
  hyper
tttccacctggctgacgctggttctcggcttcatccttttaccttcggtcttcggagtgtctctgggcatctccgagatctacatgaagatcctagtgaaaactttagaggtgagtgccgggagggatgcagccagccccacaccgctgcgggctgagaacccgggggtccagttctcaaggtcagtggtcgcgagtcaggggtgtgtgtgcgcgcgtgtgcatgcgt

SEQ ID NO: 110304 - DNA, 689 bp, Homo sapiens
  chr4:85402784-85403473
  hyper
tcgcttgcggggtttcggagccagaagtctcgagctccgcgcctccgcgcccccgcgccgcgcccttccacctgcacccgttaggcgcgctgcgggacaacagcgcagatgcaaacagctttctcgcaaggaaaaagggaattgaggagaaagtttcctctctgagccgagggaagcggaaaaagatcaaaggtcgggggcgggtagagtgggggtggggggaaccgcgggacgccctagctgtgtgcgtttcgggaggcctcgcagtgccattctgcaagagtacctgctatctcgaaaatcttttgccaccgccgaccgcagcgggagggggcaaggggctctctctgactcagctccggatttgtgcatccccgcagtgcggcacccgcagtcttgacttccccagtctctgactgaacagatgtttttgtccctcgcggagatttgtaaccgatgttgggaacagctagtggacggtgctagcaacctgtatctgttctagaacacacctagtgggagctgcggggtagagtggagaggtaggaatgcagcgggactggggcaggggacaaatcaaggtgtgtgggtaaatgtgaacatatgaacacacgtgtgtacgcacgtctctaaatgtgtcattcataacattttaaaaatggtcaagtccggccgggcgcggtggctca

SEQ ID NO: 110305 - DNA, 155 bp, Homo sapiens
  chr4:85403772-85403927
  hyper
atagctgtggttgccttttcggtttcaaagtaataaccaagcaaggaagagagaagaccgaaaactaccccgcggaaactagcacagtgtgcctggatgtctgtgtcccgggacctcggggaagagggcccgcaccggtctgcgaattgcaaggc

SEQ ID NO: 110306 - DNA, 29 bp, Homo sapiens
  chr4:85404111-85404140
  hyper
ggggcgcgtgtcagcgttggagagcctgc

SEQ ID NO: 110307 - DNA, 251 bp, Homo sapiens; identical to SEQ ID NO: 3386
  chr4:85404224-85404475
  hyper

SEQ ID NO: 110308 - DNA, 283 bp, Homo sapiens
  chr4:85404919-85405202
  hyper
gacaactgaaggcagcggccacggctgccttttcctgccctgaagtggtggagcttctgggaagatccggggcctgtagcgccctttccactgcgagtaggcgcagccgctttacaggttgtgcgatggatacaggtatcgtgtggcagacgtggtgccgtctgggcttaaagccatcgataagcaaactacacaagccagccaatcccgagcgttctaattgccttagtcctgggatcacccacgcagcaagtccagccatgaagcccgcccccacagacac

SEQ ID NO: 110309 - DNA, 30 bp, Homo sapiens
  chr4:85414976-85415006
  hyper
agtaaaaacaaaactcggaaacttaaaaat

SEQ ID NO: 110310 - DNA, 1463 bp, Homo sapiens
  chr4:85416759-85418222
  hyper
ccatgtgtgcacgcgcgcgcgacaggggcggtacctatccctccaggtatgcaaggtccactcaccttgacctgactctctgtcatccccaacgaataggccaaacgagccctctcgggccccgccaagtattttgtttgttcgaaagtcttctccagggcgaagatctgctgtccggaaaaagtgggtctcgtgtgttttctcttcccgtctttgtccaacaaaatggatccttgatctgtgagaaccaataaacaacgagagagggggaaaaacaatcggttacaagcggctgcactagggggaaaaaacgaactcgaaaaacaatgttttgtggggaaagaaagctcagtctgtggcggacaccagaagtgtagtggcgcttccagactaacggcacgtctccctttgcttttttacatccacctgttttttaaaagccgcgtgtttggcgcagcagtaaataccttctgctcaacaccgacgtcaaacagctagggagcctattgctaaagtttgccagagcctaatcgcaaggccccattaaattaacgactgccagaaaaaggccactctcgcctcctaatccagtcggtgctcgttcggccccggagcctttaagtgagaataactagatttttttttttttccttcaacgcttccctaacctgtgtccaggcaacaaaggggtccttgtttttgcacacaagagagctaaatcgcccccaagtctaacgtcgctgcagccgagggggagaggggaagggggagggggcacagcctttgttggcggcccctaatacggccatcaaaaccgatacaatagcgtctccctggcacccccaccaggcccggctgccacagtccccgggcttcccaagagaacctccacttggctttcgcaacttcccgcagttactgccgctcagccgcactaaggaggtccggagacttggaagaaacttcggagactcgctgaaaggcgaagaactgagcgagaaaaggaccccaggctgggccctgaagtccacctggaaggctgggagcctccgcggcgctgcggcctactaccccgaagactagcgtgatcttggggcaactcagtttgcctcaagcaaggtctttgcgggatggtacattttccccaggccgtgtcccttcatctcactcttctcctggctcgctcttgtgttagggtgttgagctccacgatgtccccaaatgtgcccggacgcagcgtgtgccagcccccagagtggaggcaggtgggaaagcgcgggcccagcgctggtgagcggctggaagcgctcgccctgccctggggacgctggactgtcttcaatgggctcacccaggccgagtgtactcgggcggcgagggcgaagaggtgaggtggggacaccccaggcggagacgtgcatgcaaatacactcacttcccgggcggtggagggctcaccgctg

SEQ ID NO: 110311 - DNA, 105 bp, Homo sapiens
  chr4:85418264-85418369
  hyper
cgaaggcggaatggggcgctggacgacagggaggagccgggaaagcagagatgcagtggcctctcctcccctctcctccccatctttctaatccaggccaggcct

SEQ ID NO: 110312 - DNA, 61 bp, Homo sapiens
  chr4:85418521-85418582
  hyper
cgagctcagaaaagcgagaatccctttctggaagccctggcccaacctaactggtgtgatt

SEQ ID NO: 110313 - DNA, 520 bp, Homo sapiens; identical to SEQ ID NO: 40659
  chr4:85419120-85419640
  hyper

SEQ ID NO: 110314 - DNA, 965 bp, Homo sapiens
  chr4:85419661-85420626
  hyper
cgatccctggctattctctcttcctcacttttcctagctgttcaaagtgcgctacttctcatcttctgcccccgggaaataagcaaaacaaaacccaggctggctccggagagtttgtagcaaagttagttgccgaatctccactttgaagttggagggtgggggtggcttgctttctttggggaggttcaaaggacgccttgtgcagcccgtggcgctcctctgatcttactgggatgctctgctctttcggtcgcgcggctgattcgcattcgacgctcactgtgcccggggagaaagcgcatccagcccgcgggagatctagcctctgtgcgggcttcctccgcccacgctgccccgggctgctgcgccagaaagggcagtgccacggatccccgcggctcccaggtcctcacctccacccgccttgccctctggcccacggggcactggagttgcaatattgaaaagaaaaagggggaggaaaaacacagaaaaacaaaagactaagtgtgaaaagtctgacggctgggtttcggcgccgctcgtcagtccacttctgcaaacgggcccggcgacccccgccccacccccgctccctctctccctctcactctcagcctttgactctcctctctggcattttcttcgcggcttcccaggcttcggtcttctaagtcctgtcctctggccaaactgaccctctccgcggctcctccgctctttctctcctttcctctctccctccgggcctgacagttcagatgaagctctcaaaggtaataaaacatttgcatcactccctacccctctttagctgggggacgaaagggagggggaagtgggggaccaaaatgagaactttgagggacgtcactccgaggctgcgggggccggcgagccgggcgcaggccgggggcgtaaccaccgtgtccaatagctcgccgcctcgatccttgcgtcgc

SEQ ID NO: 110315 - DNA, 30 bp, Homo sapiens; identical to SEQ ID NO: 40661
  chr4:85421035-85421065
  hyper

SEQ ID NO: 110316 - DNA, 15 bp, Homo sapiens
  chr4:85421286-85421301
  hyper
cgcgttcattatcat

SEQ ID NO: 110317 - DNA, 66 bp, Homo sapiens
  chr4:85421915-85421981
  hyper
ctattggtgtcaaagcgctcatttgggtccaagcacgaaaagccaggagggcgtactccgcttcga

SEQ ID NO: 110318 - DNA, 136 bp, Homo sapiens
  chr4:85422301-85422437
  hyper
gggtctaaaccccagcgccctgccacctcggccaggaagctgcgggaggatggtggcaggcatagcccgtcctagccttgaaactggggggcctatgtctctggcttcgttacaaacgaaacgtttctcgccttcg

SEQ ID NO: 110319 - DNA, 63 bp, Homo sapiens; identical to SEQ ID NO: 40663
  chr4:85422865-85422928
  hyper

SEQ ID NO: 110320 - DNA, 79 bp, Homo sapiens; identical to SEQ ID NO: 40664
  chr4:85422972-85423051
  hyper

SEQ ID NO: 110321 - DNA, 137 bp, Homo sapiens
  chr4:85424272-85424409
  hyper
gacagcgtggaaaagcgccgtaggatcttgcgttcggcgctctcccagtggaggccaacaccaaacaagtggggaagcgaccagtgtaaacagccccatccattctaccacagaaaagatctcgaagtccaggacct

SEQ ID NO: 110322 - DNA, 30 bp, Homo sapiens
  chr4:85424705-85424735
  hyper
aattaaaatttcccccggccccgcgtgcgc

SEQ ID NO: 110323 - DNA, 30 bp, Homo sapiens
  chr4:85425198-85425228
  hyper
aaaaaacttcttagcgtttcactctgtcta

SEQ ID NO: 110324 - DNA, 385 bp, Homo sapiens; identical to SEQ ID NO: 40665
  chr4:85503525-85503910
  hyper

SEQ ID NO: 110325 - DNA, 1108 bp, Homo sapiens
  chr4:85503985-85505093
  hyper
cgtcacctcacggggaggcggggctgtgggaaccgcagtgcagcgcagaggggcggggcctgcggcgcgagacctggtgcgggaggcccgggcagggagaagtgtgcggggccgggacaagccggctccgagtccggctccggggggcggggcgggaggggcctgcgcggcggcgggagcccagagccgcgctaaagcgggtcaagcgtcctccttttctccccgccccttctcctcctcctacctgggcctctgcgtggagacgcgcacctggcaaccggaggccgcgtctccgccttctctgctcgcgcctggcgcccggagcctgcccgggacctccgccggagccgcgctcgctgcaggcggcctcgagcgctctctcgttgatgccgttttggaggtgaccggcgcggcggccgctctatggtggggccgcgttagtggctgcggctccgcgggactccagggcgcggctgcgaggtggcggggcgccccgcctgcagaaccctgcttgcagctcaggtttcggggtgcttgaggaggccgccacggcagcgcgggagcggaagatgttggagctgaggcaccggggaagctgccccggccccagggaagcggtgtcgccgccacaccgcgagggagaggcggccggcggcgaccacgaaaccgagagcaccagcgacaaagtaagtggagccgagagaggcggacgccgcgccctggctgggtcctggttggaagcgggacacttgagagcaagggtggggcccgtccagcgtcaggtgaggctgcacgctgccggtgcaccttcctccctgcctggcactgcttcctccttctccagagggggtcgggacccgggatcccagtggcggtgaggttcccaggatgaccgcggccgctgcccgggagaaatgggccactcaacccggcttacagtttagcttcatcctcttccggtcccttcttcaggatctggggccgacgctggaatcaggagggaacctgtcctcctaggggctgcagtgcagttagtagctgccacctcacctctcttttcagtagagggaacaaagttagtaaggactagagacgtgccaccgtcggc

SEQ ID NO: 110326 - DNA, 30 bp, Homo sapiens
  chr4:85642679-85642709
  hyper
ccatcaggtgcagatcgggagcgttttaga

SEQ ID NO: 110327 - DNA, 1670 bp, Homo sapiens
  chr4:85886792-85888462
  hyper
tggctccttccataatcgaagggcttccagcgtagggcgtagggggagaggcccgaagccctggagacagcgcccgagggatggaggccgcgctcggctgcgctcaggtccgggtggctccgggagctgagaccccgcaggatgcagcgggggggggccagggcctgatcccctacccctgcgagccagggccgcctacgcccccactgcttcccacaggtaacgtccagccctctcctcccctatcccccgaaatatcccggttccgctccgctccgctcgccgcccgtgaccccgaccccgacccgtccgcgacggcgccctccccaggaggcagcggaggactagggccaggccgcccaccctggcggcggcggcggctcccggccaaggcggaccctggggaggacagcagctgggccgcggcctgtccctagggggagcgggcgcagggccgcgagtgggcagcgcctccgccccgcacgaacaaagcggccaggcgcgccgggccgaggcagcaccgcctctccgggagcgcggggggcggggaggatggcgggggtactcacctgagggccggcggagggcgcgggcgggacaggcccaggagacgggaccgcggcgggccggggctccgcgccgagggcgcacgggctacggggaaggggcgaccggcgcgacgtccgcggcggggcccgggagccccgcgccgcgggccgggggccggggcccgagctcgattctgcggccgcgaggtatgggaaccggtccgccgggccaggcagcggtgctaggcagcaggggcagcgacgccgccgcctttcccttctcctgcccccgtccctgctccgccgcgtcctcgtcctcgctgggtccccgccgccgccgcctcagcctcggcgctcctcgggtttcttctctccatcaaggccgggccgacccgcagggaccatcccggaaagtgaggggttgttgccgtttcccgcagctgttggtggccatctttaatcctcctcctcctcctgctttctccacctcccgctggctgtctgactgactgactggatcctcctctttcccctcctgctcctcctactgagccggccgcagaaattgcagccgctcagcttctaccccctcctgcctttccttcctctttccttacttccttcccttccctcggcttcccgctcttgcctcactctcagcggctgccttcgcccctgtctgcagacagcgccgctggatgctcccagctggacttcaaccccactcctctcagtccctctccccactgccttccagacgcgcctcttccccgccccgcgcccctctctcctctcccacccctgcccctctccgcggcgctcaccctcctcagtcccagtttctgaaaggactcagctgagaaaggacaactgggttccgctttccttaaccctacaccctttagctggatgctgtcagaggcgatggagaaacgcaaaggtgcgttaattttactctagccagagtataaaagaactgcccacgccagctattgtactacgcagcttcgaaactcctgcacgctctcctgtgtggctcccgtccgtgatgggactgtagttgaggagctcggtctcaaatggtgccttccgtcagtgaccttgagtcggttgcctaagatt

SEQ ID NO: 110328 - DNA, 102 bp, Homo sapiens
  chr4:86396087-86396189
  hyper
gtcagtggcgccaggcggtgtagctccagctctcagataacccaggctttgggagggcggggctcctgccggcctcccctgtagtgcggctcgagtcctgtg

SEQ ID NO: 110329 - DNA, 544 bp, Homo sapiens
  chr4:86396421-86396965
  hyper
ctgtcaaggctgcggcggggaccagagaggagcctggcgggggtggctgggtggctgggggaatccccccaacttcccatcgcaggcgcagctctctcggccgcctatttcctccgaaacccgcgctgcggagcagcccagtgcatagagttcaacacttccccttgttgtggaaagtaaaggagcctcactaccacctttttttctttgcgttttcttactgctggtcctgggagccttttccttcggagcagcagccctgtccggcatctgtcttgagctcccagcaaggtaggtgatgcggtcgcgaggaagtgcgcggagctaccgcgggaaggacggacgcggctgcctgcgccaggggagggggctgcggggggcggggagggggctgcggggggcggggagggggctgcggggggcggggagggggctgcggggggcggggagggggctgcggggggcggggagggatcgcaggaatcccgtgctgatgtagcctgtctgtgtttgtgtgtgtgtgtgcgcgcgcgcgcatgtttgt

SEQ ID NO: 110330 - DNA, 234 bp, Homo sapiens
  chr4:86851206-86851440
  hyper
cctgctgaatgtgaccggcgggcactggaagcagccgcagccacagccttggtgaggagcaaccgcagccctgccagctccctcccagttctcattgagaaaaggggagacggagcaggaggagggggaggagatgctccctgcaaagctgcctccccccacagatccaaagagcctcttggaatgggcactcgactgttctgacgttgtgattctctcgggagtttgaagaca

SEQ ID NO: 110331 - DNA, 455 bp, Homo sapiens
  chr4:87281208-87281663
  hyper
aacctaccagaggagacggacagagggcttggggaatggggttgctatggcaaccgaaaggagcacacatgacgtcaaagcccagagaggtctagggagggggatgagggggaaacagaaagaggaagcgtctatgtgcagctacagctactgtgttttccggtgaaatgaggaccaggcaaatgtaaaggaataaggttcgtcggcagccaacatcagcaactacgacatcaaggcagccagcctgcacaacctgaagaaaagatccattcgatgcagttctggccctttgcacagcagcacggaggagcaaataccagcagagcaaaacaccactggaaatgcaacctctgcttttcaactatctcttgtagtatctctaaacgtcaaacaagtaagagatggtaataacctcagaggagaagcaggcatttgagtgtcgcctgaaccccgag

SEQ ID NO: 110332 - DNA, 1008 bp, Homo sapiens
  chr4:87515018-87516026
  hyper
aaggctgagaggcagcgaagagtaagggaggagccagcacttacgcatttttcactctcctcctcactccctagggtcatagttttgattctgaagttagaagtgtgggggtcgtcggctgcattttcaacttggcctaaaagttggagttcaccacactgcaggcgctaggaactctgccgctcggtcaccaacctgagcctctggctagtccgaagaacgcgaaaagccaggcccaaggcactggttgtcatggcaaccggggcgctggtctccctggcgacctcgtccctagggaggaggtggagctggatgccaggcgggccaatgaggtcgaggggagctcggggtgggagatctgcggtcctcccagtgccggggaatggttgagtgacaggaccgggggggcggagccggcgcggctgcccgaggtggagccccagtggtgcgagtagctccagcggccacgctgaggcgagggtgacacaccatgctcacggcccctggagaccgtcgtgctggcgagccgtgctccgtagctccccggtccgcctcggcagcggtcagagtcgcctacaggagttgagccgcccgcgccagaaggttttggcgaagctcttggagaggcgtcgagcacagtagggcggcgggggtgcgttgagcgctcgggggtcaggcagtcggccgggatcgccgctggggagcgtttccgaggcgaggaggaggaggaggagatgctgctcctcttctccccctccccaggctccttctacagctccttcagcccacgcccgcagccgcttgtgggagaagtggtggtggctctcggcgcccgcggcggctgccggcggcccgccccgacgccgcgtccctgcagccctcgcccggcgctccagtagcaggacccggtctcgggaccagccggtaaggacgagagccgccctgggctctgcgctgcatgtgcagaagtgcaaaacaaagtacattgcgctcgttctcttcctcctc

SEQ ID NO: 110333 - DNA, 46 bp, Homo sapiens; identical to SEQ ID NO: 40674
  chr4:87516266-87516312
  hyper

SEQ ID NO: 110334 - DNA, 822 bp, Homo sapiens; identical to SEQ ID NO: 3396
  chr4:87813017-87813839
  hyper

SEQ ID NO: 110335 - DNA, 75 bp, Homo sapiens
  chr4:87855922-87855997
  hyper
gtcaccctcgcgaccggggcggtcattgccgtattccgtcctgagctgccgctcccccacgatcctcccaccaat

SEQ ID NO: 110336 - DNA, 1020 bp, Homo sapiens
  chr4:87856413-87857433
  hyper
ccagggctgggggtcgatccgcccggcccccgacgccgccgccgcggacttctcggaagccgaggctctccccgcctctctgccggcttcccagcacgctgactcaagtcgctggcgttcccacttttccggtgggagccctcggggagaacgggctagggctcagagctctcaccgccctacttgcgatcccgcggcaggtagcgcgtagaaaaacaggggacggggacatgggaagagacccatgctcctccctcacgcgcagcccccaagtcagacgtttgcctgtgcaccccgcgttttgcggagagctgtcccgttgttgggacctgctacttgagttgcgtaatgagtcccagaagtttctcggggggagggggcggggaaaagtggggttcttctctcctgcaccccgggacccttccctgtgcctgtcgtggagagagatgagggcttcccgccgcgtctcgctgagagcaggagggaggcgtgtgtcggtggtccgtagcctccggggaggagttggagccaccttctgagacttaacttcagggacagagggagaggcgtctttagtatgggactggttaatttctcttgataatgcttttttccctcgggtgtcccatcctctgtggccgtcgcaaccccaccctccgacggtgcgagcgccggagccagcgaatgagaggggagagaaggtggagagtgtgaatcacacgttaccttagtgtaatggtagttgcattaatggagctgcgacgggcctgcgggcggttcgataccgtccggctagttttctcttcccggagcttctccaccaccagcacccgcaaattgttatgcagatcatcccgggaaggcacttggctttggaggtggagatgtgtccgaatctcccttgaaccagtctctgttagggggaaaggccttgcagccaagtgatttgttttaagggtggagccggagataattttaaacaccctcccccttggtgcacgttgcggggtgtgactcacc

SEQ ID NO: 110337 - DNA, 30 bp, Homo sapiens
  chr4:87928575-87928605
  hyper
ggtaagccgtgcaccggagaaacttttcaa

SEQ ID NO: 110338 - DNA, 30 bp, Homo sapiens
  chr4:88110921-88110951
  hyper
tcccagcactttgggcgggatccaccgagg

SEQ ID NO: 110339 - DNA, 30 bp, Homo sapiens; identical to SEQ ID NO: 3399
  chr4:88141302-88141332
  hyper

SEQ ID NO: 110340 - DNA, 30 bp, Homo sapiens
  chr4:88141811-88141841
  hyper
ggaagtgtggttctcgggacctcctccccg

SEQ ID NO: 110341 - DNA, 30 bp, Homo sapiens
  chr4:88157081-88157111
  hyper
ggcgccattggaaacgttgtaaaatgcttg

SEQ ID NO: 110342 - DNA, 30 bp, Homo sapiens
  chr4:88312308-88312338
  hyper
agaaagagtaggggcgagagcaaggaggaa

SEQ ID NO: 110343 - DNA, 137 bp, Homo sapiens; identical to SEQ ID NO: 3400
  chr4:88886999-88887136
  hyper

SEQ ID NO: 110344 - DNA, 235 bp, Homo sapiens; identical to SEQ ID NO: 40680
  chr4:89079572-89079807
  hyper

SEQ ID NO: 110345 - DNA, 512 bp, Homo sapiens; identical to SEQ ID NO: 40681
  chr4:89079844-89080356
  hyper

SEQ ID NO: 110346 - DNA, 30 bp, Homo sapiens; identical to SEQ ID NO: 40682
  chr4:89204772-89204802
  hyper

SEQ ID NO: 110347 - DNA, 30 bp, Homo sapiens
  chr4:89205322-89205352
  hyper
ccgcctcaccccgacgagctgctcacgacc

SEQ ID NO: 110348 - DNA, 30 bp, Homo sapiens; identical to SEQ ID NO: 40683
  chr4:89205669-89205699
  hyper

SEQ ID NO: 110349 - DNA, 442 bp, Homo sapiens
  chr4:89299894-89300336
  hyper
cttgaagttcaggcagcgagagttgacatggggccagggctgcgcccctggggcgggttgaagacagggtgagtctcttgatattcaggaaatcatcgcgcacccagtcaccagcgttcgggagcctgtcgcagcgggaccgacggaatccggagcaggcgacagggcgcagaagcgggatgtacttctgttggggcgccgactccagggagctgcagcgccggaggacggcgggcagccccggggctgagctactgcaggcggccagcggggagcgccactctctgctgctgctgaccaaccacagggtcctctcgtgcggagacaacagcaggggtcagctgggccgcaggggcgcgcagcgcggggagctgccaggtgagcggggggccccaggtgcagggtgtgaggaccccagtacatgggcgcgggggcttgggta

SEQ ID NO: 110350 - DNA, 843 bp, Homo sapiens; identical to SEQ ID NO: 40685
  chr4:89377923-89378766
  hyper

SEQ ID NO: 110351 - DNA, 130 bp, Homo sapiens
  chr4:89378831-89378961
  hyper
cggcgcacctgagctgtcttttatcccggtcagtgtcaggcgcggggtgagcgggatactggcgaccagcggatcctccgctcagcaaagtggccggtgcggggcatgcgggcaccgtcttcatcctttt

SEQ ID NO: 110352 - DNA, 178 bp, Homo sapiens
  chr4:89444419-89444597
  hyper
ttcccgcaggctggcgttgcgttctgggagatgtgggacgcagctcccctggcctccggtctcccccgtcctgcccgctgtgcgcccggcgaggacagagtccagaatgtggcagcggagagtacctgaccgacctacaaggccccagtggctgcaagaggccgcggtccaccgctcc

SEQ ID NO: 110353 - DNA, 275 bp, Homo sapiens
  chr4:89444894-89445169
  hyper
cgtggccgagctcccggcttcccgttcgtccaggccagccgggcaggccccgccccctggtcctccaggaaacgctgccgaggagtaggcggggcgggcgctttggttccgagggtgcttctgctccgactgcttttcccacgggcgtcatctatagtccggaggacagccccagggcagaggcctctggtgagtgccccgccgccttaccagactacaaactaaaccagtgtttaagtcaaggtgtctgggttttcaccggggcctgtccaagg

SEQ ID NO: 110354 - DNA, 152 bp, Homo sapiens
  chr4:89513527-89513679
  hyper
ggccgccattggcgcgggcccatcccagaacggcgcccattggcccggtgcgaagccattcacccagcgcattccgccgcccgcaggcttgcggggaaacttccttattattgtgacgccgaaaacggagaaaccccgggtccggcgagagg

SEQ ID NO: 110355 - DNA, 30 bp, Homo sapiens; identical to SEQ ID NO: 40690
  chr4:89513907-89513937
  hyper

SEQ ID NO: 110356 - DNA, 30 bp, Homo sapiens
  chr4:89744416-89744446
  hyper
agcagctgaaccaccgggccaatcagagca

SEQ ID NO: 110357 - DNA, 30 bp, Homo sapiens; identical to SEQ ID NO: 3404
  chr4:89744925-89744955
  hyper

SEQ ID NO: 110358 - DNA, 30 bp, Homo sapiens; identical to SEQ ID NO: 40692
  chr4:90031844-90031874
  hyper

SEQ ID NO: 110359 - DNA, 658 bp, Homo sapiens
  chr4:90228652-90229310
  hyper
tccctgtgcaaaatgtgggaccgaatcccttccgcatccctacagagcacaccaccaggctccggtcccccgcgctggccgccaggcggaggtgcgcagggggcgtctcctacctgctctgcccggctccgcggcgcggcggggccactgcctgcgctgtggcgggggcttcccgtcgcatatcccaagcaccgtctctcggcgccacaccgatggctccggcgggcccgcgagctgaggtccttctcagcccggtcccggagcgagctccgtgcgttcaggaactgaaattactatgccaagagcagaggcggcgcgcagcagtcgggcgtagaccgagggggctgcccccaccgcggggctgcagacgccgccgccgcccccgccgggcgcagagccagtttggaggtgagagttcacttgcccgactgttcatccgtcaggcccggggtgtacccatctgtccagcgctgcccagcctgagcatccgagagaggggcgacagctttgcaggcggcggcggcggcagcagcagcggcggcagcaggaggccgagctccgccccctccaaaccccctcccccgccttcccggtcctgggggaaagtgttgcagcccaggctgctgagcgccgggccgggagctaggaggggtctggt

SEQ ID NO: 110360 - DNA, 1659 bp, Homo sapiens
  chr4:90757396-90759055
  hyper
ccgtctccaaccccgcgccagccacccgagggggcgttctcagcctccaccctagcggaccccgcgccagcacttgttaacccgttaccacctgttgacttggcctccttgcacttccatttcattatttgccaaacgcagcttgcttactttacagagaaaaaccaagagagcgggcagacagattttatgtgagagaaaagttggatgctcacgctccatggagcatcctcgcgtttcccggggaaaagcggatcccggagaagcagcctaatctctcagcccttgtggagaagggaatatcagaagcaggacgaaagccaggtcaagtctctttccttaggctccccaaagggacaagtactcacctcccagagacctggcccagcgggtcctcatggcagcaccaccccctcccggtgcccacgaccattcgtctcccatccggcgttctccaggatttccaaagacgcccgtttagatccacaggtacttacctgagtccctctgcttctccacaactccgactcctccccgcctctctctttttttaaaaaaaaaatttaaacaattcccaaataatatttaataggaaagaagaaggaaaaggagcgcacaggaagggcggaggcggcacccgggggggactgtccccagaggaggccgctgtgagccggcgacgcgaggctgggggagtgggaggcaaacccgctaacctgtcgtcgaatggccactcccagttctccgctcacgagggtggaaaggcagaaggcttgaaggcaaggcgtgagggagcgcccaggacgctctcggaggggccgggccggggtctgcgctgcagcccgcacgcacctcacttccgcgtcgcggcgctcggtcgctcgccccctctcttgggccccttctggtcgtcgccgtcctcctcctcctagtcctcctccttctccttctcctcggctctccgcccccaccgctgatttgtcagcgcttctgcccgcccctctcccggcgctcgctgctttccctgcagcgtgctcctcgtccctatctcggatggggatggggcagggggcgcggggtgagccatcaactccagccgcctgcctggccgcgcaaggcgggaaagtgggggcgcttttgcgcctcacgttaagtttagggtcacgagcactcttgtggagatcgggagcggttgggctagggatgatgcctcttcctctttccccttcccctcccttcttgtccccgcctttcctctgggtcctcccggggaccaccccctacccctcgtcagagtcgccctgggagagccgagggcctgagggtcgaccaccaagggcagagcctatcccttggggagctgctggaggagacaggcagcgccgggaggtggctcacaccgcaccgccgagagcgctttgccctcgcatcgctgaaatttaatcacggtcacaggttacaacgttaggggtcgctttagttcaaatatcttcaaggttttcgtttgctcttaatctaggaagagccggaaagggtcctgagggtgaaagggagactactaaggaagagtcacaggttgaggaggcaggagaaggctcagcaaatcctctttccacgccactatcaccattttcctttccaccaatcagcgcctgccag

SEQ ID NO: 110361 - DNA, 88 bp, Homo sapiens
  chr4:90759130-90759218
  hyper
cgctctagaaatgggacttactttgcagacctccctttatctgggagacaaatccagcgtgatttagcctaccggaccatcatatcca

SEQ ID NO: 110362 - DNA, 30 bp, Homo sapiens; identical to SEQ ID NO: 3407
  chr4:90823115-90823145
  hyper

SEQ ID NO: 110363 - DNA, 327 bp, Homo sapiens; identical to SEQ ID NO: 3408
  chr4:91048332-91048659
  hyper

SEQ ID NO: 110364 - DNA, 51 bp, Homo sapiens; identical to SEQ ID NO: 3409
  chr4:91048894-91048945
  hyper

SEQ ID NO: 110365 - DNA, 436 bp, Homo sapiens
  chr4:91049201-91049637
  hyper
ggcccgcgactcccagtgcgccgcgtggccatttcctccacgctgctgcgtggtttgctgcctgcggccgcggcggccgctccagggcgatgcggagcgctggccaaggcggcgagagttggcgcaggcttcgggtcgctccccttcctcgccactcgcgtcccgcaggtagaggcgaccggtcagcgctggcgccccgggctgcgggtgctgaggcggggacggcggcgaagagggggaaggggaggagggggcggggagccaggggctcccggaggaaccgcagtgcggggccgggaccacctcttgcctccgcctgcttgtcctctggcgccagtttcctggattggaagcaagaccctgcccagaggcagcagtaacggcagcgacttagattgaaccacttgctttgtggtggagcgtcaagggccccagg

SEQ ID NO: 110366 - DNA, 82 bp, Homo sapiens
  chr4:91049696-91049778
  hyper
gtgggttggttcacctgagcagaaagtcagccgtaagctgaaaccgcatgtggccccctggccccttcgacttttggcttgt

SEQ ID NO: 110367 - DNA, 170 bp, Homo sapiens; identical to SEQ ID NO: 40702
  chr4:91760070-91760240
  hyper

SEQ ID NO: 110368 - DNA, 164 bp, Homo sapiens; identical to SEQ ID NO: 3411
  chr4:92905821-92905985
  hyper

SEQ ID NO: 110369 - DNA, 292 bp, Homo sapiens; identical to SEQ ID NO: 40704
  chr4:93224880-93225172
  hyper

SEQ ID NO: 110370 - DNA, 536 bp, Homo sapiens
  chr4:93225439-93225975
  hyper
ctgggaccggagacccgcggcccccgcgcagcgatgggtctgatctgagccccagcctctccccctgcccaagagcagtagaggctggatatatttttcaaaagccaaactgcaaacaactctggcgatgccaaaattcccctccaagtgacacggctttgcgaaggaggtttcctcaggctgggctctttctgtcattcccttctgcctttctcggcgacgataaaaggctttgctctggcaataggaatttagaaaaaaagaaaaagctgcgctaaactccaccgtgacctcaaactctttggactgtttgaaaaaaaaaaaattggaagaaaatccatcctccaagagaatcggcataggaggagatggaagttttcccctttctcttggttttgtccgtctggtggtctcgaacctgggactcggcgaatgcggattcgatcattcacatcggtaagaaagtgttggtgcagctcgtggttacttttaccgtttcagttctcaaatgtttccccttcgctttccccctctcc

SEQ ID NO: 110371 - DNA, 246 bp, Homo sapiens; identical to SEQ ID NO: 3413
  chr4:93226457-93226703
  hyper

SEQ ID NO: 110372 - DNA, 299 bp, Homo sapiens; identical to SEQ ID NO: 3414
  chr4:93226728-93227027
  hyper

SEQ ID NO: 110373 - DNA, 323 bp, Homo sapiens
  chr4:94748535-94748858
  hyper
tgcatcgcactcccgcgccccaggggcggtgcaggagagcgcccggagccagagccagggcgcgctgggcgcaagctggggcgcgcccagggccaatgagcttctgattggctctttgctgtgaatagactaggccgaggctaataggaccggagggggcgttcacctgggaattggcctcccccccttgccaaggacctccctgattgtatggggcggagtggggtgggggtgggggctggaaaggggaagcccaccctaactaaacggaggggcgggaggaggttaaactgaggaagccacgagcccgcagtaaagagagg

SEQ ID NO: 110374 - DNA, 2021 bp, Homo sapiens
  chr4:94749481-94751502
  hyper
gagtggcttctgggcgcctggcgggtccagaatcgcccagagccgcccgcggtcgtgcacatctgacccgagtcagcttgggcaccagccgagagccggctccgcaccgctcccgcaccccagccgccggggtggtgacacacaccggagtcgaattacagccctgcaattaacatatgaatctgacgaatttaaaagaaggaaaaaaaaaaaaaaacctgagcaggcttgggagtcctctgcacacaagaacttttctcggggtgtaaaaactctttgattggctgctcgcacgcgcctgcccgcgccctccattggctgagaagacacgcgaccggcgcgaggagggggttgggagaggagcggggggagactgagtggcgcgtgccgctttttaaaggggcgcagcgccttcagcaaccggagaagcatagttgcacgcgacctggtgtgtgatctccgagtgggtgggggagggtcgaggagggaaaaaaaaataagacgttgcagaagagacccggaaagggccttttttttggttgagctggtgtcccagtgctgcctccgatcctgagcctccgagcctttgcagtgcaatgtcccgcctgctgcatgcagaagagtgggctgaagtgaaggagttgggagaccaccatcgccagccccagccgcatcatctcccgcaaccgccgccgccgccgcagccacctgcaactttgcaggcgagagagcatcccgtctacccgcctgagctgtccctcctggacagcaccgacccacgcgcctggctggctcccactttgcagggcatctgcacggcacgcgccgcccagtatttgctacattccccggagctgggtgcctcagaggccgctgcgccccgggacgaggtggacggccggggggagctggtaaggaggagcagcggcggtgccagcagcagcaagagccccgggccggtgaaagtgcgggaacagctgtgcaagctgaaaggcggggtggtggtagacgagctgggctgcagccgccaacgggccccttccagcaaacaggtgaatggggtgcagaagcagagacggctagcagccaacgccagggagcggcgcaggatgcatgggctgaaccacgccttcgaccagctgcgcaatgttatcccgtcgttcaacaacgacaagaagctgtccaaatatgagaccctgcagatggcccaaatctacatcaacgccttgtccgagctgctacaaacgcccagcggaggggaacagccaccgccgcctccagcctcctgcaaaagcgaccaccaccaccttcgcaccgcggcctcctatgaagggggcgcgggcaacgcgaccgcagctggggctcagcaggcttccggagggagccagcggccgaccccgcccgggagttgccggactcgcttctcagccccagcttctgcgggagggtactcggtgcagctggacgctctgcacttctcgactttcgaggacagcgccctgacagcgatgatggcgcaaaagaatttgtctccttctctccccgggagcatcttgcagccagtgcaggaggaaaacagcaaaacttcgcctcggtcccacagaagcgacggggaattttccccccattcccattacagtgactcggatgaggcaagttaggaaggtgacagaagcctgaaaactgagacagaaacaaaactgccctttcccagtgcgcgggaagccccgcggttaaagatccccgcaccctttaatttttgctctgcgatggtcgttgtttagcaacgacttggcttcagatggcagctacatttgatggtttgcaaatgccgccgctgttccaaacttcctacggtccatattgtttgatgaaaactttctgttaaaattgtgtcctttccgcccaccttctgctccccctttagatagatacggtataattgtaggtacccgtatatggcatcattattctagttccctgctgccaatacgctgctaaaacgtcgcatcttctctgtc

SEQ ID NO: 110375 - DNA, 30 bp, Homo sapiens
  chr4:94751709-94751739
  hyper
gtatgtgcatccgatcgcgagaacgttggc

SEQ ID NO: 110376 - DNA, 30 bp, Homo sapiens
  chr4:94752910-94752940
  hyper
aagctaatagtcgtgcgtgtgcgtgtgtgt

SEQ ID NO: 110377 - DNA, 390 bp, Homo sapiens
  chr4:94753211-94753601
  hyper
agcaccttgaaaagagaaaagcgccaaaaagaaaaggaaagcgccacaaactgggtttgcagaaagagtaatgcactagggagcgcaggttctggtctccttaagtaagaaactgcagaaccagctttttactgaccacctgggtatctgtggctttcagcggaagccgaccaagagatgcagagaacgtccgccagctctctgggagaagcgagcaggcggctggtgacactttccagggcagaaataatgcacctgtcccttagataaccttttgcacccatcgagtttgccgtgctcacgataaacatcaggaatcttcgggctgctgaataaatcaagcgattgcttctaacacatttccatttcgctctcaataagcagacccaa

SEQ ID NO: 110378 - DNA, 30 bp, Homo sapiens
  chr4:95128995-95129025
  hyper
ctctcagctgggatcgcgccgcgtcaactt

SEQ ID NO: 110379 - DNA, 30 bp, Homo sapiens
  chr4:95129273-95129303
  hyper
gcgggggaggcggacgaaggggagtgaaaa

SEQ ID NO: 110380 - DNA, 30 bp, Homo sapiens; identical to SEQ ID NO: 3418
  chr4:95293542-95293572
  hyper

SEQ ID NO: 110381 - DNA, 72 bp, Homo sapiens
  chr4:95372821-95372893
  hyper
cctttgccaggtagcgctcaaaatccgctaagactactcccaccgaaactcggtagcgcagttgtctttccg

SEQ ID NO: 110382 - DNA, 131 bp, Homo sapiens
  chr4:95373287-95373418
  hyper
aggtgctttctgggcgcggagcggcggaggtgggagagcagcttgggaaaaggagcgcccggaaaagggcagcgctggagtccgcatgaggccagagggcgagccctggggtccccgcagcccgggccgac

SEQ ID NO: 110383 - DNA, 234 bp, Homo sapiens
  chr4:95373793-95374027
  hyper
actgtgccttcggtgcgttttacaataagtggaaaaaggaagggcgtgtggacagggcagagcttggaaggaaaattcgtggcggcgctgggcagggcagatttagggtgtgatcgccagatcctatcccaagtccgccttcctgacggggaggacgtctgaacccgcctgccacggaaacggcccgttcggtagccttatttggccaacaaggctaggcgcgaatccctcctg

SEQ ID NO: 110384 - DNA, 997 bp, Homo sapiens
  chr4:95678826-95679823
  hyper
tacccgggctgcctccggcccgcaccccgccgctccccaagtcggctccgcactccgcacacaggcggcggcgctggggccgctccaagtgcgttgagaagtgtaatccctccgctaagtacttggctctcagtctccaatcactagtgggagctggagagggcaagtgaaaaaaaaaaattccagaggcagccgaggagcgagagggaaaaaaaaaaaaaaaaaaaaaaaaagtcccgcggtggcggcggcggcggcggcggagcggccgcggcggccagaagttgacggcgcagccgggcgcggggcgcggagtcggcggggcctcgcgggacgccgggcagtgcggagaccgcggcgctgaggacgcgggagccgggagcgcagccgcgggtaaggcgcgcgcggcggggccccgtcccctgcgggtggccgagttcccgagcgcgcgggaggcggccgagccggcgagagccgggcagagcgaggggcggcgcgggacgggtagcggctgggtgcggagctgggcggcggtcgccctaggcaggacggagcgcgcgagggagagggcgagagcgagggcgggctgcgcggccgtggggcggtggcggcggcggggagggggtcaggcggtggccgcctcggctttgtgcgcgggcggctctgccgggaccccgaggcctcgtgcctgcgcaggcgaggagtcggggcagcggcggcggcgggcgggacacgtgcttcgggctgtagggacgccccaaggcagggagtcggacctgcgagcggagggatggggcgggagggcgagctgagggcagtcgcggaatccgggaaatgggagggagcccggcggggcgggggcccagggccagcccaggcgggacccgcaggcacccacctgccccggacgcctcccgagacccagccttgccgtgggggaaagtgcgcagcgggctggtcccggcgccttggactgggctccgtctctgcttcagtt

SEQ ID NO: 110385 - DNA, 30 bp, Homo sapiens; identical to SEQ ID NO: 40715
  chr4:96114894-96114924
  hyper

SEQ ID NO: 110386 - DNA, 2128 bp, Homo sapiens
  chr4:96469110-96471238
  hyper
gagttataaactggtcgactaccccggggagtttcggatttggtttgaacaagcagccggttcccccagagctccgggattttcatttctacatcccctggtgggaagcaggcatgaagcggggtatgtatgagtgcagaggcatgcacatcccgggcctgcctccagccgggtacgcggattcgggtgagctgtgtatttccacagcacctgaagcagcaggcgagggggacgggtgcttttgagtccttgacagtaatggacacatttccttagctgagcgcccttcggggtctagtgtgctcagagactcagtgaagatcctgctaccccagtcttggcacagcgcggggagcctctgcgcatcatgcgcttcggggtgcatctacggtatgtcacacagccacccgcaccgagagtctttccaaacctccgtgtgtgcaatatgcaacaacgtgcgcgtgcggagctgaaagggcacaagacactccaggctcccacacgtatggagacggatcggctgcgtgtccacaccccgttcgtccctggtccattcgtgcccatctcagaagatagattaaacataataataataataattattattattataatcaaagcttcttgactagttgggaaagtggaatttagagtggtttccagttgaaagcaacgaggcaaattgaggaagtcaagagaactggggaggaggagaggaaggagggaaggaagaagctaagggaggtggccgcggagcttggcggacccccttaccttgggcggcggagccagtgccgctggcgctgagcagggccagggcaggtagcacgagcatttgcagcaagtatcccagtcccagtccgcagcgggccgctgtcgcccgcagacctttcctcatcgtagacagaggtgtgccggggggaggggagggggacagagagacgcgcaaacagctgaaagccccactgggcagaagctgaatccgtgcaccgcgaagcagtccgaagaaataacgacaaccaagcgccacactccactttctccaaaggcaggggccaaaagggggaggagaggagacgccgaggaggagtttgaaggtccctctttcccaatgccttctaactgacgtctcccgcgagcgactgctctgcccccacttgggaagtccagggaggcgcaaggcggccacctccgccgctccccccagcagcaggagcagccgcagctccgccgcacgccgaagtctggactgctctccgggtcccctcgcctgtgaggaacacacacagacaccgggggtgggggtgggggtgggggttgaagtggggggagttggaggaggagggaacggagggaggaagcttgggcaccgtcaggcgctctggtctccaatctcagtgttctcacgccggcggagagatgtcccggctgtcgctgctgggtggccaaggaggttcacatcctagagtagggcgcacgggtgcgcgaaggcgctcgccaaggaggcgtagagggcgcagcacaactcctctggggggtaaccgggggcgggagcacgcccgcccgccttatgtaagcaaggattgcagggagatcagcgcccaggagaccagctgtgggtttgcccgctgaagccgaggcgagacagaccaggggacgaagcggctgcggagagtggcagcgcgcctgcctcccgcggtgcgccagacctggacgccgggagtgcagcgggcgcgccccgggccactaggctgtgtccagtggagctcagcctgccgcctgccaccttcttcgccgcgccggcaaagcctcagccgaattccctaggactggactcggtctacgacttcgggtctcgcggttgacgaagccggtgcgggctcgaactgaagtccttcttggttggggaagaaggcatgaagcttttgcactgccccagccggctgctgtcctggggttgtcagcgccagtcagactgctttatgttctgagcgcgtatgacccctttgcagtggaacagaaactaaaagctcgacggaaactcattctgcaacagtgctttctttgcgtgcatgttggtggctgacaagggtggtgatgcgataccgagagaaactctcttagaaaa

SEQ ID NO: 110387 - DNA, 30 bp, Homo sapiens; identical to SEQ ID NO: 40717
  chr4:99181378-99181408
  hyper

SEQ ID NO: 110388 - DNA, 30 bp, Homo sapiens
  chr4:99182313-99182343
  hyper
cacgcccacccgcacgcttagcctcgctcg

SEQ ID NO: 110389 - DNA, 30 bp, Homo sapiens; identical to SEQ ID NO: 40718
  chr4:99388926-99388956
  hyper

SEQ ID NO: 110390 - DNA, 30 bp, Homo sapiens; identical to SEQ ID NO: 40719
  chr4:99578705-99578735
  hyper

SEQ ID NO: 110391 - DNA, 30 bp, Homo sapiens; identical to SEQ ID NO: 40720
  chr4:99580128-99580158
  hyper

SEQ ID NO: 110392 - DNA, 67 bp, Homo sapiens
  chr4:99850236-99850303
  hyper
aatactcaccggttcgacagtcgccatcttagatcgatctgatcgcacaaccgctccagaagggggg

SEQ ID NO: 110393 - DNA, 77 bp, Homo sapiens
  chr4:99850525-99850602
  hyper
cgcggttctcaacgcggcggacactcgcttgctggagggtggtttcagtcctctgctcttccgcctggatagctgcg

SEQ ID NO: 110394 - DNA, 165 bp, Homo sapiens
  chr4:99916361-99916526
  hyper
tgttctccaaggagcggcgggggaatccaacgcagaggagcgcagcgccctctctagcctcctgcgggtgtcggggatgatcagggctcctgggtgttcgtcagtgaagacgactgtcttatctgactgtaggcacagagagtgcgccgcgagagggcggctcct

SEQ ID NO: 110395 - DNA, 30 bp, Homo sapiens; identical to SEQ ID NO: 40724
  chr4:99917593-99917623
  hyper

SEQ ID NO: 110396 - DNA, 236 bp, Homo sapiens
  chr4:100009990-100010226
  hyper
ctcgagctgtggtgcgtgccgctaagttgtgcgttccagggtgcactcgccggcgaggctgcacggcgccggtttcattgctaaaatccgacggacttgttgcagaactcgttttttttgtcgggaaagggcttccccgtgtaactttacagcagttatcgtagataagacttgcaaattacagatgtggacggtgagggaacgggaatttcactgaaagcgcctgagaaccagta

SEQ ID NO: 110397 - DNA, 30 bp, Homo sapiens; identical to SEQ ID NO: 40726
  chr4:100239303-100239333
  hyper

SEQ ID NO: 110398 - DNA, 30 bp, Homo sapiens
  chr4:100484558-100484588
  hyper
agagagttcagcgacgtcagccctttgcag

SEQ ID NO: 110399 - DNA, 50 bp, Homo sapiens; identical to SEQ ID NO: 40727
  chr4:100484870-100484920
  hyper

SEQ ID NO: 110400 - DNA, 56 bp, Homo sapiens; identical to SEQ ID NO: 40728
  chr4:100485193-100485249
  hyper

SEQ ID NO: 110401 - DNA, 233 bp, Homo sapiens; identical to SEQ ID NO: 3422
  chr4:100729522-100729755
  hyper

SEQ ID NO: 110402 - DNA, 4 bp, Homo sapiens
  chr4:100867918-100867922
  hyper
ctcc

SEQ ID NO: 110403 - DNA, 257 bp, Homo sapiens
  chr4:100867945-100868202
  hyper
cgcgatccgcatccgtcccggcccaggaccaacctcctgggccggggcgtccgagctgactcggtggtccgcgcacggcgccagcaggctcgaagcggacctgcccgggaggcggacgatagcagccgggctgcccatcgcggggaggggttccgcccgggacccgattgccggcattggtagcgccgtgccctgtgacctccaggcgaggccctcgcagctcaggccaggaggacagggtccgggaaggggacact

SEQ ID NO: 110404 - DNA, 30 bp, Homo sapiens; identical to SEQ ID NO: 40731
  chr4:100870308-100870338
  hyper

SEQ ID NO: 110405 - DNA, 30 bp, Homo sapiens; identical to SEQ ID NO: 40732
  chr4:100870672-100870702
  hyper

SEQ ID NO: 110406 - DNA, 32 bp, Homo sapiens; identical to SEQ ID NO: 40733
  chr4:100871519-100871551
  hyper

SEQ ID NO: 110407 - DNA, 5 bp, Homo sapiens
  chr4:100871978-100871983
  hyper
aggtg

SEQ ID NO: 110408 - DNA, 1062 bp, Homo sapiens; identical to SEQ ID NO: 40734
  chr4:101111125-101112187
  hyper

SEQ ID NO: 110409 - DNA, 30 bp, Homo sapiens; identical to SEQ ID NO: 3426
  chr4:102268230-102268260
  hyper

SEQ ID NO: 110410 - DNA, 30 bp, Homo sapiens; identical to SEQ ID NO: 3427
  chr4:102268607-102268637
  hyper

SEQ ID NO: 110411 - DNA, 81 bp, Homo sapiens
  chr4:102269359-102269440
  hyper
cgccaaaacggcgacgaataaacaacttaccttgcggagaagagctacgactgcgatgcggtgtacggttgtttttgcttt

SEQ ID NO: 110412 - DNA, 252 bp, Homo sapiens
  chr4:102269668-102269920
  hyper
cacgcagccactggccgggacagttgacacccatcttccttccctgctccttccagtcattctacacccgcttggtgctgccagtgcgggcagggccttggagcccaaagcggatccccacacttgtccctacggtcggaaggaaagtagaggagagaaagtcaggcgcggcagggctaagagcaatagtggcccaaatgttcctggcccgcctgctgcgccacagagtctgaaaagcgggtctccgtctac

SEQ ID NO: 110413 - DNA, 126 bp, Homo sapiens; identical to SEQ ID NO: 40739
  chr4:102711751-102711877
  hyper

SEQ ID NO: 110414 - DNA, 58 bp, Homo sapiens; identical to SEQ ID NO: 3430
  chr4:102712137-102712195
  hyper

SEQ ID NO: 110415 - DNA, 30 bp, Homo sapiens; identical to SEQ ID NO: 40741
  chr4:103265568-103265598
  hyper

SEQ ID NO: 110416 - DNA, 408 bp, Homo sapiens
  chr4:103266028-103266436
  hyper
aggggagcgataggcggagtgggccccccggcctcctggagagcctgagataaagaggacaaagggggacagagataaaggccaccagggcaccagccggcaggctccagaaacgctgcgtggcagtagccctcaaacgcccggccgggcatggggccagacgccccggatccgggtttgcaaacgccccaggatttgcgtacatatgctcctcccggatataaagccccaaaccacgccacttcttaggaaaaactaaaaccacactaactgtagaactccacctcctcttcctgtctttctgctttattctctccgccgcaaacttagaagtgagacgtgcagtccccaaggagctgcagaaaagggctcttccggagtcctggggattgcgcgtttaaaggggac

SEQ ID NO: 110417 - DNA, 221 bp, Homo sapiens
  chr4:103266877-103267098
  hyper
ctctggtctcggggacgcatgcatcttttcgtgatcttgatgaaaccaacttgctgaaatggagcctggagacccttgcattgtctacataattaacaggaattgcttttttttctcacttcttaaaatcagaggagaaagaggaaatccaatggtagcggtggcgggctagctgagccagcactgcccaagccggcccttcctggcgggatatccgcaga

SEQ ID NO: 110418 - DNA, 80 bp, Homo sapiens
  chr4:103422181-103422261
  hyper
gggggcttccctaccggctccagcccttgggattcgggagcgccctgctaggaagccagagccccgcaggggccgcggcg

SEQ ID NO: 110419 - DNA, 30 bp, Homo sapiens
  chr4:103423131-103423161
  hyper
acacatccggacctcgcaggggctagtcgg

SEQ ID NO: 110420 - DNA, 382 bp, Homo sapiens; identical to SEQ ID NO: 40745
  chr4:103681574-103681956
  hyper

SEQ ID NO: 110421 - DNA, 110 bp, Homo sapiens
  chr4:103682319-103682429
  hyper
gagccttccctcggcgcttcttcccgccgcctcagtacatacaactggaggcaagaatcttgcacggtaattgggacagaaagatccctgggcgcgcagtggcacaaagc

SEQ ID NO: 110422 - DNA, 30 bp, Homo sapiens
  chr4:103746984-103747014
  hyper
cggataaatagcttcgggtgaaaagctgca

SEQ ID NO: 110423 - DNA, 30 bp, Homo sapiens
  chr4:103747952-103747982
  hyper
ggtgacgggaagagcggaggtggtggctac

SEQ ID NO: 110424 - DNA, 407 bp, Homo sapiens
  chr4:103748278-103748685
  hyper
tgtgtcacccctgacgccaccgtacactcactccgccttccagcgcgctcccgcgcgcgcccgcccagccacctccaccacgcgcccgcgctgtccctgaggctccggcttaggcgcgaggacgcgcccattccccctcctcctccagcaggagaggccgcggcttccccaaccttcccaccctaacccaccgcacccaataggctggccgctcaagccgcccaggtcccgcactgcccctcttacccggccggccactgggccggcctcccttccctgccctagccgtccacacccacgcgtacagaggggccggggcctccctcaagctgcggcctcggcctcctccccgcgcggcagctggtgcctccccggccctacggggctcacgcgcacgacacagccac

SEQ ID NO: 110425 - DNA, 139 bp, Homo sapiens
  chr4:103749251-103749390
  hyper
ggctcgaactggggcgggccactgccaggaaagcaacgcccctgaatgcttatgccggtggttggtagaggaaatggaattccccagactggtaagagcgcgcgcagacacagccttgtctcacgcgcccaatcaggag

SEQ ID NO: 110426 - DNA, 30 bp, Homo sapiens; identical to SEQ ID NO: 40750
  chr4:103749951-103749981
  hyper

SEQ ID NO: 110427 - DNA, 30 bp, Homo sapiens; identical to SEQ ID NO: 40751
  chr4:103789947-103789977
  hyper

SEQ ID NO: 110428 - DNA, 980 bp, Homo sapiens
  chr4:103997158-103998138
  hyper
aaaagcaagcaagaaaacccacgccaacaccttacaacagtaaacagacacgcgcccgtcaccgggtgtacaaacagaaaaggctgggcccctcgctcgcgtctccggtccagcaggcctacagggtacccgccgctggcgctgggtttatttttacccttagtgtctctggggcctctcacctggcagtctccggcgaagtcgaccaggctccgtctgaacgattaggaaaggggctgtgggggaggcggcggagcccggtctagccaccgcgctctggggttcccgattcgcgcatcttcccaggctgagccgggaggctgcgttgactgcagataaacggtctcagggcgcggcaccgcgtgtagtcggccccgcctttcgcacgaacccgctgggcgacaccgcgcagggaggtccgacccgtcggcgccggtacaggctccggagtaagcatgggttggtccggggcccgcagcggcagccccgtgtgccctccgccgggtttcaggtccggcggcgcgggtgcagagccgcgtgcgatgcctggtgcgcgtggcttcccccggaaaggtggcgccaggccgaccatgggcccacgtcccggggcctcggagcggcaccgcgcggtctttcagctgcttatcctccctgggcgggtccgcaggcttctggggccaggaccagcgagctcccgggaaagcttcccggaaagcttacccagagagcgcggacccaggcgccgagtcttcccggagatgacgagacaccgcgagaggagcacagcgcaggctcctcgggactccgcggcgcaggccgggcagcccgttacttgttttatcgttcccgaaaccaacctctaagttgtctatcagtcctccaccttttagctgtacctcttagaagtgtcttctcagctgcggtgggaagataggattctttcttaaggtgaccaattaaatggccggataaaagacttg

SEQ ID NO: 110429 - DNA, 104 bp, Homo sapiens
  chr4:104020934-104021038
  hyper
cttactttaagcagcgagctgatggcgttctccagaactcggtttgagcaacaaacttgagacaacctttgtctggaagcaagtcaagcgcttaataatgcatg

SEQ ID NO: 110430 - DNA, 30 bp, Homo sapiens; identical to SEQ ID NO: 40754
  chr4:104119181-104119211
  hyper

SEQ ID NO: 110431 - DNA, 30 bp, Homo sapiens; identical to SEQ ID NO: 40755
  chr4:104119456-104119486
  hyper

SEQ ID NO: 110432 - DNA, 30 bp, Homo sapiens; identical to SEQ ID NO: 40756
  chr4:104119835-104119865
  hyper

SEQ ID NO: 110433 - DNA, 30 bp, Homo sapiens; identical to SEQ ID NO: 3433
  chr4:104251138-104251168
  hyper

SEQ ID NO: 110434 - DNA, 30 bp, Homo sapiens
  chr4:105411959-105411989
  hyper
ggtgtcccgttttgcggttcctgcaactgc

SEQ ID NO: 110435 - DNA, 204 bp, Homo sapiens; identical to SEQ ID NO: 40758
  chr4:105412284-105412488
  hyper

SEQ ID NO: 110436 - DNA, 62 bp, Homo sapiens
  chr4:105412785-105412847
  hyper
tgggaaggcgcccccgttggtcttgtagaaggaggtggcaaaggagcggtagcgctccattt

SEQ ID NO: 110437 - DNA, 471 bp, Homo sapiens; identical to SEQ ID NO: 40759
  chr4:106067030-106067501
  hyper

SEQ ID NO: 110438 - DNA, 296 bp, Homo sapiens; identical to SEQ ID NO: 3435
  chr4:106067840-106068136
  hyper

SEQ ID NO: 110439 - DNA, 278 bp, Homo sapiens; identical to SEQ ID NO: 3436
  chr4:106068587-106068865
  hyper

SEQ ID NO: 110440 - DNA, 30 bp, Homo sapiens; identical to SEQ ID NO: 40762
  chr4:106084762-106084792
  hyper

SEQ ID NO: 110441 - DNA, 147 bp, Homo sapiens; identical to SEQ ID NO: 3437
  chr4:106111515-106111662
  hyper

SEQ ID NO: 110442 - DNA, 4462 bp, Homo sapiens; identical to SEQ ID NO: 3438
  chr4:106155052-106159514
  hyper

SEQ ID NO: 110443 - DNA, 241 bp, Homo sapiens; identical to SEQ ID NO: 3439
  chr4:106159633-106159874
  hyper

SEQ ID NO: 110444 - DNA, 181 bp, Homo sapiens; identical to SEQ ID NO: 3440
  chr4:106160113-106160294
  hyper

SEQ ID NO: 110445 - DNA, 121 bp, Homo sapiens; identical to SEQ ID NO: 3441
  chr4:106161133-106161254
  hyper

SEQ ID NO: 110446 - DNA, 2722 bp, Homo sapiens; identical to SEQ ID NO: 3442
  chr4:106161373-106164095
  hyper

SEQ ID NO: 110447 - DNA, 231 bp, Homo sapiens; identical to SEQ ID NO: 3443
  chr4:106164711-106164942
  hyper

SEQ ID NO: 110448 - DNA, 178 bp, Homo sapiens; identical to SEQ ID NO: 3444
  chr4:106180761-106180939
  hyper

SEQ ID NO: 110449 - DNA, 108 bp, Homo sapiens; identical to SEQ ID NO: 3445
  chr4:106182910-106183018
  hyper

SEQ ID NO: 110450 - DNA, 162 bp, Homo sapiens; identical to SEQ ID NO: 3446
  chr4:106190751-106190913
  hyper

SEQ ID NO: 110451 - DNA, 377 bp, Homo sapiens; identical to SEQ ID NO: 3447
  chr4:106193707-106194084
  hyper

SEQ ID NO: 110452 - DNA, 3102 bp, Homo sapiens; identical to SEQ ID NO: 3448
  chr4:106196197-106199299
  hyper

SEQ ID NO: 110453 - DNA, 1602 bp, Homo sapiens; identical to SEQ ID NO: 3449
  chr4:106199358-106200960
  hyper

SEQ ID NO: 110454 - DNA, 30 bp, Homo sapiens
  chr4:106394677-106394707
  hyper
tgagttgtgtgaaccgggaacggcggccgg

SEQ ID NO: 110455 - DNA, 30 bp, Homo sapiens
  chr4:106395014-106395044
  hyper
ggtgcgccgctcggcgaacctccgggagct

SEQ ID NO: 110456 - DNA, 9 bp, Homo sapiens
  chr4:106395299-106395308
  hyper
cccgccccg

SEQ ID NO: 110457 - DNA, 476 bp, Homo sapiens
  chr4:106629647-106630123
  hyper
ctagggcacgcaaccgcccgtaaattatgattccccttgaggagcgaggaaactaataccccacgtagctactctcccacctcgctcctggcgcgggggtctcgagcctccaggaggccaggagcagagtcgctcagcataactcaccgttccgccccgccctgccgatccgtctgttcccggtggtcccttcggaaacggttcccgcactggccggctccgaaagcaggaaaacaaaggttcccacagtaggggcgggggaaacgtttggcagtgcgacagtaggaagtgacgttacttccctttttccggtccgccggattatgaatgacggccggcgcgagtattttccacataaggtggctgtcgtttttctcctggcgtctgtggaggcgagtggtctgcgggcagcagctcccagaggcagccttggaattccagctcggactgggcgggaaggcgcaggcggcccaggt

SEQ ID NO: 110458 - DNA, 181 bp, Homo sapiens
  chr4:106816200-106816381
  hyper
ggcttctccgccctccggtgaaagctactgctcgcccctgcagtcaccacctgttcgggcggaacctgcggagcgtgcacctacgcctcgggctcctttcctcctccactcccctttcctgctgggcaccctgctttccctctcccagagagggtttgcaacttttctcccaggctggggc

SEQ ID NO: 110459 - DNA, 1478 bp, Homo sapiens
  chr4:106816425-106817903
  hyper
cgcccctgcccccgagttgcctgccccgctgggcccccgggaggagcggagcgcgctcacccttcgcccggggctgggagggcggcgagtcgggcgcacgcgcaccccctgcccgcccctggcgcccctccccgcgggcggtgcagctacccctgcagcgcctcccctagctagaagggagcgggagggggctccgggcgccgcgcagcagacctgctccggccgcgcgcctcgccgctgtcctccgggagcggcagcagtagcccgggcggcgagggctgggggttcctcgagactctcagaggggcgcctcccatcggcgcccaccaccccaacctgttcctcgcgcgccactgcgctgcgccccaggacccgctgcccaacatggattttctcctggcgctggtgctggtatcctcgctctacctgcaggcggccgccgagttcgacgggaggtgagctgggccccggggcgccctctcctccttcccgcgctaatttcacactcactgtcttgggtcacttttccccgcggggtttcgtggtcagagaggcgtctcctccatccagaagttgggccaccgcacagcgtggcgcgaggagagcggtccagcggctccgagtgcccgcccgaggcggagagggcgcgcccttgcgagtctgggaccccatccgcggccccccgagggcgactcgccccggctcgggaattaggactgagggagaggagccgctggagcctgggatctcggctctgagggcgcggtttagccacctacgccgaggtgacgcgcgaaacatcccttacccgggaaactcccgcgcctgaactagacggctcttcactggggaagcttccaggcccccggggggaggcccgggctctgctcagggctctcggggccgctcacacagagagtgggtgcgagtcagcgactgggctacgggggagatttgtgggcctctccatttggttttcttgagggaaggagactcaaaatgaggaccggagggtgggcgctccgtgaatgtgagcatgagtgtgtggatgtgtgtgtgagagcgcacacactgcgccgctcctcagactcgggcgagcctgacggcggcgtgctgtgacaggttccaacaacctcgggccgcgtctccgctgtcactcagccggtcctcccgcgctccggggccgctccggtgtgtgagagacactgggtctgtcgggagggtgtgctcggtccccctcacctctgtgcaattacagactaggctcgtcccgggtgcagatggctgctgcgaaaagaggttttactctggcgcacaccgtcgcccggtcgccttccttcagcgacctctgcccccacccctccgtgtaggtccctgcctagtcctaaagaaagatgccgcacctgttttacctttaatcttggaacgaatcaattccacaattgattcgctttcttgtacccggaggcgaacggagg

SEQ ID NO: 110460 - DNA, 335 bp, Homo sapiens
  chr4:107237671-107238006
  hyper
tcactgctatagtacgcgggtggctggacctacatgcttcctgctgtggctgtctcggaacccgtggtcctccgcttcatgtgagtgacgtcgtggcgggtcactcactcggggatcgccgattgcgatcgtaggggtcttccttctctaacttgcctccaggagagaggacctggcctgcgctgctaatgggtagtccgttcgcagcaggaccagccctggcctaaggaaacaggaaagagtttgagacttccttctaaaggagccacgtttgagaaatgggatgcaggcctaagttaagaatgctacagaaaaatatcgatccctaagcgtat

SEQ ID NO: 110461 - DNA, 515 bp, Homo sapiens
  chr4:107955311-107955826
  hyper
catcccagaatggctcggccctctcaaccaaccttcagccggctggctgcgctgtggacaggggcggcggaggacaccgagagcgcgcaaaacagcagcatcagtcggttccaaggaaactcggatctctggggcgtgggccgctgccaggggttgacacttgtgttgtgcgaggtgcgtgtgccattggtaaaatggctttctcagttttggcttcccacaaaaggagcggaagggggagctgtcatgattcccagtgcccacagagccccctctcctggccacagcgcgccagccacaactggtaccgagtgtgcgcgctcgtctctgtgcgtgtctatttgtataacagtttgcaagtggctttcaatctatctgtctgtatgacagagacagaggcgcctgcggaaagttccctctctcaaaaacgccttcagtgtcctgctgtatcgctggcgcctacgacgctgtcattgtcatctcatcattttgcttccttccgggtgatttatgta

SEQ ID NO: 110462 - DNA, 1195 bp, Homo sapiens; identical to SEQ ID NO: 40783
  chr4:107956414-107957609
  hyper

SEQ ID NO: 110463 - DNA, 30 bp, Homo sapiens; identical to SEQ ID NO: 40784
  chr4:107957926-107957956
  hyper

SEQ ID NO: 110464 - DNA, 260 bp, Homo sapiens
  chr4:107958387-107958647
  hyper
gaagccattcctgtcagcccccgggtctctccaggtccaattcccttcggccgaaggtcgaaggctgctccgggaacgactgggacgcgctggcgcttgggggcgccagtggcagccgttcagcgagccacggaattgctgcaggagacaagcgctgagttcggtgatgtctggtggccaagtgcgagactttccaagcaaagcaagggattgttcgaaagttattgcatttctgcttcgcagacactaatgtccaggag

SEQ ID NO: 110465 - DNA, 30 bp, Homo sapiens
  chr4:108181974-108182004
  hyper
ataaatattccaactcggcgaaagctaaat

SEQ ID NO: 110466 - DNA, 1139 bp, Homo sapiens
  chr4:108745571-108746710
  hyper
aaccctctgaatcaacgctggcgctcccaagcccactcacacgccgtcaggaagcagtttccgaaacaggccgggtgcgggggtgggggatcccgttccagccccacccctgaaagttgctgggagtggcacccaaagaactttcccagattgatctctgttgccgctcagggaggtcagctccaggccctcagcctttcggccgggagccaaactgccctgcctgccaagcccctccttctctgcaccttaaacagccgcgaggggagagtcggctgggattttcttcttaagaagtcgcgcaggtttttcgagctccactctgcgccaggagagccacggcagcaggaacgggcactgctgccaccgggccgacgggtgagtcactgtttggaaatggagtgggcgggcgagggtgtgagagaatgaatgatgtcaagagcgcgctgggcgcagggcgcagggagcgggccgcgcgcggcgggcggggagagcgggcgcggggccgcggtcaacactgagcgccgcgccgtgggccgagtggggcggggagacccagccctcggcgcgcacggagcctggccggtgctgcagcgccgccgagtgcggcctcgggggcggcggccgcgggagggacccggagagctgcttcccctagtcaggccgcggcgtgggagggcgagaccccgagcaaactttctagcggcttcggcccgagggtggtgacgcccggggctggtcgcggcggctgcggcagcgggctccatcccctggcaaatccccttcccgggagcaagtgccttcagctgggagtgtctggagccctggccaccagcgggtaaggagcgcgcggaggggccaggaggaggatgggctggggagcggagagtcctccgaagcgcgggaggggaaaggtggattgcgaagcggggacgtggctctaatccggcccccaccctccccgcccagggcatgcttcctcgattttgtggtctggaggagagatgtgtgccttagtctccttcctctgagcagtcatctcattcatttgcaacccatttcgggtaccccggtcctggcgttggaagggcacaggttaaaccccagattgtccagaaccactccggaggtcagggctg

SEQ ID NO: 110467 - DNA, 30 bp, Homo sapiens
  chr4:108852437-108852467
  hyper
aacagccaatcagagcgcaaggttgtgttg

SEQ ID NO: 110468 - DNA, 450 bp, Homo sapiens
  chr4:108852944-108853394
  hyper
gctggctgcggaggcgccgggcgcggggcatcccgcccgggcccacgccctggcctctggtgggcaacttcggtcacgtgctgctgcctcccttcctccggcggcggagctggctgagcagcaggaccagggccgcagggattgatccctcggtcataggcccgcaggtgctcctggctcacctagcccgcgtgtacggcagcatcttcagcttctttatcggccactacctggtggtggtcctcagcgacttccacagcgtgcgcgaggcgctggtgcagcaggccgaggtcttcagcgaccgcccgcgggtgccgctcatctccatcgtgaccaaggagaagggtgagcgggaggtcgtgggctgtgggtacgcggatgccgcggatgagtctccaggtgcgtgggggctgcagttcctgtgccccttccggccgcccgcgcccccag

SEQ ID NO: 110469 - DNA, 30 bp, Homo sapiens; identical to SEQ ID NO: 40790
  chr4:108911062-108911092
  hyper

SEQ ID NO: 110470 - DNA, 204 bp, Homo sapiens
  chr4:108911332-108911536
  hyper
caccccgcgcctcccgggtgtagttgaaatatctcgcgtctgggcctgtgagggcccaagtctcactcccctcaaaattcagggttctgggccgatcctcagcttcctcgtttggaaaattctggctgcccccagggcccgctgaaggttccatggagagtggcggtgaatgcattttggaagcgggccgtgcaagagaagaaa

SEQ ID NO: 110471 - DNA, 2009 bp, Homo sapiens
  chr4:109088014-109090023
  hyper
cagggtgtacccttgcggtgggtcggctcggcgcacccacagctcccagctgctagcccaggcgctggggccgcagggactgaaccccgcaccgcccccgcagcccgggtgcgcgccccatcggccggcctgctccccgcggcccggctcaccggtggtagggacggccccgcctgccccagcccacgcccgcctccccttcctcccgcctgtggctctgctcgtctccacctaagcctttggtggtttaacgcacttttgcagagacatctaccaagagatagcgtgtgcactttgttttccgtcccacggaagaatttatcagtagcgttattcagccctactcgctttaaagcacggcacccctcagcccaacaaaaagaccgaaggcgaaacattgtgggttcctgcccgcgaaccaaccgttcagccaccgaaccccctaaactgatccatttggaataagttaccctgcccctctacctcccatcctacacacacacacacacacacacacacacacacacacacacacactgcggaccgggggcccagctacgcacacaccccaaaacaaacgagggatctactcgggaccctcagccgggcggccgggcgccttcgttcccttcctccctctctgagtttcccagggacccgccacgcctctcggaactggggcagcggcccgctcacctcgtgtccgttgctggccgggatgatttcagactcgttcaccaaggaagacttgatgtcagctaaatcgccttcctcttcgggatgactgatctcggcgaagatcttttccttctgaggatcgccctcgtccttgaaggggatcatctcgtccgtggcgcagagttccgggtcccccccgccgccgccacctcctccggagagttggggcatcccggcggctctgtaatctccgctccgctgtgggagcacccgcgcaacagcaggaaagacagaggggtaactcaagggtgggggaggaaaggagagttggaagggttcgtgcagcaggacagcgggcggaagcggggcgggcgagcgcggggccgccggccggcagccggagcagctgccgcggcgcccgaatcccggcggccgccgcgctttcccgcttcgcggagaccgacgcaggcgcccgcccccgaggccgaagggcactgggcggcgagggctgcggtagctggcgactccgggggcgtctgcgcggcgcgcgctagacgaggctgccccggcggccaccccgcgaccccgcgtcgccgggatttgcgcgcggagaacgccggttctggagggagcacgcctccccaaagtgcagaggagggtccggcggcgcgtctccgcggaaaccctctccactgtagttaccccggatgccgacttagtagtttgttttccgagaaaagagaggggatctgggcagaagggccccgtttgccccaaaagaaggtgcaaggatcagaagataacgaaacgtccacttcctgaagggtgggaaaaaaagaaaaagaaaaaggagccacccacgctggagatgtccgttttagatcttcttattttcttccctttcgcttcggtttttcttctcgaggctcatttaatctgctagagaaggaggaggagcagaagatgggggccgaggaggaggggaagagaaagagaagtttgccaagaataaagtttttgccggcaagcgcggggactccgcagtggagggcactgcggagtctcggggagtcacagcgggggcctcgggcccaaatgcctctgcccggagctcgagccgacacacacactcagtccgacccctctttgttcccggctcgagtttctcagcctggctcgccggctcgccgctctgcacgcctccgccggccagctctgtcaaagcaaagagctgcgccccttgagttcgcccggccgaggggaggggacgccccgagcttggccgcgtgcgaggctccgggcgcgtcctggttcctcggcccgagagcgcg

SEQ ID NO: 110472 - DNA, 30 bp, Homo sapiens
  chr4:109090353-109090383
  hyper
gaaggaaggaccgggcgctgcttataaccc

SEQ ID NO: 110473 - DNA, 2000 bp, Homo sapiens
  chr4:109092585-109094585
  hyper
ggggcgaagtaaccccgggaagacgttcttccccctcccttacggattcagtgtagttcctggcataagcaattctgtcaccgggcggtcttttctaattcgtgtgggggctgatattaacataagcagccgcctcttcgggtgcgagtgggatcccaggtccgggatgtggtgggtgcggtgcgggagaggcacccgccgcccccttcactcggatgttagaggcaagttgttcgtgtgaactcgagcgaacgactggaggttggctgttgtaggttcactccttcaggatgtgggtttcagggggcgttttgatgtgatttaattccgaccgtgaaaacaattgctaggggctggctggattgctgttggtttttcccctcctggtggctttgcttggtttgggtttagtttgggaacaaacttgttttatatcaacacttccttctacatcgggcgccgtcgcctcaactgcgcgtggggggcgaggcgcccaccccgcacaagaacagaggagcgggggagaagagacggcctcgctgctcactgggtaagcggagcccagccccgctcgggagcgggcaggagagacagggtagtgacccccactcacaccagaaaacccctccccccggcgattttgctgccaactcgagtcggctacagacagtccagtgagtccttaattacaaggacgagagaaaagcacggtgcccctcgagtcctctccgccccctcggtcctaacccccgcccaggctccaggtcttcccctttgtgtggcctggactctctcccagctacgactttggtgggatccaaaaggaaggaggtggcggggcctacggaagaggatacccaggagccagggagaagggctagaaaacgaataatgtgactccagaggcggaaccccgaccccctctatttcccaccccggcttcacccggagacgaaagctgtgggcatcttcagtttaacggacttcgcggaaaaggagagaaggggggcgagggaaatggcagtttgtgtcccaggggttcttccccttcttcttgccgcctcctaaagacaaacaaactcaaccccccaccctccggggtatcagggaactcgtgggaccgtgaaaaagtcgttcccaaatccggccgcctgcggacgtcggacttccgcggggccggcgcccgttggcgtctgtagctcggcgcagccacgcggggctccagcgagcggggtccgccacccctcgcgccctcctgcggctttcccagcgctgggccagtgcaggccgagccctgcgtccctgcctcgctgggtgggggtccggggcgcggctgtccacagggccgcctcctcctgcggcccgcggggaaggggcgcatcccaccccgctctgcaggccgcccttctgccagctgggaggcgagggcacacgtcctaaggctgcccaagggggagaggaatcgcgccggtaggagagcgcacgggaaccaggaacgcaaggcgggcacaggggagccgaaggagccagacagggcccggccacgcgccctcctcgctcggctgcgctccgtgacgggaacccaggctcccacgcacggggaatgcctagaacggagctagaatggaggtgggagctggagtcattttgcgggccacaggactgctcatttcgtgggcaggacgtgacattcttgtccctcctttctgaaaaacttttctcaggcgcctgaacttggcatggggaccggcctcgaaaagccggcgggtagcacggccgcggtatccaacccttcgccctccttcccaccggccctccgcgtccctcggcccgccccccgggtcggggacgcgcgcggaaaggccgctcgcgcgctcgagccgtgccttatatcggctgagggaggcgcctgcgcacggccccgcgcggcggcgcggcctttgaagtcgcggcggctgccgctttcatcctttcttttttccctcgcaggcccctttgtg

SEQ ID NO: 110474 - DNA, 237 bp, Homo sapiens
  chr4:109541580-109541817
  hyper
tggttgccgtacaacgtggtggttccctgcatctctgcccacgtcggagaggtgcgtcggcttccgtacaacacggatactctctctctgacgcaacttcctgtcctgcgcaattctatttgacctttgaactggcaaaggcttttttcttcctcttccggggacgttgtctgcaggtatggatgttgttctcttttccctgtctttatttccttaccaatcggctgccatccgagg

SEQ ID NO: 110475 - DNA, 79 bp, Homo sapiens; identical to SEQ ID NO: 3463
  chr4:109571438-109571517
  hyper

SEQ ID NO: 110476 - DNA, 650 bp, Homo sapiens
  chr4:109683715-109684365
  hyper
ccaacccctctagccggccggcagcccccgctagtccgccggctgcagagcgagccggggactttcgagcgggcaggaagcccagcgttccgggttccaggagcgtttctgggagtccgcgcggcccctgcaggtggaggcgcgcggggcgcgtgcacaggcgcggcgggcacggagtgcggctgcagcgcatcgtttgttccctagccggctttctctctccaccttctgcactcgttattgccccctctctgcacttacttccgggccagggtgcccttacccgatgtgcttcttcctcagccccagagtgtcccgcttactgtacagctcgcacatggtggcggggtgcagggcgctgcgaaggtgcaaggtgcaaggtctgcgcgcctcctacgcgagcctgggactgccttggcggccccggccggccttcctcccgttatccctcctggcgttctcttgcccggggcgtcggaggtcaccggtggcgtcaactagctaggatcatctcccttttaagtctggctctggcgttgccctttgccaagcccctcctcctcccccgccggggccgcgggcaggtcgccgggctagcagctcattcgccaccaccctgtcctgccaggccggctcggccctacccgccc

SEQ ID NO: 110477 - DNA, 304 bp, Homo sapiens; identical to SEQ ID NO: 3465
  chr4:110223123-110223427
  hyper

SEQ ID NO: 110478 - DNA, 856 bp, Homo sapiens
  chr4:110223578-110224434
  hyper
cggaggaccggacctgttgcgcctctgtgagtttgccttatttctacctactcggtgtctttcggcacgccgacctgtttcccacctgcattcagttcaaggcaaaaaggctgtgagagcacgctacagcgcagcgcgaaaggggcgactaaggtggagaagagagaggaaaacgaaataaacccaaggaaccaatgctactcgcgaagccgaagtcgcggctgcccgaaggatctccgcagccccgcgtgcgcgatccttaaatacccttcgcgatgctcgcgtgagtgtgtgtgtgagtgtgtgagtgcgcgcgcgctccgagcacgacgtccctcccccgaccccctcccggcgcccggcgtccggcctgccgctcccgctgctgcgcgccccccttccgaaggcaaagcaggagcccgccttattatcataatgtattcaccttggcccagcccgcgggccggcccggggaacccccaagggaggcgggaagcttgggtgggagcggggcaggaggtctgttattagcataatgtatgcaaatagctggagcggccaccgtgattggagaggagcctggcgacccctccccctgcgcggagtaacttcagcatctccgagggccacctctctggcctgggccggggccgaagcggggtcggctgcgcaagaggcggcaactttggcttatactgactcagcccagcgccccctttttatcccacataaaaatggagaaatggcctccgggaggaagatgtgaagcggcacgctctatctctactgatcttcactcaaaagcagccgcaggagctgttgctatctcgctgtggtgcagcgcttttccctcctc

SEQ ID NO: 110479 - DNA, 143 bp, Homo sapiens; identical to SEQ ID NO: 3468
  chr4:110343713-110343856
  hyper

SEQ ID NO: 110480 - DNA, 30 bp, Homo sapiens
  chr4:110354428-110354458
  hyper
ccattgttcctcttcgaggaagggtgggtg

SEQ ID NO: 110481 - DNA, 30 bp, Homo sapiens
  chr4:110354805-110354835
  hyper
gggtcaaggcggagcgacccaggatccccg

SEQ ID NO: 110482 - DNA, 30 bp, Homo sapiens; identical to SEQ ID NO: 3469
  chr4:110355510-110355540
  hyper

SEQ ID NO: 110483 - DNA, 30 bp, Homo sapiens
  chr4:110481068-110481098
  hyper
ttggatggcgaagacggcgctcagagcacg

SEQ ID NO: 110484 - DNA, 530 bp, Homo sapiens
  chr4:110481808-110482338
  hyper
aggtgaagccagagcgctgcggctgggggtgcctcacccgggccgagatagggtgcggggaccaccagacttcggcctgggagcagcagaataacctgggaggcagtttctgggctgcagctctcggtcaggagcaagtttccaaagccgctgcgccgcggggccggttccctcttggtgatcagtgcccgagcccctaaggagcccggaaacgatgaacggggcagtgaccgtcccgggtgtggacggtcgcaggagagtgaaatttccatcctgaaatctgcgagcacctccctttcccagaaggaagaaaaactcgcgttttgttcagacacccgagagacgggtgaatcatgagtgtgctggtgagtaacagttggcctgacaccgttgtattgtggtctgtggagaaccgtggcttggaggagtagagagtggatgtgcaccaaaaaagactagaagaaggggaaagcgctgagtttaaggaggattgcgatggagcctgacaggagcccgggagtgcaaactct

SEQ ID NO: 110485 - DNA, 30 bp, Homo sapiens; identical to SEQ ID NO: 40805
  chr4:110624734-110624764
  hyper

SEQ ID NO: 110486 - DNA, 30 bp, Homo sapiens
  chr4:110650642-110650672
  hyper
cagccgaaggacaccgtcaaggtctgcctt

SEQ ID NO: 110487 - DNA, 30 bp, Homo sapiens
  chr4:110650899-110650929
  hyper
gcacctgacaacagcggccatgaggaggag

SEQ ID NO: 110488 - DNA, 30 bp, Homo sapiens; identical to SEQ ID NO: 40806
  chr4:110651358-110651388
  hyper

SEQ ID NO: 110489 - DNA, 212 bp, Homo sapiens; identical to SEQ ID NO: 40807
  chr4:110651656-110651868
  hyper

SEQ ID NO: 110490 - DNA, 30 bp, Homo sapiens; identical to SEQ ID NO: 3472
  chr4:110686397-110686427
  hyper

SEQ ID NO: 110491 - DNA, 382 bp, Homo sapiens
  chr4:110736300-110736682
  hyper
gaaactcagataaacgcttccgtcggctgtgacaggttctgaggcgcccagatctactggacatagcgcggctcagaagcctcagagacctgtccgcacagttcctgaagttagcaacaaattagtgagtgctgttgcgggccattttgcagccagagaagcaaatgcgcaaatgcgcccagccagtcagcacggacttcaagaaccaacttcattccttgcaaggtgctttagttctggccgttagggcggcaaccaaacagaaacctgccccgcctctgggagagaaggcggatccctaacgccagctatctccaagagcaacattgccgcagcacttccgggacgtcgtgctgcaaaggacgccgctgttatacgtcac

SEQ ID NO: 110492 - DNA, 441 bp, Homo sapiens
  chr4:111117164-111117605
  hyper
gtcattttcagtcccacgagggctgagacctgtctggctcagtactgagtgaatggagagaagaggcgggaaatggtacctgaagcaggcctaggaagtggcctcagagaaaaagcaacaagtaaataagaggcagtatcgactgcagtgggctaggaatggcgggcgtacagtgaatggggtcagccagcaaagcgagggaaagcggactccggaagagcaggttaaaccaggacgcagcaagtcagagattcggcacagaagcaaatgctgaccacactgaccacacaggctaatgcgggaggactgtgggcccgaacaggccggctggaggatatgacaaacatgtgcggagaagacccgggcccggggctagccagcagcgcggttccggcgcccgccggctccggccaccgccccctccccgcctccagcaccacc

SEQ ID NO: 110493 - DNA, 30 bp, Homo sapiens; identical to SEQ ID NO: 40811
  chr4:111118476-111118506
  hyper

SEQ ID NO: 110494 - DNA, 30 bp, Homo sapiens; identical to SEQ ID NO: 3474
  chr4:111119282-111119312
  hyper

SEQ ID NO: 110495 - DNA, 573 bp, Homo sapiens
  chr4:111119711-111120284
  hyper
tctcctcctcccggcgtccgcatccaccgtaggaggaaatgaatgccttgcggtcttagtgcccgcacgtttgtccatcaccctttttactcgtctacagggaaatctcctccccctcgtgcgatttgagaaattaacccttggcgagggagtgtgcgaaagagcgcgacctctctccgcccgggggggacagttttgtttacagcgaaggtggttggaagagtgggggaagggcgcagagagaaaggaagtggcctggaggtcatccagatcccctaagcccaacctcgtgggccgccttgctttgaatgaagtttcagcttgcagggcgcatccccgcggcgcgtggacccgagagcttggcgagtaaacgattgggaaatagtaaaacctgccagctctcttgcaagagaactccgggcaaatctacgttgagatcaccagtgaagggaatacgcttcccacctcctcgccctacctctgggaccacccccacccctacccccacccccacccgggagctctggcttagattcacgctaacccaggccctgcggacggcagagctcctta

SEQ ID NO: 110496 - DNA, 34 bp, Homo sapiens
  chr4:111531890-111531924
  hyper
tgcgaggtctcaggtccgagggccaggtcgggcg

SEQ ID NO: 110497 - DNA, 15 bp, Homo sapiens
  chr4:111531943-111531958
  hyper
cgcgcctccccttcg

SEQ ID NO: 110498 - DNA, 65 bp, Homo sapiens
  chr4:111532395-111532460
  hyper
atttttatacgtaacgttttaccccagtctattcccgcagctggttaatgttcaacccccgggcc

SEQ ID NO: 110499 - DNA, 494 bp, Homo sapiens
  chr4:111532704-111533198
  hyper
cgaggaggcccgccaggcccggagcagcggcgcgtgcgggggcgtgccgagcgcaggctctagggcccctgcttcgccccagctggaccccgcgggcggtcggtgcagctcgagcgtgtgggctgcgatgccctgcctgagacttcgggctagggatgcgggcgggaagtgggggtgcggcggcagctgcagattagattccttttttttttggccggagggacgtgcaaacttctagtgcccgggccaagagggcgaccccggaggtgcgtaggtggccctccgggttcccgcttctcctagtgcctctgaaaataccgtcagggtaaagggagacaggcagtaagtcttaccaccaccgccctttccccatgtcattggccaaaaactgaacattaagataaagcagctgtttcagtcaatggaaagcggtagggcgaggttgtacccaaaacccggtttagacggccaatgaagtcctaggaaaagccgcc

SEQ ID NO: 110500 - DNA, 56 bp, Homo sapiens
  chr4:111533328-111533384
  hyper
cggttgacaagatggcccggccacccagaggaaggaggatccgggacggggaactt

SEQ ID NO: 110501 - DNA, 318 bp, Homo sapiens
  chr4:111536187-111536505
  hyper
aaagcccccagacggcggatcgtctgcgcggggttcctgccccaggcctggcgaacctctgagcgctcaaggagcacggcggcagtgcgctgaggccagtgaggcctgggcgcctccgggcccaacctcgagctcgccatttttgaacccaagcggggaaggttggtgctcatgctatagattatgttaaaggttcctttaagcactttaatacacaactagctcagaaatcattaagagacctagagaaggagaaaaaataccctcacactcaccggtaataagtgttgacatgcagcaaaaatcggttgagtggaa

SEQ ID NO: 110502 - DNA, 413 bp, Homo sapiens; identical to SEQ ID NO: 3478
  chr4:111536561-111536974
  hyper

SEQ ID NO: 110503 - DNA, 525 bp, Homo sapiens
  chr4:111537066-111537591
  hyper
cggagaggccgggaccgctgggccctgcggctccagaagccaaagtccgcccgtggggaccgttttcctctccactgctctcaagtgaacaacatggtgggaggtgaccctcgtccaaagggcttttatctgccccccactgctgcgtgatccctccgcaagtcggaggcagagctttaaaaagaaagaaagtgtgcgttgagcactgatcttaaatcggggacattatctgcgatctctttaagtggcagcagcagtttcttgcagaacaaagactcagtgttcgagctccaaaagcttctaggtaaagtttcattcagatgaaagcaactaaggcgaaaaaacaatgatattgtcggctccagaaaatcggcggttactttttgctctaagttccccagcgtggtgtttgttctcgcccactttggttgtgcggggggttgacaagcataacaaaagatctcagcacatccctccccccacctccacaacgaccctcctagcgccatgaggatgaattctctg

SEQ ID NO: 110504 - DNA, 99 bp, Homo sapiens
  chr4:111539228-111539327
  hyper
cggagttgccccatccggcaaggtcctaggatcccggcgctgtgggtgcggctcacacgggccggtccactgcatactggcaagcactcaggttggagg

SEQ ID NO: 110505 - DNA, 364 bp, Homo sapiens
  chr4:111539478-111539842
  hyper
cgacgggctactcaggttgttcaagttattcaggctgttgagactggagcccgggacgcctgtcactgctgagggcaccatgctggacgacatgctcatggacgagatagagttgggtggggaaaacatgctctgtgatgacagggggttgacgttcatagagttgaagaaggggaagctcttggtggatagggaggcggatgtaaggcccttggcggcccagttgttgtaggaatagcctgggtacatgtcgtcgtagggctgcatgagcccattgaactgcggcccgaagccattcttgcatagctcggcctgctggttgcgctccctctttctccatttggcccgacgattcttgaaccaa

SEQ ID NO: 110506 - DNA, 15 bp, Homo sapiens
  chr4:111540186-111540201
  hyper
cggggcagcaggctt

SEQ ID NO: 110507 - DNA, 64 bp, Homo sapiens
  chr4:111540579-111540643
  hyper
caggcccagccgggtcgtttggctttgcaggcggccacccaggccggccggcttccacccgtgt

SEQ ID NO: 110508 - DNA, 327 bp, Homo sapiens
  chr4:111540782-111541109
  hyper
cgccgggcccagccgtgtaatccgctttttctctttttcctttcattcttgatttcctttttatcccccttcctctttgcacccgactgctataaaaagcacgcctcactcccacttggctcgacaagcagccgccctggaaggagaggcagctgcaaggagagcccagcgccgcggctacaaagcactagggtggagctgcggaatagcgggcggggtgggagggcgttttcgaaggatcccagaaaacccatagactctgtctttaattacttgccatttctaccctaggccatctaaactttgctcaggcgagaagagtacgtg

SEQ ID NO: 110509 - DNA, 51 bp, Homo sapiens; identical to SEQ ID NO: 3480
  chr4:111542041-111542092
  hyper

SEQ ID NO: 110510 - DNA, 872 bp, Homo sapiens; identical to SEQ ID NO: 40823
  chr4:111542473-111543345
  hyper

SEQ ID NO: 110511 - DNA, 292 bp, Homo sapiens; identical to SEQ ID NO: 3483
  chr4:111543403-111543695
  hyper

SEQ ID NO: 110512 - DNA, 460 bp, Homo sapiens; identical to SEQ ID NO: 3484
  chr4:111543720-111544180
  hyper

SEQ ID NO: 110513 - DNA, 292 bp, Homo sapiens; identical to SEQ ID NO: 3485
  chr4:111544298-111544590
  hyper

SEQ ID NO: 110514 - DNA, 30 bp, Homo sapiens
  chr4:111545113-111545143
  hyper
aagctcgtcctaacccgagagagccacgct

SEQ ID NO: 110515 - DNA, 418 bp, Homo sapiens; identical to SEQ ID NO: 40827
  chr4:111549794-111550212
  hyper

SEQ ID NO: 110516 - DNA, 355 bp, Homo sapiens
  chr4:111550494-111550849
  hyper
tacattaggagtccacgtagtatatgctccgcaaacattcgctgattgaatgagaggcgcgggggcggggcggcggagaggggtctgcggccgccaaggccgccagggttaacccaggtccttcgaagaaggttgggaccgagctgctgccgcgtgtgaaggtgtgtgtcgcggctgggggtgccacaacgggccatggagcccacctcccagagggaggaagtctgtgcacaccagcgacttgggtcgaacactttcagcccatccactgggccaaagctatttaacaattaatgcgttcctgggggaggccgggggaagtacccgccccttgtcgggacgcaaagccaggcgt

SEQ ID NO: 110517 - DNA, 30 bp, Homo sapiens
  chr4:111551255-111551285
  hyper
acgtttagtctttaacgaggacatggtatt

SEQ ID NO: 110518 - DNA, 724 bp, Homo sapiens
  chr4:111551627-111552351
  hyper
ttaatggcattaaacgtgtttaggcagcaatttttcttttcggtcaaaaagtagaaaaagacatattgagtgtaggggaagagcctttcacgtgcactaaaacaatgcgggcctgaaagtaatggttaagaaagcaatcattcattatttctagttctttatgtgctagttatcaaaagcgaacgaccaggggcgcctgcgcggcttgtgactggcgcaagcagaactcctctgctcttagccgtttcctgctcacctacgaggaccccatcctaccgtaggcttctccacctgtcctcagaatgcattccccatgtctaggaaacctggggtagggactgggggaaggagacattttgcgtctctctggctcccagcacaataagaaatgtcagcctcggcttggcgactgcgagcccgccccgcgcgaagcgagattggggagctcctctagtctggccggagccagggctgagcccgcgcaaagcattctccccagaagtcatcgctgctcttgatttttaaccatatcccaaacatactacggtctaataatttatttttactaccgattatcaaacagaagaagaatttaacacaatctaaatgacagaaatcacgcgacgttatctctgcattgcccccatttaaccccatggggttaatcccggacaagtgagcgtttaactggcccagcagggcgactggcggtgtagtgcagtgt

SEQ ID NO: 110519 - DNA, 89 bp, Homo sapiens
  chr4:111552419-111552508
  hyper
cggggaaactccaatgcaagacctttgttttcttcttagtaatacggtttgtttttttgaccggggtcccaaatcgcccccctccatcc

SEQ ID NO: 110520 - DNA, 1411 bp, Homo sapiens; identical to SEQ ID NO: 40832
  chr4:111552988-111554399
  hyper

SEQ ID NO: 110521 - DNA, 333 bp, Homo sapiens
  chr4:111554631-111554964
  hyper
gacagcagtttccctcggttttctgtaattctgaaacgaacgggctcttggcctagggtgtttcaggagcgagctgagttcgggcctctcatccatcaggagccacttttccatatttagccacactttctcctagagatactaacccggccatttatttacttactacaaataattaccctaaagtatgatttaagatcgcagaggagagacactgggtggactgagcgagactgaggagagcagggcaaacgttcttggagggtttactgcccgccaaggacggagaaatagctctggtataactgctacccagttctccccctttctctc

SEQ ID NO: 110522 - DNA, 463 bp, Homo sapiens
  chr4:111555193-111555656
  hyper
cgacgaccggagggcccacttcgcgcgggtgcggggatcggggtgggagcaagcgttgtcgggttggcggaggcacagaggcggggcagggagctgcgggcctgcctctggcctgagtaccgtttccctgcgtctcggcctctcctgaagggagctgggccctggggagcctctggccaaggtcgctgcctacaggaggggctgcccggcgctgtggcgtggggatccagggtggggacggccaggcggttcccccacccgctagcgagaacgcgggcggggactctgccgattcgatccttgtgggcccgtgggcccagaagtagcagtttggcggctccagatttagtgattctgcagtaaaatcacaggattagtccctgattgagatgtctgttcgtgagatattacaaaattcattatcacagctttctactaactcgatatgaagtaacacagatgg

SEQ ID NO: 110523 - DNA, 820 bp, Homo sapiens; identical to SEQ ID NO: 40836
  chr4:111557622-111558442
  hyper

SEQ ID NO: 110524 - DNA, 621 bp, Homo sapiens
  chr4:111558498-111559119
  hyper
cggactcccactgtggaaaggaggaccagaagggaggatgggatggaagagaagaaaaagcaatctgcgccaacccggcagccctaataaatcaaagggggagcgccagggcagcggggagacagaaacgtacttttggggagcaaatcaggacgggctgggaggaagcgacagggaaagtggcccaagagacggaacaaaggacaatgttcatggggttgtttgggacgaggcgtgtggagtgtgggtgtgagcgtgcgtgtgtgaccttctttcaggcctgcagagttgaggaaagaggtcacagcaaagagggactgcggagggaggaaagtgagagaccggtagagggcgggagtggaggtgggcgcggtggggatgggagaggatgagtgaagagaaatctagaagaatggagtgagctagtgggagagggtgggagggccacagccgggagcgaacgagctaggcttgtcagctggggaaggccgggacgctgggcccagcttagctgggacaccgcgcccgaggtcaaggcgggtggaccaggcatgctgagagtgtcggcgcacaggtgggcacggccacgcactgacccagtgttcacgaagggtttgcact

SEQ ID NO: 110525 - DNA, 562 bp, Homo sapiens
  chr4:111560180-111560742
  hyper
aaatgagggggaaaatgcccacgtgctgtttaattgtatttcctctctgactctgagaatttctatttctggtttttgaaatctcgccgaggcaagaaaatcaaatttcttcaacaagtcccacaactgaactctagttacaggacaccggaaagtgcagtccgagaaagacatcttcacctctgcccatcgacgatttttgcagcctccccattcctctgagtaatgggctaataatcctccctttttttcttttcattttgtagagattaagaggcgctcgtagcagaacggccttgccttcagctggtggcgaggataggcaatctcatggaaaagttggaagagaatgagaaaaccaaagacagaaagattcagagatccgcggagagacacagggagagggaagggagttgcgctgaaaagacgcaaagatacgcgcgtgcaactccctcccctttcaggtttcagaggtttgcaaaccagggctgagaggaaggggctcgggaagctcacgttcctctcgccccccttctgtctggagtctcgcccgccagaggct

SEQ ID NO: 110526 - DNA, 30 bp, Homo sapiens; identical to SEQ ID NO: 40840
  chr4:111561337-111561367
  hyper

SEQ ID NO: 110527 - DNA, 30 bp, Homo sapiens
  chr4:111561762-111561792
  hyper
atgtggggtgacctccgccaactccctgtc

SEQ ID NO: 110528 - DNA, 225 bp, Homo sapiens
  chr4:111562151-111562376
  hyper
atgcgttgccgattccggtgttttataatcatttcgaaattagtacttaaccacttgagctaaaagaatatataaatgcctgtattgactcactaatgaattacccaattaaaacgtccgggcaatgctgggcgctggaaagattgttaaatcaagacatattacaggagggatatgaagattagaaaggtaacagaccaatatctcgcactcaaaacggagttt

SEQ ID NO: 110529 - DNA, 420 bp, Homo sapiens
  chr4:111562491-111562911
  hyper
cggtggctcaggccctttgctcggaccgggaccttacagttctaacccaggagcgttaaactctggaagactccgggccagccctggaggtgcgtggccccgcaagtcgccaggccaagcttgctttttctgtctgcccctccggcaggctgggcgcgctatggcagtgagctttccgcgcaaacggagagctggaaccaaagctgacatttaatagatatgctaactgagcacttaccttcgtcctgagaataggaataaaaggtagctcttcttaagagaggcggtgcaaaggcacgctataggagttcagaaaaggctggcggcgggaaatctgtagcctgggggctagtcaacatcccctttcatttcaagcacttattgatttgctgttgtcatctttggcgacgcagaaggaca

SEQ ID NO: 110530 - DNA, 30 bp, Homo sapiens; identical to SEQ ID NO: 40844
  chr4:113067350-113067380
  hyper

SEQ ID NO: 110531 - DNA, 157 bp, Homo sapiens
  chr4:113152694-113152851
  hyper
aacaaacgtccgcacgcaggaattgaaccgtctcgcaggcagaggcggctgaaccaggagcgagcggaagtgacgcacaggccggtcgccagagaaggcggggcaccgaggtagcgcgcccaattggggcgcgggagaggccgggggtgtggcagcg

SEQ ID NO: 110532 - DNA, 175 bp, Homo sapiens
  chr4:113153416-113153591
  hyper
ctggaggtggcggtcgagagccctgctacactcactgcttagcagacgtcagactggtggtcgtcttggaggcccagtctggggtccggtcttggggcctcctcggaaagaggtagaagagggggcggggtgtccctcctgccagggcgccctgtcacgcggggaaggagtcacg

SEQ ID NO: 110533 - DNA, 1008 bp, Homo sapiens
  chr4:113430516-113431524
  hyper
cagttcggtgagatgcggggccgaggaggagaaggagtgggaccgtgggcgtgcaggtgtttcaaggatcctcctcctttcccccttccatctctgattccatctccaatttggatcccgggaggccgagcatctctcacgcggttgacacctctccaggctggagcgcgaagccggcgcctgcccgggtaatcagggaggcctggcctttcacgcggtgttctcagtcagtaatccaagttggcatttcccccttcgcgctctgagcagctggagaagcagagaatgctagcgaaagcagacagaaccacccctgtctcccctcccccgaccctggcaccgagagggggaaaaaagtcgtttgttgtaacgcacacaccatcaggattcttccccattccatcctcccgactcacgccaccttgcagggaaataataggtccggccacactggctttcgcgttctgctttccggatgactgaatttctttgctcgcctctcctgtcggggaccatctgaaactgcctccaagctgcgttcccagggaaccccccaacccccactcattccactcggggactaaagagcgactcacttcaacgtcctccataagatgaaccccatcccggctggaaaaatcaaactggggaaggaaaaacgcgttgggggcaaggagaaccgctcctgcagacctggcccctccttggccctaggggacccctgccgatgcccactcggtgccacgtggggcggccccaagggagatgcaccatcccccaaaccaagcgctttggaaaagaaactgcagagaataataagaagcatgggggggggggcggggggcggggtgtgtccgtggagtgatgagaaagctggtctttcatccctccttttttggacattccttaagtttaatcattaaagtggtccttaaaaaagaaggcagcagcttaacgctgctatttctgacaatctgccccacacactgtcagcgaagtgaaagatct

SEQ ID NO: 110534 - DNA, 50 bp, Homo sapiens; identical to SEQ ID NO: 40847
  chr4:113431804-113431854
  hyper

SEQ ID NO: 110535 - DNA, 239 bp, Homo sapiens; identical to SEQ ID NO: 40848
  chr4:113431915-113432154
  hyper

SEQ ID NO: 110536 - DNA, 277 bp, Homo sapiens; identical to SEQ ID NO: 40849
  chr4:113432226-113432503
  hyper

SEQ ID NO: 110537 - DNA, 152 bp, Homo sapiens
  chr4:113432518-113432670
  hyper
cgacgctccaatgagaacaggacccaccttcgcgcctctccgcacttaggaaaacgcgccgcagcgcgctagctggcgttggaaagatctagcaacactgagagtctgtgtctgtcaccggaagaaaatctccacagcgttgtttgaagtgt

SEQ ID NO: 110538 - DNA, 1938 bp, Homo sapiens; identical to SEQ ID NO: 40851
  chr4:113435423-113437361
  hyper

SEQ ID NO: 110539 - DNA, 1088 bp, Homo sapiens
  chr4:113437616-113438704
  hyper
ctaaagctcctgttggagctccgggctgcggccggagctggcgaagccgcagcggccgcagaggctcaagctgcggctgttgtcgccgccgctgtccattgtgattggtggctcgcgctcggctggagcgtgccgctaatttattaatgaatggaggtcgcgaggcgcagctggccaatcagggcgccctggactccgggaggcctgcgagccacgcgcaccggagcccgctccctttcagcagctcattaggggcccgagcgctgggggcggatggggggacccgtgctaccgcccccgccttcgtcctcgctgccgccgaggctccccccgcccggcgcgcgcgcaggcaccgcacccggcgctgccggccctcctaactcccgggtgatgggaactaggaattagttaatgggggtcagaatcccggggaaagcagttagccctgtggtgctgccgggcgtctcttggcaaagcctcttaggggttgtatcaaatagtaaacgattttaaaatggattcatttggttaggggaggagaatggcgtggatggagagatgtggacacctcgtgaacaagtgtgtttggggtccgtcgaaactggcgtgggagagtgaagggagaggacactggggattcaaacaggcgtctcttgggaggggaggtcggataggggagcagttgatgagcttttagaggatgtgagaatgaaatcactcacatgttagagctgaaaggatccccctcattttacatacaggaaactgaggctccgggcactgatgcaggttttgctggggttaacccagtttatagcctggagggacagcaaggaggcttcctgcgtgggtggcagcgaaccgagcgggaggagcggcagagctgctgctcctgcaagcaaatgcgctgcgctgacatttctgtgacctctgctccgcgctggggggcgttgtagggacaaggggcccatcttcccaattctgcttttcaatgagaaaaaagagctgaagggctactggacctcgggggaaacttgttctcaattgctcgttagccctccccactttccccacgttcatgcccaccc

SEQ ID NO: 110540 - DNA, 625 bp, Homo sapiens
  chr4:113441560-113442185
  hyper
aggacaaatggtcgccgcgctagtcccttgctgttgcaggtgactgtcgggggcgcgaaagagggcgcccttccctgagaggacaaaagccaaggtttggctatccagcgagcctgtcccccaattcacagtaaaccaccgtcggccaaaggagatggcgtgtctactctctgctaaaataacaagatgaagtacctgacaagggggctttgtaacccaaatcctaatcctccgagtgagttctcagaaagatggaaagatggcgggaaaaagttggtaaatcctaaacatcttttacatcaacggtctctagttcttcgctgcaggctagaaacgcagcttccagagcaggagagcctggtatggaaacaattagctttctccgcagagcaccccttgcaacgctaggattcgttattgatagtggtgagcgctgggaatgagtgtgaattcggagtttctgacggtcccctatccgggagccaaggaagccaaggagaaaacaatgtaaattcgccccgatccccagttactgcatcccacatggtattctcggtctcccccacgttttccccttgaatcctgtccggggaggattcggcttgaacctagccctggagaggtc

SEQ ID NO: 110541 - DNA, 478 bp, Homo sapiens; identical to SEQ ID NO: 40854
  chr4:113442246-113442724
  hyper

SEQ ID NO: 110542 - DNA, 43 bp, Homo sapiens
  chr4:113443711-113443754
  hyper
tttagtggtcgggcacgcggtggctcatgcctgtaatcccagc

SEQ ID NO: 110543 - DNA, 462 bp, Homo sapiens; identical to SEQ ID NO: 40856
  chr4:113443993-113444455
  hyper

SEQ ID NO: 110544 - DNA, 724 bp, Homo sapiens
  chr4:113444849-113445573
  hyper
ttaggggcctggaaccgaggtgtcagcagtaatttaaagaaggtattcagtccgccagcgtctcttttctccgtttcccccttccacccctcccacccctccctcatttacgccttcaagcagtatgggggcggagaagacttttaaaacaaaacacaaaacaagatcttttgcgagagcggtgtccgagggagccggagcgctgacaggtgtgcaggaggcgccccctacagcctgctgcccctctcggggttacactcccttcctgccgcacctgagcgttttcaggacgcgctctggtcctggagggccgggcccgcccgagggcagccgattcacggcgggcgcgctgcgaagtcggggcgccccctggtggggcacggaggtcgagggggtatcctgagagcaccgcggggcttcggggccgcgggggagctcccaagacagccggccaccgggggacagtggatttggggtctcctcgaggtcggtccggggacgccctctgggaagcttcacctgcggctcaggttacaaacgcacagtgcccagccacgtcctcacctgcagtttcaaaagccgaaagaaacaaacacaaaacacctcccctagggttctgatagttgccaagtttaagaacaaccggatttaagccccacgggtttcgttttcttttgttttgaggatttagcaaatcagctagaagtgacgccaagacccaata

SEQ ID NO: 110545 - DNA, 219 bp, Homo sapiens
  chr4:113558090-113558309
  hyper
cccaaaacttggcccgcccacctccgcctaagccaaaaaccgccgctttcaaatcgccaatcaaattcttccttggcttcgagtctctcagccggccgcgctctccgatgcccagccctcctggaaccacctcgcctgtgacgtaggtggagcgcgcactgcctccgggcccgtctttctcaattgggaccggaaaacgttgtcgctcatcctatgacg

SEQ ID NO: 110546 - DNA, 287 bp, Homo sapiens
  chr4:113558539-113558826
  hyper
gttatctatgcgcacgcgcaaaagtcttcggcagcacttgtagttcccgttttcagacagtaagggcgcataggggcccggcgtggggaggtttggggcgcgcccggcctatgacggcgtccttgcggaagtacgggtgccgagagaagcagtagtcaataaagagagtgccgtatttcgcagattggagctgagctgtggctgccagaagatagcgaacgtgaggatttatattctaaaattatcatcttcttttgcaggactctgccatcgtcctcaaagagtaa

SEQ ID NO: 110547 - DNA, 311 bp, Homo sapiens
  chr4:113626497-113626808
  hyper
caggggttgaggtcccggtggcatttcacaccacgttctctccgtaaatgaattcccccttatcaatagggagtagttggcagaacaaagaatgtgtgcgcgtggaggctagaggtgggtgggtgggtgggtgggtgccttagcacaactccagcggagagtgagtgcggataggaaatgtgtgtatggcatgaatggaaagagccgagagtgagtgtggagatgggcagggaagagctggacgcgccccaacagccaggggcctcccgagggaacgtccgccagtgatgcgggagcgcccgcggaggagc

SEQ ID NO: 110548 - DNA, 192 bp, Homo sapiens
  chr4:113627383-113627575
  hyper
aaagtgcgggaggggcgccggcaccccattgtcctcgcgtcccccaagggcggggacctcaaccccaatgcggcggctcccctaggagcggggccgacacgagccaacttggctacatcgcccggcccaggaccattctctaaacctcttttctcagtctcacttcacacacagacacacatacagacacac

SEQ ID NO: 110549 - DNA, 160 bp, Homo sapiens
  chr4:113739234-113739394
  hyper
tgggactggcccgccgaaagcacatggattacagtctgaggctgtaatgggaaagtcggttcctgggctgctgtctcatagacatcagcttgcagggaagctgggggctctccgaattgccctgctccggggcccctcctgctgcgtgactcacaggcac

SEQ ID NO: 110550 - DNA, 30 bp, Homo sapiens
  chr4:114681865-114681895
  hyper
acaactgcagagatcgtaaattcactaagt

SEQ ID NO: 110551 - DNA, 921 bp, Homo sapiens; identical to SEQ ID NO: 40861
  chr4:114682534-114683455
  hyper

SEQ ID NO: 110552 - DNA, 736 bp, Homo sapiens
  chr4:114900466-114901202
  hyper
actgcgaagtggacgcgtcgcgtctggctctgatcagacagataaactgccgtagtggaccggcctcctgatcaccttctccactttcccagggctattttccccagtcctttcctaggcgtttgccaatctccccgacactcaccaggcggcgaagtgaggaagaagccgtttcctgatctccctccacctccgcagaaactccgggcagcaattccttttccccgctgctagggagcctgaaggccaaagccgggtccctagccccgcggccggtccgcgcggagcccgcttggtctttgcgtagttggcgcacccggcgcaggcgctgcaaactgcgtgcgttttctcagctaacttatttagctttggcactccgagttcttttgcctcctccctcttttctctccagtgaatcacagaacggtactttcttcctgagctcccccgggaagagggggtgggggaaaaggactgtttagaggctcgatctttcctttttcttttccgggaggtggatggccaaggcagaggaggctttgccagagagagagctgcgtgctgctccagcccagcgggattccgggggatccgcctgggctaccgcgtcccaagagtgtcgcctcctgcccatcaccccgctagagggaaaggacggcggcgcgaatggggaagggtaaagcgggcacttcttttcgtggggctgttggtgaagagccccgtctcccatccctaa

SEQ ID NO: 110553 - DNA, 187 bp, Homo sapiens; identical to SEQ ID NO: 40863
  chr4:115519421-115519608
  hyper

SEQ ID NO: 110554 - DNA, 117 bp, Homo sapiens; identical to SEQ ID NO: 40864
  chr4:115519970-115520087
  hyper

SEQ ID NO: 110555 - DNA, 721 bp, Homo sapiens
  chr4:115520453-115521174
  hyper
agagggagggtataacggggaggcgattcggccgaggaccttgtacttgacccctgaagggatgggcaccgcggagcccagaggccagagccagctgccagggcagggatggaggtgggggaccaggaggagcttcgggacctcttcaactcccctttactccgtcttccccctaaggaggaacaagagcgggatgtgttgggggtggggaatgtcttggggctgtacaagctcgctgagacttttcggggcccgccgtttccgcgtgcccgcgcgactctcgacaatggacagtgtacagtggtggcagggtttcacgggtccccgcgccgatttgggaatggtacggggtgcccttgcattagagaagcctgtgcgggcccccgggattagagaagaggtgagcgcctgcgggcggggagagaaggacgcgctgctggcaaaaagaagggcgccttccatggactggaggagcggcgagggagcctggtatgtgtgttttggatttgaaggaggcaaaccgcatcggagagtgcaagtagatgcagtgcgtcggggcaaaaggacaatctgaggaggtgggcggggtacccaatctctatatacaagctttctggtttaattgagggtttataaaattgagtacggtaaacctgccattgtgcagcacttccttaggaaaggaatagcctctgtacctgtaccgcgagttcccatcacc

SEQ ID NO: 110556 - DNA, 842 bp, Homo sapiens; identical to SEQ ID NO: 40866
  chr4:118954371-118955213
  hyper

SEQ ID NO: 110557 - DNA, 47 bp, Homo sapiens; identical to SEQ ID NO: 40867
  chr4:118955469-118955516
  hyper

SEQ ID NO: 110558 - DNA, 305 bp, Homo sapiens; identical to SEQ ID NO: 3509
  chr4:119200549-119200854
  hyper

SEQ ID NO: 110559 - DNA, 1132 bp, Homo sapiens
  chr4:119273334-119274466
  hyper
cccgtccggagtttccgcggccgccccgaggccactaaccgtgtctgcagtcgcagtagccccagtccaccttgccacgggcgtctccgtagaaacaccagggtctgcccgcgccgtcggggctccgacaaaagttgtggcgctgtcctcgcagctgagcccagctcgctgggggcgaccgctccaggaagggtggcacctccgcccaccgcagacacggggcgccgaagtccgtcacgctgacccatggctcgccggcggggcagccccaggggtgcggccggggcgtgtgcccggcctggagggcgtgcgggcgctgggcagggagcgcccgcggggggcgcgggaagcgcgggagaggcggcggcggacgcgtcctcgggggccgctgctgggtgggaaggtaataggggtagtgcggacccgcagggggcgaatggcggtggctgtggtggagggaatcattgaggacagaatcaaagccgaccacttcggggagcgcccctaacatcagggctagcacgaagcgggcgagcgtcatggtgccagcgctgcggggtctggtccatgctccccagcttctcgggcttggagcggagaagaggagggggcgggggcggggctgccgcgtccctcgaatcccccagccccctcccgcccccgcacgcggaccgccctcgcctccccaaccttgcctcccgccgctggtgccctgccgcgcctcggctcctgtcccctggcggcggccgcgggtggggaaatctggagctcagccgagccccggccggcggagaggaccggaaaagagaaggcgcggacgcagcggggagcggttgggcctgagccccaggtagcggcgcaggcacgagcccgggaactctgccccctgggggcgggcgccggccgcgcaagctgctccggacctacgctcggcccctgccaggcccaccgcagtccgcccgcacggcactgccagctgctgggaccgagcccgagggtgcccgcgcggagcacggtcttggctgccccttgccagcatgcagcaccagcacagcccggcgttggcggctcccaaatctggcaccggcccctgccgtcatctctcctccaacctcgtcgccccgtatcttgc

SEQ ID NO: 110560 - DNA, 30 bp, Homo sapiens; identical to SEQ ID NO: 40870
  chr4:119606569-119606599
  hyper

SEQ ID NO: 110561 - DNA, 30 bp, Homo sapiens
  chr4:119606908-119606938
  hyper
tagttctcaattttcgcggtgtcccgaatg

SEQ ID NO: 110562 - DNA, 30 bp, Homo sapiens; identical to SEQ ID NO: 40871
  chr4:119756854-119756884
  hyper

SEQ ID NO: 110563 - DNA, 51 bp, Homo sapiens
  chr4:119757205-119757256
  hyper
tcttccccggccggcgtccccttagcctggactcacgctcggagttgcagc

SEQ ID NO: 110564 - DNA, 13 bp, Homo sapiens
  chr4:119757494-119757507
  hyper
gtcaaagccttta

SEQ ID NO: 110565 - DNA, 221 bp, Homo sapiens
  chr4:119757549-119757770
  hyper
cgcaggaaggaggggagcgcgttcattcattcttccatcaacaggttgcagtttcagctcttcattcattacgtattacttaaataactaatagttcaggtactgcactaccgttacatacgggaaagtacacgatctggacctaggggagattaccgtttaaaggcgaatctggcacgtgtacacgcacatttgatgacgtacccgtgcaatgcactaca

SEQ ID NO: 110566 - DNA, 156 bp, Homo sapiens
  chr4:119809909-119810065
  hyper
tcctcgaaggtgggccgagcaaaggagagtgacgcaagagtgggctgtgtcctggatgctgcgagcgcctctgcctccttgagaatgagcccattagccgcacaaattcgcagcaggcggctggggcggcggctggggcagcggctgcagcagcgg

SEQ ID NO: 110567 - DNA, 251 bp, Homo sapiens
  chr4:120133568-120133819
  hyper
cgatctcgcgcctccgaggaagccaactgtatcgcgcacgccatcaaatccccgcgggaatagaattccgcaggtccagaaagccgggaaatcgcgagcggaggcggagttacctcggtgagcgtgaaggcggagcccgctccgaggggcgggctcgaggcggggagaggggcggggctccagggacctgttgatcgcaggtgtcactggcctgactggtccctgggtattggggcgtatgcgcatgctcc

SEQ ID NO: 110568 - DNA, 37 bp, Homo sapiens; identical to SEQ ID NO: 3513
  chr4:120221340-120221377
  hyper

SEQ ID NO: 110569 - DNA, 51 bp, Homo sapiens; identical to SEQ ID NO: 3514
  chr4:120221610-120221661
  hyper

SEQ ID NO: 110570 - DNA, 30 bp, Homo sapiens
  chr4:120221991-120222021
  hyper
aagaaatacgttctcgtccccctgaaaggc

SEQ ID NO: 110571 - DNA, 30 bp, Homo sapiens; identical to SEQ ID NO: 40877
  chr4:120548322-120548352
  hyper

SEQ ID NO: 110572 - DNA, 30 bp, Homo sapiens
  chr4:120548917-120548947
  hyper
aagggccgccccggcgcttggctctggacc

SEQ ID NO: 110573 - DNA, 334 bp, Homo sapiens; identical to SEQ ID NO: 3515
  chr4:120549977-120550311
  hyper

SEQ ID NO: 110574 - DNA, 31 bp, Homo sapiens; identical to SEQ ID NO: 3516
  chr4:120970718-120970749
  hyper

SEQ ID NO: 110575 - DNA, 30 bp, Homo sapiens; identical to SEQ ID NO: 3517
  chr4:120987394-120987424
  hyper

SEQ ID NO: 110576 - DNA, 636 bp, Homo sapiens
  chr4:120988003-120988639
  hyper
gtcctttgcgcaggcgcgacgagcctttaagcccagccccacgcagcggggacctgccctttctctcagccttcctgtgatgtcgcgggagcggccggttcgcgcaggcgcagttggtggacctggtcgcgctgtgccgggtgtgacactacggtaggtgtaggttaggatgtgtcttctggtcgtggtctactagttggggccgagggaagaagatgacgattccaatttcagtagccactctctaggcttatgaactgaaagaccaaggagcacaatttccgagtttcaaagatactttcaaactgaaaggaactgttcgccagctgctcgcgaagtggcccatgtgacccctagtgaacggtctaaacttccgctagatgctttgggaattcgtaaagcgactgcgtgcgcggcagccaagccacagctttacagggttcgccttctgtgtgggaacgcagcttttcccgagaaattgggttagggattaaagagaagaactgcatcctttttactgccctttttccacgtctgtcctgggcttagggccctcctcagaggccagaggggtaggcgagtccggggcggtagggggctgcgtccggaagtccaggctgcgttctgtccaccctg

SEQ ID NO: 110577 - DNA, 1268 bp, Homo sapiens
  chr4:121843109-121844377
  hyper
aggagggaaggaaatcctgggcgtatgaatgagattctacggcctgcgtggagcggcgctctgggctgctcctcccatccccgcatggaaagttaggcgtttctagccacattaattcatcctaaaggaaaagaggcgacagcggagcagcgtgcgcgcgggggaaaacacccgcccacgcgtgccttcgccaacgcaaagacgcagctcacacccgtaaccgaggaagagggaggctcccgccgcgctcacttcctgcgggagagaggaaagacatcttgcggcagggaggccggtggcagttccgcccctggaccggccggcagcggagcgcaccccgccgccacctacgtggcgctgcctgctcgggtggcgcagcgagtaaaggccacccccgccgtgccccgcggtccccggccttcccacggacgcctggcccggcccgggcgaggggcgaccggggtgaagcccgccgcgccccgggccctgcggcagggcgactccgggaggcacagggcgcgcgaggtgcaggggcgcgcaggccgccgccgggtcacccacctttcgcactctgcgggccgtgtagagccccatgccgtcctgaacccgggaggacttcagggagaacctgtccggcacgtacatgcccagcattttcccgggcgcggcggccgccgcctctctcaacaccggcgcttagcgcccggcaggcggcacatcgaaatttggggtgccagggtagaggggagaaaccggcagggaaggaggaaatggagttttcctcccagaatccccacctccctgccgattccaggatcccccgcggctcagcccctcctcgtcccgggtcgggctcggcccggatccgttcctgccattcctgctgcgggggcgcggggggcgcgggcctgggcgctgcgggcgccgggacgccgctcgctgattggcccgaagttggcggctctgacccgcgcccgggcgcgaagcccggagcagggctgaccccagggcctcaaacccggaggcccgcgagctgcgcgggccgtcagcacccctagccccggcgcggcggcgtgcgttcccgcctttgtccagctctgggttttcaaaccttgccccgctgaaccattactccctgtaggggagtctcgcttgcttctcttcagatgcaaaacgaaatggaccttcacacagctggggcatcctccaaaacaactttatcaagttcctgactctgaaagccagcttattgccgactactgagaacg

SEQ ID NO: 110578 - DNA, 2308 bp, Homo sapiens
  chr4:121992096-121994404
  hyper
gatgcggggcgggtccggggaactgccgggagctctcacgcctgggcctgggatagggtgcgggcagaaaggtgaaccgagagcgcacaatgcaacgaaaccgcactccaaattcagcagtttgcaaagtgcctccaagaaaacagctgggacctgcaatcactcgttcggactcctaggttatcggggccgcggcgactccgctcagttagaaaggtagcgcgggtgagagcgaaccccaactcacgcacagacaggacgagggcacgaagccgagtctcctggctggggccgtagggggcgtcacctcggtggccgctctgctctccggaagaaagtatgagccggtcccaggccacctcgctcagcccaaggaagtttctataacgatgctcgcctaccacgcagaggacaaatgaggagccagagcggttgggggtcgggccaaccgaactcccggccccggctgcgcagctcccagacgcccaccaagaactcgtgcgctgcctggacctctagcttttcgccctacacgcagacgccctctgcaaaaccccagtcccgcagactttccctagcggcgggcggagggcatgaacctggaaagggaggcaacagccctcttggcaggcgggcaaagtaagtgtccaggctaagtccgggataaaggctccgcggctccccagaccccactgcaccccgagctcccgggtcccaggtcttccccgcccttgcgctgtctgtccacctcctcacatctctccgggccgcccagcttcgaaagcagctaaattaaaaacaaacaaacaaacaaacaacaacaacaataaaaaaaaaaaaacgagggaaacctgctcctgcccctcatgccctcagctcctacggatagggcgcccttgagaagcttcttgggccttgaagatttgggggcgcgtgcctcgagcccccatctcggatgacccttcgggcgtgaacgctccttgtgctaggtctcagggtggcgggctaaggcgtcgggtctctggggcattgctttcctctccccacttaccttaaaaagatctgtttttcgtagggaaaatagaaaaaaatccctccccgtggtgtggtgtgcgaaatagtccacgtccccggaccctgccaagatgctaagcaccaatatccaggaacgagaagcctggagggcggggacggaggcagataaaagagaaaaattcaatccgctgaagtgtcccaactttgcggtcggcacagcaaacttcaaaggcgggcgagggcgggcggcgcgcggtcgccgaagttgctgcgaagtggagtagggagccgcgcggggctggggaatcccggggcagcgccgagaagcggcgggaggtccttttaaactgcagggagcgtgcgggggctgggcggcgggaggatgccgcagcgacccgcggggctggcgcgggcttcgccggccgccgctagtcgcacaggcgcctggctggagcgccgcgcggggtgctgggagagccgggcgcacggggcggcagcggccgtggcgggtgcgctgctcagttagctccactctctcgcggctggaagtggggagtgtgtgttcgctcccgagtgtcactgctgaagcccggagtctcttcccctcccagccctaacccctcccgcctcaccgctgcccgcccgccccctccctcctctgcccgttgcctccccctccgtccctccttctctccctcccgctgcgcgccagcgcgcacgcacacacacacacacacacacacactcatacacatacacacactcacacacagacaccctctccctccttttctctctccctgtagccctccctccctctctttctctcacacacacaccaccctgctcagcgacccagcgctccccaaacaggaccctcgcgggcggcatcgcgagggacacgctgctgtcctaaccttagcgccactcggggagaatgaaggaggcccaccgagcccccgacaaagctgcaaaacccaggagacgcgcacgcgggaccatcacactgtcaagcagaccggggtgcacaatagagggaaactctggggttgatctgggggcagggagggggacgtgttaaatccagaaggttggtggttggaggcggaaagcagagtgtgcaaactgtgcattcatgtcccacttttcacccgaacgcctgcctatcacagccttcactcagggagcgcttccccctcggcgcagaccgagcctcctccgatttgaaactcagcagctgttttaacaattgaaaaagcggccctacaggacc

SEQ ID NO: 110579 - DNA, 30 bp, Homo sapiens
  chr4:122301128-122301158
  hyper
tcctgcctcactgctcgggacctttccgaa

SEQ ID NO: 110580 - DNA, 296 bp, Homo sapiens; identical to SEQ ID NO: 40886
  chr4:122301416-122301712
  hyper

SEQ ID NO: 110581 - DNA, 390 bp, Homo sapiens; identical to SEQ ID NO: 40887
  chr4:122301962-122302352
  hyper

SEQ ID NO: 110582 - DNA, 30 bp, Homo sapiens; identical to SEQ ID NO: 40888
  chr4:122617992-122618022
  hyper

SEQ ID NO: 110583 - DNA, 123 bp, Homo sapiens; identical to SEQ ID NO: 40889
  chr4:122685767-122685890
  hyper

SEQ ID NO: 110584 - DNA, 510 bp, Homo sapiens; identical to SEQ ID NO: 40890
  chr4:122686113-122686623
  hyper

SEQ ID NO: 110585 - DNA, 30 bp, Homo sapiens
  chr4:122722205-122722235
  hyper
tctagtctccaccccgtgagaggactgagc

SEQ ID NO: 110586 - DNA, 53 bp, Homo sapiens
  chr4:122722575-122722628
  hyper
caccatgaaggaaacgccactctcaaactgcgaacgccgcttcctactccgtg

SEQ ID NO: 110587 - DNA, 30 bp, Homo sapiens
  chr4:122744198-122744228
  hyper
ggtcatctcttaagcgtgaggaggataggg

SEQ ID NO: 110588 - DNA, 331 bp, Homo sapiens
  chr4:122744980-122745311
  hyper
caggcactgcccagcgtggcgagccaaagacgcccagagatgcagcgagcagcccgccggagcggcggctgttcttgcagttcaagtatcccgcgactattgaaatggaccaatgaaagcgctcgcggccttgacgtcattcaaggcgacagggtcgcaggcgagtgaagggtaaaccaaaggaaactgagcaggggcggggcaggagggagaaacaaactggctggggcgggagaaaacgcctgcgcggggcggggagaggtaggatttagggcccgacgcttccgattattttaagctgagccacctagtgagcgaggctgtccgaagg

SEQ ID NO: 110589 - DNA, 525 bp, Homo sapiens
  chr4:122791299-122791824
  hyper
gtcggcacccagcccggctccttcgcctccgcaccagctcctggcgaccgagactttcgtcagtggaaggaaggaatcctctccgggtgctgggcttgcccagcgcggcgcccgccctatcccttgggtttacctgcagataatccattcggtttaaaatcagatccatgatgactacgcggaggggctaagcagcgccggacaagaacaggagggacagaggcttcgggcccgcaggcctccgacccagtcagaaggctgcccgcgcccctcaaaagccagccccagctaccgcgcctaggtcctgggctgcacaggcggggcgacagggcagtggcgtcctgcgtgacgtcagtacgctgctgcgaggggctcctggaagaagatgaaggcccgcccctttcccgaagcaccgcccactgacagcgtgttccaatcagaggcggagaggaacaaaagaggcgaggtccgggagacccatacagggcggtttccacagagaccccagacgcagtcttggctcca

SEQ ID NO: 110590 - DNA, 1902 bp, Homo sapiens; identical to SEQ ID NO: 40892
  chr4:122871294-122873196
  hyper

SEQ ID NO: 110591 - DNA, 179 bp, Homo sapiens
  chr4:123653963-123654142
  hyper
gtcccagccagaatcgcgtctggccggtgggaagccgggaactccagccccctgtaggagaggagaaaggagcgaggttagtagtgaggtgcttccgctgactgctaagctaagtctttcctgaagacgtgggagcccgtgtgtttgatttttctgtcctcttcgggccagggaaagaa

SEQ ID NO: 110592 - DNA, 1565 bp, Homo sapiens
  chr4:123747655-123749220
  hyper
cgtggtttgggtggtgcgggggttgggcgggggtgacttttgggggataaggggcggtggagcccagggaatgccaaagccctgccgcggcctccgacgcgcgccccccgcccctcgcctctcccccgcccccgactgaggccgggctccccgccggactgatgtcgcgcgcttgcgtgttgtggccgaaccgccgaactcagaggccggccccagaaaacccgagcgagtagggggcggcgcgcaggagggaggagaactgggggcgcgggaggctggtgggtgtggggggtggagatgtagaagatgtgacgccgcggcccggcgggtgccagattagcggacgcggtgcccgcggttgcaacgggatcccgggcgctgcagcttgggaggcggctctccccaggcggcgtccgcggagacacccatccgtgaaccccaggtcccgggccgccggctcgccgcgcaccaggggccggcggacagaagagcggccgagcggctcgaggctgggggaccgcgggcgcggccgcgcgctgccgggcgggaggctggggggccggggccggggccgtgccccggagcgggtcggaggccggggccggggccgggggacggcggctccccgcgcggctccagcggctcggggatcccggccgggccccgcagggaccatggcagccgggagcatcaccacgctgcccgccttgcccgaggatggcggcagcggcgccttcccgcccggccacttcaaggaccccaagcggctgtactgcaaaaacgggggcttcttcctgcgcatccaccccgacggccgagttgacggggtccgggagaagagcgaccctcacagtgagtgccgacccgctctctccgcctcatttccatttcgtgggttctcgcccgctctctcccctccagcctgcaccctcctcccggatcttcactgcgaccctagcgctccgtgtggtttctggccgcgcggccctcggcggtttcgggttcaccactcaccccctcctttccgggctgcggcgtaggcccgggtgtcccctgggctttggggtgtgccaatttgccctgtaaaccagtacccccggcccggagccgcggcgcgccggggcctcgcggactggctgtcttcccgcggacaacctgtcgcgtcggggatgcccgcggccccgccatgcagctctggccgcttctatctgctgcgtgctgtcccggggacaaagacaggaaggaccgcagcagaacgaaacggtctttactggaaaaacacctttctagagtcctgcccttaaattccgactcgggacgacccgaggcatatggcacactactctcacccactctgttttatatttttccgaattgacgaaagctgaaagagcaaaaacaaaaaccaaccagccaaccagcaaaaaatccagatgttgttaataaagtgccatagctttgtttcagtagtgaaaagaagtgcaaacactttaatcttccacctgcagtgactagctttgagaccttgagccgacgcttaaccccagagccggtttcctcatcgc

SEQ ID NO: 110593 - DNA, 658 bp, Homo sapiens; identical to SEQ ID NO: 40895
  chr4:123843157-123843815
  hyper

SEQ ID NO: 110594 - DNA, 179 bp, Homo sapiens
  chr4:123844084-123844263
  hyper
tctttcacagatgccgttacagctgtttcaaagactgctggttttgaaaacgctcagtccctcccaccacgctgtgcactgctgcgctccactcaggggattacggcgcaggggcggaccctcgctgacttctgccccggaagtttttctctcagttgaagcgcgcacattgagtcggc

SEQ ID NO: 110595 - DNA, 30 bp, Homo sapiens; identical to SEQ ID NO: 40896
  chr4:123844549-123844579
  hyper

SEQ ID NO: 110596 - DNA, 1572 bp, Homo sapiens; identical to SEQ ID NO: 40897
  chr4:124317730-124319302
  hyper

SEQ ID NO: 110597 - DNA, 339 bp, Homo sapiens
  chr4:124319559-124319898
  hyper
gccgcctcgccctccccgccgcggttgatgcggcacgtgcacgccgccgcccgcaccaggacctgggccgggtcgcacggcttggcccccggccaccgcttcggcctaggtgagtgtgtgcggcggccgccctcggcccgctgggctgtaggcgcgcgggcggggctcgctcggcgcggcaggtgcggactcggcggcgctgctgcccgagccaggactccgggagaggaggggaggggagggacgacctcgctcggcgcggcccctcccgccgctccctgccccctgggggccgcggcttctgggggctcaaggttgggtggcggggtgggcgacggt

SEQ ID NO: 110598 - DNA, 30 bp, Homo sapiens; identical to SEQ ID NO: 3531
  chr4:124320663-124320693
  hyper

SEQ ID NO: 110599 - DNA, 540 bp, Homo sapiens
  chr4:124426676-124427216
  hyper
caggctgtgtacacccgcaagtctggaagggtgatgatgatgatgtgatgatgagttagggcaattataactacggcaaaaaaaaaaaaaaaaaaaaaagagttcgcagggacgcagcgctgccgccgccgccgccgaggccgcgaccacggcccgagccggccaccgcgcgtcaaaggagccattcaaggcccggcgaggcccgggggttgagaagttaaggagcgggaggtggtgcgccggggccgcggccgcgccatttgcatttcaatgcgacccgcttgttgactcagtgcccggcgcttccgcagctcccaccagaatctgcctttgttggttttagctccggtcaagtccacttcttgcatcgggggagccgcgcgcattgagtttgtgtagtcaggcagaacgctcgacaggaaggaaggaggaaggggcgctctgcgcggccattgtctgggcaaccgggcttaagcagccgagtgactatttaatctataaggtgcacttgaatccctcgcaaatcctctcagtgtggag

SEQ ID NO: 110600 - DNA, 197 bp, Homo sapiens; identical to SEQ ID NO: 40901
  chr4:124778303-124778500
  hyper

SEQ ID NO: 110601 - DNA, 971 bp, Homo sapiens
  chr4:125633096-125634067
  hyper
aagagtagagtgcttcggtgctggtgggtgtctgcccacaggtccggcctccagtttcagctgacagacaaaaggaactccgggattcccagcgccgggcaccaccttgggttggaaccgcccagaggagccacaggggagccacctcagagaggccacgagcgaaggtgcagcctccacaccgaggtctgcccttccagaggctgggagcgcctctgcaccccgccccgcaccgagattggggtgtgtcttttgaagggggagggggtgactgaggtccttgccaatcccagacgaggggtcgcctcccggtcggcttccgcctctgcgctcccgccccatgccccgctcccgctcccacccggccgacggcggtgcgagggaagagggcaaatctggggctcgaggccggagagggtgggtggttgggtcaggtccaagccacggcctcggcctcccagcttccaacccgagggaggggcctcgcttccaccgccgccgccgccccccggttacctcggccccagccgccgccgtggccgccgctgccgctgttagggactctcagtctcagacacttgcttcgctgagaagtcgctgccagcagcgctcccaagactccactccaactgcagccgcctcctccgccgggcccggggcacgctcccagctccggatcctcctcttggcccccggcggctgccagttccagctttcccagcagaatcggtcgtgctcgccccagcccccaccggccaaccgccgccgccgccgccgtcagggcagtaactgtctcaggcagcccccggccggccggctccgccccgcccgcccagcccagaccccgcccccgcccccgcccccgccccgccgctcggcctttctttgcccgccggctccgcctccgcgtccttcccctcccccaccgcgctctcccgcagcatcccgtgcctgggcgtgtgcggccgcct

SEQ ID NO: 110602 - DNA, 477 bp, Homo sapiens; identical to SEQ ID NO: 40904
  chr4:126235779-126236256
  hyper

SEQ ID NO: 110603 - DNA, 1194 bp, Homo sapiens
  chr4:126236931-126238125
  hyper
cgcctgggcctcagcggccactgccggcgccctgttggaggggcgttgcagcctggtttttgaggagtggggactccaggaattccatcgcctccagcttttgggaaagaaattcgattctcccggttccccaccaccccttccccggtgcgcagttgtgcttggacgtttgttcctccctcttcacgttcttcgctgcgggtaagttctaaagtttctgaagaccgttctttgcaatgattcctcatataccttagatacaggcaacttctcccaactctcatccacccgggtgaaaacgctcagactatctggattcaaaaacaaagtaaaagggggcatatataagaggcttgagaaacttttctgggaactcagctcacaggagtgtcccgcggaatgccctgccgcttttcgccacagcatctctcttgcactccgcgttcaactggctacctagagtcttttgctgatgctacttgcttttgccggactggaggttctttgaaatagcagaggtctcagaccaagccgtcagctgaatctttgctggcgctccttaatccctgtaaatatcattgcgtttgcttcaccccttccttctctttatcacatcgttttagggagccaggaccatggacttagcaccagacagggctactggccgcccgtggctcccgttgcacactctatcagtatctcagctccttcgagtgttttggctactgtcattgcttccggggcaggcctgggtccacggggccgagccgcgccaggtgttccaagtgctggaagagcaacctccaggcactctggtaggcaccatccagacgcgccccggcttcacctacaggctcagcgaaagccacgccctgtttgccataaacagtagcaccggagccctgtacaccacctccaccatcgaccgcgagagcctgcccagcgacgtgatcaacctggtggtcctttccagcgcgcccacctaccccaccgaagtgcgagtgctggtgcgggacctcaatgacaacgcccccgttttcccggacccctctatcgtggtcactttcaaggaagacagtagcagcggacgccaagtcatcttagacaccgccaccgactcggacatcggctcaaacggtgtggaccaccgctcctaccgcatcatccgcggcaatgaggcggggcgcttccgtc

SEQ ID NO: 110604 - DNA, 176 bp, Homo sapiens
  chr4:126238378-126238554
  hyper
ggtggcggcggcggacgcggacgagggcaccaacgcggacatccgctatcgcctgcaggacgaggggacccccttccaaatggaccctgagacgggacttatcacggtgcgggagcccctggacttcgaagctcggcgccaatactcgcttacggtgcaggcgatggacagaggcg

SEQ ID NO: 110605 - DNA, 844 bp, Homo sapiens
  chr4:128544019-128544863
  hyper
ctacactgggggcggcgcctggacgcgggtgtccctggccaaggcggcctcgctgtcctggaagggagggtgaagagctgcatcccgcactaggcggcgaaagagggcagcgccaagcggcggggtccggaggcgctcgacggctcgcgcccagcgccggagacgggctgtgtgttgggccagtggaagacaccggagaaacccagacgtggaagaccgggcagcctggacttcgcgagccctggtggggctggcggcccacagagcccccacctgccccgagctcccacagcgaggagtggccgcgccgcccgccagtgcgccgggctccgagaccggcaggggagcacgcgggcgaaggaggggccgccgtcgctgacaccaccgccttcagcccttggcttccgcgcgtcggaggctggcacctccaggttcaccgcggcggccggagctgtgcgggggccagacggttcggcgggagccggggctgggacctgggtgacctgtcgtccgcccctgtagcgagtctccagtgggcatgtttcaggtgggcaggtccagcatccccaaacctgccccccgcagcctggaggacctggactcagtgcagcgtgtcctgttacacaggtcagtgcagggccccgggacgcggggcgagaccgtcctcttgccccggaaatgttggcgagggaggggccgcttttctttctggggtctttctggaagcatctgacttgggattcgccttagtgcggcgctggccgcgaagggccgttgggacctgcaccccaccctttccagaatcgggtgccagcgatccaccctgtcccgctgccgagactgg

SEQ ID NO: 110606 - DNA, 46 bp, Homo sapiens; identical to SEQ ID NO: 40907
  chr4:128554020-128554066
  hyper

SEQ ID NO: 110607 - DNA, 138 bp, Homo sapiens; identical to SEQ ID NO: 3539
  chr4:128703234-128703372
  hyper

SEQ ID NO: 110608 - DNA, 246 bp, Homo sapiens
  chr4:128801995-128802241
  hyper
gcgcatgcgcgccccggcgcagcctatccggagcgatccatctcgttacgtcaccaccagcctagctcggacggcaagcggcgggagattttcaaaatgggagcccagaggcaccgcccaggcctcggaaggtgtcagggagaactttccgtggtttcagcgtcgtcgcctggagcggcggtttagagagccgagcctgatgggcgccaaggccggctggctgcttggagcgctgcctcgaaggga

SEQ ID NO: 110609 - DNA, 385 bp, Homo sapiens
  chr4:128886040-128886425
  hyper
cggccagacgccctttctcctacgttgggagcgaatctcctcggctcacacaacccagccaccggctcccaccgcgctggaacccctctggcagcgagggtttgtcccagtgcgggtgacgcccggaaaggaaccagtcccaacagcgcaggagactgaggggtccctccaccaggatccgctcacctgcttccaggtgtgtcgcctaagagcggctcctgttcactttcgttccgcaggccggccatagttacactccctacaaggcgtcttgcgcccaactctcgcgacacctgctttctcccatcccgggtggcgtgaagctggcaaaacaagcctgtaagtgcgcgtgcgcacctgacggtcagacgtaggcggaacgccc

SEQ ID NO: 110610 - DNA, 30 bp, Homo sapiens; identical to SEQ ID NO: 40909
  chr4:128886792-128886822
  hyper

SEQ ID NO: 110611 - DNA, 131 bp, Homo sapiens; identical to SEQ ID NO: 40910
  chr4:128887029-128887160
  hyper

SEQ ID NO: 110612 - DNA, 30 bp, Homo sapiens
  chr4:128981903-128981933
  hyper
agattacaggtgatcgcggtgccccgaggc

SEQ ID NO: 110613 - DNA, 30 bp, Homo sapiens
  chr4:129208710-129208740
  hyper
cccgccgcccccagcgcacccacagccggt

SEQ ID NO: 110614 - DNA, 30 bp, Homo sapiens; identical to SEQ ID NO: 40911
  chr4:129209587-129209617
  hyper

SEQ ID NO: 110615 - DNA, 160 bp, Homo sapiens
  chr4:129210003-129210163
  hyper
actcaactcgtttgacgaactcgtttgacgtgttctctcttgccctttgttgtctgttgtcttgagtctcatagaataggtttgaacctttcactgtcggttttgtaggagtcactgaggatattgacgaggcaagtgacagggtcgacactcttgtaga

SEQ ID NO: 110616 - DNA, 30 bp, Homo sapiens
  chr4:129730763-129730793
  hyper
cgtccccaccctctcgttttggcaagggat

SEQ ID NO: 110617 - DNA, 30 bp, Homo sapiens; identical to SEQ ID NO: 3541
  chr4:129731320-129731350
  hyper

SEQ ID NO: 110618 - DNA, 30 bp, Homo sapiens
  chr4:129731958-129731988
  hyper
tcttttacttacagcgcgactgcttgtaaa

SEQ ID NO: 110619 - DNA, 30 bp, Homo sapiens; identical to SEQ ID NO: 3542
  chr4:129733013-129733043
  hyper

SEQ ID NO: 110620 - DNA, 30 bp, Homo sapiens
  chr4:129733556-129733586
  hyper
tcgccgctgcggggcggcggccgagctccc

SEQ ID NO: 110621 - DNA, 30 bp, Homo sapiens; identical to SEQ ID NO: 40915
  chr4:129733872-129733902
  hyper

SEQ ID NO: 110622 - DNA, 30 bp, Homo sapiens
  chr4:130014027-130014057
  hyper
caagtactaccacacggttctgcttaaata

SEQ ID NO: 110623 - DNA, 317 bp, Homo sapiens; identical to SEQ ID NO: 40916
  chr4:130014785-130015102
  hyper

SEQ ID NO: 110624 - DNA, 145 bp, Homo sapiens
  chr4:134067329-134067474
  hyper
gtgaagaagggattacgtacaaaatatttccttctccttttccgctccagtaacggggggattgaggaacacagaatatacatgatgctctacacttcaaagaggtagtcagcctcattactgaggctgccgtatatacaaacct

SEQ ID NO: 110625 - DNA, 311 bp, Homo sapiens
  chr4:134067732-134068043
  hyper
cccttggctggagctatctagcgggaggcggaggaccaggctctgttctgttcggccgggaagaagaccctaccgtcactccgccggtccctggctggcgccacaaagactagaagtcggagaggcgagacctctagggggcctgggctcagcgacgctggtgcggacacagacccctatgacccaagaaatcttgtagagcccccaaaaggcgagctctccaaagcaaaattctctggcctgccctatgctgatttcgccgctaggagacgcctgtaacccacgtttgcggagagagttccattcaaaca

SEQ ID NO: 110626 - DNA, 655 bp, Homo sapiens
  chr4:134068266-134068921
  hyper
catgtctcccacatgcaaacacgcgcgcactcgcgcgcacacacacaagtgtttccatacgtacaaatgaacgcattagaaaattaccgtcattttttaaaaggctccaggattctgacgagtcagcttgaagagctcaaaacatttcatttcaattctgcagatctgaagaaaaagaaaggggggaggggtggaagtacagatgcaataccgtattaatattcagatacactataatctccttttcattgatccacaggtccctttatacactgccgctccattctcagccgcagacgtgatgctaaaatcattttaactgcagcggttttcgcttggctttggccagtcttcaatttactgcagctggaaaaggattagccatttttgctggaatcctttccttctaagcgctcaaaggcaggacccatcttcatgaaagagccaagtgcgggggccggggggacccggcgttgcggggagttggggcgcggaaatcagggcagtagacgtgcattcgcgggactctcagaagcacgtctcaggctactatcacgcccatggacactagccctccttaactccttgccaggaggaaatggcaacgtatctccaggtcggaaaacgactctacttttcccgcaggttgtggtgg

SEQ ID NO: 110627 - DNA, 1472 bp, Homo sapiens
  chr4:134069141-134070613
  hyper
gaactagctatgtggatgtgccgcgttgcccctgcgcctccggaaggggcactcacagctggtcaagcgcgtccttcggaactcggggaggctccgttggggcttacacagagctaagccctgggccagggaggatggatgcaagtaccgtgcatgtgcaaacgtgttcgcagatacccgcagcggtgcacactcgggcccctcgtgtgcacgggccctgcccaccaccccgcccgcgttcgccgccgccccactgtcctcatcccgcgggctgaccccaggattggcagaaatcagtggtctaatctagcatggtgggtaaagggatcgatctccaattgccaaaaaaaaaatagaaaatagccggtgttcccagccgctgcgtggcacttggccgcacaaggcgcagggatatcagaggcgctttgcagcgcttggcggtgctgtgtgccggatgccccagagcccggcgttaggatggcgggcttgtaggaagcggctcaaatcaactcctcagtcactgatgaacgcgctcacggctcgaagctaggtcctcgagtgagttaatctacttggtaagtattttgtgaatatgtattttgggaggaaagaagcacgtcgaacgcgtctgcccgtctgtaagcgctgtcatccccacatcctttagcgtgaattcctccgctttttaggagtcacctccaccccctactccgtatgcttcgcgcctttcctcacggccccgtcagaccccctcacctttagattgacacatgccatataatactcacttttaaaatgccctgccagtctctgctagggtcccttaattaggtaacccttgccaattagtgggccctgcgctactttttcccttctcgatgatttatttccatgatgcgtattagggaaaataccttaaaggaaaaagaatgttagcatcattggaaatcccgctcctaggagaggatatcgcagctgttgctattatgttttcgcatttgctgatgcaaacaggggaacctctctattccctccccattacctgcggctggggactgggaactttccgcggcattgtccccagccagcgcctcgggacctgcggggctgttctcgctctcacactcacactcaccccggccgctcgggcgagagttctgtcccgccccgcccggctgccgcgtgacgtgtctgtttggcggccagtttggccaatcatcggcagctcggtgggtggtgctcctgggcgattggttggcagaatgagggcgctgcgcaaaaacggagaagccgagcgctcggagctcagaaactgccagcccagaccacaggctcagaggctgaagcaggaggaaggaaggactggaaggaaaaagagacaggttagagggaaagaggcttgggaagaaaacagcagaaaagaaactgctcattacacttacagagaggcaagtaacggtggagatgaggac

SEQ ID NO: 110628 - DNA, 30 bp, Homo sapiens
  chr4:134071686-134071716
  hyper
tctctgagagcgccacgccaggcactcgct

SEQ ID NO: 110629 - DNA, 616 bp, Homo sapiens
  chr4:134071994-134072610
  hyper
gccctactcaccatccgagtgctggactccaatgacaatgtgcccgctttcgaccaacccgtctacactgtgtccctaccagagaactctcccccaggcactctcgtgatccagctcaacgccaccgacccggacgagggccagaacggtgaggtcgtgtactccttcagcagccacatttcgccccgggcgcgggagcttttcggactctcgccgcgcactggcagactggaggtaagcggcgagttggactatgaagagagcccagtgtaccaagtgtacgtgcaagccaaggacctgggccccaacgccgtgcctgcgcactgcaaggtgctagtgcgagtactggatgctaatgacaacgcgccagagatcagcttcagcaccgtgaaggaagcggtgagtgagggcgcggcgcccggcactgtggtggcccttttcagcgtgactgaccgcgactcagaggagaatgggcaggtgcagtgcgagctactgggagacgtgcctttccgcctcaagtcttcctttaagaattactacaccatcgttaccgaagcccccctggaccgagaggcgggggactcctacaccctgactgtagtggctcgggaccggg

SEQ ID NO: 110630 - DNA, 404 bp, Homo sapiens; identical to SEQ ID NO: 3549
  chr4:134072676-134073080
  hyper

SEQ ID NO: 110631 - DNA, 976 bp, Homo sapiens
  chr4:134073127-134074103
  hyper
cgagaacgcccggctcacttacagcatcgtgcgtggcaacgaaatgaacctctttcgcatggactggcgcaccggggagctgcgcacagcacgccgagtcccggccaagcgcgacccccagcggccttatgagctggtgatcgaggtgcgcgaccatgggcagccgcccctttcctccaccgccaccctggtggttcagctggtggatggcgccgtggagccccagggcgggggcgggagcggaggcggagggtcaggagagcaccagcgccccagtcgctctggcggcggggaaacctcgctagacctcaccctcatcctcatcatcgcgttgggctcggtgtccttcatcttcctgctggccatgatcgtgctggccgtgcgttgccaaaaagagaagaagctcaacatctatacttgtctggccagcgattgctgcctctgctgctgctgctgcggtggcggaggttcgacctgctgtggccgccaagcccgggcgcgcaagaagaaactcagcaagtcagacatcatgctggtgcagagctccaatgtacccagtaacccggcccaggtgccgatagaggagtccgggggctttggctcccaccaccacaaccagaattactgctatcaggtatgcctgacccctgagtccgccaagaccgacctgatgtttcttaagccctgcagcccttcgcggagtacggacactgagcacaacccctgcggggccatcgtcaccggttacaccgaccagcagcctgatatcatctccaacggaagcattttgtccaacgaggtaaggctgaagcgaaaggaccaccatctctcatctcctccatcagaaagcctcctctagcccggcccttgtatctctggtgcactgtatctatttttaggatattagcttatgtgtatcgttgtgggagcagagatgggcggtcaccttctcccactccttcgtgtgtaacctaac

SEQ ID NO: 110632 - DNA, 131 bp, Homo sapiens
  chr4:134074353-134074484
  hyper
aacgatgcttttagtcgcgtgtacaagtaagctatagattgtttaactttacacagttgtctaacctcgaattcatgttttagtgaacaagttaccagatccttctcctctgaactcgggttgcaaaaaaa

SEQ ID NO: 110633 - DNA, 30 bp, Homo sapiens; identical to SEQ ID NO: 3551
  chr4:136732789-136732819
  hyper

SEQ ID NO: 110634 - DNA, 30 bp, Homo sapiens; identical to SEQ ID NO: 40926
  chr4:138453702-138453732
  hyper

SEQ ID NO: 110635 - DNA, 96 bp, Homo sapiens
  chr4:139773301-139773397
  hyper
gtataggattaaaaacgaggcacgttgcagcttaactattcaggcaggtagggcaggtgcctcctgccgagactcgactcccaccccagctttcag

SEQ ID NO: 110636 - DNA, 30 bp, Homo sapiens; identical to SEQ ID NO: 3552
  chr4:139814386-139814416
  hyper

SEQ ID NO: 110637 - DNA, 30 bp, Homo sapiens
  chr4:139937459-139937489
  hyper
ggagcaaccttctgcgttccctttttcctc

SEQ ID NO: 110638 - DNA, 30 bp, Homo sapiens
  chr4:140004770-140004800
  hyper
catggaattgtggacgaagtctgaagggag

SEQ ID NO: 110639 - DNA, 93 bp, Homo sapiens
  chr4:140005145-140005238
  hyper
ccctttcccccagccgccccagtgactgtgaggtggacactgtacccccagcacagactgctacaggggagtcaccccgccttctgtgcaccc

SEQ ID NO: 110640 - DNA, 45 bp, Homo sapiens
  chr4:140005728-140005773
  hyper
ctgaggctgggaaacggctccgggagccgcgcgaggacacagccc

SEQ ID NO: 110641 - DNA, 103 bp, Homo sapiens; identical to SEQ ID NO: 3553
  chr4:140097253-140097356
  hyper

SEQ ID NO: 110642 - DNA, 30 bp, Homo sapiens; identical to SEQ ID NO: 40932
  chr4:140099386-140099416
  hyper

SEQ ID NO: 110643 - DNA, 187 bp, Homo sapiens; identical to SEQ ID NO: 40933
  chr4:140187862-140188049
  hyper

SEQ ID NO: 110644 - DNA, 627 bp, Homo sapiens
  chr4:140200529-140201156
  hyper
cagaaccaaaggtgtcgatatttggactacagagccaagcagttgcaggacgacgtgcaacctcaaaggaaagtgtcccgaaggccgcttcctttttgggggttgtggatctcagagccaggcgctcgcggggttcaggctgctgagaccctgccaagggttaggtttatttaccccacgaacattcgcccagcgtccactgagcgggccctgcctcactgcctcccagcgcttgccgggcccgctcgctgatcggcgtccaccttcccaccgttcctctgcttcctcaggagattggagagcgaatggtgcctctaacaataaaagtggtaagctgcgactttgtcagccaggcacgtttttaagtgcttttaaccatacattaactcattaaaaaggaaaaccatcatcgccctcattttatagatgaggaaacaggttaagccatttgtccaagatcaggatgcgaacccagataatctggactctgaggcaccctggaaaagttccctacttccaaagtctgcaggagcttcgggacgtcttcccgggagtctcccccagtctcctcgacctccaatccaggcttctgctgctctgggtcgggtttggccaactgggtgccgg

SEQ ID NO: 110645 - DNA, 277 bp, Homo sapiens; identical to SEQ ID NO: 40936
  chr4:140201192-140201469
  hyper

SEQ ID NO: 110646 - DNA, 404 bp, Homo sapiens
  chr4:140222257-140222661
  hyper
taaattaggcatttcgtccataatcaactacagcgcttctcaaacacctacacctgtattttagcactttgggctcaaacgatgatcacacagtgtgcgagactctttccaaggaatgaaaggtcgatctagcaggaaggcgccagagaggctgtttttgatgaggaggcggtctgaaccgtacttgcctagcctcccgtagctccgcgggcgcttcgagggtaccacgcactgaaatgatgggcggggcctgccccgaccctcccggcctccacaggcaggccagcctccaggtttcccggcaagctccgaaacccagaggaggtggggaaaggaggtcaccgcgcctgcgtgttaggaagcgtgacccgggtgggaaaaccctccgcgtccgccattttggc

SEQ ID NO: 110647 - DNA, 30 bp, Homo sapiens; identical to SEQ ID NO: 40938
  chr4:140374428-140374458
  hyper

SEQ ID NO: 110648 - DNA, 251 bp, Homo sapiens
  chr4:140374761-140375012
  hyper
tctcctctctggggcgaccaaacgatacgtcgatgccggaaccgacccgacgccggagccgtcggctccgtccttaccgttgctctccaggtacacgcccccgtcaaaggcggctctgcggccctctcgcgagagagtgcccgtggtacctccttcctctcagttgtctgtctctccccgcccccggagtgattgcgcggcttcctccagagggcgggaaccttggacgtggcggggctgggtcagtcagg

SEQ ID NO: 110649 - DNA, 30 bp, Homo sapiens
  chr4:140477712-140477742
  hyper
ggccgcgcgtattccgcgtcccagccaacc

SEQ ID NO: 110650 - DNA, 30 bp, Homo sapiens; identical to SEQ ID NO: 3558
  chr4:140478720-140478750
  hyper

SEQ ID NO: 110651 - DNA, 400 bp, Homo sapiens
  chr4:140586865-140587265
  hyper
gtgtaactggcactgcggctggagggctggtcccacagtgagctacagccctgcccgctggccgtgggagaggcttaaaacaaacgccggaagcaactcccagccccataaagatctgtgaccggcagccccagacctgcctgccttcctgacttctgttccagagcaaaggtcattcagccgcttgaatcagccttttccccccacccggtccccaactttgtttacccgataaggaaggtcagcattcaaagtcaagaagcgccatttatcttcccgtgcgctctacaaatagttccgtgagaaagatggccgggaactcgatcctgctggctgctgtctctattctctcggcctgtcagcaaagtaagaggcatgggaagttcgtgtgtgtgcgcgt

SEQ ID NO: 110652 - DNA, 515 bp, Homo sapiens
  chr4:140655983-140656498
  hyper
atcacaaaagacggccggcggcgagcaggctggggtgacggggaccccgtggataacgggcttgaggacgcccagggcttcagccttttccaggcgtccctcgccggggcaacgcagagcagctgccgttcttcccgcgccccagcagatggtggtgtcagcccggcctcgtgcccggccgccgctgcgcccgcgccccctcccctcgcagatggcttaatcagggctcccgcccgcccctccgcggcccccgccccgcgcgtctgggcgagcgctgcgaacgtggagccaggcagtcaagtgttactgcgtacagcaggtagcctggcaactgagagcacaataccgagcagatggtgttcgcacggcgtgatggacatcacacacgacagcctgagacaatccaggaattccctggtgactcgaggccctctttgcacaaaatgagttctctctccattgccgtgtatctctggggttatctgcccccctcctccgactgacactgaactggt

SEQ ID NO: 110653 - DNA, 141 bp, Homo sapiens
  chr4:140656999-140657140
  hyper
gcgggcaggggcggtgcggcggcgctcgggagacccgcgaggggccctggaggtcctcggcccgcgcgcgccgctcgggagcccgcgaggctgcggtgtgctccagcgggcgcatttcccaggccccgccacatcgtgtgt

SEQ ID NO: 110654 - DNA, 37 bp, Homo sapiens
  chr4:140969977-140970014
  hyper
gacttcctcacaagacgatatacggaatactttgcta

SEQ ID NO: 110655 - DNA, 407 bp, Homo sapiens
  chr4:140970238-140970645
  hyper
gggggcagaaagaagcgcatctgctgctctgtgattgcacaagagaagctaccactccttttcttcacaaagaaaaaaaaatggcatttatcgcaagtacagcaaggcatattaggattcacctcccccattctttcttccctcttcctcctaccatctccctcgccgcctccctttcctgttggaaaagaaaaggtgggagggagaggaggacccaccggtcacagacaacgctgtgggattctctttcttcagcttttaccagcctatgggggtcaggatgctattggttcagctttatgtgtgatatggtgcctctcacttagcaacagcgagcaggagaggcaggaagcaacgccacctggctcagcaagtgtgcggatggtttaaaacgagccactcactca

SEQ ID NO: 110656 - DNA, 1320 bp, Homo sapiens
  chr4:141071487-141072807
  hyper
ggcttgcttccacctgcgagtgtatcacaaaccaggcgcgcgcacccgagccctccctccaccagggcggaaaccagagaacacaacccaaacaccgaaagtttctggtcgcaaactctactcatcttgccgtgtccagagacccggcactgggaacggcactggcttttgttccagggtcccccagctggcgaggtaaacgccacagcagtccttgatccccaaaggttgtgagagattctgtggcacgggaattttggagcctcccgaaaggagcccatttctccgcaatccatgcgcgtggggtgtacaaatacacgaaaagaggacgcggggtgggcaggcatgaaaccttcagtgcctcttaaattctcagtctcaggttcacaaagtgaatctcctcctccgtggaagggcgctaggggggcgggggctgggagagaaataggttggagaaagggaccggagctacagtcgagatgcgggaccggccccgcctccggctacaatcagaaaaactacagtgtgtcagtggttttcggtttcctgtttgtaaagcgagaacctcccccgactcgaactgtcgttcttcctcaaaaccaaccgagacggccccttcttcgcgctcggggcaggctcagccgcagggggagcggagaggagggacgcgggggcatggggggcgcggcggggcggggacagccgcgatgaagcgggcagggccacggggcgcagcacccctcccagcccagcggccccggggtctgagctgggccgcgaggcggacaaagcgcctcccgctccctcccccacggccacgttccaaaagggaggaagaaggcgggcaagagtggctggaggaggaggaagggaggaggaaggggagggggaggaggaagaggaggagggaaggtgctgccggcgggactgggcaggatcgcgccgacctgggaggggagggaggaggggttgagcgcccccggagaactgggaggagggaaggattcttgaagcccaagataaacaaattgttcctcttcacgtgcggggtggggggacgtggggagcgagcactgcggcgtcgcctcccctcccccaagccgactctttgtcaccgagcgccggcccgagcccccggcgaaagcccacggcagcactggcaccaccccggcgccggggactcacagaccgggaacgtgtgcgatttctaaaccgcacgacgggagggccgcccctgccgggctctgcgccgccgatcgctgggcggtctgcacgggaaacaggcgaaggcgcgcggccccggcacgctccaggattccc

SEQ ID NO: 110657 - DNA, 2283 bp, Homo sapiens
  chr4:141073108-141075391
  hyper
cagcggggcagggggcgccaagcggagaaagactccgtgcacgcaagtttaaaaggaaaaaaggaaagaatcccaagcgaagttgtgtggtggggcctcttggcgcaaaccctgggtattgctttcccctcccgccccctccaggccgctcccctcttaaccctcccagccgctccacctgccgggctagccccgagtcgcgagcaaagagcggagcgcacccgcgccccgcatccgcgcgcgctcccgcgagcacccccgcgcgcagccaccctcgctcgtttctcacccacttcaaagttcattcacaaaactctcagactttctcagcccaaagggggtgagctggggagaggaggcgagaggctctccttccccgcttcccccctaggggttgagggcctggtgcccgcccagaacctgcgacagcatcaatatttccacgcacccggcggatgtgctgagaggggtgggcgtagggggacgggtctggggaggcgaggcggcgcggctagaggtggggtggggagcggcgaagaggaggagcaaggtttcaactcaggggttcactctttcaaatcggtatcttaagaaagggaaggggggaaacttttccagcacctcactccgacgctcctctaggctccctccgcccctcgcagtcgtgactggcttctcccctctcgccccctcctccccaaatctgacaaccctgacagattaacaggtagcgacgacggcagctttttccctaagaaaagttgacgttaacccttaggcttcagcccacctcacccaccgtgcaaatcagacccttgtacccccatgtaagaagctccacgcgccccccaccaccaccaccacccccaacgcgcgccgcaagcccgctgcccgtgcgccctcaccatgatcagcgtgtggttcctctgctccgccgaggcagcctccgcatcttgctggggtttgctcgggtgctgctgtttgccggtgccggcgcccgatttcttggccctctgctccagggtccgctggtagaggctcacggtgtcccggcgctccagctccagctgctccacctgagcctgctggtacctgttctcgcagttgacgtggtgccgacggcagccctcgatgcgctggcggagccgctccaccacggtgctgtgcttgggaacggccgccgaaccgccgccggggcccccggagccgccgcatccaccggctgccgggtgattgctactcggagcagcgggagtactattgggagtattattcacaccgatcccggccccgccgaggctgctgttcaggctactgttgatgcaaatactactgccattcgcggcagcagcgggggctgcgaaatcccccatcctgctccccgggcacactattttggaagaactttttttatccacccccctatcagcctcctccttgggtccaaggattaaaatagtttaagtggaacgcgggggagacgcaagcacatggatggaaacggcgatcccgacggggcgaaaaaaacggggggggagattttggggtggtttttgtttcctttttttaaactgtaaaagctcaaggggaagaaaaggggggaacgttatcggaataccatcagacacctatcaacaaaaagaatcacaacaaactgagccagcagcaaatcgggttgcaactcaaggggagatccgctccttgcttgccttctttttataatccattattttctaataaattccaggagatttccggtggttggcaagcattttctccctacataccgaaaaacacaccccatgtacacacacaagcatatgcctccagtgcggacacgcgcgacacacactcactccacaccgcatcggaaaacggcaagcttgcttattgcattttccttccacaaaaaagttttggtgtttatgccgccccgtgttctcaaagtactttggctgctcagttgcatttcacaggaacctagatatcgaatcctcgggctgggggaagtaaacacatggacagtccgaggcgactgcaaaagtagatcggtgaagtcctttgcaaaacgccgcgcagagagcagcacctaacgctcggctgggctgccgctgccgccgctgctcctgccaccatcacaatgatcaactgctcgccgccgccgccgccgccgcctcctcctcctcctctcgctcctccacctcctcctcctcctccatgccagcggagtgatatcaggacgcgcgagctcagtaaacacggcagcggcggcggctggaggcc

SEQ ID NO: 110658 - DNA, 30 bp, Homo sapiens; identical to SEQ ID NO: 3566
  chr4:141075709-141075739
  hyper

SEQ ID NO: 110659 - DNA, 62 bp, Homo sapiens; identical to SEQ ID NO: 40949
  chr4:141173820-141173882
  hyper

SEQ ID NO: 110660 - DNA, 577 bp, Homo sapiens; identical to SEQ ID NO: 3567
  chr4:141293943-141294520
  hyper

SEQ ID NO: 110661 - DNA, 796 bp, Homo sapiens; identical to SEQ ID NO: 3568
  chr4:141294545-141295341
  hyper

SEQ ID NO: 110662 - DNA, 1036 bp, Homo sapiens; identical to SEQ ID NO: 40952
  chr4:141348028-141349064
  hyper

SEQ ID NO: 110663 - DNA, 426 bp, Homo sapiens
  chr4:141419021-141419447
  hyper
ggccagatgcgttagcgcgcgtgcaggccggacgcggccctggaggaggaggtcggggcgcgggttacagcccagccgccgctgaccggggtaggcgcggcctcgggaaggcaccgacgcgggcctcccagtgccagcgcgggcggccgccgccagcttcccgcatcgcctccgcacccgccgaccctgccccgcctgcattcctgcagccccgaagcccccgcggcgggaaaggaggcgggaggagggcccgccgcttactggtttgagttatcctgtagatggagaagcaagagaagctgaacaacgcgacggcgaccagggtgatcagcaagttcacctgcttggtcctcatggccctggccaggctgcgggaggccggcgggtggaggcggcggataatgccagggacggggttgagcgcgc

SEQ ID NO: 110664 - DNA, 30 bp, Homo sapiens; identical to SEQ ID NO: 40954
  chr4:141445044-141445074
  hyper

SEQ ID NO: 110665 - DNA, 122 bp, Homo sapiens
  chr4:141445662-141445784
  hyper
gctcggcagttctgcgcttttgtcctaatgagcgcggactagatggcttgattttcaagataatgatcaacccagctgtgctatgcgctctttctgcactgacctgcgggtacttcgaactt

SEQ ID NO: 110666 - DNA, 366 bp, Homo sapiens
  chr4:141488864-141489230
  hyper
gttacactttttggaacagagcggagcccaaggcttttctgcccctcccaggaacgctcacggcttactttctttccctgcggtgaggaactcctggaccgtgtcgtagaggccgatcctgagagaggcggagctgatttgccgctgaagccccgcaggcagcccgctgtagagtttcatccgcccttctgtttttaccacagcggtgattgttcccaggacacctttatacctaataacactggacgtcgggcattcaccttggacctggaaataagaaaggtgcagaacagaagggagcgaaattgagttcactcttaagccaagatttccccctgtgttcctattttccgtttcttttctcag

SEQ ID NO: 110667 - DNA, 585 bp, Homo sapiens
  chr4:141489784-141490369
  hyper
cgggaaggtgatcacgtccgccaagcacgccgctattccagctgagaagagctggacccccagggtcgggtgtacgtccgaggctgtcaggccccccatcttcactcagagactggagatgcagaggaaaagggctccagccccgaaggtggaggaagttcctttcccttgctcttcacgcctgtccgccgggcagcaaacccgatttctgttttttgaaccgaccgccgggcagcggcggtgcagaggcggcggctgcagacggagcgcggtgttgggggccgagtccccgcgtcccctcctacccaccctcgcgccagcaggaccctctgcgttccggtcttccgctgggacttatatagctgggccgctcccgggctgggccgcgcgaggtctcagaagacccgggcgtgggacctgccgggggcgtgtccgggagcaccgggtccctcccattcccattctcgctcggtgcctcgggagccctgcttcgctccccgaaagccctgggccggccgctggttgtctgcgccccgcacaccgcacgtcggagggagggcgcaccgcggcggtcagcacccgcgc

SEQ ID NO: 110668 - DNA, 1309 bp, Homo sapiens
  chr4:141676912-141678221
  hyper
gaacatcacgactctcgatgcctcgcatacaacgaggcagggcgggtcgcccagccccaggggaccgggcggcgtctcccgagcctgcagcccaggccgcgggcggcgccgcagcgctcccggctcccctcctgcagggatcggccacggtccttacccgccagtccgccgccgccgcctccatcgccggcgtggcccttcctccgctgcaggatgaagtatgggttggccctctcggtgatccacagcgcgttggccagcaacacctcctccgggttcacccacatggtcctggctgccgcgggcgggcgcacaatgggcccgtgggtccagtcctgcacccaccaccgcgacaggcgcgcactcctgggcacacgcgcgcccgcccgcccgtccgctaggtgcggcggcggcggcggcaggcgacttcagggggtggcccgcggcgtccgggccacaacaaagccccagcaggcggcccgggaggacggtgaggacgcgggcgcggcaagcagcatcctccccgcggcgtcgccgccccgcgagagcccgcggccgcagacgcccggcctggcactctgcagcccggctcccggcccacggcggcgggaggagcgggaggaggaggaagaggaggaggaagggagcgggaggaggaggaagtggtatagctcagtcccgggatccggctcagcgccaggcagggctaagggccacccgagcggattcggccccgcggtcagggccaagctgggctccggcgctgctgctcccgcggcgccgactggagctccagagcccctcccgtctctacctgctcgagctcccgaagtcgccgcgccttaacgcgccgtgtcggggccgcaggcgccactagggaagcccagctccccgctggaaggacgctccggacactgcgaatgaatgacgacaacgcggctcacttggagcgggtccgggtttgtgcggactcggtaccaccgcgggctccgcgcgccgagctgagcagctgtggctggcttcgggggaaccttcgggggaagctcctggggaccgtgtgccaagcactgggcccgacgcccatcccagcagggaggacgccgccagcctgcgtgggtgcgtgtgtgctgtttgtgtttaaggttgacgctctatgggatagcgccaccccttttcccaggaaaagtgtttcaaggttccagacctggagctcggttagagacccggggtcggaagccaacgcagccaatggtcgtcgatgtttttgtttcctgcatccccagggcaagtcatgcgctaaacttgtcac

SEQ ID NO: 110669 - DNA, 1726 bp, Homo sapiens
  chr4:142053207-142054933
  hyper
tcggaaaagttagcccgccacgttgaacccctgtccaagcggcgctatgccaagctctccggcagcctctcccctacccaatacagttaatcttctcctctttgtaaaccccccaagtgacgcggagcaaaacttaatcggtccagggaacccagacacgtcttccgcgccgcacggacttcccagaaggagcctggaggcaggcgctggatccctctaggcacctccgtccccgccggctcccctcccccgcgcccgctgggccactcacccgcgtggggcatggtgatggtctcgttggtgttggagcccacgttgaagatgaccacggctgaggcgttctgcaggaacgcgttccggatcttatccctgtacgtgcagttgcccttggggatgagggctatccagttcttgccgcgggtcggggcggcgaacttggtgttggggtcgcaggccaggcggtcgtgggccgagctggccatgaccacctccccgcgggcgtcctgcttgggcgagtgctctccgtagcgcccgcactccgtcttctccgtgtgcagctccgcgccgccgccgcccgccgccccggccccggggtccggcgcgggctcggcgtaggtgatgttcacgaaggcggtgtaccattcctccttctcggccacggtaaagtccaggcagagcagatgcacgaaacaaaaggaaagcagccatgttgagagagccagactgcagcacgcttggatgagagacattgccatctttatccgccggggccccctccccgcccccgcgccctccctccgtcccgtccctcctccccagccccggccaaccccgggccgctgcctctcctcctgctgctgctcactcccgggccggaggggccgcggccgggacgcgcagccgccgcggggaccggattccgggcgagcggatggcgctggccccttcccctctcagctgtagcgcggtggttgcattttgcttcttgggcgcccggggggcgcgggaacagagggcccgcggggcttgcggaggagtcctgctgccgagcgtcctgctccttcgcccggcttcgccttctctcataagggtggccgggggcccacgaacttgcagggtggcggccctgcgccctccagccccggcggggacgggcacgattgctcgtagtctggggtgctgcggtgcggggtgctgcccagggtgtcccggccgccgccactgagcgctggggcgcgcgaatccagctgcagccgctgctgccctgcgccggttccctcaggctgcgggcgctgcgctcctgatctcgccggtggctgcgcctgggcacgcacttgccgcgggcggggcgggcttggggacagtgggagcgagcaggcagagcggagtaagcggtccgtgtgtgtgtgtctgtatgtttgtgtgtgtgtgtgtgtgtgtgtataatgtgtgcgtgcaaggaggagcttagtgtgatgtcaaagcccctgggattctcttgccatgttcccttggtctctctttatgggcagcagcgacccctgtcgggtctcaaattcaacctcaatcggcgacttaatctaggtggaggtaaagaggaagcgacccctcgacctttgagtacgggaataacttcctgagcgttacatttagcaaatgtatgtgcctctcgtaaacgaccctcccgtttgctggaagtactgccgtgagctccctgattacctgt

SEQ ID NO: 110670 - DNA, 72 bp, Homo sapiens
  chr4:142141957-142142029
  hyper
ggggcattggcccccgcaggagtgggcggggaaggggcggagcgaacagaggtgggcggctcccgtcctatg

SEQ ID NO: 110671 - DNA, 30 bp, Homo sapiens; identical to SEQ ID NO: 40963
  chr4:142142423-142142453
  hyper

SEQ ID NO: 110672 - DNA, 853 bp, Homo sapiens
  chr4:142557228-142558081
  hyper
cacaaagctgccacccgggtgtcttcttccaacatttcccctagttggacttcaaagtttccttcttgcagcctgtgcggggaccaagaggccggtctagagtagccgcccagcatccagatccgacatccttttccctttcctcaggaagacttggatgcgcgccagcccagcccgggtctccaggttcagctgcggaagcttcccacatggtgcccgtcgcttgggatgcggctatccttgtgccttctctgcaggtgtcccggcaggtagaggaggagaccggtggctggtgttcctgcagggcggggctggggctcctcgatgtccttgcgcttgccctgcaagttctgcgccccaggccccggcagggacggaaacaggccgggaagcagtgacacctggggcagtcagtcatccaggagccgccgccacccgccccacccccagtctccgcgggaggtgtttgtcttcgcctatgctcccggctctttctctttcacttttcttttcgccaggggttgggactccgggtggcaggcgcccgggggaatcccagctgactcgctcactgccttcgaagtccggcgccccccgggagggaactgggtggccgcaccctcccggctgcggtggctgtcgccccccaccctgcagccaggactcgatggaggtacagagctcggcttctttgccttgggaggggagtggtggtggttgaaagggcgatggaattttccccgaaagcctacgcccagggcccctcccagctccagcgttaccctccggtctatcctactggccgagctgccccgccttctcatggggaaaacttagccgcaacttcaatttt

SEQ ID NO: 110673 - DNA, 30 bp, Homo sapiens; identical to SEQ ID NO: 40965
  chr4:142558436-142558466
  hyper

SEQ ID NO: 110674 - DNA, 594 bp, Homo sapiens; identical to SEQ ID NO: 40966
  chr4:143766790-143767384
  hyper

SEQ ID NO: 110675 - DNA, 1191 bp, Homo sapiens
  chr4:143767433-143768624
  hyper
cgagcgtgtgagcgtgtgcgcgcccaggaggagctgtaacctgctatttatagaccgaagcctcagtacccggggctgagaacccggaggaaactagcaggcggcggcgacggcgcagggcgccggccgcggcttcgcgaggctccagcagctcccccagcctctggcttcggccgcgctccctgctcgctcctcgcctaccagccccgcgcgcgccccagagaagttgtcaccagcgcggctggctctccggctgctcacacgccccctggcacaattgctactttcttccaccccaacccccaccctccccgctcctcttcctcctcctctgctctctccaagcggtctcctcccaatgtcaccagcgaccgagtagaggcggccgtggcagcgacagtcgcgcaactggcgctgctcgcttcccgctactgatagagcggagatggtggcccggctgcccaccccgaaattaccacgctggctccgtgtgctcacaccccgtaccccgacccctttctgcggcccctctgcccgctgggtcgcccacccagactgggctgtgggatcaccgctaccgcgacgaggggggacccgaggccgccacgctgctgcgggggcaggagaaaccacagagaaagaacccgcgggaggaagaaagcgccccagaccccggcctatggcagcgcagtccctagaccgagggtttttggaaggggcttgggatccctgctgtcactgcctgcgtctaggcatccattcacgcctgctggaccccagtctgcagccgcgctgggacccctgtctcttgcccctcctcccccttgccccgggcagaggtcgggctgaggagaccagcttagagcagccctcggccacccaccgccagttcccacgtcgcggcgggtgactgaggccgagatgctcccaactagcgtatgacatgcctttgatatcccgggtgcgtggggacaaatccgccctgaatgtgttggggtatcaggaaaacggggtatgtaagcaagcagtctggacggagactaaaactcccccacttcctagcccctaacaagcccacaggggaaagcacgcaccctggttattccgggctgtgtagggtgtggggcaaatgactctccccatctgcgctttacaggtgccacctggcggctctctcggaaaggttttgat

SEQ ID NO: 110676 - DNA, 68 bp, Homo sapiens
  chr4:144105724-144105792
  hyper
taacctgacgcaggcggaaccgacgaagactagccggcaagaatcctacagtcgcagccatctgcgca

SEQ ID NO: 110677 - DNA, 541 bp, Homo sapiens
  chr4:144256958-144257499
  hyper
tcgcgcggcggggaccggcaggatggtggtctccccgcggttttgcctttcaggctctcaagtaaagaaaaccctcgaaactcctgatctcgagcacagcacaagctccgagctggcaccgggctgagtcaagatggcaagccccggactgaacattcgaatgtccctcagtcttccccgcgcccaagccccggtgcctctgccctagccgaggcctctgcggtcttcccgggcgaggagccgattgggggccgccggacggcggaggaccctgctcctgcttcccgaactacagatcccagggtgcctctcggactcgcgctccctccctcccttgctccctcccttcgtccgtctcctcccccggcccttgttgttttggctggaagcactccggcggagtttcagagaaagtctgggcagaaaccggagccgggcctgaacgtgggaaggggaggaggagagggaggaagaaggagcccggcggccgggagagggagggagggatcgggatctggggccgagccgctcaggacctgcc

SEQ ID NO: 110678 - DNA, 190 bp, Homo sapiens; identical to SEQ ID NO: 40970
  chr4:144257936-144258126
  hyper

SEQ ID NO: 110679 - DNA, 301 bp, Homo sapiens; identical to SEQ ID NO: 3583
  chr4:144258374-144258675
  hyper

SEQ ID NO: 110680 - DNA, 271 bp, Homo sapiens
  chr4:144434323-144434594
  hyper
gtttgaatgggcagcgcaaaacccagacaagttttccggtagtgccgccaacccctgtcaggcacagaagacacagcgagaaccgtgagccgttacgaaagcctaaaacactgagctcgcgtcctgccaagcagcaggcgcacaaacctacacctccgagcgctccctggaggtcccgcccactcttctctcccgagccggctagagatctggaagagggcgggccaagggtgaggagggcagtatgcgcatgcgcgctcaggacccagtc

SEQ ID NO: 110681 - DNA, 183 bp, Homo sapiens
  chr4:144434956-144435139
  hyper
tcgggtgggagtctcgctcctccaccagtttattgcgacgtagcatccaggcctaggcctccccgtccatccccgccggactcgggcctctggcagcagcgggtgacgcagacggaacatcatgtcgtccgcggccgagcctccgccacccccgcctcccgagagcgcgccttccaagcccgc

SEQ ID NO: 110682 - DNA, 544 bp, Homo sapiens
  chr4:144480191-144480735
  hyper
caggctcaccttgacgctctgattggcggctgcagaccccatccgcgagatggcagtgttaggaacaaaggtgagctgcccactgcaggtcaaacgctgccggctaccagctgcagctgggagtgaaagactagaatacagaaaggcgcaggcagtcacgtaggactaggccgggtttaacacccgaacagtggtgctagaaggtcagagtcttctacgtacatgttggaaacatccttgattgtctagcaccaagacttttaaacacagggggacaaatcatcactttgggtatttgtaattgttcgtcagttcaaatctcttggttttaaaaaaatactttccctctgcgcgactggcgcgtcacgtcgcgcgcgaccagtccgcagggctcctcccgcgctgctgataggcccgcagacggcggcccagcagaggagcggaaagcatggtccggggggcggcggacgcctggtaggcgctcgggccgttgttgtggggctgcgcgctggcgctgcagggcgggatgctgtacccaagagag

SEQ ID NO: 110683 - DNA, 344 bp, Homo sapiens; identical to SEQ ID NO: 40975
  chr4:144621095-144621439
  hyper

SEQ ID NO: 110684 - DNA, 382 bp, Homo sapiens; identical to SEQ ID NO: 3585
  chr4:144621514-144621896
  hyper

SEQ ID NO: 110685 - DNA, 347 bp, Homo sapiens; identical to SEQ ID NO: 3586
  chr4:144621981-144622328
  hyper

SEQ ID NO: 110686 - DNA, 30 bp, Homo sapiens
  chr4:144622540-144622570
  hyper
tccaaacaaccctgacgtttttcttctgct

SEQ ID NO: 110687 - DNA, 1722 bp, Homo sapiens
  chr4:145566943-145568665
  hyper
gcagccgggcagtcccggaatctccggactgcgtccctgccccaagcccgccgggaacccgggccgtggacgcccccacccgggggccgcggcgaggcgggcgcgcggggttcagcaccctcgaggctggttccgaaggctcgcggccctccccctccgtccgccgccgtcgcggctagccgcccctccccgccgcagcagggaggccgccggggcccgggggacgcgctcgcgcgggggccgccccctccccttccctccaccctgggcgggggcgcgcgagaagcggtgacgtcaaggggcgcgctgtggcagcacctccccgcgcgctagttaaaaagaagaagaaaagagggaacgaaacatgagaggctgtgtgagaagctgcagccgccggcagaggagacctcagcatcatctagagcccagcgctggccctgcctccgcctgccccgccgccgccgtcgccgtttctgttcctgctactgtcccacctaaacaactcccgttacacggacaagtgaacatctgtggctgtcctctccttttcttcctcctcttccaactccttctcctcctcccacttcccagccgcagcagaaagcccccaacccaactgacactggcacaactgcaaacggtgtcatccgcacaactttatctcgctcctcgggctcccctaaggcattggacccatcgccgcgtcttttattttttgcaaagttgcatcgctgtacatatttttgtccccgccacctccctctgtctctggagtgccctacagccccgcaaactcctcctggagctgcgccctagtgcccctgctgggcagtggcgttcccccccatcctcccgcgcccagcccctgctgctctgggcagacgatgctgaagatgctctcctttaagctgctgctgctggccgtggctctgggcttctttgaaggagatgctaagtttggggaaagaaacgaagggagcggagcaaggaggagaaggtgcctgaatgggaaccccccgaagcgcctgaaaaggagagacaggaggatgatgtcccagctggagctgctgagtgggggagagatgctgtgcggtggcttctaccctcggctgtcctgctgcctgcggagtgacagcccggggctagggcgcctggagaataaggtaggcactcaccggcttcacggatgcgtacttggcatattggctgggtggggttccctgtggctctggcaaagccggtggttgtaagaaggtcaaaacttctttgggggagttctttccataacttttctatagcgctaacgtgattccgttgtgtgttcctctggggtaagcaagtagcatttcctcccccagagtccgcggtcgggatgctgtgcaaacttgcctatctctgaaaacagacgtttctgcggtacccgcaccctgggctgggtaaatattttaaaagaatcgcgatgaacagtgtgttttggatcgaatggggcattggctgcggtgaaactgtaaattaaggtggctgtggtttccggcttatttttctagggtaaaaagatttgtgctgttttctccacgtgctcggttagggagaggattgaatcgtaaaggatgttgaagcatggttggtttatgatccccagccccgtcagaggggggtgtcttgcattacattagttaaaccaacagaaaggaactcctggtcctccggttagggacctga

SEQ ID NO: 110688 - DNA, 172 bp, Homo sapiens; identical to SEQ ID NO: 40980
  chr4:146018849-146019021
  hyper

SEQ ID NO: 110689 - DNA, 30 bp, Homo sapiens; identical to SEQ ID NO: 40981
  chr4:146019659-146019689
  hyper

SEQ ID NO: 110690 - DNA, 210 bp, Homo sapiens; identical to SEQ ID NO: 40982
  chr4:146098923-146099133
  hyper

SEQ ID NO: 110691 - DNA, 30 bp, Homo sapiens; identical to SEQ ID NO: 40983
  chr4:146102031-146102061
  hyper

SEQ ID NO: 110692 - DNA, 158 bp, Homo sapiens
  chr4:146102129-146102287
  hyper
atggaggtggctttaacggcttaagcagaaaatagagctaattggctgaggctccgggaactggcacggtgcgggacgacacactctgtccataaatcaaccgtggactgctgattgctattagtagtacagctcacgtactacggcaagatgaaggc

SEQ ID NO: 110693 - DNA, 30 bp, Homo sapiens
  chr4:146402389-146402419
  hyper
gagttgacacaaaacgcatctgttgactca

SEQ ID NO: 110694 - DNA, 1186 bp, Homo sapiens
  chr4:146402703-146403889
  hyper
gttaggaaagcctgaacgccgccacactgttttttctccaggaagaaacggggcgtggggctgccggtagaagggggtggctccggccgctcccccgcgccgtcctccggccccggccgcgctgcgctcacgccggccgggccgggaatttggagaggatccctggtcgcgcggcagcggcggcggcgcgcgggtgagcgggtgagcgtgtgagcgggcgggcgggcaggcgagtgcgccgggtattggcagctgaggagtggaggctgggcagctccgactccctgacgccagcgcgaccagatcaatccaggctccaggagaaagcaggcgggcgggcggagaaaggagaggccgagcggctcaacccgggccgaggctcggggagcggagagtggcgcagcgcccggccgtccggacccgggccgcgagaccccgctcgcccggccactcgtgctcccacacggacgggcgcgccgccaacccggtaaaacgaaacagacccgaaccgaactttcccttcatgccgcgtcccagccctcccctcggcgccccgggctttccagcgccgccgccgccgtctctgcacgcgtggggccgccgcggtcgtgctgggctgggggcgcgggcagcggcgggaagggggctctttctgcgcggggcgggccgcgaccccccccccccatgatggcgcctcccgtctgctcggaggagcgaacctgctaccacgtcttctcgcgcccagcccgccgggctcccctggtgtctttgttgggtcttctgctgtgggaagcccagttcccgggcccccgagcctcggctcccgggcctgaccgcgctgggatctccccggccgcgctccccttccgcgcgctcctcacatctctcccgtgctgccgccgggccgaggcccgttcgcgtggcccgcggacccattgtgtcccccgcgccggcggggcgacccctgcgggagctggaggacgaccgctggcgctgctctccaaggcgcctggtggagcgggtctcgcgggcgggggaccccggcgccccgggcccctccacatcccgcacgggttttcttctcggccccagcaagcctctttggggtcgaggtcaaggaaagttcgcaccgagatcccctctaatttattcaaaggtttggcggcggcgcgtaattttttccccc

SEQ ID NO: 110695 - DNA, 30 bp, Homo sapiens
  chr4:146540275-146540305
  hyper
cctaccccaaaggccgtaaaccgccctccc

SEQ ID NO: 110696 - DNA, 30 bp, Homo sapiens; identical to SEQ ID NO: 40987
  chr4:146540561-146540591
  hyper

SEQ ID NO: 110697 - DNA, 1009 bp, Homo sapiens; identical to SEQ ID NO: 40988
  chr4:146857460-146858469
  hyper

SEQ ID NO: 110698 - DNA, 30 bp, Homo sapiens
  chr4:146859787-146859817
  hyper
tttaaatttttggtcgtgcacctggcttgt

SEQ ID NO: 110699 - DNA, 30 bp, Homo sapiens
  chr4:147096805-147096835
  hyper
tttttcggccccagcgggctgccgtagcag

SEQ ID NO: 110700 - DNA, 30 bp, Homo sapiens; identical to SEQ ID NO: 40989
  chr4:147097428-147097458
  hyper

SEQ ID NO: 110701 - DNA, 30 bp, Homo sapiens; identical to SEQ ID NO: 40990
  chr4:147442774-147442804
  hyper

SEQ ID NO: 110702 - DNA, 44 bp, Homo sapiens; identical to SEQ ID NO: 3591
  chr4:147443080-147443124
  hyper

SEQ ID NO: 110703 - DNA, 30 bp, Homo sapiens
  chr4:147443981-147444011
  hyper
tgcccgctctggctcgcccccagggctgac

SEQ ID NO: 110704 - DNA, 308 bp, Homo sapiens
  chr4:147558073-147558381
  hyper
cccatgtccaggtttcgctgagctcacacccggcaacactgctgctaggagttcccttcggctactatttattattttcctccacacaggggaagagaaagggaagcccgagaggatccagggaaagcagaagggggttaaggaccatggacagagcccgtcgcgcgctcgttgctgccgccttccccagcactctggcggctcctgaggacagcggtcccatcttgaaaccgctattccgcccggctgaggtcaggggtggacaggcggtcccctactctccaccgccgcttccgggagctgaccac

SEQ ID NO: 110705 - DNA, 183 bp, Homo sapiens; identical to SEQ ID NO: 40993
  chr4:147558476-147558659
  hyper

SEQ ID NO: 110706 - DNA, 888 bp, Homo sapiens
  chr4:147559190-147560078
  hyper
gggagggggaggagtcgcatgcgcacagacgacccgagcctgctccgcggctgtccaatccgctgagagctgcgagaaatcgagtgagagaaagccctgcagcccctccgaccccatgtctctttggcaccaggcacccgccgggccgtggggggctcgtagccgaacgccgacctccgctcgtattgggctgggagttcagagccgcgcgcagaacccgggttggccgcaacgtctgtgttctcagcggtggccgggaacctgggatcagggtcacctgagctgacggggtgggggcgggccgagtggggttggaagcctggaacttagtggtaagcaggaggcgtaggaggtggcagccaggtaagaggcactcttacctacccaacgctggcttgggccgcaactttatttgggagtttctttttccggtgagacagagacccggcagaagaagcgggaggggctggaggctggtccttaggtaggcactgcccggcgactggagcgcggacctggccatttgggtggggttgagtgggggcgcgattgtgagtagcagccgcgggacgctgcgaaggggcggcggcaacagagcacgggcgggggcagaaaagaggcggcggagggcgcggtgggggagcgcgaggcgagtgctgagagagcagaaaggactcaagcctgaggggagtagagaggaagaaggggcaacgcgagaaaccgaacaggagccggcgtttcctggcaagggagggcggaggcgcgcgggagagagggagagagggagggcggggggcgcgggggtaggcgcggggagaggggagtataactcgccggccgcgaggagcgggggcagtttcgggtgccgaggtctgcagctagcggcaa

SEQ ID NO: 110707 - DNA, 285 bp, Homo sapiens; identical to SEQ ID NO: 40995
  chr4:147560133-147560418
  hyper

SEQ ID NO: 110708 - DNA, 642 bp, Homo sapiens
  chr4:147560459-147561101
  hyper
cggcggcggcggcggcggcggcggcggcggcggaggccgaagcagcagctccagcagcagtggcagcagcggcggcgggggctcggaggctatgcggagagcctgtcttccaaccccaccggtgcgtatttctgcataatcaccgcttaaaggcacattttgacagccccctttatctgcttgatgtttttttcatgtctgcacagcaaatcaccccacacctccaaccaattttcccctctctctctcttaagtattcagcaggtcttgcctttcatattaatttttatgacctgggatgttgcctgtgcgcgtgttgtgttgtgtttcgttgtgtctacaggctcactttcctcctcctcctgcactctcggcttctttctgtggcttccctctttttctcttcacctctgttttcaggattattattattattattttaacgatctgggaatgttgtaggcgcggcgacggtgtcgagccctgggccggggcttccggagagagggcgtacaattccctgctgagcgtaatgtgtgccttctacttacaattgcagagcaatatattcggcgggctggatgagagtctgctggcccgcgccgaggctctggcagccgtggacatcgtctcccagagcaa

SEQ ID NO: 110709 - DNA, 588 bp, Homo sapiens; identical to SEQ ID NO: 40997
  chr4:147561361-147561949
  hyper

SEQ ID NO: 110710 - DNA, 118 bp, Homo sapiens
  chr4:147561999-147562117
  hyper
cgctcttttctctcctctcttctgcctcttttcacttttggcgactagaaacaattccagtaaatgtgaatctcgacaaatcgaggactgaagagggagcgaacgagcgaacaactga

SEQ ID NO: 110711 - DNA, 567 bp, Homo sapiens
  chr4:147568700-147569267
  hyper
aggtcacttctttgcggagaggccttctcagagctttgggtaagtgaagaggcgccttaagttcgcggtcccagctgctcaggctccgcagcctggaggcgggaaagggaacagtgagactgagaagcaggacgcggggacagcgatctcccagaagctttcctcgcttttggtggctaatgctacgcgcctgcctgcggagctcaggcggcaccgaggaatcaagatcctcgtccccaccctccgactcaccacctaatgctttgcacaagctggccttgggttccctgctagtcccatctcccctctccacccctctggttcctggtgcgcactggtgacaggcggtttgggagagggtgaggggtagagtccaaagggctggggctgcgtggggtcagagcagaacctccctccctcgctggaggagctcgcccggtccccgaggggcccccagagctggggaagcaggcgtctcgccaggcgctcagcaaggaacccgcaagaaagagaggcccgggcgcctcgcccccttgcattttactaatcacgtctatttaaattcta

SEQ ID NO: 110712 - DNA, 110 bp, Homo sapiens
  chr4:147569278-147569388
  hyper
cgcgctctcaccgggaaagctctggagaactggacccatcaattattctgaaaaaatccctgactacgtgaggcttccagccagcgggagggaggcggcgggaggaggtg

SEQ ID NO: 110713 - DNA, 30 bp, Homo sapiens
  chr4:147575616-147575646
  hyper
cctttatcacacagacgtaaaaatgaaacc

SEQ ID NO: 110714 - DNA, 155 bp, Homo sapiens
  chr4:147576046-147576201
  hyper
gcggtgacagatgagcggctgggtcaggaaggagcccagttggtggaaatgacactctttccccgctccgggtcccctcccccaccccattcgcgttttctctctcggcctctcctccctcctcgccttgccctcaggcagccgaccggggacac

SEQ ID NO: 110715 - DNA, 435 bp, Homo sapiens
  chr4:147576329-147576764
  hyper
gggggcccctctggggccgcctggactcgcaggtctcccgcgccaccccctaccccattccccgcctgcgccccctgctgcgctcggcgcgcgtcctgctgcagcctgctggggacagcgcacgcagtgaccgggcgcggcagccgcttccctttcccatcgacctcgctgccttctggcttttctcaaagccttttctccagagccagacagcagacgccccggcgatgccttcgccgcccatttggccgaggtagcccaggcctgcccttgctgcctccgccggccgctccgccgcggcccaaagccggggaagcgtcccaagcccgcgcggtctgccccggagccccggaggacccgaatactcagcggaatgtcaccctggccgggttctttggattcccctccggggccatcctacggaatccagccgtc

SEQ ID NO: 110716 - DNA, 30 bp, Homo sapiens; identical to SEQ ID NO: 3602
  chr4:147867143-147867173
  hyper

SEQ ID NO: 110717 - DNA, 794 bp, Homo sapiens
  chr4:148402120-148402914
  hyper
gttaggacgctcttgcggtcccagagtggagtggaaggtctggagctttgggaggagacggggaggacagactggaggcgtgttcctccggagttttctttttcgtgcgagccctcgcgcgcgcgtacagtcatcccgctggtctgacgattgtggagaggcggtggagaggcttcatccatcccacccggtcgtcgccggggattggggtcccagcgagacctccccgggagaagcagtgcccaggaggttttctgaagccggggaagctgtgcagccgaagccgccgccgcgccggagcccgggacaccggccaccctccgcgccacccaccctcgccggctccggcttcctctggcccaggcgccgcgcggacccggcagctgtctgcgcacgccgagctccacggtcggtgcaagtctttcttatcggggactgggactggggcgggtgcggggatggcggagacgctgcctgggcccctcggtcgggagaagacgagagctgggaacgttctggcccgaccgccctgcagcttgggcgacccgtcgcagcaggggctggcacccacttgccccagggcgcgcggggaggcgggcgccttccgtgaggggtgcgctgcggacacgtgtagagttcggggaacttcacctctccacgttagggtttaggattcggagttttaggaagaggaagcccaatagttttccctgggtgaccccttttccccaggcatgcaagaactttgaggaacgccaagctctgtggcttgctccagcgccttcttgtgaagt

SEQ ID NO: 110718 - DNA, 30 bp, Homo sapiens
  chr4:148538479-148538509
  hyper
tttggcgctgacgacgaatcacctgcctca

SEQ ID NO: 110719 - DNA, 34 bp, Homo sapiens; identical to SEQ ID NO: 3604
  chr4:148538934-148538968
  hyper

SEQ ID NO: 110720 - DNA, 30 bp, Homo sapiens
  chr4:148605326-148605356
  hyper
ggcgcagaccgtgacgcataccccactatt

SEQ ID NO: 110721 - DNA, 30 bp, Homo sapiens
  chr4:148605609-148605639
  hyper
ccgctcatgagggacggtcaagcatttgtg

SEQ ID NO: 110722 - DNA, 30 bp, Homo sapiens
  chr4:148652834-148652864
  hyper
cttcagagttatgtcgcccgcctgcgggga

SEQ ID NO: 110723 - DNA, 30 bp, Homo sapiens; identical to SEQ ID NO: 41004
  chr4:148653434-148653464
  hyper

SEQ ID NO: 110724 - DNA, 296 bp, Homo sapiens
  chr4:149362745-149363041
  hyper
caccaaaagaagcttcgtccccttctcccttgcccttaaaattccaactgatgccataggaagcgtagcctgtctcaagagtttcgcgaatgctagcgaacgggaaatgcacgaatttccagagccccttttatacaggatctattaggatctatatctccttcaactgcccttatgcgctacacctccggctgagatttgggagcgtccgcaattgataaaggaaagaaatattattcaaacgtcctttaaaaattgtacagggaaaatgatccgaaattcatctttgggtaaag

SEQ ID NO: 110725 - DNA, 121 bp, Homo sapiens
  chr4:149363663-149363784
  hyper
ggcccttttaaaagcgggtcacatgtccagataaagttcaggttgctatcccgcccccctgaacccttcctattggcccgaagagaagcaaggctccacgccgcacgggtcaggcgggctt

SEQ ID NO: 110726 - DNA, 127 bp, Homo sapiens; identical to SEQ ID NO: 3607
  chr4:149364526-149364653
  hyper

SEQ ID NO: 110727 - DNA, 1597 bp, Homo sapiens
  chr4:149364661-149366258
  hyper
cggtttccctccaaccgccccctcctcgattctcctcccgcccacccaaatgctgcagttactaagcaaaaggatggggttcctaactttgatttctaaggacttttaggcttctcatgtaaggccccgttttaggctccccgctggcccggagtcagcatcagtgacgtatacacctaaatctggtcccccggccctcggcgacccgcagcccggcggcggcagctgtgcggcctcccgcctcaccctcgcttcgcgcccgccaaagcccgaggcgggggaccgggggacaccctgtgcccaaaggcccctcctctccttaacagttagttaagctccgggattccggacccctaacccagggctgagacttgaactctcagccgctccagtcaggaactccctggagataggggcgacagcggcagcgccgcgagctggtcctgaccccagactctaatgcccctcggtccccagcttggagctgcccccggcgtccccgcagccaggagtccccgccgagcgtcccaactttcccgcggggcccaccgtcacgcgcactctcccggcccagcgaactgggcatcgatctcacgtcggcagagcgcgggcggcgggcgggagcaaggggagtcccggacctagagcctgggcacgcgaggcggcggcggctccgcaagcgttgccgaattattcattattaaaggaatggacgtgtctcttttactaagtttttatctcctttgaggagggccggtcttgccctggatctcagcttcttgcaaaatctaggttagaaccgtgcaggggcagccgccgcgatcactcgcccgccacccagcacccttgccccagggccgccagcgggcaactcgtctcctgcccgcatcccacctccgctcgccaacccgcgccctctgccctgggcgcgcaacctgccttgcccggggccgcccctgcgctctccggaccccctctcgccgctgtcagcgcaaagtgactgtcgctgcactcaccttttctaggacatggtggggaggctggggcgggggaaggggaacggctagactcccgccgccgctgctgccgccgccaccagcaagtccaatattggctgatcggcggtgaggatggagaggatgataatcccggcagtggcagtcgccctgctgacggtgggtagagcaatagtgctgttaccctacaagaggcggcgaggcagcggcgccaaatcgcgcagagggggacgcgggcacccgcccgcccccagcggcggcggccgggcctctggcgggcccctctcccggggctgcgcgtccgctcggcgttgacagcggcgtccctgggagccgggaagtccggcaggaggatcccgcgcccgccgctccgcagcgccactctccgcgccccctccccgggccctgggtggccggtgacagctccggcggccgagcgcgtgtgtgagggggcggtcgcagggggagcctgcgcccccctccccgggtcacgccctcacgagcgggaggaggcggcaccgcgtccggccacccgcgggtgggaaacgggcaggggcgccggcagccgccctcccactacg

SEQ ID NO: 110728 - DNA, 30 bp, Homo sapiens; identical to SEQ ID NO: 41009
  chr4:149366982-149367012
  hyper

SEQ ID NO: 110729 - DNA, 905 bp, Homo sapiens; identical to SEQ ID NO: 41010
  chr4:150999235-151000140
  hyper

SEQ ID NO: 110730 - DNA, 480 bp, Homo sapiens
  chr4:151000246-151000726
  hyper
cgcggagaggggcccccagctcctccgggggcagcagcagctcgggccccaaggggaacgggctcatccccagtccggcgcacagtgcccactgcagcttctaccgcacgcggaccctgcaggccctcagctcggagaagaaggccaagaaggcgcgcttctaccggaacggggaccgctacttcaagggcctggtgtttgccatctccagcgaccgcttccggtccttcgatgcgctcctcatagagctcacccgctccctgtcggacaacgtgaacctgccccagggtgtccgcactatctacaccatcgacggcagccggaaggtcaccagcctggacgagctgctggaaggtaggaggggagggcgccgcacggcaggtgcggcggagcgccggcaggtgcagtgggcgtgagccggcgcagcggggagcccgcggggtgctttccaagccgcacgggaattgatgcttctgtctg

SEQ ID NO: 110731 - DNA, 30 bp, Homo sapiens
  chr4:151936434-151936464
  hyper
gcgggggaagggggcggtgattattctaaa

SEQ ID NO: 110732 - DNA, 30 bp, Homo sapiens
  chr4:151937384-151937414
  hyper
cccgccgctctcggcggagacttggagatt

SEQ ID NO: 110733 - DNA, 124 bp, Homo sapiens
  chr4:152020630-152020754
  hyper
cacgatggcgatgtcgcaaccacagtagaaagagtggcgctctctactgtcccggaattcttgaggccggaagaataacagggcaaaggtcacgtagacggcgcgccccgcccccgtacgccta

SEQ ID NO: 110734 - DNA, 240 bp, Homo sapiens
  chr4:152021089-152021329
  hyper
ccggcttgccggcgcgactcggctggaatgttagttttgtgggctcacgagctgcctcaattctgcgagtgtttgatggcactgcgacagcaggagttgaggaaagcacccttctatccattcaggacccgtcaatctcgcctttgcttggtcccgctggaatctgcgagctcctgctaagctttggggccatgcagtctcttagttaccagtacatgccattacgtgccagcaaagtta

SEQ ID NO: 110735 - DNA, 1003 bp, Homo sapiens
  chr4:152246022-152247025
  hyper
cgcaggcaaacccctcggaaggtgtcgttgtccaccgagacggccattgacctctgactcatccagagataagtcatcaaccaggccacaagtcccaagccagcagctcctggatttagtgtgcacggaaaatttgagtttcagctgtacgaccactagcagttaaagacgggtctgaatttcctcgggctcggccggaaagtgaggatggcgatggaaatgccaccctccccgagtctggcctctgagagttaaagaagccggtcccatcccggcgcgtgaaggagctgccgctgtgtggggcaggacccgagcggccccagagcgcgcagctctgggtccccgccgccccgtcccccgcgcctctcacctgcggccgagtggcccgagagcgcacggccccgggcgcggcgctggccaccaagttcgcggcgctcgcgtagctcttcctcctcgtcctcccgccgccggccctcagccatgggcgaggcgcggggcgcagccgcgggatggccagcgagctgcggccccggcgccccagaacgcctgcacccggcgccccacgccaccgccctcgggccggggggaaggcggctcccggagaggaggcgtcggcggcggctgtggaaatggccacctccgcgaactccacctgcagccggccgggcagcggcagggcgcgggccgagccgattccccgcctccttgcggcgtcccggcggcctcttaatccctggcctttcccactcccactcccgctctcttcccccttcctctttgccttccccgccccgtagagctccaccgcggatcgggcgggttcggggctggcctcgcctcctcagggaggggttatcggcccctaaggccgccccacagccacacacgctggaaacaccagctcgacccaaacaaacgtgtgcaaaataaataaacgggataggaagaggggaaagaggaggtggcctggcctcttcctgccttttcacgatattccagtgtc

SEQ ID NO: 110736 - DNA, 1079 bp, Homo sapiens; identical to SEQ ID NO: 41014
  chr4:152329808-152330887
  hyper

SEQ ID NO: 110737 - DNA, 30 bp, Homo sapiens
  chr4:152682111-152682141
  hyper
cagcgcagcatgggcgccgccattgtaact

SEQ ID NO: 110738 - DNA, 30 bp, Homo sapiens; identical to SEQ ID NO: 3615
  chr4:153249370-153249400
  hyper

SEQ ID NO: 110739 - DNA, 30 bp, Homo sapiens
  chr4:153456161-153456191
  hyper
gctgcggaaggctccggcgcggtactgagg

SEQ ID NO: 110740 - DNA, 30 bp, Homo sapiens; identical to SEQ ID NO: 41016
  chr4:153457998-153458028
  hyper

SEQ ID NO: 110741 - DNA, 30 bp, Homo sapiens; identical to SEQ ID NO: 41017
  chr4:153589912-153589942
  hyper

SEQ ID NO: 110742 - DNA, 516 bp, Homo sapiens; identical to SEQ ID NO: 41018
  chr4:153600920-153601436
  hyper

SEQ ID NO: 110743 - DNA, 30 bp, Homo sapiens
  chr4:153700656-153700686
  hyper
gagaaagcagctttcgctcttctgtggtag

SEQ ID NO: 110744 - DNA, 197 bp, Homo sapiens
  chr4:153856944-153857141
  hyper
gagggtggtctggcgcgtgcgtcggggggcgtgtgcgggtgtgtgtgtgtgtgtgcgcgcgtgtatataagagtgtgtgcgcgcccgtgtgcacaagagagggtgcctgggaggctgtcgcaaaggctcctttgtgaaaggcacttgcaggttcagaagccagcttggcgcctcctctcgcccgttccccgaggaca

SEQ ID NO: 110745 - DNA, 30 bp, Homo sapiens; identical to SEQ ID NO: 41020
  chr4:153858194-153858224
  hyper

SEQ ID NO: 110746 - DNA, 30 bp, Homo sapiens
  chr4:153859229-153859259
  hyper
ctccgggattcggccgtctgtgaccccctt

SEQ ID NO: 110747 - DNA, 31 bp, Homo sapiens; identical to SEQ ID NO: 3619
  chr4:154048774-154048805
  hyper

SEQ ID NO: 110748 - DNA, 185 bp, Homo sapiens; identical to SEQ ID NO: 3620
  chr4:154073355-154073540
  hyper

SEQ ID NO: 110749 - DNA, 87 bp, Homo sapiens
  chr4:154073797-154073884
  hyper
acacgagtgttggtgcgcgcgactgaaacgggagcagagcagttgaatgagcttcttacgctttgcatggtgcgcagaatatcccac

SEQ ID NO: 110750 - DNA, 30 bp, Homo sapiens
  chr4:154074722-154074752
  hyper
agggcaggcagccccgtcccgcccccgatc

SEQ ID NO: 110751 - DNA, 726 bp, Homo sapiens; identical to SEQ ID NO: 3621
  chr4:154143757-154144483
  hyper

SEQ ID NO: 110752 - DNA, 30 bp, Homo sapiens
  chr4:154265400-154265430
  hyper
gtcagattagaagacgagaaaggaatccag

SEQ ID NO: 110753 - DNA, 30 bp, Homo sapiens
  chr4:154266198-154266228
  hyper
gaagcgttcgcgaacgtgacccgagaactt

SEQ ID NO: 110754 - DNA, 30 bp, Homo sapiens
  chr4:154266573-154266603
  hyper
ctggttgtgtagggcgctgttgctttttta

SEQ ID NO: 110755 - DNA, 118 bp, Homo sapiens; identical to SEQ ID NO: 41024
  chr4:154387145-154387263
  hyper

SEQ ID NO: 110756 - DNA, 240 bp, Homo sapiens; identical to SEQ ID NO: 41025
  chr4:154387494-154387734
  hyper

SEQ ID NO: 110757 - DNA, 227 bp, Homo sapiens
  chr4:154387969-154388196
  hyper
ttgtgtggcgcgcgcgggtgccccgcagcggcccggcttcctgcagctttgttcccccgagcctggccgcccagggtccacactccagatgctcgggctgcggagcccggagtgcctcgtggggtgtcttcactcccacttcgtccccccacccccagcacgagcaccccgagcctgcctgcacgctgtcgccttcgcgtccgaggggccgccggctcacaccccac

SEQ ID NO: 110758 - DNA, 30 bp, Homo sapiens
  chr4:154388442-154388472
  hyper
accaggtgacagggcggctgtgggtgtacg

SEQ ID NO: 110759 - DNA, 48 bp, Homo sapiens; identical to SEQ ID NO: 41027
  chr4:154605243-154605291
  hyper

SEQ ID NO: 110760 - DNA, 30 bp, Homo sapiens; identical to SEQ ID NO: 41028
  chr4:154606036-154606066
  hyper

SEQ ID NO: 110761 - DNA, 30 bp, Homo sapiens; identical to SEQ ID NO: 3622
  chr4:154607110-154607140
  hyper

SEQ ID NO: 110762 - DNA, 453 bp, Homo sapiens
  chr4:154680876-154681329
  hyper
cctgcccggcaccagcgtgagccccgggaccccggcctggcgtcccccacgcccgcgcccccgcgccagtacctgctcctgctgcgggggggcctccagcaccggcgctgccttccgcgccgccgtccccgcggccatgcctgagccactgtgccttctccagggcacagcgcctgccggggagggtcccgcagagtccgcagaaggaggcgccgcggggcctcgggagccgagggtgagagccggatctgcggcggcggcggagcggcggccctgcccgggttgtgcggggcgggagatgggagcctcccggcacgccccgcctccgccccctgcacgctggccagcgtcctccccagcagcggcctcgaggtcccggtcgccagcaccccggttccttcagaacctcaggcctcccattcagccagccattgtcgccgataaagcgtcttg

SEQ ID NO: 110763 - DNA, 442 bp, Homo sapiens
  chr4:154709168-154709610
  hyper
ctatttttttttaaaccgccgttcagttcttcgtttttttagttttgttgtttttgtttgtttgttttatttttaaactgcccttaagtatagctggtacaactcgggaggagaatgcgcgagacttgggcggcgtgggaggggtgcctcaaatttgatacaggcttgttgtgatgacagaccaggtcaggcagaacttctgcccttcccgctactggcaccccaagcagggatgcactgggatgcgtggcaggggcgggatctcctgggagcgtctcagcccagcagggagtggggaagcaagagggaaggcttaccttcctcggtggctggcaggaggtggtcgctgctagcgagggggatgcaaaggtcgttgtcctgggggaaacggtcgcactcaagcatgtcgggccaggggaagccgaaggcggacatgaccggg

SEQ ID NO: 110764 - DNA, 859 bp, Homo sapiens
  chr4:154709758-154710617
  hyper
cggcctgctccagcacctccttcatggtctcgtggcccagcaggttgggcagccgcatgttctggtattcgatgccgtggcacagctgcaggttggcagggatgggcttgcaattgctgcgcttgtaggagaagtcgggctggccaaagaggaagagcccgcgcgccgagcccaggcagcagtgcgaggcgaggaagagcagcagcagcgagccagggccctgcagcatcgtgggcgcgcgaccccgagggggcagagggagcggagccggggaagggcgaggcggccggagttcgagcttgtcccgggcccgctctcttcgctgggtgcgactcggggccccgaaaagctggcagccggcggctggggcgcggagaagcgggacaccgggaggacagcgcgggcgaggcgctgcaagcccgcgcgcagctccggggggctccgacccgggggagcagaatgagccgttgctggggcacagccagagttttcttggccttttttatgcaaatctggagggtggggggagcaagggaggagccaatgaagggtaatccgaggagggctggtcactactttctgggtctggttttgcgttgagaatgcccctcacgcgcttgctggaagggaattctggctgcgccccctcccctagatgccgccgctcgcccgccctaggatttctttaaacaacaaacagagaagcctggccgctgcgcccccacagtgagcgagcagggcgcgggctgcgggagtggggggcacgcagggcaccccgcgagcggcctcgcgaccaggtactggcgggaacgcgcctagccccgcgtgccgccggggcccgggcttgttttgccccagt

SEQ ID NO: 110765 - DNA, 457 bp, Homo sapiens
  chr4:154710728-154711185
  hyper
cgtgtgccctgtgatggagcccgggacctgcccgcccgaggccgcctcggcgaacttcgttttccctcgaatctccagccaccgttcagcagcctgtcggtgtgctccccaatgccgtaaaaaaatcagaattataaatatattcgtatgagcagaactttacatggaaaacgaaatactaataaaatgggcttgttattctgttggagtgagtgcctaggaagggtttcgtcgttgtagaaacgcccctacaagagtctcaccagtcacacaggactgcccaccatttccccgttttggagagatttttccttcttaaatgaatggcatgactcaatactcgaaggcatcacgggctctaacacacagccgcccttgcagctgtgcgctctggaaagctggagtatgggcccccagggcactgtttgtaaagactggtggccggcacaaaagacgg

SEQ ID NO: 110766 - DNA, 30 bp, Homo sapiens
  chr4:154711581-154711611
  hyper
cacaggctcagaccccggcttcctaatttc

SEQ ID NO: 110767 - DNA, 729 bp, Homo sapiens; identical to SEQ ID NO: 41035
  chr4:154711997-154712726
  hyper

SEQ ID NO: 110768 - DNA, 734 bp, Homo sapiens
  chr4:154713480-154714214
  hyper
acgttacatgtgcctcggtgaggtgaagtgactaccgggctagccttggggacctgtcgcgacttgtcgggtgtctccaaccgcgttgccgcctggctttcagccgtgcgctggccagccgggcgggtgacgtcacctctccccgggtccgtgcacccaggccttccctgctccgggtgagtattttttcatgggattcagccatctgggggcgccatttcccaaaacagagattgtccctttgaggttgcaagtcaggttcctttacgctgagatcccttacatttttacttttaggaaggttttttcgaggggtggggggatgacctcattccttcgcctttggccctccctctacccggccccacaacgaggacgcccctgcagctggctgggccgcttcctcttgccacgcggggggacctgtgcccgcggccgtgcacctccgtgtacgcttctgctcctcggaccccatcggttcagacgcggatttccgagaacgagaccagagtctgcgtctggagagcctttgcccctcatcttaggaagagtctagtctgagaacaaacagtttgccaactcctaccccgagctcttgcgcgtatctccttaaatatttcaagggtctgggccccagatgggtgctcggaaagcaaacgaagggtccagggaggccgaggccaacgcggagctcagcgcccccttcttgcctgaaggggcgcgctggaggagga

SEQ ID NO: 110769 - DNA, 573 bp, Homo sapiens
  chr4:155254020-155254593
  hyper
ggggccaagtgggtgcgcctgtgtttgcagcatttgtgtcatcggtgagagagactcactgacttccacttgatagaccaaatgttcgaaagtccaggatgggctgtgttcgcgtttctcgataacgactgtcagcaccagcagggctgcctgaggatgcacgccttggtcctcggccctgagagtcagcgtgagctcccgctgctcgcccgcgcccaggctgccgttgaggaacagcacccccagggctctgtcgatggcaaagacgcctggctgcgggctggcgatggagtaccggatgagtccgttccgcccactgtctctgtcttccgcacgtgcgaggtacaaggctgtgccagggggcgtggtctgggatattctaatctcatccgaggtcctgaggaacgctgggtggttgtcattgacatccatgactgttatgttgacctcggtgctgctgcaggctggggcgctgccgagctgcgcctgcaccgtgagcacaaccacgggctgcgtctcgtgatccaggggcttccgggtgcgaatagtgcccagccgcgggtgaatggagaa

SEQ ID NO: 110770 - DNA, 30 bp, Homo sapiens; identical to SEQ ID NO: 3631
  chr4:155338151-155338181
  hyper

SEQ ID NO: 110771 - DNA, 91 bp, Homo sapiens; identical to SEQ ID NO: 41040
  chr4:155411402-155411493
  hyper

SEQ ID NO: 110772 - DNA, 551 bp, Homo sapiens
  chr4:155411850-155412401
  hyper
cgggcctgcggggtccttgggcaggtcggacggttgcaccagggtgtagccctgagtgctgaacagtccggcgtccggatcgtgggcaactggcaggcggaaggcggtccctggcgggctgagctcggagacgtcgagttgcagggagtcgaggggaaagcggggcgagtggtcattcacgtcgttgacgcgaatctccacctgcaccacagcgcccagcagcgtggcggcgacgaagctgtagtggtcccgccgctcgcggtccaggcgccgcgcagtgcggatgatgccggtgtccgggtgcacgtggaagtcgtccagcagcggggagtcatcggagtcctccgacagaaagaagccgctcccctcctgctgctgcgcggccggcagcccggcgcggatgtcacctaccagcgtgtccgggggaagcccctcatctacggaaagggtgaggttgaacaactgggcagaggagcccgaggccgcccacagccacacgtgcaccaagagccagagcagggagcgctgcgtcctggcgccgctgctgcctg

SEQ ID NO: 110773 - DNA, 30 bp, Homo sapiens; identical to SEQ ID NO: 3633
  chr4:155413454-155413484
  hyper

SEQ ID NO: 110774 - DNA, 349 bp, Homo sapiens
  chr4:155471469-155471818
  hyper
gtgtatcccacctccggcagggaagaaactctaatcactaacgcagtacccgccgccacagctgtgcagcaccttccggaattgggcgcccaggcggcggatgtgatgcaagctctgcgcacgcgcgctagtctccctcggccatctaggatcaggaggcgggtctccctcctcgggaccgcctctagggcggagtctcgaggctgaaagccggagactcctggaagggcctgggtggagggtttcactcgtccctctgaagaaatcttagaattatgttttctgccttagttggggtcctggttgttcgtgctgtattccccggaagcttaacgctttttattcagag

SEQ ID NO: 110775 - DNA, 30 bp, Homo sapiens; identical to SEQ ID NO: 3634
  chr4:155548258-155548288
  hyper

SEQ ID NO: 110776 - DNA, 54 bp, Homo sapiens
  chr4:155662822-155662876
  hyper
aaaagaaaaatgaaacgcaaatcagcttggcactgcttgcgtcttccaaaacgc

SEQ ID NO: 110777 - DNA, 445 bp, Homo sapiens
  chr4:155663475-155663920
  hyper
atgtgatgcgcaatcgtttgtgaatgaacaaaagtcaccggcaagcagggagacggggacagatcgctgacggcagattgagggtggcagcaaaggcccggcctccaaggataatggggagccgttttccctcacgcctggtctctatggcccccttcgtcttccaggtaaaatgaatgttccttcatccatcatccgcagagtaccctcaggcgtgcgtagaatctgctgatgaaacctattagcgccgactgggcagctttgtggagccacccgaggctctccattgtggcctttgtctgcagaatttaagcatttacataatgcattagcacggaactcagcacccggtggggacatcgcgtgccaagcctggcgcggccaacgcttcagcggctccctcacccggcagctccctaggaccaccctcgaggaggcattggag

SEQ ID NO: 110778 - DNA, 178 bp, Homo sapiens; identical to SEQ ID NO: 41046
  chr4:155663970-155664148
  hyper

SEQ ID NO: 110779 - DNA, 137 bp, Homo sapiens; identical to SEQ ID NO: 41047
  chr4:155664189-155664326
  hyper

SEQ ID NO: 110780 - DNA, 372 bp, Homo sapiens
  chr4:155664663-155665035
  hyper
aacgaaagattcggtcaggaaagaatctgcaggcattcgaggcgctcgcactttgcaaagtaaatgcaatctctttattaagccgaagtccctcatatctatccttttagaggaaggtggtccaactcagaaatctctcccaagaggactttccaccgaagactaccgcgaagtgccaggaactcgccccagtcccgacaggtgcaggacctttcgtgccgccacaccttgggactctacctccctaaataggccacttaaaagccagtagtgcaaccgggatcccgcggcgataaagaatcactgtgcagaaccctggagctgggagtcggcccgcccccctcccaaagaaaccgggatcccgcgtcctcc

SEQ ID NO: 110781 - DNA, 554 bp, Homo sapiens
  chr4:155665292-155665846
  hyper
ggtcgccaggcctcgctgtcctcctttgccttcctctctcctcagcggccgtactttgcgccgtacctcacctggcctgcaggtgagcagcagcgcagcacccctgcccggcgagcttaacttgcccagcccggcccctgccggagtggcaccggcacctctccaagacgccctcttccctgcaggatgaagaaccccatgctggaggtggtgtctttactactggagaagctgctcctcatctccaacttcacgctctttagttcgggcgccgcgggcgaagacaaagggaggaacagtttttatgaaaccagctctttccaccgaggcgacgtgctggaggtgccccggacccacctgacccactatggcatctacctaggagacaaccgtgttgcccacatgatgcccgacatcctgttggccctgacagacgacatggggcgcacgcagaaggtggtctccaacaagcgtctcatcctgggcgttattgtcaaagtggccagcatccgcgtggacacagtggaggacttcgcctacggagctaacatcct

SEQ ID NO: 110782 - DNA, 232 bp, Homo sapiens; identical to SEQ ID NO: 41050
  chr4:156129154-156129386
  hyper

SEQ ID NO: 110783 - DNA, 739 bp, Homo sapiens
  chr4:156129443-156130182
  hyper
cgctcgcctgccttgctagggaccgcagtccctcagccgcagctgggtctgtccgccccgcctttgccctcgccttttcccggggcggatttggtgaagtcggcctcaagtccaggaggtctgtcttcgccgggccagctctcgcggaactggggggtagagagcaaagggagagattcgtggaagggaagggaggtaggggtggcgcaaacgcccagagtatcaaacttgggggtggcacagtaggtgacagcagcagctgcaggtggtggctggggacccgcgagggggcgcccctctgggtagggtctggctgagcgggcttgcaagcccgggaggcggctgagagaccctggacactgttcctgctccctcgccaccaaaacttctcctccagtcccctcccctgcaggaccatcgcccgcagcctctgcacctgttttcttgtgtttaagggtggggtttgcccccctccccacgctcccatctctgatcctcccaccttcacccgcccaccccgcgagtgagtgcggtgcccaggcgcgcttggcctgagaggtcggcagcagacccggcagcgccaaccgcccagccgctctgactgctccggctgcccgcccgcgcggcgcgggctgtcctggaccctaggaggggacggaaccggacttgcctttgggcaccttccagggccctctccaggtcggctggctaatcatcggacagacggactgcacacatc

SEQ ID NO: 110784 - DNA, 346 bp, Homo sapiens
  chr4:156297387-156297733
  hyper
cttcaaaataagtcacgtcttatttaaaaggccatcaaaaggatcgtcggcgtaaaaattatgagcaccaccaccaaaaaaaaaatgtatctatatatttgcatacagcgctattcaaagaaaaagatcgtaatgctaacccgcaaacagccagcgagatgtattgcaagccaatttttcctctcacaaaagtgttaaagagagccagacaaaacgacgaagctttcgcgatgagccgcattaaaatcgcggtttcccgtactcggagcagaggcctggcagggccgcccatagcgttgtgcgccccgggttccgttccctaccaggccaggtgacgtccgggtgc

SEQ ID NO: 110785 - DNA, 193 bp, Homo sapiens; identical to SEQ ID NO: 3642
  chr4:156297941-156298134
  hyper

SEQ ID NO: 110786 - DNA, 1536 bp, Homo sapiens
  chr4:156587869-156589405
  hyper
gatttctgttatggcgattgggcggctgcagagaccaggactcagttcccctgccctagtctgagcctagtgggtgggactcagctcagagtcagttttccagaagcaggtttcagtgcagagttttcctacacttttcctgcgctagagcagcgagcagcctggaacagacccaggcggaggacacctgtgggggagggagcgcctggaggagcttagagaccccagccgggcgtgatctcaccatggtgcgttttggctgctactttctttttcagtctttcggtgcggagaaggggaggaggcgggcagaggtctgaaaaaatcgaatgccttatggaaaggaactgcaagggttcctttggggtgatcaaagagggagacacagacacagagagacaaaggcaaggaggactgtctgggagccacgcgggcgatacagtttccgaggcacgccgcgtcccgcctagcctgttgaacaggtagacatgagcgacccaagcgtaagtgccgctgccgcgagtgcccagggtgcactcgcgcggggaccgacaggtgccactgcagggtcccctctcccgctcactgcctgccacccctgacgcctgctctctttctccattcgcagtgcggatttgcgaggcgcgccctggagctgctagagatccggaagcacagccccgaggtgtgcgaagccaccaagtaagtggtcgctgcatccccacgcgggtcggggttcttcagacaggcggtccctcttccgggacccccgcttgggctgggtctccttcctctcctgagaaaccttcggtacgctcccagttgcccagccctgggaagccagcatcgggttcccacgctggggaggagcgagaggaaaggagaggacgcccgaggggccggcccagggcccgggggacccgcggcgcccgagggaggagcacagacgggggtgggcgccgagcagcgccgcgccggctgctgagctcgcggggccgggccgtgagaacgcgcggggcgcgccggggccgctggtctcccacggccagggcgcctgggccccagagcccatcagccgcgtgcagcgctgcggcctccggcgcgccggcaggcaagcgagcgggcgcagctgggggatgcctggaccccggaggcagcagggctggaggcggtggcgggcttcagggcaacttcacccggccggctgcggcgtgggtaagaggcgcgtcctcctccacagcaaaagctgcgatcgctgggctgcccagagaaggcagccggctaactgcccagcggctccacgaggtgtgcgcgtgtgtgcgagagagacaaatgatttactgcttagcagtcccatttctgttttcgttaggactgcggctcttggagaaagcgtgagcagggggccaccgcggtctccgcgcctgtctgcaccctgtcgcctgagctgcctgacagtgacaatggtgtgaggggctgcgttgcaatgtggtcatgtgatttcaggctatggatttcgtgcgtctttctctgctc

SEQ ID NO: 110787 - DNA, 1150 bp, Homo sapiens
  chr4:156680200-156681350
  hyper
cggttgcgctgtagccgctgccgcctctgcctgggtcccttcggccgtacctctgcgtgggggctgcctccccggctcccggtgcagacaccatggtaagtgctctcagccgggtgcggcccgaacctcacccctcctcggccggcctggcagcgagggaactggccgcgcagccggagcttggctcgggggccctgggcgctcactgccggccacgggagcagcctcactccttgcccgcgcccagtcaggggaggtgggaacgccgcgagtcgtggcgggggcgatcggtgcctttgcttcccaggcgggtttgccgctccacaccgcagcttcctgagctcgggaaggggaggtgcggcggaggcgtggggtcttcccggctctggccggccccaccagtgtgggaggctgagcgccagcggaagggaaggctccgggttcgcgtccccgcgctgcccccgatgcccagcctctcccggagcggtgacaggtgaggagggtgggaagatagcgtgggggtggggcggatggtgacggggagaatccaccagggattggggggttgcgcccccacgatccgactcctttagtgcatagtacccctaagggagaggagtcaggggcggggtgaaaggttaagccagcgccatgggagcagaggcagcagcctcgcccccaagccgcttctcaggtacagcgggtccctgacgctcaagtctctccctgtccccgcagtacggatttgtgaatcacgccctggagttgctggtgatccgcaattacggccccgaggtgtgggaagacatcaagtaagtggccggctaccctggctgtggcccaggtcggcgcccagtgtgggaggccccccgcgcctcgcctggtcctcagcctgctggccgggtcgcgggcgcgcatccttggaggtgcctccgcgcctcgctcccggctcgctgcagctgcgctcccacgctccgggactggaaccaggaggggaggggcggctggggcggggctgcgagggcgagaaccgcggaaaggagcccctaggggtcaccacggcttcccgacccggcctgagcgtgggaacgcgctgccggcgctcccaggctcagcaggccgggcagctcccacgcgtgcagagccccga

SEQ ID NO: 110788 - DNA, 179 bp, Homo sapiens
  chr4:157891923-157892102
  hyper
ggggaaagactcaccgttctgttccttgttgctggaaaactggaatttactactcaggttggattccgcctgagtcccctgtctctggccggccagggcagatgtcagcaggagaagcccgaagaggctcatttggctgactggggtgagagctcactcacggcgggcactttggaagc

SEQ ID NO: 110789 - DNA, 753 bp, Homo sapiens
  chr4:157892474-157893227
  hyper
actggaagccaagtcggcggcgagcagtttctgatcaataacaaagctgccaatagatgcggctctccgggcgcccctctcccccgccccaccccccacccccgaagggggagggggaagaaacaaggcgagggcgccgcggcgggtcccacgggccggggcgccggagcggggccggggggctccgggccgacggcggcccgggcgcaggcggagagaggccgcggggctcccgctcctcagcccggagcgcagttggccccgggttcggagcgccgcagcacggattccggcacctggcttgagttttccgcgaccaaagttcaccttgttcgggctcgtcccccgctcctcaaagcctggggcaattcggccgctcggggtcaccgcggggctccggttgttccccgtcccctccccccacgcctcgggctccgcgctaacctcggggctacgcgcggcgtctccgcacggggtgaagagggaaggccggggcggccgggaggatccggcttgtcccctccccttctctaccttccccccgccgggcggcagacaggaggtgggggccgtgggccgagcccgggcggagcgcgcgcctggcgagcgggggcggctcagcggctctcccgcaggcggccgatggggcgggcgggggtcagcgcctctgggaggggcagccctgggacgcgtccgcgcgagcgggcttggccgcccactggctgtcaacaggtgctgcgcagacagggggtg

SEQ ID NO: 110790 - DNA, 29 bp, Homo sapiens
  chr4:157997158-157997187
  hyper
gaaggggacgatgccgtgacgttgctctg

SEQ ID NO: 110791 - DNA, 550 bp, Homo sapiens
  chr4:157997215-157997765
  hyper
cggtcgccaggttcccccgcggcccgcgctgtccccgctgcggccccgaccgcggcgcgccacggcgcaggctccgcggcccgagcaggcgcgtcagccgagctcggcggtggcgcgggcggctgggacgcagctgcccccgctcggcgcccgctgcacccttagcagccactgccacctgggcccggagcctccacgatctcgcccggcgattgtgggcaggggcgcctccgggtaagtgccaggagctccacttaggaggaggggacgcgggttggggcggcgacggtggtctgaggacgggaatagacgcctttgcggaaacagcgggtcaagcccggggcggcggagcgcgaggagcactgcggcgtgcccgggaggacgcgcgctgccctgcgcgggagaggggcgcggggcgcctggcagcggcagccgggtccccgctgcggtggcgcccgcggagacgctccgggtggagagatgcagagggccggggtaattaggaaacgcaaggttggccaggagggctccttgcgttgttttgtttatg

SEQ ID NO: 110792 - DNA, 259 bp, Homo sapiens
  chr4:158141397-158141656
  hyper
gagaggacgcttcgccgccaacaattagcaattcggcttctacacagcagccggagatcagctttgctgcatttggtccaggttggagcatctccgcagcagctgcaacagccgcacgaaggtagctccgggcggggagcgaggcgctgtcctcggtgctgaaaggccgaggcgcgcggtgggcgcgacagccccggagacccgaggtctcgcggagggacagcggctacgggccccgagctgtgctttctcagcgccg

SEQ ID NO: 110793 - DNA, 31 bp, Homo sapiens; identical to SEQ ID NO: 41061
  chr4:158141754-158141785
  hyper

SEQ ID NO: 110794 - DNA, 87 bp, Homo sapiens
  chr4:158141844-158141931
  hyper
agaggagagagggagaagagagcgcgagagagggtgagtgtgtgtgagtgcatgggagggtgctgaatattccgagacactgggacc

SEQ ID NO: 110795 - DNA, 766 bp, Homo sapiens
  chr4:158142699-158143465
  hyper
tttattcggcctattcgcgtgaataagagactcttggatttttgggcgctagcgcgcgcccctcctttccctcccggggcactgacactgttctcttgcttgctgtttgttctttgcaggggggctatttcctaggggcgccgatcaagaatacagtgcatttcgagtagggatggttcagttttccacttcggagttcagactgacaccccacatcgacaatttggaggtggcaaacagcttcgcagtcactaatgcttgtaagtaatgaatattcatgcctttcgggtgctgcacgcggaaggccagcgagtgtgagtgtgtgtgtgcgtttctggggtggtgtgtgtgcgtttctgtgtgtcagtgtgtgggtgtgagtgactgcacacacgcgtgcgtgtgaccgtgtagagagaaggtggctgtaatctcagggacccccgctggctggagagggctgaagagagagggaaaggacgtcaagagtgtgcgcattagggagccggggtgagggttggagccagggagggcggctttcttgggttcaaggggttttcgctcatcttgagtgcttcaggagaagccctcccacctcgctccccatcgagcgcctgttggcaccctgcccacagagaacacgttgttccccagggcgcgcagtcgggctgttggacaaatcccacgagggactgccggagcccagtggcctcctgccccagcagctgccgctctcgcccgctgcccccagtttagatccgcagca

SEQ ID NO: 110796 - DNA, 519 bp, Homo sapiens
  chr4:158143609-158144128
  hyper
cggccgggtggcgtgggggtggggcggggaggcggtggaaagggggagcgctgtcaatttctcctgctcagttgcgcttccgcttaagttggagggggcgaggccgccaggggcgccgcggtcagcttgccagcccggcgcgctttgttctcaggtagctgggctccagcagaggcagccggggaaaaggactgggaagccgtgggatctggccgagtttgaaaatctggagaagtcgctgatcagccattttagtctttgcaatgctccatattaaccctctcactccgcgcagtgctccgggactcgctgggaagctctgtgatgggttcagataaagtactagaaaccaaacaattagggatctaaaaggattggtgtggaggccagagggctccggtccccgcgctcgctcccccgcgcaggcgtgggcaggcagtcgcggccactgtgccttcctgccctcttcccagcagctgccatcatttcctgccgactgccctgcggtgattctttcct

SEQ ID NO: 110797 - DNA, 149 bp, Homo sapiens
  chr4:159093900-159094049
  hyper
cttggtggagcagccgcagccaagcaagtaacttgtaaaatgaggaatgccatcacccctcgagtgtccatcccacataacttggggttagagcacaagcgttcccaggaactactcaccttaccatcttggccgtttcatttgtcttc

SEQ ID NO: 110798 - DNA, 30 bp, Homo sapiens
  chr4:159174706-159174736
  hyper
gtagttaagagaacgcgtctatcggacagc

SEQ ID NO: 110799 - DNA, 30 bp, Homo sapiens
  chr4:159592603-159592633
  hyper
gctggcatcccccccgcttcccgcccgcac

SEQ ID NO: 110800 - DNA, 130 bp, Homo sapiens
  chr4:159593504-159593634
  hyper
ccggcaggtgatggcgccccccgcggcctagaggtccagcgcccgccgcgagcagcggacagtcctcctgttgtgtccgaccgagagtcctggtgactttgaacatgctggtgccgctagccaagctgtc

SEQ ID NO: 110801 - DNA, 30 bp, Homo sapiens
  chr4:159644744-159644774
  hyper
tcccaccctcgtggcgtagagagctttgga

SEQ ID NO: 110802 - DNA, 738 bp, Homo sapiens; identical to SEQ ID NO: 41067
  chr4:159690016-159690754
  hyper

SEQ ID NO: 110803 - DNA, 30 bp, Homo sapiens; identical to SEQ ID NO: 41068
  chr4:160025376-160025406
  hyper

SEQ ID NO: 110804 - DNA, 672 bp, Homo sapiens
  chr4:163085065-163085737
  hyper
caactggtccgctcgcgtctcaggttcagcaccgacagcacagtggacagtaccagctcctttcacctccagtttgtctcagtcactgaaccaggctgattctcgctcctcctccctaggcaggagctgctgccactcaacccgggggtgccccgcccccaccatctgacgtaactattttgcatatcaactcgccgagaggtgaggggccgcccccttgactgggcttctgctagagtcagctgcggcaatcggggcaacaaaattcaggcttaacgtcagcgtgggcatctttggacttcaggatgtattctcaaccagtccagtagaaactaaacgctttgacggtgctggagcctttgccttcgcggggactgccgtttctgcgcactctaagatcgctgcgggcacagctctggaaggaagacggggcggagagagggggcagtggagcacggagaggaccgagtgggaggcgggtggggaggagacggagaaatagaatgaatctattcaaccattcttgaaaacatctccaatccttttcatcttcctgcccaaactttgctgcctctccctgccatttggttatttgaacggatccgtatttggtgttcctactcccttccctcggttcacggagcctctggagggagtcgctgctgcagaaac

SEQ ID NO: 110805 - DNA, 30 bp, Homo sapiens; identical to SEQ ID NO: 3653
  chr4:163811945-163811975
  hyper

SEQ ID NO: 110806 - DNA, 151 bp, Homo sapiens
  chr4:164088007-164088158
  hyper
ctcaggtaactacacgcggaggagccaaaagacacgcccccgccatttacgcagcaacgctttccgaagagcgtgtgacgtatgtggcgcgacggcgcgacggcgctcgcgggggcaggatacatgcgtcatatcttcgaaaatcaggatt

SEQ ID NO: 110807 - DNA, 1221 bp, Homo sapiens; identical to SEQ ID NO: 41071
  chr4:164252933-164254154
  hyper

SEQ ID NO: 110808 - DNA, 72 bp, Homo sapiens; identical to SEQ ID NO: 41072
  chr4:164264780-164264852
  hyper

SEQ ID NO: 110809 - DNA, 664 bp, Homo sapiens; identical to SEQ ID NO: 3656
  chr4:164265192-164265856
  hyper

SEQ ID NO: 110810 - DNA, 65 bp, Homo sapiens
  chr4:164415571-164415636
  hyper
agatgggcaagctccgctcttggggccggaagcgtgtagcgtctccacccgggctccaatcccca

SEQ ID NO: 110811 - DNA, 49 bp, Homo sapiens
  chr4:164415907-164415956
  hyper
ctgggtctagagtgcggagctgctccgtggccacgaggacgtcaccatg

SEQ ID NO: 110812 - DNA, 30 bp, Homo sapiens; identical to SEQ ID NO: 41074
  chr4:164465774-164465804
  hyper

SEQ ID NO: 110813 - DNA, 780 bp, Homo sapiens
  chr4:165304243-165305023
  hyper
gggataaaacttgggcgtctctctgcctcgactggtcactccacttcctggagctccagaaactccctcagcacctggataactgcgacactcacccgtgagcgcaggaccctcctggcgtcttaagtcccagctctcagtcccgctggccgcaggaacacaatgacatctctcgcccaggagggcggttgcagggaaccgaaatcggacacaacagttgcagtgaacccgactcagggttgagcgcatcagcgctaaacccaagacaaaggctgccctgtgtcttccgtactcagcgctctcctttggtaatcggtccccgtccccttcaagcccacactaggagcgcgtgagcctgtgaagtggctgtcatcgactccgcgctttccgaggggtgcggctccgtgactagtaccacgccggtgtaaacagcgcgccgcgcactggggatccgccagaaacggcgcgcgcgcagagcgggcgctgggggccaatagtagcaactaccccaggctgcgggctggagccgcctcctctcaccagagaggcgcctactgggcgagcccgccgcccgcaggttgggtggcagcacccgccgcgaaccccagccacgctccccagtggacccaccaggcaaaggcacctgctgcctgccctccagggctgatgctgtgccaagccccgctcgggatcagggacaagccgcccaggactaccagccggagagaaggggctcccagtgaggctgattgaatgaatgatgtttgcagtcacttaccg

SEQ ID NO: 110814 - DNA, 271 bp, Homo sapiens
  chr4:165305059-165305330
  hyper
cgtgcggccggcatcccggggcgcgggcattctcccatcctttgtcagttgcgggtggagcgctcctccccagctagcggacgagcagccgggtggcaggcagcccggctctggctcggctccccagtcctctcccctcctctgctccccctccccttctccgtccccctctctgagccggcattcactgggctcccatgatgtcatccagtggaaatctgccatgctcaaagactggaataatccagcgctcacgcggggaacgcagagc

SEQ ID NO: 110815 - DNA, 30 bp, Homo sapiens
  chr4:166033392-166033422
  hyper
cccggcccgagcgtcgttgtcactccaagt

SEQ ID NO: 110816 - DNA, 30 bp, Homo sapiens
  chr4:166034298-166034328
  hyper
acattaacttttttcggtcttgcctggttg

SEQ ID NO: 110817 - DNA, 80 bp, Homo sapiens
  chr4:166248059-166248139
  hyper
ccccgggcactcatcgtccagcacaacaattgcaacaacacctgggcgttctctgcccatgtagcgaggtcaaggtcctg

SEQ ID NO: 110818 - DNA, 30 bp, Homo sapiens
  chr4:166248610-166248640
  hyper
ctccgggcgctccgcggtgccgaccattgg

SEQ ID NO: 110819 - DNA, 30 bp, Homo sapiens
  chr4:166249188-166249218
  hyper
ttcgggagacaggacgtagaagatagttgc

SEQ ID NO: 110820 - DNA, 705 bp, Homo sapiens
  chr4:166299998-166300703
  hyper
ctgtcatttcacctgcgtcgtcccggacgccatttggctgttgacgtggttccgagccagcaaataacgccagcagccctcccagatccacgccggcccgtctctccgccggccccctcctcgcagtggtttctcctgcagctcccctgggctccgcggccagtagtgcagcccgtggagccgcggctttgcccgtctcctctgggtggccccagtgcgcgggctgacactcattcagccggggaaggtgaggcgagtagaggctggtgcggaacttgccgcccccagcagcgccggcgggctaagcccagggccgggcagacaaaagaggccgcccgcgtaggaaggcacggccggcggcggcggagcgcagcgatggccgggcgagggggcagcgcgctgctggctctgtgcggggcactggctgcctgcgggtggctcctgggcgccgaagcccaggagcccggggcgcccgcggcgggcatgaggcggcgccggcggctgcagcaagaggacggcatctccttcgagtaccaccgctaccccgagctgcgcgaggcgctcgtgtccgtgtggctgcagtgcaccgccatcagcaggatttacacggtggggcgcagcttcgagggccgggagctcctggtcatcgagctgtccgacaaccctggcgtccatgagcctggtaagggcgctgccccctgacag

SEQ ID NO: 110821 - DNA, 32 bp, Homo sapiens; identical to SEQ ID NO: 3659
  chr4:166414896-166414928
  hyper

SEQ ID NO: 110822 - DNA, 30 bp, Homo sapiens; identical to SEQ ID NO: 3660
  chr4:166513760-166513790
  hyper

SEQ ID NO: 110823 - DNA, 1909 bp, Homo sapiens; identical to SEQ ID NO: 41079
  chr4:166793755-166795664
  hyper

SEQ ID NO: 110824 - DNA, 29 bp, Homo sapiens
  chr4:166795963-166795992
  hyper
aggtccttcccctcccttctacgcctctg

SEQ ID NO: 110825 - DNA, 168 bp, Homo sapiens
  chr4:166796117-166796285
  hyper
cggctcgtgtccgggcttcgggagctcctggttccttgctctattgggctgtggctgaggtgatccgcgctcagtgtggacgcacaagtaacttcgtaaaggttgcatggtggttggggctaacctagcagagcggtttgtaagcggaaggcacgttaggttccatcc

SEQ ID NO: 110826 - DNA, 1140 bp, Homo sapiens
  chr4:168154955-168156095
  hyper
gaaccagctgggagggggcagcggaactgtgaacttctccagcagccctgcgccgccgcgtttccctaaacccctctcctcagaaaacggagcccactccccacccacatccggcggccgcggcccccgcctcggagcagcgcgcgcgtgtgcccggggatgtgggtgcgcggaacttacgtctcggaatttgttccactgtccgacttccttgtcatactgagagattgtggtgagccattgtttatcatccagaaaattaccgccgtccgaccgccccccggctgcagccaccgccgcggcagctgcgagagactgactgcaccaagcggctgcacacacacacagtacggctgacaccttgagcatctgggagaggagacacaacggggggtgggggggcatgtcagtgtcaaataaggggtacgaagccaggagcgaccctggaaaacatgcattagcaacgacgagggtagagggaggaggagacaagcagaggcaagcgtgtcccctccccgcaggctttacccccaaaagccgggcactcacacacacgcagacccagaggaggagaggtgggtataaggaagcaagccccagccgcagcagcccgagcgggcacaaaaccgcttcctggcacatcaccttgttgtgagccagcactgtgctcgcagctcctgctggaaatgcagccctgctctgccaactcgctgctttctggagctgctgcacgcgccgccgtctcgagccgtccactcagctccctgcgcccggcgcgctccccccatctccaccctcccttcgcgcgcggatctccagcttactcccctccgttccccctccctccccgacctccgtttttttcctcttccacctcctcctatcccaccttcctctcgctggatcccagctacagttggctccggataggacgcttggctggagccagaggacgaggtagctcctagcctaggaatccttatctgctttgtaacctctcccctccagaagaggttctcatgttcgcgagacagcctgctcattctctgctcctggatttaacacaaagtgtactatctctcgcagttgcctctgctccacaatttccagggttgtcaggcagacgtgagaaacaagatc

SEQ ID NO: 110827 - DNA, 468 bp, Homo sapiens
  chr4:169401168-169401636
  hyper
ggaaaaaagggaagcggcttgctgcctgtcaatgtccaggttcgaatggctgtgctcagatgtggtgacccttactttctcctcagcaccccagatccccaggccccctcgggtgcagaggacccgttaaatgcctgagcactctcctctctcacggtggttgtccctcttccctacctctccgcgaagctgccgcccgagcccagtgggcgccccagcttccctcgcccggcgcgcacgaagccaccaggccacctccccgcccggtccatctggatgttgaaggaatcctagaacccccgcgggacagctccgctccagggtccctagcgacacccgacgtcacccgcaatcctcaccccggccgccgaacctgctaggtccaaagagcttcggagctgcacgccccgcggggaggaggtggagcagaggagaccgagcgcagagcctggcgtcggactgggcgct

SEQ ID NO: 110828 - DNA, 30 bp, Homo sapiens; identical to SEQ ID NO: 41085
  chr4:169402283-169402313
  hyper

SEQ ID NO: 110829 - DNA, 83 bp, Homo sapiens; identical to SEQ ID NO: 41086
  chr4:169552542-169552625
  hyper

SEQ ID NO: 110830 - DNA, 116 bp, Homo sapiens; identical to SEQ ID NO: 3665
  chr4:169552931-169553047
  hyper

SEQ ID NO: 110831 - DNA, 675 bp, Homo sapiens
  chr4:169752830-169753505
  hyper
gctgccctggagtcgcgtttattggacactctttagtctgtaaaggaaaaaaacacaaacaccggaggagaatcatcctaacaagccgacaacatatctatgggcctaaaaaacttaaattctttcccgttattagcacttctcgatcgttccaggaaagcccgatttgtagcttggctgccccaggaaggggcctgcgaccagaaagatgcaaagggcgggacaaggttacgagtgggtgcggggaagcctccctaacctgggggccgcgtcccagagctgcgagccacgcctcctctctcccgcccgccgcgccgccggactcttattttgaagggcggcgggtgaaggctcggagcctcctgagtcacccggcgggcgaggtataaagcccgatacctgccccgcgcccggtccgcggagcccgctgcagctcccgctcgctccggacgcggaatcgggcagcagcgggaggcggcccggagagccgaggtaggcgcggggaatcggccctgaggctggtggaagaaatgtgtgaattaaagggagtgcagcgtgcagggtgggccgcgagtcgggagtgcagggctcgggacagggtgggggcggggaggacaagagactcgtcagcgcactttccacccggccggttccttcccgagccctctccctccc

SEQ ID NO: 110832 - DNA, 891 bp, Homo sapiens
  chr4:169753535-169754426
  hyper
cggagctccagataggaatgtctgcatcatcttggcagggcccagacgggagaagatgctctgctgccacggacgatccctcccgctctcctaactcttctctgaacacctcgcacccccacggccccccgcccctctcttaatcttggccacgctccctgaggggtcagacctggggtgggagagcagagaaagcggggctggcagagacaggggtgagggccgggagaggcgatgacatcattccctggcagctggcggggagagggtggggacggaggggtccccccgacctgagccgagccctcccttcccaagcccatcctcctttctttgggatggttcaccccacctgggcgccattcaaaggaagtttgcgcgtaactcggggcgtcctttccccggccgggtgctgtgcccggcccgcagtcggtgtttcttctgggcctgggggcggcgtggagccggcggctcagtcccctcagtcccaggccttggcagccgctttgttcacgccgggcgcgggccgaacccgaacctcagctgcagcactggcagcgcgcaccggccacgcgtgggttcccggccacggccgggccaacaagggagggtcccgtgagcagccaggctggccctccccgggcctgggtgagctcccaaagctggagcgcagggctctaggccggccccgccccggggctgggggcttcccgcccgtttgtctcattttaacttttgggggcagctctgtcccgaatggtgagtggtccagactctagaaaggggtttggtcgcttgagcccggattgaggcttgggacctttgctctcttgctggggacggaagggggcgcgctgggcaggagagggggcgtctcggtcgggtctccct

SEQ ID NO: 110833 - DNA, 179 bp, Homo sapiens
  chr4:169931433-169931612
  hyper
gagctcgacgtcgccgcgtcgacgtcatcacgcacggactcttccgcgccacacctaacaaatacgccgacgagagctccccgccggcggaagaatggcctggagagggcctcgatgcttgctgggacctgtagtcttgacgcatgagagcaactggcgcaggcgcgctgctcggtggg

SEQ ID NO: 110834 - DNA, 30 bp, Homo sapiens; identical to SEQ ID NO: 41090
  chr4:170191343-170191373
  hyper

SEQ ID NO: 110835 - DNA, 74 bp, Homo sapiens; identical to SEQ ID NO: 41091
  chr4:170192273-170192347
  hyper

SEQ ID NO: 110836 - DNA, 41 bp, Homo sapiens; identical to SEQ ID NO: 3669
  chr4:170192664-170192705
  hyper

SEQ ID NO: 110837 - DNA, 30 bp, Homo sapiens; identical to SEQ ID NO: 41093
  chr4:170533366-170533396
  hyper

SEQ ID NO: 110838 - DNA, 30 bp, Homo sapiens
  chr4:170533603-170533633
  hyper
ctacttgactgccacgtgctcctgcctcgc

SEQ ID NO: 110839 - DNA, 30 bp, Homo sapiens
  chr4:170534515-170534545
  hyper
atctcctcttcaatcgccatacagctacaa

SEQ ID NO: 110840 - DNA, 30 bp, Homo sapiens
  chr4:170541531-170541561
  hyper
cccctcctcctcctcgagacccagtcccgg

SEQ ID NO: 110841 - DNA, 30 bp, Homo sapiens
  chr4:170542024-170542054
  hyper
ccgggcaaaattttcgtaacctctgcggta

SEQ ID NO: 110842 - DNA, 242 bp, Homo sapiens
  chr4:170679067-170679309
  hyper
ccgcttccgagcgccgccaaccgcttccgggttcaaaagcctccaagccgaatttcagcgccgcccgggctcgccaatttaggggaaaggctccgcccattccccgccccctgagacctggcaccggacgcgttgaggccccgcccactcccgtgctgggcgcgtgcaaggagcgtcttctgtcagcgtagtctgcatctaggctttctggagcatcttccagggtcgctccagagaccccc

SEQ ID NO: 110843 - DNA, 290 bp, Homo sapiens
  chr4:170946844-170947134
  hyper
cgagagcttcagtagcgaggcggcggctcgcagcacccacagccgcccgcactcctgcggcatcaggacacggcgccctcccgacgcggaacccgcattcacgttctccggagccctggccagcgcacgctcctccctgtccgggtaaactgaggcacagcgatgagagagatccagagcccagcgaaagcccccacggctgttcggcgtccccttcccccacgacacctaggaggctcgccggcagctggcagtggattccgcgctcctcgccctcggaaggttacggt

SEQ ID NO: 110844 - DNA, 864 bp, Homo sapiens; identical to SEQ ID NO: 3671
  chr4:170947173-170948037
  hyper

SEQ ID NO: 110845 - DNA, 772 bp, Homo sapiens; identical to SEQ ID NO: 41096
  chr4:170948089-170948861
  hyper

SEQ ID NO: 110846 - DNA, 954 bp, Homo sapiens
  chr4:171010621-171011575
  hyper
tatttcatttctgcacgcagagcctggctcaccgcgagcgtgcacaggggtacgcatggatgcaaccaagcggtggcttgctagggaaccctccttagaggctgtgcgaggaatgccccaccccaaaggagagatggtcaccccgtttctcactcatggtccggatgggagaagggtttctggctgcgctcgctgccgtgatgaaccgtgcgtaattcatgtcttctgacagccaagcatcaagcttcttcttcagtggttgaggactagaaaaaccaaagagcctcgtcaagtcctgcctgctaactcctcactctggcaacgccaccgcgagatgtgtccccccgctgcgtctggcttcccgcgcgcggtgcccggagaacgccgccgaaactccccggctggacgctgcgttcggtctcccggtcctaaacgggtctggggctgtgtggcgagcccggcaaagtccacgccgcacgcgctcctgcggccgccagggcccaggccggttttgccccgccgcgggcctcgccgcgccccctcccgccccgcgccgtggcctatggccgcccgcggcgcgcgcctccccgtcccggatcatcgccctcagagcgcagggcgcggggtagcccaggcgcgaggcgcttgcagccccaggccaatgactcttgacctcgccgctgggaatcaccgcaacccggcgtccgcgttggccggcctaggcgccggcccagaggctagcccaggggctgaccgaggggaccggaagtgcccgtgatcctaatcctcgggaaccatctggcggcgacttgggtccactgcagggggctcccgagctgcgcccagccgggagcggccccaccctcgttcccgcgcgctccgctggcctcctctcagtcactgggactgtgcattttgcccgctcagaccatggctatgctaaatacccatctt

SEQ ID NO: 110847 - DNA, 472 bp, Homo sapiens; identical to SEQ ID NO: 41100
  chr4:172733675-172734147
  hyper

SEQ ID NO: 110848 - DNA, 203 bp, Homo sapiens; identical to SEQ ID NO: 41101
  chr4:172734188-172734391
  hyper

SEQ ID NO: 110849 - DNA, 268 bp, Homo sapiens; identical to SEQ ID NO: 41102
  chr4:172734591-172734859
  hyper

SEQ ID NO: 110850 - DNA, 122 bp, Homo sapiens; identical to SEQ ID NO: 41103
  chr4:172735016-172735138
  hyper

SEQ ID NO: 110851 - DNA, 31 bp, Homo sapiens; identical to SEQ ID NO: 41104
  chr4:172735202-172735233
  hyper

SEQ ID NO: 110852 - DNA, 30 bp, Homo sapiens
  chr4:174089500-174089530
  hyper
acaggcgttaaggacggagttattgtccat

SEQ ID NO: 110853 - DNA, 1704 bp, Homo sapiens
  chr4:174089733-174091437
  hyper
cagtcggagctctgcggtggccgccagaggggagggggccacggggaggagcggagggaagagcccggggaaaggtgtagccgaggggagttccggatctggagctggaaagggcaggcagcggagagggcggcagccgtagcggtaggggtgggggaaagagggggaggagagccggaggagggggaaggagggaggggagagcggtggcggcggctgcgccgggctgtgagtctctcgccgccggaggaagatgaggctgaagattgggttcatcttacgcagtttgctggtggtgggaagcttcctggggctagtggtcctctggtcttccctgaccccgcggccggacgacccaagcccgctgagcaggatgagggtgagtgacccgcccggccccctccggcggcagcgaccggcaacttgttttgtttgcccgcgtgtggagggagcaggggcggcggggtcgcggcacggcgtgggcaccgcagctccgcaggtggtgctggcgcagcgcgggccgagggggtgccgagccccgcgcactccgacctccctggccgccgccggcccgccccctcgccgccccttcctccgctcttccccgccccgggctccgtcgccgacacccgcgctgccgcggcagcggctcgggcggccgctctccgcgccgggactgcgggcggagcgggcggagagccgggtccggggggctgcggccgcccggcgtcccgctctggggggccgggaccgcagcgctcacggcccggggacgcggggttggtccaggctgcggcctgtggcgcgtgcaggcctgaaggaggcgagatgccgatgccgccaccgctggtccggtggaccaggccccttggtccagcctcccctcccgcagccgcccgtctgggggtgttcgcagccccgggctcccccggcccgcccgccggggagtgggagggcgatggcgccccgcctccggctcttacggagagcgcgcctccccctcaactccggcggcggggagccggggtgcgatgcgcggccgaggcctcgcccggaccgccggtccccctcgcgtccctgggcgagggaggggcggttggccggagatggcggaggggcgtccccgccccgcctgcccgccgcccccagccctcagcgcctggggaagcccctgctgtggcagtgctcgggcgctatccgggggaagaggagcagttcctcttccttggctgcggcagggctgcttgggccggaaaactaacttgtgtcggcgcccggccgccccgcgccggctgccggctagctcaggccgacgccgaggggagcggcggcgcggagctcgcggcggctccgctgggacgcatttgtctgccgcccagggcgcgagtgttagcgctgacattccttggatttggagggtttagtcaggcgcctcggaacattagttacccggagccgcgccgcgcggggaagggaccgcgggcactgcggcttccctgacccggcagcgggcggcgcgcaccggcctcgcccccgaccctgacctgcttccccccggatgaaccgttgcaccacctgcttcctcctccccgctgggacagccaactgggccggctgccagtgggggtaggagagggtatgaggggctcacgaccgccgaggcggcggggctgcaggaggagtcgagtcgctctctctgttgta

SEQ ID NO: 110854 - DNA, 43 bp, Homo sapiens
  chr4:174254797-174254840
  hyper
catgttgacagatccgcgtccacctgacggggccgagggggga

SEQ ID NO: 110855 - DNA, 30 bp, Homo sapiens
  chr4:174255544-174255574
  hyper
agttctccgcgccacggcaacttgacgagc

SEQ ID NO: 110856 - DNA, 30 bp, Homo sapiens
  chr4:174256388-174256418
  hyper
acaagggcaccctccgggtcccgaaggggc

SEQ ID NO: 110857 - DNA, 30 bp, Homo sapiens; identical to SEQ ID NO: 3679
  chr4:174291092-174291122
  hyper

SEQ ID NO: 110858 - DNA, 30 bp, Homo sapiens
  chr4:174291338-174291368
  hyper
cggccaacttggtgcgcccaagaataaaaa

SEQ ID NO: 110859 - DNA, 181 bp, Homo sapiens
  chr4:174291978-174292159
  hyper
ttcccatggggccgcgcggcagaaagaaaggggcgggacgggagggggcgcgtcgcgcttgcgcaggtcccggggccggagggaggcggaggcgtagcggtccaactgctgaagtccccatgtgacagtgagcggggtccccgctccaggagacgctcgagtctgcgtcccggccctcagc

SEQ ID NO: 110860 - DNA, 30 bp, Homo sapiens; identical to SEQ ID NO: 41107
  chr4:174293367-174293397
  hyper

SEQ ID NO: 110861 - DNA, 515 bp, Homo sapiens
  chr4:174415374-174415889
  hyper
gtcagattcaagatgcggtagattggcaccttaacctcttttggctcttcttcccccgaatcaaaacccactgtaaacaccgcgaagaaccaggaaacttcacggctttaatcatttcctttccccaagctccatgtggcacacaggacattccgttttcctttagggttgccgtcatcctgcgacaggtgcggaagaagaaaaaagcaaatctatgtttccaaagagcggaggaagcagagacaatgtgccaacacggggtgcgctcttcacctttacgctccactcggagcaagcaaggaaatcctccagctctagcaggggttgagggttagcgccacctggctttctaaagaagaacaagaggcaggaggtagatgaggctgaagaggagcccgcgccctcctttcctccttgggcaccaggagggcgagaagaaggacccgggagctcttcgtttcagagcccagggcagccaggctgctggccaccgcgcactgcgaagagacgcaatt

SEQ ID NO: 110862 - DNA, 30 bp, Homo sapiens; identical to SEQ ID NO: 3680
  chr4:174427131-174427161
  hyper

SEQ ID NO: 110863 - DNA, 76 bp, Homo sapiens
  chr4:174429790-174429866
  hyper
ctagagaaggcctgccgcccgaatctccccaagtgcaggggagaattacatttccccacctcctacccaacctgcc

SEQ ID NO: 110864 - DNA, 43 bp, Homo sapiens
  chr4:174429949-174429992
  hyper
cgagcctgtgggagaagcactcggggcccgggaggccgaggtg

SEQ ID NO: 110865 - DNA, 213 bp, Homo sapiens
  chr4:174430340-174430553
  hyper
cagggcctacttttgcgaggggcactggagaaagaagagagggttgcgcgcgcgcgtgcgggagcttcggaagctaaatctcactcgcggggaggatgggacgcgtggggactgaaggcggcatctgcctgaataaagccctcgcgcgctctgagcctcccactctgtcctggaggcctgaacctcgcgagtagagcctggcgcttttcctcc

SEQ ID NO: 110866 - DNA, 280 bp, Homo sapiens; identical to SEQ ID NO: 3682
  chr4:174430793-174431073
  hyper

SEQ ID NO: 110867 - DNA, 670 bp, Homo sapiens
  chr4:174437937-174438607
  hyper
cgcaccgggttccgactccaccgcggcgccgagggggccagaggctcccagttcttccccgcatagttcgacaaagccctactttgcttccctgggtctgggatctcaacgtgaagggggccgagagagcggtgataaggtgctagaaaggaaacggcaagaggaaactaaaaaagtggagagaaattttgtgcgccgtagtgcttagcaagctggggaaacgaggagaaaacgagcaaagtctacaggggagggagagagggaggaggcagggaaggagaggaccacgaggctcccggcgcccaggccgccacttgggaggtcccggccccaaagcaggccgggccaaccgtccccccgggaggctcggggctcgggcggggtcacaattacacctcggctccaggcgaggacttaaaaaccaagtggtggggactgcagtctggaagcaaggccctgcggtcatcggaggggggccaggcccgtgcacaggaaccttttacaaggcatgtgggtacaagaaaaaaaatcaaaataaaccactttcatccagcatgggcagtgaaaagaaaagctgccttccagagggggcgagcgggagttttgaaattcattgtgtgttttgcctttatataaggagttttgcgttttttaccgataaccaaagggg

SEQ ID NO: 110868 - DNA, 20 bp, Homo sapiens
  chr4:174438982-174439002
  hyper
ggcccttagcctcgccggcc

SEQ ID NO: 110869 - DNA, 398 bp, Homo sapiens
  chr4:174439053-174439451
  hyper
cgagagcgagtgaggagctcctcccggacctcgggcctagcttcggaggtatttttagctcctctctctgctccccagaggctcttttgtaagcttaacagaggctcagcaagctgccctcaccccgaagggctgtgggaggaggctgccctagtatcttgaagaaaaaagaaattgcctatccttaagtttaaaacaatattcgctctctctaggctccccttctgttctctcgtttttttcgcccgcaggaacactccaagttccacagttaaagaggaccgggagggcaggaatgggtggggcctggaaatcagctccgaaactgggtgcggcacaccttcctctgcctttctgcctctctcccggccactgctgctccacgggagccagtcttg

SEQ ID NO: 110870 - DNA, 877 bp, Homo sapiens
  chr4:174439740-174440617
  hyper
gcttccctggacttccgcagtcccccttctccccattccagaacctgccgagcccctgctgcatctgggacccgccttcaccgtttcccaatcccagcggttagcccctgcgccccctttttggtctccactttgccgttcgaaaatgcctaggttggtggatcgaccctccgcggagcaaagacggatggctggcaggagcaggttcaggagctgggccaaggtattctctgcttccgcctttgtgtccgcccccccgccccctgctccccgcttcccgccagcatctctccttttctgctcaggagtgtttggcccggcggtccaccccggcttcccgagatacgctagagttgcccccacgtcctgtccgccgcgcccctacccaccgggttgccttcggggcccttcggtgctgtgtagtcggcgtggcgctgtgagctaggcgaacaggaacccccaggcccgccacgtctacgctattagcagccaggtagccctgcgggtcgaagatgctcagaggaggagtaaatgcagagaaaaaatagaggaaggaataaaaaaaaaaacaaaacaaaaacacgtaacatacacgcactcaaaaccaactttgggattggactttttcagtttcacacgaagagacttggagtatctggagaaggtttttgaagacgtttaggagggagggtgagttttctgctgagaaactcaatctgccatacagtagcggccccatctgggatctgtcactgctgacagcaccagagggcacagccgtgatcttctgcacagcctgcactccccgaaataccctccttaatcaaaggatgtctgcgcgcctgagctcagctgaccgcgccgggagcaccagggc

SEQ ID NO: 110871 - DNA, 43 bp, Homo sapiens
  chr4:174440652-174440695
  hyper
cacacagccacggcccctcgcgtcttcgcggcacgttaattaa

SEQ ID NO: 110872 - DNA, 626 bp, Homo sapiens
  chr4:174443428-174444054
  hyper
cgattacacccaactcggctgggatggctccgagccgtctgccctgacgtcagcgaggctccggccccgccgcggcaagataggcgagcgcggccgggcgcgggtgcggcactaatcactcccagatgtccctaatagcggagataaagacggacagagcggccgggaataaatttgtaatcagggctctaccatctgatcatcaaagcggcccaaatgccgggagaatttgaagggaatgcgtgtgaggggggtcgcttgggggaagaggtgagggtgcacttcgcgatgggaactggcttcggtagggtagagcagggagaacagggcgagagatctgtaagttcggtgcacgtaagtcggatactcggtgctctttaacctccattagccctcagaccgaagccgtttagcggttccaggctgattggagctgcgcagttgctgtgcgggaagcacgcgttgcgcagcggctgggtggtaaggcggcgcgatgagaactgtccggcccccggaaacgtgggattggtttcctctcccggagttctcccctcccccttctttctaaacatttaaaaaacacgtagtccgtctcccccaacccccattcccggtagacttaatcc

SEQ ID NO: 110873 - DNA, 200 bp, Homo sapiens
  chr4:174448152-174448352
  hyper
ggatcccttaccacacgggagtgtcctcttcgtattaaaatatggaatgcttttcttcaaatatccactttttttttggagggggagacggggagcagatgcctcaaagggggtcaaagagaggggaaggaaattgcacataaataaaccggatgattccaaatgcaaggagtcctcagagcggagcgcggacggctttt

SEQ ID NO: 110874 - DNA, 560 bp, Homo sapiens
  chr4:174448460-174449020
  hyper
cggccagcccgtccggcctttggttttcttgtcgttgctgctcactgtgcttttcaagatttcgttctggacagaggaaaggcgagggcgagaaaagtggaaagagaaattcagagaggatacctggttccacaccaacccggagcttcctgcgccggaggagacagtgaaccagagaggaaaggatacgatgggggagtcccagcccctgcagagaagctaccaaggttagcgctaccctagccggcggggaggcctcggcgctgcagcgctcaacaaccggatccacaagtttataaacaaccgcccgttttcgagtcgtttatggaggagcggggggccttttctcttactccagatgtaggggcgggagctggagtcggcgctaagtctggtttctctgttttcattagcaatcctagatccacatctaggaaaaatagggcgaaggagcctctgtttcggcctgggcctctcggccagaggctctcggcctccagctcagcagtgcctctcctccaaggcttctgaaatctctggttattcgggaggtcactcga

SEQ ID NO: 110875 - DNA, 1125 bp, Homo sapiens
  chr4:174449601-174450726
  hyper
agagttttcaaggtccgtcctaagtactaggggagcagcgataacccggaggtaagatcaccagcgcaaagcatccctaaccttctcctcctcctgctgacaccctcccctcaactctctgcttatgccggaagccatccttacacaacctggtgcaaacaaccttgaagcgggacgcagccaaagaacacgagatgccatttctcagcccaattggaaagaggccgggagcaccagttccctgaccccctcagccccaccgcctgccgccccctggtactgaccagctccttcttcctcttctcctctttcacgtcggtcttcttgatctctgccttgaaggcctccgcctcgccattctggtcgtccttggccagcaggtccatgaggtaggcgatgtagctggtggccaggcgcagggtcttgattttggagagtttggtgtcggcgggtacgttggggatgcactcgcgcagttcggcgaaggcgctgttgatgctctgagtcctgcgccgctccttgcggttggcggtgcctcggcgcttcaccgggcgcggcccccccaggcccgggggcccggcgcccggcggcacccccccgtaatgggagtggtccaggccggcggcgccgctggcatactcggggctgtaggacagggccatgctgtagtcggggggcgacatctcggggtggccgatgagccagccatggaagtaggggttctcctcatggctgcagcggctggcggcggcggcggcagctgcggcggcggcggcggcaaacgggtagccctcgtggtgcaccaccgggtggtggggaaaaccacctaccagactcatttcgccctccgcgcccctccacgcgccccagcgtgcgcgcagccccgccgcgccctcggcccgggcccctgcctcagcgctcggcgtcctcccccaccccccaccccccagcccccgggcgcccgggcccgcccggcagccgcagagggggctgctgcagcccgggccccgtccccccgcctggccagccgggcccgcctcagcagcgctgcggccgccggctccccatggggcgcggcgagctggtcctggcaccgtgcgcccctggccgccgccgccgccgcct

SEQ ID NO: 110876 - DNA, 732 bp, Homo sapiens
  chr4:174450751-174451483
  hyper
cgcgcttcggctcctgcttcccgggctgctgcgcggaggcagaatcctctcgtgctcatacaaaggtgccggggctcccgcgaggctggtacgcggagtctcgggaatccaagcccgggccgcggtcctggcaccgaagctaacccggaatccaggggcgagtctgagccgcggctggaggagccggtccagctgtgccggggggcggcggggtcgactgctcactgcaaagctacctccgtgcgaccctccccttcccgcctcttcccctccccccaccagcccgatctgggttcttgggcgcttattgttttaatgaaatttttggttgttgttgttttggtccttaaatgtgattttagctgcgagtaacgtgtcctcgctcctctcgcgctctctcggagggttttcagagaggtctcagtgcatccattttctcagatcctctcctttcggggcaaggatctggggccctgaatgagccttggagctcgaagaccgcggctcgggctctcggagggctctgcgcggtggccgaggaagctccggggtgacggcggtggttctcctgggctggacgacgtgaggggagcaagcggattttcccagcaagatctccatgtacagctacatctttagggccgctcgggttaatatatgtcgtcagaggctcctcacgccaatcccggggcggcaggggcggcgcctcgagctctcggcaataaaactttt

SEQ ID NO: 110877 - DNA, 320 bp, Homo sapiens
  chr4:174451764-174452084
  hyper
tgctttgtaggtaatcgaggtaagaaaatatacgcaggcagcctcttacaattttatgcaggggcgccgggagcctcgtgacgggcggtgggggcccccacaaaggcgcggctgggagctggcgctctttgccccagcagggacgaggagcggctggagaagggtgtttctttgacccgtttacaggctcgaaacgccggtctcagtggctattgagttacccaccaagttaccccggttagagctgtttggggtggctcacgttattgcggcaaactttggagatgacggctgagtcctccgggcgaacatgtcaagcc

SEQ ID NO: 110878 - DNA, 30 bp, Homo sapiens
  chr4:174452474-174452504
  hyper
ccacttgtaagtcaccgggccgcggggcac

SEQ ID NO: 110879 - DNA, 376 bp, Homo sapiens; identical to SEQ ID NO: 41119
  chr4:174458998-174459374
  hyper

SEQ ID NO: 110880 - DNA, 750 bp, Homo sapiens; identical to SEQ ID NO: 41120
  chr4:174459527-174460277
  hyper

SEQ ID NO: 110881 - DNA, 382 bp, Homo sapiens; identical to SEQ ID NO: 41121
  chr4:175132784-175133166
  hyper

SEQ ID NO: 110882 - DNA, 1046 bp, Homo sapiens
  chr4:175134966-175136012
  hyper
agggactccggtgttcggttcccgtggccctctccttggctcccggtcaccgtcctcacaccccctggccccagttactgacggaagccatgtgcagctgccataatgtgtataaaagaatctctccctggcgttggtttcttctcttcttggaatgcttttggcagatcctccgcgttttccgggtctcttgggagtctgaacatgcattttcctttatttcagacaggattccgagtgttaactagattgtgccctccccactacctatcctgcccatcttccttctcagccgtcgggtgcgggaggaacgcccttgccaacctcagcctttttgatcttccgcgggcagagactcatcagagccaggaggactgtaactacccccggggcgtgtaccgccgaagcctgaagaggctggttgggccaaaatagcagtcgctgcaggcaccagtttcagcccgtcacctgagtgccggttcctgtgggcgcgccagtctcgcaggcagcgcgcccaagctcgcggatcgccctctcacatttttagaagccaagaaaagcacttttgaaattcactccttcgaccgtgggcagaggagcaggtgggcgccgagccctagctgagggtggggggtcgcggaggagaggaactggaaaatgggaaataggtgtctgctgacctagagttcttcggctttgattttaagcggcagtgaggctgggtggtttcgcccccctcatcccctcggtcgctggcgcagattgatcctggagctagttacgggtgttaaactggtacgcgggtggggcaattcattaggcaagaaatggattagttgtttattatctataaacattccaaccacagcaaccaatcataaaaccgcggaagggcctgtaaagtaaagcagcagcgaagcctccatgtgggcagctcaggcttagcgattgttcccgggtgataaagggtcgattagggaagtagagctaggaaggtgggggcgggggagcgggcgataattaagcgagtcgtcaggaaattgctt

SEQ ID NO: 110883 - DNA, 30 bp, Homo sapiens; identical to SEQ ID NO: 41125
  chr4:175137235-175137265
  hyper

SEQ ID NO: 110884 - DNA, 91 bp, Homo sapiens
  chr4:175137696-175137787
  hyper
gattgcctgaccactcgtctctctccagcgtttctctaagtccgagcccccatctctcccagtcctcccggctcagcgaggaattcctttt

SEQ ID NO: 110885 - DNA, 1059 bp, Homo sapiens
  chr4:175138121-175139180
  hyper
agctttgtgtgacctcgtgcaatgtcactttaacctggatagcgtcaggtttcctcacgcataaaataagatcagatgatgccctcttggattctttgactgcaggacaatcattaggccatagtgaacagatgcgcttggttgccagaccgcgccctttgcgggtctatcaaaagggcaagcgcatattctggagctgtctcggagacttggacagaaagattcgaggcaaatattctaggctgggaaatttcgcgccgagcccccccctcagttagcctgtctaaaggctggtgtggccagagcgaggcagagagctctgcacctactgtcggggctgacaatgatttatgcgcttgtgacccacgtagaccataaacctagtttgctagacgtacagggaactgcgccgcagttaatgcagaggacttatcctctgacctgcaatgtctccccacctggtgctctacagctccagagagcagggatttcagcttttcctccctcattggatccaatttcaatcccctcggttaactgaaagtgtgttgacttccacccagccggcaggaccctaagggcgcctggagcagtctggtgcgggtcctggctgcagcatgcccagcagagctccgggtgcaggaggctgcaaagccaccgccgcgtccaggccccttgagcggaggtgggaacgatccgccttagagttcaaggtgaattgctgtgacagtggcgggtggaggaggggagttcgagccgttcgcctcggggaagaattatccccgatcatttatttttagatctgaattcctccagaacccagcagaggctgtggccagagccccagggccaggcaagcggccaagctgcgctctcgataaaggagccagaatggttccatctggttacaaacatatctttttattaaaaagcaatcagatcctgaagcgcttcccttgcggtttaccgctctccgcaggctgcttctccgaagccagcggtggtagcgcccactcggttgagcccacgcctccgccaggcagcgcctccgccaggcag

SEQ ID NO: 110886 - DNA, 464 bp, Homo sapiens; identical to SEQ ID NO: 41129
  chr4:175139428-175139892
  hyper

SEQ ID NO: 110887 - DNA, 30 bp, Homo sapiens; identical to SEQ ID NO: 41130
  chr4:175204112-175204142
  hyper

SEQ ID NO: 110888 - DNA, 206 bp, Homo sapiens
  chr4:175204403-175204609
  hyper
cactcaagatgcttcgcactgtcattggtcgcaaactcttgctggtcggccagtttcggccaactggcaagcactggttgtctttattttcgagaaaagtgaaggtgaacagggaaaagagacaagagatctaaaatatctaggttgactcctgtacctgagcgacctgcgatctccaccgccgccgcgacgaattggcctctggg

SEQ ID NO: 110889 - DNA, 640 bp, Homo sapiens
  chr4:175204864-175205504
  hyper
atttctgttgtttacgattcgctatagattccttgtttctcacttcgtagcacgagccactctgaccatcaagatcagaaaaacttctcagctgcaagttagaagtggactggccattgaggaggctctcagcggagtcgctcttcacaggagtcttgaacgcggtgtggaatcggcagcgaggaatcctggagcacagagaagctcccagctttgaaggtcttgcggtggtgcgtggcgggcaggaacccacaattccaaatacaaacggtcggcgcgagaagcgcttctgggcgcaggcgcctggctgtagcgactggttgcgggaggctggactctggtgactgtgtatggttgcatatgctccgttttcctctccctgtcgtgctgggcctttgaaaccggcttctttgctggtggctgcttggtgagccccgaggagacggcaaggctgcgcctggtattgggcggaggtcgcctctctccgccgtccttacagagaccccgggcggagacgaatgaccagatccgccttttcattcttttaaatcaaatggcgggaggggagccttgcttatatacccaactagtatatgcttttagtcacaacgaagtgggaagtatcgtggtagctcatcct

SEQ ID NO: 110890 - DNA, 30 bp, Homo sapiens; identical to SEQ ID NO: 41133
  chr4:175443228-175443258
  hyper

SEQ ID NO: 110891 - DNA, 30 bp, Homo sapiens; identical to SEQ ID NO: 41134
  chr4:175443554-175443584
  hyper

SEQ ID NO: 110892 - DNA, 115 bp, Homo sapiens
  chr4:175444081-175444196
  hyper
gtgagttcccatctcgtaatcagtggggttgagggtgacggggagcagaagtaactaatatcattgtgttttcttagttacattttggacaaatttttacggatactggagatga

SEQ ID NO: 110893 - DNA, 906 bp, Homo sapiens
  chr4:175749924-175750830
  hyper
cccgaaactaatgtccgaaagtgtctcacgtgggccatgatacggagagatattcacgatcctgaaaatagtcttatccaaggcatggggaaccagaaagacagaatgaaaatgtacaatctaaccccgcatggtgttggtgtagactgatgcttgggaagcttcagcaccttagacagctccccgcagtatgcggaccccttctcagcattgagcagaagtggagagtcacagtgttataaatgtgcaggtgatttttacagtgaaattacaaaaatgagtgagatgaaatgtctgaagtgcctaggtgctgggcaacagttctctaaagctccagcagcaaaggaagaatgttcgttcttccctgactgagacccaggattggaggaagaagagcagcaacagccggaaagaggacgcctctccacctgctccaagcgccgcccgccggaatccagctctccaccttgggttaaaacccgagacccggagcgcggcaaagggaagcgggggtggggccggacaacccggtcctgtcgaccaatcacgaccgcacagcgggacggagtgacaggccacttacgacggtaggcggggcttagcgcttcaccctttaacaaaacccaaacaaaccaaacggcgactggagcgaggtgggcggaaaaagccacctgggaaagtcagcggttttgtggattaggtagtgtaaccccgcaggagggaccctttagtattcccttccgggaaaaggcacactttaggtcttctcggatgtgacactgtctgttacactctacaccgaaatacaagagtcagcagtaaacccagaccctggcggagggctggggaagagaagacaatgtggtgcgtgaacgcccgtggaacggaagaaccagctgcttctag

SEQ ID NO: 110894 - DNA, 30 bp, Homo sapiens; identical to SEQ ID NO: 41137
  chr4:175846410-175846440
  hyper

SEQ ID NO: 110895 - DNA, 90 bp, Homo sapiens
  chr4:176922577-176922667
  hyper
ttctccctcgctcttcgaggtgactcgtgggaccctgcgtcctagtgctgggtgtgaatcggctatttcacacccagttcttcctcccct

SEQ ID NO: 110896 - DNA, 967 bp, Homo sapiens; identical to SEQ ID NO: 41139
  chr4:176922729-176923696
  hyper

SEQ ID NO: 110897 - DNA, 57 bp, Homo sapiens; identical to SEQ ID NO: 41140
  chr4:176986728-176986785
  hyper

SEQ ID NO: 110898 - DNA, 324 bp, Homo sapiens; identical to SEQ ID NO: 3702
  chr4:176986855-176987179
  hyper

SEQ ID NO: 110899 - DNA, 174 bp, Homo sapiens; identical to SEQ ID NO: 41142
  chr4:176987206-176987380
  hyper

SEQ ID NO: 110900 - DNA, 518 bp, Homo sapiens
  chr4:177116425-177116943
  hyper
aggcctggcaggcggcggaaagcaggcggggcgcccaccgggggggcctaggactggcttactcaagcacctgttgatgttcctggggaagaagctgagatccagaccctgaagccaacgcagaacggaacgagacaagcgggagctcttcggcgcatgcggatagaccagacacttcttaggcctccctcggatgggagctgctagctgtggcgaaagtgacggtgacttgtctagggctgccgcagtctgtgtcaaataccctttttcctggccggcggcagccatgacgctttctgggttgctgcggcaacagcagaaggcggggctgggccttattgctggcggcgcggtctcgtggggcggggcggagtcttatggggcgagacctcagcgcctgcgcaagcgccgcagcagccgcccgtacttccgctttactcagattttggaccgcggggccgggtatcgagggaggcaaagctggggtcccagtggtgtggctgcggtctggggagcgc

SEQ ID NO: 110901 - DNA, 100 bp, Homo sapiens; identical to SEQ ID NO: 41143
  chr4:177240752-177240852
  hyper

SEQ ID NO: 110902 - DNA, 99 bp, Homo sapiens
  chr4:177241205-177241304
  hyper
ggactcgtgggagacgatcgcgatgaacacggtgctgtcgcgggcgaactcactgttcgccttctcgctgagcgtgatggcggcgctcaccttcggctg

SEQ ID NO: 110903 - DNA, 30 bp, Homo sapiens; identical to SEQ ID NO: 41144
  chr4:177241836-177241866
  hyper

SEQ ID NO: 110904 - DNA, 1229 bp, Homo sapiens
  chr4:177713158-177714387
  hyper
gaagatttttctccaaagcagcgtgcactgagctcagtaactttggatcccacgtacacaagcttaaagcacacacactttcccccgcgcaggttctcgggtccgccgcagaccctaacgcaaactctcgggttctccgcaaaccctaacgcagacctaccgtggcctcgcccgcgtcgggctccgcgtccgagaggtcgagtccggactcgaaggcggcggcggcggcgggcgcctcgcgaggacccgggagcagcgcagcggcgagcagagaacacgccacagagaagaagcccagcaagtgcatggtggaaggaccgggggtgggggaccggtccgctggcgggggcaggggtgggggcgcgggcgcccctgcgaggccgcgggcccctcctggtccctctcccccgggctcctcccggcgaccccccctgggcgagccggaggcggcgggagcgggtccggggctccgcgttcccaactttgcagggcgccctcccagccagtgccggggaaaggcggcgggtgtcaggtaaaagcctcacaggaaaccggacatccgagctccccgcattcggagcccgcgaggtgaagcgagggcgagggaggacgccgccgcggtccgcgtcggtgtagctttttggagaggcggggcgggggacaccagaacaccccgcgatgttcagcccctccaaacccgccagagccctcgtccccctcctccctccccttccccgaagtgagaggagccgggccgcgggcgctgcggcgggggcgctggcggcggtgccgggggcgggaggagggcggcggggcggctggcggcggcggggcccgggagcgccgcggcgcaggatcctccagagcgcgccgggctgagcggcggcggcggcggcggcgggcgcaggggcagggcatgactgacgcgccctctgcctgcgcttatgtgagagaaagcggccgagggagggagcgtgccgagcccgggctgccctcccctctcactctccctcggaagccgtctccctggagctccccgtttccctcgcctcctccccggcggccccacctcccccggcccccctctggatctctccctccccgcccctgtcccctgcggggagcgggcggccggaggggcaagttcagtcccggggctggcggttggcgggaccggctttagaggtgatgcgaccaccctggaccacgtgcagcggggagaaactggg

SEQ ID NO: 110905 - DNA, 169 bp, Homo sapiens
  chr4:178230843-178231012
  hyper
tcctccacgccccccgccccacgcgcgtttgcgttttcttaataaacccacagcaagacctagggcgggggtgaaccacagcgcatgcgccgtagggagcgacctcaacagctagggtgctgtttgggcggggcctgggcggggccagacgcgcgcgagatttgaattt

SEQ ID NO: 110906 - DNA, 30 bp, Homo sapiens
  chr4:178231428-178231458
  hyper
tcctagcgcgcctgcgcaggagaggagggc

SEQ ID NO: 110907 - DNA, 237 bp, Homo sapiens
  chr4:178363507-178363744
  hyper
gcaagttcgacttccgcgccatccctgaccaccgaagagaccagcgcgagaaaagtcccggcagccagcgatcgccgaacaattaatccccagtgccccgcccgcctggcgcccacgcccgctctctcgggggttcgctcaggcgtccctcaactctcgcgagacgaggcgtccctgggcccgcgggagagttgtgtcacggggcactgagctgttccctgcgctaaggtgcttctt

SEQ ID NO: 110908 - DNA, 127 bp, Homo sapiens
  chr4:178363968-178364095
  hyper
tggggatcccaggcctcggaggtctgcaatagttatgagtgtaggtgaagcgtgtttgcttaggaccggattgattttagattttttttccattcatagcgtccgtcattttcgcaccacagctttt

SEQ ID NO: 110909 - DNA, 49 bp, Homo sapiens
  chr4:179699959-179700008
  hyper
tctgaaatacagtttcgctcagttcatgtgtccacgagaaactctgaga

SEQ ID NO: 110910 - DNA, 30 bp, Homo sapiens; identical to SEQ ID NO: 3708
  chr4:180978694-180978724
  hyper

SEQ ID NO: 110911 - DNA, 2055 bp, Homo sapiens
  chr4:180978996-180981051
  hyper
agccaaaacaggtttacctaacgggaagcctggaagggctggcgttggagaagccgctcggaagcggggcaggtagcagagagccgcccgccggtctccgggtctacgcccagggctctttccagcccggcctttgggtaactggtgtgggggagggcggccggctttcaggtcgcctctcccgcaggtttgggagcccggtaggccgtgactgaaagaccgtagcaacagcggtcaattgccgttttagagctcattttggggcgaatggtagcagcagagccactgccgccctggctcttgtaggtgggtctggagtgtcacgtaggcaccccaactcgcgccgggggccgtggtccgcagactcccacttcattgccccggaggcctgagcccgccccgcccggctgtggctgcacctttcccgagagtcggggcagcggcggctcgaaagtggaggcagcctaaccgcgtagcgctgaaaccaccattcacaaatgcaaacccctgtcttctgtggataaacggtggcggcgcgcgtccgagcgtccccgaggggctgtggggagcccccggggagagcaggaaaggaagcggggtggcggtggctaggaagcgactgagccttctcgcccggccggcggaagagggagccgggtcccggcgcgccgagccagccgcccctcgcgcagttcctcggccgcggcgcggggttcgccccgcttctccccggcagcagccggctgggtgcccccggcacagcacagtgcggcaggcggcagcgtcctcccctcgcctcccccacattccctcacctcagccaaggcggcagccccggcgtccccgcccgcccggccccgcgcccccgcccggagcgcccccacccgttgcgcccccgccgggtcccgccgcgcagccccgccacgctgcagctggagcgaccgccgcggccggccccgcagaccggggaggaggaggaggaggggaagccggagagggaggcgcggggaggagggatggagccgggaggaggaaataaataaataaaacaatcacctccgcgccaataagagcgagggagagagcaagacgcgaccagagagccaccggggcccgctcgcgcgcctctgagaggctgtccgcgcgcgcgcgtgtgtgcgtgagtgtggatttgccgggactggagctggaaagttcaaactaaacgtgttgctctcgccgagtgccgaggccgcggcggaggctgcccaacttccccgggccaagtgagtggcgttgcccagcgcctttggcgaggcggcggccgctcggccctgcgcccggccgcggcggcggcggctccgctcgccccgggagggagcccgcggccagggctggactctcgccccgccacctccaccgactctctcctcagcctccgcgcctggcaccgcagcaaggtacgtggcgcttcctggcgcggcttcttccctagcacaccccgcgcggatttttggctgcctagattcttccccttcccggagtggtcatcatttgtcaaactttacctccacctcgcacatgcgggcggccgctgcagccgccctccctggcggcatgggctccgctcgctgatgggaaccgagaggagggtgggggggaggatctgctggcagcggtggttctcatctggattaagatcgtatttcggaataactcgcaggtcttaccttccgggggtgtccttcattatgatgttccctgtgatgctggtaatggttttccttgctccttctgcacggaaggacgtacaagtttgcaggagaaggtacatgaaaagcaggtgaagtttgcagccacttgactccaagagaggagtaaccctttctttgcagtagccgctatggttttgaagcagcggcggcggcggcagcggtgacagcggtgacagcagcctggccggtggcggcagctgcacgttgtcccgtctgtgactggaagaaggaggaaaagtggggctgcctcgtcggagagcgcaactctggagctgcctgcaaagacgctgcgggggaaaat

SEQ ID NO: 110912 - DNA, 30 bp, Homo sapiens; identical to SEQ ID NO: 41152
  chr4:182872676-182872706
  hyper

SEQ ID NO: 110913 - DNA, 30 bp, Homo sapiens; identical to SEQ ID NO: 41153
  chr4:183062731-183062761
  hyper

SEQ ID NO: 110914 - DNA, 518 bp, Homo sapiens
  chr4:183063454-183063972
  hyper
gagccgggtcgggttcgcttactaccaagacttctctacttaacgcgctgcgctcgggcacttagcaacttcgggaacacgggctgtgggtctgggcacaccacctcgagtttagggattctcctcacttctagcccaaactttggataaactaacataaaggttcaggctttcctaggaggcgtcgtccttgttctcccagtgctcgatctgtttctggttctgcacggtagttaaaaatgcaagtggatttcctaacggccgagtacaggtacaggtggaggtcggcggaatcctctgctctgaagctgaaagtggagggtggcgcgaggcggctggcgcgacgaggctgagagcgcaccagtctccgccacgcttccaaggacaggttggcgacggccggggcaggcctggtcgcgggctcctagccctccacgggcagactgctggtcccaggagagggcggggagatgctcgggcgcgcaccagggagccgcactcactcggcagccccaagc

SEQ ID NO: 110915 - DNA, 2630 bp, Homo sapiens
  chr4:183063994-183066624
  hyper
cgccccgtcccggacccgaaaggagcctgaaggatcccgccgaccacccagccagagagcggttcggctcaggtcgcccattcggagctacaaaactctggaacctccagcagtttcggaagctccgggggagggctttcctgcagacagggggcgggagctagggagccgggagccagcgctgcggtgggaacttcagtgagtagaaagtggccagtgtcttgggaggagcagcaaactttttttttccctcccacagcaaacaaaatcgaggcagggacagtgtccggccgctaatctgaggggagaatggagaggaaagaagagtagtaaaagtggggagtggagccttcggaggactcccgggtccgcccctggccaggtgatgcggggcggaggcctaggtgcttgaacctggggggcagacaattgttctgctgcagtgcccaccaggggctggtaaggaagtctgagtgtttactgcctcccttccctgtccaaaggtcatttgcgcttttcggtctcggacgaaagaacactgtggaaaggaaggcgcgggtcattttcagaggctctgcaaaggacgggccgcctaccgggggtggaaatccttaattacacccttctgcctcggaatccgtcttcccggcagtgtcttgcactgccacctcctcgggtgactcagctgacctgaaatgcccaccctacggaagatcaagaaaagtagttttctaagaaggttagaggtttgattacacagagaagtgtttccacttaagtccaaagcaattacccgccccctcccccagggccgcctccccgccacccgcagcagaaaaggacagacccccacgcacgtacccccattttgttggtgcgtgtgaatttcaaatggcgcagtaagttcattagtgttttcaatcggcggcgggcagacccctcatcagagccgaaagccggcaagagccattcatcagcgtgaagtgttattcacggatgacccctaaatcacggcgagagtagtaaaggcactgattggtcacagcatgggagcctcggtgctttcccgaacccgacgcggccgggaggagggaaggagggaggggcggcgaacgtggttcagtccggcaaatcccatttgacagaaaaaggcagtaaacggggaatctctttttttgaataaagaagaagaagaaataaagtacctgtcatcttgacaagtggcggagcggaggagtcaaggattataaatgatcacagccaggtccagctcgccccgtgattgggctctcccgcgatctgcaccgggggaagcgcatggtaggctcctctcctctcctcctctccctcgcacactcccgcacacacacacacacacacacacacggacacgtgtacgcgcccgggctcgggcacactcggcccggcgcgtcccccgccgcacaattacggtcctggatgccgctccctggccgggcgtcccgcgggcctcctcacctggcccttctcgccttcctcctccctcgcctccccggtcctcccgctcgcgggctgaaccccgaaaactccggcccggcctggtccgccgccttggaggaggctggaggggccggcgggcggggagagggggagcgcgggggagagaaagaaagtgaactcattggcgcgcgggcgccctcccctcccgcgtccccgggccgcgcggccgggggcgggcagggaaggaagttgtaacactcgcgccccctccccgcccccgccccgccggcgcccgctccccgctccctcggcggggcccccctcccccgcgcccggctcctttgaatttggcccggcgcggtgtgcgcgcggctcgggcggacgcggcggctgctgccggggagcgagccggcggcgcgggcgagccgagcgcggtaagtgcggcgccgccgccggcgcgccctccttcctttatggggtcctagtgccgggccgcggcgccgggagctggcgggcgcgagctgggacggcgcgtggccccgggaggcggcggacgcggggacatcttctcagcgcgcggattctctccacggtccggcctccccgtccccgccccgccctcgcgccagccacctccggccgccggctcaggtgggaacttcgccggcgcctctcgcccggggagccaggcgccgcgcccccgtactggggagccccggggtccctgaggaaggcagtccggaggctgggcgcccagtgggggcggggaggggagcccgccaggtcctcttcggcccccgatgtgtggcgaggccccgcgtcttctgcgggggcgtcttaacaggatcctggggggcttccagcgagcggaaagccccgggatgtcaccgctttccggggcaggcaggggacagaaggcttctgcagcgatcagggagccaagttgaaaaggagtgaaggagggagagtgcggggcgaggggtagcgtggggagtggtggatcacggctgaaacttgatcgggaaactctggatggggttggaaacacacacaaaatatcctgagctgggcgtttcaaaaattacgaatttatgagcctgcaactgagattctaagtccctctcgtgttttacaaccgattacaaagagct

SEQ ID NO: 110916 - DNA, 338 bp, Homo sapiens; identical to SEQ ID NO: 41159
  chr4:183369219-183369557
  hyper

SEQ ID NO: 110917 - DNA, 712 bp, Homo sapiens; identical to SEQ ID NO: 41160
  chr4:183369579-183370291
  hyper

SEQ ID NO: 110918 - DNA, 400 bp, Homo sapiens; identical to SEQ ID NO: 41161
  chr4:183370318-183370718
  hyper

SEQ ID NO: 110919 - DNA, 314 bp, Homo sapiens; identical to SEQ ID NO: 41162
  chr4:183727528-183727842
  hyper

SEQ ID NO: 110920 - DNA, 31 bp, Homo sapiens; identical to SEQ ID NO: 3713
  chr4:183796433-183796464
  hyper

SEQ ID NO: 110921 - DNA, 286 bp, Homo sapiens
  chr4:183839055-183839341
  hyper
tgtcgcagcgtccccgtggggacccttggccggtggctgggtcacagtttcacacactggatggggcagggaactgggtccggcgggggcgctgtgcctcgaggctcagtgcctcgaagctagatttgcatttggctgcgcctgacaggctttcagtttctgctcaaattgtgcggaagggcctgaggtgtttgctaaagcctgccgcgccctgctcgacccgtatcaccgcacaggcaccccacctgcatgttacctcctggtaatgctcgcccacttatatagt

SEQ ID NO: 110922 - DNA, 2057 bp, Homo sapiens; identical to SEQ ID NO: 41165
  chr4:184019260-184021317
  hyper

SEQ ID NO: 110923 - DNA, 30 bp, Homo sapiens
  chr4:184319728-184319758
  hyper
agctcaccagcccccgccttagtggctggc

SEQ ID NO: 110924 - DNA, 322 bp, Homo sapiens
  chr4:184328289-184328611
  hyper
ggcccgcgccccttccgcgcagtctccttccgcgtcacctctgtgaccgctgtgcccagtcgggccccacagaagcggcaagcgacgtcctcaaccgcaatctcggctcctcgggcgccacccagtggcctcggggcggaatcgcgggcgagctcggaggggctcggggtggcggggcgcagcgcggcgcctgtaaaacaaccctttgtcttcagaaggcgcttgtcctgccaaagcaaagcaccgtgctttacagctactggaagagcagtcctgagaaacaaagccccgattttttatagccaccggggaaaccagagcc

SEQ ID NO: 110925 - DNA, 30 bp, Homo sapiens
  chr4:184365183-184365213
  hyper
gggactggcactcccgccctcctgaaggcg

SEQ ID NO: 110926 - DNA, 37 bp, Homo sapiens
  chr4:184365598-184365635
  hyper
cgtggggcgggagacgcccgacgcccgcccacctcac

SEQ ID NO: 110927 - DNA, 30 bp, Homo sapiens; identical to SEQ ID NO: 41168
  chr4:184366221-184366251
  hyper

SEQ ID NO: 110928 - DNA, 30 bp, Homo sapiens
  chr4:184425211-184425241
  hyper
aacagatgccgtcccgcatcccctccccct

SEQ ID NO: 110929 - DNA, 30 bp, Homo sapiens; identical to SEQ ID NO: 41169
  chr4:184426744-184426774
  hyper

SEQ ID NO: 110930 - DNA, 51 bp, Homo sapiens
  chr4:184580351-184580402
  hyper
gacgcttggaggagcggcgtaaagttccgggacagcgattggtgtagagcg

SEQ ID NO: 110931 - DNA, 1746 bp, Homo sapiens; identical to SEQ ID NO: 41171
  chr4:184718200-184719946
  hyper

SEQ ID NO: 110932 - DNA, 1632 bp, Homo sapiens
  chr4:184826162-184827794
  hyper
gcaccaacatgtcaaatgcagcgctgaaaaaggaaatcgggcttatttttgtcgttgtttactgtaccaaagcatttttgaaaacccaaatcgaggagataaccgtttttgaatgaacggcagtgcaaagcgtggtcggggttagcagcaacgtggctgggcgcctttaactcggcgtgacctccgggtcccaggcccgcgtcccgggcccagcgcccaggcccgggcggcgcattggcccctcctcccctcgcgcgccgcgcgcattgttgtcctttagcgattggttgttggaccagaaacagctgtgcagagccgtgccatctaaagagctgtggacctgaatgcagcgtagcgggctggcggtgacttacaccgggactccagagggagagaggaagcgctgcaggccacttgcattgcgtcttccaggctgcgtggacccggcgccccggcgtgtgcggttgtgggggagctcgccgtggcctcccctccctctggctttagcttcctttggggttggcgcaggtgggccaggcagcgcaccgcagatctccccgttcccacgaaggctggctcgctgtctctctccgagcgggagggaccatcctaaaaatatgtaaatatccaagcgctggctccaggctggggcagctgccaaggtccccgcgccgccgccgggtgttttacatgaaaatgagaagcctgatgggaaccgcgttctaacttaaggcagcctggtgattagcatgagactgggcggctgtcctgcttcctgcccttcaatagccgttccgcgcgctcgcgccggagcagcgctgccgccgcgcgggggtcgatcgcaggctcggcgtccttggcagccatggctccggcgccgcctcggccagtaagtaggagcatgcatgtgtagggggcacatgcgtgtcggcgcacccacccagccatccacccgcgcgcacgcacagcgcccggagcctcggcaaggggaagattgacgaggcgctgcagtcgcggggacgacgcgggctcttcctggattccgcaggagcccgcccgccgcagctgctgtctgcagagcctgctcggatcctgtgcacacgcgccccccgctcgagcctctgtgatgaagactgtctcccggggactgcagcggaggcagagccagccagcgccggggactgcgggccgtgcggctgataggcccgcggggacacgactcggacactgtcatccccacgcctcgcgctgagctgcccggcgcggagggtctgccgccgcccctccggcctcccgcacgcccgatcccgggtcagccccggaggcctcggctgcctcatttgtttgggtcttttgtgccgtggctcccagttggccaagcactcctgcgctgaatcgggccattgtctgcgctcccattgccttcacgctgcaagtctcggcgcccccaccccgcccgccccctccccgcctcctcccggccggggagcctcctaacgtgcctttccccccaggaatctggaagctataagccgggcggattgcaaatgaagtgtaatgcattgtgggacgtgtgtaaaatcggagccttcgccgtgggggtgtgggggggcgtggggagggccggacccg

SEQ ID NO: 110933 - DNA, 40 bp, Homo sapiens
  chr4:184828122-184828162
  hyper
cgcgtttctgcccccgggccggggccgcgggacgtgctcg

SEQ ID NO: 110934 - DNA, 225 bp, Homo sapiens; identical to SEQ ID NO: 3717
  chr4:185089642-185089867
  hyper

SEQ ID NO: 110935 - DNA, 30 bp, Homo sapiens; identical to SEQ ID NO: 41174
  chr4:185305512-185305542
  hyper

SEQ ID NO: 110936 - DNA, 31 bp, Homo sapiens; identical to SEQ ID NO: 3718
  chr4:185311056-185311087
  hyper

SEQ ID NO: 110937 - DNA, 30 bp, Homo sapiens; identical to SEQ ID NO: 41176
  chr4:185395538-185395568
  hyper

SEQ ID NO: 110938 - DNA, 30 bp, Homo sapiens
  chr4:185395837-185395867
  hyper
ccgggaggtggaggcggagggagggcgcga

SEQ ID NO: 110939 - DNA, 102 bp, Homo sapiens
  chr4:185396093-185396195
  hyper
gtaggggaggagagcgggcacccgagtctccatcctcagggtggcctgaaggttccaggagggcgtccggcgaaggcacggggctgcgaccatccagttagc

SEQ ID NO: 110940 - DNA, 31 bp, Homo sapiens; identical to SEQ ID NO: 3720
  chr4:185396653-185396684
  hyper

SEQ ID NO: 110941 - DNA, 30 bp, Homo sapiens
  chr4:185459597-185459627
  hyper
ttgtaggcaaatgaacgtatggcacagtct

SEQ ID NO: 110942 - DNA, 30 bp, Homo sapiens
  chr4:185654491-185654521
  hyper
tgttctcttcagatcgtcttggcgtatggc

SEQ ID NO: 110943 - DNA, 30 bp, Homo sapiens
  chr4:185655224-185655254
  hyper
tctccgctctcgagcgactggaagctcccg

SEQ ID NO: 110944 - DNA, 30 bp, Homo sapiens
  chr4:185655609-185655639
  hyper
gctgaggccgcagtcgtctttccaggccta

SEQ ID NO: 110945 - DNA, 30 bp, Homo sapiens
  chr4:185747083-185747113
  hyper
ggccgctccgccgccggctgtcactgcagc

SEQ ID NO: 110946 - DNA, 41 bp, Homo sapiens
  chr4:185747360-185747401
  hyper
tcgagaggctgcggcgggcgaacgccgctggagtcgcccag

SEQ ID NO: 110947 - DNA, 382 bp, Homo sapiens
  chr4:185747617-185747999
  hyper
ttccttgacactgacgggcgcggccccacagggtttcccccacgctccctggccggaagaccttttctgtctggtgtctgcagagcctgacgtgggcagcgcccgcagctcgcgccggtgcaggggagctgagggccgactgcgcgctgcaccacggcggccacctgctgtgcggttctgagggcttccgcggttctgagggcttccgcgtccctgccatgcccatcttggggcttcagaagccaacacgatggttttcgggctcacatcccaaaggctgctcttccttttagcacctgggacctaccaggaacctcaacctctaacaacattggtccccgttaccgtggagtttgcgcccagcgttcgctggagggccgtt

SEQ ID NO: 110948 - DNA, 669 bp, Homo sapiens
  chr4:185937208-185937877
  hyper
cccactctggggcagcgtgtgtgacccaggccttcggaccgagaagggagaaaggaaatacgtccttccctatcctgaagcggagggcgttccaggtttcgcaggtagtgctgcagccgcgcaaggaccgggcgaggctgcgcccctgagcccaagtctccactcaccggccttcccttgccccctcacctgcacgcgggtacttttagccctgggcaagccttgagccaagcgccgagaccaaacccgggaaattaaacagtgtgcatggaatgaaatgtggtccgtggaaggtgcctgcagctggcggttaacaccggcagtaagaggatcaacgcccgggccgctggcttaaaaatgggagtgggagtgcgaagtgtgcgcgctcctttttacccattcacgttagttaatttggatgataagggttcgcgtttaatctctttgtgtgcgagtgaatatcctgaaatcgacaacccctgagagggcactcgcggctggcagagcaacctgggagggtgcggatcgtgtccaatctggcgtgaagcagaaaggaaacatcgtgaggagactagaggcaggaccgagagggacaccctaggggtgcgaggtgcagaccgagccctcacatctcccaggccgcagcaggtgggccgatggcttccccga

SEQ ID NO: 110949 - DNA, 85 bp, Homo sapiens
  chr4:185938238-185938323
  hyper
gtgtgagcgaggcccgtcctgggggaggtggcctctggccgcggggccaggttgccctcagaggcgcaggcggccaagagagttc

SEQ ID NO: 110950 - DNA, 30 bp, Homo sapiens; identical to SEQ ID NO: 41183
  chr4:185938705-185938735
  hyper

SEQ ID NO: 110951 - DNA, 2979 bp, Homo sapiens
  chr4:185938974-185941953
  hyper
cccccttttcttctcggcccactcttctccgtgttgccccccaatcctcccacccgccccttcacacacaaacacacacacacgcccgccagtctctcctcccccaccctctggcattattaaaatttagcccaatgaaactattcatacttttcaatggacattttcgtataggataataggctacaaattgagcctcttccccccgcgaagagggagcaggaggggtggggagaaaagaaagccagcgacgtggtcagggagtaggggggagcgtcgcgtgccaaacagcggcgggaggggcgaggcgaggcgaggcgggagcctcgtgtgccagccgcagccccacacctgccgggatgtccggacaaataaagcggtgtaaacaaaaaggggggagaaggacgtgtcaccaagtcgtgtgagaaaagcctgggaacaaacggggcgcctccgtctccaagagctctcccttgaacccggcggaacagcctattaaaggcttacttaattactttaatgactctggacaggctttaaaacgcactcggcgctgggacggcgggcttgctgggatttgtaaacaggcgatcatgtgagactcagcggtgggactaaaagaggcgacactgttttgtgagggtcctcgccccccggtgcccgcggccgctgcgcccctgcgctccgcgcccgcgactgctgcaggcgcttgctcgcccgccggccccagtttaccgcctccttttcccgcccgagctgttgccatgcaaatgttattcctgggccgatcacgtgtcctttgaagggccacgtggattaacaaagctgatctgcccccagctcgcccccctcggctgctaattttttttttttcttaacttctttaaaactgatcttgaatgcatacatcctccaaacgcagctcccctaatcctatggaataattcaactcgtgaatgcatctggagccctagatgaccgctttataaggcagccctcggagttgggaggctgcagtctacctgggacactcgaggaggcacacgaggcggaaaagtggacgggtgccccgcgccaccgcctctcccgagggcgcgtactgaccaggatgtcagacaagctcaaggaacgcaaagtgagtcggctgagcccaaatggcacttgcgccctggtggtggaggcatctgactcaccgacccgccacttgggtggaccgatggcagggaagtgcccgcacgggactttgagtgtggaggaatctcgagtggtttgggaagggggtggggtagagagaggagggtgctcaaccaggtagaagtcctgcctggaggctggcggccacctccccaaaggcctgggtagggtggctggaaggggagcgcgccagcgcgggcgtcagaaggcagagctcacctggcccgagcgtggcgggccaggagtcccttcctagagcgaatctgagcagtgtgcgcggctggagaggcggcttgcacccagctgctagagccgcgcctttgacgacttcccgggcaaagccatcctaaacatacaaccctctcttcgcagagaacccccgtttctcataaagtgatagaaaagcggaggagggacaggatcaaccgctgcttgaacgagctgggcaagacagtgcccatggccttggcgaagcaggtaacgttggcgacccggagccgggtgccaggcgttgggaggcctctgcggccactctgcggagacgcccgagcccgcggacacagaggacctcacttgcgggcccctcccaggcggggggcctgagcgcagggcgaacctcaggaggctctggcgcagatccgcagccgcgtccgctcgctggtcctctccagcgccacagtgcccgaccagcaggcgctgggccgctgcgaggggcccttcctccttttgcagagttccgggaagctggagaaggcggagatcctcgagatgaccgttcagtacctgagagcactgcactccgctgattttccccggggaagggaaaaaggtgggcacaggttagggaatgggacgcctgggccaggcgcctgcgccacccagagaccctggggctgggaggggagtgactgagtgttcccgagagctctactagagctccactctccaggagggcaggggtcctgcgaaggcgcctctccctgctcggcgacagcaaggcggcgagggagaactggttcccagggaggctggttccacctccttctcccgggtggggtgggtggggtcaggctctcagggaaagagggcgtttgcgcgtgcctcgccagtctctaagactgcgcagaggagagggcgggcctcaaatgggaactttggccagaaaatgtggtgggaggtgccctgcacccgctttgggctcgcgtggggaaggggcactcagggtgtgtccgtcctacgggctttctcgttcctccagcagaacttctagcggagtttgccaactacttccactatggctaccacgagtgcatgaagaacctggtgcattacctcaccacggtggagcggatggagaccaaggacacgaagtacgcgcgcatcctcgccttcttgcagtccaaggcccgcctgggcgcggagcccgcctttccgccgctgggttcgctcccggagccggatttctcctatcagctgcaccctgcggggcccgaattcgctggtcacagcccgggcgaggccgctgtgttcccgcagggctctggtgccgggcctttcccctggccgcctggcgcggcccgcagccccgcgctgccctacctgcccagcgcgccagtgccgctcgctagcccagcgcagcagcacagccccttcctgacaccggtgcagggcctggaccggcattacctcaacctgatcggccacgcgcaccccaacgcccttaacctgcacacgccccagcaccccccggtgctctgacgcccactcgcccgccagatttctcct

SEQ ID NO: 110952 - DNA, 30 bp, Homo sapiens; identical to SEQ ID NO: 41187
  chr4:185942231-185942261
  hyper

SEQ ID NO: 110953 - DNA, 7 bp, Homo sapiens
  chr4:185942465-185942472
  hyper
caagtgc

SEQ ID NO: 110954 - DNA, 270 bp, Homo sapiens
  chr4:185942491-185942761
  hyper
cgcccgcgggtctggaatgcggcgaaacccgggccagcggggcgcgtggctgagtttacagaattaaaaatcctctaaaaaataccggaaccaagtacagttctgagttgcggattagaaacaacatcgttgatgacaactgctcagcgccagaggcttccgagaagctggcgttgccttttgcgcacagagcaggccagcttcgggggcgctgggcgtctcggcgagaggtcggcacctgccgggttgggagacgccccttccccaccc

SEQ ID NO: 110955 - DNA, 70 bp, Homo sapiens
  chr4:185961213-185961283
  hyper
aagggaaaaggaagtgcgagtgagcgcgtgcacacacacacaaacacacatgcacgcgccttctaatgag

SEQ ID NO: 110956 - DNA, 627 bp, Homo sapiens
  chr4:186049492-186050119
  hyper
tccaggcgtgagccccgcgccctccccttgcggagattcggcctggaaagctccgcggctctggccggcaccggtttccttcccgcctccccgcactcccacccccgctcctagttcagagcgctggtggcgttacccacagccgcggaatcccctttactgttcccggaggagctgcgaggtggaactggccgcgcggtgggggctttccccggccccgggacgagcactcagcgtcccctccccgcgacgctccctcggaatcccggggaagagcgcagcagaggcggggaggaggcgcgagcggaggggaccgacttccaccgcacctgggtgtcgccagccccgcctggccctcggcgccgggaccccgacgcaccccgcgcatagcgactggtggcctggtgggggactgcgcctgcgaggccttcttcgcgcagagatatcggggttctctgaaccccagaaatgggcctggcaggggaaggaagctgcaagaaaggagttaatctgcaggatgctcaattctttctatgacaaatcgcttcactccccgctcggcaggtcagagctaggggtgaccgagttacgccgcgggcgctgcctgagcaacgctttctaccgcgg

SEQ ID NO: 110957 - DNA, 55 bp, Homo sapiens
  chr4:186064210-186064265
  hyper
atgtgccctttaaacgtcccaagttgcagggacagcccccggcccagcctcgctc

SEQ ID NO: 110958 - DNA, 30 bp, Homo sapiens; identical to SEQ ID NO: 41191
  chr4:186124744-186124774
  hyper

SEQ ID NO: 110959 - DNA, 69 bp, Homo sapiens; identical to SEQ ID NO: 3724
  chr4:186130482-186130551
  hyper

SEQ ID NO: 110960 - DNA, 80 bp, Homo sapiens
  chr4:186317079-186317159
  hyper
gggagcagctctgacgtcagtagctgccatcggaagtcaggtcatgttctacaaaaagcagtgacgcacgcccgacagca

SEQ ID NO: 110961 - DNA, 30 bp, Homo sapiens
  chr4:186346795-186346825
  hyper
gtgtccaaggtggccgaggcggggtgcaca

SEQ ID NO: 110962 - DNA, 345 bp, Homo sapiens
  chr4:186347191-186347536
  hyper
cgcggacggcgaggcggggcgggtagccgaagacttatgtttggtaaattctattagttaagtcttttctgtcctacagaagctcacacatccttctgtgtgttcttcgatgcggattcgaatctcctcgtatcctcccacagcgtgcttggaatggattctcccgtacccggggcaacacatcacacaataaacgccagctgtggtggaacgtgcagaggcgctgcgcagcccaggcgtgtcgcgcgcttgggaaccctcgccgctcccgcagcgcagttaacgtggacaagctggggcaacctggacgagctggggcaacctgatctcggctgtcggagtggg

SEQ ID NO: 110963 - DNA, 109 bp, Homo sapiens
  chr4:186434978-186435087
  hyper
tctctactgagagacgagaaggaagagcttgctccttatcattctggcttgttcacctgattccttcctcctaaccggggctggtttccatgctcgctcctgctggcag

SEQ ID NO: 110964 - DNA, 892 bp, Homo sapiens
  chr4:186455982-186456874
  hyper
acgcaggtcgtgccccgcgaacagcgcgctgctgaacttttcatccggacgagaaaaacgctcagatgcgcgccagctccagggaatgccggggggtgccagtccctcgcctctcccacccgggacccatcatttgttacggaagggcgatggggtgtgttttatttctgttatcacatataaaacatttaaaacctaaaggggaggaggcactcgagcctggcagcctcgccttccctgagcccagtggctctcctcggaaagtcgctgcggacccagaggatgggacacctttagagcggactttgtcaaatctctgagccgctccgcagccacttgacggagttgccgccgcccccggagctgggcgccgaagcccgggagccagcagcgccccgtccgcccgccctcgcgcgctttctggccgccctcggccccggggcatccactgcgtccccccggacgccgccggagtccccacctcgcagcaaaagcaagaatgccgacacctaccctggtgatgaccaaaggctggttgaagtctatgccccctgagagcctgaagccccagggcgcagggcccgggaggatcaccgtctggggcatgccgccttcctcccgcccaccgggctctaagtgtccccgcgcagggcagccactccgcgccgggcggcgtcctggccccgacccgggcgggggcgctttatccccgctgggggtgacgtcaccgccccgccgtcctccccgccccctcccaccccggagagctccaactttggaagcgagagccgcgccagccccgcgggagtgcgcagcccggccggctggggcagcctcccgggccgcggcgggcgcgggggcttcgggttacagcgtccgtcgctctcttgaa

SEQ ID NO: 110965 - DNA, 210 bp, Homo sapiens; identical to SEQ ID NO: 3726
  chr4:186706013-186706223
  hyper

SEQ ID NO: 110966 - DNA, 30 bp, Homo sapiens
  chr4:187025871-187025901
  hyper
ccgggtgtgttgaacgtagcaaccgcgggc

SEQ ID NO: 110967 - DNA, 30 bp, Homo sapiens
  chr4:187026155-187026185
  hyper
ccgggccgcctcggccggatctccgcggtc

SEQ ID NO: 110968 - DNA, 416 bp, Homo sapiens
  chr4:187026477-187026893
  hyper
ccgccagccgcgccgcgggagcagtggggaccctgctctcttggcccagtagccctagagcgggtaaagccccgccccagccccccactccctccggcgggggctgctcccctgctcgcctggtggtcccagcgcggccgccctcgggccccggcggggtctgggccgcgctccccaggaacccgctccagcctggccccggagagcgagagctcggcgcctgcgtggcccccggggctggccccagaaccctgttccttacgctgcctgacatcggcgaggagggggcctcggacggcgactccggggatggcgaagcgtgagtagcagcgtggtccgggcgcgtgtaccttttgccgggacccccgacccctccgcctgccgcactcaccttcgcaggtgcacttcaggaaatg

SEQ ID NO: 110969 - DNA, 31 bp, Homo sapiens; identical to SEQ ID NO: 3727
  chr4:187066081-187066112
  hyper

SEQ ID NO: 110970 - DNA, 30 bp, Homo sapiens
  chr4:187066415-187066445
  hyper
ggggaagcgttcgccgccaaagggactcct

SEQ ID NO: 110971 - DNA, 30 bp, Homo sapiens
  chr4:187112130-187112160
  hyper
ttctgcgagtaccccgcggctgcggtctcc

SEQ ID NO: 110972 - DNA, 30 bp, Homo sapiens; identical to SEQ ID NO: 41200
  chr4:187639298-187639328
  hyper

SEQ ID NO: 110973 - DNA, 881 bp, Homo sapiens
  chr4:187644342-187645223
  hyper
cactccgcagtccaccggttgcatctgcacctccgggcagcgctcctgcagggcgcaaacacccagagacccagggacccggcagccccgcgcaggcctcccgcgtgcaccgctcagcgagcgggtctttcgcagacggcgggatgccccaggagaccgcgaggccggcgcagcccggcgagctcccggagggaaggcggcgtgtcagaaaggatcggaccccagcaatggccccggatcggtcccgcgcggtcgcctccttttcccgctccgccgccgggacccccctagccagtgctgaatttcccaactgggaaggaccgagtcactccaccctccgggaagtcgcgcgctcatccgttttcggcagcgccggagcccgagccggggaccgggcggacacccacagagtccgcaccgcagcgcgctgcacgctctcgcccccgcccgccggcccgcgccccagcgaactaaccgcaaagttggcccgaagtggcgacggcgctctcgtggagctcacccgccgtctcagcgcgcccccgagcagggaccgggcctgccggggccctcgccgggctcgcgcgtccgcatggtacctgccgcacgagccgctcccgcgccctctccccgcgcccggccgcccagctcggcgccggcgcctcacgctccccgagcgcaggagatccctccgccccggccccgcccgccggcgccggcgctcatttctcgggcgcggaaactcgagcccactttccccggctgccggctctgggaccgcgggctcggccacgcagtcccgcccggacccaaagagccccagtccctgcgaacaccaggtccgtgctgggagacgagaaggcgcccagcggggtctagcgcgg

SEQ ID NO: 110974 - DNA, 566 bp, Homo sapiens; identical to SEQ ID NO: 41202
  chr4:187645504-187646070
  hyper

SEQ ID NO: 110975 - DNA, 177 bp, Homo sapiens; identical to SEQ ID NO: 41203
  chr4:187646284-187646461
  hyper

SEQ ID NO: 110976 - DNA, 1658 bp, Homo sapiens
  chr4:187646715-187648373
  hyper
gtcgccacaggagccgccgagagccagggatggagatttcagacttaggactctgccacgattctactgatccttaagcgccaacagaacgaaatggacatgcctattagctaccacaaatcgaattattttatatgagagagagaaatgtggttcaagttccacatttgtcctttaaataatcgaccctccctaaccctgtccccaaaggctcgtggaaattagggagggggttggggagacggttccagaaacaaaacgctttcctccagcacggcctctacatccagtccacccaagctgatttttgtaactcatataaagaatgggcccgggtgggtggtcagtgaagactggggtgagcaagcgcccacgtcgccgagcgccggggaggtccaggttcgcctccgcacagaaccctgcaaggagcgcgcctcgccaggtgcccggactagagggcgctgcgcccctgcaaatctcgcggccccgatgcgccctccctaggcaccattgctataataagttacattcaaaataatgcacaaacagcatcgcctctcaagttctttttaacagtgctctatatgtattttatgaactcccaaagctatgcatacgaatctttcatcgccgatccgcacaaagccagagggatgcgcagctcctggagccgagaacccgtagggcgcacacgcttccccgcactcgcttagagccacacaccccacgtaatttcattaacgtttaaacttaaatgccaaaaggcatgcacgatttgaacaaagaactcaccagtctagccgagtcctcggccctgggctctaaagtcctcggcagctccgtgatcccctcgcggtgtagatatgtgttaagagccgggtttgaagtaccaactttgcctccccgggatcttcagcatgtccctaaccagagtgccaacgtccgtgccgccgggacccaggcggccgcatctccggaggcttccgaccagggcaaacttaagcaccaaacgcaggcgaaaagagagtgcgcggggccggaacgagggcccgggagcagccaagtttgtcaggacgtgcccaggcagccagccgccgagttgaggagttgcggccgccggctgcggcgactcgctgcctctttccccactccctcccccttggaggcggtgggggaggggaggtgacgtcagcgccccgcctcgccccccgccccgggcgcggacgggattctccggctgggcgcgccaccccgacagtggcagcagcggccgtggaggctgcgggggtcccggcctctgcggtctctctggccggccgcagctgtggcgcgggtgaaacgcccgccctcctccttcggctgcgtctcccgggcgccggcgagcgcgggcgttcctcgcactcagcgcctggagccgcctggagccccgctgcgcgcacttccccggctcgcggagcccctccggcggcgtttcccacgccgcggactgcaggtgatgctcttcctcttctgcagccgaaattcgtcgcgatgtgtcgcctgccagatttttgctgggcggaagcatgaacagtctctgcagactggcctggacgacttgtactttgtggccctccaacttctggatgtgaattttttttcacgacttattattatgc

SEQ ID NO: 110977 - DNA, 31 bp, Homo sapiens; identical to SEQ ID NO: 3733
  chr4:187855389-187855420
  hyper

SEQ ID NO: 110978 - DNA, 30 bp, Homo sapiens
  chr4:188953628-188953658
  hyper
caagttgaacgaattcggcaaccacctcat

SEQ ID NO: 110979 - DNA, 30 bp, Homo sapiens
  chr4:188953911-188953941
  hyper
gaatggaaagcctggcgctgggagagctgc

SEQ ID NO: 110980 - DNA, 87 bp, Homo sapiens; identical to SEQ ID NO: 41207
  chr4:190123534-190123621
  hyper

SEQ ID NO: 110981 - DNA, 398 bp, Homo sapiens
  chr5:53500-53898
  hyper
cgagtccccttctcaggcaggctgtgggggttggggttgggcttcgcgagcccaagcggacgccgcaaagagaatgagaacctcggagcgctcggggcgggcgggcccagcccaggctcttcctacccctgcgggggtccgagggccagcggcatcggcggcgggaggagggggcgggggcggggaattagggggaggcgggtgttaaagaggagaagggcgggggcggagggggaggaggagacggggcggggaggacccccaggtttccgagtctccgcccgggctttcgttcccggctgtgtggccccgcgcggttcccgagcagctccaggaactgaaacgtgaaggggacctcggtgcccggagctgctgcccaggtaaccgcgctgcgcccg

SEQ ID NO: 110982 - DNA, 489 bp, Homo sapiens
  chr5:54002-54491
  hyper
cgccggaaccggggaggaggctggggaagagaaaggggcagaggggcgggcccgggggccggggccgagggggcggagcgcgaagtttccagagggaggatttgagctgctgagaccgggggcggcgcctggggacgccggagatccgctgctccccgggacactcacctgctgcccggcgctgcgggaggagagcgcggaaccgggagccctggaaccctggcccgactgctgagcgccccgtgggtcctacgctcccgcgccttctagggaagcccctaaagttggtgagtcccctagaaagcagttcctctgtggctacgtccaggacgaacaaccaaaaaccgccccagccccccaaaccccaattgccttattctgtttccacttgctttagcccccacgctcctgtgtgcgagaggggcctggtcagactgcagaccccacccaggaggaggaagaggaaggggccgccgtggcccgggcacc

SEQ ID NO: 110983 - DNA, 30 bp, Homo sapiens; identical to SEQ ID NO: 41210
  chr5:91993-92023
  hyper

SEQ ID NO: 110984 - DNA, 229 bp, Homo sapiens; identical to SEQ ID NO: 41211
  chr5:92361-92590
  hyper

SEQ ID NO: 110985 - DNA, 30 bp, Homo sapiens; identical to SEQ ID NO: 41212
  chr5:188656-188686
  hyper

SEQ ID NO: 110986 - DNA, 30 bp, Homo sapiens
  chr5:219112-219142
  hyper
gcctttccagaaagcgcaaatctgtccatg

SEQ ID NO: 110987 - DNA, 30 bp, Homo sapiens
  chr5:271569-271599
  hyper
gcgcaggcggcctgcgccaaagctctggct

SEQ ID NO: 110988 - DNA, 1253 bp, Homo sapiens
  chr5:320794-322047
  hyper
tgacagcctcggccgcgttgctgaaaaccgaccttgcgggatgaagagggcgcggttcccccggctgggatgaggaccgcggatgctgaggagcggactccagggaccaccgactccatggccggccccagcgagggcgagaacgggtggaagccggccagggtctgtggagacgtcagggtgcgaggccaggctgaggtgtccccagggatcccctgagggtacagggaattcagccagggcctgcgcgcccggacggaggactagagggggccaaggaccaccgggagggggaaggagaaggcgcagcccgaggtcggaggggccggcgggcgcgcagagggcgcggggtgagccctaaggacctgcaggcaggaccctgctctcggccgcgcggtcccgggtgccgaccggcggggtgggcggggcaggggcacccagggccgcacacctgccgcgtgggaccctgaaatgcccaggacgaagaacgtcgcacggacgaccctgccgtgcctggcgcgcgtccgcttcctgggaagctcaggatccaaaagcatcttaatattctctataattcgccaaaaaccatgactccttttacattttcgaaacgacctcatggggcaggcgagggggcacacgctctcctcactttacctgttcgggtctacaccgcccggctctagggccggcagctcagcacagccggccgcgagcgctggggaggggacgggggcgcagggagaaccgggggaccctgggcgcacacagaccccagggggaacgcagggcctggaggggctcagcgcgcgacccccgcctcggggcacggagactccgggggatcactgggacgcgaagggcgcagggcggaccccaggggaaccggatggcgtctccggttcgccagggcagctggggcagccggacccgagacagccggacccgcgggcgccctctgccgcctcccggccctggatgctgcggggcggggcgggcggctcgcgtgccggggtggggcagtccctggagccgccgcgggttcccgggatgcgagcgccggcacccgccgccacagctcctggccagggcgcgctgccccgcgggtgtgcctgagcctccgcgccccgcaggccctgggtaagtgtcctgggcgcccccgcaggcccccgccgcgtgccgcccgcggtggagacgggatgcgctcccgggtgtggggctgagggacgggcgccggcgtcgggaccctcctc

SEQ ID NO: 110989 - DNA, 190 bp, Homo sapiens
  chr5:322061-322251
  hyper
cgtcgccaggcccggcggccccgggacggggcggacactctggggtgcggctggctggtctcacttaaaactcggacctcggagggaagccgcggcgcgtccacggttcgtggtcctcagcgtcccctcgagagtgttctgagccttcactccccgggcgttccgtgcgggccgcgctccctggggctgg

SEQ ID NO: 110990 - DNA, 2 bp, Homo sapiens
  chr5:322265-322267
  hyper
cg

SEQ ID NO: 110991 - DNA, 534 bp, Homo sapiens
  chr5:343970-344504
  hyper
gcgcgttccggtgaccgggtgcccccttgtcttccaggccgaggacgatgatcccgccgggggagtgcacgtacgcgggccggaagcggaggaggcccctgcagaaacagtaaagtatcccgccttctgcttgtgtgggttgttgcacccatggaaggggagggttggggtttgccttgaaaacggagttttaggaacagggcgagcgaggaaggcttcgggagccgggcgggccggggctgagctccggcgcgggcggcgcaggagtcgtctccccgcagcgccccggtgcccggagcccccggcgaggctcgtccctgcgccctcggggccctgagcggtggagcgaggcggcgggcaccgtgaggcgctgaggccaaggacgcgggcggagctccgggcggcagaggcggaggcggcggggccacggcagcttcccaggctccgcaggcgagaccgccacccgctgggacggagggtgtggcacggccgggtgtgtgcgtgtgtggcgaggctatgcgaggctgtgtgtct

SEQ ID NO: 110992 - DNA, 83 bp, Homo sapiens; identical to SEQ ID NO: 41215
  chr5:368380-368463
  hyper

SEQ ID NO: 110993 - DNA, 30 bp, Homo sapiens; identical to SEQ ID NO: 41216
  chr5:372537-372567
  hyper

SEQ ID NO: 110994 - DNA, 266 bp, Homo sapiens; identical to SEQ ID NO: 41217
  chr5:373103-373369
  hyper

SEQ ID NO: 110995 - DNA, 30 bp, Homo sapiens; identical to SEQ ID NO: 41218
  chr5:374237-374267
  hyper

SEQ ID NO: 110996 - DNA, 286 bp, Homo sapiens; identical to SEQ ID NO: 41219
  chr5:374578-374864
  hyper

SEQ ID NO: 110997 - DNA, 268 bp, Homo sapiens; identical to SEQ ID NO: 41220
  chr5:377104-377372
  hyper

SEQ ID NO: 110998 - DNA, 30 bp, Homo sapiens; identical to SEQ ID NO: 41221
  chr5:393543-393573
  hyper

SEQ ID NO: 110999 - DNA, 30 bp, Homo sapiens
  chr5:443182-443212
  hyper
ccccgagctgaagtcgctcggccgggagac

SEQ ID NO: 111000 - DNA, 30 bp, Homo sapiens
  chr5:443588-443618
  hyper
gcaggtgtcctccccggcacatgtgtcccc

SEQ ID NO: 111001 - DNA, 1688 bp, Homo sapiens; identical to SEQ ID NO: 41222
  chr5:472579-474267
  hyper

SEQ ID NO: 111002 - DNA, 30 bp, Homo sapiens
  chr5:474740-474770
  hyper
gagagagacagcgcgcgcgaggcggagacc

SEQ ID NO: 111003 - DNA, 1563 bp, Homo sapiens
  chr5:490615-492178
  hyper
cggggaccattgtgacgtggccacagagccacggagtgtgcccggctctcaaaggagcggccctgacggccagactgatcacaggctactccatcccacactcgacacagctgggaggaagctgggatctcatgggcgaggggccatctggcaaggtaggtgtgagcctcgaggggccgcgggtccaggagtctctgctacaacccctgaggctttcccttgggtgcggtggctagggcggctgccccatccgaggtgtgtcctgaccacctatggcatcgcccacgtgacgggcctgccatccatgagcctgtctgtgccctcggcagctttccctgggctgcacctggtgggtgatgctggacggcagggactacagggaggggtgagaaggcgccaaggaaccacgtgctgggtgaggcggccccaacccgggagctcctctttctccatgcgtctccttggtctcaggtttcagccccttgattcccatggagaggccgggccgtgctctctcttgaaccagacggaaaatcgccaattcttgtgagtctggttcagctggtggatttgtttgaggctgagttctcagaccggtgagggcggcaggtgccggaggcctgcgctcagccgtggggcccagctggtcaaagctaggctctgcctgaggtccctggacccacctggtcaaagctgtagcatccccggcagcagcggcgggcatcagggctgcaccgcacctggcatgttgagaggcgccagccacgcgtggtctgggtccggggcgggaggcagtgcccgagagatgaagcatccaagaccaaaaccgcgcagcagttctggctccggctgtggctgcagcggtggccgagcggctccggcacacaggctgggagggacggtgcccgatacaccaggctctgcagtcctcctcctctccctgggacctggtggccggcgagtgtggacggacccctacctctgcccagtgccggaggaagagcggcagcccctggccacctgcagcccccaagccgagctgccgagatgggaactcctccccaagcagaacacgtgctgggacctggggacgcgcaggggactggccttggtcacgagggcctacggggctgccagccacgtttctcacctgacacttaccgcctggaggccagggtgcggcaccccgacctttctgagatgaggcagcgccgcccctcccggaccccaccctgatcccggccggggcaacagtggcgcagactcacccatgagcccactgaggaagacgccgtagagggacagcccggtggtggccgcgttccacacggtacccacgacggcgtacaacaggatggtccccaggttgccgaagaagaggcggttgggcatgaagtagccggcgtccagcacgatggggggcagcaggtagaagaagaagacggtgggcgtcagtgtgaaggacgcgatgtggtcggccgcccagacgatgccgcccagcaccaggcccagcacgatgagcagggcgctctcgggaaccacgctggtgaccttgtgggacag

SEQ ID NO: 111004 - DNA, 113 bp, Homo sapiens
  chr5:523689-523802
  hyper
gaagagaaatctgaccgaccgggattttctaaaaaaaaaaaaaaaaaaggaggcccgccaatgggaacgctgcgcctgtagggaggattctgctgggtttcatgcgggtagca

SEQ ID NO: 111005 - DNA, 998 bp, Homo sapiens
  chr5:523856-524854
  hyper
cgtttctctaaaaagcctgagaaccccgaaggaaacccggccccggggactccctgggcgcgagcagcctgcagtctgcggggctcggagcggaggcggggcggagaccccacagggacccgggagccgggagtccggggctccgaggctgtgcccccgccggggaggggagacctcgggacccgcaggggcggcttagcgcggccagagtcgctcccgagtctcgctctgctggacccgagagccggactctcccgggcggccgccgcgcggctccgacctgatgcgcgcggccacaacgaagcccccaggcccagcagaggcggccgcacaccccgcgggcagatccggagaccccggggccacttaccgatcttggccaagctggccacgaggatccagagcgcgatgacgtagggatcctgcacgtgggcccactcgaaggtgaccacctggaagcccccgctctcgccgtgcgcgccgccgggctccacctcgacgcccccggcccgcgccagcccgcccagcgccagcgccagcagcagcccccggtcggggccccgggccccgagtccccacattgccgcctgctcagcgcagggctgggacgcgcatgtcgcggggggtcccggctgggctgggccgacgcgcggggctgggacccggcgaggacccggcgcgctccggtgccggtaccggctacagtccgatccccgcccgccggggtggcctttaatcccgcggccccctcccgccccggggcggagcctgcccgcccccgccgcgcactcgcgagcgcagacaccgccgcagctcccggcacgcccgccccgcccgcgcacgcccaccccgcgctccctggtgcccaccctcccccggagcccgcggcctggaggtccgggaggtcgcggcaagagcgagcccgggactgcgcggccgccttcctggggcgtggggagcacagcgcggggcagcgggacaggcggttccgcgcagct

SEQ ID NO: 111006 - DNA, 4 bp, Homo sapiens
  chr5:528888-528892
  hyper
gaag

SEQ ID NO: 111007 - DNA, 30 bp, Homo sapiens; identical to SEQ ID NO: 41226
  chr5:530631-530661
  hyper

SEQ ID NO: 111008 - DNA, 30 bp, Homo sapiens; identical to SEQ ID NO: 41227
  chr5:611996-612026
  hyper

SEQ ID NO: 111009 - DNA, 30 bp, Homo sapiens
  chr5:612189-612219
  hyper
cctagaaggcggccgcgcccagggaagcct

SEQ ID NO: 111010 - DNA, 52 bp, Homo sapiens; identical to SEQ ID NO: 41228
  chr5:612240-612292
  hyper

SEQ ID NO: 111011 - DNA, 799 bp, Homo sapiens
  chr5:676504-677303
  hyper
atggggcgctggcgccgcagaggtgggccccacagccttccacacaggggcatctgacccacggcccggccccttgcaaagccaaggccgcagagggggaaggtgcaggagctctgagatgaaagaggtgatgagtttgcggcaatgtaggaatgaaatacatcggccacaggaggacgcaggtgcaaaccaccgaaataaagccattgccacacaggcggacaggacggggctcagggagaaccgctgcttttctcgggtgcgatcatggtggggtgtcgggacatgaggtgaaatgtgctggggcgtgtgagggtgcctcagtgtgcttcccagcattcatccaggagaaaacagacaatgcgtgacacggcaacagacgtgtgcacacatgacacagaaacgcacgtgcacatgcagaaacacatgcacacatgcgcacacgtgcacacacgacacagaaacgcgcacacacgacgcagaaacatgcacacacgacgcagaaacgcgcacgcgcgcatacacgacgcagaaacgcacgcgcgcacacgacgcagaaacgcgcacacgtgcacacagaaacgcacacacgacgcagaaacgcgcacacgtgcacacgcagaaacgcgcacacgtgcacacacgacgcggaaacgcacacacgtgcacacagaaacgcgcacacgtgcacacgacgcagaaaaagcaaacggcacgatgcggtttcaaggtggtggccggagccgcctccttggtgccctttgccattttgccgcccgtgggaatcctggggcagaaa

SEQ ID NO: 111012 - DNA, 36 bp, Homo sapiens; identical to SEQ ID NO: 3744
  chr5:693797-693833
  hyper

SEQ ID NO: 111013 - DNA, 30 bp, Homo sapiens
  chr5:893007-893037
  hyper
gctagggcggggcccgcgggctgaggcagc

SEQ ID NO: 111014 - DNA, 30 bp, Homo sapiens
  chr5:893416-893446
  hyper
acccgagccctgcgcgcaggaccccagctc

SEQ ID NO: 111015 - DNA, 226 bp, Homo sapiens
  chr5:923603-923829
  hyper
acagacaggggcctgcggacagacaggtggaccccgacaggcccagataggaagcgcgttgtggcatttctgccgcaggacccctttcccttgcccgctagagggcggcgctgccccagagacgcacagccagcggcttagccaaggccccagcaccagcggccctgggccctgccctgaccctgtgctgactctgcagcagcctcagctccgagtcctagtgtct

SEQ ID NO: 111016 - DNA, 228 bp, Homo sapiens; identical to SEQ ID NO: 41232
  chr5:1004764-1004992
  hyper

SEQ ID NO: 111017 - DNA, 30 bp, Homo sapiens; identical to SEQ ID NO: 41233
  chr5:1005277-1005307
  hyper

SEQ ID NO: 111018 - DNA, 30 bp, Homo sapiens; identical to SEQ ID NO: 41234
  chr5:1008894-1008924
  hyper

SEQ ID NO: 111019 - DNA, 648 bp, Homo sapiens
  chr5:1009129-1009777
  hyper
ccctgcacctgagcgcggggcccggcggggcgtggcggcggcgatggggaaactgcagtcgaagcacggtgagccgcgggccggtagggcgggagggcgggcgggcgggcgtggggccgcctctcactgtcgttttcctctccccgcgtcccgccgtgccgcagccgccgccgcccgcaagcggagagagagcccggaaggtgagcgggcgagccgacgggcggggcggggggcggcgacccggcccgggaccctcagagctaggagcccgcgcgcgtcctgccctggagccagcagtggggggacggggccgcgggtctccaggagcgcgcgggacccccacgcctgcccctgcgcggtctccaggcgatggggacacagcgaaggcgcagcgcccgcggggctcacggcgcgtctctttccctcctcggtgcgggtttcccgcgcgtccgcccccggaccgcaggggacagcttcgtggcgtccgcgtacgcgagcggccgcaaaggcgcggaggaagcggagcggcgcgcgcgggacaagcaggtaggcggcggggcggaggctggggtcgcgctgcgcacccgcccgggggcggggagcggtgtcagagctgttcctggtgcccgcccgcggacaggcgagacg

SEQ ID NO: 111020 - DNA, 220 bp, Homo sapiens; identical to SEQ ID NO: 41236
  chr5:1061581-1061801
  hyper

SEQ ID NO: 111021 - DNA, 2199 bp, Homo sapiens; identical to SEQ ID NO: 41237
  chr5:1064041-1066240
  hyper

SEQ ID NO: 111022 - DNA, 312 bp, Homo sapiens
  chr5:1104735-1105047
  hyper
ggcccactctcatcccggaccccaggaccactccccacagagccgaggcccaccggggggtgcgtgtggggtgcgtgtggggtgctgcccaagaaaaccccagaacgcaggaaacaaaccaccccaggtccacacgtgattcagaagcagcactctcctccccacaactgtttcctcaaaaagacaccgcccaaggggagagcggaaacaggcacgggctggcaggatgggggcccacgtcacagcccagggccgcaagcaccactcggaccccgagacccctgcaacggcagcacacgcccctccccgcag

SEQ ID NO: 111023 - DNA, 1021 bp, Homo sapiens; identical to SEQ ID NO: 41238
  chr5:1111380-1112401
  hyper

SEQ ID NO: 111024 - DNA, 36 bp, Homo sapiens; identical to SEQ ID NO: 3752
  chr5:1140551-1140587
  hyper

SEQ ID NO: 111025 - DNA, 961 bp, Homo sapiens
  chr5:1155506-1156467
  hyper
agcgaggtcagagggcgccccgggagctgtcggcccatccccgcggcccctgccccggctcggtgtcacctgcaggccccggacagggcgggatccccgcagggaactgccccaggtccccggagcgcgcggcgggcggcaggggcggggctccgctgggctggggggaccccaggcagggaccgacccccgggctgaccgggagccccacccccgccggcccgccaggccgccgccgcccacctgcgcccctcgaggggaccggcacctgcgcgcacctaccgtagcggccgggctcgcggcagtagagcagaatgggaagcgggtcctcgtcaggcggctcgggcgcggctgcggggtccaggccggggtcgggggcccggcgggggctcggggtggggcgctggctgtcgccttccttggccccgggccccgcaccccccgccgcgggggtcaccacgaagcgctgggacatggtgtccgcgacggctgcggggagcggggacctgagcgcggggagggcggggccggcggggcgggcgcgggaggccgggaggaagggagggaggccgggggggagagagggaccgagcgcaccgccggggatggggccgcgcggcgcggggaggggccgggagggcgaggcggactccggctgacacctcggcagcggtccctgcccgcggggggaccacggcctcggcccccgaagaacgaagagcggcctcggctctcgctgcgtgaccttggagacgccccagccgggcgaccgggtcagcgcgcggtgcagaagcctgaggggaggaacagacctcgctctgcgccgcctggaaccgacgacgaccaaccctggcagcaacgctgcagcccgcggtctctggcgacgcccaccgagggccgggaccagggggccggtgagggtggaggtctcgctggcctttgggtccgtggggaggggcgc

SEQ ID NO: 111026 - DNA, 31 bp, Homo sapiens; identical to SEQ ID NO: 3753
  chr5:1174065-1174096
  hyper

SEQ ID NO: 111027 - DNA, 30 bp, Homo sapiens
  chr5:1247076-1247106
  hyper
tcctggcttcctgccgccgggaggggccct

SEQ ID NO: 111028 - DNA, 370 bp, Homo sapiens; identical to SEQ ID NO: 41241
  chr5:1279434-1279804
  hyper

SEQ ID NO: 111029 - DNA, 246 bp, Homo sapiens; identical to SEQ ID NO: 41242
  chr5:1294070-1294316
  hyper

SEQ ID NO: 111030 - DNA, 728 bp, Homo sapiens
  chr5:1294714-1295442
  hyper
cgttcttcgcgccgcgctcgcacagcctctgcagcactcgggccaccagctccttcaggcaggacacctgcgggggaagcgccctgagtcgcctgcgctgctctccgcatgtcgctggttccccccggccgccctcaaccccagccggacgccgaccccggggaggcccacctggcggaaggagggggcggcggggggcggccgtgcgtcccagggcacgcacaccaggcactgggccaccagcgcgcggaaagccgccgggtccccgcgctgcaccagccgccagccctggggccccaggcgccgcacgaacgtggccagcggcagcacctcgcggtagtggctgcgcagcagggagcgcacggctcggcagcggggagcgcgcggcatcgcgggggtggccggggccagggcttcccacgtgcgcagcaggacgcagcgctgcctgaaactcgcgccgcgaggagagggcggggccgcggaaaggaaggggaggggctgggagggcccggagggggctgggccggggacccgggaggggtcgggacggggcggggtccgcgcggaggaggcggagctggaaggtgaaggggcaggacgggtgcccgggtccccagtccctccgccacgtgggaagcgcggtcctgggcgtctgtgcccgcgaatccactgggagcccggcctggccccgacagcgcagctgctccgggcggacccgggggtctggg

SEQ ID NO: 111031 - DNA, 95 bp, Homo sapiens
  chr5:1295604-1295699
  hyper
cgctggcctgatccggagacccagggctgcctccaggtccggacgcggggcgtcgggctccgggcaccacgaatgccggacgtgaaggggaggac

SEQ ID NO: 111032 - DNA, 30 bp, Homo sapiens; identical to SEQ ID NO: 41246
  chr5:1296240-1296270
  hyper

SEQ ID NO: 111033 - DNA, 30 bp, Homo sapiens; identical to SEQ ID NO: 41247
  chr5:1297472-1297502
  hyper

SEQ ID NO: 111034 - DNA, 30 bp, Homo sapiens; identical to SEQ ID NO: 41248
  chr5:1322071-1322101
  hyper

SEQ ID NO: 111035 - DNA, 30 bp, Homo sapiens; identical to SEQ ID NO: 41249
  chr5:1344442-1344472
  hyper

SEQ ID NO: 111036 - DNA, 30 bp, Homo sapiens; identical to SEQ ID NO: 41250
  chr5:1344893-1344923
  hyper

SEQ ID NO: 111037 - DNA, 30 bp, Homo sapiens
  chr5:1345293-1345323
  hyper
acgttacccgcccgcgccgccctcctgggg

SEQ ID NO: 111038 - DNA, 46 bp, Homo sapiens; identical to SEQ ID NO: 3756
  chr5:1345797-1345843
  hyper

SEQ ID NO: 111039 - DNA, 30 bp, Homo sapiens
  chr5:1385990-1386020
  hyper
tgcagggccggccgcggggcctggggactg

SEQ ID NO: 111040 - DNA, 51 bp, Homo sapiens
  chr5:1444711-1444762
  hyper
ccggcacgacccctccggtgggtaaaacacccgacgaaggggttccgcggc

SEQ ID NO: 111041 - DNA, 404 bp, Homo sapiens
  chr5:1444851-1445255
  hyper
cgctcctgaacgcggggcctcagaggcgagttttgggtctacacagcaaaatgtggcccgttagaaagcgtccttcctcaccgcgcccagaacaagaagcggcgctgcctggcgagtcctcgcccggcctccccgccctgcccagagcaccagcgcgcagcccgcgcccgccaccacccccaacacagacaaagcccccgcgagatggagcggcggtgtacaaaacccactccgatcggatctgggatgcgccgcacccctagtagggttaagttccacgagaagaaaccaggacccccgagtcacagccatagacacccacgcgtcccctaagccggtgactgcaccaggtgcccacccggttctgagcctggagcggggccaggggcagccctgcaccctcc

SEQ ID NO: 111042 - DNA, 30 bp, Homo sapiens; identical to SEQ ID NO: 41252
  chr5:1524212-1524242
  hyper

SEQ ID NO: 111043 - DNA, 30 bp, Homo sapiens
  chr5:1564148-1564178
  hyper
tccgagattctcctccgcacctccccctgt

SEQ ID NO: 111044 - DNA, 30 bp, Homo sapiens
  chr5:1564449-1564479
  hyper
agccttgacatgttgcggtgaccgcctgct

SEQ ID NO: 111045 - DNA, 30 bp, Homo sapiens
  chr5:1644585-1644615
  hyper
aaaacagagctccaccgcaccccgcaggca

SEQ ID NO: 111046 - DNA, 311 bp, Homo sapiens
  chr5:1645163-1645474
  hyper
ggcccacagcgccaccgtgtggtctccgcgtccccagttcggagccgcagcttacgcgctgctggccctgagcctgttcccttcctgcagtccccaggagctgacgctattcggtttgtttttaaacactccagctgagcaagcgtcttctcaggacgtcctgcgtgctgcccacactctcttgtggatggtcccccgggtccggcggaatcccgcctgggaaggcttccccgaagccttcctccatcctgggcagtggcggggcttgcaggaggcctcagagctctgtcggggccggacggaccgctgtc

SEQ ID NO: 111047 - DNA, 30 bp, Homo sapiens; identical to SEQ ID NO: 41254
  chr5:1654328-1654358
  hyper

SEQ ID NO: 111048 - DNA, 473 bp, Homo sapiens; identical to SEQ ID NO: 41255
  chr5:1667628-1668101
  hyper

SEQ ID NO: 111049 - DNA, 30 bp, Homo sapiens; identical to SEQ ID NO: 41256
  chr5:1668402-1668432
  hyper

SEQ ID NO: 111050 - DNA, 937 bp, Homo sapiens
  chr5:1800422-1801359
  hyper
acctagattctacccttagctcgcttatccctgccttttcaggtatctacccgtaactccattcgccttcctttttgtgtgtgtccgggtgagttgcagacgtggctgcgtccactccgcgctccctgcaggccccaacgcttcatcgcagcgcccactttttccacctgacccggcgaacaccgggcgggccgctggagtttatcagctccaggacaaatctgcctctgaccaccacgtttgctgggacatctttgggaccggaggttttcatgtgcattcttgtttctcatgcctttcctcctctttatcatcttccccgccactcatccatctctagtgttttgttcttggagtcacgtggtcctcaggctctgaccacagcaaaagaaaagctggatgctggagcttaagctgggatttatacccaagtcaactctaagcaaaacgggcctttttagaggctgtatttgcatgctgtaaaatcagtcggtgtactaggctttgttgcagaaatccccaatatacgtttcctctgcggctccccgtaaccacacacaggaacgcttgccttgaacgaggagaatgcacttccagtctcgtctgctaagcagttgactccttcacccaataattttgatatttaaatgtctcatgattatcggttaccataagaatataaacaatgtattttcagtttacatcctcccctgcctgtccgctaaataagaaccactgggtactcctaatcgctgaaggtttcgcacaccattgcctgcctcatcagggccctagctctagcctgcggctgcaactgcatgaggctgcacctgccggcgcaacggggccgcttaacttttaggccattgatgaaaagtcaaacaagcgcacagtactcggtgtaatcaggggcatttttagcgagatacctgggatg

SEQ ID NO: 111051 - DNA, 14 bp, Homo sapiens
  chr5:1851433-1851447
  hyper
tcccaggcagccgg

SEQ ID NO: 111052 - DNA, 43 bp, Homo sapiens
  chr5:1851534-1851577
  hyper
cgggctcctccggctgggagcgcacctgcgcagggagggtcct

SEQ ID NO: 111053 - DNA, 295 bp, Homo sapiens
  chr5:1851797-1852092
  hyper
ctcttctctgagtgacgttggaggttttcacggtgaacacagaaaggggcactccgtccgagctgagcctcagggaccgtgaggcttgctcttggccctgctgctcatacagccctccgtgcctcgcttccctcccacagcaaggaaggatgacgggtgcggggtctgcacggtggcgcggggtggccgcgttgctcaggaggcacttgcaggtcaccactgctgcttacacagccttactctagcaaggccctgggcagccacactgtgacactcggaacgtcacacctggcgt

SEQ ID NO: 111054 - DNA, 1721 bp, Homo sapiens
  chr5:1874585-1876306
  hyper
cagagtggagttggagggagacggtgagggactgggagaccgggatggggagagagagggaggccgggctgtctcgtcagcagcaggcgtgcccagggaaacgcaggtggcatacatcgcatgcataatctcaggagacggccactttaaatcttaattggttgccttttaaatatcatttaagggctggcttccctgcctctctctctagttaagaaggtgtcgtgtcaaactctattaccttgctggacgtctctcccttaagttaaaaaaaaaaaaaaaaaaagaaaagaaaaaagaaaaaaaaaatggaatcatcagccgcggtttgagaggtcgataaagcttttagatttggagacgttttccgggagcccatttcctgcggctaagagttgttaatggagcttaaggaattatcttaggccgggcggccgggagagccgtatatctcccgcgcctgttcccttgtcgagcctgaatatgctgctgtcagactcgcttaatgaaaagtaacgcaccgctgattacagttttatttgggctctatgtaaagagcgccgttaatttgcatcccctccttggtgtgtttgaattcgccacgcctgaataaccgagcgcgccggccctgccggcctcccggcgccttcccagcccttctctgacaatctccctgggagcccagtcgcccgccccgacccttccccgtcacgcccccgccccactgacatcgacctccctggcgcgtccactcagacacctaaaattcaccccctccgtgtcacctctttgcaaacgccccctccccaccccgctccgacttcggaattgtcctgcctgacacctccccaccccacaagatcagccagagggtgtttgggggcgcctaaggcaaaccggctggactgtgccccaagggaagggtgtgggggaagcgcccagcgaggggatgccatttcctgcgcgtccccttagaatgtggctgaatccgcctccccacccgacgtctttatttaacacaatctcgcagcttattcaaataagccagctttgtcagccagttccaccaagatccgggggctccagcgagatggaattcctatggccagggccacggggaggggctggggtcccgagggcagcaagcttggctggcggcaggagccctgggtcctccccaggagagggacccagagcccagaccaagtccaacccgccaacctgcgccacccatgcgcgcactgggggctgcagagccccgccaggctgcccgcggccgggagcgtaaggccggggtccacgcctcgattttcagtgtccgcagcccctaccccgcctatctgcgacgcaaggcgaaaccttgtttttgcggaaaatgcctggctttgtctagggctggggtgggggcgtctgggcagccaccctcggccacattaaaattcctggcgccccagcctcgggcctcaacgctgtcccccgagacgccactttcgctattactgtcaagtacccttgactctttatttttgcccttttatctattacaactaattcgagttcttttgcccttttcagtctaagacgtgggctttctgcaaagcctccccctgccagcgagctctcggagcgcggagcctttagaaattgaggggtttactgtcaaaatgaaaatttcacttcaaattaccttggctgatgctcgctcgccaggccgggggctc

SEQ ID NO: 111055 - DNA, 283 bp, Homo sapiens; identical to SEQ ID NO: 3761
  chr5:1876637-1876920
  hyper

SEQ ID NO: 111056 - DNA, 13 bp, Homo sapiens
  chr5:1877089-1877102
  hyper
ggaaataggagag

SEQ ID NO: 111057 - DNA, 130 bp, Homo sapiens; identical to SEQ ID NO: 41263
  chr5:1877194-1877324
  hyper

SEQ ID NO: 111058 - DNA, 290 bp, Homo sapiens; identical to SEQ ID NO: 3764
  chr5:1877738-1878028
  hyper

SEQ ID NO: 111059 - DNA, 353 bp, Homo sapiens; identical to SEQ ID NO: 3765
  chr5:1878223-1878576
  hyper

SEQ ID NO: 111060 - DNA, 309 bp, Homo sapiens
  chr5:1878830-1879139
  hyper
ggcggctctgcttccagcgggtcgaagtcgtccaagtcactaagctccagctccttctcctctttgcccacgggctctgcgggagagaatgcgtggccagtggagggagagggttggtaggtgaatcagaccccctgtccccgtccaccattatgaggcctgttcccgacgctacgaaaagcactcggggcctctcttcgcgtctcccatttcctccagaggccaccaggtcacaaactggcaacacaggggcctccaatgggggaggggggtgtctaattttttttttttttgagacggagtctcgct

SEQ ID NO: 111061 - DNA, 179 bp, Homo sapiens
  chr5:1879482-1879661
  hyper
cagaaccggtttgcacggtgaccgcctaggcatggggctcggcgtttgggacccccaagacgtcctagaaccgcagagaaggcactgtgcctgcactccagggcctcagcccccagtgacaacctcccaacccacctgcgttcttggagctcttgaggggctcctcccgcgcctcctcc

SEQ ID NO: 111062 - DNA, 159 bp, Homo sapiens
  chr5:1879689-1879848
  hyper
cgtagggccgcttctcgtctgcgcacttgttccgcggcggccacgtcatcttgttctccttcttgaggcgccggcgcgcgttggcgaaccaggtggagacctgtgtgagggtcatcttggtgatgatggccagcatgatcttctcgcccttggtggggt

SEQ ID NO: 111063 - DNA, 89 bp, Homo sapiens
  chr5:1882046-1882135
  hyper
ccagcagccggctctcgtagaccgggcagtagaccggcgcctgggccgaggcggcgggcccggagtccgccagcgtgcggcctccggac

SEQ ID NO: 111064 - DNA, 502 bp, Homo sapiens; identical to SEQ ID NO: 41268
  chr5:1882419-1882921
  hyper

SEQ ID NO: 111065 - DNA, 485 bp, Homo sapiens; identical to SEQ ID NO: 3767
  chr5:1883131-1883616
  hyper

SEQ ID NO: 111066 - DNA, 937 bp, Homo sapiens
  chr5:1883879-1884816
  hyper
cgccggccgtgctccgccggcttccccctgcccctcgcggctaagccggggactgccgggcggccctgcgcgctcggaagagcaggttcctcaacccaggccccggcccctcccgctaagctcgtccctcccggcgccccgcagggctggctgcgagggagggggcgttgggtgcctggcggaggcgccctcccctgtccattttgcccagctttctgtctggggcgcacggagcaatcggaagaggggaccgagcgcccaccccaggactccctcggccagtaccctccctgggaccttgcccaagttcaaagcggaggccagtgagcaggcggcaagggggcggcaagggggcgcccgggccatcccgaacccgttccccgccttctgcgccatcgccctccgggaccgggactcgccccggttgccctcgccccctgggccggcctcccgtggtaagttgggaaggaagccgtgcaaggcagcgttgtgcagacttgctcagaaagattcctgggttcagacctgtgaatcgccccagggtcaccctctaattaatgatgacgtcctcgccctctccccagctgcaagcctgcctcccagaaacgaaatctgcctgctcttttgacagctcggttgaaggtgattgatgactatctggagaccacagtacacatcatataatatctgctgcgtaattgctttaatttacagatgaaaatacgagttctccgatcgcgttggaccggagcgggccacgtccgagctgcttgcagagggaaaccatcggaaataatgaatagccgctccatgcaaattattcagacagtttagcgtcggtagccgcgagaaatatataaagaacacgagtcaaatgacattaataattgtttctgaattctgtattgatttcgcggcaggccgcgtttctttcttt

SEQ ID NO: 111067 - DNA, 653 bp, Homo sapiens; identical to SEQ ID NO: 41271
  chr5:1885077-1885730
  hyper

SEQ ID NO: 111068 - DNA, 105 bp, Homo sapiens; identical to SEQ ID NO: 41272
  chr5:1885971-1886076
  hyper

SEQ ID NO: 111069 - DNA, 462 bp, Homo sapiens; identical to SEQ ID NO: 41273
  chr5:1886379-1886841
  hyper

SEQ ID NO: 111070 - DNA, 148 bp, Homo sapiens; identical to SEQ ID NO: 41274
  chr5:1886997-1887145
  hyper

SEQ ID NO: 111071 - DNA, 35 bp, Homo sapiens; identical to SEQ ID NO: 3770
  chr5:1887546-1887581
  hyper

SEQ ID NO: 111072 - DNA, 280 bp, Homo sapiens
  chr5:1887655-1887935
  hyper
cgtttgggctgccccacccagggacgcttgggccgggcgcgaagagcccggaaatagccacccttgtcgtcggcccggtttccctccgaggtcttagtatttcccccctcccccaccccccaaggcctgtggagggcgaggctgctgctccagccaaccctcggaattggctgcagggcgctcaggtcctgcctttcttcccctgcccctctcccaagcccctccgtgctaagcggcccagttctgggttctctcctggtgcccacgctagtccctagcc

SEQ ID NO: 111073 - DNA, 184 bp, Homo sapiens
  chr5:1930820-1931004
  hyper
gggctacggggaagtcgcgctgcccctcgtctgagcgtgggccagggcccaggtggtgaccaaggcccggcgcagtggccccggagcgtggaggggcagctgctgggcggcctcccgggggagggtgacggcttcacccgccaacgctgcctccctcctgggattaggccggaggaatcttgga

SEQ ID NO: 111074 - DNA, 222 bp, Homo sapiens
  chr5:1931064-1931286
  hyper
cgtagacttgattggcaggccctgccccgacccctacccctccaggtccccgcctcggtgcctcggtgcccggctccgggccactcctgcaggccctgcctagggcagccggcggtgcctggaggcgggctcgccccggctgctccacgcccaggccggtccctggcatttcagccagtgggagggcgtccccgccgcccccgtgcctctccgcaggggctg

SEQ ID NO: 111075 - DNA, 132 bp, Homo sapiens; identical to SEQ ID NO: 3774
  chr5:1931444-1931576
  hyper

SEQ ID NO: 111076 - DNA, 382 bp, Homo sapiens
  chr5:1931617-1931999
  hyper
cgcgcatcccgccgcccctcaccacgaagcgcagacacaggaggttgcagggtcagtgctgcggagaatcccagacggccccacagccgccgccacccgcggggcactcgcccgggctctgccgaggatgtgggggctttggtctccgcagagctgggactcccgaaggccttaccagaaactcaggagcagccccagccctgcagagcccgcgagggtggagacgggagacccgctgtggggcctgaggctgagatgccggcctgcggtgaagccggcgggacgttccaacccgctcagacccgcccactccgcagggcccgggcccaccccccggcctgtggcctgtgctgggctgcgcagccggcggtggagggacctg

SEQ ID NO: 111077 - DNA, 444 bp, Homo sapiens; identical to SEQ ID NO: 41281
  chr5:2038418-2038862
  hyper

SEQ ID NO: 111078 - DNA, 30 bp, Homo sapiens; identical to SEQ ID NO: 41282
  chr5:2544169-2544199
  hyper

SEQ ID NO: 111079 - DNA, 275 bp, Homo sapiens
  chr5:2738854-2739129
  hyper
ctgtgcctccgggaccgtctccccacctgcgggaggccaggtgtgtggctccagagaccctccacctgaactacccgctcccagagccccagtcagggccgccagaggtcgcggagggtgaagccaatgggcctggacgccgaggccggggagaggaaggagcgaggtaatggctgtggctggagaccctcttctgactccccaggctgccgggtaggcctactgtgggatgggactcaggcgaccagacgtgctctccgtcgcctccatcccgg

SEQ ID NO: 111080 - DNA, 144 bp, Homo sapiens
  chr5:2739210-2739354
  hyper
cgaggggactcaacgcgctttgtagggcctgtgaaatccggcttgtcgcataagctccctgaagaagagaacaaacttcccagaccaggggcccgcggggagcggtgcagacaccgcggcaacccaccccgagcccgccggccc

SEQ ID NO: 111081 - DNA, 251 bp, Homo sapiens; identical to SEQ ID NO: 3777
  chr5:2739551-2739802
  hyper

SEQ ID NO: 111082 - DNA, 440 bp, Homo sapiens
  chr5:2739860-2740300
  hyper
cgggcctgaggctgagggccagggagcgaggcgagcacccggggccagccacggaggagtcccgaccaccacgggagcagggggactgggaggcaagaggtcgggggaggccggggtcagggcgggaggaacccgatgggtcccgctgcggcttcaggcgcggggtatagggtaggaccaggaaggggactgaagcccgggaccagagctgggggtgccaggagcggggcctccagtgggagctcgggggtcctcgcgggttcttctgggtcggttggtggctacccatccccagaagcctggctgcattcccctataaggaggcttcggagggcccgactgggtttcccctccagggcaccgggtcgcaaaagcggcgtcgaaaactcatgaacaggcggccgggtctggggccgccggggcagtcgtggcgtgcgggg

SEQ ID NO: 111083 - DNA, 234 bp, Homo sapiens
  chr5:2740430-2740664
  hyper
cggtcacaccggggctgaggtcaggagccggctcaccccctctcctgcgactgttccctgacctgcgactgttcggttctcccgactggccttggtcgttgccttttagggtctcggtgtgaccaactaagcagacactcagcggcagcgccgcgcttggggagactgcagggcagaaatgggcctagaggtgaaggagcccttcccaaatcggacagtcccggggctggagag

SEQ ID NO: 111084 - DNA, 99 bp, Homo sapiens
  chr5:2741122-2741221
  hyper
cgcgtcctgccccaccttgctgggtgcagagccgggtgcacgcgggacccgcactcgctctgggcgaacacgcagcgcccttcccggcctcaggccgag

SEQ ID NO: 111085 - DNA, 214 bp, Homo sapiens; identical to SEQ ID NO: 3779
  chr5:2743445-2743659
  hyper

SEQ ID NO: 111086 - DNA, 72 bp, Homo sapiens; identical to SEQ ID NO: 3780
  chr5:2743698-2743770
  hyper

SEQ ID NO: 111087 - DNA, 30 bp, Homo sapiens
  chr5:2747745-2747775
  hyper
gcagttagtcagaaccgaccccacagcctg

SEQ ID NO: 111088 - DNA, 328 bp, Homo sapiens
  chr5:2748161-2748489
  hyper
ctgtaatttgaatttcgtggcaatctgggtttgccgaaactaagacagccacgatagtaatagtcaaaataacagtaaattaagtaaaaataaataataacagggcaagtctaaaaagagggccacaccttctttggcttccatctcgccctccgccctcactctgctaattctgggtcccaggagtggccccctggatcttcttcccggaccctccctcgggtctcccgggcgctccgcctccccggggctggctctccctcccctcccgggcgccgccggccgcgggccgcctacctttcttgggctcgtagccgccgcccgggga

SEQ ID NO: 111089 - DNA, 39 bp, Homo sapiens
  chr5:2748740-2748779
  hyper
ccggcgcggcggccgcgggcagccccggtggcccgcagc

SEQ ID NO: 111090 - DNA, 251 bp, Homo sapiens
  chr5:2749065-2749316
  hyper
cgattcgcacagggggtccccggcgcggcacggaagcttctccccgtccgactcggccgagcacgagtgatccgtgagcgagtccacgtgcaggctgatccctgtgggggcgcgggcacggtgggtggcacgaggggacagcgcaggcacctggagccccctccgccccctgtcctgcggcactgggccctccccacgggacccctcacctcgcccccacccggccacgtgacaggcggagcctgacctcc

SEQ ID NO: 111091 - DNA, 172 bp, Homo sapiens
  chr5:2749604-2749776
  hyper
cggggcccaggtcatcttgttctccttcttgaggcgccggcgcgcgttggcgaaccaggtggagacctgggtgagggtcatcttggtgatgatggctagcatgatcttctcgcccttggtggggtaggggttcttgcggtgctcgttgagccaggccttgagagtggccgtg

SEQ ID NO: 111092 - DNA, 109 bp, Homo sapiens
  chr5:2749840-2749949
  hyper
cgtacgggtggtagctgatggcgccggtcatgccggtggtgtgcgcgtcgtagggtgcgccctggaaccaacaagagcctgtgagtggagtatgcggagaccccgcggg

SEQ ID NO: 111093 - DNA, 7 bp, Homo sapiens
  chr5:2750509-2750516
  hyper
ccgaggg

SEQ ID NO: 111094 - DNA, 115 bp, Homo sapiens
  chr5:2750654-2750769
  hyper
cggaggactcaggcggcccttagcgggtcacgcgcccgcaagcacgatatttgaaagcatggtccgctggacagagtaaggccgaaacctgggcgcctcgggccggactccggag

SEQ ID NO: 111095 - DNA, 127 bp, Homo sapiens; identical to SEQ ID NO: 41290
  chr5:2751854-2751981
  hyper

SEQ ID NO: 111096 - DNA, 321 bp, Homo sapiens
  chr5:2752120-2752441
  hyper
ggagccacgtcccctgcccggctccggccggctcccaccgtccccggccaccgtcttcgcccctgcccggcccccgccccttccagccactaccccgcccccacccccttctccaccctcacggactaggcagaggccgcccgcggtcaggccaggccgggtccaattaggggactcacagcctgccccgctgtgcaccccgaggaggcccggcccctgtgtccaatccggaagtcgcagggaagtggggaggtcaggatggtggcgcccgcggctcgggtcttcctccgggcagtgcgcgcggctctcacttccacggtc

SEQ ID NO: 111097 - DNA, 2001 bp, Homo sapiens
  chr5:2752508-2754509
  hyper
cggtccactccgcccagcatggacctggatccggggcgccttggttgcgaattgccaggagggccctgaggtgagctttctgcccccaaatccgcagcgcaacccccggggccctgaacgttacgactttccactgttgggaatgacgccagggcttcagctaagaagacgccgtcccctaaagagttttattttattttgtttttctaagttgactcctctttcagatttgtgttgtcaaaacactggggggatgattgttacctgacaaaccgcctctggcaggacctgaagcctcccagtcacgtcgagaacgggcaggagctcaggttggcgccgccggtgcagtgggcattacaggtagctcaggtgacgcgcggctggagtaggggggcggttgccttgcggggctcagaagcgaggcggttggcgagggttcctaggaccccagcttcctagaaccctctccccatcacgcttctccaacccttttccactcggggatggccgaagagggcgtctggctgcccactccgaagggtcacctatggggggcgctcagggggatggaagagtgtcaggtctgtgctggcctattgggagcacccacccagcaggtgcctctatcctcggaagccgtctcgggtgggtgcggtggagaagagagagcgcagtggcctggggcgggcctcagctcaggcctgcagccgactcctgcacccctgctggccctgcagcctgcggagcagccttagtgatctcaggacgcagggcatgttgcggcctccctgtggtgcggctgcagcggcgcggagggagcggagcccgggttgccagtctggtccagggcgcaagagaaacactcacggcatcaggctgtctttccccaggtgcaagggaaccagttgcaaactgcagtgctgtgcttgaggatggctcctcctgagccggcaggctcccggtaggcgcggtccaggcacgttacccctcccgccaggagctcccgagccgagccactcgccccctaccagttatcccacccaccccttcgcccacactgctcccccaccactcttcctacaaaccacacccccatcctgcacacatcctcttcaggccatctcaacacacgcacacgcacacacacccacgaccacctctccctccacccacagacaccccgttcccacaggctgggccccctgcaacgacccagcggggggtttcaaccttgttgcgactccacatgggacatcctaattcagtccaggacagatatttttaatcaattactatagagctgaaaaacagagagagagagaaagcagccgggttgggcaagccgtcgacagtctgcgacatttttgcgcttcctgggagggaattcctccaagaagaggggtaaatgagaggcccacacgctggatggcaaacacaaacactgtcagatcagatggcaacctttagggttcctttacgatcagatcagtttaaatgaaaaaaaaatcgggtgtaatttttatcaccagggagcactggcctggagtatttccatttctaaagagcggttcccgctgtggtttcattagcatttggggctcatcctccctccccctcccttgacccacccccctccccccgccggacctctgccaggggcagaagagaaaacagccagttattatacaaacatcctcagtttggagctggagtgtctgctctggatacagtcgattctgacatcaattaaatatataaccagacacgtgcagtggcggggagggtcccctcacccagggtgcatctccagaaacgccgcctgcccttccccctctttagctcagtgttgggagtttgaagatggcctcttcccgtcctgtgtgtattttccccttagcaattatactcctccactgaaatctatatgttccataccgctgctgcctgttactaataaaaaccgtctaccttgcactattaaacagtcgactcttactacat

SEQ ID NO: 111098 - DNA, 66 bp, Homo sapiens
  chr5:2754740-2754806
  hyper
gcgcggcggtcccggcgaggctgcctgagagggtggcgggctcagcccagactccgtctcggggcc

SEQ ID NO: 111099 - DNA, 1732 bp, Homo sapiens
  chr5:2754870-2756602
  hyper
cggggtgctcaggcctgtggggtcgctggggagagcccggcacttggcttctgaggcttttcagttgccgtccgagcaggagggagggaatgagcaggcacgcagggaaaacccagtaactgctttgcaaacgcgacccctggtcacaataacccaggcgatgggggcagtttcaggttcctggtgggccctgccccctttcctaggtgtgccctaggaggtggggaaaaaattaacactgtttctatttttctttattgtccctgcaacagccaaagaatttagaacgagtctacgtggacacgcaagtttcagcgagcggggatttcctgcgaggccgagcgcgaggaacagccggccccggaggctcgggctcggggtctccccggggacgcggccgactgagaaggccggggcgctcgccgggcgcggcgccgtcctccgtgtcgcggggacggaaggaggcgacgcaggccaggagtcgtgcgcgcgggcggcgagggggcgctgtggcccgtgtctgccggcccgagtcccggcaacggtgggcgcgacccacctcctcccccggcggcttaattcggggaagaagaaaaaacggcatcgaggcatttcaataaaacctaagcgactcctgatcctttctcattgtggttccttatgagctttcggtgtctggcggggaaacagttaccgttcgggggtgtggcaaacttttttggcaattaagatgaaacagacgcttttatgtgggtttcctttaatgaagtaacattggaaatgtaagtagtttcagtgcatcaaatcacatcgctaccgtattcgcggtcaccggccctcccgttccagggctccccgcgtttgtcgagggagagagcgaggcaggaacagggggccggggacatgagaagtttggctaagaaatttttcttttctttgaaaacaaaagcgttgttataaatggaacaaaatttaagtcaacatggaacccacatctctttcaaacgtcgtttctaggtctagtactctgtgagtaggttggactggatttcacgctcaaccggcatttctaggctctcaaagacgcttccgaggcctaaatgttttcctggaaaacacgtgcagaggagcatccgtggaagactgaaaggtccccgcagctccagtcctggcaggatgtgcaaggcctctcgaggttttcaaatgggcccccgaggcctgggagatccccgagtagccacgcgggcgccacttcagggacgcggggcggcggctactgtgggccgggagggcccccgcacgggctgctctgagcgcctggacccgggaccctgcgcgcgctcttttctttttctttcgtttctttctttcttatttataatttacattctagggacctcgtattcagctaaccagctcttgcttacttaactgccctgttttcagctccggatttctgggaggtctccccatggctaacttgtccctcccggcatcctttagcgctctgcaaaatttgccttcctcccacagatgccccgcctccgacgtgcttcctgaagtttctctcccgctcagggtgcccacaatcctgaattctccagcatctcgccgactccgtctctaccctcctctccttcctaatctcgcgctggcttcgcccttttctctctcctcctccttcctacgcgccccgccccctccccccaggtcgcacctctccccgcccggg

SEQ ID NO: 111100 - DNA, 825 bp, Homo sapiens; identical to SEQ ID NO: 41298
  chr5:2756673-2757498
  hyper

SEQ ID NO: 111101 - DNA, 266 bp, Homo sapiens
  chr5:2757843-2758109
  hyper
tccacgcagaggagacgcctgagaatgcgcacattcactggttgtctatctctagacaacagcagatgcctcttcacaccaatcgatggcacccagaaaggcctaggatgtgccctgttcaaactctccctgcggtgcagcttaaatttctatagagaaattcgggagacatttggccgcatctgaaagcgcagaaggtgcgtgctccctggcacccagcacacaggtgttggggaagcggggacgaggcagccctggagcatggt

SEQ ID NO: 111102 - DNA, 333 bp, Homo sapiens; identical to SEQ ID NO: 41300
  chr5:3121975-3122308
  hyper

SEQ ID NO: 111103 - DNA, 88 bp, Homo sapiens
  chr5:3197805-3197893
  hyper
ctggagaggctactgcgggatgtgaggggctggcaggagcggccctccctggccttggccattgtctttccggagaggcattctgccc

SEQ ID NO: 111104 - DNA, 36 bp, Homo sapiens
  chr5:3197991-3198027
  hyper
cgcccggcacgagctccgtgacgaccattctcagct

SEQ ID NO: 111105 - DNA, 258 bp, Homo sapiens; identical to SEQ ID NO: 41302
  chr5:3590399-3590657
  hyper

SEQ ID NO: 111106 - DNA, 748 bp, Homo sapiens; identical to SEQ ID NO: 41303
  chr5:3590803-3591551
  hyper

SEQ ID NO: 111107 - DNA, 431 bp, Homo sapiens; identical to SEQ ID NO: 41304
  chr5:3591613-3592044
  hyper

SEQ ID NO: 111108 - DNA, 79 bp, Homo sapiens; identical to SEQ ID NO: 41305
  chr5:3592383-3592462
  hyper

SEQ ID NO: 111109 - DNA, 541 bp, Homo sapiens
  chr5:3592642-3593183
  hyper
cgacccctagacctggttttgtcaggctcctcgtctttgtctctggcacagtgaccagggggcagccaccgggtgcggccagctccgccaggagcaacttccggagcagcggcagggcctgcctcagccaccccctttggaggcaggaaaagtggctgaggggccaacaaagtggctctctcctgcctcagaggtccagcgcctcacagctggggcgtcggtttcgaaggccaagcagagggaaccacacaacctcccattccaatgtccatcgcctttgcctggcacccctagggccaccagagggatggtcctagatgccagtgatgctgagtccgggcagcggcaggggcagtctctttgagggaaagttttagaccttctcacgacatttttaaaaggacgttcaaatcaggcccacggattccagacgcacagcccttctgcctgctccagcatctgaggccatgaagccctgggccccactgaaacatttgctgctgaaaatgagtggcagaacgagtgggaggaaactctacca

SEQ ID NO: 111110 - DNA, 356 bp, Homo sapiens; identical to SEQ ID NO: 41307
  chr5:3594163-3594519
  hyper

SEQ ID NO: 111111 - DNA, 99 bp, Homo sapiens; identical to SEQ ID NO: 41308
  chr5:3594777-3594876
  hyper

SEQ ID NO: 111112 - DNA, 313 bp, Homo sapiens; identical to SEQ ID NO: 41309
  chr5:3595055-3595368
  hyper

SEQ ID NO: 111113 - DNA, 252 bp, Homo sapiens; identical to SEQ ID NO: 41310
  chr5:3595849-3596101
  hyper

SEQ ID NO: 111114 - DNA, 169 bp, Homo sapiens; identical to SEQ ID NO: 41311
  chr5:3596555-3596724
  hyper

SEQ ID NO: 111115 - DNA, 131 bp, Homo sapiens; identical to SEQ ID NO: 41312
  chr5:3596824-3596955
  hyper

SEQ ID NO: 111116 - DNA, 438 bp, Homo sapiens
  chr5:3597336-3597774
  hyper
acacttaattctccgcgggggcattggcctgtctgccggtccaaatcatccattttccttggtctgactgcaaggtcggtgcttaaacttcggacggctggtgaattgtgcggcgggcgcggggccctgggaggcagccccctcctgggtcgctgcccgcgggataaagcaatttccaagcacccgcgatatctccccgctccccgcaggagaagcggggagtaaacgcccctcaagtgtgcacaagcaaagagcgggtttccctgtaacttttcttgtagttttgaaagaaagcggcccggctgcctttcaggtctcttactatcgaaaaagatcagcccccattttgttcaggcggcggggaggccgggacgcgatgagagatttacaaggtgtcctttcaaaaagaattcccagtggagacgaggctgaaacgtc

SEQ ID NO: 111117 - DNA, 60 bp, Homo sapiens
  chr5:3599384-3599444
  hyper
ccttcgcagcccacacggcgccggcttattacccctacggccagttccaatacggggacc

SEQ ID NO: 111118 - DNA, 105 bp, Homo sapiens
  chr5:3599502-3599607
  hyper
cgagcaccgcaagaatccctaccccaccaagggcgagaagatcatgctggccatcatcaccaagatgaccctcacgcaggtctccacctggttcgccaacgcgcg

SEQ ID NO: 111119 - DNA, 43 bp, Homo sapiens; identical to SEQ ID NO: 41313
  chr5:3600074-3600117
  hyper

SEQ ID NO: 111120 - DNA, 66 bp, Homo sapiens
  chr5:3600390-3600456
  hyper
cgtccacctgtcccctagctgggaatgcagaggcctggctaggtgtggtagcgtggggtgcagcat

SEQ ID NO: 111121 - DNA, 18 bp, Homo sapiens
  chr5:3600734-3600752
  hyper
tccccaggccagattcgc

SEQ ID NO: 111122 - DNA, 368 bp, Homo sapiens
  chr5:3601025-3601393
  hyper
ggcgtcgcccggcgctgcgtcccccactcacagtgcccctgtcttcttgtctcgctgtgtttcccatgcagctctctggccccgcaggagggaacgccgcggatcctagcagccctcccgtccgcctgattaagggtcttcttttacttttgcgggggggaggggggaggagttggggagggagggaatgtgggaggaattaagacaaatatttcagactggtgtaaaggacaaatatgacaacgacgtcaaggactcgcatccgtcgctttctgcagaaaggggcttcttcggtcccgagctcgcgtccaggtggccaggcctctgccggcggctccagtggctgcgattatcgggttcggtaaatg

SEQ ID NO: 111123 - DNA, 258 bp, Homo sapiens
  chr5:3601904-3602162
  hyper
acgattttataacgtcggtaaaaacagaggaaaaagaatttttattgcgaccccagaggagaacttcggattagaaaccagtttacaactagttgtctcaacggcgcatcgtggcgcctggtcgttttctgagttgagtgtgaaaataatggagtatcgctttgcatgtatttttagtgattcggttaaatcaaacacgggaagaaattggaaggctctttaaaactccacagatgggccagccgggatgcggtgcgg

SEQ ID NO: 111124 - DNA, 547 bp, Homo sapiens
  chr5:3602716-3603263
  hyper
cgcacccccagcctgtgacccgcccttcccggcttgctcgagacccactggcgccagtgctgcgcgtggggactccgtgcatggccgaagcgagggggaaagtcggggcgctggtgtcttttcagaggttccaggaaagagggaggctcgcgttaggactaggaggtgccagtccacggctcctacccgctcccgacgcccgcatccttctacagccctccaccccgttcctggtccctgtagaggggaaggtcctctccctgccccgaggcgggaggaaaagcggcgaagaggaggctcgaagggcgccgcgtagggcaagtgggccgaggacaccgggggcgcgtcggggagcggggagtgggcggggtgggatgaggcagggaggagccgggccggagcggagtggagtggaccgcgggcggacggactcgggccgggccccggggagcagctccgcagtcggaatggacgtgctccaggcgccctctatggtccgaaagcggaatgcggccttgagcagcgcccatctcgctcctggggtgtg

SEQ ID NO: 111125 - DNA, 39 bp, Homo sapiens
  chr5:3606395-3606434
  hyper
gggcggccttgaacccgggagggagcaagggatggagct

SEQ ID NO: 111126 - DNA, 311 bp, Homo sapiens
  chr5:3606711-3607022
  hyper
cgccctctccgcggctgctgttgggcttctgaagacgcagcgggtgtctctgatcccctaatccatttatccagagtcccgagcgcaatggctggtgcggggacacaacggcaggaggtggcgggggtggagggagaccgggcactcagctagcgccaccctcctcccgccccacccgagacgctgagccacgacccaccctccacgggtcccacgccctcaggcagaacgcaatggtgggaatgacgccaaggtcggtgaaatcttccaaattgaagggcttttattttaaattccgattcccctttgaa

SEQ ID NO: 111127 - DNA, 170 bp, Homo sapiens; identical to SEQ ID NO: 3799
  chr5:5139753-5139923
  hyper

SEQ ID NO: 111128 - DNA, 64 bp, Homo sapiens; identical to SEQ ID NO: 3800
  chr5:5139935-5139999
  hyper

SEQ ID NO: 111129 - DNA, 424 bp, Homo sapiens; identical to SEQ ID NO: 3801
  chr5:5140031-5140455
  hyper

SEQ ID NO: 111130 - DNA, 132 bp, Homo sapiens; identical to SEQ ID NO: 3802
  chr5:5140527-5140659
  hyper

SEQ ID NO: 111131 - DNA, 49 bp, Homo sapiens; identical to SEQ ID NO: 3803
  chr5:5140708-5140757
  hyper

SEQ ID NO: 111132 - DNA, 142 bp, Homo sapiens; identical to SEQ ID NO: 3804
  chr5:5140849-5140991
  hyper

SEQ ID NO: 111133 - DNA, 30 bp, Homo sapiens
  chr5:5141244-5141274
  hyper
tcggatcctccttcccgtccccaacctttc

SEQ ID NO: 111134 - DNA, 30 bp, Homo sapiens
  chr5:5422574-5422604
  hyper
tggcaataaaggatcgacccttaacagtgg

SEQ ID NO: 111135 - DNA, 30 bp, Homo sapiens
  chr5:5422865-5422895
  hyper
ttttgctagccccacggggacctctgtgca

SEQ ID NO: 111136 - DNA, 30 bp, Homo sapiens
  chr5:5423442-5423472
  hyper
agggacaggtgaaacgccgagggcagttat

SEQ ID NO: 111137 - DNA, 30 bp, Homo sapiens
  chr5:5492709-5492739
  hyper
ttaactggagaggtcgtctgggtgcagaat

SEQ ID NO: 111138 - DNA, 114 bp, Homo sapiens
  chr5:5887041-5887155
  hyper
gaggctgtctctgaagcatcacgagccggtcccaacacgaacgtggaggagcacgcagcagcatttcctgcaacaccagcctcgctttgctggcgcacagacccaggcatccgg

SEQ ID NO: 111139 - DNA, 112 bp, Homo sapiens
  chr5:5887231-5887343
  hyper
cggtgacacctgccagcttcagctcctgcccatcagcgctgtgccaggggtgggaaggggtggtggtggtggcgggggcggtggggaaggggagtcgctccctttacccctg

SEQ ID NO: 111140 - DNA, 79 bp, Homo sapiens
  chr5:6378228-6378307
  hyper
tctggccatgacgacgtctccaaaggggcctcaaagaggttggctcttggcaacaggctggagcgcgggccccgccctc

SEQ ID NO: 111141 - DNA, 30 bp, Homo sapiens; identical to SEQ ID NO: 3805
  chr5:6378582-6378612
  hyper

SEQ ID NO: 111142 - DNA, 30 bp, Homo sapiens
  chr5:6378867-6378897
  hyper
catcagacctgcctcggtcatgggagaagt

SEQ ID NO: 111143 - DNA, 881 bp, Homo sapiens; identical to SEQ ID NO: 3806
  chr5:6448768-6449649
  hyper

SEQ ID NO: 111144 - DNA, 639 bp, Homo sapiens
  chr5:6583140-6583779
  hyper
tccccgcttctcgggcgtcggggctcgccgcagtcacgctgcacaccctcccggcctagggcggcgccggcccgggactcgcgtgtctccccgcggcgccgcgcaggacccgggcctcggagcccggcagcatcccctgctggccgctgggctgaggagccgcgggaggcggggaacgcggggccgcgggggctgggcgggccggagtgcgcggtagagggggcggcgcggccggggtgcgcggtagagggggcggagcggccggggtgcgcggtaaagatggggcggcgcggccggggctcgccagcaccagccctggaaccccatgggggacctcgacaacagcgcctttgcggcgtgggcccctttctgcagctcctccacccgcgcgctgtcggctccgggacactggggctttgaagggcgccagttcccagccgcacctgcacgcctaggagggcgcaggccgcgtgtccctgtgggaggaaggccccggcaacctgcaaagacctcacgtcacagaaacttgcggcgtttgcccccgatgcgcgcgtcaggtgctccgtcccttccaggtggcagaggagagggaagggtcgcgcctggtgggggcctgagagccaccgggctgcggtgcgc

SEQ ID NO: 111145 - DNA, 30 bp, Homo sapiens
  chr5:6633282-6633312
  hyper
gacagggaaaacagcgaacagctctaaggg

SEQ ID NO: 111146 - DNA, 30 bp, Homo sapiens
  chr5:6634102-6634132
  hyper
cagatcccccggggcgtcccccatctgcac

SEQ ID NO: 111147 - DNA, 407 bp, Homo sapiens; identical to SEQ ID NO: 3807
  chr5:6687056-6687463
  hyper

SEQ ID NO: 111148 - DNA, 30 bp, Homo sapiens
  chr5:6714175-6714205
  hyper
cgcagggcgtgggccgcggcggctcgggct

SEQ ID NO: 111149 - DNA, 130 bp, Homo sapiens
  chr5:6714972-6715102
  hyper
tcagactcatttatcgtggagtgacttgcccagatcctacaagtaacagtccaagaaaaggggctgctgggtaggacctgcaggtatttgtcttttttactcttgagattggaacgggaaatcgactctc

SEQ ID NO: 111150 - DNA, 25 bp, Homo sapiens
  chr5:6765598-6765623
  hyper
cccaaagtgccgtgtgccaccatac

SEQ ID NO: 111151 - DNA, 63 bp, Homo sapiens
  chr5:7395015-7395078
  hyper
cgctcccacgcgtgtcgggaggggacactgtccctggtgacatccgcccccacaacgctcctg

SEQ ID NO: 111152 - DNA, 233 bp, Homo sapiens; identical to SEQ ID NO: 3810
  chr5:7395160-7395393
  hyper

SEQ ID NO: 111153 - DNA, 1496 bp, Homo sapiens
  chr5:7395433-7396929
  hyper
cgccctcgcagggagccccggccctctcaagagggtggagaggatgggggagccctcaaccctgctacgctgaggggaagaagggctggacggcaaaccggtgcccaccgcggggaggcgggaagggtgggaaatcctctccagctccccaaaagagtgaaaaggagggagaccccgctgtcctctgacccgcgtactaaaggagggaccccccgggtcctctgaccccggctgcgctctgtgactgtgggggagggtgggagcaggccccgcagcccactaaggggtggaggaaacaggagggtggcagcgtccctgcccgctgaccttgaggtagtggagaggagctgaggagccccgcagtgctccgagccaggtggggcggggggagtggtgggggtaggactccctccctccaccccttaggctgtgttctcacttcgtagcggggagggccgtccctcccaccccacccacgctgcactcgggatagggcagaggaggtggacgacctggtggctgagtgtgggaggccggcgggcgaggacgaccccgggccggggcgcagcgggagcccctcagttcgccactccccccaccgtacagcccccgccgtccccagcctgcagccgggccgtcgggtgggggccgacaccgcccctgcacggaggccggctgcgcgcggggcggggagcggcgggcggagggccccgtggaacccgccccctcccgcgcggtggcggtggcggcggcggcgccgggagctgcccccgaggccgccgcccggcccccgcccgcgcgtcagcgcgcccagcccggggcgccgagctccgcccgcgccggaggcccctgcgcgcagctccgggtgccggcagccgggccggccgaggcggcgcgggggtgggacgcgggcggccgcggcgagcggcgctgcccgggccgggcgcgcacggcgggcgccctgtgagcggccccgatgtggcaggaggcgatgcggcgccgccgctacctgcgggaccgctccgaggaggcggcgggcggcggagacgggctgccgcggtcccgggactggctctacgagtcctactactgcatgagccagcagcacccgctcatcgtcttcctgctgctcatcgtcatgggctcctgcctcgccctgctcgccgtcttcttcgcgctcgggctggtgagtggcctccccgcgggtccagcgccgcgccttccccggccctgagaggagcccggccagccgagccgcgtcccgctccgggctgcccctcggcccgcggcagcccctcggcccgcggcagcccctcggcccgcggctccctgcttctcctgctggcccgcggcccggtggactctggcaagggctgcgggcgggagaaaagtttcctgggaaggctcttcccaaaataaagttcccgaggtgttcaccaggtggacgggcagggcgtgtgctttttgcatctttgcgcacccgctggcaaactctg

SEQ ID NO: 111154 - DNA, 408 bp, Homo sapiens
  chr5:7850975-7851383
  hyper
cgcggtcctcacccgcgccgggcggtagtagtagctgtgctctttggggtccaggcgccgcggcgggatgtagctgaaggcggactgcgccgagacgggcggcggcctgggcttgccccgcagcgtggacgcggtggtctcctcctcgtcgtcctccatgccgccaccgtccagcgcccccgccttggccgcggtccgtcccgcccgcccaggggcccagtcggagtctgcaggcctcaggttgctcagcgccagcgtctagcccgcgtctgtgttcggtcgttgcctggaaaccgccgcctggcgacccggagctgccctgcagcattcccgctccagggtggagcgaccctcccctcctccctcccggcccctcgactacacctggggtctctccttccttcctcc

SEQ ID NO: 111155 - DNA, 8 bp, Homo sapiens
  chr5:7851409-7851417
  hyper
cgcgggga

SEQ ID NO: 111156 - DNA, 30 bp, Homo sapiens; identical to SEQ ID NO: 41333
  chr5:7868995-7869025
  hyper

SEQ ID NO: 111157 - DNA, 30 bp, Homo sapiens; identical to SEQ ID NO: 41334
  chr5:7869250-7869280
  hyper

SEQ ID NO: 111158 - DNA, 30 bp, Homo sapiens
  chr5:9362142-9362172
  hyper
ttgaggccccagtttcgtcttcatgagaca

SEQ ID NO: 111159 - DNA, 2163 bp, Homo sapiens; identical to SEQ ID NO: 41335
  chr5:9544613-9546776
  hyper

SEQ ID NO: 111160 - DNA, 30 bp, Homo sapiens; identical to SEQ ID NO: 3814
  chr5:10249746-10249776
  hyper

SEQ ID NO: 111161 - DNA, 56 bp, Homo sapiens; identical to SEQ ID NO: 41337
  chr5:10250263-10250319
  hyper

SEQ ID NO: 111162 - DNA, 30 bp, Homo sapiens; identical to SEQ ID NO: 41338
  chr5:10250564-10250594
  hyper

SEQ ID NO: 111163 - DNA, 30 bp, Homo sapiens; identical to SEQ ID NO: 3815
  chr5:10250984-10251014
  hyper

SEQ ID NO: 111164 - DNA, 327 bp, Homo sapiens; identical to SEQ ID NO: 41340
  chr5:10307606-10307933
  hyper

SEQ ID NO: 111165 - DNA, 708 bp, Homo sapiens
  chr5:10333391-10334099
  hyper
agctctttcaagcttcctgcacgctcttagcgccagagcaccccagccgtcctgggagcccccgaagccaagcatattcgaactccgaatccgctcgatcgccggggacctgccatctgggttcggttccccaaggtcgctgccgaccttagaccgcgggggtgtggggcgccggggaaggagacagaaggacaggcgccgcccagggccgcggggacacttggggctgcgtcctgggtgggcgcgatgctcccccagaacgactggagatggagagtgtcggggagggaaacgggacccacgaattcagggcgctgagtcggcggaatgcgccctgactccccctggccgagagccggctcagaatgaaagagcgcggagtgggaggtctgggaaatggcagtatttgtattagggagagaaggaaacaggagtgggagccgcacggcttggggaacgcgggagatcgcggattgcggggatagcgcagcgcggctgcccggggctgctgggaggggccggacgaggccagggcgagcggggtaactgcggccggccggacggcggcggtaaccggctgcaccgaggtggttccaccaccgcgctgggcgcttgcggttcgtctgctccaacgaaagccgcgtcccacgctccctgccgccgcgtggttttgcctcctcagaggggcagcggcgacccaggggctgg

SEQ ID NO: 111166 - DNA, 30 bp, Homo sapiens
  chr5:10353334-10353364
  hyper
gcaccacaactgcccggctgccaaacagaa

SEQ ID NO: 111167 - DNA, 503 bp, Homo sapiens; identical to SEQ ID NO: 3817
  chr5:10354849-10355352
  hyper

SEQ ID NO: 111168 - DNA, 902 bp, Homo sapiens
  chr5:10441402-10442304
  hyper
gtttctcctatccttcgactcgaggctcttttgacagatgtgatttatttcctcctagagccagtcacattggctcaagcaacctatcgtaagaaaacaaatacaatagtgttttagctggaaactgcccactgtctaagcggctttttaaattaagaactcaggttcactacgggatggcttaggccagggaacagcatgtgcgaagttcgaagcccgagaagtttggaggagcggccccaggcgcaggcgggtcccgcagcggggcccgtgccgcccaggcgatcagccccttcacttaacccgcttccctcctagcaggcccgagtcccctagcctcagcctcacgcagccagagcaaggggaagagggagtccttcgtgagttcgccgctcacattcggcggtgggaaaccgatccgaagatgcttttgtaggcgaaacgctcagctcgcgcggctctgaaccaccggggagcagcggctgctgctagtcggactacgccagcacctccttgtccagcccgggagcagccccgcctcgctcagggccgcgtgcgcgtgcgcggctccaggggcggggcctgctcgcgtcccgggtgcctggataccgagcgcgtccgtagtggcggctggcgctagggaactgcagggtctagggtgttgtcggagtggcagttggtccgaatttctcccgaagcccgcggaggagcgggtaagagccccgcgaatccggccccaacctcgggaacgggatgggaggcggccctggccgcaagccccgcgctgctagcgggtccaccgcgtcgtagccgacagccgcccttcttcctcgcagcgcgccgcgattcaccagcctggtcccttctgcggagagcgatgccgcttcccgacaccatgttct

SEQ ID NO: 111169 - DNA, 143 bp, Homo sapiens
  chr5:10442372-10442515
  hyper
cgcacccagccggccgacgtgctgcggtggtccgcggggtaagcgcccttggcccggggagctgtccggtctacatgcccaagccagacgagcccagagagccctcctcccggaccaggggccttacgcggcactcagcgtcc

SEQ ID NO: 111170 - DNA, 221 bp, Homo sapiens
  chr5:10563415-10563636
  hyper
ccccgcccatccccggcgccaggactgacggggagagggcaaggccgggccagaggggctgtgggcctggactgcggctgtcgcccgcggccctgctcttttgggcagccagacgtggggtcagcgcccagtcgcagcctccgggggtgagtccgcagatccccgcacgtgacacaggccaggcatggggacggggagttcctcgtcgtccgttcccactc

SEQ ID NO: 111171 - DNA, 30 bp, Homo sapiens; identical to SEQ ID NO: 3818
  chr5:10563841-10563871
  hyper

SEQ ID NO: 111172 - DNA, 371 bp, Homo sapiens; identical to SEQ ID NO: 41348
  chr5:10564287-10564658
  hyper

SEQ ID NO: 111173 - DNA, 427 bp, Homo sapiens; identical to SEQ ID NO: 3820
  chr5:10564800-10565227
  hyper

SEQ ID NO: 111174 - DNA, 489 bp, Homo sapiens; identical to SEQ ID NO: 3821
  chr5:10565262-10565751
  hyper

SEQ ID NO: 111175 - DNA, 97 bp, Homo sapiens
  chr5:10627879-10627976
  hyper
gaacttggtgagtctcggtttcccagcgttgccttatcttttcctgtgagcttttctgagctcttctgattggccatggcagcgccacacccctgcc

SEQ ID NO: 111176 - DNA, 30 bp, Homo sapiens
  chr5:10761654-10761684
  hyper
tcctgcagcgaacgcgctcagccgggctcc

SEQ ID NO: 111177 - DNA, 171 bp, Homo sapiens; identical to SEQ ID NO: 3822
  chr5:10988183-10988354
  hyper

SEQ ID NO: 111178 - DNA, 786 bp, Homo sapiens; identical to SEQ ID NO: 41352
  chr5:11384964-11385750
  hyper

SEQ ID NO: 111179 - DNA, 444 bp, Homo sapiens; identical to SEQ ID NO: 3824
  chr5:11903280-11903724
  hyper

SEQ ID NO: 111180 - DNA, 352 bp, Homo sapiens; identical to SEQ ID NO: 3825
  chr5:11903821-11904173
  hyper

SEQ ID NO: 111181 - DNA, 184 bp, Homo sapiens; identical to SEQ ID NO: 3826
  chr5:11904195-11904379
  hyper

SEQ ID NO: 111182 - DNA, 377 bp, Homo sapiens; identical to SEQ ID NO: 3827
  chr5:11904455-11904832
  hyper

SEQ ID NO: 111183 - DNA, 30 bp, Homo sapiens
  chr5:14011401-14011431
  hyper
gtggattgggtccacgtcgcagacaaccaa

SEQ ID NO: 111184 - DNA, 30 bp, Homo sapiens
  chr5:14011828-14011858
  hyper
cgccgcagccgccgcgccctgccctcgtct

SEQ ID NO: 111185 - DNA, 369 bp, Homo sapiens; identical to SEQ ID NO: 41357
  chr5:14108524-14108893
  hyper

SEQ ID NO: 111186 - DNA, 1445 bp, Homo sapiens
  chr5:14142659-14144104
  hyper
tagccggggcataggcgttttgaactagaatattcgtccagcgctggtttgacacggatcttccgcaaaggaacatttcttttggcctccccagaccccgtcatcttccccattcattctggcggagtaaggactgagaaaccgtgaacccgaggttcagcagccgaaagtcccctgggagatggggatacaccgagaggaatcccattttacaggagagctttgtacccttaggagtaccgtggcctccgggactggagcagataacctgttttcgggccctctatgttcactcaacaactattaagaagccccctccccgagccagggccagcgctgagcccactagggaggcacccgccccggcccgcgtcaccccgccttgcgggctagacgacgaaacgcctcggcgctcaggggaccgcgcaccggtgcaggagccagcgccccggttgggggcgcaatgccgggcctgggaaggtccgccccggctggtcagagctttcctgcgccttccaaggcttggagctgccccggggaagcagaccgaaccaaaccgaacgttcctgcagcctccccgccagccctgcgggagcccatccgcccaacgcggccccgcccctcccccaggctccgcccaccgccgagcccaggctcggcccttgacgaagttcgccggaaattaccgaagcccctcttttttttccttcctctccgttccctgttctcccttttcctttcacccgggttccctcggccgtgatttccccctcccccctccttccttccccattgaaatcaagatggaggctcgcggcagccgccggcgcccgtgatcccggaggtctcgccggccacgggcccccgccctcgcgactgcgcgtccgggaggcgcgtgctgctgcccgcgctccggccggcgcccgggaggccgtggctccgcgcctccgcccctcggccagctcgcggctaccgggcggagtcctcgtctatgtgggcgcgctccttgggccgagccgccgccgccgccccccgccgccccggggctctgcgtccgcgcgccgggcgcgggcagctgggtgctcggcgccgccaggcccggcgcggagcgggcggcacgcggcgctaggggcgcggggcccgaggcgggcgcggccgcgggcgccgccgcagccatgagcggcagcagcggcggagccgccgcccccgccgcgtcctccggccccgccgcggcggccagcgcggctggctcgggctgcgggggcggtgccggcgagggggcagaggaggcggccaaggacctggccgacatcgcggccttcttccgatccggtgagtgcaactgcggccggcccgcccagcggcgctgccccaagcgctcggccgacccgccgcggagctgccgagctccggccaccgcgcgctggtgcccgcccgtccgtccg

SEQ ID NO: 111187 - DNA, 124 bp, Homo sapiens; identical to SEQ ID NO: 3833
  chr5:14144285-14144409
  hyper

SEQ ID NO: 111188 - DNA, 30 bp, Homo sapiens; identical to SEQ ID NO: 3834
  chr5:14144754-14144784
  hyper

SEQ ID NO: 111189 - DNA, 46 bp, Homo sapiens; identical to SEQ ID NO: 3835
  chr5:14144999-14145045
  hyper

SEQ ID NO: 111190 - DNA, 154 bp, Homo sapiens; identical to SEQ ID NO: 41363
  chr5:14205131-14205285
  hyper

SEQ ID NO: 111191 - DNA, 181 bp, Homo sapiens
  chr5:14581605-14581786
  hyper
aatcaacgggccttcgatgaaaagtgccaaggaggtcgccggatccgcccaagtggaattcccaagatgtttcccggggagcagcctcaggaacgcgcctggaccccaggagtagcttcccgccccgctgccgagcctcggaggtctccgcagttctggggcccgcgaccccgacagcgcg

SEQ ID NO: 111192 - DNA, 30 bp, Homo sapiens; identical to SEQ ID NO: 41365
  chr5:14665151-14665181
  hyper

SEQ ID NO: 111193 - DNA, 95 bp, Homo sapiens
  chr5:14810078-14810173
  hyper
ttcaagccacagacacggactctgtttgtgttccctggtggcactagtgcctgttttcctgactctgacttcctgggtctcggcaccacagatag

SEQ ID NO: 111194 - DNA, 30 bp, Homo sapiens
  chr5:14871830-14871860
  hyper
ggcggcggcggcggcggcagaaggttctgc

SEQ ID NO: 111195 - DNA, 30 bp, Homo sapiens
  chr5:14872597-14872627
  hyper
gtttccaggggcaacggtggcccgtgtccc

SEQ ID NO: 111196 - DNA, 30 bp, Homo sapiens; identical to SEQ ID NO: 3837
  chr5:14872919-14872949
  hyper

SEQ ID NO: 111197 - DNA, 372 bp, Homo sapiens; identical to SEQ ID NO: 41367
  chr5:15499744-15500116
  hyper

SEQ ID NO: 111198 - DNA, 118 bp, Homo sapiens; identical to SEQ ID NO: 3839
  chr5:15500570-15500688
  hyper

SEQ ID NO: 111199 - DNA, 208 bp, Homo sapiens; identical to SEQ ID NO: 3840
  chr5:15500735-15500943
  hyper

SEQ ID NO: 111200 - DNA, 30 bp, Homo sapiens
  chr5:15501663-15501693
  hyper
ggagtggaagagaccgggtcagttttacag

SEQ ID NO: 111201 - DNA, 162 bp, Homo sapiens; identical to SEQ ID NO: 3841
  chr5:16178990-16179152
  hyper

SEQ ID NO: 111202 - DNA, 140 bp, Homo sapiens; identical to SEQ ID NO: 3842
  chr5:16179266-16179406
  hyper

SEQ ID NO: 111203 - DNA, 245 bp, Homo sapiens; identical to SEQ ID NO: 3843
  chr5:16179554-16179799
  hyper

SEQ ID NO: 111204 - DNA, 138 bp, Homo sapiens; identical to SEQ ID NO: 3844
  chr5:16180182-16180320
  hyper

SEQ ID NO: 111205 - DNA, 420 bp, Homo sapiens; identical to SEQ ID NO: 3845
  chr5:16180371-16180791
  hyper

SEQ ID NO: 111206 - DNA, 30 bp, Homo sapiens; identical to SEQ ID NO: 41375
  chr5:16187512-16187542
  hyper

SEQ ID NO: 111207 - DNA, 30 bp, Homo sapiens
  chr5:16465751-16465781
  hyper
gttatgcaggtgtacgtcgccattgccagg

SEQ ID NO: 111208 - DNA, 30 bp, Homo sapiens
  chr5:16466042-16466072
  hyper
ccgctcagtcagcccgaggtggctgttgat

SEQ ID NO: 111209 - DNA, 30 bp, Homo sapiens
  chr5:16466281-16466311
  hyper
gtgaatggatgtcgcgaaggcaagggctgc

SEQ ID NO: 111210 - DNA, 30 bp, Homo sapiens; identical to SEQ ID NO: 3846
  chr5:16616444-16616474
  hyper

SEQ ID NO: 111211 - DNA, 293 bp, Homo sapiens; identical to SEQ ID NO: 41377
  chr5:16616790-16617083
  hyper

SEQ ID NO: 111212 - DNA, 30 bp, Homo sapiens; identical to SEQ ID NO: 41378
  chr5:16617412-16617442
  hyper

SEQ ID NO: 111213 - DNA, 346 bp, Homo sapiens; identical to SEQ ID NO: 41379
  chr5:16934293-16934639
  hyper

SEQ ID NO: 111214 - DNA, 1625 bp, Homo sapiens
  chr5:16935457-16937082
  hyper
cacaggaagcccgcacgttttgcaaaggaaataccagacaagacctttcttggagaaaggcaggtccccgctgaacattttattgggcttcctgcacccgggcagtcgagcgggcggatcgccccgcccgcgccccggcgcgcgccgcctcacctggcgcgggtgtcccagggcgccccgagagccagccacccacgcaaacggaaacgcaccttcgctacctcccggagcaaaatgcgagcgcgggacaggacgaaacaaaacctgcccgggcttactcatcagagactccgcggggggatggggggtgatttcaggagactcccagaaagttgcgccttccagggcttaggaaaaagtacccagggcgcgcggcgtggtgggcagacgcctctctccctgggctccggaggccaggtcggactgggagcgcacttacctcggtgaagaagttatccattgttccagcgcagtcccggactcgccgagtgccgctccgactcgcggaagtcagcgccgccgcgggtccggggaaaccatgcgtgtcacggcgccactcccgaggacgcgcgcccgcggggctcccctgctgccatcgcccggtcccttcttgtccttctcaccttttgttcgcccaaacccaagtccctaactcgcccgtcccgacggcagcctttgtctcttcttcctccaagttcctcactactgggcgcagcgctcgcaagcggagaacagctggtggcacattcttcccccaggcgggggaaggcggcggggtgctggcgagcgcggccccctccctctgcgctccggccgggggccctcggggcgggcaggaggacagcgggccgcaaagtgagcaggagccgcgatccccgcgcgagcgcttggaggtgagcagtcccgcgccgcggctcagccagctctcgcccgcgggactacagcccagcgacctcgccccgccctcccgcagccggccccgccctcccgcagccggccccgccctcccgctcgcggccccgcccccaggagcttggccctccgccaaccacaccgtctggccccgcccgggcggagcgccccgcccccttcccgaccaggccccgcccactctaagcccgaagcagccgcaggctcgttagcggacccgggagggggccgcgtgtttccccaggtcttcccacgtaggcgtggggaggggatttaactcttccctctgcagagagagactaaacaatcacttagaggggaggagaagggactgggggcttctgtgcctttcatgtttagcagacccgggaaccggctcaacacggatctcattaatgcagcccggtagactagcaatctcgggaaggaagcgcggtcagcggagctgccggggctgcggggccagatcaaagcggaagacggaggctaatcagaatttctggaagctgcattcccgtgttgactttctgtcctgcagtcgggtttgcttaagacgtttgcgtaacagcggggaaatgtagttttgaaactggaaggggacgtggccaatatcacctttaaaaatgtaacccttttctagacctcaaggaagcagagatggcagatggcactgagatggacgaatgatcaaaccc

SEQ ID NO: 111215 - DNA, 820 bp, Homo sapiens; identical to SEQ ID NO: 41381
  chr5:17216353-17217173
  hyper

SEQ ID NO: 111216 - DNA, 39 bp, Homo sapiens
  chr5:17217232-17217271
  hyper
agtccacggacagcccaggcggcgcggcgggggaagggg

SEQ ID NO: 111217 - DNA, 232 bp, Homo sapiens; identical to SEQ ID NO: 41383
  chr5:17217632-17217864
  hyper

SEQ ID NO: 111218 - DNA, 942 bp, Homo sapiens; identical to SEQ ID NO: 41384
  chr5:17217991-17218933
  hyper

SEQ ID NO: 111219 - DNA, 179 bp, Homo sapiens
  chr5:17218985-17219164
  hyper
cgtccccagagacatttccgccttgaaacgaactcggtggacagcccttgcccatgtaattctcactctgctgaaattagcacagcacacatgggtgcattttttaggaccttgtacaggttgacaacacctctgtctcccccgcggccactcgcactgtggggcgggctaaaacccaa

SEQ ID NO: 111220 - DNA, 77 bp, Homo sapiens; identical to SEQ ID NO: 3853
  chr5:17987027-17987104
  hyper

SEQ ID NO: 111221 - DNA, 17 bp, Homo sapiens
  chr5:17987223-17987240
  hyper
ctcgcctgccactcacc

SEQ ID NO: 111222 - DNA, 30 bp, Homo sapiens
  chr5:19988323-19988353
  hyper
tcgagccctgggctccgaggctgggtctct

SEQ ID NO: 111223 - DNA, 85 bp, Homo sapiens
  chr5:21459583-21459668
  hyper
cctccagcatttgccgcgagttattggcaagttcccctgcagtttgggctgtctctgtggctggttctgcggcgtgcggccagcc

SEQ ID NO: 111224 - DNA, 692 bp, Homo sapiens
  chr5:22852991-22853683
  hyper
cccaaagcaaaaccacgcacaagctcctaattcagctgccagatctgtgtgcagcttcgttcagcttctcactacgctaggcatcactttattaatcatgtatgaatttctgtgcatgcaccctgaagcgatcacacacacgcggtgcaatcccaatcaaaaacggaagccttacctgatggcagaaaaggcagctgcaggagcagcagcaccgacggccgcagcagggtgccaacagctcagccttgcgcggaaggtgagacccttctcttctgtttcccctttccaaatcactgtgccaacacactgctttgcattttgtccgttttcattcaaagaaggttctccaggccgggcagccagtagacaccactttcttcctggaagaggctgcctctcttctcagaaaagcctggacccctctctgtggctccctccacatttacccttcagatcaataatgctctcggagcggctggagctcaactgcagcggcgagcggcgagccaatgggggcccaggattccctcctgtcatctccccgccctcaaaacaaaacacagcgtgcctttgacacatcattgagtagtgaaaagtaattgaatcctatatttgaaatgtattttgtttgttctttttcccccctagcgttcattgtagaatgctttgaatgaatccgaggactccttagc

SEQ ID NO: 111225 - DNA, 189 bp, Homo sapiens; identical to SEQ ID NO: 3855
  chr5:24644973-24645162
  hyper

SEQ ID NO: 111226 - DNA, 30 bp, Homo sapiens; identical to SEQ ID NO: 3856
  chr5:28974970-28975000
  hyper

SEQ ID NO: 111227 - DNA, 122 bp, Homo sapiens; identical to SEQ ID NO: 3857
  chr5:29296853-29296975
  hyper

SEQ ID NO: 111228 - DNA, 30 bp, Homo sapiens; identical to SEQ ID NO: 3858
  chr5:30298760-30298790
  hyper

SEQ ID NO: 111229 - DNA, 447 bp, Homo sapiens; identical to SEQ ID NO: 41393
  chr5:31193843-31194290
  hyper

SEQ ID NO: 111230 - DNA, 383 bp, Homo sapiens; identical to SEQ ID NO: 41394
  chr5:31194311-31194694
  hyper

SEQ ID NO: 111231 - DNA, 54 bp, Homo sapiens
  chr5:31194760-31194814
  hyper
cggctggccaggctcaaatctgggggataaagccttccccggactgattggaga

SEQ ID NO: 111232 - DNA, 159 bp, Homo sapiens
  chr5:31532166-31532325
  hyper
agtggcaccgcccgcgcctccggaacaggaaaccgagggaattaaaaagcaaacctgagaaagctgggccaagggagggaaaactcttcagcccaccgcagggccttgtgcgcggtgattggcgcgtcaacgaaagcgatggacgtctagaccaatcgt

SEQ ID NO: 111233 - DNA, 13 bp, Homo sapiens
  chr5:31639074-31639087
  hyper
ctcacccagagag

SEQ ID NO: 111234 - DNA, 720 bp, Homo sapiens
  chr5:31639164-31639884
  hyper
cgtccctgtcactcggggaagggagttcccgcccctcgaatcaaccagggggagggaatccccgcccatcctggaggctcggcggatcccctgcgcagcgaggcgaggagcggaccccagcgccggtgcgtgccggccccgggcagcgggacgcggcggggcggcggctgcaggcagccgaggagccgcaggccgaacccaaggcaccgggattgcgcctcccgcggctgccggcgaaccgcggctctgcagctcggggcaggcgcggcggcggcaccggtggtggccgcggtggcggcagctgcgcggggacccgccgggcggcgcctgggtctggacgcgcgaggaagccgcgggagcctcggccaagccgcgagcaggtgaagcgaccgtcccgctgcagccgggacgcgcggctccgggtgggcaggggatgggggaggcccggcacccccgagaccgtgtgtgcccaggaaagtttagctacaaatccgggtgcgggaatcccagccctggcagggcggggagtgaggacgccgaaccggggtcccacgttgggcggcgcaaactcctctagcatccggccggggacggggagggcgcagcccaggggagggggctagacagagcgggaccgagacagcgggacaaccggagacgcactgccgggggtactcaagacagggccgggacctcctgctcgggcgcgcatcccgggtc

SEQ ID NO: 111235 - DNA, 1257 bp, Homo sapiens
  chr5:31854441-31855698
  hyper
aaggtgggaggggtaggggagcgggagaaggtataaaggaaatgcttcagtcgtgcagtcaccggcgattgtaattcagcggtgttaactttggttactccagccgaaaggctctgaccggggatttctggaaagttccctgacatcctgccccatacgatggttgtgattttagctgggggctccacccctgtaagaactcaggctgccgcggattatgaaacggagtggtcatgaagtgaattgatgtgggaaggtggagcttcttgcaatggctcggagggagaacttttggtgcaaacgagggtctagggtagggcgctttttcctctaacctgctccaggtttgccccaggaagctcctgagccctcggtgtaaacaaaggtgtctggatgagaagccccaaactccctgaaatcctccccagggcggtttccttttcccggcgaggggagtgaccggggaggggatcttggaatgccgtggggttttgacaagtgagcaggggagtggcgagccgagtttaggattgcattacaggcttttcctaacctcctccaccgcggcgcggagggaggaggggggggtcctcccacagacctggagccggcggagagcagccttcgggaagtcctgcaggagccgcgttccaggagggcagctggcagccgccccaggcccccgggccgcctgcaggtgattaggctaatgagctgccccgggggcgcggagaccggcctggcgagcggattacccggcgcccagctgctgccggcggagactcccaggagctccggagaggaaccctccgaaggtgacttcagaactggaggtaggaaatcggcttctcaggcgaaagcctcaggttttctgatctgatccaggtcgggtgcagactggggctgaatccacaaatgtggagatttagccacagcctcggaggcgcggagcggccacctaagcgtctgcccttctcgtctcccggatcactggggtgtgttgtttttaaagtgggggatttgcgtgttgagagacggtttgtgttcctcgggaggagtaagtgacttggagctggtttgtcaatggctggacggaaggaggcgccccggctgtgtgtgacgggcagggaaggggtgcccagaggggacaggtaatagggggttccggagccacggcggtttcagaaccttggggcctgtgccgttgaagccccggtaggggcggggggcatggcagcagcccgggaaatctgtcat

SEQ ID NO: 111236 - DNA, 30 bp, Homo sapiens; identical to SEQ ID NO: 41399
  chr5:32193904-32193934
  hyper

SEQ ID NO: 111237 - DNA, 139 bp, Homo sapiens
  chr5:32313002-32313141
  hyper
tggggcagcagcggcggccaccagcactagcggctggggctccgcccatccccaaggccgcgaccgccgcgatgccgcccgcatccggctccgccgctgacaccgctcgccccgcccaggcccgtgggccccgcccatc

SEQ ID NO: 111238 - DNA, 252 bp, Homo sapiens
  chr5:32313198-32313450
  hyper
cgtcaggagagtttgacccgccgagattcaccaccttcctgcggcagagcccgccctcatgctttctctgattggcccgaggcgctgccggccgaaccccgctcccaacccattcttgagtgcacttggagagatgtttcctccaaccaatccagagagcgttctctccggactttccaacgattggatggcgaggataaaaccgtcgtccaatgatcctgcagtcaccaagttgtcgttagcaggggttca

SEQ ID NO: 111239 - DNA, 30 bp, Homo sapiens; identical to SEQ ID NO: 41401
  chr5:32567716-32567746
  hyper

SEQ ID NO: 111240 - DNA, 1165 bp, Homo sapiens
  chr5:32709812-32710977
  hyper
cggttccagaaagagcgataaggagagtgctgttaagggaggcgagcgctgacgccagaagttgccatatccccagaaaccccagtttgccttttcaccgtcgcaagtgagaaccagagcgcgttaaaggcctcggagtaaaaaacgcagcgtctgggactgcggcacccgggttgagtcgggtgcaagtttctgccgaaagagggcgtcggtctgagactaaaagaaatttgtggacacggacgcctagtcaaatgaaagaccattttaacacattttcaatgtatttaaatgtgcgggacttaattgtcagaattctcccgcccagtgtagcccgttcacattgcaaatgacttggctgcagtaggcacagaaggtccagttccattttgacccgccccgccgcgcggcggactcccgcgatgctcctctggtcacggacttctccagagccgcttccctccggtctccaccgctgctgtggctatggccagtgggaggactgggtctccgaggcaggacctttcttggagtcgcggaaccccagcacagtgcctcgagcgctccagagaaggagcggttggatctttgagcactcaggttggaggggagcgtgtgtcgtacccgggggacctaccgggaacgttttgggaaagacagtccctttatttaggtacctggtttagcaaacaaagccccgaggacgctttggggatgctttccaagctttgtgacacctccagaagttgaaccattccctcgcctttgggagcaacaagtttcactttcctgctctcagtgcgctgacagagggtccgtgagctgggacactgtgacctcggcaccgctgcgattccagcgcaaacctgcgtggcccagggggagggggctggcgcggggctgaggaaggcggggtgtaggtgacgcccgggccagccgggcacaccaggtccgcgatggagccatctgcactgggaccttggtccttgttccctgaccttgcgccgagggaccaggaaggtcaggtgctcgccccgcgtcggtgcttcaggagggaatgtggccagaacgagaaaggtgagagcaagcggcacctaaggatttttgcaccgaaaccacaatttctagaaccatccctttcccccagtcctggtttttttttttt

SEQ ID NO: 111241 - DNA, 1065 bp, Homo sapiens; identical to SEQ ID NO: 3865
  chr5:32711036-32712101
  hyper

SEQ ID NO: 111242 - DNA, 812 bp, Homo sapiens; identical to SEQ ID NO: 41404
  chr5:32712289-32713101
  hyper

SEQ ID NO: 111243 - DNA, 72 bp, Homo sapiens
  chr5:32713504-32713576
  hyper
acgcggacgtgtaatcgccagtgtggcccattttacggtagggtagaatctgagggaaggcggactgagatg

SEQ ID NO: 111244 - DNA, 30 bp, Homo sapiens; identical to SEQ ID NO: 41405
  chr5:33441289-33441319
  hyper

SEQ ID NO: 111245 - DNA, 432 bp, Homo sapiens
  chr5:33892012-33892444
  hyper
cagaaataaagcgctcgcctgtggcccagcaggaagatgcaggggtgcatggtcaggcgcgagaaggcagcgactgcaaagctgcccgcgatctccctgtgcttttttaagcagaaaggagctagacacctttttcccctccctcctcctaaaaggggagtgattcagctgacagtgtccgctttcggcggggtgtggaatgggccagagcgggagggcgcagcccaccccggtccccacccctccgcctcccgcatgccccgcggcctcgcagcccgcccgctcggtgcatcttcctcccggactcccacccccgcgctcctccggccccgccccgaacgccaggcccagctggccgagccggccaaataggggagacccgggagagccgccctgggaggcactggaggaagctgcgagtgagaggccccc

SEQ ID NO: 111246 - DNA, 597 bp, Homo sapiens; identical to SEQ ID NO: 41407
  chr5:33936114-33936711
  hyper

SEQ ID NO: 111247 - DNA, 10 bp, Homo sapiens
  chr5:33936969-33936979
  hyper
cgctgcagct

SEQ ID NO: 111248 - DNA, 194 bp, Homo sapiens
  chr5:34007306-34007500
  hyper
acctgtgtatgccagcgtctgccgctctgaaagggggaagtctacaaaaaggtgaaaatgatgggaatgggtaactgggcttcagggagcagatgctgagacttagaacgccagcatttcaggcagggaggagcgttagcctgggcccgtggatggcttgagggtacagcactccaaaacggtagccgaatgac

SEQ ID NO: 111249 - DNA, 30 bp, Homo sapiens
  chr5:34007794-34007824
  hyper
ggcgggtgcagcctcgatcgaacggccagg

SEQ ID NO: 111250 - DNA, 53 bp, Homo sapiens; identical to SEQ ID NO: 41408
  chr5:34008089-34008142
  hyper

SEQ ID NO: 111251 - DNA, 80 bp, Homo sapiens; identical to SEQ ID NO: 3870
  chr5:34486430-34486510
  hyper

SEQ ID NO: 111252 - DNA, 1690 bp, Homo sapiens
  chr5:34655745-34657435
  hyper
tcccatgcgcaatctcgcctgtcagttcaggctgtaggtttctcctttctaactcctgagcagaacaacactgaacggtggtagtcttgccttgccacccaatgagtgctagaaaacagtcacttcaaccaattggttcagtccggagaacgtgagcacattctactttactttctgttcaatgattttggaaaacaaccttttagattctggtcagaaggggcttggatccgtgactttgaaacactcgccactaccacaaacgactttggaagttaatcagaaataaacagtatctgggatctcatccgtcctaaacccaggggtcagagcgtggggggcttccactaacttcaggttaagaggatgaaacagatccgcggagaagggtcccacgatccctggagactaaaagcaagccacgaacagccgggacgcgcgggccggggagatgcgccgggggctggagggcggagagcaccccccgcaggtcccggccagagcccggggccgggtcacctgactcgcggaatttggggccgcgaggggtggaatgggaggggaatggttagcgcctcccttcccgctcccactggatccaggtcggcgggggccggcgcccggcggccacgtggtggtgctgccgctgcccccgccccgccggcctagcccgggagctcggcgcccactgacccccgcagcgggggaggaggagggactgcggcgcaggaagccgagcaggaagcgagcccggcggccgcgttttcctggggaagcggcgggcggggtggagcagccagctgggtccggggagcgccgccgccgcctcgatggggtgagtgcgcggcacggagttgggaggctcccggcgcggggtcccgggctcgtgtccccgcctttgtgtctggagctcgggcgcgggaggcgctggggacggcgcccgggcggagcggctgagcgggctgcagccggggtcccgccacctctccctggtccaccgccggcagcccactgtctgcggagagcagatctggggacaagaggaaggagaggaaggtggagatgagggtagagcgggaagacccggccaagttaggagaagggttcttcccgggtcctccgcgactcgcaggccggctggggcggggcgcggggcaggggccgcggcggagggagcgcgggtgggaatgaatgagcagacccggagatgcaccctggagtctgcgccgggtcccacctgtttcgccccgcgcggcgcctcgctgcccccgcgtcggtgctgctgagcccaatccgcctcccggctgaacttggaggaggtggggagggaggtgcgagcgggagactccgggtggctcccaggacgcggggtccgctattgttcctcctctgactccagggagcccctcggccggcccaagggcgggggcgagacccctctgggcctgcccctgccccctaccttgttttccccgccgcagctcggggagaacggatgctggagttggggcagactcggggccgccgggacttcgggagtaaggaggacgtggagccaccagaaaggcgcccgccatctcccgcgacccctgcctggtggggggtggggggtggggtgtcgtcctcaaccaccttcgctgccttcttgggcaggttggtgtcggtttagtttctgcggtttgcagggttg

SEQ ID NO: 111253 - DNA, 30 bp, Homo sapiens; identical to SEQ ID NO: 41411
  chr5:34839087-34839117
  hyper

SEQ ID NO: 111254 - DNA, 30 bp, Homo sapiens
  chr5:34915097-34915127
  hyper
gtgctggcgaggtccggcgagctccacctg

SEQ ID NO: 111255 - DNA, 7 bp, Homo sapiens
  chr5:34915397-34915404
  hyper
tggcggg

SEQ ID NO: 111256 - DNA, 182 bp, Homo sapiens
  chr5:34915469-34915651
  hyper
cgggacagcatcgcttactagtctcggggtccccgagtgcggaaaccctacctttgcggtggggtctggacgcccgagagcccttctcagcaaagtccctgaagaggagcgaggcggctccgaggaaccgcggaggaagtgaagccagtcccgccactcttcagaccggccctccacctcgg

SEQ ID NO: 111257 - DNA, 189 bp, Homo sapiens
  chr5:34915875-34916064
  hyper
ctttgcagttcaggcgaagaagccaaaaagaaacgaaatagatgcggagccgccagctaagcggcacgccacagcagaggaggtggaggaagaagagagggaccggatcccaggccccgtttgcaaggtaggaggggatgtccccgggctacacctgcggcggcggctctgtgcgccttttcttgggtt

SEQ ID NO: 111258 - DNA, 89 bp, Homo sapiens
  chr5:34929945-34930034
  hyper
ctgggggtgcggcgcgacgccagcgaggaggagctcaagaaggcctatcggaagctggccctgaaatggcacccgggtaagtacctgtc

SEQ ID NO: 111259 - DNA, 30 bp, Homo sapiens
  chr5:34930603-34930633
  hyper
ggacatgattctgccggggaaggttttaat

SEQ ID NO: 111260 - DNA, 731 bp, Homo sapiens
  chr5:35229745-35230476
  hyper
ctccggcttctggcccggaggctgctcatctgcccctacccccgctgacttttgggaggagcaacacctttcaggtcagcattgctaaccctaaactttccccgccggatgcccgcgaggctgctgcggcggcggctgctgctgatgggagagtctcgagtccggctttcatcacatcacctgtctgcgccccttccccctccccgctctttttttcttttctttttattttgacgcaaataatttgcattctgagaatcccacaatcaacgccgaaactcatgctcaaggatacaggtgaagatgcctttgacaaaggcgaatgcgagccgagtgcagtttgtaaaagctggggttgggggcagtggtggaggcaaagcaccttaagagtattttttagcccctctgagaagggacatccgggcgggaggcgggcggatcccgggcttccccgccggctgccgactctggctcctggctggcgttctctccaggagcccgcgccggtggccccgctctccccttcagcacgcgggcctcgaacccgcatcccggagagcggccgcccgcgcagcccctgccgcgcgccgtcggaggcggcctcagctcgccatgggtactcacttttgccagggagcaaagtctgccacatcagtcgatgagtacttcctgcacgaggacatgaagctccattgtgtggaaagctgtttcgcgaacggtcggtaaaatcc

SEQ ID NO: 111261 - DNA, 175 bp, Homo sapiens
  chr5:36066733-36066908
  hyper
ggagccctggcagtgcgagtatccgggacgcgcctgtctgggaattctccggccaagcactcacctactgtagatattgtcaggattttggcagcctctgagagcaggaccccagggagaaggaagcccactagaagaagcactcgctgcccagccatgctcacttctacggaag

SEQ ID NO: 111262 - DNA, 8 bp, Homo sapiens
  chr5:36066939-36066947
  hyper
cgcccggc

SEQ ID NO: 111263 - DNA, 54 bp, Homo sapiens
  chr5:36151262-36151316
  hyper
cttttaggcggcgacgcaaacacacgtagccagctgagcgacagcaagcaacca

SEQ ID NO: 111264 - DNA, 30 bp, Homo sapiens; identical to SEQ ID NO: 41415
  chr5:36152120-36152150
  hyper

SEQ ID NO: 111265 - DNA, 88 bp, Homo sapiens
  chr5:36152363-36152451
  hyper
tatgcacaggtaaacggattgcaaaaaggggaagagcatgaaatggaccctcttaataattcttttaggccgcgaatatcgctactgg

SEQ ID NO: 111266 - DNA, 30 bp, Homo sapiens
  chr5:36241175-36241205
  hyper
ccaggggagctgttcgcagggcgtccagac

SEQ ID NO: 111267 - DNA, 229 bp, Homo sapiens
  chr5:36242121-36242350
  hyper
gggagaaaggtgggcggggaagaaatggaggccccagctagtgggttttgtttgtttgtttattcgtttcactcacgcctgcataatggctgcttcgccgcccgggggcgacctccccgcaccacacgcttccccgaggtcgctcttctcccgcccccaggctaactctatcggccaatcagagcccgcggcggctccggatccgaggggccgcgccattggctgcggc

SEQ ID NO: 111268 - DNA, 104 bp, Homo sapiens; identical to SEQ ID NO: 41417
  chr5:36606431-36606535
  hyper

SEQ ID NO: 111269 - DNA, 69 bp, Homo sapiens
  chr5:36606741-36606810
  hyper
gcttacgcgcgctgcggattgttgctccgttgtacctgctggggaattcacctcgttactgcttgatat

SEQ ID NO: 111270 - DNA, 70 bp, Homo sapiens; identical to SEQ ID NO: 41419
  chr5:36607362-36607432
  hyper

SEQ ID NO: 111271 - DNA, 492 bp, Homo sapiens; identical to SEQ ID NO: 3876
  chr5:36690186-36690678
  hyper

SEQ ID NO: 111272 - DNA, 449 bp, Homo sapiens
  chr5:36693071-36693520
  hyper
cctctgcgcccggggcggcccagcaacccctgctcgcctccgcagaggccttttgtcccgcgggctctcccagcggccccgcgctgcgtggccgttttgtgaagggcacaatccgatgttctgaggagaccacccagcttcctctcccagagtctaccagagaacaaaaccgccccttcgtgtgccagcgacctccccttctgccagaccccctcccactggcctcctccctgccctgccaagcggggacggagagccagccggccctggcccggtgggaacccagttgatggtgcgcttattagctgtcctgagcgcggggacaaactttctgtacctgggccgctgctgccaccctgcggccaagacctttctctaggccccgatgacccagagcagcccggaccagacaacgtgcaaagaggagcgcttacagcaaactcctccct

SEQ ID NO: 111273 - DNA, 759 bp, Homo sapiens
  chr5:36744874-36745633
  hyper
acaaggctttatttcgtcccggcagctggcccctgggcacggcccccagcccggcgtcccagttccagccgcgctgcaggggcgcgagggtgcccggctcgcaggtgtccgcgcgcaccgcagggctgcccgagtgcggctggcggaatccctccccagctggggaggaaggcagttgttttcttcctggtggaacgttccacttgaaactgttccacaagggctgttctcgcctccgactccgggaggaactgtaattaacacagcaacaaacgcccacgacgctaactggcaaagggagtgtaacacgagccgctgctacaaccgaactgggccaattgctttcccttcttgcctcccatttggtctgttttggttccgcagtcatccaactgtagcgtttcttaaaacatgtcagtggctggtgtttgtgttttgggttgaacagtttcacacacgtcgctggagcccgtgctcgaccagctgctgtgctggggatttgctttctgcggctttgggagtgtcaggtagcaaaacgaagagagtagtcgactagaacggtggcggggaggaggaggagggattgtctgcagtggagtcgggagcctcctccggaccaggacaggtaaaaccggtctgccaggtctcagggggagcgggtggagacgtcccacctcacctggctgcgctccgactcaggctcagccggcaggttctggggcaatgggggaagggagaggggccgggcccttgtgggtc

SEQ ID NO: 111274 - DNA, 30 bp, Homo sapiens
  chr5:36877611-36877641
  hyper
tcggtgacaggcctcgcccgggagtggagc

SEQ ID NO: 111275 - DNA, 791 bp, Homo sapiens; identical to SEQ ID NO: 41424
  chr5:37248994-37249785
  hyper

SEQ ID NO: 111276 - DNA, 317 bp, Homo sapiens; identical to SEQ ID NO: 41425
  chr5:37370925-37371242
  hyper

SEQ ID NO: 111277 - DNA, 220 bp, Homo sapiens
  chr5:37371525-37371745
  hyper
aggttggtcaggttccgttggtttaagcgcgtgctcgacctgagtcttggaacttcccgcgtcggtatccgctaactgcagctatatgagttcgcgcatgagcgcgcagtttggttctccaagtaactgcttttgtgagagtagttaagaattggtaggtcgctgtcacagagagggatataaaccagtatctcactatattcttcgcgggcttcagtgt

SEQ ID NO: 111278 - DNA, 154 bp, Homo sapiens; identical to SEQ ID NO: 41426
  chr5:37379257-37379411
  hyper

SEQ ID NO: 111279 - DNA, 1273 bp, Homo sapiens; identical to SEQ ID NO: 41427
  chr5:37836726-37837999
  hyper

SEQ ID NO: 111280 - DNA, 1486 bp, Homo sapiens
  chr5:37838249-37839735
  hyper
aaaagaatttgggacacttctcgcaggcaaactgggaaagcggtctgtttaaagggccaggttccaggcccgagagcacccgaattgctagcgggaaagggctagggacacggcggacttcccagagatcggacacttgttacttgttgaaaaggcgccaccttccctgacaaagcgaaggcgcagcgaaacagtacgagtttggtcgaggccggctttgacggctttgcgggactgggtgcgtgaatgaggttggaagaaacatctcttccttgaaatacctaagcatatattccaaacactgagcaagagtcgagcgcgttctaacatctccgcagcaggggccggaagagttgcctttgtccccgcctatgagcagaagggtcgcgagctctgggatgggtaagccccccgggggcgcgcacatgggtcctggcggcggattctaccaaagccgaaactagctgggccccaggaagctggcgggaacccgcgaaagtccgtttccagcccgaagagggttcgtttttcttcgttggggcaggaaacaaaccaccagtgcggaattagcctcgaggtggtgtaaagtagtggcagtggtggtggggtgtttttggaaggcggcacagagtacaggagaaaaaggggtcattaaaataataacctcaatggcctagtggagtctcaagaatacgttcgagacagagatttgaatccaggactggcaagaaagcccctctcctaacctcgacggggatggttagttggggtggagggcgttaggaacgtgcaggcaaccgggtgaggaatgtagctttgccagacctcgcccggaggaggtgagccctccatttttaggttctcagcacctttgcagcagcccctcccccggcctgcgcttttccttggcacagatcaaaacaagctcaatagtaagttgcactcttggcaatgatagtatctctgcacgtccagagaggacacatttcgacggcggtgggttcgaagatgacccaagccctgaatcgttctgtgacttgacggaagagcacctggccgagtcggggaaggaaactgcccctcttgggcattccgggtccaggcgcatctggggctccacagatctttgcccacgtggaaaaggcaacatgcccctccgaaaggccggcctctctccggttctacttttctctctcctcgcatagcttaggttccctctagtctttccactttctactctcaccgtttgctctggggtccagacgcacccctctgactagggcgcccttcagccggccgcacccacccgcgacgcaggcaccacccgctccctgctccccggcccgctccctcacttacctcggatcgggtctccgcagaccctaggttggacattaactccaggtgccccaagtcccagccaggagacccatccgggctgatggctggagcgcggagccccgcccaacaggtcaggggcaagagt

SEQ ID NO: 111281 - DNA, 412 bp, Homo sapiens; identical to SEQ ID NO: 3884
  chr5:37839807-37840219
  hyper

SEQ ID NO: 111282 - DNA, 95 bp, Homo sapiens; identical to SEQ ID NO: 3885
  chr5:37840267-37840362
  hyper

SEQ ID NO: 111283 - DNA, 280 bp, Homo sapiens; identical to SEQ ID NO: 3886
  chr5:37840529-37840809
  hyper

SEQ ID NO: 111284 - DNA, 508 bp, Homo sapiens; identical to SEQ ID NO: 41433
  chr5:38257400-38257908
  hyper

SEQ ID NO: 111285 - DNA, 1314 bp, Homo sapiens
  chr5:38257944-38259258
  hyper
cgccaggcttaacttggagtttcatctcctccccaggagggtctcaagttgccttcctctgccgggaagggcccccactcccccgctccaggccctaatctccacccggcgtcccagtctgagcggcctggcctcagctctccatctgcgagccttaaatcccatttatcttcttagcgcctcagacccggacggtcccgcctctcttcctctcacccccaccccacttgcaaatcacagacccccgtctacccctcgcatcccccaagtgcgctggaccaactacagcaacctttgaggtgttagaaaaagtcgcctagaggggcgcggcaggaggagggcccaggtggggtggagggggggcgccccaagatttcagggtgaggaccgcggagggtcctggacccgcagtcgcctaactcctgccctgcgtctccagtgcttgaagtcggtccctcccaggtccccaatctaggtcaccagcggggaagggctgcgctgggggtcgctagagagggtgaggggcgggctgtctgcttccgaggtgggcgaggagtgaaggtttcagggcctgtccctctcacttccactcgattgtaatttcatccccgggccggtcgagcctccctccctcccgcggccagcccttccctcccagtcggcctccttcgtcgcccccgcccccgcgaaaagccctgcagcttgcagccggcttcactcgcgcacgccgacctcccggctgcagtcctacctcttggaactacccgtgtttccgggcccagccctcgcagccccccacctcctcgccccggcccggggatccgttggggccgcgtcccccacgcgcccccggagacgccctttccgtgtgcgcccgggacttggtgaaactttgcaggcgccggctgcgaaatggatttaatccgaggcgtcttgctccggctcctgctcctggcttccagcctcggacccggcgcggtgtcgctccgagcggccatccgaaaaccaggtaatgcgctcctccgcccagagccaccacgccccgagcgcccctgctgggctccggggcgaggacacagagcgggcagcgcaccgcctccctctccccgaccaacgtctgcttaactcgcttcagctctgccaggagctgagaaaagacgcaaacctcgccctcccccgagcccgggcggcgctagggatatttatttattaaaagaatgatcaattttccagacatagtagatagaggtggtggtccccgtgtttgaccgcagagagctgacagttgggacagcgatcgtgctgtctcaatta

SEQ ID NO: 111286 - DNA, 30 bp, Homo sapiens; identical to SEQ ID NO: 3892
  chr5:38353672-38353702
  hyper

SEQ ID NO: 111287 - DNA, 267 bp, Homo sapiens; identical to SEQ ID NO: 3893
  chr5:38556093-38556360
  hyper

SEQ ID NO: 111288 - DNA, 262 bp, Homo sapiens; identical to SEQ ID NO: 3894
  chr5:38556411-38556673
  hyper

SEQ ID NO: 111289 - DNA, 787 bp, Homo sapiens; identical to SEQ ID NO: 41439
  chr5:38556773-38557560
  hyper

SEQ ID NO: 111290 - DNA, 504 bp, Homo sapiens; identical to SEQ ID NO: 3896
  chr5:38845660-38846164
  hyper

SEQ ID NO: 111291 - DNA, 28 bp, Homo sapiens
  chr5:38846468-38846496
  hyper
cgcccccggcctgcctacctggtgggtg

SEQ ID NO: 111292 - DNA, 159 bp, Homo sapiens
  chr5:39075113-39075272
  hyper
cgccaggcgtaggacgcgagaagggggtgcagcggccggggaccagggcggcggtccccgcggtgggatcgcgccagcgccgggaggccggggagagggtgttctctgccgggagccgaggcgaggctgctgggtactgtgtccggcttttatggctct

SEQ ID NO: 111293 - DNA, 30 bp, Homo sapiens; identical to SEQ ID NO: 41443
  chr5:39394973-39395003
  hyper

SEQ ID NO: 111294 - DNA, 43 bp, Homo sapiens
  chr5:39424509-39424552
  hyper
aggagttaattaggcggtcagcagccacctcagtgtcctagga

SEQ ID NO: 111295 - DNA, 42 bp, Homo sapiens
  chr5:39424611-39424653
  hyper
cacacacacacacgacacaaaaggaggcgtttgttaaatgtc

SEQ ID NO: 111296 - DNA, 674 bp, Homo sapiens
  chr5:39424890-39425564
  hyper
ttcgaagctactcaccggctagctattgcctccgtgaagcgagcatgacttccccgcgcccggagcctccaggctacagcgcagcggatgcggcgggcctcgcttaaatagccgccggccgggagcttcggagccgcgcggccactcccggcgagagatatggttctaatcagatgctggcagctgaggactccccaggaatgtgccaggatgtttttgctgcctgggcttggtaactccccctcaacgtgtctgcagagtcttccaaacttaactgtttattaactcgcgctgcagcggcgcagaggaccccgctcccctgagctccgcgagccccaccagctgggggcgatcgcagggacccagcgacgggaggggaaatgtgttcggggagaagtcaaaagccccagaccgacgcgggcggggggcgggtgcaaataaggacaggaaagggaagctctggaggaaaggggtgggatccaccgagcttcgtttcacagatccgttccctggattgccactgcgagtgatgtggcacacggagtcatcctaaccaacccgttggggccctttgaacaaaggactgcctttactcctgacttttctgacaagggacaacggttcctgcgcagatctgcagtttctaaagttgatcgcgcgattggatttgctcc

SEQ ID NO: 111297 - DNA, 30 bp, Homo sapiens; identical to SEQ ID NO: 3900
  chr5:39851507-39851537
  hyper

SEQ ID NO: 111298 - DNA, 30 bp, Homo sapiens
  chr5:40680018-40680048
  hyper
agagggtggaaaggcgagagcggagctcca

SEQ ID NO: 111299 - DNA, 735 bp, Homo sapiens; identical to SEQ ID NO: 41447
  chr5:40680492-40681227
  hyper

SEQ ID NO: 111300 - DNA, 578 bp, Homo sapiens; identical to SEQ ID NO: 3902
  chr5:40681261-40681839
  hyper

SEQ ID NO: 111301 - DNA, 31 bp, Homo sapiens; identical to SEQ ID NO: 3903
  chr5:40797553-40797584
  hyper

SEQ ID NO: 111302 - DNA, 190 bp, Homo sapiens
  chr5:40798279-40798469
  hyper
gagtctgcgcatggcgctgcgggagggggcggagggggcgggcagggccgcgccgggggcgggcggggagggggtggggacgcgggagggcagccaccgagccgagtcaccgccctgcgccgccagcccaggccccgcagcctacgtcgggcgcagacgctccccctggcggggcgggcgggggctgcca

SEQ ID NO: 111303 - DNA, 30 bp, Homo sapiens
  chr5:40834601-40834631
  hyper
catttgccacaggtcgacttctgaaggtgg

SEQ ID NO: 111304 - DNA, 105 bp, Homo sapiens
  chr5:40835227-40835332
  hyper
agaggcacaaaggacgaggatggaacgcgattcacaaacaccacagtcacaactcaccatctcgcttctgcggccgagaccagaaagaccggaagagaaggcact

SEQ ID NO: 111305 - DNA, 506 bp, Homo sapiens; identical to SEQ ID NO: 41452
  chr5:41510363-41510869
  hyper

SEQ ID NO: 111306 - DNA, 797 bp, Homo sapiens
  chr5:41870077-41870874
  hyper
gagcgccaaagggctcgggagcgctgccaggagtcctcccgccccttctcagcctctccgcgcgcttctttatcgcgtctcgctccatcagggaagcgactgcagaaccaagcaaaggcggtcatccgaggggccggcgaggccaggaacgcgtcgccgcgtgtccgtgaccagggcaccgcgccacggatgccagatcccaggctggagagagcgggtaggggcagagaagaaaacgcgggcaccactcagggtttggtccacgttcttcctgcccatggccttcctcttcccccgcactttaccttgtaccaggttgccccagatccgcgggcagaggcgcagagccgaagcccggaggagaggagtttgagagccgccatcttcgggcggtgaggcaggaggaggctgcgggttggagcgcgcgtttgagcgtcggtgcgcgactgcgaaggaaacccgggcgggctggaggctcgacagcgcgtcgatgacgtcctcccggcctttcgagccgcacgccaccggcgcgctgctggctgctgcttttaaaagaagtgaggctgggcggggccccggcggggagaagaggctctgtgcagccggggcggatcgcggggaagttcctctcagcgcctcaggtgtctgggcgtgtgcagctgtgttggcgcacacttgccgctacagcccttctgtcagccctttagcttcgatggggcgctggtggccgcctccccctaggttgtggatgagtcttggcctagggttcagggccctccggccgcgggaggatctcc

SEQ ID NO: 111307 - DNA, 344 bp, Homo sapiens
  chr5:41904221-41904565
  hyper
gaggcgtgtctcaacgtcacacccgcccctagtctccttgctgctcaggattatgggagggaagggaagtccaggagggaaaaatgacccggaaagacctttgccggcctgggccagccctcttccggagctgatgtctcctcccaccaaccaggagaggtccgccctaggccccgcccgtgccgggggatcaggtgattgcgggccaacacggtcacgtgaccggggcgcacccgccgattgtggccatggcggccgcagtctctagtgtggtgagacgagtggaagagctcggggatctggctcaggcccacatacagcaacttagcgaagctgccggtgaa

SEQ ID NO: 111308 - DNA, 30 bp, Homo sapiens
  chr5:41925132-41925162
  hyper
gtacaggggctctgcggttggcgtggctga

SEQ ID NO: 111309 - DNA, 317 bp, Homo sapiens
  chr5:41925470-41925787
  hyper
gggccgcctggaggcggccatcctcagcggctggaagaccttctggcagtcagtgagcaaggagagggtggcgcgtacgacctcacgggaggaggtggatgaggcggccagcaccctgacgcggctgccggtgagcgtcggccgcaggccgcggaggacagtggggccggcccgggccggagggacctcccctggagccccccggggcctggggaactctcgcgccccggcctgggtctggctccgtccatgcagccattcctggcagtgtagtcaccgagaagctacagttgatcagaagcgtcttggcgtggacc

SEQ ID NO: 111310 - DNA, 74 bp, Homo sapiens; identical to SEQ ID NO: 41456
  chr5:42423455-42423529
  hyper

SEQ ID NO: 111311 - DNA, 517 bp, Homo sapiens; identical to SEQ ID NO: 41457
  chr5:42423573-42424090
  hyper

SEQ ID NO: 111312 - DNA, 772 bp, Homo sapiens; identical to SEQ ID NO: 3910
  chr5:42424336-42425108
  hyper

SEQ ID NO: 111313 - DNA, 817 bp, Homo sapiens
  chr5:42949350-42950167
  hyper
agaaccaaaacaaaccgtaattccgacggaaaaacagcgagaaaagaaaacgaaatgaaactgacactaagcagaccgtatagagaagtagccctacagaacgcagggattaaagagagcttcagaggccaagaaccacctgtgtccgggaaatgagcattgctgccaccaggaaactgtccgctagggctcggcactactaaggacctcgctaacaataatctggctgcgctgggactcagcaagagcagacacccagcggattgccctggtgttgccaaacaaatgtccatttaggtgccataaatggtgctgctagaaagaaactgcgggctcttagataggagtcctgtctggagaaatgaactgactgtgtttaaatgtgttgtgacagaaaaatgtgttgtggcatcttattgtgttttaagtcgtttaatgtgttttaacccgttgtaatgtgctgtgagagaaaaagccgcagctaacggtgctatggaattactagagagcacagaggctgggtgcagtcaccggtctgcaccgtaaaaaggggttcaggaagttcctacgagatattagcgtttctaggacccagaaagagacagcacagagaatttacgggccccgaaaacatgaaacgtcctgttgggcgctaagaattgtgcaccaattgagaaaacgcccagtgggcgctactggcaaaagtgctgacgcaaaaccgacagctccgcataagaagcggagtcgccagacagaacccgggacctggcagcagcaagtctgagaccgagatcggctccccgcgtcctgagcatgc

SEQ ID NO: 111314 - DNA, 579 bp, Homo sapiens
  chr5:42950732-42951311
  hyper
aaaaaaaaaaaaaaccgcattcgctggtacccagatttctacaggagttaaacgtctcctgagcagctaaagcagagcttactagtaagaaacttgcaatgactaaggaacttgaggcagggctaacccggggttgttaggattagaattccgaggctacaggaaacccggaattgctgagatgtgagtcacagggtgactcagcctcgttacgatgaaacagtaacttcctactacctagaaatcgcagccagggccagaccggtgtttgtcctaagtcggaacttgattgggctgagaaatcacattgtgactattccacgacttgaacaaggggtagaaatcgcaggcaccgcgaaatagaaacttcctaggaccaagaagccaacgacgcccgaaaccgtggggtcctgtcacagaaaccccagcagcgcagccaccggactgggttctggaggccgagccgcagtccgtgcggcggcgctgggaagagaaggcgccccggcagctcccctgccaccggccccgaggagcggctggctcccccagcccagcgccgccgccgcccggtaactccag

SEQ ID NO: 111315 - DNA, 692 bp, Homo sapiens; identical to SEQ ID NO: 3913
  chr5:42951419-42952111
  hyper

SEQ ID NO: 111316 - DNA, 370 bp, Homo sapiens; identical to SEQ ID NO: 41464
  chr5:42991871-42992241
  hyper

SEQ ID NO: 111317 - DNA, 222 bp, Homo sapiens; identical to SEQ ID NO: 3915
  chr5:42992375-42992597
  hyper

SEQ ID NO: 111318 - DNA, 251 bp, Homo sapiens; identical to SEQ ID NO: 3916
  chr5:42992782-42993033
  hyper

SEQ ID NO: 111319 - DNA, 241 bp, Homo sapiens; identical to SEQ ID NO: 3917
  chr5:42993332-42993573
  hyper

SEQ ID NO: 111320 - DNA, 381 bp, Homo sapiens
  chr5:42993812-42994193
  hyper
ctcccgacctcagatgatccacccgccttggcctcccaaagcctcaagtttctaagtcgtggcaagttccggcttcctactagtacggcttgctttagctgcgcaggagatgttcaactcctgtagaaatctgtgtaccagcgaatgcgattcatttaggtttagcgatgaccagtttagcagtgcctgggagctcttacaccaaggctagctgcgcaacatcaagtcccgccttagctatgttggtgttttttaaactcccatggaagtcaggaaatgccggcaaaagcgatttctggtttacgaagctcggtttgacgatagcaatttccgccgaacgcgactttttcctcttgtggaccaagtcgggatatatcagct

SEQ ID NO: 111321 - DNA, 372 bp, Homo sapiens; identical to SEQ ID NO: 3919
  chr5:42994610-42994982
  hyper

SEQ ID NO: 111322 - DNA, 539 bp, Homo sapiens
  chr5:42995072-42995611
  hyper
cgggatggaagcacccctcctaagaatccgcagtttctttctagcagcaccgttatggcgcctaaacggatatttgtttggcaataccagcgctatccgctaggtgccggcgcttgctgagtctcagcgccgccagattcttgctagcgaggtccagagcagtgcagagacctagcggacagttttccggtggcagcaatgctcatttcccggacacagatggtttttggcccctgaagaactctttaatccctgcgttttgtagcgctcgttctctgtaaggtttgcttagtatccgtttcatttcgacttcttttctcgctgtttttctgtcggaattacgatttgttttgtttctatgtgctctctagaattttaccggttttcatttgtctactaattttcgtgcattcgttactattgagtttcataatatctgggtgccctctgcccacgagctccggagagcataaatacccaggctgatggtagtgctaaaggttctgcttcatctcgtcaatcagcgcaaacgcttatgt

SEQ ID NO: 111323 - DNA, 1001 bp, Homo sapiens
  chr5:43007483-43008484
  hyper
aacctaggcaggcagcgtggggtggagttggcaaacgtcctgcaacccatgaagagccgctatggtaccactagcggttctaggacccaaaaactaacgaaactgctcaggagaagctgcaggcttgacccaccagaggtgctgccaccgagatcaattctgctcggacgaatgagcggtgctatgactcagaaagtgccagtccgaggaaccagggatactgggacatagtgaaaggagttagccagctttagggagactgtaagggaagggtccccagagaacctccgactggtgttttgtgcagataagggaacttgcacaagggacttgcctaagcatgcctgctgcggattaagagcgcgcatgcgcactgggggaatgggatggagccacccgggattctcgccttatacaaacagggaacccagcctccttagctttcatataaaagcctttgtattcagccgttaaggagcaaccggcaacctgctttcaggacccttgttttttatgagagctttcgtttacgcttaataaattctactccactcactcttcgatatccgcgtgcccacttcctcctgatcgtgagacaaggacccggatatagctgagcttagaagcaaaaatcctgcatcaatagcaaatgcggacactgaacgactagcggagtacccagcggcaaactttagtttttggtgcagttaaggtattgccactaagaaatcgtcgtctctgagaaatatcgaggcttggaaggttgtacagtgcttccaccgagaaagcacctacccaatgaaacgcctgtggcagaaaaaccgagcccaagcccttccagcgaaagtgctgaaagagcgcctcctcggccaatcactgggctgagaccgtgagacagccagcccggggaaagtggcggcgctaggagaggggaagcgttaccacaaagcacttctgagtcttgtgaacaagaaacgttctgggttgttttgtttttgaga

SEQ ID NO: 111324 - DNA, 220 bp, Homo sapiens; identical to SEQ ID NO: 3923
  chr5:43008723-43008943
  hyper

SEQ ID NO: 111325 - DNA, 898 bp, Homo sapiens; identical to SEQ ID NO: 41473
  chr5:43017278-43018176
  hyper

SEQ ID NO: 111326 - DNA, 372 bp, Homo sapiens; identical to SEQ ID NO: 3925
  chr5:43018326-43018698
  hyper

SEQ ID NO: 111327 - DNA, 1660 bp, Homo sapiens
  chr5:43018997-43020657
  hyper
tgggtacccgcgaatgcgattttttttaggtttaccgatgatcagtttagcagtgcctgggagctcttataccaagtttgttttcgcaatattgagtcccaccttagctaagcttgtgtgtattttaaactcccatggaagtcaggaaatgtccgcaaacgcgatttctggttaccaagctccgtttggcaatagcaagtcctgccgaacgcgactttttcctcttgtggaccaagtctgaatagaccagctactgcgatttttaagtcgtagtaaaaaaggtttaaccgtgactgcttttttttgttggtgttgtttgtttttgtttttgttttcgtaggaaatgtagacttaggtgtaacatgtaccggtttagatctgacagagatatcacaattgtaggattgcatcttttagcaaggtttgtaatttcttctttctaggattggttctctgtaatttttgcttatttttaaattctctctttgtcttttgctctgagaacgatgttaccgatgtgtttgctttccatgtttacttgcattttagcctttatttttttaattttgattttatttaaatgttatgtattttttttctactaattttgagcgtctcagcttcctgcttctttacttacattctctcaggatccggggagccgagctcggtctcagtctccctgctgtcaggtgccaggttgtgtctggtggctctccttcgtatgcggagctgatggttttgcatcagcgcttttgccagtagagccgactagcgttttctcagttacggcaccgttcttagcgcccagtgtgacgtttcccattcgccaggtccttatgttctctgtgctgtcactttcttggttctcgcaccgctagtatctgctaaagaacttcctaaaccatgttttactgtgcagaacggtgattgcacggagccgctgtacgcactagtaatttcatagcaccgttagctggcgctttttctgtcacaacacattaaaacgggttaaaatactgcaagcggattaaacacattaagaggattaaaacattaaaatgtctcaacacatttttctgacacaacacatttaaacggagtgggttcattcctccgaagaggatgtttaggcgtggaagcaccgctgtttcccaagagcacggtttctctctggcagcaccacttatggcaccaaaacaggtattttttggcaacaccagcactattcgctaggtgccggcgcttgctgagtcccagcgccgccagtttctctttcggtcgttaagtagctcagagccctagcggacagttttcaggtggcagtaatgctcatttcctggaacagatggttcgtggcccttgaagcgctgcgatctgtaaagctagttctctgcaaggtttgcttagtgtctgttttatttcggtttcttttcttgctatgtttatctgtcggaattacagtttgttttggttctatgtaatctctaaaatgttatcgtttttcttttgactactaatttttgtgcattcattactattgagtttcataatacctggcttgcctccgcccacggcctccggaaagcataaatgtccaggctaatgggagtgctgaaggctctgcctcgttgatcagcacaaacgcttgtgtcctgct

SEQ ID NO: 111328 - DNA, 485 bp, Homo sapiens; identical to SEQ ID NO: 3928
  chr5:43040738-43041223
  hyper

SEQ ID NO: 111329 - DNA, 350 bp, Homo sapiens
  chr5:43041473-43041823
  hyper
atatccacggttaaacgtgtttagctacgtctaaaaaatcgtagtagctggtacatcccgatttggtctacaagaggaaaaagtctcgatgggcaggacttgctattgtcaaagggagcttggtaaaactgagacatcgcgatcgccggcatttcctgacttccacgggagttttaaaaacacacaagcatagctaagacaggactcgatattgcgaaaccaaacttggtataagagctcccaacactgctaaactggtcatcgctaaacctttaaaaaaaaaaaaaaagcattcgctggtacccagatttccacaggagttaaacatttcctgcgcagctaaagcaagt

SEQ ID NO: 111330 - DNA, 1455 bp, Homo sapiens; identical to SEQ ID NO: 41479
  chr5:43042086-43043541
  hyper

SEQ ID NO: 111331 - DNA, 30 bp, Homo sapiens
  chr5:43065100-43065130
  hyper
cgctaccaagagcgcggcaaccgagaaaac

SEQ ID NO: 111332 - DNA, 445 bp, Homo sapiens
  chr5:43067118-43067563
  hyper
gggactagcagattcgagaaaccagcgggactggaacctagtacacttcggcagttgagaaatgacttaccaggacaaatactgcttctggctcgatggtgctgcccatgaacatccgccggctctgagaaacgagctgcactgtcagtgagaaaccgtgggcactgagaaacgagcggactgcaactgataactgcccacccagtgccactacgacaaagtgctgctggcactactcccaccctccgtcctcaaatcagtcccctcccgcctaagaagacctttatttttcctagcgaagtcatactgagggccccatcaaccgatcccttgcgatgcgcatgggaaaaggaggcagtatagggaccgagaatcgggcggattgggctggccctggtaacaaaagccatccgggtcgccaaccgtcttccactgcaagaaacaa

SEQ ID NO: 111333 - DNA, 37 bp, Homo sapiens
  chr5:43120912-43120949
  hyper
gagcccagcaagcacgtgctgcggcagggcgcgggga

SEQ ID NO: 111334 - DNA, 33 bp, Homo sapiens; identical to SEQ ID NO: 41482
  chr5:43121557-43121590
  hyper

SEQ ID NO: 111335 - DNA, 30 bp, Homo sapiens
  chr5:43122157-43122187
  hyper
ggaggctgaagagacgatggaatgccttca

SEQ ID NO: 111336 - DNA, 1327 bp, Homo sapiens; identical to SEQ ID NO: 41483
  chr5:43191848-43193175
  hyper

SEQ ID NO: 111337 - DNA, 201 bp, Homo sapiens
  chr5:43313629-43313830
  hyper
tgcccggcagcgcccgccccccagtccggcttctaccaatcaaaaggaaactagaggcgatgactcgctaggattttccctcgtggctggaagggcggggagaagaggcggggacaaagtctcagggccgaggaagtggtgtgagagactgacgtgaggtggcacgagagcccagttgccaatgacggagctgcgagatac

SEQ ID NO: 111338 - DNA, 307 bp, Homo sapiens; identical to SEQ ID NO: 3932
  chr5:43396922-43397229
  hyper

SEQ ID NO: 111339 - DNA, 125 bp, Homo sapiens; identical to SEQ ID NO: 3933
  chr5:43397305-43397430
  hyper

SEQ ID NO: 111340 - DNA, 285 bp, Homo sapiens
  chr5:43484115-43484400
  hyper
ctcgagtttctcctcgcccaccgtaggccccgacccctaaaaaggaaacttttgggacgtcagagtgagaggagaaaagtgtctttttagtttagttttgtcaaacctgaggattcgtttttcagtttagccggagctgtgccgcaaacgtagctgccgacatccccacgacgcacccaagtggtggcccggaagctggggatagaaaagtggcctccccgaatgccaggcacacaggccttactaccagaagcttgagctgggagcctcggccgtcgcatctct

SEQ ID NO: 111341 - DNA, 30 bp, Homo sapiens; identical to SEQ ID NO: 41487
  chr5:43484710-43484740
  hyper

SEQ ID NO: 111342 - DNA, 267 bp, Homo sapiens
  chr5:43514900-43515167
  hyper
cactcacagcagttcggagccgaaaagttgcggaaatgaggcccagcaacggtccctggctttgatttgccaaaatgctctggaagccgcagcgtcggcgcctgcccacgactgcttcttcaggggtttcttcagtttgacaaattaccagcgagtgatatttcttggtgaaagaaaaaaatcacaaccctagaggaataaggtggcagggagagtgttttggccaagatgcccgccacgaaacaggaaagcggagacagcgccaac

SEQ ID NO: 111343 - DNA, 30 bp, Homo sapiens; identical to SEQ ID NO: 3934
  chr5:43556676-43556706
  hyper

SEQ ID NO: 111344 - DNA, 345 bp, Homo sapiens
  chr5:43557420-43557765
  hyper
aggggtgagggggacgcttaccacaggcaggcccgacctactcggtagttctcaggagagacgtgcgagaccgacagttgacgcccgggaaataaaaacacggggggagggggcgtggaccctgcgccagggttcgctggcgcacaggtgtgttcaatgactcggctccggccgagacccgcggactgctgaggagtggtccctgggagactgtcacctgctccgttagcatcgggggaagggagtagaaacggaatcaaaatatgtgtcccctctttaattcaccctaggtgtttaccacagtaggtcacacctacgtttaacaagcttcgttctcttcccgtt

SEQ ID NO: 111345 - DNA, 30 bp, Homo sapiens; identical to SEQ ID NO: 41491
  chr5:43602365-43602395
  hyper

SEQ ID NO: 111346 - DNA, 30 bp, Homo sapiens
  chr5:43602651-43602681
  hyper
ttggaagacaagcacgcagatgtgtgttac

SEQ ID NO: 111347 - DNA, 30 bp, Homo sapiens
  chr5:43602904-43602934
  hyper
cagagaggacatcacgctttgtaactggtt

SEQ ID NO: 111348 - DNA, 30 bp, Homo sapiens
  chr5:43603154-43603184
  hyper
gttcggagagcgcgcggcgatcgggtggag

SEQ ID NO: 111349 - DNA, 222 bp, Homo sapiens
  chr5:43603562-43603784
  hyper
tggggtgtccgcaggccgcaggcttaggtggggaagaagcaccgtgcctcttggtgtccctttctcgtctcctgctggggcgatgtcgaagggagtgggctggtggatttgggaactgggtccccgaagagggcagggaatgaggcggcagctgtgcaggtgcagatatttgcagctttgggggacagcgagagtcgtacggggtcatttcggccctcaaga

SEQ ID NO: 111350 - DNA, 1176 bp, Homo sapiens; identical to SEQ ID NO: 41493
  chr5:44388245-44389421
  hyper

SEQ ID NO: 111351 - DNA, 82 bp, Homo sapiens; identical to SEQ ID NO: 41494
  chr5:44389781-44389863
  hyper

SEQ ID NO: 111352 - DNA, 235 bp, Homo sapiens; identical to SEQ ID NO: 41495
  chr5:44390200-44390435
  hyper

SEQ ID NO: 111353 - DNA, 30 bp, Homo sapiens; identical to SEQ ID NO: 41496
  chr5:44706482-44706512
  hyper

SEQ ID NO: 111354 - DNA, 349 bp, Homo sapiens
  chr5:44808977-44809326
  hyper
cagattccgctttccgattggtccctacagcaagagggcaaggacaattgcttaagttgacctctgggtccggaatcgcgggcaaagatggcggcggccaggtgttggaggcctttgctacgcggtccgaggctttcattgcacaccgcggctaatgccgccgccacggctacagaaacgacctgccaagacgtcgcggcgacccccgtcgcgcggtacccgccgattgtggcctccatgacagccgacagcaaagctgcacggctgcggcggatcgagcgctggcaggcgacggtgcacgctgcggagtcggtagacgagaagctgcgaatcctcaccaagatgcagt

SEQ ID NO: 111355 - DNA, 30 bp, Homo sapiens
  chr5:44809814-44809844
  hyper
tgtaacagtcactgcgttaggaatctagag

SEQ ID NO: 111356 - DNA, 49 bp, Homo sapiens; identical to SEQ ID NO: 41497
  chr5:45695190-45695239
  hyper

SEQ ID NO: 111357 - DNA, 294 bp, Homo sapiens; identical to SEQ ID NO: 41498
  chr5:45695313-45695607
  hyper

SEQ ID NO: 111358 - DNA, 315 bp, Homo sapiens; identical to SEQ ID NO: 41499
  chr5:45695648-45695963
  hyper

SEQ ID NO: 111359 - DNA, 587 bp, Homo sapiens
  chr5:45696137-45696724
  hyper
cgctgttgccatcgtcccggctgttagacgaagagttgggcttgccgcctccttccatgcccggaggacgcggccggcgacggcgcgggctccagactcgccggccgcccggcgccggagacacgtagccgagagggtaggggcccgagccggctgccggcgagcccagctgcccgtcgcggcggcggcggcggcggcggcggctgctgcttcccgaccgcgccgctgctagctgcgcgcctggctcccgccgccgccgctgcccttagtggctgcggtccgggctccggtgcggctggtgctgaagctgaggctgccggagctaggcgaggctcagctcggctcagccctcgcgccccagcgcctcccctcggctgccctctgttggccagaaagggtctctccccgtccgctctccacacatgctcgttactcttgctctacttctgcccagcgtgacattgaactcaagagccctcggaggagacattcattggtacacgtggagaaggactcggtgtatgtttgcatgaaagacaggggagagaggagagagagcaagactgaactagcgagtgtgtgttggt

SEQ ID NO: 111360 - DNA, 391 bp, Homo sapiens; identical to SEQ ID NO: 41501
  chr5:49736586-49736977
  hyper

SEQ ID NO: 111361 - DNA, 252 bp, Homo sapiens
  chr5:49737098-49737350
  hyper
cgcgggtaggacgctgaagaaaaggcggaatgggaggggcccggccgccttgccccactcccccgagacgctcttaccgcgcccggccctccatcagttatgcagccctcagccggctgctggcgttcccggatgtgcggtggcggtgctacttcccggctgcagcctctccggcctccgccctctcggctctagcaggtcgggagagagcttgggcaggtgatgtctagccaatctcgtggggagaggtcg

SEQ ID NO: 111362 - DNA, 30 bp, Homo sapiens
  chr5:49962598-49962628
  hyper
gccgttggtccgggcgggtgagggagaaag

SEQ ID NO: 111363 - DNA, 30 bp, Homo sapiens
  chr5:49963786-49963816
  hyper
ccttgccttctgcccggccaggcctcccct

SEQ ID NO: 111364 - DNA, 30 bp, Homo sapiens
  chr5:50258878-50258908
  hyper
ggacagcatcagaccgctcaaactcagagg

SEQ ID NO: 111365 - DNA, 30 bp, Homo sapiens
  chr5:50259118-50259148
  hyper
caagatgagctcttcggagcttcctaccca

SEQ ID NO: 111366 - DNA, 65 bp, Homo sapiens
  chr5:50259394-50259459
  hyper
ctccgctcctcctccgcccgggcccctttctccctgggcccctcgatctcgcgccgcagactgcg

SEQ ID NO: 111367 - DNA, 350 bp, Homo sapiens
  chr5:50263365-50263715
  hyper
ctaacaaaagccacccgccagtcaaccagagtcagtcgctctctctctctccctttcttccctcctctcccccactcttcctcgtctcccgcccccgccccccatctttctccagctagcctcgccccaattaacgccctacagccagtcagccttacacctgctggaaaaatcttggtggcagtggtgggaggtggtggttttggtttttagcagagcgcgggagcaccctgtcacaccctcctgagaccgccctaggaccgtcctctggaatatcttggagccaggagccagggaggctttcctcagtcccagtcgttgcctgtcgccgctttcggtttctcttccct

SEQ ID NO: 111368 - DNA, 30 bp, Homo sapiens; identical to SEQ ID NO: 41505
  chr5:50264141-50264171
  hyper

SEQ ID NO: 111369 - DNA, 142 bp, Homo sapiens
  chr5:50264389-50264531
  hyper
tacaacacacacgcacgcacgcacacacacacaccggcccaggacctcagcacaaagggcgcgctgacccagcgctaacacacaagacaaattaaagaaaggggcaaatcggaggaggggctaaggcgagggtccaggcatt

SEQ ID NO: 111370 - DNA, 344 bp, Homo sapiens
  chr5:50264821-50265165
  hyper
gagaccaagagatccggagtcaggctgtgaacttgggaaagataagttgcccggcgaggttggaggtagactgaggaacgcctttttttgtgaaggacacaaatatttgcagagtttaaagctgcaggaatacaaaagcaggagtgagattatctgattacggatacaggatgtccgagttgttgcctcccaaaaacgactgcgtaaaaaaaaataaataaaaggccagttcgaaaagtgaaattttaatatcagtgaaagcatcggagggactcggattgaacgcggcagctccggaactggacaacagctgcgtggtgcagccaatcccggggcctgtggga

SEQ ID NO: 111371 - DNA, 481 bp, Homo sapiens; identical to SEQ ID NO: 41509
  chr5:50265190-50265671
  hyper

SEQ ID NO: 111372 - DNA, 98 bp, Homo sapiens
  chr5:50673161-50673259
  hyper
tatcctctaggccagcgattggattcacctcttctttcgcgtacttacgggcaaccgaggccatccgaggccctggtcccgaacgaacttgagtagcg

SEQ ID NO: 111373 - DNA, 493 bp, Homo sapiens
  chr5:50673738-50674231
  hyper
gctgagaagagaaggcgttgttgacctttcggggagcaagttaataactcagccgagttgatgaagtgacgttctttctgaaaggggtcgtctcctgggccccttttctcagtcggcatttagcaggtagggaggcagggcaaattcttctctccacgtgaagtcacaaagaattgatgagtttcaacagcatggatctgaagtcgtagataattctaaacacacccgcgccagagttcacactcttgttcatctctgcggagttggagcagacagcgaccttcaaaattgtccctaaaatctctctcgaactgaccgggcatttactgggatttgaggggtttttcttcagcttccaaactactgttacatgcagaatatactggtagatgccaccaatgattgcccacctctctttaaaagttgccccgtccacgcaccattcagcttacactaaactgtcccgacatgccttagccgtcagtttaattca

SEQ ID NO: 111374 - DNA, 315 bp, Homo sapiens; identical to SEQ ID NO: 41511
  chr5:50674560-50674875
  hyper

SEQ ID NO: 111375 - DNA, 30 bp, Homo sapiens; identical to SEQ ID NO: 41512
  chr5:50675099-50675129
  hyper

SEQ ID NO: 111376 - DNA, 364 bp, Homo sapiens
  chr5:50677749-50678113
  hyper
caagcccagccaatgcggccggccaggatttacagctcttatcaagggttagattttgcgaaagatataaagaaaggagtttcctaacacaccgggtcttctcacagcaacaagacaccgaaattaagccttctatggtttgtgtctgtaggactttttagataaaactggcagccccattagataagaaatggctttttagaagctttgggggaagcgcgggggttcttcgtggccttcctgtgactgtctttgggagaccgtaacagatgatgggaacatgtaagaatgattgaagaaggttaccggcgagttgcacctaacagtcttctctctccaagtagtttctcgagagaaaattata

SEQ ID NO: 111377 - DNA, 988 bp, Homo sapiens
  chr5:50678407-50679395
  hyper
gagaagcagacctcgcgggtctgaaagacaaaaagtcagtccgcggagtcaacttcggtttaccggtgcgttccaacctgattgtcccaacagcaagaagcgcccctttcctcccacccaacgtttttagatatctgaggttgggggagacggagtaatggtgtagcagtcaggaaacagttcctctgggtttaatcatcccattcccgattcttcttcccctagcgcgccgagcgcagccagttctggaggaactagccctccggagcagccaaggcaggccaggccccggggatgtgcaccacggcgtggggaccaaaccaagctgaacggcctgctccaagttccccccttttcctagagcccgggagggacctcgtcaacaggtagacctacccaccagccactcgccaccggcggcagaaagtgagccccgcgcgcaacgcggccagccggactgcggggaccccaggagcgcagggcggaggagcagcgccacaggaggcgagggcgcaggcggcgcggccgggaaggaacgcgggaggggacagaaggaagaggaagaggaggagagggaggccagagccagaacagcccggcagcccgagcttcgggggagaacggcctgagccccgagcaagttgcctcgggagccctaatcctctcccgctggctcgccgagcggtcagtggcgctcagcggcggcgaggctgaaatatgataatcagaacagctgcgccgcgcgccctgcagccaatgggcgcggcgctcgcctgacgtccccgcgcgctgcgtcagaccaatggcgatggagctgagttggagcagagaagtttgagtaagagataaggaagagaggtgcccgagccgcgccgagtctgccgccgccgcagcgcctccgctccgccaactccgccggcttaaattggactcctagatccgcgagggcgcggcgcagccgagcagcggctctttcagcattggcaac

SEQ ID NO: 111378 - DNA, 47 bp, Homo sapiens
  chr5:50679666-50679713
  hyper
tcttgttgccgccacgcctgcatgcttactgtcggttcttatcttcg

SEQ ID NO: 111379 - DNA, 184 bp, Homo sapiens
  chr5:50684683-50684867
  hyper
ataccgagagggaggcgggggacatctcccagccaccgtttatctagagcctaggcagctcaacagagtttccgttttccactgcttgggatcagcccatctcaggaacatccatgtattaccttagatttaatactaagagcagggattggagatatggcagaaatagcgaatctcttcagcc

SEQ ID NO: 111380 - DNA, 30 bp, Homo sapiens; identical to SEQ ID NO: 41516
  chr5:50685186-50685216
  hyper

SEQ ID NO: 111381 - DNA, 142 bp, Homo sapiens
  chr5:50685653-50685795
  hyper
cgggcctcagtccccgtgtgatccgggtctggtttcaaaacaagcggtgcaaggacaagaagcgaagcatcatgatgaagcaactccagcagcagcagcccaatgacaaaactgtgagtggctctggggccgggcagggaat

SEQ ID NO: 111382 - DNA, 229 bp, Homo sapiens
  chr5:50685846-50686075
  hyper
cgcacggttttcaatcctgctcctgggcaggagtttggccggggctgcccctcatccttacccccctacccatgccccgggggacaggctacccggcgccggccgccagctgagggcggggaagctgggaggctccgtgcgccgggggagcagcatccaggtcccaacctcgtgggtgggctcatgcccttccacctcgcctgtacctgtgaaccggagaaacgccgtc

SEQ ID NO: 111383 - DNA, 224 bp, Homo sapiens
  chr5:50694000-50694224
  hyper
tacaatgtcccaagccgtgatggaggatctctccacacctcccagagacttctgaagtgtagacagagaagttggttcacagggagcgaaggagggggaggggcggcagggaaggctgctgagtgtttgctgtgagcattgttactatcacatcctttaatttttatggtatttaagctgttggctccaagaagccagtttctctgtctcgaggaagccagtct

SEQ ID NO: 111384 - DNA, 581 bp, Homo sapiens; identical to SEQ ID NO: 41519
  chr5:50694659-50695240
  hyper

SEQ ID NO: 111385 - DNA, 318 bp, Homo sapiens
  chr5:50695350-50695668
  hyper
cgccctcaggcccctggagaggtacccagctgcagcccctttcttgcttccaaagcccggaggcggaagggtggagggacagtgaaagaaagcttaggcgaggtgtctttgactaatccagtatctcctcttgctgcttggaaatgacagttttgcgccaaagccatttatggttcgcagggtcagtgggctctgactcaagggcaatcaataaaatatttagttcagtaataagctgagtttttttcccgaatgtaccgagaaggatgtgtcaccatcttggacaaggtgtcactgcgtagccgatcgccctttccc

SEQ ID NO: 111386 - DNA, 738 bp, Homo sapiens
  chr5:52083690-52084428
  hyper
taaggggtgtgaaggcggagccactgggctggcaacaccctcccgaaggtccagcccttacccgccttcctaccaccttaggggatttggcccggagaacgagatcaccctctcaatgaaaggcagatgtccctttaaggtttgcttctacagcccgtggactttagcctaaacacggacccgcgaagctggctttatttgtccatgtctcggacagagcctgggaagctgccagtgagatttcagagaccaagagcgcgaaggggcgggcgatgtggcaatccgtctgggatgtgaaaagcgtggagcgcatttagaggaattcgacgaaaacacaggaaatcactcctctcccgctcctgggcgccgctgccactggggcagaggactgggaaccgcggcagcgggataagtggcccagccagagagcgcagctcccgcgcccggtcctgccctgcgaaccagcgcggccccctggcgctgaggctgctccggccatggcccctcggccccgcgcccgcccaggggtcgctgtcgcctgctgctggctcctcactggtgagcgactcgcttttctctgagcatctcctgctcgcgggcttggggcttggagcggggagggaggtcctcagagccatgggccagataggaagagagagcgcccatccactttcgggcattccaggtactcaggccaggctacggggcaggcaggagtttcgcgttctggttttgata

SEQ ID NO: 111387 - DNA, 30 bp, Homo sapiens; identical to SEQ ID NO: 41522
  chr5:52095797-52095827
  hyper

SEQ ID NO: 111388 - DNA, 1077 bp, Homo sapiens
  chr5:52284770-52285847
  hyper
tgccaggagccgggcgctgccaagggctgcggaggggccacgttctcccggggactggggcatctcctgcgtgctggcgacaggctgcgggggcggagtggtgccagggcgggcgctcgcccgtcggatatgcccacccgtcccgtccagggcaggaaagcctgccagggcgccatccccatccccaccgcctccaggctgccggggctgggccgctgtacgggagccaaggtgcggtgccccgcgtgtggacgagccgaggtgcagcccgcggggccgcagggccggggtggggcggggcgcggccggagcagatccggtgtttgcggaatcaggaggggcgggctggggcgggccctcggcgctgcaggagctgcccagaaacttttccctgctctcaccgggcgggggagagaagccctctggacagcttctagagtgtgcaggttctcgtatccctcggccaagggtatcctctgcaaacctctgcaaacccagcgcaactacggtcccccggtcagacccaggatggggccagaacggacaggggccgcgccgctgccgctgctgctggtgttagcgctcagtcaaggtaagcggggatttcgctctgcatcggctgcaggagggacccgcgcggcttcctggggctcgctggagggattgggcggaactagggagcgagctccgtgtgttccctcggattccacgtggactcgggctcccagccaccaggacctgcttggaaagagatacttcttcgttcccttcctgctatcccaggccttgcgtccccattaggcgcgtctcgccctgtctgttaagcaccctccaaagtcatctcagtgagtgctttgttttaggtacacacacgcacacacacacacacacacacagacagacacgcacgcactcaagcatggacagtgtggggatccgcgggtgtcctggagaccgcgagtcctgcagcccaacttcccctggctcagacaggtgccgcgcctgccagagaccagggaaatccggaatccattgctgatggcggcctgcagctccccagcgcggtgcttgctggct

SEQ ID NO: 111389 - DNA, 30 bp, Homo sapiens
  chr5:52404896-52404926
  hyper
atgaccttagattccggtctgtataacatc

SEQ ID NO: 111390 - DNA, 54 bp, Homo sapiens
  chr5:52405479-52405533
  hyper
cgggagagacacgtcgaggagggctccgcacccaggcccgcacgcacacccgcc

SEQ ID NO: 111391 - DNA, 120 bp, Homo sapiens
  chr5:52405740-52405860
  hyper
gattagttttgcttcgcagatgggccgtggtggtgagaggaagcaatcagtatggaaatggagaaatggcttaccatgcatgtccttctccccaggagggaggtcgtggtgcaggcgagc

SEQ ID NO: 111392 - DNA, 30 bp, Homo sapiens
  chr5:52775666-52775696
  hyper
ccgactagtccagacgaagggccgcgtctc

SEQ ID NO: 111393 - DNA, 389 bp, Homo sapiens
  chr5:52776320-52776709
  hyper
agctccccacccccaaggagccgcgcacaccctcgctcgcggccgccctcccacagccccacacactgggagaccgcccaccgcaaaccgcggagacccccgtctagatttaaagcgcggctgcgcccggcttctgacgtccattgaatcgcgcgggcggccggcggcgagcgcggggctgcgccgggatcgctgcgccctccgccgctggcctctgcgacgcgcgccgctcgcccgagccacccgccgccgcgccggctccccgcgccgctgcgctcctcgccccgcgcctgcccccaggatggtccgcgcgaggcaccagccgggtgggctttgcctcctgctgctgctgctctgccagttcatggaggaccgcagtgcccagggta

SEQ ID NO: 111394 - DNA, 618 bp, Homo sapiens
  chr5:52778272-52778890
  hyper
tgtaaaaacatccgtcgcatcctgtttttgtcaggttctttaatctgctcttcgagtctctgcaggttatgaaatgggacgaataaaagtaaacagtctagtaaaagtcaatgcaagctgcacgtgttgtgtctgggtcactggtaactgacattgatatggctggggcgccctgtcttctccctctctccctccctccctctcgcccacctcccatctctgtgatcagggcttccccctccactgccttctttttccacccctccacccctttcgatttatttcctacttttctcccgcgtctctctcacttcccctcctccacgctcaccccctccccatccccgccgggtctccttcgctagccacctcgctctccctgccctgccaccgctcactgctcactcacccacctccccacccttgtctcttcacagctgggaactgctggctccgtcaagcgaagaacggccgctgccaggtcctgtacaagaccgaactgagcaaggaggagtgctgcagcaccggccggctgagcacctcgtggaccgaggaggacgtgaatgacaacacactcttcaagtggatgattttcaacgggggcgcccccaactgcat

SEQ ID NO: 111395 - DNA, 257 bp, Homo sapiens
  chr5:53606114-53606371
  hyper
aaaggcttaccagccggctgcgggagaaagaaccccagaggcatcctatcccaaagaaagaaagcaaaaaggctgctcctcaaggcagggggccatcgggcacgccgagatccgagaggcgacatgccacccctgccctgcacctaccagataatccatgtacagaaacgcctcagttattcggagatcagacatccggcagcctaaagcatccggaacggctccgaacccggaaaaaaaaagcagcgtctctggct

SEQ ID NO: 111396 - DNA, 239 bp, Homo sapiens; identical to SEQ ID NO: 41529
  chr5:53606415-53606654
  hyper

SEQ ID NO: 111397 - DNA, 30 bp, Homo sapiens
  chr5:53607633-53607663
  hyper
ctgcctgactctacacgcgatgttttagga

SEQ ID NO: 111398 - DNA, 233 bp, Homo sapiens; identical to SEQ ID NO: 41530
  chr5:53813365-53813598
  hyper

SEQ ID NO: 111399 - DNA, 108 bp, Homo sapiens; identical to SEQ ID NO: 3959
  chr5:54469035-54469143
  hyper

SEQ ID NO: 111400 - DNA, 62 bp, Homo sapiens
  chr5:54469485-54469547
  hyper
atgtgaggcgtgttcgtcagctcttcgttttcagaaggcaagaaaacgtggcaagatttcta

SEQ ID NO: 111401 - DNA, 682 bp, Homo sapiens
  chr5:54472070-54472752
  hyper
tccttccccgaccttcgtcagacccttttcaatgtatttgcacgtgcacacatagagtctggccctgtggatctttccccacaaatgagatctcattatacttatcatttttcaacttgttttctctaattcactgtattcaactaatttccgagcagtgcaaaccggagagctccccattcccagcgccaacggcaggtttgcgcgcccctccggcccgcggttactccccgccctgctccaggctggtgcctcgccctcagcccgctcgcgcctggctacgcccgcgcccgcgcccgctcccgcccctagcttctgcgcgccgccctgcagcccctgcgcgcgcctactgggccaaagggacggttgggagtttgctccaactgtccctggggcacgccttccccgcccagcaggggttggggaacgcgagctgggagtgtgagggaaagcgccacgccagtgggggctgatacagctccagcctgtgcggggcaggcgttagactgcagaaggggagagcttaggataaccgcactcaggtggcgcaaggaagtcagccacgaagaaaaagaaagggaaggaaaaacatcgtcccagactgataaactctctgctccccggtgtaacgtcgctcagtatagcgagagcatggatggacgaatgaagccctcttgatgca

SEQ ID NO: 111402 - DNA, 352 bp, Homo sapiens; identical to SEQ ID NO: 3961
  chr5:54516328-54516680
  hyper

SEQ ID NO: 111403 - DNA, 245 bp, Homo sapiens
  chr5:54516831-54517076
  hyper
cgccccacttacatccagcaccgaggccaggtgccgggttcggctggcgagttccttcagctgcacgttccgctccttgagcgaggcgatctcctcctgtttctgggtcaatgtcacgtgcagctgcaggaggagacccaaacattcaggggtaggtactgtgctgggtctcgtctgcatatctggcatgaatcaaacccagatcctgacgtctcatcaggaactggggacgcacaggcatttac

SEQ ID NO: 111404 - DNA, 74 bp, Homo sapiens
  chr5:54518558-54518632
  hyper
cgatcccagataaagcgctatgtagatccagcggttcgacttctccacgggggagagaaatgtcctaaatatgg

SEQ ID NO: 111405 - DNA, 155 bp, Homo sapiens; identical to SEQ ID NO: 3964
  chr5:54519133-54519288
  hyper

SEQ ID NO: 111406 - DNA, 185 bp, Homo sapiens; identical to SEQ ID NO: 3965
  chr5:54519382-54519567
  hyper

SEQ ID NO: 111407 - DNA, 30 bp, Homo sapiens; identical to SEQ ID NO: 41539
  chr5:54522996-54523026
  hyper

SEQ ID NO: 111408 - DNA, 225 bp, Homo sapiens
  chr5:54523517-54523742
  hyper
gactccggcctttgcgctcctgcaggatttagtaaggatgtagaataccggcagggatgccctggaacagcccccttattacagaagccccttccctcaaacctgaaccttatcctgggtcctgacttatggatttccacgtggtctcttttggcctgacgccaagagcccgccccgctccccaagccccgcactcttctcggcagtggcgcgtgagcacagcct

SEQ ID NO: 111409 - DNA, 223 bp, Homo sapiens
  chr5:54526943-54527166
  hyper
ttcaccttccctccccgcagacagacacttgcaggatttagacaaaccacaactgtttattggtgaaagactcagcttcctcatgtgctcgctgcaaaataaataaaataccagatgctagtatcgtacactatttacaacctgcagctgaccaagcaggtcctgaagccttctctgtggaccagtactgcactcttctgaggctacgggagaggtccagcag

SEQ ID NO: 111410 - DNA, 313 bp, Homo sapiens; identical to SEQ ID NO: 3966
  chr5:54527322-54527635
  hyper

SEQ ID NO: 111411 - DNA, 22 bp, Homo sapiens
  chr5:54527844-54527866
  hyper
cgcagttgatctaactactgtc

SEQ ID NO: 111412 - DNA, 496 bp, Homo sapiens; identical to SEQ ID NO: 41543
  chr5:54528084-54528580
  hyper

SEQ ID NO: 111413 - DNA, 30 bp, Homo sapiens
  chr5:54529033-54529063
  hyper
gtagcagctctggccgtagtcgcggaaggt

SEQ ID NO: 111414 - DNA, 30 bp, Homo sapiens
  chr5:54529353-54529383
  hyper
tgcggccgggtggccgctttactaccttca

SEQ ID NO: 111415 - DNA, 239 bp, Homo sapiens
  chr5:54529890-54530129
  hyper
gatcctgagttccaaacgaaagtcgggctagaattctgtcgacacgggaaaagttttcttcagtgacccaaacaagcaatagtgttaattcggttgcgtttgtcggttttgtttcggtgggtaccggagtagccagtgcccttccttccgccagcctcggggagcagagcctcagaagggccgtttgtgctgcggaatagattggagctccaccagccagccacgctttcgcgctcaaa

SEQ ID NO: 111416 - DNA, 30 bp, Homo sapiens; identical to SEQ ID NO: 41545
  chr5:54603414-54603444
  hyper

SEQ ID NO: 111417 - DNA, 109 bp, Homo sapiens
  chr5:54603780-54603889
  hyper
actgtcttcggtcgcggggcatcgtgggtaggagggagatttgctctcactgctcccaaaaatggcggacgcattcggagatgagctgttcagcgtgttcgagggcgac

SEQ ID NO: 111418 - DNA, 79 bp, Homo sapiens
  chr5:54604143-54604222
  hyper
aaggggggtcttggcgtttcctggtgtctgcaggcagcgtgatcttctgcttcaattcccttacgtcgatgttactgat

SEQ ID NO: 111419 - DNA, 91 bp, Homo sapiens
  chr5:54830956-54831047
  hyper
ggtcagccaatcagcgccgtcggcctcatccctcccgacctgcggcatccgcccagaagtgcggctctcggcagccgggcggggcgtgggg

SEQ ID NO: 111420 - DNA, 49 bp, Homo sapiens
  chr5:54831085-54831134
  hyper
cgcaattgctcaggtggtctccgaactcggcctcggtacccccactagg

SEQ ID NO: 111421 - DNA, 30 bp, Homo sapiens; identical to SEQ ID NO: 41548
  chr5:55007903-55007933
  hyper

SEQ ID NO: 111422 - DNA, 30 bp, Homo sapiens; identical to SEQ ID NO: 41549
  chr5:55008197-55008227
  hyper

SEQ ID NO: 111423 - DNA, 30 bp, Homo sapiens; identical to SEQ ID NO: 41550
  chr5:55291157-55291187
  hyper

SEQ ID NO: 111424 - DNA, 30 bp, Homo sapiens; identical to SEQ ID NO: 41551
  chr5:55776706-55776736
  hyper

SEQ ID NO: 111425 - DNA, 30 bp, Homo sapiens; identical to SEQ ID NO: 41552
  chr5:56031868-56031898
  hyper

SEQ ID NO: 111426 - DNA, 329 bp, Homo sapiens
  chr5:56110211-56110540
  hyper
caaagcaccttctcacgtagagtccagggactaggaggactcacaacgcagcgatgggcagccaggccctgcaggagtggggacagagggaacccggccggtggcccgaccctgcagggaagaaggacgtgcggcgagaagcatcggattcggggagggccgggacctggccgagggtgacattaccgagcacttcctggcacagcgctggtcccctccccaaacgcgctatatgtggttctgtacgggactgcctttcccaaagacagccaaggaaaaactaaagatcgacggggacacccgcctcccttcctcgccccaacggtttc

SEQ ID NO: 111427 - DNA, 30 bp, Homo sapiens
  chr5:56112075-56112105
  hyper
cggacggggacgtgcggaagagtttgttat

SEQ ID NO: 111428 - DNA, 563 bp, Homo sapiens
  chr5:56112630-56113193
  hyper
tgttcctgggaatgcgaactgcactgctaagtcacttgagtgacttctgtttggagtttgaatttggcctttgaagtttgcatttggcggagtggtgtaagagccaggaccggatgtgtcagccattcagtttcaaagcagtggtgactgctccccgcagcccctccggcttggcccggggactgcggcgcgggtgcagtgcttcctgctcggtgccctggcgcgggccgcccgctgaattccaggggccgcagtgcggtgggcttcggctcagatgcgtcttctggtgcatatgaagtacagtatgtgtaaggtaatttagaccagcggtttattggcctcgcccatttttggctactggaaatttttatgttaaaggaaattcttttaagtgtgacagctacatccttgtttgtttgttttttaaaaacctgattaacgtatgcaaagtacaaagtcttgatgggtattttgagttgctggaaatgtttttgtgatagtccctcgtggccctgtagaattccctgacctttattatgagaagaaagcgtgtcattttgtga

SEQ ID NO: 111429 - DNA, 207 bp, Homo sapiens
  chr5:56204902-56205109
  hyper
taactttgggaacacgggttcacgcagaagaagggctgctgtctggggaggactgaaactcgggttcccgaagtcgggctgctctggggccacggagagaaggggagagaacgtcgaggaagaggcagagctcaagtggacggaggatggaacacagagcgcggccgggacaaaggggcaggccagacagccgtgacagagaaacta

SEQ ID NO: 111430 - DNA, 72 bp, Homo sapiens
  chr5:56206156-56206228
  hyper
tcgcgcgttaagaacgggcagaacgccactcaaaagcacgtcgggatggtgggtttcggattggggtgagtc

SEQ ID NO: 111431 - DNA, 649 bp, Homo sapiens; identical to SEQ ID NO: 41556
  chr5:56246407-56247056
  hyper

SEQ ID NO: 111432 - DNA, 30 bp, Homo sapiens
  chr5:56469004-56469034
  hyper
tgggcttggctccccgcacgtctgctttcc

SEQ ID NO: 111433 - DNA, 1275 bp, Homo sapiens
  chr5:57755329-57756604
  hyper
aaagccgatccccagcgctgccggcgcacaaaagccagagggcaggtgaggagcccacctcgcgctgggatcggacccccgaaaaacccggaagcggcgggcgagggaccccgcgggcttgcccggcttggggtcgcccggacagacctcccgcccgcccggcagcccggcgccctccgcttgtcacctttcccagcactttgccccggcagtagcgcttcccagtcgtggggtcgacgataatccgcgagatctccggccccgagtgcgaatggtggtgatggtggtgaggggccgccgggggcacttgcgcctgggactgaggtggctgcgattcctcggggggctgcggcggccgcttcttcttcgagtccgctccgcaacccttgcccagcgcctgctcgcacattttggtgctggcggctggctggtaggtgatagtccgcaaaagctccatggtcgccttgccgccccgcactgcccgctgccaccccctaggcgcggtcacacgtccgagccggccgtggtcctcgcacccttgcctctggtgccgactagcacccaacaccccggtccacttgtgcgagtgagagcgctcggcgaagtcttatatacggggaggcgggaagggggcggagactcgatacgcgacatcacgtcacggcctatgccccgccccacggccggccgagcgcgcgtggccgggaagcaagtcttgtcccgccacccgggtctcgcttcccagcggagccgcgcgcctcaaacgccggccgccgagatctcttgcggccgcgggaaggccttcagagccgtccgtgggccccgctgtcccgttcttcgaaggctccgagcctcagcgtacaaaacagaatcgcgagggccgacgcctggcctcacccccgccccagccgcctggtggcagggcagtgccgtgacccgagcgagtcgggcgcgggtgtagacgcagtccctcccccgcacagcccttcccggccgcccggggcctcctgtgtcaaggtatcagggtgcccggagcccgccgcacgggcaggcgaggcctcctccggccgtatgacagggctcgtctgcagctgccccgcagtgcctgcccgcgctgtgacgagctcgctggtgtctagctggggcagtgccgagaggccgtgggggtgaaaggccgggattcgtggagccgggcattcgagcccatcgcgctagggcagacacgggcccgcagccgggatcccgggccgatcggccaaccgtgccaggatccca

SEQ ID NO: 111434 - DNA, 1549 bp, Homo sapiens
  chr5:57877869-57879418
  hyper
atcagctctgcagcccgcggccagcggcagtgtgtgcgcgctaatgacggcggaaggtgcctgggggagggcctggggaggggctggccagcgctatcgcgcccctggcacttcctaagagactgagccctttctctgcagctgcagcttggattccacgctttccctccagaggaaagaagccctccatctaaatcagctgtcttctccacatccctcctttttctctccgccagacgccacccctaccccttctattgtgttgtgccttttcattttagccccgcttcctacgtagagccctaacctcctttgtagcgagggcacttgagaatttctgaacctcgagttgtaatggagctgtatggaaaggtaagcaggcgaaaggagttccttggggtgcttagccagaaatctcgctttcacgcacttcggtgtgcgggttgtgtgtgtgactatgtacgcgcgcgcgacttctcagtgcaattatgcggataaaccactttccttatgtgtgtaccgttaatcgtctttctcccctacgtttggtgaatgagattgtaaaactgccccactctgcctaaggaaacgtagaaactttcccgattcggatggggaggggtagggcggagagtcccagagaccagctctggcttcgtttgcattggaaattagcacaaggtagtgttgtttcctaatcagaaaatcaccatctacttccgaaggcgatagttagcaaagaaaaatctccagctgagataagctggggtcacattcgcctgcccctggcgaggaaaagagcaggggagactgggagaggtaacccaggagcgtttggaaaggagtagggaggctccgcggccgagcccgactggcggatcgagcctgtttaatggtttgcttgcttgccgggagttgtagttcaccgctcgcccgtttgccgggaacacccggagggcgagactacagctcccaggagtgcacggggctcctcggcagtacgcgtgtgcggcgccaggagaggacagctccagtgctgatgttggagccggttagcgaaccccaagagtgcagagtgtggagcgtggagcgccgggactgtgcacgcttgaccggaagcccagaccagtgcggtcctagccagagagaaaggacatttgccaacaatgagacacgaagcgcccatgcaggtgggtccataaagaaagagtggcctcgggaggaattgaaagagatgcttttccccttgctccgcgcacaagcagttcaacgtaaggaaaggtctaggcggtcacccgcggagatgcggctctgtgacatgaccctgggaacagagttgggtttctttacgctctgtgtggctgtgattggggctgtcttgatgagggatcgggctattcgcaatctttctaggctctgtaaagaggataagagtgtctgtctaaaatgaaaacccaagcaaacaaaagtcagaggagcatgcaatctcgtgttggcattgatctcctctcttggcatccggggtttgagatcgcggtgaaaactcacg

SEQ ID NO: 111435 - DNA, 30 bp, Homo sapiens
  chr5:58055746-58055776
  hyper
gtaagtgttgttcttcgttactaaaaatga

SEQ ID NO: 111436 - DNA, 30 bp, Homo sapiens; identical to SEQ ID NO: 41561
  chr5:58184045-58184075
  hyper

SEQ ID NO: 111437 - DNA, 1101 bp, Homo sapiens; identical to SEQ ID NO: 41562
  chr5:58334874-58335975
  hyper

SEQ ID NO: 111438 - DNA, 30 bp, Homo sapiens; identical to SEQ ID NO: 41563
  chr5:58337465-58337495
  hyper

SEQ ID NO: 111439 - DNA, 30 bp, Homo sapiens; identical to SEQ ID NO: 41564
  chr5:58407755-58407785
  hyper

SEQ ID NO: 111440 - DNA, 30 bp, Homo sapiens
  chr5:58423353-58423383
  hyper
ttaaaatacaggaaacgcatagaagaaaga

SEQ ID NO: 111441 - DNA, 30 bp, Homo sapiens
  chr5:58423665-58423695
  hyper
acgcaaaggactccccgttcctaatcagcg

SEQ ID NO: 111442 - DNA, 30 bp, Homo sapiens
  chr5:59064564-59064594
  hyper
atcactgacaagctcgcatagcaaatgaac

SEQ ID NO: 111443 - DNA, 41 bp, Homo sapiens
  chr5:59105973-59106014
  hyper
cgcacacttctcagaaacatcaaaacgtggcgtgggaaaac

SEQ ID NO: 111444 - DNA, 244 bp, Homo sapiens; identical to SEQ ID NO: 41565
  chr5:59187967-59188211
  hyper

SEQ ID NO: 111445 - DNA, 185 bp, Homo sapiens
  chr5:59188275-59188460
  hyper
cgcacacaccgacacagtgtaactcccacagcgtcctcgctccttctccctccctcacccccttgtctctctcaaggattgctgaacattttgctccaaactctccaagtcacccacgtgttctccccttttgctattcaatttacttctccacctgacgaagagaaatgcgagttgttcttagg

SEQ ID NO: 111446 - DNA, 159 bp, Homo sapiens
  chr5:59188898-59189057
  hyper
ctagaattggtggtgataagccgacttagatggagtatttgagaaaaggggaggtgaccctttgcctgaatgggggagggggcgctctccactcaccgcctgagtccctggaacgaggagggccaggacatcctggatttcttcaggccgggccggtgg

SEQ ID NO: 111447 - DNA, 969 bp, Homo sapiens; identical to SEQ ID NO: 41568
  chr5:59189188-59190157
  hyper

SEQ ID NO: 111448 - DNA, 31 bp, Homo sapiens; identical to SEQ ID NO: 3981
  chr5:59506983-59507014
  hyper

SEQ ID NO: 111449 - DNA, 30 bp, Homo sapiens; identical to SEQ ID NO: 3982
  chr5:59995339-59995369
  hyper

SEQ ID NO: 111450 - DNA, 30 bp, Homo sapiens
  chr5:59995700-59995730
  hyper
ctttctttgaggctcgtccactaaaaggca

SEQ ID NO: 111451 - DNA, 370 bp, Homo sapiens
  chr5:59996100-59996470
  hyper
cgtgcgaacttgcccggggcgaaatctgttgcccaccctggtcccaccgtgcgagcacacctaggcaggtgcgactaaggggccgggggcgtctccccagcgctggaaaacgctgtgcagcgcccttcccagatttctgcgtccgcgcaacacaaacacacgcaacgctatctctacaaaagggtcaataataggtgttatccagcgaccgaaacccagctttgggccgcgtggataaatacctgtcctccctaccaagtgcactgtgagcctggaggtgctgctaacgctgggagaagcggtagtgaaatgaagcgaggcgacagcttttaccagtgtagggacatttaaaaacgggatagagagcaca

SEQ ID NO: 111452 - DNA, 30 bp, Homo sapiens
  chr5:60240553-60240583
  hyper
accccccccacccccgccgccccccgcctg

SEQ ID NO: 111453 - DNA, 30 bp, Homo sapiens
  chr5:60241621-60241651
  hyper
cgtacgctgttccccgccttgtgacccaga

SEQ ID NO: 111454 - DNA, 30 bp, Homo sapiens
  chr5:60457886-60457916
  hyper
tcttccgcccaaaacggatcgaccaggctc

SEQ ID NO: 111455 - DNA, 263 bp, Homo sapiens
  chr5:60458161-60458424
  hyper
acaccttgcgccgccgccgtttctgctggacaccaggagaaaaccacggcagctgcagccaccaacttcccctacatagccccacgggatcggatcccactccccactcaccgccagaccggaagcaggaaggcggaagtcgcggcctttgcgtcccgcccacaggcgacccgagccgccagccgggcgtgagtaagtctagggcccagtttccggctgcgccattgctgtgtgggtcttgggacctcgagttggaggacgcg

SEQ ID NO: 111456 - DNA, 204 bp, Homo sapiens
  chr5:60626140-60626344
  hyper
ccagaaaaatactggacggatatacaaaaacataatgccacaaaaattttcctaacaagtaaggcagctgcggaaagtcggccagcgtcccgaccccagggacctgcagcctgggacttgtgaaggcccactgtgtagctcgaggtttccagggcctcggccccgaatgggcgattttctttaaaacgccgaagcgcgctatcc

SEQ ID NO: 111457 - DNA, 253 bp, Homo sapiens
  chr5:60626722-60626975
  hyper
actgagagcgcggcgcgcgtcccgagcgcctggactccgcgcagccgggcgccgcgcacccgggtgccggggtgggagccgggccgcagacccaagtgcgcccgaagccgccgtccgccgcctggcacgccgtctgccgcctgctgggcgatgtgtgcgcgagcccgtggggcttgcgcgcgccctgcggcgtgtgtactcacaaaggtgtgtctgctaaccccacagcccgggctgcgttccaccccgagct

SEQ ID NO: 111458 - DNA, 30 bp, Homo sapiens
  chr5:60627432-60627462
  hyper
ccacccgcgtcccccggggtccatgccgca

SEQ ID NO: 111459 - DNA, 52 bp, Homo sapiens
  chr5:60627993-60628045
  hyper
gccctagatggcatcgtggcgtcgcgacggcgtgtgcgtgtcgcgcttccta

SEQ ID NO: 111460 - DNA, 30 bp, Homo sapiens
  chr5:60628876-60628906
  hyper
cgcccgcacccctgcgggtgtcctcactgg

SEQ ID NO: 111461 - DNA, 30 bp, Homo sapiens
  chr5:60629106-60629136
  hyper
gatgtggacaaaggcgcgggcggacggccg

SEQ ID NO: 111462 - DNA, 159 bp, Homo sapiens
  chr5:60704663-60704822
  hyper
ccagctgacgtcagcgccgccggttcagccgcaggccagagtcagagactgacagcgcgaggggcggggttgggagtcaggatggggcgaggcctgcgtgtgactgatggcgcgggggcggggcggcgtgtgtgtgactgacccgaccgcgcagaggcg

SEQ ID NO: 111463 - DNA, 31 bp, Homo sapiens; identical to SEQ ID NO: 41575
  chr5:60840110-60840141
  hyper

SEQ ID NO: 111464 - DNA, 159 bp, Homo sapiens
  chr5:60921444-60921603
  hyper
cgttctctgagatgtcgctgctattactgtctcaaatttccttttaaattttgctgtttgagtaaattagtgctggcctttcctgagctccgcagctccgaggtggcccgactgccgggcctccaccccttttccccggtcccgggtcggtttctccgg

SEQ ID NO: 111465 - DNA, 63 bp, Homo sapiens
  chr5:60921662-60921725
  hyper
cggtcatgcgggcgggcgggcggtgttccccagagaccgcccatcccgcggtgggggtggtgg

SEQ ID NO: 111466 - DNA, 30 bp, Homo sapiens
  chr5:61602722-61602752
  hyper
atgaccctgcctcgcgcttccccttggtct

SEQ ID NO: 111467 - DNA, 30 bp, Homo sapiens; identical to SEQ ID NO: 41576
  chr5:61603107-61603137
  hyper

SEQ ID NO: 111468 - DNA, 160 bp, Homo sapiens
  chr5:61699271-61699431
  hyper
gccaaccagggccacgaaacgtcacgccaggactgacaaactctttataagttcatcctccagctggaaaggaagtcagcggcgacgcgcagggcctgcggccgagtcggggacccacccctgccttccgcgctcacgggagcgcgtcctgaccggcctc

SEQ ID NO: 111469 - DNA, 30 bp, Homo sapiens
  chr5:61699736-61699766
  hyper
cgccccctcccgtacgctctgagctcctcc

SEQ ID NO: 111470 - DNA, 75 bp, Homo sapiens
  chr5:61708380-61708455
  hyper
catggtgacagatccggctagtccggactcctggctctttatactgcgcaagcgcactgcgcaagcgcacacaac

SEQ ID NO: 111471 - DNA, 299 bp, Homo sapiens; identical to SEQ ID NO: 41579
  chr5:63254943-63255242
  hyper

SEQ ID NO: 111472 - DNA, 387 bp, Homo sapiens; identical to SEQ ID NO: 41580
  chr5:63255315-63255702
  hyper

SEQ ID NO: 111473 - DNA, 30 bp, Homo sapiens
  chr5:63256065-63256095
  hyper
ctctcaacgctcctccgctgggtctccttt

SEQ ID NO: 111474 - DNA, 18 bp, Homo sapiens
  chr5:63257086-63257104
  hyper
cggcgcgccggggcgtcc

SEQ ID NO: 111475 - DNA, 619 bp, Homo sapiens
  chr5:63257337-63257956
  hyper
acgttctgcagggagcgctccaaggcgatggcagccaccacgcacgcattgcccagcaccgcgcagaagatgagcgtgcccagcagcagagaggtgatcacttggtagctgacggtcacgtcggagataccagtagtgttgccgccggtctcaaagggagccggtggtgatgtggtgttgttgccctgaccagggctgagcacatccatgcctgcgcgcccggcgcgggaagggggagggaagaaaaagcagcgcgaagattcgcctcgccccttcccctggggtcttccgcccttctcctgggaagtttcggaggaagggaatgcagagacccaagcaggaagttcttactgcttcggcgaagggtatctccgaggagcagctttcaggcgctccctgggctctcgcagtccagcgcgttcagaagctccagctgggaaactggagttggcctgaaagcagctccaggatctcccggcggcggagaggtggctggaacgtctgtctgtcgctgtccattttactttgccgctcccgaactggctgccggagctggagtctccccactagcaaacagtctccaatcccagaaatatctagaaccgagaagccccatcct

SEQ ID NO: 111476 - DNA, 824 bp, Homo sapiens
  chr5:63461427-63462251
  hyper
caagggagaaaaactttcccacggttccgtctggcccgcggcgcttgtctgcctgcgcggggtcaaagcccggcgccgcccacgcgcggctcgggtgggaacccgcagacgtggggcgagcagggccgctggctgtggcgggcgagcgccggggcgccacgtccgaggccgcggggtcggggctgcaggcacagctcgagcgctttccgcggggtttggctcctgtcgcttcccgtctcgccgaaccggcatcgccgccgccggagccgcagcgagtcctcagagcctggctgctggcggccgggagcgccgggacggggcgcgaagccggaggctccgggacgtggatacaggtaaaggccggcgggtcggagtcgggcggggcgcggcggcggcgcctctcggagggacctggcctcggccgggccctacccagccgcggtggcccgggcccccacgttggcccaggcggggacgtgccaaggggctgggctagggttgccgctggcctggccgcctctcgcccggcgggcctcaggtgacgcggccgcggcttaactttcgcacctgaggctctcggagcggcctcggggcgcgcccacctggaggttggaattacacagggtcgaaaaagctgagtcctggaggcgaggcgctgtaggtgtggcggaggaggccggggaaggtggggtgggtgccaggggtccagtactgaaccctctccaggtctgaggtggggaactgcgtcttgtttaatttcggagcttgtggggaccacacagccccttccacggccgattccctctgcacggttccactttcct

SEQ ID NO: 111477 - DNA, 433 bp, Homo sapiens; identical to SEQ ID NO: 3988
  chr5:63801871-63802304
  hyper

SEQ ID NO: 111478 - DNA, 672 bp, Homo sapiens
  chr5:63802339-63803011
  hyper
cgcgcctcaggtccgggctccggctgcttggcggcggcgcccagggcaacaaccgggccgcccgcgccggggcgcactgcaccagcggcttcggcttggtggatgtgtatgcatgagttctgcaccgaatgggcgcaaaaagcgccccagccggtccacccgctcctcgatcttccagatcagcaagcccccgctgcagagcggagattgggagcgcaggggcagcggctccgagagcgcccacaaaacccaacgagccctggacgactgcaagatggtgggtgaaaactgcgcctctttttttttttttttaattgagagggggtggggggagtcatgtatgttaatcatttgcctgagtgccagccactcccccaccctcagctcctcaatgccgatcacgtggcacatgcactatttttaaatctgcagtcccccaaattcagggtgacaccctggtcgtaataaccctgcagaaagaagtgtgacagcaagggtcttggggatcagcggctgtaggttgtgcctgtaccccctcgaagaatggtggatgcgaaagacacagtgaactggctcgctcacggaggagggagggatgaggaggtggggatgctgctttctggggacagagtagcaaacaaacccaaatacagcgcacggggcgctgcggag

SEQ ID NO: 111479 - DNA, 412 bp, Homo sapiens; identical to SEQ ID NO: 3990
  chr5:63986115-63986527
  hyper

SEQ ID NO: 111480 - DNA, 464 bp, Homo sapiens; identical to SEQ ID NO: 3991
  chr5:63986569-63987033
  hyper

SEQ ID NO: 111481 - DNA, 533 bp, Homo sapiens
  chr5:64064487-64065020
  hyper
tacgcctctagcgacggcagaaccagtagatgcggatgcagtttccggacgagtcatattgcagaagacacatggtccgaaccattactgatagttttggagggggagttagtttgatctgcacacgagagtagtgtaaacaccgccaacacttatgaagtgtcccttctaatattgtaatacaaataacataaataacattaagctatggtaactttacggacttttctcgttccctggagtacattggaataacccttctcagggttagcggtgctcgggtccggtaacaacatggcggcgtccgtgaggggctcctttgggcaggggtagtgtttggtgtccctgtcttgcgtgatattgacaaactgaagctttcctgcaccactggacttaaggaagagtgtactcgtaggcggacagctttagtggccggccggccgctctcatcccccgtaaggagcagagtcctttgtactgaccaagatgagcaacatctacatccaggagcctcccacgaatgggaaggtgag

SEQ ID NO: 111482 - DNA, 30 bp, Homo sapiens; identical to SEQ ID NO: 41589
  chr5:64067736-64067766
  hyper

SEQ ID NO: 111483 - DNA, 30 bp, Homo sapiens; identical to SEQ ID NO: 3992
  chr5:64331502-64331532
  hyper

SEQ ID NO: 111484 - DNA, 512 bp, Homo sapiens
  chr5:64398787-64399299
  hyper
gggtgccctcgcctccggcaaccccggtgcttcagtgctcccgacctttctctgccgcccctcgcctcggcggccgccgggagcggctgtggggtgcgccggtcgccccgggcccgagcgggaggagagtcccgccccgccgcgccccgcctccgggcgccccgacgctgccggcgcggacgccattgctgcggccgctgtttgttattaaactgcccagagaaagggcttcgagtaaaaacaccaactttccagtcggggcggcgcaggtccccgggccctggaaagttctgggacggccgaggtctccccggacacccgcacccacgcccccgtcgtgccctttctggcttttggcttcctctcctcgatttcccttttgtgcggccccgggcagcttcctcaggccccgccgcccccacctggccgccctgggagctgttcctcccccagcagcaggagcatccagctcgggttttattacctcccgagacactcgaggaagcctcagg

SEQ ID NO: 111485 - DNA, 190 bp, Homo sapiens
  chr5:64777663-64777853
  hyper
ctagatctcactaccggcccccagccaacttgaattgcagcaggagaaaattttggcagcttttcctcggaggcagagcacactgacgtcagtctgcagatgtgcctgggctgcgtcgggtgcgcatgtgtcctgggtcgtcacgtggagggggaggggaggtagaggtacaatcggggtaaccaactac

SEQ ID NO: 111486 - DNA, 30 bp, Homo sapiens; identical to SEQ ID NO: 3995
  chr5:64858833-64858863
  hyper

SEQ ID NO: 111487 - DNA, 47 bp, Homo sapiens
  chr5:64859098-64859145
  hyper
tgagttttgtgtcgcgccttttctgacgatgcgaacaacatggcggc

SEQ ID NO: 111488 - DNA, 163 bp, Homo sapiens
  chr5:64920139-64920302
  hyper
cctcaactgagaggcggggttgagccacctacccagaggcctctgcgcacgccaccggcgcacaggcgcagtaggacactgggcgccgcttagccgactcttactcctcctccccgcaatcgtcgggtggttagttgcacagcctcgcgcatgggcacttttg

SEQ ID NO: 111489 - DNA, 30 bp, Homo sapiens
  chr5:64921171-64921201
  hyper
cacgagattttagccgcagaagctgacgtc

SEQ ID NO: 111490 - DNA, 163 bp, Homo sapiens; identical to SEQ ID NO: 41594
  chr5:65017233-65017396
  hyper

SEQ ID NO: 111491 - DNA, 42 bp, Homo sapiens
  chr5:65017859-65017901
  hyper
ggcgcaaacttccccggcccctaggccgtagaccccagaacc

SEQ ID NO: 111492 - DNA, 30 bp, Homo sapiens
  chr5:65018623-65018653
  hyper
gtgtttgctcctcgcgcccattattagcat

SEQ ID NO: 111493 - DNA, 451 bp, Homo sapiens
  chr5:65220753-65221204
  hyper
tctctccgcaataaacgcgaaccctgccaggctgaattattagggccagcgcaattcaacgactgcaccaccaccgaaccgctggggttggaagcctgcgtcgcatcggagcgtacccatgtttcttctaacaaaggcacgatcttgaggccatttcgcgggcccttttcccactcccagcgccagctttgtctccccgccggtatgaggctgagacttggaggaggctgagctgcgccgctggggaacaagctcgaagggcgggcgtgggaagctgcaccgcgctgccgctgtggtttcctgcgacctgaccgtgccattagaggaagttggagtgctgcagctgcaagagatacctgctgccttcaaatcagggctggactccaacaacccctgtgcaccgattactgtcgtacaaagaaactccatcggccggcgcggcggaggcctg

SEQ ID NO: 111494 - DNA, 30 bp, Homo sapiens; identical to SEQ ID NO: 41596
  chr5:65221749-65221779
  hyper

SEQ ID NO: 111495 - DNA, 150 bp, Homo sapiens
  chr5:65439855-65440005
  hyper
agaccggaaggaaccgggtagacatgagcacaagactctcatcgacttttggggaaaacaaaaacaccgataaaaatccaggcggtgaaacgagcagcaacagccccagggacccgggagctggaggccgcagccgcgcgagaaccgccg

SEQ ID NO: 111496 - DNA, 30 bp, Homo sapiens
  chr5:65440801-65440831
  hyper
ggccgttttgctgacgagaaagcctgctgc

SEQ ID NO: 111497 - DNA, 48 bp, Homo sapiens
  chr5:65891727-65891775
  hyper
ccttttcctccaacacgctggtgagtccgtgtgcgtgggtgactgtgt

SEQ ID NO: 111498 - DNA, 813 bp, Homo sapiens
  chr5:65892689-65893502
  hyper
gggaggcaccctgggcgcccgggcgcccgccgcgtgggctccggcaagcgtgctgctggagcgcggagtccttgcgctgccgccgccgcttcccggaggagctgtgccgcccgcgccccggggcagcagcgcgtcccaggaggagcaggacgaggaggtgggcctttccccagcttgcccactctgggttccggcagccgggcgaccgtagtttcccatcctgcgcacaggcagtgggcaggagagcgctgtggcctggagatagggagggaccccaagcgctctgccccgagcacgggacaacgatagttaggagcccccctgtgggttattgacttccctgtggctgttacccccgtgtgtgtgtctcagtgtgctgcctgatggtgtgtttttaaaatgtcagagaagcaaactccttcgtgtttgtatctgacttggttgatctgtgaaaggatgcgatctggacatctggcgtgtccccacaactcacctctgattctccaaagtgggcgttgtttcccaccgaagcgcttgggccgaggggcagggagttgagggggagaaatggtgccttgggggtaagaggcaggagtagggtggggggcagcggtagccgcggagttgcctgcggaggtttcagtggcgccagccccctgggatcgcccgcgggtggttttggcgcgtccccgcagcgtcggtcctctgggagaagaggactccccgcgctccctcggtggcgctggcgtgcgcgcctgcagctcccgttcagacttgtttccagcttgtccagatgaacgcttgtcaccaaac

SEQ ID NO: 111499 - DNA, 30 bp, Homo sapiens
  chr5:66124547-66124577
  hyper
tccaatcagctagagcgtgatgtaagtgtt

SEQ ID NO: 111500 - DNA, 190 bp, Homo sapiens; identical to SEQ ID NO: 3998
  chr5:66124998-66125188
  hyper

SEQ ID NO: 111501 - DNA, 1080 bp, Homo sapiens; identical to SEQ ID NO: 41600
  chr5:66299575-66300655
  hyper

SEQ ID NO: 111502 - DNA, 179 bp, Homo sapiens; identical to SEQ ID NO: 41601
  chr5:66511672-66511851
  hyper

SEQ ID NO: 111503 - DNA, 519 bp, Homo sapiens
  chr5:67583945-67584464
  hyper
ctgtgcatagtgcctcgcttcactgtcggctacttgagccccgcgagccagccagcgcgctcagcagccagtgagactattttaggtcccctcacaatggccttctcatttcccaggcgaaaatgagcaagttggtcttgcattggccacttgtcagccgatgacaactttgacttgggctcccctccccctcccgaaatccctagctcagcaaatatttgaacctgcccaagttaatcatgaagctgcgatctttatctaagggagacgtgcgagcgcctgggctcctttcctccccgatacagtagcgaaatccagttggcttctcaatgaggagccggcagtgagcggcggtggcccggacgcactgccgggcggggcgtggggcggagggacgagccgagccgagccaagcggagctgggccactgtgcacgcccggagggtcctggcggcgcccccgctcctgcgcgcactctcggcgccggacacgagcactgcctgccgggaacaggctggg

SEQ ID NO: 111504 - DNA, 102 bp, Homo sapiens; identical to SEQ ID NO: 4001
  chr5:68179310-68179412
  hyper

SEQ ID NO: 111505 - DNA, 30 bp, Homo sapiens
  chr5:68389825-68389855
  hyper
acgtggcttggcaacgtccctaccgccgct

SEQ ID NO: 111506 - DNA, 30 bp, Homo sapiens
  chr5:68390342-68390372
  hyper
ctgcagaaggaaggcgctaaagccaaaaag

SEQ ID NO: 111507 - DNA, 30 bp, Homo sapiens; identical to SEQ ID NO: 41604
  chr5:68463026-68463056
  hyper

SEQ ID NO: 111508 - DNA, 31 bp, Homo sapiens; identical to SEQ ID NO: 41605
  chr5:68485209-68485240
  hyper

SEQ ID NO: 111509 - DNA, 174 bp, Homo sapiens
  chr5:71014804-71014978
  hyper
tcacctctagcccctcggcttcagctcaggcccctcggggagcatcccttgccgtgagactgacagcctttgggggcgcagggtcctgttctctgcgctctagcccatctgtgcgcagagcctcgttcccaggcgcctggaacccggcgggcattgacgtcaagcgccggcgga

SEQ ID NO: 111510 - DNA, 645 bp, Homo sapiens
  chr5:71015031-71015676
  hyper
cgcctcctccctctttcctgcacgggggctcgggctcactataaaaggtgggagcgcgtggtgccccagcaacgacgagtttcagaacgatggagagctcccgcgtgaggctgctgcccctcctgggcgccgccctgctgctgatgctacctctgttgggtacccgtgcccaggaggacgccgagctccagccccgagccctggacatctactctgccgtggatgatgcctcccacgagaaggagctggtcggtattcccctcgctctcgacccccttgagctgtcgccttgtctcttctcttgcacgcctccctcctccccccacccccactcctattcccagagtcagggcgcggggagctgagcgcaacgcccaggcacccactgccatccgaagagcgtctcgagctcacgggctcctggcagtctgttgagcgaatccctcatcccggcccctctgagcaacagggaccccagcggctcagagacccgcggtcagtacctgggacagcgtccgctaagtttccacccctcgaccattccctgtgtccgcggagtcccaccgcagagtgcgtgtgggtccggggctccttataactagggctggaagtgcgcacctgggctgggctcgcagccaaggcggc

SEQ ID NO: 111511 - DNA, 2017 bp, Homo sapiens
  chr5:71402901-71404918
  hyper
caggagctcagcgggcgccccagccccttggctcgcggccctgccccgaccattgtccgcacacctcgtccctccagcttccgggccgcgggcgagatgatttgctgcagatgacatcagccccgggccaacggctggaagagcggaggcagccaccgcgtgaggatgtgccgggtggtcctttcctcctcctcttcctcctcctcccggctccctgcctagtctccatataaaagcggcgccgcctccccgccctctctcactccccgctcctctccgccgcgcactctccgcggcgctgggagagggcggagggggaggcggcgcgcggcgccagaggaggggggacgcagggggcggagcggagacagtaccttcggagataatcctttctcctgccgcagtggagaggagcggccggagcgagacacttcgccgaggcacagcagccggcaggatggcgaccgtggtggtggaagccaccgagccggagccgtccggcagcatcgccaacccggcggcgtccacctcgcctagcctgtcgcaccgcttccttgacagcaagttctacttgctggtggtcgtcggcgagatcgtgaccgaggagcacctgcggcgtgccatcggcaacatcgagctcggtaagtggccccgcgcccccagagacgcgcgctgggagacgcgcaaacacgaccccacccagggcgcgacggtcactgcgctcctcccgcgcgccccgcacccatgcctctcctcgtcacctctcatacttggtccagaccctttctgggctaattaagaataatccgaattattagatatgagacccagagggagagtctccaataaccttgagggatctgtcaccacgctgagtccgcagcctgtgctgagttggccaccgcctctcccgctaagtgaaatgcaggtgtcaggggagcagaggccacaataaagccgcaaccgcaggaggcagaagggtgggggagacctgatgcaaccactcctttcagtcctcttctggcctcaggaaaaggctgggacccccaccaccgcagacctggggccgaagcccatgtgccagggcccgcgtgggattcatcctcaccacggctacctcagcccctgagaaacgccttttctgatttcaaacctcccgatcctttctttcctcagaatgactaggctagtcctagggccacgcccgctccccccgcccccccctccccggggagatgctgggatgcagaaccgcctgcgcttcgccaccagacagagcccgcctcgctaccgcccttggggccttggctgcagctctcagaaaggacaatgggaccccaagttgcggggtggggctgctgcttttagaagtcccagcctcgggagtggtagcttgaagggggtcggtgagggagacgtcagcgggtagggtcagctcctcgcccggtgctcgcaccagtggcgcgctctgcggaggccgaatagcggtacgccggggaccctgggcggggccgtgagggtccggcgggcacagcctcgggcgcacagagagaccgcccccagccccacccgagctgccgcagtgcctccggaccgcccgccacacctgcccccccacactgcggcgcccccgtcgggcacggctggctgggcttgcgctccgcccgggcctcgggctggcgggggccgcgcgcccccacctctcagtttgcctggctttgttgccctgggagtccctgggtgggcagctctggtctctgcctttccctttatccctggcgtcccggccctcccctcgctcctgacagaggtcgccgggtccctccgcagccccagcccgcgctctattctcctggggtggtgctgaagcgtttctccgggagacaccggttggtgggcgtggtgcagtccgcactgcggtctctacggcagcccgaggcggacaaagggcgttcacgcagccctcgttccccactccccctccccaataaaagacgaaagaaaaaccttgttttag

SEQ ID NO: 111512 - DNA, 30 bp, Homo sapiens
  chr5:71604124-71604154
  hyper
ctcaggggagacggcgctctggcacatgaa

SEQ ID NO: 111513 - DNA, 30 bp, Homo sapiens
  chr5:71604454-71604484
  hyper
ctctccctaccatgcggcctccctgctaag

SEQ ID NO: 111514 - DNA, 230 bp, Homo sapiens
  chr5:71616290-71616520
  hyper
ggggtgggaggctccggctctgtcagctgccgctgccctctcggaggtatccgcggctttagcctagggaaggaggggagggatgggagagaagggagtgttagatcccagctagcatctctgtggagcagccacagctcctaagtcactcactggcctggagcgcaccctcgccctctagttgcacgtgggtgcagtggtgaccactgggggtcgtggatacccccagt

SEQ ID NO: 111515 - DNA, 131 bp, Homo sapiens
  chr5:72113262-72113393
  hyper
caatcaagctattttcggaatgactttctttaaaaatgatcgcgtgttgcttactgattttaaaaatcaactggattttgcaaggattgcttagagtttaagtctgttatcttaatcgctaatcaggatgg

SEQ ID NO: 111516 - DNA, 218 bp, Homo sapiens
  chr5:72143775-72143993
  hyper
ctcttcaggtgtttcgcaggggttttgataaggacttgactttttattagcccttaagtcagtagtaatctggacggaattagagatgggttgggttggagaaaactgcgtggcactaggacccagggggctcccgtgagcggatcttggggccagattgcaaattcgcggtgactcagtctggtcggctccttgcgctcggcggccgcggcggcagc

SEQ ID NO: 111517 - DNA, 30 bp, Homo sapiens
  chr5:72144849-72144879
  hyper
tgggggtttttccacgtccttgccctaaaa

SEQ ID NO: 111518 - DNA, 30 bp, Homo sapiens; identical to SEQ ID NO: 41610
  chr5:72251713-72251743
  hyper

SEQ ID NO: 111519 - DNA, 30 bp, Homo sapiens; identical to SEQ ID NO: 41611
  chr5:72252780-72252810
  hyper

SEQ ID NO: 111520 - DNA, 141 bp, Homo sapiens
  chr5:72415781-72415922
  hyper
tggtggctccatattcgatggggagctcgcagcgagtcgcttccctctgtaaccccactccaggtctccagagcagtaggagggccacagggctgctgggtgtagtcgccccggacctcgcggtggccaaggccaaggcgg

SEQ ID NO: 111521 - DNA, 740 bp, Homo sapiens
  chr5:72416022-72416762
  hyper
cgcgcccctatagaactgggcctcaggcctcgagggggagcgggcctcggcgggcggggcgcacagttccgccagccggcgggggcatctcaactcgccggccccgccaggtgtgcgggccaggcagccgtggaaggtgcccatttctcccagattcctcgcgcgcacggccacgagcgcggaggctgccaaacccgccagccctgggttccgaagccgcccctggctctccattccctcgcgggcgcgccccgggcccccagtggcggccagctcccaccggtcgctcctgcactgccctgccctgccctccccgggccgccgcgcccgcgcagcaccgcctccttctctaaatactgccgggtccgccctccgcaccaggacgcgcggtgggtagggtgcagggcggccggcgcagccgaggccgcgtgcggaggcggacgccgcgcccagccagtgcccacagcagcgcggtcagccaggcgccggacccagcttcaggtaagctgccccggcccgcgcgcctgcgccggcggcggcgggtcgggcgctgagctgtgcggccaggctgggcgcggggagccgcggcagcgcggaggcgctgggtatccgagcccaacctgcgtccctgcgagcccctccggctgttgcttgcgctcgggctccctaaaagccgcaaaccgatttcgcacagaaggcatttgcctctcgtttcgttccccaaacgcaccatagctttg

SEQ ID NO: 111522 - DNA, 296 bp, Homo sapiens; identical to SEQ ID NO: 41615
  chr5:72497764-72498060
  hyper

SEQ ID NO: 111523 - DNA, 139 bp, Homo sapiens
  chr5:72511608-72511747
  hyper
taaacacctaagcccggagctgcaaagctgggactacgttactcgtggtgccttaaaccccaagctttatccgccccatctcccaccacctcactgcagacaccctgccctccgtccgtgcataaccacgttctcgttc

SEQ ID NO: 111524 - DNA, 615 bp, Homo sapiens
  chr5:72511765-72512380
  hyper
cggcgctggggagaaggcttcctccttgtccgcacttctgggtcaacagccttagatggggcggggggggggggtgcggagctgccgaaaccttctcgaagatcccagggagtctctgtcccgcagaatcagcaccatcctcctcggagcgcagcttttcctccctgcccaagtgcggtgcacccgcgcaccacccaagcgcccagcatcgagggcgcggcggcggcggccagggcggccagggcccttgagcacccgcgcggttttccccctatggccgcatgggggcaggagagaggagctgtggcgcagagcacgcggagagggacctggagcgcgggagccaggacggcgcaggcagctggggaggccgcggggctgcccagcgagtggagtgcccaagaattggccggggtggaaaggtccgcgggagacgatccccgacctccgggaacaggcctgcggtcggccgccttggcacccaggctctgccgcccccggagactcggatcgagcgctggaagtggccgcaagggacgcgagggagagcagagctgtgaatcagccggaaagtcactccaactccagggaattccgctccgggaagaaaggtgg

SEQ ID NO: 111525 - DNA, 257 bp, Homo sapiens
  chr5:72526157-72526414
  hyper
cctcttccccaaccccggggccacctctgaggcatgaacccagagacgcgcgccctggtctgggaaagcaggaccgctgcgcccagcgcctcaggggtagaggcgggaacaggcccgcggtcgctttgctggcggggaagggcgatctgacgatcagggagttgcgcccctctctctgggcctcgtgaaggaacagagcaattacagcgctgggccggccacgtagtcctggggctaggtgggcccaatgctccggg

SEQ ID NO: 111526 - DNA, 273 bp, Homo sapiens
  chr5:72526491-72526764
  hyper
cgcccgggactccccatcagacctttgagggggagcttctcaaaaagccctaaactcctcgaggatattctccgagtgcttctccttacccaagcgctgcttccagactccacgcctctagaactagctggcgtccacggtcggccagagcagttagggggctgcgctagcagggacatgtggggcaaaagagacgtattttaaaacccccaaacaaatgtgccctgaaactcacggagcctgagtttctgggttcctcgcttgcactgcccc

SEQ ID NO: 111527 - DNA, 596 bp, Homo sapiens
  chr5:72529229-72529825
  hyper
caggccgccccacgccgaacgaggtgggatcagatattcccgcttgtgagtgttggtggggctgaagagatcacacgcggcggggtgtggaacttcgaggggtgtcacggccagggctttgcggccccagacgtcccagcggctcgcagggggcgccaggtccgcgcttccccttgggtcttcgagaggcgtgtgcgcaggacgctgccctctgttgcccaaagcccgcaccaggctcctgggcttccgcgggcttccgcaggcctcaggcgaggggcggggacgccacccgcacgctcccgagcgcagggagggctgtcgccgaagcggtgacccacgcgtggaccccgcccgcgctgggccgggccggtcccctgcccacccgcagccctgctcggccgcgttcccagcagccgggaaagcttcctccctcggtcaccgatccaggccgctggtccagctgtcaaaacagggggtgtctctttcattctggctcacaaagtcccaaaggggaacagggggccttaatgcttgtgtttggacacaagcaattatccctaattattctttttcttttgagcctgcccgtcccgccg

SEQ ID NO: 111528 - DNA, 673 bp, Homo sapiens
  chr5:72529889-72530562
  hyper
cggcccgaggctcgggcgctttcatgtcactgcgggtttagagctgattcaaactcattgcgatgggggaattaaccccggggcccgggctttcaggggcctctgataagagattatacgtgttgatggcaagcttttcttggcaaaatgttttcaaagggcttggagttgttaaatcaaagcgccattgaattgctcgggaccaccccctcccccgcctcttgcccttcccccacctccatctttttcccttcatccctcctcccccatcaccgcccaggactgcccaaggcgagcggcccagcctccgggagtggcgagtcaccttccttggtacgattttcccccggtgcctcgcccgggaaggattgtttttgtaggtgctcctgctgctgggcactttggtaccccttcccttccccgcccctccccgccccttcacacacacttgctctggtaaagaaaacatgtcccagatgaaagacgtttttttcaaacgtacatgtgttttgcagaaaacggaggtgacagggtgggataacgaggagaaaggaagggtggctttcctgcctcccccacccccgaaaggtcatcggagtcagaggggtaaccatcgggttaaaaagtattgtgggcagagttcagatgtccggtgaatcgcacggttctgccc

SEQ ID NO: 111529 - DNA, 134 bp, Homo sapiens
  chr5:72593806-72593940
  hyper
cctgggaagcagcatcgtcattggattatctcggtcgttcccgctcacttaggccaagcaggcgatgggtgtctcggttctgcctggaactgccgtttttcggagggtgggccgcaccccgcagtgcgtccaac

SEQ ID NO: 111530 - DNA, 335 bp, Homo sapiens
  chr5:72594501-72594836
  hyper
ggactgtcctgagtgcatttttttcctcccttatagtctgttaaattgactaataaacccaacgcagcgttctctgtgcagcttcaaaaaactcagtaatttcgttagaaaacgttgaaatccgaccccaaagtattcagcccaaatgtttagttaaagtaaccccgtgggttaataaactaaacaaaggcaacccatgcaaaaccggagcaatgaaaaccaggctacataaacgaagggaagtttataagaactctttgggaggaaaaaaagagaaaaggcaccgggcacggaggtttaatgtgaagcatgtgagcggggctcagtttacaggt

SEQ ID NO: 111531 - DNA, 149 bp, Homo sapiens; identical to SEQ ID NO: 4012
  chr5:72594867-72595016
  hyper

SEQ ID NO: 111532 - DNA, 675 bp, Homo sapiens; identical to SEQ ID NO: 41623
  chr5:72595046-72595721
  hyper

SEQ ID NO: 111533 - DNA, 41 bp, Homo sapiens; identical to SEQ ID NO: 4015
  chr5:72595773-72595814
  hyper

SEQ ID NO: 111534 - DNA, 394 bp, Homo sapiens
  chr5:72597812-72598206
  hyper
atgtttaaattcacccgcaatctggaagatgttttgtccaggaactcagacatgaggtgttgggagaaaggagagaaagtgacactaagaatctttccttgccttcacttgggcctcatgatcgctcccaaccctgcccagtcgccccaccagcacgaggcaaatgactgtcttcagctccgaacattaatattaagacatcagcattgcattagtctgcaatggaccatcaacgatcaagaaaaaaatacaaaggagaaatgaaatagctcatccgaaaagtcctactgtcatcgtgtttattttttgctttgctaagcccaagatataatttactcactgctctcttgcaaacaaaagggccgtgatagcctggcaacgttgaagagcccct

SEQ ID NO: 111535 - DNA, 33 bp, Homo sapiens
  chr5:72598949-72598982
  hyper
attgtggtgcgccgccggtactcaaggagccac

SEQ ID NO: 111536 - DNA, 382 bp, Homo sapiens
  chr5:72599059-72599441
  hyper
cgaatgcagcgcccgggagtcagggctgttagtggcgtggcccgccgggcattgagctgtttcctccaacgcccggtcccccgcggcctaggcccagtgtttgcttttgcagatacgtcagagggaacattcaggaggggcgggctcccaggctcccaggagaccgcccggagcctccggagcgcgacgaggcgcggggcctcggagatctggcctgccagattgagggggaggggagggggcctggcccagcagctggacaggcgcgcagtgcccgcagcccgcgagtgggcgcccagctggcttcgcacgggtgaggggctcagcctgcacttccctcctccaccccgaccgccgaacgcgtcccggctggcttcagagt

SEQ ID NO: 111537 - DNA, 396 bp, Homo sapiens
  chr5:72599462-72599858
  hyper
cgcgcaccctagggagatgcgcggcgtccgcgcgggtcagcgccccagtaccactccccagtgtactccccaggtacacgcttcccttgcgcggcgagtttcaactcaggtcagaacggagctgagcggtgggcggagtggagaaaggtcccggaaattggccaagagggggcggtttcgaggtagtgccttcgaagtgttgtccagaccagcagggagggtcgcctccacctgcggggcctcctccagctccacaaggtagccccgtagggacttgcagatctgccagacctagcagtgagaccactgctcccactgaatggcgccgcctgcgggctggcccaagctctatgcaccggctttatctcattttctcctcaccgttaataactggca

SEQ ID NO: 111538 - DNA, 360 bp, Homo sapiens
  chr5:72607508-72607868
  hyper
tgcagtgtcatctccttgcagcgtgagccctcgctgcagcacgcaggacgaaggccgcctgccactggaacgcggtctcgcgggtgtcggggtgcagcgcaggccaggcggacaggaggtgcggctgtgagccgtcccacaaggacaatggaacttttatttctggcctgtcttggttggcagtctctctcccactctctttcttggttgggctttggtttaaagttaccctttcaggattaggttggtgttttctttcccatgccacctgggaagtttctgtttccgaagtggctgaacacagacgggtcagtcagtcccaggcctttacccggcagaggcgcgcggccggggcttctc

SEQ ID NO: 111539 - DNA, 632 bp, Homo sapiens
  chr5:72676272-72676904
  hyper
cacccaccaggactgcgtcctgccagctcttcactccgctgacctgaccttccacgcccctagtcctcgagcggacttgacctgtgggggagtaccgaaccgtccccatgaggccctccaagcggccaggtggcctccgccactctctccacccccacctcctccaccccccagcccatcggtccatcttcgatctgcaaaacacgccgggtcagcgacgcatcggtcccaggcttgtgaccacctctttctctgttacttggggagccaggcccaccgctcaggatcacagtgaggagaaaaaagacacaaacgccaggacagggcggctggggaaggaaactgctagggaccgctcattgtcagcctggcgtgtcccacggatcgcaggacccgtcgaggctttgctctctgcgacccgaatactcctgggcctctcgacctcctcctcggactcaggcgtccgcgtctccggtcatcacgggagaccaattggtttacaaatagtgatgataaacctgggaccgaccttggggctgtgtaaaagtctactgacagatgtaatggagggttgttagcagtcacaaagcctgtcggacccgtagcattagttcaagagactattttcgtgt

SEQ ID NO: 111540 - DNA, 11 bp, Homo sapiens
  chr5:72676924-72676935
  hyper
tgtaaaccaat

SEQ ID NO: 111541 - DNA, 21 bp, Homo sapiens
  chr5:72678007-72678028
  hyper
gggtcaccgcgctcccggacg

SEQ ID NO: 111542 - DNA, 49 bp, Homo sapiens
  chr5:72678365-72678414
  hyper
gggcgcagcccaggagaccgggagtcgcggcccgcgcggttccgccctc

SEQ ID NO: 111543 - DNA, 149 bp, Homo sapiens; identical to SEQ ID NO: 4016
  chr5:72715198-72715347
  hyper

SEQ ID NO: 111544 - DNA, 105 bp, Homo sapiens; identical to SEQ ID NO: 4017
  chr5:72715590-72715695
  hyper

SEQ ID NO: 111545 - DNA, 547 bp, Homo sapiens
  chr5:72715730-72716277
  hyper
cgcagtactgctctcccgccccccggagccgagcctcttcgcgttcgcaccgtgaaaggaggggagcgaggggttagccatctcgaacatttttaactaatcaaaatatttgctgatgagtatttatttttacaagaactcggtttggctggagacttcccgagcaacaatatgggctgccgtattaggtttgtgacggagccaagtgtggttggggcttattgaatctgcgggccggagatcgctcgctccggagacgtttctccgttctggggaagcagctttcccaaaaccgtccttctgcagatggctcttagaacacaaccacatgtcccctaaagcacgggaagcttcgtgttttatgtttgggctgaatgaaaagaggaacgcacgctctttcctgcccaagccaacaaaagagaaaatagcgggaaacgtccctgacctgagaaaggaaagccaaagctcagaggttccagtgtaagcacaaacaacaaaactggatgagtccaaaacacctacctcaacacatcgcttcatcgtgcta

SEQ ID NO: 111546 - DNA, 40 bp, Homo sapiens; identical to SEQ ID NO: 4019
  chr5:72732869-72732909
  hyper

SEQ ID NO: 111547 - DNA, 774 bp, Homo sapiens; identical to SEQ ID NO: 41631
  chr5:72733012-72733786
  hyper

SEQ ID NO: 111548 - DNA, 711 bp, Homo sapiens
  chr5:72739650-72740361
  hyper
tgtgtggtccttctccgggagctgcctgaaccatcagccccaatatatccctctccctattaactgcaattccctcccgactgagcttcggtcatttgtctcgaggctctacgggggcgtttgatgagcagagaaacaaggagaaggggagaaaagcgtcgggttaatgagttgtagcaaatccacactttgtagttgggaggaggagagctggtggccaatgtttgttcaactggtttatttttcgagacccagcctattgaggaaggcttgttcaagcaggcttcgttcctacaaacacacaaacatccttctgtttgcctacaaagaaaaggggaccagcgctggatttgcatgcgaatgaggagccccaggaggagacgtccttgcccatcaaaggccgcggtagcctggcggccccgcagcctttgttccagcacctgctcgcctgcacggcctgacggggcgcgccccgcgctcctggctcgcccatccagggtccacggctcactcgtccctcgcctgccccgcggcccacacctctcgcagctcatacctcacccgccccgcggccctgcttcccccagtctcatcctctcgggagcaggcccgcagggtctgcaaggccaagaacggaaccccaaacgcagagggtggggaggtgagcggcaggacgcaaaactcggaatcgaggcggcttgggtttacacg

SEQ ID NO: 111549 - DNA, 30 bp, Homo sapiens
  chr5:72740732-72740762
  hyper
gtgccgtttggattccgcctgccaacccct

SEQ ID NO: 111550 - DNA, 2926 bp, Homo sapiens; identical to SEQ ID NO: 41633
  chr5:72742463-72745389
  hyper

SEQ ID NO: 111551 - DNA, 46 bp, Homo sapiens; identical to SEQ ID NO: 41634
  chr5:72745568-72745614
  hyper

SEQ ID NO: 111552 - DNA, 14 bp, Homo sapiens
  chr5:72746669-72746683
  hyper
ttacagccatcatt

SEQ ID NO: 111553 - DNA, 1008 bp, Homo sapiens; identical to SEQ ID NO: 41635
  chr5:72746975-72747983
  hyper

SEQ ID NO: 111554 - DNA, 30 bp, Homo sapiens
  chr5:72750489-72750519
  hyper
ctagaaagctttggtcggctagccttccag

SEQ ID NO: 111555 - DNA, 30 bp, Homo sapiens
  chr5:72861022-72861052
  hyper
caggaaagaaagtccgttctgtcgccaccg

SEQ ID NO: 111556 - DNA, 30 bp, Homo sapiens
  chr5:72861734-72861764
  hyper
gaggtaggtgaaggcggctcccattgaggg

SEQ ID NO: 111557 - DNA, 1144 bp, Homo sapiens; identical to SEQ ID NO: 41636
  chr5:72921422-72922566
  hyper

SEQ ID NO: 111558 - DNA, 194 bp, Homo sapiens; identical to SEQ ID NO: 4025
  chr5:73843884-73844078
  hyper

SEQ ID NO: 111559 - DNA, 264 bp, Homo sapiens; identical to SEQ ID NO: 41638
  chr5:73935723-73935987
  hyper

SEQ ID NO: 111560 - DNA, 516 bp, Homo sapiens; identical to SEQ ID NO: 41639
  chr5:73936032-73936548
  hyper

SEQ ID NO: 111561 - DNA, 286 bp, Homo sapiens; identical to SEQ ID NO: 41640
  chr5:73936773-73937059
  hyper

SEQ ID NO: 111562 - DNA, 30 bp, Homo sapiens; identical to SEQ ID NO: 41641
  chr5:73937315-73937345
  hyper

SEQ ID NO: 111563 - DNA, 30 bp, Homo sapiens; identical to SEQ ID NO: 41642
  chr5:74063348-74063378
  hyper

SEQ ID NO: 111564 - DNA, 363 bp, Homo sapiens; identical to SEQ ID NO: 41643
  chr5:74161899-74162262
  hyper

SEQ ID NO: 111565 - DNA, 204 bp, Homo sapiens; identical to SEQ ID NO: 4030
  chr5:74162515-74162719
  hyper

SEQ ID NO: 111566 - DNA, 544 bp, Homo sapiens; identical to SEQ ID NO: 41645
  chr5:74348350-74348894
  hyper

SEQ ID NO: 111567 - DNA, 1101 bp, Homo sapiens
  chr5:74348906-74350007
  hyper
cgttatccaggacacgctccgcgcccgccgcccgctgccctttccccccgctggcctcggggaacttccccgcgtctggccgcaggcggcggctgccgcggggagccccgaagttgcggcgtctgctaggcgcgcgccgggtcgcccacccggcccgtgacgctgtgtccgtccgccgcgcgctctggtggccccggggctcctgcaggcgcggagagaggccggggttcagcccggttccccgcgcggctccgagagggcgcccccgcctgccgcctggagatggacgcggcgccgaagttttccccggcgggaaaacgaaagtcgtgaggagcagagggtcggggcgtcccggcggagacgaggctgagaccgggttaacatctccagccccgggcgaccctcgctcccccgcgtggccaagtcgacttacgagagggagcgggccagccccgaacgcggggtccgtgcggctgcggaggccgccccggcgggggccgagggttgcgctctgggttcccaggctctccgcggcggctcgctctcgccgcgctcctccgtcgccctgctggggagccgctctcgcccggcccggggtgggagagcgctgagcggcccccgtgacgtgcggagaaagtaggagcgcctccgcgctcccgcagagggagctccctgccctgcgctcccagtccccgggccgcgcttcggacaaagttctcaggcgcgcgcggtgatctcggctctccgccgctgcccggagcgtcatccacgttcggttccctcccacattagacaagaaatctgaggtcaggagagctaagtaacttgcccaaagtcgctcacaaggcagtgacgaagcaaactcacatccgcggctccttttttctccttgaacgccgggctctgcggaggctcaggccctgcaggaatcgcccaaccagacagaaggcagctcgctctcatgggtgagacgaggagtgtcccacgcagccgcgagaaatattatcagcagcgtgggaaggtggagctttttgccgaataactagagtgcaaagttgtttttcaaacagtgcctacatgccaaatcggcttgctttttat

SEQ ID NO: 111568 - DNA, 112 bp, Homo sapiens
  chr5:74632843-74632955
  hyper
ttggttggccgagccgtggtgagagatggtgcggtgcctgttcttggccctgcagagagctgtgggcggttgttaaggcgaccgttcgtgacgtagcgccgtcaggccgagc

SEQ ID NO: 111569 - DNA, 30 bp, Homo sapiens; identical to SEQ ID NO: 41647
  chr5:74633512-74633542
  hyper

SEQ ID NO: 111570 - DNA, 30 bp, Homo sapiens
  chr5:74633805-74633835
  hyper
ggcttgagaggatgcggagcccaacgtggg

SEQ ID NO: 111571 - DNA, 392 bp, Homo sapiens
  chr5:74807674-74808066
  hyper
gaagggcgttggtccgtcgctcgcgcagcctcctgggagttgtagtcgcgatcctgaggtaacgggtgagtatcccgcgcggggatcgcttgtccccttggggccttgtcagtcggtgggtgggcttcgtttgacagttgcgtgaccagcccctcggcctcgcttctatccttgccttgtgtgtttatgacgaaccctccgggcttgcgggcccagacgtgagagagctttccgctgaagatgacgggcctgctttccagggcggcttgtcgaaagcccgggagcatctggccgcttccgcctcaaccatgggctggggttttgtgagctactagtgccaagggttttctttccaccagaccaccgctgtaaatctcgagggtcttactcat

SEQ ID NO: 111572 - DNA, 120 bp, Homo sapiens
  chr5:74965023-74965143
  hyper
aaagagatagcagctcgtggtgttttacctcggacctcttgtgcttggcacaggaaatgaaagcttccgtgaacatggccacagggctctgcttatctggctacacgggaccctgatgac

SEQ ID NO: 111573 - DNA, 30 bp, Homo sapiens
  chr5:75012801-75012831
  hyper
cttccatcaccttccgacccagcctgtttt

SEQ ID NO: 111574 - DNA, 187 bp, Homo sapiens
  chr5:75013170-75013357
  hyper
cctcttagccgcgtcgcagctgcagtgtcagcaagtgcagcctcagcaagcacaaccgctacctagacggcaacctgacagtttcaaactgcagggaggaattaaggaccgccctgggcattggtcctttgtttcagcaatctgccgtttgattggtccgagagctgggggcggggatttgggccgc

SEQ ID NO: 111575 - DNA, 389 bp, Homo sapiens; identical to SEQ ID NO: 41648
  chr5:75377859-75378248
  hyper

SEQ ID NO: 111576 - DNA, 2333 bp, Homo sapiens
  chr5:75378678-75381011
  hyper
gttgctccctggaagccaagtcgaagtgaacaagtcagtcccaggcccggaaatagaatacaaaccctctttttgtccggtgctaacagagtccagcagtcagaactccctcgcgtctcacgctggacctgacccggggcgccgccaagtgcgcaacgcacagtcacagttggtgactaattaaggactgccgcccctctccttcacctgctacaaactcagagccctgacttctccagaagtacctaccacttggaggtggctctccttccccgccccctgccccagtcccacaccgcagcagcgcctcagcaccgcgacttgccggagcaccgcgagtggcgcgcgggtcccgcctcccccgcgcgccgtgactccctgcgcaccgctggtactctcgccacgccgccgcccggcactgcagcaccagggggaggaggcaggcggaggagaggaggaggaccgcagcgtgcaagccgggagccactttcccgcccctcctctcgccgctgacacgctcagaggagtcaccactccgcgcgctgcaggcgagagtggcagacggaggcagcccggggaagcgagccggagcggcgcccgcactgaggcggctgcagtgctgacaccactcagggcaagggtgtccgacggctggagcggtgagtgggggaggtgaagcgggcatccgcggggagactttcccccgctgctggatttctcttcccgactggtggccgggcgctgcagcctggggaagtttttgcagcctttcggaagcgcaactttgccccgcctgcccccggggaagcggctgcaggtgcccgctgctttgtaggcgcctttgttggagagggaccaggaaagtaggggtaaaatagatgcagtgaccccagggttcgctagggtaggtctggggactgggtcgcactttatctgggattcccagaggaggtgggtgggcagcagcggggatgcaggggccgcatctgcagcgaccgccacgctcttttttgcttgtgtggtttgaccggcagggataggcagattcaaatctagcagcctagagccccgggctgggtacctggacctataccttcatagctgccttaggctcaacttttcggcggggatccctctgcagacgtgcaggtggcgggagagcagaggtagccgcagtaagtgctgagagagcctgaaagaaacaccatgaattttcaaactctcccacatacattcccgaagcgcctgtctggcgtctaagagagagcaagagagggctggagagcaggggagcccgcggggctgaggctctttgtcagcgcctgcacttcctacgttacaacgccttcattcagcaaaaaccttttgggcgcctgctgtgcgccaggccaggcgaagcagacccgaggctgtgaagctcagaggggagagggaccaatcgcagtaaataagctaccgaggtaatcttagatggcgatgagggcagcaaaagccatcagccgaccctctgaccctttctcttagtgggcttttccccttccgcctgggttctagaactgggaagacttttctccagagcgtcgcggggagcgccccgggctgggcccacggggactgcggaatacggggatgaacttggcttggggcagccagcaccccacggcagatgaacaatcgggagcagatctgtgggcgtgcggggaccttaggcggcgcgcgggggcggggggaggggctgagccacgggggctagaggtgccgcctggacggcctgagctgggggcgctcgcgtcaccttctacgtgtgcgagtgatgcaaatgcagacccgcgaggggcgggcgggggtggcgggcgggggcaggcgacggagtctccgtctgggagcgcgcgtgtgtgcgtcaaaagctctgggttgatggatgccccgcggcgcgcctggcgcggagagcggcgacccggcggggcagaggggggcgggaggactgcggcggcgcggggcggcgaggaaagccccgcacggcctgggctggcgggcaggcggctccgcagtgcgccgcagtgccgggaaggagccgcagctaccgggcgctccccgggggaccgaggagatgaggcgtcttttaaggctcatgagagccttaaggagatgagaccgggatgccgtgatggtctcctctcccgctgaacctaatcccttcatacttagctgactgctagcgcggtagcttccgtttaattcttatccttaattctgaagaatgtggcattaatctctcaggcgttcactcattttccatggcaagttccgaaaggcctcgtgctcgtgggaag

SEQ ID NO: 111577 - DNA, 31 bp, Homo sapiens; identical to SEQ ID NO: 4035
  chr5:75566956-75566987
  hyper

SEQ ID NO: 111578 - DNA, 2020 bp, Homo sapiens; identical to SEQ ID NO: 41651
  chr5:75698193-75700213
  hyper

SEQ ID NO: 111579 - DNA, 99 bp, Homo sapiens
  chr5:76010894-76010993
  hyper
ggacatggtggcgcgcgcctttctgtggtcccaggtaatccggaggctggggcgaaagggtggcctgagccagggagatcgaggctgcagtgagccgtg

SEQ ID NO: 111580 - DNA, 1779 bp, Homo sapiens
  chr5:76011052-76012831
  hyper
aaactgtaatatcgttcaagaacgtgtgaaggacacttggaaagttaccaggccatttctctcctgggcgcccgcggccctagaacgccggcctcaccggcagacgcgcgccctcctcccagatgcgcaggtgaccccggcgggcggcgcgggaaagggaagagctccgcgaggccgcgcgggggggaagcgggagaagccgctcttcctattccactcgcagtctgcgtgtgggggaaacgagtgcccggcgtatgaaacgcctaacttcgcgaaataaagagagacgtataaaagttcaagaattctgtccagactcaagggccctttctcatttaggggcaaccctgtcactacatcataaacttttaaatccgtgatccccacgttacaaaagcagaagtcccttttagacttttagcgaaaactgaactttgccggtgtcccacacggagggagggaggacgggaggccacgccagggctgcggggctgcagggcgtggacgcatcctggccggggcgtccactgtcgacgtctccacatcccaggagggtcgagacggccgcgggaagcagcctgcgagccgtgcggccccattccaaggaccccgccagtgtgagtcactgacagcttcgcgaatcaacggtgcccagaggaaaaaacttctcatttggacttctaggcccggcagtggccggcggccagggccccccagtagggcagggcggggcggggcggggcgcacagagccagaggggcttgcgagcggcggctgagggaccgcggggagggggcgccgagcggctccagcgcagagactctcactgcacgccggagggcgcccttcctcgctcgcgcccgcgcgaccgcgcgccccagtcccgccccgccccgctaaccgccccagacacagcgctcgccgagggtcgcttggaccctgatcttacccgtgggcaccctgcgctctgcctgccgcgaagaccggctccccgacccgcagaagtcaggagagagggtgaagcggagcagcccgaggcggggcagcctcccggagcagcgccgcgcagagcccgggacaatggggccgcggcggctgctgctggtggccgcctgcttcagtctgtgcggcccgctgttgtctgcccgcacccgggcccgcaggccaggtgagagatgcacgggaatggggtgcgcgggcggagggacgccgaggggagactgcgggggtcactgttgcgccttctcctcacccctgcctcagtttcctccgaaagccaaactggcatttgggctgagatctggagttttttccagtcacgtttaggtggggcgtgccacccccttcgcgggcccagccgatgcccctttggactcgatcttggagggtgcagcccgcctgccacggggtgttggatatggaggaggatggagcggaagccccctgggggagcctgcagtcctgcgttgcacttgtcattgtgtttctcccaggaccacccccaaaaagaaaagctctcacgttgctccaccaataaacgtttcgatctttaaaatataaagtggcgaaccgctgccgctgaagttttgctttgttggaagtttttttcttgcacattttacaggcgagaaaagtgatgtagagaaaagcccaggcagtcccttggcatgtttagcagagaatcagtaccagcagcccccggcccggccttgtgtccaggaggtgcgcagggtgcgagatatatggtgacaatagcagaggctccgcgtggtggcgggg

SEQ ID NO: 111581 - DNA, 1247 bp, Homo sapiens
  chr5:76114443-76115690
  hyper
cgcatccctcctcctgcagggtccaccgcaccgggaagccctgtctgtatcagttaccaaccacaattgcagtgagtacgaatcgtggctttcccacagtcaggaaaggcaagggagaccgacgacccgcttctctaggagtaagtaaagattaaaggtagttcgcggtatagcctaggcagggattaacccgtggtcccagcgctcctgctatttgcattccaaagcagacacctcatgcgctcaaccccgcccgcaggcggctcccgcagtctaagggacctggcgcgagtccgggaagcggagggcgcagctgcgcagggaagggggccgggggcgggaccagggcgcgcgttccggtcccggggcgtggcctcccgcaggtgagtacgctgctccttcggtttccctgaaacctaacccgccctggggaggcgcgcagcagaggctccgattcggggcaggtgagaggctgactttctctcggtgcgtccagtggagctctgagtttcgaatcggcggcggcggattccccgcgcgcccggcgtcggggcttccaggaggatgcggagccccagcgcggcgtggctgctgggggccgccatcctgctagcagcctctctctcctgcagtggcaccatccaaggtgagaaacctggccaaggagggctcttatctctgaggagctggggtcctgggcacgctgggcagacggtgggatccgggcaggtgtgcgaaggctgttctgctgccggcacccatctctacgaatcccttagcctccccttggtggctttgatgtgaggtctctgcgccaaggaggcacccaggtgggacatgcgggagcagctgaagtcagcggagccgggcagaggcagagatttccccaaagaccccacttcccgtagaggctgtcatgctgggcacctccaggccccagcgtgggttcggggaaagggagggaaggaaggagtagctgtgtctaaagggtacgcagaggacctagtcccctccccgggcttggttgctttgtaaacactaagtcattaagagctttttgccaactccggagacttcctccgctggccccgcggggccggtggggttagcgagctgattgcgcagggcagggcggagtgggtgggaacccgcggcccgggagccttctaggttgttttttgcgtccctctccaactgctggaagcctttcttcgggttctggcccctgcgttcgagacccacccggg

SEQ ID NO: 111582 - DNA, 356 bp, Homo sapiens
  chr5:76249314-76249670
  hyper
ccctctctctttattcgctatgctgagtggcagggagggtgccccgctcctggtccccttttttatccccagcccttgaacttttccggactgacctatgtttcttgccagctgagggaagcggcggactacgatcctttcctgctcttcagcgccaacctgaagcgggagctggctggggagcagccgtaccgccgcgctctgcgtgagtcgaggctgcccggctcgcgggcgcccgggacgcggggaaggtgggactctgtgcggggggcagagggctcgcggacatctcggggaaggggctggccggaaccgccaggggcgcggtccccttagctaaggatcggtccgcggag

SEQ ID NO: 111583 - DNA, 211 bp, Homo sapiens
  chr5:76249695-76249906
  hyper
cgcgcccggggcgcaggaacccagcgcagcctaggctggaagtcggggcgctgggcactacagagcccgggaatggggcgcgcggagagcggccgcccgaggacggcgctgcggcggctgcagcccgggacttattgccccatgccctcctcccccagggtgcctggacatgctgagcctccagggccagttcaccttcaccgccgaccgg

SEQ ID NO: 111584 - DNA, 408 bp, Homo sapiens
  chr5:76249944-76250352
  hyper
cgaggagttcattaccatccactacgaccaggtctccatcgactgtcagggcggcgacttcctgaaggtgaggcgcccacggccagccaacctagccggagggcggcacgggagggttggaaagggctggggcgctgcacccagcgtggggctgctgagcgtaggtagccagtggcacttcttagacacttcgctggtgcccgagtcggagaggcgcgttcgaggacccccacacggcgagaatctcgcccttacccgaagacctcgacccacacacatccagtggggctggggccggtgcctctggacgctgccatggtttaaattcccttctgggcgctttcgaggccctaggaacttctaaagacttgaactcgcagcgcggaactctgacgcaatccagggccg

SEQ ID NO: 111585 - DNA, 255 bp, Homo sapiens
  chr5:76326225-76326480
  hyper
ggcgccgttgtttccggctcaactggggagctgctggagctcttctggcctctggttttccgactgcttatccgacgctcctccctctgtctctgtagctggagaaggtagtttccaggaaagttttccggtttgcaggccgcgcacatcgggcaggggccatcctcggtccccttgctcgttgctcgcagccccgttcggctacaagtgagtttcagggcgtcatggccaggggccaccgcggccagccgggtg

SEQ ID NO: 111586 - DNA, 30 bp, Homo sapiens; identical to SEQ ID NO: 4044
  chr5:76382524-76382554
  hyper

SEQ ID NO: 111587 - DNA, 183 bp, Homo sapiens
  chr5:76383032-76383215
  hyper
ggaaaacctccgcgcgtgccccttaaagacacagcgctgcattcacacgtctgcggggaaaggggggccgtcacgtgtggccttcgcccgaaagcggtaggggagtcgctctgaaaccgccaaggatcgcgagcgacagatttgtgttggccagggttttaagatgacgcaatagctgagtgt

SEQ ID NO: 111588 - DNA, 703 bp, Homo sapiens
  chr5:76476057-76476760
  hyper
taggacccaggcacccgccggcccggggacgcgtctggaaagtgaaggcgcggaggctcaggctcgctgccagagtcccacggagcaaccagagccttcacgtgggcacgaggcccggggagtggggtgcagggtgcgccaggccggtgccctctgtgcggggctaaggcgccaggcacgggcaccaccagggcgcccaggagccgcccgccgccggcatggaccagctgtactgcccaccgagcgcgtgccaggtgagcccccagcgcgggggaccgcgcagccctcggccgccccctcacacctgggtacccggccgctggcacaagcccagagccggcttcagggccccctttcagacacccaggtgctagggtggctttttttcttttcttttcgcccttagtccctgcgtgtcctagtgccaactacctccttcctttccaggcgggaagcacctcgagcgtctagtgtaaccgtcaggtttattattcccaataataattgaccacagacagccgccgttcgcgtccacctggcgcttctcagcaggagctggacctgtttctccgtcgggccggctcctcgggctgctgttgcgcctggtgttttccacgcttccccggcgcgggacggtggggcccctgcattcctcctcgtgcttccagtggctgcaaagctgcctccccttctgagtagtgag

SEQ ID NO: 111589 - DNA, 974 bp, Homo sapiens
  chr5:76506029-76507003
  hyper
cgctgggggcggcgtcgggatgagtgcagaagagacgaggcctctggacagcggaggaggaggggagggcgccgaggcgcggtgccagctgccgcgcacaggggccccgcggcggagccgagccgcgggcacgctctgccctgtcgggagagctccgggagcggcgggaggggcggaggggcgcagtggggcccgggcggctgcggccgcggagccggggcacctgaggaggaaggagggtgggagcgagggagggaggggacgggcgcagaccgaaagtggggaaagaaggtgcaggcaggcgggcaggcgggcgggcgccctggcccagggccgcgggtgcgggagcccggcgaggtcgagctgggcggcggcgggggccgcgccgagggaggaggggaaggcggaggcgcggggagcgtgtttggggcgccgcggcggggagggtggcggccgctggtgcgcgcggggcgctgtgtatgcgcgctcccccgctcggggaggaagatggcccaaaagggaaagttggggtgacgcgcgcggtccccggaggctcggcggggggcaccgcggccagcccgacggagcggcggacacacaggccggggggcgcgcagtccgggcgccgccgcggccgccccctcactgcaggtggcagcgggtgcgctgggtcccggcggccgcgggcgcgggcgggcgcgcgggggagcccggccgagggatgggctgcgcccccagcatccatgtctcgcagagcggcgtgatctactgccgggactcggacgagtccagctcgccccgccagaccaccagcgtgtcgcagggcccggcggcacccctgcccggcctcttcgtccagaccgacgccgccgacgccatccccccgagccgcgcgtcgggaccccccagcgtagcccgcgtccgcagggcccgcaccgagctgggcagcggtagcagcgcgggttccgcagccc

SEQ ID NO: 111590 - DNA, 231 bp, Homo sapiens; identical to SEQ ID NO: 41660
  chr5:76507082-76507313
  hyper

SEQ ID NO: 111591 - DNA, 30 bp, Homo sapiens; identical to SEQ ID NO: 41661
  chr5:76787377-76787407
  hyper

SEQ ID NO: 111592 - DNA, 30 bp, Homo sapiens; identical to SEQ ID NO: 41662
  chr5:76787705-76787735
  hyper

SEQ ID NO: 111593 - DNA, 30 bp, Homo sapiens; identical to SEQ ID NO: 41663
  chr5:76788272-76788302
  hyper

SEQ ID NO: 111594 - DNA, 317 bp, Homo sapiens
  chr5:76923706-76924023
  hyper
aagtttaaaacacaccgcaaaccttcccctcggccgaccgaagaaacggcatttttttcctactcctttggggcagtcccctgagcacgtgcctgaagtcgaggttagtacgcagccagcagggaccctgacaggaaaccagagcagccccggggttgggggagccctggtaggtgctggtcgtcccggacacgcctcttctggagaagcgcgtttgtcccttacttgggaggtcccgggtatctgaagcggatcccgggtctggggacatgaaggggcgccgtggccttagggaaggccccaaagaggcctaggcc

SEQ ID NO: 111595 - DNA, 213 bp, Homo sapiens; identical to SEQ ID NO: 4048
  chr5:76924086-76924299
  hyper

SEQ ID NO: 111596 - DNA, 96 bp, Homo sapiens
  chr5:76924416-76924512
  hyper
cgaagggcccacgcgttccaactggcgcgaatataaccattcccaagaccggcccctcccctccccccacgagacccctcccgccgttcaaggtca

SEQ ID NO: 111597 - DNA, 1754 bp, Homo sapiens
  chr5:76925468-76927222
  hyper
ccgtgtctgtgcgcgcgcgtgtgtagcgtctgagcgtgagcgagagtgcgagtgtgtgtgtttctgcccacaaaccagtccattggtgtctgatttcagatcctgagtcgactccctggtacgtaaaatggcgggaaggatactttttgccgggcgcgggaggagggtcgcgaagtgtggggaaagaggggaccggaggggaggcggcgggcgaggggggtcgtaggcgtcgcgtcgaaggtgtgggtgggaacgccgcccgtcagaaggccaggaggagggcgcgagcacggccagcgcaagcagggaggccagggtggcgggaagggtgggctgaggcgctggagaccgagccgagggcgcagctgggtgggaagggaagaggggcggccgggagacgggggaccgcgggcgatcgaaatcaggcggaggggaggcctcgcgggctggggcttggggtgagcccgagcgagtggaggagagaggcgaggacgaaacgagacggggcgaaggccggggcgggacggggcagggcgccggggtccgggtgcgcgccggaagggcctcggggcggcccccggggcggtgctgggggcggagcgggccggggcgcggctgcattaagtgaagctcatagagactgtgtgctctagcgccttgcggcggagggaggcgatgctggtgccccgccacacgtcgctgctgtccggggagctgcagagctggggcgaaccggagacgttgctggggccggggagggaggcgggcaccatgccggggaaggcgggctggtagaggtgcgactgcagccccgcgccgttggaacccgccaggctgttggacaggcccatggagttgggcggcggaccggccgccaggctgcactgggacagcgactgcgccatggcctgctgcctgcccagcgccggcggcagaggcagctgtgacacgccaggcatggcggccgccgcccagcgggtgtcgttggcgtggaaagagcacaggctgtcgcccatggcggcggcagcggcggcggcagccgacgggaactgaggcaggcctggcgtgggcagcagtgtgccgggcgcacggaacacgttggtcgtctttttgcgcttcttccacttggcgcgtcggttctggaaccagacctggagcgggcggggcgggagacagacagggagctattagccggcccggcggctggggagttggggcttgagccccagaaacccgcctcggatacagccgctctgccctgggaggaacaagtgccgtaggcccgacaagcccccatacccagccggagactgtggctccccaccaactcctggcaactggcgccccctgcacccaccaagcgcggagtcctgcgctcctaagagctcgtgccccgaagagtttacgcactgtgcaaacacaccaaatgtgtgcagtcttcaccacgcccctgcacattctgtgcactgcacagattcacaggtctgcagtcaggcatgtgtcaaagttcgacccacaggtgtacaaatgaagataaacgtgtacccatgtagcttaatagcatgccttataacactgatgtgctatagaattttcagaaacgctggaaatttggaaattgatgacaggctgtggatgacatagtttcaaaatcgaaagacaaaggaaaacccctaacgctacggttgacagagcggagaggttaatacagtgatctgcgtgggaaagtgaacgccactgagctacagtgttgt

SEQ ID NO: 111598 - DNA, 333 bp, Homo sapiens; identical to SEQ ID NO: 41669
  chr5:76928249-76928582
  hyper

SEQ ID NO: 111599 - DNA, 47 bp, Homo sapiens
  chr5:76928794-76928841
  hyper
gggaggtagacgggacggtgtctgtgactaaacggttcccacacctt

SEQ ID NO: 111600 - DNA, 946 bp, Homo sapiens
  chr5:76932319-76933265
  hyper
ctcggctgggccgcccgggggggcgctgaggttgccttctcaggcggaggaggcgaaccctgtagcccgacaacgccgggcttcgattttgaggagcttcttccgggatgtcgctatactggccggagacgggccttgcgtgtccattgggggatggcgatggggaccagtttccgggtagagaaggagataactcgatacaggaacgcacaggcagcctgaaagcagcccaggatctcgacaggggaagggaagaccctgctccctttgcccaaatcctcccgccctgtccttgccttctgtcccagatcccaagcccctcgtacctgcactcgggactcggtcagcccgatacgcagtgccagctcctcacgcataaagatgtcggggtagtgagtcttggcgaagctcctctccaactcgttgagctgtgcgggggtgaagcgcgtccggtggcgcttctgcttctgttggccctgctgctggccggcttggctggggttcgggccgccctggggcccgggctgcttgtccgggtctttggcgctcaccgccagcgaggccggagtagagcccactgtggtgatgtcctccccgggcagcagagtggctccctccactgggtcagagttgggcgccaggtcccccggatggcccccggggtcggagccccccacgcccagcctacacttcaccgcctcccggtggcccagaagctcggcggcatctttcatacctgaggaggcaaggggatcgcggtcactactttcttggcgatgccaggaggggctgtcttccccgcgcagccttccttcaacccgtcctcggccccctccgcacccgcgcttgtcctaaggaagaaactcccagggtattcagctgggttccccagaatttggacagccgggttggaataatatctcccggccccttgccctcgccgcag

SEQ ID NO: 111601 - DNA, 31 bp, Homo sapiens
  chr5:76933464-76933495
  hyper
cgcttcggcagcctgacgaactgtacctccg

SEQ ID NO: 111602 - DNA, 340 bp, Homo sapiens
  chr5:76934313-76934653
  hyper
cccgggcgagaggcgcgcactcacctagcctggcgtccaggaggtcggcatgagacagcatcgcgcaccgctccagggcgaaagctgttcccccccaaattttagcggctttaagttatttaaaatagatataagctataagctatacgatatagatatatatagatcacctaaatgaaagaaaattcggtttgtggttaaaaagggggcttcttgcattataatgtcctttagagagacggggaggtgcttaacagttgaatgaacccgtgagcagctcggcgaggggaccaatcaggagggcagcctgcaaatgtcagcgcccggagagtcccccact

SEQ ID NO: 111603 - DNA, 584 bp, Homo sapiens
  chr5:76934676-76935260
  hyper
cgcctgaaggaggcggcggcggcagccctggcagctccagcccggagcaggagctaaagcagcctcagccgcctcggcctcgccctgagcttctgggcccggctccctctagttcttccctgcgattttctccaggctcccctttccttccccttggccggcgctgcgcgcttcgaaggcgtagctctgtgcctctgagctaacatcttcctagggcaggggcagagcaggggtcagagcgggccatgaccctggcgtgacctgagggtcgcccccacctgcgctctctgggcctgccgctcatattggcccgccagcccagggcgcgacgagggcacaccgcggccttcagacaacgcctggacttcgccgcggctcagtaggcctgcgcctagggtccaggcgccctggctgtgccctggggtctatacgagccccaaccccacagtgggcctagagcgcaaagaggagtcggcttccctggcaccgccagcgcccgctgtctgctttggggaccctcgcggagtgtgggttcgagcgctctgcactcttctcaccgggcttcttcccggctcctgctcttc

SEQ ID NO: 111604 - DNA, 783 bp, Homo sapiens; identical to SEQ ID NO: 41674
  chr5:76936252-76937035
  hyper

SEQ ID NO: 111605 - DNA, 90 bp, Homo sapiens
  chr5:76937332-76937422
  hyper
ttggagccaggtgcccgccgccagcaggcagagcgagaaaaacgacaatagcctggatgtaaaaagctcccccctgctcccggttccctc

SEQ ID NO: 111606 - DNA, 2 bp, Homo sapiens
  chr5:76937510-76937512
  hyper
cg

SEQ ID NO: 111607 - DNA, 47 bp, Homo sapiens
  chr5:76937947-76937994
  hyper
cacaggccagggaatcggctcctgactccagccgccctgcgcgccca

SEQ ID NO: 111608 - DNA, 107 bp, Homo sapiens; identical to SEQ ID NO: 41678
  chr5:76938269-76938376
  hyper

SEQ ID NO: 111609 - DNA, 481 bp, Homo sapiens; identical to SEQ ID NO: 41679
  chr5:76939435-76939916
  hyper

SEQ ID NO: 111610 - DNA, 146 bp, Homo sapiens
  chr5:76940344-76940490
  hyper
cgagccgcctgcgctcgcccactccccgctcgctccccgcccggctcctacgtcccaatccttttcttttcgggcgcaattagtgccaggtttgcaacagacgccgggactcggccgctccagcgactctacgcttcggggggtgg

SEQ ID NO: 111611 - DNA, 633 bp, Homo sapiens
  chr5:76940864-76941497
  hyper
cccctccccgcaacccgagtgcggctaattccgggcgtctatattcactcaattagagaaatctacagagaagatcgatcttccatctgcagacatgccagcttaacaaattagattcttgtttcgtgcaggtgatttggtgacagttggggaattagaagtaataagttgttgtgtttgagcccgggcccccgccccccgcccgcgcccctccccgcccgggggcccctcggccgcgcccgccgcccgggcaccccctaccgcaccccccagccggcccgcgccgccgccgccgtcgccgcatcccccgccgtaattagtgctgctgccctccatgtgggctcgattaaaccgtgatttagccgaaagaaatataattatggctgcaaataaaataatcagcattgaagagcgatttccttaatgagatggagcggttgcacgtcacggagtaaaggggtctcattaagaggtggtaatgaggcttgggtggatggtgcagttacaaaatagcccaactcctctgcaggccgggcccgtccgcccgaagtggccgccgcgtcgccttccagcggtccggaggtgccgcggtcccagaggggactcgggcccgccccgcccggcccccagggg

SEQ ID NO: 111612 - DNA, 207 bp, Homo sapiens
  chr5:76941512-76941719
  hyper
cgcggcctcctcccggcgtctcccgcgccgtcgggccgggcgggggacacaagccgccgcagcggctagggggccccgccagcccggcccgctccgcctcggctgggcggccgggttggcacaagcaactgccaggcccccgaacactggagaagccggcccgagggaggggcccttgcctggggcgggtgccgagggtcagtccag

SEQ ID NO: 111613 - DNA, 30 bp, Homo sapiens
  chr5:77071510-77071540
  hyper
aagcctgccagtcacgccagccatgttagg

SEQ ID NO: 111614 - DNA, 301 bp, Homo sapiens
  chr5:77140503-77140804
  hyper
agtgcatgggctgtgcgcaactttgctgagccattttcccgcgaggcccccagcggcgcgggggctgtggggaggtggtgtgggagtacggtcgctgctgcgcggcgtggggagaactggagcggctgcccggacgcccccgccctggtcccgggtactttctcggcctggctgcagccgcgtggatgtctctcgaagcctccaccctattctccttattgttatttccactcaccccccaaccccctcccgccgtcctggttccagaccgcctctctcaggctgccggggagggggcaca

SEQ ID NO: 111615 - DNA, 84 bp, Homo sapiens
  chr5:77147565-77147649
  hyper
gcgtgtgcaagtgcgcgcgcgtgtgtttacacttccagaagtcaaatcctttctaggactcccccttgcttcacccggaagtgt

SEQ ID NO: 111616 - DNA, 772 bp, Homo sapiens; identical to SEQ ID NO: 41683
  chr5:77147911-77148683
  hyper

SEQ ID NO: 111617 - DNA, 18 bp, Homo sapiens
  chr5:77253986-77254004
  hyper
cggcgctggtgcccaccc

SEQ ID NO: 111618 - DNA, 667 bp, Homo sapiens; identical to SEQ ID NO: 41685
  chr5:77268309-77268976
  hyper

SEQ ID NO: 111619 - DNA, 42 bp, Homo sapiens; identical to SEQ ID NO: 41686
  chr5:77269195-77269237
  hyper

SEQ ID NO: 111620 - DNA, 204 bp, Homo sapiens
  chr5:77269263-77269467
  hyper
cgccagcaccaggggcgggctggagggggaccggcgatcagggaaaccttactcctcgcaggcttcaacctgctggggcgtgtttacgtccgcaaagtccgataatatattttgtccccacttcttaggagctgattcttcttaaaatgcattgccacgttatctctaacgttggctttctgacttccccgcggggctcggagg

SEQ ID NO: 111621 - DNA, 30 bp, Homo sapiens
  chr5:77590900-77590930
  hyper
tttcttgcttgtttcggctactctcttcca

SEQ ID NO: 111622 - DNA, 388 bp, Homo sapiens
  chr5:77591339-77591727
  hyper
tctcaaaaaaatgaaaaagaaaagaaaacatcttggggccaccagttcccgtttggagctgaagtggtgcgtcctattggcgtctagctaccaaaaataaaatggaccacctcgcgcgccagtcgtgttactcactaatatgcactagggagcctaggcgggatgcttgcctggccccagagtagctctctccgggtgctggcacccgagaaaacctctttcccggggtgccttcccccagcccgccttctcaggtgggtttcagcgccttccctctcttctccccagtgcctcccgtccaaggaaggcattaacacccaaagccctggcggccaggtactgaaactgtcaagggattctaccaggtagaacgcgaacctggaggccg

SEQ ID NO: 111623 - DNA, 69 bp, Homo sapiens
  chr5:77656464-77656533
  hyper
ggtcgggtgggtgacgccgagagccagagagatgtcggatttcgacagtaacccgtttgccgacccgga

SEQ ID NO: 111624 - DNA, 30 bp, Homo sapiens
  chr5:77656906-77656936
  hyper
gtggctggcagggccgggagtcggcggagg

SEQ ID NO: 111625 - DNA, 50 bp, Homo sapiens
  chr5:77805995-77806045
  hyper
gtccagagcatcgagcgacaggtgacaatgacatgacacatattgatgtt

SEQ ID NO: 111626 - DNA, 95 bp, Homo sapiens; identical to SEQ ID NO: 41689
  chr5:77806301-77806396
  hyper

SEQ ID NO: 111627 - DNA, 30 bp, Homo sapiens; identical to SEQ ID NO: 41690
  chr5:77943771-77943801
  hyper

SEQ ID NO: 111628 - DNA, 31 bp, Homo sapiens; identical to SEQ ID NO: 4058
  chr5:77944026-77944057
  hyper

SEQ ID NO: 111629 - DNA, 30 bp, Homo sapiens; identical to SEQ ID NO: 41692
  chr5:78279826-78279856
  hyper

SEQ ID NO: 111630 - DNA, 123 bp, Homo sapiens; identical to SEQ ID NO: 41693
  chr5:78281719-78281842
  hyper

SEQ ID NO: 111631 - DNA, 367 bp, Homo sapiens
  chr5:78407583-78407950
  hyper
ccccacgcccaactgcgggtataaagaggcaggctgcggactcggagcagctcggggctgcgcagcgggaaggctcgcctagtcggtccgcatccgtgtcgaccacctgtctggacaccacgaagatgccacccgttgggggcaaaaaggccaagaaggtgagtctccaggggacccgagggcgctctccttcccctcccacctgctctgtatcccagcctctgggagcgcagaggggccctcggaccctgcctggtacccatcatcctcctactccctcccctccctcagcctcagaccagaatgtgcttccagaacttctccagcaggaccccaaggcgcctctgagcctccccactcctgcccc

SEQ ID NO: 111632 - DNA, 258 bp, Homo sapiens
  chr5:78408016-78408274
  hyper
cgccccagatctatgtgatccttgcctctcagacccaaaggcaccctctgagccctccctgacggctgggtgtccccagaactccgagccttccaatatcttctgaatctggcaccccaagaccagaaaactccctagagatactgctcctagccccgcaggcgcgatatcccgtccccacggagcccctccgcatctgtgtccgaggccgccgcgagcgccctctgcacccggcgcgcccagaacagggaggagtgc

SEQ ID NO: 111633 - DNA, 91 bp, Homo sapiens; identical to SEQ ID NO: 4061
  chr5:78408297-78408388
  hyper

SEQ ID NO: 111634 - DNA, 211 bp, Homo sapiens
  chr5:78531491-78531702
  hyper
cctaacaggctgggggcgagccccacatagttcagcacaccgttccccgcggcaacacgctacttctgaacgcaggagcgactctccgtccgggctccctccaggagaatggaggcaaatgtacattcgagggtctcaatacctggaattcgaaacgtctcagttcctccgccttagttcctcttttcccgggttcggaggccacctgtgc

SEQ ID NO: 111635 - DNA, 1562 bp, Homo sapiens; identical to SEQ ID NO: 41698
  chr5:78531953-78533515
  hyper

SEQ ID NO: 111636 - DNA, 31 bp, Homo sapiens; identical to SEQ ID NO: 4063
  chr5:78807882-78807913
  hyper

SEQ ID NO: 111637 - DNA, 30 bp, Homo sapiens
  chr5:78809333-78809363
  hyper
cagcaggctgggggcgcagcgcacgccgga

SEQ ID NO: 111638 - DNA, 31 bp, Homo sapiens; identical to SEQ ID NO: 4064
  chr5:78810400-78810431
  hyper

SEQ ID NO: 111639 - DNA, 36 bp, Homo sapiens
  chr5:78908115-78908151
  hyper
atccggctgtcttgcgcctgcgcattcaagcaaagc

SEQ ID NO: 111640 - DNA, 30 bp, Homo sapiens
  chr5:78908480-78908510
  hyper
tacctcctttggttcgggagaaagctacga

SEQ ID NO: 111641 - DNA, 30 bp, Homo sapiens
  chr5:78908721-78908751
  hyper
tccaaatttatgggcggcatctgggctgct

SEQ ID NO: 111642 - DNA, 30 bp, Homo sapiens; identical to SEQ ID NO: 41702
  chr5:79286882-79286912
  hyper

SEQ ID NO: 111643 - DNA, 30 bp, Homo sapiens; identical to SEQ ID NO: 41703
  chr5:79316411-79316441
  hyper

SEQ ID NO: 111644 - DNA, 46 bp, Homo sapiens; identical to SEQ ID NO: 41704
  chr5:79330928-79330974
  hyper

SEQ ID NO: 111645 - DNA, 292 bp, Homo sapiens; identical to SEQ ID NO: 41705
  chr5:79551151-79551443
  hyper

SEQ ID NO: 111646 - DNA, 429 bp, Homo sapiens; identical to SEQ ID NO: 41706
  chr5:79551987-79552416
  hyper

SEQ ID NO: 111647 - DNA, 112 bp, Homo sapiens
  chr5:79703637-79703749
  hyper
tcccgacctaaggtcgaatcatcaggcgtccccgtcacccaacaacccactcaggcacttccggtaagaaatctagtgcccttggctcggaacctgcgtcgtagtgcgcaag

SEQ ID NO: 111648 - DNA, 87 bp, Homo sapiens
  chr5:79704428-79704515
  hyper
gcactgtccattcccgcacccatgcattttctcttggttagagaccagaaggatgcagtggccgtctttcccgctgcctttcctttg

SEQ ID NO: 111649 - DNA, 330 bp, Homo sapiens
  chr5:79783874-79784204
  hyper
ctgccaccagtgcccggttagcaggggcgccagcctgggcgcctgcgcggacggcgggcgtcgtcaccatggcagcatccgctggaggcccaggtaagcgccgagcgcgcggcctctgcctggaggtggggcgctttgagaggctccgccggccgtaccctccctttgcgggctcccgcggtcttccttgctagggacctgggagcgcgccgcgcagaaccgggcggctgggcttggagcccgctctgcactcggggcgcgcccgcgatcgcctggcaaggaccttggtttgccgggtgggctctaagggacaggcgttaggggaggtcg

SEQ ID NO: 111650 - DNA, 500 bp, Homo sapiens
  chr5:79864944-79865444
  hyper
ggaaggtgactggggcgacagctccagggcaccgatgggggcggggtgcgcgtttcgtcgcctcatctctgagccagggcaggcagctggcgggctaaggcgatcaccatccatgaaaacgggttctgcccacagccgctgcggagcggtccctgcgccgctcgcccgccggccggacgcggccctcccttgggaaatggtgcgtctgaggggcgcagccactgcccccatcccggagcaggcgcacctctgcacccggctctctgctaagggggtccggtatcctggtgccaaggctgtgcgcacctgagaagggcgggaaccggctgcccgcccctgtgtggctcctggaagcaggagctcctggaagctgcaaagggctccgcagtccccagcccgcccccagcgcccagccggcacctcctgctgcccagctgccgaggcacctgcggagacgcgcccaagtcagcccctccggagacgcgcccaagtcagcccct

SEQ ID NO: 111651 - DNA, 180 bp, Homo sapiens; identical to SEQ ID NO: 4068
  chr5:79865522-79865702
  hyper

SEQ ID NO: 111652 - DNA, 89 bp, Homo sapiens; identical to SEQ ID NO: 4069
  chr5:79865744-79865833
  hyper

SEQ ID NO: 111653 - DNA, 361 bp, Homo sapiens
  chr5:79866099-79866460
  hyper
gcagatctcggtagatgccgcccagtccccgccctgcttgcggaaagaggcgggcgactgccgcgaagcgctggagctgggacccggagcgcacacctcgccagacgcccgggcagcgaggcgcttccgctgggggtgacgcgtcggctccaggctctgcgcaggtgagggcggcaaggctcctctggacccaggggggccagcagctgctggaagctccgccttctgtccccgtaagtcccacccccgtcccccgcttcggccaccgcgcttcggccacggcgacttggccaacaacagcggcagcagggtctccccattgagggaagcacgcacccctacgtcacgggctttggctcct

SEQ ID NO: 111654 - DNA, 30 bp, Homo sapiens
  chr5:79950596-79950626
  hyper
ccctgcgaggcaagcggttttgagccgatt

SEQ ID NO: 111655 - DNA, 166 bp, Homo sapiens; identical to SEQ ID NO: 4071
  chr5:80255908-80256074
  hyper

SEQ ID NO: 111656 - DNA, 57 bp, Homo sapiens; identical to SEQ ID NO: 4072
  chr5:80256312-80256369
  hyper

SEQ ID NO: 111657 - DNA, 379 bp, Homo sapiens; identical to SEQ ID NO: 4073
  chr5:80256428-80256807
  hyper

SEQ ID NO: 111658 - DNA, 139 bp, Homo sapiens; identical to SEQ ID NO: 4074
  chr5:80256887-80257026
  hyper

SEQ ID NO: 111659 - DNA, 266 bp, Homo sapiens
  chr5:80597467-80597733
  hyper
tgctctgggggattcgtgcgcggtaagaagctgcgcggtagcgcggtgaggtgaggttctcagccaccaaagctgcagggtctcgtcgttcgttccctctggcctggcggaacttgcgtgggaagctgggaggacagaaggcttagccgctgggtccctgagctggctggagcgcgggctgtctaggggcggcgacctcagctgttgggctccggctgctgggggctgtgcgtccagccgccctggaatccgcctgtgggtgggcc

SEQ ID NO: 111660 - DNA, 251 bp, Homo sapiens
  chr5:80689543-80689794
  hyper
acaaacaaaaaaccccgcagaagctctctgggctcctcacttgtttaatggaatgaaggagtcccgagagccacacatttgggaaccaccggtctcggccatgcccagcgcgggcgcactgttgcaacacccctatccctggctgcgcagggttcagctctccgcaagtaccttcctcgccttcctaccccccccagcccccagccgccgccgctcccgcagccccggtcccgcgcctccccgcagccccg

SEQ ID NO: 111661 - DNA, 340 bp, Homo sapiens
  chr5:80689879-80690219
  hyper
cgccggctggatggcttggctcatgaccacctcgccgggcgccggccgctccatggccagggcgagagcgctacgcctgcggcccccgacaccccaccatgcccgctccgcccgccccgccctccccgcccagctccagagggcactggcgccgcccgcccgggccgcgaacccctggccgccaggtggtgggagctgcgagtgagggggcccgcactgtcatcccaggactatcgcgagtgggggaaaaccagcgctctcgggtctcaggagaagtctgggaagtgcgcggggagggggctcccgggtagacaggtctggaaggcggctccccgagagc

SEQ ID NO: 111662 - DNA, 30 bp, Homo sapiens; identical to SEQ ID NO: 41719
  chr5:81046743-81046773
  hyper

SEQ ID NO: 111663 - DNA, 30 bp, Homo sapiens; identical to SEQ ID NO: 41720
  chr5:81147828-81147858
  hyper

SEQ ID NO: 111664 - DNA, 30 bp, Homo sapiens; identical to SEQ ID NO: 41721
  chr5:81267512-81267542
  hyper

SEQ ID NO: 111665 - DNA, 30 bp, Homo sapiens; identical to SEQ ID NO: 41722
  chr5:81538030-81538060
  hyper

SEQ ID NO: 111666 - DNA, 30 bp, Homo sapiens; identical to SEQ ID NO: 41723
  chr5:81574424-81574454
  hyper

SEQ ID NO: 111667 - DNA, 30 bp, Homo sapiens; identical to SEQ ID NO: 41724
  chr5:81658875-81658905
  hyper

SEQ ID NO: 111668 - DNA, 111 bp, Homo sapiens
  chr5:82372771-82372882
  hyper
taaagcccctagggcgagataaggagttgcaacaaaacaagcggaaactcgagaagcgctaatgcttcaaagggtcaatgaccacacataatctacgtagccaacgtgtta

SEQ ID NO: 111669 - DNA, 236 bp, Homo sapiens
  chr5:82373207-82373443
  hyper
ccgtctgcccttctcgccctctccagccgtccggttgggcttgtcacggcaccgcctaccaagacgggcggttaagacactaggataggctcctctccaccggaaaaggcgggatttagatcacgtcccgcaggccggcggaagtagctgatactctcattggttgcaaaaccttgatctgtgaaagcgggcgttttggaagataccggaagtagagtcacggagaggtaggatcc

SEQ ID NO: 111670 - DNA, 30 bp, Homo sapiens; identical to SEQ ID NO: 41727
  chr5:82453282-82453312
  hyper

SEQ ID NO: 111671 - DNA, 30 bp, Homo sapiens; identical to SEQ ID NO: 41728
  chr5:82766936-82766966
  hyper

SEQ ID NO: 111672 - DNA, 805 bp, Homo sapiens
  chr5:82767178-82767983
  hyper
tagctgcacggggggcggggaaatgggggtggggaaggagtgggagggcagtggtttccgcgagcagagcgatgttactgagtgagtccctgaatggggagcgctgctgtccccaagccgattggtacttcttgtcaggaagaaacgccaagaggtgggagtgcctggggagggaggcaggcggtccctaccgcaggcgcggggagctgcctttccgcccctccgcctgctttccaagcctggactcttaggagtggctgaagctgcggagcgcttttggagcctgtgaatgaaccctcctcctctccctcctccttcttctcgctgagtctcctcctcggctctgacggtacagtgatataatgatgatgggtgtcacaacccgcatttgaacttgcaggcgagctgccccgagcctttctggggaagaactccaggcgtgcggacgcaacagccgagaacattaggtgttgtggacaggagctgggaccaagatcttcggccagccccgcatcctcccgcatcttccagcaccgtcccgcaccctccgcatccttccccgggccaccacgcttcctatgtgacccgcctgggcaacgccgaacccagtcgcgcagcgctgcagtgaattttccccccaaactgcaataagccgccttccaaggtaatcacgtttcttttgttccccccttaaaaaacaaaaacaaaaaacttatagaaaaaaacccgcgagcttagaaaaaagaagcaattggtagaaggctttaattaaggcaaagagctgtaaggcgaagttaagaaaatg

SEQ ID NO: 111673 - DNA, 2361 bp, Homo sapiens
  chr5:82768273-82770634
  hyper
cacagacaagtccccgaagccgccttggtgcaggccacctggtttcccagcccctggtgtgtggtcagtgcctggtgttcctggaaagccactcccgggcagctcctgacagtgcgacccggcgcccaagcagcctgggaccttgcgcggacctgaccccttcagaccgcaggcagtctgggaggaggtccggccgggggaggtgcaggatccccgccgtgtctctttgacgacttggggactgtcacggttctctcccggcgcccctgggttcttttgtcctgcacgcggtgcgaaggggccagcagggaaggagcagaggatggggggtggggttgttggagccccgcggaggtctgggaggcccctgggcgggaaaagcctgttctgaatcggcagggatgtgcaacaatttttctcaccctgaagagtgaaatagggtctgtcgctcccatctcaacaagcaaaccggcacccagagcgcactgcagacaaaggtggctcggggacccgaatcaggggcctctgggtcagtcctctcgcccagactacaggagtcctccgtttccttacatattccccaccctctcctagttctccgctctagttgagcaactttactggcaggtctagcggcagcggcgcgcgcgtgtgccgggagccccgggggacgtcctcggctggagcgccccaccgtcctgcagaggcgtgggcgctgtagggcgacatccctggtgcgtgcagacctagggcatccgggttgttctggcccgcggtctgtgtcactgggcgtggagcggtctgggtgttaggcagaggagagcggggtagaaaaatagtgtcatagcctaaactatttgctctccaatccaactgcgtctcggcaagtcctgcatgtccctgggagatgctgcgggaagggggagaaatctacacggcgcctggagagttgtcctgccgcgcgcacacccgcggcagagtctctctgggtcgcgttcctcatctttgtgtctccctctgtctccatcttctctgcctcccttcccctctcccagcctctgttctctctctctagcttctgcgtcccctcccccacagctgacaaatgaatggctagtgtgaaatccctgcctttcccgtgctccaaggcagcagggagggaggagcgagggaggcggtgcgctccttcggatctgcccccagttcagctcacaagacttgcagaacctagatgtctaggaattgggagttttgcggcgggtgtgggcgccccctgatggagaagtcccgcacaggcggagaaaaacaagccccccagaccaagcgagcatctttcacaaccttgtgttcaaggatggaaggccctagttttcccttaagtcattcattttgcactccacaatctgcggcgtacatctaggagtttggaggaccctgaaaaaaggtcttggtctgtgcaaagtgcagagatgccttctcgcgagtcggctggaacgcacgcggcgccctgggtccagttcgccgcttagtggacgaacgcacatggccagggtggagccaggtttcggaggtctagacgcgccaccctgggcgtctttaagaaagataatacacataccgtgctctcaaaacccatgaccacttgaacccaacgctagggccccgccccaggatattgcaaaagaagggctcctaatccaaaacttaaacttcctcaacttcagggcgggcgtcggacgggaaagtggagagaaggcgggcagtgggaggaaaaaagaaagggaaggaagggaagtggaaggaaagaggaccgtggaggggaggaaaaggagaaaggaacggagatggggcagatggcattcaaacagccaggaacggaccggaagggttcgtttcggggtttgggtctgaatttcgagactcgttttaggatactcttttccctttcccagcggcaacaaatgtgactgcagaggcgtgccgggatggaagggtgggaaagaactagacaagcggaggtggtccagccccgcccaaaggggctgggtctggggcccgcccccactcgctcacctcgcgccaagggaggacccgcaacgggcgctccccgcagcggctgggttagccagccgccacgtgggttggcgcttcggctcccagccgagacgggtgtgacttcctgggctcagagactgcagtacagccgcacaggcggccggcgcagccgaggcccccacccaccgaggccaatgggggcggggcggggaaggcagggcccagcttaaccgagagagccgagtggcctcgcccccaggattcggggccggctgcttctggagctgacccgagttccatccagac

SEQ ID NO: 111674 - DNA, 172 bp, Homo sapiens
  chr5:83018265-83018437
  hyper
acaatgcaggtggccggtgtgcagatgagccagcgcgcggggtgcggccgccgggatgcccgatccgagtcgcgcgggtggcggcgagcggcgctattgtcttaaagataaagcctaagccacggggactgcctcctcctggactctggagagaggcgggagagattgcagg

SEQ ID NO: 111675 - DNA, 2538 bp, Homo sapiens
  chr5:83678126-83680664
  hyper
agctgtgccctcggcgcgggtatcttcaggagacagagctcctggctgcagcgagccgggacttgccgcgccccggggctccctcaatcagacccagccaggcaagcgcggccacataggcaagcgcggccacataggctagacgcactatcttctcctctaccccgcgccgccctccacctcggagcggggacgtacggtggtggcggtgacacaatgcgagtgagtgggtgagtgtgttttcgtgtttggggtggaaacgtaggcggggaagagaaggaggagaggggagtgcctgcagtccttcccccttcccttcctgctaagagatcaaagtgcagaggaaatccagacgggaaatgagagaaaggaaaaacagcagccgtggaagcactctcttttttatatcgctggagactcggccgagcaactactggaaccattaccatttcttaacctttagtggagtggctgcctttgcctattaactggaagggcactttgtaaacgcaggcgaggcacacacctacacacacgcctacacgctgggggaaaataaccacattctgggggacggagggaggcccaggcaaggcgcggccatggatctctactgccagagctgcgagggcatctggccagcaacacccggcttcttgggcgaacagtcgcccaagagtccacaattttcttgtgactcaaatagatggataggtgcatggatggatggtgcagaatattcatactctgtctaatctcaagtggactggagtcaacgcatttttaaatccatctaccttttttagaggcacagcatttaaaaccctgtagttcactcagctttccacttgaagctgcctgcagaggattctattacccgcggatccctcacaaggggccgcccgcatctgtgagcgcaggagtggcacagctcccccaggcacagctcccactcgcctccccacacaccctgctgcccccgctgcccttttccggcgactacttcagccccggccagcggtgagacccaggtcagcacaagggtttgtatggacaagctgcacctcgcaggggacctggaagtcgcctaaactactccagcaggacactcgtcgaagtcctgcgttttcttttaaatgcttttttctttttaatttaatttgatttttatttttctgtttttattttttcgtgcaattcacagaaggcatcaccctacaagctctcacaacttttccgctcctgtgcggggacgcgaggggtggcttgccccgcactattccccattaccaagagttaacactggtactcggagggggtgcgcagctaagctccaggcccctggggtcagactaggagaggcgggttcctggggtttgctgtaatcgatgctgctcctctgggatggggaggcaggagaaagctgaagtgacctgtgagactcctctccacctcacccgcggccaaaacgcccagcgccgggtctgggtttgcgaacggctcagcccaggccctgcgccagagcaccgcacccgggggcggacggccctgcagctccccagcctcttcccgcatcaactagctgacgcccgggcgcactggcttcccccgctcccgcccgcacgaaagccctgcccgacgtctgcagtcagcatcgcccgcactgcctagggagggtttgcgccgagacccagtggccgagtgagccacagagtcgctggtcctggggacgctgtcttctaccgctccccaccgtcctcctctttcctgtatctcaccccggtaccccgcacccttctccccgctcggccccgcgcactctgctcagactttacaagcactttctcggggcacccaggactcgacgcctcctccgcgccgccagcggcgctcgccacccttggcacgccggagggaccgcctccggccccctgcgcggcgtttctcaggggactcccagcccatccctcacccagctgtccgggtcccgacgccttacctttgccgaactgggggacaccgaggctgagcccgaccaagagccagacggctaccgagcgcttcatgatcccgtctcccggacgtgaccccggctggtcaggggtcgtcgcggagggcagtgtagccgaggtggcagcgcagggcagcagcagactccgcccctactaaagaattcaagaagacgttctctttcctcagcgctttgttaaacaaattcttggagagggcgagagtggtgactaaagagaggagcctttcctccccttttgcctgcgctccggcgcgcggaggtgggtgagctccggggagccgccggcgggctcagccctccgctgcgggtgggtcccggcagaggcgcggcgggcggggcgcgggctcccgcggccgccccgggtctgctgcgcgggcaggcagacccaccggcagacaggcggaccgggcgctcggctgtcgctgttctccgcgcggcggctgcggggcttctgacttggagaacaatgaagcgtgagctggaggggagcgagcgggccgccggga

SEQ ID NO: 111676 - DNA, 73 bp, Homo sapiens; identical to SEQ ID NO: 41734
  chr5:83680693-83680766
  hyper

SEQ ID NO: 111677 - DNA, 30 bp, Homo sapiens; identical to SEQ ID NO: 4081
  chr5:85913691-85913721
  hyper

SEQ ID NO: 111678 - DNA, 149 bp, Homo sapiens
  chr5:86564356-86564505
  hyper
atcccgcagtgtgtcgggtgaagatacccgcggccctgcctgtggcagccgccccctatcctgggctggtggagaccggagtggctggaactctgggtggcggagccgctttggggtcagagttcctaggagccgggtctgtggcaggg

SEQ ID NO: 111679 - DNA, 30 bp, Homo sapiens
  chr5:86564745-86564775
  hyper
gatggaccagaatacgaggaggaagaggtg

SEQ ID NO: 111680 - DNA, 30 bp, Homo sapiens
  chr5:86708357-86708387
  hyper
ttttgatagaaaaacgcactccgcgccgca

SEQ ID NO: 111681 - DNA, 394 bp, Homo sapiens
  chr5:86708644-86709038
  hyper
gacgagaacccaaacgcatcagcgtcctggcgtaaaacacccgtacccccaccgaagatctcgcggaagcctagggcgtccggctagccggcgctggcgcgctgtcgtcacgattacgcggccagcccgtacgcagttgcatttccggagcggactaggaacagaccgtatcccgggttcgttagggcgcccactgagacgtaagtgggcggagcctagagaacgctcctctcggtgagtctgggacatagctccgccccttccaggcaagatttaaaggagaagcgcccggcaagagtgttcaaggggcataaactgagggtacggagtaggcagatgtaaattcacaggggataatcagaaatgaggaaaggatttcgtagggtgctcattt

SEQ ID NO: 111682 - DNA, 997 bp, Homo sapiens; identical to SEQ ID NO: 41737
  chr5:87436528-87437525
  hyper

SEQ ID NO: 111683 - DNA, 45 bp, Homo sapiens
  chr5:87437943-87437988
  hyper
ctcacaggctgtgcacgctcttccacacaccgaggcacacaccca

SEQ ID NO: 111684 - DNA, 176 bp, Homo sapiens
  chr5:87438272-87438448
  hyper
atacacacacacacacaaacacgcacacacgcacgcgcgcctgcgggcgggacacacccacagcctatgtcctccgcccacgggcacgggcagagcaccgatgccatcaacagcgctcagtacagttgtccagaaaacaccaatgcgagaaaaacgaaagaaacccaccctattca

SEQ ID NO: 111685 - DNA, 80 bp, Homo sapiens; identical to SEQ ID NO: 41739
  chr5:87439123-87439203
  hyper

SEQ ID NO: 111686 - DNA, 264 bp, Homo sapiens
  chr5:87564865-87565129
  hyper
ggtggctgcgcttgcgaggaccctgaggtagattgggtggtttcaacaggaacgcatccactgtctgagaggtgacggaggcacacgttggtgtggggagcgggaggggagagggaggggggcgggtggggggcgggagggggccaggggtgggagtgagggtgcgcgatgggagtcgactccagacccaggtgatttagagagagtaaagaccacctttggccgtcattttgtctcagcttaactgacgccctcttgttaccc

SEQ ID NO: 111687 - DNA, 315 bp, Homo sapiens; identical to SEQ ID NO: 41740
  chr5:87955349-87955664
  hyper

SEQ ID NO: 111688 - DNA, 91 bp, Homo sapiens; identical to SEQ ID NO: 41741
  chr5:87955839-87955930
  hyper

SEQ ID NO: 111689 - DNA, 484 bp, Homo sapiens
  chr5:87956178-87956662
  hyper
accaacgccggccaccgagcaaaacttccccgcccccgccccccacccagcttccccgcagggagaccctttccgttagcagcttttcactaagttaataacggtgtgtgtgtggtggtggcggggaggggggatttgggggttacacaatatctatatcaatgatattgatcacgtccagggaagaagcctgggcaaaactagagacaccgagtgtcagcaaaagaaagcttcttaaccacaagttgcgtgccgcctgaggaaggtgccctgtggcagggggtggccgctgggagatgcctgcctctaaccgacgtccaggcgtgactaaacctcgacgccacccccattcacaagctcaactcagggattcccaagcaaccgcagaccggaggtggcgcagaggcagtgaccgaggtcgctgattaggggccgagaggctggcaaataataattttaaaaaaaaaaaaaaccggaatagcct

SEQ ID NO: 111690 - DNA, 615 bp, Homo sapiens; identical to SEQ ID NO: 4087
  chr5:87956679-87957294
  hyper

SEQ ID NO: 111691 - DNA, 1105 bp, Homo sapiens
  chr5:87962609-87963714
  hyper
tttctggtttttactgtctctcggctgtagtctttcattctcacacgctccccggcgatcttgaaggagtttttactttcggttatctagctttatgaagaccaatacactcatacagctagataaccaaagataacaactcgcttcccacacaggcctctgtcttcctcttgccagactccaggtcctgatcctttctggcagtaccgaagagtggtcgtccaggatacttgccgcgcttaagattcctccttttatgtaaatatgacctggtttctgtttgtgtgtgtgcgcggctaaaacatccaaacgagatctgttgccttcagagtttattccgaacttttctttttcctttcagcaagtaatctccggcagcgttagccaacaattcatctattaatatcagaaaataaaaccagctattaaggtgcagcaagctgttacgagtgagcagcagcatccgtcccttcacaggcctctatttgcattgtaaattgcttctttctcacgcaagactctttagcctctctctatagagatgtataaagccaacggcaatttccagcgcaggttaaggaggaaggaaaaaaaaatcccattctatagaagtgacagctgattcaaggatctgttcctgatcctttttggttaggcaccatggctttttaccaagcggtggcagcttgattgcacatatcttgtgtgtatgtgttttagggggaagatcctcgatttcacagggcttctaggctgggaaggagaagatgccgtcttgctggcctgctgctgcccccggtctgaaagaaggagaaaagggccatcattggaggggctttcactgccaaattgtggaccagcccggcaaggtcaaaggttcgagaccgcgggagaccaaggtaatgatgatgtcatgagaaatctcaagtacatggttattgatatgcatcagtgatcagccaactgccccacgcctgctgcccgagcagcggcagcgacagcagcagtagcggcagcattgcaacaatccctattttctcaatcaacatctcttccgctagcactaccgactgctcctggaaaagcaacccgcggccttttacct

SEQ ID NO: 111692 - DNA, 360 bp, Homo sapiens
  chr5:87967773-87968133
  hyper
aagaaagggaggaaacggaacccgactctgcggtgctgggcccaaggcagccacagctccaaaggggcccccggccgtggccgtgacttgacagagcctccggtctaacttctgatcaattccactgctctcctgacccctcaagacagtcccccattcaagcaccgcgggtacatttgcaagataaaacgccgcagacactaatgcaaatacattgcccgagttcccatcaccctgggttcctgcagataattccaggccacagaaaggagttcttgccttcctcagccgggtctagactctaagcaaaccgcaaagacctagctccgtttggataccagaagcgtcttaagctgaacc

SEQ ID NO: 111693 - DNA, 30 bp, Homo sapiens
  chr5:87968367-87968397
  hyper
ttcaaaatgcgaattcgaatacagaagtgc

SEQ ID NO: 111694 - DNA, 65 bp, Homo sapiens
  chr5:87968620-87968685
  hyper
gctgaagcaaagccccggactggccctcggagcggcccgcagcgggactctgcgggcaccggcta

SEQ ID NO: 111695 - DNA, 87 bp, Homo sapiens
  chr5:87968772-87968859
  hyper
cgatactcacttgatctccctgcgccaggcaatgctgccccccaaatccagctgggcaggaaccgaggcgccggctgaaagacaaga

SEQ ID NO: 111696 - DNA, 2271 bp, Homo sapiens; identical to SEQ ID NO: 41747
  chr5:87969871-87972142
  hyper

SEQ ID NO: 111697 - DNA, 125 bp, Homo sapiens; identical to SEQ ID NO: 4092
  chr5:87974354-87974479
  hyper

SEQ ID NO: 111698 - DNA, 947 bp, Homo sapiens
  chr5:87975970-87976917
  hyper
tctttctgtagctagctcccacgaagctgggattttcaacctcttgtttattcgtaaagcccatatggaaccccggttgaatctcccctcttcggattttaccaggaggccctcagtgccccaccgccgcccatggcacgtgaagagaaaggagggagagttgggagccacgagagaagccggctcggagccgcttccgtcggggcccatgtttcgccccaacagacccgtctctcctttctctccccgaaggtacttccttaggccggcagtgtcgctacggtggtagccaggtgagcacgggcacagtcccggggcgggggcgggtagagcggccctctctcgggagctccggtgggtctgcgaacctgccgggagcggaaggctgagtggcgctgggggcccgcgcggggctcctggctcccgccggcaggggaacagcgacacctactggccgcatgggtaccgcgcccgggccgtcagggctgccctgggacggggtgccgggctccgtggacttgggaggccgcgggaaacttcaccgaaggctctgcggactgctctaggactcgtccgccctggagaagacaaagccacgctttctggagacccctgggaggactgtaggatggaactgaacacacaggcacacacgcatgcccattttttctggggaaccggataaaccctcagatgcagttgcccaccgtcccttggttttatgagagagacccaagcagaggtcggagccttgacctcctcaggttcatgacccaggcctcttcaccgcctttcccagttcagcactgactaaagaagatatctttacaaattaggaaaagaaaagagttcattatcctccctgaagcggggaaatgagtgagtcaaagacacagactcacaggcagcggttggcgccgggcacacgaaccggccgagccctcctg

SEQ ID NO: 111699 - DNA, 452 bp, Homo sapiens
  chr5:87979352-87979804
  hyper
ttcttttgagtggggcgaggctctagctttcccctcctcctttcttgatctcggcaaacaaaaccattctaccacttgagccatctgccgcaggtgtaatggatggcagggggccgacctaaccacactccagtctcttctaggtcgtcaccgctctgcaccaaacaaatgagtcctgtttcaccactagggtgccgaggtggatggtggatgctggcccccgcccctggcagcgctcagcccttagaaaccagagccagctgacaacacgcgaaacacacaggcacagcgaaaacgccgagccgacgctcattccctctgccccctccctctgctctctgtaacaaggaggacacgtacacagcctttacacacttaaaagcccttgcgactccctctgaattcttagttacttatgacggccttcctcactgcacatagcccctggggtg

SEQ ID NO: 111700 - DNA, 632 bp, Homo sapiens
  chr5:87979863-87980495
  hyper
gcgcgcacgcgtgaatgtgcatgtgtgtttaaaacgcttattggtaggtcatcagcagctgatcagacatggtaatccaataatttttttgaatacacacaatttttcgttgaagttaatttttttaaagaaaaatggaaaactattaattttctgcgcaagtctagggttcccagtttaggttccagagaacagcagatctgcgcagcccccgccttaccaaactttccttttctagggtttgaaagaggctcacattctcacttcatgacagagcagcggctcatttgcacgcgggtgtgtaaaggagggagctgtcgaacgcgcgacttaggaagggaaatcggatagctggagccccacgcagtcgctcggaaccttggctggaggcacaaggtgcccaggggcaagagcccggggtccaagcttccaggcgcacatcatcctctgggccccgggccctccggctggagcactccctcacccgcatcccatccccgttccattttgatcattatttgaatagcccaggtaagggtgcccatctctcggctatgggcgggggctggaccctgacaggtacggactccgcgggaccccagtgtgcttacctcgagcgaggccctggcaaa

SEQ ID NO: 111701 - DNA, 412 bp, Homo sapiens
  chr5:87980867-87981279
  hyper
ctgggatgggacggcgaggaataaattgctccccacccagctgcggtgcgacgcccccagcgtcccaggggagccggtgcgtcagctcacggctggccaaggcggggccgtacaaaagctagcgccgcgggacccccttcatgggcttctaccctagcagaccgagcgctggaggccgctccacgcgcgagctcgaaccacggagggctctcagctcggacaagcgtcgctgtctaagagctccaagctccacggaactttgattttatgcccgggagcccggtcatccacttctgcatctcagacaagcgccggaggctcgtgcagcttcctcgcgtcctcttcctggacgcggggcgcccaccttagtcatagcccctggtcccggcactgctcacgccgtcggtttccc

SEQ ID NO: 111702 - DNA, 247 bp, Homo sapiens
  chr5:87982564-87982811
  hyper
ggaacgagccggttacgcactgtattaaatgaggatcatattttaccaacccaggtggtgttttaaaaattctttcaggcaacagtgataagagaggaagcaaagagcacgcagacccccgcccagcccgcacccgtgttcccagtgtctggagcacacactctaaacacatcgggacccccacccccatgaattcgccctgtttgagactcagtttctgaggccaagagttcgttctcggtggatc

SEQ ID NO: 111703 - DNA, 270 bp, Homo sapiens
  chr5:87983365-87983635
  hyper
taggttctatggtgccggcactgaggagtgtgctttaaggttatcagtcttataagcaccacgtgattagacaggaaaggtaacttgaaaacacaacctgattctgagcgaaatcattttgtcctgttggcatgaaaatgtagttacacctccaagttctgctcaggaacagacggctgcgtgtgggggctggtccctacccagatcagtacaggatcttcagctggcagacgagatccagcaaatggaattcacgaagaaactcatgtg

SEQ ID NO: 111704 - DNA, 60 bp, Homo sapiens
  chr5:87984577-87984637
  hyper
gggttcggggggctccgtttggctaatttttagagaactgcttggcggaggctgctcgca

SEQ ID NO: 111705 - DNA, 128 bp, Homo sapiens; identical to SEQ ID NO: 41756
  chr5:87984846-87984974
  hyper

SEQ ID NO: 111706 - DNA, 40 bp, Homo sapiens; identical to SEQ ID NO: 41757
  chr5:87986627-87986667
  hyper

SEQ ID NO: 111707 - DNA, 446 bp, Homo sapiens; identical to SEQ ID NO: 41758
  chr5:87986872-87987318
  hyper

SEQ ID NO: 111708 - DNA, 932 bp, Homo sapiens
  chr5:87987786-87988718
  hyper
cccagtagaatcccgcgaccccacagcctcagcgctcagggttccacggtccagtacaggctaaactgacctcgccgacggccgcgcccacttgggcacttctcccgggtcttgttctacgggcgtttgaggatttcttagtctctttcttccctggcactcttcctccgaggccagaagtctgaattactagcagctaccagccgcttggagcgggaacgtggaggtgatcccctccccgggagtagcctgtccgtcccagctctcctcccttctgtgcctggcggttttgcggtacccgaatctgtcctcaagggttgggggaggggtggatatggggggatcagagacattaccttttcccaaactgtgagcacagcccgcttggggttggtttcacatcgctcaggactggggttccacgcctggagcgcagttaccttgttgcgcccgcatgtgcctcgggaagtgcatctgcgaccctaggtcggggaccaccgcgttagtgagggacagccgagtcggggggcagtctcccctggtggacagtatgaagtttggacagcaggggaaggaagagaggaactggaggttgggggaggctagagagcaacgtttgctctctgaacttttccttctcccctttgcgccttctgaaatggcctgggagttagcagaggtcgggaagctgctgtaagagcgaaacgttgccccacttggcggtgtccaggtctcgcagtaggctcgggtcacaggagggagggggtaggggttcagctccgccgaaagagttagctaccgtcccctcctttctcggccggagacgttaagagttcccggtgaatgacaccgtccagggtcagaagtcagtggtggctatactcggaataaggctgacagttcgcagtgagggaaaacgtgtaacctggcag

SEQ ID NO: 111709 - DNA, 232 bp, Homo sapiens
  chr5:87988973-87989205
  hyper
ctcacacacagcaaccgcctatgggagagcagtagttttccttgaccttccctacactgcgccccgggagttccccgtaaccccagagcagaaaaattcaccaactttggaatctagtcagaaaaacaaaacaaataaaaccgtgcggacccccaagcaaggattcactaacattcctaccggccttgcttaacctccatgcccccgggaagtggcgcgaatcactcttggc

SEQ ID NO: 111710 - DNA, 403 bp, Homo sapiens
  chr5:87989954-87990357
  hyper
aaccccccaccagcccccacccgctgggaacaggaccgacaatctttcccactttcttgtggaaaattttcacacgtacacacaaaatctggagtccgagataataggtgatgagccgtcctgggaacggtgtcgcaggctgaggatgtccaagacctggcgagtctcgggtcagaggagccggagggggcgacccgaggccccgcgccccggctctgcgctggggggtggtgctggctatttctctctgctcccaactattacatttcttttttccttcatcttggctagagttatacgttttatgtgtggggcgatttagaaaataaaattggactatataagctattctatatataaaaaagaacccgaaaagcctcgcgttttttctcttgtgttttcc

SEQ ID NO: 111711 - DNA, 25 bp, Homo sapiens
  chr5:87990689-87990714
  hyper
ttgtgaggccgggcgcggtggctca

SEQ ID NO: 111712 - DNA, 30 bp, Homo sapiens
  chr5:87991372-87991402
  hyper
ggtcttcggcaaaggcgaaaccctggagaa

SEQ ID NO: 111713 - DNA, 751 bp, Homo sapiens
  chr5:88178385-88179136
  hyper
gctaaatcttaaggcgtctacttcaaggtcacagaacatgctgtgaaatattaaaatccaccaggctccacacgctccaccatatcaaacatgctaatgacgtgaactaacttcatgaaactttaaatacactggtgtgacaggaacgagtcaggagtgatttcaatagctgatggcaaacggatacgactatctaaaaagttacttttagcaacaaacaaggaaatcatggaatctaacgaaaaagaatgcacaacgagcctcaacttcagccttcaaaaaaggcacagggatagatagacacagtgccgtggaatatattgatgcagattttagagacaatacccgggttttctatttcctcgagaaatatcaggggtacttacatgaaggaagacccgatcagattagtccttgggatattttcctttcttaagagagagagagagagaaaaaaaaaataacaacaataatctttacttcgtccagcgttgaagtgcttctccacctgattcaaacatgcagccacggcgacccacacagaaccttcaaagtcaatccaatagcagcccgaagatgtctgggtgtacgcgtgtgctcaagtgtctgtgactgcgagcagagcgagcagagagctggagacgatgtgtgcgtgtgtgcgcgcgcgcgaggggagcgcgcgcgagggggggggcgcggggccgcgcattcgcgcgcgccgaggccgctcggaagaggaggaggaggagga

SEQ ID NO: 111714 - DNA, 1222 bp, Homo sapiens
  chr5:88179187-88180409
  hyper
tcagcggccggtcggattaaaagtaaccagactcgtccagaaaactgcgtccaggaaggaagtgacagaagacgaatgggaaaaggagaacagctcacagcgtttgaaacatcgcgtaaaaaagactgggggtggtgggggcgggggggattgaaggatactgggaggggaggcgggggtggtagggaagacggagcacgaatggttggggttctaagcagcacgtccgatgaaatgtcttttgcctccttttttccccctttatttaattttgtccttgcctttgcttcgcgctgcctttttctctccgtctctctctcccccacaatcccaaaccgttgactctttcctcgcgagctggagaaatcatcagtttcactcttgcaaaaggggggcgggactagacctcggagcattttaataaaacaaacatacagcagctccctcctcacccctccagtctcaactagattgataaattactccactacactactttaattatgtatatggtatgcagaataaatcactgaacatcagtacctcaatcaagcacttttaaatgataattgcatcttggtgaatcaatctttccattcctgacattttgctaattttagttttacggtggggtaatagcacatgccatacgcaaacctaatgacaattctttattgcacgaaatgaagacaacacggcgagctgcggctccctgctcctctcgcggcgcctctgcggaggacgctcggagagaacctagtctcccgctgcggcgcgctcgcttgctctccggggacgctgcgagccagccagcaggaaagtccttctaaagtcgggatctttcctctgaccaataggagcgcgaccctaatagttgctcttgtgacttttcccccttttggacacgcgttagccacttctctcttccaccggtcggtgcgctcctccgttactcacgcgtaaaaaccacggtccaggatgtctgcagcactcgattccagcgtgcttttcctgcacgcccagaagtcgcggttttcaccctgagaggttggagcgctagaaagcgagccgaaaggtttctctaatgttagtaatgtacgaaataataaaataattaccagtatttgagatctcgacttcatcgcggggccatgaactttctaatcagtttggaaatatttaccgaggaagcagcttcctcggagttccccccctcccccca

SEQ ID NO: 111715 - DNA, 992 bp, Homo sapiens
  chr5:88184852-88185844
  hyper
ttaaaaaatctttacccggggttgtggtggaagtggggattaaaaatctcgtcctgcgttttggtgcccacttctttgtttggaaagcagagcgctgggactcaatccggacggccctcaaagacccagacgagggacgcctctagtttgagcaactcactccgctgagttattgattgcaggcagcaacaatccctccggttgatttgtgtgaaaagtgaatccgctctggctgggcgttcagcagaggcgcaacagctgcaacgccatccaattattgccgatcctcccctccaacactgctctcatcacctatatactcttctctctgcccgtctctgcttccccccccttccccccccccttttctcccggccgacggagctgaaggggcgggggttccttccttggagtgtttctagagctcggaggctgctggtagggggtgagtgcgccacgtgcgtgcgccacgggcgagcaggaggcaggctctgggccctcctggggacctgctggacctgctggacctgggtgcgacgagtgggcggccacgctggtttggcgcggggaaggaagggggtgtgccgacttgtatttagttgggggttgtggaagtcacggctgggggaaaagcgtccggtggtttgttggtaaagagggtgcgtgatgggctctggggaatggaggagggcgcaacggctgtgggtggactgtggaaacgggcggtggcagtgccggggtagttgtcctgctggtctggttttgggatcctgggctggagaaatgcgatccaaaagagctcgggatgggctcagagcgacccacgaaaataccaggggccaagtaaaatgaacccaccctttaacagtgcacaaagcgctggcacacggtccacgtctggtgacgcaggctgcccgaagcgctccaaccattttgcaaacctgggagagcaagaggggctctgcaggtctagccgccgcccctgtcccact

SEQ ID NO: 111716 - DNA, 74 bp, Homo sapiens
  chr5:89705879-89705953
  hyper
ctctctcgtaaagccgtgcggtctgtgggccgccattcagaaactggatggacagcttcggcggtgggaaggga

SEQ ID NO: 111717 - DNA, 30 bp, Homo sapiens; identical to SEQ ID NO: 41769
  chr5:89770436-89770466
  hyper

SEQ ID NO: 111718 - DNA, 44 bp, Homo sapiens; identical to SEQ ID NO: 41770
  chr5:89770670-89770714
  hyper

SEQ ID NO: 111719 - DNA, 30 bp, Homo sapiens
  chr5:89825102-89825132
  hyper
gttcttccctgtctcgggggtgtccgccac

SEQ ID NO: 111720 - DNA, 30 bp, Homo sapiens; identical to SEQ ID NO: 41771
  chr5:89825479-89825509
  hyper

SEQ ID NO: 111721 - DNA, 784 bp, Homo sapiens; identical to SEQ ID NO: 41772
  chr5:89854216-89855000
  hyper

SEQ ID NO: 111722 - DNA, 30 bp, Homo sapiens
  chr5:90675808-90675838
  hyper
gggccatttaaattcgctcccctcgaaggc

SEQ ID NO: 111723 - DNA, 122 bp, Homo sapiens
  chr5:90676142-90676264
  hyper
cgagcgagccgcggcgcttccgctttacacgccccagccggcgaccggttccatctggctcgggccactctgacacctttagtttcggcaagggatattggggtggcgaaggggaggcgggg

SEQ ID NO: 111724 - DNA, 30 bp, Homo sapiens
  chr5:90676591-90676621
  hyper
agcacctgtaaggccggcaggagcgtctgc

SEQ ID NO: 111725 - DNA, 50 bp, Homo sapiens; identical to SEQ ID NO: 4105
  chr5:90678445-90678495
  hyper

SEQ ID NO: 111726 - DNA, 284 bp, Homo sapiens
  chr5:90679119-90679403
  hyper
tctccttacaaagacgggcggctaaaagctgccagctcactttaagagcagctttgtgaaaaacaaccccagtgcgcaggcgcaggccgcggctgctgtccgccctccctgcgcgccccctcccgcgccgcgccgcgccgcgctcgctcccttgcccgctcgctcccgggtacagtaggtgtagagctaggggaaggagatactggagctgctggccggctgaacctgacttctcttcattgtgggctcctattggtaggcaggctaccgtataccctcgacgt

SEQ ID NO: 111727 - DNA, 20 bp, Homo sapiens
  chr5:92906252-92906272
  hyper
cgccaactgcccgcgcggaa

SEQ ID NO: 111728 - DNA, 29 bp, Homo sapiens
  chr5:92908610-92908639
  hyper
ggatcctccgcttcccgcgactgccggag

SEQ ID NO: 111729 - DNA, 105 bp, Homo sapiens; identical to SEQ ID NO: 41777
  chr5:92908770-92908875
  hyper

SEQ ID NO: 111730 - DNA, 105 bp, Homo sapiens
  chr5:92914941-92915046
  hyper
tcctccgaaaagccgcgggcttccgctgctccgggcatcaccaccaacagcttcccactcccacccctgggactaggacaggggacttcaccctcctccttcctt

SEQ ID NO: 111731 - DNA, 1509 bp, Homo sapiens
  chr5:92915099-92916608
  hyper
cgctagggtcacgccgggtcccaggggcctctttcaagtttgaaagctctgtgggggcacggagagcccacagtaaggatgggtgggcgcctctgctcccgggcaggctcagctgtcatcccgtctcgccttggccctcacctacagggcctgaccccgggccagcccagctaggcaaggcctcctcgcttccgagaccccccagcccccgggtgcagtccccagcatcggctgcccccgccccccgcgcgccctctgacgcaaacgcacgcccctgccccgcacggaggaaagcgctcttgttggttttaattgagcctcttcctttcaacacaccccctctgtccccacccctgggaggcgaccccctccccgcccccagccggctggcagcggcgcagggagtctggctcggctgctaggctgcgaatcccggtgctctctcgccgccgccgcaggttgtctgctcgggagagcggctcgatgtcccttttaatccgctgacactatcgcccacatcagacaggcagccatcgatcgcgttacattaggggatggcgttacaaacggcgtccgcaggtgggcggctgcagccaagctcgccaggttcaggccgtaaccaggcaaggcgcgggcacaagggccagccgggccggactctgcagccggctccaccgcgggtcgcgctcggcaccagcaggaacagccgggccggtgttaaacgtgcgggtccccgtcctccgcccgggcatccgtttcccgcctaggagagagagggaatagcgggtgggggtgggagcagcctgttttgaatgtggattgctgctcgcctggcacgatcctcccctccaaggaggcgcggcggccgcgatcctcgccttagcgctacggcgagacagaggccgagcgagggcaactcccgagcaggccccgaagaaagttctcctcgtcccgccctggctgcctagactctgctctcggcctgcggaggccgtgcgagccaagactgcctcccggccctgcccgttaccaaccccaagttcaagagaaacgacaaccattatgttacttgcctggtgaggcaggatttggccgagtctcgtttctggtgcccacgacgcacggtccagggtccgagggcggctgggccggcggactgggcatccagtgtgcctgcggtgccctggcgctcgctgtcgctggtctcccactcccttcgtctctctccgcgttctccttccctcgccctatctccctctctccgcctgctgcctctgccctcgactccctgcctctgactgtatggggagtacgatttagaatctgtacatagaaaggttttcttttctttcttttcttttggtctattttaatcgtgttcgtttcaccttttaactgaccagaagacgggagcgcgtttgcgcgtttatttgggcatagggacgagggcaaggagcccctgctacccccagtcgcctcctcgccatcagctgcgtacaatgggccacc

SEQ ID NO: 111732 - DNA, 103 bp, Homo sapiens
  chr5:92916847-92916950
  hyper
ctctgtcaatacagcgtggccatttacttccacctttacctgagggcgtgttggcgctaggaatgctcgagctgagacaaacttttacgccctcgcgagtcga

SEQ ID NO: 111733 - DNA, 31 bp, Homo sapiens; identical to SEQ ID NO: 4107
  chr5:92917347-92917378
  hyper

SEQ ID NO: 111734 - DNA, 63 bp, Homo sapiens; identical to SEQ ID NO: 4108
  chr5:92918895-92918958
  hyper

SEQ ID NO: 111735 - DNA, 30 bp, Homo sapiens; identical to SEQ ID NO: 41784
  chr5:92919632-92919662
  hyper

SEQ ID NO: 111736 - DNA, 30 bp, Homo sapiens
  chr5:92921008-92921038
  hyper
agcggcaagcactacggccaattcacctgc

SEQ ID NO: 111737 - DNA, 90 bp, Homo sapiens
  chr5:92935165-92935255
  hyper
aagcgttggcccaaccgtggggtcagcgatcgatctctgggctcagaggaaagaggagagagacagggtcgtgcacgaggctctgtctgt

SEQ ID NO: 111738 - DNA, 84 bp, Homo sapiens; identical to SEQ ID NO: 4109
  chr5:92939752-92939836
  hyper

SEQ ID NO: 111739 - DNA, 59 bp, Homo sapiens; identical to SEQ ID NO: 4110
  chr5:92940177-92940236
  hyper

SEQ ID NO: 111740 - DNA, 650 bp, Homo sapiens; identical to SEQ ID NO: 41787
  chr5:92943193-92943843
  hyper

SEQ ID NO: 111741 - DNA, 44 bp, Homo sapiens; identical to SEQ ID NO: 4111
  chr5:92946750-92946794
  hyper

SEQ ID NO: 111742 - DNA, 270 bp, Homo sapiens
  chr5:92947617-92947887
  hyper
acagggagaggtgccgaaaagcacagcttggacttaaggtctgcaagcaggagaagaggtgatgggtattgagccagacgcgtcccctttttggtgctgtcaagtaagttgccgtcaggctctttagcgcgcggcgggccgggcgcccgcagcggagccgcctctctccgggaggtaattaaccagtgcctgggcgcacccgagccagtccgacagctccagccactggcagagccgtgggaccaagggccggacgggtatggacttaga

SEQ ID NO: 111743 - DNA, 30 bp, Homo sapiens; identical to SEQ ID NO: 41790
  chr5:92948202-92948232
  hyper

SEQ ID NO: 111744 - DNA, 135 bp, Homo sapiens; identical to SEQ ID NO: 4112
  chr5:92957178-92957313
  hyper

SEQ ID NO: 111745 - DNA, 30 bp, Homo sapiens; identical to SEQ ID NO: 41792
  chr5:93953851-93953881
  hyper

SEQ ID NO: 111746 - DNA, 383 bp, Homo sapiens
  chr5:93954160-93954543
  hyper
ccattaatatcaggcgcaggagaaaacccagtaaaatcacttaccagtcttccacctccggtgctgatctagcaagagcctgacccgctggccagactcaagctctgcaccaggtattaccaccctggcgacggctccggagcgtcactgacaaccacccggaaatggtactatcgcttccggggctgcctagcgcgcggcgggaaattgtttcccagagcccggattcgtgaagcagttgagtgctgcagcggcagtcgtcgcccctgccgccgctgccaccgaaggaagcatcccagacaccgggaaggtaaaggggctcagctaggaagacacagtgtattctgtctctgtggggatgtttcttcgccgggcggtacctc

SEQ ID NO: 111747 - DNA, 30 bp, Homo sapiens
  chr5:94417350-94417380
  hyper
aaagtaagaagaacccgtgatgtttaaata

SEQ ID NO: 111748 - DNA, 30 bp, Homo sapiens
  chr5:94619129-94619159
  hyper
gtttctatttcttcccgccagccatttgct

SEQ ID NO: 111749 - DNA, 1876 bp, Homo sapiens
  chr5:94619387-94621263
  hyper
ctttgctaaaccagagcgagatgttttctttcgactgtttcatctacttagaattaatagcatttctcctcccgcctcccggcccccgccccccgctccccgggtggtgaacgcctgaagagggaggcgtggtcccgcgcaccttgtctccggccgcgccaccggcactcacctggctgctgccgtgctcctcgcccgtctccggggcccgagactccgcgggactccgcgccggctctgcgggaggaggcggcggctccagcagctgctccaggcaggcggtgcccggcagagaggagctcttctggtggcacaagtgcgccccggggccctgacgccgtgcaccctcatctcgggcgcggtcccccctcgggggaggctggggcgaggaggacagggaggatgaggcggaggaagaggaaggagctgagtcgggggagcgtccgccaggaggcgtccctcccgctgctcccgaggccgccgcgggcccctttacggcggggagcaaatgctcgcggatccggcggcgtagcgtggacccctgctcggctctgccggcgccgccgggctccaggggctccggcgacgagcagcacaggttgggctgcgaggaggagaagactcggtccagcacttgcttccgcttcttgaagccgctccacctgctgcctgcaccactccccctggccggtgcattccctgtgcccaccgggggtggcggggagggcgacggggtgtccgcagtgcggcgctctggacccccagcgcgcccgcccccgccgcccttgctcctgcccacccccagctgcaggttcttccagagccgggcctggaaggaggaggacgccgccggcggctctggctcgcccgccgcggcagcccggggctccatcctccaccccctgctcctcctctcccctcctcctcctcctcctcctcctgcttctcctccctcttcggctgcacctcctcccgggtccccgcggcgctggcggtggcggcggcggcggcggcgggcgcagcagcagaaaccgggagtgcccagcgacttcaggccagctcgggggaaagaagcggccgccgccgccgaggctctctggcctcgggactccggcgctgcctcttcctcccgcacctgctggggtgggctggagccgtaaccgaatcccggccgcggcgcctgcaaagtttttccctcgaagctccgcggctccagtccactggcgtcccccaggccgcgccctggctccctcttctctctgaccgagctcgggaagctgcacgcaccggggcgtgcgcgtccagctgcgccagggaccgcacccggcgccctctgggcagcacctgtcagcggcgggggcggctgcctccaaattgggcgcgcacgcggctcacacaacaaggcgcgtctggctggagactccggggaccagcagtccccctggggcgccccgggaccatcctccagctcctaggtgggagggccggtaggagccgggtggagctaggtagggcccgaagccagcttgctccctaggatccggccacagttgcccaggcagctcgctgtgcgctggccgctggccgcgctggcgatcgtctgggtcggatgaagcgagctggagtggaaactatgtgccctcgatgggtctcgtgggggcgccgatcgtccacactgagcgatgaacccgacggagttctaaagctgaagacgtctgcccccgccccgttgcgctccctgggtccaagacgagagtttaatttcttctgtcttgacttcatccccatccacccctcccttttctttatttgcctctgcactggtctcttatgatcaggttctagcatttccggagtctgacgataaagccagccc

SEQ ID NO: 111750 - DNA, 30 bp, Homo sapiens
  chr5:94890149-94890179
  hyper
atattctgaacctacgtcaactaactgaac

SEQ ID NO: 111751 - DNA, 153 bp, Homo sapiens
  chr5:94890672-94890825
  hyper
ggctgcaatgagagcgcatgcgcctttcccaggactcattcacgtgactggaagtggctgggttctgatttgctcggtatttgattaaaaggtcttaacgtgggtaaaagcgggaatttctctgttgcgcatgtgcgcgctctccgcctgata

SEQ ID NO: 111752 - DNA, 30 bp, Homo sapiens
  chr5:94891608-94891638
  hyper
ttgattcactcccccgtattccagagaaat

SEQ ID NO: 111753 - DNA, 1635 bp, Homo sapiens
  chr5:94955629-94957264
  hyper
gcgcccaggggtccgcggcttccgcgagggtagcgtcgggggccgctgcagagattggaagagtacccgccgggaatgggagggaagacgcggggaaggtggagaataggaatcatgtgtgttcctcgagtgtacaacccacatttgagtgacaaatcacgaggacaatcgacaaaaacaactaagcgcaaagccgcccgaatccatctccctctctgtgcgtgtgccttttcaactaactttgggaactcgtatagacccagcgtcgctccccgcgccgcctcgcctccactttggtttcccgcgtcctgcccgccctcttcggtgcctcctcttcctccgggacaaggatggaggatctctttagcccctcaattctgccgccggcgcccaacatttccgtgcccatcttgctgggctggggtctcaacctgaccttggggcaaggagcccctgcctctgggccgcccagccgccgcgtccgcctggtgttcctgggggtcatcctggtggtggcggtggcaggcaacaccacagtgctgtgccgcctgtgcggcggcggcgggccctgggcgggccccaagcgtcgcaagatggacttcctgctggtgcagctggccctggcggacctgtacgcgtgcgggggcacggcgctgtcacagctggcctgggaactgctgggcgagccccgcgcggccacgggggacctggcgtgccgcttcctgcagctgctgcaggcatccgggcggggcgcctcggcccacctcgtggtgctcatcgccctcgagcgccggcgcgcggtgcgtcttccgcacggccggccgctgcccgcgcgtgccctcgccgccctgggctggctgctggcactgctgctggcgctgcccccggccttcgtggtgcgcggggactccccctcgccgctgccgccgccgccgccgccaacgtccctgcagccaggcgcgcccccggccgcccgcgcctggccgggggagcgtcgctgccacgggatcttcgcgcccctgccgcgctggcacctgcaggtctacgcgttctacgaggccgtcgcgggcttcgtcgcgcctgttacggtcctgggcgtcgcttgcggccacctactctccgtctggtggcggcaccggccgcaggcccccgcggctgcagcgccctggtcggcgagcccaggtcgagcccctgcgcccagcgcgctgccccgcgccaaggtgcagagcctgaagatgagcctgctgctggcgctgctgttcgtgggctgcgagctgccctactttgccgcccggctggcggccgcgtggtcgtccgggcccgcgggagactgggagggagagggcctgtcggcggcgctgcgcgtggtggcgatggccaacagcgctctcaatcccttcgtctacctcttcttccaggcgggcgactgccggctccggcgacagctgcggaagcggctgggctctctgtgctgcgcgccgcagggaggcgcggaggacgaggaggggccccggggccaccaggcgctctaccgccaacgctggccccaccctcattatcaccatgctcggcgggaaccgctggacgagggcggcttgcgcccaccccctccgcgccccagacccctgccttgct

SEQ ID NO: 111754 - DNA, 278 bp, Homo sapiens
  chr5:95066553-95066831
  hyper
gaaaacagctgtagcgcatgttgacaaatgagaaagcggcagacgtggtaaagcactttcggtcaaggccaagagggggggaaatcgggttgctggggcggcactcgggctggaatccctagcttccctaacctcctttttccagtccggagtgagcgggggccccatcgccccacccccctttcctggctctggttacggccttgcgagttgaacaaacttgctgcaggcggattggcggctgggagctctcgggctggggcgttgtatttattaat

SEQ ID NO: 111755 - DNA, 66 bp, Homo sapiens
  chr5:95157377-95157443
  hyper
tcctgaagcccaggacgcaaagccaaggatgctgaagagagggaagtctttcggatggaggagagc

SEQ ID NO: 111756 - DNA, 506 bp, Homo sapiens
  chr5:95157903-95158409
  hyper
tcccacttaccctgccgcacagcagacatcagctgtactccctcttctgccccgtgaagacctttggctgcagtgccgccgctcattcaagtgaccgagatcctctctaaggcgccctcccccacaccccccgccccgcacagccctctggacgccttgaagtacggagccgcagccttatcctaaagaaaggcacagctctgacaagaaaaggcaatccgggagcctttccctagccgtttaaaatgaaactcaccgttcttgctcccgtgagctgttgcaaataatcttgaatctcgttagtgtggttggtggctgtgatatcgacaaattccagaagcccttgtttgatgggcaattgactgaggatctcttgggccctcctgcagtacgggcaggtgggcttgatgaacacaaccaccttcccaggctggattttgcagttcacaaactcttgagccatgccgatgggctgcggtctccccgggaagaatcctcagttgcag

SEQ ID NO: 111757 - DNA, 40 bp, Homo sapiens; identical to SEQ ID NO: 41800
  chr5:95170783-95170823
  hyper

SEQ ID NO: 111758 - DNA, 109 bp, Homo sapiens
  chr5:95194594-95194703
  hyper
attccagcaggtggcgctgcaccccgcgcggacccggcttgcctctcggccccagggaggtcggttgatgagcagtcgggaagtgggtctgcgcgcaccccgctgcagc

SEQ ID NO: 111759 - DNA, 484 bp, Homo sapiens
  chr5:95767460-95767944
  hyper
cgccgattactcatccgtgactccagcggcgtctcaaccaccacctccagaaaaaacgcgccaaaatgttttacaactgcctcctcccacgcttcaatgcagaccaacttcccaagcagggggcgagggcttgattccgagccaaggaaaggaaagctctagactagaagtcacactccctagggtcccctcggaatcgctcagctataagcagtctcccacttaatgtcttgacgcccacccacctccaaccagctacctatcgaccaagccttcacttggacaggcaacaataagctgaaattcccgggaaaacgattacgtacttggctgaagaacaagaaagaaatagatcccttccccatagtcagttcggcatctcgaccctgcagtgggactggccgggcaaagttatgaagcttggactttataagttcccagtgaaaagccggagctccctagagagtcgcggggatagatggtc

SEQ ID NO: 111760 - DNA, 428 bp, Homo sapiens
  chr5:95768192-95768620
  hyper
gcgcactgcttctcccgggggcgcttggttggtaagagcttgagtgtatctcaagttccctgaacaagcgtggagggatttttcttccaaaccgcgcgggaacggatttcaattctagagcggccaacagtaagcataagccctacccagctgcagcggcttccttctgcttggctgcgcccagcctaaacagtaaataatgcaagctttctctctctccaagcgcgacaggggcgagggctggagcagctccttgctctttgctactctgggctctggagagtgcaacctggggctcccacttggaagaccgcgctccagtcccgccagtcccctggggccccagaaagtttcttgaaagtggaaactcttacctgacccaaaaggtcatagcccagctcctcggcgatggccgaggctgcttccgg

SEQ ID NO: 111761 - DNA, 118 bp, Homo sapiens
  chr5:95768893-95769011
  hyper
agaggagaggctgggcggcggcgagcgctcagtgaagcgcttcggtctccaggctgagtggagccccagcccttcccagccagaatggaaatgagtgtttacacgtcaaatcgacgaa

SEQ ID NO: 111762 - DNA, 81 bp, Homo sapiens; identical to SEQ ID NO: 41802
  chr5:95769978-95770059
  hyper

SEQ ID NO: 111763 - DNA, 30 bp, Homo sapiens
  chr5:95997844-95997874
  hyper
tgctggggccggggcgggtcaccgggtgag

SEQ ID NO: 111764 - DNA, 30 bp, Homo sapiens
  chr5:95998999-95999029
  hyper
gggtgcgacctcctcgcagaccttcaggtt

SEQ ID NO: 111765 - DNA, 566 bp, Homo sapiens
  chr5:96038224-96038790
  hyper
gcgaagtgcacccaccgtcgttgccttattctggtagtcacagggtgacagccgagggagcggtaacctgtaatcagccggcggtgcgcagcccacacagcacgtggtccgcatcacaggctgcgttattgagtgagccagtctccagatgccaggcgcatgacgagtccacggagcgggacctccctccccacgcatcccgggctcccggggcggggccgccgggcaggggggcggggagcatcctgcgtcgccttcccgggaccgccccgccccgtcgcactcagagagctgggctggagctccaagcggaaaccgcgggagccgagcccagctaggaatgcagacctcctgaaaaccaagccgaggactgcggggtccggtgtccacgcagagtgagtactgtcttccgccgctttgctccaggccgcgcgtgctcccgggtctagggcctgtgcccccggctacctgccctgcgtgtccggggcctggtccctgcagcggactccccaggctcgggacgtgcgcttttcctactatcgcgaccctggcgataccgtgcgttc

SEQ ID NO: 111766 - DNA, 30 bp, Homo sapiens
  chr5:96271064-96271094
  hyper
cgtctcctcctcaccgccctcctgaggcac

SEQ ID NO: 111767 - DNA, 30 bp, Homo sapiens; identical to SEQ ID NO: 41803
  chr5:96271807-96271837
  hyper

SEQ ID NO: 111768 - DNA, 30 bp, Homo sapiens
  chr5:96519450-96519480
  hyper
taatggaactcatgcgcttgctcagtactt

SEQ ID NO: 111769 - DNA, 243 bp, Homo sapiens
  chr5:98104048-98104291
  hyper
aagctggagagggtcgtagattcttgcctaaggaggcaagaagtgacctccctgagtcaggatacttgagcatttgacttgactaagagaagtagcccgctagttccaggcgttgaacgcgccaattagctgccgctgagtatctgggatgttttttgtttgtttgtttttctactttggaagatcaatgtaaggtagaaagttaatccctttcttcttgccctccacgccttccacgctgat

SEQ ID NO: 111770 - DNA, 812 bp, Homo sapiens
  chr5:98104603-98105415
  hyper
cgtggcggggggcagcgcatctggcgccttggccggggcgcggagtgggaacagcccgcacgcgtccgctgccgccctgcctggcgacgagtggcacaatcgcccaccaggaatcggctggtgccgcgggtgggcgaaggcagcgccgccggcccggagggcggcgcggagggtggcgctggcggcgtgaaaggcgtctttgtgcaagattgagtgtggtggggggaaggcgaagagagaactgatccaggacctggacgcgggggtctgcggcgcccctacgcccccacgcccccagccgtccgcagtgccggaatgagccggatagcgccggcagggggcagtgtggcgatataggggttgccggggggagaggagggtctctgttcacctctatttgaggctgactggggagaaagctgcctggaggaagctgctggggtgcggggggctgagggatttggctccccgccctctcccctagatggcggagaaatcgggctagctggaagggcgcagctcctctcccagagctcattctggagtcggagaactgggagagcggcccccgaggcggagcctccctcccgccccgagtcgcgctgccccccacctgggggagaggggcgggcgccgcgctgccttccctccgcgcctcggccgcgtggcttgcggcttattttcccagctggcaagcgtcgcgctgcagacaagggaatgcctgtggtgagttgtttattttgttgaagtttgcggtgggcccgggggacgtggggggcgagcggcaggcagcggccgggactgttttgttt

SEQ ID NO: 111771 - DNA, 96 bp, Homo sapiens; identical to SEQ ID NO: 4117
  chr5:98107031-98107127
  hyper

SEQ ID NO: 111772 - DNA, 209 bp, Homo sapiens; identical to SEQ ID NO: 41806
  chr5:98108683-98108892
  hyper

SEQ ID NO: 111773 - DNA, 448 bp, Homo sapiens; identical to SEQ ID NO: 41807
  chr5:98109212-98109660
  hyper

SEQ ID NO: 111774 - DNA, 696 bp, Homo sapiens; identical to SEQ ID NO: 41808
  chr5:98109926-98110622
  hyper

SEQ ID NO: 111775 - DNA, 30 bp, Homo sapiens; identical to SEQ ID NO: 41809
  chr5:98262998-98263028
  hyper

SEQ ID NO: 111776 - DNA, 30 bp, Homo sapiens
  chr5:98264463-98264493
  hyper
tgaagcaccaagggcgagggcagcaagagc

SEQ ID NO: 111777 - DNA, 30 bp, Homo sapiens
  chr5:98265515-98265545
  hyper
caaaaaacgctgctcgagggatgttagtaa

SEQ ID NO: 111778 - DNA, 1360 bp, Homo sapiens; identical to SEQ ID NO: 41810
  chr5:100236034-100237394
  hyper

SEQ ID NO: 111779 - DNA, 48 bp, Homo sapiens
  chr5:100237669-100237717
  hyper
aggacgcctccaaaccggaacagggaggatttccgaaacaggactttg

SEQ ID NO: 111780 - DNA, 937 bp, Homo sapiens; identical to SEQ ID NO: 4123
  chr5:100238182-100239119
  hyper

SEQ ID NO: 111781 - DNA, 1010 bp, Homo sapiens; identical to SEQ ID NO: 4124
  chr5:100239134-100240144
  hyper

SEQ ID NO: 111782 - DNA, 281 bp, Homo sapiens; identical to SEQ ID NO: 41814
  chr5:100240232-100240513
  hyper

SEQ ID NO: 111783 - DNA, 1095 bp, Homo sapiens; identical to SEQ ID NO: 4126
  chr5:101631421-101632516
  hyper

SEQ ID NO: 111784 - DNA, 30 bp, Homo sapiens; identical to SEQ ID NO: 41816
  chr5:102090122-102090152
  hyper

SEQ ID NO: 111785 - DNA, 50 bp, Homo sapiens; identical to SEQ ID NO: 4127
  chr5:102090423-102090473
  hyper

SEQ ID NO: 111786 - DNA, 103 bp, Homo sapiens
  chr5:102091103-102091206
  hyper
tgagggtgggggcgcggaagggggcctgggctcgggatcctgctgccaccaattcctggtgccccaggaggttgttgctttttctcccgggctgcccgggtcg

SEQ ID NO: 111787 - DNA, 30 bp, Homo sapiens; identical to SEQ ID NO: 41818
  chr5:102091650-102091680
  hyper

SEQ ID NO: 111788 - DNA, 519 bp, Homo sapiens
  chr5:102201406-102201925
  hyper
tccccaggcttgggcgcaaccttgtgaaactactaatgtattaaagaacctcagctgggatttgctgaggacaaatgctgtaacgtgttagtcatccattatctgcttctatttttgcaggttctgaatgatgactgacgcgggtttgggtgatacccctcacagcccctgtcattccggagtcataaggcacccgcgcgtctagccccagcgccagggcacgcgagcggcgctggagggaggaaagcttccgcctgcgggccggacaaaagtcccgcctgcccacggctttttgcccgccgctcgtgaccgagacgcctcgccgcggccagctcgctgctctcgctggcggatggtgtgtggccgccgcaggacgcccgccgtgcccgggccatgaagtagcggctgctggcggcgccgctgcccaaccgccagccccagccccgcgctgcgctgcccggtcctctcccggcggggtcgtatcggcgtggacatggctggccgcgtccctagcctgct

SEQ ID NO: 111789 - DNA, 2608 bp, Homo sapiens; identical to SEQ ID NO: 41820
  chr5:107005046-107007654
  hyper

SEQ ID NO: 111790 - DNA, 103 bp, Homo sapiens; identical to SEQ ID NO: 41821
  chr5:107007962-107008065
  hyper

SEQ ID NO: 111791 - DNA, 146 bp, Homo sapiens
  chr5:107008359-107008505
  hyper
attggtttgctccacgagaaagaggcgttttcctaatctcccttccccacgcctcctaccccctcccccgccccaccttctagaaacctgactaattgaattactgggagtgccgaggcgccctctcctgcgccggagcccggcag

SEQ ID NO: 111792 - DNA, 30 bp, Homo sapiens
  chr5:107009193-107009223
  hyper
ccagcgcctcgggacgcgtccccactgtcg

SEQ ID NO: 111793 - DNA, 30 bp, Homo sapiens; identical to SEQ ID NO: 41823
  chr5:107009542-107009572
  hyper

SEQ ID NO: 111794 - DNA, 30 bp, Homo sapiens; identical to SEQ ID NO: 4132
  chr5:107141292-107141322
  hyper

SEQ ID NO: 111795 - DNA, 207 bp, Homo sapiens; identical to SEQ ID NO: 4133
  chr5:107359032-107359239
  hyper

SEQ ID NO: 111796 - DNA, 30 bp, Homo sapiens
  chr5:107716453-107716483
  hyper
ctccctgtgacagtcgcaggggttttcggg

SEQ ID NO: 111797 - DNA, 30 bp, Homo sapiens
  chr5:107718028-107718058
  hyper
ccgcgtttctgaggcgggaggagacacttc

SEQ ID NO: 111798 - DNA, 174 bp, Homo sapiens
  chr5:108064026-108064200
  hyper
gctgggccgccctgcgccgggagccgcccaccttcgggctgggccgggcctggccagagtctgggctaagcgcagggcctgcatgaatcttcagcctgggaggtggggcaggagcacggagaagtctcgaagaagtggaggaagcacgcactggctgccgcgggaaaagctcag

SEQ ID NO: 111799 - DNA, 31 bp, Homo sapiens; identical to SEQ ID NO: 4134
  chr5:108313516-108313547
  hyper

SEQ ID NO: 111800 - DNA, 30 bp, Homo sapiens
  chr5:108744958-108744988
  hyper
tgctgcggctcgagcggggtgtctgcgtgc

SEQ ID NO: 111801 - DNA, 30 bp, Homo sapiens
  chr5:108746484-108746514
  hyper
gctgtttgtcaagccgggaagtaacagctc

SEQ ID NO: 111802 - DNA, 465 bp, Homo sapiens
  chr5:109024544-109025009
  hyper
tgcagtcaaaaagggcgaatttggagctgagaggcaataaatcaataactggcagaagcatcacttctcagattacactcatggatttcgtagtcagatgtttctacatgtgcctggacggccctttgtcagtctcctttcccccaggttttaacaggctgtcaccaaaggaggaaatagtgagcccgaagagaatgtgcaagccctcttctcttgcatttcctccagcccgtcaccaagtactcttccaggcacgccaggcccgagtgtcctaggataggaaacctgagcaacaaagggaagtggggtgtaagctcaacccctgttggacgtgggggtgctggcgcctgaacgcccccgaaggcctcaactcccagaaagctgcctgccaggtcacaagagccctgtgaggtcttcctatcgccgggacactgggaggcaggcgcggggcgggtccgccgggcg

SEQ ID NO: 111803 - DNA, 30 bp, Homo sapiens
  chr5:109025857-109025887
  hyper
cccttcccagttgccggcgagtctcgcctc

SEQ ID NO: 111804 - DNA, 11 bp, Homo sapiens
  chr5:110074204-110074215
  hyper
ccacagtactt

SEQ ID NO: 111805 - DNA, 1028 bp, Homo sapiens
  chr5:110074272-110075300
  hyper
cgggagacaaagctaggtggaacgttattaaccctccacaactccaacctctactagcttcctcggagcaggcgaggcaccaggcccgtgagaaaacactgagatctggggcgtagctgtgacatggggtatttctggccgggatctcaccgggtaggctccacccgcgggttatcggctccctccaagaagcatctttgaactcctcccatgcaggccctattcctacaccagttctctttctggaatctctttggtactgtgtttcattaatcccacaaccatattcccacctattccctaacgacaacaaacttttaaggtccaggttaccgccgcgtctccctagcaaccgtgccctttaatggttgccggaagaggctataatcacgtgctccgaagacttccgggtttccaacgtgacttccggttgtcagaatttacccctgacgcggcggcggccgacgggaagctgtgtgtgcttaggtcgtggtggccccggtggtggtgggctccgggcgggctcgcgtcatcctgcccccgctgcgatgcatccgcggcgcccggacggatttgatggcttgggctaccggggtggtgcccgggacgagcagggctttggcggcgccttccctgcaaggtccttcagcaccgggtcggacctgggccactgggtgacgactcccccagatatccccggcagccgcaacctgcactggggcgagaagagcccgccctacggcgtgcccaccacctccaccccgtacgaaggccccacggaggaacccttttccagtggcggcggcggcagtgtgcaggggcagagcagtggtgagaagcatggggaccgacacagggatgaggggttactggggccgcggcttgcggcctgcagaccccggaagcggcgcagaggatcccgcctcctattccttctcatcctatcgcgcgccacaccctttgccctcctttggtcctctgcccctgaggctggcctcctcttcctcacaaacgaattctcctggatc

SEQ ID NO: 111806 - DNA, 555 bp, Homo sapiens
  chr5:110408730-110409285
  hyper
gctccgggacgccgccgccgggggaaaggggacatctgggctgtcagagcggggctgcgcctagcttgggacaacacttctgttccaatttagggagaggaagtctctatccggaggaaaggcaaattgggaactgggacgagggaacgttgttaggggcaccacctgctggggtccggcgcctccgcgctcgggctcggaattttggcagcctccgccccctggagacttgggaggagcgagcgtgggtgacagtcttttcgcgacgagtgccctccgccaccctcgccacgcccctgctcccccgcggttggttcttccttgctctactcaaccctgacctcttctctctgactctcgacttgtgttccccgctcctccctgaccttcctcccctcccctttcactcaattctcaccaactctttctctctctggtgttttctccttttctcgtaaactttgccgcctatgagcagccacattgccttactgaaatccagagcctaaccttcaatcccaccgccggctgcgcgtcgctcgccaaagaaatgtt

SEQ ID NO: 111807 - DNA, 30 bp, Homo sapiens
  chr5:110427831-110427861
  hyper
ccctctttgtttcccgcccttgcggttctg

SEQ ID NO: 111808 - DNA, 215 bp, Homo sapiens
  chr5:110428254-110428469
  hyper
gcgcgctcaagcgccggttctatgtaacaacctgcgtgggcaagagtttccacacctatgacgtgagtgacttcttttgttagcttcccaggaaaaccaccctccttggcctctaactctgtcctggagcagtccggttctcccttcccatttaccacgggcttcccttctttaacccctccctgtcctattaatatttcgccatccggtcacgt

SEQ ID NO: 111809 - DNA, 570 bp, Homo sapiens; identical to SEQ ID NO: 4138
  chr5:110559548-110560118
  hyper

SEQ ID NO: 111810 - DNA, 436 bp, Homo sapiens; identical to SEQ ID NO: 41835
  chr5:110560138-110560574
  hyper

SEQ ID NO: 111811 - DNA, 30 bp, Homo sapiens; identical to SEQ ID NO: 41836
  chr5:110614706-110614736
  hyper

SEQ ID NO: 111812 - DNA, 1031 bp, Homo sapiens; identical to SEQ ID NO: 41837
  chr5:110847624-110848655
  hyper

SEQ ID NO: 111813 - DNA, 30 bp, Homo sapiens
  chr5:111092830-111092860
  hyper
acagacaaaagccccgctccctgttcactc

SEQ ID NO: 111814 - DNA, 39 bp, Homo sapiens
  chr5:111093184-111093223
  hyper
tgatggagctggcgcggagccagcgccccagccttgctg

SEQ ID NO: 111815 - DNA, 30 bp, Homo sapiens
  chr5:111093609-111093639
  hyper
gaggcggcgcggcccgtactgtaataataa

SEQ ID NO: 111816 - DNA, 30 bp, Homo sapiens; identical to SEQ ID NO: 4142
  chr5:111093898-111093928
  hyper

SEQ ID NO: 111817 - DNA, 153 bp, Homo sapiens
  chr5:111093929-111094082
  hyper
gcacacagtcacacgcgcacaaccagccagagctgcggcctggcgtgatcggcccaagacatactcccctggtgcttccttctccttccctatacgctcccccactgcctgcccgtctgaaattgtactttttaaaatcgaggattgctttaa

SEQ ID NO: 111818 - DNA, 99 bp, Homo sapiens
  chr5:111496549-111496648
  hyper
cggaagcctgtcctttcttccttttggtgcgagcttgctgtggtttttgctctgggtcctctgggatggcgcctggctgtggccgcgtggtctctcacg

SEQ ID NO: 111819 - DNA, 30 bp, Homo sapiens; identical to SEQ ID NO: 4144
  chr5:111497158-111497188
  hyper

SEQ ID NO: 111820 - DNA, 30 bp, Homo sapiens
  chr5:111753739-111753769
  hyper
cgggggcgggggggcggtttcccttcacca

SEQ ID NO: 111821 - DNA, 30 bp, Homo sapiens; identical to SEQ ID NO: 41841
  chr5:111754281-111754311
  hyper

SEQ ID NO: 111822 - DNA, 883 bp, Homo sapiens
  chr5:111754512-111755395
  hyper
ctctcctccccaccgcgcagagtcgcggccgccgccctcgacccaccggtgacagccctcaaagcgatggacccccgcacccgccctgccgccaacccccggaacgcgctccgggccgcacccaccttgatgccctgctgctgggtggtaagggttaacttggattcatccaggagcaaaacttcgcagtaaaattcttccggaacagcgcagaaacagcccatgtcggttgtggtcgtctccagccaggagagaaagctaccaccgaggcgcccagccgccccctccactcaagcgcgatgcattaatttattgtccgcgccgtggcgagggtgagacgagcagctcccggcggggtccggggaccggccgccgaaccgcccggcggggcgggagcgagaaaggcggaaaagcccgggagagtcagcgcccgggagccgccggggaagcgccggcggaactgggcgcggagggcggtggcgcgtccccgcgcatcctgcggctcgagctcctccgaaggcgggggcgcggggcccctcccgcagtcctggggacgacaaaagtctcctggcactgggggcaagagaccagaaaaaggagtgatgggaattcgaggctctccccggccttggaaaaccctggaagcgctgcacctccctcctgccgcacggatttgagcgcggccccgacgtcctggcgtccgatcggcctgcggagtcccccgcgggcgcgcacttccagccgcgaccccgccccgcagccccgggtcagatccgccgagtatgaagcgctcggcttttcttttgtgtgaggagcacccacgacgccccgaccatgggcgcaggggcagaggcgaaggtcgtcgctccgtccgctaccccgt

SEQ ID NO: 111823 - DNA, 200 bp, Homo sapiens
  chr5:112043090-112043290
  hyper
agcgaagcagtgcccggcaagcggagcgcagcacccattgcgcctgcgcataacaggctctagtctccgggctgtgggaagccagcaacacctctcacgcatgcgcattgtagtcttcccacctcccacaagatggcggagggcaagtagcaagggggcggggtgtggccgccggaagcctagccgctgctcggggggga

SEQ ID NO: 111824 - DNA, 30 bp, Homo sapiens
  chr5:112043701-112043731
  hyper
ccctctcccctccccgcactccccattcag

SEQ ID NO: 111825 - DNA, 30 bp, Homo sapiens; identical to SEQ ID NO: 4145
  chr5:112175624-112175654
  hyper

SEQ ID NO: 111826 - DNA, 30 bp, Homo sapiens
  chr5:112197182-112197212
  hyper
gcttctccgctccgcggcctccagaatggc

SEQ ID NO: 111827 - DNA, 30 bp, Homo sapiens
  chr5:112256903-112256933
  hyper
agaggctccataaccgaacaccaggtacaa

SEQ ID NO: 111828 - DNA, 30 bp, Homo sapiens
  chr5:112257597-112257627
  hyper
tcctccgatgcccacgctttccgggaggcc

SEQ ID NO: 111829 - DNA, 193 bp, Homo sapiens
  chr5:112257953-112258146
  hyper
ggagcagcggcaggcggggaccgcggcgcgtctacgcgtcctccactcgcctccgctcgccccgcccggccgccgcgcgcccctcctcggccgccgcgcgcccctcctcccccgcccagcgccagggggacagcgccacaccctggcgggggcgggcctgcaactccgcggacgctgcgaggtggcctgcctg

SEQ ID NO: 111830 - DNA, 121 bp, Homo sapiens
  chr5:112312391-112312512
  hyper
caggggcgtgactccgggggctccgccccgagccttggcccagtcttggggtccaaggctgagggagcgggacggaagtgagcgggtcccgccccttccccttctcgtctccgttggagtc

SEQ ID NO: 111831 - DNA, 30 bp, Homo sapiens; identical to SEQ ID NO: 41845
  chr5:112312936-112312966
  hyper

SEQ ID NO: 111832 - DNA, 1436 bp, Homo sapiens
  chr5:112629390-112630826
  hyper
ggagcccaggaattgcaaatgcgcttgcctcaaagactcaggagtccagatccgggcaggaaataaagttctaaagcggctttgaagtgctttctccccagacccctccccagcgcgggtcattcatctcagcctagggaagagaccaccttgcctgaacgtagccaaacgcatcgcacgtgggagccaagtgggagatgaaataatccaatgcgtccccctcaccaccaccacccccaccaaattagttaccgtcggcttaaactcatcgggaatgtccgtgtattttaccgatcagggaaataaaagggtgtatataaattagtggaagcgggtgggaaggaacaagggatgcagactgtcgtgagtaaaacgcctcgcggcttggtgagaggttgtttcttttttaagccactcatttcagactgaaatatcaagccagttcaggtcatttcctgagtagcactacaagttaaaacaagatccagaaaatctactaatcttcaattgcgctgcctccagactgggagcacagggggatagggtgtagggctgtggggaggtcgaggggagggggatttgtggaaaagcaaacgcccgagaaaccctagctcccgacctcagctgtttcttacctcactcagctcggccgaggagtcgtttccatatttcatggcaactccggaattcatgatgcacttttcagagctgggctctcagtcccccaggtctcggagcttaagagttggacttcacaggctcaatatccactgcttggtcccttctgccacattttagtctagacagccattttcacccaggacagttgcgaagcgcaaacggaggatgcaggcactcttaaaaagagcagccgtggctcgcgtttcacggacgagccattgctgcaggaggctcggtggcgcggcgcgctcgcagctgcggcagcggcggagcccgcgcggggaccctcccgcgcgcacccagcgccccgttccggggcagtgccaccctgggcgccgcctcgccactcctacggtgcctcgccgccccccattaccaggatggagggcacttcccagcacgagccgacaccctagagggcaccggcgagctcccgaaaaaactagggcggtggggcgaggaagatccgcgcctcggattccagagaaggaaagaaagctagagggagccggagcggagctgcacttcacgccgaagtttccccttcgaatcgtctggagttgtaagtggtttctgattgaacacagctgtctagctgctggccacggggtgcgcggaggaggcggggctagagggagaaaagggtgggggcgagtagcctggaggccgagcagaggagaccgtgctgggagagcagagcaggcatccttccagttctctgcaatagtaattaaggacccgagtccaggaggggg

SEQ ID NO: 111833 - DNA, 562 bp, Homo sapiens; identical to SEQ ID NO: 41847
  chr5:112823741-112824303
  hyper

SEQ ID NO: 111834 - DNA, 30 bp, Homo sapiens
  chr5:112850021-112850051
  hyper
gtgtttttcccccgcgtctttcagcagcct

SEQ ID NO: 111835 - DNA, 233 bp, Homo sapiens; identical to SEQ ID NO: 41848
  chr5:113028781-113029014
  hyper

SEQ ID NO: 111836 - DNA, 770 bp, Homo sapiens
  chr5:113391103-113391873
  hyper
gaagtggagctataaatagagcggggagggaagcgccctcctgaggggagcgggcgggagattcccggctctcccctccgccgccgcggcgcgttctacgccgggggaagccggctggcgggcgcgcggccttaacccgtgcgacgccgggcagctcctgcggcagccggggagggcgtgatggagaccacgctggaaatgggaatcaaggcacgtttctaaccttgtactggaacgatacatagtctgcgatttctctccctccctgtctttcctctgcagctccccccggttaacacccgaaattcggccttagaatacacacacacgatggaatttgttccatatctttttttttaaccttcgataggcataaatccaaacctaaaattaaaatcatccccaaatttggttttgggaatcatgttggttttcacccttgagcggcgttccctccccagtgccgcatgctgcttaaggactgttactttcttggggagggaagtatcaaatggaaacggtgtgtgtgtgcgcgcgcgcgtttatttttggcgcatgcacacccctcggtagcctcaaggtcggcgataccctgagcattcgggcccccgcctgcaggactcgctcctgccagccaaggactcaagaaggagggagtccccagtcccggcggggcgcctgggattcggttcaatatttagcacagtcagtaccgaagcaggggcagccaggtgggagctgggcgcccaaaagttggaccccaatcagca

SEQ ID NO: 111837 - DNA, 121 bp, Homo sapiens
  chr5:113391904-113392025
  hyper
cgcccgcgccccggagctctccggctggctctctgctccccgaagctggggagccgggggcgctctcccgggccgcaagcaggcacggaatttgacgcccgagaggcagatggtcctggct

SEQ ID NO: 111838 - DNA, 20 bp, Homo sapiens
  chr5:113562586-113562606
  hyper
gactccgtctcaaaaaaaaa

SEQ ID NO: 111839 - DNA, 1851 bp, Homo sapiens; identical to SEQ ID NO: 41852
  chr5:113696412-113698263
  hyper

SEQ ID NO: 111840 - DNA, 253 bp, Homo sapiens; identical to SEQ ID NO: 4153
  chr5:113698330-113698583
  hyper

SEQ ID NO: 111841 - DNA, 174 bp, Homo sapiens; identical to SEQ ID NO: 4154
  chr5:113698669-113698843
  hyper

SEQ ID NO: 111842 - DNA, 747 bp, Homo sapiens
  chr5:113698951-113699698
  hyper
cgacaaggtacaggcttgaaccccagcccacgctaccggagtcgggcactgggtggttgggatgggcactggcggggaccctttgcgtgcggatccctagcctctccgggacgatcaagggagcccgccaggacagcgggcgcgtctaggacgcgcatccgtagtcagctaaacaactcggagatgaaccctttccgcgtgcagccaaagttctcgaggcagttaagagtgctcagcgcattcgggcaccttaagtaagtggttctggaagtcggtggggaaaccatctgtaattcatcccctcgtgaattatgtttagaagggccctttcaacccgctctcttgaactcagaagtaagttcctctggttttgctagcctggaacagcggcgctcgcttcggtcctctatggcgtggacccagcagcccagccacgcgtcttcccagtctttccaggtctactctcgtctcttttggttttgaggccgagtgatctgacagatcacagagccaagacaggtgcacccctctccccttatcttccttctgtgagttcaggtccacctgtgggggactgactgactctggggacgtggaaggcggttaaaagtgcttctttcttaaaagtgcttctgtctgactgtgttgcaggcgtcgctgtattccttagctctgaaatgccttatcagtctctccacgatcatcctgctcggtctgatcatcgtgtaccacgccagggaaatacag

SEQ ID NO: 111843 - DNA, 30 bp, Homo sapiens
  chr5:114505751-114505781
  hyper
ggctgagcgggactcggctgggcgtgggtg

SEQ ID NO: 111844 - DNA, 30 bp, Homo sapiens; identical to SEQ ID NO: 41857
  chr5:114506052-114506082
  hyper

SEQ ID NO: 111845 - DNA, 292 bp, Homo sapiens; identical to SEQ ID NO: 41858
  chr5:114506294-114506586
  hyper

SEQ ID NO: 111846 - DNA, 30 bp, Homo sapiens; identical to SEQ ID NO: 41859
  chr5:114506853-114506883
  hyper

SEQ ID NO: 111847 - DNA, 570 bp, Homo sapiens; identical to SEQ ID NO: 41860
  chr5:114515009-114515579
  hyper

SEQ ID NO: 111848 - DNA, 117 bp, Homo sapiens; identical to SEQ ID NO: 4158
  chr5:114515610-114515727
  hyper

SEQ ID NO: 111849 - DNA, 570 bp, Homo sapiens; identical to SEQ ID NO: 4159
  chr5:114515769-114516339
  hyper

SEQ ID NO: 111850 - DNA, 35 bp, Homo sapiens
  chr5:114598418-114598453
  hyper
cgagtgaagaatagcgctccggcaaaacctggagg

SEQ ID NO: 111851 - DNA, 290 bp, Homo sapiens
  chr5:114632025-114632315
  hyper
gccgcgcctcccgccggcgctgcagagggcacctgttcagccagggcctgcagcccctcgcctgccgccagagcagctctcggttctcccggatttacctgttgaggcgctggcgtcgctcccacgccggtcccggtggccgcgcccgcccctgccacagccccggctaccgcggtggccgcagccgctaccacaaccgtcgtcagtgcggccatgtttacccgccgagctactcgggccgcggcggccaccggtgcctggggattcgtggcaggcgcaccctggcctct

SEQ ID NO: 111852 - DNA, 31 bp, Homo sapiens; identical to SEQ ID NO: 4161
  chr5:114879309-114879340
  hyper

SEQ ID NO: 111853 - DNA, 30 bp, Homo sapiens; identical to SEQ ID NO: 41865
  chr5:114880781-114880811
  hyper

SEQ ID NO: 111854 - DNA, 211 bp, Homo sapiens
  chr5:114938163-114938374
  hyper
caggggttaatgtggcgggataactctctgcagagggaaggagctcgcaaagaagggtggaggaggggaaaccgcaatggggaactgtcaccgaggctagtggactctccctgcgcttttttttttttttttttttttggcatgtaccccaaaagccagaggtcgaggcccagaaaaatctggaaaggaattccaccgtgtttgctcctta

SEQ ID NO: 111855 - DNA, 30 bp, Homo sapiens
  chr5:114961378-114961408
  hyper
gatctcagaggcgccgccgggtccaggcac

SEQ ID NO: 111856 - DNA, 30 bp, Homo sapiens
  chr5:114961876-114961906
  hyper
ggcggggccagagtcgtgggcggagagggg

SEQ ID NO: 111857 - DNA, 187 bp, Homo sapiens
  chr5:115151170-115151357
  hyper
gaaaaaaacgacggtcgaatatttaatctgcgaaacttggcagtggatttgaataaacccacagtcggggaagttagttaaattggtttgggaaagggaacagcagaaattccgtagtggcagctgacggccacaagacgctattttacatgagtaaaaatgcttgctataaggtgcccggttgcag

SEQ ID NO: 111858 - DNA, 735 bp, Homo sapiens; identical to SEQ ID NO: 4163
  chr5:115151649-115152384
  hyper

SEQ ID NO: 111859 - DNA, 117 bp, Homo sapiens; identical to SEQ ID NO: 4164
  chr5:115152616-115152733
  hyper

SEQ ID NO: 111860 - DNA, 108 bp, Homo sapiens
  chr5:115177405-115177513
  hyper
cgcagacctctgaacgttagtaacgcaacatgtgtttctccgcgactacagacctcgggagaggagcggtgggcaacgtgtctgtgctcggtcgaatgcgcacactcc

SEQ ID NO: 111861 - DNA, 30 bp, Homo sapiens
  chr5:115178116-115178146
  hyper
cagcccagccgcgccgcggagccctgcgcc

SEQ ID NO: 111862 - DNA, 29 bp, Homo sapiens
  chr5:115297263-115297292
  hyper
atgtgaaagcctcagcgactagggtaccg

SEQ ID NO: 111863 - DNA, 609 bp, Homo sapiens
  chr5:115297376-115297985
  hyper
cggttctgaaagcaggtgtcccctctcccccggcttcaggaagggaaaccccggccccaggcagttgcagagctaagaaaaaccatcccgccaggccccttcttgtggtaacgcggtcctaaccctgctctgccccacaaccccatttcacccgggagacgcagacgccaggctccctagcactttgtcgcctcttcctccagcctggcttcctgagctctggaaaagttccgggcctccggacgttgtttccatcttcgccttcgctgcctgggccgcatgcctcctgggcttatttaggaagcgaagttagcgccacacatttggctccagaaatttgttctgacggcgcggccgacgccctgcagggtcatttctgaacgcattcccaaatatcctggtcctcaagcccttaccaccccctagcacacgaagccccagctggcggtggagcaggtgtgttgctggtagctcatcgctggcttggagatagaggtgcttggtacctgtcccctttccgacaacacctgaaaccgtatcggggcacacccctcatccaaatatccacgtttaaggtgtccggattcgtttggcttgaccaccccctcc

SEQ ID NO: 111864 - DNA, 377 bp, Homo sapiens; identical to SEQ ID NO: 41870
  chr5:115298204-115298581
  hyper

SEQ ID NO: 111865 - DNA, 292 bp, Homo sapiens
  chr5:115298781-115299073
  hyper
cgaggtgcggggacccctttccccgggcactgggaacgccacagtgggccgcgtgcccgtggacgacgtgtggttcgcgctggacacggaatacatggtgctggagctcagtgagcccctgaaacctggtagcagctacgagctgcagcttagcttctcgggcctggtgaaggaagacctcagggagggactcttcctcaacgtctacaccgaccagggcgagcgcaggtaagggctgtacagcccggggcccctctcggcccccgcccctgcgtcccggtgcaggctgcgg

SEQ ID NO: 111866 - DNA, 68 bp, Homo sapiens
  chr5:115420529-115420597
  hyper
acttaactccaacacgattggagtgtcgggagggcaactgggctgccctctccgccctccaggactgc

SEQ ID NO: 111867 - DNA, 147 bp, Homo sapiens; identical to SEQ ID NO: 41873
  chr5:115421020-115421167
  hyper

SEQ ID NO: 111868 - DNA, 30 bp, Homo sapiens; identical to SEQ ID NO: 4166
  chr5:115908468-115908498
  hyper

SEQ ID NO: 111869 - DNA, 30 bp, Homo sapiens; identical to SEQ ID NO: 41875
  chr5:115908916-115908946
  hyper

SEQ ID NO: 111870 - DNA, 684 bp, Homo sapiens
  chr5:115909338-115910022
  hyper
ctgacaacaaaagattctctccgcttccacaccgtctccgcggaaccccttctcccacctggcactggacgaaaacagcgctgttatacccaaccccctccagccctcgagggcagaaccccttcccctgccttcgacacaccgggccagggagcttccgagaatcccaccatttagggcccgctctgctccctgctgggcacgcgggaggatgagccttgggtctcgcacacacacccccaggaggaacagccatacgcgccgtcgcggcccggggcggcgccgggcgtgtgcgcaacgcgggtgggaaagctctcgacgtggagccggacgcactctggggcgcagggcagagaggaaaggcaggcagggctcacggctgctcccccaggaccgggcaaggctcgggaaacagagacacaagacaaaataaaacgcaggcaccacaaagccgacagcacgcgctagccacggccccgggaccctcaggctggagtccagctgcccgggaggtggggcgcgcccgggcgcccggggcgtaccttttcggtgcatcgacggacaggcggccggggctcggagcgaactggtacagcgtgtatcccatttagtaatccattatcgaggggatctctccgggccgcgggctgcgctctctccttcgcaagcctttgtcattcctac

SEQ ID NO: 111871 - DNA, 30 bp, Homo sapiens; identical to SEQ ID NO: 41877
  chr5:115910244-115910274
  hyper

SEQ ID NO: 111872 - DNA, 30 bp, Homo sapiens; identical to SEQ ID NO: 41878
  chr5:115910714-115910744
  hyper

SEQ ID NO: 111873 - DNA, 186 bp, Homo sapiens; identical to SEQ ID NO: 4167
  chr5:115911051-115911237
  hyper

SEQ ID NO: 111874 - DNA, 263 bp, Homo sapiens; identical to SEQ ID NO: 4168
  chr5:115911446-115911709
  hyper

SEQ ID NO: 111875 - DNA, 196 bp, Homo sapiens; identical to SEQ ID NO: 41881
  chr5:115911925-115912121
  hyper

SEQ ID NO: 111876 - DNA, 30 bp, Homo sapiens
  chr5:118324359-118324389
  hyper
ccgctgggaaggaacgagcccattggtccg

SEQ ID NO: 111877 - DNA, 30 bp, Homo sapiens
  chr5:118406547-118406577
  hyper
ggttcaagctcaaacgcacggcgttctcct

SEQ ID NO: 111878 - DNA, 352 bp, Homo sapiens; identical to SEQ ID NO: 41882
  chr5:118406921-118407273
  hyper

SEQ ID NO: 111879 - DNA, 286 bp, Homo sapiens; identical to SEQ ID NO: 41883
  chr5:118604722-118605008
  hyper

SEQ ID NO: 111880 - DNA, 91 bp, Homo sapiens
  chr5:118788276-118788367
  hyper
tcaccgctgaggttcgacgggcgggtggtactggtcaccggcgcgggggcaggtgagcatgcgaaggttggaggccgcgccccttgctgag

SEQ ID NO: 111881 - DNA, 30 bp, Homo sapiens
  chr5:118788765-118788795
  hyper
aaaagtcattcggtcgttcagtgtttgttt

SEQ ID NO: 111882 - DNA, 1748 bp, Homo sapiens; identical to SEQ ID NO: 4172
  chr5:119799800-119801548
  hyper

SEQ ID NO: 111883 - DNA, 30 bp, Homo sapiens; identical to SEQ ID NO: 41885
  chr5:121263545-121263575
  hyper

SEQ ID NO: 111884 - DNA, 16 bp, Homo sapiens
  chr5:121297504-121297520
  hyper
cgcgcaattccgttgc

SEQ ID NO: 111885 - DNA, 1747 bp, Homo sapiens
  chr5:121412479-121414226
  hyper
ccacttcctaacacttgtctgcgcgaagcagtagcagtcagaaccaggcaccagagcgccccctgaaggtagaccggggagcggggcctcagacatatcagcccgtacctggccagacagttttcctccgccgcgcatctcaggttgtacatggacatcttctgcacgtacgtggacgcctggatgtagtaggggtcggccaccaggtctgggagacctaaacgtcagcaggcgacgggcgcagcagtgaaacaacccggcgccccccgctccaactccctacccctctaggtcccttactcctcacccttcgcccaccgggactgcagagtggagcggaggacagcaagagaactggggacgcccgggactgcaaagcaatgtgaaaaggaagcaggaggggccagacgcgcggtttgcactggattccagggctgccactgcaggcgcgtgggggagggatcggatctgcgaggaccggggcccgccgcgcccaggcagccacgtcgagaagccacatagctggggaccaggtgcacgggtgcttccagcggacttgggggtacttaccgtactggaagtagccagtgccgtatccgggccggtacctgcccccaggtctgggcctttcataagtatcgtagtagttgtaataagggttgtcgtcagagtacttgtaggggttgtaagggtcgtcgcccaccatgccgtccacgcggctgggcggccgcaggttactgagcgcaggaacttctcccggcgctgtctggttctccgcgcgcgaggcgccagcttcgcgggctctagatgtcgagtagccagcttggaaccagtgacgggcggtgggcctggggcggccagcggtgactccagatgagccggccgtccgcgttcgcgccgcggcggtgcggttgtcgcggatcagcaggatcggagtgcggggctgctgggcggaggcgttggctgcaccagggacggcggcgcccgggtcccggcggcgctgaggctggtactgtgagcccaggctcagcaagctgaacacctgcccgttgttctcccattggatctgctggcgccaggcgcccggagccgccggcggctcgcgcgggggctgctgttggccggcggcgggaggggcgcagtgcactagcgcgcagagctgcaaaggcccgagcaggagcacggtccaggcgaagcgcatcactccttttgccagattgaccccgctcgaggaggacgtggctcacagaaaataaaaacggggctcaaatcacgtgagggaaggagaaatcttcaaccaaggaggcgagcggagcacgggtatctcagtctccaccaagcaatgccaagggtgggattcagacccttccccagtcaaggcggctgctcggacgtggcacccttccctttcccctttctcagtcctggaaggcaacggggagcggcgcggcagtcccggagagcgggcagtgtctggagtgaaggaaggaggagagattttaaactttctggcacgtttgcaaagttacacaagccgttctggcccggccgcccctcagctatttgttcacgtaatgcgattggaaacgtgcaaggcggacagctcctcgcctctgcccctccctctctcccgtccctgccctcctccccccagacacgttgcacagggagcgttaaggggaaagaacaaaacggaacacacatcctgagacacactggcttaatctggggcgaacatgcaggaatt

SEQ ID NO: 111886 - DNA, 1076 bp, Homo sapiens
  chr5:121647493-121648569
  hyper
ttcgtggacaggagccggcgggcaggccgggggatccctggtgaggaagcggcgagggaggggcgtgggccgagccgggggcgccgcggggagggtcgctgtcagtcaggccgagcggggctcgctggcctgggggcggccgcaggggcgcagcgcagcctgagggcgcggcggccccggcagcctccgcagtggcagtggtggccgcgcccccgtccccggccgggcgcccgcgctgcgttccttgtcccccagcgccggcttcgggccgcggccgcccaggctgcccccgcccgcgcgcgcccgttggggggcccggggagcggcgcccgcggccgggccgcattgtgacgtagcggggccgcggcagcgcctccaccgcccgcctacttcggctgaggctgttctgctcctgccgctgcggtccgtcggtcggtcagtcagtcccttcgcgctcctgagccgccggcgcgccgggcgccccgggtgagtccaggtcccaagcggacgccgcggggaggcgggaggcgggcagccagcggctcagcctttccaagtttgcaccaggcgaccccggcgggtgtcgccccgtgctccccaagccccgggacccctttgtgccgcgagtctcggctgctccgggcagcagaggcgcctctgcagaaagggtttgagggggaggtctctatagtaacagtaacagtggtggcggcagcggctgctttactggggaaagggggaaacaacccccgcctcggtttccaaaggattgttcttttcatttgcccgcctcatgtggttcttattcttgctgtcacccgggatcttatcgcaggcagggatgggcagttccgcggctcggaaaagctgagataaggaggggcgaagtaatagtaatagcgacagtactaacaacggtaataatagctgtagaaaagggacgtctggtgttgctgccgcccctcgctcatcagcaccagctccccgactgccctgtccagcccgggctccgccagcctccctctagtgctgttctgcgtcccaggctggtccgcgtggatttcagaggggaatgt

SEQ ID NO: 111887 - DNA, 233 bp, Homo sapiens
  chr5:121648818-121649051
  hyper
ctcattttcaatggacggctaggaggggggaaacgtgttgttttttcctgtgggaacgttgctttccttgggaaagttaattaaggaagcattactgtcggtgccccttttcacttgctggaggcaggatcggattcctcttggctgttactgacaagtgcccatcaaagagcccggaggacgggagaactgctgcaggacagtctcgccacacaccacgtgccgtggagcct

SEQ ID NO: 111888 - DNA, 888 bp, Homo sapiens
  chr5:122110538-122111426
  hyper
tcgggtcagcaagtcggtggcgaaaagagggccacgtcccagactttctgggaggaggcgggacaaaggggcggggcgagcgcagcgccctccgggtgggcgccgtcaagaggccgggggcggggccgagcgcggctgggcggggccttgagaggccggccgggggcggggaggctggcgggtcggcgcgggcccagccgtgcgtgctcacgtgacgggtccgcgaggcccagctcgcgcagtcgttcgggtgagcgaagatggcggccgagagggaacctcctccgctgggggacgggaagcccaccgactttgaggatctggaggacggagaggacctgttcaccagcactgtctccaccctagaggtgagaccgcgtcgctgcgggtgctgcgctgcgtagctgccgcgcgtctcacctttcccctgccccgacttgtccctccccatcccccgtgtttgcaaggaccgtcttggggtgacacctgtgacgcgagccccacctccggtgcctgtcagagggatgtgcttgggctgagcgcagggcctcctcaggagagcagcctgcggcccgcgggtgccgacctaatcctcagaggggccagaaccgaaccgagcattgcagcggcgctttcccagctcagctggccttcctcggtgtctcttgcacgtcctcctcttcaagccggagaagggcttgctctgcatcccagtaaacctccaccgagctcttttgaaggggtgctcgcttttcctttccagagggagggtgtgccgctgccaggggagcgcaatgaagtgagcgctgaggggccgagggtctgtggggaacgaatgggtgcactttcccaggaatggcccttcacggactgctggttcctcttgag

SEQ ID NO: 111889 - DNA, 60 bp, Homo sapiens
  chr5:122180919-122180979
  hyper
tctcttaatggtggcgtctagcaaactgcaaatcaagctccagccggagtccgcagggca

SEQ ID NO: 111890 - DNA, 30 bp, Homo sapiens; identical to SEQ ID NO: 41891
  chr5:122181428-122181458
  hyper

SEQ ID NO: 111891 - DNA, 30 bp, Homo sapiens
  chr5:122181665-122181695
  hyper
ccgccgcccgccttcgggagcccaggatgg

SEQ ID NO: 111892 - DNA, 351 bp, Homo sapiens
  chr5:122371099-122371450
  hyper
aagatcagagcttctcgaaaccatcaggctgtttatcagccccgcccacaacgtggcacggcctttctgcgacatcagatgctgagctggacctcctcctccccaccccctagtcctccccgtcctcaggtggcgtctgcggtcgaggatgtaagcattctactcgttgattagtatcgtttccattgacaaaccccagactgatgaagaccactttcagctgcagcccgccccctccagcttcagcttcgaagacactattgccagtgggttttctagaagtggtgatcatgggcaccaaattatcccctccctctccctgcattctcccattatcgtctacccttggtt

SEQ ID NO: 111893 - DNA, 135 bp, Homo sapiens; identical to SEQ ID NO: 4175
  chr5:122371730-122371865
  hyper

SEQ ID NO: 111894 - DNA, 879 bp, Homo sapiens
  chr5:122372078-122372957
  hyper
ctccagtccccctgcgcccgggaagcctccacctcgcccgccctgacaccgaggtcccagtatccaaagcgcccccagggccccgcccgcaacaggggaagttgcagcccgccgctctcggtcaccttggccgtcaccgaggggcctcgcttgcggaagccctcggcccccgaagaaaacacaagtgcgccgagccccacgcaaagcacgagaggtagcagcagccgaggacccgggcccatggtgagcggtggcagcggcgctaccggcacgggcgctaccggcacgggcgcgacacaggctctgggacagctgacgggactgccggccggctgcgcctgcgcgctcccggttgcgggggatggggatcgggcagtccgggaagggcggggacccggggcgcgttcctcccaagttcagactcgcgacccgaacttgggattcggaggagcgcgcccacagggcgcagccagggctcgaccgccgcgccttaggcgggtgcggagggcgccagggacgggagggagcccgggttgcccaggcgcggagccgggcgcagcgggctaggctgggagcacctccaggaatttaccgcgtaggcgcggattaaacttggacgggaagaccaggactctcgggcttccgcgtccgcccggcagctagcgctccgcgggactgggaactctgcagccggtcccggtgtgattgctgccgccttgggagcagcctccgccgcggccgccgagttccaatggcccattggaaccttttgctaggttttggacgcttagcagaactttgacatcgctggaggcgtggagccctgttgcactcgaataatggcctctctttgagatgattcacgtctagggaacactg

SEQ ID NO: 111895 - DNA, 96 bp, Homo sapiens
  chr5:122422064-122422160
  hyper
tggtcttctcagtattgaagggggtgggggaagcggatttgagggggtgcatgtccttgccgtcggtgggctcactttctaaaaactattgagatg

SEQ ID NO: 111896 - DNA, 130 bp, Homo sapiens
  chr5:122422184-122422314
  hyper
ggcccagggtcaactgtgtgagggggaagcgcccctcagagcgcgcgcagcgtcgggggtccagcttacgccgctgcgcgcccttgtgcgcaccgggtgaggatgccgagctctgcgggcatcccggaag

SEQ ID NO: 111897 - DNA, 30 bp, Homo sapiens; identical to SEQ ID NO: 41896
  chr5:122422935-122422965
  hyper

SEQ ID NO: 111898 - DNA, 129 bp, Homo sapiens; identical to SEQ ID NO: 41897
  chr5:122423302-122423431
  hyper

SEQ ID NO: 111899 - DNA, 910 bp, Homo sapiens
  chr5:122423764-122424674
  hyper
gtatggccagaaccccggcgatgggaaagtacctcctgagtcggtcaatttcacacaccctgcctgtgccctctaccatctactaccgaaaatgccaggaagagctggggggcaagtgcctccttcgtgggtgcgagactgcatcgaagggctgccctggcacaaagtctggggagaggacatggtggaggtggggctgcactcccaccctgcccctctaacaccaggttttgggtagagaaacctatgcgtgacctcctgcggcagccgcaggcagctgaccgcaaacagcctcgcccgtgtcccggagcagttgtgccaccagacgtaacactggatacttgtctccgggccccaagaaggagagggaaagagccctccagaagacaacccgagaaggggtcagcagagcgctgggtggagtgcagactccattgcagccgcctcccagccccacggccaagcttgagtccctccaggaccagctgctctcggtctcaggaccctcggtcctacgcctccctgcaccgacaagcctccctcctgggctgcagacagagggtttcactgcagcgcgcaacccgtcccgctccgcccccaacttttctccccggaggatttatgttagaggttgcgtggcgggcgagtggactctggcacccagaagcacttcaggaaaaactgagccgggcaaaagcgcaaacccggtcctggcggcgcgggcttgctccagcgcggacaccacagcgtgtgcggagatgcattcccgttgccgcatttccactgctttcaagatcagggcactgagctgggacccagaaaagacatatcatgggcagaaagagacaacaggctagcggcagacgtcacgccaaaaaaacaggggatgggagggcggaggagtttgtgc

SEQ ID NO: 111900 - DNA, 756 bp, Homo sapiens; identical to SEQ ID NO: 41899
  chr5:122424884-122425640
  hyper

SEQ ID NO: 111901 - DNA, 254 bp, Homo sapiens; identical to SEQ ID NO: 4180
  chr5:122425701-122425955
  hyper

SEQ ID NO: 111902 - DNA, 702 bp, Homo sapiens
  chr5:122426004-122426706
  hyper
cggccgctgccgccgcgctggctggtctctcggccctgccggtgtcgcagctgccggtgttcgcgcctctagccgccgctgccgtcgccgccgagccgctgccccccaaggaactgtgcctcggcgccacctccggccccgggcccgtcaagtgcggtggtggtggcggcggcggcggggagggtcgcggcgccccgcgcttccgctgcagcgcagaggagctggactattacctgtatggccagcagcgcatggagatcatcccgctcaaccagcacaccagcgaccccaacaaccgtacgtagccgcagcccgcgcgctctctcccggggcgccggcgccggcgccggcgggcgcgggtgcctgtcagggaggcgggtcggataggagtgacacggggccgggtgggtggggagcacctggtcctggccgctggcccgcgcctccccgatctctgtgacaaaagttttctggcgttggagaaggaaagagaacggatgggacggccggtggcactttggggttccctctccctccctctcctcacctgcttcacagtcccaagtgtttggggccggagtctaccgtggacccggcctaacagacctctgccctcccgccggacagtgcccggggccaggcgggtactggcagcgtgtgacagggggtgtctgggtcaggccctgcctggccttagccggg

SEQ ID NO: 111903 - DNA, 15 bp, Homo sapiens
  chr5:122426796-122426811
  hyper
cgggccgcggggttg

SEQ ID NO: 111904 - DNA, 56 bp, Homo sapiens
  chr5:122430019-122430075
  hyper
gccccttctgccctgcgcctcctctgtcaaagaccagcgagcgccttagattgcag

SEQ ID NO: 111905 - DNA, 778 bp, Homo sapiens
  chr5:122430552-122431330
  hyper
tattaatacagtcatcggaagacaaataagacccacattttctccctcccaccttcttgctctcttctttttgtctctccctcttggtcccagggtcaagcccgcagccaggcagggcagagaacgcccagagcttttgcgattcgcggggagctttaaactcgcgtagagggagagttcctgagagaattcccaggagctgggccgccccgcagggtcgagactgaaatcaattggctccccttccggcggccaggcaaacctgcctcgcctctggatctgcttctagacccgctcccggggcttggaagacccctgccgggtagaggaggagggccgggtgggtggcggggtgcagtggggacgtcggatcgtgggtggtgtcggcggccacgcctcatgtcagaagagagcctttcgtgggcaggagcggggtgggaccttcaaaactcagccttcggcgctgaggcctgggcgccccaccccgcccatcgctccctttcagccatcccatctagcctatagctcgagaaggcagtggggggaccgcaggctggagccccgggggcgtgaaccccacgcgagaagttcgggcccggatgctctgcctgcccgccctctgcccggctccccagcccccacgcccctccccgcctagggcgcacgcggcactgccagcaggcggcactcccgggtcctagtcgccgggctgggatcgatgggcgccggcccctcgggtctcggcctgcgagactgagggccgcgaccttggcggcgg

SEQ ID NO: 111906 - DNA, 265 bp, Homo sapiens; identical to SEQ ID NO: 41902
  chr5:122434262-122434527
  hyper

SEQ ID NO: 111907 - DNA, 557 bp, Homo sapiens; identical to SEQ ID NO: 4182
  chr5:122434605-122435162
  hyper

SEQ ID NO: 111908 - DNA, 101 bp, Homo sapiens; identical to SEQ ID NO: 4183
  chr5:122435201-122435302
  hyper

SEQ ID NO: 111909 - DNA, 121 bp, Homo sapiens
  chr5:122435413-122435534
  hyper
cgccggcttgtgggcaccagcagcgctgcggccgccgcgcccccgccggagctgccggagtggctgcgggacctgcctcgcgaggtgtgcctctgcaccagtactgtgcccggcctggcct

SEQ ID NO: 111910 - DNA, 26 bp, Homo sapiens
  chr5:122435628-122435654
  hyper
cgtgaggaacacgcagcatctctggg

SEQ ID NO: 111911 - DNA, 30 bp, Homo sapiens
  chr5:122620916-122620946
  hyper
ggcaggctctgccggcggagacgcacgctc

SEQ ID NO: 111912 - DNA, 12 bp, Homo sapiens
  chr5:122621170-122621182
  hyper
gagcagaaaggt

SEQ ID NO: 111913 - DNA, 60 bp, Homo sapiens
  chr5:122621308-122621368
  hyper
cgcaggaacccactgcccggggccccagcgctgtcagcccctcctgccctccacccaccc

SEQ ID NO: 111914 - DNA, 78 bp, Homo sapiens
  chr5:122621427-122621505
  hyper
ctcccgcccctccccccactccctctaccccgactccctctccctcttcccccacgccagggacgcaccgcccttggt

SEQ ID NO: 111915 - DNA, 53 bp, Homo sapiens
  chr5:122759249-122759302
  hyper
tgtgggaccagctgcgcaagcgcactactgctgtaaacgcttcctgaagctgc

SEQ ID NO: 111916 - DNA, 114 bp, Homo sapiens
  chr5:122759571-122759685
  hyper
tgacgtaaactccccgagaatttcctgtcccttagaaattacccctaaaacaaaaacactgtcacgtgggcaatgaaatataaaggttcttccacccccgatgacaaagttatt

SEQ ID NO: 111917 - DNA, 42 bp, Homo sapiens
  chr5:122847729-122847771
  hyper
cgccgtctcctttccggtcggcgatccgaccaatccaagaag

SEQ ID NO: 111918 - DNA, 299 bp, Homo sapiens
  chr5:123987436-123987735
  hyper
cccgctgcgagcactcgcgtctgattggctgggccgaggcggccgcccggagcacagaggcagcggtcgggtagaggtgagcgtggcggaggcaaagggacgcatcccccacggcgcgctggccgtgcggggctagagggccgcctgcgctgctcggctccctcggtgcacgcgggacacaggctcattcgcactaacgagtccggccgtgcagtgaaagcttcggtctgcgtgaccgtgctgcgctccccgcgccacgcggctccacacaacacgccggcccacgcagaaccctcaga

SEQ ID NO: 111919 - DNA, 1224 bp, Homo sapiens; identical to SEQ ID NO: 41907
  chr5:124082316-124083540
  hyper

SEQ ID NO: 111920 - DNA, 61 bp, Homo sapiens; identical to SEQ ID NO: 4185
  chr5:124083786-124083847
  hyper

SEQ ID NO: 111921 - DNA, 239 bp, Homo sapiens
  chr5:124084137-124084376
  hyper
ctcatttctatgcataaaactcgcacattcccctgcatgaagtccccgctaagtgctatatagagacacaccacgcaaccgtacttacggtctgtattggatcgagttgaccttttccttctaactgcattgaatgtgtttggttgcagccgctttattttggaaattataatctcttcaacaaatttattattaaagaagatggaccatcaaatgtcacagaccgtcctgtgtatttt

SEQ ID NO: 111922 - DNA, 417 bp, Homo sapiens; identical to SEQ ID NO: 4187
  chr5:124084645-124085062
  hyper

SEQ ID NO: 111923 - DNA, 766 bp, Homo sapiens
  chr5:125930477-125931243
  hyper
acagctccaaaatgacgtcgattctgcatagcacacaaggacctaaaatctaagtttttgttttaaaggcaccctacacgagaaaacttttactgtggagcttcaaaatctcccatgctactaccgcatccagcgccagcggggagtcggtaggtcagtgcccgcccggcctcctcgagcgagccccggcggctgcagagatttcttgagcgcccgcgtacctctccccggcctccccagcttccattatacacgccctcgttttcctcgcggagccccagctctttcagccacgcatactggggctgattgatgaggagagtggacatgaaggcggcaggcctgctccaaggtccagagagcttgctggtctttgcagcgtgcacacacagcgcgcgaggaaggcgccacatactgagcccgggactcgggatgagcccaaggccctgagagctgctgaaatagagccccgccccccgcccgggagaacccattgggcagacccgacccctcccactgggcacgaccccgccaccgccccgtctgcccctggtcttccggaggagcctgcggctgaatcctgcctggaacaatgggagtgctacagggaggagtgggctgctgccatctggtgaaagactccgggagccacagttccagctgggaattcttttcagcaaaatattggcgctgaagtacagtaggctatagcaggggttctgaaactgtaaaatgcgtgtaatgacctggtcgtcgtggtaaatgc

SEQ ID NO: 111924 - DNA, 30 bp, Homo sapiens
  chr5:125936538-125936568
  hyper
gacaggctggcctccgcgcgggggcgcccg

SEQ ID NO: 111925 - DNA, 30 bp, Homo sapiens
  chr5:126328272-126328302
  hyper
actacgtagaaattacgtagtacgtagagg

SEQ ID NO: 111926 - DNA, 20 bp, Homo sapiens
  chr5:126338839-126338859
  hyper
gaggtggaagcttggtaagt

SEQ ID NO: 111927 - DNA, 19 bp, Homo sapiens
  chr5:126339398-126339417
  hyper
gccagaggagtatacaacc

SEQ ID NO: 111928 - DNA, 30 bp, Homo sapiens
  chr5:126365330-126365360
  hyper
ctggcaatccctttcgcagcctctaggatt

SEQ ID NO: 111929 - DNA, 30 bp, Homo sapiens; identical to SEQ ID NO: 41914
  chr5:126365588-126365618
  hyper

SEQ ID NO: 111930 - DNA, 589 bp, Homo sapiens
  chr5:126626226-126626815
  hyper
catttgctaacttcgcgaccaggcctttggcggggtcacccaccaggcggtggaagccgctcaggcaggggcgactcacgatcgaggtgcagcagtcaggccgggaagatcctgcatgttgcgctagggactgcgcgcggcgccaagcgacaaccccccagcggccactgccccggcagcagcagctgcagcagcggcaactgctcgaatcccggccccggctcgggttacccgcccccaccccctccagcatctcgggccagacagagaaaaccttgttcaagtttgcagcaagtactttcccggtgcgcaaaactgggcgactgggaacgcgttgagacgttcctctttcccgcttctccacctttacgcctgaaagaagactcccaaagattgctttcttctgggacgctgcttggacgctaaccgcgttgattggaacagattttgtgtcttggctggctttgggtgaagaccggggagaaaaggttgcgctgcgattctcaagatctctggacctgggtaagagttgggcaaactcaactccggcggctcctggaccttggccggacgccggaaggcttctcat

SEQ ID NO: 111931 - DNA, 30 bp, Homo sapiens
  chr5:126853159-126853189
  hyper
aacttgcagcgtcccggccgggttcacagc

SEQ ID NO: 111932 - DNA, 30 bp, Homo sapiens; identical to SEQ ID NO: 41917
  chr5:127418907-127418937
  hyper

SEQ ID NO: 111933 - DNA, 234 bp, Homo sapiens
  chr5:127420000-127420234
  hyper
gacggggaagccagcggcgagagcgagccggctaaaggcagcgaggaagccaagggccgcttccgcgtgaacttcgtggacccagctgcctcctcgtcggctgaagacagcctgtcagatgctgccggggtcggagtcgacgggcccaacgtgagcttccagaacggcggggacacggtgctgagcgagggcagcagcctgcactccggcggcggcggcggcagtgggcaccac

SEQ ID NO: 111934 - DNA, 335 bp, Homo sapiens; identical to SEQ ID NO: 41919
  chr5:127536981-127537316
  hyper

SEQ ID NO: 111935 - DNA, 360 bp, Homo sapiens
  chr5:127872819-127873179
  hyper
cgcccaacccccggagagagggctttccgcccgctgagctgcggggttgggaaggaaaagggggacgcgctcctgggggtctttggatattctggcaaagggggctgcagctctaggctccagctaaagggtctgggacggagtgggccagaaagccgccaaactgaggattcccccctcccccaagccggagccctaggtgcggagccgcttgcccacttaccctcggagcacgtcctgctgtcctcgccggcggacgcggctggccactgcggcaccctcctcgcgatactcgggcgctagaaacccgccttcagagcctgctgtagcggaccgaacctgttgcggcggcggctgggg

SEQ ID NO: 111936 - DNA, 253 bp, Homo sapiens; identical to SEQ ID NO: 41921
  chr5:127873552-127873805
  hyper

SEQ ID NO: 111937 - DNA, 497 bp, Homo sapiens; identical to SEQ ID NO: 41922
  chr5:127873980-127874477
  hyper

SEQ ID NO: 111938 - DNA, 384 bp, Homo sapiens; identical to SEQ ID NO: 41923
  chr5:127874705-127875089
  hyper

SEQ ID NO: 111939 - DNA, 45 bp, Homo sapiens; identical to SEQ ID NO: 41924
  chr5:128300649-128300694
  hyper

SEQ ID NO: 111940 - DNA, 161 bp, Homo sapiens; identical to SEQ ID NO: 41925
  chr5:128300712-128300873
  hyper

SEQ ID NO: 111941 - DNA, 423 bp, Homo sapiens; identical to SEQ ID NO: 41926
  chr5:128300900-128301323
  hyper

SEQ ID NO: 111942 - DNA, 30 bp, Homo sapiens
  chr5:128430244-128430274
  hyper
ccctggctcacgcgcgcaccccggccccac

SEQ ID NO: 111943 - DNA, 1894 bp, Homo sapiens; identical to SEQ ID NO: 41927
  chr5:128795583-128797477
  hyper

SEQ ID NO: 111944 - DNA, 30 bp, Homo sapiens; identical to SEQ ID NO: 4200
  chr5:129196622-129196652
  hyper

SEQ ID NO: 111945 - DNA, 1377 bp, Homo sapiens
  chr5:129239557-129240934
  hyper
tagagagagaaggcgcggagtggcagcggtaagaacaacgtggaaaggacggaaaacgcgaagagtggcgccctggcggacctggggcggggcagagtggtaagggtcacgccaggacgtacccggctgtgggccgggggaggagagcacggtgggacagcaacgaacttgctgggggctcccggacccgagctccgccgatgaggtcagcggagcctaggcgccgggaggaggccagtagagcccccagacacgagtgtcgggaggccagcggaggggcgggacgggacgggaaatgggacgaagagcaagagctgggggaggagggaagagggggcgtcggcgctgcaagccggaggcggcccgacagggatcgtttccttccggagaggaggccggctctggactgaggcgcggacggggggcgtccaagggcgggtgacggggaaataccgcggcccgcgcttctctccggctggcagcggtgccgcctgcggctcctcctccgggccagctcggagcccggcggcggggggagcgggaggcgggagtgagggcgggggctcgggaaggagggaggagggagggcccaggcgcgccactgacagggtggcagcctaggagcggacgcgttgccgccgccgctgctcctcctcctcctcctgcagctcctccagctgccgctgctgccgccgctgccgccaccgccgccgccgggagaagtttcactcccgacccttgctcggagccccggcccagagctgagcgggagcccggcaggcagctgcagcccgcggcagtcgaggcgtccgcggcgcttcgacctccagccggtgtcggcgcctaggcggccggctgcggccgcggctgggggcgcaaaggcggaggaggggcgggtgtgagccggggaaaccgcgtgccgcgccgcgacagcccagcgagcgtccgcgcccgggacagccgcgatggctgtgcgctctcgccgcccgtggatgagcgtggcattagggctggtgctgggcttcaccgccgcgtcctggctcatcgcccccagggtggcggagctgagcgagaggaagagacgtggctccagcctctgctcctactacggtcgctctgctgctggcccccgcgccggcgctcagcagccgctcccccagccccagtcccgaccacggcaggagcagtcgccgccccccgcgcgccaggatctccaggggccaccgctgcccgaggcagcacccgggatcaccagttttcgaagcagcccctggcagcagccacctccgctgcagcagcggcggcgaggacgcgagcctgagggcgcgacggggcttcccggtgctccagcggccgagggggagcccgaggaggagg

SEQ ID NO: 111946 - DNA, 660 bp, Homo sapiens
  chr5:129240962-129241622
  hyper
cggccggccggggagtagccacaacggcagcggggacgggggcgctgccgccccgagcgcccgaccccgggacttcctgtacgtgggggtgatgaccgcgcagaagtacctgggcagccgcgcgctggccgcgcagcggacctgggcgcgtttcatcccgggccgcgtggagttcttttccagccagcagccccccaacgccggccagcccccgccacccctgcctgtcatcgcgctaccgggtgtggacgactcctatcctccccagaaaaagtccttcatgatgatcaagtacatgcacgaccactacctggacaagtatgagtggttcatgcgcgccgacgacgatgtctacatcaaaggtgacctccctgcgccggctttccagcctgccagtctccccgactcctttctctgtaaccggtcctagcccctgcccagcccctccgctgcttctctgccagcacgtgcttcgggctcccacaggccctggcccgccctccccaccccttgcatccgcccacaattcgtagcccgttcctcgtcttctgcaatctggaccctcctcacacctgcctggctttattcgccttcctcacttgctgttttcggtgccgcctcgcgcttgtcccttagtctttacctcgtcggagaggttag

SEQ ID NO: 111947 - DNA, 38 bp, Homo sapiens
  chr5:129241841-129241879
  hyper
ttgaggaatcgtcttcgctgtcccggaccctttcctat

SEQ ID NO: 111948 - DNA, 30 bp, Homo sapiens
  chr5:130500251-130500281
  hyper
gcccagacggcccgcgcacctcccagcgcc

SEQ ID NO: 111949 - DNA, 30 bp, Homo sapiens
  chr5:130500747-130500777
  hyper
cccacctcagcaggcgagagaggtggtgcc

SEQ ID NO: 111950 - DNA, 30 bp, Homo sapiens; identical to SEQ ID NO: 41931
  chr5:130501064-130501094
  hyper

SEQ ID NO: 111951 - DNA, 30 bp, Homo sapiens
  chr5:130599416-130599446
  hyper
aaggggctcccccacgctcccgcccaggtt

SEQ ID NO: 111952 - DNA, 30 bp, Homo sapiens
  chr5:130600390-130600420
  hyper
tggctacctcgtcgcgggagctgagctact

SEQ ID NO: 111953 - DNA, 56 bp, Homo sapiens; identical to SEQ ID NO: 4203
  chr5:130970374-130970430
  hyper

SEQ ID NO: 111954 - DNA, 116 bp, Homo sapiens; identical to SEQ ID NO: 41933
  chr5:130970642-130970758
  hyper

SEQ ID NO: 111955 - DNA, 80 bp, Homo sapiens
  chr5:130971006-130971086
  hyper
cgttaaaattggggcggtgcgagtaagtcgtttcctgctgtcgtcgtgagatttaaagacacctcgcgagacctcaccta

SEQ ID NO: 111956 - DNA, 30 bp, Homo sapiens; identical to SEQ ID NO: 41934
  chr5:130971545-130971575
  hyper

SEQ ID NO: 111957 - DNA, 66 bp, Homo sapiens
  chr5:131131877-131131943
  hyper
atttggtcttccttcggcagtaaccctaaactcaagtttcacatttctccttcgataacattaagg

SEQ ID NO: 111958 - DNA, 30 bp, Homo sapiens
  chr5:131132855-131132885
  hyper
cataggctcactggcgggtcccgtcacgtg

SEQ ID NO: 111959 - DNA, 198 bp, Homo sapiens; identical to SEQ ID NO: 41936
  chr5:131133197-131133395
  hyper

SEQ ID NO: 111960 - DNA, 773 bp, Homo sapiens
  chr5:131346922-131347695
  hyper
gacgcaagaactcggcgggggtttgtggtggggtcgcagagagcaagccctatatctccctccgcagacccaggtgctccccaaacccggcccggagcccgcgagaactgggggcggagggtgtacttaggcggccctggggaccttgacgggacagctcagcagcaggggatgggggctcggcggccgcggagatgtaacacctccacctcgggcgaagacctcatagcctgcgggagatgggagtccgggacgcggacaggacgggcacttacctacgaatagccagagggagccccccgacacgaggaagaaggtcagcatggcggtcagcggggcccggcccggcccggcccggcctccccgacccgcagccccgcagccccgcagcccagcagccccagcagtagccgcgccgccgccgccgctgccgggtatttttagcccccgccctccggccccgcagctcccgcctccccgcgccgctgcggagacggctcaagggggagggcgcggcgcgcactcgcaaccgagccttactccctgccctgcagcctggccggccgggtctggggcttgccccgcactgaccgcggtgtcggaaccgccaagctcccgggcgggggaggggcccggccgcagagcgaaccagccctctccggccccgctctccaacgtcagtacctggcattctgcggaaaccggctggaagggggagcacgggcgacgagcgccagagcgtgacattgagcccaccccgccgccacccaccc

SEQ ID NO: 111961 - DNA, 490 bp, Homo sapiens; identical to SEQ ID NO: 41938
  chr5:131563040-131563530
  hyper

SEQ ID NO: 111962 - DNA, 278 bp, Homo sapiens; identical to SEQ ID NO: 41939
  chr5:131563558-131563836
  hyper

SEQ ID NO: 111963 - DNA, 285 bp, Homo sapiens
  chr5:131593126-131593411
  hyper
gagcaggatccaggccgtcggggccgtccgaacgcggggatctctgagagctgagtgggggtgccgggttgccggcagccggggctgagggcgggtcctcagagccccccgaagtgggagggtcgggctggccgcggggccaatccaggcgcacagggagcgggggcgggggctgggccgagtggggacaggggcgggcgggccgggggcgggcgcggcgtccaggcggcggcggcggctgcggcggcggcggctcctcctcagagtccggctcaggctccggct

SEQ ID NO: 111964 - DNA, 30 bp, Homo sapiens
  chr5:131629495-131629525
  hyper
ggctgtcctgaggacgctgtccgggcgccg

SEQ ID NO: 111965 - DNA, 30 bp, Homo sapiens; identical to SEQ ID NO: 41941
  chr5:131630739-131630769
  hyper

SEQ ID NO: 111966 - DNA, 287 bp, Homo sapiens
  chr5:131705173-131705460
  hyper
gccgctctcccactcgctccccgcccggcgctagaggagcgagttcggactcggaccccaaggcctcgagtcccgctgccttcctaagccgagcccgggctacctcggtcgtccccagcaggcttggctggcagaggccgggcctcgccaggtccccaggacaggccccgcccgggcctcaggtgcactcccggcccgccccgcgccctcgcgtcccgccccagctccgccttcgccggcgccgctctgcctgccagcggggcgcgccttgcggcccaggcccgcaa

SEQ ID NO: 111967 - DNA, 30 bp, Homo sapiens; identical to SEQ ID NO: 41943
  chr5:131705727-131705757
  hyper

SEQ ID NO: 111968 - DNA, 30 bp, Homo sapiens
  chr5:131721142-131721172
  hyper
tgctggtggcgctgacgatgccgggggtgc

SEQ ID NO: 111969 - DNA, 30 bp, Homo sapiens; identical to SEQ ID NO: 4209
  chr5:131746047-131746077
  hyper

SEQ ID NO: 111970 - DNA, 251 bp, Homo sapiens; identical to SEQ ID NO: 41945
  chr5:131825629-131825880
  hyper

SEQ ID NO: 111971 - DNA, 30 bp, Homo sapiens
  chr5:131826850-131826880
  hyper
gggggtatatctcccgaacgcaggtgaggg

SEQ ID NO: 111972 - DNA, 239 bp, Homo sapiens; identical to SEQ ID NO: 4211
  chr5:131831521-131831760
  hyper

SEQ ID NO: 111973 - DNA, 30 bp, Homo sapiens; identical to SEQ ID NO: 41947
  chr5:131892708-131892738
  hyper

SEQ ID NO: 111974 - DNA, 375 bp, Homo sapiens
  chr5:131892941-131893316
  hyper
tgcacgccttgcttcggcctcagttaagcctttgtgggctccaggtccctggtgagattagaaacgtttgcaaacatgtcccggatcgaaaagatgagcattctgggcgtgcggagttttggaatagaggacaaagataagcaaattatcactttcttcagcccccttacaattttggttggacccaatggggcgggaaagacggtaagtcttcagtagccgccttcagtttacaggtcgctacatctttcggagaataaaatgggaagttgagaactctccttaggagcagaagcgtccctagggctccacaggtgtaggcccttaaagtgccttagggtgtggcctgcaggctacagcgaccttaggagtttg

SEQ ID NO: 111975 - DNA, 418 bp, Homo sapiens
  chr5:131991822-131992240
  hyper
gggctgccgctcggccgggcccgcggggtccctcggcctgacatggccggtgctggagcggcacgtgcgcgcctcggcccctcggccgctcccgcccctcgccggtgcgcaccggcgctcggggagccgctggcccgggtgtccagccggcccttgccctgcctggcgctcggaccgccacctttgccgccccctcgccagcctccgcagcttccagactggccggtctgcgcgcccacccctgcctcccggaccggccaccgccggaggccgcggaggagggcccggccgcgcagatcccgcttatcgggcccatctcccgttacataaggccacccccctatctccgcgggccatcgccgccgcaaccgccgcgccagcgccttctcccacgcgcgggggcgcccctgcccaccgc

SEQ ID NO: 111976 - DNA, 183 bp, Homo sapiens; identical to SEQ ID NO: 4212
  chr5:132072697-132072880
  hyper

SEQ ID NO: 111977 - DNA, 169 bp, Homo sapiens
  chr5:132073293-132073462
  hyper
gtctcaggctctctcggcccttgaattacgcctgcgcggaggctttccgagtccatctcctaggacgccagactgaggccgcgcgtgcgcaatgctgccattctgctgcgctagaaatgtggcacgcactgaggcggaggtaacctggcagcccggggttgggaggagg

SEQ ID NO: 111978 - DNA, 591 bp, Homo sapiens
  chr5:132082785-132083376
  hyper
cccagggtctgtgtccgggagtcctggcccaaggcgggcgcagtctccagccgccccacccctggctgggggctctgctcagggagcacggccggcaggggggaggaggcgtgcgctaggcagcagcggggatggagggaagggagggggtccgccacccgcctgtgcgcgcccagtcctgccgcatcctgggtgcgcgccgcccacccgcggggcgagtgcccaggaggcgaggcgcggcccggtgcgccagaggtagctccaccgcgagcgttgtgggtggggcccgccgagcccgcctccccacctcccccggcggcgccccaggctgcagtgttccgggagctgggttataaaatgccgggttaagcggcaactcagactcaggatcccgctcacgacatggcctcgggcgctcagctcccgccgcagccgtcgagctcagaggtcagcgccgtccagagcccaggcgggcgtcccggcgccggtctggaggaaacagccctgggcgttcctctcccgccgtctccgggggaggcccctctgccccgaagcaaccggagcaggtgccctgggacccgccagcccgga

SEQ ID NO: 111979 - DNA, 30 bp, Homo sapiens; identical to SEQ ID NO: 41953
  chr5:132112434-132112464
  hyper

SEQ ID NO: 111980 - DNA, 82 bp, Homo sapiens
  chr5:132148850-132148932
  hyper
ttggcggaccgcggcgtccctagggaacacacccacctagcaaccgagaccagagctggagcgctgcgcctttaattctggg

SEQ ID NO: 111981 - DNA, 83 bp, Homo sapiens
  chr5:132148947-132149030
  hyper
cgggaatttctgctccggttccctctgcatcgcgggggcagctgtcacctgtaaggcgagcgcggcgcgggggatggaagcag

SEQ ID NO: 111982 - DNA, 30 bp, Homo sapiens
  chr5:132166313-132166343
  hyper
ggccgtcgcagccgcgcggtgacatcagag

SEQ ID NO: 111983 - DNA, 30 bp, Homo sapiens
  chr5:132362209-132362239
  hyper
cgatgcatgggagtcgccatcttagcgcgg

SEQ ID NO: 111984 - DNA, 830 bp, Homo sapiens
  chr5:132386957-132387787
  hyper
ctttcaggccaggcagcgtgtcacttgcctgtgttccttgttagggcctaccaccgggtaggtgcttggaatgtgctgtggattaaaggcttaaatcctgcgggcccctcaatctgatctaaggacatgagtggcttagagaacggcgcaacaaggctaagcgaaagaaaacaaagcggtgtggctgggagtgggctccttccctccgctggtgagggtgcgatcttagactcttgagagaacccgacataaaggccgcgttccaatggcggccttctcccctaccggccaacctgccccgaaaagagcagaaggcaccctgcgggatctgcagatcagcttgcgtctcattctggggcaccgacacggtggaatgcaagacaccccactaccggaagtttctttgatgttaagaaaaacggcggaagtaggccgcagcgcttcctcagtatagtgcctcgagctggctcgcctactttctacggtaaagggaggtgctccacatctctatgcagctgtgcagcgccgcaggttccatgcgcaggctcggttggctaaatgcgctttccagccatctttcagccacccagtcctttcccaggttctcgagccaggacgtgacgtattcagacgtactgggggcggggcctcaaggggaaaagcgcctgagccgggatatcgcgagaacatcccgttctttcgtagctctggtgctgcggctccgctctcgtcgcaacgagatctttcgagatcttctccgcccccgctaccggcgcctcctctgcggccactgagccggagccggcctgagcagcgctctcggttgcagt

SEQ ID NO: 111985 - DNA, 1786 bp, Homo sapiens; identical to SEQ ID NO: 41957
  chr5:132946701-132948487
  hyper

SEQ ID NO: 111986 - DNA, 30 bp, Homo sapiens
  chr5:133304301-133304331
  hyper
gttgctaggctctacgccatgaggtcagac

SEQ ID NO: 111987 - DNA, 30 bp, Homo sapiens; identical to SEQ ID NO: 41958
  chr5:133406793-133406823
  hyper

SEQ ID NO: 111988 - DNA, 644 bp, Homo sapiens
  chr5:133449609-133450253
  hyper
aaagttccgagtctccgggctgcaggttctagtcacggaaccgagttgggagagtcataggggctgggacttggaggatcggctgaggtccggtgctcttggctgtgttcgcggctcggagccgtcgcctgactgaggggcccgtcacagatgtgtgatgtataagctctgcacgcaacaggagctcaataaatgtgcgaaggggggtatacttatgttcgcactgtatgcaggcggcctagaaggaagtccctgattggcacagggatggaggatggggcaagagccgcaacagcgccgcggagttccaacgctgccggttccctggggtacgagcacagcctcaagcagcctcaagccctaggaagcccccagttcaaagcacagggcgcattggagcctgggcacgatacagttcacaccacggctgcgatggtaagccacgcccaagtcccaagggcctaggggacccccgccctccacagccggaggagaaacctgggcgcagaaagcagggggaatatctggttgtaggtgagtaagcggggtcaggagttcccgttagagtctctgcgtttcgggagaagggtgatcattcccaggcttgtccgacgtctctctcagggtgcgctccggaagagcga

SEQ ID NO: 111989 - DNA, 550 bp, Homo sapiens
  chr5:133450701-133451251
  hyper
caagagccgcgacagcgccgccggtcccgagcgcgacctggccgagctcaagtcgtcgctcgtgaacgagtccgagggcgcggccggcggcgcagggatcccgggggtcccgggggccggcgccggggcccgcggcgaggccgaggtgagcccccgccggcgccggctcctcccccgcggtcgccgcgccgcgccgccccagttgcgcgcggccctcggggtctccagcgcgcagagcgtccctgccccggcgtcggccccgacccccgcggtcccaccgcccctcactcccctccggttctccctccaggctctcgggcgggaacacgctgcgcagagactcttcccggacaaacttccagagcccctggaggacggtgagtttctgcccggcccggcttcccttcgtcgcgctcaggccctggcctcggtgggacggggacgccaaggaccgcggggagccgggtgcctcccccaccgcagctcaggaggcggcagaacccaggggtggagagtggggggcgggcttcccgggcgccgccgggtcgag

SEQ ID NO: 111990 - DNA, 30 bp, Homo sapiens; identical to SEQ ID NO: 41961
  chr5:133512879-133512909
  hyper

SEQ ID NO: 111991 - DNA, 30 bp, Homo sapiens
  chr5:133561272-133561302
  hyper
cgggaggcagggggcgccgggtcgttagga

SEQ ID NO: 111992 - DNA, 30 bp, Homo sapiens; identical to SEQ ID NO: 41962
  chr5:133562079-133562109
  hyper

SEQ ID NO: 111993 - DNA, 30 bp, Homo sapiens
  chr5:133706642-133706672
  hyper
ataaaggtttatcccgccctcaccctctta

SEQ ID NO: 111994 - DNA, 130 bp, Homo sapiens
  chr5:133706906-133707036
  hyper
gacggggagggagacgggatagtgtttctgtttcgtggtctttgaatccacaacctctagtctgaacacagagaacacaaatttgtctattacttcaggaagcccagggggaaccgcgccccgctgaagg

SEQ ID NO: 111995 - DNA, 30 bp, Homo sapiens; identical to SEQ ID NO: 4216
  chr5:133784545-133784575
  hyper

SEQ ID NO: 111996 - DNA, 30 bp, Homo sapiens
  chr5:133801990-133802020
  hyper
tggagtgccacccgacgctttgaagaggaa

SEQ ID NO: 111997 - DNA, 30 bp, Homo sapiens
  chr5:133802259-133802289
  hyper
ggtgtgaggcccatccgcggctctccagga

SEQ ID NO: 111998 - DNA, 30 bp, Homo sapiens
  chr5:133802530-133802560
  hyper
ttgtcgccccacccccgtctccatctccaa

SEQ ID NO: 111999 - DNA, 30 bp, Homo sapiens
  chr5:133860267-133860297
  hyper
ggaaggggtcgccccggggcaaaatcctgc

SEQ ID NO: 112000 - DNA, 30 bp, Homo sapiens; identical to SEQ ID NO: 41964
  chr5:133860671-133860701
  hyper

SEQ ID NO: 112001 - DNA, 903 bp, Homo sapiens; identical to SEQ ID NO: 4217
  chr5:133862722-133863625
  hyper

SEQ ID NO: 112002 - DNA, 155 bp, Homo sapiens
  chr5:133968281-133968436
  hyper
gggtgaaaaacaggcgccccttcacgcagtgccacaggcagggactcagagtaggtcttggccctaaaagtgcgccttctaggggatccatagctgctgcccaccggtcctcccagaaggaggggctgtcactcacctgcgactggagggaacgc

SEQ ID NO: 112003 - DNA, 30 bp, Homo sapiens
  chr5:133968653-133968683
  hyper
ctgggtctcccagccgcctggtctccccac

SEQ ID NO: 112004 - DNA, 36 bp, Homo sapiens
  chr5:133984157-133984193
  hyper
tcagtcccaccccacgaaagcggctactgaatctca

SEQ ID NO: 112005 - DNA, 30 bp, Homo sapiens
  chr5:133984922-133984952
  hyper
actgctgcttgaggcgacatagatagagag

SEQ ID NO: 112006 - DNA, 30 bp, Homo sapiens; identical to SEQ ID NO: 41966
  chr5:133985231-133985261
  hyper

SEQ ID NO: 112007 - DNA, 98 bp, Homo sapiens
  chr5:134074103-134074201
  hyper
ctcactcaagatggcggccagagcctcgcgcttggtcgcgtggggcggtgcgtgagtgcttagctcacaggctccgggaccgcgctcgggggcgggtc

SEQ ID NO: 112008 - DNA, 30 bp, Homo sapiens; identical to SEQ ID NO: 4218
  chr5:134075264-134075294
  hyper

SEQ ID NO: 112009 - DNA, 357 bp, Homo sapiens
  chr5:134094186-134094543
  hyper
gccgcattatttagcgcaaattaaggcagacatcagcctgcccaggacgcctctttggctctggcgcgaaacaccctcacgggccggcgaggctgacgcgctgcgctccatcgcactaatcagccgggcgtggtgcgggcgccgggaagactgggcggggcgaaggcatcacctttcgatggggccggcgctgtgcgtcctccagtcgaggtggggcgctgtggaagagcggcagcttccggtcggcttttctcttccttcggctgccggcgccagcacgtcctgttttcgttggccgcgctgggatggccgccacagctgtaggtgctgctagtgtttagcgctggtctttgccgg

SEQ ID NO: 112010 - DNA, 30 bp, Homo sapiens
  chr5:134209883-134209913
  hyper
aaaacgacctgcaacgtctggcgcttagct

SEQ ID NO: 112011 - DNA, 75 bp, Homo sapiens
  chr5:134210443-134210518
  hyper
ggccgcgttcaggccgccctcagcccgtggctggtagccaggagggacagtgcggtaagcgctgctgaggcatac

SEQ ID NO: 112012 - DNA, 119 bp, Homo sapiens
  chr5:134240151-134240270
  hyper
aggggattacaggccgggtttccacactttttggtccaggcaaacccagacgagccagctggctcaagaacttggcagctgcgtgatgactgaacagaggctgcgttcgaacccactac

SEQ ID NO: 112013 - DNA, 30 bp, Homo sapiens
  chr5:134240762-134240792
  hyper
ggtcgggtcgggggcggctgtgggcggccg

SEQ ID NO: 112014 - DNA, 30 bp, Homo sapiens; identical to SEQ ID NO: 41971
  chr5:134241260-134241290
  hyper

SEQ ID NO: 112015 - DNA, 4 bp, Homo sapiens
  chr5:134363122-134363126
  hyper
aaac

SEQ ID NO: 112016 - DNA, 296 bp, Homo sapiens
  chr5:134364967-134365263
  hyper
cgctcgcgcttacgccacttggctcgccggttcttgaaccagacctgggggaggggacgggagaagggtcagggccgctgcgggccgggagggaccccacccccttccccaccgcctggagccttccgtcggcccgctgccctccgaacgtcgtttctctccttcgaccgatatttccgctcctgcattccctccacaatggttcctttcctgtccccagaaaatactaatttctttttccgatctttatcctctcccgaaattatatccgttttcttctccgaatacggattctc

SEQ ID NO: 112017 - DNA, 753 bp, Homo sapiens; identical to SEQ ID NO: 4220
  chr5:134366512-134367265
  hyper

SEQ ID NO: 112018 - DNA, 145 bp, Homo sapiens
  chr5:134367284-134367429
  hyper
cgctggcggtcttccctccctccctccctctagggttcctgggaactgtccccactggaaagcgcccgccgggtgctggtcgtcagtaggcacctctagtctggtgtgccgcggagaagagcccaagaatcggagctggagccgc

SEQ ID NO: 112019 - DNA, 30 bp, Homo sapiens; identical to SEQ ID NO: 41975
  chr5:134368667-134368697
  hyper

SEQ ID NO: 112020 - DNA, 30 bp, Homo sapiens; identical to SEQ ID NO: 4222
  chr5:134369002-134369032
  hyper

SEQ ID NO: 112021 - DNA, 185 bp, Homo sapiens
  chr5:134370267-134370452
  hyper
caaatgacttgtttcgcctagaatcaactcccgtctcggccgcctcgaagtccccagccctggcgagaacagcccaggatgagtgaatgtttgccgaacaggatcgcaccgagcgggcgccttcgagccagcgccggggcgggggcagagcccggggcccgttccggcagctcccagcggtgtcc

SEQ ID NO: 112022 - DNA, 36 bp, Homo sapiens
  chr5:134370508-134370544
  hyper
cggctgagtgacagcagcctgcgctctaatgggccc

SEQ ID NO: 112023 - DNA, 129 bp, Homo sapiens; identical to SEQ ID NO: 41978
  chr5:134374376-134374505
  hyper

SEQ ID NO: 112024 - DNA, 1158 bp, Homo sapiens
  chr5:134374791-134375949
  hyper
cgaagccacggctgaagtcccgggccacgcagaggggccagcaattccatgggtggtggggccctccatccctggacgcagcggggagcagcgggcggccctctctcctgcccacttctcctgggggtgggggagccctgtgtcacccgacgctgcgaggggctgccacgggcttctcaggttgtgcccttcgcggggccgtggcccgtgcccccgaggctgctaccctcttgaggtgcccggagccaaagcagagggttgatcccgccggttgggtgaggtagcacccggtgacggcggctatgactgtgccctgggcgcaggaacgagctcctcgcgctgcctcgaaggctcctgaccttccgcgccttgcgctgtcccgcgccgccgggtggacccacacacgccaggagcaaactgcgcaggactcggccgccacctccctgcgcccctccaccgcggagaccctgcgcccctagcccagcgtctcttaccccacctgggcagcgctgcgtctgcggctcgtgggctccgggctcgcccgccgcggactctggctcaggtttcggctccggctggggccccggatccagctctggctctggcactgcacggttcttcggcccctgctggttcgctacatcccagcgcgcgaggccggggcttcctcggctcggcccgctcctcccgccgccgccgcccgtcgcccgcggggaaggcggggacactggccgggaggcgggaagggtggggggaggggaagctaggtgttcgccgggacctgcggggagaggggcggcgcgcagtcccgccggctaggggtcctggcctccctcggggcgtaggctggggtccgcgcggctggcggccgggcctcgaggccggggagcgcgccctgggacctccgtggaggggccctgccgcatgcggacgaagccagagcgggtcccagcctggccctggggcactttctctccctgggcccagtttcccacctgactcgtgaggggctggccctacttccgtttagacgggggctggtggtcgagtttggggttttgagattggacctttcttctttctgctcagcctgcgggagggagctggtcttgcgtgttggcagggagagtccgctgcccagagcgtggcagccaggga

SEQ ID NO: 112025 - DNA, 394 bp, Homo sapiens; identical to SEQ ID NO: 41980
  chr5:134376162-134376556
  hyper

SEQ ID NO: 112026 - DNA, 33 bp, Homo sapiens; identical to SEQ ID NO: 41981
  chr5:134376731-134376764
  hyper

SEQ ID NO: 112027 - DNA, 187 bp, Homo sapiens
  chr5:134385980-134386167
  hyper
gagcgccctgagcctcgctggagcccatcccggcatggctgctgggaccgacaggccgatcgcgggccgcgagcacatctcacagagcctgggcacagagggcccgaactgtgcccagcgaggaggacgcgtgtgggttttgcctgcaagggttctgaccacttggggacagcgagggcgcgtagag

SEQ ID NO: 112028 - DNA, 191 bp, Homo sapiens
  chr5:134386184-134386375
  hyper
cgccgcctcactcttccgcgcgaggtgccgggtggcccagcagcaggtgctcgcgcgcaggtccagagcggcgcgttgcagagcccgctgtgccaccggagaaccgtggagcagccagggccgcactcgggcgtctgtccccagcctcatggttgccagcagagctggcgcaggggcgcgcaggcggtgag

SEQ ID NO: 112029 - DNA, 220 bp, Homo sapiens; identical to SEQ ID NO: 41982
  chr5:134463604-134463824
  hyper

SEQ ID NO: 112030 - DNA, 30 bp, Homo sapiens; identical to SEQ ID NO: 41983
  chr5:134499076-134499106
  hyper

SEQ ID NO: 112031 - DNA, 214 bp, Homo sapiens
  chr5:134527187-134527401
  hyper
cgggcctcaggtgcgcgctccccgaagctctcctgccacctgttggccgccggtggtgctgacgctacggggagaagccacgcttcagtggcttgcctggaattcatgacttgtgcgctccacgtcctgggctggccgacctgctgagggtatctctgagagcaggagccaggccgtcccgggctctcctgcgacagtgcggtgggagagcctt

SEQ ID NO: 112032 - DNA, 30 bp, Homo sapiens
  chr5:134734292-134734322
  hyper
ggcaactcgcgggccggcgggggcctcacc

SEQ ID NO: 112033 - DNA, 198 bp, Homo sapiens
  chr5:134802301-134802499
  hyper
gaaggctagagttagcgttgccgcagggctgtgcctcagacgaccaggcacgaccaagcacacaggtggtgctcaagaaatgaatgggagtagatgagggcattctggagactgcatggagagccagggcctgccgtagcagcagcaccagcagtggcgatggcagcagcggggtcgtttccaggggacttgttcttt

SEQ ID NO: 112034 - DNA, 12 bp, Homo sapiens
  chr5:134802534-134802546
  hyper
cgaagctcagcc

SEQ ID NO: 112035 - DNA, 268 bp, Homo sapiens; identical to SEQ ID NO: 41985
  chr5:134824588-134824856
  hyper

SEQ ID NO: 112036 - DNA, 14 bp, Homo sapiens
  chr5:134825091-134825105
  hyper
gtcccccaggatgg

SEQ ID NO: 112037 - DNA, 611 bp, Homo sapiens
  chr5:134825179-134825790
  hyper
cggtccagcccctgtccggccggagggaggccggggcacctgccggtctttccacctctgcatgcatttcacactttctatcctgttaggcgtccgcacttctatgccaatgaggactccccttcccacccctgtttttttatgtcatgtggatttaatctagttagacgattttatgcttaaaattgcattgttaacagcaattgtttaaaagggggccgagagcgagggcgcccaatctttgaactggtcgggttttgcatgcctccgctccgagcccgtggagcgctgcacaaaatcgtctagcgcggagcagggcggggacggggagagacacaaaacaatcctcgggctttctcgctactgagccttcggggccgtttccccaagcgcaaacagatgcaaatgtctctgcaaacattgcacaaagctattcagagagaggcagcctctcgcggcctcaatagccctttaaacctagtccaattgcccccaagtagaggtaaagagtccacatgcattttttcactttggctggaagaggggcggaggaggcgagggccttggggagcaaggtatgagggctgctctggttcagcggttcgtgccat

SEQ ID NO: 112038 - DNA, 347 bp, Homo sapiens; identical to SEQ ID NO: 41987
  chr5:134825912-134826259
  hyper

SEQ ID NO: 112039 - DNA, 19 bp, Homo sapiens
  chr5:134826479-134826498
  hyper
cgtgcgctgagggcccgga

SEQ ID NO: 112040 - DNA, 65 bp, Homo sapiens; identical to SEQ ID NO: 4231
  chr5:134827196-134827261
  hyper

SEQ ID NO: 112041 - DNA, 210 bp, Homo sapiens
  chr5:134844203-134844413
  hyper
tctctgagtgtttgctggagccgggctgacacagatctgacagaggttgtcagatctctgaagaacaatcgactttctaagcagagccccttctctgagtctcgcggtgccgcgttacatttgtaaatgccagcgcgctgctaagcacgtccccgtgaatagaagtgttttgatgttttgtttttggtcggagattgaagtccagtgtct

SEQ ID NO: 112042 - DNA, 683 bp, Homo sapiens
  chr5:134870243-134870926
  hyper
tcagccggctcaaaccgaattttcatgctcgtttttcttcattagagttctacaaattgtaaaattgacttttcacctcgtcttcaggggctgatctgtcccttttctaaatcacactgaagtggtggctggggtcagttctgagccagtcacaaaggaggttttgtggagttcagaaagtgcaaaaggaaaggccgtctaggggcgggcaggaggggcgctgggctgagggccggagaaacagaccaagagacatccgccgcgagggtgcggcgacctaacaagcggctcaggtatccccgactgctttaaagctcccgcttcctccctccgcctggagagggggtcccgaggcggcagctggggccccatctattgcctgctgactaggggagggggaaagtaacagtgtctacaaagggcctagtggtaaggaatgaaacagggcgttgtgtggagcaagtctttgggcaggcttgggaaggagaaaacagggtcgccggggcggtaggtgaagtcttcggaggcggctgggctactggggtcagagagcggggaggcggcggcggcacctgagccccaggactccgcgtcgctggcggggcttgggggaccgggcaggcaggggacgcactgcggcggcaggaggcgctcccgggcaccgcctccgggcagcccttgat

SEQ ID NO: 112043 - DNA, 647 bp, Homo sapiens
  chr5:134871417-134872064
  hyper
cgctcagagcgctgcagcccggactgagggcagagccgccagggcgcacttacgttcccaacagcctggggttgttactctgtgccagttgcgggtgcgagagcctggaagggtgcaggggcgcacggagaacttggcctggcctcctcgcctcgcctgcaggggccacgcgcccggccggtctcctgagtgatgtcgccggcgatcagatcagctcgtgtgagcaccgagtgtggcacacgactggcctcaggaccccttaagtacccggcgcaacaatgggcgcccccctcccttgccacctccgcccccgcggcagcccgggtgaatggagcgaggcggcaggtcatccccgtgcagcgcccgggtatttgcataatttatgctcgcgggaggccgccatcgcccctcccccaacccggagtgtgcccgtaattaccgccggccaatcggcggcgtcgcgcggccccgggagtcggctcgggctaagctggccagggcgtctccaggcagtgaaacagaggcggggtcggcgggcgattagcggccgaggcacgctcctcttggggcgggctgggcgcccctcgctggggtgggacggggaggcggggcgcgagcgcgaaagtgtgagccgcccagtgagttgc

SEQ ID NO: 112044 - DNA, 824 bp, Homo sapiens; identical to SEQ ID NO: 41992
  chr5:134879161-134879985
  hyper

SEQ ID NO: 112045 - DNA, 85 bp, Homo sapiens
  chr5:134880603-134880688
  hyper
agccagtcttcttaccgctgcctggcctggaaggataggaggggcaaggagagaaatgcgaagtaagattcgattttaaaagtcg

SEQ ID NO: 112046 - DNA, 852 bp, Homo sapiens
  chr5:134914166-134915018
  hyper
ccagcttcttcacgtcgctgtagcggatcttgggtcccttccgggagcacttgcatttggaccctgcgagcgagcgcggggcaacggcttagttgctaggcggtctcctgcccctcgaccaccttggtgcccacccagaccaccccccgcgggatcccaggatgcctagaaattggcgcttgggttccccaggacaggacaagacgagacggcgacaaggggagctccccgcactcaccgtccacacgcgcggtgtacagcgccagcagcagcaggagcagcgcggccgccaggagcctcatgctgaccggaggggcgcggcgtgggagcagggacatggggagggcgctggcccgtcggagcggcggcccggagacgccacccagctctgctcggctttctctgcccggggcgcgccttccggctctgctggctccggctgcgccgtcggtggatgcccagggctgtctgtggccgtgcgctgcgctctgcgcttgtctccgcgctctctccacagcctccctccgcccgccctggcctcttttaaatccgctcctgccctcgcagcgagcgagctcattaatatgcagaaccactcggtgactcactgagatttctcaatgtggtgaggggaggagaccttcccagcccgcccgtcgcccgccccgggaaaggacccgctatcgcagcggcgcacacccggagccacgcgcgcacacgcacacacacatccgctaccctctcgctcacacaacacgccgccttcgcacacttgcacacccataccacagcgcgcacacatttccagcgtcccgctctgcctttggggagcccagacggtggagaggctgc

SEQ ID NO: 112047 - DNA, 539 bp, Homo sapiens
  chr5:135170258-135170797
  hyper
gtctgggatgagccgcgcggagcgcacccttatccacccagagtgctgtgcctttaaggtccactgggggcgtgatgtcagccgccctccggcacttggagaggtgagcgcggcagcccgcgcagccggtgactgggggactgggtttggagtaggacctgcggcgtgctcgagactccgacttcggtcttgcggcgcgctcgcgcccgcgggccatgccccactgactctaagtgggcactgccccggctccgggagggcgagaccgagcgccggccatgggaagcttccagctggaagactttgcggcgggctggatcggaggtgagtgtgcttaccggggacccccggtcagagagagcgagcctggcggagtttgcctctatgctctgaggaaactttgcctctgtgcgctgccatcccgctccccgttgtgcgcgcagcctgctttggggagtgcccggccccgagatccccctggtggtcttgcagttgccagggctaaattctgagagcttcacagcgtttcgggctgagct

SEQ ID NO: 112048 - DNA, 101 bp, Homo sapiens
  chr5:135170997-135171098
  hyper
gtgggagccaggcttcgagattaggccggcccaacggggcgtcccgactggagggagcagagctctcacagcagggagcggagcgccggctgcaggtgccc

SEQ ID NO: 112049 - DNA, 11 bp, Homo sapiens
  chr5:135265848-135265859
  hyper
cgctcccggaa

SEQ ID NO: 112050 - DNA, 209 bp, Homo sapiens; identical to SEQ ID NO: 41997
  chr5:135265919-135266128
  hyper

SEQ ID NO: 112051 - DNA, 30 bp, Homo sapiens; identical to SEQ ID NO: 4237
  chr5:135335661-135335691
  hyper

SEQ ID NO: 112052 - DNA, 30 bp, Homo sapiens; identical to SEQ ID NO: 4238
  chr5:135364436-135364466
  hyper

SEQ ID NO: 112053 - DNA, 231 bp, Homo sapiens
  chr5:135468335-135468566
  hyper
ccaggcctggccatcgacgcgaaggcctccagctgatcggaagtcggcgttggccggcgcggagcccggcgcggaggcttctttcagccgcccgggcaagacacccctccctcggtcccgcagcggtcactccgcctctggcgcgcatgcgccgaccccagcgggcgtcctcccgggctccctctccctccctccctcatccgggtcctgggcgagcgggcgccgtgcgcg

SEQ ID NO: 112054 - DNA, 30 bp, Homo sapiens
  chr5:135469100-135469130
  hyper
tggcttgatgaatccgtgccgccgtcgctt

SEQ ID NO: 112055 - DNA, 1481 bp, Homo sapiens
  chr5:135527797-135529278
  hyper
ggggccagcgatccccggtgtcgtgccctccctaccaggctcaagctggctgctcttggctaggtcgggacggggcgcccggcggccgtggctcagtcccaagctacaccggccgcgtcttccagggcgcgcgggcgtcgcgcagcgagcggtcgtggggcagcgcggcgaaggccgaatggcgcagctggcaaccgatgaagaggacgacgagcgccaccgagagcagcagcaggaagaagagcagcaggtaggtgggcaggtcgggctttgtggccgcgccgtccctcataccgcgcgcagtggccagctccagcggcaaagcgccttctgccttgaccgtggctcctggggccagcgcgctgcctaccgccgcctcggggccgcccgtggcgttgaatatgtcgccgtacatggcccgcgggtcccgccgaccccagccggaccgcttcacttggcctggagcatactggcgcgacccggcgcctccatggcgcgcccctcccgccctgccgcgcccaactgaccgagagtcggtgccttggggccggcggggactgcaaagaccccgggacgcgtccgctcactcgcctccgcgctcagctgctttccccgccggctggcggaccccagttctcggagctggacagttctgtgcccgcgcccctcgggctcactgtttctctccgtcgccaccaggacagaggtcccagtcactgactcgcctttcggctttacaacagcccgctcagctcggaccctcagctccagtgagctccaggtgctgggcgcctctgggctgcggcggcggggagaggcactcagcaagtgcagccgcagcccggggtctctgctgagcgcccggtggcagagcgcacggagggcgggtggccagggagtcctccgcgtcctccggcgccgccgccaccgcagcgtctcggaacagtcctgcaggctctggtccctgtcgagacgcccagtgttcagcgagcttgtccccactccctccggctgctgcgctcctgttttgagcaggagactgagctttctggcggctctgagcgcgctcgtgtcccgggcgggggttcgggggaggggcgggactggcggcggctgcccgggggagcggctgcgaaccaatgagggcaagagaggacgcggctgcgactgcccccagcccggcctcacatcactcagggacagagggacagagacagggacagagagagagagagaaagagagaaaagcacagggtcacaggaagactgacgggcaaagacacagttacagacctatgaacagagccacacgccaaacagggacaaaccgttgaggtaagcaaaccaactcagagacaaagctcagctgagcgtgcacacctgcgttcattatcctccttgacaggctccctccaggcatggcctggtttgttccgagtgcccactggctgctgggtagcgcaggccgggcacaccacctc

SEQ ID NO: 112056 - DNA, 240 bp, Homo sapiens
  chr5:135700985-135701225
  hyper
aatccggtgttgagtcgccagaagctggctccccatgggtggtagccaaggatgtaccgctctccgtggtgctgaagtatagagctggtcaagtgagttaagttgcaacgatgtgaaagcgcgctcctctgttctttgtgttgcagtggtaaaaactcgccttccgaggcagaaccgtgttaccgtccttttcctaatcggggggaaatttcccagagaacatgacggagaagcatctgt

SEQ ID NO: 112057 - DNA, 73 bp, Homo sapiens; identical to SEQ ID NO: 4241
  chr5:136833977-136834050
  hyper

SEQ ID NO: 112058 - DNA, 374 bp, Homo sapiens; identical to SEQ ID NO: 4242
  chr5:136834289-136834663
  hyper

SEQ ID NO: 112059 - DNA, 174 bp, Homo sapiens; identical to SEQ ID NO: 4243
  chr5:136834706-136834880
  hyper

SEQ ID NO: 112060 - DNA, 254 bp, Homo sapiens; identical to SEQ ID NO: 4244
  chr5:136834912-136835166
  hyper

SEQ ID NO: 112061 - DNA, 30 bp, Homo sapiens
  chr5:136996341-136996371
  hyper
agtgttaccagcagacgagtttacaagtgc

SEQ ID NO: 112062 - DNA, 30 bp, Homo sapiens; identical to SEQ ID NO: 42006
  chr5:137089604-137089634
  hyper

SEQ ID NO: 112063 - DNA, 1 bp, Homo sapiens
  chr5:137090008-137090009
  hyper
g

SEQ ID NO: 112064 - DNA, 152 bp, Homo sapiens
  chr5:137090063-137090215
  hyper
cgcgcgcaccctccccgaggcgtgcgtcaccgccgacgtacggcagcctagggctaccagccaatccccgcctcgctccccttaatcccgcctaccgcgccgcagcgccgctctagatcacggactccccgccctccgcggtctattcaagc

SEQ ID NO: 112065 - DNA, 13 bp, Homo sapiens
  chr5:137090634-137090647
  hyper
tctggggcgccac

SEQ ID NO: 112066 - DNA, 226 bp, Homo sapiens
  chr5:137369083-137369309
  hyper
ccaggcccccagggcgcccatatccaggtgaggagcacagagacctgaaccgaaaaccgctgggggagacctaagcggtgacttcggttcccattcccagagatgtgagttagatccgggaccacggggctgcacctgcgtcctgcccgcccccaccctaccccttcacctcaggacctgacctagactccagagagaacagtaaggcttcggtgccttagtctgg

SEQ ID NO: 112067 - DNA, 268 bp, Homo sapiens
  chr5:137474815-137475083
  hyper
ggggctcgagggggcggtagagcgggtggtgggggctcgaggggacggtggctggtgggcaaccacacaccattacagcggcgggtgagcggcctcggccagctgcctctgtgaagcgaccctgtcccgcagggacctctctgtgcatagggtcaggctaattgaaaagcagggcctctaggtccgcggggactttccgggttgcacctgcaaattctgaatttgaccctctctaagtactcacctcagcggccgtcctcatatggta

SEQ ID NO: 112068 - DNA, 30 bp, Homo sapiens
  chr5:137513791-137513821
  hyper
tctactccaaatgtcgggggtaaaagagct

SEQ ID NO: 112069 - DNA, 30 bp, Homo sapiens
  chr5:137514225-137514255
  hyper
atggtgcctagcctcggatctacaaaggcc

SEQ ID NO: 112070 - DNA, 239 bp, Homo sapiens
  chr5:137514785-137515024
  hyper
ctgcacctcgtgggcggagttgtgctctgcggctgcgaaagtccagcttcggcgactaggtgtgagtaagccagtatcccaggaggagcaagtggcacgtcttcgggtgagtgtgcggctgtgctggagcccgggttaccagctcttgcccgcgcggaataggctttaagaaatcggagctgcagccatctgtttttctcttaatgctgcatctctgttctcacggtggtccttggggt

SEQ ID NO: 112071 - DNA, 30 bp, Homo sapiens; identical to SEQ ID NO: 42008
  chr5:137515546-137515576
  hyper

SEQ ID NO: 112072 - DNA, 30 bp, Homo sapiens
  chr5:137548683-137548713
  hyper
gtaataggcggaggcggttgcagctcggcc

SEQ ID NO: 112073 - DNA, 30 bp, Homo sapiens
  chr5:137548914-137548944
  hyper
caaatctgagaaatcgctgtttatggacag

SEQ ID NO: 112074 - DNA, 30 bp, Homo sapiens; identical to SEQ ID NO: 42009
  chr5:137549376-137549406
  hyper

SEQ ID NO: 112075 - DNA, 268 bp, Homo sapiens
  chr5:137577610-137577878
  hyper
ccagggctgcccaggcaggggcgcccgtccggcaccggactcccgccctgggcccagctccggcgctcggccagccccgtgccccgggcggccgctgatagtcggctaatgcgtatcgaatttttgtggagttcggcccgcgcagagtgcgcgcggaggcgctgcccgagcctcttaattccctttgcatcgatcctgccgttaatgacataaccttctcccctaattaactgacaactgcattaggcggcgcgcctccgccgcacgc

SEQ ID NO: 112076 - DNA, 267 bp, Homo sapiens
  chr5:137667420-137667687
  hyper
actgggtaggccaacgtcggactcagagtcttccctgagcagaaggccaaagttacggcctctgagcaagaatatcaacagccgcaggcgttgaccattcaaaccttccgccagcccagtaacctatccccgctcgcctctaagctgcgtcagccaatctccgcgcgcgcgcccagggcctcatggcctatcgttgggctcgcagatcacctgggggcgtgtgcttgctctggaaatggtaagacttgccccgccccatagccagag

SEQ ID NO: 112077 - DNA, 30 bp, Homo sapiens; identical to SEQ ID NO: 42012
  chr5:137673230-137673260
  hyper

SEQ ID NO: 112078 - DNA, 132 bp, Homo sapiens
  chr5:137673654-137673786
  hyper
catggcctcccccgcgggtttcaagatgtgcctccaactggggccgtccactttctgcgatattttggagggggtgactcgttagtgaggaaaccacccccatccctaaatcaaagcgccaggctcgttccc

SEQ ID NO: 112079 - DNA, 30 bp, Homo sapiens
  chr5:137688212-137688242
  hyper
cggggagattggggcggagcgctgcgaggg

SEQ ID NO: 112080 - DNA, 162 bp, Homo sapiens
  chr5:137774492-137774654
  hyper
aggtgggcaggggtcgatttcaggatgtaaccatggagacctccacgacaacagcctagggcttgaaacccaagaaagatgaacaagcgattcgaggaaggcagggcactgagggtcggaggcgcatgcccggccacagcaggtgccggggcgggggcgcgc

SEQ ID NO: 112081 - DNA, 193 bp, Homo sapiens
  chr5:137774863-137775056
  hyper
cgggtccccgccccgcgccgcgcccggccccgccatggtgtcctggatcatctctcgcctggtggtgtgagtgcggcggcggcggggggtgatgcgggctgtgatggagggcgggggtgttaaagcccgggtggacttctccgaagcttcgtgcagcagagtcacctaaaggcgctgcgtccttatttggggc

SEQ ID NO: 112082 - DNA, 30 bp, Homo sapiens; identical to SEQ ID NO: 42014
  chr5:137801018-137801048
  hyper

SEQ ID NO: 112083 - DNA, 96 bp, Homo sapiens; identical to SEQ ID NO: 42015
  chr5:137801266-137801362
  hyper

SEQ ID NO: 112084 - DNA, 30 bp, Homo sapiens
  chr5:137877785-137877815
  hyper
tgattcctatcaaacggccccctaacccgt

SEQ ID NO: 112085 - DNA, 30 bp, Homo sapiens
  chr5:137878497-137878527
  hyper
gagggtgccggacgcggcgctcacccgcgg

SEQ ID NO: 112086 - DNA, 107 bp, Homo sapiens
  chr5:137879231-137879338
  hyper
aggaccggggtcgtcgtcttttcagtccattctccttgaatagggtggacatctgaggctttgcgactcgaagctaggcacttgggcccgacgcgcggtttgaacgg

SEQ ID NO: 112087 - DNA, 61 bp, Homo sapiens
  chr5:137910696-137910757
  hyper
atgacactctagatcgcgaggggtgtgactcagcagggcccaagccggaggcaaaaccttg

SEQ ID NO: 112088 - DNA, 114 bp, Homo sapiens
  chr5:137911537-137911651
  hyper
ggtgcccgagtgcacgccagcgttccctggggcgagcccgggcgcgtgcacaccccccgggcgtggacgtgttcccagctcccgctcctggaggacggcgccatcttgtcttgt

SEQ ID NO: 112089 - DNA, 82 bp, Homo sapiens; identical to SEQ ID NO: 42018
  chr5:138088595-138088677
  hyper

SEQ ID NO: 112090 - DNA, 347 bp, Homo sapiens
  chr5:138089641-138089988
  hyper
cgggaagtgattgtcgtccggctccgaggcgttcctgccccctcccccttcccggccgctgagacttcccgatggggcggcggggacgcgggctcggcgaaccgggaggctggagcccgggcttctcccatacagcttcgccgtaggtgggccacacccgtgtggacttttggcgtgaccgtccacttggactcggggattactcagctttcctgggtttcttgtcggttggacgcacttagctttcagccctagttttcaggagtggcattagagaggtttttttttttttttaattgttgttgacttttaaaggagcgtgtgtgtgcgtgcgagtgtgaagcact

SEQ ID NO: 112091 - DNA, 31 bp, Homo sapiens; identical to SEQ ID NO: 4250
  chr5:138299453-138299484
  hyper

SEQ ID NO: 112092 - DNA, 377 bp, Homo sapiens; identical to SEQ ID NO: 42022
  chr5:138609204-138609581
  hyper

SEQ ID NO: 112093 - DNA, 30 bp, Homo sapiens; identical to SEQ ID NO: 42023
  chr5:138609833-138609863
  hyper

SEQ ID NO: 112094 - DNA, 30 bp, Homo sapiens
  chr5:138630063-138630093
  hyper
gcttgtttgagcagcgtttctttcttttcc

SEQ ID NO: 112095 - DNA, 30 bp, Homo sapiens
  chr5:138630487-138630517
  hyper
ccatgttctgtgttcggcatttaccgtgga

SEQ ID NO: 112096 - DNA, 125 bp, Homo sapiens
  chr5:138677831-138677956
  hyper
gcttgggccgacttcgtctctgtcttctccgagacatggccgtcgcttttttttcattgtcattattaatgatttggatctcgcagctctctatccgggtcctcagtggcgcgagggttgccggg

SEQ ID NO: 112097 - DNA, 30 bp, Homo sapiens
  chr5:138739896-138739926
  hyper
ggagccgcctggagcggggaaactgctgac

SEQ ID NO: 112098 - DNA, 37 bp, Homo sapiens
  chr5:138775185-138775222
  hyper
aagagaagggggcgcggagcgcggggcacgctggtca

SEQ ID NO: 112099 - DNA, 30 bp, Homo sapiens
  chr5:138897779-138897809
  hyper
ccacgcctctcgggcggcaggtcctgcctc

SEQ ID NO: 112100 - DNA, 241 bp, Homo sapiens
  chr5:138923040-138923281
  hyper
agatcctggattgcacgtcagtaggcgggctgcagaggaagggcgctgttctggttggtcctggccttaccccgccggagggcgccagctgccccggcgacgacacgggggaccggacggagcctcgggccgccagggaggggcctggctgcagaggcagctttctcactagcgactcgggcctctcaaaaccagcctttaggcatttaaaaagtgatacggttcacgccggtcttcgcca

SEQ ID NO: 112101 - DNA, 274 bp, Homo sapiens
  chr5:138940459-138940733
  hyper
gagctgtagccacgcggcctctggaaagagatgtgctaagtcccaggacttcagaagagctctgtgaccttggccaagtcccttcctccttcaggagcgctgcagtgggcctaagtgcctcctcccgggactagtacggggacggtcgtgagatctggacaacattcgccttttaatatttattgatcttttgtgacacgcgcgtgggtttccatcagcaatgaagtcaacggtcgcggcgctggagcctgcagaactcgcgctctagatctcg

SEQ ID NO: 112102 - DNA, 30 bp, Homo sapiens
  chr5:138941351-138941381
  hyper
gggccgccgccacccgcctcccaccatggc

SEQ ID NO: 112103 - DNA, 1167 bp, Homo sapiens
  chr5:139016855-139018022
  hyper
ctccgtgtggtgagcgtgcctcctttgtggtgtgggtggcctatggtggtgcttcctttcacaaattgtgtgtccgtgtgacacccccccccccctcagccgctgtgcccctttgcgggtcagtgtgttgtttgacctcggccgcgggtgcccccacccctgccggccccgccgcccctcccccgcaccgtccgcccgcgccgcgcggcgatcgatcgccattgattgtccctgacgagctgctccactttccagccaatgtcaggaggggggatctccgccgccctggcggtgtcatttccacacactccctgggctgccgccagcgcgggcgcctcgaagagccggcctggatcgcccggagctcgggctggaccgcccacaccgcgcgaggaagcccccgatggcgtggcccgaccccagtctgccggcctgcccgccctaggcctctgcacccaagcccccttcccagcgctggtggatgttgtcaccacaggagtttaagctgggccgggtatggggagggacgctgtgtcgggtgcgccctgcgcttgccctggtgggggcgcggggctgtttccggcgggcggaggcgccagcaggccaactttgccgcggcccaaacagatgctaatgattttccgggaggcgccggttatctctggccccagccggccggtgtgctgggactgggctcccggcacagacaccacctcgccccccaccctcaccctcctgagccccacctaataaccacttgtccccgagtggacgggttgggggggcgtcggggggagtccgcaggctgccccgggtgtcctggaactgttgctgtgtgggattatttgcgcctcctccacccaggatgctaccgtctttctgagcacttcgcaaagccaaacacacacccgagcacgggaaactgaggttcatagaagctcggcccaaggtcatgccgacccattccctgctcagctgagtgggtcaccctctgaaaaccatcccgtcggaggacccgcagccccctgtccccttctcgctcaggggcctgagccagtttccagactccccggttggaagtgctgacgtggctctgggcagctgtctggggccgggaagcggggcagatgtcacgcagcccaggggaggaggcggctccgcggggag

SEQ ID NO: 112104 - DNA, 30 bp, Homo sapiens
  chr5:139027520-139027550
  hyper
tccctcccggtcctcgaagcttctggcccc

SEQ ID NO: 112105 - DNA, 30 bp, Homo sapiens
  chr5:139029527-139029557
  hyper
gggagcgcggggtgcgcctggctttgttta

SEQ ID NO: 112106 - DNA, 65 bp, Homo sapiens; identical to SEQ ID NO: 4253
  chr5:139039950-139040015
  hyper

SEQ ID NO: 112107 - DNA, 531 bp, Homo sapiens
  chr5:139047724-139048255
  hyper
cctgccactccctccgcctcccagacctctggggccatgaatcatttatgaggcaaaaatgaaaccaattaaggacaaactttgaaagcctctaattgctgcgcctggtggcaccgtggaatgaggggaggccagccttctcggtgcggaatctccttggcccaggccttcccaggctgcccgtcccgccgcggctcagggcgcctcccggctccctgccgcctcccagccggacgcggacgtgcctgcgcggctctggcggccgcgtctgccgccccggcgcccgcccgggtcccaggccgactaattaggcccggctacctcccgcgccgcccactgcccgctccaggcccgctgcccgctccaggcccgaggtgatggcggctgttcctgccgttctggggcctgtgccccagagctggccgcgtttctcggggcgggagccagctctgctcgcctggcttaacccagacgagcccaggacgccctatccctgaaccccatcgtggcgtgcaggtctgagtaggctct

SEQ ID NO: 112108 - DNA, 76 bp, Homo sapiens; identical to SEQ ID NO: 42030
  chr5:139051073-139051149
  hyper

SEQ ID NO: 112109 - DNA, 499 bp, Homo sapiens
  chr5:139088831-139089330
  hyper
gtgggaaggtcctcccggcggggcctcctcttcccctccccggggaggcaggtggagctgcgtcctcatctttgttcccatctggagcgcgtttggcgcggcgtggcgggggcggggctgcgcccccgcggtgcccggagagactggcccgcccgcttatctgatctgcggctaattgaaactccctgctcgcgaaggtcagctcggtcccctgacagctgccgagccgagccgggccggatggaaaacccgggctgtgcagggcccggcggggcgctgaggggaggggttgtggggggctgcctctgcggcaaagtagacaaaggcggcccctccctccctgtgcgcgctgctgggggtcgccagaggtagcggccttcgccctcaccctgcagggtgttccagccggggtcacatggcctaaggctacagaggaggggggcgcccttaatccctacgtgcccgcccaccccgctcccacgccggggccctgtctggg

SEQ ID NO: 112110 - DNA, 144 bp, Homo sapiens
  chr5:139089533-139089677
  hyper
ccagaagccgccatccggtgggtcaggtgcggcctcagcctaggagggcgggcgggcaggcctgttgctaatggtgctgggacgggcgtgggggggcggggggatggtagcgggggagcctctgggagccccgtttccagggtt

SEQ ID NO: 112111 - DNA, 30 bp, Homo sapiens; identical to SEQ ID NO: 42032
  chr5:139090341-139090371
  hyper

SEQ ID NO: 112112 - DNA, 30 bp, Homo sapiens
  chr5:139090683-139090713
  hyper
ctcacgccgcgtggcgccccctgaggaagc

SEQ ID NO: 112113 - DNA, 62 bp, Homo sapiens; identical to SEQ ID NO: 4256
  chr5:139091110-139091172
  hyper

SEQ ID NO: 112114 - DNA, 30 bp, Homo sapiens
  chr5:139126159-139126189
  hyper
aagtgaggcacccccgcttctttgtaggac

SEQ ID NO: 112115 - DNA, 935 bp, Homo sapiens
  chr5:139126892-139127827
  hyper
ggctggcaggtgggcggggctgcagcagagcgggggtgagagagggagacgcagcctcccccccagctgttaaccttcacgcttcaggcctctgcggatggcagaggagggggaaagcccagctgccagcttggcggaggtgaccgggcgggggctgggggctgtccctccctctgggctcgtctctggggagatctggggccggaaggaatgtggtggagggcgccttcggctgaggaaggctgttgccggatgggtggcctcctgaaggcttgtgctggcgaggcgggtgcccaaagggggctctgagcggtgtcggccctgcccgcagcccggccggacgtgggggccggcgtgagaatcccgcccatctgtgagccggcctcacgccgtcagacccaatttatctcgccgccaaagtttcacagccatctgctcgagtggaacggcttccagcgctggccccaccgggccccccagccagcgcggggatgttttccaatacgacagcatcgccccgccaaagcaaggagggggtgtagggggaggcggcagagcgcggtgcgcggggctggcaggcagccctctcccgcgagcgagccgaccctgaattttaagcgattgatcaggaagctcaggccgttcccatcactttgagcagccaaatgcgacggcgcagggatttcaaggggcctttgcggaggcggtaatgaggtcaccgtcactgcgccagcccgcgggcgggagggggcgaaggtctgcggacacgtgtgaacacagcctgtgaaccgagccacatctgtattcacgtgacccccggggccccagcactgacccaggaaaactcggcatttggatctgagctgattcacactcccccgcccccaccccacctacccagccagacacggttcgagaggctgagctagaaccca

SEQ ID NO: 112116 - DNA, 347 bp, Homo sapiens
  chr5:139135574-139135921
  hyper
ctctgtctgtgcctccgctagtgtccccgcggctgccgtccgccctcccgcgccccgccaggtgagcgcagcccccacccccagtcacgctgctctgggctgagcctcggtaatttccgagtcggcggcggctttgtgtgcaccggccgcggtctgggggcggggagggaagggagggttatttctcccccctcttcctttttattgggtcattaacaacggctcggactgccgctgcgccccccctttcatgtctgccgcgcctcccgccattatctgcctccgccgcgcggcgtaattcgatgccaatcaggttggggcgcagaggcagccggatcaaagccggg

SEQ ID NO: 112117 - DNA, 235 bp, Homo sapiens
  chr5:139143821-139144056
  hyper
ccccgtgtgacttgtcgccgccacaaccgcagtggccagctcgcgcctggcactgagaccgtaagcaaatgtttgctgaattaatgagtgggggctgcagggagggcttgggctgcagttccgcctgggctgctgcagctggggcgcgtacgtacatccgtgtgcccctgggagtgtgagtgaggggcgcctgtgggtgggggagccatatccgtgtcccgggggtctggcggcg

SEQ ID NO: 112118 - DNA, 101 bp, Homo sapiens
  chr5:139144114-139144215
  hyper
cgggaccccgttgccaggagcagtcaggatgcggcagcgtctccatggcaacgcggcatctcgagccgcgcgccgccctcccccggcgccccgcagtgggc

SEQ ID NO: 112119 - DNA, 30 bp, Homo sapiens
  chr5:139167162-139167192
  hyper
ccagctaaggagtccgcctggtgccgcggg

SEQ ID NO: 112120 - DNA, 37 bp, Homo sapiens; identical to SEQ ID NO: 4257
  chr5:139175355-139175392
  hyper

SEQ ID NO: 112121 - DNA, 30 bp, Homo sapiens; identical to SEQ ID NO: 42037
  chr5:139175643-139175673
  hyper

SEQ ID NO: 112122 - DNA, 323 bp, Homo sapiens; identical to SEQ ID NO: 4258
  chr5:139175996-139176319
  hyper

SEQ ID NO: 112123 - DNA, 107 bp, Homo sapiens; identical to SEQ ID NO: 42039
  chr5:139227516-139227623
  hyper

SEQ ID NO: 112124 - DNA, 296 bp, Homo sapiens; identical to SEQ ID NO: 4260
  chr5:139227704-139228000
  hyper

SEQ ID NO: 112125 - DNA, 14 bp, Homo sapiens
  chr5:139228242-139228256
  hyper
gggcgagaggcgcg

SEQ ID NO: 112126 - DNA, 30 bp, Homo sapiens; identical to SEQ ID NO: 42042
  chr5:139256182-139256212
  hyper

SEQ ID NO: 112127 - DNA, 1127 bp, Homo sapiens
  chr5:139283458-139284585
  hyper
caagcccgagggctccgatctctccgaggaagggaaggcagtgacagctcccggagcgctcggcggccaggccgggcccagcgtctgatcagccgccgcctttctgtcggtatccgcggctccatccccgctcgctcagggctgctcgcctgcaggccggtaccggcgtgcagcgcctcttgcccgcccctgcgtggggacgcggccgcccggggagaggcgcgcacagccactgtcgggctcctggcacgcagccccttgctctcccggccgcgacgacccgctcgcacgcaggcacgcgcgccctcggtgcctgtcaccgcggcggccgctagcgcagcctagactcacccgcgctgcgctgggggcgggtgagcgggcggcaggtttctcccagggaaaccgggtttctgggcgcgcggaggtgccctacctttctccccgggatcgggctccctctcccgcttcctcccctctgggtgcttcttgccgcggccgcggcccctcctcctggactccgacattctgcacggggtcccaggcggtgggacggcctcagctctccgctgccgcgctgcgcccccgccgcctgcagcctcagtgcccgagcgcggcgcctttcttataggcggtcacaccctccgggggaggggagcagcgagccttaactcttcccctcccgcgccctccaccctcgccccccctccaccggctcgggccgcgggggcgtgtgggcggccggtctgggccctaggccccctccctgggcccaccgaggtaggcaagaccggcgcctaaacagggcgccacagacctcctcgccgaagagggggcttgagctgggctgggggcctgagcatgattggggagggcggagtagagatcccccagcgagggccaggctaaggacagcatgggggtggggagacagcgaggaaagggcccaggaagggaccaaaatgaagcccgctagccagcccagcggggtagcgagcacccttggctcttgcggtgggtctccacaacctcgaggcacccccggccgtacaggcgggttgcctgtgcctctcatgcctgcaggtctggcctcagccccgtgggataccgccatctggggaacaccttta

SEQ ID NO: 112128 - DNA, 92 bp, Homo sapiens
  chr5:139423000-139423092
  hyper
tcagcccgcaggggcgcgggaggaatcgtgccaccctttgctcccgggatttatcggcatgacagtgggggtggtgcgtgaggagaaggcga

SEQ ID NO: 112129 - DNA, 637 bp, Homo sapiens; identical to SEQ ID NO: 42045
  chr5:139487906-139488543
  hyper

SEQ ID NO: 112130 - DNA, 30 bp, Homo sapiens; identical to SEQ ID NO: 4264
  chr5:139493543-139493573
  hyper

SEQ ID NO: 112131 - DNA, 582 bp, Homo sapiens
  chr5:139525365-139525947
  hyper
ctcatagttgctttgttctatcgtctctccccatgccttcaaaggcggcctgccttcccagttcccagcctcccgccagattcttgcgtgacctcgggcggcacccagtgctgctgtggacagctcattccgccgcggcggcggctgcggctgcggcggctacaacggctcccggcgtgtccccggcgccgccagggggcgaatggggtgcccgccggctcctcggactccgggcgcgccggcactgcgctccggagaggcccggccagggaagaagcaacttccctccgccgccgcagaccagccgggcagagacttccagccccaccctcaagccctctcggtggctctgtgcgcccaggcctaggggtggggggccgtaggtgctgcgcgcccgcacaggtggtcaggccgtcagcatgcctggctcgtcgcgcacagaacactgcccaggggttcacccagctcccctccctcccctccgctgccctcctggcagctccagctctgctctcgcggctttccaggttttggggtgggtgattgagtaggccgcacctgggacactgtgactggaggacg

SEQ ID NO: 112132 - DNA, 31 bp, Homo sapiens; identical to SEQ ID NO: 4265
  chr5:139537078-139537109
  hyper

SEQ ID NO: 112133 - DNA, 292 bp, Homo sapiens
  chr5:139554292-139554584
  hyper
cctcagccccattccgctcaggtacagctcgggaagtaagcccccaaccctagttgggtctggaccaacaagacacgaggaggcagcagcccacagccgacccctcatgccacgcactgagcagggttccgcatggacgctggtcttgcctcccaggcgcctgaactagcggagttggggtatcgggtggagtctcggagaaccaatccaatctgagggggacgcctgtgggagtcctaagtatccagcgcagctgggaggcccacgttgggaagtcggagaccgaccccgc

SEQ ID NO: 112134 - DNA, 30 bp, Homo sapiens; identical to SEQ ID NO: 4267
  chr5:139554994-139555024
  hyper

SEQ ID NO: 112135 - DNA, 30 bp, Homo sapiens
  chr5:139555285-139555315
  hyper
cgagctgggccagccgggggcagggggcag

SEQ ID NO: 112136 - DNA, 30 bp, Homo sapiens
  chr5:139555518-139555548
  hyper
gggaactaatctcccggtagcagtggaggt

SEQ ID NO: 112137 - DNA, 112 bp, Homo sapiens
  chr5:139682660-139682772
  hyper
tggtgcactgtaagcgcctgcgcagtgggagttggactgaaatagggtggggaagggcgcgtcttactttgtgcgccggtctttcttctgcgcctgcgcatgagttggacta

SEQ ID NO: 112138 - DNA, 64 bp, Homo sapiens
  chr5:139725674-139725738
  hyper
ggcgagaggccaggccgcatcagacacccgcccagacccctgaccaacacgcaccgatgccgac

SEQ ID NO: 112139 - DNA, 152 bp, Homo sapiens; identical to SEQ ID NO: 42052
  chr5:139725996-139726148
  hyper

SEQ ID NO: 112140 - DNA, 275 bp, Homo sapiens
  chr5:139726429-139726704
  hyper
gcaggtggcggagagcggttcctacctttccccaaacgcctgtcactctgcagccttgtgactgactgctgagctgagttctgttccgggcctggcctcttgcttcatctaagccccataccaggggtctccatccctgtcaccctctaagtttcagaagcccaccttttggcctaccaacacggcaagtatcaaataataattaattcatctatcatttaaaaattagacacgtgaatgccagccgttctcataaacccgagataaccagagtt

SEQ ID NO: 112141 - DNA, 30 bp, Homo sapiens
  chr5:139737410-139737440
  hyper
gcctccaggagaagcgcggctcttttctca

SEQ ID NO: 112142 - DNA, 259 bp, Homo sapiens
  chr5:139742885-139743144
  hyper
agaggcccaggtgtcgccatggttccctcgccggcagagacaagagcagccgctagggggcagggcgccacgagctctggaccgagtcgcagactggttggagatcctcagccaacctggggttcccctcctcctcaggcttccctcgcaacagcgggagatcagaggtcccgccgtcccgcgcctgacctcggctgaggacaggcaccgccatgggccacacgcacacagcccggagttgcagcggaccggcaggtga

SEQ ID NO: 112143 - DNA, 30 bp, Homo sapiens; identical to SEQ ID NO: 42055
  chr5:139780656-139780686
  hyper

SEQ ID NO: 112144 - DNA, 30 bp, Homo sapiens; identical to SEQ ID NO: 42056
  chr5:139781375-139781405
  hyper

SEQ ID NO: 112145 - DNA, 423 bp, Homo sapiens
  chr5:139927088-139927511
  hyper
tgtggggcctgggactttggacgcatttccagctttctctgaaccgggctggcttcctagcagatagggcgggaccgtcgggttgagtgacggccggtggcccgccctgggcgtgacgttgttctagtgttgttgccagcagctgcacgtggtcggctgagtccgcctcagactcagagctgcgctcctcgacctcaacgccaggcggttactttgctgctcctcccgctcgctatgtcaacgtccactagctgcccgattcccgggggccgggaccagctgcccgactgctacagcaccacgccggggggcacgctatacgccactacccccggaggtcagcgggccgggcaggggtccgcaggctgcggacatattagcgcgtgcgtgttgttgcggggcgggggtaggggagggacagac

SEQ ID NO: 112146 - DNA, 30 bp, Homo sapiens; identical to SEQ ID NO: 42058
  chr5:139936767-139936797
  hyper

SEQ ID NO: 112147 - DNA, 30 bp, Homo sapiens
  chr5:139937154-139937184
  hyper
tggttcacaaccgtcgggagccgctgtggg

SEQ ID NO: 112148 - DNA, 99 bp, Homo sapiens; identical to SEQ ID NO: 42059
  chr5:139944031-139944130
  hyper

SEQ ID NO: 112149 - DNA, 206 bp, Homo sapiens; identical to SEQ ID NO: 42060
  chr5:140011815-140012021
  hyper

SEQ ID NO: 112150 - DNA, 167 bp, Homo sapiens; identical to SEQ ID NO: 4271
  chr5:140012125-140012292
  hyper

SEQ ID NO: 112151 - DNA, 281 bp, Homo sapiens
  chr5:140012364-140012645
  hyper
cggctctaggttgagaccgccggcatggatctccacctctactgcagacacacactggaaggcttcggaccagtcgggctgaggttcggagaagttgcagacgcagcggaaatcttcatcgtccagctcacaaggttctggcgtggtcgcagagacgtgcaccagcggcagcagcagcagcaacaagcaggacgcgcgctcctggggagagagcagaggtctaggaggccccatccaacccctgtggctcccgagtggcacgcgttcgaccccaagaccct

SEQ ID NO: 112152 - DNA, 30 bp, Homo sapiens; identical to SEQ ID NO: 42063
  chr5:140018896-140018926
  hyper

SEQ ID NO: 112153 - DNA, 30 bp, Homo sapiens
  chr5:140019272-140019302
  hyper
ttctgggttgtggtcgtccttcccacgctc

SEQ ID NO: 112154 - DNA, 30 bp, Homo sapiens
  chr5:140026718-140026748
  hyper
gcaaggctaaagtccgagttctagtttctc

SEQ ID NO: 112155 - DNA, 133 bp, Homo sapiens; identical to SEQ ID NO: 42064
  chr5:140027366-140027499
  hyper

SEQ ID NO: 112156 - DNA, 35 bp, Homo sapiens; identical to SEQ ID NO: 42065
  chr5:140044227-140044262
  hyper

SEQ ID NO: 112157 - DNA, 30 bp, Homo sapiens
  chr5:140044467-140044497
  hyper
gcggcggcgcggctcgcagtccttctcagc

SEQ ID NO: 112158 - DNA, 30 bp, Homo sapiens; identical to SEQ ID NO: 42066
  chr5:140070857-140070887
  hyper

SEQ ID NO: 112159 - DNA, 273 bp, Homo sapiens
  chr5:140071089-140071362
  hyper
tgactagtgaggtgcgcaaacgcccgagttttccctggtgcgcgggttccgcctttgcagtgccctccacccttcctggtgtctgacccgcctccttcccaggccttttgttcctgtcccggaaagccggcgtcctgccgcgcgatgcccctgctcggacttcttcccaggagggcctgggcttcgctgctcagccagctcctgcgaccgccctgcgcttcgtgcaccggggcggtccgttgccaaagccaggtgagcgagacagaattatct

SEQ ID NO: 112160 - DNA, 30 bp, Homo sapiens
  chr5:140167976-140168006
  hyper
tcatcgccatctgcgcggtgtccagcctgc

SEQ ID NO: 112161 - DNA, 207 bp, Homo sapiens
  chr5:140187030-140187237
  hyper
aattctcggatcgaccgggaggagctgtgccggcggagcgcggagtgcagcatccacctggaggtgatcgtagacaggccgctgcaggttttccatgtggacgtggaggtgagggacattaacgataacccgccggtgttcccagcaacacaaaagaacctgtccatcgcggaatccaggccgcttgactctcggtttccactagag

SEQ ID NO: 112162 - DNA, 30 bp, Homo sapiens
  chr5:140262288-140262318
  hyper
agacctccggaaactcgatttccactagat

SEQ ID NO: 112163 - DNA, 480 bp, Homo sapiens; identical to SEQ ID NO: 42068
  chr5:140305691-140306171
  hyper

SEQ ID NO: 112164 - DNA, 175 bp, Homo sapiens; identical to SEQ ID NO: 42069
  chr5:140306444-140306619
  hyper

SEQ ID NO: 112165 - DNA, 112 bp, Homo sapiens; identical to SEQ ID NO: 42070
  chr5:140306674-140306786
  hyper

SEQ ID NO: 112166 - DNA, 97 bp, Homo sapiens
  chr5:140307010-140307107
  hyper
cggcagcgaatacccggagttggtgttggagaaagcactggatcgcgaacagcgcgccacccacctgctggtgcttacagctcgggacggcgggcta

SEQ ID NO: 112167 - DNA, 358 bp, Homo sapiens
  chr5:140345950-140346308
  hyper
tgagcagtccgggttcgctgtccgccacttcggcgcggaatcagagcaggacttgctgagccctcctaccgctccctttccccctccccctctgtcttcccttctgtttccttttccctccccctggagctgtagcggcagcagcagcaggaagccgagccgggttgagcgactcggaggcgagcggaggagctggaatatggggagtcagcgaggacggtggggccaggagcccttgggagggcctacggagggagcggccccaggcgctttctagagcgtgagcggtgggggagcaggcgcagggtggcacgagcggaggcggggcccgggcgtggggcacggctggggaagctgc

SEQ ID NO: 112168 - DNA, 272 bp, Homo sapiens
  chr5:140381528-140381800
  hyper
aggaggagggagaggcggggtgtctctgcgcggaaagcctggaagttcacttgcaaacacagaatctgcacagccttcggtgccctgactctttcctgggcatccagaggcagcagcagccgccagcgccaaagaacgagcagtccaggggctgggccggaaacggctataatcatttaatagcctttgccggctgcactgacttagcagagtgggcggtaggcaggctccagagtgctgtctggcaagatagtccccggctttaatcaaaa

SEQ ID NO: 112169 - DNA, 353 bp, Homo sapiens; identical to SEQ ID NO: 42073
  chr5:140419803-140420156
  hyper

SEQ ID NO: 112170 - DNA, 210 bp, Homo sapiens
  chr5:140431052-140431262
  hyper
ctgatggcgggtacgcgcagaaaatctttgcaaaacaggcaagtgggatctcttctcatttttctgtgcatatctgtgggggatgcgacaactatccgctattcagtggcagaggaaatggagagcggctcgtttgtggccaacgtagctaaggacctaggactggaggtagggaagctggctgcgcgcggggcgcggctggtttccgag

SEQ ID NO: 112171 - DNA, 30 bp, Homo sapiens
  chr5:140501364-140501394
  hyper
cgtattcttctgtgtcgctagacgcaatca

SEQ ID NO: 112172 - DNA, 30 bp, Homo sapiens
  chr5:140561903-140561933
  hyper
tgcaggttaagatgacggaaaatacaactg

SEQ ID NO: 112173 - DNA, 32 bp, Homo sapiens
  chr5:140593427-140593459
  hyper
aagatcctgtgaggacgcgtggtggcgctgca

SEQ ID NO: 112174 - DNA, 112 bp, Homo sapiens
  chr5:140613723-140613835
  hyper
tcacaaaaatgcaactcggaaaataggcatatagaaggagcatataatttaaatttatagacaaacacacaagaaaaattaatattttgtctgaaacgtattggaatttatc

SEQ ID NO: 112175 - DNA, 534 bp, Homo sapiens; identical to SEQ ID NO: 42075
  chr5:140700003-140700537
  hyper

SEQ ID NO: 112176 - DNA, 30 bp, Homo sapiens
  chr5:140718268-140718298
  hyper
tttaggcctctgagcgtcgctgttgaccac

SEQ ID NO: 112177 - DNA, 30 bp, Homo sapiens; identical to SEQ ID NO: 4278
  chr5:140734937-140734967
  hyper

SEQ ID NO: 112178 - DNA, 121 bp, Homo sapiens
  chr5:140797157-140797278
  hyper
ctgggcgccgccgtcggccagtgcagagcaagcgctgacgccggggatccctcagcctctagcctgggattccctgcgcagccaacaacagaaaagaaaaccagctcccacacagaggctc

SEQ ID NO: 112179 - DNA, 151 bp, Homo sapiens
  chr5:140797327-140797478
  hyper
cgggactcctcctgtcctgggccgaatgctcttttagcgcggtagagtgcactttctccaactggaaaagcggggacccagcgagaacccgagcgaacgatgggagggagctgcgcgcagaggcgccgggccggcccgcggcaggtactat

SEQ ID NO: 112180 - DNA, 428 bp, Homo sapiens
  chr5:140800536-140800964
  hyper
agaatgggctctaggcgccgctgctcaccaatcagggaatgggaagctgcgcgccattgagtccctccctcccccgcctctaccacacaaagcggaatgagatggatactcacagatcctgacactggagacttagaagtattttccttcgctttctgatatattttggatgtagtcggcctaggacttcatagatacataagccgattcacaaccaaccagctcgagaaaccgcggaatatcggcttagagcctgccatggcgaatcggctacagcgcggggaccgcagtcggctgctgctgctgctgtgcattttcctggggacgctgcgggggttccgggccaggcagatccgatattcggtgccagaagagaccgaaaagggctccttcgtgggcaatatctccaaggacctggggctggagcc

SEQ ID NO: 112181 - DNA, 104 bp, Homo sapiens
  chr5:140801034-140801138
  hyper
cgaagcggcagcttgatcacggcaggcaggatagaccgggaggagctctgtgagacggtgtcctcctgttttttaaatatggaacttctcgtggaagacacctt

SEQ ID NO: 112182 - DNA, 30 bp, Homo sapiens
  chr5:140810525-140810555
  hyper
tccccagaggtaggacgcagcttttcgccc

SEQ ID NO: 112183 - DNA, 1093 bp, Homo sapiens; identical to SEQ ID NO: 42079
  chr5:140855365-140856458
  hyper

SEQ ID NO: 112184 - DNA, 94 bp, Homo sapiens; identical to SEQ ID NO: 4281
  chr5:140856546-140856640
  hyper

SEQ ID NO: 112185 - DNA, 15 bp, Homo sapiens
  chr5:140864511-140864526
  hyper
gcctattggctgagc

SEQ ID NO: 112186 - DNA, 194 bp, Homo sapiens; identical to SEQ ID NO: 42081
  chr5:140892329-140892523
  hyper

SEQ ID NO: 112187 - DNA, 25 bp, Homo sapiens
  chr5:140892898-140892923
  hyper
gcgggggcgggttggcgccgggcaa

SEQ ID NO: 112188 - DNA, 103 bp, Homo sapiens; identical to SEQ ID NO: 4282
  chr5:140904507-140904610
  hyper

SEQ ID NO: 112189 - DNA, 30 bp, Homo sapiens; identical to SEQ ID NO: 42084
  chr5:140997392-140997422
  hyper

SEQ ID NO: 112190 - DNA, 8 bp, Homo sapiens
  chr5:141016087-141016095
  hyper
acccccgg

SEQ ID NO: 112191 - DNA, 4 bp, Homo sapiens
  chr5:141016113-141016117
  hyper
cgat

SEQ ID NO: 112192 - DNA, 30 bp, Homo sapiens
  chr5:141017254-141017284
  hyper
gacgcccctggagccggaaccccagcagaa

SEQ ID NO: 112193 - DNA, 484 bp, Homo sapiens; identical to SEQ ID NO: 42085
  chr5:141030746-141031230
  hyper

SEQ ID NO: 112194 - DNA, 69 bp, Homo sapiens; identical to SEQ ID NO: 42086
  chr5:141061848-141061917
  hyper

SEQ ID NO: 112195 - DNA, 30 bp, Homo sapiens
  chr5:141071610-141071640
  hyper
tcttagctcattcacgttagcctggccgcc

SEQ ID NO: 112196 - DNA, 30 bp, Homo sapiens
  chr5:141082231-141082261
  hyper
aggactgccagcttcgccggtcaaccgccc

SEQ ID NO: 112197 - DNA, 30 bp, Homo sapiens
  chr5:141228976-141229006
  hyper
ctcctgccccgccacgcccccaactgcaga

SEQ ID NO: 112198 - DNA, 1248 bp, Homo sapiens
  chr5:141255433-141256681
  hyper
acacccacctactcccgcgccccccaccccctacaaacacagctagacctccggcttgtcataaaaactttctgggcggccccttccctggcagctcccgagggttgacccagagcaggtgctagaagcctcgcggcgtcttcctgcacgaagcgacccaagcagccccagtccgcaccgccttggtcagcgggcgctcccagcacacacccagcgcgcggagcgactcctcccagaggacgccgagtgtgtgtgtgtgttgcggagattagggggtggcgggggggacggcggcagtttcttgggctctggcggccccacccccaccccggcagcgcccagcctccaggaacccaaggcaaggctagggcgcggcgtggtgagaacgcgcttcggctagtggggggagcccttgcgccccccgcacccaggccaccgcggggaatccctcctccccggcatctccggcctcggcctagggtcccccgcaagccggagccggcgcgagcggcgcagcgggcgccaggagggggcggggagggagccggcgccggaatcacaaagccgcgaacccggctaggcggggacattctcataaaaccgaccctctcgtggcgagcagagggggttttttgccctacgctcaatcctccaaggcctcagtgccgcccccagtctttcctggcagaagaaatagtagccgaccactgttggggaaactgaggccagaattctgacttacagagggtagctggggggaaggggtgcgagaccacctcgcctacaaattctgctcctatgcctgccgcgatctccgttctggctccagggcctgcccgcgcacacactggcctacagcggggaccaggcggagggggcgctcaggtgtgagacgaacccaggtgtgcgggacccaccaaggtgtgtgggacccaggtgtgctggagacccaggtggctcagaaaactcagctaaatggctggaagagggtcgcaatcaccgtcccaggctagcaccctctacaaaggaacctggggccccagagctccggggaggcgggatggcttggccagccaggtccagcttgttcccggaacaccagccggttcggcccgggagtgggggttggggaggcgccgactgggaagccggcaggccggcccagccttcccgctgtgccgatatttacaataataatgtcgcgattaacgtggcggggcgcttggggctcgccgaacgaccccggcg

SEQ ID NO: 112199 - DNA, 882 bp, Homo sapiens
  chr5:141257148-141258030
  hyper
tgctctgtaaagccacgggttgtgtgtcggtgctgctgatcgtgcagacactgaagcggattctgagctggcgacggtgccccagtgggcgctggtgtgcgggaggtatgtctgtgtgcacatatgcagggatgtatgtatgtgtgtatatatgtccacggtctggccctctgggtgcccgcgagaagctggaagcggctgagtgagccgaggtagttgcccaacaagtgtgtatgtatgtgttgtggacaacggtccttgcttgctccgtcctccgggagacccccaccaaactgggggccgcgcgcttccccaaacccatcctccacgccgcgcgctcctggagtctccttatccccgtctctccgagcgcgcccaggtttgggacgcggggactagggttctgctcagcaccccctcccctccctcggcttctcgccgcggacctgggaggacggaatccctcagccgcatcccctgctatgggctcccagcagcccccacctcagccccctcgcgccgagctcgtgttgggcccccgcggcctcgctccgccgagcgcccctccctcagctcccgccggccatgaccgcttcgggccccaagccgctgctgcctccaccgccgccggatccttacccgcctccgggcagcgccggccgcccgccccgctgtccatgagccgccgccggccccggcctgggctgcggctccgcacggctggggctggagctgcagttcgggctccggctccggctccggctggctctgggcgcagcagcccggcggctttgcgtccgcgccgcgctcccgctccccgagtgtgtgaggcggcggcggcggcggcggcggcggcggcggcggcggcggagccagcagaga

SEQ ID NO: 112200 - DNA, 176 bp, Homo sapiens
  chr5:141258622-141258798
  hyper
cacaagcgtgaagacgaagtgctgctcctgagcttaggctattcgagggtcccctgatcacctgccctctgcacggcgtagtgctgcggccacacgtatttgccagtgacttacattatacagtcaccgggtccctgccccgcgaggccgcgcagtgtcacggcctgtgtcacacg

SEQ ID NO: 112201 - DNA, 356 bp, Homo sapiens; identical to SEQ ID NO: 42090
  chr5:141262786-141263142
  hyper

SEQ ID NO: 112202 - DNA, 70 bp, Homo sapiens; identical to SEQ ID NO: 42091
  chr5:141263260-141263330
  hyper

SEQ ID NO: 112203 - DNA, 30 bp, Homo sapiens; identical to SEQ ID NO: 42092
  chr5:141293770-141293800
  hyper

SEQ ID NO: 112204 - DNA, 55 bp, Homo sapiens
  chr5:141348499-141348554
  hyper
gtgagcacagggctcgcagtaagtgggggtgacggtggtcgcgccggcagcgccg

SEQ ID NO: 112205 - DNA, 30 bp, Homo sapiens; identical to SEQ ID NO: 42094
  chr5:141349088-141349118
  hyper

SEQ ID NO: 112206 - DNA, 30 bp, Homo sapiens
  chr5:141392721-141392751
  hyper
actcagtcccacctcggtccctggccccgg

SEQ ID NO: 112207 - DNA, 30 bp, Homo sapiens; identical to SEQ ID NO: 42095
  chr5:141488576-141488606
  hyper

SEQ ID NO: 112208 - DNA, 30 bp, Homo sapiens
  chr5:141489155-141489185
  hyper
agatttggaagaggcgatgtttggctgtgg

SEQ ID NO: 112209 - DNA, 30 bp, Homo sapiens
  chr5:141695815-141695845
  hyper
ctgcagtgcctgacacggaaccccaggaag

SEQ ID NO: 112210 - DNA, 74 bp, Homo sapiens; identical to SEQ ID NO: 42096
  chr5:141703931-141704005
  hyper

SEQ ID NO: 112211 - DNA, 266 bp, Homo sapiens; identical to SEQ ID NO: 42097
  chr5:141704447-141704713
  hyper

SEQ ID NO: 112212 - DNA, 85 bp, Homo sapiens; identical to SEQ ID NO: 42098
  chr5:141705341-141705426
  hyper

SEQ ID NO: 112213 - DNA, 342 bp, Homo sapiens; identical to SEQ ID NO: 42099
  chr5:141736298-141736640
  hyper

SEQ ID NO: 112214 - DNA, 30 bp, Homo sapiens
  chr5:141736862-141736892
  hyper
gctgccccagctcgcgttccagttgctttt

SEQ ID NO: 112215 - DNA, 224 bp, Homo sapiens; identical to SEQ ID NO: 42100
  chr5:141931130-141931354
  hyper

SEQ ID NO: 112216 - DNA, 147 bp, Homo sapiens; identical to SEQ ID NO: 4292
  chr5:141931424-141931571
  hyper

SEQ ID NO: 112217 - DNA, 30 bp, Homo sapiens; identical to SEQ ID NO: 42102
  chr5:142035324-142035354
  hyper

SEQ ID NO: 112218 - DNA, 31 bp, Homo sapiens; identical to SEQ ID NO: 4293
  chr5:142092798-142092829
  hyper

SEQ ID NO: 112219 - DNA, 30 bp, Homo sapiens
  chr5:142150904-142150934
  hyper
ccctgccgagggggcgctgcctccccttgg

SEQ ID NO: 112220 - DNA, 797 bp, Homo sapiens; identical to SEQ ID NO: 42104
  chr5:142781701-142782498
  hyper

SEQ ID NO: 112221 - DNA, 123 bp, Homo sapiens
  chr5:142782625-142782748
  hyper
cgtcgcccggcccttgccagccccccacccccactccccgaggctaataaaagtttgtaggctcccgcggcggcccccgagttgtctccggtcccagcggcacctcgggggagcgagcgcgcc

SEQ ID NO: 112222 - DNA, 409 bp, Homo sapiens
  chr5:142782794-142783203
  hyper
cgcccgccaccgtccgcagttcccgccgcagccgagataaacaacttagcttgtgaacgcagaaggagcaggagggaaatatattttttttttctaaaaaaaggaagtaaacagccgcccctttctccatgggtggggggagagcccctatttaagaaagtctcccattgcccagctgacaagccagccctccgccccgcgccgggctccgcgggtcgaggttccgggcgcgcgtgccccgtcccggtcccagctgcttcggccgctccggctgcggcgtctccttccacccacagaatccgtccccgacgggcaggcggtgactcgggctcccgtcacagacacgagctcgcaaaatggaggaggcggcggcggagggaagagagcgcggacacgcgaaagggcagcc

SEQ ID NO: 112223 - DNA, 1712 bp, Homo sapiens
  chr5:142783606-142785318
  hyper
cgctacctccttcccgcccccgcccagctccgcggctccagacccactcgggagctcgctctgccccttggcggcaagcgccgccagtgcccctgcgggtgacagcgggcgggccacaagagccggggcgcctcccgcggctgagctgcgtgagtggcccgcgccgccgccgccgggccgagttgcgtgaagtgtgtcacttcgaaaggggctacggggttgcacggaaacggtgccgcagcgtctcggccgcgctcggggccgggcggcctgacacgccctctggggaggcttcagggaagggacgggatagcgggggtcggcgcatacgtactttgggcccggggggagtcgcgtgccggcaggtcccccaccaccgcatcatctgggcggccgggtcttcagctgccgccgccgcgctctcgcactgggagagaagttgcaaagcagaacccaccctcccccgcgccccgaccgtcccccaccctcttccccgagtctgcgaggcggcggcggcggcagaaggaggcgccgcctgccaagttcaacccccacccctcccgcccaatgtgctcacactcgaaggaagttgcacgccaaatgcaaaacctccagcgagctggatttctttgcactttttttttattattatgattaaggaaagcagggggcggcaggcttaaaagcaagttgcaggcgaaatagtaagttgctggcgaaatatagccccccttccgaaactcctgacctcttcttccaccccggccagggcccgcgtccaagttcccggtgcaggccccacccccgaatcttgacatttgctgccctcgactctgtgcgttgctcaccctatcacgttcataggacccctgcccctacaaataaaacaaaatacaggcagctttaaaatgccagcgttcaactccctacagatgttcctgttaggagcttccccctcagtccaaggggaagggaactcgtggtccgtcctgagaaaggagagggccgtggggcgaggggtgcccgtgcgggaagcccccgccccagctcccttccccagctcgccgcgtcgggaaggcttggacgatgccgggaccgagcctcctaccttgtgcggcacagattatgatttttgtgactctgggaaaggttgtgctgtgtgggtttagggtttggggaggtaacttttgcgcccccacaggtgacatcgcttgccagctcctgacacgggcgggggctgccgcagctccacctaatcctgctcgggcgctcggccacagccactctctcacctcccgccgcgctcagactgacggcggctccccctgctctgacatcttgaagacgattggggaagcgcgtcccggaagccgcccgccgccatcttggtagggtacagtgtcgccagcccgtccccgcggccaccatcttggcaaaggttcgcgatcgcgggtagcctaagccgtccttccttggttctcaagggtaaacggttccctgtgcattgtctgatgtgaaaggaaagaagtaggctttcagcaagcctcttgtccggagacgatctacgggggccgcctccagaggattctggagccgccatcttggcaaaggaagagatactcgccacctcggaaaagaagagggaaccaaccgtatgccaacgtagaaccctcagccagaagaatttttatgaagggcgctgagcaactcca

SEQ ID NO: 112224 - DNA, 256 bp, Homo sapiens; identical to SEQ ID NO: 42108
  chr5:143550288-143550544
  hyper

SEQ ID NO: 112225 - DNA, 280 bp, Homo sapiens
  chr5:143584758-143585038
  hyper
ccgccccaagccccgcgcgcctggcaatcgcgtgcccaccgccggagcgcggcgtccccgtgcagtcctggcaacctgtcaccgaggaggacgtgactcggagctgcctccgctttctccaagccatattcctttaagatgatgtaatagtcatttccctggatggtttcttgcctgcactgctgaaacaacagcatccgaactgcactgggaactgtggaaccacccagctccgccgccagagaagccggagccccgggccccccgccggcatctctgc

SEQ ID NO: 112226 - DNA, 44 bp, Homo sapiens; identical to SEQ ID NO: 4298
  chr5:145208532-145208576
  hyper

SEQ ID NO: 112227 - DNA, 975 bp, Homo sapiens
  chr5:145214425-145215400
  hyper
cggaaagctccacacgtcggtcatctgcaactccacggagctcacgagctgggattcccggaggctcttcctaaaaggaaagcctcttctttcagctggggcaggtgtgaacgtgatgccaagcacggccccttttcccgctccctgtaaagggagtcttcgaggaaatccctctcgacccacacatccctgaagcaaagcccgcagctggaaagagacactggcggtgccagcttccgcgtggatgaaggagaggagagaggggcaagcagcggaggcagcgcgggatacggaaggtggaagcggggcggtacctttcggagaaagctggcgaccacctgctcgaaggggtacttgtacacctggtgcacatccaccgagacccccatccccgcgcgccgcgggccccgcgcaccggccacgcctccgcgagctcagagctgcccagggctccgcagaggcccggaggcgcccacactcggacagccacatgggcgtggcctttttcctccgcttttcaaactttcgaaactttattggccactcggagaaacgcgcagtcggccacgcccacgcccctactgccagagtccggggcctggggttacagagcgcgggaggcgctggagcgctcccagagcacccggggccccgcggtctccacgctggcggcgccagagcggccctggtgccctcccgcggccgcgcctgccgagaaaagcttctctgcctgggagccatcacgccccgccccaggaaacctggaccttgggcttatgcgtttatggtatcaccgcctggagtcacagaataagccgtggttggcagcacgggaaaaaagtattaataaggaaggcctggtgtgacaaaggccagcattactcatgccaccaggcagctgcctctgaggcttgggtttgggcctcgtgtaaggtaaagattgcctcgggaataagaaccgcgttttagtgcacc

SEQ ID NO: 112228 - DNA, 147 bp, Homo sapiens
  chr5:145316086-145316233
  hyper
agggctgggtaaggcgatcccttgaaatgagtaagactgagtggttaaagttttcaaagcggttggcagcagcggcgcttggaggaaaggaagccggttggagggcgcagcgcacccctgctgcgcggaggagggggctgagctgaa

SEQ ID NO: 112229 - DNA, 30 bp, Homo sapiens
  chr5:145562355-145562385
  hyper
ggaaccggcagtgacgtcactggcatgttg

SEQ ID NO: 112230 - DNA, 30 bp, Homo sapiens
  chr5:145583107-145583137
  hyper
tcggcactgtctcccgcccacctcagcctt

SEQ ID NO: 112231 - DNA, 293 bp, Homo sapiens
  chr5:145583393-145583686
  hyper
gagccgggctgggccggggccggcgaacgtgggcgttgggggctcgcgggggcgtgggggaggggaggtggcgtggggggcggcgctgaggggccgcggccgggaggtcccggcgacgccttccctgtagtactatcaccattgtggtgggggtgagggtgggagaggagcgctggggacggagaggcgccgtgaatatggggactgggggggcaggcaaggacagcgaaggcttttcaaacgcaaatatcggggtgctggaaggggtagcaggggccgtgagggaatttaaa

SEQ ID NO: 112232 - DNA, 248 bp, Homo sapiens
  chr5:145713641-145713889
  hyper
cgtgccgagccctcacggacgctcggcctctggcccctgaatccctctgggcgtctcggatcctctgagccactttgcagacaatgcaaggcagcggccaacagacgagtcccgcagcagctgcgcaggcggcgagtacatgtgagaagtttgtgaaaggcgaccagagaaagggagaggaaggcaagtcaggcggctgcgaacacctggccaggcagccccgccagctgcctcgctgcgcgatggca

SEQ ID NO: 112233 - DNA, 316 bp, Homo sapiens
  chr5:145716880-145717196
  hyper
attccatttaagagccgccgaaaccgaggctcagagggctttagcgaaagggttgcgcttggctctaggcacctgggctgagtctttttcccaccatcgcagggcgggaaccagcggagggggctggctcggatggggagaaaagcaactggagggcgccgaggggaagagggagcccggatctgtcagggcgtcctcttggactaagggatgttcccctaaaccacaccaccccacctcgttcagattctgggaaacccggcacgcacataccctgcacaataacaggcagggtgaggtctctaagccccgaaga

SEQ ID NO: 112234 - DNA, 94 bp, Homo sapiens
  chr5:145717248-145717342
  hyper
cggggtttctctccgaaccggagtgcagcgtagtcgaggtccaggattccccatccattattcacgatgtttactagagcggggcaagggagag

SEQ ID NO: 112235 - DNA, 551 bp, Homo sapiens
  chr5:145717843-145718394
  hyper
gaaagaaaggcaagcgtggggaggaagccaccccggactgagaaggcagttactgcccctacctctaccccggagcgcggttgagggaggtggggcaggggtcacctgggcctcgttctggcagcccctcaccctctccagggcccgtctgggcgcttggaggcgcctcctcgctgcgccgcgggaccggactctggtggacagcttgggcgtgaggccaggagcgccctggaaatgggcagtttggcggcagccgggccgacggagtgtgtgtgtgtgtgtgtgtgtgtgtgtgtgtgtgtgtgtgtggtggagaggggaagttggagtagggtcaacttcctgccccagctcagcccagggctacccttttatccaggcagttcgagctgggacaggacggagaggttgggacttttggggtggcatgggggaagggaagtccacgaagaagaaagaatcggaaaggtctggcgggttggagccagcggggcggggcggactgggagaggccaggccaggcccgggtataaaggctgtggagggggcgg

SEQ ID NO: 112236 - DNA, 1334 bp, Homo sapiens
  chr5:145718419-145719753
  hyper
cgctagctgctgtctctcctcacctcccgggccgcccctgcgagtccccggcgcgtgagcacgcctgcgcgcgcccgggcccttcctggcaggctgcttgtaagatgagtgaagaagcaggtgggggagaggggaggcagcgagcgagagggcgaggggagcgcgggcgctgagcagcgctcacttggagagcggcaagcaagctagacaagcctgattccatgtcacccgctgccaccctgccaggagcgcgaagatgatggccatgaactccaagcagcctttcggcatgcacccggtgctgcaagaacccaaattctccagtctgcactctggctccgaggccatgcgccgagtctgtctcccagccccgcaggtacgtagtggagcataattaccgctctaaggcacattttttgacaggcactagcttcatgtttttttcatgtcgcccagaacaatcgccgctgtctgaacccctctccttgtctcccccgcgttctctcccggcgcgctctctctctcattcatgtctctgatccacacgtctgttccagcagagccgctgcctccgtattaatttttatgacctgggctttgaggagaggcatctcggttgcttgaaaatgtgttttaatcctgtgttgacagtattccctactgaccgtgctgtgcgccttctcgcttgcagctgcagggtaatatatttggaagctttgatgagagcctgctggcacgcgccgaagctctggcggcggtggatatcgtctcccacggcaagaaccatccgttcaagcccgacgccacctaccataccatgagcagcgtgccctgcacgtccacttcgtccaccgtgcccatctcccacccagctgcgctcacctcacaccctcaccacgccgtgcaccagggcctcgaaggcgacctgctggagcacatctcgcccacgctgagtgtgagcggcctgggcgctccggaacactcggtgatgcccgcacagatccatccacaccacctgggcgccatgggccacctgcaccaggccatgggcatgagtcacccgcacaccgtggcccctcatagcgccatgcctgcatgcctcagcgacgtggagtcagacccgcgcgagctggaagccttcgccgagcgcttcaagcagcggcgcatcaagctgggggtgacccaggcggacgtgggcgcggctctggctaatctcaagatccccggcgtgggctcgctgagccaaagcaccatctgcaggttcgagtctctcactctctcgcacaacaacatgatcgctctcaagccggtgctccaggcctggttggaggagg

SEQ ID NO: 112237 - DNA, 102 bp, Homo sapiens; identical to SEQ ID NO: 42121
  chr5:145719834-145719936
  hyper

SEQ ID NO: 112238 - DNA, 300 bp, Homo sapiens; identical to SEQ ID NO: 42122
  chr5:145720018-145720318
  hyper

SEQ ID NO: 112239 - DNA, 37 bp, Homo sapiens
  chr5:145722185-145722222
  hyper
tgggtttgccctccgcgcagtgcgacaccccctaccg

SEQ ID NO: 112240 - DNA, 14 bp, Homo sapiens
  chr5:145722452-145722466
  hyper
tgcagaggagacaa

SEQ ID NO: 112241 - DNA, 261 bp, Homo sapiens
  chr5:145722560-145722821
  hyper
cgggctctggagagaaccggaaatctgcctccatcctcttttcgaaaagttctctgccgttatttatttagtctttttttttcttttaattgacaactgcaaaagtttgggagacttttacggagaggatgagaggagctgcctcctgagcgcaaggtctgctccaagacggtccagtagcactaggtccagtctccgagccatgcctctgagcctagtcttcttcaggcgcctgagacggtgatgcgcaggagtattttc

SEQ ID NO: 112242 - DNA, 30 bp, Homo sapiens
  chr5:145723054-145723084
  hyper
aggctagtatgcatccgaaccgtgtgacct

SEQ ID NO: 112243 - DNA, 338 bp, Homo sapiens
  chr5:145724336-145724674
  hyper
gctttgcacactgtgcgtcccagctacgcaaggaacgaagtattctctccctgggagtgcctggtgcgaatacatagctcccactgagaagcttggccccggtcagcggctccaggagcccggaacctcctccctggcggaatcccgggcaccattcagccttttcgaaggctccagacttcgcgctgctcctcctcccgaggaggggcggggcgccagagggcaaaggagaagcaagggtcttggactcctcctccttcccagcgaacatcccttccccgccctgttcccactttttggccccggcgccagaatgtttgagccgaaggggcagaacg

SEQ ID NO: 112244 - DNA, 170 bp, Homo sapiens; identical to SEQ ID NO: 42126
  chr5:145725693-145725863
  hyper

SEQ ID NO: 112245 - DNA, 30 bp, Homo sapiens
  chr5:145827157-145827187
  hyper
gccagggcctcctgcgcgttccctggctgc

SEQ ID NO: 112246 - DNA, 1869 bp, Homo sapiens; identical to SEQ ID NO: 42127
  chr5:146256761-146258630
  hyper

SEQ ID NO: 112247 - DNA, 600 bp, Homo sapiens
  chr5:146614039-146614639
  hyper
tattacgatccacatcgcaggggagtgaggcttcccccgcgatatgaggagtaatagcaccgccctctccccctcaaccccccggcttttaggatccacatcgcaggggggtgaggcacccccggcgatatggagagtaatagcaccccccttctcccccccccccccccccggctattacgatccacatcgcagggggggtgaggcagttcccgtgatatggggcgtaatagtacccgctgtgcgtcctggtggctccggacccggcccaagcgcggcgggacctccatccgtagccctctcccccaacgtcgccctcccggggtccttgtctagtctcagcaggcggcaaacggaccccaggcgtctggcgctcacccaggagactgcccagcggtttctggagagagcgctaagcggagacgcccgctggcaagcagatcccgcctccttccctggccaaggagccgcccctccggggtagctgtgcgctgggcggcgctcggaccccttggcagccgcaggtgcctccccagcccagcccagctcagtccagcgcagcccagcccagcccagcccggcgctcgcagcctccgccgc

SEQ ID NO: 112248 - DNA, 683 bp, Homo sapiens
  chr5:146832503-146833186
  hyper
tcccactgcagccacgttagctgtccagtcccataaacgatacattgaaacatgagtcggactgaacgcaggcaagaaggggacacggcgaggacaggtggtccagacaccctgccaccctcgcggcgcaggggtcagagccgtggggctggagctgggagaggggcgcggtcgggctgccaagtacccctggggaaaggtgtcatctctccaaacccagcacggccaaaaggatccttagacaaaaagcacacctcaacctggggcggcaaaaaccgacactccaggcggagcagtggtcctgggagagccgcgagccccgcgctcctggggaactaccggcggtgggaagggaggataaataatccaaagttctccgtgccactgtttgggtttcctctttgttttgttttccccaaaccccagggtcgctcagtctgtgtggcgccggctggactgaccgccgcgctccgccacccggaccccgggtctccgtccctccccggggaccaggccagagaagccggcgggatccgagccgaccccgcccgcagcgcagcggacagggagcgagcgaggagggagggagcagcggcgcccggactcaccgtgatccgcgggatgttcttcttgccttggtaggacatggtggcggtggtggctgcagcggctggctccctccc

SEQ ID NO: 112249 - DNA, 30 bp, Homo sapiens
  chr5:146833455-146833485
  hyper
gaatggctgatctgcgactcctccctcttc

SEQ ID NO: 112250 - DNA, 343 bp, Homo sapiens
  chr5:146888839-146889182
  hyper
agatgctgcaagtggcgacacgcgcgaatccagggtctgggctaggaagtcgcgctacgctcagtggaggatgaccctttcctcctccttgtcccccagccccgtgcaaagtgagctggagaaagttgtgcccgggccatggcggccagggctggagaaaggaacgaaggcaaggagggaagtgacccggggcccccttaccttgtccttggggccgaggttctgcaacacctctttgccggtggcgctccggatctctaccccggcgggggcgggggaggcgggcgcgggctccctgctctcttcccggccttggcccctgcgcggggtgtccccctcgatc

SEQ ID NO: 112251 - DNA, 529 bp, Homo sapiens; identical to SEQ ID NO: 4309
  chr5:146889331-146889860
  hyper

SEQ ID NO: 112252 - DNA, 30 bp, Homo sapiens; identical to SEQ ID NO: 4310
  chr5:147534273-147534303
  hyper

SEQ ID NO: 112253 - DNA, 49 bp, Homo sapiens
  chr5:147763269-147763318
  hyper
aagaccaaaccacacggtggagactggttccgacgtatcagactcagtg

SEQ ID NO: 112254 - DNA, 256 bp, Homo sapiens
  chr5:148033536-148033792
  hyper
cccgtcgtgctgccccgcccccgccgcgtccccaccggcacccgtgggctcctggggtcccgacccccggcgcacttgccgcacatacccgctgccagaggcgagggagcgaggtgccctggcagattcgagcggccacccccagccgctgagccgagcttctgctgccgccgctgccgctgcgctcccagccgctgcctgcgccctccctgccgccccctcgggtgcgggctccagcccccgcgctggggagccg

SEQ ID NO: 112255 - DNA, 234 bp, Homo sapiens
  chr5:148033820-148034054
  hyper
cgggcgcaggaccccagccccggatcacctgggctcgccgcgcatcgtccttctccccaaccgagccggactccacgggctcaacagcccccagccccggtggtccccgctgccctgcccgctgccgcccccactgggcgccagggacagcgggggtgccgctctgccggcagggcgcacaggggagtgggcacagaggcgggctggagcgatctcacccgttccgggctggcc

SEQ ID NO: 112256 - DNA, 30 bp, Homo sapiens
  chr5:148205782-148205812
  hyper
ctcggtgggcactctcgtttccttccgaat

SEQ ID NO: 112257 - DNA, 404 bp, Homo sapiens
  chr5:148206070-148206474
  hyper
tgcctcgccccttcgcggctgccggcgtgccattggccgaaagttcccgtacgtcacggcgagggcagttcccctaaagtcctgtgcacataacgggcagaacgcactgcgaagcggcttcttcagagcacgggctggaactggcaggcaccgcgagcccctagcacccgacaagctgagtgtgcaggacgagtccccaccacacccacaccacagccgctgaatgaggcttccaggcgtccgctcgcggcccgcagagccccgccgtgggtccgcccgctgaggcgcccccagccagtgcgctcacctgccagactgcgcgccatggggcaacccgggaacggcagcgccttcttgctggcacccaatggaagccatgcgccggaccacgacgtcacgcagga

SEQ ID NO: 112258 - DNA, 30 bp, Homo sapiens
  chr5:148415033-148415063
  hyper
acccagtggccagtcggacggcagcgtgca

SEQ ID NO: 112259 - DNA, 457 bp, Homo sapiens
  chr5:148520918-148521375
  hyper
caggacacaaggcctcgtccatctcacaaggcctcgtccatctcccatcacaccctagggcccaggcagaagcccggcggggcggggcctcggacacgcgccggtgcgtccagcaggtggcagcagcgagcggccgcgccccctgcgctgccaacccgcgagcccgcatcatggatgtcgagctcccctatttcgcattgctagccctggaattcgagaccccagacgaggaccaggattcatgaaatcagtcgcaggggccggggcaggggcctctggctcccgacactggccgagaggtgggttccggggcgggtcgctgctccttgaagccgggcggggacgcgctgcccccgccctgcctccctgtggtccacaccccctttgggctccggagccgctgggcaggaatagtccggggtgcgcgcgagcaggcgctgccaaccccacttctgcc

SEQ ID NO: 112260 - DNA, 1172 bp, Homo sapiens
  chr5:148650950-148652122
  hyper
agaaggtgctcaagaaagacccgcggcgaatggagaagacaagcccaaagccaggaaatgggtggcggctgcagggaagggggttttgattccctaggataaaaacgcgctccaacagtctccgcattccggcatggagccggctgaggggtgcggtggtaagaccccatcgctagcggagtgcaagcaaagccgcacacctcctgggtccgggctggggcaggccgcgcgggcgcgggaacgaacgcgtgcggacggggaaaagggtcctccaagcccaagtgggagcgccgcggagggcgagcgagcggcagggcgcggcggggcgtgtgcggcaccacgggacagcgggctgcggcccagggggcgaggcgtgctcgggtctattccgggagcggctctgaggggcgggcgcgggcgcgggcggggcgggggctgccggcgagcatcctgtctgggggaggggaccgcagagagcgccggccgctgggctggcctgagagcgcagcgcgccggccgctaccagccgcgccggagcccctgcgccctgcggcccgctccccggggaccgggccggcgccatggaccgaggccagggtaagaggggccgcgacgcccgcacttgttgcggcgccgggcgggaaagggagactggacgatctgaagccggagaggaggagggagagaggcgggcggtggggcgggggctgaggaacgctcggaggggactgggagacgcggcgcttatgcaaaggtgccttcggctgccgggacaacccggtgcgtgtcaacgcccgtgtcctggggccaactcgcctctcgtgtgtgaaatcagagttttcataggctaacgatttgtaacttcataaaagatccccctctagtttccggaggacagcgagctcctcccacctcattccactctaaaggggaaaacaaggtgtacaggttcaactcccgaaacacccgctgtgggcagcccctagggagaagctctaggggaccgaagtttgcagctgcctagggcattgcgagaaggaggagcgccgtgagcaggcgcgcgtgtgcatgcatgtgtgcgccagggagggaggaggcgggggtggttctatcccgcaccagctgtgtcctcggcccagcccttctctctggaccagcgacaaagttggact

SEQ ID NO: 112261 - DNA, 107 bp, Homo sapiens; identical to SEQ ID NO: 4314
  chr5:148724796-148724903
  hyper

SEQ ID NO: 112262 - DNA, 30 bp, Homo sapiens
  chr5:148738005-148738035
  hyper
ggctgttggctaggcgcccgggtgacagag

SEQ ID NO: 112263 - DNA, 30 bp, Homo sapiens
  chr5:148751130-148751160
  hyper
attcaccaaacacggcgcccctatccgctc

SEQ ID NO: 112264 - DNA, 30 bp, Homo sapiens; identical to SEQ ID NO: 42140
  chr5:148904076-148904106
  hyper

SEQ ID NO: 112265 - DNA, 30 bp, Homo sapiens
  chr5:148929534-148929564
  hyper
aaaacaccaagacccggattcagctggtct

SEQ ID NO: 112266 - DNA, 62 bp, Homo sapiens
  chr5:148931072-148931134
  hyper
gcccacgctccgagcgtcaccctgtcaccgcccagctgcgcatgagcgctgcaactcctgct

SEQ ID NO: 112267 - DNA, 87 bp, Homo sapiens
  chr5:149109658-149109745
  hyper
ctgcgtgagctggtcgcggcgccagacacggcgcaggaaagtgggtgagcgacccccggctcccgcgggcgccgcgcggccccgccc

SEQ ID NO: 112268 - DNA, 192 bp, Homo sapiens
  chr5:149109802-149109994
  hyper
cggcctcactccctcctccctcctcccttgctcgctcgctggctccctccccccgggccggctcggcgttgactccgccgcacgctgcagccgcggctggaagatggcggggaacgactgcggcgcgctgctggacgaagagctctcctccttcttcctcaactatctcgctgacacgcaggtacggccggc

SEQ ID NO: 112269 - DNA, 477 bp, Homo sapiens; identical to SEQ ID NO: 42143
  chr5:149111287-149111764
  hyper

SEQ ID NO: 112270 - DNA, 255 bp, Homo sapiens
  chr5:149340037-149340292
  hyper
aactctgggcagagcgcttccgcgcctctcctgctatttcaccctggccacaggctagccgccgaggccggtcatccgctctctccgcggaggagtcaacgccacggaagcagcggcggaacctctctaagaatccttccagcttgtgctcttctgtccagggcagccaatcgcgaggaggagagtagtcagagggcggcaccctccccggtctgggccgagttattggctggtggtagcgtcgctcgcccggca

SEQ ID NO: 112271 - DNA, 30 bp, Homo sapiens; identical to SEQ ID NO: 42145
  chr5:149340846-149340876
  hyper

SEQ ID NO: 112272 - DNA, 149 bp, Homo sapiens; identical to SEQ ID NO: 4315
  chr5:149379995-149380144
  hyper

SEQ ID NO: 112273 - DNA, 30 bp, Homo sapiens; identical to SEQ ID NO: 42147
  chr5:149380766-149380796
  hyper

SEQ ID NO: 112274 - DNA, 318 bp, Homo sapiens
  chr5:149381199-149381517
  hyper
tcctctagagcccttcgtttttaaccttaaattgtcctgcctttttttgcattgctatactgctgcctcgagtctgataacaaacttgtactcaggcttagaacagggtaataaaacaaacaaaaccgtagggtgttgtcttcctgccctcagcccaaggtggctgtaatgagtgtttcctaacccgttttgcgcagggtgcttagtaccctatatgccattcattacagatgctctcctgcagttactgcccttctccacaaggctttcagccgcccagaagtcaattcagggcaaaaaagcgcagtccccacgtag

SEQ ID NO: 112275 - DNA, 531 bp, Homo sapiens; identical to SEQ ID NO: 42149
  chr5:149569479-149570010
  hyper

SEQ ID NO: 112276 - DNA, 967 bp, Homo sapiens
  chr5:149681824-149682791
  hyper
gctcgccagcctccccgggcccgtcggccacgaagctcggcttggcccagtcccaggacaggtagccgaagctgagcaggctgaccagggagaagccagtgagggtgtgcatcgccaagccggcccgcgcgtcccggcgcgccgggctcctggggcctcaccacctcgcgcgcccagggcgcaccaccggcccgccggctcggatgctgcgagggagttcagcgccccccggggacggtccagtgtctggtccgggactggctgccggacggctgggccggatctgctcggccgcagcggggcgctctggggaggtcaggcccgcgccgagctgcctcccgctgcctaagcgcaggccctgcgccgcctttgctccctcttccccagctcagcccggccagcctgagacgcggcgtggcagcttccaaaaagtgctctctaccatcctctgactcccctcttccttcttgccctggatttctcccgcctcctaatttctctctcctctgctttcccggcctctcgccccacccggagtccttaaaacagcccagctccctgcagggaggtgggcaggaccccagaggggaaggggagggaggcacaagttgggcgggtcgaggggacacggcgggagagaattcgaaaaagttgtaacatctgccgggccgggccgagccccaggtggaggggcgggacgcagagcagcggctccacctcccgggcgggaagccccggccctctcggcctgctggctccagcgcccgcccctgaccgggatggggaaaggagggagtggggctgcttggaattcgatggaacagctccagaatggctgggtcagacattcctcgatcatggagtcttagcctctctgagtgccagccctggaaggaaagcccatcatttcctagtccaaccgggtcattctacagatggagaaactgaggcccggagatgagcctca

SEQ ID NO: 112277 - DNA, 138 bp, Homo sapiens
  chr5:149682867-149683005
  hyper
cggtgagccggtagagaaagcgatggagaatggcaagcactttggcaagcccccgcggctgcaagtcaggaagcttggttgtagccttgccagctcccctctcctcaacccctccctcctcctcgttctgcagttccc

SEQ ID NO: 112278 - DNA, 30 bp, Homo sapiens; identical to SEQ ID NO: 42151
  chr5:149737639-149737669
  hyper

SEQ ID NO: 112279 - DNA, 30 bp, Homo sapiens
  chr5:149828669-149828699
  hyper
aaacgcagggcaagcgcacagcaaacattg

SEQ ID NO: 112280 - DNA, 108 bp, Homo sapiens; identical to SEQ ID NO: 42152
  chr5:149829575-149829683
  hyper

SEQ ID NO: 112281 - DNA, 16 bp, Homo sapiens
  chr5:149866009-149866025
  hyper
cgcccagccggtgggg

SEQ ID NO: 112282 - DNA, 444 bp, Homo sapiens
  chr5:150004273-150004717
  hyper
cccagcccggggtcccggagcagcccgctaggcggtggcggtggcggcggcgaggagggggcgtcgggcgcggagcctgggcctggcgcggggcgggggtggcggggacctcggggcggggcgcgctgacggacgcggccaggtgtgccgaggcggcggcgcccgggagctcggggaccgtgcgcagcggctggaggtgagtgaggggcgctggcctggcaggggtgcgggcaccgcgcgagcctcgccccttcccacctgcgctattcccggcgccgcccaggaggaggtggcacatctgggctccagtcctcgcacgcggggtgaccttggccaagtcgcttctacactttgggcctcagtttccccatctgtaggtggggggctggaggggtatcgaggctttcgagcagctgaggagcgggaggacgccctgacgccggg

SEQ ID NO: 112283 - DNA, 30 bp, Homo sapiens; identical to SEQ ID NO: 42154
  chr5:150051189-150051219
  hyper

SEQ ID NO: 112284 - DNA, 60 bp, Homo sapiens
  chr5:150051551-150051611
  hyper
ccagaaggctagtccgcccccttccccaacacacacgcgcacgcgcgcactcccctcgcc

SEQ ID NO: 112285 - DNA, 130 bp, Homo sapiens
  chr5:150051899-150052029
  hyper
aggctatgcggagccgctgaagggcgtcccgccagagaagttcaaccacaccgccatctccaagggctaccgctgcccttggcaggagttcgtcagctaccgggactaccagagcgatggccgaagtcac

SEQ ID NO: 112286 - DNA, 30 bp, Homo sapiens
  chr5:150079950-150079980
  hyper
aagtaccacaacatcgacaggacatgaata

SEQ ID NO: 112287 - DNA, 45 bp, Homo sapiens
  chr5:150080672-150080717
  hyper
gggcggggcctttgcgtcatgacgtcgcccgctcttggaatttct

SEQ ID NO: 112288 - DNA, 70 bp, Homo sapiens
  chr5:150158134-150158204
  hyper
tccacggctacgcggcgagtgtgtggcaacgtggaaggggagcccgagacgccctggtctctcccttctc

SEQ ID NO: 112289 - DNA, 546 bp, Homo sapiens
  chr5:150158234-150158780
  hyper
cgcaggggacgctggaggaggagctgagctggagttgccggggccccgggaccgggcgttccgggggcggtccccagcagccgcgcattccagagccagcagcgcgtcctggccgctcctgcgctctcccgcctcccggggctcggaggagccggggcacgttccaggagctgcctagggctgaggttccaggcctgggggtcgcttccagctgccagatcccgtgcagtcctggggaccctgagaagcaccgagccatccctgacccaggaactttccgcagactcgccgccatctggggtgagtggggccaccgggggattgtttgtggggctctggcagagcggagctcttcggattcgcgacctacctctagtgcggcccctttccccgggctcccaacgttcttctttatgtccggtctctcctccccatttctcccttttcatcacttttgtatttcttgccctcaccccctcctttttctcctgctgtcagctcttaagttcgagcctcctagtgcacagaattttgggcctgggggag

SEQ ID NO: 112290 - DNA, 21 bp, Homo sapiens
  chr5:150158831-150158852
  hyper
cgggtccgctgcccttgcctt

SEQ ID NO: 112291 - DNA, 30 bp, Homo sapiens; identical to SEQ ID NO: 4320
  chr5:150336249-150336279
  hyper

SEQ ID NO: 112292 - DNA, 671 bp, Homo sapiens; identical to SEQ ID NO: 4321
  chr5:150399979-150400650
  hyper

SEQ ID NO: 112293 - DNA, 30 bp, Homo sapiens; identical to SEQ ID NO: 4322
  chr5:150460085-150460115
  hyper

SEQ ID NO: 112294 - DNA, 30 bp, Homo sapiens
  chr5:150460600-150460630
  hyper
gggcctggccgggccgccccacccctggga

SEQ ID NO: 112295 - DNA, 14 bp, Homo sapiens
  chr5:150536707-150536721
  hyper
gccctgaggtatgt

SEQ ID NO: 112296 - DNA, 315 bp, Homo sapiens
  chr5:150536746-150537061
  hyper
cgcaggcagccctcccccgacaccacacacaagccattttataagcagctggagggtccaacgctcttgctctcagtcttgggcctcagccacacccttctctgcgggtcctttgactggcgtccagctgaccccaaccccggaccttcaaagtctcttgagcccccccaaattaaggccggcaggaccagcccctggctcagctccggcgcccaggaccctcaaccagaccctctgcagcaacgggactccctcccctccccctagccagggcgccctccgcccgcgcctctccgccccgaccccagatttgct

SEQ ID NO: 112297 - DNA, 514 bp, Homo sapiens
  chr5:150603037-150603551
  hyper
tccccagggatgctgatactgcgagtctgtggaacactcttcgagcagccctgagattatcagcctttaacccccggggggaggaagccgaaggcccagagaggtcaagtcacttgtccatggccacacagcgaacagccccagaccgaaagcagagggcacctgccacagacacacgacatctccccacccgaggcagcgggaatcagctgcctttccctggcccgggtgccgtgtttgtaaactcggctgcttggtgcggctcgggccggggtaaagggcgcctcccagcagagcctccctcgtctctgagctggcctctccaggttctccgtccggtatcccgggccgaccagagagagcccggggcgccgagtcctctgcggcggagcgattccgcactcccctctcctctgaaagcaaacttctccgccggcgccctttacctttttcgggggtttgcagctgctcagcctgctgtgtctgcagcccatcctcctccgggggctcccgg

SEQ ID NO: 112298 - DNA, 184 bp, Homo sapiens; identical to SEQ ID NO: 4325
  chr5:150603589-150603773
  hyper

SEQ ID NO: 112299 - DNA, 30 bp, Homo sapiens; identical to SEQ ID NO: 4326
  chr5:150620960-150620990
  hyper

SEQ ID NO: 112300 - DNA, 30 bp, Homo sapiens
  chr5:150632262-150632292
  hyper
ccttccaaaggtgacggccccggcacgagt

SEQ ID NO: 112301 - DNA, 30 bp, Homo sapiens
  chr5:150632511-150632541
  hyper
ttctcttccaactccgcctacgccccagag

SEQ ID NO: 112302 - DNA, 42 bp, Homo sapiens
  chr5:150826985-150827027
  hyper
gttcagttcctattcgcagtccccagcgcccaggaacatagt

SEQ ID NO: 112303 - DNA, 373 bp, Homo sapiens; identical to SEQ ID NO: 42167
  chr5:151066246-151066619
  hyper

SEQ ID NO: 112304 - DNA, 30 bp, Homo sapiens; identical to SEQ ID NO: 4328
  chr5:151138146-151138176
  hyper

SEQ ID NO: 112305 - DNA, 30 bp, Homo sapiens; identical to SEQ ID NO: 42169
  chr5:151138378-151138408
  hyper

SEQ ID NO: 112306 - DNA, 23 bp, Homo sapiens
  chr5:151150204-151150227
  hyper
cggctccccagaggccgaggccg

SEQ ID NO: 112307 - DNA, 648 bp, Homo sapiens; identical to SEQ ID NO: 42171
  chr5:151150270-151150918
  hyper

SEQ ID NO: 112308 - DNA, 30 bp, Homo sapiens
  chr5:151151357-151151387
  hyper
ccaatcaagagccacgccttcatccccgag

SEQ ID NO: 112309 - DNA, 228 bp, Homo sapiens
  chr5:151152044-151152272
  hyper
tgattggagtcttgcggtccgcgcgtcgcagaagcgccttcggttttgcagagagcaaagagggagcagcgagtgcacggagtggtagtaacaaccaatgttctttccacgccctcactgtgtgtccggcactgtgcggagccacttttctgcctttcatttgattcttgcagtgagctggcgaggtgggtacggctatcctccttccttagcggcccaaggcacggg

SEQ ID NO: 112310 - DNA, 412 bp, Homo sapiens
  chr5:151304226-151304638
  hyper
cggggaacaggggcgcggagggagagccccaggggaaattggagcgagggggtcgtagataccacggacagcggcggctgcgaggcgtttcagcaccacggagagcgtccagacctgcttttcaggagcgcgaagagtattgctgtttgttaaactccagcgtgtctgttggctccctgcggcgctggggaggcacgtttgggggtgggtatatttccttttttttttttttttttttaaacccctgtttttctgtttaaacggccagctccctgcaaggaaaaaaatcttctgtggagatcagagcgctggcctcggaccgttggattgggcgagcatcttgggtaaagagaacagagctttatggctctgggccggcctgagggggttaggggcgaggggaaagcggttg

SEQ ID NO: 112311 - DNA, 407 bp, Homo sapiens
  chr5:152870099-152870506
  hyper
gtgtgagtgtgagggggagagcgagagagagcaagggagggagagagaggcaggctgcgaggggagaggagagggagtgggggagccagcgctccagctagcatgaggacgggcttcttttcccgtgctcagttaatctggctgtcagttggtgttaacgctgcagtttaagtgttcggattccaagggaaacagacaaacctcacgaaaggaaggaagcaagcaagcaaggaaggaactgcaggaggaaaagaacaggcagaacagcgagaagaataaagggaaagggggggaaacaccaaatctatgattggacctgggcttctttttcgccaatgcaaaaaggaatatgcagcacatttttgccttcttctgcaccggtttcctaggcgcggtagtaggtgcca

SEQ ID NO: 112312 - DNA, 84 bp, Homo sapiens; identical to SEQ ID NO: 4330
  chr5:152871129-152871213
  hyper

SEQ ID NO: 112313 - DNA, 30 bp, Homo sapiens
  chr5:153418187-153418217
  hyper
agattcgacgtaaacgtccgctcccaacta

SEQ ID NO: 112314 - DNA, 30 bp, Homo sapiens
  chr5:153418511-153418541
  hyper
tccgagaaaacttccgagttaagccgccgc

SEQ ID NO: 112315 - DNA, 40 bp, Homo sapiens
  chr5:153569199-153569239
  hyper
gctggctggcatcaccgtcggagtccggctccacggccct

SEQ ID NO: 112316 - DNA, 30 bp, Homo sapiens
  chr5:153569808-153569838
  hyper
ctccaggctcagaacgcccggcggggcccc

SEQ ID NO: 112317 - DNA, 30 bp, Homo sapiens
  chr5:153570497-153570527
  hyper
cgtggggctttgggcgctgtaccgcgagcg

SEQ ID NO: 112318 - DNA, 30 bp, Homo sapiens; identical to SEQ ID NO: 42175
  chr5:153785040-153785070
  hyper

SEQ ID NO: 112319 - DNA, 30 bp, Homo sapiens; identical to SEQ ID NO: 42176
  chr5:153826281-153826311
  hyper

SEQ ID NO: 112320 - DNA, 30 bp, Homo sapiens; identical to SEQ ID NO: 4331
  chr5:153826510-153826540
  hyper

SEQ ID NO: 112321 - DNA, 841 bp, Homo sapiens
  chr5:153852462-153853303
  hyper
gtgggcgtgggaggccgctggagtcaggcgtggggagagtgggggactatccagtgaccctctcaatgggcgccggctccgtctcggctcccgggttcagggactgcacgtttctgagaccgagtttagggctccaaggctctcttcccaaagagggtttggggccagcaggattgggttttctgaagaggcctggttatgccagacttggctttggcggccgctggcgggtctccctcagcaccccctcttctttccccggctataagaaagctagaccagggtgcgcattcttcccgtgcctaggatacttcacggtgctaaaaatagtcctgggagctgggacctgtgtatagccagaggtttgtgtgtgagcgaagttggagtcctgggttcgaatctagataagcttccctccgtgctgtggggcttagatcacctccctccctgagtctgtttctccatgcgcgccggaatttctaaacggactcccagaaagaaacggaaagaaagaaggtaaagaaaagaaaaacaaaacaacaagaaagaaactttgatttttctctctgctcctccccaagggccctggggcctcgggccgggtactgaggccgaggaaggggtgcgtcggacaggctcattaccgccaagtgttgccctagttaaatcgcgggcctgtttgatctggcggcgggtggcgagagggaaaaaagaaaaaagtaggggggcgagagtagagagagaagctcacacctcccccactgtttcctagcgcccataaaacaccttttattaactccttcgcgtccggaaaggcccgcgtggcctctcggcccctgct

SEQ ID NO: 112322 - DNA, 169 bp, Homo sapiens
  chr5:153853386-153853555
  hyper
cgaggccctgccccggagctgcctgaggtctcctttcttgttcccaagccgagcgctcaggctccaggtgcgcagagcgaaagttccaagacagcctcacgggtctcccctcctccttcgcagtgagcgccgcagaccctcaggcgctgcagagcgtgcgctccgtggg

SEQ ID NO: 112323 - DNA, 127 bp, Homo sapiens
  chr5:153854288-153854415
  hyper
agactaattcgtttccgtttttgttcttccccgttcccataagttacccccacctcccgttctagtctaaagagaactttgctcttgttcttgaaatacattctttatctgccggcttcccttgatt

SEQ ID NO: 112324 - DNA, 476 bp, Homo sapiens
  chr5:153854934-153855410
  hyper
tttaattagagaagacggcgtcggggcggatcatatggagggacaagagagaaagagccagatagggaaatggagatagggctgaggttctaaattcgctccaaaagggtggaagagtgcgtctttgagcccttgggttcgacagtccctccttcttgcatgttgccgccaagggccgccctcggttgggctgggggtggatatatatatatttctctttctcttaatgtattaaaaaaaatcaaaggacattgcacgtgcgatccaagtgtgtggttgcagccgacgacctgccggcgctcagcagaagctccgcgggatgcgtagcaccagtcgccggagcccagagcctggcgttcgccgctgccttcctctcctcccggggcttcaggagtggctggcctggccaggtcctcggcgcgggcctcggctcactggtttaactccagcgcccagacttgctgcggccagccggt

SEQ ID NO: 112325 - DNA, 269 bp, Homo sapiens; identical to SEQ ID NO: 42183
  chr5:153855657-153855926
  hyper

SEQ ID NO: 112326 - DNA, 425 bp, Homo sapiens
  chr5:153856148-153856573
  hyper
cgtccctggatgagctttcgtcagtttaccacaggcccccgcaggttggataaaccaggtggggcgcttcagctggctccactccgctacggccttaagccccccaacctagagaaactgattggccagcctgaaaacccagcgctcagaagcccccagccccggacagccagaccgagtgccaggaagtgtcaccctaaccggagaggatcaagaaggccaagacgagactgcgctctccaaagctaaaagaagtggctcttatttacatgcaaagccactgaagtcgtcctcagaaccagtccatggggagaaccagaactggccctggactgagtagaagacccgatctgttttacctcacctccaccctggactcctcagataggtgcttttcctgccccgacccactctgggccctcagt

SEQ ID NO: 112327 - DNA, 261 bp, Homo sapiens
  chr5:153856936-153857197
  hyper
caacacagcctccttcgactacctgcatggcctgaggctgctcaccgctcctgcacccttggctggagcatgcaagccccaggactcaccagctcccttttccgcttgctctcacggccgccatccgccttcttgagttcagccttgaaggcctcgggatcgccagactgtgcatccttggccagcacgtccatcaggtaggcgatgtagctggtggctaggcgcagagtcttgatcttggagagcttggtgtcggccggc

SEQ ID NO: 112328 - DNA, 649 bp, Homo sapiens
  chr5:153857284-153857933
  hyper
cgccggccaagacggccgccaagcgcctccagccgcccggggctctgcccaggcctggcgtcaggaccataggcggtggcggctgcagcggccgcgggcggcggcccgcccgcagggaagtccggggcagcgtcagccgggctcagcagccagctctggaagtagggcctttcctgatgacagcgcgaggccggaccgaagaggaagggttcgtggagcatggggtgcgcagggtgcgggtggtgatggtggtgatggtgtgcgtagctgcccacgaggttcatgttggagcggctactggcctgcgccgccagccctattaacgccgctccatgcgccccagagactgccgggggccacctgtgggctctggagccactactgggcgccggctttgggagagtccgggcaaggctgaaaatgagacgcgcagcccactgtcttcttaccggtttctgccgcgggcgaggtcgccgaagcccaaagacctgtttaacccttctgcggactcccctgcggatctggcttatataagaccgcggctttgatgtcaacctctcccgggagccaatggcaggggggcggggataaggaaaagggggagtggctatcccaggttttacgctcagcccgcgccactctagtccgc

SEQ ID NO: 112329 - DNA, 30 bp, Homo sapiens; identical to SEQ ID NO: 42187
  chr5:153858570-153858600
  hyper

SEQ ID NO: 112330 - DNA, 56 bp, Homo sapiens
  chr5:153858838-153858894
  hyper
gacaccagcattcggcgttagacacacgcagaggggaccaagactgcacagcatcc

SEQ ID NO: 112331 - DNA, 166 bp, Homo sapiens
  chr5:153858916-153859082
  hyper
cgacgtccggcatctctcacgcatcagcgcagaggcgcgactcggctgcacgaccctccgagatttcaccccgggggtagggccattccctgccagccggactctctccactgtgggctttccccaggctcgcgttggaatctgggaatcccggagtggtgacgct

SEQ ID NO: 112332 - DNA, 398 bp, Homo sapiens
  chr5:153859603-153860001
  hyper
gggaggtcctggtttcctgcccgaggcgggctggaaaccccccgctctccccggcgcctggcgccagcagcgctggggtagggcagagcgcggagccggaggcacgcggggagggagcgctgggggcccgctgctgcggcggctctgcggggtcccaagcctccctggcctggaggcattctagaaagagcgcaggtagagagtaattacgctgtggagagaaggacctcaacacacaatcctcaacacacgcccagtctttgtcctaatccaagtacaatctgcaacagtgcctctcagagcggcacactaggccctcagattatacattcacaggtacatgcacaagggctcacaaaaccttgccgccgtacacaaaagcccgtatcttcataaga

SEQ ID NO: 112333 - DNA, 148 bp, Homo sapiens; identical to SEQ ID NO: 42190
  chr5:153862031-153862179
  hyper

SEQ ID NO: 112334 - DNA, 451 bp, Homo sapiens
  chr5:153862218-153862669
  hyper
cgtgaccttgacgccacgggcaatccccgcaccggaccccttatctaaatagggcagtaaatcaaggacctgtcagggcccgggtaattacaggaactccataaaaaggacccggccggccgcctgtttatattagcgcggtgtaaaatattctcgctgtcttggggaatcgcgtcgcgcagtaacgcgccataaatcagcccgcggaccatttaccccgcagcttgagcgcgcaaatcccttaaacatttctctgccatgtctgaagaggacctaggactttccaatctggcccagcctgctcccagggatgggggacagtcggggcagggaagagataggcacggagtagattgctcctgggagctccaaggttctgtttgcagacgggaaactagcccagagaggggaaggaactttcctaagggcacacggccgatgagtggcagac

SEQ ID NO: 112335 - DNA, 608 bp, Homo sapiens
  chr5:153863401-153864009
  hyper
gtctgcttcgggacgcgttcaacctaaacagaacccggtctgattggaaaatgtatttatttgaaaaatcgtaactcacggttttggtgaaaacggcccccaaatttatgggatcgcttggggcgcagcgattgtaaatcaaaaggcactggacacctccctcccccatccccgaagcagctcggtcaggttctccagaacaccaggagtcctgtctcctcccggtccaccctgcggccctccgagaccctcccttctcccatccctcgcagtggttagttgcacactagcaggcaggtggattttactccggtttcttttacccagtcccgttgctttcagggcaatttcattctggtcagcttcacagcactcagctccaggccgcctgttaacgaagttttgctgtgcaccaggctgttttcggcatattgggagattttttttgttcctcacatgctggttagtttcctggtgctcggttgctccccgggtcgggtcgggccacttgtagccaatccctagaccactgatcattgcctgccgagctgtttcatgccaagaggcttatctcggctcattgtcacgaaggtcattctcactgcctg

SEQ ID NO: 112336 - DNA, 206 bp, Homo sapiens
  chr5:153900643-153900849
  hyper
agggcgctgagctcccggtatcctctaggtggcgcacaattctctggggaaaaggagaattccaggtgaactaattccacgggaagaagggttggtttgggaggggctaagccctgcctacgggctcctgtaggggaatcagctccccatccccctgctccctccagagcagcgcccagcattcaatcattcgctcgcatttattt

SEQ ID NO: 112337 - DNA, 30 bp, Homo sapiens
  chr5:153990580-153990610
  hyper
catacccacgcccacgcgcccagcaagttc

SEQ ID NO: 112338 - DNA, 414 bp, Homo sapiens
  chr5:153990826-153991240
  hyper
aataaaatagaacatttctagcgacacacacaggcacgccaatctcagtcacactcgccccaggcacagacactgtcactatgatttgccatccccgcctccccacgctggagagcagcgccctcacagaagggccgagccgcggacgggccacacacccgcgtgtacacacagtccgagaacgcacacacgtacacacacacatgcgcaaggcacggcctggccttcaggcacagagagcccatccggtttcccactcagctcccacaacttcccccacactttggtactaagggctcagctgggtccttttgaagccaccaagggagggagttgggaagggccccagtgacaaacagtggggagcaagaattttacgaacttaagggctgtaaatttcggccagcaaatccc

SEQ ID NO: 112339 - DNA, 316 bp, Homo sapiens
  chr5:154026797-154027113
  hyper
ggtgaagtttaccctggctcccgcctgctgcaccgtcacctccggcccctcattacggaaatgaagaccactaaggagcatgagcgtcgtaaccgcccgcctggggttgacttctcttggggtgatcagccacgtgaccctagccacccgcctcctttacactacgccccaggatccccggcggcagagataaagagctggactttagactcagacgaccgcgctcttaaaccttagatgacctcatcccagccaggtgatctcgcaagctcccgacgctgtgctcagctcctgtctcctgcgcttgggtaagcgc

SEQ ID NO: 112340 - DNA, 30 bp, Homo sapiens; identical to SEQ ID NO: 42196
  chr5:154062189-154062219
  hyper

SEQ ID NO: 112341 - DNA, 148 bp, Homo sapiens
  chr5:154136121-154136269
  hyper
ccctcttcccaccccgcccggcgctccccgttttggtagcgttgcgagcgtccccatgttgtaaatgtttaatgagcatatgtcacgggcaacccagtgcccggcgcggagtacatgctggccgcacggatgcggggattaaaagtta

SEQ ID NO: 112342 - DNA, 87 bp, Homo sapiens
  chr5:154237358-154237445
  hyper
cccacgggaggcgccgtcctctttgtaactcgagcagaccctggcgggccagttgctatggcaatgttcctcgctctgctcggtgag

SEQ ID NO: 112343 - DNA, 390 bp, Homo sapiens
  chr5:154317540-154317930
  hyper
tgtccctggactctcgcctgcgcccgggcccacgcggacaaggaagacggaggtccgcgcggcgaagccaaagaggcccccgggcacggcatcgctgcagcgggcgcagtaccagttgggggagggcggcagcgtccgcggctcctgccccataactacaagccgtcagagacaagagaagctgccacagccgaccgctcgtagcctcacgccttaggtagggagcggggcggggtgaactccgagccccgccttctcgggcagtcgctacggtgcgcgtcgaggcccagccagcaccgcgcgttgcgttcccgctaccgccgggctgggaagggcgggaccacgcgtgctgcactggccctcagtacctagcccgcggtaggaggtccg

SEQ ID NO: 112344 - DNA, 30 bp, Homo sapiens; identical to SEQ ID NO: 42199
  chr5:154320524-154320554
  hyper

SEQ ID NO: 112345 - DNA, 753 bp, Homo sapiens
  chr5:155107330-155108083
  hyper
ccttgggagtctgttggttaacgggaaaagtgctttctctgagaggaaggcggggcaagccggaacaagctctcgctgggaatccgcacactccttctcccggtgtttcttaacccctttcttctcccgggagtggagagggggctcaaggatactagaaacctgtccccttggcggagacacgtagtcgcctctggccgccgcggccgactgatcttgcggagtggagctccccccaccccgcccgcgtttcgctggggctccctccgctctgcaaagggagcggggagctgggggagccttgcacaccagtcttcctggagctgcagacgaggagccccgcgccttcgggagcctctcggcggcttcccctctaacgcgcgactgtgcagcctctccccgccgcccccacccgcggctcgccctcgctccctccctccagccccgccagccggagcgcgcacaccgggactccggcacgtgggcgcgcgggaggtggcggccgctgctgccgctgctgccgctgccggagcccgaacccaagccccagctggagccggagtcggagccggcgagatcgccctccatgctgcgggagctgcggccgccttccgctcagcctctggtcccaggcgagcctggcgagccggcgaagcaccggcggggaggaggactagaacaggaggaggggcacggcggattgaagcgagctgggctgtgagcaagggacacccacagcctggagaaacagcc

SEQ ID NO: 112346 - DNA, 107 bp, Homo sapiens; identical to SEQ ID NO: 4342
  chr5:155108160-155108267
  hyper

SEQ ID NO: 112347 - DNA, 748 bp, Homo sapiens; identical to SEQ ID NO: 42203
  chr5:155108355-155109103
  hyper

SEQ ID NO: 112348 - DNA, 332 bp, Homo sapiens; identical to SEQ ID NO: 4344
  chr5:155109188-155109520
  hyper

SEQ ID NO: 112349 - DNA, 30 bp, Homo sapiens
  chr5:156569883-156569913
  hyper
cttccggtctcctccgggaagaagccaccg

SEQ ID NO: 112350 - DNA, 30 bp, Homo sapiens
  chr5:156692954-156692984
  hyper
ggtcctgggtgcgccggcggtacagcggag

SEQ ID NO: 112351 - DNA, 30 bp, Homo sapiens; identical to SEQ ID NO: 4345
  chr5:156693942-156693972
  hyper

SEQ ID NO: 112352 - DNA, 490 bp, Homo sapiens
  chr5:156887015-156887505
  hyper
ctcttgcccctagcacggggcggtgactccagagctgggagcctggcagcgtcctcaccccaggaaggcatgcgcccctctgcgggcggccccagccctgggccccctgcccccggaattgcccaagatgccgggtgactcctccccggggactctcccactctgggacgcgtcactctccccacccctgggtccggaccccggcggcttctcgcgcgcgagccacgcgggggacaagtcgcggccacctgctccggagctggggagcccgggcgccgtccgcccgcgcgtcggttcgtgtgccccgggccccatggagctgcgggtcagcaacaccagctgcgagaacggtgcgtacggcagggctggggaccaggcgggctccgcgcttcgcgccctcccctccttgccaccgctctccctcgcatcctctcctcccaggggggccaaagctggggaggggcagggccagcacgaggtggctcccacc

SEQ ID NO: 112353 - DNA, 1323 bp, Homo sapiens
  chr5:157001781-157003104
  hyper
tagtcctgagaaacacggacatcacccggcatcttagctggaaacatcgagtcagaccccttcgcttcacagaaggggaaactgaggaccaaagaaggcggccgtcgggttggcgtggaaagagagccctggtttccagtgccaccgcggacctcaacccgtggcgtggccttgggcaagtcctttcccttttgtgggcctcggtttccccatctgtgaaatgggtgcgtttgacttggccttcagtagggctcctgccagctcggggatccgaagtgtgtggctgcagatacccagcgagccatcccctagccaaggctaccacagtctgccgcgggcattttatgtcctaccccaccagtgtggcaggcaccgagcctggtcccaggaagccgctcccaggccacacgggcagggcgctcgggatgctcggcgttggcgagtgcagcgggcggtagagagaaagacagagagagaggcggagcggacacgagggaccgtgagaaaacggaggaggataagccccgagaacggcggaaagagaagccaaaagcagaaaaacagaggaaggagaaggcgagaagggaaggctagccagtgagcggaccggctgttttctggctgcgccgggtttccccgacctctgccacctcccagggcgcagaacgtgggaacaaagcccgggctcccaggctggggacggcgggggcgcaggccccgcggagttgcgggaggcgcaggggtcgcggtcccagcgctccggacccgcaaggctactcccaggtctccgggccacccagcctccatccccccgcgcctggccacttacttgtccatccaggctcccgcgccgcccgcggccggaggggctgcagggcaaacgccagcaagcagagccgggcggcgcctgcgccccctggcatggtggcggcggcccttagcgctcggcgctcacacgccctcagccatacctgcccactgcccggcggtggaggcgcgtctggaaccccccggctcgccccgcgcctccccacccggctcccagccctctgccgagacgctccgcctccagccccgcgggcctccgccaggggatggaggaggggaggctccagcccggagggggctggagggaggggccggggaggagctggcgagactcgggggagcggggctggctcaggtgagggagaccgcggggaagggagaatccgagccccccaggaggagggatttgtggtggacgcggcctgtagagggtcggggactcgggcttctaggagttaaactggacccctctccgcacagcggcccgtttactgt

SEQ ID NO: 112354 - DNA, 709 bp, Homo sapiens
  chr5:157098031-157098740
  hyper
tcggtgtcaagaccccgcaggagatggcggattcattcaggaagcagccgctccgggaagccttagccaagggtcttccggaaagacaccagtcttgatcctggagcctcaatccccgctgacccagcactttggtttccatagcaattgtctcgtcgcagaaaggaatcgcctgtgctgggtcttcagacctcagctccatgccgctgagcagccccaccctggctcaacccgttacccgccccgccagcaggccggggtcactgcagtccccacgtcgaagcggaaaaggtctgctcagctcaccgcaccccacttcttccagacccgtccgtcttcacagcaacgcgccgggtctcaccacggcggatgccgagggacaatattaccgcgtccgtggccgccggactctgcacgcatgtccaacagcccccgtccccttccccgcagccaatatgtgtctcccaggcaacgcgccgcgctcggttcagggctccgcccagggactcactccgcgtcagcgcgcgcccacctaggtgggctggcaaccagccaccagtttccaactctttctccaacagggaagccgcaatgacacagccgactaggccctcggtcacctgtgaccagggatcctccacgatcggcgggaccgccgcccaggcgaccaccagttccagcgccacctcgggttcgaactaccagcgcg

SEQ ID NO: 112355 - DNA, 208 bp, Homo sapiens
  chr5:157158248-157158456
  hyper
gatttgccgcaggacgggaggaggaagaagcaagcgtggaaggtgctaacggaggaacctaaacctccatcctctttgcctgggaggttaagaactacagggagaggcgagagagactatgactgccctacggctagagtagccgcgaagagaacacttccggggcggggctatctggccctttcctttccgcgtgtagaatgtgggg

SEQ ID NO: 112356 - DNA, 30 bp, Homo sapiens
  chr5:157158867-157158897
  hyper
tggcttggagtgcccgtgttaagtgaacag

SEQ ID NO: 112357 - DNA, 218 bp, Homo sapiens
  chr5:157170398-157170616
  hyper
tgccttcctccagacgcttcctgccagctcaagctaggatgcgatcccgagctcattcccggggaacccagagtattaacaaacaccctaagtgataatgatacagacggggaaactgcgctggagcaggtcaagcagcagtcgacagcgttaacctgtcagctatgggaggaggcggtgcgaggcgcgggctggtcggagccgcgtaccacgccccc

SEQ ID NO: 112358 - DNA, 65 bp, Homo sapiens; identical to SEQ ID NO: 4350
  chr5:157285887-157285952
  hyper

SEQ ID NO: 112359 - DNA, 30 bp, Homo sapiens; identical to SEQ ID NO: 42212
  chr5:157988964-157988994
  hyper

SEQ ID NO: 112360 - DNA, 30 bp, Homo sapiens; identical to SEQ ID NO: 42213
  chr5:158244067-158244097
  hyper

SEQ ID NO: 112361 - DNA, 48 bp, Homo sapiens; identical to SEQ ID NO: 42214
  chr5:158478417-158478465
  hyper

SEQ ID NO: 112362 - DNA, 132 bp, Homo sapiens; identical to SEQ ID NO: 42215
  chr5:158478512-158478644
  hyper

SEQ ID NO: 112363 - DNA, 30 bp, Homo sapiens
  chr5:158524710-158524740
  hyper
ggctcagaactgtcgcgggtggtcgctgtg

SEQ ID NO: 112364 - DNA, 223 bp, Homo sapiens
  chr5:158526149-158526372
  hyper
acagctccaggtcctccggccgcaggcgacgaaggcagagcggctggagagcgcggagccccggcggagagcggagcgcagcggctgcggactcaccccgccgcccggccccgcggcagcagctgccgctgccgctgccgcctccgcctcccggctctcccgctcgcggctcacctcggccgcggtccccgcgcagtacccacctctgcgccgccgtgttggc

SEQ ID NO: 112365 - DNA, 109 bp, Homo sapiens; identical to SEQ ID NO: 42217
  chr5:158526599-158526708
  hyper

SEQ ID NO: 112366 - DNA, 650 bp, Homo sapiens; identical to SEQ ID NO: 4353
  chr5:158527353-158528003
  hyper

SEQ ID NO: 112367 - DNA, 435 bp, Homo sapiens
  chr5:158533458-158533893
  hyper
gagcctgaactcacacgtggttttgtgtgcacgtgtgcgtatgaaattcagcaaaaaaaaaaaaaaaaaatccaaaaaaatctaggtctaggcagggtgcggaccgagggcccaagggcaggcgtgcagaccgctacgactttggctttagggagacgccttcggggcgcagggcccgcccgaagacgcgggttagcatacagctcagctccaggcaggcgatgcgggttcccaatgcgggcctacagattacgcggactgagctgggaacggtccctgctggacagttccgtgctcttaatccttcctcgcctacggtctctgattattgatgcttgccgtgtgtcctaaaagggaccgcttccggtttatttgcttatgtatttattatctttatcaacgttattttttggcagctgccgtgaagatgccaaa

SEQ ID NO: 112368 - DNA, 1212 bp, Homo sapiens; identical to SEQ ID NO: 42220
  chr5:158634800-158636012
  hyper

SEQ ID NO: 112369 - DNA, 30 bp, Homo sapiens
  chr5:158636620-158636650
  hyper
gcccctcccgcgcgcgcccgcgctcactca

SEQ ID NO: 112370 - DNA, 346 bp, Homo sapiens
  chr5:158689915-158690261
  hyper
ttttaagcttcattcggaacatgacacagccacacgagtcctagccctgaatctcacgaagacctcagtacacctggaaaaggcagcacacccagttacgacactactagagacgtcacacgcctcagcacccatccgctcccagcccagaacgagcgcacgcgcagaacgagagagcggccacccagggatcggcgctatctgcacagcggttacagtctcggaaaggcctggcttcttcgtggctttgtggagatcccttacagcggccatttgattagcacccgaagagattcaaaggaagcagttgttccgtccccaacatatttccgtttcaaaccaccca

SEQ ID NO: 112371 - DNA, 30 bp, Homo sapiens; identical to SEQ ID NO: 42222
  chr5:158690485-158690515
  hyper

SEQ ID NO: 112372 - DNA, 167 bp, Homo sapiens
  chr5:158758338-158758505
  hyper
atgcacaggaatagcggaataaagatatctctcgtggtggaatttcaagttgctaagaggtatgcaaaggtgtacaccggtgtggacccccccatcccccgcccagtctgcacgtgaacaggaacatgtacctgcacgtataccaggtacacgcagacagatgcggg

SEQ ID NO: 112373 - DNA, 410 bp, Homo sapiens
  chr5:159200261-159200671
  hyper
tgagcttcctgggcgcgctccgcagcgccctccgcccctagctcgcggggagggcgtcgcgcggctgttcagcggggcagcggcctagcggcgcggacctgggtctcctccctcgcaccgggccgagcgccgggctcgtctgcattgacgtctgcggcggcggcggcggcagcagccgggctctcgggagcctgggtgaattatgatgcacatccaccgcggctgctaaaaaaagggcagtgactcaccaccggccgcggaaacttccacgagcgccggccgcaaaaaggcgggggcgccaggccaagggcggctgcgcccggggcgcgcggcagcagccaggtgtgtctcgaaagcaaaacggcgaggaccgtggcgcggggtcgggcgggaaccggagagacctgggg

SEQ ID NO: 112374 - DNA, 31 bp, Homo sapiens; identical to SEQ ID NO: 42224
  chr5:159228213-159228244
  hyper

SEQ ID NO: 112375 - DNA, 599 bp, Homo sapiens
  chr5:159343215-159343814
  hyper
cggaagagtgactagcggggaaaataaccccagcgggccgcctaggggtgggtgacccgcgatctccacgcccaggtcccgccctcgcggcccctgcccccgccccgccccccgcagagggcgcgccctgggagcggcgggggacgcggctggcttcccggcttgcggggtggcggcgtcggggctgcgggcgccttggctggacccgcattgccccctagtgccgcgcggagtcagggcgccgggctcccccgcctgatgtcaccgccgtgcagtcagcccagaagcggctcattgaaagcagaccctcttcggcgctcgctgggcggaggacgcgccgcggtccgcagacccgagcgagctgggcaccgccgggcgcccccggccctgccgccccctcctccccgccgctcccccgcgagcccggccaggcgcgcctgacgtggaccattaaacttggagctgccgcctcgtcccctctcctcctcctcctccctctgacaggcgagcgagcgactcggtgcaggcaggagacgtgctgccgggctgggctgcccgggggagatgactcctcgccaggagggcgcctctgggaagaa

SEQ ID NO: 112376 - DNA, 77 bp, Homo sapiens
  chr5:159399022-159399099
  hyper
ctcgggtgccagtgccgcggccgcggccgccgccgacgccgccgccgccgtcgcctgggcggctgcgcctacaccta

SEQ ID NO: 112377 - DNA, 235 bp, Homo sapiens
  chr5:159414351-159414586
  hyper
cgtctccagcagagcgcagcaaagaagacgaagcctcctggggcctttcctcgccgcctggagcggggcatccttcctccttacgtgcagagactgggaagcagctctttagacactgcagtgaccgagcccgctccacgcccctttcccctgagcaggtgcttgacgtggggcaagctcggcgttgaggtggacccgcgcgccacccgctggccaacgcgcctaagcgacagga

SEQ ID NO: 112378 - DNA, 79 bp, Homo sapiens
  chr5:159545791-159545870
  hyper
gctgggggcgggcgcggtaccttttggacagatccatgaggaccccggagaagagcttctccccgaagcggaacgacac

SEQ ID NO: 112379 - DNA, 143 bp, Homo sapiens; identical to SEQ ID NO: 42228
  chr5:159546856-159546999
  hyper

SEQ ID NO: 112380 - DNA, 393 bp, Homo sapiens
  chr5:159615278-159615671
  hyper
ttcctcagccacacgcgatcaaatgctgcttcagagctctaggaagctgggtgtgtcttctgtgctttgtaaaaaagaaacgaaaaaaacattagcaaatccccagcccaggtagccggctggctgagggcggactcttggaactgggcggtgggaggtgggggacgggggagggattggggggcccttgctccaaagccaaagagcgggaaacaggaactgcagggaggccactccgcaggcgcctcccctttcccgctggggagaggccgccgccgcgcggcgctcggcctgcaccgaccctccggggaccccgctaaacggaggagaccccaggcccggaggtgtcgcccctgggctgcgacccccgactttggccggcttctccctgcg

SEQ ID NO: 112381 - DNA, 1151 bp, Homo sapiens
  chr5:159738772-159739923
  hyper
gagttcccacgcaggcgacctgagaacacgaagtcgagaccgaaggagactgtacccagtcttgagagtgacaagggcagggagggactgaccttctcgcgcagggtgcagtggacgtccgaggcgacgcgcccttcccaccacggctcatccatcatcgcgtacgcagcgccgctatccgaggctacccggctctcagggcgcaccctgcgtggacacgggcaacttcagcggccagagcgtaccccgggctccgacccccggtgtccctatcctctctcgcccctggccccgggccccggcgggcgccccctcctgcgccgctcagaggagctggaggtcgcctctggtccgcggaaggctgcggtgccccctcccctctgctcgccggacacggggcgatatggagctgtgcaacaacttgcagaatttttatcttcccttttgcaaaagttgcagagaaagttgtcaactccgctagctcgctcgaggctggggctctggcggcggccacaggctcgccgtccccaactcctcccccgccgcccagcctttgtcctgctcccacatcctgccctcgagccggggcgaaactcacgcatcctctctgggcgtggggggctgcgagcgccgggcccctcccagtgccgagccagccgtgccctctggtgcctgccggcggttggaccctcgtccgaggcgctccgcactcccgacggccgcctccgcagcccgactagcccccgccgtcgccgcgcccctgcgtgcgctcgggtcccgccgcggctcgcaggctcccggccgccgggggcctccctccctcgctgggggaattgggggccgggcctcgcgcatgcgctgccggcgcccccgcgccccgcggggcggggggctgggaattggagcctttctttgccagctctggctccgcttcctgcccgccctcctccctcgcttcggcggaaagcttctctctcaccttcgctgaggctagtggtagccttctgggcacccctccggcttgcgcagggagcaaagggaccgcggcgccacctgcgcgcaccacgcgtgaaacgtgcggacaggacgcccccagaaagttctgccttccgcgcgcactgctctagccatccttacgtcggttccacctg

SEQ ID NO: 112382 - DNA, 155 bp, Homo sapiens
  chr5:159797260-159797415
  hyper
tgttactattgtaacgggtaaaccactgggcacagagcctggcacacagtaaggactcaaaacatgttaatttgtattataatacgaaggtagaagtcgagaggcaggaatgcaggagctgcccagcccgcaataaaggcgcgctggcagctctc

SEQ ID NO: 112383 - DNA, 174 bp, Homo sapiens; identical to SEQ ID NO: 4360
  chr5:159826415-159826589
  hyper

SEQ ID NO: 112384 - DNA, 541 bp, Homo sapiens
  chr5:159826807-159827348
  hyper
gcgcggtctccgcccgcccgtctccaagcctgaggcgcaggcctatgggatgcacgggcttcttttaggcgcccgtttcaggctccagtcccactctccgctcagcctagggcccagcctctggccgtcggaaccagtagagacggcggttcctcgggtccaacccccgggcaggaatctgcggtgcgcctggagagagaagcatccgcaacaacctccgcctcagccaggcccgggttccatccgggttctccagggtgcttcccgcccgcaaactgggagaggcgtctcccacacgcaggcgcagtagcaaagggctgtgggatgggctggctggcttgagtattgagcatgcgcgctagcccttcccaattttttttttaagattgtgtacgtggaacaagaaatcgtttgtttattgtgtctgccagagaggatgaactgtacaatttcaggaatggaaggggctgtaaactccacatagttctttttaacatgcagagcacttaaacttttatattgtgtcgggctttgagcttgg

SEQ ID NO: 112385 - DNA, 30 bp, Homo sapiens; identical to SEQ ID NO: 42236
  chr5:159845883-159845913
  hyper

SEQ ID NO: 112386 - DNA, 30 bp, Homo sapiens
  chr5:159849178-159849208
  hyper
gcccgtgactgttccgctgtttagctcttg

SEQ ID NO: 112387 - DNA, 705 bp, Homo sapiens
  chr5:160973448-160974153
  hyper
tcaataaggaagcaggcatagcgttttcagcatcggatccctactacatttccctgctcacagaggtatgcagacagaacccttcaaagtgagaacggaaaagagaaacgctgggcacacttacctctgcgcacagacagcggcgattattaaggggaaggaccaaatcccaaagtagccccttttccgcactctccacatccctttagtttttgatggaattgagggtttcactgaagagaggagatccaacttagtctgcccagtgcagtaattctaatgtgaggcgcatgcgcacggcgtaccaaaacatcaaaggggaagcggcggctgccggggaccgagcagatttccttgtttaaaaaaaaaaaaaaaaattaaaagggaaaaaggaaaaacatgtatatgtataatacatacatatttgaataatatagaaaagtcaccccacagcagcatccagaataaaatttttgttgttatcctttcgttaagacaaaataactacagcgtctggtaagtttcggtagttgcaagaggcagttttgcaccgagcgggttgtgggtttttggtgtgtgtgtgtgtccttttaaatatgcaaaaccagattagaaaattagaggagagcaggtgtggcgtgccagcggaagataggtgccggtaagcccacttctggtctcagccggacacggggcaaggagttt

SEQ ID NO: 112388 - DNA, 857 bp, Homo sapiens; identical to SEQ ID NO: 42238
  chr5:160974540-160975397
  hyper

SEQ ID NO: 112389 - DNA, 215 bp, Homo sapiens; identical to SEQ ID NO: 4361
  chr5:160975718-160975933
  hyper

SEQ ID NO: 112390 - DNA, 403 bp, Homo sapiens
  chr5:160975955-160976358
  hyper
cggaagtagctccacaggcttgcgaccccggcagccctgggggctcctcagggtcctgttccgtgctgcactcttgacccacttaccttctgataacctttcccctcccccaccttggtcagagggtcatctgggggtagtttgtggggatgactccgggggaagtgtggaggcgggagggctttaaaaggggggaatccgacagctcctctgggatggatgataaacaggaaaagaaagccgagttccttcaccgaccaagggagtttctaggttaggaacaggtaaagcccagcaccatgaacatactgctgatctaccgcgcggcgctctatagactcccaggctcataggagcccatccaaagacgcgcgcttactcacacacacgcacacacacatac

SEQ ID NO: 112391 - DNA, 491 bp, Homo sapiens
  chr5:161274275-161274766
  hyper
cccattttcctaatccgagaatgatggagctcgaggcaaaggaatgattccggaaatggagatatgattctcaaacctagaaatgatcggagtgatttattagttaaatattcttcgtccaggaacccagcacaattcagaggtaacagcgcctgcgttttctccatgataacatagacaaacagttgcctccaaaggtaaaaacccggttccggagggtattcttgctgtcctctaagctacagaagaaggtggggtggaaagcgctcccaacctgagaaagtgcgaaagactctctaaatccagtagccaatttcctacctgccagaactctttcctaccatccgtcaccattcgtgactctgcaagacacggggacttagacatatgtgtgggagtgtgtgtgtgagggagagaggcgagacgagtgctctccccacacgtgtaaccctgcatctcccagtttcagagcttgcgttcattcatatgca

SEQ ID NO: 112392 - DNA, 43 bp, Homo sapiens; identical to SEQ ID NO: 42242
  chr5:161275108-161275151
  hyper

SEQ ID NO: 112393 - DNA, 534 bp, Homo sapiens
  chr5:161275346-161275880
  hyper
cgctggctccagtctctccacgattctctctcccagacttttccccggtcttaagagatcctgtgtccagagggggccttaggtaagtgcgactttggaccacgatacacagacagagctttgaacgtggcttttcctagctggagagacaggaatgttatagtcggggggggggggcggggggagacggggggagagagagagagagagaagaaggagagcgagcgagcgagcaagggagcgagcaggacaggagcctgatcccacagcaggtagaaacaacgaaatgtttttctttcagggtgaaaccgcagcaatataagagcattattattatttttttcccgctgtctttcttcttttcttctcctctttcttaggcatatttgaatgtattccgcagggtgggtggtggcatgttgttttggtcttttatttatttatttatttgcaagggggagctggggtgagttggggaggggcgtcgggggccatcatctaaagttaagacgctgggacggaaaacctgtctca

SEQ ID NO: 112394 - DNA, 30 bp, Homo sapiens; identical to SEQ ID NO: 42245
  chr5:161494485-161494515
  hyper

SEQ ID NO: 112395 - DNA, 30 bp, Homo sapiens
  chr5:161495120-161495150
  hyper
tgccctttttggcgtcgttttgttctgaag

SEQ ID NO: 112396 - DNA, 30 bp, Homo sapiens; identical to SEQ ID NO: 42246
  chr5:162886416-162886446
  hyper

SEQ ID NO: 112397 - DNA, 30 bp, Homo sapiens; identical to SEQ ID NO: 42247
  chr5:162886937-162886967
  hyper

SEQ ID NO: 112398 - DNA, 358 bp, Homo sapiens
  chr5:162887184-162887542
  hyper
ttggtgtgcgtgttcgtttttccctttgaatggccgtttacggcaccggcaggccccggatgaaagaactgaaatccagaaaagttcacatgcaacgaacaatgggacagaattggaaccagtgaagccggaactcactacaccgtcccctaagtgacgccaaaatgcactttctaacgtctccggagggaagtgcgcttgcgcaaatgctaggttacacttgagtaactccgggaatgactgggtgggtggggcggggaacagtaacggtctcctattggatggcagcctaaactcgcaggccagctaattggacgcaatcagaacccagcattctttcttcgtgttcctgtgcggg

SEQ ID NO: 112399 - DNA, 228 bp, Homo sapiens; identical to SEQ ID NO: 42249
  chr5:162930155-162930383
  hyper

SEQ ID NO: 112400 - DNA, 30 bp, Homo sapiens; identical to SEQ ID NO: 42250
  chr5:162930595-162930625
  hyper

SEQ ID NO: 112401 - DNA, 884 bp, Homo sapiens; identical to SEQ ID NO: 42251
  chr5:162931121-162932005
  hyper

SEQ ID NO: 112402 - DNA, 47 bp, Homo sapiens; identical to SEQ ID NO: 42252
  chr5:162932440-162932487
  hyper

SEQ ID NO: 112403 - DNA, 30 bp, Homo sapiens
  chr5:162934007-162934037
  hyper
gagcacagtagcgtcgcagtagaagttaga

SEQ ID NO: 112404 - DNA, 30 bp, Homo sapiens
  chr5:162991527-162991557
  hyper
gtgtaaaagatgctcgcctgctgctttctg

SEQ ID NO: 112405 - DNA, 30 bp, Homo sapiens
  chr5:162993359-162993389
  hyper
ctgcggctccaatgcggaaccggttctcta

SEQ ID NO: 112406 - DNA, 1223 bp, Homo sapiens; identical to SEQ ID NO: 42253
  chr5:166405637-166406860
  hyper

SEQ ID NO: 112407 - DNA, 153 bp, Homo sapiens
  chr5:167000607-167000760
  hyper
cctttgatgcacatacgttgtcacaattcattgactctcctctcttctctgttcttacactcaagcctagcggtgctttcgccaggcagcagcagcctctcctgcgagttttaggcatgtatgcagctcagtttgatcgagcgttccttttct

SEQ ID NO: 112408 - DNA, 178 bp, Homo sapiens
  chr5:167000960-167001138
  hyper
tggtaaggattggagcgagctagagatgctgcacgctgctaacaagggaaggaagccttcagctgaggcaggtaagcgccgatcggagggtttgaccgagtggcttagttaaatctctgttttcaccgttttgtaattgagaaaggcatccgcagcagaagccgatttttcagtcggc

SEQ ID NO: 112409 - DNA, 30 bp, Homo sapiens
  chr5:167696405-167696435
  hyper
cccagcacccgcagcgggcactgtggctgc

SEQ ID NO: 112410 - DNA, 224 bp, Homo sapiens; identical to SEQ ID NO: 4371
  chr5:167718507-167718731
  hyper

SEQ ID NO: 112411 - DNA, 378 bp, Homo sapiens; identical to SEQ ID NO: 4372
  chr5:167718951-167719329
  hyper

SEQ ID NO: 112412 - DNA, 248 bp, Homo sapiens
  chr5:167913519-167913767
  hyper
ctgagtgctccgcgcggctgctgcagcaggtttggacgcaggagaccggcgggaaggcctgaaagagatggagcaggctctgactcctgcccaagcggcttcgggggcgggacagctaggcgaggaccatcctggtcctctcagagtggagcggcacggtccctgtgggaacaggaagggttgagagaggaagcacccatcatttcaaagcccgtgtgactgtgattttcagcggaatggagggtccc

SEQ ID NO: 112413 - DNA, 131 bp, Homo sapiens
  chr5:167956135-167956266
  hyper
cagcagagacgcccccgtccctgtggcccagggaagtgccagggatccctgggaaggcgggagatggggaaggggcagggtgagcgaagaggagcaggctgcgtctgcacgcgggctgggaagcggggctt

SEQ ID NO: 112414 - DNA, 70 bp, Homo sapiens; identical to SEQ ID NO: 42259
  chr5:167956413-167956483
  hyper

SEQ ID NO: 112415 - DNA, 88 bp, Homo sapiens; identical to SEQ ID NO: 42260
  chr5:167956734-167956822
  hyper

SEQ ID NO: 112416 - DNA, 29 bp, Homo sapiens
  chr5:167956844-167956873
  hyper
cggggcggaggacgcgctggtcacgctga

SEQ ID NO: 112417 - DNA, 30 bp, Homo sapiens
  chr5:168005892-168005922
  hyper
ctaaaagccgccagcgcaacctgacagccg

SEQ ID NO: 112418 - DNA, 89 bp, Homo sapiens
  chr5:168006687-168006776
  hyper
gtagttctccggttcgtgaggccccgctctctggctgtagttgtgcaggtggactacaaagcccgagatgcatcgcggcccctcctccg

SEQ ID NO: 112419 - DNA, 674 bp, Homo sapiens
  chr5:168727253-168727927
  hyper
tgtcagcgggccctgcgtctggaaccctcacccctggagaggcactgctctttgcccatcgctgggggtttcgagacctctctttccagatctgaccaagcctacagacccccagctcggagagtgagggatcgtatccaggaagggatgagaatagagactgcatccagggaggccgaggggaaaggacggatctggcgcctggggccccctcggtgggacccaggtgggtggcccgcgtggggtggggcaggggtactcacaggcgctcagcgttgcgggggatgccccgaggaaccgcgcggaggcccagcccgtggcagtccacgctggcagcggagcaggtacacttggtggggcaggcgacggctggaggcccactcaggacgctcgccagcgccaaggccagcgccaggcgggcgcgcacggcggcgccgacccctgcccacccgggggccatggtgtgcagggccccgctcctggaggaggctgcctctgcggggcaagacgcgtggagcccgaggaggcgcgcggggagcgcgggcggcctggggagcgggcggcggagttagcgcggaggaggggcgagctcggtgctcaggcgcacggggcgcgggcggagcggggcgctccgggcggcggcggcggcagcaacagcagctccatcggcgggg

SEQ ID NO: 112420 - DNA, 301 bp, Homo sapiens; identical to SEQ ID NO: 42264
  chr5:168727994-168728295
  hyper

SEQ ID NO: 112421 - DNA, 45 bp, Homo sapiens
  chr5:168728507-168728552
  hyper
ctcagagaagtgaagcgacttgctggaggtcgcacagctgctagg

SEQ ID NO: 112422 - DNA, 135 bp, Homo sapiens
  chr5:169010585-169010720
  hyper
tggagccacgtctgcgcctgcgcctgcgccaagcccacggcgcgccacttgcacatgcgcagtagctgtaggagggggtgggcgctccattgggcgtttctcttggtttttcctttccgcgcggcttgggcggac

SEQ ID NO: 112423 - DNA, 30 bp, Homo sapiens
  chr5:169011159-169011189
  hyper
tgcgctgtgcggtacggtagcctctagccc

SEQ ID NO: 112424 - DNA, 825 bp, Homo sapiens
  chr5:169063980-169064805
  hyper
gttcagtccctaggcacggcaatcaggaaactctctgcacttgcggtggtggtctggcgagccccaggtggggactggcctctgctccctcgcctggggaggagacaaagtgggagtggtccccaagttttgcgtgaagtggggtggggtggcgtgtcttagcctacggggcaccagccttctagtgtgcccctgcccaacgggagggaggagggagcggggagccccggcgagggaggagagggcgggccctgagaggagtttgaaaagaggaaggaagtggggccctgcggcgcccagccaccccctgacggcttccccacgggaggacgcgaggccccggcccagccatggccccctggcgcaaagctgacaaggagcggcacggcgtgggtaggtgcgggccccagggcgcggcagggagcgggacaggtggcgggagagccgcgagcaggaggatgctgcggggccggcggcgcggggtgggcagggcgcgctgcctgcaggtcagagggcgcagcctgcggcggggcctcggggcgggaaagccgaggctcggggagaggacggcgggaccccaccccgcaggctaagcacagccctcgccctctcgcctgctgagggaaccttagacatttccgagatagggtcaagacctgcgcttgacaactcagttcttcgcgccaaactcggcgtccccaggagtgccccagctcgccgcgtgggagacttggccttgtagagggagctccactctcccctggctcagccttggcctgcccaccatgcatacttccaccccctccaaagcgacacccatttgcc

SEQ ID NO: 112425 - DNA, 280 bp, Homo sapiens
  chr5:169930890-169931170
  hyper
ggcagatgagggtgcgcaggggtgagggcgcagggctgggcgtcccccgcccccaccgtgcagccctcgcccccgccccgcccctccgtagttgcccgcccgccgccccctccgccgccccctccgccgctccgactctcgccccgagcgctggcagcaggcagcaggcagcaggcgggcgcgctgtggctccgcgccgcgcggtccgggctctgttcattcatgattggtactcggccctccgagacccagcccgagcgcagggaggggagccgagtgt

SEQ ID NO: 112426 - DNA, 103 bp, Homo sapiens
  chr5:169931223-169931326
  hyper
cggcagcctcggccgggcggccgctctggccccgtgtccagtgccaggcaggcttcagggcaccgtcctcggccctgggcgagggaaccgccgggccgggtcc

SEQ ID NO: 112427 - DNA, 167 bp, Homo sapiens
  chr5:169931353-169931520
  hyper
cgcggggagcggctagccctgagtccctgcatgtgcggggctgaagaaggaagccagaagcctcctagcctcgcctccacgcttgctgaataccaagctgcaggcgagctgccgggcgcttttctctcctccaattcagagtagacaaaccacggggatttctttcc

SEQ ID NO: 112428 - DNA, 435 bp, Homo sapiens; identical to SEQ ID NO: 4378
  chr5:170108014-170108449
  hyper

SEQ ID NO: 112429 - DNA, 707 bp, Homo sapiens
  chr5:170171108-170171815
  hyper
gtgggccgggggaaacgcgggcaggagaagggaagtctcgctcaggggagtggtgtgcatggggcagaggctgccagggacgctgaaggctgatagccgggttggcgcggaaatgggacgccgcagggtgggacaggcgggagggatgggatgggcagggtgtgatgccggacgaaggaaacgggcctgcccggcaggtggcagagagccacagaagagctccgagggggtggtgcgtgagatggcgctgcaggctggaaaggggctgcaggcagggtgcctccagagaccgcaagagaacagcttgcgagggaccgtgggaacttcaaggaaccgcaccgccctcctggaccacccgagaaaacaggggaagtgggcgaatgagtagaccaaagtactcatgacagggcaggagcaagtgagagaccctggaggaccatggagagaacgtggtaaccgatggagagggatgaaaaccgagccgcgggtgtgagtctgaggcgcccccaggcccaccagcgtgtgagcggcaggtgctgttcgccatcagccgctagatggagccggcgcctcgccgaatgcgccgggatccgtcgcgtggatgtcaggtccgggccagggagccaaagcggcggctccgcggggaccctccacagttccggactccagcccagcgccggcttcagggcgtgcgaccctgagcttgg

SEQ ID NO: 112430 - DNA, 30 bp, Homo sapiens; identical to SEQ ID NO: 4379
  chr5:170288990-170289020
  hyper

SEQ ID NO: 112431 - DNA, 138 bp, Homo sapiens; identical to SEQ ID NO: 42271
  chr5:170289638-170289776
  hyper

SEQ ID NO: 112432 - DNA, 144 bp, Homo sapiens
  chr5:170735176-170735320
  hyper
tgactacttcgtgtgcggtcctgtccacggtgccctgggccgggtagacagtcactgaggcgcgagcagaacggggagtggttccagcgcccaaagtggactggagccgggaagggctcaccagtcgcgtttcccaaagaaatc

SEQ ID NO: 112433 - DNA, 433 bp, Homo sapiens
  chr5:170735730-170736163
  hyper
cggtagcgtccaaggggcttctgcggattccgccgggtcgtcccggggttgcaactccattgtacctgaaaggatgcatttggtttggcttttgctcagatgaaaaaaaaaaaaaattggaagaaaacgaaaacccactcagcaaaagacaatttcacaagcggagcgctctacccacccagcgcggtgtctgggaagcggcccggcccggaggagcggggagcgtctgctaattgcagcttcgttagatttcgggtttgggaggctgtggttcgggctctaatatccgccgcccattatccctgctaataaatttgacctattgttcgtttgttaaaatgatgtcaccttggaacagtccctaagctcctatttccatgaattaggcctttattgaaagccgggagccaatgagaggagagaggcttgttga

SEQ ID NO: 112434 - DNA, 115 bp, Homo sapiens; identical to SEQ ID NO: 4382
  chr5:170736715-170736830
  hyper

SEQ ID NO: 112435 - DNA, 582 bp, Homo sapiens; identical to SEQ ID NO: 4383
  chr5:170737281-170737863
  hyper

SEQ ID NO: 112436 - DNA, 754 bp, Homo sapiens; identical to SEQ ID NO: 42275
  chr5:170737935-170738689
  hyper

SEQ ID NO: 112437 - DNA, 1161 bp, Homo sapiens; identical to SEQ ID NO: 42276
  chr5:170738823-170739984
  hyper

SEQ ID NO: 112438 - DNA, 14 bp, Homo sapiens
  chr5:170740463-170740477
  hyper
acactttcggggcc

SEQ ID NO: 112439 - DNA, 507 bp, Homo sapiens; identical to SEQ ID NO: 42277
  chr5:170740574-170741081
  hyper

SEQ ID NO: 112440 - DNA, 775 bp, Homo sapiens
  chr5:170741500-170742275
  hyper
ccaacgtatcattcttataaggcctagtatttttgtttttcaaaattacttctgttgttttgccagggtgacactcaattctttgggcctctttggagacacacgcacgttgtttttttttctttctgttgggcgcctcgctttgcgcagaaggcctctggcccggaggcccgtccggggtaggcgtccaggcaggccgggggtggggggccggtctggcttcggccctcggggggcgcctggctttcccgcacctagtgccttcgcggcgtttggcgtcttccagcgctttgccctcacccagccttgcccagccagagacgggctacgggtcttttcctgttacagagctgagcccactcatgtggtgccaagtagcgactatctctcggccacctccacccagagcaatgtgggcgcccccagcgggtgggagcgattgccgagcggcgcaagggcgtttaacgcctaaccccctcctcctgggttgccaagccgctaggtcgccgtttccaacgtggctgcgcgggactgaagtccgacgactcctcgtcctcagtaggagacacacctcccactgcccccagccacgcgagctatgggcagaatcggggcaacggtaatatctggatggggcaggctcccctgaggctgtgcttaagaaaaaaggaatctggagtagcctgaggggccccacgagggggcctcctttgcgatcgtctcccagccttaggccaaggctacggaggcaggcggccgagtgttggcgcccagc

SEQ ID NO: 112441 - DNA, 213 bp, Homo sapiens; identical to SEQ ID NO: 42279
  chr5:170742386-170742599
  hyper

SEQ ID NO: 112442 - DNA, 149 bp, Homo sapiens; identical to SEQ ID NO: 42280
  chr5:170742672-170742821
  hyper

SEQ ID NO: 112443 - DNA, 359 bp, Homo sapiens; identical to SEQ ID NO: 42281
  chr5:170743120-170743479
  hyper

SEQ ID NO: 112444 - DNA, 452 bp, Homo sapiens; identical to SEQ ID NO: 42282
  chr5:170743646-170744098
  hyper

SEQ ID NO: 112445 - DNA, 30 bp, Homo sapiens
  chr5:170744513-170744543
  hyper
ttgctctgtcagacccgctgccaattaatg

SEQ ID NO: 112446 - DNA, 106 bp, Homo sapiens
  chr5:170744957-170745063
  hyper
tctttaaaagcctccagacctcgcacagcccatgcgctggctgctaccggggatgtactggctttactatcaagcactgttggtcgatggatttatcccagctgtg

SEQ ID NO: 112447 - DNA, 237 bp, Homo sapiens
  chr5:170745323-170745560
  hyper
gtgattatccagcatgcgaagctgccttgcatttgcatccactgttcaggtgctacagctggggcacttttgttcctgggacgtagtgagactaagaagaaggggaggggagagcagagagggaacgcaaccccggggaagacgccaagagagggtgctgggccggggtgaactttattaatgcctgccgtttccagctcgtttgttggagggggcgggcagggctcctctgggcag

SEQ ID NO: 112448 - DNA, 30 bp, Homo sapiens; identical to SEQ ID NO: 42283
  chr5:170764137-170764167
  hyper

SEQ ID NO: 112449 - DNA, 116 bp, Homo sapiens
  chr5:170814439-170814555
  hyper
ggctcattcgcagccggctaacccgccatatcttacacagctaagggctgccgacgccattttgcagggtgggctgcgcagactcttggcgggaggccggcgcgcttgagcgggag

SEQ ID NO: 112450 - DNA, 30 bp, Homo sapiens
  chr5:170815399-170815429
  hyper
gaggctgggttcaccgggaagcatgggcct

SEQ ID NO: 112451 - DNA, 30 bp, Homo sapiens; identical to SEQ ID NO: 4390
  chr5:170819918-170819948
  hyper

SEQ ID NO: 112452 - DNA, 30 bp, Homo sapiens; identical to SEQ ID NO: 4391
  chr5:170834697-170834727
  hyper

SEQ ID NO: 112453 - DNA, 30 bp, Homo sapiens; identical to SEQ ID NO: 4392
  chr5:170837529-170837559
  hyper

SEQ ID NO: 112454 - DNA, 30 bp, Homo sapiens; identical to SEQ ID NO: 4393
  chr5:170837858-170837888
  hyper

SEQ ID NO: 112455 - DNA, 1107 bp, Homo sapiens
  chr5:170845700-170846807
  hyper
atggggccctggttaaaggaacgaagctgcctagtatgcaaacggaggcaagtcttagtccggttttgggaggaggccggaagagggcctcagcgtggtcgctgaccagagtcctgctggctgctccccggcgtgcagccgtccgtgctggggttgcagtgacgtctcggggccgcttggtggtagccgtgtgtttccaaagctggctcgcctacgggagagtccagctgggatcccgtgaaccgaccccagagccccggagggggcgaggggtgggaaggagagatgcccgggagcccccttcgcagcggcagggacgtaagaagaggacgggggctcacttaagtgggtagccagtcaagagggtggctgggaaactccacgatcgcagggcgggtaaaagcgacccccattcagtggagccgccccggggctgggtttgacccgcccctctcggctctccactagagcgctggtgagtgagtgcgagtagcgaatgtgggcaggtgaggacgttccgtacctaactgcgttcttggggagcatcgcctgcccaatttgggcaacgtttgcgcggaggagcggtcactgcgctcgggcgcagagctccgacggcttccagcgctcaccagcttcagtctcgcgggtcctgcccctttggagctgccggtcccgtctccgagagtctgagcgcctcccctccaaccccgagccgccaggagaaggaggaggaggcagcgagaggccgcggcaggcaggcgagcaggcagggccgcctttgatgtgggctgggcgcacccaggcgagctgagcgcccgtccggccgcgccccgaggggggagcccccaggccccgcatcctcattgtgccggctcgggcccgggcccgcccccggccccccgccccctcgccgcccgcgcgtagaaaacgccccggccgccgccagtggtgggaggcggcgatgcgcacggccggagagacgcggaggaggagacatgagccggcgggcgcccagacggagcggccgtgacgctttcgcgctgcagccgcgcgccccgaccccggagcgctgacccctggccccacgcagctccgcgcccgggccgg

SEQ ID NO: 112456 - DNA, 368 bp, Homo sapiens
  chr5:170847119-170847487
  hyper
ggcggcggaggcgcccggtcccggccgcgcggagcggacatgtgcaggctgggctaggagccgccgcctccctcccgcccagcgatgtattcagcgccctccgcctgcacttgcctgtaagcgcccgcgcgcggggctgcccaccttgcctggctgtctgtccgtatgcctgtgccctgtacctctgtctgcccgcccgtcggttcacctgactcttcgactgcgtgtctgtctgtccgtgcgcccccttcctcaggtcccactgaccgcttctccatctgtttcccgcaggtgtttacacttcctgctgctgtgcttccaggtacaggtacgtgggctcctgactttgacctcctcccgcccctgcc

SEQ ID NO: 112457 - DNA, 30 bp, Homo sapiens; identical to SEQ ID NO: 4396
  chr5:171022582-171022612
  hyper

SEQ ID NO: 112458 - DNA, 30 bp, Homo sapiens
  chr5:171433845-171433875
  hyper
tcatggcagggcctcgagagcgccacgact

SEQ ID NO: 112459 - DNA, 31 bp, Homo sapiens; identical to SEQ ID NO: 4397
  chr5:171533959-171533990
  hyper

SEQ ID NO: 112460 - DNA, 86 bp, Homo sapiens; identical to SEQ ID NO: 42294
  chr5:171541757-171541843
  hyper

SEQ ID NO: 112461 - DNA, 30 bp, Homo sapiens; identical to SEQ ID NO: 42295
  chr5:171615041-171615071
  hyper

SEQ ID NO: 112462 - DNA, 30 bp, Homo sapiens; identical to SEQ ID NO: 42296
  chr5:171615457-171615487
  hyper

SEQ ID NO: 112463 - DNA, 30 bp, Homo sapiens; identical to SEQ ID NO: 42297
  chr5:171615923-171615953
  hyper

SEQ ID NO: 112464 - DNA, 31 bp, Homo sapiens; identical to SEQ ID NO: 4398
  chr5:172043001-172043032
  hyper

SEQ ID NO: 112465 - DNA, 93 bp, Homo sapiens
  chr5:172068056-172068149
  hyper
ccttcccggcccgggcgcgggagcggcgagggcgggaggcttggctgtgcttctcccgccgcctggtgcaaactttcaaaagatgcggcggcc

SEQ ID NO: 112466 - DNA, 446 bp, Homo sapiens
  chr5:172068384-172068830
  hyper
cgccaacgccgcgcccgacgcagcgatgggcaacacggtgcaccggaccctgccaggtacgccggggagccctgcccgggaggcgggcgccgggcttctctcctccgggggacccgctgggtgactctggagagctaccccacggcccttggagccctcggctcgcagcgggctggagtctccggtacctcccggacctcagctcggcgcgcgccccgcggctgggctttgcgccccgggagggcgggtaccgcgtcctggttaccttggggaccccagtcctcattctcccggctttggccagatgcgcaaaaagggccgctggggcgatgccgcgcgccccctcgcctttgttccagcccgagggcgctgatgagcaaactcaaggcgacctgggtgggggtgactggagccgggctcgccagggcttccgacggtcagaagcc

SEQ ID NO: 112467 - DNA, 31 bp, Homo sapiens; identical to SEQ ID NO: 4400
  chr5:172070427-172070458
  hyper

SEQ ID NO: 112468 - DNA, 30 bp, Homo sapiens
  chr5:172124793-172124823
  hyper
catcctgcagaagccgcaacgaccgggaag

SEQ ID NO: 112469 - DNA, 162 bp, Homo sapiens; identical to SEQ ID NO: 42302
  chr5:172197153-172197315
  hyper

SEQ ID NO: 112470 - DNA, 30 bp, Homo sapiens
  chr5:172197896-172197926
  hyper
cgctcccccagcagcgcccgcaggcctcca

SEQ ID NO: 112471 - DNA, 796 bp, Homo sapiens
  chr5:172198698-172199494
  hyper
ctcatcactaacaggcggggaaactgaggttccccaggcgaagcgactgacttgcccagaaccacactactggggtgggggcagcaaataggcgcctaagatgaagtttagagaaaaatgaacaactctgccgatagaaaagtcgtccctaccaagaccgactcgagcgagttggggcggagaggttcagggcaatgctttcctgtttcccagacttttctttaaggtggctttaaaatatctacatttgccatgaaagtgtgagcaagcaaactcccaccgggaaataatgctattcctagtcttgtggcccccggaagacttggagccaagggaggcaggtcagggggctgaaatcccggtgaggggtcgcaaggccccgcagtggattccagggtttggcgtttggaggggtgaggggcgacccgcagcgcgactcgacggcgccccccaggggccgcccgacacgtttctgtcaccttggctccagactgagcttctccatccctttctttattatacaaataggcagtatacacagtgagcgcccactaagcgctgggctgggggcctccaacccggaacagaagccggccacaaccctcgctccctgtcgtcgcggccgttataggccgaaagcaaaatccaatcccgggccattgtgggcggattgccaggacctggatcgcaacacttgggaagacccccgccccgcccagcgatctccgtgccctgagtcccagtgacggccccctggacagcggagcctgctgcagcgacgcgacgcgctgggtac

SEQ ID NO: 112472 - DNA, 276 bp, Homo sapiens
  chr5:172234231-172234507
  hyper
ttactattttttaaacgtcaattgatgccaggaatattctgccagccctccaagggtggtttcagcaggcttacttcctggtcataatcacttcctccatccccggcttctgtcatgctcagccctgacctcaccaccgacccgccctgcccctcccattagctgcgtcaccactgcctgcccccacgtttagcccagcccccagcccagatctcagccttgggtgaaaagtgtcagcccgcacactttctgttttacctccggccgctcttttaa

SEQ ID NO: 112473 - DNA, 30 bp, Homo sapiens
  chr5:172261140-172261170
  hyper
ccttccgacagcctcgactctccgcccctt

SEQ ID NO: 112474 - DNA, 31 bp, Homo sapiens; identical to SEQ ID NO: 4403
  chr5:172359606-172359637
  hyper

SEQ ID NO: 112475 - DNA, 447 bp, Homo sapiens; identical to SEQ ID NO: 4404
  chr5:172385501-172385948
  hyper

SEQ ID NO: 112476 - DNA, 250 bp, Homo sapiens
  chr5:172386282-172386532
  hyper
ttgtactcactggcatcgccctcccggggccgccaggaatgaggcactgagatcccaccccaagccgctgggggcgccattcgacttcgctcctacggaaatggggcttcgatgtctttctgcgcttgcgcggcacggaaactcacttccggccctgcgcactcagggtctgaggcagctagtagccgggtgagtggaggctggagttttctcggacagtgaactctaccgccccgtgagaccctgccct

SEQ ID NO: 112477 - DNA, 233 bp, Homo sapiens
  chr5:172410474-172410707
  hyper
cagtgccaggcacacgggaattcagaatagtaagggacaactattgttaagttctctatgtctgttgcataagtagatgaggctgtagataactacactctttgtctaaaagggccaagttctcatcagaacactttgctgagccccgggtgaccgaatccctagctctggggtgagcgacatgcctccaaggagctgcagccaggagacagccaggcgaaggcggggctctg

SEQ ID NO: 112478 - DNA, 103 bp, Homo sapiens; identical to SEQ ID NO: 42309
  chr5:172444178-172444281
  hyper

SEQ ID NO: 112479 - DNA, 30 bp, Homo sapiens; identical to SEQ ID NO: 42310
  chr5:172482708-172482738
  hyper

SEQ ID NO: 112480 - DNA, 275 bp, Homo sapiens
  chr5:172483101-172483376
  hyper
tctcccatcctgggcgtgctgccgggtatcgcagacggcccacgcccacactgcagaggccggcaccgagcccccgctccgccctctcttcctggtttttcccggcaacccgcccctccggcgacacgtgacaggggtgcccggccggactcagcccctgattggccgggctgtggaacgcctcgcgattggcccgaggccggcgggcccccgcctccctcctcctcctcgccgcggcccacgtgaggggggcgagtcacgcgatttccgggaac

SEQ ID NO: 112481 - DNA, 30 bp, Homo sapiens
  chr5:172483736-172483766
  hyper
gtagatgggactcgcgggcgggcagtaggc

SEQ ID NO: 112482 - DNA, 30 bp, Homo sapiens; identical to SEQ ID NO: 42312
  chr5:172484088-172484118
  hyper

SEQ ID NO: 112483 - DNA, 298 bp, Homo sapiens
  chr5:172571551-172571849
  hyper
gcggctccccaagacgtccacgtccggatctgtaaccaagagattgtcaaatttgacctggaggtgaaggcgcttattcaggtactgatcccgggacccctgccgggctccagcagccctaacccaagctctgctggtctgtgagcttggcagtgtcactcccgaactttccccacttggtttcccagaccacaggctccgccccatggtcggctacccccccggtccccatttggttgtgtcccggtgactgctggccttgatcctttttccgggtgccgccggatctcccatcccc

SEQ ID NO: 112484 - DNA, 802 bp, Homo sapiens; identical to SEQ ID NO: 42315
  chr5:172655932-172656734
  hyper

SEQ ID NO: 112485 - DNA, 30 bp, Homo sapiens; identical to SEQ ID NO: 42316
  chr5:172659204-172659234
  hyper

SEQ ID NO: 112486 - DNA, 490 bp, Homo sapiens
  chr5:172659535-172660025
  hyper
gggatcggtcagggtcgcgccacgcgggtcccttccctaccaggctcggataccatgcagcgtggacactcccgagttgctctgcggaatcccggggctctgaaccgcattcaagtccccgacgccgaagttcacgaagttgttgttggcggcggcagtggccggctgcgctggggaaggcccggcggggtaagcggcagtgcagctgtagccagggctgcaggccgcgccgccgtaacccggataggcggggtaggcgttataaccgtagggattgaggcccacgccgtaggcaggcgcgtagggcgccgagtcccctaggcatggcttgccatcgcgcaccagcactggcaccgcgatcctgcgggcaggcggcggcggcggcgggggcagccccaccagctccagagtctggtcctgccgctgccgcttgcacttgtagcgccggttctggaaccagatcttgacctgcgtggacgtgagtttcagc

SEQ ID NO: 112487 - DNA, 293 bp, Homo sapiens
  chr5:172660141-172660434
  hyper
cgcccggggccgctccgcgttgtccgcctctgtcttctccagctccaccgccttctgcagcgcgcacagctctgagggggaacagagaggcagagagacgcttggtaagagcggcttgacctacggagcgcggccgcacagtaatggtaagggatcctcgtggaggccactgtgtcctgcctggagcgcccagctggctgcggctcactctgccaagtgcactgggagccaccgacacgtctcactcagcatttgtagaaagtcaggctggctcaaggcgctggagaacaaaa

SEQ ID NO: 112488 - DNA, 192 bp, Homo sapiens
  chr5:172660808-172661000
  hyper
atcagttctagccgccgtgcccgcccgaatttgttcccaggcctctgctcctcaacaaacctatgaattctctcccggctggcagcggcccttcgcccagcgcttcgcccagcgcctgcggcctcccgggaatcgcccgggctcctgccttgggctggggggtctcccagaaggcccctttctgcagcgggg

SEQ ID NO: 112489 - DNA, 513 bp, Homo sapiens
  chr5:172661472-172661985
  hyper
cccaggagcagagccgaagccgcccggggctttgttaggccggggggaaacgttttttggtctcttgcttctgatcctttcaatccggcatttcctctgaacctccgattggacgcggggcgcgggagcctggcgacaacaccaggcatcttacattctgaaccccccgccgcagcccagccctcggcccaagggcgcgtgtctcctcctcctggccctgagtttcttggggacgaaagcgacccaggaggggagaagggggcctgtgtttcctcctcacctttcttttcggctctagggtccttggctgggtcggggtcgctgtaggcacgtggatagaaggcgggggcggcgggaaaggcagacgcacacttggccggtgaaggcgcgcggcccagctctgcgcgcagctctgggaggcccggcgcagccgcctcgggcccagcgtaggcctctggcttgaaggcggccagcatgcaggaggagggcgccagggtcgcctccaggcgggca

SEQ ID NO: 112490 - DNA, 1026 bp, Homo sapiens
  chr5:172663578-172664604
  hyper
agcgttggcttctcacggccctagctggtacagggaaccgcgggcgggaagctgggcgggacgcgtggacttgctgagaatggggatgtggagggcttggctctttgcggagtgcgggttggcaagaggcgcttggagtagaataaaggcggcgcagggccaaaaactacctaaagacacagctcccgcaggcgcgcccaaggtgcggaggaaacgctccatgtatggggacaaaatagtgtctgtccagaacgtacatcttgggtgctcaaacccgacagtgtgccgtctgagacgccgacgcaagtgaagtcaagcattggcctgatgttgggacttttcctgtccctcatcaaagccacactcccaggacctggggcctccatgctggggagagaggtgagccccgcagggcagcccaggaggcgcgcaacgccctgaccccggcttctaggcgccagccgtcagtaacaggcctgggctgccacgccgaaatcacgcctcgagtttctgagccagggactactgggggtctggaattgttagtctagtctgtggaggatgccttttcttaaatgtggggcgttcaaggcccaggaaacctcgtccccccacctcttcacctcccaacccaaattctccttggacggagctgcatgtcagcggccttgcggcccttcctcgcctggacttttggccacgttaccgttatggctgtaaattaacctagcttgggggcccgccttgcctttgaagattgttttcgagcgcgggcgggggggggtgtcgttggagaggatgcctatcgccgaggcggtgacgtctggcaaacgagccacatccgattcaattaaatgtctcgctgaaaagagctcggaacgagggtcctgggagcgctgttaagtgaatctgctggccaggcggctcgcgatgacagtttgaaagattagtgtgagcggacgcctgaaatattaccgtttaatgggggacatcgaggctacatccgggatccctgtttttagtaag

SEQ ID NO: 112491 - DNA, 965 bp, Homo sapiens
  chr5:172665285-172666250
  hyper
aatccaaattccagggtggctcgagcgcattctccgtgaataaattattattaattgaaaagcgatcggcgcagccggagccggcccccctttcgtgcaatcagcagggctggtcgcaaaaggtatatatgattaattgaaagataagctggaactatcaccgggaatgtcattaatgcgctggggagacgtccattggagacaggcggcgttatccgcggctttatcttcaacaacgcctcgctctcggcccgcgcgggggaaacagatgggagtttctgtctgggacgctcgccccatgtttatattttgggaagaatcgcaactcgtgggagtccccggctggccccctgataaatgaacattagcactttttcggactactgtatcaacaaaggggctgcggcgctgcaataattggcgagaaagcaaacagagggccgagagcgcgactctgctcttcgtccggctgatggatgagcagctccggctgcgcgccggactcccggcctcggcctccgcctccgcctccgcctccgcctccgcgctgggcccctccgccgcccggcttccttcctggccgggagttgggggcggggggcgactctgagggccgccgacctcgcccttggctccggaagagtccaggcggcctccgcggcaccggatttttcctgcctcgggactcgcctcattcaggtggctcagctggcaccaaatccttctcatttccacgcttgttcagtgcccacggggtgtgccaggcgctctcacggatctcgtcacggatcctcttattccgactgcaggcctgaggagaatgaggttcagagacgtggagtaagttgctcagggtcacacagatgggaaaggacagtgtcagggtgttaggattcgaacacacagctgactgcacagctgagactgttttcttttattacacgtcgctgcgcccaagaccgtac

SEQ ID NO: 112492 - DNA, 299 bp, Homo sapiens
  chr5:172670863-172671162
  hyper
cttccggtgtcctttcgcgttaatttcgtcctcttttcttctctgggctggggctggtggctgccacatcccaccccttctgccccgacggctgcaaaccgcttcagccaaaacgggcggagaggcggagagaatcgagacgctggaatcagttcctcggagtcccgtcgctggaggtcacagctgggaaaatcaggtgacattcgagtcagatggacaacgactcagatacagtgaagaggaaaatggttgtcctggggctggttcgcgcctgcccggcgggtgtgaagcccggggaa

SEQ ID NO: 112493 - DNA, 236 bp, Homo sapiens
  chr5:172671245-172671481
  hyper
cgcgggggaccagccgggccgacggcagcgctgcgggtgggttgggtcgtcggccgccgctccccggagaggtgaagagtcgcacctaccaccgggcagcctccgcggctctggccgaaaccccggctggccgcagctccgggagcccccagccctgtgctgctgcggccggctcagtgctgaattgatgctggaaacggctggccagcgggcctagggtcgccgcctttccctcc

SEQ ID NO: 112494 - DNA, 136 bp, Homo sapiens
  chr5:172671639-172671775
  hyper
cgcaagcggtgtctgtggagagcctcccgggggcatggcacgggggacccggaggccaacaagctgcgcgataccggagcaaagtcgggatcagcagccgcctttcgcggagggcgttctgcgctccaagcaaatt

SEQ ID NO: 112495 - DNA, 630 bp, Homo sapiens; identical to SEQ ID NO: 42325
  chr5:172672262-172672892
  hyper

SEQ ID NO: 112496 - DNA, 63 bp, Homo sapiens; identical to SEQ ID NO: 42326
  chr5:172672960-172673023
  hyper

SEQ ID NO: 112497 - DNA, 322 bp, Homo sapiens; identical to SEQ ID NO: 42327
  chr5:172710793-172711115
  hyper

SEQ ID NO: 112498 - DNA, 134 bp, Homo sapiens
  chr5:172721005-172721139
  hyper
cgtagagacctggccgtccgtgtgaagaggtcttcaaacccgtttggcgtgaggattcccctgcctttgcccgcttgataaaaaacgcgcggtgttctctctccatggccgccaggtggcgatgtggaatagga

SEQ ID NO: 112499 - DNA, 854 bp, Homo sapiens
  chr5:172754108-172754962
  hyper
atccgtaagaccccacgcgccgccggggcaggaccgcacagggccgccattcactcacttggggcgtccctaatgggcactcgtgcattccagctcgtgcggtgagcgcacgcacgccgccgctgccgcgttcacacggccccccaaagtcgggggaggggtcgtggagcgaaggagctgtaggcagattttctttctctttccgagctgggaaaagggccagccccgtgccctgcacgcctggctctgctttgcagcttgccggtgagccaagagccggtagagcagaggaggcgcacggttcgggtcgtgtcaccatttcttggcttgctgacctggccaggagctggggatggcggcagcaccgcggaggtacgctttgcgctgccctcacgctcccttccgaaagcagtgcccccagggggaaagttcgcaatgccatttgtctcgccggcaaagttctgggatgtcgggcatcttttgaggagggggaagacgcggcacccttactgaggccggcaggccaggaagagaagttctccgggcgcagggcgcagcccagctccggggaccctctgggcctcccgcgtgccggccgggatgaagcgcgctttgcaccggacccgggattcgggggcgggggctggcgctggcagcgtcagacgctgcttcatttcccctcgaccctggggaggacagcaacaagtcctgccccagccatttcatcaccctgctagcacgtgcagattccgggccctcggagcccggcgcggacctcgccttgcctcgcgcttccctttgcacgtcccgtgccatcccaagagtttgcgtggccctgggtgggcgcctggctc

SEQ ID NO: 112500 - DNA, 392 bp, Homo sapiens; identical to SEQ ID NO: 4416
  chr5:172754985-172755377
  hyper

SEQ ID NO: 112501 - DNA, 142 bp, Homo sapiens; identical to SEQ ID NO: 4417
  chr5:172755420-172755562
  hyper

SEQ ID NO: 112502 - DNA, 283 bp, Homo sapiens; identical to SEQ ID NO: 4418
  chr5:172755594-172755877
  hyper

SEQ ID NO: 112503 - DNA, 972 bp, Homo sapiens
  chr5:172756194-172757166
  hyper
caaggcagccctgagtcagcccgccgcggagcatcgcgtgcccggaggccagagcttgaaaggcaactttacgcgtctccaaacacactcctgcattttctcaaagcgctgctcgccaccccgctccgggttcccttttactctccagtcatccgatggaagtggtgagaacaaaaacaaagacaaaaaagctaaatccggggaagttatctccatctcctcccttttcttgttcggccccctccccaagaaccgccgggtcgggatagcccccggctactttctcacccggcccgtggagggaaggagaaagttgggcgccgcttggagcgcctcttcccctgctgtgtgtgtacgtgtgcacgctcacgtctcccccgcgccggggccggggacaggaactgctctcggtcccgtcaccccacggcgcagctcggggggctcgcagggctgggggagggcggggacacgagcgccgcgcccaagcgccccagggcacgcacccggcgttggcgcgcactcgcccctccccccgtccccaccctcctcctggagaacaggtgagccccggtaccagctctcgatcccccacccccgccccgcgccccgcccgcgccctctgcggtaatgcgcctgggaagtttcatcacccactgcccaggcgacgcggccctgggtctccgcggcggggcgcactgcccgcctggttggggccgccatgtgacacggctgggggagggggcgaggagacacgcgggcaggtcatcttttggccggcgcttgacttccaaagctttcctttcccgtgtcccggctgcacgcgggagtggggaaggcggaggcggggggccaggatggccacggctggccgcagctatccggcgtgtcgagctctcctgagtcggaaggaaggagaggagggggtggggagggcgtcttcagagtgggcttcccctgcgctggagcgccagg

SEQ ID NO: 112504 - DNA, 73 bp, Homo sapiens; identical to SEQ ID NO: 42335
  chr5:173043699-173043772
  hyper

SEQ ID NO: 112505 - DNA, 361 bp, Homo sapiens
  chr5:173314917-173315278
  hyper
ccttctcattcatccgcggtttcacgggccgccacttcgatctccaacaccttgaccgtatgccttcgtgagcgaggaatccgttctccttgacacgtccctattgctcctcctgcaaagcccagttagggaagagaaatatcaaaggagtcccttgcccacacaaaagatggcgacctgctgcgctcactctgggtgggggaagcgggttccaggcgccgggcctcactaggcgaggcgcagacggaagaggcgtctctggaggtaacttttcgaccttcctgggagtagctctgaagcgagggggcgtggcctcgcctgagttctaacagatgattggtcttccggcaggtaggtgggg

SEQ ID NO: 112506 - DNA, 30 bp, Homo sapiens
  chr5:173315534-173315564
  hyper
taaagcggcgacggcggcgacggcccagca

SEQ ID NO: 112507 - DNA, 30 bp, Homo sapiens
  chr5:173315861-173315891
  hyper
ccctcgtcgagtctcgctaatccctcctga

SEQ ID NO: 112508 - DNA, 193 bp, Homo sapiens
  chr5:173345560-173345753
  hyper
acatcgtcataggatcggactgaagcctttctccctctagcctctgaatggaaaccaactcagttcaaactaaatgcatcttgtgcatgggccagatcctcatctgccccgtttacttacataacacatactagtcaatcgaaaatagtgatcctctgccctctacctgccacacattcgtgattgaatattt

SEQ ID NO: 112509 - DNA, 543 bp, Homo sapiens; identical to SEQ ID NO: 42338
  chr5:173738806-173739349
  hyper

SEQ ID NO: 112510 - DNA, 30 bp, Homo sapiens
  chr5:173846740-173846770
  hyper
accagctcattccccggaggctccatcacc

SEQ ID NO: 112511 - DNA, 513 bp, Homo sapiens; identical to SEQ ID NO: 42339
  chr5:174115355-174115868
  hyper

SEQ ID NO: 112512 - DNA, 1080 bp, Homo sapiens
  chr5:174119515-174120595
  hyper
gtcctcctgtgcagacgaggaaactgagtcacacgagaggaagcaattgctgatagttcacagttgccacgccctcctcatgcctttacagacatcccaggcctttgatcaaactagggagaggttagaagaaaggcgagacgggcctcagaagaatttggatctgttgaaaaaggattttaggacaagaacgaaacaagacgcgttttcatgggaacgcaaacccagtaacttctcagagccagggcttcgcagagaaactgcatcaaaaggaaaagagtctggtcccaacctttatttctcccaaggcatgaaactcctgatttcaaaccacttctctttgcctctgaaagaaaacaagaaaaagatggggctgtgtagttcttccaacagtgaaaaaaagaaagaaaagagagaagaagaaaactgtttcgggtttcgaaacagaaagggcctccttcccctttatcgataattttgaaagggtcgctgtaagacactgactaatgacacgtgacctttggattctccacgaggcagcaggcgcgggccccgagcccagcggggacccctctgccagttaggggtcactctctccattcaacgctttattagccccctcaagtctcagggcgaagtcctgctgctttgagacgtttacagctttgattgaggaaagctattcagggctggggcgaggatctgtttgttttcaggaggaagcctctgtgagcctgccccctcccccctgtgtttccagagttgctggagagataaaagccatacctccttttgaccttcattggacagtaggagccccgactcagcgtggaataataaaggcatatcatgctgcataaattatcccgtgattgacgctctttcttccagctctgacttaaaggggggtgtcgggggctggggcagggaatggggaggggttcggtttatttactcaagcacctactgtgtgctgctgatggggaacttcctaggcaagtcattgtcgcatttcatccctacaaacagtcccaggaggtaaatattatttatccctgtgatgtgcgtgaggaaatggca

SEQ ID NO: 112513 - DNA, 33 bp, Homo sapiens
  chr5:174147149-174147182
  hyper
gacccagcaaggtgacggcggaaaacggtgaga

SEQ ID NO: 112514 - DNA, 1103 bp, Homo sapiens
  chr5:174147428-174148531
  hyper
ctctctgcgcctggacgacttcatctgtggaatggggagaaagctcaggctttagggggccttcagtaatctgcatcgtgcttttggcaaaagctccttctctccagccccggctcaaacccgggctcggtcctgactccggaccttagggggcgggaacaggagaacaggaaagaacaagcttgggcttgcagagcttcgcaagcaagacgtttgtacccccaaaacctccagctgtgaccctgaatatctatctacccgacttcctgggctgtgtaactcggaaagtgatctctctagacaccagaggaccgaaccttccccattctcactctgcaacaagccagtaagaaaaatgagctcagagacgagtagccttttgcccgaagtcacacagccaatgttttggggggtgggtgagcggtgttgtggaattcctggcggatgttggcgcccgcgggtctgcctgcttctgatacccgggctcggtagaataggccgctaacgagctcccattaggaggaattgtcactcctctgggagcgagcttgtcccattagggcgaattgtcattcctcctggagcgaggttgtcccggctccgcgcaggctgagtgctggggccgagagcaattaacgcggctccggcgcgggcagccgcctctgccccgggcagcgggggcggggcagggcgggggcggggcgcccggcgcggctggagccggtcacccggcgcagccccttcccccggagcccgcctttcatctccccgcgcctggcgcctgcccgaagcccaggcccgtctacagcccccttcgctgcccctcccccgcccccttctagccgctggggttacaaactagccttcggccctcggggttacaaacgctgcgttctgcgcgcagtgctccacagtttgcaaggagtgttttctccttgggactcgcagcgcgcgtacgcggttgcttcaagaaggggcctggcgggtgtaacgcgccccggggagcgcgggaaggtgcagggttgaggatctacgctcagaggcctcagccgcgcgggagggattcctgtgtctcccacttctacctgcgcgaccttgggcag

SEQ ID NO: 112515 - DNA, 218 bp, Homo sapiens; identical to SEQ ID NO: 42343
  chr5:174149050-174149268
  hyper

SEQ ID NO: 112516 - DNA, 824 bp, Homo sapiens; identical to SEQ ID NO: 42344
  chr5:174150697-174151521
  hyper

SEQ ID NO: 112517 - DNA, 1212 bp, Homo sapiens; identical to SEQ ID NO: 42345
  chr5:174151577-174152789
  hyper

SEQ ID NO: 112518 - DNA, 45 bp, Homo sapiens
  chr5:174158415-174158460
  hyper
caaggagatggactccgagcaaacactcttcggtttgaagtggga

SEQ ID NO: 112519 - DNA, 22 bp, Homo sapiens
  chr5:174158665-174158687
  hyper
tcagatgggaggctccggtgac

SEQ ID NO: 112520 - DNA, 502 bp, Homo sapiens
  chr5:174159299-174159801
  hyper
ggagaaaagggctgcatcttgcgtggctggcgggttagactggaatccgtctggggaactgcgcaccatccccatcgctccagacgccgaaacaaaacctgaggctcggagaggggaaaaagagttgttcaggctcgaacatacgcatcccagcctcataggtggatggggttaccgagctgagaaccaagccggaggtccgcgaagccgggccgcccccttgctctgggcctcccttcaagcctgcagtctggggatgggttccgagtcaccgcggtccgggcctcggtcaggcttggtcgggcacacagggcgtttcagaggccagattgacaacctgtggcggcaaaaggactctccctcaccagggacccgcgaaggcgcgcattgcaagatgttagcgtgcgggctttagatatccttgcgtccgatgccagaagcctggcacgcaaatttacccacccttccatactttcagtgctttgttcgaaacttttcaaga

SEQ ID NO: 112521 - DNA, 30 bp, Homo sapiens
  chr5:174160347-174160377
  hyper
aacgtctgcctgacccgactgaaaagagga

SEQ ID NO: 112522 - DNA, 604 bp, Homo sapiens
  chr5:174162401-174163005
  hyper
gcgccaggagcggtgcgcccagcgcagggggctcctagtcacctcgacccttccggcgcccttccctccttagctgcacctggcaagccagcaagggagtgacccttgcgcaggaagggggcgcgtcacccggtttccccatagaaccgtgggcgtcgcaggcgagaagggaagcgtccaggcgctcggccccttccgccccgcccgctgccggccgcccgtttgatgtcgcgggcccggcaggaatgcggccgggttatcaatcacccagctggatcccgaaggtctctgcctaatcacatttaattgctcgtggaggcccactctcgccccgggccggccgccgcgctcaattactccccaaatacctgccatcaataaatacgcactgacaccggcccggcccgctccaccggcacggaagatcgcagccgaccaggcgccctcctccctgccccttgtcccccatcattaaacttacacctcgacgcccaaagaagcaagccgagcagataataacagccccctgtaactgagcgcttcccaagtgccagacactgttgctcggcgatttacaccaatcaactcacgggtgctagtgagt

SEQ ID NO: 112523 - DNA, 788 bp, Homo sapiens
  chr5:174178089-174178877
  hyper
ctcctgcccccttccgaatcacagactccccgcagtcagagatggcgaagcctccaccgggtcacctcggccggcccccgggctcccccgaccccgccctggcagcgccccccgccgcgagctcccggggcggaggagccggctcggctttgattagcaacacttgcgggggccgcggcgcaccctgacagcccggcagctccgcgccaaaatggatgggtctcgggcggcgagggcacggatacaaatgcgccgccgcgttctcaggtacacaaatgcggcctcgggcgggcgctggttcccaggcgcacggaggcggcggccccttcaactcggggcgcgggcgggagcggaacccgcgttaattactgtacgtttccactgtaaagagtgtcagccggggagcggggccgccgcgcctgcccggccccggcgcacaaaagcttcatatattctgaatgaaggcgaatcgcagcctcggcctccttgaaaagagccgtgagggagacttaattctctccctttcagctgtgctcagactgtgaaatccacacaatcgcgcccttctctttaaagggagggagaagaggggccgcggccgcgcgccccgccatcagctgcgcgcacagagggagagttcactccggggacaagggcggcgcgaccggcccggggctcttgggcggccgcgtttcccctcccaccggctgcagcccccttctcccgcggcactttccggcgtcttttgtggggcgagtcctggcgagggtgtccgccgtcaggtgcac

SEQ ID NO: 112524 - DNA, 89 bp, Homo sapiens; identical to SEQ ID NO: 42349
  chr5:174220727-174220816
  hyper

SEQ ID NO: 112525 - DNA, 205 bp, Homo sapiens; identical to SEQ ID NO: 42350
  chr5:174220856-174221061
  hyper

SEQ ID NO: 112526 - DNA, 30 bp, Homo sapiens; identical to SEQ ID NO: 42351
  chr5:174728096-174728126
  hyper

SEQ ID NO: 112527 - DNA, 42 bp, Homo sapiens
  chr5:174870821-174870863
  hyper
gttcggctcccggtgcgcaaaaatcgccggggtgcgtttggg

SEQ ID NO: 112528 - DNA, 874 bp, Homo sapiens
  chr5:174871083-174871957
  hyper
tacagagcagggccccgcgcctccccgcaggcactgcccgcgacctctcaggagcctgtggcaatgcgaggcagcgagccgagctggcaccagcaagcgcacaggccggcggggttcccgcggggcacagcccaccccgcccgcgcgtcccctcccctgccctgggggcggtcctcgcttgacaggcagagttgcgggcgacagccgcacgtggtccccctggatggttctgcgggcgaggtgggcggaggacgccccggtgagtgcttgccctccctggttacctcgccagtctccggatccccgcgcagcacgcgcagggcccgcgaggcaaatccaatgtcagaacctcaagtaagcttgagtcccctgaaagcaaagctcagccccgacatccagcgcctcttggggtcaacccctagccggacccaaagccctaagcgagcgggagcaccccccattccccgcacaccaactcctagaacggccggcggacgtccgacctgcgttgtctccaagtgtcccctaactagggttggagatgcccgtgggcgcctgtactcaccgctcgcagggagggcgcggcgcagctgggatccgggccagcgcgcgccgctgcgccccgaggggactcactccttccccgcccaggtggcgggcgcgtcccggctgcggtcaacgccggactccagccggtgccccgcacctcccgagcgccccaaccccagcgccgcgcgctccgtgtgcccggggcgccctctgccggcggctgcgacttcccgagcgcccgctgtgccctcgcgggcaccaacctcactcacaagggttccagcgaccgccagggacccgcgccccgactcgctcttcccggtcc

SEQ ID NO: 112529 - DNA, 30 bp, Homo sapiens
  chr5:174872254-174872284
  hyper
cggctcaacccgcttcgcccaggtggaaat

SEQ ID NO: 112530 - DNA, 30 bp, Homo sapiens
  chr5:174905229-174905259
  hyper
tgggtaaatgactgcgtgaacggatgctgg

SEQ ID NO: 112531 - DNA, 30 bp, Homo sapiens; identical to SEQ ID NO: 4434
  chr5:174905603-174905633
  hyper

SEQ ID NO: 112532 - DNA, 30 bp, Homo sapiens; identical to SEQ ID NO: 4435
  chr5:174961182-174961212
  hyper

SEQ ID NO: 112533 - DNA, 619 bp, Homo sapiens; identical to SEQ ID NO: 42356
  chr5:175084695-175085314
  hyper

SEQ ID NO: 112534 - DNA, 195 bp, Homo sapiens
  chr5:175085524-175085719
  hyper
cgaaacagtccccgttttgtctccgggtctgggtggtggcattttctcgcggcgatgtgtctgtcggagcatggagcaactttctgctaaagggaagccagcggagagcgggggctgctggggaggaggcttctatgtctcaggaaaccagaacgacctgccttcatcccgctgggctgccgcccgctgccggat

SEQ ID NO: 112535 - DNA, 229 bp, Homo sapiens
  chr5:175200303-175200532
  hyper
ccgggcagtctccgccgctcccggccccgcttcccccgcgccgtgggctccgcggggtggctttgttggggcagcagcaggcaggatttatttccggcgttgtttatgcgcagcacgtctggaacagggcccttggtgattaaaacgcctcgggacagaaaagccgaactgaaacattggtgaaaatacaaaaaggaaaacaaaacagcggcatcgacagggacatctc

SEQ ID NO: 112536 - DNA, 159 bp, Homo sapiens; identical to SEQ ID NO: 4440
  chr5:175223588-175223747
  hyper

SEQ ID NO: 112537 - DNA, 114 bp, Homo sapiens; identical to SEQ ID NO: 4441
  chr5:175223835-175223949
  hyper

SEQ ID NO: 112538 - DNA, 560 bp, Homo sapiens
  chr5:175224441-175225001
  hyper
gggctgggcctaggctgaggtcccggcggggaggaaggagtgcgccgccccgtcttccctccagacccccaccccatcccagctcagaatcgcggacttccaagagccctgcacagaagcccgcggctggcagctgcaatcactgactccggctgtccccggaacatccctagaaagtgtgaggctgagtttccgtagggggagggggctgagaagccgcggggaagcctcacgaacgggacagctccaggctccctctctccctcactccccgggttccgcccccacctccagagaaatcccagacggcagagaaggcaggggggagggggcgacccagacagcaggttgcgaactcggcttagacctgggaggttgcaattagcaagaaaaaaggttgagggcgtctgtgaagccgggaggttcccaaacagggaagccagttccgcggcaggaaagcatacgtggaagagaaaccttttctctgagagctgaggctgggagggccctcggatcacgtgacactctagatcactgattgtctccgcggaagacaaggc

SEQ ID NO: 112539 - DNA, 1676 bp, Homo sapiens; identical to SEQ ID NO: 42362
  chr5:175298494-175300170
  hyper

SEQ ID NO: 112540 - DNA, 101 bp, Homo sapiens; identical to SEQ ID NO: 42363
  chr5:175300216-175300317
  hyper

SEQ ID NO: 112541 - DNA, 31 bp, Homo sapiens; identical to SEQ ID NO: 4445
  chr5:175305777-175305808
  hyper

SEQ ID NO: 112542 - DNA, 30 bp, Homo sapiens; identical to SEQ ID NO: 42365
  chr5:175560553-175560583
  hyper

SEQ ID NO: 112543 - DNA, 33 bp, Homo sapiens
  chr5:175788707-175788740
  hyper
agccattgtgagagcggcggcgatttcgaaggt

SEQ ID NO: 112544 - DNA, 761 bp, Homo sapiens; identical to SEQ ID NO: 42367
  chr5:175792170-175792931
  hyper

SEQ ID NO: 112545 - DNA, 159 bp, Homo sapiens
  chr5:175792997-175793156
  hyper
cgggtgttccagcgggggccggagtttggagggcgcggctcgggagcatcccggggcccagccgggtcggctcgcgcccctccggcgcctgcgcagtgcaccccgcccgggggtggggatgtcgggagaaaccccatcccctcccgcctgcggtcggga

SEQ ID NO: 112546 - DNA, 30 bp, Homo sapiens; identical to SEQ ID NO: 42369
  chr5:175815673-175815703
  hyper

SEQ ID NO: 112547 - DNA, 30 bp, Homo sapiens
  chr5:175816246-175816276
  hyper
tggctttggggaagcgagacccaaagcggg

SEQ ID NO: 112548 - DNA, 30 bp, Homo sapiens
  chr5:175843799-175843829
  hyper
cgtgcacagagctgcgacaggaggccacct

SEQ ID NO: 112549 - DNA, 30 bp, Homo sapiens
  chr5:175874660-175874690
  hyper
ggaaaagcagatgccgggccggggttccag

SEQ ID NO: 112550 - DNA, 379 bp, Homo sapiens
  chr5:175875016-175875395
  hyper
ggttagagagcagccgaaatcagccgaatgccattcgggatgctccggagcttctcgaggcacattcgggccctctcggctctgcaagactgcactggaatcttaggtctcctttcgtcgcctaatcttagcagatcctttcgtcgcctaaatggtaagagcgacttgtaccgacagtccctcggcaatttccggaagtgttcgggataggcccgagcgtggcgccctctggcggcggccagaggtggcggggggcggggggaggttagtgggccagcgcgcgcagacgcagttgcgcgccggcggccgttcagaccggatgtggttgtggctgaggtcagttccggcgggtgacggtgcggacgggtcaggagcgtag

SEQ ID NO: 112551 - DNA, 30 bp, Homo sapiens; identical to SEQ ID NO: 4449
  chr5:175961090-175961120
  hyper

SEQ ID NO: 112552 - DNA, 30 bp, Homo sapiens
  chr5:175964265-175964295
  hyper
gtccgcggcggcagcggaatgtaacaaacc

SEQ ID NO: 112553 - DNA, 30 bp, Homo sapiens; identical to SEQ ID NO: 4450
  chr5:175964497-175964527
  hyper

SEQ ID NO: 112554 - DNA, 30 bp, Homo sapiens
  chr5:175964799-175964829
  hyper
tgacggggcgagagcggcccaagtggttat

SEQ ID NO: 112555 - DNA, 247 bp, Homo sapiens; identical to SEQ ID NO: 4451
  chr5:175969791-175970038
  hyper

SEQ ID NO: 112556 - DNA, 30 bp, Homo sapiens; identical to SEQ ID NO: 42374
  chr5:175970555-175970585
  hyper

SEQ ID NO: 112557 - DNA, 31 bp, Homo sapiens; identical to SEQ ID NO: 4452
  chr5:176008080-176008111
  hyper

SEQ ID NO: 112558 - DNA, 10 bp, Homo sapiens
  chr5:176023871-176023881
  hyper
gcggaacagg

SEQ ID NO: 112559 - DNA, 301 bp, Homo sapiens
  chr5:176024005-176024306
  hyper
gctccagatgcttctggatggccatgcccagcacctccacctccatggcggcgccgtatacctcccacgtcatgcccttctcgtcccagctcacgtctcgcacgggctcagccggctccgggggcgctacagcggccgccagcgctgagccgggccgcacccgcacttcggggaaggcgggcggcgcggcggcttgaggtgtcatgggcccagtggccacggagcgcgtctcggcggcgcccagcgacacctgcaggcccgcatctcggcgcgagggcgggctgggcgcgcgcggcgccgc

SEQ ID NO: 112560 - DNA, 31 bp, Homo sapiens; identical to SEQ ID NO: 4454
  chr5:176036591-176036622
  hyper

SEQ ID NO: 112561 - DNA, 30 bp, Homo sapiens; identical to SEQ ID NO: 42378
  chr5:176037495-176037525
  hyper

SEQ ID NO: 112562 - DNA, 94 bp, Homo sapiens; identical to SEQ ID NO: 4455
  chr5:176038450-176038544
  hyper

SEQ ID NO: 112563 - DNA, 317 bp, Homo sapiens
  chr5:176046195-176046512
  hyper
agggtcttgcgcaggcgagtttgggggcctctgcggcatagccacgccaagagccagtccgggtgggggcggggcctctgcgggacggggcggggcctcggtgcaagcgcggagagagggcctctgcggcaagagggcaggggcggggcctcgcgcagggactgcctatgccaataaaggcagcgcatggggggcggtgcctctgcgcggagccagcagtatctccgcccccatctttctcactctgaggcggtgttgggggccccctagtgctgatcctgatccgctcaaggctcccgggcggcatcccagacctc

SEQ ID NO: 112564 - DNA, 1281 bp, Homo sapiens
  chr5:176056553-176057834
  hyper
cttggtcttctccgccgcctcggtgaccccctgcttggttttctccgcggctgccacaacgccctccttggccatggacaggcccttcatgaacacgtccatcctggcggcctggggagggcgatacacgggcaccggtgcactggccccgcactctcaccccagcccctcccgcgggacgcagatgcccccctactcccgagaccgcggcgcccttctggaccctgagccccctcccgctttccccccatcccaccccactccccagtgcgaagcctcagggccgcggagagtcctagcgtccttgaaacctggggacgcgggaggggccactgcctcggttatccgggccctgcaaactgcagccccgtcgaaccggagtgctgggttcggcgcgaatatccaggacccgcctgtacacgcacggcacagtcacacggtcatgcacacaaacatacaccacggacaagctcacgtgcacacacaggacacgcagacgctccaacgcgcacgaataccccgacccacatgggcgcggacacacgtccccacagccgcccgggcagctgcaaacaccggagcatactcacatactccggggtgcacactgacgcgcatcccccgggtctccctccattttccatccccttccccagctccctcctgtcgccccagtcccctctccatcctcatcccgttccccatccccggcgcgcggccgcctcacctggatgcggggccggggctggggatggagcggcggctgcggcgggcggacgcgggggctccgctaggccaggccggggtggaccaggggccggaggggggatagggccgggatcaggcgctcgggtcgcgggtcctgagcaggagcgcagcagtgcccgggtctcgggtgcgtagccagccaccgctcgttcctcgcgccctgcgagctcgcgcgctccggctccggctccggctccggcgctgcggcagctctgagctcagcgcccccgctggcggccgcgccgccccttcggcctgactgacagggggcggggagggtgacagcgcgtagccgatgagcctcccggggcgggcccgggacgcgcccctgggggccccggccgtaagactcgcgtagtctgttgggagttgagggagggggacaacgcggcgtgtgaagagtggggaagaaatcacgcgactggatttggagttctgctgggctcgaatctcagctgtgctttttattaaccgtgggaccttgagctactcggctctcctttctgaatgaca

SEQ ID NO: 112565 - DNA, 48 bp, Homo sapiens; identical to SEQ ID NO: 42381
  chr5:176074451-176074499
  hyper

SEQ ID NO: 112566 - DNA, 45 bp, Homo sapiens; identical to SEQ ID NO: 4458
  chr5:176074861-176074906
  hyper

SEQ ID NO: 112567 - DNA, 353 bp, Homo sapiens
  chr5:176107131-176107484
  hyper
gcccgccccgcaccccgtaccccgcagcctgtccgtccatccgccccgcttcacttcgctgtcccctgtcggggttcgagtcgcagcctccagcctcaacccgcacctcccgccctgcagctcaactctcgcctccgctgcaatttattactggaggccgcagaaccagcggcgtggagtgcgcctcccgggagccgccgctgtcggagaaaggcacccacccgcctgggccggctcccgggcgcggggcggtgtctcagggaggcgtctcagccgagctgcagggcgaggggagcgagccgggtcccgggggaaggcatccggtcagggcctcgcccacccggatggctcct

SEQ ID NO: 112568 - DNA, 30 bp, Homo sapiens; identical to SEQ ID NO: 42384
  chr5:176170245-176170275
  hyper

SEQ ID NO: 112569 - DNA, 69 bp, Homo sapiens
  chr5:176170551-176170620
  hyper
ctccctgcagaccgcgagcggagcccccgcacccccggggctggcccctggcctcccgccccagcccgg

SEQ ID NO: 112570 - DNA, 16 bp, Homo sapiens
  chr5:176170703-176170719
  hyper
cgacaacggcaaatta

SEQ ID NO: 112571 - DNA, 584 bp, Homo sapiens
  chr5:176236413-176236997
  hyper
attatcgaccggccccgtaggcgtttgagtttgcgaccctgccctcaccctgctcattcccctcccgacccagactaggaccctctctttttccgatcactccccccaggcacaccgcacgcggctgtcatttcctttctccttcaaggcagccctctgtttattttaacccgattagggaatgggggtggggcacaggagactccagcagcggtcactgctggaggctccaggagacgacgtgacttgaccaaggtcacagagctggaaggtgaagtcgcctggaccctacccccggtctccctagctgccaaagcccagctcgttcctttacacccacgtcgcgggcgccgtgcgctctcggggctcaaacaccgcgcgcccagtcgggtgtgctgcgcctgaaggttgttttccttcggcgaacggcgccgaggggttagggaaaccttgggtcatggtgtgaggcgcgcccctggaatccaccagcctgcgaggctgggactgcgggtgtccccgagtctggcctgccagctctggtggccagggcacctctgcgcgcgggccagggccccggggctctc

SEQ ID NO: 112572 - DNA, 246 bp, Homo sapiens
  chr5:176237148-176237394
  hyper
cgcgccggggtcgccgcagccccgggcccctcccgggccacctgtgcgcagactggcgggcccgcgagagcccggatccggagcaccgatccactccgggtttcagactcctgcccctgtccctggagaccccgcggggcggtgggaggcctccacgcccaccaccccaagcccctccctgggggagcctcaggcatcgcccagagggattcccggtgctgggggtggcccgcgcgcgctgcgcgg

SEQ ID NO: 112573 - DNA, 30 bp, Homo sapiens; identical to SEQ ID NO: 42388
  chr5:176237981-176238011
  hyper

SEQ ID NO: 112574 - DNA, 188 bp, Homo sapiens
  chr5:176239884-176240072
  hyper
gcaggctggccctgccgtgacccgggctcctcccgcgctgccttttgcctccgttgcaacagcctccggtgaaaaatgtgtctgtgagccgctgagggagggatggccagcgggcagcagggggcgccgggggccagcgcgactgactgcagccgcttgctccccaggccacgcgcccaccctctgtt

SEQ ID NO: 112575 - DNA, 92 bp, Homo sapiens
  chr5:176245001-176245093
  hyper
cctggctgagcgctcggctgccgccccgggagcgggcgtccagcctccgggcaccgccgcgcggccgcctccgccccgcctccgtgctgtag

SEQ ID NO: 112576 - DNA, 75 bp, Homo sapiens; identical to SEQ ID NO: 4462
  chr5:176264795-176264870
  hyper

SEQ ID NO: 112577 - DNA, 30 bp, Homo sapiens
  chr5:176432847-176432877
  hyper
tactgcccgggactcgcgccccgttaactg

SEQ ID NO: 112578 - DNA, 30 bp, Homo sapiens
  chr5:176433256-176433286
  hyper
ggagacccaacccgcgtcccgaacccacct

SEQ ID NO: 112579 - DNA, 46 bp, Homo sapiens
  chr5:176433876-176433922
  hyper
gctcgcaccttgcgcggtctcagttgcttgcgctttgggggaaagc

SEQ ID NO: 112580 - DNA, 331 bp, Homo sapiens
  chr5:176449526-176449857
  hyper
tgctgcggaatcagcgacaggtttccgaatccacggcacacgctctgaggtaccagaggtagcaaagcaaaataagcgcggggtcccgcacggcagcgcgggtgcagcgcccaaacctcgcgagatttgttggctgggccaagtaccacccaccaaatctcgcgatacctaggcgcctgagaggctctctaccggtgagggtttgcggggaagatggagtatcccgcgccggccacggtgcaggccgcggacggcggagcggccgggccttacagcagctcggagttgctggagggccaggagccggacggggtgcgctttgaccgcgaga

SEQ ID NO: 112581 - DNA, 30 bp, Homo sapiens; identical to SEQ ID NO: 42392
  chr5:176514052-176514082
  hyper

SEQ ID NO: 112582 - DNA, 30 bp, Homo sapiens; identical to SEQ ID NO: 42393
  chr5:176514340-176514370
  hyper

SEQ ID NO: 112583 - DNA, 604 bp, Homo sapiens
  chr5:176560001-176560605
  hyper
gagctgctgcctccattttgtttcctgctcagcttggtctgtggtggtggtggtggtggtggtgtgggtttggggtgcggccgggtagggggttcgcctgcggccgcgtctgctcggggcctgaggcctcgaagaccccagcccaagcccccaggtgagccctgcggcaggaggggggttgccttggcctcgggccgaacccagcgggctgagggcaggtgcccagtggatggggagcctgggctgtaacctaagatggaggccgggactgacgcgggcccgagcagggctggcgggacgatcggacaggcctcagccgcgccaggtgccgcctgggttggggttcgagacgcgtagggtgcgggagccgtgtgcggcccgaggccagcgccgtgccccgaggtaggtgaggggatcggaatgccacccacgacgcccgcaggccccgacactccaaggaggcgcgcgaggcccctggggagcccgcctcaggccccgcccgggcagccgggccggcccgtaggccccggccgcgagcgggcgcgcagggggaggggagggggcggcagcggcagctccgctgattgggcggcgctctcacaag

SEQ ID NO: 112584 - DNA, 30 bp, Homo sapiens
  chr5:176561432-176561462
  hyper
ccctgactgggcttcgctggccgcctcggt

SEQ ID NO: 112585 - DNA, 30 bp, Homo sapiens; identical to SEQ ID NO: 42395
  chr5:176731092-176731122
  hyper

SEQ ID NO: 112586 - DNA, 295 bp, Homo sapiens
  chr5:176738657-176738952
  hyper
ttactgtcctagggcggtgcatccttcaagctgggagccaggtccagtccaggcccgtgtcagcgaggtcgccgcccggaattcagccaagggtccttcctcacctctctcacggcgctccaggaactcggccgcctgcagcaggacctggatgttgctggccaagggttccatgtcggcgacagctggcggcgggccggcctagggtgccggccggagcaagcggctgcagcacttttgttacaaagtaactgacacggtgcaacaaacacaggggcccgccccgcccccggga

SEQ ID NO: 112587 - DNA, 395 bp, Homo sapiens
  chr5:176739157-176739552
  hyper
cgccggctcattggcgtctttgatctcagcttccagccccgtgctagtgactagcccccaacatagcacggcgctctgggggcctggtggtcccctgaaagcgccgggcccagccgctgcacgtgggtgccgcgggggcggggcctccggccgccgctcgcccattcgcacatggcttctcaaggatcgctgttgtcatcctcggggcggggtcggggagcctctgatgccctattggctggcgctctgccccgccctctcccgccgctgatccacacgttcgggcgggaaaagaagcaggtttcaaatttgaaaacccaagcgatggggcggggttgagaggggagctgggcctcaatgcgcaggcgccggcggaggggcggcggacccggctc

SEQ ID NO: 112588 - DNA, 30 bp, Homo sapiens
  chr5:176778909-176778939
  hyper
gtcacggaacagcacgttaggcttgcgagc

SEQ ID NO: 112589 - DNA, 24 bp, Homo sapiens
  chr5:176785051-176785075
  hyper
cgtccccaacgggcgcatggtgag

SEQ ID NO: 112590 - DNA, 30 bp, Homo sapiens; identical to SEQ ID NO: 4467
  chr5:176785281-176785311
  hyper

SEQ ID NO: 112591 - DNA, 31 bp, Homo sapiens; identical to SEQ ID NO: 42401
  chr5:176813625-176813656
  hyper

SEQ ID NO: 112592 - DNA, 91 bp, Homo sapiens; identical to SEQ ID NO: 42402
  chr5:176827092-176827183
  hyper

SEQ ID NO: 112593 - DNA, 289 bp, Homo sapiens
  chr5:176830416-176830705
  hyper
agcgtgaggcggggacgccggggccccaagctctcttcccgtccccgcggggcgcccccacgcacccaggtcgtgctggtagctgacgggcgagaaggcctcgtgcaagcggtaggagcgcacggccaacgtctggcacggctcacagctgtggttacggcgttcctggccgagcaccaccgtcagatcctcgggtgcgggcctgcggggggggtaggggagaggcagcgctctcagacctggccacaagcgttctggggaagccccctgctcccgaaccccaatcccg

SEQ ID NO: 112594 - DNA, 148 bp, Homo sapiens
  chr5:176830932-176831080
  hyper
cccagtacagcgcggcgatgtaggggtgcgccccgcgtagcgccaccagcccgccaacgacgcgggtcatcgaagacagactcttgcggagccgctgcccgcagctcagtgggccgttcctggtcagggaaggcggctgctcccgctt

SEQ ID NO: 112595 - DNA, 211 bp, Homo sapiens
  chr5:176853270-176853481
  hyper
gccacaccttcaggcgacgacccaatcaaaatgcagtacttgagatgacggacgtcttcttcacccaatcacatattcggcctcctgggcgtgccccagagtacccacctccattgtcccggctgagggctcggccctaattggcagtttggtatcctacgaaagcctagaaattcgaacctaggggctgaaccccgccctcagaccaacc

SEQ ID NO: 112596 - DNA, 30 bp, Homo sapiens
  chr5:176873317-176873347
  hyper
catgtggtggtgtacgcctgctgggcacct

SEQ ID NO: 112597 - DNA, 192 bp, Homo sapiens
  chr5:176873631-176873823
  hyper
gcgggctggagaaccgggtctcggcgccgcaggtgggtgaccgtcctccccctccttccctccgggggcagcctcctcgcggcgtgtggctgggggtgcggggccctctgccggctgccgcgcgcgcgcacgccgggctcagcacccgccgtgtacgcgcccgtgcgcgcgccccgcgcctccagcccagcg

SEQ ID NO: 112598 - DNA, 30 bp, Homo sapiens
  chr5:176881453-176881483
  hyper
caacggcgccgagacgcctcttcagggacc

SEQ ID NO: 112599 - DNA, 125 bp, Homo sapiens
  chr5:176882533-176882658
  hyper
cggaagtgggcgggcgttggagggctcgctgcttaccctcagggcttccatccgcagcctccgggagaacacgggcggcggcgggctcgggttcgggctagggctggggcgcgggcggcccctgg

SEQ ID NO: 112600 - DNA, 30 bp, Homo sapiens; identical to SEQ ID NO: 4468
  chr5:176883196-176883226
  hyper

SEQ ID NO: 112601 - DNA, 30 bp, Homo sapiens
  chr5:176924812-176924842
  hyper
gggggccggggctgcgggtcgcctccttag

SEQ ID NO: 112602 - DNA, 268 bp, Homo sapiens
  chr5:176943951-176944219
  hyper
gctgcacgcatgcgcgccacggcgaaaccccgcctcatccttgcgtgagacccaatccgatgtgaagaggcgaacgacggcgcgtaggaacgacctcggagttccggatcgcgcagagggacaaatttgttccggagatactatcgcacggcgaggcatggacgctttcatgggtggttacgcgacagttgccaggaccgagggcgaaaccggctgcaaggcattgtgggacattggaggacttggaatatgcgctagaaggctcaat

SEQ ID NO: 112603 - DNA, 127 bp, Homo sapiens
  chr5:176944481-176944608
  hyper
tcactggtggggcacgcatcagatacggatggcagtggttttgaagtgggaggccctgtataaatgtaaacggttattactgtaaatgctctaacagagctgcctggggggcgcttccagggaagcg

SEQ ID NO: 112604 - DNA, 51 bp, Homo sapiens; identical to SEQ ID NO: 42408
  chr5:177019029-177019080
  hyper

SEQ ID NO: 112605 - DNA, 30 bp, Homo sapiens
  chr5:177019298-177019328
  hyper
gctgtggctggcgacgcgcggaagcgcgct

SEQ ID NO: 112606 - DNA, 30 bp, Homo sapiens
  chr5:177019593-177019623
  hyper
tgtatgacaagcagcgggaggagtaccagc

SEQ ID NO: 112607 - DNA, 30 bp, Homo sapiens; identical to SEQ ID NO: 42409
  chr5:177026939-177026969
  hyper

SEQ ID NO: 112608 - DNA, 30 bp, Homo sapiens
  chr5:177027574-177027604
  hyper
ctcgttatgtgtttcgttgtgtctgtgttt

SEQ ID NO: 112609 - DNA, 716 bp, Homo sapiens
  chr5:177411507-177412223
  hyper
cgcggagatgggccagagtccggccatccagaagtgcctggagcgcacagcaaggccctgccctcggctccgtgaaggtgagggggtaaagtcggcccggagtccccgggggtgcaggaggggccccgcgggttccagcagaccctcgacggaacgttccaggcaggcgagatctcgcacagaatctgcccttttaaaggctcggctttgtcctcgttaaacttgcgtctggcaacgcgaccgctgcggctcccgagcaagattagagggtttccgctcgcaggggcgcgcccggggaccgcgcctccccgcctggtctcggcgccccggcccaggggtcttcagtggtgaggggcgcccagatcgctgcatcccctggagctctgcgcccggccgagccactcagagctcccgccccgcacacccacttcgagctccaagtccttccttttctatactccaagttggatcctgctgggaaggaagggcccttcctgagagaccagggattgcgatttcccagcacaaagtcgaattcatgacttcagcttcaacggggctgcattctccccttggcaggaatgggatggagcgagggtgaagctgctggaaagacactcgttttatttttttaatcgtaaacggggcaacttccaactctgccagttttaagcttctagagtatctcctcggcggagcgcggtggctcacgcctg

SEQ ID NO: 112610 - DNA, 14 bp, Homo sapiens
  chr5:177540224-177540238
  hyper
ggaggcgggcgagg

SEQ ID NO: 112611 - DNA, 257 bp, Homo sapiens; identical to SEQ ID NO: 42412
  chr5:177540464-177540721
  hyper

SEQ ID NO: 112612 - DNA, 243 bp, Homo sapiens; identical to SEQ ID NO: 42413
  chr5:177540787-177541030
  hyper

SEQ ID NO: 112613 - DNA, 30 bp, Homo sapiens; identical to SEQ ID NO: 42414
  chr5:177541739-177541769
  hyper

SEQ ID NO: 112614 - DNA, 100 bp, Homo sapiens
  chr5:177543580-177543680
  hyper
gctgctggacgtgaccgtctgcaccgtgtcctctaacatgggctctctgtgctgctgggtggggctgacatgtggcacaccgtggcgtgtgtggttgtat

SEQ ID NO: 112615 - DNA, 60 bp, Homo sapiens
  chr5:177558238-177558298
  hyper
tgtcggccctgggccgggagctggagtcccagactcataggtcccggcccagcccccgaa

SEQ ID NO: 112616 - DNA, 258 bp, Homo sapiens
  chr5:177580325-177580583
  hyper
cggtattgtcgtaccggtattgtaccaaagggactttaccgactgcttgattggcttctgtatatggggctaggtcagagttaacctttttactgcgcgcctactaagtagagatttctccgttaacgtttagaaatgcaaaatccagaggaaggaaggttcttaccctttttctcctttgttgacaaatttctgaacctctttcaccccgcgccgaatctgcttctgcttcaccgctgcaacgacagaagagtcggt

SEQ ID NO: 112617 - DNA, 30 bp, Homo sapiens
  chr5:177580845-177580875
  hyper
gggaggcgagcccacgcggtccacagcttt

SEQ ID NO: 112618 - DNA, 196 bp, Homo sapiens
  chr5:177591085-177591281
  hyper
aggtccagggggctcgggatggataataagggtccctacctcatcaggctgttgggagagccaagtgcatgtacggtaagtgcggccgcagctggaaccgggagacctacggtggaaatgggaatggagatctgtgagttgtggcagaaaggcctccacctcccactgaggcgtgacgggcggggaaagcaggtgg

SEQ ID NO: 112619 - DNA, 131 bp, Homo sapiens
  chr5:177631398-177631529
  hyper
cgcgcgcgccgtggcggccaatgggacgctgaagctaggttgagtgacggacttgagcagccaatgagtgtgcagtttgttgcgatgtggcacccggctccggcattataaagggcgccacgagtcggcat

SEQ ID NO: 112620 - DNA, 30 bp, Homo sapiens
  chr5:177659214-177659244
  hyper
aacagcggtgagggcggggccgtctcctga

SEQ ID NO: 112621 - DNA, 30 bp, Homo sapiens
  chr5:177666120-177666150
  hyper
ggagacttccctgcacggtaccttatgcca

SEQ ID NO: 112622 - DNA, 30 bp, Homo sapiens
  chr5:177666550-177666580
  hyper
tggcctgggtcctgccgagagccgtgtggc

SEQ ID NO: 112623 - DNA, 312 bp, Homo sapiens; identical to SEQ ID NO: 42418
  chr5:177706981-177707293
  hyper

SEQ ID NO: 112624 - DNA, 31 bp, Homo sapiens; identical to SEQ ID NO: 4473
  chr5:177804050-177804081
  hyper

SEQ ID NO: 112625 - DNA, 130 bp, Homo sapiens
  chr5:178016440-178016570
  hyper
tctgaggctttcctccgccgtgaccaccgcctctccaggtgtaccagcgttggttaggaacagtaggtgctactggtcacagtcaccagatacttcccacgagcctcatctttatccccgactctggccg

SEQ ID NO: 112626 - DNA, 302 bp, Homo sapiens; identical to SEQ ID NO: 4474
  chr5:178016681-178016983
  hyper

SEQ ID NO: 112627 - DNA, 451 bp, Homo sapiens; identical to SEQ ID NO: 4475
  chr5:178017519-178017970
  hyper

SEQ ID NO: 112628 - DNA, 30 bp, Homo sapiens
  chr5:178053179-178053209
  hyper
gtaaaaagcacaatcgcacaggacagctat

SEQ ID NO: 112629 - DNA, 30 bp, Homo sapiens; identical to SEQ ID NO: 42422
  chr5:178053518-178053548
  hyper

SEQ ID NO: 112630 - DNA, 64 bp, Homo sapiens
  chr5:178054093-178054157
  hyper
cgcgaacgcgcctgcgtgacagaaccttgcgcgctcccgccgctccacctaagggcggggctcc

SEQ ID NO: 112631 - DNA, 149 bp, Homo sapiens
  chr5:178054178-178054327
  hyper
cgagcctccacactgcggctgcgcggcccaagcatttccacccccccccccccgcccacccggtcccggggcctctaggccgggagggtgtttacgttctctacgggctcgggtggaaccgggaaggaacgcccgtgtcccgccctcag

SEQ ID NO: 112632 - DNA, 30 bp, Homo sapiens; identical to SEQ ID NO: 42423
  chr5:178157331-178157361
  hyper

SEQ ID NO: 112633 - DNA, 30 bp, Homo sapiens
  chr5:178157777-178157807
  hyper
agtgtagttccatgcgtttgaggcggggtc

SEQ ID NO: 112634 - DNA, 565 bp, Homo sapiens; identical to SEQ ID NO: 42424
  chr5:178287035-178287600
  hyper

SEQ ID NO: 112635 - DNA, 295 bp, Homo sapiens
  chr5:178322843-178323138
  hyper
tctcgcacacgccgacggcctggccgcactgcagccccgcagccttgtgggaaatgtagtctggcgctccgggctgtaagcgccggtcgcggctgtgtcggtcgccgctgctcccgctcctgctgggagagggtgagtgcggggccggtggcgggggcgcgcgccatccgtgagtcttgtaggcccccgcaggaggagctccggattgcggggcgaggccccagcttcctgagggttgaggggcgggcccgcagcagatgggccgggggtgcggcctcactgcgcctgtggagcg

SEQ ID NO: 112636 - DNA, 337 bp, Homo sapiens
  chr5:178323183-178323520
  hyper
cggcgggagcacgctggcagctgagtgtccttcggcgctgtcctgggcaggcgccgaggtggaatcacagccccggagcagcggggatgggggctcgaacaagggccacgccggccaccacgggtcagggaggggcccaaggttccaagagtcgctcggacccgggttcctccctggctttccccagccgcgcgcagctttgtcccgggacacgctgcgaccgtggagcgaacctaacccgcggacatcccggggattctgggccagaggctgggtctccctgtgcagcatctgccctttgtgtaaaccgggtctccggacccgccctctggatctc

SEQ ID NO: 112637 - DNA, 486 bp, Homo sapiens; identical to SEQ ID NO: 42425
  chr5:178367635-178368121
  hyper

SEQ ID NO: 112638 - DNA, 30 bp, Homo sapiens; identical to SEQ ID NO: 42426
  chr5:178368612-178368642
  hyper

SEQ ID NO: 112639 - DNA, 30 bp, Homo sapiens; identical to SEQ ID NO: 4478
  chr5:178382964-178382994
  hyper

SEQ ID NO: 112640 - DNA, 215 bp, Homo sapiens; identical to SEQ ID NO: 4479
  chr5:178423618-178423833
  hyper

SEQ ID NO: 112641 - DNA, 672 bp, Homo sapiens
  chr5:178450490-178451162
  hyper
gcgaataatcagcagcggctagtcttccagatttaaaaattcatactcacttttccgtcttactatttttgtcattctaattacgaatacaatgggtggtttagcggagggagagtagttggagcccaagctgagggactcggcttcagccttctcgaactccacagcccgaccgcgttctccgctctcggcgctgtggttctctctcggacaccgtaagtggtggtgccgcagcgacgtctgggaaatgaagtccggagggacaaacgctgcggttcagccagggaaacccgtcggctctccggcgcgcaggcgcagttgcgcccggcagcgacgggaaacgtctctgaattaggtgttccgctcgcctcttgtgcggtgtggagctgcgcgccccccgccgaggcgggcccaggtacaggctgccggtgagggcgggcccggggcgtgcggctgccgcggcgggaccaggacgagggctggcctctgcgcgtgtctgccgagtccccggctccgggcgtccgagccggggcggcctcggcaggtgaacccggccccggagggggcgtggcctgggaagggcctggcggaggccgggagggcgcttcgacgccgctggactcctgggccgcagcctgggccggactccgggggaaacggctccagaacaga

SEQ ID NO: 112642 - DNA, 196 bp, Homo sapiens
  chr5:178487107-178487303
  hyper
aatgaatctaatttccggttttgttttttcaaactactccgcttgcttaacaagtgcgcgggctgtaggcagcacggccagcagctggagacctcctgcctcgtgtgcggcgtgcgtactccctcgcactgcagcccctccgcgcactgtcgcctttgagagctctcgttggcggaggcggttcctctcccggagt

SEQ ID NO: 112643 - DNA, 473 bp, Homo sapiens
  chr5:178487341-178487814
  hyper
cggcgtggggccggaggcatgccgggagtggtagttctcccgcggttggcggggtttcggggacagctcgcggcctttcgggggttctcctggcttgggccatccaggcttggctaggattgccggcctggggttgaggcgctcgcagtggtctcttccgggccggggtggatccgggcctctccagcgagtgggcggcgtgcagcctcgtctgggcttctgggaccagccctacgcggctcgggccccttggccactgggtcccggggcgccgtccgcgagcggcctggactgccggagacccgcgggagggagcgcctcgccaggtgagctgggtgcgccgggccgctggggtggggatgccagccttttgtcgttgttcattctgcgattttcttctgtgcattttcttctgagtaacggaaataataaaagcaatagctgatgcccgccgagagcgctcgggtgccagg

SEQ ID NO: 112644 - DNA, 546 bp, Homo sapiens
  chr5:178594123-178594669
  hyper
cgacacctcgcttccacttcattttcctaccttccggatgacgaactgcgtctcagacaactgaaaggactcgcctgagtcccacagccggaaagaggtcggggtgctgccccccgcgcggggcgggcagaggaagggccgggcccgagcggccaccaggtggcgctgctgccgcgagaacagcggcccgggccggggacgcacccggcgcccagactccgcggccgcacccgggctcccggggccccagcggccccaagacagcctctgggcctcaccctaaatacatcaattatgacctgagcaaaaagttctgttccaatcgttgctctccgacatttccattgtttgctctggaaggagctgaattatctatgctcttccctccttcagtcaaggagacgtgggaggaaaccgggatggggatcagcagcctggaggccgcctccgctggaaccgcgcccgccccgccaggaggctctgcctgctgggcaaggcgcactcagccagccccgcaggccgccacgcgaccgaggctcaccaagt

SEQ ID NO: 112645 - DNA, 30 bp, Homo sapiens
  chr5:178646870-178646900
  hyper
cctctgcacctgccccgtgccactctccag

SEQ ID NO: 112646 - DNA, 30 bp, Homo sapiens
  chr5:178647150-178647180
  hyper
ggccgatggagaggccggcaggtcttttat

SEQ ID NO: 112647 - DNA, 30 bp, Homo sapiens
  chr5:178647487-178647517
  hyper
gctgcctcctctgcccgcacgtgcacctcc

SEQ ID NO: 112648 - DNA, 464 bp, Homo sapiens
  chr5:178770440-178770904
  hyper
gtacacacacatacacggacccacccccggatgcaagccagagacctgttcaggcaggcaaaagagagaggcgcacgctcctgcctgctgagccttttggagacccgggcgctccccatgcataaatggccccctgctcagaccagtcaaaacaacctgctttccagccaagcccttcagttggagcacgaggctcactaaagcacgggaagggcgcggaaagtcctcagcgcaggccttgccctcccaagggactcccaggtaacccttttccaaaacccaggcgagagcagcggagagaaaggagctagagaagtgcgtactcaccagcccatcgcagttgctgagcgccacagaggaggcttcggctaggccggccacgtctccgacgtagagacagctcccgagcaggggctccacgcgggtggtgcccttctcgccctgccactccatagtggccccgg

SEQ ID NO: 112649 - DNA, 432 bp, Homo sapiens; identical to SEQ ID NO: 4483
  chr5:178771198-178771630
  hyper

SEQ ID NO: 112650 - DNA, 136 bp, Homo sapiens; identical to SEQ ID NO: 4484
  chr5:178771723-178771859
  hyper

SEQ ID NO: 112651 - DNA, 762 bp, Homo sapiens; identical to SEQ ID NO: 42436
  chr5:178771967-178772729
  hyper

SEQ ID NO: 112652 - DNA, 30 bp, Homo sapiens; identical to SEQ ID NO: 42437
  chr5:178772778-178772808
  hyper

SEQ ID NO: 112653 - DNA, 79 bp, Homo sapiens; identical to SEQ ID NO: 4488
  chr5:178946790-178946869
  hyper

SEQ ID NO: 112654 - DNA, 311 bp, Homo sapiens
  chr5:178957597-178957908
  hyper
cgagggtgatctgagatccaaagtcaggagtcttctgcatcctgccctttgtcagcgctggtcctcatttcacctgcccagggccttcaggaggggcgacactctccggctgcgggcggcccagcgctcgcccccctcggccccacgtactcttcctgcctcgcccccatcgccctcctccggcttcccgcgcctcccggggctctgcgcttgcgtccagggcgccctctccggggacaatgggcgggtgcttcgcaggctgcagtcagggccgacttcacccggcgaggacagggcgaggcgctgggccc

SEQ ID NO: 112655 - DNA, 169 bp, Homo sapiens
  chr5:178977221-178977390
  hyper
ctacagaaaaatgacgaagtggaaaatatagaccatgaaatgaaaatttaaaagaggaaatggtgtcacaaagacaacgacggccagggaaccccgtgaagcgccgggcagggtgcacaactgtcctcggagaaagttcaagaggaacttccccgcgaacaggtcctgc

SEQ ID NO: 112656 - DNA, 30 bp, Homo sapiens; identical to SEQ ID NO: 42440
  chr5:178977633-178977663
  hyper

SEQ ID NO: 112657 - DNA, 30 bp, Homo sapiens; identical to SEQ ID NO: 42441
  chr5:178978219-178978249
  hyper

SEQ ID NO: 112658 - DNA, 30 bp, Homo sapiens
  chr5:179050515-179050545
  hyper
ggcagcctgcagctcgccaaggtccccgtg

SEQ ID NO: 112659 - DNA, 167 bp, Homo sapiens
  chr5:179050811-179050978
  hyper
ggcggattattacacgcttgggttttgggctcagcacccccacccataaacccgccgggctttttgttgcgcctgcgccttcccgcgaatattgaacttcggagtcctagcggtttataattatttcatgcgcatgcgtcttccttgaaaccgttctctagccttac

SEQ ID NO: 112660 - DNA, 30 bp, Homo sapiens
  chr5:179125327-179125357
  hyper
tgtgttatgctgggcgacgaggctgcgcag

SEQ ID NO: 112661 - DNA, 30 bp, Homo sapiens; identical to SEQ ID NO: 42443
  chr5:179126418-179126448
  hyper

SEQ ID NO: 112662 - DNA, 30 bp, Homo sapiens; identical to SEQ ID NO: 42444
  chr5:179160255-179160285
  hyper

SEQ ID NO: 112663 - DNA, 30 bp, Homo sapiens; identical to SEQ ID NO: 4489
  chr5:179160697-179160727
  hyper

SEQ ID NO: 112664 - DNA, 284 bp, Homo sapiens
  chr5:179223439-179223723
  hyper
gcctccagctgccccggggaggggcgctcgcttccgcatcctagtctctatcattaaagttctagtgaccgagacccgggctgcgttctctgggtccgcgggggtggcgcaccgcgggctacggagcctggaggggcccagcccgagtccgggcagcccggggcgggcttcctagtggcggcgtgagagtggctgcgaaggaacgagccctccccctggggcgggactggatccggtcttcacctcctaccccactccctactcagcctcggggtcacaaggcc

SEQ ID NO: 112665 - DNA, 30 bp, Homo sapiens; identical to SEQ ID NO: 42446
  chr5:179233107-179233137
  hyper

SEQ ID NO: 112666 - DNA, 49 bp, Homo sapiens
  chr5:179233841-179233890
  hyper
gcagatatcaggggcgcgggacactggcggcctcgcctccgcggcaggg

SEQ ID NO: 112667 - DNA, 150 bp, Homo sapiens; identical to SEQ ID NO: 42447
  chr5:179234472-179234622
  hyper

SEQ ID NO: 112668 - DNA, 22 bp, Homo sapiens
  chr5:179243855-179243877
  hyper
gtgcccccgggtctccggccac

SEQ ID NO: 112669 - DNA, 102 bp, Homo sapiens
  chr5:179244320-179244422
  hyper
gggcgttcgtcctccatccctccccccttttccccactccgcggttgacgagggccgcccccaagtggccatgtcccccggcatggacgacccctcagtgcc

SEQ ID NO: 112670 - DNA, 753 bp, Homo sapiens
  chr5:179245836-179246589
  hyper
cctgggcatgcacgccgggccctggagggtgggaaggggccagtggacgcggggagcctgcggggtgggactgcatcgggaaaggggaaggagtcagaggcgagaagggggagagtgtctgtctggctccagccgctgcacgctcttcctgctcaggggactcacggtgaccccggagccactccccagcccagcctccaggtaagaggtcactgagatgggtggcagcaggggccggggatccccctattacgacagcggtcatgggacgctgactcactgccggccagaccacctgacctccgcggcgggaggagagggccctgccagggggttcccgccgcgccttgtttacctccgggaggcctcggcctcgcgtgggggcagggcggccgctggggccgcaaggcgtgcggggaagggccagagccgggtgtccaccccagcttcccaaagactccctcttctgtgcttccttctcccctccccgccccccccccagtctcttcacatgcccctagcccccgcggaaacttcccgcgatcccaaacgggccaaatggcgagaaagcaaaggagctccttcttgggggtgagtggggcgccttgagcgcttcctcaaagctatgttcccagagccacaggccttccttgtgtccctcaccctgctcagaccgggccatagccgggggctggggcaggaaagccggccctcggcgggggccacgtggctctcaggcgcctgggctgctga

SEQ ID NO: 112671 - DNA, 31 bp, Homo sapiens; identical to SEQ ID NO: 4492
  chr5:179279346-179279377
  hyper

SEQ ID NO: 112672 - DNA, 30 bp, Homo sapiens; identical to SEQ ID NO: 4493
  chr5:179285176-179285206
  hyper

SEQ ID NO: 112673 - DNA, 30 bp, Homo sapiens
  chr5:179286109-179286139
  hyper
gactggaattgagacgacagggcctccgct

SEQ ID NO: 112674 - DNA, 30 bp, Homo sapiens; identical to SEQ ID NO: 4494
  chr5:179334756-179334786
  hyper

SEQ ID NO: 112675 - DNA, 1351 bp, Homo sapiens
  chr5:179498001-179499352
  hyper
ttaagaaaaacggcacgtttttatattagaaaagggccgcatccttccagatctagcgcagccttaagtccgtgatttgaggaacctgccgcttccaaaatacaggctgagacgtcctccccatgaagtagttttgcgctcttgcaccacctcctttgtctacgctgtccctgcaaactcctagctcaatgccctccagcaaacgagctgcctgaacgcaaagatgaccgttccaagtcttttttaaaagaagggaaaaacccagtcacgctcctggagcctggttcccacgggagcaggccgggctgtccacgacggaagcctcgaccctggctggggctgtcggccgggcagcgcgggagagccagggccagagccggggccgggaaccctagtcccgccgcctacgcgggatgcagcgaccaccgcccgccgcccccgggccggcactcacctccgtggaggggcagcggcgccagcacctggccgcggacctcggccttgggggagtcaagcccgtagcgcccgcggtcgatgcgaaacgtgagcggggcgccgcggccgggctcctgcaccgtcacgttgatgagcgccgtgtagtactcctggctcgcgttgtctgcccgtgccggccacaggctgcaggtcagcagggcgagcgcggcgagccgggcagggcccgcccgccccgcgcagctcatcgtccctccggcagccgccgctgctcgcggaccgggctccggggccggcgcctagaggcggggcgggcgcggcccgggcggcggcgggagcgcgcgcgcgcggcctgcgcggggccgagcccgagcgcggccctcctggacgccgcggccccgccgctcgccgccctcacgtccactgcccgcctgtggggacgcgcccatgggccctcggcgagggcggcgtctcaggtcgcacgcgggcgtctcttcggggtcccaggagggttgtagaagcgtgccccctccatccccccgggtcggtcccaccgaatgggaggcgcctcgcaaggacgcggcgggggaggggaagggcggcacgggaggaagcgccccgaggagggtcagcggaacacaaagtccctctcgcgcggctgccgcctgaggcgcgtgtccgccgccgccccgcccccccgctggtctagcggcaacgcgcaggcctaaggcgcagtcccgccccgagcgcatgcgtgccagggcctgtccgctcccgcccgcctgcacgagggcccgggcagccgggtcagccgctggtgctggttgtttctctgtcaggcgtgatagccgcagggcgtggagcccgggagatttgcgaggacgtatggaaatgtgtg

SEQ ID NO: 112676 - DNA, 30 bp, Homo sapiens
  chr5:179517611-179517641
  hyper
tgccggagggagggcgccccctggcggttc

SEQ ID NO: 112677 - DNA, 30 bp, Homo sapiens
  chr5:179718516-179718546
  hyper
aggtcgcggggacgcgaccccgggcccctg

SEQ ID NO: 112678 - DNA, 340 bp, Homo sapiens
  chr5:179779442-179779782
  hyper
tgcagatgtgcgctccgggccgcggccgccctccccacggtcccgcagccacgcgggacagcgcgggagcgccgcgggaatcggacgcccggccccgctccccgccccggactccctctcgtggcttcgggccgaggttcgggcagtgactgcctcttccccgcgcaaagaggcggtaacgcggcagcgacccttctagggaccagacgttcctttggggtcgcgaggaggacgcgcaggccctgcctgaggcactgacgcagcgggggcgaccgggcgggctgcggggacggcggggcggggtcgcctctcctctcctcggtgggcgcggcgggctgag

SEQ ID NO: 112679 - DNA, 172 bp, Homo sapiens; identical to SEQ ID NO: 4497
  chr5:179779840-179780012
  hyper

SEQ ID NO: 112680 - DNA, 665 bp, Homo sapiens; identical to SEQ ID NO: 4498
  chr5:179780035-179780700
  hyper

SEQ ID NO: 112681 - DNA, 627 bp, Homo sapiens
  chr5:179780801-179781428
  hyper
cgctcccatctgagtgacaggcttgtttcagagctccgcagacctctaagcctggccctcaccctgcgtggagagaacgcccgggcttggcggagagacgagaaaaccgaggctcccggaggcagacaaggactctgccaaaaccggacgccgcggcggtggcagaattcgaccctgggatttgccgcggagcccgagcttgaaggcgagggttccgcaggttgtgaacgaagctggaggcgccccaggaagccccgaccccacccgcgccgagctgccccctccccagatctgcctcgcgctgcaggcccgcgagggacccgggggttcctacgcctggggtcggaatccgaccccccagtgaggcaccaaggcccgcgtttctccgccctggttcccggccgtccctcccgttccccctgcactctgggcccctcgtctcccgaggaaggtcacgagaaccggcccaacgtttgcgcactttgaagtttttttttttcttaaaaaaatcctgaaattctaaacggatcctcctcagtcgtgtaaaaaaaaaaagatttttacatctcgtctagagcatttttctaacataatccctccctagtttcaccgcgactctgcaagccc

SEQ ID NO: 112682 - DNA, 191 bp, Homo sapiens
  chr5:179867480-179867671
  hyper
aggaggaaggggatggagggtcgcattaaacaacacctcaaggcagcccagatcgggagggagggtccctctgcaggacagaaaccagctcgtgccgcaagccaaccgcgagaagggaagagggggcgctctaggttacaagagaattaagaagcacaacacccagatacgtgtggcctgtgtttggattc

SEQ ID NO: 112683 - DNA, 30 bp, Homo sapiens
  chr5:179921689-179921719
  hyper
cacagggcagaccccgctgcactcacaggg

SEQ ID NO: 112684 - DNA, 30 bp, Homo sapiens
  chr5:179922132-179922162
  hyper
gcctctgtgggtggcgcgctgtgtggagtg

SEQ ID NO: 112685 - DNA, 30 bp, Homo sapiens
  chr5:180007865-180007895
  hyper
aagagctttaattgccggatacgttccagc

SEQ ID NO: 112686 - DNA, 1053 bp, Homo sapiens; identical to SEQ ID NO: 42458
  chr5:180017078-180018131
  hyper

SEQ ID NO: 112687 - DNA, 336 bp, Homo sapiens; identical to SEQ ID NO: 42459
  chr5:180018484-180018820
  hyper

SEQ ID NO: 112688 - DNA, 30 bp, Homo sapiens
  chr5:180046167-180046197
  hyper
ctccgcgtttgcacccgcgccccctcccgc

SEQ ID NO: 112689 - DNA, 536 bp, Homo sapiens
  chr5:180046790-180047326
  hyper
tgcaggtgagctgtacggggtgagcgtggagacaggtgggcggcgggggagccccgtgcagaggtccaggaggacaggcctggcagcaggaggagcgtggggagccacagcgggaagacaaggagaggtggacaggaggccgcgcatcctcccgggtaggtgtgacagatacaccctgctcagggtggcagcaggtgacctcagggagcctgggaactggggaccctggctgaggttctaggtacccacgcccacagggacaggtcaggccaggcggaacttcctggtgcaagttttgaaaatggagggattcaggcactccggcctgcagcaggtgggtcgggcaggaggtgtgggttgggcaggctggtgctggcctcacccaggtgcagccgctctcgggggaattcccactggctggcatcgtaggacaggtattcgcattgctcctccagaggcacctccccggggtccatgatgatggacaggtagcccgtcttgatgtctgcgtgggccggctgcggggaggggacagg

SEQ ID NO: 112690 - DNA, 14 bp, Homo sapiens
  chr5:180075843-180075857
  hyper
cttccgccccttct

SEQ ID NO: 112691 - DNA, 404 bp, Homo sapiens
  chr5:180076053-180076457
  hyper
cgcacccaagtccggggcccggccgggatggatctccggcgcgcgtgggtcgggacggcgcggcgcggggaccccgcggggaagcgagtaagggcgcgaaggatccgggctcagcgcgcagcccggcagggcccggctccgaggacgcggagccaccgacggagacgcggattcaggggccgggagagctacccctgcgccgaggcgcggcccggccgccctggccctgacccggctgcggtccccgcccgccccttcctcatcccgaggtcccgcgccccaagcgccgtgctcccctcaggcgtccgcgcaccagggccaccgtgtcccccgcccgtacccggcggagcggtctcagcgcccgccccaggtgcgcggtaccccctccccggccagccccacgc

SEQ ID NO: 112692 - DNA, 541 bp, Homo sapiens
  chr5:180076532-180077073
  hyper
cgccccgctgcatctccggccgctgcgcgtgggtccgacccgagcggccgcggctcggggctgaaagtgtccgcgcgggcgccggctggcctggggcggggcggggcggggcgggggccggaggcgggcccgggattcaggccgctccccgcgcccccctccccccgtccctcccagcccgccgcggggcgtccggtgcacccgagcagtgcgcgctccgcaccacagggtccgggccccctcctgggcggctccgggcgcggggacgcgggtaacgcagacggtctcgcgatgcgctccggaggtgatggagcctggtgggcaaaggggagcaaaatgcggcacgcgctcttttccgtcctttctttccatcggtaaaatctagactaaacaagaaagcaatccttgtaaaaatagtatgttacatctttgaaaatagtggcaccagccggcgtaacatagggagacccagtctcaaaaataaacaagcaaataaataaaataatacgccgagcttggttgtgcgcgcctgtaatcccag

SEQ ID NO: 112693 - DNA, 145 bp, Homo sapiens
  chr5:180100728-180100873
  hyper
tcgttgtcctcgcagcgttaaggcgagtctgggacaggaccccggcaccccctccggatctgtggcatcctccaggactccggcgcaggacgcgctccaggagccgctccttcagggcctccggtgcgcgcagtccgggcgccgg

SEQ ID NO: 112694 - DNA, 152 bp, Homo sapiens; identical to SEQ ID NO: 42463
  chr5:180101015-180101167
  hyper

SEQ ID NO: 112695 - DNA, 27 bp, Homo sapiens
  chr5:180101251-180101278
  hyper
cgggaggaaaaacggaggctcccaggg

SEQ ID NO: 112696 - DNA, 30 bp, Homo sapiens; identical to SEQ ID NO: 42464
  chr5:180229529-180229559
  hyper

SEQ ID NO: 112697 - DNA, 63 bp, Homo sapiens
  chr5:180230098-180230161
  hyper
gcccagcctggagccgcgcctgaagtgggcccgcagtccaggaaaggcgttcaccaaacccta

SEQ ID NO: 112698 - DNA, 54 bp, Homo sapiens
  chr5:180234902-180234956
  hyper
cacgtagagcaacatcgatgttattgtttcctgtgtacacggccctggatactt

SEQ ID NO: 112699 - DNA, 577 bp, Homo sapiens
  chr5:180257864-180258441
  hyper
aaggttagagggaaggcgcagggagggagagacggcgggtgggggttgaacaaagtggagattcacaaaagcagactagggcgggcgacgtgatcagatgacctgtgcgggcggcagcctcctgccctcctccccttcgtgcgccggctggagcgaagagttcttttgacagccgtgagcttccccgccaggaacttactggggctgcatcaccctagaaacgtggctttgggctgtggaaacgctgcctctgtggaagtctctcctcgcgggggtggacgggtcgctgcgcgcccagcgttcttctgcggttctcacagcccgccgccgccgccgcctcggggacctttgcggggaggcctcaggtcagcgccgcccttgcgatggcgggagagcagagcggccccagggcctctgagctccggccccggcacgtcccgccctctcctccgcttgcgggagccggggcgcctcggagggaaaccttccggacacaggccgggagaagaggggccgtggcgccatcgcgcagcttcctggtttcggccatgtttttttttttttgagacggagtttc

SEQ ID NO: 112700 - DNA, 481 bp, Homo sapiens
  chr5:180258500-180258981
  hyper
tcccgggttgaagggactctccggcctcaggccgcggtgttcttgtaaattagaaccggcctatgcgccaagcgcgggtctcgcggctgcggagagaggcccagcagggggcggggacgccgggaggcggggcctggccgagctgcgcacacccgggtggttctggctacgggtacccggacctgcccaacgaccgttctccattcccgacctccgcaccctacccggtccgcagggcaccttcctcctctctctcaggcacgtcctcgacctcagttgccacgtgcacatgctggtgccttccaggtcggtctttctccaccagactccacctggaactttcttccttttcgtcctgtgctggcctaacccctgctcggcctcggccctcagctgccggctctaacaaagcctctgtctttcccagacccctgtgaccaggtcaggctctgctccctgcgttcctctctccttgcttccc

SEQ ID NO: 112701 - DNA, 30 bp, Homo sapiens; identical to SEQ ID NO: 42468
  chr5:180287810-180287840
  hyper

SEQ ID NO: 112702 - DNA, 1489 bp, Homo sapiens; identical to SEQ ID NO: 42469
  chr5:180479641-180481130
  hyper

SEQ ID NO: 112703 - DNA, 233 bp, Homo sapiens
  chr5:180527465-180527698
  hyper
attcctgcagcccgccgagctgttgctgtcgccctgggagcagggcacgctcttgaccatccactcgcagatctgcgacagcgcgagccgcttctccgccgagctctcgtcggccctggtgctgaggtcggcgtgggacaggctgcgcgacgcggtgcgacgggacgagctgcccctgcgctgctgcccggcggaggcggggtcccgggtgggtgctgcggcgcggcgtcccg

SEQ ID NO: 112704 - DNA, 27 bp, Homo sapiens
  chr5:180527793-180527820
  hyper
cgactggaaatccgggtgcacctccgc

SEQ ID NO: 112705 - DNA, 104 bp, Homo sapiens
  chr5:180531198-180531302
  hyper
ccccttatgctaccgcgtcgggcatgaaaacttccttttctttcttctccttctttccttccttttgagacagggtcttgctctgtctccgccgctggagtgca

SEQ ID NO: 112706 - DNA, 93 bp, Homo sapiens; identical to SEQ ID NO: 4507
  chr5:180594970-180595063
  hyper

SEQ ID NO: 112707 - DNA, 165 bp, Homo sapiens
  chr5:180600255-180600420
  hyper
aaaatggtgccagcgcgcccctgctgttcaacccccgtgcctactgttgctgccacatcctctctcaagactcccgtgtccacttatgccaccacattgcacatgaaaacttccttttcttgtttctttcttttctctctttcgagacaagatcttgctctgtcg

SEQ ID NO: 112708 - DNA, 181 bp, Homo sapiens
  chr5:180600479-180600660
  hyper
cagccgtcctcccgcctcagccttccaggtgctgaaacgtgctttttttgtgtgttcatgctcattaacaaagctcaaagggacgcatggaggaagctctgaattatgatgagaaataaaataccgccctgtgtggtggctcattgtgatggcacaggtatcccatgcaggtttccgtagt

SEQ ID NO: 112709 - DNA, 273 bp, Homo sapiens
  chr5:180614835-180615108
  hyper
ggccccacacatactcgagatgcggggttccatttggcagcgtgccgctgtccagtggatgagctctgtgccgagcttgtccacagcaagtaaaactggattgagttcacaggtgcgggtggttgggaatggaaagcaaaagcgtagatgccctcttctctttgtgccgctgtgaccaccaggtggacatactagtgggatcttctaggttagtctccagtgtaataagagcgtgtaatgagataataaccgcttcggggccgcgcgcggtgg

SEQ ID NO: 112710 - DNA, 30 bp, Homo sapiens
  chr5:180615521-180615551
  hyper
ctagcagctactctccgggtacgttcgaca

SEQ ID NO: 112711 - DNA, 30 bp, Homo sapiens; identical to SEQ ID NO: 42474
  chr5:180618001-180618031
  hyper

SEQ ID NO: 112712 - DNA, 659 bp, Homo sapiens; identical to SEQ ID NO: 42475
  chr5:180630960-180631619
  hyper

SEQ ID NO: 112713 - DNA, 708 bp, Homo sapiens; identical to SEQ ID NO: 42476
  chr5:180632775-180633483
  hyper

SEQ ID NO: 112714 - DNA, 30 bp, Homo sapiens
  chr5:180643711-180643741
  hyper
ccggacttcctgatgcgtaaattctgggac

SEQ ID NO: 112715 - DNA, 685 bp, Homo sapiens
  chr5:180643999-180644684
  hyper
ctcgacctagggtagtaactggaactgcaggtatgcaccaccacgctcggctaattaaaaaaatatatatattttttcctagagatggggcggggggcgggggcgggggcggaggggacagtctcactatgttgcctaggctggtctcgaactcttaagcccggtttccgagtcgctggggctacagtagcgcgctgacacgcccgacccttgctttgccacttagatgttgcatttattcgactttcacgtcgggcagaggtgctgggaaagaggcggctggcccctgcgtaagtgtgcgggtgcggtgtgagaaagctggaagcctgttttctaggcggggaagcagcctgcgctgccggggccgcatcatggcacgtgggtttccccgggcttactctcctgccagtagcgctgtcctagggatcccgcccacccctccggcttcttctctgaagcctttgcagcattttccctgagattgctgaagaggcccctggggatcgggctcccaactcacccgccgcgtcccacggcccgaagccgacgagctgcaagtgaggatgggtgcagagggaggccgacggtcacgccttggagaggctgatggtcctcttgaccgccctccaccgccactgcgaacccaaaagccgtgtcagtgctgcaggcccgcccgaagtggcgc

SEQ ID NO: 112716 - DNA, 30 bp, Homo sapiens
  chr5:180650091-180650121
  hyper
ttctacctcggatgcgaaacgccgactaca

SEQ ID NO: 112717 - DNA, 30 bp, Homo sapiens
  chr5:180650935-180650965
  hyper
gtagggaagacccccgcccctcgccccccc

SEQ ID NO: 112718 - DNA, 513 bp, Homo sapiens
  chr5:180670800-180671313
  hyper
ggcggcggcgagagcgtgtgtcgctgcagcgacgaggatggcactggatggcttagagaaactagcaccacaacctctcctgccgccgccttgcagtgaaagagagagagaaaagccccccgccggaaccggaaatacccgctcgaccatgcaaaatggcgagccccatgatacatttctgctcaagatggcggcgccatgtaatgcaaaaggcagagggaaattgcaaggcatcacagtcccgtcttccgtacaacaaaatctgactgcactttacaaatacactctgaaacaagcacattcaagtgtttaaaaaggcttctcagggatgatgtagagcgagaagcgaaagaggtgaagtgtacggcacattcccatgaggaccgccgggctgcttccccgcccctatgtggcatagctcgagctccgcctgttccacttggtgcggggagggttgacggggcaaccccaggggagcttaattttcatttcactatcgtgggtaacgatggg

SEQ ID NO: 112719 - DNA, 30 bp, Homo sapiens; identical to SEQ ID NO: 42479
  chr5:180673589-180673619
  hyper

SEQ ID NO: 112720 - DNA, 339 bp, Homo sapiens; identical to SEQ ID NO: 4509
  chr5:180673931-180674270
  hyper

SEQ ID NO: 112721 - DNA, 30 bp, Homo sapiens; identical to SEQ ID NO: 42481
  chr5:180688259-180688289
  hyper

SEQ ID NO: 112722 - DNA, 30 bp, Homo sapiens
  chr5:180688743-180688773
  hyper
cttccgtgagccgtcgggccccagctccac

SEQ ID NO: 112723 - DNA, 802 bp, Homo sapiens; identical to SEQ ID NO: 4510
  chr6:391097-391899
  hyper

SEQ ID NO: 112724 - DNA, 24 bp, Homo sapiens
  chr6:392409-392433
  hyper
gctctcccgggcctgctccggggt

SEQ ID NO: 112725 - DNA, 371 bp, Homo sapiens; identical to SEQ ID NO: 4512
  chr6:392587-392958
  hyper

SEQ ID NO: 112726 - DNA, 348 bp, Homo sapiens; identical to SEQ ID NO: 4513
  chr6:393124-393472
  hyper

SEQ ID NO: 112727 - DNA, 76 bp, Homo sapiens; identical to SEQ ID NO: 4514
  chr6:393764-393840
  hyper

SEQ ID NO: 112728 - DNA, 30 bp, Homo sapiens
  chr6:693289-693319
  hyper
tgcctgaatggacacgagtaggaggttttt

SEQ ID NO: 112729 - DNA, 819 bp, Homo sapiens
  chr6:710653-711472
  hyper
gtgtttgcgtgctgacggggactggcttttcttcttcttcttgtagtttgaaatggaaacgctgcactgctgagaaaataccacggaaatagaacccactgcattccaggaaaataaataagcaaggccacccaaattttcaatgagtgctcctgcagaatgcaggaaatggcaggagatccgtccgaggcaccccaggccgggtcgtgggtagagagcagggacgagggctgggaggggacgcaggcacagggtgagggtggcccgtctccagggagaactgcgcgctcacaggcggggccggcttcccgcatcagcccggccgggctgcaggttctgagcgagggggcggccgtgcctcactctgggcgggacgcggcctggtgcagggacgctcacttccagtggcatttcccgtcttacacgatgagcttcatccacgttctccataaccccctccccgccacgggaagcgtcagccacctggaacagccctattctgctcggttgtaaaaagcgtcaggcgcttttgatttgaaaagcgttaggcctgggaatcgctgttgctccctcggtgggcacgccctgctgacacgccctagcccaccggggaagccactggccacgagggagcgaggcgcacgggtgtcttccctccccagagtgagtgtcagggaggaagccaggtcttccagggcgctgacaaggcagggccgggctccttccctccgttgtgtttctctgaaatgttcgaatcactggtgtgacgggagcacttaaagccgaaaaaggaaagacgaaagcaaaggattcttcagg

SEQ ID NO: 112730 - DNA, 1271 bp, Homo sapiens; identical to SEQ ID NO: 42488
  chr6:1311047-1312318
  hyper

SEQ ID NO: 112731 - DNA, 13 bp, Homo sapiens
  chr6:1312342-1312355
  hyper
cgcggcaggccag

SEQ ID NO: 112732 - DNA, 1309 bp, Homo sapiens; identical to SEQ ID NO: 4519
  chr6:1312594-1313903
  hyper

SEQ ID NO: 112733 - DNA, 100 bp, Homo sapiens; identical to SEQ ID NO: 4520
  chr6:1314000-1314100
  hyper

SEQ ID NO: 112734 - DNA, 21 bp, Homo sapiens
  chr6:1314219-1314240
  hyper
ggactttgcactttgaatcca

SEQ ID NO: 112735 - DNA, 460 bp, Homo sapiens
  chr6:1316702-1317162
  hyper
atcacactgggcgggcggggcgggggcattggagggtcctgggctgtcgcctcctccctgtccctccttcacacacccagccccggggagtttcggtttctcagtgctgggtcggaggcagcccaggaggaaaggcgacggcacagctcccgttttctcaatgaaggcagaaagctgcacagctgcttttagttcaggcgaagctggaattccgcggagccgcacctggcggcaggcacgccggccttcggaggggccgctcggtgcggctgcaggaccctgcactcaggcagcagcctcgcggtggcggtgggacctctcgagcccaacagctccttccagcatctgcccagaaaactgccttcctcgcaggcgcgggaggagggttcggggctcactgtgcccaggcccccaggcctggccgcgcccaagtggccccccgcgccgagggcagggctcg

SEQ ID NO: 112736 - DNA, 252 bp, Homo sapiens; identical to SEQ ID NO: 42494
  chr6:1378223-1378475
  hyper

SEQ ID NO: 112737 - DNA, 824 bp, Homo sapiens
  chr6:1379267-1380091
  hyper
cgaaaccaccccggggaaagccgtaggggcgcgccggcccacgcgggaccgagttcagaggactctgcaccgtcagtttcagggccgacgtttatagagcgcttcccacgtgccgcacgcggttctaagagcttggcttgtattaattcgtttaatcctcccagcaacactgttaggcattataatgatcccaatcgtagaagtcaaaaaaccgaggtgcagaaacaaagtaacttgttccagatcacgtaggtggtaagtgcagggtattctggagcaggagggagggtggaaagcacagaaaaaaaaaaatgaactgggaaaagcgttgacgtgcttagtatttcatactgcaggttccactttcagagccaggctgcgagcctacagggtagagtaggggtgccgggccccctggtgtcctggcgtactcggggggaagacagtcgccggccgccgggctcctgccacgctgtggcgcgcgtggaaggtgagggtcctccgctgtcccgccgcctcccacagggcggcccagagcctgcatcttttgcaaagggaacataggatggagagaaagaaagtcccgcctgaaataagcaaacgcggtggcggctttgcggtcggccacgtccgctaggaacccgcgaggcgcccttgcgagctgcgcagtcgagttttctttccactgcactttcacgttctgccggatgggatttcgggggcagaagactcctcgaatgcagaccggctgtctgtggctggacccccagtgctgcaaaggaatctgatatacctggaggaaccaacctcgaggtccaaccaag

SEQ ID NO: 112738 - DNA, 30 bp, Homo sapiens; identical to SEQ ID NO: 42497
  chr6:1380883-1380913
  hyper

SEQ ID NO: 112739 - DNA, 1403 bp, Homo sapiens
  chr6:1381770-1383173
  hyper
ttctccaagggcgggcgggtgggatgatttgttgatttgcttgttttccaccaaaccgcagggcacctccaggagctccgggacaacttacaaatgaagacacagagcccccgtcccttgcttcagagaaccaaataacggaactgaatgatcgtttcttcagcaaagcctaaagacgcttgcgtcccgcggagaggtgcccacgcgcgactcggctgccccctcttcttgcgggtccgggtagggtagggcgggaacgcgggacgtgccctaagcgggccagccgagcgcgagacaggcgatgctgcagaagcctgcccgcctgcgggtcacacaccggccggcctcggctgcaggggttgcggggccacgggtcgcggggcgccgggagccgcgagcaggtgacggccgcgccgggcagccccgcgggccgcgattcccgagagcctggcgccaccccgcggaagccggaggaactgcggcttcttcccgctcccgcgcggaggggagagggaggcgcagcgcggaggggagagggaggcgcagcgcggaggggagagggaggcgcagcgcggaggggagagggaggcgcagcccgcaccgcgcaatcccggggctctggcgggagggaaggtgacttgcgtgggacgactccaagaggccaggcccggccttcgcagttcacccacgaggataccgcgaccaagccaccaaagcactctctggccaggccgagaccccttttcccccgggccccaagagaaaaaagcactttctcctaaaacacgaactccccgcggaggggcccggggctgcctggcacggggcagggtgtgcggctgccgtgcgggcgcgggccagagtcacgtggaggcaggcggagagggcgagggggcccccgtaaatcatcctgagggatttttggcccaagtccctgtttccgaaaggttgcgggacggctttgacgttgattatgtagctgttctcttttcaagtgcgcgcccctccccaccgcagcccgtctggtgtgcgaggattgtgtttgaaagggaggaagcatccttgaagtggtgggtgatggattgtctaaacccttctgggacgttctgggtgggggttttcgaggcagctcatcaataaagacccccctggagagaaggggcggctggagaccagcccccgccgcgcagccccgaggccccaggcctggaacacagtcctcggtgtggggcacagggcgtgaggggaggatgagctccccctgagcagatggagatttctccttgcctgggccgtttgacccccaaagccttgcagactggccgcgtgggtgccatggggcgatttcttgggaaaggagggcagcagaaaggcccgtgggctctcagcgccttggagtcagg

SEQ ID NO: 112740 - DNA, 332 bp, Homo sapiens; identical to SEQ ID NO: 4526
  chr6:1383376-1383708
  hyper

SEQ ID NO: 112741 - DNA, 320 bp, Homo sapiens; identical to SEQ ID NO: 4527
  chr6:1383859-1384179
  hyper

SEQ ID NO: 112742 - DNA, 15 bp, Homo sapiens
  chr6:1384625-1384640
  hyper
cgagcgttgccacag

SEQ ID NO: 112743 - DNA, 48 bp, Homo sapiens
  chr6:1385118-1385166
  hyper
ccaaggttttggtctcgcaaccgaggggacccgcgcccggcaatttgg

SEQ ID NO: 112744 - DNA, 223 bp, Homo sapiens
  chr6:1388650-1388873
  hyper
gctcctatccctggtcggactacatttccctgcacgtgtaatccaataactaactgtcgggtctcattggaagtgattgctcccgagggcacatctctctcagagcctgactcttacttagggaggaattagccacaactggggagaagtgttctcggacaggagttagctgagacctggcacagttttgggtgggcaatgttaagacggaggatgtaaacct

SEQ ID NO: 112745 - DNA, 144 bp, Homo sapiens
  chr6:1389130-1389274
  hyper
tcaaagttccgaaaacgtccacgatcgccagcggcccgcaaccctgcggcggcccccagtcgccctaacaattgtcggggagcctgcaggccctgccagaaagagagaggattggcacgttacctttgggcgtctggcaccccg

SEQ ID NO: 112746 - DNA, 1033 bp, Homo sapiens; identical to SEQ ID NO: 42506
  chr6:1389372-1390405
  hyper

SEQ ID NO: 112747 - DNA, 331 bp, Homo sapiens; identical to SEQ ID NO: 4530
  chr6:1390427-1390758
  hyper

SEQ ID NO: 112748 - DNA, 512 bp, Homo sapiens; identical to SEQ ID NO: 4531
  chr6:1390955-1391467
  hyper

SEQ ID NO: 112749 - DNA, 202 bp, Homo sapiens; identical to SEQ ID NO: 4532
  chr6:1439137-1439339
  hyper

SEQ ID NO: 112750 - DNA, 237 bp, Homo sapiens
  chr6:1524267-1524504
  hyper
gcgaggggtctggtgcggaccagcccccgagccacagagtgcggggcccgagctccggaagcccagcctgggccgcgacggccccaattccagcaacgctagagggcgcccgtgccaagcgcccgctcccggcaagccgcgtgctcccgggtggccgcaaccgcgggccgagggggcggagtcatggaaacacgtgccacggcctggatgaacctgcagggccgaacgctcagtgaa

SEQ ID NO: 112751 - DNA, 724 bp, Homo sapiens
  chr6:1604912-1605636
  hyper
ttttctgctgacgctcgcggggaagcggcgggaagcctgtgaggggcggcctgggagcagacggaccaccaggtcaccggcgcgcgctgccaggcgccgacccactcgcgaggaccagcggttcccggaggcgtcggccctcaggtcctcgggggaggccggctgcaccgagccgggtgtcggccttgtccctgtcctgagaggtgcaaacaccggccccggcccaggcccccggggctcctgcccagaaggctcagagctgggggccgaccgcgccttacccgcaggaggcccggcggtgcgtccgcgttggtgccactccccggccggggtgagggacgtcggaaggaaggtcccagggcgcagggttccgcgaagggagcactcggaaggaaggctggctgcggccccggcgcctgggtccgctgcggcgccgggccggagacctgggaacagccagccacctgcaaggttgcagcccacctcaccccgccggcggctccggggctgtctgtgggtctgtctcacggggcaaagcctttcttcccacacccacagccaaggcgcgtccgtgcaggggcacacgccttctgctccagccccaggaaggcgctttcgccctgcagtcctccgacggccggctcccgccgcaccgcgcaccctggctccggcagactctggggcctggggactcgcccaccctgcgcggcgcgccccccacatg

SEQ ID NO: 112752 - DNA, 2013 bp, Homo sapiens
  chr6:1610182-1612195
  hyper
ttaagcggctggcgcgcgagagaccgagaaaaggtgacgcggggcccgggcaggcggccggcgcgcggccccccccccccccgccctggttatttggccgccttcgccggcagctcagggcagagtctcctggaaggcgcaggcagtgtggcgagaagggcgcctgcttgttctttctttttgtctgctttcccccgtttgcgcctggaagctgcgccgcgagttcctgcaaggcggtctgccgcggccgggcccggccttctcccctcgcagcgaccccgcctcgcggccgcgcgggccccgaggtagcccgaggcgccggaggagccagccccagcgagcgccgggagaggcggcagcgcagccggacgcacagcgcagcgggccggcaccagctcggccgggcccggactcggactcggcggccggcgcggcgcggcccggcccgagcgagggtggggggcggcgggcggcgcggggcggcggcgagcgggggccatgcaggcgcgctactccgtgtccagccccaactccctgggagtggtgccctacctcggcggcgagcagagctactaccgcgcggcggccgcggcggccgggggcggctacaccgccatgccggcccccatgagcgtgtactcgcaccctgcgcacgccgagcagtacccgggcggcatggcccgcgcctacgggccctacacgccgcagccgcagcccaaggacatggtgaagccgccctatagctacatcgcgctcatcaccatggccatccagaacgccccggacaagaagatcaccctgaacggcatctaccagttcatcatggaccgcttccccttctaccgggacaacaagcagggctggcagaacagcatccgccacaacctctcgctcaacgagtgcttcgtcaaggtgccgcgcgacgacaagaagccgggcaagggcagctactggacgctggacccggactcctacaacatgttcgagaacggcagcttcctgcggcggcggcggcgcttcaagaagaaggacgcggtgaaggacaaggaggagaaggacaggctgcacctcaaggagccgcccccgcccggccgccagcccccgcccgcgccgccggagcaggccgacggcaacgcgcccggtccgcagccgccgcccgtgcgcatccaggacatcaagaccgagaacggtacgtgcccctcgccgccccagcccctgtccccggccgccgccctgggcagcggcagcgccgccgcggtgcccaagatcgagagccccgacagcagcagcagcagcctgtccagcgggagcagccccccgggcagcctgccgtcggcgcggccgctcagcctggacggtgcggattccgcgccgccgccgcccgcgccctccgccccgccgccgcaccatagccagggcttcagcgtggacaacatcatgacgtcgctgcgggggtcgccgcagagcgcggccgcggagctcagctccggccttctggcctcggcggccgcgtcctcgcgcgcggggatcgcacccccgctggcgctcggcgcctactcgcccggccagagctccctctacagctccccctgcagccagacctccagcgcgggcagctcgggcggcggcggcggcggcgcgggggccgcggggggcgcgggcggcgccgggacctaccactgcaacctgcaagccatgagcctgtacgcggccggcgagcgcgggggccacttgcagggcgcgcccgggggcgcgggcggctcggccgtggacgaccccctgcccgactactctctgcctccggtcaccagcagcagctcgtcgtccctgagtcacggcggcggcggcggcggcggcgggggaggccaggaggccggccaccaccctgcggcccaccaaggccgcctcacctcgtggtacctgaaccaggcgggcggagacctgggccacttggcgagcgcggcggcggcggcggcggccgcaggctacccgggccagcagcagaacttccac

SEQ ID NO: 112753 - DNA, 186 bp, Homo sapiens
  chr6:1612300-1612486
  hyper
cgcacgtccggagctttcgtctacgactgtagcaagttttgacacaccctcaaagccgaactaaatcgaaccccaaagcaggaaaagctaaaggaacccatcaaggcaaaatcgaaactaaaaaaaaaaaatccaattaaaaaaaacccctgagaatattcaccacaccagcgaacagaatatccc

SEQ ID NO: 112754 - DNA, 80 bp, Homo sapiens; identical to SEQ ID NO: 4536
  chr6:1614119-1614199
  hyper

SEQ ID NO: 112755 - DNA, 119 bp, Homo sapiens; identical to SEQ ID NO: 4537
  chr6:1614286-1614405
  hyper

SEQ ID NO: 112756 - DNA, 30 bp, Homo sapiens
  chr6:1615308-1615338
  hyper
ccgcctcggcctggccgcaccagacctgcc

SEQ ID NO: 112757 - DNA, 205 bp, Homo sapiens; identical to SEQ ID NO: 42517
  chr6:1619898-1620103
  hyper

SEQ ID NO: 112758 - DNA, 965 bp, Homo sapiens; identical to SEQ ID NO: 4538
  chr6:1624812-1625777
  hyper

SEQ ID NO: 112759 - DNA, 45 bp, Homo sapiens
  chr6:2246047-2246092
  hyper
ctcgcctggctggccgtggggggcctggacgcagtggcctcccga

SEQ ID NO: 112760 - DNA, 30 bp, Homo sapiens
  chr6:2246538-2246568
  hyper
cacaggtggggtcccggcttacatctgttg

SEQ ID NO: 112761 - DNA, 169 bp, Homo sapiens
  chr6:2764959-2765128
  hyper
attacacagcggcccgcgagaagcatctcttggctcgaagcgcgctgtaggtgaaccgcccttgacttaaacgccaacacatctaaaagggggcgagggacgctttattttcatttccctgaccactactgaggtgagcatttctttcactcgcgtacttgtttgtatt

SEQ ID NO: 112762 - DNA, 30 bp, Homo sapiens; identical to SEQ ID NO: 42519
  chr6:2766179-2766209
  hyper

SEQ ID NO: 112763 - DNA, 886 bp, Homo sapiens; identical to SEQ ID NO: 4539
  chr6:2841488-2842374
  hyper

SEQ ID NO: 112764 - DNA, 30 bp, Homo sapiens
  chr6:2902497-2902527
  hyper
aggttctcttgaccccgccggcgcgaccct

SEQ ID NO: 112765 - DNA, 682 bp, Homo sapiens
  chr6:2903031-2903713
  hyper
gtgagccactgcgcccggccgagactggtgactgtaaaggacagtgaagaagcaggacagacgtcatcctgcggatcccagagcagagaagagcagtgagaacacagggccggcaggtggggaggaggctgcaggggagggcttcggccagggaagggcagcgaggagacatccgggagggaggcgtccgcggtggctgtgggccgccaaggcggagaccggctgccgctcccaggcaccccccagagaccgttgctgaccccaccgagaaggcaccgcctccccggggctcttggctgagcgacctctcctgtcctccggtcccatcactcggtggcagccggtggacctgaagctcgccactcccgtcccctaccccagccgtgcgcggggacgccctcacctgccacctagtccagcgctgccgccgtctccgtgccgcgctccgagcctggacgccgacccccgaggcgcaggacccggccctgctgctgcgctcgccgcggactcccgctagggcctctgcaggcaccgcttttataccgcagggtcgggcgcctcccacgctttctgcgtttaggcggagcctggcgggaccagcgggggcgccgcgcgtggtggccgaggtcagagctgggagcagggtcaggtcagggtccccccagtccgccccgcccggggc

SEQ ID NO: 112766 - DNA, 30 bp, Homo sapiens
  chr6:2971935-2971965
  hyper
agccggaggggccgcgagtcctgcccggag

SEQ ID NO: 112767 - DNA, 30 bp, Homo sapiens; identical to SEQ ID NO: 4541
  chr6:2988708-2988738
  hyper

SEQ ID NO: 112768 - DNA, 30 bp, Homo sapiens; identical to SEQ ID NO: 42523
  chr6:2989503-2989533
  hyper

SEQ ID NO: 112769 - DNA, 225 bp, Homo sapiens
  chr6:2999175-2999400
  hyper
gcagaagccagcaagcgctggaaaaagtcggcccaaactgttcaccagcaccgccccccataactccccaccggctctggtttcaagactttccgttttctaggtatttccttggccttaaaccattttcctttaaacgaactttttctgtgaagccatccggtttcccccgatagtggcatctcacaaaggacaatccagtatcccaacagcgtgttgcgttcc

SEQ ID NO: 112770 - DNA, 30 bp, Homo sapiens
  chr6:3064454-3064484
  hyper
ggggtcccctgcagcgcgcagccggtttcc

SEQ ID NO: 112771 - DNA, 30 bp, Homo sapiens
  chr6:3068555-3068585
  hyper
tcttttacgtaggccgccccactcgcttga

SEQ ID NO: 112772 - DNA, 206 bp, Homo sapiens
  chr6:3118558-3118764
  hyper
agcctgcctagagccggagccccgcccactccggagtcccgcctggacgccgacgcagcgagggcgctatggctggcggcctcgcctcctggaaaggccatggtcgctgaggcgacgagcgagggcggggcagcgccgacggggacactcatcccgggagccagagccagcaccgagaggggacggtctacgcgggtgccggcggt

SEQ ID NO: 112773 - DNA, 30 bp, Homo sapiens
  chr6:3119526-3119556
  hyper
ctgagcctgagtaccgctaaggctttaatc

SEQ ID NO: 112774 - DNA, 30 bp, Homo sapiens; identical to SEQ ID NO: 42525
  chr6:3157151-3157181
  hyper

SEQ ID NO: 112775 - DNA, 255 bp, Homo sapiens
  chr6:3162841-3163096
  hyper
catgcggcgagactgcggtctccgctggccgcacgctcttctgcatacagctccgcactacactcctctcccctaatcccgaggctggcgctgcagagtgagcgagcgcaggatcgctaagcgcgagccgaggcgccatcggaacactcttgcccccacccagacgtcgagtctgcaggtccagggcagagggcgctgggcggcgccgggaggcgcgaggcacccgggagagccggctccgtggcttcctactac

SEQ ID NO: 112776 - DNA, 561 bp, Homo sapiens
  chr6:3227010-3227571
  hyper
tgaagctttaaagggcgtcgtgacccgggcacagccgcggggcttgtattttgcaggttcagaaagttgaaactgggcgtttcccaggcaaacagctgccgctcgcggggggaggtaggggtcgagggggtaaggaccagccaaagccgggcagtggcggagcttggcgcactggtcgcagccccaggctgcggcaggaggcgagggcacagggactgcagcccgccaggagcgggtgggcggggaaagaggaacgcaaaggagctaaaggaccgcggttttagattcaaagcacgtcctgagaccgcaagacaatcgctctcctcccctcccccggcagctcgactccggttcaagcgagtacaattaatcctcctggtgtcccagcccctcgcgcggagcgccgcgcacagcctcgcggacacaccctcgtcttctccaggcacgcgtgcctgccaagcagccagcgcggagggaggccgagggggtgacggggactccaaatgagttacagcagaaagaaagagaggtgccccctccgtccgcgaaagtcacctccta

SEQ ID NO: 112777 - DNA, 1108 bp, Homo sapiens; identical to SEQ ID NO: 42529
  chr6:3228110-3229218
  hyper

SEQ ID NO: 112778 - DNA, 928 bp, Homo sapiens
  chr6:3229277-3230205
  hyper
gagagagagactaatcctgcgtgcgtttgagggcgggaggggaaagggtgtcagaaacgttcactgcacaacctgttccctgcaattcgatgactgaagcgcgccgccccacacttcggaagggccgttggcgaggtgacgtgacctctttcatcccctggcgagaaaggccgaatgacccgggcgcacgcggcggagctcagcctgcagctgttgagcgagaccctcccagaactatcagcaagctgtcatcgcctccctttcccgctgtggggtggagggtggggggttcaagtcgattccaatgtacaaagagaagtagcgagaacaaaagcccaggcgcccccaaacatccagggcgcccagactggagctcgccggccggtattccagacccggccggcgtgcccgggtgagggtggggtctaccgagaggcagagagcagcggagggtctgtccacatgccctgctctcccggtaccaaggtctcggggcctgacctccgagtttctaatccagatcctgcagatgccgaaacgtcgagggctagcaattcccaaggtcatacagcaagttgaggacagggctcggactggaatctcgtcttttgggcacaccagacctcagggaaagtgaccgcatctcggccaaaagggctgtggcaggtgtcagcctcgaggtggcggctctggtgggaccaagctgcgccggaaggaacagagctagggcggcacccgcgcggcgagtgtagacacactcggagcggtcaccccctcgctgcgagctcccaggagcaaccctgatgctcagcgctggggggtggggttgggggccgctcagctccatgctgagtaacttgagctggccgcctgcctccttcatctaaccaattcatttctcagcttctgtttccgagccaaatctcca

SEQ ID NO: 112779 - DNA, 718 bp, Homo sapiens
  chr6:3231614-3232332
  hyper
cccggcggagctgcccggcactgtttagtcgcaggggctgcggggtggcagcctcagagccctgtccttccgcagccgtgggccccgcagggaccagccaagcagggcaaccaaaagctggaaccagcagcgaaaaccccgagcccacgaacgcagcgcagtgcgggaacacttgccctttgttcctcagtaaggccgggtgttttcgcatccccggaggttgtgaatttgagttataatggcctcggtcgggactgagagagccgagcttccacgagagagctttgcctgctttgtcctacaaatcggcggagggagtagcatcctggcttttctagggcgccatttccctgctacaggcaatctcccctcccccacgctgtcaatgatttgtgggattcttaggcaggcggggcaggccgagcccagggaatgcacgctgagtcctagacacagagccaggccgggtggaaaacaaaaagagaagaagtgattatgaaataataagacggaccgtgtgccccttgcaaggtgcggcctgcgaaatcaacagacttataaataaggtctggtggaagcgcaggagcgcacgcgggaggctatggcgggggaacctctgtgagttccgcggcggaggctagaacatcgctgtggctgcgggaccctcacccggcgctgaaaaccctccacatcagctcctgctcggaaatgtctccgc

SEQ ID NO: 112780 - DNA, 30 bp, Homo sapiens
  chr6:3258974-3259004
  hyper
gggtttccccagcccgtccagagaggtact

SEQ ID NO: 112781 - DNA, 30 bp, Homo sapiens
  chr6:3259722-3259752
  hyper
ggacgcgtctgcctcgtagctctcctgcca

SEQ ID NO: 112782 - DNA, 1367 bp, Homo sapiens; identical to SEQ ID NO: 42532
  chr6:3455897-3457264
  hyper

SEQ ID NO: 112783 - DNA, 707 bp, Homo sapiens
  chr6:3457536-3458243
  hyper
tcccctgcccgttgcccgtttcgcgccgggcggggcgggggaggaggagacgcgcgtagcaggggtcgccggccggcgacgggtcccggcaaagtcggcgtgcgctgagaacgtgtgggccgggtcttctctgaggctgggctcccgcagccgcgcgggccccccacccactccgcgcgcgccaggtctccgtgacctctgtctcttcagaggtgcccggcggtcccgctgcccgcgccccgctcccagtcccaagcccgagggtcttcagccttcgggaacaaccctctgcgctttttccaggagcgaataaggttgatttttgtgtccgtggagcagggtcaaggaggcgcctttgccaatttcaggtcgccagtcccccgcagtgtctggccacctgcgacccgccgcacccactcccaaatcgccatttcttcccccactcctaagtgcatgcgatgtaagcacgatgctgggatatatctccaacacaagttataatacacacagtataaacgtgatggcattccccaccccctccctaagatcttgtattcacgtttggaacgccgtgtgcacaggcgcacacatctatactctcacacaagaagacaaacctctccctcctctcctgctccagcgccaaccttgcccagccagcgctgtataaataacaccagccctgcggcaaacggctacattagcat

SEQ ID NO: 112784 - DNA, 30 bp, Homo sapiens
  chr6:3742803-3742833
  hyper
gcgcgcgcactctgcggaaaaagcaggatg

SEQ ID NO: 112785 - DNA, 716 bp, Homo sapiens
  chr6:3750699-3751415
  hyper
ccccgcaattcttcccgtctcaattccagtccctctctcttgcgtcctcccggcttccaccccctcagcctggcctccaaaagaaagatcgggcagagcggtaggaaaagggaagccaccgcggtttctgaaaacaagaattcccgcgagccaggacggtcacgaggccggggaggaggcggcgcagctgatcaaacgcgaatggggaccagccctggcgggggtgcgggggggccctggctgtccgcggcagccgcgggcggggcggccgctccgaggagggacggaagggctgcgtggcacctcgcgctcgaagaccaggggcgcgccctccgcggggagaactcggggcggcggccagacccgacgcgacccccggctcggaccctgcagttaactgctcccagacgctttcccagtgcgcccgcccgccggccctcgggaggtaccgggcagggggctagggccgggccgaccctgtgagccgctcagccccgggcgcccccgccctcctcggaagtgactcgtcctcagggagagtccggcgcccgccctgccggcctcggcccctttcccgccccatttggctcctccgccgggggcgcccccaggctgggcaggctggctccccgtccccctaaccccgccgcccgggcacccctcgtctgcgggcgcggggtccaagtgtcccctgtccagggcgggcagaaaggaga

SEQ ID NO: 112786 - DNA, 30 bp, Homo sapiens
  chr6:3751724-3751754
  hyper
atgttcacgagcgacgtgccctcaaacacc

SEQ ID NO: 112787 - DNA, 31 bp, Homo sapiens; identical to SEQ ID NO: 4549
  chr6:3906687-3906718
  hyper

SEQ ID NO: 112788 - DNA, 30 bp, Homo sapiens
  chr6:4018805-4018835
  hyper
gaagcaaggagcatcggcaccgacggatag

SEQ ID NO: 112789 - DNA, 30 bp, Homo sapiens
  chr6:4019085-4019115
  hyper
ccgaggccgctttccgttgcaaaggttcct

SEQ ID NO: 112790 - DNA, 30 bp, Homo sapiens
  chr6:4021988-4022018
  hyper
cggcagtgaggtcgcgctttcctatgcctc

SEQ ID NO: 112791 - DNA, 629 bp, Homo sapiens; identical to SEQ ID NO: 42535
  chr6:4135154-4135783
  hyper

SEQ ID NO: 112792 - DNA, 30 bp, Homo sapiens; identical to SEQ ID NO: 4550
  chr6:4415168-4415198
  hyper

SEQ ID NO: 112793 - DNA, 30 bp, Homo sapiens
  chr6:4647907-4647937
  hyper
agccctggacactgcgggacgctaggcagc

SEQ ID NO: 112794 - DNA, 870 bp, Homo sapiens
  chr6:4775126-4775996
  hyper
tcaaacggtggggaccgcaggtagaagcaccgcttaaggggaacggcgattcgactcgcagtgacttaagggttggcgtggtgcttgttcctgggcgtggggaggacaggaaaccgcggggtctgtgagacgccccgtggttgttgaaacgctgttggggggcacaaacgaatagggctttaggaagaaaactggtgggaggagccttgtggctccaaggtaggttaggaactggagcgagatggagcacggaggagtgaggcggcccgaaggatgcccggggagacatggaggaactggcgagggcttcccgatgcagggcctgggggagagggtgaactaatgcctctgcagtgccccgtggggaagttccgcatactcggccagagtgatcggagttggcggctgtctgggggagttgggtcaggaagccccttctttcgccaccgatggggcacgtccagggcccggcaggtgtgccctggcagtagatcttccctgggaagtggagcgcgggccagccctcgctgttctgagcgagggcctgtcgtgtagtccacaccgttccgcgaaaggaaccaccattgacagcctcgttcgattagaacccggacctccctggaatccagactcggtcccttcccagctgcgcttcggaggaggcggacgctccgagaggaacccagaggcctggcgtggggggagctgcgggcagagcggaggcagccgcgccctcgcgccgccctccgccgcgcccggctcccgccccccggatcccacccccggcctgccgcggagccagcgtgccagccggagctcgccgggccaccccgcggggcgcgcggcccgggctccgggtcttggcggcgg

SEQ ID NO: 112795 - DNA, 83 bp, Homo sapiens
  chr6:4776187-4776270
  hyper
cgcatggttccctgccccatctcgggtccgtcgctgcccgtcctggtgtgcacaaccgcgctgcgcctcgaacctcgaggtcc

SEQ ID NO: 112796 - DNA, 30 bp, Homo sapiens
  chr6:4776654-4776684
  hyper
tttctgcactacaccggagaggggagccgc

SEQ ID NO: 112797 - DNA, 507 bp, Homo sapiens; identical to SEQ ID NO: 4553
  chr6:4948975-4949482
  hyper

SEQ ID NO: 112798 - DNA, 31 bp, Homo sapiens; identical to SEQ ID NO: 4554
  chr6:4949502-4949533
  hyper

SEQ ID NO: 112799 - DNA, 123 bp, Homo sapiens
  chr6:5004397-5004520
  hyper
ttcttaggagcccacgcagccgctctttggtggatgtctgaagctgtaaattcactgtcccagtggctgggaacctggctcttgccttttcaacgccacttttcctccgtccccgccatccct

SEQ ID NO: 112800 - DNA, 1653 bp, Homo sapiens
  chr6:5084675-5086328
  hyper
aggtggtgcgtgccgcgtgggcgccggccccacggggccccctctccgccctccctgcgggatcccggggcgcggactcgcgggcgcgtcgggcgggacagggggaggggcgggacgtgctcccgggcctggcgcgaatggcctccggccgctctcggctgcgggccatggccgctccccggcgcgtccccacacggtccccgccccagtctggccgcagcccaccccgcgccgccactgggcagatgggggcggcggctcctgcctcccggctttcggaagagcagagcggagcgcgcctgaccgagtcaggcttccgagtgggattggaacccggggcgccctgaagtttggggaaagcaggagcagaagggaagggatgcgctccccgctctccggcggcgcggaatgggcctccttccagcctctgcgtaggcaagatttccccagttgcgcgctgcaccggggactccccagcccgtgaggcagccaagaggagagcgctcagtgaccctctgggggcagagccgtcaggccaagttcatgggcaggaagactttgtgcacgtgggggtctctgaaggttgagcgcgagctctgcacccccacttcgaggcactcaagaagcggaacagacgcgagccccgccgggggtgcgggtgagggctgcagggagcccgcgaacgacagaaagtcgccccccgcattccaccggagcactcgggaacacggcttccaggtgtcccagcggccgcgcctccccgcccccggccctcccccgtcgcgggcaggttcaaccgggaggcggcgtggccccggagccggccccaggcccgcatcctcctcccacttcgccctgggcagccgcagctaaaagccggaggctccaaagtggaactacgttgtcttgtcgagcctggggcgactcgcctcggggagggcgagcctgaactgcagccctgcgctccttccacggcccgaggagttagttaagtctccagaggggcccggttcggcccgagcaagtccaggggcgaacggcgtcatggagcccataggggcgcggctaagtttggaggcgccgggaccagcgcccttccgagaggccccgccggccgaggagctgcccgccccggtggtcccctgtgtgcagggtggcggcgacggcggtggcgcttcggagaccccgagtcctgacgctcagctaggggataggcccctgtccccgaaggaagaggccgccccccaggagcaggaggagctgctggaatgccgccgccgctgccgcgcgcgctccttttccttgcccgccgaccccatcttgcaggcggccaagttcctgcagcagcagcagcaacaggcggtggcactgggcggcgagggggcggaggacgcacagctcggcccgggcggctgctgcgccaagtgcaagaagcgggtgcagttcgcggacacgctggggctaagcctggccagcgtgaagcacttcagcgaggcggaggagccgcaggtgccgcccgccgtgctctcgcgcctgcgaagcttccctatgcgtgccgaggacctggagcagctcggggggctgctggccgcggcggcagtggccgcgcccctttcagcgccgccttcccggctccggccgctcttccagctc

SEQ ID NO: 112801 - DNA, 30 bp, Homo sapiens
  chr6:5261391-5261421
  hyper
gagcctttgggaaccgtctggggtcttggc

SEQ ID NO: 112802 - DNA, 611 bp, Homo sapiens; identical to SEQ ID NO: 42542
  chr6:5851315-5851926
  hyper

SEQ ID NO: 112803 - DNA, 1204 bp, Homo sapiens
  chr6:5996184-5997388
  hyper
acggcaaattatagccgaagacggcgcgataataatctaaacaatcaccacaagaagaaacgttctctaacgctccagttgcggaagcctgcgtttccaagactcgcggccctgcgttcccagggatatctccgtgctcacgtgagcgtggtcctcggcttgggacagacaagggagccccagacaggacgataaggtttggagattcccagggcgatctgggactccgtggcgtgggggcttggaagcgcgtggaggggctgagagaggggagagggcgcccttcctctagggcggccccgtctgggaagcagttggaacagcagtaggagccaggggttcctagagaagaaccctgttaggagagcagaccagcccgcgctcccagtccccgccccctcgccccttctgccccgcccttagcctgcctcttcctagatcttccaggacattgatttccgagtaggaagcccgcgctgctaggggaggggcgtcctctgtgggtcgtgggggggtttcccttctctccacagtcggagcagaagggcgcctgccttttattttgacaagcaatgggcttagttgtgagcacttgtttgcccccaatatgtagaggaaaagatactgataggaggcggcgtgctacgatggcaaaaatggagaagaccctccctctttatcctggttctcctccttgttaaatagattcgtatttaagataggcacagacattctaatttgaattccaggggttgaactccagttagaatcatcctatttatacgcagaccgaaaataaccattgaaacgaaaccaacaaaatgcaactattttccaaaaccccgagcgtttgctggtgggtgaccaccccgcgcaggtagcgcggatctgctttggttttgactgagaacccgggttttgactgagacctccgtcgggaggaggggactgggtgggagttagcgggcgaaacgattccccggagtggccccgagcggcgcgtgcgtgaacgcgcggccgtaatatatgctgccattaagaatccgtgcagcttccagcgctccgggcgcagggacgcatgtgttgctggaattcaatccgtggggggaatgcagattgggctgcgactcactgggtttgatttatgaactgttacactagcaattgtttacacattgcatttcagagcccgggcccaccctcc

SEQ ID NO: 112804 - DNA, 674 bp, Homo sapiens
  chr6:5997401-5998075
  hyper
cgggcttcgtgcgggaacctgctgcagcccccttggtctctctccatcctcctcccttcccccgtcccccccccccggggcccccgcagcttcctcccacagccaccttctccaagaaatcagatttcgatttctctgaacccagagacctgcatgcagttctttctcccccgcctactccaggcctgcagtccccggacccgggtcgcctctgcccatttactccggaatgtttacttctctttaaggccatgcggggcctataaataggagaggtggaatcagccccactgccagatcaatagggcccgtctcctcgccatttcagctgagctgtcttattaattatgaaaggattcacctgatccctgccagggaacacagcctctcggcccctctgctggagcccttaatggcggttccttcgcaagctgcctctggccaccgcacaggaagaggcgaatcgtggttaggccgagcctgcgaggatcgtggttagggctccggcccgcctgaggcgggggcagacggccggccactggcattgtctgcctgtgcgagcaagcccagttcctctaaatctcaaacagaaagaatctctgctttgtaattaatttaaaaacaactttcattttctcttttttaaggaagcacggtttcggggaagtggccaa

SEQ ID NO: 112805 - DNA, 30 bp, Homo sapiens; identical to SEQ ID NO: 4561
  chr6:5999244-5999274
  hyper

SEQ ID NO: 112806 - DNA, 398 bp, Homo sapiens
  chr6:5999609-6000007
  hyper
cgggacctccgcctaccccagaagcggctgtctaaagcgggggtgggggggcgccccctcctgtctggttttcccttccagttgccgggagaggactaggcagccgggagccgggccgtgcacccgctgtggcgcgctggcacctcggcctccgcaaacagattgctcgccctcctcggggaaagctaggaaaacagtgctaagcctcgcaagctgccgcccattaatgcctcttagcttgcaagatgggttactagctctgagcacggccctcccctcggggcttcttacattctcctccccctcgccccttctgtctccctccttctccacgccgcggtactctcgccttcgccctcattctctccctccacctactacctcttccttttgttttc

SEQ ID NO: 112807 - DNA, 92 bp, Homo sapiens
  chr6:6000046-6000138
  hyper
tctgctttcctctcttctgttccccacttcctcttcctccttcccacaacctgcctggatcctccttgctctccacagttcccggctcagat

SEQ ID NO: 112808 - DNA, 113 bp, Homo sapiens
  chr6:6003415-6003528
  hyper
tccgagtgagaccctcggatgcaccctctcccgccccgctggaaagagggcagcctggacgtcctgagacctggcgcggatgatgagtggtctggagaggagaaggccagagg

SEQ ID NO: 112809 - DNA, 394 bp, Homo sapiens; identical to SEQ ID NO: 42548
  chr6:6004349-6004743
  hyper

SEQ ID NO: 112810 - DNA, 534 bp, Homo sapiens
  chr6:6004836-6005370
  hyper
cgtgaacatttctgtcttttaaaactgtgactccttggactctagccttctctgggaggccgggaggctgcgcgcgggacggattttgcaggcgcacgcgtcccagcaggtcgcagcccgtgggtccctcgctgtccttcctgaaccccgcttaggcgagactctagcgggtgaccctggctccttccctgtcctctctgccgtccccttcttgtgcggtttccatccgttcattcattcgttcgacctctcattcattccgaacttcctcctgctgcgtcttctttcgtgttcaccacactcttctacctccccgcccctcccaacccccacttttcttgccaaatgtcaatgatttgggacagctcccagccgtgaattaataaagaccgaggttctgttgcaggaaagggcagacattagggaacaaatacgttcaatttcaattccacagtcaacaaatagtcatttttggaccgaggttaatgtgttcaaaacgcgtccctcaggcacgaccaccgtcttttttttccc

SEQ ID NO: 112811 - DNA, 1687 bp, Homo sapiens
  chr6:6006711-6008398
  hyper
gcacacatttcctggcgaacatttggaatctatagctttaggaaaaaccgatctgggacgcgctagtccccaggaactgatgcccccaccctcgggggattgccggcttctccgcaccctggggcggccgcggacccgctagtccccctccgcgcctcgggccggggcaggctgcctcccgcctccagcctccagccgggctgagcggccacttacctatttgcaccgcgaggatcagtgaaatatatctgccgttcaacttaagtcccatcctacgtttagtcaaaccatttgcgaccgcagacctttaaatagttagtttagagaacgcgggggaaagccaaaaaataggcattgccaacaagttccgggagcgacagagactttatgcactgggaaggcagagggaggagagaaagagagggagcgaggaagagacagaaagagagagagagagagaaagagagagagagagagaggctgaggggggggggagagctgggaatggttcactccattagaagggggcggaggaagtacagcctcacgcccacgagcaggcctgacgtgggggatgacacggaatgattttttttttaatatagacaccttggtagagaatcgccatttatagtcatcagaagctggaattaatcagatatctccaattaatgtgcgatctgaacgaaattttgcctcccgggggtgagcactttcctattctagcggtcacccctgcctcttcctcgttccgggggccccccagccccgccgcctccctgcgcagaacaggggctccccctcccttccccgccaggagctggggagtcctggcgcgcccactcgattgtttcaacctgctccccctcctccatcagcaccacagagaatccagcccgctctctacgatgcaggggggtttaaaggagcgggagagggaaaaacagctaagctagctcgattaattcgaaagcgctcctcggccgcccgccccctgcgcttgcctaccctctttttctccaacccagcagctgagctctgggcgcagcctggagcgcgtgagcacgcagcccggccccccgcacgagcacacacacacacacacacacacacacacacaaacgcgcgcgcgcacgcccgccagccgcgccgagcgcccccatgcccgcccgcacacaaggcacgcgagcgcgcgcacacgcccaggccccgggggtttggtttgcacacgtggggccccagaaataaacaccgaatgtcctctgaattttacccacctgcgatgccccagcgggccaaaggccgcttcaagggacacagcgacacctgttttagggggcgagtagggcaccggggaaggagcctctgataagacagttttcggatactagtgatttaccaaccaactctcagcgctttaggaaatttccaaggcaagcgctggtgtgcggacttctttctaatcttgatgcgcctcttgggcttatttgttgggctacacacacacgtacccacacgcacacacgtacatcacgtacgcacacgcacacccggacccacacacacctgcactgtcttttgatgctcaggcacagaccctgtgtaggtgtagcctaccctgcaacaaaatacttctgcagctggctttgtgctaggtgcaagctgctatcgacgacagcttgagtca

SEQ ID NO: 112812 - DNA, 811 bp, Homo sapiens; identical to SEQ ID NO: 42550
  chr6:6008842-6009653
  hyper

SEQ ID NO: 112813 - DNA, 31 bp, Homo sapiens; identical to SEQ ID NO: 4569
  chr6:6320597-6320628
  hyper

SEQ ID NO: 112814 - DNA, 933 bp, Homo sapiens
  chr6:6546386-6547319
  hyper
agcccctggcacagtcgggtccttaacagctcccgccccagaagctgccttcggatgaacagccgggtgaatcgccatgaaaaattaatcagcctccgcctgtccgcggcctagatgggcgcaaagcagatgacctggcaggaaccagccgcagtgaagccaccgcaaccgcagccgcagccgcggaggggaggccgtgcacccgcccgccgggagagccgcgcgcctgagccgggcgcacgtgggaagtgggccacgagactggagtccaccgagatggaggccccggcactcgggctcaggcctttgtgcttagcacgtactgttggaatccagcacgccctgctccggcgggcgcctccgatcctgaagcgcgcacctgggaactcacgcaccgcccagccgcgaggggcttggcctggctgaaagccacattattctcgaaaacaaccgtgggaagcacacgctgagctcccggggcccctagagtatgcaaagaggccggccctgcgagactaaataagtctctccccctaggacctagtcccttgccaccggctcccgcggccaccgcgcagccagagtgcaccgtccctagggctttggcggtggccagagccagcaagtgcggcggcctggagctggggtggtgagggcggatggcaggttggagaaatgcagccgagccgcaggtttctagaggcctctacagcccctgccatctgggcactgcacagacagacgctgcgtgagacctggagctcgccacctccatgcggcgctgccagccactccgctgcgggtgcaggagcgttccatgtcggggactgagggaccagcgccggctccccagtttctctgcattgtgaagtcattttcttaaactcgggctttaaataaccaccgatgacttgcctacgggccacgcagatg

SEQ ID NO: 112815 - DNA, 30 bp, Homo sapiens
  chr6:6697293-6697323
  hyper
gcctcaagggggcgccgctccgcctcctaa

SEQ ID NO: 112816 - DNA, 30 bp, Homo sapiens
  chr6:6724827-6724857
  hyper
cagggaaaggggcccgcttacccggaggaa

SEQ ID NO: 112817 - DNA, 30 bp, Homo sapiens
  chr6:7051065-7051095
  hyper
tgccaggcttctccgcgcaggtagtttact

SEQ ID NO: 112818 - DNA, 12 bp, Homo sapiens
  chr6:7051649-7051661
  hyper
tgcctctccagg

SEQ ID NO: 112819 - DNA, 72 bp, Homo sapiens; identical to SEQ ID NO: 42553
  chr6:7051765-7051837
  hyper

SEQ ID NO: 112820 - DNA, 787 bp, Homo sapiens
  chr6:7051873-7052660
  hyper
cgcccccttcctcgcgcggagcccagcggcagtcgagggcctggctggtgtggggctgcggggtgcgtgcgcggcgcggggcccgggcgtatttttcaagcctcggggcgcgtgggtgcgccccccaactcctgtcccccgagaggctgtgccacttccgcagccccagcccagtcccttccccactgggccgcacctccagtctgcccgcaaggcgccgcgcagcccccggcccggcccggtggcgcgggggaggggcgcgccgggcaggcaaagttgctgagttgctctgcacgctcagaagttgcagctgcgacggcagcttccctcccccttcctgcactgggctacccggaacgcacacccacccgtcaccacccgctacctgccctcgcccctgcggccccggccgggactccacagcatccccaccctgcgcccgcgaggagcccaggtttccagcggagttgggctgggggcgggcgcaccccatctccccgctccgcctcgggggaggcgggtgatgcgtggagggggtggttaggatcccctctaccgagtcgccgcttgcctgcggcgcttttgcactttcctaagctgagcagctgtgcaggcgtcgcccgccggcccctgcgccctcctagcaaagcggggtttgcagaacgggaactgggcggtcttcccattccctcccgcaaggaattttgctgtgagggtggagagggggcggcggggggctcggcttggggctgaggttgccaacaggtgctcgcgggtccatgtgacc

SEQ ID NO: 112821 - DNA, 30 bp, Homo sapiens
  chr6:7107678-7107708
  hyper
gggacgattgggatcgcagccagtcgcggc

SEQ ID NO: 112822 - DNA, 30 bp, Homo sapiens
  chr6:7108426-7108456
  hyper
aactcggtgtgtcccggagccggggacccg

SEQ ID NO: 112823 - DNA, 30 bp, Homo sapiens
  chr6:7108880-7108910
  hyper
ctcgggccgggaagcgcggagatgacggcg

SEQ ID NO: 112824 - DNA, 30 bp, Homo sapiens
  chr6:7261502-7261532
  hyper
gacccaaaggcctccggtgatgcgctgaca

SEQ ID NO: 112825 - DNA, 112 bp, Homo sapiens
  chr6:7389806-7389918
  hyper
tgtgggctagctggcgcctcctgccgcagtaaacacaaagtggggtacagaaacgaaaactccgggaagaaacggccagcacgggcctcgccgtgccggctactcaacacgc

SEQ ID NO: 112826 - DNA, 207 bp, Homo sapiens
  chr6:7390148-7390355
  hyper
caaggcctttggatcggccgtgggtacatccgtctgagccgttcctttccatcgcagagcggcggcctccggcggcgctctccagtcatggactaccggcggcttctcatgagccgggtggtccccgggcaattcgacgacgcggactcctctgacaggtaggcggccgtacagtgccctggctctgggtacggctctctccttgac

SEQ ID NO: 112827 - DNA, 2036 bp, Homo sapiens
  chr6:7541427-7543463
  hyper
tgcgtggtaggtagcgtttccagtgatcaacaaaagtaaatatttgaccagtaagtctccaatcgagaggcccctccattccagctatttccgcccggggaccgaggaaatcctcaaaagccgggccacgcattcccagcccgagaggccccagcgcagagcgcagcagcccccgcgagcgcaggtcctccccgcggtggcttcgcccagggcgcttgggtctcggggaccccgcccccgccccgcccggtgttactcaggcctcggtggcgcagggcggagtcgcgggcggcgggcgcaggtggggaggggcggccggagcgcgtcggtgacacccgcgggggggcggggaaggcgcggcggccgcaccccaccctgggaagaaaccggccaggtgtggcctaggcgcccagtgccagcggggaggagactcgctccgccgccgaccaacaccaacacccagctccgacgcagctcctctgcgcccttgccgccctccgagccacagctttcctcccgctcctgcccccggcccgtcgccgtctccgcgctcgcagcggcctcgggagggcccaggtagcgagcagcgacctcgcgagccttccgcactcccgcccggttccccggccgtccgcctatccttggccccctccgctttctccgcgccggcccgcctcgcttatgcctcggcgctgagccgctctcccgattgcccgccgacatgagctgcaacggaggctcccacccgcggatcaacactctgggccgcatgatccgcgccgagtctggcccggacctgcgctacgaggtgaccagcggcggcgggggcaccagcaggatgtactattctcggcgcggcgtgatcaccgaccagaactcggacggctactggtgggtacctgcccggagagcgcgggctgcggggctcgcgggacagggagggaccgtcctcctctggacgactgggagactcgggtcccgaaggtggaaaggtttttttgccccaggtcccgaaagaacttcccggccgcgctgggagcaggaccgggtgtcctgacgcgtgcggggacaggttggcccctgtcctgcgaacagggactcggtcgtacctttctcccctcccgcgagcccgggcgggtggtcagagggggcgtcgggcccgcgcggggctgtcccctgcctgctggacacggctgcagccgcctttgtcccagcccgcgaatgggaggtcaggcgaggtggggctgcgaccacaaaacccaacctctccaaccgtaatcaaagtaaaagaggaaaggagcggggccccggtcctgtctggtggccgagtggtgctcggggctccgcagtctctaccggctcacccccaatccccagtaaccccgagaccacgactgcaacgactcctggactcctcggccacccaaggacgtttgtatcaaggctgcgcgtcccggcggcgcggggtcctgtcccgaggaggcgcttcggcttcccctgtccgggaaacgaaacttccccgccggggcggctgccgggcccgggtctcgaagttcggccgggacgtgcctgttaccttcggtcgtccgcgccgcagcccccgcgggcgagcgcacctggggccctgcctctgagccttttgtttcctcctttttaaaaacaccggatgaaagaccccagtgtgccttggatcgcagagcgccggccgcatgtctgctttgatccagaatgtgtgggcaggggagtgggggggtgggagaggacgacgctgggggcccgccctggcctaggcgccccgggaagaccccccggtgagagggtcagcttctccggatcccagcggaaacagaccgagggcgtcatttgggtgggtggggaagagatcctgtccctgctttgaccgggtctcgggagctggactctagatgcccacgtgagccgtgcgcgttttgcagcccgccccacctccccgccccctgctagttgttcccacgtcgggcttttgggaaagaggccctgagcgccgggacgttatt

SEQ ID NO: 112828 - DNA, 239 bp, Homo sapiens
  chr6:7590297-7590536
  hyper
ccagagcaaatgcacgcaagagctgagaaaagattggaaaacgcctctcaaaataacagtcccgcccttcccgggactcttccctataggctgttcaagtcacgtggcgactgtggccccgcccacagctcccagaggcctgcgcgtgcggtctgcagttcggccgcttcctcttggcgggtgggctgcagctatggagggcgagcctccacctgtggaggagcggcggcggctgcagg

SEQ ID NO: 112829 - DNA, 1723 bp, Homo sapiens; identical to SEQ ID NO: 4574
  chr6:7726045-7727768
  hyper

SEQ ID NO: 112830 - DNA, 1042 bp, Homo sapiens
  chr6:7728086-7729128
  hyper
cggccgggccgcggggctccgggagcgctgtccccagcgggcgtgtatttgcggactccctgagcacgttccgcgctttttttcacttctgcccagctctggccaggttaactcaactgcagcaggagagtccagcccgagtgtggccatcctgggaagagggctcttcagtacgattttcccctctaaactgccgccttttgccccctaacttggagtgcagttttcccaccgagacttttagggaatccgacagcggctgggaactttgaaaacttggcatgagtatgtttagaggtatccacggcactaggggaggttgcagagggaagtcccaaaaggaccgcggaaggcgctcggatcccggccgggcggggctcgcttctgtttggggcgggatgaaagctcaactggggtaatccatcctgtgccccggctcacatgcccttggccattgtccccaaaggctgaacctttgatcaatgcagcccaagctgcacgggcagagaaagggtgcggggtaggggccggggttgggcgctgagctcctctgaaccggttgccaggcaacagaatggaaattcacgggcggctaaatggagctccgccacaaatgttctgtggcaaacccggacccagtcacatcgccctttctcccccctcccaccccactgagttttctcatctgtaaatgagaagggtgcagagaagactcttttcttcggagtcagtgcctccggtttgcactgcttttcattcataagctgacttagtttagcgcagacataggatggagggacgcgctgtcagcggacagatcatgggtgcactggctacgcccgggatggttgcagctgcgcggcggggtggggcttcacgggcctccttcccatgtgagacggtggttgtgcccaggccctgaagtgggtgagcagacactcgccaaaggagcacacgggtctcccagccacgtcaaagacgctcatcttttaacggcattacttactggaatgattcccgcgtagactatctgggtgatttc

SEQ ID NO: 112831 - DNA, 30 bp, Homo sapiens; identical to SEQ ID NO: 42563
  chr6:7910206-7910236
  hyper

SEQ ID NO: 112832 - DNA, 30 bp, Homo sapiens
  chr6:7910826-7910856
  hyper
gtgcgggtcctgtccgtcctcgccgtctgc

SEQ ID NO: 112833 - DNA, 87 bp, Homo sapiens
  chr6:8064728-8064815
  hyper
atctacccagcgggcggttccggaaaggcgcctgccgtgtagtcaggctgtgaactggcagaagctcttgccgccatgctggatcag

SEQ ID NO: 112834 - DNA, 30 bp, Homo sapiens; identical to SEQ ID NO: 42565
  chr6:8102766-8102796
  hyper

SEQ ID NO: 112835 - DNA, 30 bp, Homo sapiens; identical to SEQ ID NO: 4578
  chr6:8825196-8825226
  hyper

SEQ ID NO: 112836 - DNA, 30 bp, Homo sapiens; identical to SEQ ID NO: 42567
  chr6:9413417-9413447
  hyper

SEQ ID NO: 112837 - DNA, 31 bp, Homo sapiens; identical to SEQ ID NO: 4579
  chr6:10125877-10125908
  hyper

SEQ ID NO: 112838 - DNA, 49 bp, Homo sapiens
  chr6:10381543-10381592
  hyper
gtgtgccctagagggcgctgggccccgcgcgctttcctggctgtccccg

SEQ ID NO: 112839 - DNA, 274 bp, Homo sapiens; identical to SEQ ID NO: 4581
  chr6:10381694-10381968
  hyper

SEQ ID NO: 112840 - DNA, 46 bp, Homo sapiens
  chr6:10382321-10382367
  hyper
cgaggggcctaggttagggacacgctcttctcgctgggtcccaagc

SEQ ID NO: 112841 - DNA, 482 bp, Homo sapiens
  chr6:10382716-10383198
  hyper
acatcttattaagggagacttcgaaggcctgttagcaggtgactgcggcaggggcaggggcgcatcagctgtccggcttggaccggcgtgggcgtgggctgggggcttttccgatttgctgagtcagccgcgggcgccgcgggctttggtgtttccagcccaagcgactgtgcttcgctgactggtgtgtcaacttggtagtgtaattattgttttgttttctaatatgtaattactctttgtcgttgctattatgaatccaccgagcttgactcttgagcagcaagatggattcaagtttgaagttaggatttgatgcgtggggaaaactggcttctccccatgcgtaggacactataggggcccacgcgtgtcttccccgcagcccagcaagaaagggggcgccgggggtgccctggcggataacaggcggtcacgcctgatccccgcataacagatccactctccgtgtggctacgagc

SEQ ID NO: 112842 - DNA, 611 bp, Homo sapiens
  chr6:10383569-10384180
  hyper
tgtacaggcctcccccgcccgacggagcgtcccctcgcacctccccagagttgcctaactcctaggccctgaaagtgccagaacaaaggccgactcccccggcgcctccctcggggactgagcaccctgggccctgctgacgaagcaaaccccagactcagctcagctacccacgctcccagccacgtcgcgggtggatattcccgcctgggctgggcaccgcggaatcagcaccgcctgctgcgcaggccccgcccagaggctgcaccacccaggccctgcccgccgccctctgcagcctaggcggggtgtgtggcgtcgcggtcagccttaccgagggacacgccgccccgggccgggacggggtggggctgtgggggatcctgggccgaggaaagcgatccattttctctaaccgtttgctccagagctgtcaggttagcgtggcctcctcggccgcccagagaagaatgtgttaaaattctttgcacgggagcctttcccagcccaaatataccacactgtggcgttcctcgtgccgaccgtgggtctctaacctagccaccttctcccgttgaaatatgcacatcgctattcaataatttagacaa

SEQ ID NO: 112843 - DNA, 30 bp, Homo sapiens; identical to SEQ ID NO: 4585
  chr6:10384431-10384461
  hyper

SEQ ID NO: 112844 - DNA, 30 bp, Homo sapiens; identical to SEQ ID NO: 4586
  chr6:10384944-10384974
  hyper

SEQ ID NO: 112845 - DNA, 902 bp, Homo sapiens
  chr6:10385279-10386181
  hyper
gtgaaaatttgcgattcagggcaaatgattctccgacagacgctgggctccacatcccacccctcccagcccgcgccccctccggtcctcgcgctccccggccgccacgtcccgggcagttcaggaaagcttgctaggtttccacgccggaaagcccaaggagaaggagccagcaggcctctgagcgtgtgagcgcgtgtgcgtgtcagcgcgtacatgggggtgttttcctcttcgggaagtgttatcaaacagtaatagctaccctcgactccgaatcacagcattccccccagaattcctgatcagtaaaacccaaatcgttttcaagacaaaggagcatcaatcagcgacaaagacagatttaacgtattaaatctttattaaagtgaagtcattcttattgaaatgatgtattgggtgtgcagaaagattggatttttttttttttttttttttgacaatgtgtaaaatggagatggtggcggagagcttgcgccgcgtcttgccctgattgttctgggctgggattggattactgggactgcccagggtcccgcgccaggaaacaccaccttggactacagggaagagactgatctccctcctcctgccggcccccacgttgatttcccgagaaacaagcgtgtcccaggtcttctcaaaaacttccctccttggtctccgcattagggaaactgaggtactgctggcatggctgtccatacgtttgctaaatcagctactccagaggcctagagaagggagggaacgccctgggttttccagaacaagacacagatctctccgtagcctaaagaaagtccttgcgccccaggtctgaaagccaaggggagcctgtgtttgctcccagcggggtcgccggccgtctccacaaccct

SEQ ID NO: 112846 - DNA, 1152 bp, Homo sapiens; identical to SEQ ID NO: 42578
  chr6:10390063-10391215
  hyper

SEQ ID NO: 112847 - DNA, 324 bp, Homo sapiens
  chr6:10391324-10391648
  hyper
cgcgagtgccggtggccgctgcccaggccgtccacatttccctccctggctgtccttcgagcccctaccagtccttcctctccctgccgcccaagcccaggcaagactcgaaccgcccgtcccacacaatctctaccatccccccacccccacgcccaacgccagacagtccaaatcaagtagcgaatagctcctaatacaaaggggtgcatggcaggatattttcggggaattcaaatagggcagcgccctgccagcgggtggggtcctgggtggggcaggtgggacccagtgagggggtgcgcaccgcgctgcctcctccca

SEQ ID NO: 112848 - DNA, 161 bp, Homo sapiens
  chr6:10392114-10392275
  hyper
accttcagttgagggcgtgtgtttaggtttgttactggaatttaaaggacgcgatctttattgccatagaaaaatcacgtgcagcaaaagcatagcatgggttgggtcactttttaaagctcccgccctgctgatgaaaatattcccgcccccttaaatgg

SEQ ID NO: 112849 - DNA, 30 bp, Homo sapiens; identical to SEQ ID NO: 4591
  chr6:10393763-10393793
  hyper

SEQ ID NO: 112850 - DNA, 147 bp, Homo sapiens
  chr6:10395821-10395968
  hyper
ttaaaaaacaattgccgcgttgcgttctgagaatacactttccatttgaattcttttttaaacccaccattgttatgaattctctggcttcggaaaatagaattcagactccaccaactcgcgttcgtttgtcgagattgattttac

SEQ ID NO: 112851 - DNA, 30 bp, Homo sapiens; identical to SEQ ID NO: 4592
  chr6:10404348-10404378
  hyper

SEQ ID NO: 112852 - DNA, 199 bp, Homo sapiens; identical to SEQ ID NO: 4593
  chr6:10409933-10410132
  hyper

SEQ ID NO: 112853 - DNA, 3587 bp, Homo sapiens
  chr6:10410242-10413829
  hyper
cgaggatccaggcccgacagctggtgaggcagcccccggtgcgtgtgcaggagcccagactcctggctctgcctctggccgggccagcctgggtgctgcggctgcggctgggcgtgcagggggttcaggctgtaggggtcgttgacgtgggagtaaggatcttgcgactgggggtagataggctggtagggtggggggaagtatgggggctggaagtcggcattgggggtgtgggacagcggcggggcgctcgtgtagggagattgacctacagtgcccagctggggcaaccgtgccgtcccgttgctggtgccgtcgtgacggtcctagaagagagcgagaggaaaggtaaagaacaaggaatcaggcgtcgagctacaactatccacacaaaatccacttgacaagtctgcgtgggaaatcgcccgttcccgttggctggccgccgggaaaaaatcagctctaagttcttttcaggaaataccctcaagtgaaacagaccgaacaacgcagagaaactgtatatggagggggcacaagagactatttaggggtttctttcaaagagaggaaaagatagaaaagggtctcctggaacacagcccattaaactgcagcgtgaaatctctcttaagcaaaattaaaattcctcctaaatactaaacagcagaagcggccttttcttttcccccgatttgaacctgtctgccactgcgttattgtttattctcttccatttatttggagagaaaaaaatcataaacgttcaaagactgttaccgtttcatgactacttaaatagaaacatatttcgcagaggggctgtaacaaaaacacacgtttaaattaccagcttaaagaaggttttaactgcaggatcggggtctgtctttttcgcttcctctgttaggagcctttttctcgacagagtcgatttatggtttggatagggaaagggggacgtcaagtcaaggtttaaaatagaaagattcagccttattgggtttaaaagagagaggtgcaccccggggctgtggccccccccccccgccccttccaccccagccccaaagggcagaagaaacgcctgactttaggtttctctattgcaattcccttgcaaaacaagcgaagagagttgattccagagaccgcgaaccctcggcggttcggccgcaggtcccgagggtagggggcacaccgcgctgcacttttcctgcagacagtttaagcatcaaatgttgagaacatctcggggacaagtgaagactcaaggaaatcaagatgaacgtggggagaaacacgccttgggaagccgcggcgaggtaggtctgcgtgctcggagaggtcgagcgggggctggggtagggggtaatgcactcgatttagggatggaaaagagcgagagaaaggcggaaggtggggtgggggatgcaaatggagagggtgtcctgaaggaaagctgggcgtgaaacccgaggtttcgggcagctccacggcaccaggtttccagaatccaattcctaaagaaacagcaacgggggtggggatgggactcaccatggctgaaaaactgtgaactaacatctgcgaagagtctggggtaacgagtcagggtggaaaaaaacaagcaagcctggagcgcccggctgccccgccgcccgagcgcgccccacacaaaaggcgccgagagccccgcgccacccaggactccagtcacggcgccgacgctccccggagcgcgggagcccggctcggatccatccgaacttgaaccaccgattcgcgcggcgccttcagctggtcgaacccacggtctctatcctgccgcgactggttatgattcaaagttctttaaaaatgaaaaaccccaaaaaaggaaaaaggaaaaagtatgtgtgagtgtgtgggtgcgtgcgtgttccttaatccgtgtctccccctcttttcttagcggcggcttcgcttgagcttctaataaccgcgctgggcagcgttcctggagcctcctaatagcagatattcatgactattaatattacacgaatacttaataagggaagaatgcctggaaatcgagcgtgaagcggagaggcaactcgcgccggagccggctctcaatgcagtccattgacgggagtctcagtgtagcaaatcggagtggggagagggagcgcgagagacaaaaagcgagcgagagagggagcgggcgagcgcgcggggggccgcggcgcggcgtctggcgaatcacagggaaggggcaacattttaaaaggttgcagggcatgcaaaagtgaaagagaaagaggcagagagggagaccgaaggagagagcgcagagagggagaatgtgtctgcgtgcgtgtgtgagaaagaaagtgtgggcgagggagaggagccccgggtggggagaggggagggagggaaggagggagagcccgagaggaggaagggagggaaagagggagggaggaagggagggagggagggggagggggcccagccggagcgcacggagggggaggccgcgggggagggggaaggggagaggaagcgagcgaggacaatcagacctaaaaggctggggcagacctcgggatgcagcgggggtcgtgcgtagcgggtaggagctgcttgggaccgcgtccgggcgctcgtggggctctcggcgcggcaggcgcttcccggccctgtctggccgcgggctccgccgcttcgcagccgagtctgggactcgggactcggctgcccgctgctgcgcggctcctccatgacccggcgccctgcccgggaccggcccgctcgctgcactggtcctctcctcggcctcctcttgagctttcctcggacaggggcaccgtgcgctccccggccaccgtcgctctgccctcggctctctggggccggggattccggatcgggagccgggatgcgggccggggcgcgcacagacgctaggcggcccagcccgggcgccgctggcaccggctcgcggctcccggcaaaaacccgtccgactggctgggccactcccgcctgacgcccccccagatgacacgactagctctcccggcgtgctgcctttgccagtctacccgccaggttgtcagaacaagcggcacctcgcctcctgcgtgtccctacagagccccggcacaatcagactgccccaagccagctccgaaacccgaaatccccgctccggcgcttgcccaccacggccaaagttgtggaaacagctttgactttattctcctctctctctcatctttttttgcctcgcttacacacgcattcacacttgcccccacaggatccctctaggggtgcaagttcatcccccacctagccacccaccccatccagtcggcacctagagccgcacggaggttcggaccccgcccgccgagggcgcccacacctggagctgggtttcggcctctgcgaaagtgaaatgcccaagcctccggccaaagcccagaccagtacagtatgaattgtcctatgagactgaggggttcggcttcattcctacctgcccgcaaagctcgcccccagcctcgaaaacaaagcgactggtctgacgt

SEQ ID NO: 112854 - DNA, 102 bp, Homo sapiens
  chr6:10414478-10414580
  hyper
cacccccgtggggtgcgtcgatcctgtagctcagagggagaagctacttagaacttcgtgaagcacagaggatctggagcgagccccgcagctgggatcagt

SEQ ID NO: 112855 - DNA, 1465 bp, Homo sapiens; identical to SEQ ID NO: 42586
  chr6:10414933-10416398
  hyper

SEQ ID NO: 112856 - DNA, 38 bp, Homo sapiens
  chr6:10416507-10416545
  hyper
cgcgaggcagagcccggctgccgcggaacctggaggcc

SEQ ID NO: 112857 - DNA, 336 bp, Homo sapiens; identical to SEQ ID NO: 4601
  chr6:10417193-10417529
  hyper

SEQ ID NO: 112858 - DNA, 231 bp, Homo sapiens
  chr6:10417835-10418066
  hyper
cgtcgcggggaagagggagtatttgtgtgagagacagagtcacaaagagaaagagacagtgaggggccagaacgactctcttttctccgattgtcaatgcccagtgggagccgggagcccaacaggcccagcccatcagattcggcccctccgggccccaaatccgctcgccccacccgagatccaggcctccagccacttgcctaactgtgagcccgcaagagccaggcc

SEQ ID NO: 112859 - DNA, 713 bp, Homo sapiens
  chr6:10418726-10419439
  hyper
tgatgatgaaatcggcgacaggcagagccttttaccgccaccatcctggccagagccgctctgtttcccgaagggaaagtgtctggaagttggaaggagagagctggacaaatgcttccttggccagggtcggaatccggggctcaggaaggacaggagccaagccttggatgccttgtggtgtccgcggcctagcagggccaagttccacaggcgttggttttggcaaattcaccacccccctgcctcctcacccaccattctcacactccctcatccgtagcccaggcggcaaaaacccatttcaggaagtggagtgagttgctagctaaacttcgggcaaactttgtatctcctacagaaacacgctgcctccgcgacccagccatctggacccctttccattcttcacacatcctagatctcccgaaatctgggggtaccaagagagacaggtgcaccagaacctgtccaacactcaaccctggggtctagggcgaggccgcaggcgcagcaggctgaaaaccttcaccgccgcgcaccacaaccccaggccttctccctccccccttccgaattagtcatcctcccaagtttctacttgaggtgggaggggggtgggggaaacggccacagcacaaaccacaagtgacccaccaggccacctgtggagcgtgcgccggacttccccggcgccgggccccgcgggctgc

SEQ ID NO: 112860 - DNA, 525 bp, Homo sapiens; identical to SEQ ID NO: 4604
  chr6:10419476-10420001
  hyper

SEQ ID NO: 112861 - DNA, 265 bp, Homo sapiens; identical to SEQ ID NO: 4605
  chr6:10420118-10420383
  hyper

SEQ ID NO: 112862 - DNA, 73 bp, Homo sapiens; identical to SEQ ID NO: 4606
  chr6:10420681-10420754
  hyper

SEQ ID NO: 112863 - DNA, 229 bp, Homo sapiens
  chr6:10420876-10421105
  hyper
cgcctgggccaggcccagttaccctcccgggctgctgtcgccgggacttggagacgaacaaagaaccagttttaaatcgtcttctctgacatgtcaggcaaatatgtgtaaaaggtcagctccacgctgtggagcagagacctgtcccccaggcaccaaaacctcccctttctaaccgtgcccgagagcctccgacccctgggccctgtccaggcggctttgcacctct

SEQ ID NO: 112864 - DNA, 101 bp, Homo sapiens; identical to SEQ ID NO: 4608
  chr6:10421350-10421451
  hyper

SEQ ID NO: 112865 - DNA, 1159 bp, Homo sapiens
  chr6:10421548-10422707
  hyper
cgggcccagccggacgggccgggccgagcctaggaggggctggcagacgtgtcccagggccagggtggggcgtagggagcgccgtctccaccctcagtacttttggggtgggggacctgagcgtgcggagagcgggaggcagagctgagagcggggttaagcgcgaagctaaggcgccgcatagggttgggtgggaatggacagggtgagctggaagcgaagcaccccagccaggccttaggagagaggaccgtcggcatctgtgcacatcctagcgggcggatgatgtgggagagaggcggagggaggtgaaatgcgggagctagaatttagctttgcagtgaggtcacttggggtctgcattcagctccgatatatacatgtaggggctgtgtgatcctggggaagttaccgaccttgtctgaactcctgtttcctggtttgtaaagtggctaattggtgggaattcaataggagaatgtgcgcaaaacgcttagcacagcgcctggccaacaatgcgctctcaagaaaggctgctgagccttgtccaggacggtctacaccgccccacgtccaagatgagttcacagcgcccaagacctgttcaatttaagatgatgtaaactgcattgcccttcttagacacgcagcagccaggagctggtcatctgcacctcccgcgatttcctcctcagaaccccagtcctgccagatttgcgtccttccctggctcctcaaacacctgctgcaccgctcagagcctttccccaccccgacctcctccgcagctccgcaccagcgagactgcgccccgtggcacctcgggggtgccacgattggcgggggatgggggatgcctcccagcttcatccgctctccgggttccagacaaccattccggagagccagctgctctcagtgcgggcaggcccaaggccactaactgcacttggcgacccacctccgttcccaagaggcctcggaaagtgcggcctcgggtctcttttgaaacagagacccgcggcaccccgcttctccccctgggataggagagggagagccgcgggagttccgcagccactcctggcgctgccaccacgaagcaggttcactagctaacagggcctgggacactgagccgtgtcgcaaacttttctgt

SEQ ID NO: 112866 - DNA, 969 bp, Homo sapiens; identical to SEQ ID NO: 42598
  chr6:10423450-10424419
  hyper

SEQ ID NO: 112867 - DNA, 160 bp, Homo sapiens; identical to SEQ ID NO: 42599
  chr6:10425629-10425789
  hyper

SEQ ID NO: 112868 - DNA, 1126 bp, Homo sapiens; identical to SEQ ID NO: 42600
  chr6:10425838-10426964
  hyper

SEQ ID NO: 112869 - DNA, 181 bp, Homo sapiens
  chr6:10529012-10529193
  hyper
cagggaacagccagacgagagcttcagccatcacgaggatgatttcggaacctggagaaaatgtaagttaaatatatctacactctgatcctatctcaagagagagatattttactcatttcctggttgtgaatgatgggctcttggaagcactgtctttttagcgcgtctcttatctctg

SEQ ID NO: 112870 - DNA, 363 bp, Homo sapiens
  chr6:10694858-10695221
  hyper
tcctcctgatgtcacggaaatgaagggcttcgcagaggatgtcccgcccgctcccttcagacgggcgtagctggcaccttcctgagatatgcctgcttgcccccgatttttttctccttgcagtgagaacctcctcatgtggcatctttacttattctcttcttggaaaatccatgtgacctccccgcgcttaaagtgtttccacgttacaggcgacttaaaggcagccctggagcctgacgtataattcgagcgccgatgcagaaaggagtcaggtgtttttttttttttttttttggtttccggttctgtcacctccaggctgagccgggctggcggaagaggcacgtgcgctgctgaatg

SEQ ID NO: 112871 - DNA, 111 bp, Homo sapiens
  chr6:10723050-10723161
  hyper
ccgagctcacgtggtccggcttgtgcaagtcccaggtccaactccgggtctcctgcttttggccactcaggattggacctgggactgatactggtcggccctgcaggcgct

SEQ ID NO: 112872 - DNA, 30 bp, Homo sapiens; identical to SEQ ID NO: 42604
  chr6:10747678-10747708
  hyper

SEQ ID NO: 112873 - DNA, 167 bp, Homo sapiens
  chr6:10882204-10882371
  hyper
ggttatggacccgggcggggccttgtccttggccgcggtgctgaacgttctccacccgaacggcagcatcgacctctggcagctgccccctcctttataaagatatacctccggggggctccgccctgtctcgcctacctcgctagcgcccacgctccaggggccgg

SEQ ID NO: 112874 - DNA, 30 bp, Homo sapiens
  chr6:10883117-10883147
  hyper
gcccaggcgccttcacgctcccggggactt

SEQ ID NO: 112875 - DNA, 30 bp, Homo sapiens
  chr6:10883802-10883832
  hyper
aggactagagaatcgcggtggtgcggaggt

SEQ ID NO: 112876 - DNA, 650 bp, Homo sapiens; identical to SEQ ID NO: 42606
  chr6:10886952-10887602
  hyper

SEQ ID NO: 112877 - DNA, 1240 bp, Homo sapiens
  chr6:11043615-11044855
  hyper
gcagttcatcggacacgggtgaacacacacacacacacacacacacacacagcttactgtcaggcagttcatcggacacgggtgaacacacacacacacacacacagcttactgccgaggagaaagaagcgttactaatccagagtggaggactggcctgggaaatcgggcagagagaggagttgtcggaaagaacacaccagaagcccctccgagcccagacactgatagaaacccagccgcttcccaagccaatctgcaaacccaggaggcacccacgagtgcacagacacacccccggggtgcaggcgcggtgaagggaggagaggggcaagagcttgaccgttagggcccgaaccccagaactcccgaggcagggtgtgtgccgcgcgcgggaaacgccgttctccgctccaggcgtcggcgggcggtggcgagagcaggttcgggggtccggagggtcggagggtgggctgcgcgcgggaatggccgccgcgaaggaggggcggcttcctcgggcatcccgggcgcccggccccgtgcatgcaacaggggactgggcgcgagcgggcgcctcgaggtgccggggcgggaccggggagaggggaccgagacaaagttcccgagacccgcgggcctcgggccgacccgcgcgcccccggcccaaacgctcagctcccgctccccaggcccgcgcggacccggcccctccgagggtagcgggttccagcggcgaacccgcagcgcccgcgccggcgcccgctcggccctttcccgcccggtgcgtgggtccaggagagaaagaaagcgcggcggtgtcggtggcggcgcgcggccccactcaccatgatccgcagcggctgtggcgcggcgacccgggcgggcggcgatgcgctgtccagggtagccgggtccctctgcccggcgctatctcggcgcccgcgccggttacccccacccacacccacgcccggcgcgcgcacacccgcccgcgcctccccgccccctcgggctcgcgccgccgccgcgcggcgctccgagcctcggggccgtttcgtccccgccccctctcccacaggggcctcgccggccgccgcgccaggagggcgcgcgggggaggggcgcagggcaagtgaggcggcgccccccgcccctgcggcctcgcgcgccccctcctgggcgaccgacctcgccctcgcgtccgcggcgtcccctgccggccgggcggcgatttgcaggt

SEQ ID NO: 112878 - DNA, 30 bp, Homo sapiens
  chr6:11093809-11093839
  hyper
ggcagccagatccgcggctttggagaaggc

SEQ ID NO: 112879 - DNA, 30 bp, Homo sapiens; identical to SEQ ID NO: 42608
  chr6:11094051-11094081
  hyper

SEQ ID NO: 112880 - DNA, 30 bp, Homo sapiens; identical to SEQ ID NO: 42609
  chr6:11094606-11094636
  hyper

SEQ ID NO: 112881 - DNA, 30 bp, Homo sapiens
  chr6:11094868-11094898
  hyper
cagccttgcttcaccggcagcgtctgctct

SEQ ID NO: 112882 - DNA, 30 bp, Homo sapiens; identical to SEQ ID NO: 42610
  chr6:11217446-11217476
  hyper

SEQ ID NO: 112883 - DNA, 222 bp, Homo sapiens
  chr6:11232918-11233140
  hyper
tgaggcaggctgatcgcggacctcatttgcatgccgccccgccattggctagtgggacaaggtaatgctcaggccctgcccacccctaattctgaaaaactgacaaagaacttgtaatgtgatcgcttctttttgctttatcagacggtggaaaataaaacagaaagtggggaaccgtcctgaaccttactctgtcctcccgcccccgccaaaaaagaagac

SEQ ID NO: 112884 - DNA, 31 bp, Homo sapiens; identical to SEQ ID NO: 4619
  chr6:11382658-11382689
  hyper

SEQ ID NO: 112885 - DNA, 30 bp, Homo sapiens; identical to SEQ ID NO: 4620
  chr6:11392177-11392207
  hyper

SEQ ID NO: 112886 - DNA, 117 bp, Homo sapiens; identical to SEQ ID NO: 4621
  chr6:11537479-11537596
  hyper

SEQ ID NO: 112887 - DNA, 352 bp, Homo sapiens
  chr6:11537919-11538271
  hyper
agaggcgcgcgcgtgcgcgtgcacgagtggcccgccggcggctgcgggtggagggggcggttcctcgagtgtcggcgacccgagggcgggcaggcgggcggcaggtgccgccgcagcctctggctggtcccgcgtctccgtcctccggcggcgatgagctgggccctgtcgggggctgcacctgccggctgcccatcagcaccggcctcctggcgtgacctcggcctcctcgcgtgtccagtccccgcggcgcggcgctgcccctgagagggagcggcggcggcctcctccgccccgagtcctcgctcgggggccgcgcgaggacggcgcccggccccctcccctccttcct

SEQ ID NO: 112888 - DNA, 608 bp, Homo sapiens
  chr6:11538299-11538907
  hyper
cggggagggggctgcctgggagacacgctgagcggcccccccacggaggccctccggctgcagcagcagcagcgcccggcccggcgtcccgcagcctccaccagcggcggcggcctggaggagccgcgcacccgccgccgccccccgagcctcgcagccgccgccgccgcccggcacccgaggagagggcggcgggcgcccctcggggaagatgaaggcggaggggggcgaccactccatgatcaacctgtcggtgcagcaggtcctgagcctctgggcccacgggacggtgctgaggaacctcacgggtaattgacgcgcctgggctggggacggggatgcggtccgcccctctcctgtcttctccttcctcgggaggggacacgctcctcgccgccccacccccgtgcgcgccccgctcggagctccaggtcccggcgaggaaggtgttaatcggagccactctgcgcgtgtcccgggggcgccggctcccgccacccccttccctgagtcgccaggggagcatcagcgacccccgctcctgccccgcacggggagagctcccggtggcggcccggcctctgtagtacgcgcggagtagctttagt

SEQ ID NO: 112889 - DNA, 30 bp, Homo sapiens; identical to SEQ ID NO: 42617
  chr6:11968636-11968666
  hyper

SEQ ID NO: 112890 - DNA, 30 bp, Homo sapiens
  chr6:12011297-12011327
  hyper
accttggctttcctcgctcttttaatagaa

SEQ ID NO: 112891 - DNA, 30 bp, Homo sapiens
  chr6:12013452-12013482
  hyper
cctggcatgcgaagcgctttgttcagtgca

SEQ ID NO: 112892 - DNA, 30 bp, Homo sapiens; identical to SEQ ID NO: 42618
  chr6:12163297-12163327
  hyper

SEQ ID NO: 112893 - DNA, 30 bp, Homo sapiens
  chr6:12290450-12290480
  hyper
cctggccttatctccggctgcacgttgcct

SEQ ID NO: 112894 - DNA, 3 bp, Homo sapiens
  chr6:12749937-12749940
  hyper
gac

SEQ ID NO: 112895 - DNA, 94 bp, Homo sapiens
  chr6:12750364-12750458
  hyper
gggcgaggttggctggcgcggctactacggggtggaacttgttggtgacattcagactctgttggctttgacgggttgacgccgccgctgcggt

SEQ ID NO: 112896 - DNA, 30 bp, Homo sapiens; identical to SEQ ID NO: 42619
  chr6:12957903-12957933
  hyper

SEQ ID NO: 112897 - DNA, 977 bp, Homo sapiens
  chr6:13013494-13014471
  hyper
caatctccttcgggtcggagaatttctatgggaggtgaaaacatcaattatgttgtaacaggttgtctgctccagtgaaagtcaagggctacgggttggacccgccggagagggtaatttgctgtggccctggaggggagcttgcacccgaggtttcccagtgcagcgctttccgtgtgaaacattttgctttcattcggcagctttaggcgtgaagaaaagggggagggggttggcgttccgccctggagctcttgagagtgaaggtagcttcaaacccagcaggctctcagtagctggtgctgagatttccggaggggtggggctgccagaggaggatgtgcacgtgagaccccgagagaggtgggagtggagcttctcaggtaggacccaggagcgccctgcctaccccctcctccggcttcgggatccggattggctggggcagcgaggtcggcgaggtcaagaccctttcggcgccctccccgacccgccccgccgcggcggtgcttatatagagcggccggcgcgggcggggcgggggcatgctggcgaggccgaggggcgcgagtggcagcgcgcgggggccggagcagcgcccggccccgggcgcccgggggccggatggcggagcccacgcgctcagcgaagccggggaggtttgcgctccgttcgccgcgctgcagggagggcgcggtgccaggcgcgagcgccgagaaacccaaaaagaaagctttttatttgctgaggatgaagcccctgaaggagcccgcccccaacaacaacaacaacgtgtcctttgtgatccactgtcaactaggcaaggagatcaaacacatttgcagcaactgcagtcggggggaggacgcccgggacggtgagtgccggggcccgtcggggcggcggcggcgagcgcgggaggcggggaggtggctcgggctgtctcagtttgggggcaccgccggcgtctgtcgcct

SEQ ID NO: 112898 - DNA, 150 bp, Homo sapiens
  chr6:13328434-13328584
  hyper
atctcctgcccatgcgcgtccacctgatgggaaaagtaaaaacaccctggtccaagaccccaggtcccattctctctatgatggatgcttcacctctagtagtgcaaacacacccgggttgagactaagtggtccgggagaagcagagga

SEQ ID NO: 112899 - DNA, 30 bp, Homo sapiens; identical to SEQ ID NO: 42621
  chr6:13328954-13328984
  hyper

SEQ ID NO: 112900 - DNA, 16 bp, Homo sapiens
  chr6:13486607-13486623
  hyper
cgccttctccagcctg

SEQ ID NO: 112901 - DNA, 30 bp, Homo sapiens; identical to SEQ ID NO: 42622
  chr6:13486918-13486948
  hyper

SEQ ID NO: 112902 - DNA, 437 bp, Homo sapiens
  chr6:13488241-13488678
  hyper
cgataataataacctcggctcccggagcgtttcttgcgtgctgagcatcatactaacgcctttccaggtattgtcccttttagtcctcgcagcaacctaaggttattgtaaacccattttaccagtgatgtgaatgagccgcaatgaaggctaagggacttgcgcaaggtgacatatataagcaacaggcctgcgattggaatccaggccccagagtctgggcacggaaccgcagacttctacggtctccttccaagctagcctgctccaatcgcgcgcccccgctccggccgcgcacgcacggttcagccgccttcttccaagacagtccagtcttggcgggctcccatctgcctcccacctcccccgcccctaggcccatgcccgcccccgcgtagacgctgtggtgtgtacggccgcagcggggcagggggtct

SEQ ID NO: 112903 - DNA, 147 bp, Homo sapiens; identical to SEQ ID NO: 4623
  chr6:13574017-13574164
  hyper

SEQ ID NO: 112904 - DNA, 30 bp, Homo sapiens
  chr6:13574882-13574912
  hyper
cggtcgggacacagcgcctctaggagaaag

SEQ ID NO: 112905 - DNA, 91 bp, Homo sapiens
  chr6:13614826-13614917
  hyper
tctctagggaccggcgaagccattctttcaggagatatgctcagcatttgccacgggccagctgctgttccaggtcgtgggttagggcccg

SEQ ID NO: 112906 - DNA, 67 bp, Homo sapiens
  chr6:13615518-13615585
  hyper
tgaaagtaggcttgcgctccgcttgtagctgcttccgggtcagaggtcagacggtctagcgctgcgt

SEQ ID NO: 112907 - DNA, 30 bp, Homo sapiens; identical to SEQ ID NO: 42627
  chr6:13722507-13722537
  hyper

SEQ ID NO: 112908 - DNA, 30 bp, Homo sapiens
  chr6:13767817-13767847
  hyper
ctcgtgtctctgttccgctacaccgctgcc

SEQ ID NO: 112909 - DNA, 610 bp, Homo sapiens
  chr6:13924914-13925524
  hyper
cttggccctgggctcgctccgctttagccttcccctctcgctggggagaaacaggcggtttgtgagggagactgagagaggggcgtgtttgtggtggtggcggcccatcgggggtccttgtcctctccgaatacccggactgctgaggggaagggccgggggggccccggcggttgccatggtgacgcagggtcggcggctcagcgccgtagagacaaagccgcccgcccgccagcccgctagctcctcgcgcgagctcctcctccacgggaacctccctcccctcccaggcgccgccgcagccggagcggctcccgggccctgggccgccgccggccaggtaaggcgatcgcgcccgcggccggggaggggtcggcgggacgccgggcctccccaacgctggggcagcagccagccccgcagtcctggacggcgccgggccgcccaagcgcgccgaggagagggggcggcaaacttcgggccgagcggcgccggggcccgcgcgcggagtctccctccgggcaccacgggggccgccgtcctggcaccaacttgaggggctgtgcggcggagggcggctgcggagcgcccgcgcgggctgcacctgctc

SEQ ID NO: 112910 - DNA, 293 bp, Homo sapiens; identical to SEQ ID NO: 42630
  chr6:14117385-14117678
  hyper

SEQ ID NO: 112911 - DNA, 30 bp, Homo sapiens
  chr6:14118212-14118242
  hyper
aaggtggcttgctccgaagatgtggacttg

SEQ ID NO: 112912 - DNA, 129 bp, Homo sapiens; identical to SEQ ID NO: 4628
  chr6:14211102-14211231
  hyper

SEQ ID NO: 112913 - DNA, 30 bp, Homo sapiens; identical to SEQ ID NO: 42632
  chr6:15245757-15245787
  hyper

SEQ ID NO: 112914 - DNA, 30 bp, Homo sapiens
  chr6:15246381-15246411
  hyper
ccaagatgtaactacggatcagacactaag

SEQ ID NO: 112915 - DNA, 30 bp, Homo sapiens; identical to SEQ ID NO: 42633
  chr6:15662749-15662779
  hyper

SEQ ID NO: 112916 - DNA, 344 bp, Homo sapiens
  chr6:15663119-15663463
  hyper
ctctcctcaggcctcgggctgctgctgcctctgtcgccccctgggtcccacgccgccaaccccgcgctgtcaccgcgcgccccgcactcccactaccggccccgcccccggtctggtcctcgccgccgcgccgcaaccccagccccttccgcgttcccgccccgcgcgcgccaggctcgcgcagccgcagtggactgcgccgggctcgggctgcggaaaaggggcgggtcttcccccgaccgagagggccagtagctcctcggctcattcctatcccgcaccaggccttctcgtttttttttttttttctttaaaatggaagcggcatcgtgaaaggatgattt

SEQ ID NO: 112917 - DNA, 30 bp, Homo sapiens
  chr6:15691702-15691732
  hyper
tgcgtgcctccagacggcgctgcagctcgt

SEQ ID NO: 112918 - DNA, 30 bp, Homo sapiens; identical to SEQ ID NO: 4629
  chr6:15810289-15810319
  hyper

SEQ ID NO: 112919 - DNA, 30 bp, Homo sapiens
  chr6:16129555-16129585
  hyper
gctgtgttatgtgacgaggccggacgcggt

SEQ ID NO: 112920 - DNA, 228 bp, Homo sapiens; identical to SEQ ID NO: 42636
  chr6:16129889-16130117
  hyper

SEQ ID NO: 112921 - DNA, 154 bp, Homo sapiens
  chr6:16238455-16238609
  hyper
agcctgagcgacagtgagactgtctcaaaaaaaaaaaaaaaaaagtaaaagctctcagggagcgacttttcccttggataaggcagccacacgctaagtcccctctccatcggggaccctggggacaaacagaacggtgcgcatttccctcccc

SEQ ID NO: 112922 - DNA, 378 bp, Homo sapiens
  chr6:16238860-16239238
  hyper
cgccgccccgcgcaggcgcccccgccccgccgtcgccgccgccgcagccaggagccgctgcaccatgccccgcatagatgcggacctcaagctcgacttcaaggatgtcctgctccgacctaagcggagcagcctcaagagccgagccgaggtgggggacgttcggaagtcgcagtggggtgggatttttttttccgggtggcgcggggcaagtgggtggaagggggtggcaccgggttaccctgcctgctttggtgtttgagactggggcgctgcgcccccgttcccgcgccccagcacctgccaggacgtgaggtgtctttaagggcggtgatacgggggcccatgaaattctctacacgtcggtcccgttgggtg

SEQ ID NO: 112923 - DNA, 30 bp, Homo sapiens
  chr6:16332465-16332495
  hyper
taaggggaaacccacgggtagagattgggt

SEQ ID NO: 112924 - DNA, 30 bp, Homo sapiens
  chr6:16760164-16760194
  hyper
ggaagggccccctccgcgtcgcgacggccc

SEQ ID NO: 112925 - DNA, 253 bp, Homo sapiens
  chr6:16761653-16761906
  hyper
aaacaggtcctgtacggctccgccactgtagtagaaatgatgtctgcggtatactctgctctctcctcctcctcctcctcctcctcctccccctcctcccgctcccctcccctccctcctccctccgcccgcccgccctccctccctccctcgcgctctctcgcgctcgctcgctcgctcgctccagtatgtaaatgtgtaatagaagccaaatatggagcagttggctgccgccgccgcagctcaaggatcc

SEQ ID NO: 112926 - DNA, 30 bp, Homo sapiens; identical to SEQ ID NO: 42640
  chr6:16762563-16762593
  hyper

SEQ ID NO: 112927 - DNA, 30 bp, Homo sapiens; identical to SEQ ID NO: 42641
  chr6:16762969-16762999
  hyper

SEQ ID NO: 112928 - DNA, 153 bp, Homo sapiens; identical to SEQ ID NO: 4632
  chr6:16763512-16763665
  hyper

SEQ ID NO: 112929 - DNA, 722 bp, Homo sapiens
  chr6:17101828-17102550
  hyper
gtgttggtttctgttcgtgcgaccgtctttctgaggtcgcttttgtgccactgccttctggtgctgtcggggccgcctccacaccgtcctccggccctcaacagccgtctctgcgactggacacctgcctcgcatgccacacgatcaccttcactacagacagtgtctaaaaacaaggatgtggtccaggcaccaggggtaggggcgtgtcacacacaccgtgtcttacaaagaggaaaaataagaggttcccgcaagatgcttgcgactctggtacttttcaaagtaacgcagccaggcagcgggctttcccccggcccctcgctctggatagggctgccatttgcatcctagctgtgatttagacacctccaaccttctagttttcagttacaagagtcccatctccgcccaggtcccaggtctgcatgacgtaatttattgtggcaaccattcctggcgactgcccagaaactcagtgcgtcctgcccggggtttaagcgcgggaagtgggagaggcgggtggcgcccgagcgcagtagcaggggcgtagggcgcagggcgcaggagcgcgggaccaccggcgccggagcgcggcagggagcgctcgcgggggcgcacagcagccaagcccgcggaggaggagcgcgcgcgcgcagcatgggctgtggaccttcccaacctgctgaagaccggagacgtgtacgcgcgcccaagaaggg

SEQ ID NO: 112930 - DNA, 1294 bp, Homo sapiens
  chr6:17281118-17282412
  hyper
cggcgcccggcgccccaggtgctgccgcggccaatcgcaggcgtccggcccgcccccctccccagccgggcgtcgacccccggcccgcgggggaagggagcagagaggtggagagctgtcctcggcactcgtcttccagatcccacggcgggagggacagaccagagccgaagctgcgcggagttcctcgcccctggccccgccgccgcgccccccgcccgcttcggcgctcggacgctcttcccgcggaccctccccacaccccacccaaggcacctgattcctaaggaagaaaaatctacctctaaagcacccgcttcttcgcttgagaactaccctctcttttcatttttggcctccccgccgggtgagtggaaaccgcttgcacattctatagaacccgattctaatccagacgatccggagaatttgtacggtgaccggcagggggggcgggaggagagagcgaagtcaagtctccagggccgctggcgacttcggaagccgcgcgcccggcgctctcggccgcccccggccgctcgcccccgccgcgccgccgccctcgcccccgggctcgcccttggcccccggcggccgcgaaagggtgcgggagacgcggagccggaggaggaggcgcagccgctgcccgagccgcagccgcagccggagcccgagccgcggggcgggtgcgaagatgcacacgacccagaaggacacgacgtacaccaagatcttcgtcggggggctgccctaccacaccaccgacgccagcctgcgcaagtacttcgaggtcttcggcgagatcgaggaggcggtggtcatcaccgaccggcagacgggcaagtcccggggctatggatttgtaagttgcacggactgggggtgacggggagggacggagtggcggctgaccccggggatcgggagcttggagtgaggggctcggcgtgacccgtgaggagccccgcgggtagagcggcgctgccccttcgctccggggtgaactgaaactttgctaggggagagggtcggcgccagcctcgcggggttcggagaagacccagcgctgtgcgaggtcgggggccgggcagggcagagcaggggtgaaaggagagacctgtaatgacggcgggatttggggtgcggagggttgcgagggaggggccgcaaccctgaacaattgcattcccgggctggatgccggttgttaagcgcgctgttgctttgtaaaaatgcgtgtgttctggtgttttggctggggcagggaggggacaccccacgaggtctggggctg

SEQ ID NO: 112931 - DNA, 48 bp, Homo sapiens
  chr6:17393744-17393792
  hyper
tttccactccccacccgcgtggctttgctctccctctcccccctcagc

SEQ ID NO: 112932 - DNA, 759 bp, Homo sapiens
  chr6:17393824-17394583
  hyper
cgactctcccctggagcagcgtgactgacaccggctcctattcagctgggaggagggagaggggaggagaaggggagggccgcgggaggagggtacgagtggccgaccacggatttgcattgccgaggacgggaccccagggcagcgaagcaggtaatcctgcagcggtcggggcccggcgaggcggggaggggtcggggtgcaggtgcggggggcgcctggcggcgggcgctggcaagttgagcccgatgggtggggtagggaagcggccgggacgctgcggctgtggcagcagcgcgaggggaataaaggcggcgcgggcgcgggggccggggcgcggcgacccgggcgcggggcgcgggcgcgggcggactcccatctgggtcagcggagcggcgcgccctgcccccgcctccccagctccggcgtcctggccgctcggaaggcggggtgcgggcaggagctgcccggggttggcgggcggccgcggcctccccaccccagcgccgccgcccgcccggccgctctaactttggggggtctcgtccaccgggctgtgagtcttccaggggggtgggggtgggagtcattgcgccggctctgaccagagccacctcgatcagaaagtgctggaaagaaacagacctggcttcccctctgcagaacctgacttgaggcgatgagtcacttctaaaaaatgcagaggcaactgagactgggggaacggctcggaaaaacggcacccgccgctggctctct

SEQ ID NO: 112933 - DNA, 30 bp, Homo sapiens; identical to SEQ ID NO: 42646
  chr6:17600631-17600661
  hyper

SEQ ID NO: 112934 - DNA, 101 bp, Homo sapiens
  chr6:17706853-17706954
  hyper
tccggccgcctctgcggacccccgcctctgtgtgtgtcacggtctctatggagatctcccgcagaggacagcacgaacagttccccgcggtgctgaggcct

SEQ ID NO: 112935 - DNA, 202 bp, Homo sapiens; identical to SEQ ID NO: 42648
  chr6:17987164-17987366
  hyper

SEQ ID NO: 112936 - DNA, 31 bp, Homo sapiens; identical to SEQ ID NO: 4637
  chr6:17987686-17987717
  hyper

SEQ ID NO: 112937 - DNA, 191 bp, Homo sapiens
  chr6:17988448-17988639
  hyper
tgtgaatccaccaccgaaacagtgtatgtttgtaaatagtgctctcccttcctttcccggcctctcttgtctcgggagggatgtcaagtgggctgggagggccattaactcttacataagaatttaatagcaatggattctgtcatcctgccaaatgcagacctcgctgccagggcggaactgggcgaatc

SEQ ID NO: 112938 - DNA, 58 bp, Homo sapiens; identical to SEQ ID NO: 42650
  chr6:18122950-18123008
  hyper

SEQ ID NO: 112939 - DNA, 30 bp, Homo sapiens
  chr6:18155086-18155116
  hyper
ttactgtccgacctcgttattcccagtttc

SEQ ID NO: 112940 - DNA, 30 bp, Homo sapiens; identical to SEQ ID NO: 4638
  chr6:18155901-18155931
  hyper

SEQ ID NO: 112941 - DNA, 1475 bp, Homo sapiens; identical to SEQ ID NO: 4639
  chr6:18263765-18265240
  hyper

SEQ ID NO: 112942 - DNA, 583 bp, Homo sapiens; identical to SEQ ID NO: 4640
  chr6:18277377-18277960
  hyper

SEQ ID NO: 112943 - DNA, 103 bp, Homo sapiens; identical to SEQ ID NO: 42654
  chr6:18277979-18278082
  hyper

SEQ ID NO: 112944 - DNA, 188 bp, Homo sapiens
  chr6:18387298-18387486
  hyper
agagaggtagcaggcgcttaaggccaagaggtgagctgtccctgtctgggcagaagaagtgcgctaggggcagctgcctgcaccccctgctctgaattcctgcaacagcggtcccaggagaacaagagacaggtcctgacaagcagtagagtcggtgcagcgcgcccgggttcggatagggttaaggc

SEQ ID NO: 112945 - DNA, 421 bp, Homo sapiens
  chr6:19691575-19691996
  hyper
tcactcttccagcagcggtcatttaagaaaaaaaaaaattgataataatgtggaactccctccaaaattagcctacaccgtgatataaattggttttctttgtgatctaaaattgactcgcagttgactagttagaaaatagttgctgaaaagccggggccttggagctttcggatcctgcccgcctttcatcatgtaaacaaacgcatcagatttaaagctttcccataattgttatgctaaccttggagcgcaacctctccatttgcatttgaaggagctaaatattaggcaggaaagaaagtgctctttttgaaagcctgagaaaatgtccccgctcggggctgctccgccatctgggccgcgggctgggcgcgcggctcccgcccccagctccttggcagaggcgccggaggaaggg

SEQ ID NO: 112946 - DNA, 290 bp, Homo sapiens
  chr6:19692142-19692432
  hyper
cgtcccgagggctctcccttttcccagagcgcataccaaaggcagactcctttgcaggctccacgagccccattcgcggtggaaaggggcgttccagactgcagggtgaggggctccggtgtgtgtgtggtgtgtgtggtgtgtgtgtgtacgcgcgcgcacgcccttaaggaaaaatccatcttttataagtgctgtggcccacttttaactggatctcgtggagtactcagatacagccggtatagtgaaggctaatagcatcagcacactttcgcgcattaatcttg

SEQ ID NO: 112947 - DNA, 622 bp, Homo sapiens
  chr6:19804680-19805302
  hyper
agggccgaacccaaccgccagaatgtctgccgagcctagcatgggatgctgcccagcaaaacagcacccagggagagggcgactgaggaagacagcctgcaagcgcgcttcagaaaggactgggaccagagccctagaaaactacagcgagtggattccctggcaggggaaacccgcgagagcctgggaaaaaaaaaaaaacgagagggagagaaaaaaactcacccgggcgccctgaagcccagcgcaagcaagcgagtgagcgcgcaggctggctgggctgctccagctggaagtcattgtgcgggctggcgtctgcgttgtcagggcgaccgcccggccggcgccagcggagcgggggaggcgggctccgtgaatgggtgacgtcacgcagccggcgccaggcagtctgggcggccgagccaatgaatcagctgtccgggggaggcagcgcagcgcggcgcgcgggagctgggtgcaggaatgcgcctggagccgcgcggcccgggagggcgcgagacgtctccgcccgcctggtcgccccgcggcggccagaggtcccagcgtcccaggctcggccattccggtgccccccacgcccagtctgcggctgtgcccgcgt

SEQ ID NO: 112948 - DNA, 306 bp, Homo sapiens; identical to SEQ ID NO: 4646
  chr6:19836898-19837204
  hyper

SEQ ID NO: 112949 - DNA, 151 bp, Homo sapiens; identical to SEQ ID NO: 42662
  chr6:19837269-19837420
  hyper

SEQ ID NO: 112950 - DNA, 199 bp, Homo sapiens; identical to SEQ ID NO: 42663
  chr6:19837743-19837942
  hyper

SEQ ID NO: 112951 - DNA, 1585 bp, Homo sapiens
  chr6:19837983-19839568
  hyper
cgatgaaggcggtgagcccggtgcgcccctcgggccgcaaggcgccgtcgggctgcggcggcggggagctggcgctgcgctgcctggccgagcacggccacagcctgggtggctccgcagccgcggcggcggcggcggcggcagcgcgctgtaaggcggccgaggcggcggccgacgagccggcgctgtgcctgcagtgcgatatgaacgactgctatagccgcctgcggaggctggtgcccaccatcccgcccaacaagaaagtcagcaaagtggagatcctgcagcacgttatcgactacatcctggacctgcagctggcgctggagacgcacccggccctgctgaggcagccaccaccgcccgcgccgccacaccacccggccgggacctgtccagccgcgccgccgcggaccccgctcactgcgctcaacaccgacccggtgagaggccgggcgccggccgtgggcggacgccgcgggggatgggaggttggtggcgtggtggcgggacgcgggcgctcaccgtcctccgggcaggggcgggccaggaatgacagccccctccccctgctcctccgggctcccccgggccgccagcagccggccgggctcggcgagcgcgggtccgggagaacgcgcagggcgggactcggggctgtgggcgccctgggctgtcaagtcccgcctgagcccggaggggcccccccggctacaggctggggtgggggcgtcggcgcgccagcctgatttccgaggacaatccaggaccgtgtcgagcgcgttgtttgcgcctgctaacctttcccttggtgttcggttgctgttccaggccggcgcggtgaacaagcagggcgacagcattctgtgccgctgagccgcgctgtccaggtgagcgcgcatttcccgtctcgggtggccggtcaccagagacgcccgtccccgagggcttccggggccaggcaccgcggtgttctttgcccccagcgtttctgagagcaaactcccaaggaagtaaatcccctctctccctgccacctaagtagcaagtaaacccgtacttagccttagaactcgaggttcagtctcggtggagacgggtcagcccttgtccccgccgtccccgtgttttttctggtggtcagcgggctcttctgccttccctagttcccgagggagggcaccctcgtgggcatgggagctgccccggtgtcctcccgtgcagtctgtcacccacaaagggggacgcgggcagggcgccggagtgggtcccctctccgggcttcccgagggccgcagctgcctgctcggcgcctggcccggccgcgggcgggtgttgtctgacctggtggtttgttttgggttgttgatcaagcatgtcttgagtttggtcggtggcgccagttagtctgcagcgagaaggttcacacaccccctctattcattcctcttccacaggtgtgcggccgcctgagcccgagccaggagcactagagagggagggggaagagcagaagttagagaaaaaaagccaccggaggaaaggaaaaaacatcggccaacctagaaacgttttcattcgtcat

SEQ ID NO: 112952 - DNA, 1154 bp, Homo sapiens
  chr6:20211952-20213106
  hyper
cgtctacagattcatcgcgcttgttttttaagtagggtcatctaaattaaaaacaataacgacttgaggacactgatgaaagaaacactggtttcatgtatcagactacttcagaacttgattacaggaaacgaggcaatcccaaacttaaagaaaaaaaagttcagtagaacttgccgcgcaggctgtaccaatattttttcacacttacaaggagaaaaacactaacaccaactcaagaagggaaaacacacacacacacacacacacacacacacacacaaaaaccaactgtctagtgtgtggctgtaaaatacgccatggaggcggagggacggtggctaacactttcgcccgccccgtgcacgcgatcgctggggagctggggtcgctgcgctcccggcctgcagttacctggtccagcgggatgcccaggagctcgctgagcgggtgcaggtaggtggagcccgtggtgcggtaggaaaggctggacggctgcggctctgctgccatcctgcatcttcgggaggtggctgcccctgtcccagcccgcaacaccccctgctcggcgtcctcccgcccgggtgctcttgggtggttgccccgagaggcgcacggccgcctggttcgcgggggagcgaacgggaggccggggaatgcgaaccggcgcaaactctcgaggcgcaaactctcgaggcgcaaacttggctttggcgctggcgctgcagccacgggcgccgtaggagggccgggcccaaggcgccccgcttcccgctcccttcctctccgcgcccattggcccggccgctcgggacggccccgagaggagggaaggagggaggaaaagtggggactccgagcccggcccccaagcgccgcccggcccgcccagcctggcctgcaccgaggccgaccgggagagggaaagcgacgccagcgggcgccgccgcctggccctgcagctggaggcgggacgcgcctttcctcctcccgggctgaccgtcctagccccccgccagacaaaacgacctcacccagcgggcgccttccactagagagcaccacccaccccgccccaccctgttttggtttcgccgccgcagtcgaagcggctgagtggctgcgtttccctttcaagccgtagagggttcctc

SEQ ID NO: 112953 - DNA, 325 bp, Homo sapiens; identical to SEQ ID NO: 42666
  chr6:20401054-20401379
  hyper

SEQ ID NO: 112954 - DNA, 460 bp, Homo sapiens
  chr6:20401708-20402168
  hyper
ctgagtctgcggggcgcggagtccctgcccaggtcagtagcgccggcccggcgggcgggcggggacaggggcggagcctaggccaggcgtggtcttccgtgggagagaaggaaattctttgccccaccccctaaaaactgctcttctgccagccaatcaaggaggcctatgcaaatagggtccctgtcgccccggtaaccatgatgcacggcagccaatggaaaccagcaagtcgcggccctgctccatgattgggactgaagtaaggaggtagcggcccaatgggctgtgggaacggtcctcggcgggttgaggggcggggatatgcaaatatggtttgaaaagccggcgggaaatccgagtttcgcgggaggaccttggcgcgtaaaccgtatcccttcattcattgtcagcagcagcttcctggagccatttttcagctgccggccgcagcacccgg

SEQ ID NO: 112955 - DNA, 30 bp, Homo sapiens; identical to SEQ ID NO: 42668
  chr6:20404075-20404105
  hyper

SEQ ID NO: 112956 - DNA, 189 bp, Homo sapiens
  chr6:20534531-20534720
  hyper
catttctaggaacccgaggactcagggttgttattttagttcttggaatcaaaggaacttgaagcgtagtcattcctaaactaagttaaaccagaactagcgctttcagcaatgatgtaatttgatctcttcgggccaccgtcgctgagcatgcgcaaataaacgtggcgggacgtatgtgtcatggcg

SEQ ID NO: 112957 - DNA, 31 bp, Homo sapiens; identical to SEQ ID NO: 4651
  chr6:21332629-21332660
  hyper

SEQ ID NO: 112958 - DNA, 31 bp, Homo sapiens; identical to SEQ ID NO: 4652
  chr6:21588775-21588806
  hyper

SEQ ID NO: 112959 - DNA, 30 bp, Homo sapiens
  chr6:21589284-21589314
  hyper
ccgctctcggaagccggagaaactgcattc

SEQ ID NO: 112960 - DNA, 30 bp, Homo sapiens
  chr6:21593842-21593872
  hyper
gattattattgcatcgggttccaagccaat

SEQ ID NO: 112961 - DNA, 1132 bp, Homo sapiens; identical to SEQ ID NO: 4653
  chr6:21594474-21595606
  hyper

SEQ ID NO: 112962 - DNA, 483 bp, Homo sapiens
  chr6:21595890-21596373
  hyper
tcgcacgcgtcctcctcggcctcgtcccactcctcctcttcctcctcctcgggctcctcgtcctccgacgacgagttcgaagacgacctgctcgacctgaaccccagctcaaactttgagagcatgtccctgggcagcttcagttcgtcgtcggcgctcgaccgggacctggattttaacttcgagcccggctccggctcgcacttcgagttcccggactactgcacgcccgaggtgagcgagatgatctcgggagactggctcgagtccagcatctccaacctggttttcacctactgaagggcgcgcaggcagggagaagggccggggggggtaggagaggagaaaaaaaaagtgaaaaaaagaaacgaaaaggacagacgaagagtttaaagagaaaagggaaaaaagaaagaaaaagtaagcagggctggcttcgcccgcgttctcgtcgtcggatcaaggagcgcggcggcgttttgg

SEQ ID NO: 112963 - DNA, 30 bp, Homo sapiens; identical to SEQ ID NO: 42673
  chr6:21649069-21649099
  hyper

SEQ ID NO: 112964 - DNA, 2314 bp, Homo sapiens; identical to SEQ ID NO: 42674
  chr6:21664625-21666939
  hyper

SEQ ID NO: 112965 - DNA, 31 bp, Homo sapiens; identical to SEQ ID NO: 4656
  chr6:21783024-21783055
  hyper

SEQ ID NO: 112966 - DNA, 264 bp, Homo sapiens
  chr6:22146852-22147116
  hyper
ttcctcacagctccacggctgcatctccgtgggcacgcaagcttcccctggttacctgagctgctcctgccgtctcccgcctgggcttcgccgtggtgcacccgatcccggaatcgtgcgtctgcgccctgcgaaagaaggacctgctggcggagctccggccggggtctcctgcctcgcagctgggcgaggggacttggaggacagggtgaagctgcagaagacctggggtgggatggctagagaggacgccaaggactgggg

SEQ ID NO: 112967 - DNA, 290 bp, Homo sapiens; identical to SEQ ID NO: 4658
  chr6:24360081-24360371
  hyper

SEQ ID NO: 112968 - DNA, 98 bp, Homo sapiens
  chr6:24403047-24403145
  hyper
ggtaggcaagcaaacgtctattggctgtggacttaacaggctcgcccacaggtaccttccgagcatgcgtggggaagtagcacgcaggcgcggcacgc

SEQ ID NO: 112969 - DNA, 263 bp, Homo sapiens
  chr6:24403464-24403727
  hyper
gtactgcccttccccggcaacagccttgggacgctggtcttgcagtgaccttagactgctgccccagccgtccggcgcggcgcgcctgttgctccgcgccctccgcaggcctcggcctcccgcgtgtcctgtgagcttgcacaggcccgcgggccgagctgcgtcccactcgctcagaatgcgaccttgctatgtgcgctgtgccctgccggggtcccagcggccaaccctctgccttctcctccaccgcccttgctgcagat

SEQ ID NO: 112970 - DNA, 208 bp, Homo sapiens
  chr6:24494664-24494872
  hyper
cgcggggtcacacttcgacccctcagagaacgatcgctcccaatcaatactacgtgctcaggagctacaactgaagaagcgtgatcacggccttggcatttagggcaggcaccagcgcatctatggaccgcgcacaaattccggggatgccgaatttgggggatgctaaggggagagagtgggtctctagcagcgattgggggctcag

SEQ ID NO: 112971 - DNA, 30 bp, Homo sapiens
  chr6:24495599-24495629
  hyper
gggccagagctggccggggacacggcgggg

SEQ ID NO: 112972 - DNA, 30 bp, Homo sapiens; identical to SEQ ID NO: 42680
  chr6:24645917-24645947
  hyper

SEQ ID NO: 112973 - DNA, 30 bp, Homo sapiens; identical to SEQ ID NO: 42681
  chr6:24646349-24646379
  hyper

SEQ ID NO: 112974 - DNA, 204 bp, Homo sapiens; identical to SEQ ID NO: 42682
  chr6:24667301-24667505
  hyper

SEQ ID NO: 112975 - DNA, 30 bp, Homo sapiens
  chr6:24720803-24720833
  hyper
gaaaggaagccctgcgctaagggtcagcaa

SEQ ID NO: 112976 - DNA, 266 bp, Homo sapiens
  chr6:24721641-24721907
  hyper
ggcgagggtaggggcggagcaaagaaggaaaaggaaagtgtgtgttggagattggaagattcttatttcgattcttataattagttagtcctgggggtcggccccgcggtatcctgcggcaacaaacctagaactcaattcgacacctggaatttaaacggcgtgcgggagcagatgtctcatgttagtgctacttgcctctgtccccaccccgccacgtgcgcaggcagggagggcggtcctcaagcttcgaacaaggtcaaaga

SEQ ID NO: 112977 - DNA, 30 bp, Homo sapiens
  chr6:24774996-24775026
  hyper
tccaagagcagggtcggaggggagggtcaa

SEQ ID NO: 112978 - DNA, 891 bp, Homo sapiens; identical to SEQ ID NO: 42684
  chr6:24910933-24911824
  hyper

SEQ ID NO: 112979 - DNA, 214 bp, Homo sapiens; identical to SEQ ID NO: 42685
  chr6:25278941-25279155
  hyper

SEQ ID NO: 112980 - DNA, 168 bp, Homo sapiens; identical to SEQ ID NO: 42686
  chr6:25280012-25280180
  hyper

SEQ ID NO: 112981 - DNA, 30 bp, Homo sapiens; identical to SEQ ID NO: 42687
  chr6:25280476-25280506
  hyper

SEQ ID NO: 112982 - DNA, 30 bp, Homo sapiens
  chr6:25280718-25280748
  hyper
taatgattaacctaccgattctccctatag

SEQ ID NO: 112983 - DNA, 504 bp, Homo sapiens
  chr6:25652225-25652729
  hyper
aagtttggaaagtgagtcaaacgtaagagggatgtcttctccgagtctgagaagcaagttaaagggcaaaagcagtgagccgtggacgcctggagacagtttctttcttcctgaattccccaaagcgcagagacagacaggatctgccaggacagcgcgcagggcggggcggggacaggcgcgccaggagcggggcgggcttccagccgctggttttgctgagggctgagggacggctcagcgacgccacggccagcagcgctcgcgtcctccccagcaacagttactcaaagctaatcagatagcgaaagaagcaggagagcaagtcaagaaatacggtgaaggagtccttcccaaagttgtctaggtccttccgcgccggtgcctggtcttcgtcgtcaacaccatggacagctcccgggaaccgactctggggcgcttggacgccgctggcttctggcaggtctggcagcgctttgatgcggatggtgagtagaacaagcc

SEQ ID NO: 112984 - DNA, 30 bp, Homo sapiens; identical to SEQ ID NO: 42688
  chr6:25992386-25992416
  hyper

SEQ ID NO: 112985 - DNA, 30 bp, Homo sapiens; identical to SEQ ID NO: 42689
  chr6:25993000-25993030
  hyper

SEQ ID NO: 112986 - DNA, 125 bp, Homo sapiens
  chr6:26020587-26020712
  hyper
aatcagagtgtgtaacgtcatatttagcgtcttctatcatccaatcactgcactttacacactataaatagagcagctcatgggcgtatttgcgctagtgttgggtgttccgctgtgctgttttt

SEQ ID NO: 112987 - DNA, 525 bp, Homo sapiens; identical to SEQ ID NO: 42691
  chr6:26020763-26021288
  hyper

SEQ ID NO: 112988 - DNA, 761 bp, Homo sapiens
  chr6:26021527-26022288
  hyper
tctaatgtactccagtctgggcgacagagagattcggttaaaaaaaaagttcgacttaaaataattctggagtcagaatgggtttacatttaattcttaacccagttcctcaaagcctgtagctctgttaagaaaataaaggccattggtcaagcctgcttggtcccaccctcatctccccaccctcccccaatcgctgctcccgccatttcctggggcttggaggaggggttaaaggagcggactgtaggcgtcacatttcccgcctgcgcgcttttcagtctcagtgtccgctggaggtgggggcaggggtaacgtagatatataaagatcggtttcctattctctcacttgctcttggttcacttcttgggaagtcatgtctggacgtggtaagggcgggaagggtttgggtaaggggggtgccaagcgccaccgcaaggtgttgcgtgacaacatccagggcatcaccaagccggccatccggcgtctggcccggcgtggcggtgtgaagcggatctctggtctgatctacgaggagactcgcggggtgctcaaggtgtttttggagaacgtgatccgtgacgctgtcacctatacggagcacgccaagcgcaagacagtcactgccatggacgtggtctacgcgcttaagcgccagggacgcaccctttatggctttggcggttaaggttgctgatttctccacagcttgcatttctgaaccaaaggcccttttcagggccgcccaactaaacaaa

SEQ ID NO: 112989 - DNA, 30 bp, Homo sapiens
  chr6:26026568-26026598
  hyper
aaagcagctttaaccgccagtcctactcca

SEQ ID NO: 112990 - DNA, 506 bp, Homo sapiens; identical to SEQ ID NO: 4661
  chr6:26027157-26027663
  hyper

SEQ ID NO: 112991 - DNA, 937 bp, Homo sapiens; identical to SEQ ID NO: 42695
  chr6:26031786-26032723
  hyper

SEQ ID NO: 112992 - DNA, 36 bp, Homo sapiens; identical to SEQ ID NO: 4663
  chr6:26032842-26032878
  hyper

SEQ ID NO: 112993 - DNA, 826 bp, Homo sapiens
  chr6:26033433-26034259
  hyper
agttttcttaggcagcagcaccgcctgaatattaggcaaaacgccaccctgcgcgatggtcacacgccccaagagtttattaagctcctcgtcattgcggatggccaattgcaggtggcgcgggatgatgcgggtcttcttgttgtcgcgggccgcattgcccgccagctccaggatctcggcggtcaggtactcaagcaccgccgcgagatacaccggcgcgccagccccgacgcgctcggagtagttgcctttgcggagcaggcggtgcactcggcccacaggaaactgcaaacctgcacgagaagaccgagtcttagccttggcgcgagctttaccgccttgtttgccgcgaccagacataactacttctgataagggaaaatcgccacaagaaaatgtaatgaaactacattagaacgcaaggcagagaagtatttatactgactggaggtaggctgtgaggaattctcccattggctaatgtcaaatacccaatgggaaatcagaatctgcatccttcatttgcatgtaatccttccgtctggtgtaaggtttatgtttgacccaatccccagtctggcttgacgagccttcgacttgaatactaataataattggccgaattaggattttgtcaaaataccttttttaagcatgagtggaggttttgttctggttattttgactttcagccgctcgtgcttttcccggattgtgactcatgtttttggaaaggagtggactccgaccaatttctaaatagatatttaagaggtccttcaaatcgggcgcagtggctcatgcccgtaataccagcactttg

SEQ ID NO: 112994 - DNA, 796 bp, Homo sapiens
  chr6:26045207-26046003
  hyper
ataagcgttatttcccgacatgagtctgaacgtttctggtggtttagtgagtgttcaccagcattgataacttgcgagactgtcaggaatgcagaatttcaagtcccactcaaacttactgaatcggaatttacattttaaaaatccttagataccttgttatacactctgttctttgggactggatgaactagaattttagacaatttgtcgctgcagataactgaaacgaaaaggacaggatgggcggtggggcaactcatccaataagattgtctagtaatgaaccaatcagtctggtcactcttcagccaatgattttatcgcgcgggacttttgaaatattacaggaccaatcagaatgtttctcactatatttaaaggccacttgctctcagttcactacacttttgtgtgtgctctcattgcaaatggctcgtacgaagcaaacagctcgcaagtctaccggcggcaaagctccgcgcaagcagcttgctactaaagcagcccgtaagagcgctccggccaccggtggcgtgaagaaacctcatcgctaccgcccgggcaccgtggccttgcgcgaaatccgtcgctaccagaagtccaccgagctgctgatccggaagctgccgttccagcgcctggtgcgagaaatcgcccaggacttcaaaaccgacctgcgtttccagagctctgcggtgatggcgctgcaggaggcttgtgaggcctacctggtgggactcttcgaagacaccaatctgtgcgctattcacgctaaacgcgtcaccatcatgcc

SEQ ID NO: 112995 - DNA, 232 bp, Homo sapiens
  chr6:26056525-26056757
  hyper
atgagctctgacaccgggggaccagacgccttacgaggcgtacccccagcctttttggccgccttcttctttacaggggccttctccgcaggaggcgcggcagcgggagcggcaggagcagtctcggacatgttgagaatcaaaaactcgggtacaagtggcaaagcgccgatgaagcagcgcctgggcagggccgctgtatatatagagcgcaggcgcgctctgattggtg

SEQ ID NO: 112996 - DNA, 696 bp, Homo sapiens; identical to SEQ ID NO: 42699
  chr6:26087585-26088281
  hyper

SEQ ID NO: 112997 - DNA, 248 bp, Homo sapiens
  chr6:26104170-26104418
  hyper
gaatcatgtctggtcgcggcaaaggcggaaaaggcttggggaagggtggtgctaagcgccatcgtaaggtgctccgggataacatccagggcattacaaaaccggctattcgccgtttggctcggcgcggtggcgtcaagcgcatttccggtcttatctatgaggagactcgaggtgtgcttaaggttttcttagagaacgttattcgagacgccgtcacctatacggagcacgccaagcgcaaaact

SEQ ID NO: 112998 - DNA, 45 bp, Homo sapiens
  chr6:26123721-26123766
  hyper
gttaggtgttaagacgcttacttggaatgtttacttggagctggt

SEQ ID NO: 112999 - DNA, 45 bp, Homo sapiens
  chr6:26123885-26123930
  hyper
gcgccaggcgggaagcctcgcccgcgatgcgctcaaatatgtcgt

SEQ ID NO: 113000 - DNA, 30 bp, Homo sapiens
  chr6:26124860-26124890
  hyper
ggtatctgagctcccggaaacgctatcaaa

SEQ ID NO: 113001 - DNA, 181 bp, Homo sapiens; identical to SEQ ID NO: 42701
  chr6:26125816-26125997
  hyper

SEQ ID NO: 113002 - DNA, 329 bp, Homo sapiens; identical to SEQ ID NO: 42702
  chr6:26126236-26126565
  hyper

SEQ ID NO: 113003 - DNA, 155 bp, Homo sapiens
  chr6:26156347-26156502
  hyper
gaagcctgagggttcggggatcattatctgagaaaaaccgggcagttcggtgtagacaatttttatatttttggctttttttgaggtgtaacaaacacaactcgggatccgagaggacactctgcggctgccagcgaggcgggctggacagcgca
